United States Patent Application Publication US 2005/0255487 A1 - sequence listing, part 46

SEQ ID NO: 1257436 - RNA, 19 nt, Homo sapiens
  misc_RNA (1)...(19): siRNA sense strand
uagaacaccuugcacagaa

SEQ ID NO: 1257437 - RNA, 19 nt, Homo sapiens
  misc_RNA (1)...(19): siRNA sense strand
aggaagaaauugagaacua

SEQ ID NO: 1257438 - RNA, 19 nt, Homo sapiens
  misc_RNA (1)...(19): siRNA sense strand
gaacaccuugcacagaaua

SEQ ID NO: 1257439 - RNA, 19 nt, Homo sapiens
  misc_RNA (1)...(19): siRNA sense strand
aaucaaaccagaaccaaua

SEQ ID NO: 1257440 - RNA, 19 nt, Homo sapiens
  misc_RNA (1)...(19): siRNA sense strand
guagggaugucucgagaug

SEQ ID NO: 1257441 - RNA, 19 nt, Homo sapiens
  misc_RNA (1)...(19): siRNA sense strand
gaggugauguggcaauugu

SEQ ID NO: 1257442 - RNA, 19 nt, Homo sapiens
  misc_RNA (1)...(19): siRNA sense strand
gcucauggcugcaagaaaa

SEQ ID NO: 1257443 - RNA, 19 nt, Homo sapiens
  misc_RNA (1)...(19): siRNA sense strand
ggaaaccugccaauacuug

SEQ ID NO: 1257444 - RNA, 19 nt, Homo sapiens
  misc_RNA (1)...(19): siRNA sense strand
gaggugguguuuaucagaa

SEQ ID NO: 1257445 - RNA, 19 nt, Homo sapiens
  misc_RNA (1)...(19): siRNA sense strand
ccaaacgcauugauggauu

SEQ ID NO: 1257446 - RNA, 19 nt, Homo sapiens
  misc_RNA (1)...(19): siRNA sense strand
uuacagaagcuauacagua

SEQ ID NO: 1257447 - RNA, 19 nt, Homo sapiens
  misc_RNA (1)...(19): siRNA sense strand
gaaccaauaugugacuaca

SEQ ID NO: 1257448 - RNA, 19 nt, Homo sapiens
  misc_RNA (1)...(19): siRNA sense strand
caacacguccuacagaaga

SEQ ID NO: 1257449 - RNA, 19 nt, Homo sapiens
  misc_RNA (1)...(19): siRNA sense strand
gugaagacuuuauuagcuu

SEQ ID NO: 1257450 - RNA, 19 nt, Homo sapiens
  misc_RNA (1)...(19): siRNA sense strand
uaugcaaggugucuacauu

SEQ ID NO: 1257451 - RNA, 19 nt, Homo sapiens
  misc_RNA (1)...(19): siRNA sense strand
ucaccgagaagauggaaua

SEQ ID NO: 1257452 - RNA, 19 nt, Homo sapiens
  misc_RNA (1)...(19): siRNA sense strand
ccagucaggucuugauauc

SEQ ID NO: 1257453 - RNA, 19 nt, Homo sapiens
  misc_RNA (1)...(19): siRNA sense strand
gauggaauacuaacaaagu

SEQ ID NO: 1257454 - RNA, 19 nt, Homo sapiens
  misc_RNA (1)...(19): siRNA sense strand
gaaugugccgugccuuuga

SEQ ID NO: 1257455 - RNA, 19 nt, Homo sapiens
  misc_RNA (1)...(19): siRNA sense strand
ggagaagucagcaaagcaa

SEQ ID NO: 1257456 - RNA, 19 nt, Homo sapiens
  misc_RNA (1)...(19): siRNA sense strand
ugcaaggugucuacauuaa

SEQ ID NO: 1257457 - RNA, 19 nt, Homo sapiens
  misc_RNA (1)...(19): siRNA sense strand
acagaagaaucaccgagaa

SEQ ID NO: 1257458 - RNA, 19 nt, Homo sapiens
  misc_RNA (1)...(19): siRNA sense strand
gaagaaucaccgagaagau

SEQ ID NO: 1257459 - RNA, 19 nt, Homo sapiens
  misc_RNA (1)...(19): siRNA sense strand
ucagaagaacuguuugauu

SEQ ID NO: 1257460 - RNA, 19 nt, Homo sapiens
  misc_RNA (1)...(19): siRNA sense strand
cgaccucaguaacuacauu

SEQ ID NO: 1257461 - RNA, 19 nt, Homo sapiens
  misc_RNA (1)...(19): siRNA sense strand
caaaccagaaccaauaugu

SEQ ID NO: 1257462 - RNA, 19 nt, Homo sapiens
  misc_RNA (1)...(19): siRNA sense strand
agacaaaucaucaggaauc

SEQ ID NO: 1257463 - RNA, 19 nt, Homo sapiens
  misc_RNA (1)...(19): siRNA sense strand
gacugaagaugaaauugca

SEQ ID NO: 1257464 - RNA, 19 nt, Homo sapiens
  misc_RNA (1)...(19): siRNA sense strand
guccauggcagaauuagaa

SEQ ID NO: 1257465 - RNA, 19 nt, Homo sapiens
  misc_RNA (1)...(19): siRNA sense strand
uacaguaugugguggaguu

SEQ ID NO: 1257466 - RNA, 19 nt, Homo sapiens
  misc_RNA (1)...(19): siRNA sense strand
gccaauacuugagagaaga

SEQ ID NO: 1257467 - RNA, 19 nt, Homo sapiens
  misc_RNA (1)...(19): siRNA sense strand
gaaaccugccaauacuuga

SEQ ID NO: 1257468 - RNA, 19 nt, Homo sapiens
  misc_RNA (1)...(19): siRNA sense strand
aaauucagcuagcucuuca

SEQ ID NO: 1257469 - RNA, 19 nt, Homo sapiens
  misc_RNA (1)...(19): siRNA sense strand
gacauugugcgacuucauu

SEQ ID NO: 1257470 - RNA, 19 nt, Homo sapiens
  misc_RNA (1)...(19): siRNA sense strand
cgagaagauggaauacuaa

SEQ ID NO: 1257471 - RNA, 19 nt, Homo sapiens
  misc_RNA (1)...(19): siRNA sense strand
agaaaccgcugccaacacu

SEQ ID NO: 1257472 - RNA, 19 nt, Homo sapiens
  misc_RNA (1)...(19): siRNA sense strand
cuaugcaccugacugaaga

SEQ ID NO: 1257473 - RNA, 19 nt, Homo sapiens
  misc_RNA (1)...(19): siRNA sense strand
cgacgucuucaaauccuua

SEQ ID NO: 1257474 - RNA, 19 nt, Homo sapiens
  misc_RNA (1)...(19): siRNA sense strand
cagaaugugccgugccuuu

SEQ ID NO: 1257475 - RNA, 19 nt, Homo sapiens
  misc_RNA (1)...(19): siRNA sense strand
gggaggugauguggcaauu

SEQ ID NO: 1257476 - RNA, 19 nt, Homo sapiens
  misc_RNA (1)...(19): siRNA sense strand
gaaucaaaccagaaccaau

SEQ ID NO: 1257477 - RNA, 19 nt, Homo sapiens
  misc_RNA (1)...(19): siRNA sense strand
ccaacgggcugacggaacu

SEQ ID NO: 1257478 - RNA, 19 nt, Homo sapiens
  misc_RNA (1)...(19): siRNA sense strand
gaucuguggagacaaauca

SEQ ID NO: 1257479 - RNA, 19 nt, Homo sapiens
  misc_RNA (1)...(19): siRNA sense strand
ucaaauccuuagguuguga

SEQ ID NO: 1257480 - RNA, 19 nt, Homo sapiens
  misc_RNA (1)...(19): siRNA sense strand
gaagaaauugagaacuauc

SEQ ID NO: 1257481 - RNA, 19 nt, Homo sapiens
  misc_RNA (1)...(19): siRNA sense strand
ucgagaugcuguaaaauuu

SEQ ID NO: 1257482 - RNA, 19 nt, Homo sapiens
  misc_RNA (1)...(19): siRNA sense strand
ucagcuagcucuucaacac

SEQ ID NO: 1257483 - RNA, 19 nt, Homo sapiens
  misc_RNA (1)...(19): siRNA sense strand
gguugugaagacuuuauua

SEQ ID NO: 1257484 - RNA, 19 nt, Homo sapiens
  misc_RNA (1)...(19): siRNA sense strand
aaccagaaccaauauguga

SEQ ID NO: 1257485 - RNA, 19 nt, Homo sapiens
  misc_RNA (1)...(19): siRNA sense strand
aaucaucaggaauccauua

SEQ ID NO: 1257486 - RNA, 19 nt, Homo sapiens
  misc_RNA (1)...(19): siRNA sense strand
gcuucuaccuggacauaca

SEQ ID NO: 1257487 - RNA, 19 nt, Homo sapiens
  misc_RNA (1)...(19): siRNA sense strand
guaugcagaaguacagaaa

SEQ ID NO: 1257488 - RNA, 19 nt, Homo sapiens
  misc_RNA (1)...(19): siRNA sense strand
caaaucaucaggaauccau

SEQ ID NO: 1257489 - RNA, 19 nt, Homo sapiens
  misc_RNA (1)...(19): siRNA sense strand
ggaaucaaaccagaaccaa

SEQ ID NO: 1257490 - RNA, 19 nt, Homo sapiens
  misc_RNA (1)...(19): siRNA sense strand
acgcauugauggauuuaug

SEQ ID NO: 1257491 - RNA, 19 nt, Homo sapiens
  misc_RNA (1)...(19): siRNA sense strand
cuuagguugugaagacuuu

SEQ ID NO: 1257492 - RNA, 19 nt, Homo sapiens
  misc_RNA (1)...(19): siRNA sense strand
agaagaacuguuugauuga

SEQ ID NO: 1257493 - RNA, 19 nt, Homo sapiens
  misc_RNA (1)...(19): siRNA sense strand
aaugcaaauugauggguaa

SEQ ID NO: 1257494 - RNA, 19 nt, Homo sapiens
  misc_RNA (1)...(19): siRNA sense strand
cuucaaauccuuagguugu

SEQ ID NO: 1257495 - RNA, 19 nt, Homo sapiens
  misc_RNA (1)...(19): siRNA sense strand
cugccaacacugucgauua

SEQ ID NO: 1257496 - RNA, 19 nt, Homo sapiens
  misc_RNA (1)...(19): siRNA sense strand
gcaaggugucuacauuaag

SEQ ID NO: 1257497 - RNA, 19 nt, Homo sapiens
  misc_RNA (1)...(19): siRNA sense strand
ugugaagacuuuauuagcu

SEQ ID NO: 1257498 - RNA, 19 nt, Homo sapiens
  misc_RNA (1)...(19): siRNA sense strand
acgacgaccucaguaacua

SEQ ID NO: 1257499 - RNA, 19 nt, Homo sapiens
  misc_RNA (1)...(19): siRNA sense strand
ugacuacacaccagcauca

SEQ ID NO: 1257500 - RNA, 19 nt, Homo sapiens
  misc_RNA (1)...(19): siRNA sense strand
aaagcaauauacccagaca

SEQ ID NO: 1257501 - RNA, 19 nt, Homo sapiens
  misc_RNA (1)...(19): siRNA sense strand
cucuagaggugguguuuau

SEQ ID NO: 1257502 - RNA, 19 nt, Homo sapiens
  misc_RNA (1)...(19): siRNA sense strand
cuaaaucgcaucuggaaac

SEQ ID NO: 1257503 - RNA, 19 nt, Homo sapiens
  misc_RNA (1)...(19): siRNA sense strand
cagcuucuaccuggacaua

SEQ ID NO: 1257504 - RNA, 19 nt, Homo sapiens
  misc_RNA (1)...(19): siRNA sense strand
guucuaugcaccugacuga

SEQ ID NO: 1257505 - RNA, 19 nt, Homo sapiens
  misc_RNA (1)...(19): siRNA sense strand
cagaaccaauaugugacua

SEQ ID NO: 1257506 - RNA, 19 nt, Homo sapiens
  misc_RNA (1)...(19): siRNA sense strand
ugccaacacugucgauuac

SEQ ID NO: 1257507 - RNA, 19 nt, Homo sapiens
  misc_RNA (1)...(19): siRNA sense strand
ggaguuguucacuucagaa

SEQ ID NO: 1257508 - RNA, 19 nt, Homo sapiens
  misc_RNA (1)...(19): siRNA sense strand
uggaaagaguuuauguucu

SEQ ID NO: 1257509 - RNA, 19 nt, Homo sapiens
  misc_RNA (1)...(19): siRNA sense strand
gaagacuuuauuagcuuug

SEQ ID NO: 1257510 - RNA, 19 nt, Homo sapiens
  misc_RNA (1)...(19): siRNA sense strand
gaagucagcaaagcaaugc

SEQ ID NO: 1257511 - RNA, 19 nt, Homo sapiens
  misc_RNA (1)...(19): siRNA sense strand
guagaaaccgcugccaaca

SEQ ID NO: 1257512 - RNA, 19 nt, Homo sapiens
  misc_RNA (1)...(19): siRNA sense strand
ggugguguuuaucagaaug

SEQ ID NO: 1257513 - RNA, 19 nt, Homo sapiens
  misc_RNA (1)...(19): siRNA sense strand
cuggaaaccugccaauacu

SEQ ID NO: 1257514 - RNA, 19 nt, Homo sapiens
  misc_RNA (1)...(19): siRNA sense strand
gaucgaaccaguagaaacc

SEQ ID NO: 1257515 - RNA, 19 nt, Homo sapiens
  misc_RNA (1)...(19): siRNA sense strand
cgucagaagaacuguuuga

SEQ ID NO: 1257516 - RNA, 19 nt, Homo sapiens
  misc_RNA (1)...(19): siRNA sense strand
gccuuugacucucagaaca

SEQ ID NO: 1257517 - RNA, 19 nt, Homo sapiens
  misc_RNA (1)...(19): siRNA sense strand
ggaaagaguuuauguucua

SEQ ID NO: 1257518 - RNA, 19 nt, Homo sapiens
  misc_RNA (1)...(19): siRNA sense strand
cagaagaacuguuugauug

SEQ ID NO: 1257519 - RNA, 19 nt, Homo sapiens
  misc_RNA (1)...(19): siRNA sense strand
gagaagagcuccagcagau

SEQ ID NO: 1257520 - RNA, 19 nt, Homo sapiens
  misc_RNA (1)...(19): siRNA sense strand
gcaauugugugccaucaaa

SEQ ID NO: 1257521 - RNA, 19 nt, Homo sapiens
  misc_RNA (1)...(19): siRNA sense strand
ggagacaaaucaucaggaa

SEQ ID NO: 1257522 - RNA, 19 nt, Homo sapiens
  misc_RNA (1)...(19): siRNA sense strand
gaagagcuccagcagauaa

SEQ ID NO: 1257523 - RNA, 19 nt, Homo sapiens
  misc_RNA (1)...(19): siRNA sense strand
caagaucuguggagacaaa

SEQ ID NO: 1257524 - RNA, 19 nt, Homo sapiens
  misc_RNA (1)...(19): siRNA sense strand
guuguucacuucagaauuu

SEQ ID NO: 1257525 - RNA, 19 nt, Homo sapiens
  misc_RNA (1)...(19): siRNA sense strand
gcaccugacugaagaugaa

SEQ ID NO: 1257526 - RNA, 19 nt, Homo sapiens
  misc_RNA (1)...(19): siRNA sense strand
gaaauuauuccaugcaaga

SEQ ID NO: 1257527 - RNA, 19 nt, Homo sapiens
  misc_RNA (1)...(19): siRNA sense strand
ggaagaaauugagaacuau

SEQ ID NO: 1257528 - RNA, 19 nt, Homo sapiens
  misc_RNA (1)...(19): siRNA sense strand
caaggugucuacauuaaga

SEQ ID NO: 1257529 - RNA, 19 nt, Homo sapiens
  misc_RNA (1)...(19): siRNA sense strand
ccgagaagauggaauacua

SEQ ID NO: 1257530 - RNA, 19 nt, Homo sapiens
  misc_RNA (1)...(19): siRNA sense strand
gaagauggaauacuaacaa

SEQ ID NO: 1257531 - RNA, 19 nt, Homo sapiens
  misc_RNA (1)...(19): siRNA sense strand
cagcuuguaugcagaagua

SEQ ID NO: 1257532 - RNA, 19 nt, Homo sapiens
  misc_RNA (1)...(19): siRNA sense strand
gaucaaauugugcuucuaa

SEQ ID NO: 1257533 - RNA, 19 nt, Homo sapiens
  misc_RNA (1)...(19): siRNA sense strand
gcagagagacagcuuguau

SEQ ID NO: 1257534 - RNA, 19 nt, Homo sapiens
  misc_RNA (1)...(19): siRNA sense strand
caaacgcauugauggauuu

SEQ ID NO: 1257535 - RNA, 19 nt, Homo sapiens
  misc_RNA (1)...(19): siRNA sense strand
gaagaacuguuugauugau

SEQ ID NO: 1257536 - RNA, 19 nt, Homo sapiens
  misc_RNA (1)...(19): siRNA sense strand
uagaacaccuugcacagaa

SEQ ID NO: 1257537 - RNA, 19 nt, Homo sapiens
  misc_RNA (1)...(19): siRNA sense strand
aggaagaaauugagaacua

SEQ ID NO: 1257538 - RNA, 19 nt, Homo sapiens
  misc_RNA (1)...(19): siRNA sense strand
gaacaccuugcacagaaua

SEQ ID NO: 1257539 - RNA, 19 nt, Homo sapiens
  misc_RNA (1)...(19): siRNA sense strand
aaucaaaccagaaccaaua

SEQ ID NO: 1257540 - RNA, 19 nt, Homo sapiens
  misc_RNA (1)...(19): siRNA sense strand
guagggaugucucgagaug

SEQ ID NO: 1257541 - RNA, 19 nt, Homo sapiens
  misc_RNA (1)...(19): siRNA sense strand
gaggugauguggcaauugu

SEQ ID NO: 1257542 - RNA, 19 nt, Homo sapiens
  misc_RNA (1)...(19): siRNA sense strand
gcucauggcugcaagaaaa

SEQ ID NO: 1257543 - RNA, 19 nt, Homo sapiens
  misc_RNA (1)...(19): siRNA sense strand
ggaaaccugccaauacuug

SEQ ID NO: 1257544 - RNA, 19 nt, Homo sapiens
  misc_RNA (1)...(19): siRNA sense strand
gaggugguguuuaucagaa

SEQ ID NO: 1257545 - RNA, 19 nt, Homo sapiens
  misc_RNA (1)...(19): siRNA sense strand
ccaaacgcauugauggauu

SEQ ID NO: 1257546 - RNA, 19 nt, Homo sapiens
  misc_RNA (1)...(19): siRNA sense strand
uuacagaagcuauacagua

SEQ ID NO: 1257547 - RNA, 19 nt, Homo sapiens
  misc_RNA (1)...(19): siRNA sense strand
gaaccaauaugugacuaca

SEQ ID NO: 1257548 - RNA, 19 nt, Homo sapiens
  misc_RNA (1)...(19): siRNA sense strand
caacacguccuacagaaga

SEQ ID NO: 1257549 - RNA, 19 nt, Homo sapiens
  misc_RNA (1)...(19): siRNA sense strand
gugaagacuuuauuagcuu

SEQ ID NO: 1257550 - RNA, 19 nt, Homo sapiens
  misc_RNA (1)...(19): siRNA sense strand
uaugcaaggugucuacauu

SEQ ID NO: 1257551 - RNA, 19 nt, Homo sapiens
  misc_RNA (1)...(19): siRNA sense strand
ucaccgagaagauggaaua

SEQ ID NO: 1257552 - RNA, 19 nt, Homo sapiens
  misc_RNA (1)...(19): siRNA sense strand
ccagucaggucuugauauc

SEQ ID NO: 1257553 - RNA, 19 nt, Homo sapiens
  misc_RNA (1)...(19): siRNA sense strand
gauggaauacuaacaaagu

SEQ ID NO: 1257554 - RNA, 19 nt, Homo sapiens
  misc_RNA (1)...(19): siRNA sense strand
gaaugugccgugccuuuga

SEQ ID NO: 1257555 - RNA, 19 nt, Homo sapiens
  misc_RNA (1)...(19): siRNA sense strand
ggagaagucagcaaagcaa

SEQ ID NO: 1257556 - RNA, 19 nt, Homo sapiens
  misc_RNA (1)...(19): siRNA sense strand
ugcaaggugucuacauuaa

SEQ ID NO: 1257557 - RNA, 19 nt, Homo sapiens
  misc_RNA (1)...(19): siRNA sense strand
acagaagaaucaccgagaa

SEQ ID NO: 1257558 - RNA, 19 nt, Homo sapiens
  misc_RNA (1)...(19): siRNA sense strand
gaagaaucaccgagaagau

SEQ ID NO: 1257559 - RNA, 19 nt, Homo sapiens
  misc_RNA (1)...(19): siRNA sense strand
ucagaagaacuguuugauu

SEQ ID NO: 1257560 - RNA, 19 nt, Homo sapiens
  misc_RNA (1)...(19): siRNA sense strand
cgaccucaguaacuacauu

SEQ ID NO: 1257561 - RNA, 19 nt, Homo sapiens
  misc_RNA (1)...(19): siRNA sense strand
caaaccagaaccaauaugu

SEQ ID NO: 1257562 - RNA, 19 nt, Homo sapiens
  misc_RNA (1)...(19): siRNA sense strand
agacaaaucaucaggaauc

SEQ ID NO: 1257563 - RNA, 19 nt, Homo sapiens
  misc_RNA (1)...(19): siRNA sense strand
gacugaagaugaaauugca

SEQ ID NO: 1257564 - RNA, 19 nt, Homo sapiens
  misc_RNA (1)...(19): siRNA sense strand
guccauggcagaauuagaa

SEQ ID NO: 1257565 - RNA, 19 nt, Homo sapiens
  misc_RNA (1)...(19): siRNA sense strand
uacaguaugugguggaguu

SEQ ID NO: 1257566 - RNA, 19 nt, Homo sapiens
  misc_RNA (1)...(19): siRNA sense strand
gccaauacuugagagaaga

SEQ ID NO: 1257567 - RNA, 19 nt, Homo sapiens
  misc_RNA (1)...(19): siRNA sense strand
gaaaccugccaauacuuga

SEQ ID NO: 1257568 - RNA, 19 nt, Homo sapiens
  misc_RNA (1)...(19): siRNA sense strand
aaauucagcuagcucuuca

SEQ ID NO: 1257569 - RNA, 19 nt, Homo sapiens
  misc_RNA (1)...(19): siRNA sense strand
gacauugugcgacuucauu

SEQ ID NO: 1257570 - RNA, 19 nt, Homo sapiens
  misc_RNA (1)...(19): siRNA sense strand
cgagaagauggaauacuaa

SEQ ID NO: 1257571 - RNA, 19 nt, Homo sapiens
  misc_RNA (1)...(19): siRNA sense strand
agaaaccgcugccaacacu

SEQ ID NO: 1257572 - RNA, 19 nt, Homo sapiens
  misc_RNA (1)...(19): siRNA sense strand
cuaugcaccugacugaaga

SEQ ID NO: 1257573 - RNA, 19 nt, Homo sapiens
  misc_RNA (1)...(19): siRNA sense strand
cgacgucuucaaauccuua

SEQ ID NO: 1257574 - RNA, 19 nt, Homo sapiens
  misc_RNA (1)...(19): siRNA sense strand
cagaaugugccgugccuuu

SEQ ID NO: 1257575 - RNA, 19 nt, Homo sapiens
  misc_RNA (1)...(19): siRNA sense strand
gggaggugauguggcaauu

SEQ ID NO: 1257576 - RNA, 19 nt, Homo sapiens
  misc_RNA (1)...(19): siRNA sense strand
gaaucaaaccagaaccaau

SEQ ID NO: 1257577 - RNA, 19 nt, Homo sapiens
  misc_RNA (1)...(19): siRNA sense strand
ccaacgggcugacggaacu

SEQ ID NO: 1257578 - RNA, 19 nt, Homo sapiens
  misc_RNA (1)...(19): siRNA sense strand
gaucuguggagacaaauca

SEQ ID NO: 1257579 - RNA, 19 nt, Homo sapiens
  misc_RNA (1)...(19): siRNA sense strand
ucaaauccuuagguuguga

SEQ ID NO: 1257580 - RNA, 19 nt, Homo sapiens
  misc_RNA (1)...(19): siRNA sense strand
gaagaaauugagaacuauc

SEQ ID NO: 1257581 - RNA, 19 nt, Homo sapiens
  misc_RNA (1)...(19): siRNA sense strand
ucgagaugcuguaaaauuu

SEQ ID NO: 1257582 - RNA, 19 nt, Homo sapiens
  misc_RNA (1)...(19): siRNA sense strand
ucagcuagcucuucaacac

SEQ ID NO: 1257583 - RNA, 19 nt, Homo sapiens
  misc_RNA (1)...(19): siRNA sense strand
gguugugaagacuuuauua

SEQ ID NO: 1257584 - RNA, 19 nt, Homo sapiens
  misc_RNA (1)...(19): siRNA sense strand
aaccagaaccaauauguga

SEQ ID NO: 1257585 - RNA, 19 nt, Homo sapiens
  misc_RNA (1)...(19): siRNA sense strand
aaucaucaggaauccauua

SEQ ID NO: 1257586 - RNA, 19 nt, Homo sapiens
  misc_RNA (1)...(19): siRNA sense strand
gcuucuaccuggacauaca

SEQ ID NO: 1257587 - RNA, 19 nt, Homo sapiens
  misc_RNA (1)...(19): siRNA sense strand
guaugcagaaguacagaaa

SEQ ID NO: 1257588 - RNA, 19 nt, Homo sapiens
  misc_RNA (1)...(19): siRNA sense strand
caaaucaucaggaauccau

SEQ ID NO: 1257589 - RNA, 19 nt, Homo sapiens
  misc_RNA (1)...(19): siRNA sense strand
ggaaucaaaccagaaccaa

SEQ ID NO: 1257590 - RNA, 19 nt, Homo sapiens
  misc_RNA (1)...(19): siRNA sense strand
acgcauugauggauuuaug

SEQ ID NO: 1257591 - RNA, 19 nt, Homo sapiens
  misc_RNA (1)...(19): siRNA sense strand
cuuagguugugaagacuuu

SEQ ID NO: 1257592 - RNA, 19 nt, Homo sapiens
  misc_RNA (1)...(19): siRNA sense strand
agaagaacuguuugauuga

SEQ ID NO: 1257593 - RNA, 19 nt, Homo sapiens
  misc_RNA (1)...(19): siRNA sense strand
aaugcaaauugauggguaa

SEQ ID NO: 1257594 - RNA, 19 nt, Homo sapiens
  misc_RNA (1)...(19): siRNA sense strand
cuucaaauccuuagguugu

SEQ ID NO: 1257595 - RNA, 19 nt, Homo sapiens
  misc_RNA (1)...(19): siRNA sense strand
cugccaacacugucgauua

SEQ ID NO: 1257596 - RNA, 19 nt, Homo sapiens
  misc_RNA (1)...(19): siRNA sense strand
gcaaggugucuacauuaag

SEQ ID NO: 1257597 - RNA, 19 nt, Homo sapiens
  misc_RNA (1)...(19): siRNA sense strand
ugugaagacuuuauuagcu

SEQ ID NO: 1257598 - RNA, 19 nt, Homo sapiens
  misc_RNA (1)...(19): siRNA sense strand
acgacgaccucaguaacua

SEQ ID NO: 1257599 - RNA, 19 nt, Homo sapiens
  misc_RNA (1)...(19): siRNA sense strand
ugacuacacaccagcauca

SEQ ID NO: 1257600 - RNA, 19 nt, Homo sapiens
  misc_RNA (1)...(19): siRNA sense strand
aaagcaauauacccagaca

SEQ ID NO: 1257601 - RNA, 19 nt, Homo sapiens
  misc_RNA (1)...(19): siRNA sense strand
cucuagaggugguguuuau

SEQ ID NO: 1257602 - RNA, 19 nt, Homo sapiens
  misc_RNA (1)...(19): siRNA sense strand
cuaaaucgcaucuggaaac

SEQ ID NO: 1257603 - RNA, 19 nt, Homo sapiens
  misc_RNA (1)...(19): siRNA sense strand
cagcuucuaccuggacaua

SEQ ID NO: 1257604 - RNA, 19 nt, Homo sapiens
  misc_RNA (1)...(19): siRNA sense strand
guucuaugcaccugacuga

SEQ ID NO: 1257605 - RNA, 19 nt, Homo sapiens
  misc_RNA (1)...(19): siRNA sense strand
cagaaccaauaugugacua

SEQ ID NO: 1257606 - RNA, 19 nt, Homo sapiens
  misc_RNA (1)...(19): siRNA sense strand
ugccaacacugucgauuac

SEQ ID NO: 1257607 - RNA, 19 nt, Homo sapiens
  misc_RNA (1)...(19): siRNA sense strand
ggaguuguucacuucagaa

SEQ ID NO: 1257608 - RNA, 19 nt, Homo sapiens
  misc_RNA (1)...(19): siRNA sense strand
uggaaagaguuuauguucu

SEQ ID NO: 1257609 - RNA, 19 nt, Homo sapiens
  misc_RNA (1)...(19): siRNA sense strand
gaagacuuuauuagcuuug

SEQ ID NO: 1257610 - RNA, 19 nt, Homo sapiens
  misc_RNA (1)...(19): siRNA sense strand
gaagucagcaaagcaaugc

SEQ ID NO: 1257611 - RNA, 19 nt, Homo sapiens
  misc_RNA (1)...(19): siRNA sense strand
guagaaaccgcugccaaca

SEQ ID NO: 1257612 - RNA, 19 nt, Homo sapiens
  misc_RNA (1)...(19): siRNA sense strand
ggugguguuuaucagaaug

SEQ ID NO: 1257613 - RNA, 19 nt, Homo sapiens
  misc_RNA (1)...(19): siRNA sense strand
cuggaaaccugccaauacu

SEQ ID NO: 1257614 - RNA, 19 nt, Homo sapiens
  misc_RNA (1)...(19): siRNA sense strand
gaucgaaccaguagaaacc

SEQ ID NO: 1257615 - RNA, 19 nt, Homo sapiens
  misc_RNA (1)...(19): siRNA sense strand
cgucagaagaacuguuuga

SEQ ID NO: 1257616 - RNA, 19 nt, Homo sapiens
  misc_RNA (1)...(19): siRNA sense strand
gccuuugacucucagaaca

SEQ ID NO: 1257617 - RNA, 19 nt, Homo sapiens
  misc_RNA (1)...(19): siRNA sense strand
ggaaagaguuuauguucua

SEQ ID NO: 1257618 - RNA, 19 nt, Homo sapiens
  misc_RNA (1)...(19): siRNA sense strand
cagaagaacuguuugauug

SEQ ID NO: 1257619 - RNA, 19 nt, Homo sapiens
  misc_RNA (1)...(19): siRNA sense strand
gagaagagcuccagcagau

SEQ ID NO: 1257620 - RNA, 19 nt, Homo sapiens
  misc_RNA (1)...(19): siRNA sense strand
gcaauugugugccaucaaa

SEQ ID NO: 1257621 - RNA, 19 nt, Homo sapiens
  misc_RNA (1)...(19): siRNA sense strand
ggagacaaaucaucaggaa

SEQ ID NO: 1257622 - RNA, 19 nt, Homo sapiens
  misc_RNA (1)...(19): siRNA sense strand
gaagagcuccagcagauaa

SEQ ID NO: 1257623 - RNA, 19 nt, Homo sapiens
  misc_RNA (1)...(19): siRNA sense strand
caagaucuguggagacaaa

SEQ ID NO: 1257624 - RNA, 19 nt, Homo sapiens
  misc_RNA (1)...(19): siRNA sense strand
guuguucacuucagaauuu

SEQ ID NO: 1257625 - RNA, 19 nt, Homo sapiens
  misc_RNA (1)...(19): siRNA sense strand
gcaccugacugaagaugaa

SEQ ID NO: 1257626 - RNA, 19 nt, Homo sapiens
  misc_RNA (1)...(19): siRNA sense strand
gaaauuauuccaugcaaga

SEQ ID NO: 1257627 - RNA, 19 nt, Homo sapiens
  misc_RNA (1)...(19): siRNA sense strand
ggaagaaauugagaacuau

SEQ ID NO: 1257628 - RNA, 19 nt, Homo sapiens
  misc_RNA (1)...(19): siRNA sense strand
caaggugucuacauuaaga

SEQ ID NO: 1257629 - RNA, 19 nt, Homo sapiens
  misc_RNA (1)...(19): siRNA sense strand
ccgagaagauggaauacua

SEQ ID NO: 1257630 - RNA, 19 nt, Homo sapiens
  misc_RNA (1)...(19): siRNA sense strand
gaagauggaauacuaacaa

SEQ ID NO: 1257631 - RNA, 19 nt, Homo sapiens
  misc_RNA (1)...(19): siRNA sense strand
cagcuuguaugcagaagua

SEQ ID NO: 1257632 - RNA, 19 nt, Homo sapiens
  misc_RNA (1)...(19): siRNA sense strand
gaucaaauugugcuucuaa

SEQ ID NO: 1257633 - RNA, 19 nt, Homo sapiens
  misc_RNA (1)...(19): siRNA sense strand
gcagagagacagcuuguau

SEQ ID NO: 1257634 - RNA, 19 nt, Homo sapiens
  misc_RNA (1)...(19): siRNA sense strand
caaacgcauugauggauuu

SEQ ID NO: 1257635 - RNA, 19 nt, Homo sapiens
  misc_RNA (1)...(19): siRNA sense strand
gaagaacuguuugauugau

SEQ ID NO: 1257636 - RNA, 19 nt, Homo sapiens
  misc_RNA (1)...(19): siRNA sense strand
uagaacaccuugcacagaa

SEQ ID NO: 1257637 - RNA, 19 nt, Homo sapiens
  misc_RNA (1)...(19): siRNA sense strand
aggaagaaauugagaacua

SEQ ID NO: 1257638 - RNA, 19 nt, Homo sapiens
  misc_RNA (1)...(19): siRNA sense strand
gaacaccuugcacagaaua

SEQ ID NO: 1257639 - RNA, 19 nt, Homo sapiens
  misc_RNA (1)...(19): siRNA sense strand
aaucaaaccagaaccaaua

SEQ ID NO: 1257640 - RNA, 19 nt, Homo sapiens
  misc_RNA (1)...(19): siRNA sense strand
guagggaugucucgagaug

SEQ ID NO: 1257641 - RNA, 19 nt, Homo sapiens
  misc_RNA (1)...(19): siRNA sense strand
gaggugauguggcaauugu

SEQ ID NO: 1257642 - RNA, 19 nt, Homo sapiens
  misc_RNA (1)...(19): siRNA sense strand
gcucauggcugcaagaaaa

SEQ ID NO: 1257643 - RNA, 19 nt, Homo sapiens
  misc_RNA (1)...(19): siRNA sense strand
ggaaaccugccaauacuug

SEQ ID NO: 1257644 - RNA, 19 nt, Homo sapiens
  misc_RNA (1)...(19): siRNA sense strand
gaggugguguuuaucagaa

SEQ ID NO: 1257645 - RNA, 19 nt, Homo sapiens
  misc_RNA (1)...(19): siRNA sense strand
ccaaacgcauugauggauu

SEQ ID NO: 1257646 - RNA, 19 nt, Homo sapiens
  misc_RNA (1)...(19): siRNA sense strand
uuacagaagcuauacagua

SEQ ID NO: 1257647 - RNA, 19 nt, Homo sapiens
  misc_RNA (1)...(19): siRNA sense strand
gaaccaauaugugacuaca

SEQ ID NO: 1257648 - RNA, 19 nt, Homo sapiens
  misc_RNA (1)...(19): siRNA sense strand
caacacguccuacagaaga

SEQ ID NO: 1257649 - RNA, 19 nt, Homo sapiens
  misc_RNA (1)...(19): siRNA sense strand
gugaagacuuuauuagcuu

SEQ ID NO: 1257650 - RNA, 19 nt, Homo sapiens
  misc_RNA (1)...(19): siRNA sense strand
uaugcaaggugucuacauu

SEQ ID NO: 1257651 - RNA, 19 nt, Homo sapiens
  misc_RNA (1)...(19): siRNA sense strand
ucaccgagaagauggaaua

SEQ ID NO: 1257652 - RNA, 19 nt, Homo sapiens
  misc_RNA (1)...(19): siRNA sense strand
ccagucaggucuugauauc

SEQ ID NO: 1257653 - RNA, 19 nt, Homo sapiens
  misc_RNA (1)...(19): siRNA sense strand
gauggaauacuaacaaagu

SEQ ID NO: 1257654 - RNA, 19 nt, Homo sapiens
  misc_RNA (1)...(19): siRNA sense strand
gaaugugccgugccuuuga

SEQ ID NO: 1257655 - RNA, 19 nt, Homo sapiens
  misc_RNA (1)...(19): siRNA sense strand
ggagaagucagcaaagcaa

SEQ ID NO: 1257656 - RNA, 19 nt, Homo sapiens
  misc_RNA (1)...(19): siRNA sense strand
ugcaaggugucuacauuaa

SEQ ID NO: 1257657 - RNA, 19 nt, Homo sapiens
  misc_RNA (1)...(19): siRNA sense strand
acagaagaaucaccgagaa

SEQ ID NO: 1257658 - RNA, 19 nt, Homo sapiens
  misc_RNA (1)...(19): siRNA sense strand
gaagaaucaccgagaagau

SEQ ID NO: 1257659 - RNA, 19 nt, Homo sapiens
  misc_RNA (1)...(19): siRNA sense strand
ucagaagaacuguuugauu

SEQ ID NO: 1257660 - RNA, 19 nt, Homo sapiens
  misc_RNA (1)...(19): siRNA sense strand
cgaccucaguaacuacauu

SEQ ID NO: 1257661 - RNA, 19 nt, Homo sapiens
  misc_RNA (1)...(19): siRNA sense strand
caaaccagaaccaauaugu

SEQ ID NO: 1257662 - RNA, 19 nt, Homo sapiens
  misc_RNA (1)...(19): siRNA sense strand
agacaaaucaucaggaauc

SEQ ID NO: 1257663 - RNA, 19 nt, Homo sapiens
  misc_RNA (1)...(19): siRNA sense strand
gacugaagaugaaauugca

SEQ ID NO: 1257664 - RNA, 19 nt, Homo sapiens
  misc_RNA (1)...(19): siRNA sense strand
guccauggcagaauuagaa

SEQ ID NO: 1257665 - RNA, 19 nt, Homo sapiens
  misc_RNA (1)...(19): siRNA sense strand
uacaguaugugguggaguu

SEQ ID NO: 1257666 - RNA, 19 nt, Homo sapiens
  misc_RNA (1)...(19): siRNA sense strand
gccaauacuugagagaaga

SEQ ID NO: 1257667 - RNA, 19 nt, Homo sapiens
  misc_RNA (1)...(19): siRNA sense strand
gaaaccugccaauacuuga

SEQ ID NO: 1257668 - RNA, 19 nt, Homo sapiens
  misc_RNA (1)...(19): siRNA sense strand
aaauucagcuagcucuuca

SEQ ID NO: 1257669 - RNA, 19 nt, Homo sapiens
  misc_RNA (1)...(19): siRNA sense strand
gacauugugcgacuucauu

SEQ ID NO: 1257670 - RNA, 19 nt, Homo sapiens
  misc_RNA (1)...(19): siRNA sense strand
cgagaagauggaauacuaa

SEQ ID NO: 1257671 - RNA, 19 nt, Homo sapiens
  misc_RNA (1)...(19): siRNA sense strand
agaaaccgcugccaacacu

SEQ ID NO: 1257672 - RNA, 19 nt, Homo sapiens
  misc_RNA (1)...(19): siRNA sense strand
cuaugcaccugacugaaga

SEQ ID NO: 1257673 - RNA, 19 nt, Homo sapiens
  misc_RNA (1)...(19): siRNA sense strand
cgacgucuucaaauccuua

SEQ ID NO: 1257674 - RNA, 19 nt, Homo sapiens
  misc_RNA (1)...(19): siRNA sense strand
cagaaugugccgugccuuu

SEQ ID NO: 1257675 - RNA, 19 nt, Homo sapiens
  misc_RNA (1)...(19): siRNA sense strand
gggaggugauguggcaauu

SEQ ID NO: 1257676 - RNA, 19 nt, Homo sapiens
  misc_RNA (1)...(19): siRNA sense strand
gaaucaaaccagaaccaau

SEQ ID NO: 1257677 - RNA, 19 nt, Homo sapiens
  misc_RNA (1)...(19): siRNA sense strand
ccaacgggcugacggaacu

SEQ ID NO: 1257678 - RNA, 19 nt, Homo sapiens
  misc_RNA (1)...(19): siRNA sense strand
gaucuguggagacaaauca

SEQ ID NO: 1257679 - RNA, 19 nt, Homo sapiens
  misc_RNA (1)...(19): siRNA sense strand
ucaaauccuuagguuguga

SEQ ID NO: 1257680 - RNA, 19 nt, Homo sapiens
  misc_RNA (1)...(19): siRNA sense strand
gaagaaauugagaacuauc

SEQ ID NO: 1257681 - RNA, 19 nt, Homo sapiens
  misc_RNA (1)...(19): siRNA sense strand
ucgagaugcuguaaaauuu

SEQ ID NO: 1257682 - RNA, 19 nt, Homo sapiens
  misc_RNA (1)...(19): siRNA sense strand
ucagcuagcucuucaacac

SEQ ID NO: 1257683 - RNA, 19 nt, Homo sapiens
  misc_RNA (1)...(19): siRNA sense strand
gguugugaagacuuuauua

SEQ ID NO: 1257684 - RNA, 19 nt, Homo sapiens
  misc_RNA (1)...(19): siRNA sense strand
aaccagaaccaauauguga

SEQ ID NO: 1257685 - RNA, 19 nt, Homo sapiens
  misc_RNA (1)...(19): siRNA sense strand
aaucaucaggaauccauua

SEQ ID NO: 1257686 - RNA, 19 nt, Homo sapiens
  misc_RNA (1)...(19): siRNA sense strand
gcuucuaccuggacauaca

SEQ ID NO: 1257687 - RNA, 19 nt, Homo sapiens
  misc_RNA (1)...(19): siRNA sense strand
guaugcagaaguacagaaa

SEQ ID NO: 1257688 - RNA, 19 nt, Homo sapiens
  misc_RNA (1)...(19): siRNA sense strand
caaaucaucaggaauccau

SEQ ID NO: 1257689 - RNA, 19 nt, Homo sapiens
  misc_RNA (1)...(19): siRNA sense strand
ggaaucaaaccagaaccaa

SEQ ID NO: 1257690 - RNA, 19 nt, Homo sapiens
  misc_RNA (1)...(19): siRNA sense strand
acgcauugauggauuuaug

SEQ ID NO: 1257691 - RNA, 19 nt, Homo sapiens
  misc_RNA (1)...(19): siRNA sense strand
cuuagguugugaagacuuu

SEQ ID NO: 1257692 - RNA, 19 nt, Homo sapiens
  misc_RNA (1)...(19): siRNA sense strand
agaagaacuguuugauuga

SEQ ID NO: 1257693 - RNA, 19 nt, Homo sapiens
  misc_RNA (1)...(19): siRNA sense strand
aaugcaaauugauggguaa

SEQ ID NO: 1257694 - RNA, 19 nt, Homo sapiens
  misc_RNA (1)...(19): siRNA sense strand
cuucaaauccuuagguugu

SEQ ID NO: 1257695 - RNA, 19 nt, Homo sapiens
  misc_RNA (1)...(19): siRNA sense strand
cugccaacacugucgauua

SEQ ID NO: 1257696 - RNA, 19 nt, Homo sapiens
  misc_RNA (1)...(19): siRNA sense strand
gcaaggugucuacauuaag

SEQ ID NO: 1257697 - RNA, 19 nt, Homo sapiens
  misc_RNA (1)...(19): siRNA sense strand
ugugaagacuuuauuagcu

SEQ ID NO: 1257698 - RNA, 19 nt, Homo sapiens
  misc_RNA (1)...(19): siRNA sense strand
acgacgaccucaguaacua

SEQ ID NO: 1257699 - RNA, 19 nt, Homo sapiens
  misc_RNA (1)...(19): siRNA sense strand
ugacuacacaccagcauca

SEQ ID NO: 1257700 - RNA, 19 nt, Homo sapiens
  misc_RNA (1)...(19): siRNA sense strand
aaagcaauauacccagaca

SEQ ID NO: 1257701 - RNA, 19 nt, Homo sapiens
  misc_RNA (1)...(19): siRNA sense strand
cucuagaggugguguuuau

SEQ ID NO: 1257702 - RNA, 19 nt, Homo sapiens
  misc_RNA (1)...(19): siRNA sense strand
cuaaaucgcaucuggaaac

SEQ ID NO: 1257703 - RNA, 19 nt, Homo sapiens
  misc_RNA (1)...(19): siRNA sense strand
cagcuucuaccuggacaua

SEQ ID NO: 1257704 - RNA, 19 nt, Homo sapiens
  misc_RNA (1)...(19): siRNA sense strand
guucuaugcaccugacuga

SEQ ID NO: 1257705 - RNA, 19 nt, Homo sapiens
  misc_RNA (1)...(19): siRNA sense strand
cagaaccaauaugugacua

SEQ ID NO: 1257706 - RNA, 19 nt, Homo sapiens
  misc_RNA (1)...(19): siRNA sense strand
ugccaacacugucgauuac

SEQ ID NO: 1257707 - RNA, 19 nt, Homo sapiens
  misc_RNA (1)...(19): siRNA sense strand
ggaguuguucacuucagaa

SEQ ID NO: 1257708 - RNA, 19 nt, Homo sapiens
  misc_RNA (1)...(19): siRNA sense strand
uggaaagaguuuauguucu

SEQ ID NO: 1257709 - RNA, 19 nt, Homo sapiens
  misc_RNA (1)...(19): siRNA sense strand
gaagacuuuauuagcuuug

SEQ ID NO: 1257710 - RNA, 19 nt, Homo sapiens
  misc_RNA (1)...(19): siRNA sense strand
gaagucagcaaagcaaugc

SEQ ID NO: 1257711 - RNA, 19 nt, Homo sapiens
  misc_RNA (1)...(19): siRNA sense strand
guagaaaccgcugccaaca

SEQ ID NO: 1257712 - RNA, 19 nt, Homo sapiens
  misc_RNA (1)...(19): siRNA sense strand
ggugguguuuaucagaaug

SEQ ID NO: 1257713 - RNA, 19 nt, Homo sapiens
  misc_RNA (1)...(19): siRNA sense strand
cuggaaaccugccaauacu

SEQ ID NO: 1257714 - RNA, 19 nt, Homo sapiens
  misc_RNA (1)...(19): siRNA sense strand
gaucgaaccaguagaaacc

SEQ ID NO: 1257715 - RNA, 19 nt, Homo sapiens
  misc_RNA (1)...(19): siRNA sense strand
cgucagaagaacuguuuga

SEQ ID NO: 1257716 - RNA, 19 nt, Homo sapiens
  misc_RNA (1)...(19): siRNA sense strand
gccuuugacucucagaaca

SEQ ID NO: 1257717 - RNA, 19 nt, Homo sapiens
  misc_RNA (1)...(19): siRNA sense strand
ggaaagaguuuauguucua

SEQ ID NO: 1257718 - RNA, 19 nt, Homo sapiens
  misc_RNA (1)...(19): siRNA sense strand
cagaagaacuguuugauug

SEQ ID NO: 1257719 - RNA, 19 nt, Homo sapiens
  misc_RNA (1)...(19): siRNA sense strand
gagaagagcuccagcagau

SEQ ID NO: 1257720 - RNA, 19 nt, Homo sapiens
  misc_RNA (1)...(19): siRNA sense strand
gcaauugugugccaucaaa

SEQ ID NO: 1257721 - RNA, 19 nt, Homo sapiens
  misc_RNA (1)...(19): siRNA sense strand
ggagacaaaucaucaggaa

SEQ ID NO: 1257722 - RNA, 19 nt, Homo sapiens
  misc_RNA (1)...(19): siRNA sense strand
gaagagcuccagcagauaa

SEQ ID NO: 1257723 - RNA, 19 nt, Homo sapiens
  misc_RNA (1)...(19): siRNA sense strand
caagaucuguggagacaaa

SEQ ID NO: 1257724 - RNA, 19 nt, Homo sapiens
  misc_RNA (1)...(19): siRNA sense strand
guuguucacuucagaauuu

SEQ ID NO: 1257725 - RNA, 19 nt, Homo sapiens
  misc_RNA (1)...(19): siRNA sense strand
gcaccugacugaagaugaa

SEQ ID NO: 1257726 - RNA, 19 nt, Homo sapiens
  misc_RNA (1)...(19): siRNA sense strand
gaaauuauuccaugcaaga

SEQ ID NO: 1257727 - RNA, 19 nt, Homo sapiens
  misc_RNA (1)...(19): siRNA sense strand
ggaagaaauugagaacuau

SEQ ID NO: 1257728 - RNA, 19 nt, Homo sapiens
  misc_RNA (1)...(19): siRNA sense strand
caaggugucuacauuaaga

SEQ ID NO: 1257729 - RNA, 19 nt, Homo sapiens
  misc_RNA (1)...(19): siRNA sense strand
ccgagaagauggaauacua

SEQ ID NO: 1257730 - RNA, 19 nt, Homo sapiens
  misc_RNA (1)...(19): siRNA sense strand
gaagauggaauacuaacaa

SEQ ID NO: 1257731 - RNA, 19 nt, Homo sapiens
  misc_RNA (1)...(19): siRNA sense strand
cagcuuguaugcagaagua

SEQ ID NO: 1257732 - RNA, 19 nt, Homo sapiens
  misc_RNA (1)...(19): siRNA sense strand
gaucaaauugugcuucuaa

SEQ ID NO: 1257733 - RNA, 19 nt, Homo sapiens
  misc_RNA (1)...(19): siRNA sense strand
gcagagagacagcuuguau

SEQ ID NO: 1257734 - RNA, 19 nt, Homo sapiens
  misc_RNA (1)...(19): siRNA sense strand
caaacgcauugauggauuu

SEQ ID NO: 1257735 - RNA, 19 nt, Homo sapiens
  misc_RNA (1)...(19): siRNA sense strand
gaagaacuguuugauugau

SEQ ID NO: 1257736 - RNA, 19 nt, Homo sapiens
  misc_RNA (1)...(19): siRNA sense strand
uagaacaccuugcacagaa

SEQ ID NO: 1257737 - RNA, 19 nt, Homo sapiens
  misc_RNA (1)...(19): siRNA sense strand
aggaagaaauugagaacua

SEQ ID NO: 1257738 - RNA, 19 nt, Homo sapiens
  misc_RNA (1)...(19): siRNA sense strand
gaacaccuugcacagaaua

SEQ ID NO: 1257739 - RNA, 19 nt, Homo sapiens
  misc_RNA (1)...(19): siRNA sense strand
aaucaaaccagaaccaaua

SEQ ID NO: 1257740 - RNA, 19 nt, Homo sapiens
  misc_RNA (1)...(19): siRNA sense strand
guagggaugucucgagaug

SEQ ID NO: 1257741 - RNA, 19 nt, Homo sapiens
  misc_RNA (1)...(19): siRNA sense strand
gaggugauguggcaauugu

SEQ ID NO: 1257742 - RNA, 19 nt, Homo sapiens
  misc_RNA (1)...(19): siRNA sense strand
gcucauggcugcaagaaaa

SEQ ID NO: 1257743 - RNA, 19 nt, Homo sapiens
  misc_RNA (1)...(19): siRNA sense strand
ggaaaccugccaauacuug

SEQ ID NO: 1257744 - RNA, 19 nt, Homo sapiens
  misc_RNA (1)...(19): siRNA sense strand
gaggugguguuuaucagaa

SEQ ID NO: 1257745 - RNA, 19 nt, Homo sapiens
  misc_RNA (1)...(19): siRNA sense strand
ccaaacgcauugauggauu

SEQ ID NO: 1257746 - RNA, 19 nt, Homo sapiens
  misc_RNA (1)...(19): siRNA sense strand
uuacagaagcuauacagua

SEQ ID NO: 1257747 - RNA, 19 nt, Homo sapiens
  misc_RNA (1)...(19): siRNA sense strand
gaaccaauaugugacuaca

SEQ ID NO: 1257748 - RNA, 19 nt, Homo sapiens
  misc_RNA (1)...(19): siRNA sense strand
caacacguccuacagaaga

SEQ ID NO: 1257749 - RNA, 19 nt, Homo sapiens
  misc_RNA (1)...(19): siRNA sense strand
gugaagacuuuauuagcuu

SEQ ID NO: 1257750 - RNA, 19 nt, Homo sapiens
  misc_RNA (1)...(19): siRNA sense strand
uaugcaaggugucuacauu

SEQ ID NO: 1257751 - RNA, 19 nt, Homo sapiens
  misc_RNA (1)...(19): siRNA sense strand
ucaccgagaagauggaaua

SEQ ID NO: 1257752 - RNA, 19 nt, Homo sapiens
  misc_RNA (1)...(19): siRNA sense strand
ccagucaggucuugauauc

SEQ ID NO: 1257753 - RNA, 19 nt, Homo sapiens
  misc_RNA (1)...(19): siRNA sense strand
gauggaauacuaacaaagu

SEQ ID NO: 1257754 - RNA, 19 nt, Homo sapiens
  misc_RNA (1)...(19): siRNA sense strand
gaaugugccgugccuuuga

SEQ ID NO: 1257755 - RNA, 19 nt, Homo sapiens
  misc_RNA (1)...(19): siRNA sense strand
ggagaagucagcaaagcaa

SEQ ID NO: 1257756 - RNA, 19 nt, Homo sapiens
  misc_RNA (1)...(19): siRNA sense strand
ugcaaggugucuacauuaa

SEQ ID NO: 1257757 - RNA, 19 nt, Homo sapiens
  misc_RNA (1)...(19): siRNA sense strand
acagaagaaucaccgagaa

SEQ ID NO: 1257758 - RNA, 19 nt, Homo sapiens
  misc_RNA (1)...(19): siRNA sense strand
gaagaaucaccgagaagau

SEQ ID NO: 1257759 - RNA, 19 nt, Homo sapiens
  misc_RNA (1)...(19): siRNA sense strand
ucagaagaacuguuugauu

SEQ ID NO: 1257760 - RNA, 19 nt, Homo sapiens
  misc_RNA (1)...(19): siRNA sense strand
cgaccucaguaacuacauu

SEQ ID NO: 1257761 - RNA, 19 nt, Homo sapiens
  misc_RNA (1)...(19): siRNA sense strand
caaaccagaaccaauaugu

SEQ ID NO: 1257762 - RNA, 19 nt, Homo sapiens
  misc_RNA (1)...(19): siRNA sense strand
agacaaaucaucaggaauc

SEQ ID NO: 1257763 - RNA, 19 nt, Homo sapiens
  misc_RNA (1)...(19): siRNA sense strand
gacugaagaugaaauugca

SEQ ID NO: 1257764 - RNA, 19 nt, Homo sapiens
  misc_RNA (1)...(19): siRNA sense strand
guccauggcagaauuagaa

SEQ ID NO: 1257765 - RNA, 19 nt, Homo sapiens
  misc_RNA (1)...(19): siRNA sense strand
uacaguaugugguggaguu

SEQ ID NO: 1257766 - RNA, 19 nt, Homo sapiens
  misc_RNA (1)...(19): siRNA sense strand
gccaauacuugagagaaga

SEQ ID NO: 1257767 - RNA, 19 nt, Homo sapiens
  misc_RNA (1)...(19): siRNA sense strand
gaaaccugccaauacuuga

SEQ ID NO: 1257768 - RNA, 19 nt, Homo sapiens
  misc_RNA (1)...(19): siRNA sense strand
aaauucagcuagcucuuca

SEQ ID NO: 1257769 - RNA, 19 nt, Homo sapiens
  misc_RNA (1)...(19): siRNA sense strand
gacauugugcgacuucauu

SEQ ID NO: 1257770 - RNA, 19 nt, Homo sapiens
  misc_RNA (1)...(19): siRNA sense strand
cgagaagauggaauacuaa

SEQ ID NO: 1257771 - RNA, 19 nt, Homo sapiens
  misc_RNA (1)...(19): siRNA sense strand
agaaaccgcugccaacacu

SEQ ID NO: 1257772 - RNA, 19 nt, Homo sapiens
  misc_RNA (1)...(19): siRNA sense strand
cuaugcaccugacugaaga

SEQ ID NO: 1257773 - RNA, 19 nt, Homo sapiens
  misc_RNA (1)...(19): siRNA sense strand
cgacgucuucaaauccuua

SEQ ID NO: 1257774 - RNA, 19 nt, Homo sapiens
  misc_RNA (1)...(19): siRNA sense strand
cagaaugugccgugccuuu

SEQ ID NO: 1257775 - RNA, 19 nt, Homo sapiens
  misc_RNA (1)...(19): siRNA sense strand
gggaggugauguggcaauu

SEQ ID NO: 1257776 - RNA, 19 nt, Homo sapiens
  misc_RNA (1)...(19): siRNA sense strand
gaaucaaaccagaaccaau

SEQ ID NO: 1257777 - RNA, 19 nt, Homo sapiens
  misc_RNA (1)...(19): siRNA sense strand
ccaacgggcugacggaacu

SEQ ID NO: 1257778 - RNA, 19 nt, Homo sapiens
  misc_RNA (1)...(19): siRNA sense strand
gaucuguggagacaaauca

SEQ ID NO: 1257779 - RNA, 19 nt, Homo sapiens
  misc_RNA (1)...(19): siRNA sense strand
ucaaauccuuagguuguga

SEQ ID NO: 1257780 - RNA, 19 nt, Homo sapiens
  misc_RNA (1)...(19): siRNA sense strand
gaagaaauugagaacuauc

SEQ ID NO: 1257781 - RNA, 19 nt, Homo sapiens
  misc_RNA (1)...(19): siRNA sense strand
ucgagaugcuguaaaauuu

SEQ ID NO: 1257782 - RNA, 19 nt, Homo sapiens
  misc_RNA (1)...(19): siRNA sense strand
ucagcuagcucuucaacac

SEQ ID NO: 1257783 - RNA, 19 nt, Homo sapiens
  misc_RNA (1)...(19): siRNA sense strand
gguugugaagacuuuauua

SEQ ID NO: 1257784 - RNA, 19 nt, Homo sapiens
  misc_RNA (1)...(19): siRNA sense strand
aaccagaaccaauauguga

SEQ ID NO: 1257785 - RNA, 19 nt, Homo sapiens
  misc_RNA (1)...(19): siRNA sense strand
aaucaucaggaauccauua

SEQ ID NO: 1257786 - RNA, 19 nt, Homo sapiens
  misc_RNA (1)...(19): siRNA sense strand
gcuucuaccuggacauaca

SEQ ID NO: 1257787 - RNA, 19 nt, Homo sapiens
  misc_RNA (1)...(19): siRNA sense strand
guaugcagaaguacagaaa

SEQ ID NO: 1257788 - RNA, 19 nt, Homo sapiens
  misc_RNA (1)...(19): siRNA sense strand
caaaucaucaggaauccau

SEQ ID NO: 1257789 - RNA, 19 nt, Homo sapiens
  misc_RNA (1)...(19): siRNA sense strand
ggaaucaaaccagaaccaa

SEQ ID NO: 1257790 - RNA, 19 nt, Homo sapiens
  misc_RNA (1)...(19): siRNA sense strand
acgcauugauggauuuaug

SEQ ID NO: 1257791 - RNA, 19 nt, Homo sapiens
  misc_RNA (1)...(19): siRNA sense strand
cuuagguugugaagacuuu

SEQ ID NO: 1257792 - RNA, 19 nt, Homo sapiens
  misc_RNA (1)...(19): siRNA sense strand
agaagaacuguuugauuga

SEQ ID NO: 1257793 - RNA, 19 nt, Homo sapiens
  misc_RNA (1)...(19): siRNA sense strand
aaugcaaauugauggguaa

SEQ ID NO: 1257794 - RNA, 19 nt, Homo sapiens
  misc_RNA (1)...(19): siRNA sense strand
cuucaaauccuuagguugu

SEQ ID NO: 1257795 - RNA, 19 nt, Homo sapiens
  misc_RNA (1)...(19): siRNA sense strand
cugccaacacugucgauua

SEQ ID NO: 1257796 - RNA, 19 nt, Homo sapiens
  misc_RNA (1)...(19): siRNA sense strand
gcaaggugucuacauuaag

SEQ ID NO: 1257797 - RNA, 19 nt, Homo sapiens
  misc_RNA (1)...(19): siRNA sense strand
ugugaagacuuuauuagcu

SEQ ID NO: 1257798 - RNA, 19 nt, Homo sapiens
  misc_RNA (1)...(19): siRNA sense strand
acgacgaccucaguaacua

SEQ ID NO: 1257799 - RNA, 19 nt, Homo sapiens
  misc_RNA (1)...(19): siRNA sense strand
ugacuacacaccagcauca

SEQ ID NO: 1257800 - RNA, 19 nt, Homo sapiens
  misc_RNA (1)...(19): siRNA sense strand
aaagcaauauacccagaca

SEQ ID NO: 1257801 - RNA, 19 nt, Homo sapiens
  misc_RNA (1)...(19): siRNA sense strand
cucuagaggugguguuuau

SEQ ID NO: 1257802 - RNA, 19 nt, Homo sapiens
  misc_RNA (1)...(19): siRNA sense strand
cuaaaucgcaucuggaaac

SEQ ID NO: 1257803 - RNA, 19 nt, Homo sapiens
  misc_RNA (1)...(19): siRNA sense strand
cagcuucuaccuggacaua

SEQ ID NO: 1257804 - RNA, 19 nt, Homo sapiens
  misc_RNA (1)...(19): siRNA sense strand
guucuaugcaccugacuga

SEQ ID NO: 1257805 - RNA, 19 nt, Homo sapiens
  misc_RNA (1)...(19): siRNA sense strand
cagaaccaauaugugacua

SEQ ID NO: 1257806 - RNA, 19 nt, Homo sapiens
  misc_RNA (1)...(19): siRNA sense strand
ugccaacacugucgauuac

SEQ ID NO: 1257807 - RNA, 19 nt, Homo sapiens
  misc_RNA (1)...(19): siRNA sense strand
ggaguuguucacuucagaa

SEQ ID NO: 1257808 - RNA, 19 nt, Homo sapiens
  misc_RNA (1)...(19): siRNA sense strand
uggaaagaguuuauguucu

SEQ ID NO: 1257809 - RNA, 19 nt, Homo sapiens
  misc_RNA (1)...(19): siRNA sense strand
gaagacuuuauuagcuuug

SEQ ID NO: 1257810 - RNA, 19 nt, Homo sapiens
  misc_RNA (1)...(19): siRNA sense strand
gaagucagcaaagcaaugc

SEQ ID NO: 1257811 - RNA, 19 nt, Homo sapiens
  misc_RNA (1)...(19): siRNA sense strand
guagaaaccgcugccaaca

SEQ ID NO: 1257812 - RNA, 19 nt, Homo sapiens
  misc_RNA (1)...(19): siRNA sense strand
ggugguguuuaucagaaug

SEQ ID NO: 1257813 - RNA, 19 nt, Homo sapiens
  misc_RNA (1)...(19): siRNA sense strand
cuggaaaccugccaauacu

SEQ ID NO: 1257814 - RNA, 19 nt, Homo sapiens
  misc_RNA (1)...(19): siRNA sense strand
gaucgaaccaguagaaacc

SEQ ID NO: 1257815 - RNA, 19 nt, Homo sapiens
  misc_RNA (1)...(19): siRNA sense strand
cgucagaagaacuguuuga

SEQ ID NO: 1257816 - RNA, 19 nt, Homo sapiens
  misc_RNA (1)...(19): siRNA sense strand
gccuuugacucucagaaca

SEQ ID NO: 1257817 - RNA, 19 nt, Homo sapiens
  misc_RNA (1)...(19): siRNA sense strand
cgaaguuacucaaggauuu

SEQ ID NO: 1257818 - RNA, 19 nt, Homo sapiens
  misc_RNA (1)...(19): siRNA sense strand
gaagauggcagaagcuguu

SEQ ID NO: 1257819 - RNA, 19 nt, Homo sapiens
  misc_RNA (1)...(19): siRNA sense strand
gaucacaucaucauugcua

SEQ ID NO: 1257820 - RNA, 19 nt, Homo sapiens
  misc_RNA (1)...(19): siRNA sense strand
gaaagagauucugcuguca

SEQ ID NO: 1257821 - RNA, 19 nt, Homo sapiens
  misc_RNA (1)...(19): siRNA sense strand
gagaugcaucccaguguua

SEQ ID NO: 1257822 - RNA, 19 nt, Homo sapiens
  misc_RNA (1)...(19): siRNA sense strand
gaauauggaaucacaagug

SEQ ID NO: 1257823 - RNA, 19 nt, Homo sapiens
  misc_RNA (1)...(19): siRNA sense strand
ccgcaugacuggaggaaga

SEQ ID NO: 1257824 - RNA, 19 nt, Homo sapiens
  misc_RNA (1)...(19): siRNA sense strand
gaaggaauccccuggaaaa

SEQ ID NO: 1257825 - RNA, 19 nt, Homo sapiens
  misc_RNA (1)...(19): siRNA sense strand
gcaucccaguguuauguaa

SEQ ID NO: 1257826 - RNA, 19 nt, Homo sapiens
  misc_RNA (1)...(19): siRNA sense strand
ggcagaagcuguucaaaau

SEQ ID NO: 1257827 - RNA, 19 nt, Homo sapiens
  misc_RNA (1)...(19): siRNA sense strand
gucaaguacuuuaacauca

SEQ ID NO: 1257828 - RNA, 19 nt, Homo sapiens
  misc_RNA (1)...(19): siRNA sense strand
cgagaugcaucccaguguu

SEQ ID NO: 1257829 - RNA, 19 nt, Homo sapiens
  misc_RNA (1)...(19): siRNA sense strand
ggaggacacgggcaccuuu

SEQ ID NO: 1257830 - RNA, 19 nt, Homo sapiens
  misc_RNA (1)...(19): siRNA sense strand
ccaguguuauguaaagaug

SEQ ID NO: 1257831 - RNA, 19 nt, Homo sapiens
  misc_RNA (1)...(19): siRNA sense strand
gaaguuacucaaggauuug

SEQ ID NO: 1257832 - RNA, 19 nt, Homo sapiens
  misc_RNA (1)...(19): siRNA sense strand
cacaugcucugaggaggua

SEQ ID NO: 1257833 - RNA, 19 nt, Homo sapiens
  misc_RNA (1)...(19): siRNA sense strand
caggucagcgggacuauga

SEQ ID NO: 1257834 - RNA, 19 nt, Homo sapiens
  misc_RNA (1)...(19): siRNA sense strand
uagagcacauggcaucuca

SEQ ID NO: 1257835 - RNA, 19 nt, Homo sapiens
  misc_RNA (1)...(19): siRNA sense strand
ucuaucacgcccauuauaa

SEQ ID NO: 1257836 - RNA, 19 nt, Homo sapiens
  misc_RNA (1)...(19): siRNA sense strand
ugggaggccugauccaaga

SEQ ID NO: 1257837 - RNA, 19 nt, Homo sapiens
  misc_RNA (1)...(19): siRNA sense strand
ggagaaggcugggguagau

SEQ ID NO: 1257838 - RNA, 19 nt, Homo sapiens
  misc_RNA (1)...(19): siRNA sense strand
gaagucugaauuuggagaa

SEQ ID NO: 1257839 - RNA, 19 nt, Homo sapiens
  misc_RNA (1)...(19): siRNA sense strand
gauggacuacgacaauguu

SEQ ID NO: 1257840 - RNA, 19 nt, Homo sapiens
  misc_RNA (1)...(19): siRNA sense strand
cagaagcuguucaaaauca

SEQ ID NO: 1257841 - RNA, 19 nt, Homo sapiens
  misc_RNA (1)...(19): siRNA sense strand
gacaggcugcugaggguaa

SEQ ID NO: 1257842 - RNA, 19 nt, Homo sapiens
  misc_RNA (1)...(19): siRNA sense strand
caaaggugggaaagagauu

SEQ ID NO: 1257843 - RNA, 19 nt, Homo sapiens
  misc_RNA (1)...(19): siRNA sense strand
gcgaaguuacucaaggauu

SEQ ID NO: 1257844 - RNA, 19 nt, Homo sapiens
  misc_RNA (1)...(19): siRNA sense strand
gccgaucacaucaucauug

SEQ ID NO: 1257845 - RNA, 19 nt, Homo sapiens
  misc_RNA (1)...(19): siRNA sense strand
caacgcaggcgaaguuacu

SEQ ID NO: 1257846 - RNA, 19 nt, Homo sapiens
  misc_RNA (1)...(19): siRNA sense strand
ggagcauguugaggucuau

SEQ ID NO: 1257847 - RNA, 19 nt, Homo sapiens
  misc_RNA (1)...(19): siRNA sense strand
cuaucacgcccauuauaaa

SEQ ID NO: 1257848 - RNA, 19 nt, Homo sapiens
  misc_RNA (1)...(19): siRNA sense strand
cacgguggcuggacgagau

SEQ ID NO: 1257849 - RNA, 19 nt, Homo sapiens
  misc_RNA (1)...(19): siRNA sense strand
gcucugaggagguagucaa

SEQ ID NO: 1257850 - RNA, 19 nt, Homo sapiens
  misc_RNA (1)...(19): siRNA sense strand
gauggcagaagcuguucaa

SEQ ID NO: 1257851 - RNA, 19 nt, Homo sapiens
  misc_RNA (1)...(19): siRNA sense strand
ucacgcccauuauaaacca

SEQ ID NO: 1257852 - RNA, 19 nt, Homo sapiens
  misc_RNA (1)...(19): siRNA sense strand
cagaucugauggacuacga

SEQ ID NO: 1257853 - RNA, 19 nt, Homo sapiens
  misc_RNA (1)...(19): siRNA sense strand
cuuggaauauggaaucaca

SEQ ID NO: 1257854 - RNA, 19 nt, Homo sapiens
  misc_RNA (1)...(19): siRNA sense strand
ccaaaggugggaaagagau

SEQ ID NO: 1257855 - RNA, 19 nt, Homo sapiens
  misc_RNA (1)...(19): siRNA sense strand
ggaauauggaaucacaagu

SEQ ID NO: 1257856 - RNA, 19 nt, Homo sapiens
  misc_RNA (1)...(19): siRNA sense strand
aggcgaaguuacucaagga

SEQ ID NO: 1257857 - RNA, 19 nt, Homo sapiens
  misc_RNA (1)...(19): siRNA sense strand
gggcuggacaccaccauca

SEQ ID NO: 1257858 - RNA, 19 nt, Homo sapiens
  misc_RNA (1)...(19): siRNA sense strand
gaggacacgggcaccuuug

SEQ ID NO: 1257859 - RNA, 19 nt, Homo sapiens
  misc_RNA (1)...(19): siRNA sense strand
gucuaucacgcccauuaua

SEQ ID NO: 1257860 - RNA, 19 nt, Homo sapiens
  misc_RNA (1)...(19): siRNA sense strand
ccacaucuacgccauuggu

SEQ ID NO: 1257861 - RNA, 19 nt, Homo sapiens
  misc_RNA (1)...(19): siRNA sense strand
ggacagaaaagucaaguac

SEQ ID NO: 1257862 - RNA, 19 nt, Homo sapiens
  misc_RNA (1)...(19): siRNA sense strand
ggucuaucacgcccauuau

SEQ ID NO: 1257863 - RNA, 19 nt, Homo sapiens
  misc_RNA (1)...(19): siRNA sense strand
aaaaucacgugaaauccuu

SEQ ID NO: 1257864 - RNA, 19 nt, Homo sapiens
  misc_RNA (1)...(19): siRNA sense strand
cacgugaaauccuugaacu

SEQ ID NO: 1257865 - RNA, 19 nt, Homo sapiens
  misc_RNA (1)...(19): siRNA sense strand
aggagcauguugaggucua

SEQ ID NO: 1257866 - RNA, 19 nt, Homo sapiens
  misc_RNA (1)...(19): siRNA sense strand
ggacuacguggaaccuucu

SEQ ID NO: 1257867 - RNA, 19 nt, Homo sapiens
  misc_RNA (1)...(19): siRNA sense strand
gccaaaggugggaaagaga

SEQ ID NO: 1257868 - RNA, 19 nt, Homo sapiens
  misc_RNA (1)...(19): siRNA sense strand
ugccaaaggugggaaagag

SEQ ID NO: 1257869 - RNA, 19 nt, Homo sapiens
  misc_RNA (1)...(19): siRNA sense strand
uguccuccauggucauaga

SEQ ID NO: 1257870 - RNA, 19 nt, Homo sapiens
  misc_RNA (1)...(19): siRNA sense strand
gcuggacaccaccaucaug

SEQ ID NO: 1257871 - RNA, 19 nt, Homo sapiens
  misc_RNA (1)...(19): siRNA sense strand
ccgaucacaucaucauugc

SEQ ID NO: 1257872 - RNA, 19 nt, Homo sapiens
  misc_RNA (1)...(19): siRNA sense strand
gucagccgaucacaucauc

SEQ ID NO: 1257873 - RNA, 19 nt, Homo sapiens
  misc_RNA (1)...(19): siRNA sense strand
ggucagcgggacuaugauc

SEQ ID NO: 1257874 - RNA, 19 nt, Homo sapiens
  misc_RNA (1)...(19): siRNA sense strand
ucugauggacuacgacaau

SEQ ID NO: 1257875 - RNA, 19 nt, Homo sapiens
  misc_RNA (1)...(19): siRNA sense strand
cgaaguuacucaaggauuu

SEQ ID NO: 1257876 - RNA, 19 nt, Homo sapiens
  misc_RNA (1)...(19): siRNA sense strand
gaagauggcagaagcuguu

SEQ ID NO: 1257877 - RNA, 19 nt, Homo sapiens
  misc_RNA (1)...(19): siRNA sense strand
gaucacaucaucauugcua

SEQ ID NO: 1257878 - RNA, 19 nt, Homo sapiens
  misc_RNA (1)...(19): siRNA sense strand
gaaagagauucugcuguca

SEQ ID NO: 1257879 - RNA, 19 nt, Homo sapiens
  misc_RNA (1)...(19): siRNA sense strand
gagaugcaucccaguguua

SEQ ID NO: 1257880 - RNA, 19 nt, Homo sapiens
  misc_RNA (1)...(19): siRNA sense strand
gaauauggaaucacaagug

SEQ ID NO: 1257881 - RNA, 19 nt, Homo sapiens
  misc_RNA (1)...(19): siRNA sense strand
ccgcaugacuggaggaaga

SEQ ID NO: 1257882 - RNA, 19 nt, Homo sapiens
  misc_RNA (1)...(19): siRNA sense strand
gaaggaauccccuggaaaa

SEQ ID NO: 1257883 - RNA, 19 nt, Homo sapiens
  misc_RNA (1)...(19): siRNA sense strand
gcaucccaguguuauguaa

SEQ ID NO: 1257884 - RNA, 19 nt, Homo sapiens
  misc_RNA (1)...(19): siRNA sense strand
ggcagaagcuguucaaaau

SEQ ID NO: 1257885 - RNA, 19 nt, Homo sapiens
  misc_RNA (1)...(19): siRNA sense strand
gucaaguacuuuaacauca

SEQ ID NO: 1257886 - RNA, 19 nt, Homo sapiens
  misc_RNA (1)...(19): siRNA sense strand
cgagaugcaucccaguguu

SEQ ID NO: 1257887 - RNA, 19 nt, Homo sapiens
  misc_RNA (1)...(19): siRNA sense strand
ggaggacacgggcaccuuu

SEQ ID NO: 1257888 - RNA, 19 nt, Homo sapiens
  misc_RNA (1)...(19): siRNA sense strand
ccaguguuauguaaagaug

SEQ ID NO: 1257889 - RNA, 19 nt, Homo sapiens
  misc_RNA (1)...(19): siRNA sense strand
gaaguuacucaaggauuug

SEQ ID NO: 1257890 - RNA, 19 nt, Homo sapiens
  misc_RNA (1)...(19): siRNA sense strand
cacaugcucugaggaggua

SEQ ID NO: 1257891 - RNA, 19 nt, Homo sapiens
  misc_RNA (1)...(19): siRNA sense strand
uagagcacauggcaucuca

SEQ ID NO: 1257892 - RNA, 19 nt, Homo sapiens
  misc_RNA (1)...(19): siRNA sense strand
ucuaucacgcccauuauaa

SEQ ID NO: 1257893 - RNA, 19 nt, Homo sapiens
  misc_RNA (1)...(19): siRNA sense strand
gaagucugaauuuggagaa

SEQ ID NO: 1257894 - RNA, 19 nt, Homo sapiens
  misc_RNA (1)...(19): siRNA sense strand
ugggaggccugauccaaga

SEQ ID NO: 1257895 - RNA, 19 nt, Homo sapiens
  misc_RNA (1)...(19): siRNA sense strand
ggagaaggcugggguagau

SEQ ID NO: 1257896 - RNA, 19 nt, Homo sapiens
  misc_RNA (1)...(19): siRNA sense strand
gauggacuacgacaauguu

SEQ ID NO: 1257897 - RNA, 19 nt, Homo sapiens
  misc_RNA (1)...(19): siRNA sense strand
cagaagcuguucaaaauca

SEQ ID NO: 1257898 - RNA, 19 nt, Homo sapiens
  misc_RNA (1)...(19): siRNA sense strand
gacaggcugcugaggguaa

SEQ ID NO: 1257899 - RNA, 19 nt, Homo sapiens
  misc_RNA (1)...(19): siRNA sense strand
caaaggugggaaagagauu

SEQ ID NO: 1257900 - RNA, 19 nt, Homo sapiens
  misc_RNA (1)...(19): siRNA sense strand
gcgaaguuacucaaggauu

SEQ ID NO: 1257901 - RNA, 19 nt, Homo sapiens
  misc_RNA (1)...(19): siRNA sense strand
gccgaucacaucaucauug

SEQ ID NO: 1257902 - RNA, 19 nt, Homo sapiens
  misc_RNA (1)...(19): siRNA sense strand
caacgcaggcgaaguuacu

SEQ ID NO: 1257903 - RNA, 19 nt, Homo sapiens
  misc_RNA (1)...(19): siRNA sense strand
ggagcauguugaggucuau

SEQ ID NO: 1257904 - RNA, 19 nt, Homo sapiens
  misc_RNA (1)...(19): siRNA sense strand
cuaucacgcccauuauaaa

SEQ ID NO: 1257905 - RNA, 19 nt, Homo sapiens
  misc_RNA (1)...(19): siRNA sense strand
cacgguggcuggacgagau

SEQ ID NO: 1257906 - RNA, 19 nt, Homo sapiens
  misc_RNA (1)...(19): siRNA sense strand
gcucugaggagguagucaa

SEQ ID NO: 1257907 - RNA, 19 nt, Homo sapiens
  misc_RNA (1)...(19): siRNA sense strand
ccaaaggugggaaagagau

SEQ ID NO: 1257908 - RNA, 19 nt, Homo sapiens
  misc_RNA (1)...(19): siRNA sense strand
ucacgcccauuauaaacca

SEQ ID NO: 1257909 - RNA, 19 nt, Homo sapiens
  misc_RNA (1)...(19): siRNA sense strand
cagaucugauggacuacga

SEQ ID NO: 1257910 - RNA, 19 nt, Homo sapiens
  misc_RNA (1)...(19): siRNA sense strand
gauggcagaagcuguucaa

SEQ ID NO: 1257911 - RNA, 19 nt, Homo sapiens
  misc_RNA (1)...(19): siRNA sense strand
cuuggaauauggaaucaca

SEQ ID NO: 1257912 - RNA, 19 nt, Homo sapiens
  misc_RNA (1)...(19): siRNA sense strand
ggaauauggaaucacaagu

SEQ ID NO: 1257913 - RNA, 19 nt, Homo sapiens
  misc_RNA (1)...(19): siRNA sense strand
aggcgaaguuacucaagga

SEQ ID NO: 1257914 - RNA, 19 nt, Homo sapiens
  misc_RNA (1)...(19): siRNA sense strand
gggcuggacaccaccauca

SEQ ID NO: 1257915 - RNA, 19 nt, Homo sapiens
  misc_RNA (1)...(19): siRNA sense strand
gaggacacgggcaccuuug

SEQ ID NO: 1257916 - RNA, 19 nt, Homo sapiens
  misc_RNA (1)...(19): siRNA sense strand
gucuaucacgcccauuaua

SEQ ID NO: 1257917 - RNA, 19 nt, Homo sapiens
  misc_RNA (1)...(19): siRNA sense strand
ccacaucuacgccauuggu

SEQ ID NO: 1257918 - RNA, 19 nt, Homo sapiens
  misc_RNA (1)...(19): siRNA sense strand
ggacagaaaagucaaguac

SEQ ID NO: 1257919 - RNA, 19 nt, Homo sapiens
  misc_RNA (1)...(19): siRNA sense strand
ggucuaucacgcccauuau

SEQ ID NO: 1257920 - RNA, 19 nt, Homo sapiens
  misc_RNA (1)...(19): siRNA sense strand
aaaaucacgugaaauccuu

SEQ ID NO: 1257921 - RNA, 19 nt, Homo sapiens
  misc_RNA (1)...(19): siRNA sense strand
gccaaaggugggaaagaga

SEQ ID NO: 1257922 - RNA, 19 nt, Homo sapiens
  misc_RNA (1)...(19): siRNA sense strand
cacgugaaauccuugaacu

SEQ ID NO: 1257923 - RNA, 19 nt, Homo sapiens
  misc_RNA (1)...(19): siRNA sense strand
aggagcauguugaggucua

SEQ ID NO: 1257924 - RNA, 19 nt, Homo sapiens
  misc_RNA (1)...(19): siRNA sense strand
ugccaaaggugggaaagag

SEQ ID NO: 1257925 - RNA, 19 nt, Homo sapiens
  misc_RNA (1)...(19): siRNA sense strand
uguccuccauggucauaga

SEQ ID NO: 1257926 - RNA, 19 nt, Homo sapiens
  misc_RNA (1)...(19): siRNA sense strand
gcuggacaccaccaucaug

SEQ ID NO: 1257927 - RNA, 19 nt, Homo sapiens
  misc_RNA (1)...(19): siRNA sense strand
ccgaucacaucaucauugc

SEQ ID NO: 1257928 - RNA, 19 nt, Homo sapiens
  misc_RNA (1)...(19): siRNA sense strand
gucagccgaucacaucauc

SEQ ID NO: 1257929 - RNA, 19 nt, Homo sapiens
  misc_RNA (1)...(19): siRNA sense strand
ucugauggacuacgacaau

SEQ ID NO: 1257930 - RNA, 19 nt, Homo sapiens
  misc_RNA (1)...(19): siRNA sense strand
cgaaguuacucaaggauuu

SEQ ID NO: 1257931 - RNA, 19 nt, Homo sapiens
  misc_RNA (1)...(19): siRNA sense strand
gaagauggcagaagcuguu

SEQ ID NO: 1257932 - RNA, 19 nt, Homo sapiens
  misc_RNA (1)...(19): siRNA sense strand
gaucacaucaucauugcua

SEQ ID NO: 1257933 - RNA, 19 nt, Homo sapiens
  misc_RNA (1)...(19): siRNA sense strand
gaaagagauucugcuguca

SEQ ID NO: 1257934 - RNA, 19 nt, Homo sapiens
  misc_RNA (1)...(19): siRNA sense strand
gagaugcaucccaguguua

SEQ ID NO: 1257935 - RNA, 19 nt, Homo sapiens
  misc_RNA (1)...(19): siRNA sense strand
gaauauggaaucacaagug

SEQ ID NO: 1257936 - RNA, 19 nt, Homo sapiens
  misc_RNA (1)...(19): siRNA sense strand
ccgcaugacuggaggaaga

SEQ ID NO: 1257937 - RNA, 19 nt, Homo sapiens
  misc_RNA (1)...(19): siRNA sense strand
gaaggaauccccuggaaaa

SEQ ID NO: 1257938 - RNA, 19 nt, Homo sapiens
  misc_RNA (1)...(19): siRNA sense strand
gcaucccaguguuauguaa

SEQ ID NO: 1257939 - RNA, 19 nt, Homo sapiens
  misc_RNA (1)...(19): siRNA sense strand
ggcagaagcuguucaaaau

SEQ ID NO: 1257940 - RNA, 19 nt, Homo sapiens
  misc_RNA (1)...(19): siRNA sense strand
gucaaguacuuuaacauca

SEQ ID NO: 1257941 - RNA, 19 nt, Homo sapiens
  misc_RNA (1)...(19): siRNA sense strand
cgagaugcaucccaguguu

SEQ ID NO: 1257942 - RNA, 19 nt, Homo sapiens
  misc_RNA (1)...(19): siRNA sense strand
ggaggacacgggcaccuuu

SEQ ID NO: 1257943 - RNA, 19 nt, Homo sapiens
  misc_RNA (1)...(19): siRNA sense strand
ccaguguuauguaaagaug

SEQ ID NO: 1257944 - RNA, 19 nt, Homo sapiens
  misc_RNA (1)...(19): siRNA sense strand
gaaguuacucaaggauuug

SEQ ID NO: 1257945 - RNA, 19 nt, Homo sapiens
  misc_RNA (1)...(19): siRNA sense strand
cacaugcucugaggaggua

SEQ ID NO: 1257946 - RNA, 19 nt, Homo sapiens
  misc_RNA (1)...(19): siRNA sense strand
caggucagcgggacuauga

SEQ ID NO: 1257947 - RNA, 19 nt, Homo sapiens
  misc_RNA (1)...(19): siRNA sense strand
uagagcacauggcaucuca

SEQ ID NO: 1257948 - RNA, 19 nt, Homo sapiens
  misc_RNA (1)...(19): siRNA sense strand
ucuaucacgcccauuauaa

SEQ ID NO: 1257949 - RNA, 19 nt, Homo sapiens
  misc_RNA (1)...(19): siRNA sense strand
ugggaggccugauccaaga

SEQ ID NO: 1257950 - RNA, 19 nt, Homo sapiens
  misc_RNA (1)...(19): siRNA sense strand
ggagaaggcugggguagau

SEQ ID NO: 1257951 - RNA, 19 nt, Homo sapiens
  misc_RNA (1)...(19): siRNA sense strand
gaagucugaauuuggagaa

SEQ ID NO: 1257952 - RNA, 19 nt, Homo sapiens
  misc_RNA (1)...(19): siRNA sense strand
gauggacuacgacaauguu

SEQ ID NO: 1257953 - RNA, 19 nt, Homo sapiens
  misc_RNA (1)...(19): siRNA sense strand
cagaagcuguucaaaauca

SEQ ID NO: 1257954 - RNA, 19 nt, Homo sapiens
  misc_RNA (1)...(19): siRNA sense strand
gacaggcugcugaggguaa

SEQ ID NO: 1257955 - RNA, 19 nt, Homo sapiens
  misc_RNA (1)...(19): siRNA sense strand
caaaggugggaaagagauu

SEQ ID NO: 1257956 - RNA, 19 nt, Homo sapiens
  misc_RNA (1)...(19): siRNA sense strand
gcgaaguuacucaaggauu

SEQ ID NO: 1257957 - RNA, 19 nt, Homo sapiens
  misc_RNA (1)...(19): siRNA sense strand
gccgaucacaucaucauug

SEQ ID NO: 1257958 - RNA, 19 nt, Homo sapiens
  misc_RNA (1)...(19): siRNA sense strand
caacgcaggcgaaguuacu

SEQ ID NO: 1257959 - RNA, 19 nt, Homo sapiens
  misc_RNA (1)...(19): siRNA sense strand
ggagcauguugaggucuau

SEQ ID NO: 1257960 - RNA, 19 nt, Homo sapiens
  misc_RNA (1)...(19): siRNA sense strand
cuaucacgcccauuauaaa

SEQ ID NO: 1257961 - RNA, 19 nt, Homo sapiens
  misc_RNA (1)...(19): siRNA sense strand
cacgguggcuggacgagau

SEQ ID NO: 1257962 - RNA, 19 nt, Homo sapiens
  misc_RNA (1)...(19): siRNA sense strand
gcucugaggagguagucaa

SEQ ID NO: 1257963 - RNA, 19 nt, Homo sapiens
  misc_RNA (1)...(19): siRNA sense strand
gauggcagaagcuguucaa

SEQ ID NO: 1257964 - RNA, 19 nt, Homo sapiens
  misc_RNA (1)...(19): siRNA sense strand
ucacgcccauuauaaacca

SEQ ID NO: 1257965 - RNA, 19 nt, Homo sapiens
  misc_RNA (1)...(19): siRNA sense strand
cagaucugauggacuacga

SEQ ID NO: 1257966 - RNA, 19 nt, Homo sapiens
  misc_RNA (1)...(19): siRNA sense strand
cuuggaauauggaaucaca

SEQ ID NO: 1257967 - RNA, 19 nt, Homo sapiens
  misc_RNA (1)...(19): siRNA sense strand
ccaaaggugggaaagagau

SEQ ID NO: 1257968 - RNA, 19 nt, Homo sapiens
  misc_RNA (1)...(19): siRNA sense strand
ggaauauggaaucacaagu

SEQ ID NO: 1257969 - RNA, 19 nt, Homo sapiens
  misc_RNA (1)...(19): siRNA sense strand
aggcgaaguuacucaagga

SEQ ID NO: 1257970 - RNA, 19 nt, Homo sapiens
  misc_RNA (1)...(19): siRNA sense strand
gggcuggacaccaccauca

SEQ ID NO: 1257971 - RNA, 19 nt, Homo sapiens
  misc_RNA (1)...(19): siRNA sense strand
gaggacacgggcaccuuug

SEQ ID NO: 1257972 - RNA, 19 nt, Homo sapiens
  misc_RNA (1)...(19): siRNA sense strand
gucuaucacgcccauuaua

SEQ ID NO: 1257973 - RNA, 19 nt, Homo sapiens
  misc_RNA (1)...(19): siRNA sense strand
ccacaucuacgccauuggu

SEQ ID NO: 1257974 - RNA, 19 nt, Homo sapiens
  misc_RNA (1)...(19): siRNA sense strand
ggacagaaaagucaaguac

SEQ ID NO: 1257975 - RNA, 19 nt, Homo sapiens
  misc_RNA (1)...(19): siRNA sense strand
ggucuaucacgcccauuau

SEQ ID NO: 1257976 - RNA, 19 nt, Homo sapiens
  misc_RNA (1)...(19): siRNA sense strand
aaaaucacgugaaauccuu

SEQ ID NO: 1257977 - RNA, 19 nt, Homo sapiens
  misc_RNA (1)...(19): siRNA sense strand
cacgugaaauccuugaacu

SEQ ID NO: 1257978 - RNA, 19 nt, Homo sapiens
  misc_RNA (1)...(19): siRNA sense strand
aggagcauguugaggucua

SEQ ID NO: 1257979 - RNA, 19 nt, Homo sapiens
  misc_RNA (1)...(19): siRNA sense strand
ggacuacguggaaccuucu

SEQ ID NO: 1257980 - RNA, 19 nt, Homo sapiens
  misc_RNA (1)...(19): siRNA sense strand
gccaaaggugggaaagaga

SEQ ID NO: 1257981 - RNA, 19 nt, Homo sapiens
  misc_RNA (1)...(19): siRNA sense strand
ugccaaaggugggaaagag

SEQ ID NO: 1257982 - RNA, 19 nt, Homo sapiens
  misc_RNA (1)...(19): siRNA sense strand
uguccuccauggucauaga

SEQ ID NO: 1257983 - RNA, 19 nt, Homo sapiens
  misc_RNA (1)...(19): siRNA sense strand
gcuggacaccaccaucaug

SEQ ID NO: 1257984 - RNA, 19 nt, Homo sapiens
  misc_RNA (1)...(19): siRNA sense strand
ccgaucacaucaucauugc

SEQ ID NO: 1257985 - RNA, 19 nt, Homo sapiens
  misc_RNA (1)...(19): siRNA sense strand
gucagccgaucacaucauc

SEQ ID NO: 1257986 - RNA, 19 nt, Homo sapiens
  misc_RNA (1)...(19): siRNA sense strand
ggucagcgggacuaugauc

SEQ ID NO: 1257987 - RNA, 19 nt, Homo sapiens
  misc_RNA (1)...(19): siRNA sense strand
ucugauggacuacgacaau

SEQ ID NO: 1257988 - RNA, 19 nt, Homo sapiens
  misc_RNA (1)...(19): siRNA sense strand
cgaaguuacucaaggauuu

SEQ ID NO: 1257989 - RNA, 19 nt, Homo sapiens
  misc_RNA (1)...(19): siRNA sense strand
gaagauggcagaagcuguu

SEQ ID NO: 1257990 - RNA, 19 nt, Homo sapiens
  misc_RNA (1)...(19): siRNA sense strand
gaucacaucaucauugcua

SEQ ID NO: 1257991 - RNA, 19 nt, Homo sapiens
  misc_RNA (1)...(19): siRNA sense strand
gaaagagauucugcuguca

SEQ ID NO: 1257992 - RNA, 19 nt, Homo sapiens
  misc_RNA (1)...(19): siRNA sense strand
gagaugcaucccaguguua

SEQ ID NO: 1257993 - RNA, 19 nt, Homo sapiens
  misc_RNA (1)...(19): siRNA sense strand
gaauauggaaucacaagug

SEQ ID NO: 1257994 - RNA, 19 nt, Homo sapiens
  misc_RNA (1)...(19): siRNA sense strand
ccgcaugacuggaggaaga

SEQ ID NO: 1257995 - RNA, 19 nt, Homo sapiens
  misc_RNA (1)...(19): siRNA sense strand
gaaggaauccccuggaaaa

SEQ ID NO: 1257996 - RNA, 19 nt, Homo sapiens
  misc_RNA (1)...(19): siRNA sense strand
gcaucccaguguuauguaa

SEQ ID NO: 1257997 - RNA, 19 nt, Homo sapiens
  misc_RNA (1)...(19): siRNA sense strand
ggcagaagcuguucaaaau

SEQ ID NO: 1257998 - RNA, 19 nt, Homo sapiens
  misc_RNA (1)...(19): siRNA sense strand
gucaaguacuuuaacauca

SEQ ID NO: 1257999 - RNA, 19 nt, Homo sapiens
  misc_RNA (1)...(19): siRNA sense strand
cgagaugcaucccaguguu

SEQ ID NO: 1258000 - RNA, 19 nt, Homo sapiens
  misc_RNA (1)...(19): siRNA sense strand
ggaggacacgggcaccuuu

SEQ ID NO: 1258001 - RNA, 19 nt, Homo sapiens
  misc_RNA (1)...(19): siRNA sense strand
ccaguguuauguaaagaug

SEQ ID NO: 1258002 - RNA, 19 nt, Homo sapiens
  misc_RNA (1)...(19): siRNA sense strand
gaaguuacucaaggauuug

SEQ ID NO: 1258003 - RNA, 19 nt, Homo sapiens
  misc_RNA (1)...(19): siRNA sense strand
cacaugcucugaggaggua

SEQ ID NO: 1258004 - RNA, 19 nt, Homo sapiens
  misc_RNA (1)...(19): siRNA sense strand
caggucagcgggacuauga

SEQ ID NO: 1258005 - RNA, 19 nt, Homo sapiens
  misc_RNA (1)...(19): siRNA sense strand
uagagcacauggcaucuca

SEQ ID NO: 1258006 - RNA, 19 nt, Homo sapiens
  misc_RNA (1)...(19): siRNA sense strand
ucuaucacgcccauuauaa

SEQ ID NO: 1258007 - RNA, 19 nt, Homo sapiens
  misc_RNA (1)...(19): siRNA sense strand
ugggaggccugauccaaga

SEQ ID NO: 1258008 - RNA, 19 nt, Homo sapiens
  misc_RNA (1)...(19): siRNA sense strand
ggagaaggcugggguagau

SEQ ID NO: 1258009 - RNA, 19 nt, Homo sapiens
  misc_RNA (1)...(19): siRNA sense strand
gaagucugaauuuggagaa

SEQ ID NO: 1258010 - RNA, 19 nt, Homo sapiens
  misc_RNA (1)...(19): siRNA sense strand
gauggacuacgacaauguu

SEQ ID NO: 1258011 - RNA, 19 nt, Homo sapiens
  misc_RNA (1)...(19): siRNA sense strand
cagaagcuguucaaaauca

SEQ ID NO: 1258012 - RNA, 19 nt, Homo sapiens
  misc_RNA (1)...(19): siRNA sense strand
gacaggcugcugaggguaa

SEQ ID NO: 1258013 - RNA, 19 nt, Homo sapiens
  misc_RNA (1)...(19): siRNA sense strand
caaaggugggaaagagauu

SEQ ID NO: 1258014 - RNA, 19 nt, Homo sapiens
  misc_RNA (1)...(19): siRNA sense strand
gcgaaguuacucaaggauu

SEQ ID NO: 1258015 - RNA, 19 nt, Homo sapiens
  misc_RNA (1)...(19): siRNA sense strand
gccgaucacaucaucauug

SEQ ID NO: 1258016 - RNA, 19 nt, Homo sapiens
  misc_RNA (1)...(19): siRNA sense strand
caacgcaggcgaaguuacu

SEQ ID NO: 1258017 - RNA, 19 nt, Homo sapiens
  misc_RNA (1)...(19): siRNA sense strand
ggagcauguugaggucuau

SEQ ID NO: 1258018 - RNA, 19 nt, Homo sapiens
  misc_RNA (1)...(19): siRNA sense strand
cuaucacgcccauuauaaa

SEQ ID NO: 1258019 - RNA, 19 nt, Homo sapiens
  misc_RNA (1)...(19): siRNA sense strand
cacgguggcuggacgagau

SEQ ID NO: 1258020 - RNA, 19 nt, Homo sapiens
  misc_RNA (1)...(19): siRNA sense strand
gcucugaggagguagucaa

SEQ ID NO: 1258021 - RNA, 19 nt, Homo sapiens
  misc_RNA (1)...(19): siRNA sense strand
gauggcagaagcuguucaa

SEQ ID NO: 1258022 - RNA, 19 nt, Homo sapiens
  misc_RNA (1)...(19): siRNA sense strand
ucacgcccauuauaaacca

SEQ ID NO: 1258023 - RNA, 19 nt, Homo sapiens
  misc_RNA (1)...(19): siRNA sense strand
cagaucugauggacuacga

SEQ ID NO: 1258024 - RNA, 19 nt, Homo sapiens
  misc_RNA (1)...(19): siRNA sense strand
cuuggaauauggaaucaca

SEQ ID NO: 1258025 - RNA, 19 nt, Homo sapiens
  misc_RNA (1)...(19): siRNA sense strand
ccaaaggugggaaagagau

SEQ ID NO: 1258026 - RNA, 19 nt, Homo sapiens
  misc_RNA (1)...(19): siRNA sense strand
ggaauauggaaucacaagu

SEQ ID NO: 1258027 - RNA, 19 nt, Homo sapiens
  misc_RNA (1)...(19): siRNA sense strand
aggcgaaguuacucaagga

SEQ ID NO: 1258028 - RNA, 19 nt, Homo sapiens
  misc_RNA (1)...(19): siRNA sense strand
gggcuggacaccaccauca

SEQ ID NO: 1258029 - RNA, 19 nt, Homo sapiens
  misc_RNA (1)...(19): siRNA sense strand
gaggacacgggcaccuuug

SEQ ID NO: 1258030 - RNA, 19 nt, Homo sapiens
  misc_RNA (1)...(19): siRNA sense strand
gucuaucacgcccauuaua

SEQ ID NO: 1258031 - RNA, 19 nt, Homo sapiens
  misc_RNA (1)...(19): siRNA sense strand
ccacaucuacgccauuggu

SEQ ID NO: 1258032 - RNA, 19 nt, Homo sapiens
  misc_RNA (1)...(19): siRNA sense strand
ggacagaaaagucaaguac

SEQ ID NO: 1258033 - RNA, 19 nt, Homo sapiens
  misc_RNA (1)...(19): siRNA sense strand
ggucuaucacgcccauuau

SEQ ID NO: 1258034 - RNA, 19 nt, Homo sapiens
  misc_RNA (1)...(19): siRNA sense strand
aaaaucacgugaaauccuu

SEQ ID NO: 1258035 - RNA, 19 nt, Homo sapiens
  misc_RNA (1)...(19): siRNA sense strand
cacgugaaauccuugaacu

SEQ ID NO: 1258036 - RNA, 19 nt, Homo sapiens
  misc_RNA (1)...(19): siRNA sense strand
aggagcauguugaggucua

SEQ ID NO: 1258037 - RNA, 19 nt, Homo sapiens
  misc_RNA (1)...(19): siRNA sense strand
ggacuacguggaaccuucu

SEQ ID NO: 1258038 - RNA, 19 nt, Homo sapiens
  misc_RNA (1)...(19): siRNA sense strand
gccaaaggugggaaagaga

SEQ ID NO: 1258039 - RNA, 19 nt, Homo sapiens
  misc_RNA (1)...(19): siRNA sense strand
ugccaaaggugggaaagag

SEQ ID NO: 1258040 - RNA, 19 nt, Homo sapiens
  misc_RNA (1)...(19): siRNA sense strand
uguccuccauggucauaga

SEQ ID NO: 1258041 - RNA, 19 nt, Homo sapiens
  misc_RNA (1)...(19): siRNA sense strand
gcuggacaccaccaucaug

SEQ ID NO: 1258042 - RNA, 19 nt, Homo sapiens
  misc_RNA (1)...(19): siRNA sense strand
ccgaucacaucaucauugc

SEQ ID NO: 1258043 - RNA, 19 nt, Homo sapiens
  misc_RNA (1)...(19): siRNA sense strand
gucagccgaucacaucauc

SEQ ID NO: 1258044 - RNA, 19 nt, Homo sapiens
  misc_RNA (1)...(19): siRNA sense strand
ggucagcgggacuaugauc

SEQ ID NO: 1258045 - RNA, 19 nt, Homo sapiens
  misc_RNA (1)...(19): siRNA sense strand
ucugauggacuacgacaau

SEQ ID NO: 1258046 - RNA, 19 nt, Homo sapiens
  misc_RNA (1)...(19): siRNA sense strand
cgaaguuacucaaggauuu

SEQ ID NO: 1258047 - RNA, 19 nt, Homo sapiens
  misc_RNA (1)...(19): siRNA sense strand
gaagauggcagaagcuguu

SEQ ID NO: 1258048 - RNA, 19 nt, Homo sapiens
  misc_RNA (1)...(19): siRNA sense strand
gaucacaucaucauugcua

SEQ ID NO: 1258049 - RNA, 19 nt, Homo sapiens
  misc_RNA (1)...(19): siRNA sense strand
gaaagagauucugcuguca

SEQ ID NO: 1258050 - RNA, 19 nt, Homo sapiens
  misc_RNA (1)...(19): siRNA sense strand
gagaugcaucccaguguua

SEQ ID NO: 1258051 - RNA, 19 nt, Homo sapiens
  misc_RNA (1)...(19): siRNA sense strand
gaauauggaaucacaagug

SEQ ID NO: 1258052 - RNA, 19 nt, Homo sapiens
  misc_RNA (1)...(19): siRNA sense strand
ccgcaugacuggaggaaga

SEQ ID NO: 1258053 - RNA, 19 nt, Homo sapiens
  misc_RNA (1)...(19): siRNA sense strand
gaaggaauccccuggaaaa

SEQ ID NO: 1258054 - RNA, 19 nt, Homo sapiens
  misc_RNA (1)...(19): siRNA sense strand
gcaucccaguguuauguaa

SEQ ID NO: 1258055 - RNA, 19 nt, Homo sapiens
  misc_RNA (1)...(19): siRNA sense strand
ggcagaagcuguucaaaau

SEQ ID NO: 1258056 - RNA, 19 nt, Homo sapiens
  misc_RNA (1)...(19): siRNA sense strand
gucaaguacuuuaacauca

SEQ ID NO: 1258057 - RNA, 19 nt, Homo sapiens
  misc_RNA (1)...(19): siRNA sense strand
cgagaugcaucccaguguu

SEQ ID NO: 1258058 - RNA, 19 nt, Homo sapiens
  misc_RNA (1)...(19): siRNA sense strand
ggaggacacgggcaccuuu

SEQ ID NO: 1258059 - RNA, 19 nt, Homo sapiens
  misc_RNA (1)...(19): siRNA sense strand
ccaguguuauguaaagaug

SEQ ID NO: 1258060 - RNA, 19 nt, Homo sapiens
  misc_RNA (1)...(19): siRNA sense strand
gaaguuacucaaggauuug

SEQ ID NO: 1258061 - RNA, 19 nt, Homo sapiens
  misc_RNA (1)...(19): siRNA sense strand
cacaugcucugaggaggua

SEQ ID NO: 1258062 - RNA, 19 nt, Homo sapiens
  misc_RNA (1)...(19): siRNA sense strand
uagagcacauggcaucuca

SEQ ID NO: 1258063 - RNA, 19 nt, Homo sapiens
  misc_RNA (1)...(19): siRNA sense strand
ucuaucacgcccauuauaa

SEQ ID NO: 1258064 - RNA, 19 nt, Homo sapiens
  misc_RNA (1)...(19): siRNA sense strand
gaagucugaauuuggagaa

SEQ ID NO: 1258065 - RNA, 19 nt, Homo sapiens
  misc_RNA (1)...(19): siRNA sense strand
ugggaggccugauccaaga

SEQ ID NO: 1258066 - RNA, 19 nt, Homo sapiens
  misc_RNA (1)...(19): siRNA sense strand
ggagaaggcugggguagau

SEQ ID NO: 1258067 - RNA, 19 nt, Homo sapiens
  misc_RNA (1)...(19): siRNA sense strand
gauggacuacgacaauguu

SEQ ID NO: 1258068 - RNA, 19 nt, Homo sapiens
  misc_RNA (1)...(19): siRNA sense strand
cagaagcuguucaaaauca

SEQ ID NO: 1258069 - RNA, 19 nt, Homo sapiens
  misc_RNA (1)...(19): siRNA sense strand
gacaggcugcugaggguaa

SEQ ID NO: 1258070 - RNA, 19 nt, Homo sapiens
  misc_RNA (1)...(19): siRNA sense strand
caaaggugggaaagagauu

SEQ ID NO: 1258071 - RNA, 19 nt, Homo sapiens
  misc_RNA (1)...(19): siRNA sense strand
gcgaaguuacucaaggauu

SEQ ID NO: 1258072 - RNA, 19 nt, Homo sapiens
  misc_RNA (1)...(19): siRNA sense strand
gccgaucacaucaucauug

SEQ ID NO: 1258073 - RNA, 19 nt, Homo sapiens
  misc_RNA (1)...(19): siRNA sense strand
caacgcaggcgaaguuacu

SEQ ID NO: 1258074 - RNA, 19 nt, Homo sapiens
  misc_RNA (1)...(19): siRNA sense strand
ggagcauguugaggucuau

SEQ ID NO: 1258075 - RNA, 19 nt, Homo sapiens
  misc_RNA (1)...(19): siRNA sense strand
cuaucacgcccauuauaaa

SEQ ID NO: 1258076 - RNA, 19 nt, Homo sapiens
  misc_RNA (1)...(19): siRNA sense strand
cacgguggcuggacgagau

SEQ ID NO: 1258077 - RNA, 19 nt, Homo sapiens
  misc_RNA (1)...(19): siRNA sense strand
gcucugaggagguagucaa

SEQ ID NO: 1258078 - RNA, 19 nt, Homo sapiens
  misc_RNA (1)...(19): siRNA sense strand
ccaaaggugggaaagagau

SEQ ID NO: 1258079 - RNA, 19 nt, Homo sapiens
  misc_RNA (1)...(19): siRNA sense strand
ucacgcccauuauaaacca

SEQ ID NO: 1258080 - RNA, 19 nt, Homo sapiens
  misc_RNA (1)...(19): siRNA sense strand
cagaucugauggacuacga

SEQ ID NO: 1258081 - RNA, 19 nt, Homo sapiens
  misc_RNA (1)...(19): siRNA sense strand
gauggcagaagcuguucaa

SEQ ID NO: 1258082 - RNA, 19 nt, Homo sapiens
  misc_RNA (1)...(19): siRNA sense strand
cuuggaauauggaaucaca

SEQ ID NO: 1258083 - RNA, 19 nt, Homo sapiens
  misc_RNA (1)...(19): siRNA sense strand
ggaauauggaaucacaagu

SEQ ID NO: 1258084 - RNA, 19 nt, Homo sapiens
  misc_RNA (1)...(19): siRNA sense strand
aggcgaaguuacucaagga

SEQ ID NO: 1258085 - RNA, 19 nt, Homo sapiens
  misc_RNA (1)...(19): siRNA sense strand
gggcuggacaccaccauca

SEQ ID NO: 1258086 - RNA, 19 nt, Homo sapiens
  misc_RNA (1)...(19): siRNA sense strand
gaggacacgggcaccuuug

SEQ ID NO: 1258087 - RNA, 19 nt, Homo sapiens
  misc_RNA (1)...(19): siRNA sense strand
gucuaucacgcccauuaua

SEQ ID NO: 1258088 - RNA, 19 nt, Homo sapiens
  misc_RNA (1)...(19): siRNA sense strand
ccacaucuacgccauuggu

SEQ ID NO: 1258089 - RNA, 19 nt, Homo sapiens
  misc_RNA (1)...(19): siRNA sense strand
ggacagaaaagucaaguac

SEQ ID NO: 1258090 - RNA, 19 nt, Homo sapiens
  misc_RNA (1)...(19): siRNA sense strand
ggucuaucacgcccauuau

SEQ ID NO: 1258091 - RNA, 19 nt, Homo sapiens
  misc_RNA (1)...(19): siRNA sense strand
aaaaucacgugaaauccuu

SEQ ID NO: 1258092 - RNA, 19 nt, Homo sapiens
  misc_RNA (1)...(19): siRNA sense strand
gccaaaggugggaaagaga

SEQ ID NO: 1258093 - RNA, 19 nt, Homo sapiens
  misc_RNA (1)...(19): siRNA sense strand
cacgugaaauccuugaacu

SEQ ID NO: 1258094 - RNA, 19 nt, Homo sapiens
  misc_RNA (1)...(19): siRNA sense strand
aggagcauguugaggucua

SEQ ID NO: 1258095 - RNA, 19 nt, Homo sapiens
  misc_RNA (1)...(19): siRNA sense strand
ugccaaaggugggaaagag

SEQ ID NO: 1258096 - RNA, 19 nt, Homo sapiens
  misc_RNA (1)...(19): siRNA sense strand
uguccuccauggucauaga

SEQ ID NO: 1258097 - RNA, 19 nt, Homo sapiens
  misc_RNA (1)...(19): siRNA sense strand
gcuggacaccaccaucaug

SEQ ID NO: 1258098 - RNA, 19 nt, Homo sapiens
  misc_RNA (1)...(19): siRNA sense strand
ccgaucacaucaucauugc

SEQ ID NO: 1258099 - RNA, 19 nt, Homo sapiens
  misc_RNA (1)...(19): siRNA sense strand
gucagccgaucacaucauc

SEQ ID NO: 1258100 - RNA, 19 nt, Homo sapiens
  misc_RNA (1)...(19): siRNA sense strand
ucugauggacuacgacaau

SEQ ID NO: 1258101 - RNA, 19 nt, Homo sapiens
  misc_RNA (1)...(19): siRNA sense strand
cgaaguuacucaaggauuu

SEQ ID NO: 1258102 - RNA, 19 nt, Homo sapiens
  misc_RNA (1)...(19): siRNA sense strand
gaagauggcagaagcuguu

SEQ ID NO: 1258103 - RNA, 19 nt, Homo sapiens
  misc_RNA (1)...(19): siRNA sense strand
gaucacaucaucauugcua

SEQ ID NO: 1258104 - RNA, 19 nt, Homo sapiens
  misc_RNA (1)...(19): siRNA sense strand
gaaagagauucugcuguca

SEQ ID NO: 1258105 - RNA, 19 nt, Homo sapiens
  misc_RNA (1)...(19): siRNA sense strand
gagaugcaucccaguguua

SEQ ID NO: 1258106 - RNA, 19 nt, Homo sapiens
  misc_RNA (1)...(19): siRNA sense strand
gaauauggaaucacaagug

SEQ ID NO: 1258107 - RNA, 19 nt, Homo sapiens
  misc_RNA (1)...(19): siRNA sense strand
ccgcaugacuggaggaaga

SEQ ID NO: 1258108 - RNA, 19 nt, Homo sapiens
  misc_RNA (1)...(19): siRNA sense strand
gaaggaauccccuggaaaa

SEQ ID NO: 1258109 - RNA, 19 nt, Homo sapiens
  misc_RNA (1)...(19): siRNA sense strand
gcaucccaguguuauguaa

SEQ ID NO: 1258110 - RNA, 19 nt, Homo sapiens
  misc_RNA (1)...(19): siRNA sense strand
ggcagaagcuguucaaaau

SEQ ID NO: 1258111 - RNA, 19 nt, Homo sapiens
  misc_RNA (1)...(19): siRNA sense strand
gucaaguacuuuaacauca

SEQ ID NO: 1258112 - RNA, 19 nt, Homo sapiens
  misc_RNA (1)...(19): siRNA sense strand
cgagaugcaucccaguguu

SEQ ID NO: 1258113 - RNA, 19 nt, Homo sapiens
  misc_RNA (1)...(19): siRNA sense strand
ggaggacacgggcaccuuu

SEQ ID NO: 1258114 - RNA, 19 nt, Homo sapiens
  misc_RNA (1)...(19): siRNA sense strand
ccaguguuauguaaagaug

SEQ ID NO: 1258115 - RNA, 19 nt, Homo sapiens
  misc_RNA (1)...(19): siRNA sense strand
gaaguuacucaaggauuug

SEQ ID NO: 1258116 - RNA, 19 nt, Homo sapiens
  misc_RNA (1)...(19): siRNA sense strand
cacaugcucugaggaggua

SEQ ID NO: 1258117 - RNA, 19 nt, Homo sapiens
  misc_RNA (1)...(19): siRNA sense strand
caggucagcgggacuauga

SEQ ID NO: 1258118 - RNA, 19 nt, Homo sapiens
  misc_RNA (1)...(19): siRNA sense strand
uagagcacauggcaucuca

SEQ ID NO: 1258119 - RNA, 19 nt, Homo sapiens
  misc_RNA (1)...(19): siRNA sense strand
ucuaucacgcccauuauaa

SEQ ID NO: 1258120 - RNA, 19 nt, Homo sapiens
  misc_RNA (1)...(19): siRNA sense strand
ugggaggccugauccaaga

SEQ ID NO: 1258121 - RNA, 19 nt, Homo sapiens
  misc_RNA (1)...(19): siRNA sense strand
ggagaaggcugggguagau

SEQ ID NO: 1258122 - RNA, 19 nt, Homo sapiens
  misc_RNA (1)...(19): siRNA sense strand
gaagucugaauuuggagaa

SEQ ID NO: 1258123 - RNA, 19 nt, Homo sapiens
  misc_RNA (1)...(19): siRNA sense strand
gauggacuacgacaauguu

SEQ ID NO: 1258124 - RNA, 19 nt, Homo sapiens
  misc_RNA (1)...(19): siRNA sense strand
cagaagcuguucaaaauca

SEQ ID NO: 1258125 - RNA, 19 nt, Homo sapiens
  misc_RNA (1)...(19): siRNA sense strand
gacaggcugcugaggguaa

SEQ ID NO: 1258126 - RNA, 19 nt, Homo sapiens
  misc_RNA (1)...(19): siRNA sense strand
caaaggugggaaagagauu

SEQ ID NO: 1258127 - RNA, 19 nt, Homo sapiens
  misc_RNA (1)...(19): siRNA sense strand
gcgaaguuacucaaggauu

SEQ ID NO: 1258128 - RNA, 19 nt, Homo sapiens
  misc_RNA (1)...(19): siRNA sense strand
gccgaucacaucaucauug

SEQ ID NO: 1258129 - RNA, 19 nt, Homo sapiens
  misc_RNA (1)...(19): siRNA sense strand
caacgcaggcgaaguuacu

SEQ ID NO: 1258130 - RNA, 19 nt, Homo sapiens
  misc_RNA (1)...(19): siRNA sense strand
ggagcauguugaggucuau

SEQ ID NO: 1258131 - RNA, 19 nt, Homo sapiens
  misc_RNA (1)...(19): siRNA sense strand
cuaucacgcccauuauaaa

SEQ ID NO: 1258132 - RNA, 19 nt, Homo sapiens
  misc_RNA (1)...(19): siRNA sense strand
cacgguggcuggacgagau

SEQ ID NO: 1258133 - RNA, 19 nt, Homo sapiens
  misc_RNA (1)...(19): siRNA sense strand
gcucugaggagguagucaa

SEQ ID NO: 1258134 - RNA, 19 nt, Homo sapiens
  misc_RNA (1)...(19): siRNA sense strand
gauggcagaagcuguucaa

SEQ ID NO: 1258135 - RNA, 19 nt, Homo sapiens
  misc_RNA (1)...(19): siRNA sense strand
ucacgcccauuauaaacca

SEQ ID NO: 1258136 - RNA, 19 nt, Homo sapiens
  misc_RNA (1)...(19): siRNA sense strand
cagaucugauggacuacga

SEQ ID NO: 1258137 - RNA, 19 nt, Homo sapiens
  misc_RNA (1)...(19): siRNA sense strand
cuuggaauauggaaucaca

SEQ ID NO: 1258138 - RNA, 19 nt, Homo sapiens
  misc_RNA (1)...(19): siRNA sense strand
ccaaaggugggaaagagau

SEQ ID NO: 1258139 - RNA, 19 nt, Homo sapiens
  misc_RNA (1)...(19): siRNA sense strand
ggaauauggaaucacaagu

SEQ ID NO: 1258140 - RNA, 19 nt, Homo sapiens
  misc_RNA (1)...(19): siRNA sense strand
aggcgaaguuacucaagga

SEQ ID NO: 1258141 - RNA, 19 nt, Homo sapiens
  misc_RNA (1)...(19): siRNA sense strand
gggcuggacaccaccauca

SEQ ID NO: 1258142 - RNA, 19 nt, Homo sapiens
  misc_RNA (1)...(19): siRNA sense strand
gaggacacgggcaccuuug

SEQ ID NO: 1258143 - RNA, 19 nt, Homo sapiens
  misc_RNA (1)...(19): siRNA sense strand
gucuaucacgcccauuaua

SEQ ID NO: 1258144 - RNA, 19 nt, Homo sapiens
  misc_RNA (1)...(19): siRNA sense strand
ccacaucuacgccauuggu

SEQ ID NO: 1258145 - RNA, 19 nt, Homo sapiens
  misc_RNA (1)...(19): siRNA sense strand
ggacagaaaagucaaguac

SEQ ID NO: 1258146 - RNA, 19 nt, Homo sapiens
  misc_RNA (1)...(19): siRNA sense strand
ggucuaucacgcccauuau

SEQ ID NO: 1258147 - RNA, 19 nt, Homo sapiens
  misc_RNA (1)...(19): siRNA sense strand
aaaaucacgugaaauccuu

SEQ ID NO: 1258148 - RNA, 19 nt, Homo sapiens
  misc_RNA (1)...(19): siRNA sense strand
cacgugaaauccuugaacu

SEQ ID NO: 1258149 - RNA, 19 nt, Homo sapiens
  misc_RNA (1)...(19): siRNA sense strand
aggagcauguugaggucua

SEQ ID NO: 1258150 - RNA, 19 nt, Homo sapiens
  misc_RNA (1)...(19): siRNA sense strand
ggacuacguggaaccuucu

SEQ ID NO: 1258151 - RNA, 19 nt, Homo sapiens
  misc_RNA (1)...(19): siRNA sense strand
gccaaaggugggaaagaga

SEQ ID NO: 1258152 - RNA, 19 nt, Homo sapiens
  misc_RNA (1)...(19): siRNA sense strand
ugccaaaggugggaaagag

SEQ ID NO: 1258153 - RNA, 19 nt, Homo sapiens
  misc_RNA (1)...(19): siRNA sense strand
uguccuccauggucauaga

SEQ ID NO: 1258154 - RNA, 19 nt, Homo sapiens
  misc_RNA (1)...(19): siRNA sense strand
gcuggacaccaccaucaug

SEQ ID NO: 1258155 - RNA, 19 nt, Homo sapiens
  misc_RNA (1)...(19): siRNA sense strand
ccgaucacaucaucauugc

SEQ ID NO: 1258156 - RNA, 19 nt, Homo sapiens
  misc_RNA (1)...(19): siRNA sense strand
gucagccgaucacaucauc

SEQ ID NO: 1258157 - RNA, 19 nt, Homo sapiens
  misc_RNA (1)...(19): siRNA sense strand
ggucagcgggacuaugauc

SEQ ID NO: 1258158 - RNA, 19 nt, Homo sapiens
  misc_RNA (1)...(19): siRNA sense strand
ucugauggacuacgacaau

SEQ ID NO: 1258159 - RNA, 19 nt, Homo sapiens
  misc_RNA (1)...(19): siRNA sense strand
gaacaagcauccaaagaga

SEQ ID NO: 1258160 - RNA, 19 nt, Homo sapiens
  misc_RNA (1)...(19): siRNA sense strand
guagauggcuugaauuuua

SEQ ID NO: 1258161 - RNA, 19 nt, Homo sapiens
  misc_RNA (1)...(19): siRNA sense strand
gaaaguggacccagugauu

SEQ ID NO: 1258162 - RNA, 19 nt, Homo sapiens
  misc_RNA (1)...(19): siRNA sense strand
gaaugugaaugaccucuug

SEQ ID NO: 1258163 - RNA, 19 nt, Homo sapiens
  misc_RNA (1)...(19): siRNA sense strand
gcacguacuucucccauca

SEQ ID NO: 1258164 - RNA, 19 nt, Homo sapiens
  misc_RNA (1)...(19): siRNA sense strand
gaugugaguuggauaagga

SEQ ID NO: 1258165 - RNA, 19 nt, Homo sapiens
  misc_RNA (1)...(19): siRNA sense strand
ugaaugaccucuugaagca

SEQ ID NO: 1258166 - RNA, 19 nt, Homo sapiens
  misc_RNA (1)...(19): siRNA sense strand
caggagacgugucaacauu

SEQ ID NO: 1258167 - RNA, 19 nt, Homo sapiens
  misc_RNA (1)...(19): siRNA sense strand
ugagguuucuuaccaaauu

SEQ ID NO: 1258168 - RNA, 19 nt, Homo sapiens
  misc_RNA (1)...(19): siRNA sense strand
gugaagaacuugaaagacu

SEQ ID NO: 1258169 - RNA, 19 nt, Homo sapiens
  misc_RNA (1)...(19): siRNA sense strand
ucaaugcacucucuguaug

SEQ ID NO: 1258170 - RNA, 19 nt, Homo sapiens
  misc_RNA (1)...(19): siRNA sense strand
gagagugguuuggacauug

SEQ ID NO: 1258171 - RNA, 19 nt, Homo sapiens
  misc_RNA (1)...(19): siRNA sense strand
ugaagaacuugaaagacuu

SEQ ID NO: 1258172 - RNA, 19 nt, Homo sapiens
  misc_RNA (1)...(19): siRNA sense strand
gaaggugcuuuacguggau

SEQ ID NO: 1258173 - RNA, 19 nt, Homo sapiens
  misc_RNA (1)...(19): siRNA sense strand
ccacaggaucuuaguguuu

SEQ ID NO: 1258174 - RNA, 19 nt, Homo sapiens
  misc_RNA (1)...(19): siRNA sense strand
ggguuuagauguauacaca

SEQ ID NO: 1258175 - RNA, 19 nt, Homo sapiens
  misc_RNA (1)...(19): siRNA sense strand
guacaguaaugccuuugau

SEQ ID NO: 1258176 - RNA, 19 nt, Homo sapiens
  misc_RNA (1)...(19): siRNA sense strand
ccacucagccuuuaaccuu

SEQ ID NO: 1258177 - RNA, 19 nt, Homo sapiens
  misc_RNA (1)...(19): siRNA sense strand
guaaugccuuugauguguu

SEQ ID NO: 1258178 - RNA, 19 nt, Homo sapiens
  misc_RNA (1)...(19): siRNA sense strand
ccaaguagcacuaaauuuu

SEQ ID NO: 1258179 - RNA, 19 nt, Homo sapiens
  misc_RNA (1)...(19): siRNA sense strand
gcaguauucuaaccagcaa

SEQ ID NO: 1258180 - RNA, 19 nt, Homo sapiens
  misc_RNA (1)...(19): siRNA sense strand
ccaguacaguaaugccuuu

SEQ ID NO: 1258181 - RNA, 19 nt, Homo sapiens
  misc_RNA (1)...(19): siRNA sense strand
cagcaauuccagccuguua

SEQ ID NO: 1258182 - RNA, 19 nt, Homo sapiens
  misc_RNA (1)...(19): siRNA sense strand
gaaauccaaguagcacuaa

SEQ ID NO: 1258183 - RNA, 19 nt, Homo sapiens
  misc_RNA (1)...(19): siRNA sense strand
acucagccuuuaaccuuua

SEQ ID NO: 1258184 - RNA, 19 nt, Homo sapiens
  misc_RNA (1)...(19): siRNA sense strand
caaguucggcucuaccaaa

SEQ ID NO: 1258185 - RNA, 19 nt, Homo sapiens
  misc_RNA (1)...(19): siRNA sense strand
ggagacgugucaacauuuu

SEQ ID NO: 1258186 - RNA, 19 nt, Homo sapiens
  misc_RNA (1)...(19): siRNA sense strand
cacaggaucuuaguguuug

SEQ ID NO: 1258187 - RNA, 19 nt, Homo sapiens
  misc_RNA (1)...(19): siRNA sense strand
gaccagugaaggugcuuua

SEQ ID NO: 1258188 - RNA, 19 nt, Homo sapiens
  misc_RNA (1)...(19): siRNA sense strand
gcuuaaauaacaugcagua

SEQ ID NO: 1258189 - RNA, 19 nt, Homo sapiens
  misc_RNA (1)...(19): siRNA sense strand
gcuguaagcccuaccuuca

SEQ ID NO: 1258190 - RNA, 19 nt, Homo sapiens
  misc_RNA (1)...(19): siRNA sense strand
gaucgacccauuugagguu

SEQ ID NO: 1258191 - RNA, 19 nt, Homo sapiens
  misc_RNA (1)...(19): siRNA sense strand
gaaaagccauacaaaggau

SEQ ID NO: 1258192 - RNA, 19 nt, Homo sapiens
  misc_RNA (1)...(19): siRNA sense strand
gcaauuccagccuguuaug

SEQ ID NO: 1258193 - RNA, 19 nt, Homo sapiens
  misc_RNA (1)...(19): siRNA sense strand
gacccagccucaucagugu

SEQ ID NO: 1258194 - RNA, 19 nt, Homo sapiens
  misc_RNA (1)...(19): siRNA sense strand
uaaugccuuugauguguuu

SEQ ID NO: 1258195 - RNA, 19 nt, Homo sapiens
  misc_RNA (1)...(19): siRNA sense strand
gggcacugguauccugaaa

SEQ ID NO: 1258196 - RNA, 19 nt, Homo sapiens
  misc_RNA (1)...(19): siRNA sense strand
gagguuucuuaccaaauug

SEQ ID NO: 1258197 - RNA, 19 nt, Homo sapiens
  misc_RNA (1)...(19): siRNA sense strand
aaccucggcuugaauguga

SEQ ID NO: 1258198 - RNA, 19 nt, Homo sapiens
  misc_RNA (1)...(19): siRNA sense strand
uguaagcccuaccuucaug

SEQ ID NO: 1258199 - RNA, 19 nt, Homo sapiens
  misc_RNA (1)...(19): siRNA sense strand
ugaaauccaaguagcacua

SEQ ID NO: 1258200 - RNA, 19 nt, Homo sapiens
  misc_RNA (1)...(19): siRNA sense strand
cauuugagguuucuuacca

SEQ ID NO: 1258201 - RNA, 19 nt, Homo sapiens
  misc_RNA (1)...(19): siRNA sense strand
gagaaaguggacccaguga

SEQ ID NO: 1258202 - RNA, 19 nt, Homo sapiens
  misc_RNA (1)...(19): siRNA sense strand
gcacugguauccugaaaag

SEQ ID NO: 1258203 - RNA, 19 nt, Homo sapiens
  misc_RNA (1)...(19): siRNA sense strand
agagugguuuggacauuga

SEQ ID NO: 1258204 - RNA, 19 nt, Homo sapiens
  misc_RNA (1)...(19): siRNA sense strand
agagagugguuuggacauu

SEQ ID NO: 1258205 - RNA, 19 nt, Homo sapiens
  misc_RNA (1)...(19): siRNA sense strand
gccacaggaucuuaguguu

SEQ ID NO: 1258206 - RNA, 19 nt, Homo sapiens
  misc_RNA (1)...(19): siRNA sense strand
ugaacaagcauccaaagag

SEQ ID NO: 1258207 - RNA, 19 nt, Homo sapiens
  misc_RNA (1)...(19): siRNA sense strand
agccaucucuuccucaaug

SEQ ID NO: 1258208 - RNA, 19 nt, Homo sapiens
  misc_RNA (1)...(19): siRNA sense strand
aaagccaucucuuccucaa

SEQ ID NO: 1258209 - RNA, 19 nt, Homo sapiens
  misc_RNA (1)...(19): siRNA sense strand
guguuuggaucgacccauu

SEQ ID NO: 1258210 - RNA, 19 nt, Homo sapiens
  misc_RNA (1)...(19): siRNA sense strand
aguaaugccuuugaugugu

SEQ ID NO: 1258211 - RNA, 19 nt, Homo sapiens
  misc_RNA (1)...(19): siRNA sense strand
ugcuuuacguggaugauaa

SEQ ID NO: 1258212 - RNA, 19 nt, Homo sapiens
  misc_RNA (1)...(19): siRNA sense strand
gauugaacaagcauccaaa

SEQ ID NO: 1258213 - RNA, 19 nt, Homo sapiens
  misc_RNA (1)...(19): siRNA sense strand
ggaucgggguuuagaugua

SEQ ID NO: 1258214 - RNA, 19 nt, Homo sapiens
  misc_RNA (1)...(19): siRNA sense strand
uaagugacccagccucauc

SEQ ID NO: 1258215 - RNA, 19 nt, Homo sapiens
  misc_RNA (1)...(19): siRNA sense strand
cagugaaggugcuuuacgu

SEQ ID NO: 1258216 - RNA, 19 nt, Homo sapiens
  misc_RNA (1)...(19): siRNA sense strand
aauaugaagggcacuggua

SEQ ID NO: 1258217 - RNA, 19 nt, Homo sapiens
  misc_RNA (1)...(19): siRNA sense strand
ccucaaugcacucucugua

SEQ ID NO: 1258218 - RNA, 19 nt, Homo sapiens
  misc_RNA (1)...(19): siRNA sense strand
ggaugugaguuggauaagg

SEQ ID NO: 1258219 - RNA, 19 nt, Homo sapiens
  misc_RNA (1)...(19): siRNA sense strand
acaguaaugccuuugaugu

SEQ ID NO: 1258220 - RNA, 19 nt, Homo sapiens
  misc_RNA (1)...(19): siRNA sense strand
ccucaguccucuccaguac

SEQ ID NO: 1258221 - RNA, 19 nt, Homo sapiens
  misc_RNA (1)...(19): siRNA sense strand
guaguaguaccaauggaau

SEQ ID NO: 1258222 - RNA, 19 nt, Homo sapiens
  misc_RNA (1)...(19): siRNA sense strand
cacucagccuuuaaccuuu

SEQ ID NO: 1258223 - RNA, 19 nt, Homo sapiens
  misc_RNA (1)...(19): siRNA sense strand
ccgguccacucagccuuua

SEQ ID NO: 1258224 - RNA, 19 nt, Homo sapiens
  misc_RNA (1)...(19): siRNA sense strand
uggcuugaauuuuagcuua

SEQ ID NO: 1258225 - RNA, 19 nt, Homo sapiens
  misc_RNA (1)...(19): siRNA sense strand
cagggucaagguaguagua

SEQ ID NO: 1258226 - RNA, 19 nt, Homo sapiens
  misc_RNA (1)...(19): siRNA sense strand
gcagcaacaacagcagaaa

SEQ ID NO: 1258227 - RNA, 19 nt, Homo sapiens
  misc_RNA (1)...(19): siRNA sense strand
aaaguggacccagugauug

SEQ ID NO: 1258228 - RNA, 19 nt, Homo sapiens
  misc_RNA (1)...(19): siRNA sense strand
ucacucugcugcuguaagc

SEQ ID NO: 1258229 - RNA, 19 nt, Homo sapiens
  misc_RNA (1)...(19): siRNA sense strand
cuaccaaaaugaagaauag

SEQ ID NO: 1258230 - RNA, 19 nt, Homo sapiens
  misc_RNA (1)...(19): siRNA sense strand
cguggaugauaauaaugaa

SEQ ID NO: 1258231 - RNA, 19 nt, Homo sapiens
  misc_RNA (1)...(19): siRNA sense strand
guacuucucccaucaaccu

SEQ ID NO: 1258232 - RNA, 19 nt, Homo sapiens
  misc_RNA (1)...(19): siRNA sense strand
aauaguggccguagcaaca

SEQ ID NO: 1258233 - RNA, 19 nt, Homo sapiens
  misc_RNA (1)...(19): siRNA sense strand
ccaccaaguucggcucuac

SEQ ID NO: 1258234 - RNA, 19 nt, Homo sapiens
  misc_RNA (1)...(19): siRNA sense strand
gcaaucugccacaggaucu

SEQ ID NO: 1258235 - RNA, 19 nt, Homo sapiens
  misc_RNA (1)...(19): siRNA sense strand
uaguaccaauggaauguuc

SEQ ID NO: 1258236 - RNA, 19 nt, Homo sapiens
  misc_RNA (1)...(19): siRNA sense strand
caccacagcagcaacaaca

SEQ ID NO: 1258237 - RNA, 19 nt, Homo sapiens
  misc_RNA (1)...(19): siRNA sense strand
aaauggaugugaguuggau

SEQ ID NO: 1258238 - RNA, 19 nt, Homo sapiens
  misc_RNA (1)...(19): siRNA sense strand
ggacccagugauugaacaa

SEQ ID NO: 1258239 - RNA, 19 nt, Homo sapiens
  misc_RNA (1)...(19): siRNA sense strand
ccucuccaguacaguaaug

SEQ ID NO: 1258240 - RNA, 19 nt, Homo sapiens
  misc_RNA (1)...(19): siRNA sense strand
gaucgggguuuagauguau

SEQ ID NO: 1258241 - RNA, 19 nt, Homo sapiens
  misc_RNA (1)...(19): siRNA sense strand
uaacaugcaguauucuaac

SEQ ID NO: 1258242 - RNA, 19 nt, Homo sapiens
  misc_RNA (1)...(19): siRNA sense strand
uacaaaggaucgggguuua

SEQ ID NO: 1258243 - RNA, 19 nt, Homo sapiens
  misc_RNA (1)...(19): siRNA sense strand
ccuauggaggccucaauga

SEQ ID NO: 1258244 - RNA, 19 nt, Homo sapiens
  misc_RNA (1)...(19): siRNA sense strand
ugauguguuugcagccuau

SEQ ID NO: 1258245 - RNA, 19 nt, Homo sapiens
  misc_RNA (1)...(19): siRNA sense strand
ucaguccucuccaguacag

SEQ ID NO: 1258246 - RNA, 19 nt, Homo sapiens
  misc_RNA (1)...(19): siRNA sense strand
aaauccaaguagcacuaaa

SEQ ID NO: 1258247 - RNA, 19 nt, Homo sapiens
  misc_RNA (1)...(19): siRNA sense strand
ugaguuggauaaggagauc

SEQ ID NO: 1258248 - RNA, 19 nt, Homo sapiens
  misc_RNA (1)...(19): siRNA sense strand
gaagcagaaagccaucucu

SEQ ID NO: 1258249 - RNA, 19 nt, Homo sapiens
  misc_RNA (1)...(19): siRNA sense strand
uuguagauggcuugaauuu

SEQ ID NO: 1258250 - RNA, 19 nt, Homo sapiens
  misc_RNA (1)...(19): siRNA sense strand
caguaaugccuuugaugug

SEQ ID NO: 1258251 - RNA, 19 nt, Homo sapiens
  misc_RNA (1)...(19): siRNA sense strand
gugcuuuacguggaugaua

SEQ ID NO: 1258252 - RNA, 19 nt, Homo sapiens
  misc_RNA (1)...(19): siRNA sense strand
aauaugcagggucaaggua

SEQ ID NO: 1258253 - RNA, 19 nt, Homo sapiens
  misc_RNA (1)...(19): siRNA sense strand
caaccucggcuugaaugug

SEQ ID NO: 1258254 - RNA, 19 nt, Homo sapiens
  misc_RNA (1)...(19): siRNA sense strand
gaaacuaugugcgggauga

SEQ ID NO: 1258255 - RNA, 19 nt, Homo sapiens
  misc_RNA (1)...(19): siRNA sense strand
ggagcuggaaguacaagua

SEQ ID NO: 1258256 - RNA, 19 nt, Homo sapiens
  misc_RNA (1)...(19): siRNA sense strand
ugaucuaccugcacacuug

SEQ ID NO: 1258257 - RNA, 19 nt, Homo sapiens
  misc_RNA (1)...(19): siRNA sense strand
ggccaccguuucugcgaua

SEQ ID NO: 1258258 - RNA, 19 nt, Homo sapiens
  misc_RNA (1)...(19): siRNA sense strand
gcuggaaguacaaguauug

SEQ ID NO: 1258259 - RNA, 19 nt, Homo sapiens
  misc_RNA (1)...(19): siRNA sense strand
cauccgugcugcuguugaa

SEQ ID NO: 1258260 - RNA, 19 nt, Homo sapiens
  misc_RNA (1)...(19): siRNA sense strand
gagcuggaaguacaaguau

SEQ ID NO: 1258261 - RNA, 19 nt, Homo sapiens
  misc_RNA (1)...(19): siRNA sense strand
gucauucccugcccuaauc

SEQ ID NO: 1258262 - RNA, 19 nt, Homo sapiens
  misc_RNA (1)...(19): siRNA sense strand
ccuaaucgcugccccauga

SEQ ID NO: 1258263 - RNA, 19 nt, Homo sapiens
  misc_RNA (1)...(19): siRNA sense strand
gcgggaugaugcagucuuc

SEQ ID NO: 1258264 - RNA, 19 nt, Homo sapiens
  misc_RNA (1)...(19): siRNA sense strand
gaauaccugcagcuucaau

SEQ ID NO: 1258265 - RNA, 19 nt, Homo sapiens
  misc_RNA (1)...(19): siRNA sense strand
acuacaaguuccuggagaa

SEQ ID NO: 1258266 - RNA, 19 nt, Homo sapiens
  misc_RNA (1)...(19): siRNA sense strand
ucucugggcuuugguuauc

SEQ ID NO: 1258267 - RNA, 19 nt, Homo sapiens
  misc_RNA (1)...(19): siRNA sense strand
ggacuaugccaagaucuac

SEQ ID NO: 1258268 - RNA, 19 nt, Homo sapiens
  misc_RNA (1)...(19): siRNA sense strand
cuucauccgugcugcuguu

SEQ ID NO: 1258269 - RNA, 19 nt, Homo sapiens
  misc_RNA (1)...(19): siRNA sense strand
acccggagcuggaaguaca

SEQ ID NO: 1258270 - RNA, 19 nt, Homo sapiens
  misc_RNA (1)...(19): siRNA sense strand
ccucuggacuaugccaaga

SEQ ID NO: 1258271 - RNA, 19 nt, Homo sapiens
  misc_RNA (1)...(19): siRNA sense strand
gcgccucaagugcgaguuu

SEQ ID NO: 1258272 - RNA, 19 nt, Homo sapiens
  misc_RNA (1)...(19): siRNA sense strand
gccacuacgucaucuacag

SEQ ID NO: 1258273 - RNA, 19 nt, Homo sapiens
  misc_RNA (1)...(19): siRNA sense strand
uggcuucgacuacaaguuc

SEQ ID NO: 1258274 - RNA, 19 nt, Homo sapiens
  misc_RNA (1)...(19): siRNA sense strand
guucucugggcuuugguua

SEQ ID NO: 1258275 - RNA, 19 nt, Homo sapiens
  misc_RNA (1)...(19): siRNA sense strand
gaaacuaugugcgggauga

SEQ ID NO: 1258276 - RNA, 19 nt, Homo sapiens
  misc_RNA (1)...(19): siRNA sense strand
ggagcuggaaguacaagua

SEQ ID NO: 1258277 - RNA, 19 nt, Homo sapiens
  misc_RNA (1)...(19): siRNA sense strand
ugaucuaccugcacacuug

SEQ ID NO: 1258278 - RNA, 19 nt, Homo sapiens
  misc_RNA (1)...(19): siRNA sense strand
ggccaccguuucugcgaua

SEQ ID NO: 1258279 - RNA, 19 nt, Homo sapiens
  misc_RNA (1)...(19): siRNA sense strand
gcuggaaguacaaguauug

SEQ ID NO: 1258280 - RNA, 19 nt, Homo sapiens
  misc_RNA (1)...(19): siRNA sense strand
cauccgugcugcuguugaa

SEQ ID NO: 1258281 - RNA, 19 nt, Homo sapiens
  misc_RNA (1)...(19): siRNA sense strand
gagcuggaaguacaaguau

SEQ ID NO: 1258282 - RNA, 19 nt, Homo sapiens
  misc_RNA (1)...(19): siRNA sense strand
gucauucccugcccuaauc

SEQ ID NO: 1258283 - RNA, 19 nt, Homo sapiens
  misc_RNA (1)...(19): siRNA sense strand
ccuaaucgcugccccauga

SEQ ID NO: 1258284 - RNA, 19 nt, Homo sapiens
  misc_RNA (1)...(19): siRNA sense strand
gcgggaugaugcagucuuc

SEQ ID NO: 1258285 - RNA, 19 nt, Homo sapiens
  misc_RNA (1)...(19): siRNA sense strand
gaauaccugcagcuucaau

SEQ ID NO: 1258286 - RNA, 19 nt, Homo sapiens
  misc_RNA (1)...(19): siRNA sense strand
acuacaaguuccuggagaa

SEQ ID NO: 1258287 - RNA, 19 nt, Homo sapiens
  misc_RNA (1)...(19): siRNA sense strand
ucucugggcuuugguuauc

SEQ ID NO: 1258288 - RNA, 19 nt, Homo sapiens
  misc_RNA (1)...(19): siRNA sense strand
ggacuaugccaagaucuac

SEQ ID NO: 1258289 - RNA, 19 nt, Homo sapiens
  misc_RNA (1)...(19): siRNA sense strand
cuucauccgugcugcuguu

SEQ ID NO: 1258290 - RNA, 19 nt, Homo sapiens
  misc_RNA (1)...(19): siRNA sense strand
acccggagcuggaaguaca

SEQ ID NO: 1258291 - RNA, 19 nt, Homo sapiens
  misc_RNA (1)...(19): siRNA sense strand
ccucuggacuaugccaaga

SEQ ID NO: 1258292 - RNA, 19 nt, Homo sapiens
  misc_RNA (1)...(19): siRNA sense strand
gcgccucaagugcgaguuu

SEQ ID NO: 1258293 - RNA, 19 nt, Homo sapiens
  misc_RNA (1)...(19): siRNA sense strand
gccacuacgucaucuacag

SEQ ID NO: 1258294 - RNA, 19 nt, Homo sapiens
  misc_RNA (1)...(19): siRNA sense strand
uggcuucgacuacaaguuc

SEQ ID NO: 1258295 - RNA, 19 nt, Homo sapiens
  misc_RNA (1)...(19): siRNA sense strand
guucucugggcuuugguua

SEQ ID NO: 1258296 - RNA, 19 nt, Homo sapiens
  misc_RNA (1)...(19): siRNA sense strand
ggaaugagcucuucuacug

SEQ ID NO: 1258297 - RNA, 19 nt, Homo sapiens
  misc_RNA (1)...(19): siRNA sense strand
caucauuucuuucuacuuc

SEQ ID NO: 1258298 - RNA, 19 nt, Homo sapiens
  misc_RNA (1)...(19): siRNA sense strand
gcuggacgcuuucgaugga

SEQ ID NO: 1258299 - RNA, 19 nt, Homo sapiens
  misc_RNA (1)...(19): siRNA sense strand
gagccacgcuguucuucca

SEQ ID NO: 1258300 - RNA, 19 nt, Homo sapiens
  misc_RNA (1)...(19): siRNA sense strand
ggccugcucuguucaccuu

SEQ ID NO: 1258301 - RNA, 19 nt, Homo sapiens
  misc_RNA (1)...(19): siRNA sense strand
gaccgcugcuccaccaugu

SEQ ID NO: 1258302 - RNA, 19 nt, Homo sapiens
  misc_RNA (1)...(19): siRNA sense strand
gucacaagaugaucgacuu

SEQ ID NO: 1258303 - RNA, 19 nt, Homo sapiens
  misc_RNA (1)...(19): siRNA sense strand
ccaugugccuguuggucaa

SEQ ID NO: 1258304 - RNA, 19 nt, Homo sapiens
  misc_RNA (1)...(19): siRNA sense strand
cagcaugaguuuggaugug

SEQ ID NO: 1258305 - RNA, 19 nt, Homo sapiens
  misc_RNA (1)...(19): siRNA sense strand
acgcuguucuuccaaauca

SEQ ID NO: 1258306 - RNA, 19 nt, Homo sapiens
  misc_RNA (1)...(19): siRNA sense strand
cggauugucuucgccauca

SEQ ID NO: 1258307 - RNA, 19 nt, Homo sapiens
  misc_RNA (1)...(19): siRNA sense strand
gccacgcuguucuuccaaa

SEQ ID NO: 1258308 - RNA, 19 nt, Homo sapiens
  misc_RNA (1)...(19): siRNA sense strand
ccacgcuguucuuccaaau

SEQ ID NO: 1258309 - RNA, 19 nt, Homo sapiens
  misc_RNA (1)...(19): siRNA sense strand
uccucuaccuguuccauuu

SEQ ID NO: 1258310 - RNA, 19 nt, Homo sapiens
  misc_RNA (1)...(19): siRNA sense strand
guuuggauguggccaguca

SEQ ID NO: 1258311 - RNA, 19 nt, Homo sapiens
  misc_RNA (1)...(19): siRNA sense strand
uugcugaagucgcucauca

SEQ ID NO: 1258312 - RNA, 19 nt, Homo sapiens
  misc_RNA (1)...(19): siRNA sense strand
ucugagggaccuuuaguug

SEQ ID NO: 1258313 - RNA, 19 nt, Homo sapiens
  misc_RNA (1)...(19): siRNA sense strand
ggcugcaccuccacaguuc

SEQ ID NO: 1258314 - RNA, 19 nt, Homo sapiens
  misc_RNA (1)...(19): siRNA sense strand
gauugucuucgccaucauu

SEQ ID NO: 1258315 - RNA, 19 nt, Homo sapiens
  misc_RNA (1)...(19): siRNA sense strand
ccucgaggccugcucuguu

SEQ ID NO: 1258316 - RNA, 19 nt, Homo sapiens
  misc_RNA (1)...(19): siRNA sense strand
caccuugugugcugggaau

SEQ ID NO: 1258317 - RNA, 19 nt, Homo sapiens
  misc_RNA (1)...(19): siRNA sense strand
caaccuggcccugcuguac

SEQ ID NO: 1258318 - RNA, 19 nt, Homo sapiens
  misc_RNA (1)...(19): siRNA sense strand
gaccuuuaguuggcucugu

SEQ ID NO: 1258319 - RNA, 19 nt, Homo sapiens
  misc_RNA (1)...(19): siRNA sense strand
ucuucgccaucauuucuuu

SEQ ID NO: 1258320 - RNA, 19 nt, Homo sapiens
  misc_RNA (1)...(19): siRNA sense strand
gcugcucgcgcucuuaauc

SEQ ID NO: 1258321 - RNA, 19 nt, Homo sapiens
  misc_RNA (1)...(19): siRNA sense strand
gguuaugcccggauugucu

SEQ ID NO: 1258322 - RNA, 19 nt, Homo sapiens
  misc_RNA (1)...(19): siRNA sense strand
cgccaucauuucuuucuac

SEQ ID NO: 1258323 - RNA, 19 nt, Homo sapiens
  misc_RNA (1)...(19): siRNA sense strand
ggaaugagcucuucuacug

SEQ ID NO: 1258324 - RNA, 19 nt, Homo sapiens
  misc_RNA (1)...(19): siRNA sense strand
caucauuucuuucuacuuc

SEQ ID NO: 1258325 - RNA, 19 nt, Homo sapiens
  misc_RNA (1)...(19): siRNA sense strand
gcuggacgcuuucgaugga

SEQ ID NO: 1258326 - RNA, 19 nt, Homo sapiens
  misc_RNA (1)...(19): siRNA sense strand
gagccacgcuguucuucca

SEQ ID NO: 1258327 - RNA, 19 nt, Homo sapiens
  misc_RNA (1)...(19): siRNA sense strand
ggccugcucuguucaccuu

SEQ ID NO: 1258328 - RNA, 19 nt, Homo sapiens
  misc_RNA (1)...(19): siRNA sense strand
gaccgcugcuccaccaugu

SEQ ID NO: 1258329 - RNA, 19 nt, Homo sapiens
  misc_RNA (1)...(19): siRNA sense strand
gucacaagaugaucgacuu

SEQ ID NO: 1258330 - RNA, 19 nt, Homo sapiens
  misc_RNA (1)...(19): siRNA sense strand
ccaugugccuguuggucaa

SEQ ID NO: 1258331 - RNA, 19 nt, Homo sapiens
  misc_RNA (1)...(19): siRNA sense strand
cagcaugaguuuggaugug

SEQ ID NO: 1258332 - RNA, 19 nt, Homo sapiens
  misc_RNA (1)...(19): siRNA sense strand
acgcuguucuuccaaauca

SEQ ID NO: 1258333 - RNA, 19 nt, Homo sapiens
  misc_RNA (1)...(19): siRNA sense strand
cggauugucuucgccauca

SEQ ID NO: 1258334 - RNA, 19 nt, Homo sapiens
  misc_RNA (1)...(19): siRNA sense strand
gccacgcuguucuuccaaa

SEQ ID NO: 1258335 - RNA, 19 nt, Homo sapiens
  misc_RNA (1)...(19): siRNA sense strand
ccacgcuguucuuccaaau

SEQ ID NO: 1258336 - RNA, 19 nt, Homo sapiens
  misc_RNA (1)...(19): siRNA sense strand
uccucuaccuguuccauuu

SEQ ID NO: 1258337 - RNA, 19 nt, Homo sapiens
  misc_RNA (1)...(19): siRNA sense strand
guuuggauguggccaguca

SEQ ID NO: 1258338 - RNA, 19 nt, Homo sapiens
  misc_RNA (1)...(19): siRNA sense strand
uugcugaagucgcucauca

SEQ ID NO: 1258339 - RNA, 19 nt, Homo sapiens
  misc_RNA (1)...(19): siRNA sense strand
ucugagggaccuuuaguug

SEQ ID NO: 1258340 - RNA, 19 nt, Homo sapiens
  misc_RNA (1)...(19): siRNA sense strand
ggcugcaccuccacaguuc

SEQ ID NO: 1258341 - RNA, 19 nt, Homo sapiens
  misc_RNA (1)...(19): siRNA sense strand
gauugucuucgccaucauu

SEQ ID NO: 1258342 - RNA, 19 nt, Homo sapiens
  misc_RNA (1)...(19): siRNA sense strand
ccucgaggccugcucuguu

SEQ ID NO: 1258343 - RNA, 19 nt, Homo sapiens
  misc_RNA (1)...(19): siRNA sense strand
caccuugugugcugggaau

SEQ ID NO: 1258344 - RNA, 19 nt, Homo sapiens
  misc_RNA (1)...(19): siRNA sense strand
caaccuggcccugcuguac

SEQ ID NO: 1258345 - RNA, 19 nt, Homo sapiens
  misc_RNA (1)...(19): siRNA sense strand
gaccuuuaguuggcucugu

SEQ ID NO: 1258346 - RNA, 19 nt, Homo sapiens
  misc_RNA (1)...(19): siRNA sense strand
ucuucgccaucauuucuuu

SEQ ID NO: 1258347 - RNA, 19 nt, Homo sapiens
  misc_RNA (1)...(19): siRNA sense strand
gcugcucgcgcucuuaauc

SEQ ID NO: 1258348 - RNA, 19 nt, Homo sapiens
  misc_RNA (1)...(19): siRNA sense strand
gguuaugcccggauugucu

SEQ ID NO: 1258349 - RNA, 19 nt, Homo sapiens
  misc_RNA (1)...(19): siRNA sense strand
cgccaucauuucuuucuac

SEQ ID NO: 1258350 - RNA, 19 nt, Homo sapiens
  misc_RNA (1)...(19): siRNA sense strand
gaucaaagauuagccguuu

SEQ ID NO: 1258351 - RNA, 19 nt, Homo sapiens
  misc_RNA (1)...(19): siRNA sense strand
gaagagcgcuacaaaugug

SEQ ID NO: 1258352 - RNA, 19 nt, Homo sapiens
  misc_RNA (1)...(19): siRNA sense strand
ggucacaccugucccuaua

SEQ ID NO: 1258353 - RNA, 19 nt, Homo sapiens
  misc_RNA (1)...(19): siRNA sense strand
caagaacgccuacauuaaa

SEQ ID NO: 1258354 - RNA, 19 nt, Homo sapiens
  misc_RNA (1)...(19): siRNA sense strand
gagcaagacuguccuuuua

SEQ ID NO: 1258355 - RNA, 19 nt, Homo sapiens
  misc_RNA (1)...(19): siRNA sense strand
gugcgaagauuauucuaaa

SEQ ID NO: 1258356 - RNA, 19 nt, Homo sapiens
  misc_RNA (1)...(19): siRNA sense strand
caugauacccacauuaaua

SEQ ID NO: 1258357 - RNA, 19 nt, Homo sapiens
  misc_RNA (1)...(19): siRNA sense strand
ggaggaaccugcagcaaca

SEQ ID NO: 1258358 - RNA, 19 nt, Homo sapiens
  misc_RNA (1)...(19): siRNA sense strand
gccaagaacgccuacauua

SEQ ID NO: 1258359 - RNA, 19 nt, Homo sapiens
  misc_RNA (1)...(19): siRNA sense strand
gcagcuagcagaaacuaua

SEQ ID NO: 1258360 - RNA, 19 nt, Homo sapiens
  misc_RNA (1)...(19): siRNA sense strand
auaaagaggucaucaaauc

SEQ ID NO: 1258361 - RNA, 19 nt, Homo sapiens
  misc_RNA (1)...(19): siRNA sense strand
gcuagaagcucaagugcau

SEQ ID NO: 1258362 - RNA, 19 nt, Homo sapiens
  misc_RNA (1)...(19): siRNA sense strand
uaacugaccuggaggaucu

SEQ ID NO: 1258363 - RNA, 19 nt, Homo sapiens
  misc_RNA (1)...(19): siRNA sense strand
ggugacagauuacaagaug

SEQ ID NO: 1258364 - RNA, 19 nt, Homo sapiens
  misc_RNA (1)...(19): siRNA sense strand
caucaaaucucaggagguu

SEQ ID NO: 1258365 - RNA, 19 nt, Homo sapiens
  misc_RNA (1)...(19): siRNA sense strand
gcaaugcuccuggauguaa

SEQ ID NO: 1258366 - RNA, 19 nt, Homo sapiens
  misc_RNA (1)...(19): siRNA sense strand
ccaagaacgccuacauuaa

SEQ ID NO: 1258367 - RNA, 19 nt, Homo sapiens
  misc_RNA (1)...(19): siRNA sense strand
gaggguacuugcuauaaug

SEQ ID NO: 1258368 - RNA, 19 nt, Homo sapiens
  misc_RNA (1)...(19): siRNA sense strand
ccaauuagaagaacagauu

SEQ ID NO: 1258369 - RNA, 19 nt, Homo sapiens
  misc_RNA (1)...(19): siRNA sense strand
gcacaugcguuugguuuua

SEQ ID NO: 1258370 - RNA, 19 nt, Homo sapiens
  misc_RNA (1)...(19): siRNA sense strand
uuuggaaggugacagauua

SEQ ID NO: 1258371 - RNA, 19 nt, Homo sapiens
  misc_RNA (1)...(19): siRNA sense strand
ggaggguacuugcuauaau

SEQ ID NO: 1258372 - RNA, 19 nt, Homo sapiens
  misc_RNA (1)...(19): siRNA sense strand
cagaagagcauaaagguau

SEQ ID NO: 1258373 - RNA, 19 nt, Homo sapiens
  misc_RNA (1)...(19): siRNA sense strand
caacaauugugcgaagauu

SEQ ID NO: 1258374 - RNA, 19 nt, Homo sapiens
  misc_RNA (1)...(19): siRNA sense strand
aaacugagguagaugaaca

SEQ ID NO: 1258375 - RNA, 19 nt, Homo sapiens
  misc_RNA (1)...(19): siRNA sense strand
gagcacaugcguuugguuu

SEQ ID NO: 1258376 - RNA, 19 nt, Homo sapiens
  misc_RNA (1)...(19): siRNA sense strand
ggaagagcgcuacaaaugu

SEQ ID NO: 1258377 - RNA, 19 nt, Homo sapiens
  misc_RNA (1)...(19): siRNA sense strand
cccaauagcagcagcuuua

SEQ ID NO: 1258378 - RNA, 19 nt, Homo sapiens
  misc_RNA (1)...(19): siRNA sense strand
aaacaugauacccacauua

SEQ ID NO: 1258379 - RNA, 19 nt, Homo sapiens
  misc_RNA (1)...(19): siRNA sense strand
guccucaacuuauauguau

SEQ ID NO: 1258380 - RNA, 19 nt, Homo sapiens
  misc_RNA (1)...(19): siRNA sense strand
aaacuuguguccugaauac

SEQ ID NO: 1258381 - RNA, 19 nt, Homo sapiens
  misc_RNA (1)...(19): siRNA sense strand
caaacaugauacccacauu

SEQ ID NO: 1258382 - RNA, 19 nt, Homo sapiens
  misc_RNA (1)...(19): siRNA sense strand
ucaagcaguuugcacaguu

SEQ ID NO: 1258383 - RNA, 19 nt, Homo sapiens
  misc_RNA (1)...(19): siRNA sense strand
ggacuuugagcccaguaua

SEQ ID NO: 1258384 - RNA, 19 nt, Homo sapiens
  misc_RNA (1)...(19): siRNA sense strand
auggaaagcucauuuggaa

SEQ ID NO: 1258385 - RNA, 19 nt, Homo sapiens
  misc_RNA (1)...(19): siRNA sense strand
gcugugcuguaacggauaa

SEQ ID NO: 1258386 - RNA, 19 nt, Homo sapiens
  misc_RNA (1)...(19): siRNA sense strand
gauggaagcaguugauaca

SEQ ID NO: 1258387 - RNA, 19 nt, Homo sapiens
  misc_RNA (1)...(19): siRNA sense strand
gaagcuuccucccaaacau

SEQ ID NO: 1258388 - RNA, 19 nt, Homo sapiens
  misc_RNA (1)...(19): siRNA sense strand
gaauguccaauuagaagaa

SEQ ID NO: 1258389 - RNA, 19 nt, Homo sapiens
  misc_RNA (1)...(19): siRNA sense strand
uggaagagcgcuacaaaug

SEQ ID NO: 1258390 - RNA, 19 nt, Homo sapiens
  misc_RNA (1)...(19): siRNA sense strand
gguacuugcuauaauggaa

SEQ ID NO: 1258391 - RNA, 19 nt, Homo sapiens
  misc_RNA (1)...(19): siRNA sense strand
acaagagccuagaacagaa

SEQ ID NO: 1258392 - RNA, 19 nt, Homo sapiens
  misc_RNA (1)...(19): siRNA sense strand
ggauguaaugccaagguua

SEQ ID NO: 1258393 - RNA, 19 nt, Homo sapiens
  misc_RNA (1)...(19): siRNA sense strand
gauaaagaggucaucaaau

SEQ ID NO: 1258394 - RNA, 19 nt, Homo sapiens
  misc_RNA (1)...(19): siRNA sense strand
gaaggugacagauuacaag

SEQ ID NO: 1258395 - RNA, 19 nt, Homo sapiens
  misc_RNA (1)...(19): siRNA sense strand
caguauagaguaccaguuu

SEQ ID NO: 1258396 - RNA, 19 nt, Homo sapiens
  misc_RNA (1)...(19): siRNA sense strand
gcagcaacaugagcauuca

SEQ ID NO: 1258397 - RNA, 19 nt, Homo sapiens
  misc_RNA (1)...(19): siRNA sense strand
gauguaaugccaagguuau

SEQ ID NO: 1258398 - RNA, 19 nt, Homo sapiens
  misc_RNA (1)...(19): siRNA sense strand
ccugagaccuuugauggaa

SEQ ID NO: 1258399 - RNA, 19 nt, Homo sapiens
  misc_RNA (1)...(19): siRNA sense strand
acaugagcauucagccuua

SEQ ID NO: 1258400 - RNA, 19 nt, Homo sapiens
  misc_RNA (1)...(19): siRNA sense strand
cacuauggcugugcuguaa

SEQ ID NO: 1258401 - RNA, 19 nt, Homo sapiens
  misc_RNA (1)...(19): siRNA sense strand
ucaucaaucuacagaauca

SEQ ID NO: 1258402 - RNA, 19 nt, Homo sapiens
  misc_RNA (1)...(19): siRNA sense strand
gguaugcccugugguuuca

SEQ ID NO: 1258403 - RNA, 19 nt, Homo sapiens
  misc_RNA (1)...(19): siRNA sense strand
aagcucaagugcaucaauu

SEQ ID NO: 1258404 - RNA, 19 nt, Homo sapiens
  misc_RNA (1)...(19): siRNA sense strand
gcaguuugcacaguuguuu

SEQ ID NO: 1258405 - RNA, 19 nt, Homo sapiens
  misc_RNA (1)...(19): siRNA sense strand
gugccaaucugcccuguag

SEQ ID NO: 1258406 - RNA, 19 nt, Homo sapiens
  misc_RNA (1)...(19): siRNA sense strand
cagauuacaagaugaagaa

SEQ ID NO: 1258407 - RNA, 19 nt, Homo sapiens
  misc_RNA (1)...(19): siRNA sense strand
agaggaaacuaacaaacau

SEQ ID NO: 1258408 - RNA, 19 nt, Homo sapiens
  misc_RNA (1)...(19): siRNA sense strand
caagcaguuugcacaguug

SEQ ID NO: 1258409 - RNA, 19 nt, Homo sapiens
  misc_RNA (1)...(19): siRNA sense strand
auaaagcacagcugaguaa

SEQ ID NO: 1258410 - RNA, 19 nt, Homo sapiens
  misc_RNA (1)...(19): siRNA sense strand
ggucaugcgaggagaguuu

SEQ ID NO: 1258411 - RNA, 19 nt, Homo sapiens
  misc_RNA (1)...(19): siRNA sense strand
gcuagagcauaccugaaug

SEQ ID NO: 1258412 - RNA, 19 nt, Homo sapiens
  misc_RNA (1)...(19): siRNA sense strand
gugcaguguucuaaugaga

SEQ ID NO: 1258413 - RNA, 19 nt, Homo sapiens
  misc_RNA (1)...(19): siRNA sense strand
gaacgccuacauuaaagau

SEQ ID NO: 1258414 - RNA, 19 nt, Homo sapiens
  misc_RNA (1)...(19): siRNA sense strand
ggaaggugacagauuacaa

SEQ ID NO: 1258415 - RNA, 19 nt, Homo sapiens
  misc_RNA (1)...(19): siRNA sense strand
cacaagagccuagaacaga

SEQ ID NO: 1258416 - RNA, 19 nt, Homo sapiens
  misc_RNA (1)...(19): siRNA sense strand
gaugaacaccuggcuguau

SEQ ID NO: 1258417 - RNA, 19 nt, Homo sapiens
  misc_RNA (1)...(19): siRNA sense strand
agauaaagaggucaucaaa

SEQ ID NO: 1258418 - RNA, 19 nt, Homo sapiens
  misc_RNA (1)...(19): siRNA sense strand
acaccugucccuauacuuu

SEQ ID NO: 1258419 - RNA, 19 nt, Homo sapiens
  misc_RNA (1)...(19): siRNA sense strand
gaagagagaggcgguggau

SEQ ID NO: 1258420 - RNA, 19 nt, Homo sapiens
  misc_RNA (1)...(19): siRNA sense strand
gcucaagugcaucaauuau

SEQ ID NO: 1258421 - RNA, 19 nt, Homo sapiens
  misc_RNA (1)...(19): siRNA sense strand
gaagaggaaacuaacaaac

SEQ ID NO: 1258422 - RNA, 19 nt, Homo sapiens
  misc_RNA (1)...(19): siRNA sense strand
ugagagaauuaaacacagu

SEQ ID NO: 1258423 - RNA, 19 nt, Homo sapiens
  misc_RNA (1)...(19): siRNA sense strand
acgccuacauuaaagauga

SEQ ID NO: 1258424 - RNA, 19 nt, Homo sapiens
  misc_RNA (1)...(19): siRNA sense strand
ugacagauuacaagaugaa

SEQ ID NO: 1258425 - RNA, 19 nt, Homo sapiens
  misc_RNA (1)...(19): siRNA sense strand
cauaaagcacagcugagua

SEQ ID NO: 1258426 - RNA, 19 nt, Homo sapiens
  misc_RNA (1)...(19): siRNA sense strand
gauacccacauuaauauuc

SEQ ID NO: 1258427 - RNA, 19 nt, Homo sapiens
  misc_RNA (1)...(19): siRNA sense strand
ccauuuccuuggacuuuga

SEQ ID NO: 1258428 - RNA, 19 nt, Homo sapiens
  misc_RNA (1)...(19): siRNA sense strand
agucaucaaucuacagaau

SEQ ID NO: 1258429 - RNA, 19 nt, Homo sapiens
  misc_RNA (1)...(19): siRNA sense strand
gcuggaggguacuugcuau

SEQ ID NO: 1258430 - RNA, 19 nt, Homo sapiens
  misc_RNA (1)...(19): siRNA sense strand
gagccuagaacagaaagaa

SEQ ID NO: 1258431 - RNA, 19 nt, Homo sapiens
  misc_RNA (1)...(19): siRNA sense strand
gaaaacuuguguccugaau

SEQ ID NO: 1258432 - RNA, 19 nt, Homo sapiens
  misc_RNA (1)...(19): siRNA sense strand
gaugacacucuguucuuga

SEQ ID NO: 1258433 - RNA, 19 nt, Homo sapiens
  misc_RNA (1)...(19): siRNA sense strand
caauagcagcagcuuuaaa

SEQ ID NO: 1258434 - RNA, 19 nt, Homo sapiens
  misc_RNA (1)...(19): siRNA sense strand
ucagaagagcauaaaggua

SEQ ID NO: 1258435 - RNA, 19 nt, Homo sapiens
  misc_RNA (1)...(19): siRNA sense strand
uagaagaggaaacuaacaa

SEQ ID NO: 1258436 - RNA, 19 nt, Homo sapiens
  misc_RNA (1)...(19): siRNA sense strand
aaaaggaguucaagcaguu

SEQ ID NO: 1258437 - RNA, 19 nt, Homo sapiens
  misc_RNA (1)...(19): siRNA sense strand
caagagccuagaacagaaa

SEQ ID NO: 1258438 - RNA, 19 nt, Homo sapiens
  misc_RNA (1)...(19): siRNA sense strand
ccugugcaguguucuaaug

SEQ ID NO: 1258439 - RNA, 19 nt, Homo sapiens
  misc_RNA (1)...(19): siRNA sense strand
gaaagcucauuuggaaggu

SEQ ID NO: 1258440 - RNA, 19 nt, Homo sapiens
  misc_RNA (1)...(19): siRNA sense strand
aacaugauacccacauuaa

SEQ ID NO: 1258441 - RNA, 19 nt, Homo sapiens
  misc_RNA (1)...(19): siRNA sense strand
uaaacacagugccaaucug

SEQ ID NO: 1258442 - RNA, 19 nt, Homo sapiens
  misc_RNA (1)...(19): siRNA sense strand
gcagaaacuauaaagaaac

SEQ ID NO: 1258443 - RNA, 19 nt, Homo sapiens
  misc_RNA (1)...(19): siRNA sense strand
gaaaagaauguccaauuag

SEQ ID NO: 1258444 - RNA, 19 nt, Homo sapiens
  misc_RNA (1)...(19): siRNA sense strand
ggaaccugcagcaacauga

SEQ ID NO: 1258445 - RNA, 19 nt, Homo sapiens
  misc_RNA (1)...(19): siRNA sense strand
acaauugugcgaagauuau

SEQ ID NO: 1258446 - RNA, 19 nt, Homo sapiens
  misc_RNA (1)...(19): siRNA sense strand
aauuugaccugagaccuuu

SEQ ID NO: 1258447 - RNA, 19 nt, Homo sapiens
  misc_RNA (1)...(19): siRNA sense strand
cagcuagcagaaacuauaa

SEQ ID NO: 1258448 - RNA, 19 nt, Homo sapiens
  misc_RNA (1)...(19): siRNA sense strand
aagaacgccuacauuaaag

SEQ ID NO: 1258449 - RNA, 19 nt, Homo sapiens
  misc_RNA (1)...(19): siRNA sense strand
gacacucuguucuugaaag

SEQ ID NO: 1258450 - RNA, 19 nt, Homo sapiens
  misc_RNA (1)...(19): siRNA sense strand
gaucaaagauuagccguuu

SEQ ID NO: 1258451 - RNA, 19 nt, Homo sapiens
  misc_RNA (1)...(19): siRNA sense strand
gaagagcgcuacaaaugug

SEQ ID NO: 1258452 - RNA, 19 nt, Homo sapiens
  misc_RNA (1)...(19): siRNA sense strand
ggucacaccugucccuaua

SEQ ID NO: 1258453 - RNA, 19 nt, Homo sapiens
  misc_RNA (1)...(19): siRNA sense strand
caagaacgccuacauuaaa

SEQ ID NO: 1258454 - RNA, 19 nt, Homo sapiens
  misc_RNA (1)...(19): siRNA sense strand
gagcaagacuguccuuuua

SEQ ID NO: 1258455 - RNA, 19 nt, Homo sapiens
  misc_RNA (1)...(19): siRNA sense strand
gugcgaagauuauucuaaa

SEQ ID NO: 1258456 - RNA, 19 nt, Homo sapiens
  misc_RNA (1)...(19): siRNA sense strand
caugauacccacauuaaua

SEQ ID NO: 1258457 - RNA, 19 nt, Homo sapiens
  misc_RNA (1)...(19): siRNA sense strand
ggaggaaccugcagcaaca

SEQ ID NO: 1258458 - RNA, 19 nt, Homo sapiens
  misc_RNA (1)...(19): siRNA sense strand
gccaagaacgccuacauua

SEQ ID NO: 1258459 - RNA, 19 nt, Homo sapiens
  misc_RNA (1)...(19): siRNA sense strand
gcagcuagcagaaacuaua

SEQ ID NO: 1258460 - RNA, 19 nt, Homo sapiens
  misc_RNA (1)...(19): siRNA sense strand
auaaagaggucaucaaauc

SEQ ID NO: 1258461 - RNA, 19 nt, Homo sapiens
  misc_RNA (1)...(19): siRNA sense strand
gcuagaagcucaagugcau

SEQ ID NO: 1258462 - RNA, 19 nt, Homo sapiens
  misc_RNA (1)...(19): siRNA sense strand
uaacugaccuggaggaucu

SEQ ID NO: 1258463 - RNA, 19 nt, Homo sapiens
  misc_RNA (1)...(19): siRNA sense strand
ggugacagauuacaagaug

SEQ ID NO: 1258464 - RNA, 19 nt, Homo sapiens
  misc_RNA (1)...(19): siRNA sense strand
caucaaaucucaggagguu

SEQ ID NO: 1258465 - RNA, 19 nt, Homo sapiens
  misc_RNA (1)...(19): siRNA sense strand
gcaaugcuccuggauguaa

SEQ ID NO: 1258466 - RNA, 19 nt, Homo sapiens
  misc_RNA (1)...(19): siRNA sense strand
ccaagaacgccuacauuaa

SEQ ID NO: 1258467 - RNA, 19 nt, Homo sapiens
  misc_RNA (1)...(19): siRNA sense strand
gaggguacuugcuauaaug

SEQ ID NO: 1258468 - RNA, 19 nt, Homo sapiens
  misc_RNA (1)...(19): siRNA sense strand
ccaauuagaagaacagauu

SEQ ID NO: 1258469 - RNA, 19 nt, Homo sapiens
  misc_RNA (1)...(19): siRNA sense strand
gcacaugcguuugguuuua

SEQ ID NO: 1258470 - RNA, 19 nt, Homo sapiens
  misc_RNA (1)...(19): siRNA sense strand
uuuggaaggugacagauua

SEQ ID NO: 1258471 - RNA, 19 nt, Homo sapiens
  misc_RNA (1)...(19): siRNA sense strand
ggaggguacuugcuauaau

SEQ ID NO: 1258472 - RNA, 19 nt, Homo sapiens
  misc_RNA (1)...(19): siRNA sense strand
cagaagagcauaaagguau

SEQ ID NO: 1258473 - RNA, 19 nt, Homo sapiens
  misc_RNA (1)...(19): siRNA sense strand
caacaauugugcgaagauu

SEQ ID NO: 1258474 - RNA, 19 nt, Homo sapiens
  misc_RNA (1)...(19): siRNA sense strand
aaacugagguagaugaaca

SEQ ID NO: 1258475 - RNA, 19 nt, Homo sapiens
  misc_RNA (1)...(19): siRNA sense strand
gagcacaugcguuugguuu

SEQ ID NO: 1258476 - RNA, 19 nt, Homo sapiens
  misc_RNA (1)...(19): siRNA sense strand
ggaagagcgcuacaaaugu

SEQ ID NO: 1258477 - RNA, 19 nt, Homo sapiens
  misc_RNA (1)...(19): siRNA sense strand
cccaauagcagcagcuuua

SEQ ID NO: 1258478 - RNA, 19 nt, Homo sapiens
  misc_RNA (1)...(19): siRNA sense strand
aaacaugauacccacauua

SEQ ID NO: 1258479 - RNA, 19 nt, Homo sapiens
  misc_RNA (1)...(19): siRNA sense strand
guccucaacuuauauguau

SEQ ID NO: 1258480 - RNA, 19 nt, Homo sapiens
  misc_RNA (1)...(19): siRNA sense strand
aaacuuguguccugaauac

SEQ ID NO: 1258481 - RNA, 19 nt, Homo sapiens
  misc_RNA (1)...(19): siRNA sense strand
caaacaugauacccacauu

SEQ ID NO: 1258482 - RNA, 19 nt, Homo sapiens
  misc_RNA (1)...(19): siRNA sense strand
ucaagcaguuugcacaguu

SEQ ID NO: 1258483 - RNA, 19 nt, Homo sapiens
  misc_RNA (1)...(19): siRNA sense strand
ggacuuugagcccaguaua

SEQ ID NO: 1258484 - RNA, 19 nt, Homo sapiens
  misc_RNA (1)...(19): siRNA sense strand
auggaaagcucauuuggaa

SEQ ID NO: 1258485 - RNA, 19 nt, Homo sapiens
  misc_RNA (1)...(19): siRNA sense strand
gcugugcuguaacggauaa

SEQ ID NO: 1258486 - RNA, 19 nt, Homo sapiens
  misc_RNA (1)...(19): siRNA sense strand
gauggaagcaguugauaca

SEQ ID NO: 1258487 - RNA, 19 nt, Homo sapiens
  misc_RNA (1)...(19): siRNA sense strand
gaagcuuccucccaaacau

SEQ ID NO: 1258488 - RNA, 19 nt, Homo sapiens
  misc_RNA (1)...(19): siRNA sense strand
gaauguccaauuagaagaa

SEQ ID NO: 1258489 - RNA, 19 nt, Homo sapiens
  misc_RNA (1)...(19): siRNA sense strand
uggaagagcgcuacaaaug

SEQ ID NO: 1258490 - RNA, 19 nt, Homo sapiens
  misc_RNA (1)...(19): siRNA sense strand
gguacuugcuauaauggaa

SEQ ID NO: 1258491 - RNA, 19 nt, Homo sapiens
  misc_RNA (1)...(19): siRNA sense strand
acaagagccuagaacagaa

SEQ ID NO: 1258492 - RNA, 19 nt, Homo sapiens
  misc_RNA (1)...(19): siRNA sense strand
ggauguaaugccaagguua

SEQ ID NO: 1258493 - RNA, 19 nt, Homo sapiens
  misc_RNA (1)...(19): siRNA sense strand
gauaaagaggucaucaaau

SEQ ID NO: 1258494 - RNA, 19 nt, Homo sapiens
  misc_RNA (1)...(19): siRNA sense strand
gaaggugacagauuacaag

SEQ ID NO: 1258495 - RNA, 19 nt, Homo sapiens
  misc_RNA (1)...(19): siRNA sense strand
caguauagaguaccaguuu

SEQ ID NO: 1258496 - RNA, 19 nt, Homo sapiens
  misc_RNA (1)...(19): siRNA sense strand
gcagcaacaugagcauuca

SEQ ID NO: 1258497 - RNA, 19 nt, Homo sapiens
  misc_RNA (1)...(19): siRNA sense strand
gauguaaugccaagguuau

SEQ ID NO: 1258498 - RNA, 19 nt, Homo sapiens
  misc_RNA (1)...(19): siRNA sense strand
ccugagaccuuugauggaa

SEQ ID NO: 1258499 - RNA, 19 nt, Homo sapiens
  misc_RNA (1)...(19): siRNA sense strand
acaugagcauucagccuua

SEQ ID NO: 1258500 - RNA, 19 nt, Homo sapiens
  misc_RNA (1)...(19): siRNA sense strand
cacuauggcugugcuguaa

SEQ ID NO: 1258501 - RNA, 19 nt, Homo sapiens
  misc_RNA (1)...(19): siRNA sense strand
ucaucaaucuacagaauca

SEQ ID NO: 1258502 - RNA, 19 nt, Homo sapiens
  misc_RNA (1)...(19): siRNA sense strand
gguaugcccugugguuuca

SEQ ID NO: 1258503 - RNA, 19 nt, Homo sapiens
  misc_RNA (1)...(19): siRNA sense strand
aagcucaagugcaucaauu

SEQ ID NO: 1258504 - RNA, 19 nt, Homo sapiens
  misc_RNA (1)...(19): siRNA sense strand
gcaguuugcacaguuguuu

SEQ ID NO: 1258505 - RNA, 19 nt, Homo sapiens
  misc_RNA (1)...(19): siRNA sense strand
gugccaaucugcccuguag

SEQ ID NO: 1258506 - RNA, 19 nt, Homo sapiens
  misc_RNA (1)...(19): siRNA sense strand
cagauuacaagaugaagaa

SEQ ID NO: 1258507 - RNA, 19 nt, Homo sapiens
  misc_RNA (1)...(19): siRNA sense strand
agaggaaacuaacaaacau

SEQ ID NO: 1258508 - RNA, 19 nt, Homo sapiens
  misc_RNA (1)...(19): siRNA sense strand
caagcaguuugcacaguug

SEQ ID NO: 1258509 - RNA, 19 nt, Homo sapiens
  misc_RNA (1)...(19): siRNA sense strand
auaaagcacagcugaguaa

SEQ ID NO: 1258510 - RNA, 19 nt, Homo sapiens
  misc_RNA (1)...(19): siRNA sense strand
ggucaugcgaggagaguuu

SEQ ID NO: 1258511 - RNA, 19 nt, Homo sapiens
  misc_RNA (1)...(19): siRNA sense strand
gcuagagcauaccugaaug

SEQ ID NO: 1258512 - RNA, 19 nt, Homo sapiens
  misc_RNA (1)...(19): siRNA sense strand
gugcaguguucuaaugaga

SEQ ID NO: 1258513 - RNA, 19 nt, Homo sapiens
  misc_RNA (1)...(19): siRNA sense strand
gaacgccuacauuaaagau

SEQ ID NO: 1258514 - RNA, 19 nt, Homo sapiens
  misc_RNA (1)...(19): siRNA sense strand
ggaaggugacagauuacaa

SEQ ID NO: 1258515 - RNA, 19 nt, Homo sapiens
  misc_RNA (1)...(19): siRNA sense strand
cacaagagccuagaacaga

SEQ ID NO: 1258516 - RNA, 19 nt, Homo sapiens
  misc_RNA (1)...(19): siRNA sense strand
gaugaacaccuggcuguau

SEQ ID NO: 1258517 - RNA, 19 nt, Homo sapiens
  misc_RNA (1)...(19): siRNA sense strand
agauaaagaggucaucaaa

SEQ ID NO: 1258518 - RNA, 19 nt, Homo sapiens
  misc_RNA (1)...(19): siRNA sense strand
acaccugucccuauacuuu

SEQ ID NO: 1258519 - RNA, 19 nt, Homo sapiens
  misc_RNA (1)...(19): siRNA sense strand
gaagagagaggcgguggau

SEQ ID NO: 1258520 - RNA, 19 nt, Homo sapiens
  misc_RNA (1)...(19): siRNA sense strand
gcucaagugcaucaauuau

SEQ ID NO: 1258521 - RNA, 19 nt, Homo sapiens
  misc_RNA (1)...(19): siRNA sense strand
gaagaggaaacuaacaaac

SEQ ID NO: 1258522 - RNA, 19 nt, Homo sapiens
  misc_RNA (1)...(19): siRNA sense strand
ugagagaauuaaacacagu

SEQ ID NO: 1258523 - RNA, 19 nt, Homo sapiens
  misc_RNA (1)...(19): siRNA sense strand
acgccuacauuaaagauga

SEQ ID NO: 1258524 - RNA, 19 nt, Homo sapiens
  misc_RNA (1)...(19): siRNA sense strand
ugacagauuacaagaugaa

SEQ ID NO: 1258525 - RNA, 19 nt, Homo sapiens
  misc_RNA (1)...(19): siRNA sense strand
cauaaagcacagcugagua

SEQ ID NO: 1258526 - RNA, 19 nt, Homo sapiens
  misc_RNA (1)...(19): siRNA sense strand
gauacccacauuaauauuc

SEQ ID NO: 1258527 - RNA, 19 nt, Homo sapiens
  misc_RNA (1)...(19): siRNA sense strand
ccauuuccuuggacuuuga

SEQ ID NO: 1258528 - RNA, 19 nt, Homo sapiens
  misc_RNA (1)...(19): siRNA sense strand
agucaucaaucuacagaau

SEQ ID NO: 1258529 - RNA, 19 nt, Homo sapiens
  misc_RNA (1)...(19): siRNA sense strand
gcuggaggguacuugcuau

SEQ ID NO: 1258530 - RNA, 19 nt, Homo sapiens
  misc_RNA (1)...(19): siRNA sense strand
gagccuagaacagaaagaa

SEQ ID NO: 1258531 - RNA, 19 nt, Homo sapiens
  misc_RNA (1)...(19): siRNA sense strand
gaaaacuuguguccugaau

SEQ ID NO: 1258532 - RNA, 19 nt, Homo sapiens
  misc_RNA (1)...(19): siRNA sense strand
gaugacacucuguucuuga

SEQ ID NO: 1258533 - RNA, 19 nt, Homo sapiens
  misc_RNA (1)...(19): siRNA sense strand
caauagcagcagcuuuaaa

SEQ ID NO: 1258534 - RNA, 19 nt, Homo sapiens
  misc_RNA (1)...(19): siRNA sense strand
ucagaagagcauaaaggua

SEQ ID NO: 1258535 - RNA, 19 nt, Homo sapiens
  misc_RNA (1)...(19): siRNA sense strand
uagaagaggaaacuaacaa

SEQ ID NO: 1258536 - RNA, 19 nt, Homo sapiens
  misc_RNA (1)...(19): siRNA sense strand
aaaaggaguucaagcaguu

SEQ ID NO: 1258537 - RNA, 19 nt, Homo sapiens
  misc_RNA (1)...(19): siRNA sense strand
caagagccuagaacagaaa

SEQ ID NO: 1258538 - RNA, 19 nt, Homo sapiens
  misc_RNA (1)...(19): siRNA sense strand
ccugugcaguguucuaaug

SEQ ID NO: 1258539 - RNA, 19 nt, Homo sapiens
  misc_RNA (1)...(19): siRNA sense strand
gaaagcucauuuggaaggu

SEQ ID NO: 1258540 - RNA, 19 nt, Homo sapiens
  misc_RNA (1)...(19): siRNA sense strand
aacaugauacccacauuaa

SEQ ID NO: 1258541 - RNA, 19 nt, Homo sapiens
  misc_RNA (1)...(19): siRNA sense strand
uaaacacagugccaaucug

SEQ ID NO: 1258542 - RNA, 19 nt, Homo sapiens
  misc_RNA (1)...(19): siRNA sense strand
gcagaaacuauaaagaaac

SEQ ID NO: 1258543 - RNA, 19 nt, Homo sapiens
  misc_RNA (1)...(19): siRNA sense strand
gaaaagaauguccaauuag

SEQ ID NO: 1258544 - RNA, 19 nt, Homo sapiens
  misc_RNA (1)...(19): siRNA sense strand
ggaaccugcagcaacauga

SEQ ID NO: 1258545 - RNA, 19 nt, Homo sapiens
  misc_RNA (1)...(19): siRNA sense strand
acaauugugcgaagauuau

SEQ ID NO: 1258546 - RNA, 19 nt, Homo sapiens
  misc_RNA (1)...(19): siRNA sense strand
aauuugaccugagaccuuu

SEQ ID NO: 1258547 - RNA, 19 nt, Homo sapiens
  misc_RNA (1)...(19): siRNA sense strand
cagcuagcagaaacuauaa

SEQ ID NO: 1258548 - RNA, 19 nt, Homo sapiens
  misc_RNA (1)...(19): siRNA sense strand
aagaacgccuacauuaaag

SEQ ID NO: 1258549 - RNA, 19 nt, Homo sapiens
  misc_RNA (1)...(19): siRNA sense strand
gacacucuguucuugaaag

SEQ ID NO: 1258550 - RNA, 19 nt, Homo sapiens
  misc_RNA (1)...(19): siRNA sense strand
ugacauagcugggaaguuu

SEQ ID NO: 1258551 - RNA, 19 nt, Homo sapiens
  misc_RNA (1)...(19): siRNA sense strand
gcugaaagcucucgaaauc

SEQ ID NO: 1258552 - RNA, 19 nt, Homo sapiens
  misc_RNA (1)...(19): siRNA sense strand
ggaauagcaucucaaguga

SEQ ID NO: 1258553 - RNA, 19 nt, Homo sapiens
  misc_RNA (1)...(19): siRNA sense strand
gaagaaugaugagaaggua

SEQ ID NO: 1258554 - RNA, 19 nt, Homo sapiens
  misc_RNA (1)...(19): siRNA sense strand
gaaagaagaggaagaggaa

SEQ ID NO: 1258555 - RNA, 19 nt, Homo sapiens
  misc_RNA (1)...(19): siRNA sense strand
gugaagaacuccauggaaa

SEQ ID NO: 1258556 - RNA, 19 nt, Homo sapiens
  misc_RNA (1)...(19): siRNA sense strand
cugagaaacucgucacuua

SEQ ID NO: 1258557 - RNA, 19 nt, Homo sapiens
  misc_RNA (1)...(19): siRNA sense strand
ugaagaaucugacguaaag

SEQ ID NO: 1258558 - RNA, 19 nt, Homo sapiens
  misc_RNA (1)...(19): siRNA sense strand
gaggaggagucucagaauu

SEQ ID NO: 1258559 - RNA, 19 nt, Homo sapiens
  misc_RNA (1)...(19): siRNA sense strand
cggaagaccugacugagaa

SEQ ID NO: 1258560 - RNA, 19 nt, Homo sapiens
  misc_RNA (1)...(19): siRNA sense strand
gaugaggaaugggaaguuu

SEQ ID NO: 1258561 - RNA, 19 nt, Homo sapiens
  misc_RNA (1)...(19): siRNA sense strand
gcagggcgcaugacuauga

SEQ ID NO: 1258562 - RNA, 19 nt, Homo sapiens
  misc_RNA (1)...(19): siRNA sense strand
ccucucggcugaugacaua

SEQ ID NO: 1258563 - RNA, 19 nt, Homo sapiens
  misc_RNA (1)...(19): siRNA sense strand
ggaagaggaagaagagauu

SEQ ID NO: 1258564 - RNA, 19 nt, Homo sapiens
  misc_RNA (1)...(19): siRNA sense strand
gagggaugcugaucuugaa

SEQ ID NO: 1258565 - RNA, 19 nt, Homo sapiens
  misc_RNA (1)...(19): siRNA sense strand
guggaugacugaagacuug

SEQ ID NO: 1258566 - RNA, 19 nt, Homo sapiens
  misc_RNA (1)...(19): siRNA sense strand
uugaugagguggccauaua

SEQ ID NO: 1258567 - RNA, 19 nt, Homo sapiens
  misc_RNA (1)...(19): siRNA sense strand
ggaaaucgagagugaguug

SEQ ID NO: 1258568 - RNA, 19 nt, Homo sapiens
  misc_RNA (1)...(19): siRNA sense strand
gaggaugaauuaugaaacu

SEQ ID NO: 1258569 - RNA, 19 nt, Homo sapiens
  misc_RNA (1)...(19): siRNA sense strand
cagccuacccucucaauuu

SEQ ID NO: 1258570 - RNA, 19 nt, Homo sapiens
  misc_RNA (1)...(19): siRNA sense strand
gaggugccaucacggguaa

SEQ ID NO: 1258571 - RNA, 19 nt, Homo sapiens
  misc_RNA (1)...(19): siRNA sense strand
cgaaaucgcccaggaaaug

SEQ ID NO: 1258572 - RNA, 19 nt, Homo sapiens
  misc_RNA (1)...(19): siRNA sense strand
caagcaguuuggaguauug

SEQ ID NO: 1258573 - RNA, 19 nt, Homo sapiens
  misc_RNA (1)...(19): siRNA sense strand
ccacagauuccgugaagaa

SEQ ID NO: 1258574 - RNA, 19 nt, Homo sapiens
  misc_RNA (1)...(19): siRNA sense strand
gcagaugagacgcccauuu

SEQ ID NO: 1258575 - RNA, 19 nt, Homo sapiens
  misc_RNA (1)...(19): siRNA sense strand
gaaaucgcccaggaaauga

SEQ ID NO: 1258576 - RNA, 19 nt, Homo sapiens
  misc_RNA (1)...(19): siRNA sense strand
gaugagacgcccauuuguu

SEQ ID NO: 1258577 - RNA, 19 nt, Homo sapiens
  misc_RNA (1)...(19): siRNA sense strand
uggaaagcaugaacacuga

SEQ ID NO: 1258578 - RNA, 19 nt, Homo sapiens
  misc_RNA (1)...(19): siRNA sense strand
cggcagacaugcagaaagu

SEQ ID NO: 1258579 - RNA, 19 nt, Homo sapiens
  misc_RNA (1)...(19): siRNA sense strand
cagaugagacgcccauuug

SEQ ID NO: 1258580 - RNA, 19 nt, Homo sapiens
  misc_RNA (1)...(19): siRNA sense strand
ggaggagucucagaauucu

SEQ ID NO: 1258581 - RNA, 19 nt, Homo sapiens
  misc_RNA (1)...(19): siRNA sense strand
gggaggcgaugcagcugaa

SEQ ID NO: 1258582 - RNA, 19 nt, Homo sapiens
  misc_RNA (1)...(19): siRNA sense strand
gcugggaaguuucaguuca

SEQ ID NO: 1258583 - RNA, 19 nt, Homo sapiens
  misc_RNA (1)...(19): siRNA sense strand
aaaugaagaaucugacgua

SEQ ID NO: 1258584 - RNA, 19 nt, Homo sapiens
  misc_RNA (1)...(19): siRNA sense strand
uggaauagcaucucaagug

SEQ ID NO: 1258585 - RNA, 19 nt, Homo sapiens
  misc_RNA (1)...(19): siRNA sense strand
caucacggguaacuguuga

SEQ ID NO: 1258586 - RNA, 19 nt, Homo sapiens
  misc_RNA (1)...(19): siRNA sense strand
gaaugcuaccucccaguuu

SEQ ID NO: 1258587 - RNA, 19 nt, Homo sapiens
  misc_RNA (1)...(19): siRNA sense strand
ggccgaauaugucagauac

SEQ ID NO: 1258588 - RNA, 19 nt, Homo sapiens
  misc_RNA (1)...(19): siRNA sense strand
gaaguuaccaccguacauc

SEQ ID NO: 1258589 - RNA, 19 nt, Homo sapiens
  misc_RNA (1)...(19): siRNA sense strand
gaugagguggccauauauu

SEQ ID NO: 1258590 - RNA, 19 nt, Homo sapiens
  misc_RNA (1)...(19): siRNA sense strand
caaccgggaaugcuaagaa

SEQ ID NO: 1258591 - RNA, 19 nt, Homo sapiens
  misc_RNA (1)...(19): siRNA sense strand
ugagacgcccauuuguuua

SEQ ID NO: 1258592 - RNA, 19 nt, Homo sapiens
  misc_RNA (1)...(19): siRNA sense strand
ugugggaaaucgagaguga

SEQ ID NO: 1258593 - RNA, 19 nt, Homo sapiens
  misc_RNA (1)...(19): siRNA sense strand
gacgauguccugugggaaa

SEQ ID NO: 1258594 - RNA, 19 nt, Homo sapiens
  misc_RNA (1)...(19): siRNA sense strand
cagacaugaucacccguuu

SEQ ID NO: 1258595 - RNA, 19 nt, Homo sapiens
  misc_RNA (1)...(19): siRNA sense strand
caugaucacccguuuggaa

SEQ ID NO: 1258596 - RNA, 19 nt, Homo sapiens
  misc_RNA (1)...(19): siRNA sense strand
guccaaggguucaagaagu

SEQ ID NO: 1258597 - RNA, 19 nt, Homo sapiens
  misc_RNA (1)...(19): siRNA sense strand
ucuacaagccacugaauga

SEQ ID NO: 1258598 - RNA, 19 nt, Homo sapiens
  misc_RNA (1)...(19): siRNA sense strand
gggaggaggagucucagaa

SEQ ID NO: 1258599 - RNA, 19 nt, Homo sapiens
  misc_RNA (1)...(19): siRNA sense strand
ggaggaggagucucagaau

SEQ ID NO: 1258600 - RNA, 19 nt, Homo sapiens
  misc_RNA (1)...(19): siRNA sense strand
acacugacauggugaucau

SEQ ID NO: 1258601 - RNA, 19 nt, Homo sapiens
  misc_RNA (1)...(19): siRNA sense strand
gguucaagcugaugguagu

SEQ ID NO: 1258602 - RNA, 19 nt, Homo sapiens
  misc_RNA (1)...(19): siRNA sense strand
guucgagacuggcgcaaag

SEQ ID NO: 1258603 - RNA, 19 nt, Homo sapiens
  misc_RNA (1)...(19): siRNA sense strand
ggaugcugaucuugaaugg

SEQ ID NO: 1258604 - RNA, 19 nt, Homo sapiens
  misc_RNA (1)...(19): siRNA sense strand
cgagggaugcugaucuuga

SEQ ID NO: 1258605 - RNA, 19 nt, Homo sapiens
  misc_RNA (1)...(19): siRNA sense strand
uuaccaccguacaucauuu

SEQ ID NO: 1258606 - RNA, 19 nt, Homo sapiens
  misc_RNA (1)...(19): siRNA sense strand
aaugaagaaucugacguaa

SEQ ID NO: 1258607 - RNA, 19 nt, Homo sapiens
  misc_RNA (1)...(19): siRNA sense strand
gaaagcaugaacacugaca

SEQ ID NO: 1258608 - RNA, 19 nt, Homo sapiens
  misc_RNA (1)...(19): siRNA sense strand
gcaguuuggaguauuggaa

SEQ ID NO: 1258609 - RNA, 19 nt, Homo sapiens
  misc_RNA (1)...(19): siRNA sense strand
gagacuggcgcaaagugaa

SEQ ID NO: 1258610 - RNA, 19 nt, Homo sapiens
  misc_RNA (1)...(19): siRNA sense strand
ccauaucuccagcaacuug

SEQ ID NO: 1258611 - RNA, 19 nt, Homo sapiens
  misc_RNA (1)...(19): siRNA sense strand
ccagugggauggaaauucg

SEQ ID NO: 1258612 - RNA, 19 nt, Homo sapiens
  misc_RNA (1)...(19): siRNA sense strand
ccaaacccaaugaaugcua

SEQ ID NO: 1258613 - RNA, 19 nt, Homo sapiens
  misc_RNA (1)...(19): siRNA sense strand
ggaugaauuaugaaacugu

SEQ ID NO: 1258614 - RNA, 19 nt, Homo sapiens
  misc_RNA (1)...(19): siRNA sense strand
cagauuccgugaagaacuc

SEQ ID NO: 1258615 - RNA, 19 nt, Homo sapiens
  misc_RNA (1)...(19): siRNA sense strand
agccuacccucucaauuug

SEQ ID NO: 1258616 - RNA, 19 nt, Homo sapiens
  misc_RNA (1)...(19): siRNA sense strand
ggaagaccugacugagaaa

SEQ ID NO: 1258617 - RNA, 19 nt, Homo sapiens
  misc_RNA (1)...(19): siRNA sense strand
ggguuggugucgaagaaug

SEQ ID NO: 1258618 - RNA, 19 nt, Homo sapiens
  misc_RNA (1)...(19): siRNA sense strand
guaguggaauaugcugaga

SEQ ID NO: 1258619 - RNA, 19 nt, Homo sapiens
  misc_RNA (1)...(19): siRNA sense strand
ucagcacuuugacagcuuu

SEQ ID NO: 1258620 - RNA, 19 nt, Homo sapiens
  misc_RNA (1)...(19): siRNA sense strand
gcagacaugcagaaaguac

SEQ ID NO: 1258621 - RNA, 19 nt, Homo sapiens
  misc_RNA (1)...(19): siRNA sense strand
gacaugaucacccguuugg

SEQ ID NO: 1258622 - RNA, 19 nt, Homo sapiens
  misc_RNA (1)...(19): siRNA sense strand
ggagaaccaccaaaagauu

SEQ ID NO: 1258623 - RNA, 19 nt, Homo sapiens
  misc_RNA (1)...(19): siRNA sense strand
ugccauaucuccagcaacu

SEQ ID NO: 1258624 - RNA, 19 nt, Homo sapiens
  misc_RNA (1)...(19): siRNA sense strand
gaagaggaagaagagauuc

SEQ ID NO: 1258625 - RNA, 19 nt, Homo sapiens
  misc_RNA (1)...(19): siRNA sense strand
gguauggguggaugacuga

SEQ ID NO: 1258626 - RNA, 19 nt, Homo sapiens
  misc_RNA (1)...(19): siRNA sense strand
ggguaacuguugauaacca

SEQ ID NO: 1258627 - RNA, 19 nt, Homo sapiens
  misc_RNA (1)...(19): siRNA sense strand
augagacgcccauuuguuu

SEQ ID NO: 1258628 - RNA, 19 nt, Homo sapiens
  misc_RNA (1)...(19): siRNA sense strand
cgaagaaugaugagaaggu

SEQ ID NO: 1258629 - RNA, 19 nt, Homo sapiens
  misc_RNA (1)...(19): siRNA sense strand
ggccaaacccaaugaaugc

SEQ ID NO: 1258630 - RNA, 19 nt, Homo sapiens
  misc_RNA (1)...(19): siRNA sense strand
gaggagaaccaccaaaaga

SEQ ID NO: 1258631 - RNA, 19 nt, Homo sapiens
  misc_RNA (1)...(19): siRNA sense strand
gucauggucgcguggaaua

SEQ ID NO: 1258632 - RNA, 19 nt, Homo sapiens
  misc_RNA (1)...(19): siRNA sense strand
gaagaacuccauggaaagc

SEQ ID NO: 1258633 - RNA, 19 nt, Homo sapiens
  misc_RNA (1)...(19): siRNA sense strand
ggaaguuaccaccguacau

SEQ ID NO: 1258634 - RNA, 19 nt, Homo sapiens
  misc_RNA (1)...(19): siRNA sense strand
gagacgcccauuuguuuag

SEQ ID NO: 1258635 - RNA, 19 nt, Homo sapiens
  misc_RNA (1)...(19): siRNA sense strand
ugaaugcuaccucccaguu

SEQ ID NO: 1258636 - RNA, 19 nt, Homo sapiens
  misc_RNA (1)...(19): siRNA sense strand
aaugcuaccucccaguuuc

SEQ ID NO: 1258637 - RNA, 19 nt, Homo sapiens
  misc_RNA (1)...(19): siRNA sense strand
uccaaggguucaagaagug

SEQ ID NO: 1258638 - RNA, 19 nt, Homo sapiens
  misc_RNA (1)...(19): siRNA sense strand
caggagcagugcccaagca

SEQ ID NO: 1258639 - RNA, 19 nt, Homo sapiens
  misc_RNA (1)...(19): siRNA sense strand
ugucgaagaaugaugagaa

SEQ ID NO: 1258640 - RNA, 19 nt, Homo sapiens
  misc_RNA (1)...(19): siRNA sense strand
gaggaagaagagauucaga

SEQ ID NO: 1258641 - RNA, 19 nt, Homo sapiens
  misc_RNA (1)...(19): siRNA sense strand
gcaacuuggaggaggaaga

SEQ ID NO: 1258642 - RNA, 19 nt, Homo sapiens
  misc_RNA (1)...(19): siRNA sense strand
uucaagaagugccauaucu

SEQ ID NO: 1258643 - RNA, 19 nt, Homo sapiens
  misc_RNA (1)...(19): siRNA sense strand
gaaugaugagaagguauga

SEQ ID NO: 1258644 - RNA, 19 nt, Homo sapiens
  misc_RNA (1)...(19): siRNA sense strand
ucacggguaacuguugaua

SEQ ID NO: 1258645 - RNA, 19 nt, Homo sapiens
  misc_RNA (1)...(19): siRNA sense strand
cgagacuggcgcaaaguga

SEQ ID NO: 1258646 - RNA, 19 nt, Homo sapiens
  misc_RNA (1)...(19): siRNA sense strand
gcccaaccgggaaugcuaa

SEQ ID NO: 1258647 - RNA, 19 nt, Homo sapiens
  misc_RNA (1)...(19): siRNA sense strand
caauuugagccugaaagaa

SEQ ID NO: 1258648 - RNA, 19 nt, Homo sapiens
  misc_RNA (1)...(19): siRNA sense strand
aagaagaggaagaggaaga

SEQ ID NO: 1258649 - RNA, 19 nt, Homo sapiens
  misc_RNA (1)...(19): siRNA sense strand
ugccacagauuccgugaag

SEQ ID NO: 1258650 - RNA, 19 nt, Homo sapiens
  misc_RNA (1)...(19): siRNA sense strand
caacaucauuggcaucaua

SEQ ID NO: 1258651 - RNA, 19 nt, Homo sapiens
  misc_RNA (1)...(19): siRNA sense strand
aagagucacugcauaauaa

SEQ ID NO: 1258652 - RNA, 19 nt, Homo sapiens
  misc_RNA (1)...(19): siRNA sense strand
caggaagaaugaagaagua

SEQ ID NO: 1258653 - RNA, 19 nt, Homo sapiens
  misc_RNA (1)...(19): siRNA sense strand
ggacuaaaucuacaaguga

SEQ ID NO: 1258654 - RNA, 19 nt, Homo sapiens
  misc_RNA (1)...(19): siRNA sense strand
gugcacaucuauauugaaa

SEQ ID NO: 1258655 - RNA, 19 nt, Homo sapiens
  misc_RNA (1)...(19): siRNA sense strand
ugacagagguauccagaug

SEQ ID NO: 1258656 - RNA, 19 nt, Homo sapiens
  misc_RNA (1)...(19): siRNA sense strand
gaagaaugaagaaguaaug

SEQ ID NO: 1258657 - RNA, 19 nt, Homo sapiens
  misc_RNA (1)...(19): siRNA sense strand
caucaucgcagaaauugua

SEQ ID NO: 1258658 - RNA, 19 nt, Homo sapiens
  misc_RNA (1)...(19): siRNA sense strand
gaaaccagcaggaagaaug

SEQ ID NO: 1258659 - RNA, 19 nt, Homo sapiens
  misc_RNA (1)...(19): siRNA sense strand
ugaagaugcugacuacgaa

SEQ ID NO: 1258660 - RNA, 19 nt, Homo sapiens
  misc_RNA (1)...(19): siRNA sense strand
ucaaagagucacugcauaa

SEQ ID NO: 1258661 - RNA, 19 nt, Homo sapiens
  misc_RNA (1)...(19): siRNA sense strand
ucauuggcaucauaguuua

SEQ ID NO: 1258662 - RNA, 19 nt, Homo sapiens
  misc_RNA (1)...(19): siRNA sense strand
ggacacagccgaauaucuc

SEQ ID NO: 1258663 - RNA, 19 nt, Homo sapiens
  misc_RNA (1)...(19): siRNA sense strand
gggcacggacuacugguua

SEQ ID NO: 1258664 - RNA, 19 nt, Homo sapiens
  misc_RNA (1)...(19): siRNA sense strand
aaagagucacugcauaaua

SEQ ID NO: 1258665 - RNA, 19 nt, Homo sapiens
  misc_RNA (1)...(19): siRNA sense strand
gcaagaaaaucgaucacuu

SEQ ID NO: 1258666 - RNA, 19 nt, Homo sapiens
  misc_RNA (1)...(19): siRNA sense strand
gcaaaggcuuccacaccau

SEQ ID NO: 1258667 - RNA, 19 nt, Homo sapiens
  misc_RNA (1)...(19): siRNA sense strand
gcaggaagaaugaagaagu

SEQ ID NO: 1258668 - RNA, 19 nt, Homo sapiens
  misc_RNA (1)...(19): siRNA sense strand
gcacggacuacugguuaua

SEQ ID NO: 1258669 - RNA, 19 nt, Homo sapiens
  misc_RNA (1)...(19): siRNA sense strand
acagagguauccagauguu

SEQ ID NO: 1258670 - RNA, 19 nt, Homo sapiens
  misc_RNA (1)...(19): siRNA sense strand
gacuaaaucuacaagugau

SEQ ID NO: 1258671 - RNA, 19 nt, Homo sapiens
  misc_RNA (1)...(19): siRNA sense strand
gaacaggacacagccgaau

SEQ ID NO: 1258672 - RNA, 19 nt, Homo sapiens
  misc_RNA (1)...(19): siRNA sense strand
ggaagaaugaagaaguaau

SEQ ID NO: 1258673 - RNA, 19 nt, Homo sapiens
  misc_RNA (1)...(19): siRNA sense strand
ggagccuucucuuucauca

SEQ ID NO: 1258674 - RNA, 19 nt, Homo sapiens
  misc_RNA (1)...(19): siRNA sense strand
cagcagacacaacgucauu

SEQ ID NO: 1258675 - RNA, 19 nt, Homo sapiens
  misc_RNA (1)...(19): siRNA sense strand
gugcaggacuaaaucuaca

SEQ ID NO: 1258676 - RNA, 19 nt, Homo sapiens
  misc_RNA (1)...(19): siRNA sense strand
agacacaacgucauucuca

SEQ ID NO: 1258677 - RNA, 19 nt, Homo sapiens
  misc_RNA (1)...(19): siRNA sense strand
ggguuaagcaacaucauug

SEQ ID NO: 1258678 - RNA, 19 nt, Homo sapiens
  misc_RNA (1)...(19): siRNA sense strand
agaggugugugcaggacua

SEQ ID NO: 1258679 - RNA, 19 nt, Homo sapiens
  misc_RNA (1)...(19): siRNA sense strand
cggaguuccugaagaaauc

SEQ ID NO: 1258680 - RNA, 19 nt, Homo sapiens
  misc_RNA (1)...(19): siRNA sense strand
uuucuacaguuccacaauu

SEQ ID NO: 1258681 - RNA, 19 nt, Homo sapiens
  misc_RNA (1)...(19): siRNA sense strand
uucaaagagucacugcaua

SEQ ID NO: 1258682 - RNA, 19 nt, Homo sapiens
  misc_RNA (1)...(19): siRNA sense strand
ccacaauuccacacccaaa

SEQ ID NO: 1258683 - RNA, 19 nt, Homo sapiens
  misc_RNA (1)...(19): siRNA sense strand
caucauuggcaucauaguu

SEQ ID NO: 1258684 - RNA, 19 nt, Homo sapiens
  misc_RNA (1)...(19): siRNA sense strand
caaagagucacugcauaau

SEQ ID NO: 1258685 - RNA, 19 nt, Homo sapiens
  misc_RNA (1)...(19): siRNA sense strand
uaggagccuuugccgcuuu

SEQ ID NO: 1258686 - RNA, 19 nt, Homo sapiens
  misc_RNA (1)...(19): siRNA sense strand
gaggaccugcugccuagaa

SEQ ID NO: 1258687 - RNA, 19 nt, Homo sapiens
  misc_RNA (1)...(19): siRNA sense strand
aggacuaaaucuacaagug

SEQ ID NO: 1258688 - RNA, 19 nt, Homo sapiens
  misc_RNA (1)...(19): siRNA sense strand
agagguauccagauguuga

SEQ ID NO: 1258689 - RNA, 19 nt, Homo sapiens
  misc_RNA (1)...(19): siRNA sense strand
caaagaguucaaagaguca

SEQ ID NO: 1258690 - RNA, 19 nt, Homo sapiens
  misc_RNA (1)...(19): siRNA sense strand
ggaccacgcuuuucuacag

SEQ ID NO: 1258691 - RNA, 19 nt, Homo sapiens
  misc_RNA (1)...(19): siRNA sense strand
gccgugcacaucuauauug

SEQ ID NO: 1258692 - RNA, 19 nt, Homo sapiens
  misc_RNA (1)...(19): siRNA sense strand
aaaccagcaggaagaauga

SEQ ID NO: 1258693 - RNA, 19 nt, Homo sapiens
  misc_RNA (1)...(19): siRNA sense strand
aaugaaaccagcaggaaga

SEQ ID NO: 1258694 - RNA, 19 nt, Homo sapiens
  misc_RNA (1)...(19): siRNA sense strand
cugaagaaaucuacuuuug

SEQ ID NO: 1258695 - RNA, 19 nt, Homo sapiens
  misc_RNA (1)...(19): siRNA sense strand
ccgugcacaucuauauuga

SEQ ID NO: 1258696 - RNA, 19 nt, Homo sapiens
  misc_RNA (1)...(19): siRNA sense strand
gcagacacaacgucauucu

SEQ ID NO: 1258697 - RNA, 19 nt, Homo sapiens
  misc_RNA (1)...(19): siRNA sense strand
aaaaguuacuccuaugguu

SEQ ID NO: 1258698 - RNA, 19 nt, Homo sapiens
  misc_RNA (1)...(19): siRNA sense strand
cccaaagaguucaaagagu

SEQ ID NO: 1258699 - RNA, 19 nt, Homo sapiens
  misc_RNA (1)...(19): siRNA sense strand
guucaaagagucacugcau

SEQ ID NO: 1258700 - RNA, 19 nt, Homo sapiens
  misc_RNA (1)...(19): siRNA sense strand
cagcaggaagaaugaagaa

SEQ ID NO: 1258701 - RNA, 19 nt, Homo sapiens
  misc_RNA (1)...(19): siRNA sense strand
ggcacggacuacugguuau

SEQ ID NO: 1258702 - RNA, 19 nt, Homo sapiens
  misc_RNA (1)...(19): siRNA sense strand
acaggacacagccgaauau

SEQ ID NO: 1258703 - RNA, 19 nt, Homo sapiens
  misc_RNA (1)...(19): siRNA sense strand
ggugugugcaggacuaaau

SEQ ID NO: 1258704 - RNA, 19 nt, Homo sapiens
  misc_RNA (1)...(19): siRNA sense strand
guugaucaccacuguagga

SEQ ID NO: 1258705 - RNA, 19 nt, Homo sapiens
  misc_RNA (1)...(19): siRNA sense strand
acggacuacugguuauauu

SEQ ID NO: 1258706 - RNA, 19 nt, Homo sapiens
  misc_RNA (1)...(19): siRNA sense strand
uuucggagccuucucuuuc

SEQ ID NO: 1258707 - RNA, 19 nt, Homo sapiens
  misc_RNA (1)...(19): siRNA sense strand
acaauuccacacccaaaga

SEQ ID NO: 1258708 - RNA, 19 nt, Homo sapiens
  misc_RNA (1)...(19): siRNA sense strand
gugucacgcugcuguucuu

SEQ ID NO: 1258709 - RNA, 19 nt, Homo sapiens
  misc_RNA (1)...(19): siRNA sense strand
gcaguuacgagccaaaucc

SEQ ID NO: 1258710 - RNA, 19 nt, Homo sapiens
  misc_RNA (1)...(19): siRNA sense strand
gauguugaucaccacugua

SEQ ID NO: 1258711 - RNA, 19 nt, Homo sapiens
  misc_RNA (1)...(19): siRNA sense strand
agauguugaucaccacugu

SEQ ID NO: 1258712 - RNA, 19 nt, Homo sapiens
  misc_RNA (1)...(19): siRNA sense strand
agccuucucuuucaucauc

SEQ ID NO: 1258713 - RNA, 19 nt, Homo sapiens
  misc_RNA (1)...(19): siRNA sense strand
gcaggguuaagcaacauca

SEQ ID NO: 1258714 - RNA, 19 nt, Homo sapiens
  misc_RNA (1)...(19): siRNA sense strand
caagaaaaucgaucacuuc

SEQ ID NO: 1258715 - RNA, 19 nt, Homo sapiens
  misc_RNA (1)...(19): siRNA sense strand
aacaggacacagccgaaua

SEQ ID NO: 1258716 - RNA, 19 nt, Homo sapiens
  misc_RNA (1)...(19): siRNA sense strand
caucgcagaaauuguagga

SEQ ID NO: 1258717 - RNA, 19 nt, Homo sapiens
  misc_RNA (1)...(19): siRNA sense strand
ggacuacugguuauauucc

SEQ ID NO: 1258718 - RNA, 19 nt, Homo sapiens
  misc_RNA (1)...(19): siRNA sense strand
ccagcaggaagaaugaaga

SEQ ID NO: 1258719 - RNA, 19 nt, Homo sapiens
  misc_RNA (1)...(19): siRNA sense strand
auaauaauccggccaacag

SEQ ID NO: 1258720 - RNA, 19 nt, Homo sapiens
  misc_RNA (1)...(19): siRNA sense strand
gacagagguauccagaugu

SEQ ID NO: 1258721 - RNA, 19 nt, Homo sapiens
  misc_RNA (1)...(19): siRNA sense strand
gcaacaucauuggcaucau

SEQ ID NO: 1258722 - RNA, 19 nt, Homo sapiens
  misc_RNA (1)...(19): siRNA sense strand
cugaagaugcugacuacga

SEQ ID NO: 1258723 - RNA, 19 nt, Homo sapiens
  misc_RNA (1)...(19): siRNA sense strand
gccuugagcccuuaaacuu

SEQ ID NO: 1258724 - RNA, 19 nt, Homo sapiens
  misc_RNA (1)...(19): siRNA sense strand
ucccugcucuccauacuuc

SEQ ID NO: 1258725 - RNA, 19 nt, Homo sapiens
  misc_RNA (1)...(19): siRNA sense strand
cuugagcccuuaaacuucu

SEQ ID NO: 1258726 - RNA, 19 nt, Homo sapiens
  misc_RNA (1)...(19): siRNA sense strand
gccuugagcccuuaaacuu

SEQ ID NO: 1258727 - RNA, 19 nt, Homo sapiens
  misc_RNA (1)...(19): siRNA sense strand
ucccugcucuccauacuuc

SEQ ID NO: 1258728 - RNA, 19 nt, Homo sapiens
  misc_RNA (1)...(19): siRNA sense strand
cuugagcccuuaaacuucu

SEQ ID NO: 1258729 - RNA, 19 nt, Homo sapiens
  misc_RNA (1)...(19): siRNA sense strand
gccuugagcccuuaaacuu

SEQ ID NO: 1258730 - RNA, 19 nt, Homo sapiens
  misc_RNA (1)...(19): siRNA sense strand
cuugagcccuuaaacuucu

SEQ ID NO: 1258731 - RNA, 19 nt, Homo sapiens
  misc_RNA (1)...(19): siRNA sense strand
gccuugagcccuuaaacuu

SEQ ID NO: 1258732 - RNA, 19 nt, Homo sapiens
  misc_RNA (1)...(19): siRNA sense strand
ucccugcucuccauacuuc

SEQ ID NO: 1258733 - RNA, 19 nt, Homo sapiens
  misc_RNA (1)...(19): siRNA sense strand
cuugagcccuuaaacuucu

SEQ ID NO: 1258734 - RNA, 19 nt, Homo sapiens
  misc_RNA (1)...(19): siRNA sense strand
gccuugagcccuuaaacuu

SEQ ID NO: 1258735 - RNA, 19 nt, Homo sapiens
  misc_RNA (1)...(19): siRNA sense strand
ucccugcucuccauacuuc

SEQ ID NO: 1258736 - RNA, 19 nt, Homo sapiens
  misc_RNA (1)...(19): siRNA sense strand
cuugagcccuuaaacuucu

SEQ ID NO: 1258737 - RNA, 19 nt, Homo sapiens
  misc_RNA (1)...(19): siRNA sense strand
gccuugagcccuuaaacuu

SEQ ID NO: 1258738 - RNA, 19 nt, Homo sapiens
  misc_RNA (1)...(19): siRNA sense strand
cuugagcccuuaaacuucu

SEQ ID NO: 1258739 - RNA, 19 nt, Homo sapiens
  misc_RNA (1)...(19): siRNA sense strand
gguaauggaugaugaagua

SEQ ID NO: 1258740 - RNA, 19 nt, Homo sapiens
  misc_RNA (1)...(19): siRNA sense strand
ggaauuggccuccuguauu

SEQ ID NO: 1258741 - RNA, 19 nt, Homo sapiens
  misc_RNA (1)...(19): siRNA sense strand
caacugcauucuauagauu

SEQ ID NO: 1258742 - RNA, 19 nt, Homo sapiens
  misc_RNA (1)...(19): siRNA sense strand
gcaacugcauucuauagau

SEQ ID NO: 1258743 - RNA, 19 nt, Homo sapiens
  misc_RNA (1)...(19): siRNA sense strand
agaagacuguguagcauuu

SEQ ID NO: 1258744 - RNA, 19 nt, Homo sapiens
  misc_RNA (1)...(19): siRNA sense strand
gcagagcccaccugaauga

SEQ ID NO: 1258745 - RNA, 19 nt, Homo sapiens
  misc_RNA (1)...(19): siRNA sense strand
ucgaacagaugacagagua

SEQ ID NO: 1258746 - RNA, 19 nt, Homo sapiens
  misc_RNA (1)...(19): siRNA sense strand
ccacaccauugcauauuug

SEQ ID NO: 1258747 - RNA, 19 nt, Homo sapiens
  misc_RNA (1)...(19): siRNA sense strand
gagaaaaugccaagaagua

SEQ ID NO: 1258748 - RNA, 19 nt, Homo sapiens
  misc_RNA (1)...(19): siRNA sense strand
gaacagaugacagaguaga

SEQ ID NO: 1258749 - RNA, 19 nt, Homo sapiens
  misc_RNA (1)...(19): siRNA sense strand
ugacagaguagaacgugua

SEQ ID NO: 1258750 - RNA, 19 nt, Homo sapiens
  misc_RNA (1)...(19): siRNA sense strand
ucacccagguaauggauga

SEQ ID NO: 1258751 - RNA, 19 nt, Homo sapiens
  misc_RNA (1)...(19): siRNA sense strand
ccaccugaaugaccuugaa

SEQ ID NO: 1258752 - RNA, 19 nt, Homo sapiens
  misc_RNA (1)...(19): siRNA sense strand
cuacagccauccugcacuu

SEQ ID NO: 1258753 - RNA, 19 nt, Homo sapiens
  misc_RNA (1)...(19): siRNA sense strand
aaaugaugcuuaugaguac

SEQ ID NO: 1258754 - RNA, 19 nt, Homo sapiens
  misc_RNA (1)...(19): siRNA sense strand
aauggaugaugaaguauuc

SEQ ID NO: 1258755 - RNA, 19 nt, Homo sapiens
  misc_RNA (1)...(19): siRNA sense strand
ccagaagacuguguagcau

SEQ ID NO: 1258756 - RNA, 19 nt, Homo sapiens
  misc_RNA (1)...(19): siRNA sense strand
acgcagagcccaccugaau

SEQ ID NO: 1258757 - RNA, 19 nt, Homo sapiens
  misc_RNA (1)...(19): siRNA sense strand
acagguugcugaaaaguaa

SEQ ID NO: 1258758 - RNA, 19 nt, Homo sapiens
  misc_RNA (1)...(19): siRNA sense strand
gcacuucagacuauuuguc

SEQ ID NO: 1258759 - RNA, 19 nt, Homo sapiens
  misc_RNA (1)...(19): siRNA sense strand
gcuuacagguugcugaaaa

SEQ ID NO: 1258760 - RNA, 19 nt, Homo sapiens
  misc_RNA (1)...(19): siRNA sense strand
cagaagacuguguagcauu

SEQ ID NO: 1258761 - RNA, 19 nt, Homo sapiens
  misc_RNA (1)...(19): siRNA sense strand
accacaccauugcauauuu

SEQ ID NO: 1258762 - RNA, 19 nt, Homo sapiens
  misc_RNA (1)...(19): siRNA sense strand
uuuguuggauauggaguua

SEQ ID NO: 1258763 - RNA, 19 nt, Homo sapiens
  misc_RNA (1)...(19): siRNA sense strand
cauccuaugcaacaauuau

SEQ ID NO: 1258764 - RNA, 19 nt, Homo sapiens
  misc_RNA (1)...(19): siRNA sense strand
gaagacuguguagcauuug

SEQ ID NO: 1258765 - RNA, 19 nt, Homo sapiens
  misc_RNA (1)...(19): siRNA sense strand
ccagguaauggaugaugaa

SEQ ID NO: 1258766 - RNA, 19 nt, Homo sapiens
  misc_RNA (1)...(19): siRNA sense strand
caauccagaagacugugua

SEQ ID NO: 1258767 - RNA, 19 nt, Homo sapiens
  misc_RNA (1)...(19): siRNA sense strand
cccagguaauggaugauga

SEQ ID NO: 1258768 - RNA, 19 nt, Homo sapiens
  misc_RNA (1)...(19): siRNA sense strand
agauugacaagaaagguuu

SEQ ID NO: 1258769 - RNA, 19 nt, Homo sapiens
  misc_RNA (1)...(19): siRNA sense strand
cuaccacaccauugcauau

SEQ ID NO: 1258770 - RNA, 19 nt, Homo sapiens
  misc_RNA (1)...(19): siRNA sense strand
gaaaaugccaagaaguauc

SEQ ID NO: 1258771 - RNA, 19 nt, Homo sapiens
  misc_RNA (1)...(19): siRNA sense strand
gcugaaaaguaaauuguac

SEQ ID NO: 1258772 - RNA, 19 nt, Homo sapiens
  misc_RNA (1)...(19): siRNA sense strand
caccauugcauauuugaca

SEQ ID NO: 1258773 - RNA, 19 nt, Homo sapiens
  misc_RNA (1)...(19): siRNA sense strand
uagauugacaagaaagguu

SEQ ID NO: 1258774 - RNA, 19 nt, Homo sapiens
  misc_RNA (1)...(19): siRNA sense strand
auccugcacuucagacuau

SEQ ID NO: 1258775 - RNA, 19 nt, Homo sapiens
  misc_RNA (1)...(19): siRNA sense strand
cauccugcacuucagacua

SEQ ID NO: 1258776 - RNA, 19 nt, Homo sapiens
  misc_RNA (1)...(19): siRNA sense strand
ggccuccuguauuccuuga

SEQ ID NO: 1258777 - RNA, 19 nt, Homo sapiens
  misc_RNA (1)...(19): siRNA sense strand
uggaauuggccuccuguau

SEQ ID NO: 1258778 - RNA, 19 nt, Homo sapiens
  misc_RNA (1)...(19): siRNA sense strand
gguaauggaugaugaagua

SEQ ID NO: 1258779 - RNA, 19 nt, Homo sapiens
  misc_RNA (1)...(19): siRNA sense strand
ggaauuggccuccuguauu

SEQ ID NO: 1258780 - RNA, 19 nt, Homo sapiens
  misc_RNA (1)...(19): siRNA sense strand
caacugcauucuauagauu

SEQ ID NO: 1258781 - RNA, 19 nt, Homo sapiens
  misc_RNA (1)...(19): siRNA sense strand
gcaacugcauucuauagau

SEQ ID NO: 1258782 - RNA, 19 nt, Homo sapiens
  misc_RNA (1)...(19): siRNA sense strand
agaagacuguguagcauuu

SEQ ID NO: 1258783 - RNA, 19 nt, Homo sapiens
  misc_RNA (1)...(19): siRNA sense strand
gcagagcccaccugaauga

SEQ ID NO: 1258784 - RNA, 19 nt, Homo sapiens
  misc_RNA (1)...(19): siRNA sense strand
ucgaacagaugacagagua

SEQ ID NO: 1258785 - RNA, 19 nt, Homo sapiens
  misc_RNA (1)...(19): siRNA sense strand
ccacaccauugcauauuug

SEQ ID NO: 1258786 - RNA, 19 nt, Homo sapiens
  misc_RNA (1)...(19): siRNA sense strand
gaacagaugacagaguaga

SEQ ID NO: 1258787 - RNA, 19 nt, Homo sapiens
  misc_RNA (1)...(19): siRNA sense strand
ugacagaguagaacgugua

SEQ ID NO: 1258788 - RNA, 19 nt, Homo sapiens
  misc_RNA (1)...(19): siRNA sense strand
ucacccagguaauggauga

SEQ ID NO: 1258789 - RNA, 19 nt, Homo sapiens
  misc_RNA (1)...(19): siRNA sense strand
ccaccugaaugaccuugaa

SEQ ID NO: 1258790 - RNA, 19 nt, Homo sapiens
  misc_RNA (1)...(19): siRNA sense strand
cuacagccauccugcacuu

SEQ ID NO: 1258791 - RNA, 19 nt, Homo sapiens
  misc_RNA (1)...(19): siRNA sense strand
aaaugaugcuuaugaguac

SEQ ID NO: 1258792 - RNA, 19 nt, Homo sapiens
  misc_RNA (1)...(19): siRNA sense strand
aauggaugaugaaguauuc

SEQ ID NO: 1258793 - RNA, 19 nt, Homo sapiens
  misc_RNA (1)...(19): siRNA sense strand
ccagaagacuguguagcau

SEQ ID NO: 1258794 - RNA, 19 nt, Homo sapiens
  misc_RNA (1)...(19): siRNA sense strand
acgcagagcccaccugaau

SEQ ID NO: 1258795 - RNA, 19 nt, Homo sapiens
  misc_RNA (1)...(19): siRNA sense strand
acagguugcugaaaaguaa

SEQ ID NO: 1258796 - RNA, 19 nt, Homo sapiens
  misc_RNA (1)...(19): siRNA sense strand
gcacuucagacuauuuguc

SEQ ID NO: 1258797 - RNA, 19 nt, Homo sapiens
  misc_RNA (1)...(19): siRNA sense strand
gcuuacagguugcugaaaa

SEQ ID NO: 1258798 - RNA, 19 nt, Homo sapiens
  misc_RNA (1)...(19): siRNA sense strand
cagaagacuguguagcauu

SEQ ID NO: 1258799 - RNA, 19 nt, Homo sapiens
  misc_RNA (1)...(19): siRNA sense strand
accacaccauugcauauuu

SEQ ID NO: 1258800 - RNA, 19 nt, Homo sapiens
  misc_RNA (1)...(19): siRNA sense strand
uuuguuggauauggaguua

SEQ ID NO: 1258801 - RNA, 19 nt, Homo sapiens
  misc_RNA (1)...(19): siRNA sense strand
cauccuaugcaacaauuau

SEQ ID NO: 1258802 - RNA, 19 nt, Homo sapiens
  misc_RNA (1)...(19): siRNA sense strand
gaagacuguguagcauuug

SEQ ID NO: 1258803 - RNA, 19 nt, Homo sapiens
  misc_RNA (1)...(19): siRNA sense strand
ccagguaauggaugaugaa

SEQ ID NO: 1258804 - RNA, 19 nt, Homo sapiens
  misc_RNA (1)...(19): siRNA sense strand
caauccagaagacugugua

SEQ ID NO: 1258805 - RNA, 19 nt, Homo sapiens
  misc_RNA (1)...(19): siRNA sense strand
cccagguaauggaugauga

SEQ ID NO: 1258806 - RNA, 19 nt, Homo sapiens
  misc_RNA (1)...(19): siRNA sense strand
agauugacaagaaagguuu

SEQ ID NO: 1258807 - RNA, 19 nt, Homo sapiens
  misc_RNA (1)...(19): siRNA sense strand
cuaccacaccauugcauau

SEQ ID NO: 1258808 - RNA, 19 nt, Homo sapiens
  misc_RNA (1)...(19): siRNA sense strand
caccauugcauauuugaca

SEQ ID NO: 1258809 - RNA, 19 nt, Homo sapiens
  misc_RNA (1)...(19): siRNA sense strand
gcugaaaaguaaauuguac

SEQ ID NO: 1258810 - RNA, 19 nt, Homo sapiens
  misc_RNA (1)...(19): siRNA sense strand
uagauugacaagaaagguu

SEQ ID NO: 1258811 - RNA, 19 nt, Homo sapiens
  misc_RNA (1)...(19): siRNA sense strand
auccugcacuucagacuau

SEQ ID NO: 1258812 - RNA, 19 nt, Homo sapiens
  misc_RNA (1)...(19): siRNA sense strand
cauccugcacuucagacua

SEQ ID NO: 1258813 - RNA, 19 nt, Homo sapiens
  misc_RNA (1)...(19): siRNA sense strand
ggccuccuguauuccuuga

SEQ ID NO: 1258814 - RNA, 19 nt, Homo sapiens
  misc_RNA (1)...(19): siRNA sense strand
uggaauuggccuccuguau

SEQ ID NO: 1258815 - RNA, 19 nt, Homo sapiens
  misc_RNA (1)...(19): siRNA sense strand
gguaauggaugaugaagua

SEQ ID NO: 1258816 - RNA, 19 nt, Homo sapiens
  misc_RNA (1)...(19): siRNA sense strand
ggaauuggccuccuguauu

SEQ ID NO: 1258817 - RNA, 19 nt, Homo sapiens
  misc_RNA (1)...(19): siRNA sense strand
caacugcauucuauagauu

SEQ ID NO: 1258818 - RNA, 19 nt, Homo sapiens
  misc_RNA (1)...(19): siRNA sense strand
gcaacugcauucuauagau

SEQ ID NO: 1258819 - RNA, 19 nt, Homo sapiens
  misc_RNA (1)...(19): siRNA sense strand
agaagacuguguagcauuu

SEQ ID NO: 1258820 - RNA, 19 nt, Homo sapiens
  misc_RNA (1)...(19): siRNA sense strand
gcagagcccaccugaauga

SEQ ID NO: 1258821 - RNA, 19 nt, Homo sapiens
  misc_RNA (1)...(19): siRNA sense strand
ucgaacagaugacagagua

SEQ ID NO: 1258822 - RNA, 19 nt, Homo sapiens
  misc_RNA (1)...(19): siRNA sense strand
ccacaccauugcauauuug

SEQ ID NO: 1258823 - RNA, 19 nt, Homo sapiens
  misc_RNA (1)...(19): siRNA sense strand
gaacagaugacagaguaga

SEQ ID NO: 1258824 - RNA, 19 nt, Homo sapiens
  misc_RNA (1)...(19): siRNA sense strand
ugacagaguagaacgugua

SEQ ID NO: 1258825 - RNA, 19 nt, Homo sapiens
  misc_RNA (1)...(19): siRNA sense strand
ucacccagguaauggauga

SEQ ID NO: 1258826 - RNA, 19 nt, Homo sapiens
  misc_RNA (1)...(19): siRNA sense strand
ccaccugaaugaccuugaa

SEQ ID NO: 1258827 - RNA, 19 nt, Homo sapiens
  misc_RNA (1)...(19): siRNA sense strand
cuacagccauccugcacuu

SEQ ID NO: 1258828 - RNA, 19 nt, Homo sapiens
  misc_RNA (1)...(19): siRNA sense strand
aaaugaugcuuaugaguac

SEQ ID NO: 1258829 - RNA, 19 nt, Homo sapiens
  misc_RNA (1)...(19): siRNA sense strand
aauggaugaugaaguauuc

SEQ ID NO: 1258830 - RNA, 19 nt, Homo sapiens
  misc_RNA (1)...(19): siRNA sense strand
ccagaagacuguguagcau

SEQ ID NO: 1258831 - RNA, 19 nt, Homo sapiens
  misc_RNA (1)...(19): siRNA sense strand
acgcagagcccaccugaau

SEQ ID NO: 1258832 - RNA, 19 nt, Homo sapiens
  misc_RNA (1)...(19): siRNA sense strand
acagguugcugaaaaguaa

SEQ ID NO: 1258833 - RNA, 19 nt, Homo sapiens
  misc_RNA (1)...(19): siRNA sense strand
gcacuucagacuauuuguc

SEQ ID NO: 1258834 - RNA, 19 nt, Homo sapiens
  misc_RNA (1)...(19): siRNA sense strand
gcuuacagguugcugaaaa

SEQ ID NO: 1258835 - RNA, 19 nt, Homo sapiens
  misc_RNA (1)...(19): siRNA sense strand
cagaagacuguguagcauu

SEQ ID NO: 1258836 - RNA, 19 nt, Homo sapiens
  misc_RNA (1)...(19): siRNA sense strand
accacaccauugcauauuu

SEQ ID NO: 1258837 - RNA, 19 nt, Homo sapiens
  misc_RNA (1)...(19): siRNA sense strand
uuuguuggauauggaguua

SEQ ID NO: 1258838 - RNA, 19 nt, Homo sapiens
  misc_RNA (1)...(19): siRNA sense strand
cauccuaugcaacaauuau

SEQ ID NO: 1258839 - RNA, 19 nt, Homo sapiens
  misc_RNA (1)...(19): siRNA sense strand
gaagacuguguagcauuug

SEQ ID NO: 1258840 - RNA, 19 nt, Homo sapiens
  misc_RNA (1)...(19): siRNA sense strand
ccagguaauggaugaugaa

SEQ ID NO: 1258841 - RNA, 19 nt, Homo sapiens
  misc_RNA (1)...(19): siRNA sense strand
caauccagaagacugugua

SEQ ID NO: 1258842 - RNA, 19 nt, Homo sapiens
  misc_RNA (1)...(19): siRNA sense strand
cccagguaauggaugauga

SEQ ID NO: 1258843 - RNA, 19 nt, Homo sapiens
  misc_RNA (1)...(19): siRNA sense strand
agauugacaagaaagguuu

SEQ ID NO: 1258844 - RNA, 19 nt, Homo sapiens
  misc_RNA (1)...(19): siRNA sense strand
cuaccacaccauugcauau

SEQ ID NO: 1258845 - RNA, 19 nt, Homo sapiens
  misc_RNA (1)...(19): siRNA sense strand
caccauugcauauuugaca

SEQ ID NO: 1258846 - RNA, 19 nt, Homo sapiens
  misc_RNA (1)...(19): siRNA sense strand
gcugaaaaguaaauuguac

SEQ ID NO: 1258847 - RNA, 19 nt, Homo sapiens
  misc_RNA (1)...(19): siRNA sense strand
uagauugacaagaaagguu

SEQ ID NO: 1258848 - RNA, 19 nt, Homo sapiens
  misc_RNA (1)...(19): siRNA sense strand
auccugcacuucagacuau

SEQ ID NO: 1258849 - RNA, 19 nt, Homo sapiens
  misc_RNA (1)...(19): siRNA sense strand
cauccugcacuucagacua

SEQ ID NO: 1258850 - RNA, 19 nt, Homo sapiens
  misc_RNA (1)...(19): siRNA sense strand
ggccuccuguauuccuuga

SEQ ID NO: 1258851 - RNA, 19 nt, Homo sapiens
  misc_RNA (1)...(19): siRNA sense strand
uggaauuggccuccuguau

SEQ ID NO: 1258852 - RNA, 19 nt, Homo sapiens
  misc_RNA (1)...(19): siRNA sense strand
gguaauggaugaugaagua

SEQ ID NO: 1258853 - RNA, 19 nt, Homo sapiens
  misc_RNA (1)...(19): siRNA sense strand
ggaauuggccuccuguauu

SEQ ID NO: 1258854 - RNA, 19 nt, Homo sapiens
  misc_RNA (1)...(19): siRNA sense strand
caacugcauucuauagauu

SEQ ID NO: 1258855 - RNA, 19 nt, Homo sapiens
  misc_RNA (1)...(19): siRNA sense strand
gcaacugcauucuauagau

SEQ ID NO: 1258856 - RNA, 19 nt, Homo sapiens
  misc_RNA (1)...(19): siRNA sense strand
agaagacuguguagcauuu

SEQ ID NO: 1258857 - RNA, 19 nt, Homo sapiens
  misc_RNA (1)...(19): siRNA sense strand
gcagagcccaccugaauga

SEQ ID NO: 1258858 - RNA, 19 nt, Homo sapiens
  misc_RNA (1)...(19): siRNA sense strand
ucgaacagaugacagagua

SEQ ID NO: 1258859 - RNA, 19 nt, Homo sapiens
  misc_RNA (1)...(19): siRNA sense strand
ccacaccauugcauauuug

SEQ ID NO: 1258860 - RNA, 19 nt, Homo sapiens
  misc_RNA (1)...(19): siRNA sense strand
gaacagaugacagaguaga

SEQ ID NO: 1258861 - RNA, 19 nt, Homo sapiens
  misc_RNA (1)...(19): siRNA sense strand
ugacagaguagaacgugua

SEQ ID NO: 1258862 - RNA, 19 nt, Homo sapiens
  misc_RNA (1)...(19): siRNA sense strand
ucacccagguaauggauga

SEQ ID NO: 1258863 - RNA, 19 nt, Homo sapiens
  misc_RNA (1)...(19): siRNA sense strand
ccaccugaaugaccuugaa

SEQ ID NO: 1258864 - RNA, 19 nt, Homo sapiens
  misc_RNA (1)...(19): siRNA sense strand
cuacagccauccugcacuu

SEQ ID NO: 1258865 - RNA, 19 nt, Homo sapiens
  misc_RNA (1)...(19): siRNA sense strand
aaaugaugcuuaugaguac

SEQ ID NO: 1258866 - RNA, 19 nt, Homo sapiens
  misc_RNA (1)...(19): siRNA sense strand
aauggaugaugaaguauuc

SEQ ID NO: 1258867 - RNA, 19 nt, Homo sapiens
  misc_RNA (1)...(19): siRNA sense strand
ccagaagacuguguagcau

SEQ ID NO: 1258868 - RNA, 19 nt, Homo sapiens
  misc_RNA (1)...(19): siRNA sense strand
acgcagagcccaccugaau

SEQ ID NO: 1258869 - RNA, 19 nt, Homo sapiens
  misc_RNA (1)...(19): siRNA sense strand
acagguugcugaaaaguaa

SEQ ID NO: 1258870 - RNA, 19 nt, Homo sapiens
  misc_RNA (1)...(19): siRNA sense strand
gcacuucagacuauuuguc

SEQ ID NO: 1258871 - RNA, 19 nt, Homo sapiens
  misc_RNA (1)...(19): siRNA sense strand
gcuuacagguugcugaaaa

SEQ ID NO: 1258872 - RNA, 19 nt, Homo sapiens
  misc_RNA (1)...(19): siRNA sense strand
cagaagacuguguagcauu

SEQ ID NO: 1258873 - RNA, 19 nt, Homo sapiens
  misc_RNA (1)...(19): siRNA sense strand
accacaccauugcauauuu

SEQ ID NO: 1258874 - RNA, 19 nt, Homo sapiens
  misc_RNA (1)...(19): siRNA sense strand
uuuguuggauauggaguua

SEQ ID NO: 1258875 - RNA, 19 nt, Homo sapiens
  misc_RNA (1)...(19): siRNA sense strand
cauccuaugcaacaauuau

SEQ ID NO: 1258876 - RNA, 19 nt, Homo sapiens
  misc_RNA (1)...(19): siRNA sense strand
gaagacuguguagcauuug

SEQ ID NO: 1258877 - RNA, 19 nt, Homo sapiens
  misc_RNA (1)...(19): siRNA sense strand
ccagguaauggaugaugaa

SEQ ID NO: 1258878 - RNA, 19 nt, Homo sapiens
  misc_RNA (1)...(19): siRNA sense strand
caauccagaagacugugua

SEQ ID NO: 1258879 - RNA, 19 nt, Homo sapiens
  misc_RNA (1)...(19): siRNA sense strand
cccagguaauggaugauga

SEQ ID NO: 1258880 - RNA, 19 nt, Homo sapiens
  misc_RNA (1)...(19): siRNA sense strand
agauugacaagaaagguuu

SEQ ID NO: 1258881 - RNA, 19 nt, Homo sapiens
  misc_RNA (1)...(19): siRNA sense strand
cuaccacaccauugcauau

SEQ ID NO: 1258882 - RNA, 19 nt, Homo sapiens
  misc_RNA (1)...(19): siRNA sense strand
caccauugcauauuugaca

SEQ ID NO: 1258883 - RNA, 19 nt, Homo sapiens
  misc_RNA (1)...(19): siRNA sense strand
gcugaaaaguaaauuguac

SEQ ID NO: 1258884 - RNA, 19 nt, Homo sapiens
  misc_RNA (1)...(19): siRNA sense strand
uagauugacaagaaagguu

SEQ ID NO: 1258885 - RNA, 19 nt, Homo sapiens
  misc_RNA (1)...(19): siRNA sense strand
auccugcacuucagacuau

SEQ ID NO: 1258886 - RNA, 19 nt, Homo sapiens
  misc_RNA (1)...(19): siRNA sense strand
cauccugcacuucagacua

SEQ ID NO: 1258887 - RNA, 19 nt, Homo sapiens
  misc_RNA (1)...(19): siRNA sense strand
ggccuccuguauuccuuga

SEQ ID NO: 1258888 - RNA, 19 nt, Homo sapiens
  misc_RNA (1)...(19): siRNA sense strand
uggaauuggccuccuguau

SEQ ID NO: 1258889 - RNA, 19 nt, Homo sapiens
  misc_RNA (1)...(19): siRNA sense strand
gguaauggaugaugaagua

SEQ ID NO: 1258890 - RNA, 19 nt, Homo sapiens
  misc_RNA (1)...(19): siRNA sense strand
ggaauuggccuccuguauu

SEQ ID NO: 1258891 - RNA, 19 nt, Homo sapiens
  misc_RNA (1)...(19): siRNA sense strand
caacugcauucuauagauu

SEQ ID NO: 1258892 - RNA, 19 nt, Homo sapiens
  misc_RNA (1)...(19): siRNA sense strand
gcaacugcauucuauagau

SEQ ID NO: 1258893 - RNA, 19 nt, Homo sapiens
  misc_RNA (1)...(19): siRNA sense strand
agaagacuguguagcauuu

SEQ ID NO: 1258894 - RNA, 19 nt, Homo sapiens
  misc_RNA (1)...(19): siRNA sense strand
gcagagcccaccugaauga

SEQ ID NO: 1258895 - RNA, 19 nt, Homo sapiens
  misc_RNA (1)...(19): siRNA sense strand
ucgaacagaugacagagua

SEQ ID NO: 1258896 - RNA, 19 nt, Homo sapiens
  misc_RNA (1)...(19): siRNA sense strand
ccacaccauugcauauuug

SEQ ID NO: 1258897 - RNA, 19 nt, Homo sapiens
  misc_RNA (1)...(19): siRNA sense strand
gagaaaaugccaagaagua

SEQ ID NO: 1258898 - RNA, 19 nt, Homo sapiens
  misc_RNA (1)...(19): siRNA sense strand
gaacagaugacagaguaga

SEQ ID NO: 1258899 - RNA, 19 nt, Homo sapiens
  misc_RNA (1)...(19): siRNA sense strand
ugacagaguagaacgugua

SEQ ID NO: 1258900 - RNA, 19 nt, Homo sapiens
  misc_RNA (1)...(19): siRNA sense strand
ucacccagguaauggauga

SEQ ID NO: 1258901 - RNA, 19 nt, Homo sapiens
  misc_RNA (1)...(19): siRNA sense strand
ccaccugaaugaccuugaa

SEQ ID NO: 1258902 - RNA, 19 nt, Homo sapiens
  misc_RNA (1)...(19): siRNA sense strand
cuacagccauccugcacuu

SEQ ID NO: 1258903 - RNA, 19 nt, Homo sapiens
  misc_RNA (1)...(19): siRNA sense strand
aaaugaugcuuaugaguac

SEQ ID NO: 1258904 - RNA, 19 nt, Homo sapiens
  misc_RNA (1)...(19): siRNA sense strand
aauggaugaugaaguauuc

SEQ ID NO: 1258905 - RNA, 19 nt, Homo sapiens
  misc_RNA (1)...(19): siRNA sense strand
ccagaagacuguguagcau

SEQ ID NO: 1258906 - RNA, 19 nt, Homo sapiens
  misc_RNA (1)...(19): siRNA sense strand
acgcagagcccaccugaau

SEQ ID NO: 1258907 - RNA, 19 nt, Homo sapiens
  misc_RNA (1)...(19): siRNA sense strand
acagguugcugaaaaguaa

SEQ ID NO: 1258908 - RNA, 19 nt, Homo sapiens
  misc_RNA (1)...(19): siRNA sense strand
gcacuucagacuauuuguc

SEQ ID NO: 1258909 - RNA, 19 nt, Homo sapiens
  misc_RNA (1)...(19): siRNA sense strand
gcuuacagguugcugaaaa

SEQ ID NO: 1258910 - RNA, 19 nt, Homo sapiens
  misc_RNA (1)...(19): siRNA sense strand
cagaagacuguguagcauu

SEQ ID NO: 1258911 - RNA, 19 nt, Homo sapiens
  misc_RNA (1)...(19): siRNA sense strand
accacaccauugcauauuu

SEQ ID NO: 1258912 - RNA, 19 nt, Homo sapiens
  misc_RNA (1)...(19): siRNA sense strand
uuuguuggauauggaguua

SEQ ID NO: 1258913 - RNA, 19 nt, Homo sapiens
  misc_RNA (1)...(19): siRNA sense strand
cauccuaugcaacaauuau

SEQ ID NO: 1258914 - RNA, 19 nt, Homo sapiens
  misc_RNA (1)...(19): siRNA sense strand
gaagacuguguagcauuug

SEQ ID NO: 1258915 - RNA, 19 nt, Homo sapiens
  misc_RNA (1)...(19): siRNA sense strand
ccagguaauggaugaugaa

SEQ ID NO: 1258916 - RNA, 19 nt, Homo sapiens
  misc_RNA (1)...(19): siRNA sense strand
caauccagaagacugugua

SEQ ID NO: 1258917 - RNA, 19 nt, Homo sapiens
  misc_RNA (1)...(19): siRNA sense strand
cccagguaauggaugauga

SEQ ID NO: 1258918 - RNA, 19 nt, Homo sapiens
  misc_RNA (1)...(19): siRNA sense strand
agauugacaagaaagguuu

SEQ ID NO: 1258919 - RNA, 19 nt, Homo sapiens
  misc_RNA (1)...(19): siRNA sense strand
cuaccacaccauugcauau

SEQ ID NO: 1258920 - RNA, 19 nt, Homo sapiens
  misc_RNA (1)...(19): siRNA sense strand
gaaaaugccaagaaguauc

SEQ ID NO: 1258921 - RNA, 19 nt, Homo sapiens
  misc_RNA (1)...(19): siRNA sense strand
gcugaaaaguaaauuguac

SEQ ID NO: 1258922 - RNA, 19 nt, Homo sapiens
  misc_RNA (1)...(19): siRNA sense strand
caccauugcauauuugaca

SEQ ID NO: 1258923 - RNA, 19 nt, Homo sapiens
  misc_RNA (1)...(19): siRNA sense strand
uagauugacaagaaagguu

SEQ ID NO: 1258924 - RNA, 19 nt, Homo sapiens
  misc_RNA (1)...(19): siRNA sense strand
auccugcacuucagacuau

SEQ ID NO: 1258925 - RNA, 19 nt, Homo sapiens
  misc_RNA (1)...(19): siRNA sense strand
cauccugcacuucagacua

SEQ ID NO: 1258926 - RNA, 19 nt, Homo sapiens
  misc_RNA (1)...(19): siRNA sense strand
ggccuccuguauuccuuga

SEQ ID NO: 1258927 - RNA, 19 nt, Homo sapiens
  misc_RNA (1)...(19): siRNA sense strand
uggaauuggccuccuguau

SEQ ID NO: 1258928 - RNA, 19 nt, Homo sapiens
  misc_RNA (1)...(19): siRNA sense strand
gguaauggaugaugaagua

SEQ ID NO: 1258929 - RNA, 19 nt, Homo sapiens
  misc_RNA (1)...(19): siRNA sense strand
ggaauuggccuccuguauu

SEQ ID NO: 1258930 - RNA, 19 nt, Homo sapiens
  misc_RNA (1)...(19): siRNA sense strand
caacugcauucuauagauu

SEQ ID NO: 1258931 - RNA, 19 nt, Homo sapiens
  misc_RNA (1)...(19): siRNA sense strand
gcaacugcauucuauagau

SEQ ID NO: 1258932 - RNA, 19 nt, Homo sapiens
  misc_RNA (1)...(19): siRNA sense strand
agaagacuguguagcauuu

SEQ ID NO: 1258933 - RNA, 19 nt, Homo sapiens
  misc_RNA (1)...(19): siRNA sense strand
gcagagcccaccugaauga

SEQ ID NO: 1258934 - RNA, 19 nt, Homo sapiens
  misc_RNA (1)...(19): siRNA sense strand
ucgaacagaugacagagua

SEQ ID NO: 1258935 - RNA, 19 nt, Homo sapiens
  misc_RNA (1)...(19): siRNA sense strand
ccacaccauugcauauuug

SEQ ID NO: 1258936 - RNA, 19 nt, Homo sapiens
  misc_RNA (1)...(19): siRNA sense strand
gaacagaugacagaguaga

SEQ ID NO: 1258937 - RNA, 19 nt, Homo sapiens
  misc_RNA (1)...(19): siRNA sense strand
ugacagaguagaacgugua

SEQ ID NO: 1258938 - RNA, 19 nt, Homo sapiens
  misc_RNA (1)...(19): siRNA sense strand
ucacccagguaauggauga

SEQ ID NO: 1258939 - RNA, 19 nt, Homo sapiens
  misc_RNA (1)...(19): siRNA sense strand
ccaccugaaugaccuugaa

SEQ ID NO: 1258940 - RNA, 19 nt, Homo sapiens
  misc_RNA (1)...(19): siRNA sense strand
cuacagccauccugcacuu

SEQ ID NO: 1258941 - RNA, 19 nt, Homo sapiens
  misc_RNA (1)...(19): siRNA sense strand
aaaugaugcuuaugaguac

SEQ ID NO: 1258942 - RNA, 19 nt, Homo sapiens
  misc_RNA (1)...(19): siRNA sense strand
aauggaugaugaaguauuc

SEQ ID NO: 1258943 - RNA, 19 nt, Homo sapiens
  misc_RNA (1)...(19): siRNA sense strand
ccagaagacuguguagcau

SEQ ID NO: 1258944 - RNA, 19 nt, Homo sapiens
  misc_RNA (1)...(19): siRNA sense strand
acgcagagcccaccugaau

SEQ ID NO: 1258945 - RNA, 19 nt, Homo sapiens
  misc_RNA (1)...(19): siRNA sense strand
acagguugcugaaaaguaa

SEQ ID NO: 1258946 - RNA, 19 nt, Homo sapiens
  misc_RNA (1)...(19): siRNA sense strand
gcacuucagacuauuuguc

SEQ ID NO: 1258947 - RNA, 19 nt, Homo sapiens
  misc_RNA (1)...(19): siRNA sense strand
gcuuacagguugcugaaaa

SEQ ID NO: 1258948 - RNA, 19 nt, Homo sapiens
  misc_RNA (1)...(19): siRNA sense strand
cagaagacuguguagcauu

SEQ ID NO: 1258949 - RNA, 19 nt, Homo sapiens
  misc_RNA (1)...(19): siRNA sense strand
accacaccauugcauauuu

SEQ ID NO: 1258950 - RNA, 19 nt, Homo sapiens
  misc_RNA (1)...(19): siRNA sense strand
uuuguuggauauggaguua

SEQ ID NO: 1258951 - RNA, 19 nt, Homo sapiens
  misc_RNA (1)...(19): siRNA sense strand
cauccuaugcaacaauuau

SEQ ID NO: 1258952 - RNA, 19 nt, Homo sapiens
  misc_RNA (1)...(19): siRNA sense strand
gaagacuguguagcauuug

SEQ ID NO: 1258953 - RNA, 19 nt, Homo sapiens
  misc_RNA (1)...(19): siRNA sense strand
ccagguaauggaugaugaa

SEQ ID NO: 1258954 - RNA, 19 nt, Homo sapiens
  misc_RNA (1)...(19): siRNA sense strand
caauccagaagacugugua

SEQ ID NO: 1258955 - RNA, 19 nt, Homo sapiens
  misc_RNA (1)...(19): siRNA sense strand
cccagguaauggaugauga

SEQ ID NO: 1258956 - RNA, 19 nt, Homo sapiens
  misc_RNA (1)...(19): siRNA sense strand
agauugacaagaaagguuu

SEQ ID NO: 1258957 - RNA, 19 nt, Homo sapiens
  misc_RNA (1)...(19): siRNA sense strand
cuaccacaccauugcauau

SEQ ID NO: 1258958 - RNA, 19 nt, Homo sapiens
  misc_RNA (1)...(19): siRNA sense strand
caccauugcauauuugaca

SEQ ID NO: 1258959 - RNA, 19 nt, Homo sapiens
  misc_RNA (1)...(19): siRNA sense strand
gcugaaaaguaaauuguac

SEQ ID NO: 1258960 - RNA, 19 nt, Homo sapiens
  misc_RNA (1)...(19): siRNA sense strand
uagauugacaagaaagguu

SEQ ID NO: 1258961 - RNA, 19 nt, Homo sapiens
  misc_RNA (1)...(19): siRNA sense strand
auccugcacuucagacuau

SEQ ID NO: 1258962 - RNA, 19 nt, Homo sapiens
  misc_RNA (1)...(19): siRNA sense strand
cauccugcacuucagacua

SEQ ID NO: 1258963 - RNA, 19 nt, Homo sapiens
  misc_RNA (1)...(19): siRNA sense strand
ggccuccuguauuccuuga

SEQ ID NO: 1258964 - RNA, 19 nt, Homo sapiens
  misc_RNA (1)...(19): siRNA sense strand
uggaauuggccuccuguau

SEQ ID NO: 1258965 - RNA, 19 nt, Homo sapiens
  misc_RNA (1)...(19): siRNA sense strand
gguaauggaugaugaagua

SEQ ID NO: 1258966 - RNA, 19 nt, Homo sapiens
  misc_RNA (1)...(19): siRNA sense strand
ggaauuggccuccuguauu

SEQ ID NO: 1258967 - RNA, 19 nt, Homo sapiens
  misc_RNA (1)...(19): siRNA sense strand
caacugcauucuauagauu

SEQ ID NO: 1258968 - RNA, 19 nt, Homo sapiens
  misc_RNA (1)...(19): siRNA sense strand
gcaacugcauucuauagau

SEQ ID NO: 1258969 - RNA, 19 nt, Homo sapiens
  misc_RNA (1)...(19): siRNA sense strand
agaagacuguguagcauuu

SEQ ID NO: 1258970 - RNA, 19 nt, Homo sapiens
  misc_RNA (1)...(19): siRNA sense strand
gcagagcccaccugaauga

SEQ ID NO: 1258971 - RNA, 19 nt, Homo sapiens
  misc_RNA (1)...(19): siRNA sense strand
ucgaacagaugacagagua

SEQ ID NO: 1258972 - RNA, 19 nt, Homo sapiens
  misc_RNA (1)...(19): siRNA sense strand
ccacaccauugcauauuug

SEQ ID NO: 1258973 - RNA, 19 nt, Homo sapiens
  misc_RNA (1)...(19): siRNA sense strand
gaacagaugacagaguaga

SEQ ID NO: 1258974 - RNA, 19 nt, Homo sapiens
  misc_RNA (1)...(19): siRNA sense strand
ugacagaguagaacgugua

SEQ ID NO: 1258975 - RNA, 19 nt, Homo sapiens
  misc_RNA (1)...(19): siRNA sense strand
ucacccagguaauggauga

SEQ ID NO: 1258976 - RNA, 19 nt, Homo sapiens
  misc_RNA (1)...(19): siRNA sense strand
ccaccugaaugaccuugaa

SEQ ID NO: 1258977 - RNA, 19 nt, Homo sapiens
  misc_RNA (1)...(19): siRNA sense strand
cuacagccauccugcacuu

SEQ ID NO: 1258978 - RNA, 19 nt, Homo sapiens
  misc_RNA (1)...(19): siRNA sense strand
aaaugaugcuuaugaguac

SEQ ID NO: 1258979 - RNA, 19 nt, Homo sapiens
  misc_RNA (1)...(19): siRNA sense strand
aauggaugaugaaguauuc

SEQ ID NO: 1258980 - RNA, 19 nt, Homo sapiens
  misc_RNA (1)...(19): siRNA sense strand
ccagaagacuguguagcau

SEQ ID NO: 1258981 - RNA, 19 nt, Homo sapiens
  misc_RNA (1)...(19): siRNA sense strand
acgcagagcccaccugaau

SEQ ID NO: 1258982 - RNA, 19 nt, Homo sapiens
  misc_RNA (1)...(19): siRNA sense strand
acagguugcugaaaaguaa

SEQ ID NO: 1258983 - RNA, 19 nt, Homo sapiens
  misc_RNA (1)...(19): siRNA sense strand
gcacuucagacuauuuguc

SEQ ID NO: 1258984 - RNA, 19 nt, Homo sapiens
  misc_RNA (1)...(19): siRNA sense strand
gcuuacagguugcugaaaa

SEQ ID NO: 1258985 - RNA, 19 nt, Homo sapiens
  misc_RNA (1)...(19): siRNA sense strand
cagaagacuguguagcauu

SEQ ID NO: 1258986 - RNA, 19 nt, Homo sapiens
  misc_RNA (1)...(19): siRNA sense strand
accacaccauugcauauuu

SEQ ID NO: 1258987 - RNA, 19 nt, Homo sapiens
  misc_RNA (1)...(19): siRNA sense strand
uuuguuggauauggaguua

SEQ ID NO: 1258988 - RNA, 19 nt, Homo sapiens
  misc_RNA (1)...(19): siRNA sense strand
cauccuaugcaacaauuau

SEQ ID NO: 1258989 - RNA, 19 nt, Homo sapiens
  misc_RNA (1)...(19): siRNA sense strand
gaagacuguguagcauuug

SEQ ID NO: 1258990 - RNA, 19 nt, Homo sapiens
  misc_RNA (1)...(19): siRNA sense strand
ccagguaauggaugaugaa

SEQ ID NO: 1258991 - RNA, 19 nt, Homo sapiens
  misc_RNA (1)...(19): siRNA sense strand
caauccagaagacugugua

SEQ ID NO: 1258992 - RNA, 19 nt, Homo sapiens
  misc_RNA (1)...(19): siRNA sense strand
cccagguaauggaugauga

SEQ ID NO: 1258993 - RNA, 19 nt, Homo sapiens
  misc_RNA (1)...(19): siRNA sense strand
agauugacaagaaagguuu

SEQ ID NO: 1258994 - RNA, 19 nt, Homo sapiens
  misc_RNA (1)...(19): siRNA sense strand
cuaccacaccauugcauau

SEQ ID NO: 1258995 - RNA, 19 nt, Homo sapiens
  misc_RNA (1)...(19): siRNA sense strand
caccauugcauauuugaca

SEQ ID NO: 1258996 - RNA, 19 nt, Homo sapiens
  misc_RNA (1)...(19): siRNA sense strand
gcugaaaaguaaauuguac

SEQ ID NO: 1258997 - RNA, 19 nt, Homo sapiens
  misc_RNA (1)...(19): siRNA sense strand
uagauugacaagaaagguu

SEQ ID NO: 1258998 - RNA, 19 nt, Homo sapiens
  misc_RNA (1)...(19): siRNA sense strand
auccugcacuucagacuau

SEQ ID NO: 1258999 - RNA, 19 nt, Homo sapiens
  misc_RNA (1)...(19): siRNA sense strand
cauccugcacuucagacua

SEQ ID NO: 1259000 - RNA, 19 nt, Homo sapiens
  misc_RNA (1)...(19): siRNA sense strand
ggccuccuguauuccuuga

SEQ ID NO: 1259001 - RNA, 19 nt, Homo sapiens
  misc_RNA (1)...(19): siRNA sense strand
uggaauuggccuccuguau

SEQ ID NO: 1259002 - RNA, 19 nt, Homo sapiens
  misc_RNA (1)...(19): siRNA sense strand
gguaauggaugaugaagua

SEQ ID NO: 1259003 - RNA, 19 nt, Homo sapiens
  misc_RNA (1)...(19): siRNA sense strand
ggaauuggccuccuguauu

SEQ ID NO: 1259004 - RNA, 19 nt, Homo sapiens
  misc_RNA (1)...(19): siRNA sense strand
caacugcauucuauagauu

SEQ ID NO: 1259005 - RNA, 19 nt, Homo sapiens
  misc_RNA (1)...(19): siRNA sense strand
gcaacugcauucuauagau

SEQ ID NO: 1259006 - RNA, 19 nt, Homo sapiens
  misc_RNA (1)...(19): siRNA sense strand
agaagacuguguagcauuu

SEQ ID NO: 1259007 - RNA, 19 nt, Homo sapiens
  misc_RNA (1)...(19): siRNA sense strand
gcagagcccaccugaauga

SEQ ID NO: 1259008 - RNA, 19 nt, Homo sapiens
  misc_RNA (1)...(19): siRNA sense strand
ucgaacagaugacagagua

SEQ ID NO: 1259009 - RNA, 19 nt, Homo sapiens
  misc_RNA (1)...(19): siRNA sense strand
ccacaccauugcauauuug

SEQ ID NO: 1259010 - RNA, 19 nt, Homo sapiens
  misc_RNA (1)...(19): siRNA sense strand
gaacagaugacagaguaga

SEQ ID NO: 1259011 - RNA, 19 nt, Homo sapiens
  misc_RNA (1)...(19): siRNA sense strand
ugacagaguagaacgugua

SEQ ID NO: 1259012 - RNA, 19 nt, Homo sapiens
  misc_RNA (1)...(19): siRNA sense strand
ucacccagguaauggauga

SEQ ID NO: 1259013 - RNA, 19 nt, Homo sapiens
  misc_RNA (1)...(19): siRNA sense strand
ccaccugaaugaccuugaa

SEQ ID NO: 1259014 - RNA, 19 nt, Homo sapiens
  misc_RNA (1)...(19): siRNA sense strand
cuacagccauccugcacuu

SEQ ID NO: 1259015 - RNA, 19 nt, Homo sapiens
  misc_RNA (1)...(19): siRNA sense strand
aaaugaugcuuaugaguac

SEQ ID NO: 1259016 - RNA, 19 nt, Homo sapiens
  misc_RNA (1)...(19): siRNA sense strand
aauggaugaugaaguauuc

SEQ ID NO: 1259017 - RNA, 19 nt, Homo sapiens
  misc_RNA (1)...(19): siRNA sense strand
ccagaagacuguguagcau

SEQ ID NO: 1259018 - RNA, 19 nt, Homo sapiens
  misc_RNA (1)...(19): siRNA sense strand
acgcagagcccaccugaau

SEQ ID NO: 1259019 - RNA, 19 nt, Homo sapiens
  misc_RNA (1)...(19): siRNA sense strand
acagguugcugaaaaguaa

SEQ ID NO: 1259020 - RNA, 19 nt, Homo sapiens
  misc_RNA (1)...(19): siRNA sense strand
gcacuucagacuauuuguc

SEQ ID NO: 1259021 - RNA, 19 nt, Homo sapiens
  misc_RNA (1)...(19): siRNA sense strand
gcuuacagguugcugaaaa

SEQ ID NO: 1259022 - RNA, 19 nt, Homo sapiens
  misc_RNA (1)...(19): siRNA sense strand
cagaagacuguguagcauu

SEQ ID NO: 1259023 - RNA, 19 nt, Homo sapiens
  misc_RNA (1)...(19): siRNA sense strand
accacaccauugcauauuu

SEQ ID NO: 1259024 - RNA, 19 nt, Homo sapiens
  misc_RNA (1)...(19): siRNA sense strand
uuuguuggauauggaguua

SEQ ID NO: 1259025 - RNA, 19 nt, Homo sapiens
  misc_RNA (1)...(19): siRNA sense strand
cauccuaugcaacaauuau

SEQ ID NO: 1259026 - RNA, 19 nt, Homo sapiens
  misc_RNA (1)...(19): siRNA sense strand
gaagacuguguagcauuug

SEQ ID NO: 1259027 - RNA, 19 nt, Homo sapiens
  misc_RNA (1)...(19): siRNA sense strand
ccagguaauggaugaugaa

SEQ ID NO: 1259028 - RNA, 19 nt, Homo sapiens
  misc_RNA (1)...(19): siRNA sense strand
caauccagaagacugugua

SEQ ID NO: 1259029 - RNA, 19 nt, Homo sapiens
  misc_RNA (1)...(19): siRNA sense strand
cccagguaauggaugauga

SEQ ID NO: 1259030 - RNA, 19 nt, Homo sapiens
  misc_RNA (1)...(19): siRNA sense strand
agauugacaagaaagguuu

SEQ ID NO: 1259031 - RNA, 19 nt, Homo sapiens
  misc_RNA (1)...(19): siRNA sense strand
cuaccacaccauugcauau

SEQ ID NO: 1259032 - RNA, 19 nt, Homo sapiens
  misc_RNA (1)...(19): siRNA sense strand
caccauugcauauuugaca

SEQ ID NO: 1259033 - RNA, 19 nt, Homo sapiens
  misc_RNA (1)...(19): siRNA sense strand
gcugaaaaguaaauuguac

SEQ ID NO: 1259034 - RNA, 19 nt, Homo sapiens
  misc_RNA (1)...(19): siRNA sense strand
uagauugacaagaaagguu

SEQ ID NO: 1259035 - RNA, 19 nt, Homo sapiens
  misc_RNA (1)...(19): siRNA sense strand
auccugcacuucagacuau

SEQ ID NO: 1259036 - RNA, 19 nt, Homo sapiens
  misc_RNA (1)...(19): siRNA sense strand
cauccugcacuucagacua

SEQ ID NO: 1259037 - RNA, 19 nt, Homo sapiens
  misc_RNA (1)...(19): siRNA sense strand
ggccuccuguauuccuuga

SEQ ID NO: 1259038 - RNA, 19 nt, Homo sapiens
  misc_RNA (1)...(19): siRNA sense strand
uggaauuggccuccuguau

SEQ ID NO: 1259039 - RNA, 19 nt, Homo sapiens
  misc_RNA (1)...(19): siRNA sense strand
gcaagaauauggacagaaa

SEQ ID NO: 1259040 - RNA, 19 nt, Homo sapiens
  misc_RNA (1)...(19): siRNA sense strand
gaggugaacuuucugguuu

SEQ ID NO: 1259041 - RNA, 19 nt, Homo sapiens
  misc_RNA (1)...(19): siRNA sense strand
gcaaagagaucuacaccau

SEQ ID NO: 1259042 - RNA, 19 nt, Homo sapiens
  misc_RNA (1)...(19): siRNA sense strand
gcaagugcuucauuugauu

SEQ ID NO: 1259043 - RNA, 19 nt, Homo sapiens
  misc_RNA (1)...(19): siRNA sense strand
uugaagaucuggaguauga

SEQ ID NO: 1259044 - RNA, 19 nt, Homo sapiens
  misc_RNA (1)...(19): siRNA sense strand
agacucaacugcaaggaua

SEQ ID NO: 1259045 - RNA, 19 nt, Homo sapiens
  misc_RNA (1)...(19): siRNA sense strand
aaagagaucuacaccauca

SEQ ID NO: 1259046 - RNA, 19 nt, Homo sapiens
  misc_RNA (1)...(19): siRNA sense strand
ucacucggcuuucacguuu

SEQ ID NO: 1259047 - RNA, 19 nt, Homo sapiens
  misc_RNA (1)...(19): siRNA sense strand
caacaaagccacaguccuu

SEQ ID NO: 1259048 - RNA, 19 nt, Homo sapiens
  misc_RNA (1)...(19): siRNA sense strand
caacaucaaugggacacua

SEQ ID NO: 1259049 - RNA, 19 nt, Homo sapiens
  misc_RNA (1)...(19): siRNA sense strand
gaauggagcacaugaaauc

SEQ ID NO: 1259050 - RNA, 19 nt, Homo sapiens
  misc_RNA (1)...(19): siRNA sense strand
ggaaaguacuuggcuagug

SEQ ID NO: 1259051 - RNA, 19 nt, Homo sapiens
  misc_RNA (1)...(19): siRNA sense strand
guucauaucuggaauacuc

SEQ ID NO: 1259052 - RNA, 19 nt, Homo sapiens
  misc_RNA (1)...(19): siRNA sense strand
gagaauggagcacaugaaa

SEQ ID NO: 1259053 - RNA, 19 nt, Homo sapiens
  misc_RNA (1)...(19): siRNA sense strand
gagcacaugaaaucaauaa

SEQ ID NO: 1259054 - RNA, 19 nt, Homo sapiens
  misc_RNA (1)...(19): siRNA sense strand
caaagccaauggaaauaga

SEQ ID NO: 1259055 - RNA, 19 nt, Homo sapiens
  misc_RNA (1)...(19): siRNA sense strand
gcacaugaaaucaauaauc

SEQ ID NO: 1259056 - RNA, 19 nt, Homo sapiens
  misc_RNA (1)...(19): siRNA sense strand
uauggaaccugaaugagaa

SEQ ID NO: 1259057 - RNA, 19 nt, Homo sapiens
  misc_RNA (1)...(19): siRNA sense strand
ggauauggaaccugaauga

SEQ ID NO: 1259058 - RNA, 19 nt, Homo sapiens
  misc_RNA (1)...(19): siRNA sense strand
agaagggacugcaguaugu

SEQ ID NO: 1259059 - RNA, 19 nt, Homo sapiens
  misc_RNA (1)...(19): siRNA sense strand
ccugauaguugcugugauu

SEQ ID NO: 1259060 - RNA, 19 nt, Homo sapiens
  misc_RNA (1)...(19): siRNA sense strand
ggaaauagauggggauguu

SEQ ID NO: 1259061 - RNA, 19 nt, Homo sapiens
  misc_RNA (1)...(19): siRNA sense strand
cgaggucaaugccaucaaa

SEQ ID NO: 1259062 - RNA, 19 nt, Homo sapiens
  misc_RNA (1)...(19): siRNA sense strand
gacaugacauugaagaucu

SEQ ID NO: 1259063 - RNA, 19 nt, Homo sapiens
  misc_RNA (1)...(19): siRNA sense strand
guauguagaggcugagaua

SEQ ID NO: 1259064 - RNA, 19 nt, Homo sapiens
  misc_RNA (1)...(19): siRNA sense strand
gcuaguggauccuuugaca

SEQ ID NO: 1259065 - RNA, 19 nt, Homo sapiens
  misc_RNA (1)...(19): siRNA sense strand
ggaagagaauggagcacau

SEQ ID NO: 1259066 - RNA, 19 nt, Homo sapiens
  misc_RNA (1)...(19): siRNA sense strand
gcaaaggcggcaaccauga

SEQ ID NO: 1259067 - RNA, 19 nt, Homo sapiens
  misc_RNA (1)...(19): siRNA sense strand
agucugagguguucauuug

SEQ ID NO: 1259068 - RNA, 19 nt, Homo sapiens
  misc_RNA (1)...(19): siRNA sense strand
guggauccuuugacaagua

SEQ ID NO: 1259069 - RNA, 19 nt, Homo sapiens
  misc_RNA (1)...(19): siRNA sense strand
gauguggacuggcagaaca

SEQ ID NO: 1259070 - RNA, 19 nt, Homo sapiens
  misc_RNA (1)...(19): siRNA sense strand
uaaccuggccagcaccuua

SEQ ID NO: 1259071 - RNA, 19 nt, Homo sapiens
  misc_RNA (1)...(19): siRNA sense strand
guugagacauuguauacga

SEQ ID NO: 1259072 - RNA, 19 nt, Homo sapiens
  misc_RNA (1)...(19): siRNA sense strand
ggcacgacgucccaaguaa

SEQ ID NO: 1259073 - RNA, 19 nt, Homo sapiens
  misc_RNA (1)...(19): siRNA sense strand
ggcaagugcuucauuugau

SEQ ID NO: 1259074 - RNA, 19 nt, Homo sapiens
  misc_RNA (1)...(19): siRNA sense strand
cggaugacaugacauugaa

SEQ ID NO: 1259075 - RNA, 19 nt, Homo sapiens
  misc_RNA (1)...(19): siRNA sense strand
ggaacccugucagugauuu

SEQ ID NO: 1259076 - RNA, 19 nt, Homo sapiens
  misc_RNA (1)...(19): siRNA sense strand
gaagucucguccacagcua

SEQ ID NO: 1259077 - RNA, 19 nt, Homo sapiens
  misc_RNA (1)...(19): siRNA sense strand
guuggcaagugcuucauuu

SEQ ID NO: 1259078 - RNA, 19 nt, Homo sapiens
  misc_RNA (1)...(19): siRNA sense strand
gaagcucacucagcagcaa

SEQ ID NO: 1259079 - RNA, 19 nt, Homo sapiens
  misc_RNA (1)...(19): siRNA sense strand
caucuucgcucugaaaugg

SEQ ID NO: 1259080 - RNA, 19 nt, Homo sapiens
  misc_RNA (1)...(19): siRNA sense strand
ucaccucacuggacuggaa

SEQ ID NO: 1259081 - RNA, 19 nt, Homo sapiens
  misc_RNA (1)...(19): siRNA sense strand
ccacgagucugagguguuc

SEQ ID NO: 1259082 - RNA, 19 nt, Homo sapiens
  misc_RNA (1)...(19): siRNA sense strand
gcucugaaauggaacaaaa

SEQ ID NO: 1259083 - RNA, 19 nt, Homo sapiens
  misc_RNA (1)...(19): siRNA sense strand
caccuuaggccaacauaaa

SEQ ID NO: 1259084 - RNA, 19 nt, Homo sapiens
  misc_RNA (1)...(19): siRNA sense strand
ggaacacuauuggcuaugg

SEQ ID NO: 1259085 - RNA, 19 nt, Homo sapiens
  misc_RNA (1)...(19): siRNA sense strand
gaacgcccgaggagauaaa

SEQ ID NO: 1259086 - RNA, 19 nt, Homo sapiens
  misc_RNA (1)...(19): siRNA sense strand
ccaaggcacuggcgguauc

SEQ ID NO: 1259087 - RNA, 19 nt, Homo sapiens
  misc_RNA (1)...(19): siRNA sense strand
gggcacgacgucccaagua

SEQ ID NO: 1259088 - RNA, 19 nt, Homo sapiens
  misc_RNA (1)...(19): siRNA sense strand
cagcucguguugagacauu

SEQ ID NO: 1259089 - RNA, 19 nt, Homo sapiens
  misc_RNA (1)...(19): siRNA sense strand
cauugaagaucuggaguau

SEQ ID NO: 1259090 - RNA, 19 nt, Homo sapiens
  misc_RNA (1)...(19): siRNA sense strand
gaagggacugcaguaugua

SEQ ID NO: 1259091 - RNA, 19 nt, Homo sapiens
  misc_RNA (1)...(19): siRNA sense strand
gcucggaugacaugacauu

SEQ ID NO: 1259092 - RNA, 19 nt, Homo sapiens
  misc_RNA (1)...(19): siRNA sense strand
cacgacgucccaaguaaua

SEQ ID NO: 1259093 - RNA, 19 nt, Homo sapiens
  misc_RNA (1)...(19): siRNA sense strand
caacugcaaggauauggaa

SEQ ID NO: 1259094 - RNA, 19 nt, Homo sapiens
  misc_RNA (1)...(19): siRNA sense strand
ccacagaggcaucagcaau

SEQ ID NO: 1259095 - RNA, 19 nt, Homo sapiens
  misc_RNA (1)...(19): siRNA sense strand
gcaggcauuuggagagaag

SEQ ID NO: 1259096 - RNA, 19 nt, Homo sapiens
  misc_RNA (1)...(19): siRNA sense strand
agauaagcaucaacaagga

SEQ ID NO: 1259097 - RNA, 19 nt, Homo sapiens
  misc_RNA (1)...(19): siRNA sense strand
gaugacaugacauugaaga

SEQ ID NO: 1259098 - RNA, 19 nt, Homo sapiens
  misc_RNA (1)...(19): siRNA sense strand
cagaacaacaugaccuuug

SEQ ID NO: 1259099 - RNA, 19 nt, Homo sapiens
  misc_RNA (1)...(19): siRNA sense strand
gaugguuucgcaagaauau

SEQ ID NO: 1259100 - RNA, 19 nt, Homo sapiens
  misc_RNA (1)...(19): siRNA sense strand
ccacccagcucguguugag

SEQ ID NO: 1259101 - RNA, 19 nt, Homo sapiens
  misc_RNA (1)...(19): siRNA sense strand
gaagagaauggagcacaug

SEQ ID NO: 1259102 - RNA, 19 nt, Homo sapiens
  misc_RNA (1)...(19): siRNA sense strand
ggauccuucuggaauguug

SEQ ID NO: 1259103 - RNA, 19 nt, Homo sapiens
  misc_RNA (1)...(19): siRNA sense strand
ucacacaggagaagccaaa

SEQ ID NO: 1259104 - RNA, 19 nt, Homo sapiens
  misc_RNA (1)...(19): siRNA sense strand
cagcaggcauuuggagaga

SEQ ID NO: 1259105 - RNA, 19 nt, Homo sapiens
  misc_RNA (1)...(19): siRNA sense strand
ggugaacuuucugguuuau

SEQ ID NO: 1259106 - RNA, 19 nt, Homo sapiens
  misc_RNA (1)...(19): siRNA sense strand
gugacgaggugaacuuucu

SEQ ID NO: 1259107 - RNA, 19 nt, Homo sapiens
  misc_RNA (1)...(19): siRNA sense strand
gcagaacaacaugaccuuu

SEQ ID NO: 1259108 - RNA, 19 nt, Homo sapiens
  misc_RNA (1)...(19): siRNA sense strand
uaugaugguuucgcaagaa

SEQ ID NO: 1259109 - RNA, 19 nt, Homo sapiens
  misc_RNA (1)...(19): siRNA sense strand
cgacgucccaaguaauaaa

SEQ ID NO: 1259110 - RNA, 19 nt, Homo sapiens
  misc_RNA (1)...(19): siRNA sense strand
gcacgacgucccaaguaau

SEQ ID NO: 1259111 - RNA, 19 nt, Homo sapiens
  misc_RNA (1)...(19): siRNA sense strand
auaaagaugucaccucacu

SEQ ID NO: 1259112 - RNA, 19 nt, Homo sapiens
  misc_RNA (1)...(19): siRNA sense strand
gagugcugguguagacaaa

SEQ ID NO: 1259113 - RNA, 19 nt, Homo sapiens
  misc_RNA (1)...(19): siRNA sense strand
acucaaagccaauggaaau

SEQ ID NO: 1259114 - RNA, 19 nt, Homo sapiens
  misc_RNA (1)...(19): siRNA sense strand
gcaguuuccuuuucauuca

SEQ ID NO: 1259115 - RNA, 19 nt, Homo sapiens
  misc_RNA (1)...(19): siRNA sense strand
gcaccuuaggccaacauaa

SEQ ID NO: 1259116 - RNA, 19 nt, Homo sapiens
  misc_RNA (1)...(19): siRNA sense strand
gagacauuguauacgagaa

SEQ ID NO: 1259117 - RNA, 19 nt, Homo sapiens
  misc_RNA (1)...(19): siRNA sense strand
gaagaucuggaguaugaag

SEQ ID NO: 1259118 - RNA, 19 nt, Homo sapiens
  misc_RNA (1)...(19): siRNA sense strand
gcaaaauccuccaaagaac

SEQ ID NO: 1259119 - RNA, 19 nt, Homo sapiens
  misc_RNA (1)...(19): siRNA sense strand
gaaccugaaugagaauagc

SEQ ID NO: 1259120 - RNA, 19 nt, Homo sapiens
  misc_RNA (1)...(19): siRNA sense strand
cagaagggacugcaguaug

SEQ ID NO: 1259121 - RNA, 19 nt, Homo sapiens
  misc_RNA (1)...(19): siRNA sense strand
ccuggaacccugucaguga

SEQ ID NO: 1259122 - RNA, 19 nt, Homo sapiens
  misc_RNA (1)...(19): siRNA sense strand
uggagcacaugaaaucaau

SEQ ID NO: 1259123 - RNA, 19 nt, Homo sapiens
  misc_RNA (1)...(19): siRNA sense strand
aacccaaacuccagcauca

SEQ ID NO: 1259124 - RNA, 19 nt, Homo sapiens
  misc_RNA (1)...(19): siRNA sense strand
ugaacuuucugguuuaucg

SEQ ID NO: 1259125 - RNA, 19 nt, Homo sapiens
  misc_RNA (1)...(19): siRNA sense strand
gagauuccacccaacaaag

SEQ ID NO: 1259126 - RNA, 19 nt, Homo sapiens
  misc_RNA (1)...(19): siRNA sense strand
ggguucauaugaugguuuc

SEQ ID NO: 1259127 - RNA, 19 nt, Homo sapiens
  misc_RNA (1)...(19): siRNA sense strand
acacacucaugaagcauca

SEQ ID NO: 1259128 - RNA, 19 nt, Homo sapiens
  misc_RNA (1)...(19): siRNA sense strand
ggacuggcagaacaacaug

SEQ ID NO: 1259129 - RNA, 19 nt, Homo sapiens
  misc_RNA (1)...(19): siRNA sense strand
gagaagccaaacagcaguu

SEQ ID NO: 1259130 - RNA, 19 nt, Homo sapiens
  misc_RNA (1)...(19): siRNA sense strand
aggugaacuuucugguuua

SEQ ID NO: 1259131 - RNA, 19 nt, Homo sapiens
  misc_RNA (1)...(19): siRNA sense strand
ggagcacaugaaaucaaua

SEQ ID NO: 1259132 - RNA, 19 nt, Homo sapiens
  misc_RNA (1)...(19): siRNA sense strand
uggcaagugcuucauuuga

SEQ ID NO: 1259133 - RNA, 19 nt, Homo sapiens
  misc_RNA (1)...(19): siRNA sense strand
gcugagauaagcaucaaca

SEQ ID NO: 1259134 - RNA, 19 nt, Homo sapiens
  misc_RNA (1)...(19): siRNA sense strand
uagagucccugucccugau

SEQ ID NO: 1259135 - RNA, 19 nt, Homo sapiens
  misc_RNA (1)...(19): siRNA sense strand
ugagauuccacccaacaaa

SEQ ID NO: 1259136 - RNA, 19 nt, Homo sapiens
  misc_RNA (1)...(19): siRNA sense strand
gugcuucauuugauucuac

SEQ ID NO: 1259137 - RNA, 19 nt, Homo sapiens
  misc_RNA (1)...(19): siRNA sense strand
ggaacgcccgaggagauaa

SEQ ID NO: 1259138 - RNA, 19 nt, Homo sapiens
  misc_RNA (1)...(19): siRNA sense strand
gcacccacacacucaugaa

SEQ ID NO: 1259139 - RNA, 19 nt, Homo sapiens
  misc_RNA (1)...(19): siRNA sense strand
gcaagaauauggacagaaa

SEQ ID NO: 1259140 - RNA, 19 nt, Homo sapiens
  misc_RNA (1)...(19): siRNA sense strand
gaggugaacuuucugguuu

SEQ ID NO: 1259141 - RNA, 19 nt, Homo sapiens
  misc_RNA (1)...(19): siRNA sense strand
gcaaagagaucuacaccau

SEQ ID NO: 1259142 - RNA, 19 nt, Homo sapiens
  misc_RNA (1)...(19): siRNA sense strand
gcaagugcuucauuugauu

SEQ ID NO: 1259143 - RNA, 19 nt, Homo sapiens
  misc_RNA (1)...(19): siRNA sense strand
uugaagaucuggaguauga

SEQ ID NO: 1259144 - RNA, 19 nt, Homo sapiens
  misc_RNA (1)...(19): siRNA sense strand
agacucaacugcaaggaua

SEQ ID NO: 1259145 - RNA, 19 nt, Homo sapiens
  misc_RNA (1)...(19): siRNA sense strand
aaagagaucuacaccauca

SEQ ID NO: 1259146 - RNA, 19 nt, Homo sapiens
  misc_RNA (1)...(19): siRNA sense strand
ucacucggcuuucacguuu

SEQ ID NO: 1259147 - RNA, 19 nt, Homo sapiens
  misc_RNA (1)...(19): siRNA sense strand
caacaaagccacaguccuu

SEQ ID NO: 1259148 - RNA, 19 nt, Homo sapiens
  misc_RNA (1)...(19): siRNA sense strand
caacaucaaugggacacua

SEQ ID NO: 1259149 - RNA, 19 nt, Homo sapiens
  misc_RNA (1)...(19): siRNA sense strand
gaauggagcacaugaaauc

SEQ ID NO: 1259150 - RNA, 19 nt, Homo sapiens
  misc_RNA (1)...(19): siRNA sense strand
ggaaaguacuuggcuagug

SEQ ID NO: 1259151 - RNA, 19 nt, Homo sapiens
  misc_RNA (1)...(19): siRNA sense strand
guucauaucuggaauacuc

SEQ ID NO: 1259152 - RNA, 19 nt, Homo sapiens
  misc_RNA (1)...(19): siRNA sense strand
gagaauggagcacaugaaa

SEQ ID NO: 1259153 - RNA, 19 nt, Homo sapiens
  misc_RNA (1)...(19): siRNA sense strand
gagcacaugaaaucaauaa

SEQ ID NO: 1259154 - RNA, 19 nt, Homo sapiens
  misc_RNA (1)...(19): siRNA sense strand
caaagccaauggaaauaga

SEQ ID NO: 1259155 - RNA, 19 nt, Homo sapiens
  misc_RNA (1)...(19): siRNA sense strand
gcacaugaaaucaauaauc

SEQ ID NO: 1259156 - RNA, 19 nt, Homo sapiens
  misc_RNA (1)...(19): siRNA sense strand
uauggaaccugaaugagaa

SEQ ID NO: 1259157 - RNA, 19 nt, Homo sapiens
  misc_RNA (1)...(19): siRNA sense strand
ggauauggaaccugaauga

SEQ ID NO: 1259158 - RNA, 19 nt, Homo sapiens
  misc_RNA (1)...(19): siRNA sense strand
agaagggacugcaguaugu

SEQ ID NO: 1259159 - RNA, 19 nt, Homo sapiens
  misc_RNA (1)...(19): siRNA sense strand
ccugauaguugcugugauu

SEQ ID NO: 1259160 - RNA, 19 nt, Homo sapiens
  misc_RNA (1)...(19): siRNA sense strand
ggaaauagauggggauguu

SEQ ID NO: 1259161 - RNA, 19 nt, Homo sapiens
  misc_RNA (1)...(19): siRNA sense strand
cgaggucaaugccaucaaa

SEQ ID NO: 1259162 - RNA, 19 nt, Homo sapiens
  misc_RNA (1)...(19): siRNA sense strand
gacaugacauugaagaucu

SEQ ID NO: 1259163 - RNA, 19 nt, Homo sapiens
  misc_RNA (1)...(19): siRNA sense strand
guauguagaggcugagaua

SEQ ID NO: 1259164 - RNA, 19 nt, Homo sapiens
  misc_RNA (1)...(19): siRNA sense strand
gcuaguggauccuuugaca

SEQ ID NO: 1259165 - RNA, 19 nt, Homo sapiens
  misc_RNA (1)...(19): siRNA sense strand
ggaagagaauggagcacau

SEQ ID NO: 1259166 - RNA, 19 nt, Homo sapiens
  misc_RNA (1)...(19): siRNA sense strand
gcaaaggcggcaaccauga

SEQ ID NO: 1259167 - RNA, 19 nt, Homo sapiens
  misc_RNA (1)...(19): siRNA sense strand
agucugagguguucauuug

SEQ ID NO: 1259168 - RNA, 19 nt, Homo sapiens
  misc_RNA (1)...(19): siRNA sense strand
guggauccuuugacaagua

SEQ ID NO: 1259169 - RNA, 19 nt, Homo sapiens
  misc_RNA (1)...(19): siRNA sense strand
gauguggacuggcagaaca

SEQ ID NO: 1259170 - RNA, 19 nt, Homo sapiens
  misc_RNA (1)...(19): siRNA sense strand
uaaccuggccagcaccuua

SEQ ID NO: 1259171 - RNA, 19 nt, Homo sapiens
  misc_RNA (1)...(19): siRNA sense strand
guugagacauuguauacga

SEQ ID NO: 1259172 - RNA, 19 nt, Homo sapiens
  misc_RNA (1)...(19): siRNA sense strand
ggcacgacgucccaaguaa

SEQ ID NO: 1259173 - RNA, 19 nt, Homo sapiens
  misc_RNA (1)...(19): siRNA sense strand
ggcaagugcuucauuugau

SEQ ID NO: 1259174 - RNA, 19 nt, Homo sapiens
  misc_RNA (1)...(19): siRNA sense strand
cggaugacaugacauugaa

SEQ ID NO: 1259175 - RNA, 19 nt, Homo sapiens
  misc_RNA (1)...(19): siRNA sense strand
ggaacccugucagugauuu

SEQ ID NO: 1259176 - RNA, 19 nt, Homo sapiens
  misc_RNA (1)...(19): siRNA sense strand
gaagucucguccacagcua

SEQ ID NO: 1259177 - RNA, 19 nt, Homo sapiens
  misc_RNA (1)...(19): siRNA sense strand
guuggcaagugcuucauuu

SEQ ID NO: 1259178 - RNA, 19 nt, Homo sapiens
  misc_RNA (1)...(19): siRNA sense strand
gaagcucacucagcagcaa

SEQ ID NO: 1259179 - RNA, 19 nt, Homo sapiens
  misc_RNA (1)...(19): siRNA sense strand
caucuucgcucugaaaugg

SEQ ID NO: 1259180 - RNA, 19 nt, Homo sapiens
  misc_RNA (1)...(19): siRNA sense strand
ucaccucacuggacuggaa

SEQ ID NO: 1259181 - RNA, 19 nt, Homo sapiens
  misc_RNA (1)...(19): siRNA sense strand
ccacgagucugagguguuc

SEQ ID NO: 1259182 - RNA, 19 nt, Homo sapiens
  misc_RNA (1)...(19): siRNA sense strand
gcucugaaauggaacaaaa

SEQ ID NO: 1259183 - RNA, 19 nt, Homo sapiens
  misc_RNA (1)...(19): siRNA sense strand
caccuuaggccaacauaaa

SEQ ID NO: 1259184 - RNA, 19 nt, Homo sapiens
  misc_RNA (1)...(19): siRNA sense strand
ggaacacuauuggcuaugg

SEQ ID NO: 1259185 - RNA, 19 nt, Homo sapiens
  misc_RNA (1)...(19): siRNA sense strand
gaacgcccgaggagauaaa

SEQ ID NO: 1259186 - RNA, 19 nt, Homo sapiens
  misc_RNA (1)...(19): siRNA sense strand
ccaaggcacuggcgguauc

SEQ ID NO: 1259187 - RNA, 19 nt, Homo sapiens
  misc_RNA (1)...(19): siRNA sense strand
gggcacgacgucccaagua

SEQ ID NO: 1259188 - RNA, 19 nt, Homo sapiens
  misc_RNA (1)...(19): siRNA sense strand
cagcucguguugagacauu

SEQ ID NO: 1259189 - RNA, 19 nt, Homo sapiens
  misc_RNA (1)...(19): siRNA sense strand
cauugaagaucuggaguau

SEQ ID NO: 1259190 - RNA, 19 nt, Homo sapiens
  misc_RNA (1)...(19): siRNA sense strand
gaagggacugcaguaugua

SEQ ID NO: 1259191 - RNA, 19 nt, Homo sapiens
  misc_RNA (1)...(19): siRNA sense strand
gcucggaugacaugacauu

SEQ ID NO: 1259192 - RNA, 19 nt, Homo sapiens
  misc_RNA (1)...(19): siRNA sense strand
cacgacgucccaaguaaua

SEQ ID NO: 1259193 - RNA, 19 nt, Homo sapiens
  misc_RNA (1)...(19): siRNA sense strand
caacugcaaggauauggaa

SEQ ID NO: 1259194 - RNA, 19 nt, Homo sapiens
  misc_RNA (1)...(19): siRNA sense strand
ccacagaggcaucagcaau

SEQ ID NO: 1259195 - RNA, 19 nt, Homo sapiens
  misc_RNA (1)...(19): siRNA sense strand
gcaggcauuuggagagaag

SEQ ID NO: 1259196 - RNA, 19 nt, Homo sapiens
  misc_RNA (1)...(19): siRNA sense strand
agauaagcaucaacaagga

SEQ ID NO: 1259197 - RNA, 19 nt, Homo sapiens
  misc_RNA (1)...(19): siRNA sense strand
gaugacaugacauugaaga

SEQ ID NO: 1259198 - RNA, 19 nt, Homo sapiens
  misc_RNA (1)...(19): siRNA sense strand
cagaacaacaugaccuuug

SEQ ID NO: 1259199 - RNA, 19 nt, Homo sapiens
  misc_RNA (1)...(19): siRNA sense strand
gaugguuucgcaagaauau

SEQ ID NO: 1259200 - RNA, 19 nt, Homo sapiens
  misc_RNA (1)...(19): siRNA sense strand
ccacccagcucguguugag

SEQ ID NO: 1259201 - RNA, 19 nt, Homo sapiens
  misc_RNA (1)...(19): siRNA sense strand
gaagagaauggagcacaug

SEQ ID NO: 1259202 - RNA, 19 nt, Homo sapiens
  misc_RNA (1)...(19): siRNA sense strand
ggauccuucuggaauguug

SEQ ID NO: 1259203 - RNA, 19 nt, Homo sapiens
  misc_RNA (1)...(19): siRNA sense strand
ucacacaggagaagccaaa

SEQ ID NO: 1259204 - RNA, 19 nt, Homo sapiens
  misc_RNA (1)...(19): siRNA sense strand
cagcaggcauuuggagaga

SEQ ID NO: 1259205 - RNA, 19 nt, Homo sapiens
  misc_RNA (1)...(19): siRNA sense strand
ggugaacuuucugguuuau

SEQ ID NO: 1259206 - RNA, 19 nt, Homo sapiens
  misc_RNA (1)...(19): siRNA sense strand
gugacgaggugaacuuucu

SEQ ID NO: 1259207 - RNA, 19 nt, Homo sapiens
  misc_RNA (1)...(19): siRNA sense strand
gcagaacaacaugaccuuu

SEQ ID NO: 1259208 - RNA, 19 nt, Homo sapiens
  misc_RNA (1)...(19): siRNA sense strand
uaugaugguuucgcaagaa

SEQ ID NO: 1259209 - RNA, 19 nt, Homo sapiens
  misc_RNA (1)...(19): siRNA sense strand
cgacgucccaaguaauaaa

SEQ ID NO: 1259210 - RNA, 19 nt, Homo sapiens
  misc_RNA (1)...(19): siRNA sense strand
gcacgacgucccaaguaau

SEQ ID NO: 1259211 - RNA, 19 nt, Homo sapiens
  misc_RNA (1)...(19): siRNA sense strand
auaaagaugucaccucacu

SEQ ID NO: 1259212 - RNA, 19 nt, Homo sapiens
  misc_RNA (1)...(19): siRNA sense strand
gagugcugguguagacaaa

SEQ ID NO: 1259213 - RNA, 19 nt, Homo sapiens
  misc_RNA (1)...(19): siRNA sense strand
acucaaagccaauggaaau

SEQ ID NO: 1259214 - RNA, 19 nt, Homo sapiens
  misc_RNA (1)...(19): siRNA sense strand
gcaguuuccuuuucauuca

SEQ ID NO: 1259215 - RNA, 19 nt, Homo sapiens
  misc_RNA (1)...(19): siRNA sense strand
gcaccuuaggccaacauaa

SEQ ID NO: 1259216 - RNA, 19 nt, Homo sapiens
  misc_RNA (1)...(19): siRNA sense strand
gagacauuguauacgagaa

SEQ ID NO: 1259217 - RNA, 19 nt, Homo sapiens
  misc_RNA (1)...(19): siRNA sense strand
gaagaucuggaguaugaag

SEQ ID NO: 1259218 - RNA, 19 nt, Homo sapiens
  misc_RNA (1)...(19): siRNA sense strand
gcaaaauccuccaaagaac

SEQ ID NO: 1259219 - RNA, 19 nt, Homo sapiens
  misc_RNA (1)...(19): siRNA sense strand
gaaccugaaugagaauagc

SEQ ID NO: 1259220 - RNA, 19 nt, Homo sapiens
  misc_RNA (1)...(19): siRNA sense strand
cagaagggacugcaguaug

SEQ ID NO: 1259221 - RNA, 19 nt, Homo sapiens
  misc_RNA (1)...(19): siRNA sense strand
ccuggaacccugucaguga

SEQ ID NO: 1259222 - RNA, 19 nt, Homo sapiens
  misc_RNA (1)...(19): siRNA sense strand
uggagcacaugaaaucaau

SEQ ID NO: 1259223 - RNA, 19 nt, Homo sapiens
  misc_RNA (1)...(19): siRNA sense strand
aacccaaacuccagcauca

SEQ ID NO: 1259224 - RNA, 19 nt, Homo sapiens
  misc_RNA (1)...(19): siRNA sense strand
ugaacuuucugguuuaucg

SEQ ID NO: 1259225 - RNA, 19 nt, Homo sapiens
  misc_RNA (1)...(19): siRNA sense strand
gagauuccacccaacaaag

SEQ ID NO: 1259226 - RNA, 19 nt, Homo sapiens
  misc_RNA (1)...(19): siRNA sense strand
ggguucauaugaugguuuc

SEQ ID NO: 1259227 - RNA, 19 nt, Homo sapiens
  misc_RNA (1)...(19): siRNA sense strand
acacacucaugaagcauca

SEQ ID NO: 1259228 - RNA, 19 nt, Homo sapiens
  misc_RNA (1)...(19): siRNA sense strand
ggacuggcagaacaacaug

SEQ ID NO: 1259229 - RNA, 19 nt, Homo sapiens
  misc_RNA (1)...(19): siRNA sense strand
gagaagccaaacagcaguu

SEQ ID NO: 1259230 - RNA, 19 nt, Homo sapiens
  misc_RNA (1)...(19): siRNA sense strand
aggugaacuuucugguuua

SEQ ID NO: 1259231 - RNA, 19 nt, Homo sapiens
  misc_RNA (1)...(19): siRNA sense strand
ggagcacaugaaaucaaua

SEQ ID NO: 1259232 - RNA, 19 nt, Homo sapiens
  misc_RNA (1)...(19): siRNA sense strand
uggcaagugcuucauuuga

SEQ ID NO: 1259233 - RNA, 19 nt, Homo sapiens
  misc_RNA (1)...(19): siRNA sense strand
gcugagauaagcaucaaca

SEQ ID NO: 1259234 - RNA, 19 nt, Homo sapiens
  misc_RNA (1)...(19): siRNA sense strand
uagagucccugucccugau

SEQ ID NO: 1259235 - RNA, 19 nt, Homo sapiens
  misc_RNA (1)...(19): siRNA sense strand
ugagauuccacccaacaaa

SEQ ID NO: 1259236 - RNA, 19 nt, Homo sapiens
  misc_RNA (1)...(19): siRNA sense strand
gugcuucauuugauucuac

SEQ ID NO: 1259237 - RNA, 19 nt, Homo sapiens
  misc_RNA (1)...(19): siRNA sense strand
ggaacgcccgaggagauaa

SEQ ID NO: 1259238 - RNA, 19 nt, Homo sapiens
  misc_RNA (1)...(19): siRNA sense strand
gcacccacacacucaugaa

SEQ ID NO: 1259239 - RNA, 19 nt, Homo sapiens
  misc_RNA (1)...(19): siRNA sense strand
gcaagaauauggacagaaa

SEQ ID NO: 1259240 - RNA, 19 nt, Homo sapiens
  misc_RNA (1)...(19): siRNA sense strand
gaggugaacuuucugguuu

SEQ ID NO: 1259241 - RNA, 19 nt, Homo sapiens
  misc_RNA (1)...(19): siRNA sense strand
gcaaagagaucuacaccau

SEQ ID NO: 1259242 - RNA, 19 nt, Homo sapiens
  misc_RNA (1)...(19): siRNA sense strand
gcaagugcuucauuugauu

SEQ ID NO: 1259243 - RNA, 19 nt, Homo sapiens
  misc_RNA (1)...(19): siRNA sense strand
uugaagaucuggaguauga

SEQ ID NO: 1259244 - RNA, 19 nt, Homo sapiens
  misc_RNA (1)...(19): siRNA sense strand
agacucaacugcaaggaua

SEQ ID NO: 1259245 - RNA, 19 nt, Homo sapiens
  misc_RNA (1)...(19): siRNA sense strand
aaagagaucuacaccauca

SEQ ID NO: 1259246 - RNA, 19 nt, Homo sapiens
  misc_RNA (1)...(19): siRNA sense strand
ucacucggcuuucacguuu

SEQ ID NO: 1259247 - RNA, 19 nt, Homo sapiens
  misc_RNA (1)...(19): siRNA sense strand
caacaaagccacaguccuu

SEQ ID NO: 1259248 - RNA, 19 nt, Homo sapiens
  misc_RNA (1)...(19): siRNA sense strand
caacaucaaugggacacua

SEQ ID NO: 1259249 - RNA, 19 nt, Homo sapiens
  misc_RNA (1)...(19): siRNA sense strand
gaauggagcacaugaaauc

SEQ ID NO: 1259250 - RNA, 19 nt, Homo sapiens
  misc_RNA (1)...(19): siRNA sense strand
ggaaaguacuuggcuagug

SEQ ID NO: 1259251 - RNA, 19 nt, Homo sapiens
  misc_RNA (1)...(19): siRNA sense strand
guucauaucuggaauacuc

SEQ ID NO: 1259252 - RNA, 19 nt, Homo sapiens
  misc_RNA (1)...(19): siRNA sense strand
gagaauggagcacaugaaa

SEQ ID NO: 1259253 - RNA, 19 nt, Homo sapiens
  misc_RNA (1)...(19): siRNA sense strand
gagcacaugaaaucaauaa

SEQ ID NO: 1259254 - RNA, 19 nt, Homo sapiens
  misc_RNA (1)...(19): siRNA sense strand
caaagccaauggaaauaga

SEQ ID NO: 1259255 - RNA, 19 nt, Homo sapiens
  misc_RNA (1)...(19): siRNA sense strand
gcacaugaaaucaauaauc

SEQ ID NO: 1259256 - RNA, 19 nt, Homo sapiens
  misc_RNA (1)...(19): siRNA sense strand
uauggaaccugaaugagaa

SEQ ID NO: 1259257 - RNA, 19 nt, Homo sapiens
  misc_RNA (1)...(19): siRNA sense strand
ggauauggaaccugaauga

SEQ ID NO: 1259258 - RNA, 19 nt, Homo sapiens
  misc_RNA (1)...(19): siRNA sense strand
agaagggacugcaguaugu

SEQ ID NO: 1259259 - RNA, 19 nt, Homo sapiens
  misc_RNA (1)...(19): siRNA sense strand
ccugauaguugcugugauu

SEQ ID NO: 1259260 - RNA, 19 nt, Homo sapiens
  misc_RNA (1)...(19): siRNA sense strand
ggaaauagauggggauguu

SEQ ID NO: 1259261 - RNA, 19 nt, Homo sapiens
  misc_RNA (1)...(19): siRNA sense strand
cgaggucaaugccaucaaa

SEQ ID NO: 1259262 - RNA, 19 nt, Homo sapiens
  misc_RNA (1)...(19): siRNA sense strand
gacaugacauugaagaucu

SEQ ID NO: 1259263 - RNA, 19 nt, Homo sapiens
  misc_RNA (1)...(19): siRNA sense strand
guauguagaggcugagaua

SEQ ID NO: 1259264 - RNA, 19 nt, Homo sapiens
  misc_RNA (1)...(19): siRNA sense strand
gcuaguggauccuuugaca

SEQ ID NO: 1259265 - RNA, 19 nt, Homo sapiens
  misc_RNA (1)...(19): siRNA sense strand
ggaagagaauggagcacau

SEQ ID NO: 1259266 - RNA, 19 nt, Homo sapiens
  misc_RNA (1)...(19): siRNA sense strand
gcaaaggcggcaaccauga

SEQ ID NO: 1259267 - RNA, 19 nt, Homo sapiens
  misc_RNA (1)...(19): siRNA sense strand
agucugagguguucauuug

SEQ ID NO: 1259268 - RNA, 19 nt, Homo sapiens
  misc_RNA (1)...(19): siRNA sense strand
guggauccuuugacaagua

SEQ ID NO: 1259269 - RNA, 19 nt, Homo sapiens
  misc_RNA (1)...(19): siRNA sense strand
gauguggacuggcagaaca

SEQ ID NO: 1259270 - RNA, 19 nt, Homo sapiens
  misc_RNA (1)...(19): siRNA sense strand
uaaccuggccagcaccuua

SEQ ID NO: 1259271 - RNA, 19 nt, Homo sapiens
  misc_RNA (1)...(19): siRNA sense strand
guugagacauuguauacga

SEQ ID NO: 1259272 - RNA, 19 nt, Homo sapiens
  misc_RNA (1)...(19): siRNA sense strand
ggcacgacgucccaaguaa

SEQ ID NO: 1259273 - RNA, 19 nt, Homo sapiens
  misc_RNA (1)...(19): siRNA sense strand
ggcaagugcuucauuugau

SEQ ID NO: 1259274 - RNA, 19 nt, Homo sapiens
  misc_RNA (1)...(19): siRNA sense strand
cggaugacaugacauugaa

SEQ ID NO: 1259275 - RNA, 19 nt, Homo sapiens
  misc_RNA (1)...(19): siRNA sense strand
ggaacccugucagugauuu

SEQ ID NO: 1259276 - RNA, 19 nt, Homo sapiens
  misc_RNA (1)...(19): siRNA sense strand
gaagucucguccacagcua

SEQ ID NO: 1259277 - RNA, 19 nt, Homo sapiens
  misc_RNA (1)...(19): siRNA sense strand
guuggcaagugcuucauuu

SEQ ID NO: 1259278 - RNA, 19 nt, Homo sapiens
  misc_RNA (1)...(19): siRNA sense strand
gaagcucacucagcagcaa

SEQ ID NO: 1259279 - RNA, 19 nt, Homo sapiens
  misc_RNA (1)...(19): siRNA sense strand
caucuucgcucugaaaugg

SEQ ID NO: 1259280 - RNA, 19 nt, Homo sapiens
  misc_RNA (1)...(19): siRNA sense strand
ucaccucacuggacuggaa

SEQ ID NO: 1259281 - RNA, 19 nt, Homo sapiens
  misc_RNA (1)...(19): siRNA sense strand
ccacgagucugagguguuc

SEQ ID NO: 1259282 - RNA, 19 nt, Homo sapiens
  misc_RNA (1)...(19): siRNA sense strand
gcucugaaauggaacaaaa

SEQ ID NO: 1259283 - RNA, 19 nt, Homo sapiens
  misc_RNA (1)...(19): siRNA sense strand
caccuuaggccaacauaaa

SEQ ID NO: 1259284 - RNA, 19 nt, Homo sapiens
  misc_RNA (1)...(19): siRNA sense strand
ggaacacuauuggcuaugg

SEQ ID NO: 1259285 - RNA, 19 nt, Homo sapiens
  misc_RNA (1)...(19): siRNA sense strand
gaacgcccgaggagauaaa

SEQ ID NO: 1259286 - RNA, 19 nt, Homo sapiens
  misc_RNA (1)...(19): siRNA sense strand
ccaaggcacuggcgguauc

SEQ ID NO: 1259287 - RNA, 19 nt, Homo sapiens
  misc_RNA (1)...(19): siRNA sense strand
gggcacgacgucccaagua

SEQ ID NO: 1259288 - RNA, 19 nt, Homo sapiens
  misc_RNA (1)...(19): siRNA sense strand
cagcucguguugagacauu

SEQ ID NO: 1259289 - RNA, 19 nt, Homo sapiens
  misc_RNA (1)...(19): siRNA sense strand
cauugaagaucuggaguau

SEQ ID NO: 1259290 - RNA, 19 nt, Homo sapiens
  misc_RNA (1)...(19): siRNA sense strand
gaagggacugcaguaugua

SEQ ID NO: 1259291 - RNA, 19 nt, Homo sapiens
  misc_RNA (1)...(19): siRNA sense strand
gcucggaugacaugacauu

SEQ ID NO: 1259292 - RNA, 19 nt, Homo sapiens
  misc_RNA (1)...(19): siRNA sense strand
cacgacgucccaaguaaua

SEQ ID NO: 1259293 - RNA, 19 nt, Homo sapiens
  misc_RNA (1)...(19): siRNA sense strand
caacugcaaggauauggaa

SEQ ID NO: 1259294 - RNA, 19 nt, Homo sapiens
  misc_RNA (1)...(19): siRNA sense strand
ccacagaggcaucagcaau

SEQ ID NO: 1259295 - RNA, 19 nt, Homo sapiens
  misc_RNA (1)...(19): siRNA sense strand
gcaggcauuuggagagaag

SEQ ID NO: 1259296 - RNA, 19 nt, Homo sapiens
  misc_RNA (1)...(19): siRNA sense strand
agauaagcaucaacaagga

SEQ ID NO: 1259297 - RNA, 19 nt, Homo sapiens
  misc_RNA (1)...(19): siRNA sense strand
gaugacaugacauugaaga

SEQ ID NO: 1259298 - RNA, 19 nt, Homo sapiens
  misc_RNA (1)...(19): siRNA sense strand
cagaacaacaugaccuuug

SEQ ID NO: 1259299 - RNA, 19 nt, Homo sapiens
  misc_RNA (1)...(19): siRNA sense strand
gaugguuucgcaagaauau

SEQ ID NO: 1259300 - RNA, 19 nt, Homo sapiens
  misc_RNA (1)...(19): siRNA sense strand
ccacccagcucguguugag

SEQ ID NO: 1259301 - RNA, 19 nt, Homo sapiens
  misc_RNA (1)...(19): siRNA sense strand
gaagagaauggagcacaug

SEQ ID NO: 1259302 - RNA, 19 nt, Homo sapiens
  misc_RNA (1)...(19): siRNA sense strand
ggauccuucuggaauguug

SEQ ID NO: 1259303 - RNA, 19 nt, Homo sapiens
  misc_RNA (1)...(19): siRNA sense strand
ucacacaggagaagccaaa

SEQ ID NO: 1259304 - RNA, 19 nt, Homo sapiens
  misc_RNA (1)...(19): siRNA sense strand
cagcaggcauuuggagaga

SEQ ID NO: 1259305 - RNA, 19 nt, Homo sapiens
  misc_RNA (1)...(19): siRNA sense strand
ggugaacuuucugguuuau

SEQ ID NO: 1259306 - RNA, 19 nt, Homo sapiens
  misc_RNA (1)...(19): siRNA sense strand
gugacgaggugaacuuucu

SEQ ID NO: 1259307 - RNA, 19 nt, Homo sapiens
  misc_RNA (1)...(19): siRNA sense strand
gcagaacaacaugaccuuu

SEQ ID NO: 1259308 - RNA, 19 nt, Homo sapiens
  misc_RNA (1)...(19): siRNA sense strand
uaugaugguuucgcaagaa

SEQ ID NO: 1259309 - RNA, 19 nt, Homo sapiens
  misc_RNA (1)...(19): siRNA sense strand
cgacgucccaaguaauaaa

SEQ ID NO: 1259310 - RNA, 19 nt, Homo sapiens
  misc_RNA (1)...(19): siRNA sense strand
gcacgacgucccaaguaau

SEQ ID NO: 1259311 - RNA, 19 nt, Homo sapiens
  misc_RNA (1)...(19): siRNA sense strand
auaaagaugucaccucacu

SEQ ID NO: 1259312 - RNA, 19 nt, Homo sapiens
  misc_RNA (1)...(19): siRNA sense strand
gagugcugguguagacaaa

SEQ ID NO: 1259313 - RNA, 19 nt, Homo sapiens
  misc_RNA (1)...(19): siRNA sense strand
acucaaagccaauggaaau

SEQ ID NO: 1259314 - RNA, 19 nt, Homo sapiens
  misc_RNA (1)...(19): siRNA sense strand
gcaguuuccuuuucauuca

SEQ ID NO: 1259315 - RNA, 19 nt, Homo sapiens
  misc_RNA (1)...(19): siRNA sense strand
gcaccuuaggccaacauaa

SEQ ID NO: 1259316 - RNA, 19 nt, Homo sapiens
  misc_RNA (1)...(19): siRNA sense strand
gagacauuguauacgagaa

SEQ ID NO: 1259317 - RNA, 19 nt, Homo sapiens
  misc_RNA (1)...(19): siRNA sense strand
gaagaucuggaguaugaag

SEQ ID NO: 1259318 - RNA, 19 nt, Homo sapiens
  misc_RNA (1)...(19): siRNA sense strand
gcaaaauccuccaaagaac

SEQ ID NO: 1259319 - RNA, 19 nt, Homo sapiens
  misc_RNA (1)...(19): siRNA sense strand
gaaccugaaugagaauagc

SEQ ID NO: 1259320 - RNA, 19 nt, Homo sapiens
  misc_RNA (1)...(19): siRNA sense strand
cagaagggacugcaguaug

SEQ ID NO: 1259321 - RNA, 19 nt, Homo sapiens
  misc_RNA (1)...(19): siRNA sense strand
ccuggaacccugucaguga

SEQ ID NO: 1259322 - RNA, 19 nt, Homo sapiens
  misc_RNA (1)...(19): siRNA sense strand
uggagcacaugaaaucaau

SEQ ID NO: 1259323 - RNA, 19 nt, Homo sapiens
  misc_RNA (1)...(19): siRNA sense strand
aacccaaacuccagcauca

SEQ ID NO: 1259324 - RNA, 19 nt, Homo sapiens
  misc_RNA (1)...(19): siRNA sense strand
ugaacuuucugguuuaucg

SEQ ID NO: 1259325 - RNA, 19 nt, Homo sapiens
  misc_RNA (1)...(19): siRNA sense strand
gagauuccacccaacaaag

SEQ ID NO: 1259326 - RNA, 19 nt, Homo sapiens
  misc_RNA (1)...(19): siRNA sense strand
ggguucauaugaugguuuc

SEQ ID NO: 1259327 - RNA, 19 nt, Homo sapiens
  misc_RNA (1)...(19): siRNA sense strand
acacacucaugaagcauca

SEQ ID NO: 1259328 - RNA, 19 nt, Homo sapiens
  misc_RNA (1)...(19): siRNA sense strand
ggacuggcagaacaacaug

SEQ ID NO: 1259329 - RNA, 19 nt, Homo sapiens
  misc_RNA (1)...(19): siRNA sense strand
gagaagccaaacagcaguu

SEQ ID NO: 1259330 - RNA, 19 nt, Homo sapiens
  misc_RNA (1)...(19): siRNA sense strand
aggugaacuuucugguuua

SEQ ID NO: 1259331 - RNA, 19 nt, Homo sapiens
  misc_RNA (1)...(19): siRNA sense strand
ggagcacaugaaaucaaua

SEQ ID NO: 1259332 - RNA, 19 nt, Homo sapiens
  misc_RNA (1)...(19): siRNA sense strand
uggcaagugcuucauuuga

SEQ ID NO: 1259333 - RNA, 19 nt, Homo sapiens
  misc_RNA (1)...(19): siRNA sense strand
gcugagauaagcaucaaca

SEQ ID NO: 1259334 - RNA, 19 nt, Homo sapiens
  misc_RNA (1)...(19): siRNA sense strand
uagagucccugucccugau

SEQ ID NO: 1259335 - RNA, 19 nt, Homo sapiens
  misc_RNA (1)...(19): siRNA sense strand
ugagauuccacccaacaaa

SEQ ID NO: 1259336 - RNA, 19 nt, Homo sapiens
  misc_RNA (1)...(19): siRNA sense strand
gugcuucauuugauucuac

SEQ ID NO: 1259337 - RNA, 19 nt, Homo sapiens
  misc_RNA (1)...(19): siRNA sense strand
ggaacgcccgaggagauaa

SEQ ID NO: 1259338 - RNA, 19 nt, Homo sapiens
  misc_RNA (1)...(19): siRNA sense strand
gcacccacacacucaugaa

SEQ ID NO: 1259339 - RNA, 19 nt, Homo sapiens
  misc_RNA (1)...(19): siRNA sense strand
ggaaagaguuuauguucua

SEQ ID NO: 1259340 - RNA, 19 nt, Homo sapiens
  misc_RNA (1)...(19): siRNA sense strand
cagaagaacuguuugauug

SEQ ID NO: 1259341 - RNA, 19 nt, Homo sapiens
  misc_RNA (1)...(19): siRNA sense strand
gagaagagcuccagcagau

SEQ ID NO: 1259342 - RNA, 19 nt, Homo sapiens
  misc_RNA (1)...(19): siRNA sense strand
gcaauugugugccaucaaa

SEQ ID NO: 1259343 - RNA, 19 nt, Homo sapiens
  misc_RNA (1)...(19): siRNA sense strand
ggagacaaaucaucaggaa

SEQ ID NO: 1259344 - RNA, 19 nt, Homo sapiens
  misc_RNA (1)...(19): siRNA sense strand
gaagagcuccagcagauaa

SEQ ID NO: 1259345 - RNA, 19 nt, Homo sapiens
  misc_RNA (1)...(19): siRNA sense strand
caagaucuguggagacaaa

SEQ ID NO: 1259346 - RNA, 19 nt, Homo sapiens
  misc_RNA (1)...(19): siRNA sense strand
guuguucacuucagaauuu

SEQ ID NO: 1259347 - RNA, 19 nt, Homo sapiens
  misc_RNA (1)...(19): siRNA sense strand
gcaccugacugaagaugaa

SEQ ID NO: 1259348 - RNA, 19 nt, Homo sapiens
  misc_RNA (1)...(19): siRNA sense strand
gaaauuauuccaugcaaga

SEQ ID NO: 1259349 - RNA, 19 nt, Homo sapiens
  misc_RNA (1)...(19): siRNA sense strand
ggaagaaauugagaacuau

SEQ ID NO: 1259350 - RNA, 19 nt, Homo sapiens
  misc_RNA (1)...(19): siRNA sense strand
caaggugucuacauuaaga

SEQ ID NO: 1259351 - RNA, 19 nt, Homo sapiens
  misc_RNA (1)...(19): siRNA sense strand
ccgagaagauggaauacua

SEQ ID NO: 1259352 - RNA, 19 nt, Homo sapiens
  misc_RNA (1)...(19): siRNA sense strand
gaagauggaauacuaacaa

SEQ ID NO: 1259353 - RNA, 19 nt, Homo sapiens
  misc_RNA (1)...(19): siRNA sense strand
cagcuuguaugcagaagua

SEQ ID NO: 1259354 - RNA, 19 nt, Homo sapiens
  misc_RNA (1)...(19): siRNA sense strand
gaucaaauugugcuucuaa

SEQ ID NO: 1259355 - RNA, 19 nt, Homo sapiens
  misc_RNA (1)...(19): siRNA sense strand
gcagagagacagcuuguau

SEQ ID NO: 1259356 - RNA, 19 nt, Homo sapiens
  misc_RNA (1)...(19): siRNA sense strand
caaacgcauugauggauuu

SEQ ID NO: 1259357 - RNA, 19 nt, Homo sapiens
  misc_RNA (1)...(19): siRNA sense strand
gaagaacuguuugauugau

SEQ ID NO: 1259358 - RNA, 19 nt, Homo sapiens
  misc_RNA (1)...(19): siRNA sense strand
uagaacaccuugcacagaa

SEQ ID NO: 1259359 - RNA, 19 nt, Homo sapiens
  misc_RNA (1)...(19): siRNA sense strand
aggaagaaauugagaacua

SEQ ID NO: 1259360 - RNA, 19 nt, Homo sapiens
  misc_RNA (1)...(19): siRNA sense strand
gaacaccuugcacagaaua

SEQ ID NO: 1259361 - RNA, 19 nt, Homo sapiens
  misc_RNA (1)...(19): siRNA sense strand
aaucaaaccagaaccaaua

SEQ ID NO: 1259362 - RNA, 19 nt, Homo sapiens
  misc_RNA (1)...(19): siRNA sense strand
guagggaugucucgagaug

SEQ ID NO: 1259363 - RNA, 19 nt, Homo sapiens
  misc_RNA (1)...(19): siRNA sense strand
gaggugauguggcaauugu

SEQ ID NO: 1259364 - RNA, 19 nt, Homo sapiens
  misc_RNA (1)...(19): siRNA sense strand
gcucauggcugcaagaaaa

SEQ ID NO: 1259365 - RNA, 19 nt, Homo sapiens
  misc_RNA (1)...(19): siRNA sense strand
ggaaaccugccaauacuug

SEQ ID NO: 1259366 - RNA, 19 nt, Homo sapiens
  misc_RNA (1)...(19): siRNA sense strand
gaggugguguuuaucagaa

SEQ ID NO: 1259367 - RNA, 19 nt, Homo sapiens
  misc_RNA (1)...(19): siRNA sense strand
ccaaacgcauugauggauu

SEQ ID NO: 1259368 - RNA, 19 nt, Homo sapiens
  misc_RNA (1)...(19): siRNA sense strand
uuacagaagcuauacagua

SEQ ID NO: 1259369 - RNA, 19 nt, Homo sapiens
  misc_RNA (1)...(19): siRNA sense strand
gaaccaauaugugacuaca

SEQ ID NO: 1259370 - RNA, 19 nt, Homo sapiens
  misc_RNA (1)...(19): siRNA sense strand
caacacguccuacagaaga

SEQ ID NO: 1259371 - RNA, 19 nt, Homo sapiens
  misc_RNA (1)...(19): siRNA sense strand
gugaagacuuuauuagcuu

SEQ ID NO: 1259372 - RNA, 19 nt, Homo sapiens
  misc_RNA (1)...(19): siRNA sense strand
uaugcaaggugucuacauu

SEQ ID NO: 1259373 - RNA, 19 nt, Homo sapiens
  misc_RNA (1)...(19): siRNA sense strand
ucaccgagaagauggaaua

SEQ ID NO: 1259374 - RNA, 19 nt, Homo sapiens
  misc_RNA (1)...(19): siRNA sense strand
ccagucaggucuugauauc

SEQ ID NO: 1259375 - RNA, 19 nt, Homo sapiens
  misc_RNA (1)...(19): siRNA sense strand
gauggaauacuaacaaagu

SEQ ID NO: 1259376 - RNA, 19 nt, Homo sapiens
  misc_RNA (1)...(19): siRNA sense strand
gaaugugccgugccuuuga

SEQ ID NO: 1259377 - RNA, 19 nt, Homo sapiens
  misc_RNA (1)...(19): siRNA sense strand
ggagaagucagcaaagcaa

SEQ ID NO: 1259378 - RNA, 19 nt, Homo sapiens
  misc_RNA (1)...(19): siRNA sense strand
ugcaaggugucuacauuaa

SEQ ID NO: 1259379 - RNA, 19 nt, Homo sapiens
  misc_RNA (1)...(19): siRNA sense strand
acagaagaaucaccgagaa

SEQ ID NO: 1259380 - RNA, 19 nt, Homo sapiens
  misc_RNA (1)...(19): siRNA sense strand
gaagaaucaccgagaagau

SEQ ID NO: 1259381 - RNA, 19 nt, Homo sapiens
  misc_RNA (1)...(19): siRNA sense strand
ucagaagaacuguuugauu

SEQ ID NO: 1259382 - RNA, 19 nt, Homo sapiens
  misc_RNA (1)...(19): siRNA sense strand
cgaccucaguaacuacauu

SEQ ID NO: 1259383 - RNA, 19 nt, Homo sapiens
  misc_RNA (1)...(19): siRNA sense strand
caaaccagaaccaauaugu

SEQ ID NO: 1259384 - RNA, 19 nt, Homo sapiens
  misc_RNA (1)...(19): siRNA sense strand
agacaaaucaucaggaauc

SEQ ID NO: 1259385 - RNA, 19 nt, Homo sapiens
  misc_RNA (1)...(19): siRNA sense strand
gacugaagaugaaauugca

SEQ ID NO: 1259386 - RNA, 19 nt, Homo sapiens
  misc_RNA (1)...(19): siRNA sense strand
guccauggcagaauuagaa

SEQ ID NO: 1259387 - RNA, 19 nt, Homo sapiens
  misc_RNA (1)...(19): siRNA sense strand
uacaguaugugguggaguu

SEQ ID NO: 1259388 - RNA, 19 nt, Homo sapiens
  misc_RNA (1)...(19): siRNA sense strand
gccaauacuugagagaaga

SEQ ID NO: 1259389 - RNA, 19 nt, Homo sapiens
  misc_RNA (1)...(19): siRNA sense strand
gaaaccugccaauacuuga

SEQ ID NO: 1259390 - RNA, 19 nt, Homo sapiens
  misc_RNA (1)...(19): siRNA sense strand
aaauucagcuagcucuuca

SEQ ID NO: 1259391 - RNA, 19 nt, Homo sapiens
  misc_RNA (1)...(19): siRNA sense strand
gacauugugcgacuucauu

SEQ ID NO: 1259392 - RNA, 19 nt, Homo sapiens
  misc_RNA (1)...(19): siRNA sense strand
cgagaagauggaauacuaa

SEQ ID NO: 1259393 - RNA, 19 nt, Homo sapiens
  misc_RNA (1)...(19): siRNA sense strand
agaaaccgcugccaacacu

SEQ ID NO: 1259394 - RNA, 19 nt, Homo sapiens
  misc_RNA (1)...(19): siRNA sense strand
cuaugcaccugacugaaga

SEQ ID NO: 1259395 - RNA, 19 nt, Homo sapiens
  misc_RNA (1)...(19): siRNA sense strand
cgacgucuucaaauccuua

SEQ ID NO: 1259396 - RNA, 19 nt, Homo sapiens
  misc_RNA (1)...(19): siRNA sense strand
cagaaugugccgugccuuu

SEQ ID NO: 1259397 - RNA, 19 nt, Homo sapiens
  misc_RNA (1)...(19): siRNA sense strand
gggaggugauguggcaauu

SEQ ID NO: 1259398 - RNA, 19 nt, Homo sapiens
  misc_RNA (1)...(19): siRNA sense strand
gaaucaaaccagaaccaau

SEQ ID NO: 1259399 - RNA, 19 nt, Homo sapiens
  misc_RNA (1)...(19): siRNA sense strand
ccaacgggcugacggaacu

SEQ ID NO: 1259400 - RNA, 19 nt, Homo sapiens
  misc_RNA (1)...(19): siRNA sense strand
gaucuguggagacaaauca

SEQ ID NO: 1259401 - RNA, 19 nt, Homo sapiens
  misc_RNA (1)...(19): siRNA sense strand
ucaaauccuuagguuguga

SEQ ID NO: 1259402 - RNA, 19 nt, Homo sapiens
  misc_RNA (1)...(19): siRNA sense strand
gaagaaauugagaacuauc

SEQ ID NO: 1259403 - RNA, 19 nt, Homo sapiens
  misc_RNA (1)...(19): siRNA sense strand
ucgagaugcuguaaaauuu

SEQ ID NO: 1259404 - RNA, 19 nt, Homo sapiens
  misc_RNA (1)...(19): siRNA sense strand
ucagcuagcucuucaacac

SEQ ID NO: 1259405 - RNA, 19 nt, Homo sapiens
  misc_RNA (1)...(19): siRNA sense strand
gguugugaagacuuuauua

SEQ ID NO: 1259406 - RNA, 19 nt, Homo sapiens
  misc_RNA (1)...(19): siRNA sense strand
aaccagaaccaauauguga

SEQ ID NO: 1259407 - RNA, 19 nt, Homo sapiens
  misc_RNA (1)...(19): siRNA sense strand
aaucaucaggaauccauua

SEQ ID NO: 1259408 - RNA, 19 nt, Homo sapiens
  misc_RNA (1)...(19): siRNA sense strand
gcuucuaccuggacauaca

SEQ ID NO: 1259409 - RNA, 19 nt, Homo sapiens
  misc_RNA (1)...(19): siRNA sense strand
guaugcagaaguacagaaa

SEQ ID NO: 1259410 - RNA, 19 nt, Homo sapiens
  misc_RNA (1)...(19): siRNA sense strand
caaaucaucaggaauccau

SEQ ID NO: 1259411 - RNA, 19 nt, Homo sapiens
  misc_RNA (1)...(19): siRNA sense strand
ggaaucaaaccagaaccaa

SEQ ID NO: 1259412 - RNA, 19 nt, Homo sapiens
  misc_RNA (1)...(19): siRNA sense strand
acgcauugauggauuuaug

SEQ ID NO: 1259413 - RNA, 19 nt, Homo sapiens
  misc_RNA (1)...(19): siRNA sense strand
cuuagguugugaagacuuu

SEQ ID NO: 1259414 - RNA, 19 nt, Homo sapiens
  misc_RNA (1)...(19): siRNA sense strand
agaagaacuguuugauuga

SEQ ID NO: 1259415 - RNA, 19 nt, Homo sapiens
  misc_RNA (1)...(19): siRNA sense strand
aaugcaaauugauggguaa

SEQ ID NO: 1259416 - RNA, 19 nt, Homo sapiens
  misc_RNA (1)...(19): siRNA sense strand
cuucaaauccuuagguugu

SEQ ID NO: 1259417 - RNA, 19 nt, Homo sapiens
  misc_RNA (1)...(19): siRNA sense strand
cugccaacacugucgauua

SEQ ID NO: 1259418 - RNA, 19 nt, Homo sapiens
  misc_RNA (1)...(19): siRNA sense strand
gcaaggugucuacauuaag

SEQ ID NO: 1259419 - RNA, 19 nt, Homo sapiens
  misc_RNA (1)...(19): siRNA sense strand
ugugaagacuuuauuagcu

SEQ ID NO: 1259420 - RNA, 19 nt, Homo sapiens
  misc_RNA (1)...(19): siRNA sense strand
acgacgaccucaguaacua

SEQ ID NO: 1259421 - RNA, 19 nt, Homo sapiens
  misc_RNA (1)...(19): siRNA sense strand
ugacuacacaccagcauca

SEQ ID NO: 1259422 - RNA, 19 nt, Homo sapiens
  misc_RNA (1)...(19): siRNA sense strand
aaagcaauauacccagaca

SEQ ID NO: 1259423 - RNA, 19 nt, Homo sapiens
  misc_RNA (1)...(19): siRNA sense strand
cucuagaggugguguuuau

SEQ ID NO: 1259424 - RNA, 19 nt, Homo sapiens
  misc_RNA (1)...(19): siRNA sense strand
cuaaaucgcaucuggaaac

SEQ ID NO: 1259425 - RNA, 19 nt, Homo sapiens
  misc_RNA (1)...(19): siRNA sense strand
cagcuucuaccuggacaua

SEQ ID NO: 1259426 - RNA, 19 nt, Homo sapiens
  misc_RNA (1)...(19): siRNA sense strand
guucuaugcaccugacuga

SEQ ID NO: 1259427 - RNA, 19 nt, Homo sapiens
  misc_RNA (1)...(19): siRNA sense strand
cagaaccaauaugugacua

SEQ ID NO: 1259428 - RNA, 19 nt, Homo sapiens
  misc_RNA (1)...(19): siRNA sense strand
ugccaacacugucgauuac

SEQ ID NO: 1259429 - RNA, 19 nt, Homo sapiens
  misc_RNA (1)...(19): siRNA sense strand
ggaguuguucacuucagaa

SEQ ID NO: 1259430 - RNA, 19 nt, Homo sapiens
  misc_RNA (1)...(19): siRNA sense strand
uggaaagaguuuauguucu

SEQ ID NO: 1259431 - RNA, 19 nt, Homo sapiens
  misc_RNA (1)...(19): siRNA sense strand
gaagacuuuauuagcuuug

SEQ ID NO: 1259432 - RNA, 19 nt, Homo sapiens
  misc_RNA (1)...(19): siRNA sense strand
gaagucagcaaagcaaugc

SEQ ID NO: 1259433 - RNA, 19 nt, Homo sapiens
  misc_RNA (1)...(19): siRNA sense strand
guagaaaccgcugccaaca

SEQ ID NO: 1259434 - RNA, 19 nt, Homo sapiens
  misc_RNA (1)...(19): siRNA sense strand
ggugguguuuaucagaaug

SEQ ID NO: 1259435 - RNA, 19 nt, Homo sapiens
  misc_RNA (1)...(19): siRNA sense strand
cuggaaaccugccaauacu

SEQ ID NO: 1259436 - RNA, 19 nt, Homo sapiens
  misc_RNA (1)...(19): siRNA sense strand
gaucgaaccaguagaaacc

SEQ ID NO: 1259437 - RNA, 19 nt, Homo sapiens
  misc_RNA (1)...(19): siRNA sense strand
cgucagaagaacuguuuga

SEQ ID NO: 1259438 - RNA, 19 nt, Homo sapiens
  misc_RNA (1)...(19): siRNA sense strand
gccuuugacucucagaaca

SEQ ID NO: 1259439 - RNA, 19 nt, Homo sapiens
  misc_RNA (1)...(19): siRNA sense strand
ggaaagaguuuauguucua

SEQ ID NO: 1259440 - RNA, 19 nt, Homo sapiens
  misc_RNA (1)...(19): siRNA sense strand
cagaagaacuguuugauug

SEQ ID NO: 1259441 - RNA, 19 nt, Homo sapiens
  misc_RNA (1)...(19): siRNA sense strand
gagaagagcuccagcagau

SEQ ID NO: 1259442 - RNA, 19 nt, Homo sapiens
  misc_RNA (1)...(19): siRNA sense strand
gcaauugugugccaucaaa

SEQ ID NO: 1259443 - RNA, 19 nt, Homo sapiens
  misc_RNA (1)...(19): siRNA sense strand
ggagacaaaucaucaggaa

SEQ ID NO: 1259444 - RNA, 19 nt, Homo sapiens
  misc_RNA (1)...(19): siRNA sense strand
gaagagcuccagcagauaa

SEQ ID NO: 1259445 - RNA, 19 nt, Homo sapiens
  misc_RNA (1)...(19): siRNA sense strand
caagaucuguggagacaaa

SEQ ID NO: 1259446 - RNA, 19 nt, Homo sapiens
  misc_RNA (1)...(19): siRNA sense strand
guuguucacuucagaauuu

SEQ ID NO: 1259447 - RNA, 19 nt, Homo sapiens
  misc_RNA (1)...(19): siRNA sense strand
gcaccugacugaagaugaa

SEQ ID NO: 1259448 - RNA, 19 nt, Homo sapiens
  misc_RNA (1)...(19): siRNA sense strand
gaaauuauuccaugcaaga

SEQ ID NO: 1259449 - RNA, 19 nt, Homo sapiens
  misc_RNA (1)...(19): siRNA sense strand
ggaagaaauugagaacuau

SEQ ID NO: 1259450 - RNA, 19 nt, Homo sapiens
  misc_RNA (1)...(19): siRNA sense strand
caaggugucuacauuaaga

SEQ ID NO: 1259451 - RNA, 19 nt, Homo sapiens
  misc_RNA (1)...(19): siRNA sense strand
ccgagaagauggaauacua

SEQ ID NO: 1259452 - RNA, 19 nt, Homo sapiens
  misc_RNA (1)...(19): siRNA sense strand
gaagauggaauacuaacaa

SEQ ID NO: 1259453 - RNA, 19 nt, Homo sapiens
  misc_RNA (1)...(19): siRNA sense strand
cagcuuguaugcagaagua

SEQ ID NO: 1259454 - RNA, 19 nt, Homo sapiens
  misc_RNA (1)...(19): siRNA sense strand
gaucaaauugugcuucuaa

SEQ ID NO: 1259455 - RNA, 19 nt, Homo sapiens
  misc_RNA (1)...(19): siRNA sense strand
gcagagagacagcuuguau

SEQ ID NO: 1259456 - RNA, 19 nt, Homo sapiens
  misc_RNA (1)...(19): siRNA sense strand
caaacgcauugauggauuu

SEQ ID NO: 1259457 - RNA, 19 nt, Homo sapiens
  misc_RNA (1)...(19): siRNA sense strand
gaagaacuguuugauugau

SEQ ID NO: 1259458 - RNA, 19 nt, Homo sapiens
  misc_RNA (1)...(19): siRNA sense strand
uagaacaccuugcacagaa

SEQ ID NO: 1259459 - RNA, 19 nt, Homo sapiens
  misc_RNA (1)...(19): siRNA sense strand
aggaagaaauugagaacua

SEQ ID NO: 1259460 - RNA, 19 nt, Homo sapiens
  misc_RNA (1)...(19): siRNA sense strand
gaacaccuugcacagaaua

SEQ ID NO: 1259461 - RNA, 19 nt, Homo sapiens
  misc_RNA (1)...(19): siRNA sense strand
aaucaaaccagaaccaaua

SEQ ID NO: 1259462 - RNA, 19 nt, Homo sapiens
  misc_RNA (1)...(19): siRNA sense strand
guagggaugucucgagaug

SEQ ID NO: 1259463 - RNA, 19 nt, Homo sapiens
  misc_RNA (1)...(19): siRNA sense strand
gaggugauguggcaauugu

SEQ ID NO: 1259464 - RNA, 19 nt, Homo sapiens
  misc_RNA (1)...(19): siRNA sense strand
gcucauggcugcaagaaaa

SEQ ID NO: 1259465 - RNA, 19 nt, Homo sapiens
  misc_RNA (1)...(19): siRNA sense strand
ggaaaccugccaauacuug

SEQ ID NO: 1259466 - RNA, 19 nt, Homo sapiens
  misc_RNA (1)...(19): siRNA sense strand
gaggugguguuuaucagaa

SEQ ID NO: 1259467 - RNA, 19 nt, Homo sapiens
  misc_RNA (1)...(19): siRNA sense strand
ccaaacgcauugauggauu

SEQ ID NO: 1259468 - RNA, 19 nt, Homo sapiens
  misc_RNA (1)...(19): siRNA sense strand
uuacagaagcuauacagua

SEQ ID NO: 1259469 - RNA, 19 nt, Homo sapiens
  misc_RNA (1)...(19): siRNA sense strand
gaaccaauaugugacuaca

SEQ ID NO: 1259470 - RNA, 19 nt, Homo sapiens
  misc_RNA (1)...(19): siRNA sense strand
caacacguccuacagaaga

SEQ ID NO: 1259471 - RNA, 19 nt, Homo sapiens
  misc_RNA (1)...(19): siRNA sense strand
gugaagacuuuauuagcuu

SEQ ID NO: 1259472 - RNA, 19 nt, Homo sapiens
  misc_RNA (1)...(19): siRNA sense strand
uaugcaaggugucuacauu

SEQ ID NO: 1259473 - RNA, 19 nt, Homo sapiens
  misc_RNA (1)...(19): siRNA sense strand
ucaccgagaagauggaaua

SEQ ID NO: 1259474 - RNA, 19 nt, Homo sapiens
  misc_RNA (1)...(19): siRNA sense strand
ccagucaggucuugauauc

SEQ ID NO: 1259475 - RNA, 19 nt, Homo sapiens
  misc_RNA (1)...(19): siRNA sense strand
gauggaauacuaacaaagu

SEQ ID NO: 1259476 - RNA, 19 nt, Homo sapiens
  misc_RNA (1)...(19): siRNA sense strand
gaaugugccgugccuuuga

SEQ ID NO: 1259477 - RNA, 19 nt, Homo sapiens
  misc_RNA (1)...(19): siRNA sense strand
ggagaagucagcaaagcaa

SEQ ID NO: 1259478 - RNA, 19 nt, Homo sapiens
  misc_RNA (1)...(19): siRNA sense strand
ugcaaggugucuacauuaa

SEQ ID NO: 1259479 - RNA, 19 nt, Homo sapiens
  misc_RNA (1)...(19): siRNA sense strand
acagaagaaucaccgagaa

SEQ ID NO: 1259480 - RNA, 19 nt, Homo sapiens
  misc_RNA (1)...(19): siRNA sense strand
gaagaaucaccgagaagau

SEQ ID NO: 1259481 - RNA, 19 nt, Homo sapiens
  misc_RNA (1)...(19): siRNA sense strand
ucagaagaacuguuugauu

SEQ ID NO: 1259482 - RNA, 19 nt, Homo sapiens
  misc_RNA (1)...(19): siRNA sense strand
cgaccucaguaacuacauu

SEQ ID NO: 1259483 - RNA, 19 nt, Homo sapiens
  misc_RNA (1)...(19): siRNA sense strand
caaaccagaaccaauaugu

SEQ ID NO: 1259484 - RNA, 19 nt, Homo sapiens
  misc_RNA (1)...(19): siRNA sense strand
agacaaaucaucaggaauc

SEQ ID NO: 1259485 - RNA, 19 nt, Homo sapiens
  misc_RNA (1)...(19): siRNA sense strand
gacugaagaugaaauugca

SEQ ID NO: 1259486 - RNA, 19 nt, Homo sapiens
  misc_RNA (1)...(19): siRNA sense strand
guccauggcagaauuagaa

SEQ ID NO: 1259487 - RNA, 19 nt, Homo sapiens
  misc_RNA (1)...(19): siRNA sense strand
uacaguaugugguggaguu

SEQ ID NO: 1259488 - RNA, 19 nt, Homo sapiens
  misc_RNA (1)...(19): siRNA sense strand
gccaauacuugagagaaga

SEQ ID NO: 1259489 - RNA, 19 nt, Homo sapiens
  misc_RNA (1)...(19): siRNA sense strand
gaaaccugccaauacuuga

SEQ ID NO: 1259490 - RNA, 19 nt, Homo sapiens
  misc_RNA (1)...(19): siRNA sense strand
aaauucagcuagcucuuca

SEQ ID NO: 1259491 - RNA, 19 nt, Homo sapiens
  misc_RNA (1)...(19): siRNA sense strand
gacauugugcgacuucauu

SEQ ID NO: 1259492 - RNA, 19 nt, Homo sapiens
  misc_RNA (1)...(19): siRNA sense strand
cgagaagauggaauacuaa

SEQ ID NO: 1259493 - RNA, 19 nt, Homo sapiens
  misc_RNA (1)...(19): siRNA sense strand
agaaaccgcugccaacacu

SEQ ID NO: 1259494 - RNA, 19 nt, Homo sapiens
  misc_RNA (1)...(19): siRNA sense strand
cuaugcaccugacugaaga

SEQ ID NO: 1259495 - RNA, 19 nt, Homo sapiens
  misc_RNA (1)...(19): siRNA sense strand
cgacgucuucaaauccuua

SEQ ID NO: 1259496 - RNA, 19 nt, Homo sapiens
  misc_RNA (1)...(19): siRNA sense strand
cagaaugugccgugccuuu

SEQ ID NO: 1259497 - RNA, 19 nt, Homo sapiens
  misc_RNA (1)...(19): siRNA sense strand
gggaggugauguggcaauu

SEQ ID NO: 1259498 - RNA, 19 nt, Homo sapiens
  misc_RNA (1)...(19): siRNA sense strand
gaaucaaaccagaaccaau

SEQ ID NO: 1259499 - RNA, 19 nt, Homo sapiens
  misc_RNA (1)...(19): siRNA sense strand
ccaacgggcugacggaacu

SEQ ID NO: 1259500 - RNA, 19 nt, Homo sapiens
  misc_RNA (1)...(19): siRNA sense strand
gaucuguggagacaaauca

SEQ ID NO: 1259501 - RNA, 19 nt, Homo sapiens
  misc_RNA (1)...(19): siRNA sense strand
ucaaauccuuagguuguga

SEQ ID NO: 1259502 - RNA, 19 nt, Homo sapiens
  misc_RNA (1)...(19): siRNA sense strand
gaagaaauugagaacuauc

SEQ ID NO: 1259503 - RNA, 19 nt, Homo sapiens
  misc_RNA (1)...(19): siRNA sense strand
ucgagaugcuguaaaauuu

SEQ ID NO: 1259504 - RNA, 19 nt, Homo sapiens
  misc_RNA (1)...(19): siRNA sense strand
ucagcuagcucuucaacac

SEQ ID NO: 1259505 - RNA, 19 nt, Homo sapiens
  misc_RNA (1)...(19): siRNA sense strand
gguugugaagacuuuauua

SEQ ID NO: 1259506 - RNA, 19 nt, Homo sapiens
  misc_RNA (1)...(19): siRNA sense strand
aaccagaaccaauauguga

SEQ ID NO: 1259507 - RNA, 19 nt, Homo sapiens
  misc_RNA (1)...(19): siRNA sense strand
aaucaucaggaauccauua

SEQ ID NO: 1259508 - RNA, 19 nt, Homo sapiens
  misc_RNA (1)...(19): siRNA sense strand
gcuucuaccuggacauaca

SEQ ID NO: 1259509 - RNA, 19 nt, Homo sapiens
  misc_RNA (1)...(19): siRNA sense strand
guaugcagaaguacagaaa

SEQ ID NO: 1259510 - RNA, 19 nt, Homo sapiens
  misc_RNA (1)...(19): siRNA sense strand
caaaucaucaggaauccau

SEQ ID NO: 1259511 - RNA, 19 nt, Homo sapiens
  misc_RNA (1)...(19): siRNA sense strand
ggaaucaaaccagaaccaa

SEQ ID NO: 1259512 - RNA, 19 nt, Homo sapiens
  misc_RNA (1)...(19): siRNA sense strand
acgcauugauggauuuaug

SEQ ID NO: 1259513 - RNA, 19 nt, Homo sapiens
  misc_RNA (1)...(19): siRNA sense strand
cuuagguugugaagacuuu

SEQ ID NO: 1259514 - RNA, 19 nt, Homo sapiens
  misc_RNA (1)...(19): siRNA sense strand
agaagaacuguuugauuga

SEQ ID NO: 1259515 - RNA, 19 nt, Homo sapiens
  misc_RNA (1)...(19): siRNA sense strand
aaugcaaauugauggguaa

SEQ ID NO: 1259516 - RNA, 19 nt, Homo sapiens
  misc_RNA (1)...(19): siRNA sense strand
cuucaaauccuuagguugu

SEQ ID NO: 1259517 - RNA, 19 nt, Homo sapiens
  misc_RNA (1)...(19): siRNA sense strand
cugccaacacugucgauua

SEQ ID NO: 1259518 - RNA, 19 nt, Homo sapiens
  misc_RNA (1)...(19): siRNA sense strand
gcaaggugucuacauuaag

SEQ ID NO: 1259519 - RNA, 19 nt, Homo sapiens
  misc_RNA (1)...(19): siRNA sense strand
ugugaagacuuuauuagcu

SEQ ID NO: 1259520 - RNA, 19 nt, Homo sapiens
  misc_RNA (1)...(19): siRNA sense strand
acgacgaccucaguaacua

SEQ ID NO: 1259521 - RNA, 19 nt, Homo sapiens
  misc_RNA (1)...(19): siRNA sense strand
ugacuacacaccagcauca

SEQ ID NO: 1259522 - RNA, 19 nt, Homo sapiens
  misc_RNA (1)...(19): siRNA sense strand
aaagcaauauacccagaca

SEQ ID NO: 1259523 - RNA, 19 nt, Homo sapiens
  misc_RNA (1)...(19): siRNA sense strand
cucuagaggugguguuuau

SEQ ID NO: 1259524 - RNA, 19 nt, Homo sapiens
  misc_RNA (1)...(19): siRNA sense strand
cuaaaucgcaucuggaaac

SEQ ID NO: 1259525 - RNA, 19 nt, Homo sapiens
  misc_RNA (1)...(19): siRNA sense strand
cagcuucuaccuggacaua

SEQ ID NO: 1259526 - RNA, 19 nt, Homo sapiens
  misc_RNA (1)...(19): siRNA sense strand
guucuaugcaccugacuga

SEQ ID NO: 1259527 - RNA, 19 nt, Homo sapiens
  misc_RNA (1)...(19): siRNA sense strand
cagaaccaauaugugacua

SEQ ID NO: 1259528 - RNA, 19 nt, Homo sapiens
  misc_RNA (1)...(19): siRNA sense strand
ugccaacacugucgauuac

SEQ ID NO: 1259529 - RNA, 19 nt, Homo sapiens
  misc_RNA (1)...(19): siRNA sense strand
ggaguuguucacuucagaa

SEQ ID NO: 1259530 - RNA, 19 nt, Homo sapiens
  misc_RNA (1)...(19): siRNA sense strand
uggaaagaguuuauguucu

SEQ ID NO: 1259531 - RNA, 19 nt, Homo sapiens
  misc_RNA (1)...(19): siRNA sense strand
gaagacuuuauuagcuuug

SEQ ID NO: 1259532 - RNA, 19 nt, Homo sapiens
  misc_RNA (1)...(19): siRNA sense strand
gaagucagcaaagcaaugc

SEQ ID NO: 1259533 - RNA, 19 nt, Homo sapiens
  misc_RNA (1)...(19): siRNA sense strand
guagaaaccgcugccaaca

SEQ ID NO: 1259534 - RNA, 19 nt, Homo sapiens
  misc_RNA (1)...(19): siRNA sense strand
ggugguguuuaucagaaug

SEQ ID NO: 1259535 - RNA, 19 nt, Homo sapiens
  misc_RNA (1)...(19): siRNA sense strand
cuggaaaccugccaauacu

SEQ ID NO: 1259536 - RNA, 19 nt, Homo sapiens
  misc_RNA (1)...(19): siRNA sense strand
gaucgaaccaguagaaacc

SEQ ID NO: 1259537 - RNA, 19 nt, Homo sapiens
  misc_RNA (1)...(19): siRNA sense strand
cgucagaagaacuguuuga

SEQ ID NO: 1259538 - RNA, 19 nt, Homo sapiens
  misc_RNA (1)...(19): siRNA sense strand
gccuuugacucucagaaca

SEQ ID NO: 1259539 - RNA, 19 nt, Homo sapiens
  misc_RNA (1)...(19): siRNA sense strand
ggaaagaguuuauguucua

SEQ ID NO: 1259540 - RNA, 19 nt, Homo sapiens
  misc_RNA (1)...(19): siRNA sense strand
cagaagaacuguuugauug

SEQ ID NO: 1259541 - RNA, 19 nt, Homo sapiens
  misc_RNA (1)...(19): siRNA sense strand
gagaagagcuccagcagau

SEQ ID NO: 1259542 - RNA, 19 nt, Homo sapiens
  misc_RNA (1)...(19): siRNA sense strand
gcaauugugugccaucaaa

SEQ ID NO: 1259543 - RNA, 19 nt, Homo sapiens
  misc_RNA (1)...(19): siRNA sense strand
ggagacaaaucaucaggaa

SEQ ID NO: 1259544 - RNA, 19 nt, Homo sapiens
  misc_RNA (1)...(19): siRNA sense strand
gaagagcuccagcagauaa

SEQ ID NO: 1259545 - RNA, 19 nt, Homo sapiens
  misc_RNA (1)...(19): siRNA sense strand
caagaucuguggagacaaa

SEQ ID NO: 1259546 - RNA, 19 nt, Homo sapiens
  misc_RNA (1)...(19): siRNA sense strand
guuguucacuucagaauuu

SEQ ID NO: 1259547 - RNA, 19 nt, Homo sapiens
  misc_RNA (1)...(19): siRNA sense strand
gcaccugacugaagaugaa

SEQ ID NO: 1259548 - RNA, 19 nt, Homo sapiens
  misc_RNA (1)...(19): siRNA sense strand
gaaauuauuccaugcaaga

SEQ ID NO: 1259549 - RNA, 19 nt, Homo sapiens
  misc_RNA (1)...(19): siRNA sense strand
ggaagaaauugagaacuau

SEQ ID NO: 1259550 - RNA, 19 nt, Homo sapiens
  misc_RNA (1)...(19): siRNA sense strand
caaggugucuacauuaaga

SEQ ID NO: 1259551 - RNA, 19 nt, Homo sapiens
  misc_RNA (1)...(19): siRNA sense strand
ccgagaagauggaauacua

SEQ ID NO: 1259552 - RNA, 19 nt, Homo sapiens
  misc_RNA (1)...(19): siRNA sense strand
gaagauggaauacuaacaa

SEQ ID NO: 1259553 - RNA, 19 nt, Homo sapiens
  misc_RNA (1)...(19): siRNA sense strand
cagcuuguaugcagaagua

SEQ ID NO: 1259554 - RNA, 19 nt, Homo sapiens
  misc_RNA (1)...(19): siRNA sense strand
gaucaaauugugcuucuaa

SEQ ID NO: 1259555 - RNA, 19 nt, Homo sapiens
  misc_RNA (1)...(19): siRNA sense strand
gcagagagacagcuuguau

SEQ ID NO: 1259556 - RNA, 19 nt, Homo sapiens
  misc_RNA (1)...(19): siRNA sense strand
caaacgcauugauggauuu

SEQ ID NO: 1259557 - RNA, 19 nt, Homo sapiens
  misc_RNA (1)...(19): siRNA sense strand
gaagaacuguuugauugau

SEQ ID NO: 1259558 - RNA, 19 nt, Homo sapiens
  misc_RNA (1)...(19): siRNA sense strand
uagaacaccuugcacagaa

SEQ ID NO: 1259559 - RNA, 19 nt, Homo sapiens
  misc_RNA (1)...(19): siRNA sense strand
aggaagaaauugagaacua

SEQ ID NO: 1259560 - RNA, 19 nt, Homo sapiens
  misc_RNA (1)...(19): siRNA sense strand
gaacaccuugcacagaaua

SEQ ID NO: 1259561 - RNA, 19 nt, Homo sapiens
  misc_RNA (1)...(19): siRNA sense strand
aaucaaaccagaaccaaua

SEQ ID NO: 1259562 - RNA, 19 nt, Homo sapiens
  misc_RNA (1)...(19): siRNA sense strand
guagggaugucucgagaug

SEQ ID NO: 1259563 - RNA, 19 nt, Homo sapiens
  misc_RNA (1)...(19): siRNA sense strand
gaggugauguggcaauugu

SEQ ID NO: 1259564 - RNA, 19 nt, Homo sapiens
  misc_RNA (1)...(19): siRNA sense strand
gcucauggcugcaagaaaa

SEQ ID NO: 1259565 - RNA, 19 nt, Homo sapiens
  misc_RNA (1)...(19): siRNA sense strand
ggaaaccugccaauacuug

SEQ ID NO: 1259566 - RNA, 19 nt, Homo sapiens
  misc_RNA (1)...(19): siRNA sense strand
gaggugguguuuaucagaa

SEQ ID NO: 1259567 - RNA, 19 nt, Homo sapiens
  misc_RNA (1)...(19): siRNA sense strand
ccaaacgcauugauggauu

SEQ ID NO: 1259568 - RNA, 19 nt, Homo sapiens
  misc_RNA (1)...(19): siRNA sense strand
uuacagaagcuauacagua

SEQ ID NO: 1259569 - RNA, 19 nt, Homo sapiens
  misc_RNA (1)...(19): siRNA sense strand
gaaccaauaugugacuaca

SEQ ID NO: 1259570 - RNA, 19 nt, Homo sapiens
  misc_RNA (1)...(19): siRNA sense strand
caacacguccuacagaaga

SEQ ID NO: 1259571 - RNA, 19 nt, Homo sapiens
  misc_RNA (1)...(19): siRNA sense strand
gugaagacuuuauuagcuu

SEQ ID NO: 1259572 - RNA, 19 nt, Homo sapiens
  misc_RNA (1)...(19): siRNA sense strand
uaugcaaggugucuacauu

SEQ ID NO: 1259573 - RNA, 19 nt, Homo sapiens
  misc_RNA (1)...(19): siRNA sense strand
ucaccgagaagauggaaua

SEQ ID NO: 1259574 - RNA, 19 nt, Homo sapiens
  misc_RNA (1)...(19): siRNA sense strand
ccagucaggucuugauauc

SEQ ID NO: 1259575 - RNA, 19 nt, Homo sapiens
  misc_RNA (1)...(19): siRNA sense strand
gauggaauacuaacaaagu

SEQ ID NO: 1259576 - RNA, 19 nt, Homo sapiens
  misc_RNA (1)...(19): siRNA sense strand
gaaugugccgugccuuuga

SEQ ID NO: 1259577 - RNA, 19 nt, Homo sapiens
  misc_RNA (1)...(19): siRNA sense strand
ggagaagucagcaaagcaa

SEQ ID NO: 1259578 - RNA, 19 nt, Homo sapiens
  misc_RNA (1)...(19): siRNA sense strand
ugcaaggugucuacauuaa

SEQ ID NO: 1259579 - RNA, 19 nt, Homo sapiens
  misc_RNA (1)...(19): siRNA sense strand
acagaagaaucaccgagaa

SEQ ID NO: 1259580 - RNA, 19 nt, Homo sapiens
  misc_RNA (1)...(19): siRNA sense strand
gaagaaucaccgagaagau

SEQ ID NO: 1259581 - RNA, 19 nt, Homo sapiens
  misc_RNA (1)...(19): siRNA sense strand
ucagaagaacuguuugauu

SEQ ID NO: 1259582 - RNA, 19 nt, Homo sapiens
  misc_RNA (1)...(19): siRNA sense strand
cgaccucaguaacuacauu

SEQ ID NO: 1259583 - RNA, 19 nt, Homo sapiens
  misc_RNA (1)...(19): siRNA sense strand
caaaccagaaccaauaugu

SEQ ID NO: 1259584 - RNA, 19 nt, Homo sapiens
  misc_RNA (1)...(19): siRNA sense strand
agacaaaucaucaggaauc

SEQ ID NO: 1259585 - RNA, 19 nt, Homo sapiens
  misc_RNA (1)...(19): siRNA sense strand
gacugaagaugaaauugca

SEQ ID NO: 1259586 - RNA, 19 nt, Homo sapiens
  misc_RNA (1)...(19): siRNA sense strand
guccauggcagaauuagaa

SEQ ID NO: 1259587 - RNA, 19 nt, Homo sapiens
  misc_RNA (1)...(19): siRNA sense strand
uacaguaugugguggaguu

SEQ ID NO: 1259588 - RNA, 19 nt, Homo sapiens
  misc_RNA (1)...(19): siRNA sense strand
gccaauacuugagagaaga

SEQ ID NO: 1259589 - RNA, 19 nt, Homo sapiens
  misc_RNA (1)...(19): siRNA sense strand
gaaaccugccaauacuuga

SEQ ID NO: 1259590 - RNA, 19 nt, Homo sapiens
  misc_RNA (1)...(19): siRNA sense strand
aaauucagcuagcucuuca

SEQ ID NO: 1259591 - RNA, 19 nt, Homo sapiens
  misc_RNA (1)...(19): siRNA sense strand
gacauugugcgacuucauu

SEQ ID NO: 1259592 - RNA, 19 nt, Homo sapiens
  misc_RNA (1)...(19): siRNA sense strand
cgagaagauggaauacuaa

SEQ ID NO: 1259593 - RNA, 19 nt, Homo sapiens
  misc_RNA (1)...(19): siRNA sense strand
agaaaccgcugccaacacu

SEQ ID NO: 1259594 - RNA, 19 nt, Homo sapiens
  misc_RNA (1)...(19): siRNA sense strand
cuaugcaccugacugaaga

SEQ ID NO: 1259595 - RNA, 19 nt, Homo sapiens
  misc_RNA (1)...(19): siRNA sense strand
cgacgucuucaaauccuua

SEQ ID NO: 1259596 - RNA, 19 nt, Homo sapiens
  misc_RNA (1)...(19): siRNA sense strand
cagaaugugccgugccuuu

SEQ ID NO: 1259597 - RNA, 19 nt, Homo sapiens
  misc_RNA (1)...(19): siRNA sense strand
gggaggugauguggcaauu

SEQ ID NO: 1259598 - RNA, 19 nt, Homo sapiens
  misc_RNA (1)...(19): siRNA sense strand
gaaucaaaccagaaccaau

SEQ ID NO: 1259599 - RNA, 19 nt, Homo sapiens
  misc_RNA (1)...(19): siRNA sense strand
ccaacgggcugacggaacu

SEQ ID NO: 1259600 - RNA, 19 nt, Homo sapiens
  misc_RNA (1)...(19): siRNA sense strand
gaucuguggagacaaauca

SEQ ID NO: 1259601 - RNA, 19 nt, Homo sapiens
  misc_RNA (1)...(19): siRNA sense strand
ucaaauccuuagguuguga

SEQ ID NO: 1259602 - RNA, 19 nt, Homo sapiens
  misc_RNA (1)...(19): siRNA sense strand
gaagaaauugagaacuauc

SEQ ID NO: 1259603 - RNA, 19 nt, Homo sapiens
  misc_RNA (1)...(19): siRNA sense strand
ucgagaugcuguaaaauuu

SEQ ID NO: 1259604 - RNA, 19 nt, Homo sapiens
  misc_RNA (1)...(19): siRNA sense strand
ucagcuagcucuucaacac

SEQ ID NO: 1259605 - RNA, 19 nt, Homo sapiens
  misc_RNA (1)...(19): siRNA sense strand
gguugugaagacuuuauua

SEQ ID NO: 1259606 - RNA, 19 nt, Homo sapiens
  misc_RNA (1)...(19): siRNA sense strand
aaccagaaccaauauguga

SEQ ID NO: 1259607 - RNA, 19 nt, Homo sapiens
  misc_RNA (1)...(19): siRNA sense strand
aaucaucaggaauccauua

SEQ ID NO: 1259608 - RNA, 19 nt, Homo sapiens
  misc_RNA (1)...(19): siRNA sense strand
gcuucuaccuggacauaca

SEQ ID NO: 1259609 - RNA, 19 nt, Homo sapiens
  misc_RNA (1)...(19): siRNA sense strand
guaugcagaaguacagaaa

SEQ ID NO: 1259610 - RNA, 19 nt, Homo sapiens
  misc_RNA (1)...(19): siRNA sense strand
caaaucaucaggaauccau

SEQ ID NO: 1259611 - RNA, 19 nt, Homo sapiens
  misc_RNA (1)...(19): siRNA sense strand
ggaaucaaaccagaaccaa

SEQ ID NO: 1259612 - RNA, 19 nt, Homo sapiens
  misc_RNA (1)...(19): siRNA sense strand
acgcauugauggauuuaug

SEQ ID NO: 1259613 - RNA, 19 nt, Homo sapiens
  misc_RNA (1)...(19): siRNA sense strand
cuuagguugugaagacuuu

SEQ ID NO: 1259614 - RNA, 19 nt, Homo sapiens
  misc_RNA (1)...(19): siRNA sense strand
agaagaacuguuugauuga

SEQ ID NO: 1259615 - RNA, 19 nt, Homo sapiens
  misc_RNA (1)...(19): siRNA sense strand
aaugcaaauugauggguaa

SEQ ID NO: 1259616 - RNA, 19 nt, Homo sapiens
  misc_RNA (1)...(19): siRNA sense strand
cuucaaauccuuagguugu

SEQ ID NO: 1259617 - RNA, 19 nt, Homo sapiens
  misc_RNA (1)...(19): siRNA sense strand
cugccaacacugucgauua

SEQ ID NO: 1259618 - RNA, 19 nt, Homo sapiens
  misc_RNA (1)...(19): siRNA sense strand
gcaaggugucuacauuaag

SEQ ID NO: 1259619 - RNA, 19 nt, Homo sapiens
  misc_RNA (1)...(19): siRNA sense strand
ugugaagacuuuauuagcu

SEQ ID NO: 1259620 - RNA, 19 nt, Homo sapiens
  misc_RNA (1)...(19): siRNA sense strand
acgacgaccucaguaacua

SEQ ID NO: 1259621 - RNA, 19 nt, Homo sapiens
  misc_RNA (1)...(19): siRNA sense strand
ugacuacacaccagcauca

SEQ ID NO: 1259622 - RNA, 19 nt, Homo sapiens
  misc_RNA (1)...(19): siRNA sense strand
aaagcaauauacccagaca

SEQ ID NO: 1259623 - RNA, 19 nt, Homo sapiens
  misc_RNA (1)...(19): siRNA sense strand
cucuagaggugguguuuau

SEQ ID NO: 1259624 - RNA, 19 nt, Homo sapiens
  misc_RNA (1)...(19): siRNA sense strand
cuaaaucgcaucuggaaac

SEQ ID NO: 1259625 - RNA, 19 nt, Homo sapiens
  misc_RNA (1)...(19): siRNA sense strand
cagcuucuaccuggacaua

SEQ ID NO: 1259626 - RNA, 19 nt, Homo sapiens
  misc_RNA (1)...(19): siRNA sense strand
guucuaugcaccugacuga

SEQ ID NO: 1259627 - RNA, 19 nt, Homo sapiens
  misc_RNA (1)...(19): siRNA sense strand
cagaaccaauaugugacua

SEQ ID NO: 1259628 - RNA, 19 nt, Homo sapiens
  misc_RNA (1)...(19): siRNA sense strand
ugccaacacugucgauuac

SEQ ID NO: 1259629 - RNA, 19 nt, Homo sapiens
  misc_RNA (1)...(19): siRNA sense strand
ggaguuguucacuucagaa

SEQ ID NO: 1259630 - RNA, 19 nt, Homo sapiens
  misc_RNA (1)...(19): siRNA sense strand
uggaaagaguuuauguucu

SEQ ID NO: 1259631 - RNA, 19 nt, Homo sapiens
  misc_RNA (1)...(19): siRNA sense strand
gaagacuuuauuagcuuug

SEQ ID NO: 1259632 - RNA, 19 nt, Homo sapiens
  misc_RNA (1)...(19): siRNA sense strand
gaagucagcaaagcaaugc

SEQ ID NO: 1259633 - RNA, 19 nt, Homo sapiens
  misc_RNA (1)...(19): siRNA sense strand
guagaaaccgcugccaaca

SEQ ID NO: 1259634 - RNA, 19 nt, Homo sapiens
  misc_RNA (1)...(19): siRNA sense strand
ggugguguuuaucagaaug

SEQ ID NO: 1259635 - RNA, 19 nt, Homo sapiens
  misc_RNA (1)...(19): siRNA sense strand
cuggaaaccugccaauacu

SEQ ID NO: 1259636 - RNA, 19 nt, Homo sapiens
  misc_RNA (1)...(19): siRNA sense strand
gaucgaaccaguagaaacc

SEQ ID NO: 1259637 - RNA, 19 nt, Homo sapiens
  misc_RNA (1)...(19): siRNA sense strand
cgucagaagaacuguuuga

SEQ ID NO: 1259638 - RNA, 19 nt, Homo sapiens
  misc_RNA (1)...(19): siRNA sense strand
gccuuugacucucagaaca

SEQ ID NO: 1259639 - RNA, 19 nt, Homo sapiens
  misc_RNA (1)...(19): siRNA sense strand
ggaaagaguuuauguucua

SEQ ID NO: 1259640 - RNA, 19 nt, Homo sapiens
  misc_RNA (1)...(19): siRNA sense strand
cagaagaacuguuugauug

SEQ ID NO: 1259641 - RNA, 19 nt, Homo sapiens
  misc_RNA (1)...(19): siRNA sense strand
gagaagagcuccagcagau

SEQ ID NO: 1259642 - RNA, 19 nt, Homo sapiens
  misc_RNA (1)...(19): siRNA sense strand
gcaauugugugccaucaaa

SEQ ID NO: 1259643 - RNA, 19 nt, Homo sapiens
  misc_RNA (1)...(19): siRNA sense strand
ggagacaaaucaucaggaa

SEQ ID NO: 1259644 - RNA, 19 nt, Homo sapiens
  misc_RNA (1)...(19): siRNA sense strand
gaagagcuccagcagauaa

SEQ ID NO: 1259645 - RNA, 19 nt, Homo sapiens
  misc_RNA (1)...(19): siRNA sense strand
caagaucuguggagacaaa

SEQ ID NO: 1259646 - RNA, 19 nt, Homo sapiens
  misc_RNA (1)...(19): siRNA sense strand
guuguucacuucagaauuu

SEQ ID NO: 1259647 - RNA, 19 nt, Homo sapiens
  misc_RNA (1)...(19): siRNA sense strand
gcaccugacugaagaugaa

SEQ ID NO: 1259648 - RNA, 19 nt, Homo sapiens
  misc_RNA (1)...(19): siRNA sense strand
gaaauuauuccaugcaaga

SEQ ID NO: 1259649 - RNA, 19 nt, Homo sapiens
  misc_RNA (1)...(19): siRNA sense strand
ggaagaaauugagaacuau

SEQ ID NO: 1259650 - RNA, 19 nt, Homo sapiens
  misc_RNA (1)...(19): siRNA sense strand
caaggugucuacauuaaga

SEQ ID NO: 1259651 - RNA, 19 nt, Homo sapiens
  misc_RNA (1)...(19): siRNA sense strand
ccgagaagauggaauacua

SEQ ID NO: 1259652 - RNA, 19 nt, Homo sapiens
  misc_RNA (1)...(19): siRNA sense strand
gaagauggaauacuaacaa

SEQ ID NO: 1259653 - RNA, 19 nt, Homo sapiens
  misc_RNA (1)...(19): siRNA sense strand
cagcuuguaugcagaagua

SEQ ID NO: 1259654 - RNA, 19 nt, Homo sapiens
  misc_RNA (1)...(19): siRNA sense strand
gaucaaauugugcuucuaa

SEQ ID NO: 1259655 - RNA, 19 nt, Homo sapiens
  misc_RNA (1)...(19): siRNA sense strand
gcagagagacagcuuguau

SEQ ID NO: 1259656 - RNA, 19 nt, Homo sapiens
  misc_RNA (1)...(19): siRNA sense strand
caaacgcauugauggauuu

SEQ ID NO: 1259657 - RNA, 19 nt, Homo sapiens
  misc_RNA (1)...(19): siRNA sense strand
gaagaacuguuugauugau

SEQ ID NO: 1259658 - RNA, 19 nt, Homo sapiens
  misc_RNA (1)...(19): siRNA sense strand
uagaacaccuugcacagaa

SEQ ID NO: 1259659 - RNA, 19 nt, Homo sapiens
  misc_RNA (1)...(19): siRNA sense strand
aggaagaaauugagaacua

SEQ ID NO: 1259660 - RNA, 19 nt, Homo sapiens
  misc_RNA (1)...(19): siRNA sense strand
gaacaccuugcacagaaua

SEQ ID NO: 1259661 - RNA, 19 nt, Homo sapiens
  misc_RNA (1)...(19): siRNA sense strand
aaucaaaccagaaccaaua

SEQ ID NO: 1259662 - RNA, 19 nt, Homo sapiens
  misc_RNA (1)...(19): siRNA sense strand
guagggaugucucgagaug

SEQ ID NO: 1259663 - RNA, 19 nt, Homo sapiens
  misc_RNA (1)...(19): siRNA sense strand
gaggugauguggcaauugu

SEQ ID NO: 1259664 - RNA, 19 nt, Homo sapiens
  misc_RNA (1)...(19): siRNA sense strand
gcucauggcugcaagaaaa

SEQ ID NO: 1259665 - RNA, 19 nt, Homo sapiens
  misc_RNA (1)...(19): siRNA sense strand
ggaaaccugccaauacuug

SEQ ID NO: 1259666 - RNA, 19 nt, Homo sapiens
  misc_RNA (1)...(19): siRNA sense strand
gaggugguguuuaucagaa

SEQ ID NO: 1259667 - RNA, 19 nt, Homo sapiens
  misc_RNA (1)...(19): siRNA sense strand
ccaaacgcauugauggauu

SEQ ID NO: 1259668 - RNA, 19 nt, Homo sapiens
  misc_RNA (1)...(19): siRNA sense strand
uuacagaagcuauacagua

SEQ ID NO: 1259669 - RNA, 19 nt, Homo sapiens
  misc_RNA (1)...(19): siRNA sense strand
gaaccaauaugugacuaca

SEQ ID NO: 1259670 - RNA, 19 nt, Homo sapiens
  misc_RNA (1)...(19): siRNA sense strand
caacacguccuacagaaga

SEQ ID NO: 1259671 - RNA, 19 nt, Homo sapiens
  misc_RNA (1)...(19): siRNA sense strand
gugaagacuuuauuagcuu

SEQ ID NO: 1259672 - RNA, 19 nt, Homo sapiens
  misc_RNA (1)...(19): siRNA sense strand
uaugcaaggugucuacauu

SEQ ID NO: 1259673 - RNA, 19 nt, Homo sapiens
  misc_RNA (1)...(19): siRNA sense strand
ucaccgagaagauggaaua

SEQ ID NO: 1259674 - RNA, 19 nt, Homo sapiens
  misc_RNA (1)...(19): siRNA sense strand
ccagucaggucuugauauc

SEQ ID NO: 1259675 - RNA, 19 nt, Homo sapiens
  misc_RNA (1)...(19): siRNA sense strand
gauggaauacuaacaaagu

SEQ ID NO: 1259676 - RNA, 19 nt, Homo sapiens
  misc_RNA (1)...(19): siRNA sense strand
gaaugugccgugccuuuga

SEQ ID NO: 1259677 - RNA, 19 nt, Homo sapiens
  misc_RNA (1)...(19): siRNA sense strand
ggagaagucagcaaagcaa

SEQ ID NO: 1259678 - RNA, 19 nt, Homo sapiens
  misc_RNA (1)...(19): siRNA sense strand
ugcaaggugucuacauuaa

SEQ ID NO: 1259679 - RNA, 19 nt, Homo sapiens
  misc_RNA (1)...(19): siRNA sense strand
acagaagaaucaccgagaa

SEQ ID NO: 1259680 - RNA, 19 nt, Homo sapiens
  misc_RNA (1)...(19): siRNA sense strand
gaagaaucaccgagaagau

SEQ ID NO: 1259681 - RNA, 19 nt, Homo sapiens
  misc_RNA (1)...(19): siRNA sense strand
ucagaagaacuguuugauu

SEQ ID NO: 1259682 - RNA, 19 nt, Homo sapiens
  misc_RNA (1)...(19): siRNA sense strand
cgaccucaguaacuacauu

SEQ ID NO: 1259683 - RNA, 19 nt, Homo sapiens
  misc_RNA (1)...(19): siRNA sense strand
caaaccagaaccaauaugu

SEQ ID NO: 1259684 - RNA, 19 nt, Homo sapiens
  misc_RNA (1)...(19): siRNA sense strand
agacaaaucaucaggaauc

SEQ ID NO: 1259685 - RNA, 19 nt, Homo sapiens
  misc_RNA (1)...(19): siRNA sense strand
gacugaagaugaaauugca

SEQ ID NO: 1259686 - RNA, 19 nt, Homo sapiens
  misc_RNA (1)...(19): siRNA sense strand
guccauggcagaauuagaa

SEQ ID NO: 1259687 - RNA, 19 nt, Homo sapiens
  misc_RNA (1)...(19): siRNA sense strand
uacaguaugugguggaguu

SEQ ID NO: 1259688 - RNA, 19 nt, Homo sapiens
  misc_RNA (1)...(19): siRNA sense strand
gccaauacuugagagaaga

SEQ ID NO: 1259689 - RNA, 19 nt, Homo sapiens
  misc_RNA (1)...(19): siRNA sense strand
gaaaccugccaauacuuga

SEQ ID NO: 1259690 - RNA, 19 nt, Homo sapiens
  misc_RNA (1)...(19): siRNA sense strand
aaauucagcuagcucuuca

SEQ ID NO: 1259691 - RNA, 19 nt, Homo sapiens
  misc_RNA (1)...(19): siRNA sense strand
gacauugugcgacuucauu

SEQ ID NO: 1259692 - RNA, 19 nt, Homo sapiens
  misc_RNA (1)...(19): siRNA sense strand
cgagaagauggaauacuaa

SEQ ID NO: 1259693 - RNA, 19 nt, Homo sapiens
  misc_RNA (1)...(19): siRNA sense strand
agaaaccgcugccaacacu

SEQ ID NO: 1259694 - RNA, 19 nt, Homo sapiens
  misc_RNA (1)...(19): siRNA sense strand
cuaugcaccugacugaaga

SEQ ID NO: 1259695 - RNA, 19 nt, Homo sapiens
  misc_RNA (1)...(19): siRNA sense strand
cgacgucuucaaauccuua

SEQ ID NO: 1259696 - RNA, 19 nt, Homo sapiens
  misc_RNA (1)...(19): siRNA sense strand
cagaaugugccgugccuuu

SEQ ID NO: 1259697 - RNA, 19 nt, Homo sapiens
  misc_RNA (1)...(19): siRNA sense strand
gggaggugauguggcaauu

SEQ ID NO: 1259698 - RNA, 19 nt, Homo sapiens
  misc_RNA (1)...(19): siRNA sense strand
gaaucaaaccagaaccaau

SEQ ID NO: 1259699 - RNA, 19 nt, Homo sapiens
  misc_RNA (1)...(19): siRNA sense strand
ccaacgggcugacggaacu

SEQ ID NO: 1259700 - RNA, 19 nt, Homo sapiens
  misc_RNA (1)...(19): siRNA sense strand
gaucuguggagacaaauca

SEQ ID NO: 1259701 - RNA, 19 nt, Homo sapiens
  misc_RNA (1)...(19): siRNA sense strand
ucaaauccuuagguuguga

SEQ ID NO: 1259702 - RNA, 19 nt, Homo sapiens
  misc_RNA (1)...(19): siRNA sense strand
gaagaaauugagaacuauc

SEQ ID NO: 1259703 - RNA, 19 nt, Homo sapiens
  misc_RNA (1)...(19): siRNA sense strand
ucgagaugcuguaaaauuu

SEQ ID NO: 1259704 - RNA, 19 nt, Homo sapiens
  misc_RNA (1)...(19): siRNA sense strand
ucagcuagcucuucaacac

SEQ ID NO: 1259705 - RNA, 19 nt, Homo sapiens
  misc_RNA (1)...(19): siRNA sense strand
gguugugaagacuuuauua

SEQ ID NO: 1259706 - RNA, 19 nt, Homo sapiens
  misc_RNA (1)...(19): siRNA sense strand
aaccagaaccaauauguga

SEQ ID NO: 1259707 - RNA, 19 nt, Homo sapiens
  misc_RNA (1)...(19): siRNA sense strand
aaucaucaggaauccauua

SEQ ID NO: 1259708 - RNA, 19 nt, Homo sapiens
  misc_RNA (1)...(19): siRNA sense strand
gcuucuaccuggacauaca

SEQ ID NO: 1259709 - RNA, 19 nt, Homo sapiens
  misc_RNA (1)...(19): siRNA sense strand
guaugcagaaguacagaaa

SEQ ID NO: 1259710 - RNA, 19 nt, Homo sapiens
  misc_RNA (1)...(19): siRNA sense strand
caaaucaucaggaauccau

SEQ ID NO: 1259711 - RNA, 19 nt, Homo sapiens
  misc_RNA (1)...(19): siRNA sense strand
ggaaucaaaccagaaccaa

SEQ ID NO: 1259712 - RNA, 19 nt, Homo sapiens
  misc_RNA (1)...(19): siRNA sense strand
acgcauugauggauuuaug

SEQ ID NO: 1259713 - RNA, 19 nt, Homo sapiens
  misc_RNA (1)...(19): siRNA sense strand
cuuagguugugaagacuuu

SEQ ID NO: 1259714 - RNA, 19 nt, Homo sapiens
  misc_RNA (1)...(19): siRNA sense strand
agaagaacuguuugauuga

SEQ ID NO: 1259715 - RNA, 19 nt, Homo sapiens
  misc_RNA (1)...(19): siRNA sense strand
aaugcaaauugauggguaa

SEQ ID NO: 1259716 - RNA, 19 nt, Homo sapiens
  misc_RNA (1)...(19): siRNA sense strand
cuucaaauccuuagguugu

SEQ ID NO: 1259717 - RNA, 19 nt, Homo sapiens
  misc_RNA (1)...(19): siRNA sense strand
cugccaacacugucgauua

SEQ ID NO: 1259718 - RNA, 19 nt, Homo sapiens
  misc_RNA (1)...(19): siRNA sense strand
gcaaggugucuacauuaag

SEQ ID NO: 1259719 - RNA, 19 nt, Homo sapiens
  misc_RNA (1)...(19): siRNA sense strand
ugugaagacuuuauuagcu

SEQ ID NO: 1259720 - RNA, 19 nt, Homo sapiens
  misc_RNA (1)...(19): siRNA sense strand
acgacgaccucaguaacua

SEQ ID NO: 1259721 - RNA, 19 nt, Homo sapiens
  misc_RNA (1)...(19): siRNA sense strand
ugacuacacaccagcauca

SEQ ID NO: 1259722 - RNA, 19 nt, Homo sapiens
  misc_RNA (1)...(19): siRNA sense strand
aaagcaauauacccagaca

SEQ ID NO: 1259723 - RNA, 19 nt, Homo sapiens
  misc_RNA (1)...(19): siRNA sense strand
cucuagaggugguguuuau

SEQ ID NO: 1259724 - RNA, 19 nt, Homo sapiens
  misc_RNA (1)...(19): siRNA sense strand
cuaaaucgcaucuggaaac

SEQ ID NO: 1259725 - RNA, 19 nt, Homo sapiens
  misc_RNA (1)...(19): siRNA sense strand
cagcuucuaccuggacaua

SEQ ID NO: 1259726 - RNA, 19 nt, Homo sapiens
  misc_RNA (1)...(19): siRNA sense strand
guucuaugcaccugacuga

SEQ ID NO: 1259727 - RNA, 19 nt, Homo sapiens
  misc_RNA (1)...(19): siRNA sense strand
cagaaccaauaugugacua

SEQ ID NO: 1259728 - RNA, 19 nt, Homo sapiens
  misc_RNA (1)...(19): siRNA sense strand
ugccaacacugucgauuac

SEQ ID NO: 1259729 - RNA, 19 nt, Homo sapiens
  misc_RNA (1)...(19): siRNA sense strand
ggaguuguucacuucagaa

SEQ ID NO: 1259730 - RNA, 19 nt, Homo sapiens
  misc_RNA (1)...(19): siRNA sense strand
uggaaagaguuuauguucu

SEQ ID NO: 1259731 - RNA, 19 nt, Homo sapiens
  misc_RNA (1)...(19): siRNA sense strand
gaagacuuuauuagcuuug

SEQ ID NO: 1259732 - RNA, 19 nt, Homo sapiens
  misc_RNA (1)...(19): siRNA sense strand
gaagucagcaaagcaaugc

SEQ ID NO: 1259733 - RNA, 19 nt, Homo sapiens
  misc_RNA (1)...(19): siRNA sense strand
guagaaaccgcugccaaca

SEQ ID NO: 1259734 - RNA, 19 nt, Homo sapiens
  misc_RNA (1)...(19): siRNA sense strand
ggugguguuuaucagaaug

SEQ ID NO: 1259735 - RNA, 19 nt, Homo sapiens
  misc_RNA (1)...(19): siRNA sense strand
cuggaaaccugccaauacu

SEQ ID NO: 1259736 - RNA, 19 nt, Homo sapiens
  misc_RNA (1)...(19): siRNA sense strand
gaucgaaccaguagaaacc

SEQ ID NO: 1259737 - RNA, 19 nt, Homo sapiens
  misc_RNA (1)...(19): siRNA sense strand
cgucagaagaacuguuuga

SEQ ID NO: 1259738 - RNA, 19 nt, Homo sapiens
  misc_RNA (1)...(19): siRNA sense strand
gccuuugacucucagaaca

SEQ ID NO: 1259739 - RNA, 19 nt, Homo sapiens
  misc_RNA (1)...(19): siRNA sense strand
gguaauggaugaugaagua

SEQ ID NO: 1259740 - RNA, 19 nt, Homo sapiens
  misc_RNA (1)...(19): siRNA sense strand
ggaauuggccuccuguauu

SEQ ID NO: 1259741 - RNA, 19 nt, Homo sapiens
  misc_RNA (1)...(19): siRNA sense strand
caacugcauucuauagauu

SEQ ID NO: 1259742 - RNA, 19 nt, Homo sapiens
  misc_RNA (1)...(19): siRNA sense strand
gcaacugcauucuauagau

SEQ ID NO: 1259743 - RNA, 19 nt, Homo sapiens
  misc_RNA (1)...(19): siRNA sense strand
agaagacuguguagcauuu

SEQ ID NO: 1259744 - RNA, 19 nt, Homo sapiens
  misc_RNA (1)...(19): siRNA sense strand
gcagagcccaccugaauga

SEQ ID NO: 1259745 - RNA, 19 nt, Homo sapiens
  misc_RNA (1)...(19): siRNA sense strand
ucgaacagaugacagagua

SEQ ID NO: 1259746 - RNA, 19 nt, Homo sapiens
  misc_RNA (1)...(19): siRNA sense strand
ccacaccauugcauauuug

SEQ ID NO: 1259747 - RNA, 19 nt, Homo sapiens
  misc_RNA (1)...(19): siRNA sense strand
gagaaaaugccaagaagua

SEQ ID NO: 1259748 - RNA, 19 nt, Homo sapiens
  misc_RNA (1)...(19): siRNA sense strand
gaacagaugacagaguaga

SEQ ID NO: 1259749 - RNA, 19 nt, Homo sapiens
  misc_RNA (1)...(19): siRNA sense strand
ugacagaguagaacgugua

SEQ ID NO: 1259750 - RNA, 19 nt, Homo sapiens
  misc_RNA (1)...(19): siRNA sense strand
ucacccagguaauggauga

SEQ ID NO: 1259751 - RNA, 19 nt, Homo sapiens
  misc_RNA (1)...(19): siRNA sense strand
ccaccugaaugaccuugaa

SEQ ID NO: 1259752 - RNA, 19 nt, Homo sapiens
  misc_RNA (1)...(19): siRNA sense strand
cuacagccauccugcacuu

SEQ ID NO: 1259753 - RNA, 19 nt, Homo sapiens
  misc_RNA (1)...(19): siRNA sense strand
aaaugaugcuuaugaguac

SEQ ID NO: 1259754 - RNA, 19 nt, Homo sapiens
  misc_RNA (1)...(19): siRNA sense strand
aauggaugaugaaguauuc

SEQ ID NO: 1259755 - RNA, 19 nt, Homo sapiens
  misc_RNA (1)...(19): siRNA sense strand
ccagaagacuguguagcau

SEQ ID NO: 1259756 - RNA, 19 nt, Homo sapiens
  misc_RNA (1)...(19): siRNA sense strand
acgcagagcccaccugaau

SEQ ID NO: 1259757 - RNA, 19 nt, Homo sapiens
  misc_RNA (1)...(19): siRNA sense strand
acagguugcugaaaaguaa

SEQ ID NO: 1259758 - RNA, 19 nt, Homo sapiens
  misc_RNA (1)...(19): siRNA sense strand
gcacuucagacuauuuguc

SEQ ID NO: 1259759 - RNA, 19 nt, Homo sapiens
  misc_RNA (1)...(19): siRNA sense strand
gcuuacagguugcugaaaa

SEQ ID NO: 1259760 - RNA, 19 nt, Homo sapiens
  misc_RNA (1)...(19): siRNA sense strand
cagaagacuguguagcauu

SEQ ID NO: 1259761 - RNA, 19 nt, Homo sapiens
  misc_RNA (1)...(19): siRNA sense strand
accacaccauugcauauuu

SEQ ID NO: 1259762 - RNA, 19 nt, Homo sapiens
  misc_RNA (1)...(19): siRNA sense strand
uuuguuggauauggaguua

SEQ ID NO: 1259763 - RNA, 19 nt, Homo sapiens
  misc_RNA (1)...(19): siRNA sense strand
cauccuaugcaacaauuau

SEQ ID NO: 1259764 - RNA, 19 nt, Homo sapiens
  misc_RNA (1)...(19): siRNA sense strand
gaagacuguguagcauuug

SEQ ID NO: 1259765 - RNA, 19 nt, Homo sapiens
  misc_RNA (1)...(19): siRNA sense strand
ccagguaauggaugaugaa

SEQ ID NO: 1259766 - RNA, 19 nt, Homo sapiens
  misc_RNA (1)...(19): siRNA sense strand
caauccagaagacugugua

SEQ ID NO: 1259767 - RNA, 19 nt, Homo sapiens
  misc_RNA (1)...(19): siRNA sense strand
cccagguaauggaugauga

SEQ ID NO: 1259768 - RNA, 19 nt, Homo sapiens
  misc_RNA (1)...(19): siRNA sense strand
agauugacaagaaagguuu

SEQ ID NO: 1259769 - RNA, 19 nt, Homo sapiens
  misc_RNA (1)...(19): siRNA sense strand
cuaccacaccauugcauau

SEQ ID NO: 1259770 - RNA, 19 nt, Homo sapiens
  misc_RNA (1)...(19): siRNA sense strand
gaaaaugccaagaaguauc

SEQ ID NO: 1259771 - RNA, 19 nt, Homo sapiens
  misc_RNA (1)...(19): siRNA sense strand
gcugaaaaguaaauuguac

SEQ ID NO: 1259772 - RNA, 19 nt, Homo sapiens
  misc_RNA (1)...(19): siRNA sense strand
caccauugcauauuugaca

SEQ ID NO: 1259773 - RNA, 19 nt, Homo sapiens
  misc_RNA (1)...(19): siRNA sense strand
uagauugacaagaaagguu

SEQ ID NO: 1259774 - RNA, 19 nt, Homo sapiens
  misc_RNA (1)...(19): siRNA sense strand
auccugcacuucagacuau

SEQ ID NO: 1259775 - RNA, 19 nt, Homo sapiens
  misc_RNA (1)...(19): siRNA sense strand
cauccugcacuucagacua

SEQ ID NO: 1259776 - RNA, 19 nt, Homo sapiens
  misc_RNA (1)...(19): siRNA sense strand
ggccuccuguauuccuuga

SEQ ID NO: 1259777 - RNA, 19 nt, Homo sapiens
  misc_RNA (1)...(19): siRNA sense strand
uggaauuggccuccuguau

SEQ ID NO: 1259778 - RNA, 19 nt, Homo sapiens
  misc_RNA (1)...(19): siRNA sense strand
gguaauggaugaugaagua

SEQ ID NO: 1259779 - RNA, 19 nt, Homo sapiens
  misc_RNA (1)...(19): siRNA sense strand
ggaauuggccuccuguauu

SEQ ID NO: 1259780 - RNA, 19 nt, Homo sapiens
  misc_RNA (1)...(19): siRNA sense strand
caacugcauucuauagauu

SEQ ID NO: 1259781 - RNA, 19 nt, Homo sapiens
  misc_RNA (1)...(19): siRNA sense strand
gcaacugcauucuauagau

SEQ ID NO: 1259782 - RNA, 19 nt, Homo sapiens
  misc_RNA (1)...(19): siRNA sense strand
agaagacuguguagcauuu

SEQ ID NO: 1259783 - RNA, 19 nt, Homo sapiens
  misc_RNA (1)...(19): siRNA sense strand
gcagagcccaccugaauga

SEQ ID NO: 1259784 - RNA, 19 nt, Homo sapiens
  misc_RNA (1)...(19): siRNA sense strand
ucgaacagaugacagagua

SEQ ID NO: 1259785 - RNA, 19 nt, Homo sapiens
  misc_RNA (1)...(19): siRNA sense strand
ccacaccauugcauauuug

SEQ ID NO: 1259786 - RNA, 19 nt, Homo sapiens
  misc_RNA (1)...(19): siRNA sense strand
gaacagaugacagaguaga

SEQ ID NO: 1259787 - RNA, 19 nt, Homo sapiens
  misc_RNA (1)...(19): siRNA sense strand
ugacagaguagaacgugua

SEQ ID NO: 1259788 - RNA, 19 nt, Homo sapiens
  misc_RNA (1)...(19): siRNA sense strand
ucacccagguaauggauga

SEQ ID NO: 1259789 - RNA, 19 nt, Homo sapiens
  misc_RNA (1)...(19): siRNA sense strand
ccaccugaaugaccuugaa

SEQ ID NO: 1259790 - RNA, 19 nt, Homo sapiens
  misc_RNA (1)...(19): siRNA sense strand
cuacagccauccugcacuu

SEQ ID NO: 1259791 - RNA, 19 nt, Homo sapiens
  misc_RNA (1)...(19): siRNA sense strand
aaaugaugcuuaugaguac

SEQ ID NO: 1259792 - RNA, 19 nt, Homo sapiens
  misc_RNA (1)...(19): siRNA sense strand
aauggaugaugaaguauuc

SEQ ID NO: 1259793 - RNA, 19 nt, Homo sapiens
  misc_RNA (1)...(19): siRNA sense strand
ccagaagacuguguagcau

SEQ ID NO: 1259794 - RNA, 19 nt, Homo sapiens
  misc_RNA (1)...(19): siRNA sense strand
acgcagagcccaccugaau

SEQ ID NO: 1259795 - RNA, 19 nt, Homo sapiens
  misc_RNA (1)...(19): siRNA sense strand
acagguugcugaaaaguaa

SEQ ID NO: 1259796 - RNA, 19 nt, Homo sapiens
  misc_RNA (1)...(19): siRNA sense strand
gcacuucagacuauuuguc

SEQ ID NO: 1259797 - RNA, 19 nt, Homo sapiens
  misc_RNA (1)...(19): siRNA sense strand
gcuuacagguugcugaaaa

SEQ ID NO: 1259798 - RNA, 19 nt, Homo sapiens
  misc_RNA (1)...(19): siRNA sense strand
cagaagacuguguagcauu

SEQ ID NO: 1259799 - RNA, 19 nt, Homo sapiens
  misc_RNA (1)...(19): siRNA sense strand
accacaccauugcauauuu

SEQ ID NO: 1259800 - RNA, 19 nt, Homo sapiens
  misc_RNA (1)...(19): siRNA sense strand
uuuguuggauauggaguua

SEQ ID NO: 1259801 - RNA, 19 nt, Homo sapiens
  misc_RNA (1)...(19): siRNA sense strand
cauccuaugcaacaauuau

SEQ ID NO: 1259802 - RNA, 19 nt, Homo sapiens
  misc_RNA (1)...(19): siRNA sense strand
gaagacuguguagcauuug

SEQ ID NO: 1259803 - RNA, 19 nt, Homo sapiens
  misc_RNA (1)...(19): siRNA sense strand
ccagguaauggaugaugaa

SEQ ID NO: 1259804 - RNA, 19 nt, Homo sapiens
  misc_RNA (1)...(19): siRNA sense strand
caauccagaagacugugua

SEQ ID NO: 1259805 - RNA, 19 nt, Homo sapiens
  misc_RNA (1)...(19): siRNA sense strand
cccagguaauggaugauga

SEQ ID NO: 1259806 - RNA, 19 nt, Homo sapiens
  misc_RNA (1)...(19): siRNA sense strand
agauugacaagaaagguuu

SEQ ID NO: 1259807 - RNA, 19 nt, Homo sapiens
  misc_RNA (1)...(19): siRNA sense strand
cuaccacaccauugcauau

SEQ ID NO: 1259808 - RNA, 19 nt, Homo sapiens
  misc_RNA (1)...(19): siRNA sense strand
caccauugcauauuugaca

SEQ ID NO: 1259809 - RNA, 19 nt, Homo sapiens
  misc_RNA (1)...(19): siRNA sense strand
gcugaaaaguaaauuguac

SEQ ID NO: 1259810 - RNA, 19 nt, Homo sapiens
  misc_RNA (1)...(19): siRNA sense strand
uagauugacaagaaagguu

SEQ ID NO: 1259811 - RNA, 19 nt, Homo sapiens
  misc_RNA (1)...(19): siRNA sense strand
auccugcacuucagacuau

SEQ ID NO: 1259812 - RNA, 19 nt, Homo sapiens
  misc_RNA (1)...(19): siRNA sense strand
cauccugcacuucagacua

SEQ ID NO: 1259813 - RNA, 19 nt, Homo sapiens
  misc_RNA (1)...(19): siRNA sense strand
ggccuccuguauuccuuga

SEQ ID NO: 1259814 - RNA, 19 nt, Homo sapiens
  misc_RNA (1)...(19): siRNA sense strand
uggaauuggccuccuguau

SEQ ID NO: 1259815 - RNA, 19 nt, Homo sapiens
  misc_RNA (1)...(19): siRNA sense strand
gguaauggaugaugaagua

SEQ ID NO: 1259816 - RNA, 19 nt, Homo sapiens
  misc_RNA (1)...(19): siRNA sense strand
ggaauuggccuccuguauu

SEQ ID NO: 1259817 - RNA, 19 nt, Homo sapiens
  misc_RNA (1)...(19): siRNA sense strand
caacugcauucuauagauu

SEQ ID NO: 1259818 - RNA, 19 nt, Homo sapiens
  misc_RNA (1)...(19): siRNA sense strand
gcaacugcauucuauagau

SEQ ID NO: 1259819 - RNA, 19 nt, Homo sapiens
  misc_RNA (1)...(19): siRNA sense strand
agaagacuguguagcauuu

SEQ ID NO: 1259820 - RNA, 19 nt, Homo sapiens
  misc_RNA (1)...(19): siRNA sense strand
gcagagcccaccugaauga

SEQ ID NO: 1259821 - RNA, 19 nt, Homo sapiens
  misc_RNA (1)...(19): siRNA sense strand
ucgaacagaugacagagua

SEQ ID NO: 1259822 - RNA, 19 nt, Homo sapiens
  misc_RNA (1)...(19): siRNA sense strand
ccacaccauugcauauuug

SEQ ID NO: 1259823 - RNA, 19 nt, Homo sapiens
  misc_RNA (1)...(19): siRNA sense strand
gaacagaugacagaguaga

SEQ ID NO: 1259824 - RNA, 19 nt, Homo sapiens
  misc_RNA (1)...(19): siRNA sense strand
ugacagaguagaacgugua

SEQ ID NO: 1259825 - RNA, 19 nt, Homo sapiens
  misc_RNA (1)...(19): siRNA sense strand
ucacccagguaauggauga

SEQ ID NO: 1259826 - RNA, 19 nt, Homo sapiens
  misc_RNA (1)...(19): siRNA sense strand
ccaccugaaugaccuugaa

SEQ ID NO: 1259827 - RNA, 19 nt, Homo sapiens
  misc_RNA (1)...(19): siRNA sense strand
cuacagccauccugcacuu

SEQ ID NO: 1259828 - RNA, 19 nt, Homo sapiens
  misc_RNA (1)...(19): siRNA sense strand
aaaugaugcuuaugaguac

SEQ ID NO: 1259829 - RNA, 19 nt, Homo sapiens
  misc_RNA (1)...(19): siRNA sense strand
aauggaugaugaaguauuc

SEQ ID NO: 1259830 - RNA, 19 nt, Homo sapiens
  misc_RNA (1)...(19): siRNA sense strand
ccagaagacuguguagcau

SEQ ID NO: 1259831 - RNA, 19 nt, Homo sapiens
  misc_RNA (1)...(19): siRNA sense strand
acgcagagcccaccugaau

SEQ ID NO: 1259832 - RNA, 19 nt, Homo sapiens
  misc_RNA (1)...(19): siRNA sense strand
acagguugcugaaaaguaa

SEQ ID NO: 1259833 - RNA, 19 nt, Homo sapiens
  misc_RNA (1)...(19): siRNA sense strand
gcacuucagacuauuuguc

SEQ ID NO: 1259834 - RNA, 19 nt, Homo sapiens
  misc_RNA (1)...(19): siRNA sense strand
gcuuacagguugcugaaaa

SEQ ID NO: 1259835 - RNA, 19 nt, Homo sapiens
  misc_RNA (1)...(19): siRNA sense strand
cagaagacuguguagcauu

SEQ ID NO: 1259836 - RNA, 19 nt, Homo sapiens
  misc_RNA (1)...(19): siRNA sense strand
accacaccauugcauauuu

SEQ ID NO: 1259837 - RNA, 19 nt, Homo sapiens
  misc_RNA (1)...(19): siRNA sense strand
uuuguuggauauggaguua

SEQ ID NO: 1259838 - RNA, 19 nt, Homo sapiens
  misc_RNA (1)...(19): siRNA sense strand
cauccuaugcaacaauuau

SEQ ID NO: 1259839 - RNA, 19 nt, Homo sapiens
  misc_RNA (1)...(19): siRNA sense strand
gaagacuguguagcauuug

SEQ ID NO: 1259840 - RNA, 19 nt, Homo sapiens
  misc_RNA (1)...(19): siRNA sense strand
ccagguaauggaugaugaa

SEQ ID NO: 1259841 - RNA, 19 nt, Homo sapiens
  misc_RNA (1)...(19): siRNA sense strand
caauccagaagacugugua

SEQ ID NO: 1259842 - RNA, 19 nt, Homo sapiens
  misc_RNA (1)...(19): siRNA sense strand
cccagguaauggaugauga

SEQ ID NO: 1259843 - RNA, 19 nt, Homo sapiens
  misc_RNA (1)...(19): siRNA sense strand
agauugacaagaaagguuu

SEQ ID NO: 1259844 - RNA, 19 nt, Homo sapiens
  misc_RNA (1)...(19): siRNA sense strand
cuaccacaccauugcauau

SEQ ID NO: 1259845 - RNA, 19 nt, Homo sapiens
  misc_RNA (1)...(19): siRNA sense strand
caccauugcauauuugaca

SEQ ID NO: 1259846 - RNA, 19 nt, Homo sapiens
  misc_RNA (1)...(19): siRNA sense strand
gcugaaaaguaaauuguac

SEQ ID NO: 1259847 - RNA, 19 nt, Homo sapiens
  misc_RNA (1)...(19): siRNA sense strand
uagauugacaagaaagguu

SEQ ID NO: 1259848 - RNA, 19 nt, Homo sapiens
  misc_RNA (1)...(19): siRNA sense strand
auccugcacuucagacuau

SEQ ID NO: 1259849 - RNA, 19 nt, Homo sapiens
  misc_RNA (1)...(19): siRNA sense strand
cauccugcacuucagacua

SEQ ID NO: 1259850 - RNA, 19 nt, Homo sapiens
  misc_RNA (1)...(19): siRNA sense strand
ggccuccuguauuccuuga

SEQ ID NO: 1259851 - RNA, 19 nt, Homo sapiens
  misc_RNA (1)...(19): siRNA sense strand
uggaauuggccuccuguau

SEQ ID NO: 1259852 - RNA, 19 nt, Homo sapiens
  misc_RNA (1)...(19): siRNA sense strand
gguaauggaugaugaagua

SEQ ID NO: 1259853 - RNA, 19 nt, Homo sapiens
  misc_RNA (1)...(19): siRNA sense strand
ggaauuggccuccuguauu

SEQ ID NO: 1259854 - RNA, 19 nt, Homo sapiens
  misc_RNA (1)...(19): siRNA sense strand
caacugcauucuauagauu

SEQ ID NO: 1259855 - RNA, 19 nt, Homo sapiens
  misc_RNA (1)...(19): siRNA sense strand
gcaacugcauucuauagau

SEQ ID NO: 1259856 - RNA, 19 nt, Homo sapiens
  misc_RNA (1)...(19): siRNA sense strand
agaagacuguguagcauuu

SEQ ID NO: 1259857 - RNA, 19 nt, Homo sapiens
  misc_RNA (1)...(19): siRNA sense strand
gcagagcccaccugaauga

SEQ ID NO: 1259858 - RNA, 19 nt, Homo sapiens
  misc_RNA (1)...(19): siRNA sense strand
ucgaacagaugacagagua

SEQ ID NO: 1259859 - RNA, 19 nt, Homo sapiens
  misc_RNA (1)...(19): siRNA sense strand
ccacaccauugcauauuug

SEQ ID NO: 1259860 - RNA, 19 nt, Homo sapiens
  misc_RNA (1)...(19): siRNA sense strand
gaacagaugacagaguaga

SEQ ID NO: 1259861 - RNA, 19 nt, Homo sapiens
  misc_RNA (1)...(19): siRNA sense strand
ugacagaguagaacgugua

SEQ ID NO: 1259862 - RNA, 19 nt, Homo sapiens
  misc_RNA (1)...(19): siRNA sense strand
ucacccagguaauggauga

SEQ ID NO: 1259863 - RNA, 19 nt, Homo sapiens
  misc_RNA (1)...(19): siRNA sense strand
ccaccugaaugaccuugaa

SEQ ID NO: 1259864 - RNA, 19 nt, Homo sapiens
  misc_RNA (1)...(19): siRNA sense strand
cuacagccauccugcacuu

SEQ ID NO: 1259865 - RNA, 19 nt, Homo sapiens
  misc_RNA (1)...(19): siRNA sense strand
aaaugaugcuuaugaguac

SEQ ID NO: 1259866 - RNA, 19 nt, Homo sapiens
  misc_RNA (1)...(19): siRNA sense strand
aauggaugaugaaguauuc

SEQ ID NO: 1259867 - RNA, 19 nt, Homo sapiens
  misc_RNA (1)...(19): siRNA sense strand
ccagaagacuguguagcau

SEQ ID NO: 1259868 - RNA, 19 nt, Homo sapiens
  misc_RNA (1)...(19): siRNA sense strand
acgcagagcccaccugaau

SEQ ID NO: 1259869 - RNA, 19 nt, Homo sapiens
  misc_RNA (1)...(19): siRNA sense strand
acagguugcugaaaaguaa

SEQ ID NO: 1259870 - RNA, 19 nt, Homo sapiens
  misc_RNA (1)...(19): siRNA sense strand
gcacuucagacuauuuguc

SEQ ID NO: 1259871 - RNA, 19 nt, Homo sapiens
  misc_RNA (1)...(19): siRNA sense strand
gcuuacagguugcugaaaa

SEQ ID NO: 1259872 - RNA, 19 nt, Homo sapiens
  misc_RNA (1)...(19): siRNA sense strand
cagaagacuguguagcauu

SEQ ID NO: 1259873 - RNA, 19 nt, Homo sapiens
  misc_RNA (1)...(19): siRNA sense strand
accacaccauugcauauuu

SEQ ID NO: 1259874 - RNA, 19 nt, Homo sapiens
  misc_RNA (1)...(19): siRNA sense strand
uuuguuggauauggaguua

SEQ ID NO: 1259875 - RNA, 19 nt, Homo sapiens
  misc_RNA (1)...(19): siRNA sense strand
cauccuaugcaacaauuau

SEQ ID NO: 1259876 - RNA, 19 nt, Homo sapiens
  misc_RNA (1)...(19): siRNA sense strand
gaagacuguguagcauuug

SEQ ID NO: 1259877 - RNA, 19 nt, Homo sapiens
  misc_RNA (1)...(19): siRNA sense strand
ccagguaauggaugaugaa

SEQ ID NO: 1259878 - RNA, 19 nt, Homo sapiens
  misc_RNA (1)...(19): siRNA sense strand
caauccagaagacugugua

SEQ ID NO: 1259879 - RNA, 19 nt, Homo sapiens
  misc_RNA (1)...(19): siRNA sense strand
cccagguaauggaugauga

SEQ ID NO: 1259880 - RNA, 19 nt, Homo sapiens
  misc_RNA (1)...(19): siRNA sense strand
agauugacaagaaagguuu

SEQ ID NO: 1259881 - RNA, 19 nt, Homo sapiens
  misc_RNA (1)...(19): siRNA sense strand
cuaccacaccauugcauau

SEQ ID NO: 1259882 - RNA, 19 nt, Homo sapiens
  misc_RNA (1)...(19): siRNA sense strand
caccauugcauauuugaca

SEQ ID NO: 1259883 - RNA, 19 nt, Homo sapiens
  misc_RNA (1)...(19): siRNA sense strand
gcugaaaaguaaauuguac

SEQ ID NO: 1259884 - RNA, 19 nt, Homo sapiens
  misc_RNA (1)...(19): siRNA sense strand
uagauugacaagaaagguu

SEQ ID NO: 1259885 - RNA, 19 nt, Homo sapiens
  misc_RNA (1)...(19): siRNA sense strand
auccugcacuucagacuau

SEQ ID NO: 1259886 - RNA, 19 nt, Homo sapiens
  misc_RNA (1)...(19): siRNA sense strand
cauccugcacuucagacua

SEQ ID NO: 1259887 - RNA, 19 nt, Homo sapiens
  misc_RNA (1)...(19): siRNA sense strand
ggccuccuguauuccuuga

SEQ ID NO: 1259888 - RNA, 19 nt, Homo sapiens
  misc_RNA (1)...(19): siRNA sense strand
uggaauuggccuccuguau

SEQ ID NO: 1259889 - RNA, 19 nt, Homo sapiens
  misc_RNA (1)...(19): siRNA sense strand
gaaauucccacucauguuu

SEQ ID NO: 1259890 - RNA, 19 nt, Homo sapiens
  misc_RNA (1)...(19): siRNA sense strand
gaagagugcuugaaauuuu

SEQ ID NO: 1259891 - RNA, 19 nt, Homo sapiens
  misc_RNA (1)...(19): siRNA sense strand
gggagaagcccaacuguuu

SEQ ID NO: 1259892 - RNA, 19 nt, Homo sapiens
  misc_RNA (1)...(19): siRNA sense strand
gaucucgccuugcggauuu

SEQ ID NO: 1259893 - RNA, 19 nt, Homo sapiens
  misc_RNA (1)...(19): siRNA sense strand
cacagaagcugaaauccaa

SEQ ID NO: 1259894 - RNA, 19 nt, Homo sapiens
  misc_RNA (1)...(19): siRNA sense strand
ggcaauggcuccgauguga

SEQ ID NO: 1259895 - RNA, 19 nt, Homo sapiens
  misc_RNA (1)...(19): siRNA sense strand
agaagucgcucuacaacug

SEQ ID NO: 1259896 - RNA, 19 nt, Homo sapiens
  misc_RNA (1)...(19): siRNA sense strand
gcagccagccuucccagua

SEQ ID NO: 1259897 - RNA, 19 nt, Homo sapiens
  misc_RNA (1)...(19): siRNA sense strand
aacagcagauugucagaua

SEQ ID NO: 1259898 - RNA, 19 nt, Homo sapiens
  misc_RNA (1)...(19): siRNA sense strand
ccaccagcguguccaauga

SEQ ID NO: 1259899 - RNA, 19 nt, Homo sapiens
  misc_RNA (1)...(19): siRNA sense strand
agaacugccugcgcauuua

SEQ ID NO: 1259900 - RNA, 19 nt, Homo sapiens
  misc_RNA (1)...(19): siRNA sense strand
uagaagagugcuugaaauu

SEQ ID NO: 1259901 - RNA, 19 nt, Homo sapiens
  misc_RNA (1)...(19): siRNA sense strand
ccacugcccuccggguuaa

SEQ ID NO: 1259902 - RNA, 19 nt, Homo sapiens
  misc_RNA (1)...(19): siRNA sense strand
cagcagauugucagauaua

SEQ ID NO: 1259903 - RNA, 19 nt, Homo sapiens
  misc_RNA (1)...(19): siRNA sense strand
ggagaagcccaacuguuug

SEQ ID NO: 1259904 - RNA, 19 nt, Homo sapiens
  misc_RNA (1)...(19): siRNA sense strand
gagaagcccaacuguuuga

SEQ ID NO: 1259905 - RNA, 19 nt, Homo sapiens
  misc_RNA (1)...(19): siRNA sense strand
gcacagaagcugaaaucca

SEQ ID NO: 1259906 - RNA, 19 nt, Homo sapiens
  misc_RNA (1)...(19): siRNA sense strand
cuagaagagugcuugaaau

SEQ ID NO: 1259907 - RNA, 19 nt, Homo sapiens
  misc_RNA (1)...(19): siRNA sense strand
guaugaagaaggagaagaa

SEQ ID NO: 1259908 - RNA, 19 nt, Homo sapiens
  misc_RNA (1)...(19): siRNA sense strand
ccuccaagcuguggucuga

SEQ ID NO: 1259909 - RNA, 19 nt, Homo sapiens
  misc_RNA (1)...(19): siRNA sense strand
aagcugaaauccaaugugu

SEQ ID NO: 1259910 - RNA, 19 nt, Homo sapiens
  misc_RNA (1)...(19): siRNA sense strand
gccaccgugugcaaauuua

SEQ ID NO: 1259911 - RNA, 19 nt, Homo sapiens
  misc_RNA (1)...(19): siRNA sense strand
cagcagggucugagaauga

SEQ ID NO: 1259912 - RNA, 19 nt, Homo sapiens
  misc_RNA (1)...(19): siRNA sense strand
gcccaacuguuugaauuug

SEQ ID NO: 1259913 - RNA, 19 nt, Homo sapiens
  misc_RNA (1)...(19): siRNA sense strand
aagcccaacuguuugaauu

SEQ ID NO: 1259914 - RNA, 19 nt, Homo sapiens
  misc_RNA (1)...(19): siRNA sense strand
gcaaggagaccaacuucag

SEQ ID NO: 1259915 - RNA, 19 nt, Homo sapiens
  misc_RNA (1)...(19): siRNA sense strand
cagauugucagauauauuc

SEQ ID NO: 1259916 - RNA, 19 nt, Homo sapiens
  misc_RNA (1)...(19): siRNA sense strand
gcagauugucagauauauu

SEQ ID NO: 1259917 - RNA, 19 nt, Homo sapiens
  misc_RNA (1)...(19): siRNA sense strand
gaagaacugccugcgcauu

SEQ ID NO: 1259918 - RNA, 19 nt, Homo sapiens
  misc_RNA (1)...(19): siRNA sense strand
caaauuuacaggcacagaa

SEQ ID NO: 1259919 - RNA, 19 nt, Homo sapiens
  misc_RNA (1)...(19): siRNA sense strand
gcaagacgaauuacaucug

SEQ ID NO: 1259920 - RNA, 19 nt, Homo sapiens
  misc_RNA (1)...(19): siRNA sense strand
uguccacccuauuaucuuu

SEQ ID NO: 1259921 - RNA, 19 nt, Homo sapiens
  misc_RNA (1)...(19): siRNA sense strand
ccaguuaacagcagauugu

SEQ ID NO: 1259922 - RNA, 19 nt, Homo sapiens
  misc_RNA (1)...(19): siRNA sense strand
aaaugcaauucaagccuuu

SEQ ID NO: 1259923 - RNA, 19 nt, Homo sapiens
  misc_RNA (1)...(19): siRNA sense strand
ccuagaagagugcuugaaa

SEQ ID NO: 1259924 - RNA, 19 nt, Homo sapiens
  misc_RNA (1)...(19): siRNA sense strand
agaagagugcuugaaauuu

SEQ ID NO: 1259925 - RNA, 19 nt, Homo sapiens
  misc_RNA (1)...(19): siRNA sense strand
ccgccuggauugcgugaaa

SEQ ID NO: 1259926 - RNA, 19 nt, Homo sapiens
  misc_RNA (1)...(19): siRNA sense strand
uggaggcccugaagcagaa

SEQ ID NO: 1259927 - RNA, 19 nt, Homo sapiens
  misc_RNA (1)...(19): siRNA sense strand
ccacauaaccacaaaauca

SEQ ID NO: 1259928 - RNA, 19 nt, Homo sapiens
  misc_RNA (1)...(19): siRNA sense strand
cgacgacauuugcaagaag

SEQ ID NO: 1259929 - RNA, 19 nt, Homo sapiens
  misc_RNA (1)...(19): siRNA sense strand
ugaagaaggagaagaacug

SEQ ID NO: 1259930 - RNA, 19 nt, Homo sapiens
  misc_RNA (1)...(19): siRNA sense strand
gaacaacugccuggaugca

SEQ ID NO: 1259931 - RNA, 19 nt, Homo sapiens
  misc_RNA (1)...(19): siRNA sense strand
aagcagaagucgcucuaca

SEQ ID NO: 1259932 - RNA, 19 nt, Homo sapiens
  misc_RNA (1)...(19): siRNA sense strand
gcagaagucgcucuacaac

SEQ ID NO: 1259933 - RNA, 19 nt, Homo sapiens
  misc_RNA (1)...(19): siRNA sense strand
ccagccacauaaccacaaa

SEQ ID NO: 1259934 - RNA, 19 nt, Homo sapiens
  misc_RNA (1)...(19): siRNA sense strand
gacgacauuugcaagaagu

SEQ ID NO: 1259935 - RNA, 19 nt, Homo sapiens
  misc_RNA (1)...(19): siRNA sense strand
gcagcugucuaaaggaaaa

SEQ ID NO: 1259936 - RNA, 19 nt, Homo sapiens
  misc_RNA (1)...(19): siRNA sense strand
aagaacugccugcgcauuu

SEQ ID NO: 1259937 - RNA, 19 nt, Homo sapiens
  misc_RNA (1)...(19): siRNA sense strand
acacaccucuguauuucca

SEQ ID NO: 1259938 - RNA, 19 nt, Homo sapiens
  misc_RNA (1)...(19): siRNA sense strand
caacagugggaacgaccua

SEQ ID NO: 1259939 - RNA, 19 nt, Homo sapiens
  misc_RNA (1)...(19): siRNA sense strand
gguggucccauucauauca

SEQ ID NO: 1259940 - RNA, 19 nt, Homo sapiens
  misc_RNA (1)...(19): siRNA sense strand
ugaaauucccacucauguu

SEQ ID NO: 1259941 - RNA, 19 nt, Homo sapiens
  misc_RNA (1)...(19): siRNA sense strand
uccaaugugucgggcaaua

SEQ ID NO: 1259942 - RNA, 19 nt, Homo sapiens
  misc_RNA (1)...(19): siRNA sense strand
acaaggcccuccggcaguu

SEQ ID NO: 1259943 - RNA, 19 nt, Homo sapiens
  misc_RNA (1)...(19): siRNA sense strand
gaagcccaacuguuugaau

SEQ ID NO: 1259944 - RNA, 19 nt, Homo sapiens
  misc_RNA (1)...(19): siRNA sense strand
caacugccagccagaguca

SEQ ID NO: 1259945 - RNA, 19 nt, Homo sapiens
  misc_RNA (1)...(19): siRNA sense strand
gaacugccugcgcauuuac

SEQ ID NO: 1259946 - RNA, 19 nt, Homo sapiens
  misc_RNA (1)...(19): siRNA sense strand
gaagcugaaauccaaugug

SEQ ID NO: 1259947 - RNA, 19 nt, Homo sapiens
  misc_RNA (1)...(19): siRNA sense strand
ccaacuguuugaauuugca

SEQ ID NO: 1259948 - RNA, 19 nt, Homo sapiens
  misc_RNA (1)...(19): siRNA sense strand
gcaaauuuacaggcacaga

SEQ ID NO: 1259949 - RNA, 19 nt, Homo sapiens
  misc_RNA (1)...(19): siRNA sense strand
cagccagccuucccaguac

SEQ ID NO: 1259950 - RNA, 19 nt, Homo sapiens
  misc_RNA (1)...(19): siRNA sense strand
cauaugaaccaguuaacag

SEQ ID NO: 1259951 - RNA, 19 nt, Homo sapiens
  misc_RNA (1)...(19): siRNA sense strand
ccagcagggucugagaaug

SEQ ID NO: 1259952 - RNA, 19 nt, Homo sapiens
  misc_RNA (1)...(19): siRNA sense strand
gggcaaggagaccaacuuc

SEQ ID NO: 1259953 - RNA, 19 nt, Homo sapiens
  misc_RNA (1)...(19): siRNA sense strand
ccaaguaccgcacgcuaag

SEQ ID NO: 1259954 - RNA, 19 nt, Homo sapiens
  misc_RNA (1)...(19): siRNA sense strand
ugaagcagaagucgcucua

SEQ ID NO: 1259955 - RNA, 19 nt, Homo sapiens
  misc_RNA (1)...(19): siRNA sense strand
ucgacgacauuugcaagaa

SEQ ID NO: 1259956 - RNA, 19 nt, Homo sapiens
  misc_RNA (1)...(19): siRNA sense strand
gcuacggaaugcucuucug

SEQ ID NO: 1259957 - RNA, 19 nt, Homo sapiens
  misc_RNA (1)...(19): siRNA sense strand
gcucuguccacccuauuau

SEQ ID NO: 1259958 - RNA, 19 nt, Homo sapiens
  misc_RNA (1)...(19): siRNA sense strand
gcauuuacuggagcaugua

SEQ ID NO: 1259959 - RNA, 19 nt, Homo sapiens
  misc_RNA (1)...(19): siRNA sense strand
gggcaauacacaccucugu

SEQ ID NO: 1259960 - RNA, 19 nt, Homo sapiens
  misc_RNA (1)...(19): siRNA sense strand
acagcagauugucagauau

SEQ ID NO: 1259961 - RNA, 19 nt, Homo sapiens
  misc_RNA (1)...(19): siRNA sense strand
ccugugugcuccuaugaag

SEQ ID NO: 1259962 - RNA, 19 nt, Homo sapiens
  misc_RNA (1)...(19): siRNA sense strand
gcuggaggauuccccauau

SEQ ID NO: 1259963 - RNA, 19 nt, Homo sapiens
  misc_RNA (1)...(19): siRNA sense strand
aagcacagcuacggaaugc

SEQ ID NO: 1259964 - RNA, 19 nt, Homo sapiens
  misc_RNA (1)...(19): siRNA sense strand
caagcacagcuacggaaug

SEQ ID NO: 1259965 - RNA, 19 nt, Homo sapiens
  misc_RNA (1)...(19): siRNA sense strand
caaccucgacgacauuugc

SEQ ID NO: 1259966 - RNA, 19 nt, Homo sapiens
  misc_RNA (1)...(19): siRNA sense strand
cgcauuuacuggagcaugu

SEQ ID NO: 1259967 - RNA, 19 nt, Homo sapiens
  misc_RNA (1)...(19): siRNA sense strand
gggcuuauuggcacaguca

SEQ ID NO: 1259968 - RNA, 19 nt, Homo sapiens
  misc_RNA (1)...(19): siRNA sense strand
uccacccuauuaucuuuaa

SEQ ID NO: 1259969 - RNA, 19 nt, Homo sapiens
  misc_RNA (1)...(19): siRNA sense strand
ccggguggucccauucaua

SEQ ID NO: 1259970 - RNA, 19 nt, Homo sapiens
  misc_RNA (1)...(19): siRNA sense strand
auucaagccuuuggcaaug

SEQ ID NO: 1259971 - RNA, 19 nt, Homo sapiens
  misc_RNA (1)...(19): siRNA sense strand
cggguggucccauucauau

SEQ ID NO: 1259972 - RNA, 19 nt, Homo sapiens
  misc_RNA (1)...(19): siRNA sense strand
accagagccugcagggaaa

SEQ ID NO: 1259973 - RNA, 19 nt, Homo sapiens
  misc_RNA (1)...(19): siRNA sense strand
caaugugucgggcaauaca

SEQ ID NO: 1259974 - RNA, 19 nt, Homo sapiens
  misc_RNA (1)...(19): siRNA sense strand
ccauggaggcccugaagca

SEQ ID NO: 1259975 - RNA, 19 nt, Homo sapiens
  misc_RNA (1)...(19): siRNA sense strand
acuccugcaagacgaauua

SEQ ID NO: 1259976 - RNA, 19 nt, Homo sapiens
  misc_RNA (1)...(19): siRNA sense strand
gaaauucccacucauguuu

SEQ ID NO: 1259977 - RNA, 19 nt, Homo sapiens
  misc_RNA (1)...(19): siRNA sense strand
gaagagugcuugaaauuuu

SEQ ID NO: 1259978 - RNA, 19 nt, Homo sapiens
  misc_RNA (1)...(19): siRNA sense strand
gggagaagcccaacuguuu

SEQ ID NO: 1259979 - RNA, 19 nt, Homo sapiens
  misc_RNA (1)...(19): siRNA sense strand
gaucucgccuugcggauuu

SEQ ID NO: 1259980 - RNA, 19 nt, Homo sapiens
  misc_RNA (1)...(19): siRNA sense strand
cacagaagcugaaauccaa

SEQ ID NO: 1259981 - RNA, 19 nt, Homo sapiens
  misc_RNA (1)...(19): siRNA sense strand
ggcaauggcuccgauguga

SEQ ID NO: 1259982 - RNA, 19 nt, Homo sapiens
  misc_RNA (1)...(19): siRNA sense strand
agaagucgcucuacaacug

SEQ ID NO: 1259983 - RNA, 19 nt, Homo sapiens
  misc_RNA (1)...(19): siRNA sense strand
gcagccagccuucccagua

SEQ ID NO: 1259984 - RNA, 19 nt, Homo sapiens
  misc_RNA (1)...(19): siRNA sense strand
aacagcagauugucagaua

SEQ ID NO: 1259985 - RNA, 19 nt, Homo sapiens
  misc_RNA (1)...(19): siRNA sense strand
ccaccagcguguccaauga

SEQ ID NO: 1259986 - RNA, 19 nt, Homo sapiens
  misc_RNA (1)...(19): siRNA sense strand
agaacugccugcgcauuua

SEQ ID NO: 1259987 - RNA, 19 nt, Homo sapiens
  misc_RNA (1)...(19): siRNA sense strand
uagaagagugcuugaaauu

SEQ ID NO: 1259988 - RNA, 19 nt, Homo sapiens
  misc_RNA (1)...(19): siRNA sense strand
ccacugcccuccggguuaa

SEQ ID NO: 1259989 - RNA, 19 nt, Homo sapiens
  misc_RNA (1)...(19): siRNA sense strand
cagcagauugucagauaua

SEQ ID NO: 1259990 - RNA, 19 nt, Homo sapiens
  misc_RNA (1)...(19): siRNA sense strand
ggagaagcccaacuguuug

SEQ ID NO: 1259991 - RNA, 19 nt, Homo sapiens
  misc_RNA (1)...(19): siRNA sense strand
gagaagcccaacuguuuga

SEQ ID NO: 1259992 - RNA, 19 nt, Homo sapiens
  misc_RNA (1)...(19): siRNA sense strand
gcacagaagcugaaaucca

SEQ ID NO: 1259993 - RNA, 19 nt, Homo sapiens
  misc_RNA (1)...(19): siRNA sense strand
cuagaagagugcuugaaau

SEQ ID NO: 1259994 - RNA, 19 nt, Homo sapiens
  misc_RNA (1)...(19): siRNA sense strand
guaugaagaaggagaagaa

SEQ ID NO: 1259995 - RNA, 19 nt, Homo sapiens
  misc_RNA (1)...(19): siRNA sense strand
ccuccaagcuguggucuga

SEQ ID NO: 1259996 - RNA, 19 nt, Homo sapiens
  misc_RNA (1)...(19): siRNA sense strand
aagcugaaauccaaugugu

SEQ ID NO: 1259997 - RNA, 19 nt, Homo sapiens
  misc_RNA (1)...(19): siRNA sense strand
gccaccgugugcaaauuua

SEQ ID NO: 1259998 - RNA, 19 nt, Homo sapiens
  misc_RNA (1)...(19): siRNA sense strand
cagcagggucugagaauga

SEQ ID NO: 1259999 - RNA, 19 nt, Homo sapiens
  misc_RNA (1)...(19): siRNA sense strand
gcccaacuguuugaauuug

SEQ ID NO: 1260000 - RNA, 19 nt, Homo sapiens
  misc_RNA (1)...(19): siRNA sense strand
aagcccaacuguuugaauu

SEQ ID NO: 1260001 - RNA, 19 nt, Homo sapiens
  misc_RNA (1)...(19): siRNA sense strand
gcaaggagaccaacuucag

SEQ ID NO: 1260002 - RNA, 19 nt, Homo sapiens
  misc_RNA (1)...(19): siRNA sense strand
cagauugucagauauauuc

SEQ ID NO: 1260003 - RNA, 19 nt, Homo sapiens
  misc_RNA (1)...(19): siRNA sense strand
gcagauugucagauauauu

SEQ ID NO: 1260004 - RNA, 19 nt, Homo sapiens
  misc_RNA (1)...(19): siRNA sense strand
gaagaacugccugcgcauu

SEQ ID NO: 1260005 - RNA, 19 nt, Homo sapiens
  misc_RNA (1)...(19): siRNA sense strand
caaauuuacaggcacagaa

SEQ ID NO: 1260006 - RNA, 19 nt, Homo sapiens
  misc_RNA (1)...(19): siRNA sense strand
gcaagacgaauuacaucug

SEQ ID NO: 1260007 - RNA, 19 nt, Homo sapiens
  misc_RNA (1)...(19): siRNA sense strand
uguccacccuauuaucuuu

SEQ ID NO: 1260008 - RNA, 19 nt, Homo sapiens
  misc_RNA (1)...(19): siRNA sense strand
ccaguuaacagcagauugu

SEQ ID NO: 1260009 - RNA, 19 nt, Homo sapiens
  misc_RNA (1)...(19): siRNA sense strand
aaaugcaauucaagccuuu

SEQ ID NO: 1260010 - RNA, 19 nt, Homo sapiens
  misc_RNA (1)...(19): siRNA sense strand
ccuagaagagugcuugaaa

SEQ ID NO: 1260011 - RNA, 19 nt, Homo sapiens
  misc_RNA (1)...(19): siRNA sense strand
agaagagugcuugaaauuu

SEQ ID NO: 1260012 - RNA, 19 nt, Homo sapiens
  misc_RNA (1)...(19): siRNA sense strand
ccgccuggauugcgugaaa

SEQ ID NO: 1260013 - RNA, 19 nt, Homo sapiens
  misc_RNA (1)...(19): siRNA sense strand
uggaggcccugaagcagaa

SEQ ID NO: 1260014 - RNA, 19 nt, Homo sapiens
  misc_RNA (1)...(19): siRNA sense strand
ccacauaaccacaaaauca

SEQ ID NO: 1260015 - RNA, 19 nt, Homo sapiens
  misc_RNA (1)...(19): siRNA sense strand
cgacgacauuugcaagaag

SEQ ID NO: 1260016 - RNA, 19 nt, Homo sapiens
  misc_RNA (1)...(19): siRNA sense strand
ugaagaaggagaagaacug

SEQ ID NO: 1260017 - RNA, 19 nt, Homo sapiens
  misc_RNA (1)...(19): siRNA sense strand
gaacaacugccuggaugca

SEQ ID NO: 1260018 - RNA, 19 nt, Homo sapiens
  misc_RNA (1)...(19): siRNA sense strand
aagcagaagucgcucuaca

SEQ ID NO: 1260019 - RNA, 19 nt, Homo sapiens
  misc_RNA (1)...(19): siRNA sense strand
gcagaagucgcucuacaac

SEQ ID NO: 1260020 - RNA, 19 nt, Homo sapiens
  misc_RNA (1)...(19): siRNA sense strand
ccagccacauaaccacaaa

SEQ ID NO: 1260021 - RNA, 19 nt, Homo sapiens
  misc_RNA (1)...(19): siRNA sense strand
gacgacauuugcaagaagu

SEQ ID NO: 1260022 - RNA, 19 nt, Homo sapiens
  misc_RNA (1)...(19): siRNA sense strand
gcagcugucuaaaggaaaa

SEQ ID NO: 1260023 - RNA, 19 nt, Homo sapiens
  misc_RNA (1)...(19): siRNA sense strand
aagaacugccugcgcauuu

SEQ ID NO: 1260024 - RNA, 19 nt, Homo sapiens
  misc_RNA (1)...(19): siRNA sense strand
acacaccucuguauuucca

SEQ ID NO: 1260025 - RNA, 19 nt, Homo sapiens
  misc_RNA (1)...(19): siRNA sense strand
caacagugggaacgaccua

SEQ ID NO: 1260026 - RNA, 19 nt, Homo sapiens
  misc_RNA (1)...(19): siRNA sense strand
gguggucccauucauauca

SEQ ID NO: 1260027 - RNA, 19 nt, Homo sapiens
  misc_RNA (1)...(19): siRNA sense strand
ugaaauucccacucauguu

SEQ ID NO: 1260028 - RNA, 19 nt, Homo sapiens
  misc_RNA (1)...(19): siRNA sense strand
uccaaugugucgggcaaua

SEQ ID NO: 1260029 - RNA, 19 nt, Homo sapiens
  misc_RNA (1)...(19): siRNA sense strand
acaaggcccuccggcaguu

SEQ ID NO: 1260030 - RNA, 19 nt, Homo sapiens
  misc_RNA (1)...(19): siRNA sense strand
gaagcccaacuguuugaau

SEQ ID NO: 1260031 - RNA, 19 nt, Homo sapiens
  misc_RNA (1)...(19): siRNA sense strand
caacugccagccagaguca

SEQ ID NO: 1260032 - RNA, 19 nt, Homo sapiens
  misc_RNA (1)...(19): siRNA sense strand
gaacugccugcgcauuuac

SEQ ID NO: 1260033 - RNA, 19 nt, Homo sapiens
  misc_RNA (1)...(19): siRNA sense strand
gaagcugaaauccaaugug

SEQ ID NO: 1260034 - RNA, 19 nt, Homo sapiens
  misc_RNA (1)...(19): siRNA sense strand
ccaacuguuugaauuugca

SEQ ID NO: 1260035 - RNA, 19 nt, Homo sapiens
  misc_RNA (1)...(19): siRNA sense strand
gcaaauuuacaggcacaga

SEQ ID NO: 1260036 - RNA, 19 nt, Homo sapiens
  misc_RNA (1)...(19): siRNA sense strand
cagccagccuucccaguac

SEQ ID NO: 1260037 - RNA, 19 nt, Homo sapiens
  misc_RNA (1)...(19): siRNA sense strand
cauaugaaccaguuaacag

SEQ ID NO: 1260038 - RNA, 19 nt, Homo sapiens
  misc_RNA (1)...(19): siRNA sense strand
ccagcagggucugagaaug

SEQ ID NO: 1260039 - RNA, 19 nt, Homo sapiens
  misc_RNA (1)...(19): siRNA sense strand
gggcaaggagaccaacuuc

SEQ ID NO: 1260040 - RNA, 19 nt, Homo sapiens
  misc_RNA (1)...(19): siRNA sense strand
ccaaguaccgcacgcuaag

SEQ ID NO: 1260041 - RNA, 19 nt, Homo sapiens
  misc_RNA (1)...(19): siRNA sense strand
ugaagcagaagucgcucua

SEQ ID NO: 1260042 - RNA, 19 nt, Homo sapiens
  misc_RNA (1)...(19): siRNA sense strand
ucgacgacauuugcaagaa

SEQ ID NO: 1260043 - RNA, 19 nt, Homo sapiens
  misc_RNA (1)...(19): siRNA sense strand
gcuacggaaugcucuucug

SEQ ID NO: 1260044 - RNA, 19 nt, Homo sapiens
  misc_RNA (1)...(19): siRNA sense strand
gcucuguccacccuauuau

SEQ ID NO: 1260045 - RNA, 19 nt, Homo sapiens
  misc_RNA (1)...(19): siRNA sense strand
gcauuuacuggagcaugua

SEQ ID NO: 1260046 - RNA, 19 nt, Homo sapiens
  misc_RNA (1)...(19): siRNA sense strand
gggcaauacacaccucugu

SEQ ID NO: 1260047 - RNA, 19 nt, Homo sapiens
  misc_RNA (1)...(19): siRNA sense strand
acagcagauugucagauau

SEQ ID NO: 1260048 - RNA, 19 nt, Homo sapiens
  misc_RNA (1)...(19): siRNA sense strand
ccugugugcuccuaugaag

SEQ ID NO: 1260049 - RNA, 19 nt, Homo sapiens
  misc_RNA (1)...(19): siRNA sense strand
gcuggaggauuccccauau

SEQ ID NO: 1260050 - RNA, 19 nt, Homo sapiens
  misc_RNA (1)...(19): siRNA sense strand
aagcacagcuacggaaugc

SEQ ID NO: 1260051 - RNA, 19 nt, Homo sapiens
  misc_RNA (1)...(19): siRNA sense strand
caagcacagcuacggaaug

SEQ ID NO: 1260052 - RNA, 19 nt, Homo sapiens
  misc_RNA (1)...(19): siRNA sense strand
caaccucgacgacauuugc

SEQ ID NO: 1260053 - RNA, 19 nt, Homo sapiens
  misc_RNA (1)...(19): siRNA sense strand
cgcauuuacuggagcaugu

SEQ ID NO: 1260054 - RNA, 19 nt, Homo sapiens
  misc_RNA (1)...(19): siRNA sense strand
gggcuuauuggcacaguca

SEQ ID NO: 1260055 - RNA, 19 nt, Homo sapiens
  misc_RNA (1)...(19): siRNA sense strand
uccacccuauuaucuuuaa

SEQ ID NO: 1260056 - RNA, 19 nt, Homo sapiens
  misc_RNA (1)...(19): siRNA sense strand
ccggguggucccauucaua

SEQ ID NO: 1260057 - RNA, 19 nt, Homo sapiens
  misc_RNA (1)...(19): siRNA sense strand
auucaagccuuuggcaaug

SEQ ID NO: 1260058 - RNA, 19 nt, Homo sapiens
  misc_RNA (1)...(19): siRNA sense strand
cggguggucccauucauau

SEQ ID NO: 1260059 - RNA, 19 nt, Homo sapiens
  misc_RNA (1)...(19): siRNA sense strand
accagagccugcagggaaa

SEQ ID NO: 1260060 - RNA, 19 nt, Homo sapiens
  misc_RNA (1)...(19): siRNA sense strand
caaugugucgggcaauaca

SEQ ID NO: 1260061 - RNA, 19 nt, Homo sapiens
  misc_RNA (1)...(19): siRNA sense strand
ccauggaggcccugaagca

SEQ ID NO: 1260062 - RNA, 19 nt, Homo sapiens
  misc_RNA (1)...(19): siRNA sense strand
acuccugcaagacgaauua

SEQ ID NO: 1260063 - RNA, 19 nt, Homo sapiens
  misc_RNA (1)...(19): siRNA sense strand
gaaaucaucuuuacggaau

SEQ ID NO: 1260064 - RNA, 19 nt, Homo sapiens
  misc_RNA (1)...(19): siRNA sense strand
gcucaaaucuucacagagu

SEQ ID NO: 1260065 - RNA, 19 nt, Homo sapiens
  misc_RNA (1)...(19): siRNA sense strand
ggagcaacuuagucaaaua

SEQ ID NO: 1260066 - RNA, 19 nt, Homo sapiens
  misc_RNA (1)...(19): siRNA sense strand
ccuguggacuggaguauua

SEQ ID NO: 1260067 - RNA, 19 nt, Homo sapiens
  misc_RNA (1)...(19): siRNA sense strand
cacaagcucuuucuggaua

SEQ ID NO: 1260068 - RNA, 19 nt, Homo sapiens
  misc_RNA (1)...(19): siRNA sense strand
cgagccaacugcuguauuu

SEQ ID NO: 1260069 - RNA, 19 nt, Homo sapiens
  misc_RNA (1)...(19): siRNA sense strand
cagcagagccuuaucuauu

SEQ ID NO: 1260070 - RNA, 19 nt, Homo sapiens
  misc_RNA (1)...(19): siRNA sense strand
ggacaaaguacuugauaug

SEQ ID NO: 1260071 - RNA, 19 nt, Homo sapiens
  misc_RNA (1)...(19): siRNA sense strand
ggaauguggugcugagaga

SEQ ID NO: 1260072 - RNA, 19 nt, Homo sapiens
  misc_RNA (1)...(19): siRNA sense strand
gcaaauggacaaaguacuu

SEQ ID NO: 1260073 - RNA, 19 nt, Homo sapiens
  misc_RNA (1)...(19): siRNA sense strand
gauuacagguccuaucaug

SEQ ID NO: 1260074 - RNA, 19 nt, Homo sapiens
  misc_RNA (1)...(19): siRNA sense strand
ggauacagagaccaauuua

SEQ ID NO: 1260075 - RNA, 19 nt, Homo sapiens
  misc_RNA (1)...(19): siRNA sense strand
gcugagagacuacauuuau

SEQ ID NO: 1260076 - RNA, 19 nt, Homo sapiens
  misc_RNA (1)...(19): siRNA sense strand
gcacggagugugaauguga

SEQ ID NO: 1260077 - RNA, 19 nt, Homo sapiens
  misc_RNA (1)...(19): siRNA sense strand
ccucagacuucacauguau

SEQ ID NO: 1260078 - RNA, 19 nt, Homo sapiens
  misc_RNA (1)...(19): siRNA sense strand
cugagagacuacauuuaua

SEQ ID NO: 1260079 - RNA, 19 nt, Homo sapiens
  misc_RNA (1)...(19): siRNA sense strand
acaaaguacuugauaugga

SEQ ID NO: 1260080 - RNA, 19 nt, Homo sapiens
  misc_RNA (1)...(19): siRNA sense strand
gagauuacagguccuauca

SEQ ID NO: 1260081 - RNA, 19 nt, Homo sapiens
  misc_RNA (1)...(19): siRNA sense strand
caacugcuguauuuaacau

SEQ ID NO: 1260082 - RNA, 19 nt, Homo sapiens
  misc_RNA (1)...(19): siRNA sense strand
acagagaccaauuuaguuu

SEQ ID NO: 1260083 - RNA, 19 nt, Homo sapiens
  misc_RNA (1)...(19): siRNA sense strand
ccacuguucccucguauug

SEQ ID NO: 1260084 - RNA, 19 nt, Homo sapiens
  misc_RNA (1)...(19): siRNA sense strand
uuuaacaucugccugcaaa

SEQ ID NO: 1260085 - RNA, 19 nt, Homo sapiens
  misc_RNA (1)...(19): siRNA sense strand
ugaccaugcugcucaaauc

SEQ ID NO: 1260086 - RNA, 19 nt, Homo sapiens
  misc_RNA (1)...(19): siRNA sense strand
ggucuuguccagcauugua

SEQ ID NO: 1260087 - RNA, 19 nt, Homo sapiens
  misc_RNA (1)...(19): siRNA sense strand
cuaccacuguucccucgua

SEQ ID NO: 1260088 - RNA, 19 nt, Homo sapiens
  misc_RNA (1)...(19): siRNA sense strand
agcagagccuuaucuauug

SEQ ID NO: 1260089 - RNA, 19 nt, Homo sapiens
  misc_RNA (1)...(19): siRNA sense strand
gguccuaucaugccucauu

SEQ ID NO: 1260090 - RNA, 19 nt, Homo sapiens
  misc_RNA (1)...(19): siRNA sense strand
gcagagccuuaucuauugg

SEQ ID NO: 1260091 - RNA, 19 nt, Homo sapiens
  misc_RNA (1)...(19): siRNA sense strand
agacuucacauguaucauu

SEQ ID NO: 1260092 - RNA, 19 nt, Homo sapiens
  misc_RNA (1)...(19): siRNA sense strand
uaacaucugccugcaaaug

SEQ ID NO: 1260093 - RNA, 19 nt, Homo sapiens
  misc_RNA (1)...(19): siRNA sense strand
gugcugagagacuacauuu

SEQ ID NO: 1260094 - RNA, 19 nt, Homo sapiens
  misc_RNA (1)...(19): siRNA sense strand
gacuucacauguaucauuc

SEQ ID NO: 1260095 - RNA, 19 nt, Homo sapiens
  misc_RNA (1)...(19): siRNA sense strand
cugggcagaucauuugaaa

SEQ ID NO: 1260096 - RNA, 19 nt, Homo sapiens
  misc_RNA (1)...(19): siRNA sense strand
auacagagaccaauuuagu

SEQ ID NO: 1260097 - RNA, 19 nt, Homo sapiens
  misc_RNA (1)...(19): siRNA sense strand
ccucugagcuccguuguac

SEQ ID NO: 1260098 - RNA, 19 nt, Homo sapiens
  misc_RNA (1)...(19): siRNA sense strand
gggcagaucauuugaaagc

SEQ ID NO: 1260099 - RNA, 19 nt, Homo sapiens
  misc_RNA (1)...(19): siRNA sense strand
agucaaauaccguuacuug

SEQ ID NO: 1260100 - RNA, 19 nt, Homo sapiens
  misc_RNA (1)...(19): siRNA sense strand
gagccaacugcuguauuua

SEQ ID NO: 1260101 - RNA, 19 nt, Homo sapiens
  misc_RNA (1)...(19): siRNA sense strand
uauuggagcugauagaaaa

SEQ ID NO: 1260102 - RNA, 19 nt, Homo sapiens
  misc_RNA (1)...(19): siRNA sense strand
gcuccacccugcuuugucu

SEQ ID NO: 1260103 - RNA, 19 nt, Homo sapiens
  misc_RNA (1)...(19): siRNA sense strand
gcuaugggaagagaaguuu

SEQ ID NO: 1260104 - RNA, 19 nt, Homo sapiens
  misc_RNA (1)...(19): siRNA sense strand
caaauggacaaaguacuug

SEQ ID NO: 1260105 - RNA, 19 nt, Homo sapiens
  misc_RNA (1)...(19): siRNA sense strand
ccaugcugcucaaaucuuc

SEQ ID NO: 1260106 - RNA, 19 nt, Homo sapiens
  misc_RNA (1)...(19): siRNA sense strand
guauuggagcugauagaaa

SEQ ID NO: 1260107 - RNA, 19 nt, Homo sapiens
  misc_RNA (1)...(19): siRNA sense strand
ugucuuggcuaccacuguu

SEQ ID NO: 1260108 - RNA, 19 nt, Homo sapiens
  misc_RNA (1)...(19): siRNA sense strand
gagcaacuuagucaaauac

SEQ ID NO: 1260109 - RNA, 19 nt, Homo sapiens
  misc_RNA (1)...(19): siRNA sense strand
gccaacugcuguauuuaac

SEQ ID NO: 1260110 - RNA, 19 nt, Homo sapiens
  misc_RNA (1)...(19): siRNA sense strand
gaaagcacaggaagaagcu

SEQ ID NO: 1260111 - RNA, 19 nt, Homo sapiens
  misc_RNA (1)...(19): siRNA sense strand
gauuugcuaugggaagaga

SEQ ID NO: 1260112 - RNA, 19 nt, Homo sapiens
  misc_RNA (1)...(19): siRNA sense strand
uggacaaaguacuugauau

SEQ ID NO: 1260113 - RNA, 19 nt, Homo sapiens
  misc_RNA (1)...(19): siRNA sense strand
caccucuucucaacccuuu

SEQ ID NO: 1260114 - RNA, 19 nt, Homo sapiens
  misc_RNA (1)...(19): siRNA sense strand
gcaacccugcagcauguuu

SEQ ID NO: 1260115 - RNA, 19 nt, Homo sapiens
  misc_RNA (1)...(19): siRNA sense strand
cugcucaaaucuucacaga

SEQ ID NO: 1260116 - RNA, 19 nt, Homo sapiens
  misc_RNA (1)...(19): siRNA sense strand
ucacagaguggaucuuucu

SEQ ID NO: 1260117 - RNA, 19 nt, Homo sapiens
  misc_RNA (1)...(19): siRNA sense strand
uggagcaacuuagucaaau

SEQ ID NO: 1260118 - RNA, 19 nt, Homo sapiens
  misc_RNA (1)...(19): siRNA sense strand
gacaaaguacuugauaugg

SEQ ID NO: 1260119 - RNA, 19 nt, Homo sapiens
  misc_RNA (1)...(19): siRNA sense strand
uggauacagagaccaauuu

SEQ ID NO: 1260120 - RNA, 19 nt, Homo sapiens
  misc_RNA (1)...(19): siRNA sense strand
ggagauuacagguccuauc

SEQ ID NO: 1260121 - RNA, 19 nt, Homo sapiens
  misc_RNA (1)...(19): siRNA sense strand
uaccugggcagaucauuug

SEQ ID NO: 1260122 - RNA, 19 nt, Homo sapiens
  misc_RNA (1)...(19): siRNA sense strand
cuaacacucuggagcaacu

SEQ ID NO: 1260123 - RNA, 19 nt, Homo sapiens
  misc_RNA (1)...(19): siRNA sense strand
gagcuuacuaacugugguu

SEQ ID NO: 1260124 - RNA, 19 nt, Homo sapiens
  misc_RNA (1)...(19): siRNA sense strand
uauacaggaucccaaacuc

SEQ ID NO: 1260125 - RNA, 19 nt, Homo sapiens
  misc_RNA (1)...(19): siRNA sense strand
uacagagaccaauuuaguu

SEQ ID NO: 1260126 - RNA, 19 nt, Homo sapiens
  misc_RNA (1)...(19): siRNA sense strand
gauacagagaccaauuuag

SEQ ID NO: 1260127 - RNA, 19 nt, Homo sapiens
  misc_RNA (1)...(19): siRNA sense strand
uuaccugggcagaucauuu

SEQ ID NO: 1260128 - RNA, 19 nt, Homo sapiens
  misc_RNA (1)...(19): siRNA sense strand
cuugggaaaucaucuuuac

SEQ ID NO: 1260129 - RNA, 19 nt, Homo sapiens
  misc_RNA (1)...(19): siRNA sense strand
cagagaccaauuuaguuug

SEQ ID NO: 1260130 - RNA, 19 nt, Homo sapiens
  misc_RNA (1)...(19): siRNA sense strand
gagugugaaugugaagaca

SEQ ID NO: 1260131 - RNA, 19 nt, Homo sapiens
  misc_RNA (1)...(19): siRNA sense strand
aucccaaacucuccucuga

SEQ ID NO: 1260132 - RNA, 19 nt, Homo sapiens
  misc_RNA (1)...(19): siRNA sense strand
uggagguuguucauaagga

SEQ ID NO: 1260133 - RNA, 19 nt, Homo sapiens
  misc_RNA (1)...(19): siRNA sense strand
agccaacugcuguauuuaa

SEQ ID NO: 1260134 - RNA, 19 nt, Homo sapiens
  misc_RNA (1)...(19): siRNA sense strand
ccagcagagccuuaucuau

SEQ ID NO: 1260135 - RNA, 19 nt, Homo sapiens
  misc_RNA (1)...(19): siRNA sense strand
cacggagugugaaugugaa

SEQ ID NO: 1260136 - RNA, 19 nt, Homo sapiens
  misc_RNA (1)...(19): siRNA sense strand
acuguucccucguauugga

SEQ ID NO: 1260137 - RNA, 19 nt, Homo sapiens
  misc_RNA (1)...(19): siRNA sense strand
uuugaaagcacaggaagaa

SEQ ID NO: 1260138 - RNA, 19 nt, Homo sapiens
  misc_RNA (1)...(19): siRNA sense strand
gccugcaaauggacaaagu

SEQ ID NO: 1260139 - RNA, 19 nt, Homo sapiens
  misc_RNA (1)...(19): siRNA sense strand
ucagacuucacauguauca

SEQ ID NO: 1260140 - RNA, 19 nt, Homo sapiens
  misc_RNA (1)...(19): siRNA sense strand
guauacaggaucccaaacu

SEQ ID NO: 1260141 - RNA, 19 nt, Homo sapiens
  misc_RNA (1)...(19): siRNA sense strand
gcuggaaagacaaguccuu

SEQ ID NO: 1260142 - RNA, 19 nt, Homo sapiens
  misc_RNA (1)...(19): siRNA sense strand
aaucaucuuuacggaaugu

SEQ ID NO: 1260143 - RNA, 19 nt, Homo sapiens
  misc_RNA (1)...(19): siRNA sense strand
acaucugccugcaaaugga

SEQ ID NO: 1260144 - RNA, 19 nt, Homo sapiens
  misc_RNA (1)...(19): siRNA sense strand
guccuaucaugccucauuc

SEQ ID NO: 1260145 - RNA, 19 nt, Homo sapiens
  misc_RNA (1)...(19): siRNA sense strand
ccuguggacuggaguauua

SEQ ID NO: 1260146 - RNA, 19 nt, Homo sapiens
  misc_RNA (1)...(19): siRNA sense strand
cagcagagccuuaucuauu

SEQ ID NO: 1260147 - RNA, 19 nt, Homo sapiens
  misc_RNA (1)...(19): siRNA sense strand
ccucagacuucacauguau

SEQ ID NO: 1260148 - RNA, 19 nt, Homo sapiens
  misc_RNA (1)...(19): siRNA sense strand
ccacuguucccucguauug

SEQ ID NO: 1260149 - RNA, 19 nt, Homo sapiens
  misc_RNA (1)...(19): siRNA sense strand
ggucuuguccagcauugua

SEQ ID NO: 1260150 - RNA, 19 nt, Homo sapiens
  misc_RNA (1)...(19): siRNA sense strand
cuaccacuguucccucgua

SEQ ID NO: 1260151 - RNA, 19 nt, Homo sapiens
  misc_RNA (1)...(19): siRNA sense strand
agcagagccuuaucuauug

SEQ ID NO: 1260152 - RNA, 19 nt, Homo sapiens
  misc_RNA (1)...(19): siRNA sense strand
gcagagccuuaucuauugg

SEQ ID NO: 1260153 - RNA, 19 nt, Homo sapiens
  misc_RNA (1)...(19): siRNA sense strand
agacuucacauguaucauu

SEQ ID NO: 1260154 - RNA, 19 nt, Homo sapiens
  misc_RNA (1)...(19): siRNA sense strand
gacuucacauguaucauuc

SEQ ID NO: 1260155 - RNA, 19 nt, Homo sapiens
  misc_RNA (1)...(19): siRNA sense strand
cugggcagaucauuugaaa

SEQ ID NO: 1260156 - RNA, 19 nt, Homo sapiens
  misc_RNA (1)...(19): siRNA sense strand
ccucugagcuccguuguac

SEQ ID NO: 1260157 - RNA, 19 nt, Homo sapiens
  misc_RNA (1)...(19): siRNA sense strand
gggcagaucauuugaaagc

SEQ ID NO: 1260158 - RNA, 19 nt, Homo sapiens
  misc_RNA (1)...(19): siRNA sense strand
uauuggagcugauagaaaa

SEQ ID NO: 1260159 - RNA, 19 nt, Homo sapiens
  misc_RNA (1)...(19): siRNA sense strand
gcuccacccugcuuugucu

SEQ ID NO: 1260160 - RNA, 19 nt, Homo sapiens
  misc_RNA (1)...(19): siRNA sense strand
gcuaugggaagagaaguuu

SEQ ID NO: 1260161 - RNA, 19 nt, Homo sapiens
  misc_RNA (1)...(19): siRNA sense strand
guauuggagcugauagaaa

SEQ ID NO: 1260162 - RNA, 19 nt, Homo sapiens
  misc_RNA (1)...(19): siRNA sense strand
ugucuuggcuaccacuguu

SEQ ID NO: 1260163 - RNA, 19 nt, Homo sapiens
  misc_RNA (1)...(19): siRNA sense strand
gaaagcacaggaagaagcu

SEQ ID NO: 1260164 - RNA, 19 nt, Homo sapiens
  misc_RNA (1)...(19): siRNA sense strand
gauuugcuaugggaagaga

SEQ ID NO: 1260165 - RNA, 19 nt, Homo sapiens
  misc_RNA (1)...(19): siRNA sense strand
caccucuucucaacccuuu

SEQ ID NO: 1260166 - RNA, 19 nt, Homo sapiens
  misc_RNA (1)...(19): siRNA sense strand
gcaacccugcagcauguuu

SEQ ID NO: 1260167 - RNA, 19 nt, Homo sapiens
  misc_RNA (1)...(19): siRNA sense strand
uaccugggcagaucauuug

SEQ ID NO: 1260168 - RNA, 19 nt, Homo sapiens
  misc_RNA (1)...(19): siRNA sense strand
uauacaggaucccaaacuc

SEQ ID NO: 1260169 - RNA, 19 nt, Homo sapiens
  misc_RNA (1)...(19): siRNA sense strand
uuaccugggcagaucauuu

SEQ ID NO: 1260170 - RNA, 19 nt, Homo sapiens
  misc_RNA (1)...(19): siRNA sense strand
aucccaaacucuccucuga

SEQ ID NO: 1260171 - RNA, 19 nt, Homo sapiens
  misc_RNA (1)...(19): siRNA sense strand
ccagcagagccuuaucuau

SEQ ID NO: 1260172 - RNA, 19 nt, Homo sapiens
  misc_RNA (1)...(19): siRNA sense strand
acuguucccucguauugga

SEQ ID NO: 1260173 - RNA, 19 nt, Homo sapiens
  misc_RNA (1)...(19): siRNA sense strand
uuugaaagcacaggaagaa

SEQ ID NO: 1260174 - RNA, 19 nt, Homo sapiens
  misc_RNA (1)...(19): siRNA sense strand
ucagacuucacauguauca

SEQ ID NO: 1260175 - RNA, 19 nt, Homo sapiens
  misc_RNA (1)...(19): siRNA sense strand
guauacaggaucccaaacu

SEQ ID NO: 1260176 - RNA, 19 nt, Homo sapiens
  misc_RNA (1)...(19): siRNA sense strand
gcuggaaagacaaguccuu

SEQ ID NO: 1260177 - RNA, 19 nt, Homo sapiens
  misc_RNA (1)...(19): siRNA sense strand
ccuguggacuggaguauua

SEQ ID NO: 1260178 - RNA, 19 nt, Homo sapiens
  misc_RNA (1)...(19): siRNA sense strand
cagcagagccuuaucuauu

SEQ ID NO: 1260179 - RNA, 19 nt, Homo sapiens
  misc_RNA (1)...(19): siRNA sense strand
ccucagacuucacauguau

SEQ ID NO: 1260180 - RNA, 19 nt, Homo sapiens
  misc_RNA (1)...(19): siRNA sense strand
ccacuguucccucguauug

SEQ ID NO: 1260181 - RNA, 19 nt, Homo sapiens
  misc_RNA (1)...(19): siRNA sense strand
ggucuuguccagcauugua

SEQ ID NO: 1260182 - RNA, 19 nt, Homo sapiens
  misc_RNA (1)...(19): siRNA sense strand
cuaccacuguucccucgua

SEQ ID NO: 1260183 - RNA, 19 nt, Homo sapiens
  misc_RNA (1)...(19): siRNA sense strand
agcagagccuuaucuauug

SEQ ID NO: 1260184 - RNA, 19 nt, Homo sapiens
  misc_RNA (1)...(19): siRNA sense strand
gcagagccuuaucuauugg

SEQ ID NO: 1260185 - RNA, 19 nt, Homo sapiens
  misc_RNA (1)...(19): siRNA sense strand
agacuucacauguaucauu

SEQ ID NO: 1260186 - RNA, 19 nt, Homo sapiens
  misc_RNA (1)...(19): siRNA sense strand
gacuucacauguaucauuc

SEQ ID NO: 1260187 - RNA, 19 nt, Homo sapiens
  misc_RNA (1)...(19): siRNA sense strand
cugggcagaucauuugaaa

SEQ ID NO: 1260188 - RNA, 19 nt, Homo sapiens
  misc_RNA (1)...(19): siRNA sense strand
ccucugagcuccguuguac

SEQ ID NO: 1260189 - RNA, 19 nt, Homo sapiens
  misc_RNA (1)...(19): siRNA sense strand
gggcagaucauuugaaagc

SEQ ID NO: 1260190 - RNA, 19 nt, Homo sapiens
  misc_RNA (1)...(19): siRNA sense strand
uauuggagcugauagaaaa

SEQ ID NO: 1260191 - RNA, 19 nt, Homo sapiens
  misc_RNA (1)...(19): siRNA sense strand
gcuccacccugcuuugucu

SEQ ID NO: 1260192 - RNA, 19 nt, Homo sapiens
  misc_RNA (1)...(19): siRNA sense strand
gcuaugggaagagaaguuu

SEQ ID NO: 1260193 - RNA, 19 nt, Homo sapiens
  misc_RNA (1)...(19): siRNA sense strand
guauuggagcugauagaaa

SEQ ID NO: 1260194 - RNA, 19 nt, Homo sapiens
  misc_RNA (1)...(19): siRNA sense strand
ugucuuggcuaccacuguu

SEQ ID NO: 1260195 - RNA, 19 nt, Homo sapiens
  misc_RNA (1)...(19): siRNA sense strand
gaaagcacaggaagaagcu

SEQ ID NO: 1260196 - RNA, 19 nt, Homo sapiens
  misc_RNA (1)...(19): siRNA sense strand
gauuugcuaugggaagaga

SEQ ID NO: 1260197 - RNA, 19 nt, Homo sapiens
  misc_RNA (1)...(19): siRNA sense strand
caccucuucucaacccuuu

SEQ ID NO: 1260198 - RNA, 19 nt, Homo sapiens
  misc_RNA (1)...(19): siRNA sense strand
gcaacccugcagcauguuu

SEQ ID NO: 1260199 - RNA, 19 nt, Homo sapiens
  misc_RNA (1)...(19): siRNA sense strand
uaccugggcagaucauuug

SEQ ID NO: 1260200 - RNA, 19 nt, Homo sapiens
  misc_RNA (1)...(19): siRNA sense strand
uauacaggaucccaaacuc

SEQ ID NO: 1260201 - RNA, 19 nt, Homo sapiens
  misc_RNA (1)...(19): siRNA sense strand
uuaccugggcagaucauuu

SEQ ID NO: 1260202 - RNA, 19 nt, Homo sapiens
  misc_RNA (1)...(19): siRNA sense strand
aucccaaacucuccucuga

SEQ ID NO: 1260203 - RNA, 19 nt, Homo sapiens
  misc_RNA (1)...(19): siRNA sense strand
ccagcagagccuuaucuau

SEQ ID NO: 1260204 - RNA, 19 nt, Homo sapiens
  misc_RNA (1)...(19): siRNA sense strand
acuguucccucguauugga

SEQ ID NO: 1260205 - RNA, 19 nt, Homo sapiens
  misc_RNA (1)...(19): siRNA sense strand
uuugaaagcacaggaagaa

SEQ ID NO: 1260206 - RNA, 19 nt, Homo sapiens
  misc_RNA (1)...(19): siRNA sense strand
ucagacuucacauguauca

SEQ ID NO: 1260207 - RNA, 19 nt, Homo sapiens
  misc_RNA (1)...(19): siRNA sense strand
guauacaggaucccaaacu

SEQ ID NO: 1260208 - RNA, 19 nt, Homo sapiens
  misc_RNA (1)...(19): siRNA sense strand
gcuggaaagacaaguccuu

SEQ ID NO: 1260209 - RNA, 19 nt, Homo sapiens
  misc_RNA (1)...(19): siRNA sense strand
gaaaucaucuuuacggaau

SEQ ID NO: 1260210 - RNA, 19 nt, Homo sapiens
  misc_RNA (1)...(19): siRNA sense strand
gcucaaaucuucacagagu

SEQ ID NO: 1260211 - RNA, 19 nt, Homo sapiens
  misc_RNA (1)...(19): siRNA sense strand
ggagcaacuuagucaaaua

SEQ ID NO: 1260212 - RNA, 19 nt, Homo sapiens
  misc_RNA (1)...(19): siRNA sense strand
ccuguggacuggaguauua

SEQ ID NO: 1260213 - RNA, 19 nt, Homo sapiens
  misc_RNA (1)...(19): siRNA sense strand
cacaagcucuuucuggaua

SEQ ID NO: 1260214 - RNA, 19 nt, Homo sapiens
  misc_RNA (1)...(19): siRNA sense strand
cgagccaacugcuguauuu

SEQ ID NO: 1260215 - RNA, 19 nt, Homo sapiens
  misc_RNA (1)...(19): siRNA sense strand
cagcagagccuuaucuauu

SEQ ID NO: 1260216 - RNA, 19 nt, Homo sapiens
  misc_RNA (1)...(19): siRNA sense strand
ggacaaaguacuugauaug

SEQ ID NO: 1260217 - RNA, 19 nt, Homo sapiens
  misc_RNA (1)...(19): siRNA sense strand
ggaauguggugcugagaga

SEQ ID NO: 1260218 - RNA, 19 nt, Homo sapiens
  misc_RNA (1)...(19): siRNA sense strand
gcaaauggacaaaguacuu

SEQ ID NO: 1260219 - RNA, 19 nt, Homo sapiens
  misc_RNA (1)...(19): siRNA sense strand
gauuacagguccuaucaug

SEQ ID NO: 1260220 - RNA, 19 nt, Homo sapiens
  misc_RNA (1)...(19): siRNA sense strand
ggauacagagaccaauuua

SEQ ID NO: 1260221 - RNA, 19 nt, Homo sapiens
  misc_RNA (1)...(19): siRNA sense strand
gcugagagacuacauuuau

SEQ ID NO: 1260222 - RNA, 19 nt, Homo sapiens
  misc_RNA (1)...(19): siRNA sense strand
gcacggagugugaauguga

SEQ ID NO: 1260223 - RNA, 19 nt, Homo sapiens
  misc_RNA (1)...(19): siRNA sense strand
ccucagacuucacauguau

SEQ ID NO: 1260224 - RNA, 19 nt, Homo sapiens
  misc_RNA (1)...(19): siRNA sense strand
cugagagacuacauuuaua

SEQ ID NO: 1260225 - RNA, 19 nt, Homo sapiens
  misc_RNA (1)...(19): siRNA sense strand
acaaaguacuugauaugga

SEQ ID NO: 1260226 - RNA, 19 nt, Homo sapiens
  misc_RNA (1)...(19): siRNA sense strand
gagauuacagguccuauca

SEQ ID NO: 1260227 - RNA, 19 nt, Homo sapiens
  misc_RNA (1)...(19): siRNA sense strand
caacugcuguauuuaacau

SEQ ID NO: 1260228 - RNA, 19 nt, Homo sapiens
  misc_RNA (1)...(19): siRNA sense strand
acagagaccaauuuaguuu

SEQ ID NO: 1260229 - RNA, 19 nt, Homo sapiens
  misc_RNA (1)...(19): siRNA sense strand
ccacuguucccucguauug

SEQ ID NO: 1260230 - RNA, 19 nt, Homo sapiens
  misc_RNA (1)...(19): siRNA sense strand
uuuaacaucugccugcaaa

SEQ ID NO: 1260231 - RNA, 19 nt, Homo sapiens
  misc_RNA (1)...(19): siRNA sense strand
ugaccaugcugcucaaauc

SEQ ID NO: 1260232 - RNA, 19 nt, Homo sapiens
  misc_RNA (1)...(19): siRNA sense strand
ggucuuguccagcauugua

SEQ ID NO: 1260233 - RNA, 19 nt, Homo sapiens
  misc_RNA (1)...(19): siRNA sense strand
cuaccacuguucccucgua

SEQ ID NO: 1260234 - RNA, 19 nt, Homo sapiens
  misc_RNA (1)...(19): siRNA sense strand
agcagagccuuaucuauug

SEQ ID NO: 1260235 - RNA, 19 nt, Homo sapiens
  misc_RNA (1)...(19): siRNA sense strand
gguccuaucaugccucauu

SEQ ID NO: 1260236 - RNA, 19 nt, Homo sapiens
  misc_RNA (1)...(19): siRNA sense strand
gcagagccuuaucuauugg

SEQ ID NO: 1260237 - RNA, 19 nt, Homo sapiens
  misc_RNA (1)...(19): siRNA sense strand
agacuucacauguaucauu

SEQ ID NO: 1260238 - RNA, 19 nt, Homo sapiens
  misc_RNA (1)...(19): siRNA sense strand
uaacaucugccugcaaaug

SEQ ID NO: 1260239 - RNA, 19 nt, Homo sapiens
  misc_RNA (1)...(19): siRNA sense strand
gugcugagagacuacauuu

SEQ ID NO: 1260240 - RNA, 19 nt, Homo sapiens
  misc_RNA (1)...(19): siRNA sense strand
gacuucacauguaucauuc

SEQ ID NO: 1260241 - RNA, 19 nt, Homo sapiens
  misc_RNA (1)...(19): siRNA sense strand
cugggcagaucauuugaaa

SEQ ID NO: 1260242 - RNA, 19 nt, Homo sapiens
  misc_RNA (1)...(19): siRNA sense strand
auacagagaccaauuuagu

SEQ ID NO: 1260243 - RNA, 19 nt, Homo sapiens
  misc_RNA (1)...(19): siRNA sense strand
ccucugagcuccguuguac

SEQ ID NO: 1260244 - RNA, 19 nt, Homo sapiens
  misc_RNA (1)...(19): siRNA sense strand
gggcagaucauuugaaagc

SEQ ID NO: 1260245 - RNA, 19 nt, Homo sapiens
  misc_RNA (1)...(19): siRNA sense strand
agucaaauaccguuacuug

SEQ ID NO: 1260246 - RNA, 19 nt, Homo sapiens
  misc_RNA (1)...(19): siRNA sense strand
gagccaacugcuguauuua

SEQ ID NO: 1260247 - RNA, 19 nt, Homo sapiens
  misc_RNA (1)...(19): siRNA sense strand
uauuggagcugauagaaaa

SEQ ID NO: 1260248 - RNA, 19 nt, Homo sapiens
  misc_RNA (1)...(19): siRNA sense strand
gcuccacccugcuuugucu

SEQ ID NO: 1260249 - RNA, 19 nt, Homo sapiens
  misc_RNA (1)...(19): siRNA sense strand
gcuaugggaagagaaguuu

SEQ ID NO: 1260250 - RNA, 19 nt, Homo sapiens
  misc_RNA (1)...(19): siRNA sense strand
caaauggacaaaguacuug

SEQ ID NO: 1260251 - RNA, 19 nt, Homo sapiens
  misc_RNA (1)...(19): siRNA sense strand
ccaugcugcucaaaucuuc

SEQ ID NO: 1260252 - RNA, 19 nt, Homo sapiens
  misc_RNA (1)...(19): siRNA sense strand
guauuggagcugauagaaa

SEQ ID NO: 1260253 - RNA, 19 nt, Homo sapiens
  misc_RNA (1)...(19): siRNA sense strand
ugucuuggcuaccacuguu

SEQ ID NO: 1260254 - RNA, 19 nt, Homo sapiens
  misc_RNA (1)...(19): siRNA sense strand
gagcaacuuagucaaauac

SEQ ID NO: 1260255 - RNA, 19 nt, Homo sapiens
  misc_RNA (1)...(19): siRNA sense strand
gccaacugcuguauuuaac

SEQ ID NO: 1260256 - RNA, 19 nt, Homo sapiens
  misc_RNA (1)...(19): siRNA sense strand
gaaagcacaggaagaagcu

SEQ ID NO: 1260257 - RNA, 19 nt, Homo sapiens
  misc_RNA (1)...(19): siRNA sense strand
gauuugcuaugggaagaga

SEQ ID NO: 1260258 - RNA, 19 nt, Homo sapiens
  misc_RNA (1)...(19): siRNA sense strand
uggacaaaguacuugauau

SEQ ID NO: 1260259 - RNA, 19 nt, Homo sapiens
  misc_RNA (1)...(19): siRNA sense strand
caccucuucucaacccuuu

SEQ ID NO: 1260260 - RNA, 19 nt, Homo sapiens
  misc_RNA (1)...(19): siRNA sense strand
gcaacccugcagcauguuu

SEQ ID NO: 1260261 - RNA, 19 nt, Homo sapiens
  misc_RNA (1)...(19): siRNA sense strand
cugcucaaaucuucacaga

SEQ ID NO: 1260262 - RNA, 19 nt, Homo sapiens
  misc_RNA (1)...(19): siRNA sense strand
ucacagaguggaucuuucu

SEQ ID NO: 1260263 - RNA, 19 nt, Homo sapiens
  misc_RNA (1)...(19): siRNA sense strand
uggagcaacuuagucaaau

SEQ ID NO: 1260264 - RNA, 19 nt, Homo sapiens
  misc_RNA (1)...(19): siRNA sense strand
gacaaaguacuugauaugg

SEQ ID NO: 1260265 - RNA, 19 nt, Homo sapiens
  misc_RNA (1)...(19): siRNA sense strand
uggauacagagaccaauuu

SEQ ID NO: 1260266 - RNA, 19 nt, Homo sapiens
  misc_RNA (1)...(19): siRNA sense strand
ggagauuacagguccuauc

SEQ ID NO: 1260267 - RNA, 19 nt, Homo sapiens
  misc_RNA (1)...(19): siRNA sense strand
uaccugggcagaucauuug

SEQ ID NO: 1260268 - RNA, 19 nt, Homo sapiens
  misc_RNA (1)...(19): siRNA sense strand
cuaacacucuggagcaacu

SEQ ID NO: 1260269 - RNA, 19 nt, Homo sapiens
  misc_RNA (1)...(19): siRNA sense strand
gagcuuacuaacugugguu

SEQ ID NO: 1260270 - RNA, 19 nt, Homo sapiens
  misc_RNA (1)...(19): siRNA sense strand
uauacaggaucccaaacuc

SEQ ID NO: 1260271 - RNA, 19 nt, Homo sapiens
  misc_RNA (1)...(19): siRNA sense strand
uacagagaccaauuuaguu

SEQ ID NO: 1260272 - RNA, 19 nt, Homo sapiens
  misc_RNA (1)...(19): siRNA sense strand
gauacagagaccaauuuag

SEQ ID NO: 1260273 - RNA, 19 nt, Homo sapiens
  misc_RNA (1)...(19): siRNA sense strand
uuaccugggcagaucauuu

SEQ ID NO: 1260274 - RNA, 19 nt, Homo sapiens
  misc_RNA (1)...(19): siRNA sense strand
cuugggaaaucaucuuuac

SEQ ID NO: 1260275 - RNA, 19 nt, Homo sapiens
  misc_RNA (1)...(19): siRNA sense strand
cagagaccaauuuaguuug

SEQ ID NO: 1260276 - RNA, 19 nt, Homo sapiens
  misc_RNA (1)...(19): siRNA sense strand
gagugugaaugugaagaca

SEQ ID NO: 1260277 - RNA, 19 nt, Homo sapiens
  misc_RNA (1)...(19): siRNA sense strand
aucccaaacucuccucuga

SEQ ID NO: 1260278 - RNA, 19 nt, Homo sapiens
  misc_RNA (1)...(19): siRNA sense strand
uggagguuguucauaagga

SEQ ID NO: 1260279 - RNA, 19 nt, Homo sapiens
  misc_RNA (1)...(19): siRNA sense strand
agccaacugcuguauuuaa

SEQ ID NO: 1260280 - RNA, 19 nt, Homo sapiens
  misc_RNA (1)...(19): siRNA sense strand
ccagcagagccuuaucuau

SEQ ID NO: 1260281 - RNA, 19 nt, Homo sapiens
  misc_RNA (1)...(19): siRNA sense strand
cacggagugugaaugugaa

SEQ ID NO: 1260282 - RNA, 19 nt, Homo sapiens
  misc_RNA (1)...(19): siRNA sense strand
acuguucccucguauugga

SEQ ID NO: 1260283 - RNA, 19 nt, Homo sapiens
  misc_RNA (1)...(19): siRNA sense strand
uuugaaagcacaggaagaa

SEQ ID NO: 1260284 - RNA, 19 nt, Homo sapiens
  misc_RNA (1)...(19): siRNA sense strand
gccugcaaauggacaaagu

SEQ ID NO: 1260285 - RNA, 19 nt, Homo sapiens
  misc_RNA (1)...(19): siRNA sense strand
ucagacuucacauguauca

SEQ ID NO: 1260286 - RNA, 19 nt, Homo sapiens
  misc_RNA (1)...(19): siRNA sense strand
guauacaggaucccaaacu

SEQ ID NO: 1260287 - RNA, 19 nt, Homo sapiens
  misc_RNA (1)...(19): siRNA sense strand
gcuggaaagacaaguccuu

SEQ ID NO: 1260288 - RNA, 19 nt, Homo sapiens
  misc_RNA (1)...(19): siRNA sense strand
aaucaucuuuacggaaugu

SEQ ID NO: 1260289 - RNA, 19 nt, Homo sapiens
  misc_RNA (1)...(19): siRNA sense strand
acaucugccugcaaaugga

SEQ ID NO: 1260290 - RNA, 19 nt, Homo sapiens
  misc_RNA (1)...(19): siRNA sense strand
guccuaucaugccucauuc

SEQ ID NO: 1260291 - RNA, 19 nt, Homo sapiens
  misc_RNA (1)...(19): siRNA sense strand
ccuguggacuggaguauua

SEQ ID NO: 1260292 - RNA, 19 nt, Homo sapiens
  misc_RNA (1)...(19): siRNA sense strand
cagcagagccuuaucuauu

SEQ ID NO: 1260293 - RNA, 19 nt, Homo sapiens
  misc_RNA (1)...(19): siRNA sense strand
ccucagacuucacauguau

SEQ ID NO: 1260294 - RNA, 19 nt, Homo sapiens
  misc_RNA (1)...(19): siRNA sense strand
ccacuguucccucguauug

SEQ ID NO: 1260295 - RNA, 19 nt, Homo sapiens
  misc_RNA (1)...(19): siRNA sense strand
ggucuuguccagcauugua

SEQ ID NO: 1260296 - RNA, 19 nt, Homo sapiens
  misc_RNA (1)...(19): siRNA sense strand
cuaccacuguucccucgua

SEQ ID NO: 1260297 - RNA, 19 nt, Homo sapiens
  misc_RNA (1)...(19): siRNA sense strand
agcagagccuuaucuauug

SEQ ID NO: 1260298 - RNA, 19 nt, Homo sapiens
  misc_RNA (1)...(19): siRNA sense strand
gcagagccuuaucuauugg

SEQ ID NO: 1260299 - RNA, 19 nt, Homo sapiens
  misc_RNA (1)...(19): siRNA sense strand
agacuucacauguaucauu

SEQ ID NO: 1260300 - RNA, 19 nt, Homo sapiens
  misc_RNA (1)...(19): siRNA sense strand
gacuucacauguaucauuc

SEQ ID NO: 1260301 - RNA, 19 nt, Homo sapiens
  misc_RNA (1)...(19): siRNA sense strand
cugggcagaucauuugaaa

SEQ ID NO: 1260302 - RNA, 19 nt, Homo sapiens
  misc_RNA (1)...(19): siRNA sense strand
ccucugagcuccguuguac

SEQ ID NO: 1260303 - RNA, 19 nt, Homo sapiens
  misc_RNA (1)...(19): siRNA sense strand
gggcagaucauuugaaagc

SEQ ID NO: 1260304 - RNA, 19 nt, Homo sapiens
  misc_RNA (1)...(19): siRNA sense strand
uauuggagcugauagaaaa

SEQ ID NO: 1260305 - RNA, 19 nt, Homo sapiens
  misc_RNA (1)...(19): siRNA sense strand
gcuccacccugcuuugucu

SEQ ID NO: 1260306 - RNA, 19 nt, Homo sapiens
  misc_RNA (1)...(19): siRNA sense strand
gcuaugggaagagaaguuu

SEQ ID NO: 1260307 - RNA, 19 nt, Homo sapiens
  misc_RNA (1)...(19): siRNA sense strand
guauuggagcugauagaaa

SEQ ID NO: 1260308 - RNA, 19 nt, Homo sapiens
  misc_RNA (1)...(19): siRNA sense strand
ugucuuggcuaccacuguu

SEQ ID NO: 1260309 - RNA, 19 nt, Homo sapiens
  misc_RNA (1)...(19): siRNA sense strand
gaaagcacaggaagaagcu

SEQ ID NO: 1260310 - RNA, 19 nt, Homo sapiens
  misc_RNA (1)...(19): siRNA sense strand
gauuugcuaugggaagaga

SEQ ID NO: 1260311 - RNA, 19 nt, Homo sapiens
  misc_RNA (1)...(19): siRNA sense strand
caccucuucucaacccuuu

SEQ ID NO: 1260312 - RNA, 19 nt, Homo sapiens
  misc_RNA (1)...(19): siRNA sense strand
gcaacccugcagcauguuu

SEQ ID NO: 1260313 - RNA, 19 nt, Homo sapiens
  misc_RNA (1)...(19): siRNA sense strand
uaccugggcagaucauuug

SEQ ID NO: 1260314 - RNA, 19 nt, Homo sapiens
  misc_RNA (1)...(19): siRNA sense strand
uauacaggaucccaaacuc

SEQ ID NO: 1260315 - RNA, 19 nt, Homo sapiens
  misc_RNA (1)...(19): siRNA sense strand
uuaccugggcagaucauuu

SEQ ID NO: 1260316 - RNA, 19 nt, Homo sapiens
  misc_RNA (1)...(19): siRNA sense strand
aucccaaacucuccucuga

SEQ ID NO: 1260317 - RNA, 19 nt, Homo sapiens
  misc_RNA (1)...(19): siRNA sense strand
ccagcagagccuuaucuau

SEQ ID NO: 1260318 - RNA, 19 nt, Homo sapiens
  misc_RNA (1)...(19): siRNA sense strand
acuguucccucguauugga

SEQ ID NO: 1260319 - RNA, 19 nt, Homo sapiens
  misc_RNA (1)...(19): siRNA sense strand
uuugaaagcacaggaagaa

SEQ ID NO: 1260320 - RNA, 19 nt, Homo sapiens
  misc_RNA (1)...(19): siRNA sense strand
ucagacuucacauguauca

SEQ ID NO: 1260321 - RNA, 19 nt, Homo sapiens
  misc_RNA (1)...(19): siRNA sense strand
guauacaggaucccaaacu

SEQ ID NO: 1260322 - RNA, 19 nt, Homo sapiens
  misc_RNA (1)...(19): siRNA sense strand
gcuggaaagacaaguccuu

SEQ ID NO: 1260323 - RNA, 19 nt, Homo sapiens
  misc_RNA (1)...(19): siRNA sense strand
ccuguggacuggaguauua

SEQ ID NO: 1260324 - RNA, 19 nt, Homo sapiens
  misc_RNA (1)...(19): siRNA sense strand
cagcagagccuuaucuauu

SEQ ID NO: 1260325 - RNA, 19 nt, Homo sapiens
  misc_RNA (1)...(19): siRNA sense strand
ccucagacuucacauguau

SEQ ID NO: 1260326 - RNA, 19 nt, Homo sapiens
  misc_RNA (1)...(19): siRNA sense strand
ccacuguucccucguauug

SEQ ID NO: 1260327 - RNA, 19 nt, Homo sapiens
  misc_RNA (1)...(19): siRNA sense strand
ggucuuguccagcauugua

SEQ ID NO: 1260328 - RNA, 19 nt, Homo sapiens
  misc_RNA (1)...(19): siRNA sense strand
cuaccacuguucccucgua

SEQ ID NO: 1260329 - RNA, 19 nt, Homo sapiens
  misc_RNA (1)...(19): siRNA sense strand
agcagagccuuaucuauug

SEQ ID NO: 1260330 - RNA, 19 nt, Homo sapiens
  misc_RNA (1)...(19): siRNA sense strand
gcagagccuuaucuauugg

SEQ ID NO: 1260331 - RNA, 19 nt, Homo sapiens
  misc_RNA (1)...(19): siRNA sense strand
agacuucacauguaucauu

SEQ ID NO: 1260332 - RNA, 19 nt, Homo sapiens
  misc_RNA (1)...(19): siRNA sense strand
gacuucacauguaucauuc

SEQ ID NO: 1260333 - RNA, 19 nt, Homo sapiens
  misc_RNA (1)...(19): siRNA sense strand
cugggcagaucauuugaaa

SEQ ID NO: 1260334 - RNA, 19 nt, Homo sapiens
  misc_RNA (1)...(19): siRNA sense strand
ccucugagcuccguuguac

SEQ ID NO: 1260335 - RNA, 19 nt, Homo sapiens
  misc_RNA (1)...(19): siRNA sense strand
gggcagaucauuugaaagc

SEQ ID NO: 1260336 - RNA, 19 nt, Homo sapiens
  misc_RNA (1)...(19): siRNA sense strand
uauuggagcugauagaaaa

SEQ ID NO: 1260337 - RNA, 19 nt, Homo sapiens
  misc_RNA (1)...(19): siRNA sense strand
gcuccacccugcuuugucu

SEQ ID NO: 1260338 - RNA, 19 nt, Homo sapiens
  misc_RNA (1)...(19): siRNA sense strand
gcuaugggaagagaaguuu

SEQ ID NO: 1260339 - RNA, 19 nt, Homo sapiens
  misc_RNA (1)...(19): siRNA sense strand
guauuggagcugauagaaa

SEQ ID NO: 1260340 - RNA, 19 nt, Homo sapiens
  misc_RNA (1)...(19): siRNA sense strand
ugucuuggcuaccacuguu

SEQ ID NO: 1260341 - RNA, 19 nt, Homo sapiens
  misc_RNA (1)...(19): siRNA sense strand
gaaagcacaggaagaagcu

SEQ ID NO: 1260342 - RNA, 19 nt, Homo sapiens
  misc_RNA (1)...(19): siRNA sense strand
gauuugcuaugggaagaga

SEQ ID NO: 1260343 - RNA, 19 nt, Homo sapiens
  misc_RNA (1)...(19): siRNA sense strand
caccucuucucaacccuuu

SEQ ID NO: 1260344 - RNA, 19 nt, Homo sapiens
  misc_RNA (1)...(19): siRNA sense strand
gcaacccugcagcauguuu

SEQ ID NO: 1260345 - RNA, 19 nt, Homo sapiens
  misc_RNA (1)...(19): siRNA sense strand
uaccugggcagaucauuug

SEQ ID NO: 1260346 - RNA, 19 nt, Homo sapiens
  misc_RNA (1)...(19): siRNA sense strand
uauacaggaucccaaacuc

SEQ ID NO: 1260347 - RNA, 19 nt, Homo sapiens
  misc_RNA (1)...(19): siRNA sense strand
uuaccugggcagaucauuu

SEQ ID NO: 1260348 - RNA, 19 nt, Homo sapiens
  misc_RNA (1)...(19): siRNA sense strand
aucccaaacucuccucuga

SEQ ID NO: 1260349 - RNA, 19 nt, Homo sapiens
  misc_RNA (1)...(19): siRNA sense strand
ccagcagagccuuaucuau

SEQ ID NO: 1260350 - RNA, 19 nt, Homo sapiens
  misc_RNA (1)...(19): siRNA sense strand
acuguucccucguauugga

SEQ ID NO: 1260351 - RNA, 19 nt, Homo sapiens
  misc_RNA (1)...(19): siRNA sense strand
uuugaaagcacaggaagaa

SEQ ID NO: 1260352 - RNA, 19 nt, Homo sapiens
  misc_RNA (1)...(19): siRNA sense strand
ucagacuucacauguauca

SEQ ID NO: 1260353 - RNA, 19 nt, Homo sapiens
  misc_RNA (1)...(19): siRNA sense strand
guauacaggaucccaaacu

SEQ ID NO: 1260354 - RNA, 19 nt, Homo sapiens
  misc_RNA (1)...(19): siRNA sense strand
gcuggaaagacaaguccuu

SEQ ID NO: 1260355 - RNA, 19 nt, Homo sapiens
  misc_RNA (1)...(19): siRNA sense strand
gaaaucaucuuuacggaau

SEQ ID NO: 1260356 - RNA, 19 nt, Homo sapiens
  misc_RNA (1)...(19): siRNA sense strand
gcucaaaucuucacagagu

SEQ ID NO: 1260357 - RNA, 19 nt, Homo sapiens
  misc_RNA (1)...(19): siRNA sense strand
ggagcaacuuagucaaaua

SEQ ID NO: 1260358 - RNA, 19 nt, Homo sapiens
  misc_RNA (1)...(19): siRNA sense strand
ccuguggacuggaguauua

SEQ ID NO: 1260359 - RNA, 19 nt, Homo sapiens
  misc_RNA (1)...(19): siRNA sense strand
cacaagcucuuucuggaua

SEQ ID NO: 1260360 - RNA, 19 nt, Homo sapiens
  misc_RNA (1)...(19): siRNA sense strand
cgagccaacugcuguauuu

SEQ ID NO: 1260361 - RNA, 19 nt, Homo sapiens
  misc_RNA (1)...(19): siRNA sense strand
cagcagagccuuaucuauu

SEQ ID NO: 1260362 - RNA, 19 nt, Homo sapiens
  misc_RNA (1)...(19): siRNA sense strand
ggacaaaguacuugauaug

SEQ ID NO: 1260363 - RNA, 19 nt, Homo sapiens
  misc_RNA (1)...(19): siRNA sense strand
ggaauguggugcugagaga

SEQ ID NO: 1260364 - RNA, 19 nt, Homo sapiens
  misc_RNA (1)...(19): siRNA sense strand
gcaaauggacaaaguacuu

SEQ ID NO: 1260365 - RNA, 19 nt, Homo sapiens
  misc_RNA (1)...(19): siRNA sense strand
gauuacagguccuaucaug

SEQ ID NO: 1260366 - RNA, 19 nt, Homo sapiens
  misc_RNA (1)...(19): siRNA sense strand
ggauacagagaccaauuua

SEQ ID NO: 1260367 - RNA, 19 nt, Homo sapiens
  misc_RNA (1)...(19): siRNA sense strand
gcugagagacuacauuuau

SEQ ID NO: 1260368 - RNA, 19 nt, Homo sapiens
  misc_RNA (1)...(19): siRNA sense strand
gcacggagugugaauguga

SEQ ID NO: 1260369 - RNA, 19 nt, Homo sapiens
  misc_RNA (1)...(19): siRNA sense strand
ccucagacuucacauguau

SEQ ID NO: 1260370 - RNA, 19 nt, Homo sapiens
  misc_RNA (1)...(19): siRNA sense strand
cugagagacuacauuuaua

SEQ ID NO: 1260371 - RNA, 19 nt, Homo sapiens
  misc_RNA (1)...(19): siRNA sense strand
acaaaguacuugauaugga

SEQ ID NO: 1260372 - RNA, 19 nt, Homo sapiens
  misc_RNA (1)...(19): siRNA sense strand
gagauuacagguccuauca

SEQ ID NO: 1260373 - RNA, 19 nt, Homo sapiens
  misc_RNA (1)...(19): siRNA sense strand
caacugcuguauuuaacau

SEQ ID NO: 1260374 - RNA, 19 nt, Homo sapiens
  misc_RNA (1)...(19): siRNA sense strand
acagagaccaauuuaguuu

SEQ ID NO: 1260375 - RNA, 19 nt, Homo sapiens
  misc_RNA (1)...(19): siRNA sense strand
ccacuguucccucguauug

SEQ ID NO: 1260376 - RNA, 19 nt, Homo sapiens
  misc_RNA (1)...(19): siRNA sense strand
uuuaacaucugccugcaaa

SEQ ID NO: 1260377 - RNA, 19 nt, Homo sapiens
  misc_RNA (1)...(19): siRNA sense strand
ugaccaugcugcucaaauc

SEQ ID NO: 1260378 - RNA, 19 nt, Homo sapiens
  misc_RNA (1)...(19): siRNA sense strand
ggucuuguccagcauugua

SEQ ID NO: 1260379 - RNA, 19 nt, Homo sapiens
  misc_RNA (1)...(19): siRNA sense strand
cuaccacuguucccucgua

SEQ ID NO: 1260380 - RNA, 19 nt, Homo sapiens
  misc_RNA (1)...(19): siRNA sense strand
agcagagccuuaucuauug

SEQ ID NO: 1260381 - RNA, 19 nt, Homo sapiens
  misc_RNA (1)...(19): siRNA sense strand
gguccuaucaugccucauu

SEQ ID NO: 1260382 - RNA, 19 nt, Homo sapiens
  misc_RNA (1)...(19): siRNA sense strand
gcagagccuuaucuauugg

SEQ ID NO: 1260383 - RNA, 19 nt, Homo sapiens
  misc_RNA (1)...(19): siRNA sense strand
agacuucacauguaucauu

SEQ ID NO: 1260384 - RNA, 19 nt, Homo sapiens
  misc_RNA (1)...(19): siRNA sense strand
uaacaucugccugcaaaug

SEQ ID NO: 1260385 - RNA, 19 nt, Homo sapiens
  misc_RNA (1)...(19): siRNA sense strand
gugcugagagacuacauuu

SEQ ID NO: 1260386 - RNA, 19 nt, Homo sapiens
  misc_RNA (1)...(19): siRNA sense strand
gacuucacauguaucauuc

SEQ ID NO: 1260387 - RNA, 19 nt, Homo sapiens
  misc_RNA (1)...(19): siRNA sense strand
cugggcagaucauuugaaa

SEQ ID NO: 1260388 - RNA, 19 nt, Homo sapiens
  misc_RNA (1)...(19): siRNA sense strand
auacagagaccaauuuagu

SEQ ID NO: 1260389 - RNA, 19 nt, Homo sapiens
  misc_RNA (1)...(19): siRNA sense strand
ccucugagcuccguuguac

SEQ ID NO: 1260390 - RNA, 19 nt, Homo sapiens
  misc_RNA (1)...(19): siRNA sense strand
gggcagaucauuugaaagc

SEQ ID NO: 1260391 - RNA, 19 nt, Homo sapiens
  misc_RNA (1)...(19): siRNA sense strand
agucaaauaccguuacuug

SEQ ID NO: 1260392 - RNA, 19 nt, Homo sapiens
  misc_RNA (1)...(19): siRNA sense strand
gagccaacugcuguauuua

SEQ ID NO: 1260393 - RNA, 19 nt, Homo sapiens
  misc_RNA (1)...(19): siRNA sense strand
uauuggagcugauagaaaa

SEQ ID NO: 1260394 - RNA, 19 nt, Homo sapiens
  misc_RNA (1)...(19): siRNA sense strand
gcuccacccugcuuugucu

SEQ ID NO: 1260395 - RNA, 19 nt, Homo sapiens
  misc_RNA (1)...(19): siRNA sense strand
gcuaugggaagagaaguuu

SEQ ID NO: 1260396 - RNA, 19 nt, Homo sapiens
  misc_RNA (1)...(19): siRNA sense strand
caaauggacaaaguacuug

SEQ ID NO: 1260397 - RNA, 19 nt, Homo sapiens
  misc_RNA (1)...(19): siRNA sense strand
ccaugcugcucaaaucuuc

SEQ ID NO: 1260398 - RNA, 19 nt, Homo sapiens
  misc_RNA (1)...(19): siRNA sense strand
guauuggagcugauagaaa

SEQ ID NO: 1260399 - RNA, 19 nt, Homo sapiens
  misc_RNA (1)...(19): siRNA sense strand
ugucuuggcuaccacuguu

SEQ ID NO: 1260400 - RNA, 19 nt, Homo sapiens
  misc_RNA (1)...(19): siRNA sense strand
gagcaacuuagucaaauac

SEQ ID NO: 1260401 - RNA, 19 nt, Homo sapiens
  misc_RNA (1)...(19): siRNA sense strand
gccaacugcuguauuuaac

SEQ ID NO: 1260402 - RNA, 19 nt, Homo sapiens
  misc_RNA (1)...(19): siRNA sense strand
gaaagcacaggaagaagcu

SEQ ID NO: 1260403 - RNA, 19 nt, Homo sapiens
  misc_RNA (1)...(19): siRNA sense strand
gauuugcuaugggaagaga

SEQ ID NO: 1260404 - RNA, 19 nt, Homo sapiens
  misc_RNA (1)...(19): siRNA sense strand
uggacaaaguacuugauau

SEQ ID NO: 1260405 - RNA, 19 nt, Homo sapiens
  misc_RNA (1)...(19): siRNA sense strand
caccucuucucaacccuuu

SEQ ID NO: 1260406 - RNA, 19 nt, Homo sapiens
  misc_RNA (1)...(19): siRNA sense strand
gcaacccugcagcauguuu

SEQ ID NO: 1260407 - RNA, 19 nt, Homo sapiens
  misc_RNA (1)...(19): siRNA sense strand
cugcucaaaucuucacaga

SEQ ID NO: 1260408 - RNA, 19 nt, Homo sapiens
  misc_RNA (1)...(19): siRNA sense strand
ucacagaguggaucuuucu

SEQ ID NO: 1260409 - RNA, 19 nt, Homo sapiens
  misc_RNA (1)...(19): siRNA sense strand
uggagcaacuuagucaaau

SEQ ID NO: 1260410 - RNA, 19 nt, Homo sapiens
  misc_RNA (1)...(19): siRNA sense strand
gacaaaguacuugauaugg

SEQ ID NO: 1260411 - RNA, 19 nt, Homo sapiens
  misc_RNA (1)...(19): siRNA sense strand
uggauacagagaccaauuu

SEQ ID NO: 1260412 - RNA, 19 nt, Homo sapiens
  misc_RNA (1)...(19): siRNA sense strand
ggagauuacagguccuauc

SEQ ID NO: 1260413 - RNA, 19 nt, Homo sapiens
  misc_RNA (1)...(19): siRNA sense strand
uaccugggcagaucauuug

SEQ ID NO: 1260414 - RNA, 19 nt, Homo sapiens
  misc_RNA (1)...(19): siRNA sense strand
cuaacacucuggagcaacu

SEQ ID NO: 1260415 - RNA, 19 nt, Homo sapiens
  misc_RNA (1)...(19): siRNA sense strand
gagcuuacuaacugugguu

SEQ ID NO: 1260416 - RNA, 19 nt, Homo sapiens
  misc_RNA (1)...(19): siRNA sense strand
uauacaggaucccaaacuc

SEQ ID NO: 1260417 - RNA, 19 nt, Homo sapiens
  misc_RNA (1)...(19): siRNA sense strand
uacagagaccaauuuaguu

SEQ ID NO: 1260418 - RNA, 19 nt, Homo sapiens
  misc_RNA (1)...(19): siRNA sense strand
gauacagagaccaauuuag

SEQ ID NO: 1260419 - RNA, 19 nt, Homo sapiens
  misc_RNA (1)...(19): siRNA sense strand
uuaccugggcagaucauuu

SEQ ID NO: 1260420 - RNA, 19 nt, Homo sapiens
  misc_RNA (1)...(19): siRNA sense strand
cuugggaaaucaucuuuac

SEQ ID NO: 1260421 - RNA, 19 nt, Homo sapiens
  misc_RNA (1)...(19): siRNA sense strand
cagagaccaauuuaguuug

SEQ ID NO: 1260422 - RNA, 19 nt, Homo sapiens
  misc_RNA (1)...(19): siRNA sense strand
gagugugaaugugaagaca

SEQ ID NO: 1260423 - RNA, 19 nt, Homo sapiens
  misc_RNA (1)...(19): siRNA sense strand
aucccaaacucuccucuga

SEQ ID NO: 1260424 - RNA, 19 nt, Homo sapiens
  misc_RNA (1)...(19): siRNA sense strand
uggagguuguucauaagga

SEQ ID NO: 1260425 - RNA, 19 nt, Homo sapiens
  misc_RNA (1)...(19): siRNA sense strand
agccaacugcuguauuuaa

SEQ ID NO: 1260426 - RNA, 19 nt, Homo sapiens
  misc_RNA (1)...(19): siRNA sense strand
ccagcagagccuuaucuau

SEQ ID NO: 1260427 - RNA, 19 nt, Homo sapiens
  misc_RNA (1)...(19): siRNA sense strand
cacggagugugaaugugaa

SEQ ID NO: 1260428 - RNA, 19 nt, Homo sapiens
  misc_RNA (1)...(19): siRNA sense strand
acuguucccucguauugga

SEQ ID NO: 1260429 - RNA, 19 nt, Homo sapiens
  misc_RNA (1)...(19): siRNA sense strand
uuugaaagcacaggaagaa

SEQ ID NO: 1260430 - RNA, 19 nt, Homo sapiens
  misc_RNA (1)...(19): siRNA sense strand
gccugcaaauggacaaagu

SEQ ID NO: 1260431 - RNA, 19 nt, Homo sapiens
  misc_RNA (1)...(19): siRNA sense strand
ucagacuucacauguauca

SEQ ID NO: 1260432 - RNA, 19 nt, Homo sapiens
  misc_RNA (1)...(19): siRNA sense strand
guauacaggaucccaaacu

SEQ ID NO: 1260433 - RNA, 19 nt, Homo sapiens
  misc_RNA (1)...(19): siRNA sense strand
gcuggaaagacaaguccuu

SEQ ID NO: 1260434 - RNA, 19 nt, Homo sapiens
  misc_RNA (1)...(19): siRNA sense strand
aaucaucuuuacggaaugu

SEQ ID NO: 1260435 - RNA, 19 nt, Homo sapiens
  misc_RNA (1)...(19): siRNA sense strand
acaucugccugcaaaugga

SEQ ID NO: 1260436 - RNA, 19 nt, Homo sapiens
  misc_RNA (1)...(19): siRNA sense strand
guccuaucaugccucauuc

SEQ ID NO: 1260437 - RNA, 19 nt, Homo sapiens
  misc_RNA (1)...(19): siRNA sense strand
ccuguggacuggaguauua

SEQ ID NO: 1260438 - RNA, 19 nt, Homo sapiens
  misc_RNA (1)...(19): siRNA sense strand
cagcagagccuuaucuauu

SEQ ID NO: 1260439 - RNA, 19 nt, Homo sapiens
  misc_RNA (1)...(19): siRNA sense strand
ccucagacuucacauguau

SEQ ID NO: 1260440 - RNA, 19 nt, Homo sapiens
  misc_RNA (1)...(19): siRNA sense strand
ccacuguucccucguauug

SEQ ID NO: 1260441 - RNA, 19 nt, Homo sapiens
  misc_RNA (1)...(19): siRNA sense strand
ggucuuguccagcauugua

SEQ ID NO: 1260442 - RNA, 19 nt, Homo sapiens
  misc_RNA (1)...(19): siRNA sense strand
cuaccacuguucccucgua

SEQ ID NO: 1260443 - RNA, 19 nt, Homo sapiens
  misc_RNA (1)...(19): siRNA sense strand
agcagagccuuaucuauug

SEQ ID NO: 1260444 - RNA, 19 nt, Homo sapiens
  misc_RNA (1)...(19): siRNA sense strand
gcagagccuuaucuauugg

SEQ ID NO: 1260445 - RNA, 19 nt, Homo sapiens
  misc_RNA (1)...(19): siRNA sense strand
agacuucacauguaucauu

SEQ ID NO: 1260446 - RNA, 19 nt, Homo sapiens
  misc_RNA (1)...(19): siRNA sense strand
gacuucacauguaucauuc

SEQ ID NO: 1260447 - RNA, 19 nt, Homo sapiens
  misc_RNA (1)...(19): siRNA sense strand
cugggcagaucauuugaaa

SEQ ID NO: 1260448 - RNA, 19 nt, Homo sapiens
  misc_RNA (1)...(19): siRNA sense strand
ccucugagcuccguuguac

SEQ ID NO: 1260449 - RNA, 19 nt, Homo sapiens
  misc_RNA (1)...(19): siRNA sense strand
gggcagaucauuugaaagc

SEQ ID NO: 1260450 - RNA, 19 nt, Homo sapiens
  misc_RNA (1)...(19): siRNA sense strand
uauuggagcugauagaaaa

SEQ ID NO: 1260451 - RNA, 19 nt, Homo sapiens
  misc_RNA (1)...(19): siRNA sense strand
gcuccacccugcuuugucu

SEQ ID NO: 1260452 - RNA, 19 nt, Homo sapiens
  misc_RNA (1)...(19): siRNA sense strand
gcuaugggaagagaaguuu

SEQ ID NO: 1260453 - RNA, 19 nt, Homo sapiens
  misc_RNA (1)...(19): siRNA sense strand
guauuggagcugauagaaa

SEQ ID NO: 1260454 - RNA, 19 nt, Homo sapiens
  misc_RNA (1)...(19): siRNA sense strand
ugucuuggcuaccacuguu

SEQ ID NO: 1260455 - RNA, 19 nt, Homo sapiens
  misc_RNA (1)...(19): siRNA sense strand
gaaagcacaggaagaagcu

SEQ ID NO: 1260456 - RNA, 19 nt, Homo sapiens
  misc_RNA (1)...(19): siRNA sense strand
gauuugcuaugggaagaga

SEQ ID NO: 1260457 - RNA, 19 nt, Homo sapiens
  misc_RNA (1)...(19): siRNA sense strand
caccucuucucaacccuuu

SEQ ID NO: 1260458 - RNA, 19 nt, Homo sapiens
  misc_RNA (1)...(19): siRNA sense strand
gcaacccugcagcauguuu

SEQ ID NO: 1260459 - RNA, 19 nt, Homo sapiens
  misc_RNA (1)...(19): siRNA sense strand
uaccugggcagaucauuug

SEQ ID NO: 1260460 - RNA, 19 nt, Homo sapiens
  misc_RNA (1)...(19): siRNA sense strand
uauacaggaucccaaacuc

SEQ ID NO: 1260461 - RNA, 19 nt, Homo sapiens
  misc_RNA (1)...(19): siRNA sense strand
uuaccugggcagaucauuu

SEQ ID NO: 1260462 - RNA, 19 nt, Homo sapiens
  misc_RNA (1)...(19): siRNA sense strand
aucccaaacucuccucuga

SEQ ID NO: 1260463 - RNA, 19 nt, Homo sapiens
  misc_RNA (1)...(19): siRNA sense strand
ccagcagagccuuaucuau

SEQ ID NO: 1260464 - RNA, 19 nt, Homo sapiens
  misc_RNA (1)...(19): siRNA sense strand
acuguucccucguauugga

SEQ ID NO: 1260465 - RNA, 19 nt, Homo sapiens
  misc_RNA (1)...(19): siRNA sense strand
uuugaaagcacaggaagaa

SEQ ID NO: 1260466 - RNA, 19 nt, Homo sapiens
  misc_RNA (1)...(19): siRNA sense strand
ucagacuucacauguauca

SEQ ID NO: 1260467 - RNA, 19 nt, Homo sapiens
  misc_RNA (1)...(19): siRNA sense strand
guauacaggaucccaaacu

SEQ ID NO: 1260468 - RNA, 19 nt, Homo sapiens
  misc_RNA (1)...(19): siRNA sense strand
gcuggaaagacaaguccuu

SEQ ID NO: 1260469 - RNA, 19 nt, Homo sapiens
  misc_RNA (1)...(19): siRNA sense strand
ccuguggacuggaguauua

SEQ ID NO: 1260470 - RNA, 19 nt, Homo sapiens
  misc_RNA (1)...(19): siRNA sense strand
cagcagagccuuaucuauu

SEQ ID NO: 1260471 - RNA, 19 nt, Homo sapiens
  misc_RNA (1)...(19): siRNA sense strand
ccucagacuucacauguau

SEQ ID NO: 1260472 - RNA, 19 nt, Homo sapiens
  misc_RNA (1)...(19): siRNA sense strand
ccacuguucccucguauug

SEQ ID NO: 1260473 - RNA, 19 nt, Homo sapiens
  misc_RNA (1)...(19): siRNA sense strand
ggucuuguccagcauugua

SEQ ID NO: 1260474 - RNA, 19 nt, Homo sapiens
  misc_RNA (1)...(19): siRNA sense strand
cuaccacuguucccucgua

SEQ ID NO: 1260475 - RNA, 19 nt, Homo sapiens
  misc_RNA (1)...(19): siRNA sense strand
agcagagccuuaucuauug

SEQ ID NO: 1260476 - RNA, 19 nt, Homo sapiens
  misc_RNA (1)...(19): siRNA sense strand
gcagagccuuaucuauugg

SEQ ID NO: 1260477 - RNA, 19 nt, Homo sapiens
  misc_RNA (1)...(19): siRNA sense strand
agacuucacauguaucauu

SEQ ID NO: 1260478 - RNA, 19 nt, Homo sapiens
  misc_RNA (1)...(19): siRNA sense strand
gacuucacauguaucauuc

SEQ ID NO: 1260479 - RNA, 19 nt, Homo sapiens
  misc_RNA (1)...(19): siRNA sense strand
cugggcagaucauuugaaa

SEQ ID NO: 1260480 - RNA, 19 nt, Homo sapiens
  misc_RNA (1)...(19): siRNA sense strand
ccucugagcuccguuguac

SEQ ID NO: 1260481 - RNA, 19 nt, Homo sapiens
  misc_RNA (1)...(19): siRNA sense strand
gggcagaucauuugaaagc

SEQ ID NO: 1260482 - RNA, 19 nt, Homo sapiens
  misc_RNA (1)...(19): siRNA sense strand
uauuggagcugauagaaaa

SEQ ID NO: 1260483 - RNA, 19 nt, Homo sapiens
  misc_RNA (1)...(19): siRNA sense strand
gcuccacccugcuuugucu

SEQ ID NO: 1260484 - RNA, 19 nt, Homo sapiens
  misc_RNA (1)...(19): siRNA sense strand
gcuaugggaagagaaguuu

SEQ ID NO: 1260485 - RNA, 19 nt, Homo sapiens
  misc_RNA (1)...(19): siRNA sense strand
guauuggagcugauagaaa

SEQ ID NO: 1260486 - RNA, 19 nt, Homo sapiens
  misc_RNA (1)...(19): siRNA sense strand
ugucuuggcuaccacuguu

SEQ ID NO: 1260487 - RNA, 19 nt, Homo sapiens
  misc_RNA (1)...(19): siRNA sense strand
gaaagcacaggaagaagcu

SEQ ID NO: 1260488 - RNA, 19 nt, Homo sapiens
  misc_RNA (1)...(19): siRNA sense strand
gauuugcuaugggaagaga

SEQ ID NO: 1260489 - RNA, 19 nt, Homo sapiens
  misc_RNA (1)...(19): siRNA sense strand
caccucuucucaacccuuu

SEQ ID NO: 1260490 - RNA, 19 nt, Homo sapiens
  misc_RNA (1)...(19): siRNA sense strand
gcaacccugcagcauguuu

SEQ ID NO: 1260491 - RNA, 19 nt, Homo sapiens
  misc_RNA (1)...(19): siRNA sense strand
uaccugggcagaucauuug

SEQ ID NO: 1260492 - RNA, 19 nt, Homo sapiens
  misc_RNA (1)...(19): siRNA sense strand
uauacaggaucccaaacuc

SEQ ID NO: 1260493 - RNA, 19 nt, Homo sapiens
  misc_RNA (1)...(19): siRNA sense strand
uuaccugggcagaucauuu

SEQ ID NO: 1260494 - RNA, 19 nt, Homo sapiens
  misc_RNA (1)...(19): siRNA sense strand
aucccaaacucuccucuga

SEQ ID NO: 1260495 - RNA, 19 nt, Homo sapiens
  misc_RNA (1)...(19): siRNA sense strand
ccagcagagccuuaucuau

SEQ ID NO: 1260496 - RNA, 19 nt, Homo sapiens
  misc_RNA (1)...(19): siRNA sense strand
acuguucccucguauugga

SEQ ID NO: 1260497 - RNA, 19 nt, Homo sapiens
  misc_RNA (1)...(19): siRNA sense strand
uuugaaagcacaggaagaa

SEQ ID NO: 1260498 - RNA, 19 nt, Homo sapiens
  misc_RNA (1)...(19): siRNA sense strand
ucagacuucacauguauca

SEQ ID NO: 1260499 - RNA, 19 nt, Homo sapiens
  misc_RNA (1)...(19): siRNA sense strand
guauacaggaucccaaacu

SEQ ID NO: 1260500 - RNA, 19 nt, Homo sapiens
  misc_RNA (1)...(19): siRNA sense strand
gcuggaaagacaaguccuu

SEQ ID NO: 1260501 - RNA, 19 nt, Homo sapiens
  misc_RNA (1)...(19): siRNA sense strand
gaagagagcuguuaggaaa

SEQ ID NO: 1260502 - RNA, 19 nt, Homo sapiens
  misc_RNA (1)...(19): siRNA sense strand
gcaaugaaguggccaaauu

SEQ ID NO: 1260503 - RNA, 19 nt, Homo sapiens
  misc_RNA (1)...(19): siRNA sense strand
gaaagucccuggauucaga

SEQ ID NO: 1260504 - RNA, 19 nt, Homo sapiens
  misc_RNA (1)...(19): siRNA sense strand
gcucauggcucucaaagaa

SEQ ID NO: 1260505 - RNA, 19 nt, Homo sapiens
  misc_RNA (1)...(19): siRNA sense strand
gcccagaaaugguugaaua

SEQ ID NO: 1260506 - RNA, 19 nt, Homo sapiens
  misc_RNA (1)...(19): siRNA sense strand
gcaacuagcuguucagucu

SEQ ID NO: 1260507 - RNA, 19 nt, Homo sapiens
  misc_RNA (1)...(19): siRNA sense strand
ggagagaugccuuauguuu

SEQ ID NO: 1260508 - RNA, 19 nt, Homo sapiens
  misc_RNA (1)...(19): siRNA sense strand
ggaccugagucuucaauga

SEQ ID NO: 1260509 - RNA, 19 nt, Homo sapiens
  misc_RNA (1)...(19): siRNA sense strand
gguuuaagaucuccuauga

SEQ ID NO: 1260510 - RNA, 19 nt, Homo sapiens
  misc_RNA (1)...(19): siRNA sense strand
uagcccagcucacaaauuu

SEQ ID NO: 1260511 - RNA, 19 nt, Homo sapiens
  misc_RNA (1)...(19): siRNA sense strand
gaagcgaccugguguuaca

SEQ ID NO: 1260512 - RNA, 19 nt, Homo sapiens
  misc_RNA (1)...(19): siRNA sense strand
gaaaauauguccacgaugu

SEQ ID NO: 1260513 - RNA, 19 nt, Homo sapiens
  misc_RNA (1)...(19): siRNA sense strand
cuaaucauuucccuacuua

SEQ ID NO: 1260514 - RNA, 19 nt, Homo sapiens
  misc_RNA (1)...(19): siRNA sense strand
gaagagaaauguuuaucac

SEQ ID NO: 1260515 - RNA, 19 nt, Homo sapiens
  misc_RNA (1)...(19): siRNA sense strand
gggcaaauaucugagcuuu

SEQ ID NO: 1260516 - RNA, 19 nt, Homo sapiens
  misc_RNA (1)...(19): siRNA sense strand
ccagguacccaguuuguua

SEQ ID NO: 1260517 - RNA, 19 nt, Homo sapiens
  misc_RNA (1)...(19): siRNA sense strand
caaguguucucccagauga

SEQ ID NO: 1260518 - RNA, 19 nt, Homo sapiens
  misc_RNA (1)...(19): siRNA sense strand
gcugaacacuuccgaaauc

SEQ ID NO: 1260519 - RNA, 19 nt, Homo sapiens
  misc_RNA (1)...(19): siRNA sense strand
caauaucgcuccucacucu

SEQ ID NO: 1260520 - RNA, 19 nt, Homo sapiens
  misc_RNA (1)...(19): siRNA sense strand
gaccggaacgugaagaaua

SEQ ID NO: 1260521 - RNA, 19 nt, Homo sapiens
  misc_RNA (1)...(19): siRNA sense strand
caucugcucugcccuuauu

SEQ ID NO: 1260522 - RNA, 19 nt, Homo sapiens
  misc_RNA (1)...(19): siRNA sense strand
ccgaaugucugaauguuga

SEQ ID NO: 1260523 - RNA, 19 nt, Homo sapiens
  misc_RNA (1)...(19): siRNA sense strand
ggucugggcacaaugguua

SEQ ID NO: 1260524 - RNA, 19 nt, Homo sapiens
  misc_RNA (1)...(19): siRNA sense strand
cagcaaggccaaacgguua

SEQ ID NO: 1260525 - RNA, 19 nt, Homo sapiens
  misc_RNA (1)...(19): siRNA sense strand
ccaaucaugugacuaguuc

SEQ ID NO: 1260526 - RNA, 19 nt, Homo sapiens
  misc_RNA (1)...(19): siRNA sense strand
gcuccucacucuacucuga

SEQ ID NO: 1260527 - RNA, 19 nt, Homo sapiens
  misc_RNA (1)...(19): siRNA sense strand
gcagaacggugagguagau

SEQ ID NO: 1260528 - RNA, 19 nt, Homo sapiens
  misc_RNA (1)...(19): siRNA sense strand
caaaguaccagaaccaaau

SEQ ID NO: 1260529 - RNA, 19 nt, Homo sapiens
  misc_RNA (1)...(19): siRNA sense strand
ugagaggucacauguguua

SEQ ID NO: 1260530 - RNA, 19 nt, Homo sapiens
  misc_RNA (1)...(19): siRNA sense strand
caaugaaagugaccucuuc

SEQ ID NO: 1260531 - RNA, 19 nt, Homo sapiens
  misc_RNA (1)...(19): siRNA sense strand
gaaucuagagggcaaauau

SEQ ID NO: 1260532 - RNA, 19 nt, Homo sapiens
  misc_RNA (1)...(19): siRNA sense strand
ggucacauguguuacuguu

SEQ ID NO: 1260533 - RNA, 19 nt, Homo sapiens
  misc_RNA (1)...(19): siRNA sense strand
aaaggaaagucccuggauu

SEQ ID NO: 1260534 - RNA, 19 nt, Homo sapiens
  misc_RNA (1)...(19): siRNA sense strand
ugaggacucuguaguugaa

SEQ ID NO: 1260535 - RNA, 19 nt, Homo sapiens
  misc_RNA (1)...(19): siRNA sense strand
ucacaaauuucccuaaggu

SEQ ID NO: 1260536 - RNA, 19 nt, Homo sapiens
  misc_RNA (1)...(19): siRNA sense strand
ccaaacgguuagaccaauu

SEQ ID NO: 1260537 - RNA, 19 nt, Homo sapiens
  misc_RNA (1)...(19): siRNA sense strand
uaaaugaggagaccuuguu

SEQ ID NO: 1260538 - RNA, 19 nt, Homo sapiens
  misc_RNA (1)...(19): siRNA sense strand
gagcagcugucugugaaga

SEQ ID NO: 1260539 - RNA, 19 nt, Homo sapiens
  misc_RNA (1)...(19): siRNA sense strand
gagagaugccuuauguuug

SEQ ID NO: 1260540 - RNA, 19 nt, Homo sapiens
  misc_RNA (1)...(19): siRNA sense strand
caaacgguuagaccaauua

SEQ ID NO: 1260541 - RNA, 19 nt, Homo sapiens
  misc_RNA (1)...(19): siRNA sense strand
gaaaggaaagucccuggau

SEQ ID NO: 1260542 - RNA, 19 nt, Homo sapiens
  misc_RNA (1)...(19): siRNA sense strand
acaggcagcugaacacuuc

SEQ ID NO: 1260543 - RNA, 19 nt, Homo sapiens
  misc_RNA (1)...(19): siRNA sense strand
ccaagaaccugagcuagca

SEQ ID NO: 1260544 - RNA, 19 nt, Homo sapiens
  misc_RNA (1)...(19): siRNA sense strand
ggaagagccccaaguauuu

SEQ ID NO: 1260545 - RNA, 19 nt, Homo sapiens
  misc_RNA (1)...(19): siRNA sense strand
gaccacgaaucccaagcua

SEQ ID NO: 1260546 - RNA, 19 nt, Homo sapiens
  misc_RNA (1)...(19): siRNA sense strand
aauaggacguucuuuggaa

SEQ ID NO: 1260547 - RNA, 19 nt, Homo sapiens
  misc_RNA (1)...(19): siRNA sense strand
ucauaagccuggagagaug

SEQ ID NO: 1260548 - RNA, 19 nt, Homo sapiens
  misc_RNA (1)...(19): siRNA sense strand
caaaguagcccagcucaca

SEQ ID NO: 1260549 - RNA, 19 nt, Homo sapiens
  misc_RNA (1)...(19): siRNA sense strand
guccagaccaaacucauua

SEQ ID NO: 1260550 - RNA, 19 nt, Homo sapiens
  misc_RNA (1)...(19): siRNA sense strand
ugaauacccuuaacaccau

SEQ ID NO: 1260551 - RNA, 19 nt, Homo sapiens
  misc_RNA (1)...(19): siRNA sense strand
ccaaccacaugaucaacaa

SEQ ID NO: 1260552 - RNA, 19 nt, Homo sapiens
  misc_RNA (1)...(19): siRNA sense strand
ucauuucccuacuuacgua

SEQ ID NO: 1260553 - RNA, 19 nt, Homo sapiens
  misc_RNA (1)...(19): siRNA sense strand
agacuucccuaaucauuuc

SEQ ID NO: 1260554 - RNA, 19 nt, Homo sapiens
  misc_RNA (1)...(19): siRNA sense strand
cuggagagaugccuuaugu

SEQ ID NO: 1260555 - RNA, 19 nt, Homo sapiens
  misc_RNA (1)...(19): siRNA sense strand
aaugcucaauuucguguua

SEQ ID NO: 1260556 - RNA, 19 nt, Homo sapiens
  misc_RNA (1)...(19): siRNA sense strand
uuuaagaucuccuaugagu

SEQ ID NO: 1260557 - RNA, 19 nt, Homo sapiens
  misc_RNA (1)...(19): siRNA sense strand
guuuaucacugcaacaaau

SEQ ID NO: 1260558 - RNA, 19 nt, Homo sapiens
  misc_RNA (1)...(19): siRNA sense strand
ugagguagauguccauuuu

SEQ ID NO: 1260559 - RNA, 19 nt, Homo sapiens
  misc_RNA (1)...(19): siRNA sense strand
gugaagcgaccugguguua

SEQ ID NO: 1260560 - RNA, 19 nt, Homo sapiens
  misc_RNA (1)...(19): siRNA sense strand
guaguacuguuugcucuau

SEQ ID NO: 1260561 - RNA, 19 nt, Homo sapiens
  misc_RNA (1)...(19): siRNA sense strand
ccgcugaccuccucaaugg

SEQ ID NO: 1260562 - RNA, 19 nt, Homo sapiens
  misc_RNA (1)...(19): siRNA sense strand
gaaugggcguuugaaagug

SEQ ID NO: 1260563 - RNA, 19 nt, Homo sapiens
  misc_RNA (1)...(19): siRNA sense strand
gcucacaaauuucccuaag

SEQ ID NO: 1260564 - RNA, 19 nt, Homo sapiens
  misc_RNA (1)...(19): siRNA sense strand
ggauugugcugaacguaca

SEQ ID NO: 1260565 - RNA, 19 nt, Homo sapiens
  misc_RNA (1)...(19): siRNA sense strand
acucuguaguugaagauua

SEQ ID NO: 1260566 - RNA, 19 nt, Homo sapiens
  misc_RNA (1)...(19): siRNA sense strand
gaagagaaacuggcugagu

SEQ ID NO: 1260567 - RNA, 19 nt, Homo sapiens
  misc_RNA (1)...(19): siRNA sense strand
ccacucacccgcaggcuuu

SEQ ID NO: 1260568 - RNA, 19 nt, Homo sapiens
  misc_RNA (1)...(19): siRNA sense strand
ggaacgugaagaauaugua

SEQ ID NO: 1260569 - RNA, 19 nt, Homo sapiens
  misc_RNA (1)...(19): siRNA sense strand
ggacaaaauugaacacaag

SEQ ID NO: 1260570 - RNA, 19 nt, Homo sapiens
  misc_RNA (1)...(19): siRNA sense strand
acaccgaccuguucaugga

SEQ ID NO: 1260571 - RNA, 19 nt, Homo sapiens
  misc_RNA (1)...(19): siRNA sense strand
caccagaagagaaauguuu

SEQ ID NO: 1260572 - RNA, 19 nt, Homo sapiens
  misc_RNA (1)...(19): siRNA sense strand
gcucuaugcugcaauacag

SEQ ID NO: 1260573 - RNA, 19 nt, Homo sapiens
  misc_RNA (1)...(19): siRNA sense strand
gcagaaugccaaucaugug

SEQ ID NO: 1260574 - RNA, 19 nt, Homo sapiens
  misc_RNA (1)...(19): siRNA sense strand
uaugaaacaccacguagaa

SEQ ID NO: 1260575 - RNA, 19 nt, Homo sapiens
  misc_RNA (1)...(19): siRNA sense strand
ccuaaucauuucccuacuu

SEQ ID NO: 1260576 - RNA, 19 nt, Homo sapiens
  misc_RNA (1)...(19): siRNA sense strand
gccguuggcuucgacguuu

SEQ ID NO: 1260577 - RNA, 19 nt, Homo sapiens
  misc_RNA (1)...(19): siRNA sense strand
acgauguaaugcucaauuu

SEQ ID NO: 1260578 - RNA, 19 nt, Homo sapiens
  misc_RNA (1)...(19): siRNA sense strand
ccacagcuggcaauccuuu

SEQ ID NO: 1260579 - RNA, 19 nt, Homo sapiens
  misc_RNA (1)...(19): siRNA sense strand
ucaccagccucaacugcaa

SEQ ID NO: 1260580 - RNA, 19 nt, Homo sapiens
  misc_RNA (1)...(19): siRNA sense strand
guuccuguauccucuaaug

SEQ ID NO: 1260581 - RNA, 19 nt, Homo sapiens
  misc_RNA (1)...(19): siRNA sense strand
ugaaugggcguuugaaagu

SEQ ID NO: 1260582 - RNA, 19 nt, Homo sapiens
  misc_RNA (1)...(19): siRNA sense strand
ugagguagauggucacacu

SEQ ID NO: 1260583 - RNA, 19 nt, Homo sapiens
  misc_RNA (1)...(19): siRNA sense strand
ccaggaugguggacggaaa

SEQ ID NO: 1260584 - RNA, 19 nt, Homo sapiens
  misc_RNA (1)...(19): siRNA sense strand
ccagaaggccaccaaaaua

SEQ ID NO: 1260585 - RNA, 19 nt, Homo sapiens
  misc_RNA (1)...(19): siRNA sense strand
cagcugaacacuuccgaaa

SEQ ID NO: 1260586 - RNA, 19 nt, Homo sapiens
  misc_RNA (1)...(19): siRNA sense strand
ggagccgaaugucugaaug

SEQ ID NO: 1260587 - RNA, 19 nt, Homo sapiens
  misc_RNA (1)...(19): siRNA sense strand
caaagcugccacugugaaa

SEQ ID NO: 1260588 - RNA, 19 nt, Homo sapiens
  misc_RNA (1)...(19): siRNA sense strand
cauaaaaccuuccguaaac

SEQ ID NO: 1260589 - RNA, 19 nt, Homo sapiens
  misc_RNA (1)...(19): siRNA sense strand
agagaugccuuauguuugc

SEQ ID NO: 1260590 - RNA, 19 nt, Homo sapiens
  misc_RNA (1)...(19): siRNA sense strand
caaacucauuaugcuugua

SEQ ID NO: 1260591 - RNA, 19 nt, Homo sapiens
  misc_RNA (1)...(19): siRNA sense strand
ucaauuucguguuacugaa

SEQ ID NO: 1260592 - RNA, 19 nt, Homo sapiens
  misc_RNA (1)...(19): siRNA sense strand
cagcggaccugagucuuca

SEQ ID NO: 1260593 - RNA, 19 nt, Homo sapiens
  misc_RNA (1)...(19): siRNA sense strand
ggacaccgaccuguucaug

SEQ ID NO: 1260594 - RNA, 19 nt, Homo sapiens
  misc_RNA (1)...(19): siRNA sense strand
uuugagaggucacaugugu

SEQ ID NO: 1260595 - RNA, 19 nt, Homo sapiens
  misc_RNA (1)...(19): siRNA sense strand
ccucacaaccaauauuuau

SEQ ID NO: 1260596 - RNA, 19 nt, Homo sapiens
  misc_RNA (1)...(19): siRNA sense strand
ccaaacucauuaugcuugu

SEQ ID NO: 1260597 - RNA, 19 nt, Homo sapiens
  misc_RNA (1)...(19): siRNA sense strand
cuagagggcaaauaucuga

SEQ ID NO: 1260598 - RNA, 19 nt, Homo sapiens
  misc_RNA (1)...(19): siRNA sense strand
gaacgugaagaauauguac

SEQ ID NO: 1260599 - RNA, 19 nt, Homo sapiens
  misc_RNA (1)...(19): siRNA sense strand
guaccuuuguuaccucugu

SEQ ID NO: 1260600 - RNA, 19 nt, Homo sapiens
  misc_RNA (1)...(19): siRNA sense strand
cagaaugccaaucauguga

SEQ ID NO: 1260601 - RNA, 19 nt, Homo sapiens
  misc_RNA (1)...(19): siRNA sense strand
gaagagagcuguuaggaaa

SEQ ID NO: 1260602 - RNA, 19 nt, Homo sapiens
  misc_RNA (1)...(19): siRNA sense strand
gcaaugaaguggccaaauu

SEQ ID NO: 1260603 - RNA, 19 nt, Homo sapiens
  misc_RNA (1)...(19): siRNA sense strand
gaaagucccuggauucaga

SEQ ID NO: 1260604 - RNA, 19 nt, Homo sapiens
  misc_RNA (1)...(19): siRNA sense strand
gcucauggcucucaaagaa

SEQ ID NO: 1260605 - RNA, 19 nt, Homo sapiens
  misc_RNA (1)...(19): siRNA sense strand
gcccagaaaugguugaaua

SEQ ID NO: 1260606 - RNA, 19 nt, Homo sapiens
  misc_RNA (1)...(19): siRNA sense strand
gcaacuagcuguucagucu

SEQ ID NO: 1260607 - RNA, 19 nt, Homo sapiens
  misc_RNA (1)...(19): siRNA sense strand
ggagagaugccuuauguuu

SEQ ID NO: 1260608 - RNA, 19 nt, Homo sapiens
  misc_RNA (1)...(19): siRNA sense strand
ggaccugagucuucaauga

SEQ ID NO: 1260609 - RNA, 19 nt, Homo sapiens
  misc_RNA (1)...(19): siRNA sense strand
gguuuaagaucuccuauga

SEQ ID NO: 1260610 - RNA, 19 nt, Homo sapiens
  misc_RNA (1)...(19): siRNA sense strand
uagcccagcucacaaauuu

SEQ ID NO: 1260611 - RNA, 19 nt, Homo sapiens
  misc_RNA (1)...(19): siRNA sense strand
gaagcgaccugguguuaca

SEQ ID NO: 1260612 - RNA, 19 nt, Homo sapiens
  misc_RNA (1)...(19): siRNA sense strand
gaaaauauguccacgaugu

SEQ ID NO: 1260613 - RNA, 19 nt, Homo sapiens
  misc_RNA (1)...(19): siRNA sense strand
cuaaucauuucccuacuua

SEQ ID NO: 1260614 - RNA, 19 nt, Homo sapiens
  misc_RNA (1)...(19): siRNA sense strand
gaagagaaauguuuaucac

SEQ ID NO: 1260615 - RNA, 19 nt, Homo sapiens
  misc_RNA (1)...(19): siRNA sense strand
gggcaaauaucugagcuuu

SEQ ID NO: 1260616 - RNA, 19 nt, Homo sapiens
  misc_RNA (1)...(19): siRNA sense strand
ccagguacccaguuuguua

SEQ ID NO: 1260617 - RNA, 19 nt, Homo sapiens
  misc_RNA (1)...(19): siRNA sense strand
caaguguucucccagauga

SEQ ID NO: 1260618 - RNA, 19 nt, Homo sapiens
  misc_RNA (1)...(19): siRNA sense strand
gcugaacacuuccgaaauc

SEQ ID NO: 1260619 - RNA, 19 nt, Homo sapiens
  misc_RNA (1)...(19): siRNA sense strand
caauaucgcuccucacucu

SEQ ID NO: 1260620 - RNA, 19 nt, Homo sapiens
  misc_RNA (1)...(19): siRNA sense strand
gaccggaacgugaagaaua

SEQ ID NO: 1260621 - RNA, 19 nt, Homo sapiens
  misc_RNA (1)...(19): siRNA sense strand
caucugcucugcccuuauu

SEQ ID NO: 1260622 - RNA, 19 nt, Homo sapiens
  misc_RNA (1)...(19): siRNA sense strand
ccgaaugucugaauguuga

SEQ ID NO: 1260623 - RNA, 19 nt, Homo sapiens
  misc_RNA (1)...(19): siRNA sense strand
ggucugggcacaaugguua

SEQ ID NO: 1260624 - RNA, 19 nt, Homo sapiens
  misc_RNA (1)...(19): siRNA sense strand
cagcaaggccaaacgguua

SEQ ID NO: 1260625 - RNA, 19 nt, Homo sapiens
  misc_RNA (1)...(19): siRNA sense strand
ccaaucaugugacuaguuc

SEQ ID NO: 1260626 - RNA, 19 nt, Homo sapiens
  misc_RNA (1)...(19): siRNA sense strand
gcuccucacucuacucuga

SEQ ID NO: 1260627 - RNA, 19 nt, Homo sapiens
  misc_RNA (1)...(19): siRNA sense strand
gcagaacggugagguagau

SEQ ID NO: 1260628 - RNA, 19 nt, Homo sapiens
  misc_RNA (1)...(19): siRNA sense strand
caaaguaccagaaccaaau

SEQ ID NO: 1260629 - RNA, 19 nt, Homo sapiens
  misc_RNA (1)...(19): siRNA sense strand
ugagaggucacauguguua

SEQ ID NO: 1260630 - RNA, 19 nt, Homo sapiens
  misc_RNA (1)...(19): siRNA sense strand
caaugaaagugaccucuuc

SEQ ID NO: 1260631 - RNA, 19 nt, Homo sapiens
  misc_RNA (1)...(19): siRNA sense strand
gaaucuagagggcaaauau

SEQ ID NO: 1260632 - RNA, 19 nt, Homo sapiens
  misc_RNA (1)...(19): siRNA sense strand
ggucacauguguuacuguu

SEQ ID NO: 1260633 - RNA, 19 nt, Homo sapiens
  misc_RNA (1)...(19): siRNA sense strand
aaaggaaagucccuggauu

SEQ ID NO: 1260634 - RNA, 19 nt, Homo sapiens
  misc_RNA (1)...(19): siRNA sense strand
ugaggacucuguaguugaa

SEQ ID NO: 1260635 - RNA, 19 nt, Homo sapiens
  misc_RNA (1)...(19): siRNA sense strand
ucacaaauuucccuaaggu

SEQ ID NO: 1260636 - RNA, 19 nt, Homo sapiens
  misc_RNA (1)...(19): siRNA sense strand
ccaaacgguuagaccaauu

SEQ ID NO: 1260637 - RNA, 19 nt, Homo sapiens
  misc_RNA (1)...(19): siRNA sense strand
uaaaugaggagaccuuguu

SEQ ID NO: 1260638 - RNA, 19 nt, Homo sapiens
  misc_RNA (1)...(19): siRNA sense strand
gagcagcugucugugaaga

SEQ ID NO: 1260639 - RNA, 19 nt, Homo sapiens
  misc_RNA (1)...(19): siRNA sense strand
gagagaugccuuauguuug

SEQ ID NO: 1260640 - RNA, 19 nt, Homo sapiens
  misc_RNA (1)...(19): siRNA sense strand
caaacgguuagaccaauua

SEQ ID NO: 1260641 - RNA, 19 nt, Homo sapiens
  misc_RNA (1)...(19): siRNA sense strand
gaaaggaaagucccuggau

SEQ ID NO: 1260642 - RNA, 19 nt, Homo sapiens
  misc_RNA (1)...(19): siRNA sense strand
acaggcagcugaacacuuc

SEQ ID NO: 1260643 - RNA, 19 nt, Homo sapiens
  misc_RNA (1)...(19): siRNA sense strand
ccaagaaccugagcuagca

SEQ ID NO: 1260644 - RNA, 19 nt, Homo sapiens
  misc_RNA (1)...(19): siRNA sense strand
ggaagagccccaaguauuu

SEQ ID NO: 1260645 - RNA, 19 nt, Homo sapiens
  misc_RNA (1)...(19): siRNA sense strand
gaccacgaaucccaagcua

SEQ ID NO: 1260646 - RNA, 19 nt, Homo sapiens
  misc_RNA (1)...(19): siRNA sense strand
aauaggacguucuuuggaa

SEQ ID NO: 1260647 - RNA, 19 nt, Homo sapiens
  misc_RNA (1)...(19): siRNA sense strand
ucauaagccuggagagaug

SEQ ID NO: 1260648 - RNA, 19 nt, Homo sapiens
  misc_RNA (1)...(19): siRNA sense strand
caaaguagcccagcucaca

SEQ ID NO: 1260649 - RNA, 19 nt, Homo sapiens
  misc_RNA (1)...(19): siRNA sense strand
guccagaccaaacucauua

SEQ ID NO: 1260650 - RNA, 19 nt, Homo sapiens
  misc_RNA (1)...(19): siRNA sense strand
ugaauacccuuaacaccau

SEQ ID NO: 1260651 - RNA, 19 nt, Homo sapiens
  misc_RNA (1)...(19): siRNA sense strand
ccaaccacaugaucaacaa

SEQ ID NO: 1260652 - RNA, 19 nt, Homo sapiens
  misc_RNA (1)...(19): siRNA sense strand
ucauuucccuacuuacgua

SEQ ID NO: 1260653 - RNA, 19 nt, Homo sapiens
  misc_RNA (1)...(19): siRNA sense strand
agacuucccuaaucauuuc

SEQ ID NO: 1260654 - RNA, 19 nt, Homo sapiens
  misc_RNA (1)...(19): siRNA sense strand
cuggagagaugccuuaugu

SEQ ID NO: 1260655 - RNA, 19 nt, Homo sapiens
  misc_RNA (1)...(19): siRNA sense strand
aaugcucaauuucguguua

SEQ ID NO: 1260656 - RNA, 19 nt, Homo sapiens
  misc_RNA (1)...(19): siRNA sense strand
uuuaagaucuccuaugagu

SEQ ID NO: 1260657 - RNA, 19 nt, Homo sapiens
  misc_RNA (1)...(19): siRNA sense strand
guuuaucacugcaacaaau

SEQ ID NO: 1260658 - RNA, 19 nt, Homo sapiens
  misc_RNA (1)...(19): siRNA sense strand
ugagguagauguccauuuu

SEQ ID NO: 1260659 - RNA, 19 nt, Homo sapiens
  misc_RNA (1)...(19): siRNA sense strand
gugaagcgaccugguguua

SEQ ID NO: 1260660 - RNA, 19 nt, Homo sapiens
  misc_RNA (1)...(19): siRNA sense strand
guaguacuguuugcucuau

SEQ ID NO: 1260661 - RNA, 19 nt, Homo sapiens
  misc_RNA (1)...(19): siRNA sense strand
ccgcugaccuccucaaugg

SEQ ID NO: 1260662 - RNA, 19 nt, Homo sapiens
  misc_RNA (1)...(19): siRNA sense strand
gaaugggcguuugaaagug

SEQ ID NO: 1260663 - RNA, 19 nt, Homo sapiens
  misc_RNA (1)...(19): siRNA sense strand
gcucacaaauuucccuaag

SEQ ID NO: 1260664 - RNA, 19 nt, Homo sapiens
  misc_RNA (1)...(19): siRNA sense strand
ggauugugcugaacguaca

SEQ ID NO: 1260665 - RNA, 19 nt, Homo sapiens
  misc_RNA (1)...(19): siRNA sense strand
acucuguaguugaagauua

SEQ ID NO: 1260666 - RNA, 19 nt, Homo sapiens
  misc_RNA (1)...(19): siRNA sense strand
gaagagaaacuggcugagu

SEQ ID NO: 1260667 - RNA, 19 nt, Homo sapiens
  misc_RNA (1)...(19): siRNA sense strand
ccacucacccgcaggcuuu

SEQ ID NO: 1260668 - RNA, 19 nt, Homo sapiens
  misc_RNA (1)...(19): siRNA sense strand
ggaacgugaagaauaugua

SEQ ID NO: 1260669 - RNA, 19 nt, Homo sapiens
  misc_RNA (1)...(19): siRNA sense strand
ggacaaaauugaacacaag

SEQ ID NO: 1260670 - RNA, 19 nt, Homo sapiens
  misc_RNA (1)...(19): siRNA sense strand
acaccgaccuguucaugga

SEQ ID NO: 1260671 - RNA, 19 nt, Homo sapiens
  misc_RNA (1)...(19): siRNA sense strand
caccagaagagaaauguuu

SEQ ID NO: 1260672 - RNA, 19 nt, Homo sapiens
  misc_RNA (1)...(19): siRNA sense strand
gcucuaugcugcaauacag

SEQ ID NO: 1260673 - RNA, 19 nt, Homo sapiens
  misc_RNA (1)...(19): siRNA sense strand
gcagaaugccaaucaugug

SEQ ID NO: 1260674 - RNA, 19 nt, Homo sapiens
  misc_RNA (1)...(19): siRNA sense strand
uaugaaacaccacguagaa

SEQ ID NO: 1260675 - RNA, 19 nt, Homo sapiens
  misc_RNA (1)...(19): siRNA sense strand
ccuaaucauuucccuacuu

SEQ ID NO: 1260676 - RNA, 19 nt, Homo sapiens
  misc_RNA (1)...(19): siRNA sense strand
gccguuggcuucgacguuu

SEQ ID NO: 1260677 - RNA, 19 nt, Homo sapiens
  misc_RNA (1)...(19): siRNA sense strand
acgauguaaugcucaauuu

SEQ ID NO: 1260678 - RNA, 19 nt, Homo sapiens
  misc_RNA (1)...(19): siRNA sense strand
ccacagcuggcaauccuuu

SEQ ID NO: 1260679 - RNA, 19 nt, Homo sapiens
  misc_RNA (1)...(19): siRNA sense strand
ucaccagccucaacugcaa

SEQ ID NO: 1260680 - RNA, 19 nt, Homo sapiens
  misc_RNA (1)...(19): siRNA sense strand
guuccuguauccucuaaug

SEQ ID NO: 1260681 - RNA, 19 nt, Homo sapiens
  misc_RNA (1)...(19): siRNA sense strand
ugaaugggcguuugaaagu

SEQ ID NO: 1260682 - RNA, 19 nt, Homo sapiens
  misc_RNA (1)...(19): siRNA sense strand
ugagguagauggucacacu

SEQ ID NO: 1260683 - RNA, 19 nt, Homo sapiens
  misc_RNA (1)...(19): siRNA sense strand
ccaggaugguggacggaaa

SEQ ID NO: 1260684 - RNA, 19 nt, Homo sapiens
  misc_RNA (1)...(19): siRNA sense strand
ccagaaggccaccaaaaua

SEQ ID NO: 1260685 - RNA, 19 nt, Homo sapiens
  misc_RNA (1)...(19): siRNA sense strand
cagcugaacacuuccgaaa

SEQ ID NO: 1260686 - RNA, 19 nt, Homo sapiens
  misc_RNA (1)...(19): siRNA sense strand
ggagccgaaugucugaaug

SEQ ID NO: 1260687 - RNA, 19 nt, Homo sapiens
  misc_RNA (1)...(19): siRNA sense strand
caaagcugccacugugaaa

SEQ ID NO: 1260688 - RNA, 19 nt, Homo sapiens
  misc_RNA (1)...(19): siRNA sense strand
cauaaaaccuuccguaaac

SEQ ID NO: 1260689 - RNA, 19 nt, Homo sapiens
  misc_RNA (1)...(19): siRNA sense strand
agagaugccuuauguuugc

SEQ ID NO: 1260690 - RNA, 19 nt, Homo sapiens
  misc_RNA (1)...(19): siRNA sense strand
caaacucauuaugcuugua

SEQ ID NO: 1260691 - RNA, 19 nt, Homo sapiens
  misc_RNA (1)...(19): siRNA sense strand
ucaauuucguguuacugaa

SEQ ID NO: 1260692 - RNA, 19 nt, Homo sapiens
  misc_RNA (1)...(19): siRNA sense strand
cagcggaccugagucuuca

SEQ ID NO: 1260693 - RNA, 19 nt, Homo sapiens
  misc_RNA (1)...(19): siRNA sense strand
ggacaccgaccuguucaug

SEQ ID NO: 1260694 - RNA, 19 nt, Homo sapiens
  misc_RNA (1)...(19): siRNA sense strand
uuugagaggucacaugugu

SEQ ID NO: 1260695 - RNA, 19 nt, Homo sapiens
  misc_RNA (1)...(19): siRNA sense strand
ccucacaaccaauauuuau

SEQ ID NO: 1260696 - RNA, 19 nt, Homo sapiens
  misc_RNA (1)...(19): siRNA sense strand
ccaaacucauuaugcuugu

SEQ ID NO: 1260697 - RNA, 19 nt, Homo sapiens
  misc_RNA (1)...(19): siRNA sense strand
cuagagggcaaauaucuga

SEQ ID NO: 1260698 - RNA, 19 nt, Homo sapiens
  misc_RNA (1)...(19): siRNA sense strand
gaacgugaagaauauguac

SEQ ID NO: 1260699 - RNA, 19 nt, Homo sapiens
  misc_RNA (1)...(19): siRNA sense strand
guaccuuuguuaccucugu

SEQ ID NO: 1260700 - RNA, 19 nt, Homo sapiens
  misc_RNA (1)...(19): siRNA sense strand
cagaaugccaaucauguga

SEQ ID NO: 1260701 - RNA, 19 nt, Homo sapiens
  misc_RNA (1)...(19): siRNA sense strand
gcaagaagcucuguacaug

SEQ ID NO: 1260702 - RNA, 19 nt, Homo sapiens
  misc_RNA (1)...(19): siRNA sense strand
gcauugaccuugacacuga

SEQ ID NO: 1260703 - RNA, 19 nt, Homo sapiens
  misc_RNA (1)...(19): siRNA sense strand
gcucagaguugucaagaau

SEQ ID NO: 1260704 - RNA, 19 nt, Homo sapiens
  misc_RNA (1)...(19): siRNA sense strand
gauaugaaguggaagaaca

SEQ ID NO: 1260705 - RNA, 19 nt, Homo sapiens
  misc_RNA (1)...(19): siRNA sense strand
ggcaagauaugaaguggaa

SEQ ID NO: 1260706 - RNA, 19 nt, Homo sapiens
  misc_RNA (1)...(19): siRNA sense strand
gcaacaacaucggcaaaga

SEQ ID NO: 1260707 - RNA, 19 nt, Homo sapiens
  misc_RNA (1)...(19): siRNA sense strand
gaucaaaucccaggaccua

SEQ ID NO: 1260708 - RNA, 19 nt, Homo sapiens
  misc_RNA (1)...(19): siRNA sense strand
aagaagcucuguacaugaa

SEQ ID NO: 1260709 - RNA, 19 nt, Homo sapiens
  misc_RNA (1)...(19): siRNA sense strand
gcgaggagcuggaguacag

SEQ ID NO: 1260710 - RNA, 19 nt, Homo sapiens
  misc_RNA (1)...(19): siRNA sense strand
gggaggugcucauccgaaa

SEQ ID NO: 1260711 - RNA, 19 nt, Homo sapiens
  misc_RNA (1)...(19): siRNA sense strand
gaccgaggcuuccgcuuca

SEQ ID NO: 1260712 - RNA, 19 nt, Homo sapiens
  misc_RNA (1)...(19): siRNA sense strand
ggucauguccaucaacaaa

SEQ ID NO: 1260713 - RNA, 19 nt, Homo sapiens
  misc_RNA (1)...(19): siRNA sense strand
cugaagggcuggcacaaga

SEQ ID NO: 1260714 - RNA, 19 nt, Homo sapiens
  misc_RNA (1)...(19): siRNA sense strand
gcaacaacccggcaagaca

SEQ ID NO: 1260715 - RNA, 19 nt, Homo sapiens
  misc_RNA (1)...(19): siRNA sense strand
gcaccagggcucagaguug

SEQ ID NO: 1260716 - RNA, 19 nt, Homo sapiens
  misc_RNA (1)...(19): siRNA sense strand
caagaagcucuguacauga

SEQ ID NO: 1260717 - RNA, 19 nt, Homo sapiens
  misc_RNA (1)...(19): siRNA sense strand
acaccaggcucgcuucuuc

SEQ ID NO: 1260718 - RNA, 19 nt, Homo sapiens
  misc_RNA (1)...(19): siRNA sense strand
gcaaagucauggaggaaaa

SEQ ID NO: 1260719 - RNA, 19 nt, Homo sapiens
  misc_RNA (1)...(19): siRNA sense strand
ggaacauucugcgcaacaa

SEQ ID NO: 1260720 - RNA, 19 nt, Homo sapiens
  misc_RNA (1)...(19): siRNA sense strand
ggacgggauccuucauuau

SEQ ID NO: 1260721 - RNA, 19 nt, Homo sapiens
  misc_RNA (1)...(19): siRNA sense strand
gacgggauccuucauuaug

SEQ ID NO: 1260722 - RNA, 19 nt, Homo sapiens
  misc_RNA (1)...(19): siRNA sense strand
caacaucuaccaccucaag

SEQ ID NO: 1260723 - RNA, 19 nt, Homo sapiens
  misc_RNA (1)...(19): siRNA sense strand
caagauaugaaguggaaga

SEQ ID NO: 1260724 - RNA, 19 nt, Homo sapiens
  misc_RNA (1)...(19): siRNA sense strand
ucaaaucccaggaccuauu

SEQ ID NO: 1260725 - RNA, 19 nt, Homo sapiens
  misc_RNA (1)...(19): siRNA sense strand
ugaaguggaagaacaaguu

SEQ ID NO: 1260726 - RNA, 19 nt, Homo sapiens
  misc_RNA (1)...(19): siRNA sense strand
gauagcagcgggaaagagu

SEQ ID NO: 1260727 - RNA, 19 nt, Homo sapiens
  misc_RNA (1)...(19): siRNA sense strand
gacgugagccuguggaaca

SEQ ID NO: 1260728 - RNA, 19 nt, Homo sapiens
  misc_RNA (1)...(19): siRNA sense strand
gaagggcuggcacaagaga

SEQ ID NO: 1260729 - RNA, 19 nt, Homo sapiens
  misc_RNA (1)...(19): siRNA sense strand
cgagacaggcgcaaaguca

SEQ ID NO: 1260730 - RNA, 19 nt, Homo sapiens
  misc_RNA (1)...(19): siRNA sense strand
caaggugacauccugcauu

SEQ ID NO: 1260731 - RNA, 19 nt, Homo sapiens
  misc_RNA (1)...(19): siRNA sense strand
ugccaaggaugacaccauu

SEQ ID NO: 1260732 - RNA, 19 nt, Homo sapiens
  misc_RNA (1)...(19): siRNA sense strand
ucagaguugucaagaaugg

SEQ ID NO: 1260733 - RNA, 19 nt, Homo sapiens
  misc_RNA (1)...(19): siRNA sense strand
gauccuucauuaugcaaca

SEQ ID NO: 1260734 - RNA, 19 nt, Homo sapiens
  misc_RNA (1)...(19): siRNA sense strand
caacaacccggcaagacau

SEQ ID NO: 1260735 - RNA, 19 nt, Homo sapiens
  misc_RNA (1)...(19): siRNA sense strand
aaggugacauccugcauuc

SEQ ID NO: 1260736 - RNA, 19 nt, Homo sapiens
  misc_RNA (1)...(19): siRNA sense strand
acacugaagacaacaucua

SEQ ID NO: 1260737 - RNA, 19 nt, Homo sapiens
  misc_RNA (1)...(19): siRNA sense strand
gcaagaucaccuucugcaa

SEQ ID NO: 1260738 - RNA, 19 nt, Homo sapiens
  misc_RNA (1)...(19): siRNA sense strand
ggaguccuguaccagugaa

SEQ ID NO: 1260739 - RNA, 19 nt, Homo sapiens
  misc_RNA (1)...(19): siRNA sense strand
caccagggcucagaguugu

SEQ ID NO: 1260740 - RNA, 19 nt, Homo sapiens
  misc_RNA (1)...(19): siRNA sense strand
ccagagcuuugccaaggau

SEQ ID NO: 1260741 - RNA, 19 nt, Homo sapiens
  misc_RNA (1)...(19): siRNA sense strand
caaccgaaagacccaagaa

SEQ ID NO: 1260742 - RNA, 19 nt, Homo sapiens
  misc_RNA (1)...(19): siRNA sense strand
caaaucccaggaccuauuc

SEQ ID NO: 1260743 - RNA, 19 nt, Homo sapiens
  misc_RNA (1)...(19): siRNA sense strand
guacaucgcagccuuugcu

SEQ ID NO: 1260744 - RNA, 19 nt, Homo sapiens
  misc_RNA (1)...(19): siRNA sense strand
gaggugcucauccgaaaca

SEQ ID NO: 1260745 - RNA, 19 nt, Homo sapiens
  misc_RNA (1)...(19): siRNA sense strand
gagggugucaugccugaga

SEQ ID NO: 1260746 - RNA, 19 nt, Homo sapiens
  misc_RNA (1)...(19): siRNA sense strand
acaccacggcggacucuuu

SEQ ID NO: 1260747 - RNA, 19 nt, Homo sapiens
  misc_RNA (1)...(19): siRNA sense strand
gcugaggcccagaagagaa

SEQ ID NO: 1260748 - RNA, 19 nt, Homo sapiens
  misc_RNA (1)...(19): siRNA sense strand
ucacccaguuugccuugga

SEQ ID NO: 1260749 - RNA, 19 nt, Homo sapiens
  misc_RNA (1)...(19): siRNA sense strand
ggucaccugcucaagaaga

SEQ ID NO: 1260750 - RNA, 19 nt, Homo sapiens
  misc_RNA (1)...(19): siRNA sense strand
gcgcaacaacaucggcaaa

SEQ ID NO: 1260751 - RNA, 19 nt, Homo sapiens
  misc_RNA (1)...(19): siRNA sense strand
caccaggccucagugacaa

SEQ ID NO: 1260752 - RNA, 19 nt, Homo sapiens
  misc_RNA (1)...(19): siRNA sense strand
gauugugccugugggaaca

SEQ ID NO: 1260753 - RNA, 19 nt, Homo sapiens
  misc_RNA (1)...(19): siRNA sense strand
gugagccuguggaacauuc

SEQ ID NO: 1260754 - RNA, 19 nt, Homo sapiens
  misc_RNA (1)...(19): siRNA sense strand
ucuaccaccucaagaucaa

SEQ ID NO: 1260755 - RNA, 19 nt, Homo sapiens
  misc_RNA (1)...(19): siRNA sense strand
ggaggaaaacaacaucgua

SEQ ID NO: 1260756 - RNA, 19 nt, Homo sapiens
  misc_RNA (1)...(19): siRNA sense strand
ccacacaccaggccucagu

SEQ ID NO: 1260757 - RNA, 19 nt, Homo sapiens
  misc_RNA (1)...(19): siRNA sense strand
cuggaccgcugcucucaug

SEQ ID NO: 1260758 - RNA, 19 nt, Homo sapiens
  misc_RNA (1)...(19): siRNA sense strand
aaacggacaagccgcaugu

SEQ ID NO: 1260759 - RNA, 19 nt, Homo sapiens
  misc_RNA (1)...(19): siRNA sense strand
caacaacaucggcaaagac

SEQ ID NO: 1260760 - RNA, 19 nt, Homo sapiens
  misc_RNA (1)...(19): siRNA sense strand
cagccugucugaggagaug

SEQ ID NO: 1260761 - RNA, 19 nt, Homo sapiens
  misc_RNA (1)...(19): siRNA sense strand
uggagucccugcaccgaau

SEQ ID NO: 1260762 - RNA, 19 nt, Homo sapiens
  misc_RNA (1)...(19): siRNA sense strand
gcgcaaagucauggaggaa

SEQ ID NO: 1260763 - RNA, 19 nt, Homo sapiens
  misc_RNA (1)...(19): siRNA sense strand
gcgagcgcaugguguacau

SEQ ID NO: 1260764 - RNA, 19 nt, Homo sapiens
  misc_RNA (1)...(19): siRNA sense strand
ucuggaaacccaacucaau

SEQ ID NO: 1260765 - RNA, 19 nt, Homo sapiens
  misc_RNA (1)...(19): siRNA sense strand
ccacacggaguucuucgau

SEQ ID NO: 1260766 - RNA, 19 nt, Homo sapiens
  misc_RNA (1)...(19): siRNA sense strand
gccaggcuaugggaacaug

SEQ ID NO: 1260767 - RNA, 19 nt, Homo sapiens
  misc_RNA (1)...(19): siRNA sense strand
gagcagcugcagcgagaca

SEQ ID NO: 1260768 - RNA, 19 nt, Homo sapiens
  misc_RNA (1)...(19): siRNA sense strand
ggcucagaguugucaagaa

SEQ ID NO: 1260769 - RNA, 19 nt, Homo sapiens
  misc_RNA (1)...(19): siRNA sense strand
gaacauucugcgcaacaac

SEQ ID NO: 1260770 - RNA, 19 nt, Homo sapiens
  misc_RNA (1)...(19): siRNA sense strand
gguguacaucgcagccuuu

SEQ ID NO: 1260771 - RNA, 19 nt, Homo sapiens
  misc_RNA (1)...(19): siRNA sense strand
gcagcgagacaggcgcaaa

SEQ ID NO: 1260772 - RNA, 19 nt, Homo sapiens
  misc_RNA (1)...(19): siRNA sense strand
cggccuacuccuccacaua

SEQ ID NO: 1260773 - RNA, 19 nt, Homo sapiens
  misc_RNA (1)...(19): siRNA sense strand
acaccaggccucagugaca

SEQ ID NO: 1260774 - RNA, 19 nt, Homo sapiens
  misc_RNA (1)...(19): siRNA sense strand
caccgacucuuugggaagu

SEQ ID NO: 1260775 - RNA, 19 nt, Homo sapiens
  misc_RNA (1)...(19): siRNA sense strand
caaugccugugcagcucaa

SEQ ID NO: 1260776 - RNA, 19 nt, Homo sapiens
  misc_RNA (1)...(19): siRNA sense strand
gcaagaagcucuguacaug

SEQ ID NO: 1260777 - RNA, 19 nt, Homo sapiens
  misc_RNA (1)...(19): siRNA sense strand
gcauugaccuugacacuga

SEQ ID NO: 1260778 - RNA, 19 nt, Homo sapiens
  misc_RNA (1)...(19): siRNA sense strand
gcucagaguugucaagaau

SEQ ID NO: 1260779 - RNA, 19 nt, Homo sapiens
  misc_RNA (1)...(19): siRNA sense strand
gauaugaaguggaagaaca

SEQ ID NO: 1260780 - RNA, 19 nt, Homo sapiens
  misc_RNA (1)...(19): siRNA sense strand
ggcaagauaugaaguggaa

SEQ ID NO: 1260781 - RNA, 19 nt, Homo sapiens
  misc_RNA (1)...(19): siRNA sense strand
gcaacaacaucggcaaaga

SEQ ID NO: 1260782 - RNA, 19 nt, Homo sapiens
  misc_RNA (1)...(19): siRNA sense strand
gaucaaaucccaggaccua

SEQ ID NO: 1260783 - RNA, 19 nt, Homo sapiens
  misc_RNA (1)...(19): siRNA sense strand
aagaagcucuguacaugaa

SEQ ID NO: 1260784 - RNA, 19 nt, Homo sapiens
  misc_RNA (1)...(19): siRNA sense strand
gcgaggagcuggaguacag

SEQ ID NO: 1260785 - RNA, 19 nt, Homo sapiens
  misc_RNA (1)...(19): siRNA sense strand
gggaggugcucauccgaaa

SEQ ID NO: 1260786 - RNA, 19 nt, Homo sapiens
  misc_RNA (1)...(19): siRNA sense strand
gaccgaggcuuccgcuuca

SEQ ID NO: 1260787 - RNA, 19 nt, Homo sapiens
  misc_RNA (1)...(19): siRNA sense strand
ggucauguccaucaacaaa

SEQ ID NO: 1260788 - RNA, 19 nt, Homo sapiens
  misc_RNA (1)...(19): siRNA sense strand
cugaagggcuggcacaaga

SEQ ID NO: 1260789 - RNA, 19 nt, Homo sapiens
  misc_RNA (1)...(19): siRNA sense strand
gcaacaacccggcaagaca

SEQ ID NO: 1260790 - RNA, 19 nt, Homo sapiens
  misc_RNA (1)...(19): siRNA sense strand
gcaccagggcucagaguug

SEQ ID NO: 1260791 - RNA, 19 nt, Homo sapiens
  misc_RNA (1)...(19): siRNA sense strand
caagaagcucuguacauga

SEQ ID NO: 1260792 - RNA, 19 nt, Homo sapiens
  misc_RNA (1)...(19): siRNA sense strand
acaccaggcucgcuucuuc

SEQ ID NO: 1260793 - RNA, 19 nt, Homo sapiens
  misc_RNA (1)...(19): siRNA sense strand
gcaaagucauggaggaaaa

SEQ ID NO: 1260794 - RNA, 19 nt, Homo sapiens
  misc_RNA (1)...(19): siRNA sense strand
ggaacauucugcgcaacaa

SEQ ID NO: 1260795 - RNA, 19 nt, Homo sapiens
  misc_RNA (1)...(19): siRNA sense strand
ggacgggauccuucauuau

SEQ ID NO: 1260796 - RNA, 19 nt, Homo sapiens
  misc_RNA (1)...(19): siRNA sense strand
gacgggauccuucauuaug

SEQ ID NO: 1260797 - RNA, 19 nt, Homo sapiens
  misc_RNA (1)...(19): siRNA sense strand
caacaucuaccaccucaag

SEQ ID NO: 1260798 - RNA, 19 nt, Homo sapiens
  misc_RNA (1)...(19): siRNA sense strand
caagauaugaaguggaaga

SEQ ID NO: 1260799 - RNA, 19 nt, Homo sapiens
  misc_RNA (1)...(19): siRNA sense strand
ucaaaucccaggaccuauu

SEQ ID NO: 1260800 - RNA, 19 nt, Homo sapiens
  misc_RNA (1)...(19): siRNA sense strand
ugaaguggaagaacaaguu

SEQ ID NO: 1260801 - RNA, 19 nt, Homo sapiens
  misc_RNA (1)...(19): siRNA sense strand
gauagcagcgggaaagagu

SEQ ID NO: 1260802 - RNA, 19 nt, Homo sapiens
  misc_RNA (1)...(19): siRNA sense strand
gacgugagccuguggaaca

SEQ ID NO: 1260803 - RNA, 19 nt, Homo sapiens
  misc_RNA (1)...(19): siRNA sense strand
gaagggcuggcacaagaga

SEQ ID NO: 1260804 - RNA, 19 nt, Homo sapiens
  misc_RNA (1)...(19): siRNA sense strand
cgagacaggcgcaaaguca

SEQ ID NO: 1260805 - RNA, 19 nt, Homo sapiens
  misc_RNA (1)...(19): siRNA sense strand
caaggugacauccugcauu

SEQ ID NO: 1260806 - RNA, 19 nt, Homo sapiens
  misc_RNA (1)...(19): siRNA sense strand
ugccaaggaugacaccauu

SEQ ID NO: 1260807 - RNA, 19 nt, Homo sapiens
  misc_RNA (1)...(19): siRNA sense strand
ucagaguugucaagaaugg

SEQ ID NO: 1260808 - RNA, 19 nt, Homo sapiens
  misc_RNA (1)...(19): siRNA sense strand
gauccuucauuaugcaaca

SEQ ID NO: 1260809 - RNA, 19 nt, Homo sapiens
  misc_RNA (1)...(19): siRNA sense strand
caacaacccggcaagacau

SEQ ID NO: 1260810 - RNA, 19 nt, Homo sapiens
  misc_RNA (1)...(19): siRNA sense strand
aaggugacauccugcauuc

SEQ ID NO: 1260811 - RNA, 19 nt, Homo sapiens
  misc_RNA (1)...(19): siRNA sense strand
acacugaagacaacaucua

SEQ ID NO: 1260812 - RNA, 19 nt, Homo sapiens
  misc_RNA (1)...(19): siRNA sense strand
gcaagaucaccuucugcaa

SEQ ID NO: 1260813 - RNA, 19 nt, Homo sapiens
  misc_RNA (1)...(19): siRNA sense strand
ggaguccuguaccagugaa

SEQ ID NO: 1260814 - RNA, 19 nt, Homo sapiens
  misc_RNA (1)...(19): siRNA sense strand
caccagggcucagaguugu

SEQ ID NO: 1260815 - RNA, 19 nt, Homo sapiens
  misc_RNA (1)...(19): siRNA sense strand
ccagagcuuugccaaggau

SEQ ID NO: 1260816 - RNA, 19 nt, Homo sapiens
  misc_RNA (1)...(19): siRNA sense strand
caaccgaaagacccaagaa

SEQ ID NO: 1260817 - RNA, 19 nt, Homo sapiens
  misc_RNA (1)...(19): siRNA sense strand
caaaucccaggaccuauuc

SEQ ID NO: 1260818 - RNA, 19 nt, Homo sapiens
  misc_RNA (1)...(19): siRNA sense strand
guacaucgcagccuuugcu

SEQ ID NO: 1260819 - RNA, 19 nt, Homo sapiens
  misc_RNA (1)...(19): siRNA sense strand
gaggugcucauccgaaaca

SEQ ID NO: 1260820 - RNA, 19 nt, Homo sapiens
  misc_RNA (1)...(19): siRNA sense strand
gagggugucaugccugaga

SEQ ID NO: 1260821 - RNA, 19 nt, Homo sapiens
  misc_RNA (1)...(19): siRNA sense strand
acaccacggcggacucuuu

SEQ ID NO: 1260822 - RNA, 19 nt, Homo sapiens
  misc_RNA (1)...(19): siRNA sense strand
gcugaggcccagaagagaa

SEQ ID NO: 1260823 - RNA, 19 nt, Homo sapiens
  misc_RNA (1)...(19): siRNA sense strand
ucacccaguuugccuugga

SEQ ID NO: 1260824 - RNA, 19 nt, Homo sapiens
  misc_RNA (1)...(19): siRNA sense strand
ggucaccugcucaagaaga

SEQ ID NO: 1260825 - RNA, 19 nt, Homo sapiens
  misc_RNA (1)...(19): siRNA sense strand
gcgcaacaacaucggcaaa

SEQ ID NO: 1260826 - RNA, 19 nt, Homo sapiens
  misc_RNA (1)...(19): siRNA sense strand
caccaggccucagugacaa

SEQ ID NO: 1260827 - RNA, 19 nt, Homo sapiens
  misc_RNA (1)...(19): siRNA sense strand
gauugugccugugggaaca

SEQ ID NO: 1260828 - RNA, 19 nt, Homo sapiens
  misc_RNA (1)...(19): siRNA sense strand
gugagccuguggaacauuc

SEQ ID NO: 1260829 - RNA, 19 nt, Homo sapiens
  misc_RNA (1)...(19): siRNA sense strand
ucuaccaccucaagaucaa

SEQ ID NO: 1260830 - RNA, 19 nt, Homo sapiens
  misc_RNA (1)...(19): siRNA sense strand
ggaggaaaacaacaucgua

SEQ ID NO: 1260831 - RNA, 19 nt, Homo sapiens
  misc_RNA (1)...(19): siRNA sense strand
ccacacaccaggccucagu

SEQ ID NO: 1260832 - RNA, 19 nt, Homo sapiens
  misc_RNA (1)...(19): siRNA sense strand
cuggaccgcugcucucaug

SEQ ID NO: 1260833 - RNA, 19 nt, Homo sapiens
  misc_RNA (1)...(19): siRNA sense strand
aaacggacaagccgcaugu

SEQ ID NO: 1260834 - RNA, 19 nt, Homo sapiens
  misc_RNA (1)...(19): siRNA sense strand
caacaacaucggcaaagac

SEQ ID NO: 1260835 - RNA, 19 nt, Homo sapiens
  misc_RNA (1)...(19): siRNA sense strand
cagccugucugaggagaug

SEQ ID NO: 1260836 - RNA, 19 nt, Homo sapiens
  misc_RNA (1)...(19): siRNA sense strand
uggagucccugcaccgaau

SEQ ID NO: 1260837 - RNA, 19 nt, Homo sapiens
  misc_RNA (1)...(19): siRNA sense strand
gcgcaaagucauggaggaa

SEQ ID NO: 1260838 - RNA, 19 nt, Homo sapiens
  misc_RNA (1)...(19): siRNA sense strand
gcgagcgcaugguguacau

SEQ ID NO: 1260839 - RNA, 19 nt, Homo sapiens
  misc_RNA (1)...(19): siRNA sense strand
ucuggaaacccaacucaau

SEQ ID NO: 1260840 - RNA, 19 nt, Homo sapiens
  misc_RNA (1)...(19): siRNA sense strand
ccacacggaguucuucgau

SEQ ID NO: 1260841 - RNA, 19 nt, Homo sapiens
  misc_RNA (1)...(19): siRNA sense strand
gccaggcuaugggaacaug

SEQ ID NO: 1260842 - RNA, 19 nt, Homo sapiens
  misc_RNA (1)...(19): siRNA sense strand
gagcagcugcagcgagaca

SEQ ID NO: 1260843 - RNA, 19 nt, Homo sapiens
  misc_RNA (1)...(19): siRNA sense strand
ggcucagaguugucaagaa

SEQ ID NO: 1260844 - RNA, 19 nt, Homo sapiens
  misc_RNA (1)...(19): siRNA sense strand
gaacauucugcgcaacaac

SEQ ID NO: 1260845 - RNA, 19 nt, Homo sapiens
  misc_RNA (1)...(19): siRNA sense strand
gguguacaucgcagccuuu

SEQ ID NO: 1260846 - RNA, 19 nt, Homo sapiens
  misc_RNA (1)...(19): siRNA sense strand
gcagcgagacaggcgcaaa

SEQ ID NO: 1260847 - RNA, 19 nt, Homo sapiens
  misc_RNA (1)...(19): siRNA sense strand
cggccuacuccuccacaua

SEQ ID NO: 1260848 - RNA, 19 nt, Homo sapiens
  misc_RNA (1)...(19): siRNA sense strand
acaccaggccucagugaca

SEQ ID NO: 1260849 - RNA, 19 nt, Homo sapiens
  misc_RNA (1)...(19): siRNA sense strand
caccgacucuuugggaagu

SEQ ID NO: 1260850 - RNA, 19 nt, Homo sapiens
  misc_RNA (1)...(19): siRNA sense strand
caaugccugugcagcucaa

SEQ ID NO: 1260851 - RNA, 19 nt, Homo sapiens
  misc_RNA (1)...(19): siRNA sense strand
ggagaaaccuguugugauu

SEQ ID NO: 1260852 - RNA, 19 nt, Homo sapiens
  misc_RNA (1)...(19): siRNA sense strand
ggacaaaguugcugaaauc

SEQ ID NO: 1260853 - RNA, 19 nt, Homo sapiens
  misc_RNA (1)...(19): siRNA sense strand
gaacagaugccuaaucauu

SEQ ID NO: 1260854 - RNA, 19 nt, Homo sapiens
  misc_RNA (1)...(19): siRNA sense strand
ggagacagguuucuuguga

SEQ ID NO: 1260855 - RNA, 19 nt, Homo sapiens
  misc_RNA (1)...(19): siRNA sense strand
gagaacagaugccuaauca

SEQ ID NO: 1260856 - RNA, 19 nt, Homo sapiens
  misc_RNA (1)...(19): siRNA sense strand
guucauaguuugagcguua

SEQ ID NO: 1260857 - RNA, 19 nt, Homo sapiens
  misc_RNA (1)...(19): siRNA sense strand
caaaguugcugaaaucgaa

SEQ ID NO: 1260858 - RNA, 19 nt, Homo sapiens
  misc_RNA (1)...(19): siRNA sense strand
cauuaaggaugacacauua

SEQ ID NO: 1260859 - RNA, 19 nt, Homo sapiens
  misc_RNA (1)...(19): siRNA sense strand
gauaugauguagaguuuga

SEQ ID NO: 1260860 - RNA, 19 nt, Homo sapiens
  misc_RNA (1)...(19): siRNA sense strand
caacugugcugcaucaaug

SEQ ID NO: 1260861 - RNA, 19 nt, Homo sapiens
  misc_RNA (1)...(19): siRNA sense strand
gcagugcaauggaauuuau

SEQ ID NO: 1260862 - RNA, 19 nt, Homo sapiens
  misc_RNA (1)...(19): siRNA sense strand
gggauaugauguagaguuu

SEQ ID NO: 1260863 - RNA, 19 nt, Homo sapiens
  misc_RNA (1)...(19): siRNA sense strand
ggugaaauguccaaaugaa

SEQ ID NO: 1260864 - RNA, 19 nt, Homo sapiens
  misc_RNA (1)...(19): siRNA sense strand
ggucacaaauguccaguug

SEQ ID NO: 1260865 - RNA, 19 nt, Homo sapiens
  misc_RNA (1)...(19): siRNA sense strand
aaccagagcugcuugcuuu

SEQ ID NO: 1260866 - RNA, 19 nt, Homo sapiens
  misc_RNA (1)...(19): siRNA sense strand
gaccagaacuguccuuugg

SEQ ID NO: 1260867 - RNA, 19 nt, Homo sapiens
  misc_RNA (1)...(19): siRNA sense strand
gauaauggaugccaaacca

SEQ ID NO: 1260868 - RNA, 19 nt, Homo sapiens
  misc_RNA (1)...(19): siRNA sense strand
ggaugcaggucacaaaugu

SEQ ID NO: 1260869 - RNA, 19 nt, Homo sapiens
  misc_RNA (1)...(19): siRNA sense strand
gaaccucuccagcucauuu

SEQ ID NO: 1260870 - RNA, 19 nt, Homo sapiens
  misc_RNA (1)...(19): siRNA sense strand
caaaugucaucugugaaua

SEQ ID NO: 1260871 - RNA, 19 nt, Homo sapiens
  misc_RNA (1)...(19): siRNA sense strand
gcaaaugucaucugugaau

SEQ ID NO: 1260872 - RNA, 19 nt, Homo sapiens
  misc_RNA (1)...(19): siRNA sense strand
ucucagagguccggaauuu

SEQ ID NO: 1260873 - RNA, 19 nt, Homo sapiens
  misc_RNA (1)...(19): siRNA sense strand
ugagacaucuugaggauca

SEQ ID NO: 1260874 - RNA, 19 nt, Homo sapiens
  misc_RNA (1)...(19): siRNA sense strand
uggcaaaugucaucuguga

SEQ ID NO: 1260875 - RNA, 19 nt, Homo sapiens
  misc_RNA (1)...(19): siRNA sense strand
guuagagggucgccuugua

SEQ ID NO: 1260876 - RNA, 19 nt, Homo sapiens
  misc_RNA (1)...(19): siRNA sense strand
ggccauagguucugcaaag

SEQ ID NO: 1260877 - RNA, 19 nt, Homo sapiens
  misc_RNA (1)...(19): siRNA sense strand
ccaauuccaugcacauuca

SEQ ID NO: 1260878 - RNA, 19 nt, Homo sapiens
  misc_RNA (1)...(19): siRNA sense strand
ugacaacugugcugcauca

SEQ ID NO: 1260879 - RNA, 19 nt, Homo sapiens
  misc_RNA (1)...(19): siRNA sense strand
acaauacgccuuacaauuc

SEQ ID NO: 1260880 - RNA, 19 nt, Homo sapiens
  misc_RNA (1)...(19): siRNA sense strand
gcgcuugcaccuucaguua

SEQ ID NO: 1260881 - RNA, 19 nt, Homo sapiens
  misc_RNA (1)...(19): siRNA sense strand
ucagagaacagaugccuaa

SEQ ID NO: 1260882 - RNA, 19 nt, Homo sapiens
  misc_RNA (1)...(19): siRNA sense strand
gcaaagccugcaucauaaa

SEQ ID NO: 1260883 - RNA, 19 nt, Homo sapiens
  misc_RNA (1)...(19): siRNA sense strand
gaucuagacugcccuacag

SEQ ID NO: 1260884 - RNA, 19 nt, Homo sapiens
  misc_RNA (1)...(19): siRNA sense strand
guauguaagugagcucaaa

SEQ ID NO: 1260885 - RNA, 19 nt, Homo sapiens
  misc_RNA (1)...(19): siRNA sense strand
gcaaaaccacgaagagaua

SEQ ID NO: 1260886 - RNA, 19 nt, Homo sapiens
  misc_RNA (1)...(19): siRNA sense strand
ugugaauacugcaauacua

SEQ ID NO: 1260887 - RNA, 19 nt, Homo sapiens
  misc_RNA (1)...(19): siRNA sense strand
ccagggauaugauguagag

SEQ ID NO: 1260888 - RNA, 19 nt, Homo sapiens
  misc_RNA (1)...(19): siRNA sense strand
caauacgccuuacaauucu

SEQ ID NO: 1260889 - RNA, 19 nt, Homo sapiens
  misc_RNA (1)...(19): siRNA sense strand
gcucagcgcugugcaaacu

SEQ ID NO: 1260890 - RNA, 19 nt, Homo sapiens
  misc_RNA (1)...(19): siRNA sense strand
gaagaggagaaaccuguug

SEQ ID NO: 1260891 - RNA, 19 nt, Homo sapiens
  misc_RNA (1)...(19): siRNA sense strand
gcacgccaccuacaagaga

SEQ ID NO: 1260892 - RNA, 19 nt, Homo sapiens
  misc_RNA (1)...(19): siRNA sense strand
gaacacccagucacacaug

SEQ ID NO: 1260893 - RNA, 19 nt, Homo sapiens
  misc_RNA (1)...(19): siRNA sense strand
ucacaaauguccaguugac

SEQ ID NO: 1260894 - RNA, 19 nt, Homo sapiens
  misc_RNA (1)...(19): siRNA sense strand
gaggagaaaccuguuguga

SEQ ID NO: 1260895 - RNA, 19 nt, Homo sapiens
  misc_RNA (1)...(19): siRNA sense strand
ggaaagcaaguaugaaugc

SEQ ID NO: 1260896 - RNA, 19 nt, Homo sapiens
  misc_RNA (1)...(19): siRNA sense strand
agaaaccuguugugauuca

SEQ ID NO: 1260897 - RNA, 19 nt, Homo sapiens
  misc_RNA (1)...(19): siRNA sense strand
guaagugagcucaaacgaa

SEQ ID NO: 1260898 - RNA, 19 nt, Homo sapiens
  misc_RNA (1)...(19): siRNA sense strand
uccgggagcugacugcuaa

SEQ ID NO: 1260899 - RNA, 19 nt, Homo sapiens
  misc_RNA (1)...(19): siRNA sense strand
ugaguuugcucuuauggau

SEQ ID NO: 1260900 - RNA, 19 nt, Homo sapiens
  misc_RNA (1)...(19): siRNA sense strand
ucaacuauuuccagacaau

SEQ ID NO: 1260901 - RNA, 19 nt, Homo sapiens
  misc_RNA (1)...(19): siRNA sense strand
caaacgccaugcggccaua

SEQ ID NO: 1260902 - RNA, 19 nt, Homo sapiens
  misc_RNA (1)...(19): siRNA sense strand
gcacaagauggaacugaga

SEQ ID NO: 1260903 - RNA, 19 nt, Homo sapiens
  misc_RNA (1)...(19): siRNA sense strand
gaagauuggcaacuuugga

SEQ ID NO: 1260904 - RNA, 19 nt, Homo sapiens
  misc_RNA (1)...(19): siRNA sense strand
cauugugaguuugcucuua

SEQ ID NO: 1260905 - RNA, 19 nt, Homo sapiens
  misc_RNA (1)...(19): siRNA sense strand
gcaauacuauacucaucag

SEQ ID NO: 1260906 - RNA, 19 nt, Homo sapiens
  misc_RNA (1)...(19): siRNA sense strand
uacaauacgccuuacaauu

SEQ ID NO: 1260907 - RNA, 19 nt, Homo sapiens
  misc_RNA (1)...(19): siRNA sense strand
gcucauuuauggaggagau

SEQ ID NO: 1260908 - RNA, 19 nt, Homo sapiens
  misc_RNA (1)...(19): siRNA sense strand
ggaugacacauuauuagug

SEQ ID NO: 1260909 - RNA, 19 nt, Homo sapiens
  misc_RNA (1)...(19): siRNA sense strand
guacaauacgccuuacaau

SEQ ID NO: 1260910 - RNA, 19 nt, Homo sapiens
  misc_RNA (1)...(19): siRNA sense strand
gcgcugugcaaacuauaua

SEQ ID NO: 1260911 - RNA, 19 nt, Homo sapiens
  misc_RNA (1)...(19): siRNA sense strand
gagcucaaacgaaccauuc

SEQ ID NO: 1260912 - RNA, 19 nt, Homo sapiens
  misc_RNA (1)...(19): siRNA sense strand
aaucaacuauuuccagaca

SEQ ID NO: 1260913 - RNA, 19 nt, Homo sapiens
  misc_RNA (1)...(19): siRNA sense strand
auacuauacucaucagaga

SEQ ID NO: 1260914 - RNA, 19 nt, Homo sapiens
  misc_RNA (1)...(19): siRNA sense strand
gaaaacagcuguggaucca

SEQ ID NO: 1260915 - RNA, 19 nt, Homo sapiens
  misc_RNA (1)...(19): siRNA sense strand
cccaggcuguucauaguuu

SEQ ID NO: 1260916 - RNA, 19 nt, Homo sapiens
  misc_RNA (1)...(19): siRNA sense strand
ccaugcacauucaguacuu

SEQ ID NO: 1260917 - RNA, 19 nt, Homo sapiens
  misc_RNA (1)...(19): siRNA sense strand
ucauagcccuggauucuac

SEQ ID NO: 1260918 - RNA, 19 nt, Homo sapiens
  misc_RNA (1)...(19): siRNA sense strand
ggagcugacugcuaaaaug

SEQ ID NO: 1260919 - RNA, 19 nt, Homo sapiens
  misc_RNA (1)...(19): siRNA sense strand
gagaacacccagucacaca

SEQ ID NO: 1260920 - RNA, 19 nt, Homo sapiens
  misc_RNA (1)...(19): siRNA sense strand
cagaguauguauguaagug

SEQ ID NO: 1260921 - RNA, 19 nt, Homo sapiens
  misc_RNA (1)...(19): siRNA sense strand
caggguacaauacgccuua

SEQ ID NO: 1260922 - RNA, 19 nt, Homo sapiens
  misc_RNA (1)...(19): siRNA sense strand
ggauccagccagucugaaa

SEQ ID NO: 1260923 - RNA, 19 nt, Homo sapiens
  misc_RNA (1)...(19): siRNA sense strand
agacagguuucuugugaca

SEQ ID NO: 1260924 - RNA, 19 nt, Homo sapiens
  misc_RNA (1)...(19): siRNA sense strand
gguacaauacgccuuacaa

SEQ ID NO: 1260925 - RNA, 19 nt, Homo sapiens
  misc_RNA (1)...(19): siRNA sense strand
gaaauguccaaaugaaggu

SEQ ID NO: 1260926 - RNA, 19 nt, Homo sapiens
  misc_RNA (1)...(19): siRNA sense strand
gcaaacuauauaucccuuu

SEQ ID NO: 1260927 - RNA, 19 nt, Homo sapiens
  misc_RNA (1)...(19): siRNA sense strand
guaagacaagaccaucaaa

SEQ ID NO: 1260928 - RNA, 19 nt, Homo sapiens
  misc_RNA (1)...(19): siRNA sense strand
ggcccaggcuguucauagu

SEQ ID NO: 1260929 - RNA, 19 nt, Homo sapiens
  misc_RNA (1)...(19): siRNA sense strand
gugaauacugcaauacuau

SEQ ID NO: 1260930 - RNA, 19 nt, Homo sapiens
  misc_RNA (1)...(19): siRNA sense strand
gcccuaagacaaagaacuu

SEQ ID NO: 1260931 - RNA, 19 nt, Homo sapiens
  misc_RNA (1)...(19): siRNA sense strand
aaugaaauacugcuggaaa

SEQ ID NO: 1260932 - RNA, 19 nt, Homo sapiens
  misc_RNA (1)...(19): siRNA sense strand
ucagcgcugugcaaacuau

SEQ ID NO: 1260933 - RNA, 19 nt, Homo sapiens
  misc_RNA (1)...(19): siRNA sense strand
uaagacaagaccaucaaau

SEQ ID NO: 1260934 - RNA, 19 nt, Homo sapiens
  misc_RNA (1)...(19): siRNA sense strand
gaaaagaugcagaggaauc

SEQ ID NO: 1260935 - RNA, 19 nt, Homo sapiens
  misc_RNA (1)...(19): siRNA sense strand
gaauacugcaauacuauac

SEQ ID NO: 1260936 - RNA, 19 nt, Homo sapiens
  misc_RNA (1)...(19): siRNA sense strand
uuagagggucgccuuguaa

SEQ ID NO: 1260937 - RNA, 19 nt, Homo sapiens
  misc_RNA (1)...(19): siRNA sense strand
gaagcccuaagacaaagaa

SEQ ID NO: 1260938 - RNA, 19 nt, Homo sapiens
  misc_RNA (1)...(19): siRNA sense strand
aagauaaagagauccauga

SEQ ID NO: 1260939 - RNA, 19 nt, Homo sapiens
  misc_RNA (1)...(19): siRNA sense strand
gggaaccucuccagcucau

SEQ ID NO: 1260940 - RNA, 19 nt, Homo sapiens
  misc_RNA (1)...(19): siRNA sense strand
cagcagugcaauggaauuu

SEQ ID NO: 1260941 - RNA, 19 nt, Homo sapiens
  misc_RNA (1)...(19): siRNA sense strand
gaaccauucgaacccuuga

SEQ ID NO: 1260942 - RNA, 19 nt, Homo sapiens
  misc_RNA (1)...(19): siRNA sense strand
gcaaaacgugagauucuuu

SEQ ID NO: 1260943 - RNA, 19 nt, Homo sapiens
  misc_RNA (1)...(19): siRNA sense strand
ccacgaagagauaauggau

SEQ ID NO: 1260944 - RNA, 19 nt, Homo sapiens
  misc_RNA (1)...(19): siRNA sense strand
cacaaugcaaggagaauau

SEQ ID NO: 1260945 - RNA, 19 nt, Homo sapiens
  misc_RNA (1)...(19): siRNA sense strand
uggcaaacccggguacaaa

SEQ ID NO: 1260946 - RNA, 19 nt, Homo sapiens
  misc_RNA (1)...(19): siRNA sense strand
aaaccuguugugauucaua

SEQ ID NO: 1260947 - RNA, 19 nt, Homo sapiens
  misc_RNA (1)...(19): siRNA sense strand
gcaacuuuggaaugcauuu

SEQ ID NO: 1260948 - RNA, 19 nt, Homo sapiens
  misc_RNA (1)...(19): siRNA sense strand
gaugauaguguggguggaa

SEQ ID NO: 1260949 - RNA, 19 nt, Homo sapiens
  misc_RNA (1)...(19): siRNA sense strand
aguuugcucuuauggauug

SEQ ID NO: 1260950 - RNA, 19 nt, Homo sapiens
  misc_RNA (1)...(19): siRNA sense strand
gccuuacaauucuugauca

SEQ ID NO: 1260951 - RNA, 19 nt, Homo sapiens
  misc_RNA (1)...(19): siRNA sense strand
ggagaaaccuguugugauu

SEQ ID NO: 1260952 - RNA, 19 nt, Homo sapiens
  misc_RNA (1)...(19): siRNA sense strand
ggacaaaguugcugaaauc

SEQ ID NO: 1260953 - RNA, 19 nt, Homo sapiens
  misc_RNA (1)...(19): siRNA sense strand
gaacagaugccuaaucauu

SEQ ID NO: 1260954 - RNA, 19 nt, Homo sapiens
  misc_RNA (1)...(19): siRNA sense strand
ggagacagguuucuuguga

SEQ ID NO: 1260955 - RNA, 19 nt, Homo sapiens
  misc_RNA (1)...(19): siRNA sense strand
gagaacagaugccuaauca

SEQ ID NO: 1260956 - RNA, 19 nt, Homo sapiens
  misc_RNA (1)...(19): siRNA sense strand
guucauaguuugagcguua

SEQ ID NO: 1260957 - RNA, 19 nt, Homo sapiens
  misc_RNA (1)...(19): siRNA sense strand
caaaguugcugaaaucgaa

SEQ ID NO: 1260958 - RNA, 19 nt, Homo sapiens
  misc_RNA (1)...(19): siRNA sense strand
cauuaaggaugacacauua

SEQ ID NO: 1260959 - RNA, 19 nt, Homo sapiens
  misc_RNA (1)...(19): siRNA sense strand
gauaugauguagaguuuga

SEQ ID NO: 1260960 - RNA, 19 nt, Homo sapiens
  misc_RNA (1)...(19): siRNA sense strand
caacugugcugcaucaaug

SEQ ID NO: 1260961 - RNA, 19 nt, Homo sapiens
  misc_RNA (1)...(19): siRNA sense strand
gcagugcaauggaauuuau

SEQ ID NO: 1260962 - RNA, 19 nt, Homo sapiens
  misc_RNA (1)...(19): siRNA sense strand
gggauaugauguagaguuu

SEQ ID NO: 1260963 - RNA, 19 nt, Homo sapiens
  misc_RNA (1)...(19): siRNA sense strand
ggugaaauguccaaaugaa

SEQ ID NO: 1260964 - RNA, 19 nt, Homo sapiens
  misc_RNA (1)...(19): siRNA sense strand
ggucacaaauguccaguug

SEQ ID NO: 1260965 - RNA, 19 nt, Homo sapiens
  misc_RNA (1)...(19): siRNA sense strand
aaccagagcugcuugcuuu

SEQ ID NO: 1260966 - RNA, 19 nt, Homo sapiens
  misc_RNA (1)...(19): siRNA sense strand
gaccagaacuguccuuugg

SEQ ID NO: 1260967 - RNA, 19 nt, Homo sapiens
  misc_RNA (1)...(19): siRNA sense strand
gauaauggaugccaaacca

SEQ ID NO: 1260968 - RNA, 19 nt, Homo sapiens
  misc_RNA (1)...(19): siRNA sense strand
ggaugcaggucacaaaugu

SEQ ID NO: 1260969 - RNA, 19 nt, Homo sapiens
  misc_RNA (1)...(19): siRNA sense strand
gaaccucuccagcucauuu

SEQ ID NO: 1260970 - RNA, 19 nt, Homo sapiens
  misc_RNA (1)...(19): siRNA sense strand
caaaugucaucugugaaua

SEQ ID NO: 1260971 - RNA, 19 nt, Homo sapiens
  misc_RNA (1)...(19): siRNA sense strand
gcaaaugucaucugugaau

SEQ ID NO: 1260972 - RNA, 19 nt, Homo sapiens
  misc_RNA (1)...(19): siRNA sense strand
ucucagagguccggaauuu

SEQ ID NO: 1260973 - RNA, 19 nt, Homo sapiens
  misc_RNA (1)...(19): siRNA sense strand
ugagacaucuugaggauca

SEQ ID NO: 1260974 - RNA, 19 nt, Homo sapiens
  misc_RNA (1)...(19): siRNA sense strand
uggcaaaugucaucuguga

SEQ ID NO: 1260975 - RNA, 19 nt, Homo sapiens
  misc_RNA (1)...(19): siRNA sense strand
guuagagggucgccuugua

SEQ ID NO: 1260976 - RNA, 19 nt, Homo sapiens
  misc_RNA (1)...(19): siRNA sense strand
ggccauagguucugcaaag

SEQ ID NO: 1260977 - RNA, 19 nt, Homo sapiens
  misc_RNA (1)...(19): siRNA sense strand
ccaauuccaugcacauuca

SEQ ID NO: 1260978 - RNA, 19 nt, Homo sapiens
  misc_RNA (1)...(19): siRNA sense strand
ugacaacugugcugcauca

SEQ ID NO: 1260979 - RNA, 19 nt, Homo sapiens
  misc_RNA (1)...(19): siRNA sense strand
acaauacgccuuacaauuc

SEQ ID NO: 1260980 - RNA, 19 nt, Homo sapiens
  misc_RNA (1)...(19): siRNA sense strand
gcgcuugcaccuucaguua

SEQ ID NO: 1260981 - RNA, 19 nt, Homo sapiens
  misc_RNA (1)...(19): siRNA sense strand
ucagagaacagaugccuaa

SEQ ID NO: 1260982 - RNA, 19 nt, Homo sapiens
  misc_RNA (1)...(19): siRNA sense strand
gcaaagccugcaucauaaa

SEQ ID NO: 1260983 - RNA, 19 nt, Homo sapiens
  misc_RNA (1)...(19): siRNA sense strand
gaucuagacugcccuacag

SEQ ID NO: 1260984 - RNA, 19 nt, Homo sapiens
  misc_RNA (1)...(19): siRNA sense strand
guauguaagugagcucaaa

SEQ ID NO: 1260985 - RNA, 19 nt, Homo sapiens
  misc_RNA (1)...(19): siRNA sense strand
gcaaaaccacgaagagaua

SEQ ID NO: 1260986 - RNA, 19 nt, Homo sapiens
  misc_RNA (1)...(19): siRNA sense strand
ugugaauacugcaauacua

SEQ ID NO: 1260987 - RNA, 19 nt, Homo sapiens
  misc_RNA (1)...(19): siRNA sense strand
ccagggauaugauguagag

SEQ ID NO: 1260988 - RNA, 19 nt, Homo sapiens
  misc_RNA (1)...(19): siRNA sense strand
caauacgccuuacaauucu

SEQ ID NO: 1260989 - RNA, 19 nt, Homo sapiens
  misc_RNA (1)...(19): siRNA sense strand
gcucagcgcugugcaaacu

SEQ ID NO: 1260990 - RNA, 19 nt, Homo sapiens
  misc_RNA (1)...(19): siRNA sense strand
gaagaggagaaaccuguug

SEQ ID NO: 1260991 - RNA, 19 nt, Homo sapiens
  misc_RNA (1)...(19): siRNA sense strand
gcacgccaccuacaagaga

SEQ ID NO: 1260992 - RNA, 19 nt, Homo sapiens
  misc_RNA (1)...(19): siRNA sense strand
gaacacccagucacacaug

SEQ ID NO: 1260993 - RNA, 19 nt, Homo sapiens
  misc_RNA (1)...(19): siRNA sense strand
ucacaaauguccaguugac

SEQ ID NO: 1260994 - RNA, 19 nt, Homo sapiens
  misc_RNA (1)...(19): siRNA sense strand
gaggagaaaccuguuguga

SEQ ID NO: 1260995 - RNA, 19 nt, Homo sapiens
  misc_RNA (1)...(19): siRNA sense strand
ggaaagcaaguaugaaugc

SEQ ID NO: 1260996 - RNA, 19 nt, Homo sapiens
  misc_RNA (1)...(19): siRNA sense strand
agaaaccuguugugauuca

SEQ ID NO: 1260997 - RNA, 19 nt, Homo sapiens
  misc_RNA (1)...(19): siRNA sense strand
guaagugagcucaaacgaa

SEQ ID NO: 1260998 - RNA, 19 nt, Homo sapiens
  misc_RNA (1)...(19): siRNA sense strand
uccgggagcugacugcuaa

SEQ ID NO: 1260999 - RNA, 19 nt, Homo sapiens
  misc_RNA (1)...(19): siRNA sense strand
ugaguuugcucuuauggau

SEQ ID NO: 1261000 - RNA, 19 nt, Homo sapiens
  misc_RNA (1)...(19): siRNA sense strand
ucaacuauuuccagacaau

SEQ ID NO: 1261001 - RNA, 19 nt, Homo sapiens
  misc_RNA (1)...(19): siRNA sense strand
caaacgccaugcggccaua

SEQ ID NO: 1261002 - RNA, 19 nt, Homo sapiens
  misc_RNA (1)...(19): siRNA sense strand
gcacaagauggaacugaga

SEQ ID NO: 1261003 - RNA, 19 nt, Homo sapiens
  misc_RNA (1)...(19): siRNA sense strand
gaagauuggcaacuuugga

SEQ ID NO: 1261004 - RNA, 19 nt, Homo sapiens
  misc_RNA (1)...(19): siRNA sense strand
cauugugaguuugcucuua

SEQ ID NO: 1261005 - RNA, 19 nt, Homo sapiens
  misc_RNA (1)...(19): siRNA sense strand
gcaauacuauacucaucag

SEQ ID NO: 1261006 - RNA, 19 nt, Homo sapiens
  misc_RNA (1)...(19): siRNA sense strand
uacaauacgccuuacaauu

SEQ ID NO: 1261007 - RNA, 19 nt, Homo sapiens
  misc_RNA (1)...(19): siRNA sense strand
gcucauuuauggaggagau

SEQ ID NO: 1261008 - RNA, 19 nt, Homo sapiens
  misc_RNA (1)...(19): siRNA sense strand
ggaugacacauuauuagug

SEQ ID NO: 1261009 - RNA, 19 nt, Homo sapiens
  misc_RNA (1)...(19): siRNA sense strand
guacaauacgccuuacaau

SEQ ID NO: 1261010 - RNA, 19 nt, Homo sapiens
  misc_RNA (1)...(19): siRNA sense strand
gcgcugugcaaacuauaua

SEQ ID NO: 1261011 - RNA, 19 nt, Homo sapiens
  misc_RNA (1)...(19): siRNA sense strand
gagcucaaacgaaccauuc

SEQ ID NO: 1261012 - RNA, 19 nt, Homo sapiens
  misc_RNA (1)...(19): siRNA sense strand
aaucaacuauuuccagaca

SEQ ID NO: 1261013 - RNA, 19 nt, Homo sapiens
  misc_RNA (1)...(19): siRNA sense strand
auacuauacucaucagaga

SEQ ID NO: 1261014 - RNA, 19 nt, Homo sapiens
  misc_RNA (1)...(19): siRNA sense strand
gaaaacagcuguggaucca

SEQ ID NO: 1261015 - RNA, 19 nt, Homo sapiens
  misc_RNA (1)...(19): siRNA sense strand
cccaggcuguucauaguuu

SEQ ID NO: 1261016 - RNA, 19 nt, Homo sapiens
  misc_RNA (1)...(19): siRNA sense strand
ccaugcacauucaguacuu

SEQ ID NO: 1261017 - RNA, 19 nt, Homo sapiens
  misc_RNA (1)...(19): siRNA sense strand
ucauagcccuggauucuac

SEQ ID NO: 1261018 - RNA, 19 nt, Homo sapiens
  misc_RNA (1)...(19): siRNA sense strand
ggagcugacugcuaaaaug

SEQ ID NO: 1261019 - RNA, 19 nt, Homo sapiens
  misc_RNA (1)...(19): siRNA sense strand
gagaacacccagucacaca

SEQ ID NO: 1261020 - RNA, 19 nt, Homo sapiens
  misc_RNA (1)...(19): siRNA sense strand
cagaguauguauguaagug

SEQ ID NO: 1261021 - RNA, 19 nt, Homo sapiens
  misc_RNA (1)...(19): siRNA sense strand
caggguacaauacgccuua

SEQ ID NO: 1261022 - RNA, 19 nt, Homo sapiens
  misc_RNA (1)...(19): siRNA sense strand
ggauccagccagucugaaa

SEQ ID NO: 1261023 - RNA, 19 nt, Homo sapiens
  misc_RNA (1)...(19): siRNA sense strand
agacagguuucuugugaca

SEQ ID NO: 1261024 - RNA, 19 nt, Homo sapiens
  misc_RNA (1)...(19): siRNA sense strand
gguacaauacgccuuacaa

SEQ ID NO: 1261025 - RNA, 19 nt, Homo sapiens
  misc_RNA (1)...(19): siRNA sense strand
gaaauguccaaaugaaggu

SEQ ID NO: 1261026 - RNA, 19 nt, Homo sapiens
  misc_RNA (1)...(19): siRNA sense strand
gcaaacuauauaucccuuu

SEQ ID NO: 1261027 - RNA, 19 nt, Homo sapiens
  misc_RNA (1)...(19): siRNA sense strand
guaagacaagaccaucaaa

SEQ ID NO: 1261028 - RNA, 19 nt, Homo sapiens
  misc_RNA (1)...(19): siRNA sense strand
ggcccaggcuguucauagu

SEQ ID NO: 1261029 - RNA, 19 nt, Homo sapiens
  misc_RNA (1)...(19): siRNA sense strand
gugaauacugcaauacuau

SEQ ID NO: 1261030 - RNA, 19 nt, Homo sapiens
  misc_RNA (1)...(19): siRNA sense strand
gcccuaagacaaagaacuu

SEQ ID NO: 1261031 - RNA, 19 nt, Homo sapiens
  misc_RNA (1)...(19): siRNA sense strand
aaugaaauacugcuggaaa

SEQ ID NO: 1261032 - RNA, 19 nt, Homo sapiens
  misc_RNA (1)...(19): siRNA sense strand
ucagcgcugugcaaacuau

SEQ ID NO: 1261033 - RNA, 19 nt, Homo sapiens
  misc_RNA (1)...(19): siRNA sense strand
uaagacaagaccaucaaau

SEQ ID NO: 1261034 - RNA, 19 nt, Homo sapiens
  misc_RNA (1)...(19): siRNA sense strand
gaaaagaugcagaggaauc

SEQ ID NO: 1261035 - RNA, 19 nt, Homo sapiens
  misc_RNA (1)...(19): siRNA sense strand
gaauacugcaauacuauac

SEQ ID NO: 1261036 - RNA, 19 nt, Homo sapiens
  misc_RNA (1)...(19): siRNA sense strand
uuagagggucgccuuguaa

SEQ ID NO: 1261037 - RNA, 19 nt, Homo sapiens
  misc_RNA (1)...(19): siRNA sense strand
gaagcccuaagacaaagaa

SEQ ID NO: 1261038 - RNA, 19 nt, Homo sapiens
  misc_RNA (1)...(19): siRNA sense strand
aagauaaagagauccauga

SEQ ID NO: 1261039 - RNA, 19 nt, Homo sapiens
  misc_RNA (1)...(19): siRNA sense strand
gggaaccucuccagcucau

SEQ ID NO: 1261040 - RNA, 19 nt, Homo sapiens
  misc_RNA (1)...(19): siRNA sense strand
cagcagugcaauggaauuu

SEQ ID NO: 1261041 - RNA, 19 nt, Homo sapiens
  misc_RNA (1)...(19): siRNA sense strand
gaaccauucgaacccuuga

SEQ ID NO: 1261042 - RNA, 19 nt, Homo sapiens
  misc_RNA (1)...(19): siRNA sense strand
gcaaaacgugagauucuuu

SEQ ID NO: 1261043 - RNA, 19 nt, Homo sapiens
  misc_RNA (1)...(19): siRNA sense strand
ccacgaagagauaauggau

SEQ ID NO: 1261044 - RNA, 19 nt, Homo sapiens
  misc_RNA (1)...(19): siRNA sense strand
cacaaugcaaggagaauau

SEQ ID NO: 1261045 - RNA, 19 nt, Homo sapiens
  misc_RNA (1)...(19): siRNA sense strand
uggcaaacccggguacaaa

SEQ ID NO: 1261046 - RNA, 19 nt, Homo sapiens
  misc_RNA (1)...(19): siRNA sense strand
aaaccuguugugauucaua

SEQ ID NO: 1261047 - RNA, 19 nt, Homo sapiens
  misc_RNA (1)...(19): siRNA sense strand
gcaacuuuggaaugcauuu

SEQ ID NO: 1261048 - RNA, 19 nt, Homo sapiens
  misc_RNA (1)...(19): siRNA sense strand
gaugauaguguggguggaa

SEQ ID NO: 1261049 - RNA, 19 nt, Homo sapiens
  misc_RNA (1)...(19): siRNA sense strand
aguuugcucuuauggauug

SEQ ID NO: 1261050 - RNA, 19 nt, Homo sapiens
  misc_RNA (1)...(19): siRNA sense strand
gccuuacaauucuugauca

SEQ ID NO: 1261051 - RNA, 19 nt, Homo sapiens
  misc_RNA (1)...(19): siRNA sense strand
ggacuuccaccguaaggua

SEQ ID NO: 1261052 - RNA, 19 nt, Homo sapiens
  misc_RNA (1)...(19): siRNA sense strand
ggucaucuguggcaacaag

SEQ ID NO: 1261053 - RNA, 19 nt, Homo sapiens
  misc_RNA (1)...(19): siRNA sense strand
acagugaccucaaguacau

SEQ ID NO: 1261054 - RNA, 19 nt, Homo sapiens
  misc_RNA (1)...(19): siRNA sense strand
caagugcaccauccaguga

SEQ ID NO: 1261055 - RNA, 19 nt, Homo sapiens
  misc_RNA (1)...(19): siRNA sense strand
caacagugaccucaaguac

SEQ ID NO: 1261056 - RNA, 19 nt, Homo sapiens
  misc_RNA (1)...(19): siRNA sense strand
gcaagaucuccgugcagua

SEQ ID NO: 1261057 - RNA, 19 nt, Homo sapiens
  misc_RNA (1)...(19): siRNA sense strand
ucgaggacuuccaccguaa

SEQ ID NO: 1261058 - RNA, 19 nt, Homo sapiens
  misc_RNA (1)...(19): siRNA sense strand
caacguggacgagauguuc

SEQ ID NO: 1261059 - RNA, 19 nt, Homo sapiens
  misc_RNA (1)...(19): siRNA sense strand
gucaaguccugccugaaga

SEQ ID NO: 1261060 - RNA, 19 nt, Homo sapiens
  misc_RNA (1)...(19): siRNA sense strand
ggucaaguccugccugaag

SEQ ID NO: 1261061 - RNA, 19 nt, Homo sapiens
  misc_RNA (1)...(19): siRNA sense strand
ugaagaacaagaccaagga

SEQ ID NO: 1261062 - RNA, 19 nt, Homo sapiens
  misc_RNA (1)...(19): siRNA sense strand
gugucucgcuuccucaaug

SEQ ID NO: 1261063 - RNA, 19 nt, Homo sapiens
  misc_RNA (1)...(19): siRNA sense strand
ucaacagugaccucaagua

SEQ ID NO: 1261064 - RNA, 19 nt, Homo sapiens
  misc_RNA (1)...(19): siRNA sense strand
caagagcuccaucgugucu

SEQ ID NO: 1261065 - RNA, 19 nt, Homo sapiens
  misc_RNA (1)...(19): siRNA sense strand
cgagaacugcgccuacuuc

SEQ ID NO: 1261066 - RNA, 19 nt, Homo sapiens
  misc_RNA (1)...(19): siRNA sense strand
ccaagaagaacaccaacgu

SEQ ID NO: 1261067 - RNA, 19 nt, Homo sapiens
  misc_RNA (1)...(19): siRNA sense strand
acaccaacguggacgagau

SEQ ID NO: 1261068 - RNA, 19 nt, Homo sapiens
  misc_RNA (1)...(19): siRNA sense strand
gaggucaagcgccuucaga

SEQ ID NO: 1261069 - RNA, 19 nt, Homo sapiens
  misc_RNA (1)...(19): siRNA sense strand
caagaucuccgugcaguac

SEQ ID NO: 1261070 - RNA, 19 nt, Homo sapiens
  misc_RNA (1)...(19): siRNA sense strand
aguccugccugaagaacaa

SEQ ID NO: 1261071 - RNA, 19 nt, Homo sapiens
  misc_RNA (1)...(19): siRNA sense strand
gacgagaacugcgccuacu

SEQ ID NO: 1261072 - RNA, 19 nt, Homo sapiens
  misc_RNA (1)...(19): siRNA sense strand
uggacgagauguucuacgu

SEQ ID NO: 1261073 - RNA, 19 nt, Homo sapiens
  misc_RNA (1)...(19): siRNA sense strand
caagcugccacacgagaug

SEQ ID NO: 1261074 - RNA, 19 nt, Homo sapiens
  misc_RNA (1)...(19): siRNA sense strand
cuuccucaauggccgcuuu

SEQ ID NO: 1261075 - RNA, 19 nt, Homo sapiens
  misc_RNA (1)...(19): siRNA sense strand
ucaaguccugccugaagaa

SEQ ID NO: 1261076 - RNA, 19 nt, Homo sapiens
  misc_RNA (1)...(19): siRNA sense strand
gauguucuacgugcucuuc

SEQ ID NO: 1261077 - RNA, 19 nt, Homo sapiens
  misc_RNA (1)...(19): siRNA sense strand
gcagaaagaucucagagua

SEQ ID NO: 1261078 - RNA, 19 nt, Homo sapiens
  misc_RNA (1)...(19): siRNA sense strand
gaagauauauaaccguuca

SEQ ID NO: 1261079 - RNA, 19 nt, Homo sapiens
  misc_RNA (1)...(19): siRNA sense strand
gagaacgucugcagcaauu

SEQ ID NO: 1261080 - RNA, 19 nt, Homo sapiens
  misc_RNA (1)...(19): siRNA sense strand
gaagaugaccugcccagaa

SEQ ID NO: 1261081 - RNA, 19 nt, Homo sapiens
  misc_RNA (1)...(19): siRNA sense strand
gaaugugcaugccuacuug

SEQ ID NO: 1261082 - RNA, 19 nt, Homo sapiens
  misc_RNA (1)...(19): siRNA sense strand
agaaagaucucagaguaaa

SEQ ID NO: 1261083 - RNA, 19 nt, Homo sapiens
  misc_RNA (1)...(19): siRNA sense strand
caacuccgauucagaagau

SEQ ID NO: 1261084 - RNA, 19 nt, Homo sapiens
  misc_RNA (1)...(19): siRNA sense strand
acucaugucugaauuagaa

SEQ ID NO: 1261085 - RNA, 19 nt, Homo sapiens
  misc_RNA (1)...(19): siRNA sense strand
gaugaaaguggaaugaauu

SEQ ID NO: 1261086 - RNA, 19 nt, Homo sapiens
  misc_RNA (1)...(19): siRNA sense strand
ggaagaggauaaguacaug

SEQ ID NO: 1261087 - RNA, 19 nt, Homo sapiens
  misc_RNA (1)...(19): siRNA sense strand
gaagacuauugauaccaaa

SEQ ID NO: 1261088 - RNA, 19 nt, Homo sapiens
  misc_RNA (1)...(19): siRNA sense strand
ucagauaugugaaguugau

SEQ ID NO: 1261089 - RNA, 19 nt, Homo sapiens
  misc_RNA (1)...(19): siRNA sense strand
gaagaugaaaguggaauga

SEQ ID NO: 1261090 - RNA, 19 nt, Homo sapiens
  misc_RNA (1)...(19): siRNA sense strand
uaucauggcuuugggaaug

SEQ ID NO: 1261091 - RNA, 19 nt, Homo sapiens
  misc_RNA (1)...(19): siRNA sense strand
ugacaguugugacagcuuu

SEQ ID NO: 1261092 - RNA, 19 nt, Homo sapiens
  misc_RNA (1)...(19): siRNA sense strand
cagcuuugcuucugauaau

SEQ ID NO: 1261093 - RNA, 19 nt, Homo sapiens
  misc_RNA (1)...(19): siRNA sense strand
gaccguggauggcuacaug

SEQ ID NO: 1261094 - RNA, 19 nt, Homo sapiens
  misc_RNA (1)...(19): siRNA sense strand
guggauggcuacaugaaug

SEQ ID NO: 1261095 - RNA, 19 nt, Homo sapiens
  misc_RNA (1)...(19): siRNA sense strand
ucacugggcucuacuuguc

SEQ ID NO: 1261096 - RNA, 19 nt, Homo sapiens
  misc_RNA (1)...(19): siRNA sense strand
cgucagaagacuauugaua

SEQ ID NO: 1261097 - RNA, 19 nt, Homo sapiens
  misc_RNA (1)...(19): siRNA sense strand
gaucucagaguaaagaaga

SEQ ID NO: 1261098 - RNA, 19 nt, Homo sapiens
  misc_RNA (1)...(19): siRNA sense strand
ggaaugugcaugccuacuu

SEQ ID NO: 1261099 - RNA, 19 nt, Homo sapiens
  misc_RNA (1)...(19): siRNA sense strand
ugaaguugauuuccaugga

SEQ ID NO: 1261100 - RNA, 19 nt, Homo sapiens
  misc_RNA (1)...(19): siRNA sense strand
agaagacuauugauaccaa

SEQ ID NO: 1261101 - RNA, 19 nt, Homo sapiens
  misc_RNA (1)...(19): siRNA sense strand
cagaaagaucucagaguaa

SEQ ID NO: 1261102 - RNA, 19 nt, Homo sapiens
  misc_RNA (1)...(19): siRNA sense strand
ggaggaagaggauaaguac

SEQ ID NO: 1261103 - RNA, 19 nt, Homo sapiens
  misc_RNA (1)...(19): siRNA sense strand
caucaaugccgucagaaga

SEQ ID NO: 1261104 - RNA, 19 nt, Homo sapiens
  misc_RNA (1)...(19): siRNA sense strand
aaacucaugucugaauuag

SEQ ID NO: 1261105 - RNA, 19 nt, Homo sapiens
  misc_RNA (1)...(19): siRNA sense strand
aagaugaccugcccagaag

SEQ ID NO: 1261106 - RNA, 19 nt, Homo sapiens
  misc_RNA (1)...(19): siRNA sense strand
agaugaaaguggaaugaau

SEQ ID NO: 1261107 - RNA, 19 nt, Homo sapiens
  misc_RNA (1)...(19): siRNA sense strand
ugucaucaaugccgucaga

SEQ ID NO: 1261108 - RNA, 19 nt, Homo sapiens
  misc_RNA (1)...(19): siRNA sense strand
ggagaacgucugcagcaau

SEQ ID NO: 1261109 - RNA, 19 nt, Homo sapiens
  misc_RNA (1)...(19): siRNA sense strand
cagaguaaagaagaacuua

SEQ ID NO: 1261110 - RNA, 19 nt, Homo sapiens
  misc_RNA (1)...(19): siRNA sense strand
gauaugugaaguugauuuc

SEQ ID NO: 1261111 - RNA, 19 nt, Homo sapiens
  misc_RNA (1)...(19): siRNA sense strand
gaacgucugcagcaauucu

SEQ ID NO: 1261112 - RNA, 19 nt, Homo sapiens
  misc_RNA (1)...(19): siRNA sense strand
cucgagagaagauauauaa

SEQ ID NO: 1261113 - RNA, 19 nt, Homo sapiens
  misc_RNA (1)...(19): siRNA sense strand
aaagaucucagaguaaaga

SEQ ID NO: 1261114 - RNA, 19 nt, Homo sapiens
  misc_RNA (1)...(19): siRNA sense strand
ucgaaaccguuauggugaa

SEQ ID NO: 1261115 - RNA, 19 nt, Homo sapiens
  misc_RNA (1)...(19): siRNA sense strand
gcuuugcuucugauaauuu

SEQ ID NO: 1261116 - RNA, 19 nt, Homo sapiens
  misc_RNA (1)...(19): siRNA sense strand
gggcucuacuugucaucaa

SEQ ID NO: 1261117 - RNA, 19 nt, Homo sapiens
  misc_RNA (1)...(19): siRNA sense strand
cagaggaggaguuggagaa

SEQ ID NO: 1261118 - RNA, 19 nt, Homo sapiens
  misc_RNA (1)...(19): siRNA sense strand
cuacaugaaugaagaugac

SEQ ID NO: 1261119 - RNA, 19 nt, Homo sapiens
  misc_RNA (1)...(19): siRNA sense strand
gaagaggauaaguacaugu

SEQ ID NO: 1261120 - RNA, 19 nt, Homo sapiens
  misc_RNA (1)...(19): siRNA sense strand
caaaacucaugucugaauu

SEQ ID NO: 1261121 - RNA, 19 nt, Homo sapiens
  misc_RNA (1)...(19): siRNA sense strand
ugacagcuuugcuucugau

SEQ ID NO: 1261122 - RNA, 19 nt, Homo sapiens
  misc_RNA (1)...(19): siRNA sense strand
gguguugcuuccaggagaa

SEQ ID NO: 1261123 - RNA, 19 nt, Homo sapiens
  misc_RNA (1)...(19): siRNA sense strand
gcaaaacucaugucugaau

SEQ ID NO: 1261124 - RNA, 19 nt, Homo sapiens
  misc_RNA (1)...(19): siRNA sense strand
cgccagcccucagagaauu

SEQ ID NO: 1261125 - RNA, 19 nt, Homo sapiens
  misc_RNA (1)...(19): siRNA sense strand
cgacugggguccuugugua

SEQ ID NO: 1261126 - RNA, 19 nt, Homo sapiens
  misc_RNA (1)...(19): siRNA sense strand
uugcaaaacucaugucuga

SEQ ID NO: 1261127 - RNA, 19 nt, Homo sapiens
  misc_RNA (1)...(19): siRNA sense strand
gagaauucugugacugauu

SEQ ID NO: 1261128 - RNA, 19 nt, Homo sapiens
  misc_RNA (1)...(19): siRNA sense strand
gugacagcuuugcuucuga

SEQ ID NO: 1261129 - RNA, 19 nt, Homo sapiens
  misc_RNA (1)...(19): siRNA sense strand
gugcaugccuacuugaaaa

SEQ ID NO: 1261130 - RNA, 19 nt, Homo sapiens
  misc_RNA (1)...(19): siRNA sense strand
gaaagaucucagaguaaag

SEQ ID NO: 1261131 - RNA, 19 nt, Homo sapiens
  misc_RNA (1)...(19): siRNA sense strand
uuacagaggaggaguugga

SEQ ID NO: 1261132 - RNA, 19 nt, Homo sapiens
  misc_RNA (1)...(19): siRNA sense strand
ggaggaggaggaagaggau

SEQ ID NO: 1261133 - RNA, 19 nt, Homo sapiens
  misc_RNA (1)...(19): siRNA sense strand
ccgugacccuuccgcauau

SEQ ID NO: 1261134 - RNA, 19 nt, Homo sapiens
  misc_RNA (1)...(19): siRNA sense strand
gucagaagacuauugauac

SEQ ID NO: 1261135 - RNA, 19 nt, Homo sapiens
  misc_RNA (1)...(19): siRNA sense strand
uaugugaaguugauuucca

SEQ ID NO: 1261136 - RNA, 19 nt, Homo sapiens
  misc_RNA (1)...(19): siRNA sense strand
gacccuuccgcauauaauu

SEQ ID NO: 1261137 - RNA, 19 nt, Homo sapiens
  misc_RNA (1)...(19): siRNA sense strand
aggaggaagaggauaagua

SEQ ID NO: 1261138 - RNA, 19 nt, Homo sapiens
  misc_RNA (1)...(19): siRNA sense strand
ccuuguguauuuagccaaa

SEQ ID NO: 1261139 - RNA, 19 nt, Homo sapiens
  misc_RNA (1)...(19): siRNA sense strand
gcuacaugaaugaagauga

SEQ ID NO: 1261140 - RNA, 19 nt, Homo sapiens
  misc_RNA (1)...(19): siRNA sense strand
ugucugaauuagaaagcuu

SEQ ID NO: 1261141 - RNA, 19 nt, Homo sapiens
  misc_RNA (1)...(19): siRNA sense strand
ugugacagcuuugcuucug

SEQ ID NO: 1261142 - RNA, 19 nt, Homo sapiens
  misc_RNA (1)...(19): siRNA sense strand
ucagaagacuauugauacc

SEQ ID NO: 1261143 - RNA, 19 nt, Homo sapiens
  misc_RNA (1)...(19): siRNA sense strand
gccgucagaagacuauuga

SEQ ID NO: 1261144 - RNA, 19 nt, Homo sapiens
  misc_RNA (1)...(19): siRNA sense strand
aagaggauaaguacauguu

SEQ ID NO: 1261145 - RNA, 19 nt, Homo sapiens
  misc_RNA (1)...(19): siRNA sense strand
ucaggguggcgaugaaguu

SEQ ID NO: 1261146 - RNA, 19 nt, Homo sapiens
  misc_RNA (1)...(19): siRNA sense strand
aaaccguuauggugaagag

SEQ ID NO: 1261147 - RNA, 19 nt, Homo sapiens
  misc_RNA (1)...(19): siRNA sense strand
aaaccucgucauccucuga

SEQ ID NO: 1261148 - RNA, 19 nt, Homo sapiens
  misc_RNA (1)...(19): siRNA sense strand
cgaaaccguuauggugaag

SEQ ID NO: 1261149 - RNA, 19 nt, Homo sapiens
  misc_RNA (1)...(19): siRNA sense strand
gcucuacuugucaucaaug

SEQ ID NO: 1261150 - RNA, 19 nt, Homo sapiens
  misc_RNA (1)...(19): siRNA sense strand
uauaauucgcccaguggaa

SEQ ID NO: 1261151 - RNA, 19 nt, Homo sapiens
  misc_RNA (1)...(19): siRNA sense strand
uccgugacccuuccgcaua

SEQ ID NO: 1261152 - RNA, 19 nt, Homo sapiens
  misc_RNA (1)...(19): siRNA sense strand
aggaggaggaagaggauaa

SEQ ID NO: 1261153 - RNA, 19 nt, Homo sapiens
  misc_RNA (1)...(19): siRNA sense strand
gcagaaagaucucagagua

SEQ ID NO: 1261154 - RNA, 19 nt, Homo sapiens
  misc_RNA (1)...(19): siRNA sense strand
gaagauauauaaccguuca

SEQ ID NO: 1261155 - RNA, 19 nt, Homo sapiens
  misc_RNA (1)...(19): siRNA sense strand
gagaacgucugcagcaauu

SEQ ID NO: 1261156 - RNA, 19 nt, Homo sapiens
  misc_RNA (1)...(19): siRNA sense strand
gaagaugaccugcccagaa

SEQ ID NO: 1261157 - RNA, 19 nt, Homo sapiens
  misc_RNA (1)...(19): siRNA sense strand
gaaugugcaugccuacuug

SEQ ID NO: 1261158 - RNA, 19 nt, Homo sapiens
  misc_RNA (1)...(19): siRNA sense strand
agaaagaucucagaguaaa

SEQ ID NO: 1261159 - RNA, 19 nt, Homo sapiens
  misc_RNA (1)...(19): siRNA sense strand
caacuccgauucagaagau

SEQ ID NO: 1261160 - RNA, 19 nt, Homo sapiens
  misc_RNA (1)...(19): siRNA sense strand
acucaugucugaauuagaa

SEQ ID NO: 1261161 - RNA, 19 nt, Homo sapiens
  misc_RNA (1)...(19): siRNA sense strand
gaugaaaguggaaugaauu

SEQ ID NO: 1261162 - RNA, 19 nt, Homo sapiens
  misc_RNA (1)...(19): siRNA sense strand
ggaagaggauaaguacaug

SEQ ID NO: 1261163 - RNA, 19 nt, Homo sapiens
  misc_RNA (1)...(19): siRNA sense strand
gaagacuauugauaccaaa

SEQ ID NO: 1261164 - RNA, 19 nt, Homo sapiens
  misc_RNA (1)...(19): siRNA sense strand
ucagauaugugaaguugau

SEQ ID NO: 1261165 - RNA, 19 nt, Homo sapiens
  misc_RNA (1)...(19): siRNA sense strand
gaagaugaaaguggaauga

SEQ ID NO: 1261166 - RNA, 19 nt, Homo sapiens
  misc_RNA (1)...(19): siRNA sense strand
uaucauggcuuugggaaug

SEQ ID NO: 1261167 - RNA, 19 nt, Homo sapiens
  misc_RNA (1)...(19): siRNA sense strand
ugacaguugugacagcuuu

SEQ ID NO: 1261168 - RNA, 19 nt, Homo sapiens
  misc_RNA (1)...(19): siRNA sense strand
cagcuuugcuucugauaau

SEQ ID NO: 1261169 - RNA, 19 nt, Homo sapiens
  misc_RNA (1)...(19): siRNA sense strand
gaccguggauggcuacaug

SEQ ID NO: 1261170 - RNA, 19 nt, Homo sapiens
  misc_RNA (1)...(19): siRNA sense strand
guggauggcuacaugaaug

SEQ ID NO: 1261171 - RNA, 19 nt, Homo sapiens
  misc_RNA (1)...(19): siRNA sense strand
ucacugggcucuacuuguc

SEQ ID NO: 1261172 - RNA, 19 nt, Homo sapiens
  misc_RNA (1)...(19): siRNA sense strand
cgucagaagacuauugaua

SEQ ID NO: 1261173 - RNA, 19 nt, Homo sapiens
  misc_RNA (1)...(19): siRNA sense strand
gaucucagaguaaagaaga

SEQ ID NO: 1261174 - RNA, 19 nt, Homo sapiens
  misc_RNA (1)...(19): siRNA sense strand
ggaaugugcaugccuacuu

SEQ ID NO: 1261175 - RNA, 19 nt, Homo sapiens
  misc_RNA (1)...(19): siRNA sense strand
ugaaguugauuuccaugga

SEQ ID NO: 1261176 - RNA, 19 nt, Homo sapiens
  misc_RNA (1)...(19): siRNA sense strand
agaagacuauugauaccaa

SEQ ID NO: 1261177 - RNA, 19 nt, Homo sapiens
  misc_RNA (1)...(19): siRNA sense strand
cagaaagaucucagaguaa

SEQ ID NO: 1261178 - RNA, 19 nt, Homo sapiens
  misc_RNA (1)...(19): siRNA sense strand
ggaggaagaggauaaguac

SEQ ID NO: 1261179 - RNA, 19 nt, Homo sapiens
  misc_RNA (1)...(19): siRNA sense strand
caucaaugccgucagaaga

SEQ ID NO: 1261180 - RNA, 19 nt, Homo sapiens
  misc_RNA (1)...(19): siRNA sense strand
aaacucaugucugaauuag

SEQ ID NO: 1261181 - RNA, 19 nt, Homo sapiens
  misc_RNA (1)...(19): siRNA sense strand
aagaugaccugcccagaag

SEQ ID NO: 1261182 - RNA, 19 nt, Homo sapiens
  misc_RNA (1)...(19): siRNA sense strand
agaugaaaguggaaugaau

SEQ ID NO: 1261183 - RNA, 19 nt, Homo sapiens
  misc_RNA (1)...(19): siRNA sense strand
ugucaucaaugccgucaga

SEQ ID NO: 1261184 - RNA, 19 nt, Homo sapiens
  misc_RNA (1)...(19): siRNA sense strand
ggagaacgucugcagcaau

SEQ ID NO: 1261185 - RNA, 19 nt, Homo sapiens
  misc_RNA (1)...(19): siRNA sense strand
cagaguaaagaagaacuua

SEQ ID NO: 1261186 - RNA, 19 nt, Homo sapiens
  misc_RNA (1)...(19): siRNA sense strand
gauaugugaaguugauuuc

SEQ ID NO: 1261187 - RNA, 19 nt, Homo sapiens
  misc_RNA (1)...(19): siRNA sense strand
gaacgucugcagcaauucu

SEQ ID NO: 1261188 - RNA, 19 nt, Homo sapiens
  misc_RNA (1)...(19): siRNA sense strand
cucgagagaagauauauaa

SEQ ID NO: 1261189 - RNA, 19 nt, Homo sapiens
  misc_RNA (1)...(19): siRNA sense strand
aaagaucucagaguaaaga

SEQ ID NO: 1261190 - RNA, 19 nt, Homo sapiens
  misc_RNA (1)...(19): siRNA sense strand
ucgaaaccguuauggugaa

SEQ ID NO: 1261191 - RNA, 19 nt, Homo sapiens
  misc_RNA (1)...(19): siRNA sense strand
gcuuugcuucugauaauuu

SEQ ID NO: 1261192 - RNA, 19 nt, Homo sapiens
  misc_RNA (1)...(19): siRNA sense strand
gggcucuacuugucaucaa

SEQ ID NO: 1261193 - RNA, 19 nt, Homo sapiens
  misc_RNA (1)...(19): siRNA sense strand
cagaggaggaguuggagaa

SEQ ID NO: 1261194 - RNA, 19 nt, Homo sapiens
  misc_RNA (1)...(19): siRNA sense strand
cuacaugaaugaagaugac

SEQ ID NO: 1261195 - RNA, 19 nt, Homo sapiens
  misc_RNA (1)...(19): siRNA sense strand
gaagaggauaaguacaugu

SEQ ID NO: 1261196 - RNA, 19 nt, Homo sapiens
  misc_RNA (1)...(19): siRNA sense strand
caaaacucaugucugaauu

SEQ ID NO: 1261197 - RNA, 19 nt, Homo sapiens
  misc_RNA (1)...(19): siRNA sense strand
ugacagcuuugcuucugau

SEQ ID NO: 1261198 - RNA, 19 nt, Homo sapiens
  misc_RNA (1)...(19): siRNA sense strand
gguguugcuuccaggagaa

SEQ ID NO: 1261199 - RNA, 19 nt, Homo sapiens
  misc_RNA (1)...(19): siRNA sense strand
gcaaaacucaugucugaau

SEQ ID NO: 1261200 - RNA, 19 nt, Homo sapiens
  misc_RNA (1)...(19): siRNA sense strand
cgccagcccucagagaauu

SEQ ID NO: 1261201 - RNA, 19 nt, Homo sapiens
  misc_RNA (1)...(19): siRNA sense strand
cgacugggguccuugugua

SEQ ID NO: 1261202 - RNA, 19 nt, Homo sapiens
  misc_RNA (1)...(19): siRNA sense strand
uugcaaaacucaugucuga

SEQ ID NO: 1261203 - RNA, 19 nt, Homo sapiens
  misc_RNA (1)...(19): siRNA sense strand
gagaauucugugacugauu

SEQ ID NO: 1261204 - RNA, 19 nt, Homo sapiens
  misc_RNA (1)...(19): siRNA sense strand
gugacagcuuugcuucuga

SEQ ID NO: 1261205 - RNA, 19 nt, Homo sapiens
  misc_RNA (1)...(19): siRNA sense strand
gugcaugccuacuugaaaa

SEQ ID NO: 1261206 - RNA, 19 nt, Homo sapiens
  misc_RNA (1)...(19): siRNA sense strand
gaaagaucucagaguaaag

SEQ ID NO: 1261207 - RNA, 19 nt, Homo sapiens
  misc_RNA (1)...(19): siRNA sense strand
uuacagaggaggaguugga

SEQ ID NO: 1261208 - RNA, 19 nt, Homo sapiens
  misc_RNA (1)...(19): siRNA sense strand
ggaggaggaggaagaggau

SEQ ID NO: 1261209 - RNA, 19 nt, Homo sapiens
  misc_RNA (1)...(19): siRNA sense strand
ccgugacccuuccgcauau

SEQ ID NO: 1261210 - RNA, 19 nt, Homo sapiens
  misc_RNA (1)...(19): siRNA sense strand
gucagaagacuauugauac

SEQ ID NO: 1261211 - RNA, 19 nt, Homo sapiens
  misc_RNA (1)...(19): siRNA sense strand
uaugugaaguugauuucca

SEQ ID NO: 1261212 - RNA, 19 nt, Homo sapiens
  misc_RNA (1)...(19): siRNA sense strand
gacccuuccgcauauaauu

SEQ ID NO: 1261213 - RNA, 19 nt, Homo sapiens
  misc_RNA (1)...(19): siRNA sense strand
aggaggaagaggauaagua

SEQ ID NO: 1261214 - RNA, 19 nt, Homo sapiens
  misc_RNA (1)...(19): siRNA sense strand
ccuuguguauuuagccaaa

SEQ ID NO: 1261215 - RNA, 19 nt, Homo sapiens
  misc_RNA (1)...(19): siRNA sense strand
gcuacaugaaugaagauga

SEQ ID NO: 1261216 - RNA, 19 nt, Homo sapiens
  misc_RNA (1)...(19): siRNA sense strand
ugucugaauuagaaagcuu

SEQ ID NO: 1261217 - RNA, 19 nt, Homo sapiens
  misc_RNA (1)...(19): siRNA sense strand
ugugacagcuuugcuucug

SEQ ID NO: 1261218 - RNA, 19 nt, Homo sapiens
  misc_RNA (1)...(19): siRNA sense strand
ucagaagacuauugauacc

SEQ ID NO: 1261219 - RNA, 19 nt, Homo sapiens
  misc_RNA (1)...(19): siRNA sense strand
gccgucagaagacuauuga

SEQ ID NO: 1261220 - RNA, 19 nt, Homo sapiens
  misc_RNA (1)...(19): siRNA sense strand
aagaggauaaguacauguu

SEQ ID NO: 1261221 - RNA, 19 nt, Homo sapiens
  misc_RNA (1)...(19): siRNA sense strand
ucaggguggcgaugaaguu

SEQ ID NO: 1261222 - RNA, 19 nt, Homo sapiens
  misc_RNA (1)...(19): siRNA sense strand
aaaccguuauggugaagag

SEQ ID NO: 1261223 - RNA, 19 nt, Homo sapiens
  misc_RNA (1)...(19): siRNA sense strand
aaaccucgucauccucuga

SEQ ID NO: 1261224 - RNA, 19 nt, Homo sapiens
  misc_RNA (1)...(19): siRNA sense strand
cgaaaccguuauggugaag

SEQ ID NO: 1261225 - RNA, 19 nt, Homo sapiens
  misc_RNA (1)...(19): siRNA sense strand
gcucuacuugucaucaaug

SEQ ID NO: 1261226 - RNA, 19 nt, Homo sapiens
  misc_RNA (1)...(19): siRNA sense strand
uauaauucgcccaguggaa

SEQ ID NO: 1261227 - RNA, 19 nt, Homo sapiens
  misc_RNA (1)...(19): siRNA sense strand
uccgugacccuuccgcaua

SEQ ID NO: 1261228 - RNA, 19 nt, Homo sapiens
  misc_RNA (1)...(19): siRNA sense strand
aggaggaggaagaggauaa

SEQ ID NO: 1261229 - RNA, 19 nt, Homo sapiens
  misc_RNA (1)...(19): siRNA sense strand
gcaccgagaucaagauguc

SEQ ID NO: 1261230 - RNA, 19 nt, Homo sapiens
  misc_RNA (1)...(19): siRNA sense strand
gcagagaccuacuucaacu

SEQ ID NO: 1261231 - RNA, 19 nt, Homo sapiens
  misc_RNA (1)...(19): siRNA sense strand
ggacgauacuggccuuugu

SEQ ID NO: 1261232 - RNA, 19 nt, Homo sapiens
  misc_RNA (1)...(19): siRNA sense strand
ggucaauguucuaaagaug

SEQ ID NO: 1261233 - RNA, 19 nt, Homo sapiens
  misc_RNA (1)...(19): siRNA sense strand
gggcguugcuucaccauag

SEQ ID NO: 1261234 - RNA, 19 nt, Homo sapiens
  misc_RNA (1)...(19): siRNA sense strand
gaacaacaucggacacauc

SEQ ID NO: 1261235 - RNA, 19 nt, Homo sapiens
  misc_RNA (1)...(19): siRNA sense strand
gaauaugugaugcccauga

SEQ ID NO: 1261236 - RNA, 19 nt, Homo sapiens
  misc_RNA (1)...(19): siRNA sense strand
ggaggagggugugauugug

SEQ ID NO: 1261237 - RNA, 19 nt, Homo sapiens
  misc_RNA (1)...(19): siRNA sense strand
gauacuggccuuugucucu

SEQ ID NO: 1261238 - RNA, 19 nt, Homo sapiens
  misc_RNA (1)...(19): siRNA sense strand
agaccuacuucaacuacaa

SEQ ID NO: 1261239 - RNA, 19 nt, Homo sapiens
  misc_RNA (1)...(19): siRNA sense strand
ucucuggcaucuucuuuau

SEQ ID NO: 1261240 - RNA, 19 nt, Homo sapiens
  misc_RNA (1)...(19): siRNA sense strand
caagaugucccugcacuca

SEQ ID NO: 1261241 - RNA, 19 nt, Homo sapiens
  misc_RNA (1)...(19): siRNA sense strand
ccaaggaugcagagaccua

SEQ ID NO: 1261242 - RNA, 19 nt, Homo sapiens
  misc_RNA (1)...(19): siRNA sense strand
gccgccaucuccuuccuuu

SEQ ID NO: 1261243 - RNA, 19 nt, Homo sapiens
  misc_RNA (1)...(19): siRNA sense strand
aauaugugaugcccaugaa

SEQ ID NO: 1261244 - RNA, 19 nt, Homo sapiens
  misc_RNA (1)...(19): siRNA sense strand
gcuugggccuccuggguau

SEQ ID NO: 1261245 - RNA, 19 nt, Homo sapiens
  misc_RNA (1)...(19): siRNA sense strand
ggguuuauccugaacaaca

SEQ ID NO: 1261246 - RNA, 19 nt, Homo sapiens
  misc_RNA (1)...(19): siRNA sense strand
aaguauggguggucguuug

SEQ ID NO: 1261247 - RNA, 19 nt, Homo sapiens
  misc_RNA (1)...(19): siRNA sense strand
caucuucuuuauccucuca

SEQ ID NO: 1261248 - RNA, 19 nt, Homo sapiens
  misc_RNA (1)...(19): siRNA sense strand
ucauuggguuuauccugaa

SEQ ID NO: 1261249 - RNA, 19 nt, Homo sapiens
  misc_RNA (1)...(19): siRNA sense strand
ggucagccucuucuucaug

SEQ ID NO: 1261250 - RNA, 19 nt, Homo sapiens
  misc_RNA (1)...(19): siRNA sense strand
gucagccucuucuucaugu

SEQ ID NO: 1261251 - RNA, 19 nt, Homo sapiens
  misc_RNA (1)...(19): siRNA sense strand
gucaauguucuaaagauga

SEQ ID NO: 1261252 - RNA, 19 nt, Homo sapiens
  misc_RNA (1)...(19): siRNA sense strand
gguuuauccugaacaacau

SEQ ID NO: 1261253 - RNA, 19 nt, Homo sapiens
  misc_RNA (1)...(19): siRNA sense strand
gagcaccgagaucaagaug

SEQ ID NO: 1261254 - RNA, 19 nt, Homo sapiens
  misc_RNA (1)...(19): siRNA sense strand
gagaccuacuucaacuaca

SEQ ID NO: 1261255 - RNA, 19 nt, Homo sapiens
  misc_RNA (1)...(19): siRNA sense strand
cacggucaauguucuaaag

SEQ ID NO: 1261256 - RNA, 19 nt, Homo sapiens
  misc_RNA (1)...(19): siRNA sense strand
gaaccagagcaccgagauc

SEQ ID NO: 1261257 - RNA, 19 nt, Homo sapiens
  misc_RNA (1)...(19): siRNA sense strand
ggcguugcuucaccauaga

SEQ ID NO: 1261258 - RNA, 19 nt, Homo sapiens
  misc_RNA (1)...(19): siRNA sense strand
cggucaauguucuaaagau

SEQ ID NO: 1261259 - RNA, 19 nt, Homo sapiens
  misc_RNA (1)...(19): siRNA sense strand
cagagaccuacuucaacua

SEQ ID NO: 1261260 - RNA, 19 nt, Homo sapiens
  misc_RNA (1)...(19): siRNA sense strand
ggaugcagagaccuacuuc

SEQ ID NO: 1261261 - RNA, 19 nt, Homo sapiens
  misc_RNA (1)...(19): siRNA sense strand
caacaggaccaaggaugca

SEQ ID NO: 1261262 - RNA, 19 nt, Homo sapiens
  misc_RNA (1)...(19): siRNA sense strand
ugaacaacaucggacacau

SEQ ID NO: 1261263 - RNA, 19 nt, Homo sapiens
  misc_RNA (1)...(19): siRNA sense strand
cgccaucuccuuccuuuua

SEQ ID NO: 1261264 - RNA, 19 nt, Homo sapiens
  misc_RNA (1)...(19): siRNA sense strand
uugcuucaccauagaauau

SEQ ID NO: 1261265 - RNA, 19 nt, Homo sapiens
  misc_RNA (1)...(19): siRNA sense strand
cuuugucucuggcaucuuc

SEQ ID NO: 1261266 - RNA, 19 nt, Homo sapiens
  misc_RNA (1)...(19): siRNA sense strand
ccgcucagccacaccauuc

SEQ ID NO: 1261267 - RNA, 19 nt, Homo sapiens
  misc_RNA (1)...(19): siRNA sense strand
gcaccgagaucaagauguc

SEQ ID NO: 1261268 - RNA, 19 nt, Homo sapiens
  misc_RNA (1)...(19): siRNA sense strand
gcagagaccuacuucaacu

SEQ ID NO: 1261269 - RNA, 19 nt, Homo sapiens
  misc_RNA (1)...(19): siRNA sense strand
ggacgauacuggccuuugu

SEQ ID NO: 1261270 - RNA, 19 nt, Homo sapiens
  misc_RNA (1)...(19): siRNA sense strand
ggucaauguucuaaagaug

SEQ ID NO: 1261271 - RNA, 19 nt, Homo sapiens
  misc_RNA (1)...(19): siRNA sense strand
gggcguugcuucaccauag

SEQ ID NO: 1261272 - RNA, 19 nt, Homo sapiens
  misc_RNA (1)...(19): siRNA sense strand
gaacaacaucggacacauc

SEQ ID NO: 1261273 - RNA, 19 nt, Homo sapiens
  misc_RNA (1)...(19): siRNA sense strand
gaauaugugaugcccauga

SEQ ID NO: 1261274 - RNA, 19 nt, Homo sapiens
  misc_RNA (1)...(19): siRNA sense strand
ggaggagggugugauugug

SEQ ID NO: 1261275 - RNA, 19 nt, Homo sapiens
  misc_RNA (1)...(19): siRNA sense strand
gauacuggccuuugucucu

SEQ ID NO: 1261276 - RNA, 19 nt, Homo sapiens
  misc_RNA (1)...(19): siRNA sense strand
agaccuacuucaacuacaa

SEQ ID NO: 1261277 - RNA, 19 nt, Homo sapiens
  misc_RNA (1)...(19): siRNA sense strand
ucucuggcaucuucuuuau

SEQ ID NO: 1261278 - RNA, 19 nt, Homo sapiens
  misc_RNA (1)...(19): siRNA sense strand
caagaugucccugcacuca

SEQ ID NO: 1261279 - RNA, 19 nt, Homo sapiens
  misc_RNA (1)...(19): siRNA sense strand
ccaaggaugcagagaccua

SEQ ID NO: 1261280 - RNA, 19 nt, Homo sapiens
  misc_RNA (1)...(19): siRNA sense strand
gccgccaucuccuuccuuu

SEQ ID NO: 1261281 - RNA, 19 nt, Homo sapiens
  misc_RNA (1)...(19): siRNA sense strand
aauaugugaugcccaugaa

SEQ ID NO: 1261282 - RNA, 19 nt, Homo sapiens
  misc_RNA (1)...(19): siRNA sense strand
gcuugggccuccuggguau

SEQ ID NO: 1261283 - RNA, 19 nt, Homo sapiens
  misc_RNA (1)...(19): siRNA sense strand
ggguuuauccugaacaaca

SEQ ID NO: 1261284 - RNA, 19 nt, Homo sapiens
  misc_RNA (1)...(19): siRNA sense strand
aaguauggguggucguuug

SEQ ID NO: 1261285 - RNA, 19 nt, Homo sapiens
  misc_RNA (1)...(19): siRNA sense strand
caucuucuuuauccucuca

SEQ ID NO: 1261286 - RNA, 19 nt, Homo sapiens
  misc_RNA (1)...(19): siRNA sense strand
ucauuggguuuauccugaa

SEQ ID NO: 1261287 - RNA, 19 nt, Homo sapiens
  misc_RNA (1)...(19): siRNA sense strand
ggucagccucuucuucaug

SEQ ID NO: 1261288 - RNA, 19 nt, Homo sapiens
  misc_RNA (1)...(19): siRNA sense strand
gucagccucuucuucaugu

SEQ ID NO: 1261289 - RNA, 19 nt, Homo sapiens
  misc_RNA (1)...(19): siRNA sense strand
gucaauguucuaaagauga

SEQ ID NO: 1261290 - RNA, 19 nt, Homo sapiens
  misc_RNA (1)...(19): siRNA sense strand
gguuuauccugaacaacau

SEQ ID NO: 1261291 - RNA, 19 nt, Homo sapiens
  misc_RNA (1)...(19): siRNA sense strand
gagcaccgagaucaagaug

SEQ ID NO: 1261292 - RNA, 19 nt, Homo sapiens
  misc_RNA (1)...(19): siRNA sense strand
gagaccuacuucaacuaca

SEQ ID NO: 1261293 - RNA, 19 nt, Homo sapiens
  misc_RNA (1)...(19): siRNA sense strand
cacggucaauguucuaaag

SEQ ID NO: 1261294 - RNA, 19 nt, Homo sapiens
  misc_RNA (1)...(19): siRNA sense strand
gaaccagagcaccgagauc

SEQ ID NO: 1261295 - RNA, 19 nt, Homo sapiens
  misc_RNA (1)...(19): siRNA sense strand
ggcguugcuucaccauaga

SEQ ID NO: 1261296 - RNA, 19 nt, Homo sapiens
  misc_RNA (1)...(19): siRNA sense strand
cggucaauguucuaaagau

SEQ ID NO: 1261297 - RNA, 19 nt, Homo sapiens
  misc_RNA (1)...(19): siRNA sense strand
cagagaccuacuucaacua

SEQ ID NO: 1261298 - RNA, 19 nt, Homo sapiens
  misc_RNA (1)...(19): siRNA sense strand
ggaugcagagaccuacuuc

SEQ ID NO: 1261299 - RNA, 19 nt, Homo sapiens
  misc_RNA (1)...(19): siRNA sense strand
caacaggaccaaggaugca

SEQ ID NO: 1261300 - RNA, 19 nt, Homo sapiens
  misc_RNA (1)...(19): siRNA sense strand
ugaacaacaucggacacau

SEQ ID NO: 1261301 - RNA, 19 nt, Homo sapiens
  misc_RNA (1)...(19): siRNA sense strand
cgccaucuccuuccuuuua

SEQ ID NO: 1261302 - RNA, 19 nt, Homo sapiens
  misc_RNA (1)...(19): siRNA sense strand
uugcuucaccauagaauau

SEQ ID NO: 1261303 - RNA, 19 nt, Homo sapiens
  misc_RNA (1)...(19): siRNA sense strand
cuuugucucuggcaucuuc

SEQ ID NO: 1261304 - RNA, 19 nt, Homo sapiens
  misc_RNA (1)...(19): siRNA sense strand
ccgcucagccacaccauuc

SEQ ID NO: 1261305 - RNA, 19 nt, Homo sapiens
  misc_RNA (1)...(19): siRNA sense strand
gguagaaacugaccacaua

SEQ ID NO: 1261306 - RNA, 19 nt, Homo sapiens
  misc_RNA (1)...(19): siRNA sense strand
gcaaaggugucaucuucua

SEQ ID NO: 1261307 - RNA, 19 nt, Homo sapiens
  misc_RNA (1)...(19): siRNA sense strand
caaggaagaucauuaagga

SEQ ID NO: 1261308 - RNA, 19 nt, Homo sapiens
  misc_RNA (1)...(19): siRNA sense strand
gcaggaagguagaaacuga

SEQ ID NO: 1261309 - RNA, 19 nt, Homo sapiens
  misc_RNA (1)...(19): siRNA sense strand
gcaugaagaucucaaugaa

SEQ ID NO: 1261310 - RNA, 19 nt, Homo sapiens
  misc_RNA (1)...(19): siRNA sense strand
gaacaucuuuaaccgaaug

SEQ ID NO: 1261311 - RNA, 19 nt, Homo sapiens
  misc_RNA (1)...(19): siRNA sense strand
caacauucaugaagacuga

SEQ ID NO: 1261312 - RNA, 19 nt, Homo sapiens
  misc_RNA (1)...(19): siRNA sense strand
gcacagaagugauucaacu

SEQ ID NO: 1261313 - RNA, 19 nt, Homo sapiens
  misc_RNA (1)...(19): siRNA sense strand
gaacugguauccgaucaga

SEQ ID NO: 1261314 - RNA, 19 nt, Homo sapiens
  misc_RNA (1)...(19): siRNA sense strand
gaaagauccuccccgaaua

SEQ ID NO: 1261315 - RNA, 19 nt, Homo sapiens
  misc_RNA (1)...(19): siRNA sense strand
gauauaaaguugggaagga

SEQ ID NO: 1261316 - RNA, 19 nt, Homo sapiens
  misc_RNA (1)...(19): siRNA sense strand
gaucagagagugagacaga

SEQ ID NO: 1261317 - RNA, 19 nt, Homo sapiens
  misc_RNA (1)...(19): siRNA sense strand
ugaaguagccaaacuauuc

SEQ ID NO: 1261318 - RNA, 19 nt, Homo sapiens
  misc_RNA (1)...(19): siRNA sense strand
cggcaaaggugucaucuuc

SEQ ID NO: 1261319 - RNA, 19 nt, Homo sapiens
  misc_RNA (1)...(19): siRNA sense strand
gaaaggaaauaugggaaag

SEQ ID NO: 1261320 - RNA, 19 nt, Homo sapiens
  misc_RNA (1)...(19): siRNA sense strand
ucaauguucuggagugauu

SEQ ID NO: 1261321 - RNA, 19 nt, Homo sapiens
  misc_RNA (1)...(19): siRNA sense strand
agucagcaguggcaaguua

SEQ ID NO: 1261322 - RNA, 19 nt, Homo sapiens
  misc_RNA (1)...(19): siRNA sense strand
gccaaacuauucaacauuc

SEQ ID NO: 1261323 - RNA, 19 nt, Homo sapiens
  misc_RNA (1)...(19): siRNA sense strand
gauguuggcuaugaagcua

SEQ ID NO: 1261324 - RNA, 19 nt, Homo sapiens
  misc_RNA (1)...(19): siRNA sense strand
caagcacgcucuaacaucu

SEQ ID NO: 1261325 - RNA, 19 nt, Homo sapiens
  misc_RNA (1)...(19): siRNA sense strand
gcugcaugcuucuacgaua

SEQ ID NO: 1261326 - RNA, 19 nt, Homo sapiens
  misc_RNA (1)...(19): siRNA sense strand
gaaagacggcaggaaggua

SEQ ID NO: 1261327 - RNA, 19 nt, Homo sapiens
  misc_RNA (1)...(19): siRNA sense strand
uagcaaggaagaucauuaa

SEQ ID NO: 1261328 - RNA, 19 nt, Homo sapiens
  misc_RNA (1)...(19): siRNA sense strand
gcaccaugaucacgcuguu

SEQ ID NO: 1261329 - RNA, 19 nt, Homo sapiens
  misc_RNA (1)...(19): siRNA sense strand
gaaguagccaaacuauuca

SEQ ID NO: 1261330 - RNA, 19 nt, Homo sapiens
  misc_RNA (1)...(19): siRNA sense strand
uccgaggccucagaaauua

SEQ ID NO: 1261331 - RNA, 19 nt, Homo sapiens
  misc_RNA (1)...(19): siRNA sense strand
ggagcccaauguugaguug

SEQ ID NO: 1261332 - RNA, 19 nt, Homo sapiens
  misc_RNA (1)...(19): siRNA sense strand
caagacugguggccuggaa

SEQ ID NO: 1261333 - RNA, 19 nt, Homo sapiens
  misc_RNA (1)...(19): siRNA sense strand
gcaaggaagaucauuaagg

SEQ ID NO: 1261334 - RNA, 19 nt, Homo sapiens
  misc_RNA (1)...(19): siRNA sense strand
gaaugccaauagcaaggaa

SEQ ID NO: 1261335 - RNA, 19 nt, Homo sapiens
  misc_RNA (1)...(19): siRNA sense strand
gcaugcuucuacgauauaa

SEQ ID NO: 1261336 - RNA, 19 nt, Homo sapiens
  misc_RNA (1)...(19): siRNA sense strand
caaugaaguagccaaacua

SEQ ID NO: 1261337 - RNA, 19 nt, Homo sapiens
  misc_RNA (1)...(19): siRNA sense strand
ccgaauaccucagcaacug

SEQ ID NO: 1261338 - RNA, 19 nt, Homo sapiens
  misc_RNA (1)...(19): siRNA sense strand
cagaagugauucaacucuu

SEQ ID NO: 1261339 - RNA, 19 nt, Homo sapiens
  misc_RNA (1)...(19): siRNA sense strand
cuucuacgauauaaaguug

SEQ ID NO: 1261340 - RNA, 19 nt, Homo sapiens
  misc_RNA (1)...(19): siRNA sense strand
ucaaugaaguagccaaacu

SEQ ID NO: 1261341 - RNA, 19 nt, Homo sapiens
  misc_RNA (1)...(19): siRNA sense strand
augaagaucucaaugaagu

SEQ ID NO: 1261342 - RNA, 19 nt, Homo sapiens
  misc_RNA (1)...(19): siRNA sense strand
guccgaggccucagaaauu

SEQ ID NO: 1261343 - RNA, 19 nt, Homo sapiens
  misc_RNA (1)...(19): siRNA sense strand
ccggguaaaugcagagcua

SEQ ID NO: 1261344 - RNA, 19 nt, Homo sapiens
  misc_RNA (1)...(19): siRNA sense strand
gaagaucucaaugaaguag

SEQ ID NO: 1261345 - RNA, 19 nt, Homo sapiens
  misc_RNA (1)...(19): siRNA sense strand
ggguagagcaccaugauca

SEQ ID NO: 1261346 - RNA, 19 nt, Homo sapiens
  misc_RNA (1)...(19): siRNA sense strand
ccaaacuauucaacauuca

SEQ ID NO: 1261347 - RNA, 19 nt, Homo sapiens
  misc_RNA (1)...(19): siRNA sense strand
cuaugaagcuauuggucuu

SEQ ID NO: 1261348 - RNA, 19 nt, Homo sapiens
  misc_RNA (1)...(19): siRNA sense strand
ggaaagauccuccccgaau

SEQ ID NO: 1261349 - RNA, 19 nt, Homo sapiens
  misc_RNA (1)...(19): siRNA sense strand
uagccaaacuauucaacau

SEQ ID NO: 1261350 - RNA, 19 nt, Homo sapiens
  misc_RNA (1)...(19): siRNA sense strand
uuugguggcuuccggguaa

SEQ ID NO: 1261351 - RNA, 19 nt, Homo sapiens
  misc_RNA (1)...(19): siRNA sense strand
ccucagaaauuacuauucc

SEQ ID NO: 1261352 - RNA, 19 nt, Homo sapiens
  misc_RNA (1)...(19): siRNA sense strand
ggaacaucuuuaaccgaau

SEQ ID NO: 1261353 - RNA, 19 nt, Homo sapiens
  misc_RNA (1)...(19): siRNA sense strand
ggugaugcccaaugcuauu

SEQ ID NO: 1261354 - RNA, 19 nt, Homo sapiens
  misc_RNA (1)...(19): siRNA sense strand
aaggaaauaugggaaagau

SEQ ID NO: 1261355 - RNA, 19 nt, Homo sapiens
  misc_RNA (1)...(19): siRNA sense strand
agaaaggaaauaugggaaa

SEQ ID NO: 1261356 - RNA, 19 nt, Homo sapiens
  misc_RNA (1)...(19): siRNA sense strand
cuacaagcacgcucuaaca

SEQ ID NO: 1261357 - RNA, 19 nt, Homo sapiens
  misc_RNA (1)...(19): siRNA sense strand
cugcaugcuucuacgauau

SEQ ID NO: 1261358 - RNA, 19 nt, Homo sapiens
  misc_RNA (1)...(19): siRNA sense strand
gccuggagcccaauguuga

SEQ ID NO: 1261359 - RNA, 19 nt, Homo sapiens
  misc_RNA (1)...(19): siRNA sense strand
aagauuggcuggagaaaau

SEQ ID NO: 1261360 - RNA, 19 nt, Homo sapiens
  misc_RNA (1)...(19): siRNA sense strand
gguaaaugcagagcuacaa

SEQ ID NO: 1261361 - RNA, 19 nt, Homo sapiens
  misc_RNA (1)...(19): siRNA sense strand
ccaauagcaaggaagauca

SEQ ID NO: 1261362 - RNA, 19 nt, Homo sapiens
  misc_RNA (1)...(19): siRNA sense strand
ggauugugcuauggaacau

SEQ ID NO: 1261363 - RNA, 19 nt, Homo sapiens
  misc_RNA (1)...(19): siRNA sense strand
ggaggacuacggcaaaggu

SEQ ID NO: 1261364 - RNA, 19 nt, Homo sapiens
  misc_RNA (1)...(19): siRNA sense strand
auagcaaggaagaucauua

SEQ ID NO: 1261365 - RNA, 19 nt, Homo sapiens
  misc_RNA (1)...(19): siRNA sense strand
gcaacuggaccauggaaaa

SEQ ID NO: 1261366 - RNA, 19 nt, Homo sapiens
  misc_RNA (1)...(19): siRNA sense strand
cugguggccuggaaauaga

SEQ ID NO: 1261367 - RNA, 19 nt, Homo sapiens
  misc_RNA (1)...(19): siRNA sense strand
caaaagcaacugcacaaga

SEQ ID NO: 1261368 - RNA, 19 nt, Homo sapiens
  misc_RNA (1)...(19): siRNA sense strand
gccuggaaauagacucaga

SEQ ID NO: 1261369 - RNA, 19 nt, Homo sapiens
  misc_RNA (1)...(19): siRNA sense strand
gggauugugcuauggaaca

SEQ ID NO: 1261370 - RNA, 19 nt, Homo sapiens
  misc_RNA (1)...(19): siRNA sense strand
ggaagauuggcuggagaaa

SEQ ID NO: 1261371 - RNA, 19 nt, Homo sapiens
  misc_RNA (1)...(19): siRNA sense strand
ugaagaucucaaugaagua

SEQ ID NO: 1261372 - RNA, 19 nt, Homo sapiens
  misc_RNA (1)...(19): siRNA sense strand
gaagcccgaggcagaggaa

SEQ ID NO: 1261373 - RNA, 19 nt, Homo sapiens
  misc_RNA (1)...(19): siRNA sense strand
uuaaggugaugcccaaugc

SEQ ID NO: 1261374 - RNA, 19 nt, Homo sapiens
  misc_RNA (1)...(19): siRNA sense strand
ggagucagcaguggcaagu

SEQ ID NO: 1261375 - RNA, 19 nt, Homo sapiens
  misc_RNA (1)...(19): siRNA sense strand
guagaaacugaccacauag

SEQ ID NO: 1261376 - RNA, 19 nt, Homo sapiens
  misc_RNA (1)...(19): siRNA sense strand
uaaggacggugagcagcau

SEQ ID NO: 1261377 - RNA, 19 nt, Homo sapiens
  misc_RNA (1)...(19): siRNA sense strand
gugcuauggaacaucuuua

SEQ ID NO: 1261378 - RNA, 19 nt, Homo sapiens
  misc_RNA (1)...(19): siRNA sense strand
guaaaugcagagcuacaag

SEQ ID NO: 1261379 - RNA, 19 nt, Homo sapiens
  misc_RNA (1)...(19): siRNA sense strand
uguugugaguggaagauug

SEQ ID NO: 1261380 - RNA, 19 nt, Homo sapiens
  misc_RNA (1)...(19): siRNA sense strand
uggcaucagucaauguucu

SEQ ID NO: 1261381 - RNA, 19 nt, Homo sapiens
  misc_RNA (1)...(19): siRNA sense strand
gaagauuggcuggagaaaa

SEQ ID NO: 1261382 - RNA, 19 nt, Homo sapiens
  misc_RNA (1)...(19): siRNA sense strand
gcuucuacgauauaaaguu

SEQ ID NO: 1261383 - RNA, 19 nt, Homo sapiens
  misc_RNA (1)...(19): siRNA sense strand
gugagcagcaugaagaucu

SEQ ID NO: 1261384 - RNA, 19 nt, Homo sapiens
  misc_RNA (1)...(19): siRNA sense strand
agaaacugaccacauagug

SEQ ID NO: 1261385 - RNA, 19 nt, Homo sapiens
  misc_RNA (1)...(19): siRNA sense strand
ggccuggagcccaauguug

SEQ ID NO: 1261386 - RNA, 19 nt, Homo sapiens
  misc_RNA (1)...(19): siRNA sense strand
gccaauagcaaggaagauc

SEQ ID NO: 1261387 - RNA, 19 nt, Homo sapiens
  misc_RNA (1)...(19): siRNA sense strand
guuaaggugaugcccaaug

SEQ ID NO: 1261388 - RNA, 19 nt, Homo sapiens
  misc_RNA (1)...(19): siRNA sense strand
ggucuuguggacaguaguu

SEQ ID NO: 1261389 - RNA, 19 nt, Homo sapiens
  misc_RNA (1)...(19): siRNA sense strand
gggcacagaagugauucaa

SEQ ID NO: 1261390 - RNA, 19 nt, Homo sapiens
  misc_RNA (1)...(19): siRNA sense strand
guagccaaacuauucaaca

SEQ ID NO: 1261391 - RNA, 19 nt, Homo sapiens
  misc_RNA (1)...(19): siRNA sense strand
gcagcaugaagaucucaau

SEQ ID NO: 1261392 - RNA, 19 nt, Homo sapiens
  misc_RNA (1)...(19): siRNA sense strand
ggacggugagcagcaugaa

SEQ ID NO: 1261393 - RNA, 19 nt, Homo sapiens
  misc_RNA (1)...(19): siRNA sense strand
aaggugaugcccaaugcua

SEQ ID NO: 1261394 - RNA, 19 nt, Homo sapiens
  misc_RNA (1)...(19): siRNA sense strand
cagcaugaagaucucaaug

SEQ ID NO: 1261395 - RNA, 19 nt, Homo sapiens
  misc_RNA (1)...(19): siRNA sense strand
uuacuuaucaagcugaaag

SEQ ID NO: 1261396 - RNA, 19 nt, Homo sapiens
  misc_RNA (1)...(19): siRNA sense strand
acugguauccgaucagaga

SEQ ID NO: 1261397 - RNA, 19 nt, Homo sapiens
  misc_RNA (1)...(19): siRNA sense strand
gagcugcuaagccguacug

SEQ ID NO: 1261398 - RNA, 19 nt, Homo sapiens
  misc_RNA (1)...(19): siRNA sense strand
gcggguagagcaccaugau

SEQ ID NO: 1261399 - RNA, 19 nt, Homo sapiens
  misc_RNA (1)...(19): siRNA sense strand
gguagaaacugaccacaua

SEQ ID NO: 1261400 - RNA, 19 nt, Homo sapiens
  misc_RNA (1)...(19): siRNA sense strand
gcaaaggugucaucuucua

SEQ ID NO: 1261401 - RNA, 19 nt, Homo sapiens
  misc_RNA (1)...(19): siRNA sense strand
caaggaagaucauuaagga

SEQ ID NO: 1261402 - RNA, 19 nt, Homo sapiens
  misc_RNA (1)...(19): siRNA sense strand
gcaggaagguagaaacuga

SEQ ID NO: 1261403 - RNA, 19 nt, Homo sapiens
  misc_RNA (1)...(19): siRNA sense strand
gcaugaagaucucaaugaa

SEQ ID NO: 1261404 - RNA, 19 nt, Homo sapiens
  misc_RNA (1)...(19): siRNA sense strand
gaacaucuuuaaccgaaug

SEQ ID NO: 1261405 - RNA, 19 nt, Homo sapiens
  misc_RNA (1)...(19): siRNA sense strand
caacauucaugaagacuga

SEQ ID NO: 1261406 - RNA, 19 nt, Homo sapiens
  misc_RNA (1)...(19): siRNA sense strand
gcacagaagugauucaacu

SEQ ID NO: 1261407 - RNA, 19 nt, Homo sapiens
  misc_RNA (1)...(19): siRNA sense strand
gaacugguauccgaucaga

SEQ ID NO: 1261408 - RNA, 19 nt, Homo sapiens
  misc_RNA (1)...(19): siRNA sense strand
gaaagauccuccccgaaua

SEQ ID NO: 1261409 - RNA, 19 nt, Homo sapiens
  misc_RNA (1)...(19): siRNA sense strand
gauauaaaguugggaagga

SEQ ID NO: 1261410 - RNA, 19 nt, Homo sapiens
  misc_RNA (1)...(19): siRNA sense strand
gaucagagagugagacaga

SEQ ID NO: 1261411 - RNA, 19 nt, Homo sapiens
  misc_RNA (1)...(19): siRNA sense strand
ugaaguagccaaacuauuc

SEQ ID NO: 1261412 - RNA, 19 nt, Homo sapiens
  misc_RNA (1)...(19): siRNA sense strand
cggcaaaggugucaucuuc

SEQ ID NO: 1261413 - RNA, 19 nt, Homo sapiens
  misc_RNA (1)...(19): siRNA sense strand
gaaaggaaauaugggaaag

SEQ ID NO: 1261414 - RNA, 19 nt, Homo sapiens
  misc_RNA (1)...(19): siRNA sense strand
ucaauguucuggagugauu

SEQ ID NO: 1261415 - RNA, 19 nt, Homo sapiens
  misc_RNA (1)...(19): siRNA sense strand
agucagcaguggcaaguua

SEQ ID NO: 1261416 - RNA, 19 nt, Homo sapiens
  misc_RNA (1)...(19): siRNA sense strand
gccaaacuauucaacauuc

SEQ ID NO: 1261417 - RNA, 19 nt, Homo sapiens
  misc_RNA (1)...(19): siRNA sense strand
gauguuggcuaugaagcua

SEQ ID NO: 1261418 - RNA, 19 nt, Homo sapiens
  misc_RNA (1)...(19): siRNA sense strand
caagcacgcucuaacaucu

SEQ ID NO: 1261419 - RNA, 19 nt, Homo sapiens
  misc_RNA (1)...(19): siRNA sense strand
gcugcaugcuucuacgaua

SEQ ID NO: 1261420 - RNA, 19 nt, Homo sapiens
  misc_RNA (1)...(19): siRNA sense strand
gaaagacggcaggaaggua

SEQ ID NO: 1261421 - RNA, 19 nt, Homo sapiens
  misc_RNA (1)...(19): siRNA sense strand
uagcaaggaagaucauuaa

SEQ ID NO: 1261422 - RNA, 19 nt, Homo sapiens
  misc_RNA (1)...(19): siRNA sense strand
gcaccaugaucacgcuguu

SEQ ID NO: 1261423 - RNA, 19 nt, Homo sapiens
  misc_RNA (1)...(19): siRNA sense strand
gaaguagccaaacuauuca

SEQ ID NO: 1261424 - RNA, 19 nt, Homo sapiens
  misc_RNA (1)...(19): siRNA sense strand
uccgaggccucagaaauua

SEQ ID NO: 1261425 - RNA, 19 nt, Homo sapiens
  misc_RNA (1)...(19): siRNA sense strand
ggagcccaauguugaguug

SEQ ID NO: 1261426 - RNA, 19 nt, Homo sapiens
  misc_RNA (1)...(19): siRNA sense strand
caagacugguggccuggaa

SEQ ID NO: 1261427 - RNA, 19 nt, Homo sapiens
  misc_RNA (1)...(19): siRNA sense strand
gcaaggaagaucauuaagg

SEQ ID NO: 1261428 - RNA, 19 nt, Homo sapiens
  misc_RNA (1)...(19): siRNA sense strand
gaaugccaauagcaaggaa

SEQ ID NO: 1261429 - RNA, 19 nt, Homo sapiens
  misc_RNA (1)...(19): siRNA sense strand
gcaugcuucuacgauauaa

SEQ ID NO: 1261430 - RNA, 19 nt, Homo sapiens
  misc_RNA (1)...(19): siRNA sense strand
caaugaaguagccaaacua

SEQ ID NO: 1261431 - RNA, 19 nt, Homo sapiens
  misc_RNA (1)...(19): siRNA sense strand
ccgaauaccucagcaacug

SEQ ID NO: 1261432 - RNA, 19 nt, Homo sapiens
  misc_RNA (1)...(19): siRNA sense strand
cagaagugauucaacucuu

SEQ ID NO: 1261433 - RNA, 19 nt, Homo sapiens
  misc_RNA (1)...(19): siRNA sense strand
cuucuacgauauaaaguug

SEQ ID NO: 1261434 - RNA, 19 nt, Homo sapiens
  misc_RNA (1)...(19): siRNA sense strand
ucaaugaaguagccaaacu

SEQ ID NO: 1261435 - RNA, 19 nt, Homo sapiens
  misc_RNA (1)...(19): siRNA sense strand
augaagaucucaaugaagu

SEQ ID NO: 1261436 - RNA, 19 nt, Homo sapiens
  misc_RNA (1)...(19): siRNA sense strand
guccgaggccucagaaauu

SEQ ID NO: 1261437 - RNA, 19 nt, Homo sapiens
  misc_RNA (1)...(19): siRNA sense strand
ccggguaaaugcagagcua

SEQ ID NO: 1261438 - RNA, 19 nt, Homo sapiens
  misc_RNA (1)...(19): siRNA sense strand
gaagaucucaaugaaguag

SEQ ID NO: 1261439 - RNA, 19 nt, Homo sapiens
  misc_RNA (1)...(19): siRNA sense strand
ggguagagcaccaugauca

SEQ ID NO: 1261440 - RNA, 19 nt, Homo sapiens
  misc_RNA (1)...(19): siRNA sense strand
ccaaacuauucaacauuca

SEQ ID NO: 1261441 - RNA, 19 nt, Homo sapiens
  misc_RNA (1)...(19): siRNA sense strand
cuaugaagcuauuggucuu

SEQ ID NO: 1261442 - RNA, 19 nt, Homo sapiens
  misc_RNA (1)...(19): siRNA sense strand
ggaaagauccuccccgaau

SEQ ID NO: 1261443 - RNA, 19 nt, Homo sapiens
  misc_RNA (1)...(19): siRNA sense strand
uagccaaacuauucaacau

SEQ ID NO: 1261444 - RNA, 19 nt, Homo sapiens
  misc_RNA (1)...(19): siRNA sense strand
uuugguggcuuccggguaa

SEQ ID NO: 1261445 - RNA, 19 nt, Homo sapiens
  misc_RNA (1)...(19): siRNA sense strand
ccucagaaauuacuauucc

SEQ ID NO: 1261446 - RNA, 19 nt, Homo sapiens
  misc_RNA (1)...(19): siRNA sense strand
ggaacaucuuuaaccgaau

SEQ ID NO: 1261447 - RNA, 19 nt, Homo sapiens
  misc_RNA (1)...(19): siRNA sense strand
ggugaugcccaaugcuauu

SEQ ID NO: 1261448 - RNA, 19 nt, Homo sapiens
  misc_RNA (1)...(19): siRNA sense strand
aaggaaauaugggaaagau

SEQ ID NO: 1261449 - RNA, 19 nt, Homo sapiens
  misc_RNA (1)...(19): siRNA sense strand
agaaaggaaauaugggaaa

SEQ ID NO: 1261450 - RNA, 19 nt, Homo sapiens
  misc_RNA (1)...(19): siRNA sense strand
cuacaagcacgcucuaaca

SEQ ID NO: 1261451 - RNA, 19 nt, Homo sapiens
  misc_RNA (1)...(19): siRNA sense strand
cugcaugcuucuacgauau

SEQ ID NO: 1261452 - RNA, 19 nt, Homo sapiens
  misc_RNA (1)...(19): siRNA sense strand
gccuggagcccaauguuga

SEQ ID NO: 1261453 - RNA, 19 nt, Homo sapiens
  misc_RNA (1)...(19): siRNA sense strand
aagauuggcuggagaaaau

SEQ ID NO: 1261454 - RNA, 19 nt, Homo sapiens
  misc_RNA (1)...(19): siRNA sense strand
gguaaaugcagagcuacaa

SEQ ID NO: 1261455 - RNA, 19 nt, Homo sapiens
  misc_RNA (1)...(19): siRNA sense strand
ccaauagcaaggaagauca

SEQ ID NO: 1261456 - RNA, 19 nt, Homo sapiens
  misc_RNA (1)...(19): siRNA sense strand
ggauugugcuauggaacau

SEQ ID NO: 1261457 - RNA, 19 nt, Homo sapiens
  misc_RNA (1)...(19): siRNA sense strand
ggaggacuacggcaaaggu

SEQ ID NO: 1261458 - RNA, 19 nt, Homo sapiens
  misc_RNA (1)...(19): siRNA sense strand
auagcaaggaagaucauua

SEQ ID NO: 1261459 - RNA, 19 nt, Homo sapiens
  misc_RNA (1)...(19): siRNA sense strand
gcaacuggaccauggaaaa

SEQ ID NO: 1261460 - RNA, 19 nt, Homo sapiens
  misc_RNA (1)...(19): siRNA sense strand
cugguggccuggaaauaga

SEQ ID NO: 1261461 - RNA, 19 nt, Homo sapiens
  misc_RNA (1)...(19): siRNA sense strand
caaaagcaacugcacaaga

SEQ ID NO: 1261462 - RNA, 19 nt, Homo sapiens
  misc_RNA (1)...(19): siRNA sense strand
gccuggaaauagacucaga

SEQ ID NO: 1261463 - RNA, 19 nt, Homo sapiens
  misc_RNA (1)...(19): siRNA sense strand
gggauugugcuauggaaca

SEQ ID NO: 1261464 - RNA, 19 nt, Homo sapiens
  misc_RNA (1)...(19): siRNA sense strand
ggaagauuggcuggagaaa

SEQ ID NO: 1261465 - RNA, 19 nt, Homo sapiens
  misc_RNA (1)...(19): siRNA sense strand
ugaagaucucaaugaagua

SEQ ID NO: 1261466 - RNA, 19 nt, Homo sapiens
  misc_RNA (1)...(19): siRNA sense strand
gaagcccgaggcagaggaa

SEQ ID NO: 1261467 - RNA, 19 nt, Homo sapiens
  misc_RNA (1)...(19): siRNA sense strand
uuaaggugaugcccaaugc

SEQ ID NO: 1261468 - RNA, 19 nt, Homo sapiens
  misc_RNA (1)...(19): siRNA sense strand
ggagucagcaguggcaagu

SEQ ID NO: 1261469 - RNA, 19 nt, Homo sapiens
  misc_RNA (1)...(19): siRNA sense strand
guagaaacugaccacauag

SEQ ID NO: 1261470 - RNA, 19 nt, Homo sapiens
  misc_RNA (1)...(19): siRNA sense strand
uaaggacggugagcagcau

SEQ ID NO: 1261471 - RNA, 19 nt, Homo sapiens
  misc_RNA (1)...(19): siRNA sense strand
gugcuauggaacaucuuua

SEQ ID NO: 1261472 - RNA, 19 nt, Homo sapiens
  misc_RNA (1)...(19): siRNA sense strand
guaaaugcagagcuacaag

SEQ ID NO: 1261473 - RNA, 19 nt, Homo sapiens
  misc_RNA (1)...(19): siRNA sense strand
uguugugaguggaagauug

SEQ ID NO: 1261474 - RNA, 19 nt, Homo sapiens
  misc_RNA (1)...(19): siRNA sense strand
uggcaucagucaauguucu

SEQ ID NO: 1261475 - RNA, 19 nt, Homo sapiens
  misc_RNA (1)...(19): siRNA sense strand
gaagauuggcuggagaaaa

SEQ ID NO: 1261476 - RNA, 19 nt, Homo sapiens
  misc_RNA (1)...(19): siRNA sense strand
gcuucuacgauauaaaguu

SEQ ID NO: 1261477 - RNA, 19 nt, Homo sapiens
  misc_RNA (1)...(19): siRNA sense strand
gugagcagcaugaagaucu

SEQ ID NO: 1261478 - RNA, 19 nt, Homo sapiens
  misc_RNA (1)...(19): siRNA sense strand
agaaacugaccacauagug

SEQ ID NO: 1261479 - RNA, 19 nt, Homo sapiens
  misc_RNA (1)...(19): siRNA sense strand
ggccuggagcccaauguug

SEQ ID NO: 1261480 - RNA, 19 nt, Homo sapiens
  misc_RNA (1)...(19): siRNA sense strand
gccaauagcaaggaagauc

SEQ ID NO: 1261481 - RNA, 19 nt, Homo sapiens
  misc_RNA (1)...(19): siRNA sense strand
guuaaggugaugcccaaug

SEQ ID NO: 1261482 - RNA, 19 nt, Homo sapiens
  misc_RNA (1)...(19): siRNA sense strand
ggucuuguggacaguaguu

SEQ ID NO: 1261483 - RNA, 19 nt, Homo sapiens
  misc_RNA (1)...(19): siRNA sense strand
gggcacagaagugauucaa

SEQ ID NO: 1261484 - RNA, 19 nt, Homo sapiens
  misc_RNA (1)...(19): siRNA sense strand
guagccaaacuauucaaca

SEQ ID NO: 1261485 - RNA, 19 nt, Homo sapiens
  misc_RNA (1)...(19): siRNA sense strand
gcagcaugaagaucucaau

SEQ ID NO: 1261486 - RNA, 19 nt, Homo sapiens
  misc_RNA (1)...(19): siRNA sense strand
ggacggugagcagcaugaa

SEQ ID NO: 1261487 - RNA, 19 nt, Homo sapiens
  misc_RNA (1)...(19): siRNA sense strand
aaggugaugcccaaugcua

SEQ ID NO: 1261488 - RNA, 19 nt, Homo sapiens
  misc_RNA (1)...(19): siRNA sense strand
cagcaugaagaucucaaug

SEQ ID NO: 1261489 - RNA, 19 nt, Homo sapiens
  misc_RNA (1)...(19): siRNA sense strand
uuacuuaucaagcugaaag

SEQ ID NO: 1261490 - RNA, 19 nt, Homo sapiens
  misc_RNA (1)...(19): siRNA sense strand
acugguauccgaucagaga

SEQ ID NO: 1261491 - RNA, 19 nt, Homo sapiens
  misc_RNA (1)...(19): siRNA sense strand
gagcugcuaagccguacug

SEQ ID NO: 1261492 - RNA, 19 nt, Homo sapiens
  misc_RNA (1)...(19): siRNA sense strand
gcggguagagcaccaugau

SEQ ID NO: 1261493 - RNA, 19 nt, Homo sapiens
  misc_RNA (1)...(19): siRNA sense strand
gguagaaacugaccacaua

SEQ ID NO: 1261494 - RNA, 19 nt, Homo sapiens
  misc_RNA (1)...(19): siRNA sense strand
gcaaaggugucaucuucua

SEQ ID NO: 1261495 - RNA, 19 nt, Homo sapiens
  misc_RNA (1)...(19): siRNA sense strand
caaggaagaucauuaagga

SEQ ID NO: 1261496 - RNA, 19 nt, Homo sapiens
  misc_RNA (1)...(19): siRNA sense strand
gcaggaagguagaaacuga

SEQ ID NO: 1261497 - RNA, 19 nt, Homo sapiens
  misc_RNA (1)...(19): siRNA sense strand
gcaugaagaucucaaugaa

SEQ ID NO: 1261498 - RNA, 19 nt, Homo sapiens
  misc_RNA (1)...(19): siRNA sense strand
gaacaucuuuaaccgaaug

SEQ ID NO: 1261499 - RNA, 19 nt, Homo sapiens
  misc_RNA (1)...(19): siRNA sense strand
caacauucaugaagacuga

SEQ ID NO: 1261500 - RNA, 19 nt, Homo sapiens
  misc_RNA (1)...(19): siRNA sense strand
gcacagaagugauucaacu

SEQ ID NO: 1261501 - RNA, 19 nt, Homo sapiens
  misc_RNA (1)...(19): siRNA sense strand
gaacugguauccgaucaga

SEQ ID NO: 1261502 - RNA, 19 nt, Homo sapiens
  misc_RNA (1)...(19): siRNA sense strand
gaaagauccuccccgaaua

SEQ ID NO: 1261503 - RNA, 19 nt, Homo sapiens
  misc_RNA (1)...(19): siRNA sense strand
gauauaaaguugggaagga

SEQ ID NO: 1261504 - RNA, 19 nt, Homo sapiens
  misc_RNA (1)...(19): siRNA sense strand
gaucagagagugagacaga

SEQ ID NO: 1261505 - RNA, 19 nt, Homo sapiens
  misc_RNA (1)...(19): siRNA sense strand
ugaaguagccaaacuauuc

SEQ ID NO: 1261506 - RNA, 19 nt, Homo sapiens
  misc_RNA (1)...(19): siRNA sense strand
cggcaaaggugucaucuuc

SEQ ID NO: 1261507 - RNA, 19 nt, Homo sapiens
  misc_RNA (1)...(19): siRNA sense strand
gaaaggaaauaugggaaag

SEQ ID NO: 1261508 - RNA, 19 nt, Homo sapiens
  misc_RNA (1)...(19): siRNA sense strand
ucaauguucuggagugauu

SEQ ID NO: 1261509 - RNA, 19 nt, Homo sapiens
  misc_RNA (1)...(19): siRNA sense strand
agucagcaguggcaaguua

SEQ ID NO: 1261510 - RNA, 19 nt, Homo sapiens
  misc_RNA (1)...(19): siRNA sense strand
gccaaacuauucaacauuc

SEQ ID NO: 1261511 - RNA, 19 nt, Homo sapiens
  misc_RNA (1)...(19): siRNA sense strand
gauguuggcuaugaagcua

SEQ ID NO: 1261512 - RNA, 19 nt, Homo sapiens
  misc_RNA (1)...(19): siRNA sense strand
caagcacgcucuaacaucu

SEQ ID NO: 1261513 - RNA, 19 nt, Homo sapiens
  misc_RNA (1)...(19): siRNA sense strand
gcugcaugcuucuacgaua

SEQ ID NO: 1261514 - RNA, 19 nt, Homo sapiens
  misc_RNA (1)...(19): siRNA sense strand
gaaagacggcaggaaggua

SEQ ID NO: 1261515 - RNA, 19 nt, Homo sapiens
  misc_RNA (1)...(19): siRNA sense strand
uagcaaggaagaucauuaa

SEQ ID NO: 1261516 - RNA, 19 nt, Homo sapiens
  misc_RNA (1)...(19): siRNA sense strand
gcaccaugaucacgcuguu

SEQ ID NO: 1261517 - RNA, 19 nt, Homo sapiens
  misc_RNA (1)...(19): siRNA sense strand
gaaguagccaaacuauuca

SEQ ID NO: 1261518 - RNA, 19 nt, Homo sapiens
  misc_RNA (1)...(19): siRNA sense strand
uccgaggccucagaaauua

SEQ ID NO: 1261519 - RNA, 19 nt, Homo sapiens
  misc_RNA (1)...(19): siRNA sense strand
ggagcccaauguugaguug

SEQ ID NO: 1261520 - RNA, 19 nt, Homo sapiens
  misc_RNA (1)...(19): siRNA sense strand
caagacugguggccuggaa

SEQ ID NO: 1261521 - RNA, 19 nt, Homo sapiens
  misc_RNA (1)...(19): siRNA sense strand
gcaaggaagaucauuaagg

SEQ ID NO: 1261522 - RNA, 19 nt, Homo sapiens
  misc_RNA (1)...(19): siRNA sense strand
gaaugccaauagcaaggaa

SEQ ID NO: 1261523 - RNA, 19 nt, Homo sapiens
  misc_RNA (1)...(19): siRNA sense strand
gcaugcuucuacgauauaa

SEQ ID NO: 1261524 - RNA, 19 nt, Homo sapiens
  misc_RNA (1)...(19): siRNA sense strand
caaugaaguagccaaacua

SEQ ID NO: 1261525 - RNA, 19 nt, Homo sapiens
  misc_RNA (1)...(19): siRNA sense strand
ccgaauaccucagcaacug

SEQ ID NO: 1261526 - RNA, 19 nt, Homo sapiens
  misc_RNA (1)...(19): siRNA sense strand
cagaagugauucaacucuu

SEQ ID NO: 1261527 - RNA, 19 nt, Homo sapiens
  misc_RNA (1)...(19): siRNA sense strand
cuucuacgauauaaaguug

SEQ ID NO: 1261528 - RNA, 19 nt, Homo sapiens
  misc_RNA (1)...(19): siRNA sense strand
ucaaugaaguagccaaacu

SEQ ID NO: 1261529 - RNA, 19 nt, Homo sapiens
  misc_RNA (1)...(19): siRNA sense strand
augaagaucucaaugaagu

SEQ ID NO: 1261530 - RNA, 19 nt, Homo sapiens
  misc_RNA (1)...(19): siRNA sense strand
guccgaggccucagaaauu

SEQ ID NO: 1261531 - RNA, 19 nt, Homo sapiens
  misc_RNA (1)...(19): siRNA sense strand
ccggguaaaugcagagcua

SEQ ID NO: 1261532 - RNA, 19 nt, Homo sapiens
  misc_RNA (1)...(19): siRNA sense strand
gaagaucucaaugaaguag

SEQ ID NO: 1261533 - RNA, 19 nt, Homo sapiens
  misc_RNA (1)...(19): siRNA sense strand
ggguagagcaccaugauca

SEQ ID NO: 1261534 - RNA, 19 nt, Homo sapiens
  misc_RNA (1)...(19): siRNA sense strand
ccaaacuauucaacauuca

SEQ ID NO: 1261535 - RNA, 19 nt, Homo sapiens
  misc_RNA (1)...(19): siRNA sense strand
cuaugaagcuauuggucuu

SEQ ID NO: 1261536 - RNA, 19 nt, Homo sapiens
  misc_RNA (1)...(19): siRNA sense strand
ggaaagauccuccccgaau

SEQ ID NO: 1261537 - RNA, 19 nt, Homo sapiens
  misc_RNA (1)...(19): siRNA sense strand
uagccaaacuauucaacau

SEQ ID NO: 1261538 - RNA, 19 nt, Homo sapiens
  misc_RNA (1)...(19): siRNA sense strand
uuugguggcuuccggguaa

SEQ ID NO: 1261539 - RNA, 19 nt, Homo sapiens
  misc_RNA (1)...(19): siRNA sense strand
ccucagaaauuacuauucc

SEQ ID NO: 1261540 - RNA, 19 nt, Homo sapiens
  misc_RNA (1)...(19): siRNA sense strand
ggaacaucuuuaaccgaau

SEQ ID NO: 1261541 - RNA, 19 nt, Homo sapiens
  misc_RNA (1)...(19): siRNA sense strand
ggugaugcccaaugcuauu

SEQ ID NO: 1261542 - RNA, 19 nt, Homo sapiens
  misc_RNA (1)...(19): siRNA sense strand
aaggaaauaugggaaagau

SEQ ID NO: 1261543 - RNA, 19 nt, Homo sapiens
  misc_RNA (1)...(19): siRNA sense strand
agaaaggaaauaugggaaa

SEQ ID NO: 1261544 - RNA, 19 nt, Homo sapiens
  misc_RNA (1)...(19): siRNA sense strand
cuacaagcacgcucuaaca

SEQ ID NO: 1261545 - RNA, 19 nt, Homo sapiens
  misc_RNA (1)...(19): siRNA sense strand
cugcaugcuucuacgauau

SEQ ID NO: 1261546 - RNA, 19 nt, Homo sapiens
  misc_RNA (1)...(19): siRNA sense strand
gccuggagcccaauguuga

SEQ ID NO: 1261547 - RNA, 19 nt, Homo sapiens
  misc_RNA (1)...(19): siRNA sense strand
aagauuggcuggagaaaau

SEQ ID NO: 1261548 - RNA, 19 nt, Homo sapiens
  misc_RNA (1)...(19): siRNA sense strand
gguaaaugcagagcuacaa

SEQ ID NO: 1261549 - RNA, 19 nt, Homo sapiens
  misc_RNA (1)...(19): siRNA sense strand
ccaauagcaaggaagauca

SEQ ID NO: 1261550 - RNA, 19 nt, Homo sapiens
  misc_RNA (1)...(19): siRNA sense strand
ggauugugcuauggaacau

SEQ ID NO: 1261551 - RNA, 19 nt, Homo sapiens
  misc_RNA (1)...(19): siRNA sense strand
ggaggacuacggcaaaggu

SEQ ID NO: 1261552 - RNA, 19 nt, Homo sapiens
  misc_RNA (1)...(19): siRNA sense strand
auagcaaggaagaucauua

SEQ ID NO: 1261553 - RNA, 19 nt, Homo sapiens
  misc_RNA (1)...(19): siRNA sense strand
gcaacuggaccauggaaaa

SEQ ID NO: 1261554 - RNA, 19 nt, Homo sapiens
  misc_RNA (1)...(19): siRNA sense strand
cugguggccuggaaauaga

SEQ ID NO: 1261555 - RNA, 19 nt, Homo sapiens
  misc_RNA (1)...(19): siRNA sense strand
caaaagcaacugcacaaga

SEQ ID NO: 1261556 - RNA, 19 nt, Homo sapiens
  misc_RNA (1)...(19): siRNA sense strand
gccuggaaauagacucaga

SEQ ID NO: 1261557 - RNA, 19 nt, Homo sapiens
  misc_RNA (1)...(19): siRNA sense strand
gggauugugcuauggaaca

SEQ ID NO: 1261558 - RNA, 19 nt, Homo sapiens
  misc_RNA (1)...(19): siRNA sense strand
ggaagauuggcuggagaaa

SEQ ID NO: 1261559 - RNA, 19 nt, Homo sapiens
  misc_RNA (1)...(19): siRNA sense strand
ugaagaucucaaugaagua

SEQ ID NO: 1261560 - RNA, 19 nt, Homo sapiens
  misc_RNA (1)...(19): siRNA sense strand
gaagcccgaggcagaggaa

SEQ ID NO: 1261561 - RNA, 19 nt, Homo sapiens
  misc_RNA (1)...(19): siRNA sense strand
uuaaggugaugcccaaugc

SEQ ID NO: 1261562 - RNA, 19 nt, Homo sapiens
  misc_RNA (1)...(19): siRNA sense strand
ggagucagcaguggcaagu

SEQ ID NO: 1261563 - RNA, 19 nt, Homo sapiens
  misc_RNA (1)...(19): siRNA sense strand
guagaaacugaccacauag

SEQ ID NO: 1261564 - RNA, 19 nt, Homo sapiens
  misc_RNA (1)...(19): siRNA sense strand
uaaggacggugagcagcau

SEQ ID NO: 1261565 - RNA, 19 nt, Homo sapiens
  misc_RNA (1)...(19): siRNA sense strand
gugcuauggaacaucuuua

SEQ ID NO: 1261566 - RNA, 19 nt, Homo sapiens
  misc_RNA (1)...(19): siRNA sense strand
guaaaugcagagcuacaag

SEQ ID NO: 1261567 - RNA, 19 nt, Homo sapiens
  misc_RNA (1)...(19): siRNA sense strand
uguugugaguggaagauug

SEQ ID NO: 1261568 - RNA, 19 nt, Homo sapiens
  misc_RNA (1)...(19): siRNA sense strand
uggcaucagucaauguucu

SEQ ID NO: 1261569 - RNA, 19 nt, Homo sapiens
  misc_RNA (1)...(19): siRNA sense strand
gaagauuggcuggagaaaa

SEQ ID NO: 1261570 - RNA, 19 nt, Homo sapiens
  misc_RNA (1)...(19): siRNA sense strand
gcuucuacgauauaaaguu

SEQ ID NO: 1261571 - RNA, 19 nt, Homo sapiens
  misc_RNA (1)...(19): siRNA sense strand
gugagcagcaugaagaucu

SEQ ID NO: 1261572 - RNA, 19 nt, Homo sapiens
  misc_RNA (1)...(19): siRNA sense strand
agaaacugaccacauagug

SEQ ID NO: 1261573 - RNA, 19 nt, Homo sapiens
  misc_RNA (1)...(19): siRNA sense strand
ggccuggagcccaauguug

SEQ ID NO: 1261574 - RNA, 19 nt, Homo sapiens
  misc_RNA (1)...(19): siRNA sense strand
gccaauagcaaggaagauc

SEQ ID NO: 1261575 - RNA, 19 nt, Homo sapiens
  misc_RNA (1)...(19): siRNA sense strand
guuaaggugaugcccaaug

SEQ ID NO: 1261576 - RNA, 19 nt, Homo sapiens
  misc_RNA (1)...(19): siRNA sense strand
ggucuuguggacaguaguu

SEQ ID NO: 1261577 - RNA, 19 nt, Homo sapiens
  misc_RNA (1)...(19): siRNA sense strand
gggcacagaagugauucaa

SEQ ID NO: 1261578 - RNA, 19 nt, Homo sapiens
  misc_RNA (1)...(19): siRNA sense strand
guagccaaacuauucaaca

SEQ ID NO: 1261579 - RNA, 19 nt, Homo sapiens
  misc_RNA (1)...(19): siRNA sense strand
gcagcaugaagaucucaau

SEQ ID NO: 1261580 - RNA, 19 nt, Homo sapiens
  misc_RNA (1)...(19): siRNA sense strand
ggacggugagcagcaugaa

SEQ ID NO: 1261581 - RNA, 19 nt, Homo sapiens
  misc_RNA (1)...(19): siRNA sense strand
aaggugaugcccaaugcua

SEQ ID NO: 1261582 - RNA, 19 nt, Homo sapiens
  misc_RNA (1)...(19): siRNA sense strand
cagcaugaagaucucaaug

SEQ ID NO: 1261583 - RNA, 19 nt, Homo sapiens
  misc_RNA (1)...(19): siRNA sense strand
uuacuuaucaagcugaaag

SEQ ID NO: 1261584 - RNA, 19 nt, Homo sapiens
  misc_RNA (1)...(19): siRNA sense strand
acugguauccgaucagaga

SEQ ID NO: 1261585 - RNA, 19 nt, Homo sapiens
  misc_RNA (1)...(19): siRNA sense strand
gagcugcuaagccguacug

SEQ ID NO: 1261586 - RNA, 19 nt, Homo sapiens
  misc_RNA (1)...(19): siRNA sense strand
gcggguagagcaccaugau

SEQ ID NO: 1261587 - RNA, 19 nt, Homo sapiens
  misc_RNA (1)...(19): siRNA sense strand
gguagaaacugaccacaua

SEQ ID NO: 1261588 - RNA, 19 nt, Homo sapiens
  misc_RNA (1)...(19): siRNA sense strand
gcaaaggugucaucuucua

SEQ ID NO: 1261589 - RNA, 19 nt, Homo sapiens
  misc_RNA (1)...(19): siRNA sense strand
caaggaagaucauuaagga

SEQ ID NO: 1261590 - RNA, 19 nt, Homo sapiens
  misc_RNA (1)...(19): siRNA sense strand
gcaggaagguagaaacuga

SEQ ID NO: 1261591 - RNA, 19 nt, Homo sapiens
  misc_RNA (1)...(19): siRNA sense strand
gcaugaagaucucaaugaa

SEQ ID NO: 1261592 - RNA, 19 nt, Homo sapiens
  misc_RNA (1)...(19): siRNA sense strand
gaacaucuuuaaccgaaug

SEQ ID NO: 1261593 - RNA, 19 nt, Homo sapiens
  misc_RNA (1)...(19): siRNA sense strand
caacauucaugaagacuga

SEQ ID NO: 1261594 - RNA, 19 nt, Homo sapiens
  misc_RNA (1)...(19): siRNA sense strand
gcacagaagugauucaacu

SEQ ID NO: 1261595 - RNA, 19 nt, Homo sapiens
  misc_RNA (1)...(19): siRNA sense strand
gaacugguauccgaucaga

SEQ ID NO: 1261596 - RNA, 19 nt, Homo sapiens
  misc_RNA (1)...(19): siRNA sense strand
gaaagauccuccccgaaua

SEQ ID NO: 1261597 - RNA, 19 nt, Homo sapiens
  misc_RNA (1)...(19): siRNA sense strand
gauauaaaguugggaagga

SEQ ID NO: 1261598 - RNA, 19 nt, Homo sapiens
  misc_RNA (1)...(19): siRNA sense strand
gaucagagagugagacaga

SEQ ID NO: 1261599 - RNA, 19 nt, Homo sapiens
  misc_RNA (1)...(19): siRNA sense strand
ugaaguagccaaacuauuc

SEQ ID NO: 1261600 - RNA, 19 nt, Homo sapiens
  misc_RNA (1)...(19): siRNA sense strand
cggcaaaggugucaucuuc

SEQ ID NO: 1261601 - RNA, 19 nt, Homo sapiens
  misc_RNA (1)...(19): siRNA sense strand
gaaaggaaauaugggaaag

SEQ ID NO: 1261602 - RNA, 19 nt, Homo sapiens
  misc_RNA (1)...(19): siRNA sense strand
ucaauguucuggagugauu

SEQ ID NO: 1261603 - RNA, 19 nt, Homo sapiens
  misc_RNA (1)...(19): siRNA sense strand
agucagcaguggcaaguua

SEQ ID NO: 1261604 - RNA, 19 nt, Homo sapiens
  misc_RNA (1)...(19): siRNA sense strand
gccaaacuauucaacauuc

SEQ ID NO: 1261605 - RNA, 19 nt, Homo sapiens
  misc_RNA (1)...(19): siRNA sense strand
gauguuggcuaugaagcua

SEQ ID NO: 1261606 - RNA, 19 nt, Homo sapiens
  misc_RNA (1)...(19): siRNA sense strand
caagcacgcucuaacaucu

SEQ ID NO: 1261607 - RNA, 19 nt, Homo sapiens
  misc_RNA (1)...(19): siRNA sense strand
gcugcaugcuucuacgaua

SEQ ID NO: 1261608 - RNA, 19 nt, Homo sapiens
  misc_RNA (1)...(19): siRNA sense strand
gaaagacggcaggaaggua

SEQ ID NO: 1261609 - RNA, 19 nt, Homo sapiens
  misc_RNA (1)...(19): siRNA sense strand
uagcaaggaagaucauuaa

SEQ ID NO: 1261610 - RNA, 19 nt, Homo sapiens
  misc_RNA (1)...(19): siRNA sense strand
gcaccaugaucacgcuguu

SEQ ID NO: 1261611 - RNA, 19 nt, Homo sapiens
  misc_RNA (1)...(19): siRNA sense strand
gaaguagccaaacuauuca

SEQ ID NO: 1261612 - RNA, 19 nt, Homo sapiens
  misc_RNA (1)...(19): siRNA sense strand
uccgaggccucagaaauua

SEQ ID NO: 1261613 - RNA, 19 nt, Homo sapiens
  misc_RNA (1)...(19): siRNA sense strand
ggagcccaauguugaguug

SEQ ID NO: 1261614 - RNA, 19 nt, Homo sapiens
  misc_RNA (1)...(19): siRNA sense strand
caagacugguggccuggaa

SEQ ID NO: 1261615 - RNA, 19 nt, Homo sapiens
  misc_RNA (1)...(19): siRNA sense strand
gcaaggaagaucauuaagg

SEQ ID NO: 1261616 - RNA, 19 nt, Homo sapiens
  misc_RNA (1)...(19): siRNA sense strand
gaaugccaauagcaaggaa

SEQ ID NO: 1261617 - RNA, 19 nt, Homo sapiens
  misc_RNA (1)...(19): siRNA sense strand
gcaugcuucuacgauauaa

SEQ ID NO: 1261618 - RNA, 19 nt, Homo sapiens
  misc_RNA (1)...(19): siRNA sense strand
caaugaaguagccaaacua

SEQ ID NO: 1261619 - RNA, 19 nt, Homo sapiens
  misc_RNA (1)...(19): siRNA sense strand
ccgaauaccucagcaacug

SEQ ID NO: 1261620 - RNA, 19 nt, Homo sapiens
  misc_RNA (1)...(19): siRNA sense strand
cagaagugauucaacucuu

SEQ ID NO: 1261621 - RNA, 19 nt, Homo sapiens
  misc_RNA (1)...(19): siRNA sense strand
cuucuacgauauaaaguug

SEQ ID NO: 1261622 - RNA, 19 nt, Homo sapiens
  misc_RNA (1)...(19): siRNA sense strand
ucaaugaaguagccaaacu

SEQ ID NO: 1261623 - RNA, 19 nt, Homo sapiens
  misc_RNA (1)...(19): siRNA sense strand
augaagaucucaaugaagu

SEQ ID NO: 1261624 - RNA, 19 nt, Homo sapiens
  misc_RNA (1)...(19): siRNA sense strand
guccgaggccucagaaauu

SEQ ID NO: 1261625 - RNA, 19 nt, Homo sapiens
  misc_RNA (1)...(19): siRNA sense strand
ccggguaaaugcagagcua

SEQ ID NO: 1261626 - RNA, 19 nt, Homo sapiens
  misc_RNA (1)...(19): siRNA sense strand
gaagaucucaaugaaguag

SEQ ID NO: 1261627 - RNA, 19 nt, Homo sapiens
  misc_RNA (1)...(19): siRNA sense strand
ggguagagcaccaugauca

SEQ ID NO: 1261628 - RNA, 19 nt, Homo sapiens
  misc_RNA (1)...(19): siRNA sense strand
ccaaacuauucaacauuca

SEQ ID NO: 1261629 - RNA, 19 nt, Homo sapiens
  misc_RNA (1)...(19): siRNA sense strand
cuaugaagcuauuggucuu

SEQ ID NO: 1261630 - RNA, 19 nt, Homo sapiens
  misc_RNA (1)...(19): siRNA sense strand
ggaaagauccuccccgaau

SEQ ID NO: 1261631 - RNA, 19 nt, Homo sapiens
  misc_RNA (1)...(19): siRNA sense strand
uagccaaacuauucaacau

SEQ ID NO: 1261632 - RNA, 19 nt, Homo sapiens
  misc_RNA (1)...(19): siRNA sense strand
uuugguggcuuccggguaa

SEQ ID NO: 1261633 - RNA, 19 nt, Homo sapiens
  misc_RNA (1)...(19): siRNA sense strand
ccucagaaauuacuauucc

SEQ ID NO: 1261634 - RNA, 19 nt, Homo sapiens
  misc_RNA (1)...(19): siRNA sense strand
ggaacaucuuuaaccgaau

SEQ ID NO: 1261635 - RNA, 19 nt, Homo sapiens
  misc_RNA (1)...(19): siRNA sense strand
ggugaugcccaaugcuauu

SEQ ID NO: 1261636 - RNA, 19 nt, Homo sapiens
  misc_RNA (1)...(19): siRNA sense strand
aaggaaauaugggaaagau

SEQ ID NO: 1261637 - RNA, 19 nt, Homo sapiens
  misc_RNA (1)...(19): siRNA sense strand
agaaaggaaauaugggaaa

SEQ ID NO: 1261638 - RNA, 19 nt, Homo sapiens
  misc_RNA (1)...(19): siRNA sense strand
cuacaagcacgcucuaaca

SEQ ID NO: 1261639 - RNA, 19 nt, Homo sapiens
  misc_RNA (1)...(19): siRNA sense strand
cugcaugcuucuacgauau

SEQ ID NO: 1261640 - RNA, 19 nt, Homo sapiens
  misc_RNA (1)...(19): siRNA sense strand
gccuggagcccaauguuga

SEQ ID NO: 1261641 - RNA, 19 nt, Homo sapiens
  misc_RNA (1)...(19): siRNA sense strand
aagauuggcuggagaaaau

SEQ ID NO: 1261642 - RNA, 19 nt, Homo sapiens
  misc_RNA (1)...(19): siRNA sense strand
gguaaaugcagagcuacaa

SEQ ID NO: 1261643 - RNA, 19 nt, Homo sapiens
  misc_RNA (1)...(19): siRNA sense strand
ccaauagcaaggaagauca

SEQ ID NO: 1261644 - RNA, 19 nt, Homo sapiens
  misc_RNA (1)...(19): siRNA sense strand
ggauugugcuauggaacau

SEQ ID NO: 1261645 - RNA, 19 nt, Homo sapiens
  misc_RNA (1)...(19): siRNA sense strand
ggaggacuacggcaaaggu

SEQ ID NO: 1261646 - RNA, 19 nt, Homo sapiens
  misc_RNA (1)...(19): siRNA sense strand
auagcaaggaagaucauua

SEQ ID NO: 1261647 - RNA, 19 nt, Homo sapiens
  misc_RNA (1)...(19): siRNA sense strand
gcaacuggaccauggaaaa

SEQ ID NO: 1261648 - RNA, 19 nt, Homo sapiens
  misc_RNA (1)...(19): siRNA sense strand
cugguggccuggaaauaga

SEQ ID NO: 1261649 - RNA, 19 nt, Homo sapiens
  misc_RNA (1)...(19): siRNA sense strand
caaaagcaacugcacaaga

SEQ ID NO: 1261650 - RNA, 19 nt, Homo sapiens
  misc_RNA (1)...(19): siRNA sense strand
gccuggaaauagacucaga

SEQ ID NO: 1261651 - RNA, 19 nt, Homo sapiens
  misc_RNA (1)...(19): siRNA sense strand
gggauugugcuauggaaca

SEQ ID NO: 1261652 - RNA, 19 nt, Homo sapiens
  misc_RNA (1)...(19): siRNA sense strand
ggaagauuggcuggagaaa

SEQ ID NO: 1261653 - RNA, 19 nt, Homo sapiens
  misc_RNA (1)...(19): siRNA sense strand
ugaagaucucaaugaagua

SEQ ID NO: 1261654 - RNA, 19 nt, Homo sapiens
  misc_RNA (1)...(19): siRNA sense strand
gaagcccgaggcagaggaa

SEQ ID NO: 1261655 - RNA, 19 nt, Homo sapiens
  misc_RNA (1)...(19): siRNA sense strand
uuaaggugaugcccaaugc

SEQ ID NO: 1261656 - RNA, 19 nt, Homo sapiens
  misc_RNA (1)...(19): siRNA sense strand
ggagucagcaguggcaagu

SEQ ID NO: 1261657 - RNA, 19 nt, Homo sapiens
  misc_RNA (1)...(19): siRNA sense strand
guagaaacugaccacauag

SEQ ID NO: 1261658 - RNA, 19 nt, Homo sapiens
  misc_RNA (1)...(19): siRNA sense strand
uaaggacggugagcagcau

SEQ ID NO: 1261659 - RNA, 19 nt, Homo sapiens
  misc_RNA (1)...(19): siRNA sense strand
gugcuauggaacaucuuua

SEQ ID NO: 1261660 - RNA, 19 nt, Homo sapiens
  misc_RNA (1)...(19): siRNA sense strand
guaaaugcagagcuacaag

SEQ ID NO: 1261661 - RNA, 19 nt, Homo sapiens
  misc_RNA (1)...(19): siRNA sense strand
uguugugaguggaagauug

SEQ ID NO: 1261662 - RNA, 19 nt, Homo sapiens
  misc_RNA (1)...(19): siRNA sense strand
uggcaucagucaauguucu

SEQ ID NO: 1261663 - RNA, 19 nt, Homo sapiens
  misc_RNA (1)...(19): siRNA sense strand
gaagauuggcuggagaaaa

SEQ ID NO: 1261664 - RNA, 19 nt, Homo sapiens
  misc_RNA (1)...(19): siRNA sense strand
gcuucuacgauauaaaguu

SEQ ID NO: 1261665 - RNA, 19 nt, Homo sapiens
  misc_RNA (1)...(19): siRNA sense strand
gugagcagcaugaagaucu

SEQ ID NO: 1261666 - RNA, 19 nt, Homo sapiens
  misc_RNA (1)...(19): siRNA sense strand
agaaacugaccacauagug

SEQ ID NO: 1261667 - RNA, 19 nt, Homo sapiens
  misc_RNA (1)...(19): siRNA sense strand
ggccuggagcccaauguug

SEQ ID NO: 1261668 - RNA, 19 nt, Homo sapiens
  misc_RNA (1)...(19): siRNA sense strand
gccaauagcaaggaagauc

SEQ ID NO: 1261669 - RNA, 19 nt, Homo sapiens
  misc_RNA (1)...(19): siRNA sense strand
guuaaggugaugcccaaug

SEQ ID NO: 1261670 - RNA, 19 nt, Homo sapiens
  misc_RNA (1)...(19): siRNA sense strand
ggucuuguggacaguaguu

SEQ ID NO: 1261671 - RNA, 19 nt, Homo sapiens
  misc_RNA (1)...(19): siRNA sense strand
gggcacagaagugauucaa

SEQ ID NO: 1261672 - RNA, 19 nt, Homo sapiens
  misc_RNA (1)...(19): siRNA sense strand
guagccaaacuauucaaca

SEQ ID NO: 1261673 - RNA, 19 nt, Homo sapiens
  misc_RNA (1)...(19): siRNA sense strand
gcagcaugaagaucucaau

SEQ ID NO: 1261674 - RNA, 19 nt, Homo sapiens
  misc_RNA (1)...(19): siRNA sense strand
ggacggugagcagcaugaa

SEQ ID NO: 1261675 - RNA, 19 nt, Homo sapiens
  misc_RNA (1)...(19): siRNA sense strand
aaggugaugcccaaugcua

SEQ ID NO: 1261676 - RNA, 19 nt, Homo sapiens
  misc_RNA (1)...(19): siRNA sense strand
cagcaugaagaucucaaug

SEQ ID NO: 1261677 - RNA, 19 nt, Homo sapiens
  misc_RNA (1)...(19): siRNA sense strand
uuacuuaucaagcugaaag

SEQ ID NO: 1261678 - RNA, 19 nt, Homo sapiens
  misc_RNA (1)...(19): siRNA sense strand
acugguauccgaucagaga

SEQ ID NO: 1261679 - RNA, 19 nt, Homo sapiens
  misc_RNA (1)...(19): siRNA sense strand
gagcugcuaagccguacug

SEQ ID NO: 1261680 - RNA, 19 nt, Homo sapiens
  misc_RNA (1)...(19): siRNA sense strand
gcggguagagcaccaugau

SEQ ID NO: 1261681 - RNA, 19 nt, Homo sapiens
  misc_RNA (1)...(19): siRNA sense strand
gguagaaacugaccacaua

SEQ ID NO: 1261682 - RNA, 19 nt, Homo sapiens
  misc_RNA (1)...(19): siRNA sense strand
gcaaaggugucaucuucua

SEQ ID NO: 1261683 - RNA, 19 nt, Homo sapiens
  misc_RNA (1)...(19): siRNA sense strand
caaggaagaucauuaagga

SEQ ID NO: 1261684 - RNA, 19 nt, Homo sapiens
  misc_RNA (1)...(19): siRNA sense strand
gcaggaagguagaaacuga

SEQ ID NO: 1261685 - RNA, 19 nt, Homo sapiens
  misc_RNA (1)...(19): siRNA sense strand
gcaugaagaucucaaugaa

SEQ ID NO: 1261686 - RNA, 19 nt, Homo sapiens
  misc_RNA (1)...(19): siRNA sense strand
gaacaucuuuaaccgaaug

SEQ ID NO: 1261687 - RNA, 19 nt, Homo sapiens
  misc_RNA (1)...(19): siRNA sense strand
caacauucaugaagacuga

SEQ ID NO: 1261688 - RNA, 19 nt, Homo sapiens
  misc_RNA (1)...(19): siRNA sense strand
gcacagaagugauucaacu

SEQ ID NO: 1261689 - RNA, 19 nt, Homo sapiens
  misc_RNA (1)...(19): siRNA sense strand
gaacugguauccgaucaga

SEQ ID NO: 1261690 - RNA, 19 nt, Homo sapiens
  misc_RNA (1)...(19): siRNA sense strand
gaaagauccuccccgaaua

SEQ ID NO: 1261691 - RNA, 19 nt, Homo sapiens
  misc_RNA (1)...(19): siRNA sense strand
gauauaaaguugggaagga

SEQ ID NO: 1261692 - RNA, 19 nt, Homo sapiens
  misc_RNA (1)...(19): siRNA sense strand
gaucagagagugagacaga

SEQ ID NO: 1261693 - RNA, 19 nt, Homo sapiens
  misc_RNA (1)...(19): siRNA sense strand
ugaaguagccaaacuauuc

SEQ ID NO: 1261694 - RNA, 19 nt, Homo sapiens
  misc_RNA (1)...(19): siRNA sense strand
cggcaaaggugucaucuuc

SEQ ID NO: 1261695 - RNA, 19 nt, Homo sapiens
  misc_RNA (1)...(19): siRNA sense strand
gaaaggaaauaugggaaag

SEQ ID NO: 1261696 - RNA, 19 nt, Homo sapiens
  misc_RNA (1)...(19): siRNA sense strand
ucaauguucuggagugauu

SEQ ID NO: 1261697 - RNA, 19 nt, Homo sapiens
  misc_RNA (1)...(19): siRNA sense strand
agucagcaguggcaaguua

SEQ ID NO: 1261698 - RNA, 19 nt, Homo sapiens
  misc_RNA (1)...(19): siRNA sense strand
gccaaacuauucaacauuc

SEQ ID NO: 1261699 - RNA, 19 nt, Homo sapiens
  misc_RNA (1)...(19): siRNA sense strand
gauguuggcuaugaagcua

SEQ ID NO: 1261700 - RNA, 19 nt, Homo sapiens
  misc_RNA (1)...(19): siRNA sense strand
caagcacgcucuaacaucu

SEQ ID NO: 1261701 - RNA, 19 nt, Homo sapiens
  misc_RNA (1)...(19): siRNA sense strand
gcugcaugcuucuacgaua

SEQ ID NO: 1261702 - RNA, 19 nt, Homo sapiens
  misc_RNA (1)...(19): siRNA sense strand
gaaagacggcaggaaggua

SEQ ID NO: 1261703 - RNA, 19 nt, Homo sapiens
  misc_RNA (1)...(19): siRNA sense strand
uagcaaggaagaucauuaa

SEQ ID NO: 1261704 - RNA, 19 nt, Homo sapiens
  misc_RNA (1)...(19): siRNA sense strand
gcaccaugaucacgcuguu

SEQ ID NO: 1261705 - RNA, 19 nt, Homo sapiens
  misc_RNA (1)...(19): siRNA sense strand
gaaguagccaaacuauuca

SEQ ID NO: 1261706 - RNA, 19 nt, Homo sapiens
  misc_RNA (1)...(19): siRNA sense strand
uccgaggccucagaaauua

SEQ ID NO: 1261707 - RNA, 19 nt, Homo sapiens
  misc_RNA (1)...(19): siRNA sense strand
ggagcccaauguugaguug

SEQ ID NO: 1261708 - RNA, 19 nt, Homo sapiens
  misc_RNA (1)...(19): siRNA sense strand
caagacugguggccuggaa

SEQ ID NO: 1261709 - RNA, 19 nt, Homo sapiens
  misc_RNA (1)...(19): siRNA sense strand
gcaaggaagaucauuaagg

SEQ ID NO: 1261710 - RNA, 19 nt, Homo sapiens
  misc_RNA (1)...(19): siRNA sense strand
gaaugccaauagcaaggaa

SEQ ID NO: 1261711 - RNA, 19 nt, Homo sapiens
  misc_RNA (1)...(19): siRNA sense strand
gcaugcuucuacgauauaa

SEQ ID NO: 1261712 - RNA, 19 nt, Homo sapiens
  misc_RNA (1)...(19): siRNA sense strand
caaugaaguagccaaacua

SEQ ID NO: 1261713 - RNA, 19 nt, Homo sapiens
  misc_RNA (1)...(19): siRNA sense strand
ccgaauaccucagcaacug

SEQ ID NO: 1261714 - RNA, 19 nt, Homo sapiens
  misc_RNA (1)...(19): siRNA sense strand
cagaagugauucaacucuu

SEQ ID NO: 1261715 - RNA, 19 nt, Homo sapiens
  misc_RNA (1)...(19): siRNA sense strand
cuucuacgauauaaaguug

SEQ ID NO: 1261716 - RNA, 19 nt, Homo sapiens
  misc_RNA (1)...(19): siRNA sense strand
ucaaugaaguagccaaacu

SEQ ID NO: 1261717 - RNA, 19 nt, Homo sapiens
  misc_RNA (1)...(19): siRNA sense strand
augaagaucucaaugaagu

SEQ ID NO: 1261718 - RNA, 19 nt, Homo sapiens
  misc_RNA (1)...(19): siRNA sense strand
guccgaggccucagaaauu

SEQ ID NO: 1261719 - RNA, 19 nt, Homo sapiens
  misc_RNA (1)...(19): siRNA sense strand
ccggguaaaugcagagcua

SEQ ID NO: 1261720 - RNA, 19 nt, Homo sapiens
  misc_RNA (1)...(19): siRNA sense strand
gaagaucucaaugaaguag

SEQ ID NO: 1261721 - RNA, 19 nt, Homo sapiens
  misc_RNA (1)...(19): siRNA sense strand
ggguagagcaccaugauca

SEQ ID NO: 1261722 - RNA, 19 nt, Homo sapiens
  misc_RNA (1)...(19): siRNA sense strand
ccaaacuauucaacauuca

SEQ ID NO: 1261723 - RNA, 19 nt, Homo sapiens
  misc_RNA (1)...(19): siRNA sense strand
cuaugaagcuauuggucuu

SEQ ID NO: 1261724 - RNA, 19 nt, Homo sapiens
  misc_RNA (1)...(19): siRNA sense strand
ggaaagauccuccccgaau

SEQ ID NO: 1261725 - RNA, 19 nt, Homo sapiens
  misc_RNA (1)...(19): siRNA sense strand
uagccaaacuauucaacau

SEQ ID NO: 1261726 - RNA, 19 nt, Homo sapiens
  misc_RNA (1)...(19): siRNA sense strand
uuugguggcuuccggguaa

SEQ ID NO: 1261727 - RNA, 19 nt, Homo sapiens
  misc_RNA (1)...(19): siRNA sense strand
ccucagaaauuacuauucc

SEQ ID NO: 1261728 - RNA, 19 nt, Homo sapiens
  misc_RNA (1)...(19): siRNA sense strand
ggaacaucuuuaaccgaau

SEQ ID NO: 1261729 - RNA, 19 nt, Homo sapiens
  misc_RNA (1)...(19): siRNA sense strand
ggugaugcccaaugcuauu

SEQ ID NO: 1261730 - RNA, 19 nt, Homo sapiens
  misc_RNA (1)...(19): siRNA sense strand
aaggaaauaugggaaagau

SEQ ID NO: 1261731 - RNA, 19 nt, Homo sapiens
  misc_RNA (1)...(19): siRNA sense strand
agaaaggaaauaugggaaa

SEQ ID NO: 1261732 - RNA, 19 nt, Homo sapiens
  misc_RNA (1)...(19): siRNA sense strand
cuacaagcacgcucuaaca

SEQ ID NO: 1261733 - RNA, 19 nt, Homo sapiens
  misc_RNA (1)...(19): siRNA sense strand
cugcaugcuucuacgauau

SEQ ID NO: 1261734 - RNA, 19 nt, Homo sapiens
  misc_RNA (1)...(19): siRNA sense strand
gccuggagcccaauguuga

SEQ ID NO: 1261735 - RNA, 19 nt, Homo sapiens
  misc_RNA (1)...(19): siRNA sense strand
aagauuggcuggagaaaau

SEQ ID NO: 1261736 - RNA, 19 nt, Homo sapiens
  misc_RNA (1)...(19): siRNA sense strand
gguaaaugcagagcuacaa

SEQ ID NO: 1261737 - RNA, 19 nt, Homo sapiens
  misc_RNA (1)...(19): siRNA sense strand
ccaauagcaaggaagauca

SEQ ID NO: 1261738 - RNA, 19 nt, Homo sapiens
  misc_RNA (1)...(19): siRNA sense strand
ggauugugcuauggaacau

SEQ ID NO: 1261739 - RNA, 19 nt, Homo sapiens
  misc_RNA (1)...(19): siRNA sense strand
ggaggacuacggcaaaggu

SEQ ID NO: 1261740 - RNA, 19 nt, Homo sapiens
  misc_RNA (1)...(19): siRNA sense strand
auagcaaggaagaucauua

SEQ ID NO: 1261741 - RNA, 19 nt, Homo sapiens
  misc_RNA (1)...(19): siRNA sense strand
gcaacuggaccauggaaaa

SEQ ID NO: 1261742 - RNA, 19 nt, Homo sapiens
  misc_RNA (1)...(19): siRNA sense strand
cugguggccuggaaauaga

SEQ ID NO: 1261743 - RNA, 19 nt, Homo sapiens
  misc_RNA (1)...(19): siRNA sense strand
caaaagcaacugcacaaga

SEQ ID NO: 1261744 - RNA, 19 nt, Homo sapiens
  misc_RNA (1)...(19): siRNA sense strand
gccuggaaauagacucaga

SEQ ID NO: 1261745 - RNA, 19 nt, Homo sapiens
  misc_RNA (1)...(19): siRNA sense strand
gggauugugcuauggaaca

SEQ ID NO: 1261746 - RNA, 19 nt, Homo sapiens
  misc_RNA (1)...(19): siRNA sense strand
ggaagauuggcuggagaaa

SEQ ID NO: 1261747 - RNA, 19 nt, Homo sapiens
  misc_RNA (1)...(19): siRNA sense strand
ugaagaucucaaugaagua

SEQ ID NO: 1261748 - RNA, 19 nt, Homo sapiens
  misc_RNA (1)...(19): siRNA sense strand
gaagcccgaggcagaggaa

SEQ ID NO: 1261749 - RNA, 19 nt, Homo sapiens
  misc_RNA (1)...(19): siRNA sense strand
uuaaggugaugcccaaugc

SEQ ID NO: 1261750 - RNA, 19 nt, Homo sapiens
  misc_RNA (1)...(19): siRNA sense strand
ggagucagcaguggcaagu

SEQ ID NO: 1261751 - RNA, 19 nt, Homo sapiens
  misc_RNA (1)...(19): siRNA sense strand
guagaaacugaccacauag

SEQ ID NO: 1261752 - RNA, 19 nt, Homo sapiens
  misc_RNA (1)...(19): siRNA sense strand
uaaggacggugagcagcau

SEQ ID NO: 1261753 - RNA, 19 nt, Homo sapiens
  misc_RNA (1)...(19): siRNA sense strand
gugcuauggaacaucuuua

SEQ ID NO: 1261754 - RNA, 19 nt, Homo sapiens
  misc_RNA (1)...(19): siRNA sense strand
guaaaugcagagcuacaag

SEQ ID NO: 1261755 - RNA, 19 nt, Homo sapiens
  misc_RNA (1)...(19): siRNA sense strand
uguugugaguggaagauug

SEQ ID NO: 1261756 - RNA, 19 nt, Homo sapiens
  misc_RNA (1)...(19): siRNA sense strand
uggcaucagucaauguucu

SEQ ID NO: 1261757 - RNA, 19 nt, Homo sapiens
  misc_RNA (1)...(19): siRNA sense strand
gaagauuggcuggagaaaa

SEQ ID NO: 1261758 - RNA, 19 nt, Homo sapiens
  misc_RNA (1)...(19): siRNA sense strand
gcuucuacgauauaaaguu

SEQ ID NO: 1261759 - RNA, 19 nt, Homo sapiens
  misc_RNA (1)...(19): siRNA sense strand
gugagcagcaugaagaucu

SEQ ID NO: 1261760 - RNA, 19 nt, Homo sapiens
  misc_RNA (1)...(19): siRNA sense strand
agaaacugaccacauagug

SEQ ID NO: 1261761 - RNA, 19 nt, Homo sapiens
  misc_RNA (1)...(19): siRNA sense strand
ggccuggagcccaauguug

SEQ ID NO: 1261762 - RNA, 19 nt, Homo sapiens
  misc_RNA (1)...(19): siRNA sense strand
gccaauagcaaggaagauc

SEQ ID NO: 1261763 - RNA, 19 nt, Homo sapiens
  misc_RNA (1)...(19): siRNA sense strand
guuaaggugaugcccaaug

SEQ ID NO: 1261764 - RNA, 19 nt, Homo sapiens
  misc_RNA (1)...(19): siRNA sense strand
ggucuuguggacaguaguu

SEQ ID NO: 1261765 - RNA, 19 nt, Homo sapiens
  misc_RNA (1)...(19): siRNA sense strand
gggcacagaagugauucaa

SEQ ID NO: 1261766 - RNA, 19 nt, Homo sapiens
  misc_RNA (1)...(19): siRNA sense strand
guagccaaacuauucaaca

SEQ ID NO: 1261767 - RNA, 19 nt, Homo sapiens
  misc_RNA (1)...(19): siRNA sense strand
gcagcaugaagaucucaau

SEQ ID NO: 1261768 - RNA, 19 nt, Homo sapiens
  misc_RNA (1)...(19): siRNA sense strand
ggacggugagcagcaugaa

SEQ ID NO: 1261769 - RNA, 19 nt, Homo sapiens
  misc_RNA (1)...(19): siRNA sense strand
aaggugaugcccaaugcua

SEQ ID NO: 1261770 - RNA, 19 nt, Homo sapiens
  misc_RNA (1)...(19): siRNA sense strand
cagcaugaagaucucaaug

SEQ ID NO: 1261771 - RNA, 19 nt, Homo sapiens
  misc_RNA (1)...(19): siRNA sense strand
uuacuuaucaagcugaaag

SEQ ID NO: 1261772 - RNA, 19 nt, Homo sapiens
  misc_RNA (1)...(19): siRNA sense strand
acugguauccgaucagaga

SEQ ID NO: 1261773 - RNA, 19 nt, Homo sapiens
  misc_RNA (1)...(19): siRNA sense strand
gagcugcuaagccguacug

SEQ ID NO: 1261774 - RNA, 19 nt, Homo sapiens
  misc_RNA (1)...(19): siRNA sense strand
gcggguagagcaccaugau

SEQ ID NO: 1261775 - RNA, 19 nt, Homo sapiens
  misc_RNA (1)...(19): siRNA sense strand
gguagaaacugaccacaua

SEQ ID NO: 1261776 - RNA, 19 nt, Homo sapiens
  misc_RNA (1)...(19): siRNA sense strand
gcaaaggugucaucuucua

SEQ ID NO: 1261777 - RNA, 19 nt, Homo sapiens
  misc_RNA (1)...(19): siRNA sense strand
caaggaagaucauuaagga

SEQ ID NO: 1261778 - RNA, 19 nt, Homo sapiens
  misc_RNA (1)...(19): siRNA sense strand
gcaggaagguagaaacuga

SEQ ID NO: 1261779 - RNA, 19 nt, Homo sapiens
  misc_RNA (1)...(19): siRNA sense strand
gcaugaagaucucaaugaa

SEQ ID NO: 1261780 - RNA, 19 nt, Homo sapiens
  misc_RNA (1)...(19): siRNA sense strand
gaacaucuuuaaccgaaug

SEQ ID NO: 1261781 - RNA, 19 nt, Homo sapiens
  misc_RNA (1)...(19): siRNA sense strand
caacauucaugaagacuga

SEQ ID NO: 1261782 - RNA, 19 nt, Homo sapiens
  misc_RNA (1)...(19): siRNA sense strand
gcacagaagugauucaacu

SEQ ID NO: 1261783 - RNA, 19 nt, Homo sapiens
  misc_RNA (1)...(19): siRNA sense strand
gaacugguauccgaucaga

SEQ ID NO: 1261784 - RNA, 19 nt, Homo sapiens
  misc_RNA (1)...(19): siRNA sense strand
gaaagauccuccccgaaua

SEQ ID NO: 1261785 - RNA, 19 nt, Homo sapiens
  misc_RNA (1)...(19): siRNA sense strand
gauauaaaguugggaagga

SEQ ID NO: 1261786 - RNA, 19 nt, Homo sapiens
  misc_RNA (1)...(19): siRNA sense strand
gaucagagagugagacaga

SEQ ID NO: 1261787 - RNA, 19 nt, Homo sapiens
  misc_RNA (1)...(19): siRNA sense strand
ugaaguagccaaacuauuc

SEQ ID NO: 1261788 - RNA, 19 nt, Homo sapiens
  misc_RNA (1)...(19): siRNA sense strand
cggcaaaggugucaucuuc

SEQ ID NO: 1261789 - RNA, 19 nt, Homo sapiens
  misc_RNA (1)...(19): siRNA sense strand
gaaaggaaauaugggaaag

SEQ ID NO: 1261790 - RNA, 19 nt, Homo sapiens
  misc_RNA (1)...(19): siRNA sense strand
ucaauguucuggagugauu

SEQ ID NO: 1261791 - RNA, 19 nt, Homo sapiens
  misc_RNA (1)...(19): siRNA sense strand
agucagcaguggcaaguua

SEQ ID NO: 1261792 - RNA, 19 nt, Homo sapiens
  misc_RNA (1)...(19): siRNA sense strand
gccaaacuauucaacauuc

SEQ ID NO: 1261793 - RNA, 19 nt, Homo sapiens
  misc_RNA (1)...(19): siRNA sense strand
gauguuggcuaugaagcua

SEQ ID NO: 1261794 - RNA, 19 nt, Homo sapiens
  misc_RNA (1)...(19): siRNA sense strand
caagcacgcucuaacaucu

SEQ ID NO: 1261795 - RNA, 19 nt, Homo sapiens
  misc_RNA (1)...(19): siRNA sense strand
gcugcaugcuucuacgaua

SEQ ID NO: 1261796 - RNA, 19 nt, Homo sapiens
  misc_RNA (1)...(19): siRNA sense strand
gaaagacggcaggaaggua

SEQ ID NO: 1261797 - RNA, 19 nt, Homo sapiens
  misc_RNA (1)...(19): siRNA sense strand
uagcaaggaagaucauuaa

SEQ ID NO: 1261798 - RNA, 19 nt, Homo sapiens
  misc_RNA (1)...(19): siRNA sense strand
gcaccaugaucacgcuguu

SEQ ID NO: 1261799 - RNA, 19 nt, Homo sapiens
  misc_RNA (1)...(19): siRNA sense strand
gaaguagccaaacuauuca

SEQ ID NO: 1261800 - RNA, 19 nt, Homo sapiens
  misc_RNA (1)...(19): siRNA sense strand
uccgaggccucagaaauua

SEQ ID NO: 1261801 - RNA, 19 nt, Homo sapiens
  misc_RNA (1)...(19): siRNA sense strand
ggagcccaauguugaguug

SEQ ID NO: 1261802 - RNA, 19 nt, Homo sapiens
  misc_RNA (1)...(19): siRNA sense strand
caagacugguggccuggaa

SEQ ID NO: 1261803 - RNA, 19 nt, Homo sapiens
  misc_RNA (1)...(19): siRNA sense strand
gcaaggaagaucauuaagg

SEQ ID NO: 1261804 - RNA, 19 nt, Homo sapiens
  misc_RNA (1)...(19): siRNA sense strand
gaaugccaauagcaaggaa

SEQ ID NO: 1261805 - RNA, 19 nt, Homo sapiens
  misc_RNA (1)...(19): siRNA sense strand
gcaugcuucuacgauauaa

SEQ ID NO: 1261806 - RNA, 19 nt, Homo sapiens
  misc_RNA (1)...(19): siRNA sense strand
caaugaaguagccaaacua

SEQ ID NO: 1261807 - RNA, 19 nt, Homo sapiens
  misc_RNA (1)...(19): siRNA sense strand
ccgaauaccucagcaacug

SEQ ID NO: 1261808 - RNA, 19 nt, Homo sapiens
  misc_RNA (1)...(19): siRNA sense strand
cagaagugauucaacucuu

SEQ ID NO: 1261809 - RNA, 19 nt, Homo sapiens
  misc_RNA (1)...(19): siRNA sense strand
cuucuacgauauaaaguug

SEQ ID NO: 1261810 - RNA, 19 nt, Homo sapiens
  misc_RNA (1)...(19): siRNA sense strand
ucaaugaaguagccaaacu

SEQ ID NO: 1261811 - RNA, 19 nt, Homo sapiens
  misc_RNA (1)...(19): siRNA sense strand
augaagaucucaaugaagu

SEQ ID NO: 1261812 - RNA, 19 nt, Homo sapiens
  misc_RNA (1)...(19): siRNA sense strand
guccgaggccucagaaauu

SEQ ID NO: 1261813 - RNA, 19 nt, Homo sapiens
  misc_RNA (1)...(19): siRNA sense strand
ccggguaaaugcagagcua

SEQ ID NO: 1261814 - RNA, 19 nt, Homo sapiens
  misc_RNA (1)...(19): siRNA sense strand
gaagaucucaaugaaguag

SEQ ID NO: 1261815 - RNA, 19 nt, Homo sapiens
  misc_RNA (1)...(19): siRNA sense strand
ggguagagcaccaugauca

SEQ ID NO: 1261816 - RNA, 19 nt, Homo sapiens
  misc_RNA (1)...(19): siRNA sense strand
ccaaacuauucaacauuca

SEQ ID NO: 1261817 - RNA, 19 nt, Homo sapiens
  misc_RNA (1)...(19): siRNA sense strand
cuaugaagcuauuggucuu

SEQ ID NO: 1261818 - RNA, 19 nt, Homo sapiens
  misc_RNA (1)...(19): siRNA sense strand
ggaaagauccuccccgaau

SEQ ID NO: 1261819 - RNA, 19 nt, Homo sapiens
  misc_RNA (1)...(19): siRNA sense strand
uagccaaacuauucaacau

SEQ ID NO: 1261820 - RNA, 19 nt, Homo sapiens
  misc_RNA (1)...(19): siRNA sense strand
uuugguggcuuccggguaa

SEQ ID NO: 1261821 - RNA, 19 nt, Homo sapiens
  misc_RNA (1)...(19): siRNA sense strand
ccucagaaauuacuauucc

SEQ ID NO: 1261822 - RNA, 19 nt, Homo sapiens
  misc_RNA (1)...(19): siRNA sense strand
ggaacaucuuuaaccgaau

SEQ ID NO: 1261823 - RNA, 19 nt, Homo sapiens
  misc_RNA (1)...(19): siRNA sense strand
ggugaugcccaaugcuauu

SEQ ID NO: 1261824 - RNA, 19 nt, Homo sapiens
  misc_RNA (1)...(19): siRNA sense strand
aaggaaauaugggaaagau

SEQ ID NO: 1261825 - RNA, 19 nt, Homo sapiens
  misc_RNA (1)...(19): siRNA sense strand
agaaaggaaauaugggaaa

SEQ ID NO: 1261826 - RNA, 19 nt, Homo sapiens
  misc_RNA (1)...(19): siRNA sense strand
cuacaagcacgcucuaaca

SEQ ID NO: 1261827 - RNA, 19 nt, Homo sapiens
  misc_RNA (1)...(19): siRNA sense strand
cugcaugcuucuacgauau

SEQ ID NO: 1261828 - RNA, 19 nt, Homo sapiens
  misc_RNA (1)...(19): siRNA sense strand
gccuggagcccaauguuga

SEQ ID NO: 1261829 - RNA, 19 nt, Homo sapiens
  misc_RNA (1)...(19): siRNA sense strand
aagauuggcuggagaaaau

SEQ ID NO: 1261830 - RNA, 19 nt, Homo sapiens
  misc_RNA (1)...(19): siRNA sense strand
gguaaaugcagagcuacaa

SEQ ID NO: 1261831 - RNA, 19 nt, Homo sapiens
  misc_RNA (1)...(19): siRNA sense strand
ccaauagcaaggaagauca

SEQ ID NO: 1261832 - RNA, 19 nt, Homo sapiens
  misc_RNA (1)...(19): siRNA sense strand
ggauugugcuauggaacau

SEQ ID NO: 1261833 - RNA, 19 nt, Homo sapiens
  misc_RNA (1)...(19): siRNA sense strand
ggaggacuacggcaaaggu

SEQ ID NO: 1261834 - RNA, 19 nt, Homo sapiens
  misc_RNA (1)...(19): siRNA sense strand
auagcaaggaagaucauua

SEQ ID NO: 1261835 - RNA, 19 nt, Homo sapiens
  misc_RNA (1)...(19): siRNA sense strand
gcaacuggaccauggaaaa

SEQ ID NO: 1261836 - RNA, 19 nt, Homo sapiens
  misc_RNA (1)...(19): siRNA sense strand
cugguggccuggaaauaga

SEQ ID NO: 1261837 - RNA, 19 nt, Homo sapiens
  misc_RNA (1)...(19): siRNA sense strand
caaaagcaacugcacaaga

SEQ ID NO: 1261838 - RNA, 19 nt, Homo sapiens
  misc_RNA (1)...(19): siRNA sense strand
gccuggaaauagacucaga

SEQ ID NO: 1261839 - RNA, 19 nt, Homo sapiens
  misc_RNA (1)...(19): siRNA sense strand
gggauugugcuauggaaca

SEQ ID NO: 1261840 - RNA, 19 nt, Homo sapiens
  misc_RNA (1)...(19): siRNA sense strand
ggaagauuggcuggagaaa

SEQ ID NO: 1261841 - RNA, 19 nt, Homo sapiens
  misc_RNA (1)...(19): siRNA sense strand
ugaagaucucaaugaagua

SEQ ID NO: 1261842 - RNA, 19 nt, Homo sapiens
  misc_RNA (1)...(19): siRNA sense strand
gaagcccgaggcagaggaa

SEQ ID NO: 1261843 - RNA, 19 nt, Homo sapiens
  misc_RNA (1)...(19): siRNA sense strand
uuaaggugaugcccaaugc

SEQ ID NO: 1261844 - RNA, 19 nt, Homo sapiens
  misc_RNA (1)...(19): siRNA sense strand
ggagucagcaguggcaagu

SEQ ID NO: 1261845 - RNA, 19 nt, Homo sapiens
  misc_RNA (1)...(19): siRNA sense strand
guagaaacugaccacauag

SEQ ID NO: 1261846 - RNA, 19 nt, Homo sapiens
  misc_RNA (1)...(19): siRNA sense strand
uaaggacggugagcagcau

SEQ ID NO: 1261847 - RNA, 19 nt, Homo sapiens
  misc_RNA (1)...(19): siRNA sense strand
gugcuauggaacaucuuua

SEQ ID NO: 1261848 - RNA, 19 nt, Homo sapiens
  misc_RNA (1)...(19): siRNA sense strand
guaaaugcagagcuacaag

SEQ ID NO: 1261849 - RNA, 19 nt, Homo sapiens
  misc_RNA (1)...(19): siRNA sense strand
uguugugaguggaagauug

SEQ ID NO: 1261850 - RNA, 19 nt, Homo sapiens
  misc_RNA (1)...(19): siRNA sense strand
uggcaucagucaauguucu

SEQ ID NO: 1261851 - RNA, 19 nt, Homo sapiens
  misc_RNA (1)...(19): siRNA sense strand
gaagauuggcuggagaaaa

SEQ ID NO: 1261852 - RNA, 19 nt, Homo sapiens
  misc_RNA (1)...(19): siRNA sense strand
gcuucuacgauauaaaguu

SEQ ID NO: 1261853 - RNA, 19 nt, Homo sapiens
  misc_RNA (1)...(19): siRNA sense strand
gugagcagcaugaagaucu

SEQ ID NO: 1261854 - RNA, 19 nt, Homo sapiens
  misc_RNA (1)...(19): siRNA sense strand
agaaacugaccacauagug

SEQ ID NO: 1261855 - RNA, 19 nt, Homo sapiens
  misc_RNA (1)...(19): siRNA sense strand
ggccuggagcccaauguug

SEQ ID NO: 1261856 - RNA, 19 nt, Homo sapiens
  misc_RNA (1)...(19): siRNA sense strand
gccaauagcaaggaagauc

SEQ ID NO: 1261857 - RNA, 19 nt, Homo sapiens
  misc_RNA (1)...(19): siRNA sense strand
guuaaggugaugcccaaug

SEQ ID NO: 1261858 - RNA, 19 nt, Homo sapiens
  misc_RNA (1)...(19): siRNA sense strand
ggucuuguggacaguaguu

SEQ ID NO: 1261859 - RNA, 19 nt, Homo sapiens
  misc_RNA (1)...(19): siRNA sense strand
gggcacagaagugauucaa

SEQ ID NO: 1261860 - RNA, 19 nt, Homo sapiens
  misc_RNA (1)...(19): siRNA sense strand
guagccaaacuauucaaca

SEQ ID NO: 1261861 - RNA, 19 nt, Homo sapiens
  misc_RNA (1)...(19): siRNA sense strand
gcagcaugaagaucucaau

SEQ ID NO: 1261862 - RNA, 19 nt, Homo sapiens
  misc_RNA (1)...(19): siRNA sense strand
ggacggugagcagcaugaa

SEQ ID NO: 1261863 - RNA, 19 nt, Homo sapiens
  misc_RNA (1)...(19): siRNA sense strand
aaggugaugcccaaugcua

SEQ ID NO: 1261864 - RNA, 19 nt, Homo sapiens
  misc_RNA (1)...(19): siRNA sense strand
cagcaugaagaucucaaug

SEQ ID NO: 1261865 - RNA, 19 nt, Homo sapiens
  misc_RNA (1)...(19): siRNA sense strand
uuacuuaucaagcugaaag

SEQ ID NO: 1261866 - RNA, 19 nt, Homo sapiens
  misc_RNA (1)...(19): siRNA sense strand
acugguauccgaucagaga

SEQ ID NO: 1261867 - RNA, 19 nt, Homo sapiens
  misc_RNA (1)...(19): siRNA sense strand
gagcugcuaagccguacug

SEQ ID NO: 1261868 - RNA, 19 nt, Homo sapiens
  misc_RNA (1)...(19): siRNA sense strand
gcggguagagcaccaugau

SEQ ID NO: 1261869 - RNA, 19 nt, Homo sapiens
  misc_RNA (1)...(19): siRNA sense strand
gaugugguccaacuucuuc

SEQ ID NO: 1261870 - RNA, 19 nt, Homo sapiens
  misc_RNA (1)...(19): siRNA sense strand
cuggagguguuccggcauu

SEQ ID NO: 1261871 - RNA, 19 nt, Homo sapiens
  misc_RNA (1)...(19): siRNA sense strand
gaugugguccaacuucuuc

SEQ ID NO: 1261872 - RNA, 19 nt, Homo sapiens
  misc_RNA (1)...(19): siRNA sense strand
cuggagguguuccggcauu

SEQ ID NO: 1261873 - RNA, 19 nt, Homo sapiens
  misc_RNA (1)...(19): siRNA sense strand
gaugugguccaacuucuuc

SEQ ID NO: 1261874 - RNA, 19 nt, Homo sapiens
  misc_RNA (1)...(19): siRNA sense strand
cuggagguguuccggcauu

SEQ ID NO: 1261875 - RNA, 19 nt, Homo sapiens
  misc_RNA (1)...(19): siRNA sense strand
aaaguacucugcuggauua

SEQ ID NO: 1261876 - RNA, 19 nt, Homo sapiens
  misc_RNA (1)...(19): siRNA sense strand
guacucugcuggauuagaa

SEQ ID NO: 1261877 - RNA, 19 nt, Homo sapiens
  misc_RNA (1)...(19): siRNA sense strand
gagcacacccagcaaauga

SEQ ID NO: 1261878 - RNA, 19 nt, Homo sapiens
  misc_RNA (1)...(19): siRNA sense strand
ccuccgggcugaagacuuu

SEQ ID NO: 1261879 - RNA, 19 nt, Homo sapiens
  misc_RNA (1)...(19): siRNA sense strand
ugaaggagcggcagaaguu

SEQ ID NO: 1261880 - RNA, 19 nt, Homo sapiens
  misc_RNA (1)...(19): siRNA sense strand
ggauuagaauuacuuagca

SEQ ID NO: 1261881 - RNA, 19 nt, Homo sapiens
  misc_RNA (1)...(19): siRNA sense strand
uagaauccaugacagcaaa

SEQ ID NO: 1261882 - RNA, 19 nt, Homo sapiens
  misc_RNA (1)...(19): siRNA sense strand
uagaauuacuuagcaggua

SEQ ID NO: 1261883 - RNA, 19 nt, Homo sapiens
  misc_RNA (1)...(19): siRNA sense strand
cagaagagccaaagacugu

SEQ ID NO: 1261884 - RNA, 19 nt, Homo sapiens
  misc_RNA (1)...(19): siRNA sense strand
caaaguacucugcuggauu

SEQ ID NO: 1261885 - RNA, 19 nt, Homo sapiens
  misc_RNA (1)...(19): siRNA sense strand
cuggagagcugguggauag

SEQ ID NO: 1261886 - RNA, 19 nt, Homo sapiens
  misc_RNA (1)...(19): siRNA sense strand
ccugaacucuggaggagaa

SEQ ID NO: 1261887 - RNA, 19 nt, Homo sapiens
  misc_RNA (1)...(19): siRNA sense strand
gccaaagacugugcaagug

SEQ ID NO: 1261888 - RNA, 19 nt, Homo sapiens
  misc_RNA (1)...(19): siRNA sense strand
gaaagaugcaaacauaugc

SEQ ID NO: 1261889 - RNA, 19 nt, Homo sapiens
  misc_RNA (1)...(19): siRNA sense strand
gcagugugaauuagaaaga

SEQ ID NO: 1261890 - RNA, 19 nt, Homo sapiens
  misc_RNA (1)...(19): siRNA sense strand
agaacaaccugcugcaucu

SEQ ID NO: 1261891 - RNA, 19 nt, Homo sapiens
  misc_RNA (1)...(19): siRNA sense strand
agaauuacuuagcagguau

SEQ ID NO: 1261892 - RNA, 19 nt, Homo sapiens
  misc_RNA (1)...(19): siRNA sense strand
gaggagaagagaacacugu

SEQ ID NO: 1261893 - RNA, 19 nt, Homo sapiens
  misc_RNA (1)...(19): siRNA sense strand
gaaggagcggcagaaguuu

SEQ ID NO: 1261894 - RNA, 19 nt, Homo sapiens
  misc_RNA (1)...(19): siRNA sense strand
agaaagaugcaaacauaug

SEQ ID NO: 1261895 - RNA, 19 nt, Homo sapiens
  misc_RNA (1)...(19): siRNA sense strand
ccaaaguacucugcuggau

SEQ ID NO: 1261896 - RNA, 19 nt, Homo sapiens
  misc_RNA (1)...(19): siRNA sense strand
gcgagguggucaugcuuuc

SEQ ID NO: 1261897 - RNA, 19 nt, Homo sapiens
  misc_RNA (1)...(19): siRNA sense strand
uuuaaucgcagacuuagaa

SEQ ID NO: 1261898 - RNA, 19 nt, Homo sapiens
  misc_RNA (1)...(19): siRNA sense strand
ugucauccauggaagugaa

SEQ ID NO: 1261899 - RNA, 19 nt, Homo sapiens
  misc_RNA (1)...(19): siRNA sense strand
agaagguccuggaaaugga

SEQ ID NO: 1261900 - RNA, 19 nt, Homo sapiens
  misc_RNA (1)...(19): siRNA sense strand
uaagaggaaggaacuugaa

SEQ ID NO: 1261901 - RNA, 19 nt, Homo sapiens
  misc_RNA (1)...(19): siRNA sense strand
agacuuaugugggcagugu

SEQ ID NO: 1261902 - RNA, 19 nt, Homo sapiens
  misc_RNA (1)...(19): siRNA sense strand
ggaagugaacguggacaug

SEQ ID NO: 1261903 - RNA, 19 nt, Homo sapiens
  misc_RNA (1)...(19): siRNA sense strand
gcccauaggcagcauguca

SEQ ID NO: 1261904 - RNA, 19 nt, Homo sapiens
  misc_RNA (1)...(19): siRNA sense strand
caacuggagaauuacaaga

SEQ ID NO: 1261905 - RNA, 19 nt, Homo sapiens
  misc_RNA (1)...(19): siRNA sense strand
agcaggacauggagcagua

SEQ ID NO: 1261906 - RNA, 19 nt, Homo sapiens
  misc_RNA (1)...(19): siRNA sense strand
acuggagaauuacaagaaa

SEQ ID NO: 1261907 - RNA, 19 nt, Homo sapiens
  misc_RNA (1)...(19): siRNA sense strand
agacuuagaauccaugaca

SEQ ID NO: 1261908 - RNA, 19 nt, Homo sapiens
  misc_RNA (1)...(19): siRNA sense strand
uugaggagguagagaacaa

SEQ ID NO: 1261909 - RNA, 19 nt, Homo sapiens
  misc_RNA (1)...(19): siRNA sense strand
ugacagcaaaucugacuca

SEQ ID NO: 1261910 - RNA, 19 nt, Homo sapiens
  misc_RNA (1)...(19): siRNA sense strand
ggagcacacccagcaaaug

SEQ ID NO: 1261911 - RNA, 19 nt, Homo sapiens
  misc_RNA (1)...(19): siRNA sense strand
cagcuuuaaucgcagacuu

SEQ ID NO: 1261912 - RNA, 19 nt, Homo sapiens
  misc_RNA (1)...(19): siRNA sense strand
gcaucuggaagacuuaugu

SEQ ID NO: 1261913 - RNA, 19 nt, Homo sapiens
  misc_RNA (1)...(19): siRNA sense strand
gcuggauuagaauuacuua

SEQ ID NO: 1261914 - RNA, 19 nt, Homo sapiens
  misc_RNA (1)...(19): siRNA sense strand
agauggaccugauggacau

SEQ ID NO: 1261915 - RNA, 19 nt, Homo sapiens
  misc_RNA (1)...(19): siRNA sense strand
gcacacccagcaaaugaag

SEQ ID NO: 1261916 - RNA, 19 nt, Homo sapiens
  misc_RNA (1)...(19): siRNA sense strand
cuuagcagguaugaggaua

SEQ ID NO: 1261917 - RNA, 19 nt, Homo sapiens
  misc_RNA (1)...(19): siRNA sense strand
cagaagguccuggaaaugg

SEQ ID NO: 1261918 - RNA, 19 nt, Homo sapiens
  misc_RNA (1)...(19): siRNA sense strand
gcaacuggagaauuacaag

SEQ ID NO: 1261919 - RNA, 19 nt, Homo sapiens
  misc_RNA (1)...(19): siRNA sense strand
gaauuagaaagaugcaaac

SEQ ID NO: 1261920 - RNA, 19 nt, Homo sapiens
  misc_RNA (1)...(19): siRNA sense strand
ggauacaugggcugcacuu

SEQ ID NO: 1261921 - RNA, 19 nt, Homo sapiens
  misc_RNA (1)...(19): siRNA sense strand
aagcaaaagugaaaagcaa

SEQ ID NO: 1261922 - RNA, 19 nt, Homo sapiens
  misc_RNA (1)...(19): siRNA sense strand
ggauagcgagguggucaug

SEQ ID NO: 1261923 - RNA, 19 nt, Homo sapiens
  misc_RNA (1)...(19): siRNA sense strand
ugggcagugugaauuagaa

SEQ ID NO: 1261924 - RNA, 19 nt, Homo sapiens
  misc_RNA (1)...(19): siRNA sense strand
gaauuacuuagcagguaug

SEQ ID NO: 1261925 - RNA, 19 nt, Homo sapiens
  misc_RNA (1)...(19): siRNA sense strand
gcagacuuagaauccauga

SEQ ID NO: 1261926 - RNA, 19 nt, Homo sapiens
  misc_RNA (1)...(19): siRNA sense strand
auacaugggcugcacuuca

SEQ ID NO: 1261927 - RNA, 19 nt, Homo sapiens
  misc_RNA (1)...(19): siRNA sense strand
gggcagugugaauuagaaa

SEQ ID NO: 1261928 - RNA, 19 nt, Homo sapiens
  misc_RNA (1)...(19): siRNA sense strand
ucacagaagagccaaagac

SEQ ID NO: 1261929 - RNA, 19 nt, Homo sapiens
  misc_RNA (1)...(19): siRNA sense strand
aauaagaggaaggaacuug

SEQ ID NO: 1261930 - RNA, 19 nt, Homo sapiens
  misc_RNA (1)...(19): siRNA sense strand
ugagcgugcagcaggauuu

SEQ ID NO: 1261931 - RNA, 19 nt, Homo sapiens
  misc_RNA (1)...(19): siRNA sense strand
gaacaaccugcugcaucug

SEQ ID NO: 1261932 - RNA, 19 nt, Homo sapiens
  misc_RNA (1)...(19): siRNA sense strand
uggagcagauggaccugau

SEQ ID NO: 1261933 - RNA, 19 nt, Homo sapiens
  misc_RNA (1)...(19): siRNA sense strand
auaagaggaaggaacuuga

SEQ ID NO: 1261934 - RNA, 19 nt, Homo sapiens
  misc_RNA (1)...(19): siRNA sense strand
aaaguacucugcuggauua

SEQ ID NO: 1261935 - RNA, 19 nt, Homo sapiens
  misc_RNA (1)...(19): siRNA sense strand
guacucugcuggauuagaa

SEQ ID NO: 1261936 - RNA, 19 nt, Homo sapiens
  misc_RNA (1)...(19): siRNA sense strand
gagcacacccagcaaauga

SEQ ID NO: 1261937 - RNA, 19 nt, Homo sapiens
  misc_RNA (1)...(19): siRNA sense strand
ccuccgggcugaagacuuu

SEQ ID NO: 1261938 - RNA, 19 nt, Homo sapiens
  misc_RNA (1)...(19): siRNA sense strand
ugaaggagcggcagaaguu

SEQ ID NO: 1261939 - RNA, 19 nt, Homo sapiens
  misc_RNA (1)...(19): siRNA sense strand
ggauuagaauuacuuagca

SEQ ID NO: 1261940 - RNA, 19 nt, Homo sapiens
  misc_RNA (1)...(19): siRNA sense strand
uagaauccaugacagcaaa

SEQ ID NO: 1261941 - RNA, 19 nt, Homo sapiens
  misc_RNA (1)...(19): siRNA sense strand
uagaauuacuuagcaggua

SEQ ID NO: 1261942 - RNA, 19 nt, Homo sapiens
  misc_RNA (1)...(19): siRNA sense strand
cagaagagccaaagacugu

SEQ ID NO: 1261943 - RNA, 19 nt, Homo sapiens
  misc_RNA (1)...(19): siRNA sense strand
caaaguacucugcuggauu

SEQ ID NO: 1261944 - RNA, 19 nt, Homo sapiens
  misc_RNA (1)...(19): siRNA sense strand
cuggagagcugguggauag

SEQ ID NO: 1261945 - RNA, 19 nt, Homo sapiens
  misc_RNA (1)...(19): siRNA sense strand
ccugaacucuggaggagaa

SEQ ID NO: 1261946 - RNA, 19 nt, Homo sapiens
  misc_RNA (1)...(19): siRNA sense strand
gccaaagacugugcaagug

SEQ ID NO: 1261947 - RNA, 19 nt, Homo sapiens
  misc_RNA (1)...(19): siRNA sense strand
gaaagaugcaaacauaugc

SEQ ID NO: 1261948 - RNA, 19 nt, Homo sapiens
  misc_RNA (1)...(19): siRNA sense strand
gcagugugaauuagaaaga

SEQ ID NO: 1261949 - RNA, 19 nt, Homo sapiens
  misc_RNA (1)...(19): siRNA sense strand
agaacaaccugcugcaucu

SEQ ID NO: 1261950 - RNA, 19 nt, Homo sapiens
  misc_RNA (1)...(19): siRNA sense strand
agaauuacuuagcagguau

SEQ ID NO: 1261951 - RNA, 19 nt, Homo sapiens
  misc_RNA (1)...(19): siRNA sense strand
gaggagaagagaacacugu

SEQ ID NO: 1261952 - RNA, 19 nt, Homo sapiens
  misc_RNA (1)...(19): siRNA sense strand
gaaggagcggcagaaguuu

SEQ ID NO: 1261953 - RNA, 19 nt, Homo sapiens
  misc_RNA (1)...(19): siRNA sense strand
agaaagaugcaaacauaug

SEQ ID NO: 1261954 - RNA, 19 nt, Homo sapiens
  misc_RNA (1)...(19): siRNA sense strand
ccaaaguacucugcuggau

SEQ ID NO: 1261955 - RNA, 19 nt, Homo sapiens
  misc_RNA (1)...(19): siRNA sense strand
gcgagguggucaugcuuuc

SEQ ID NO: 1261956 - RNA, 19 nt, Homo sapiens
  misc_RNA (1)...(19): siRNA sense strand
uuuaaucgcagacuuagaa

SEQ ID NO: 1261957 - RNA, 19 nt, Homo sapiens
  misc_RNA (1)...(19): siRNA sense strand
ugucauccauggaagugaa

SEQ ID NO: 1261958 - RNA, 19 nt, Homo sapiens
  misc_RNA (1)...(19): siRNA sense strand
agaagguccuggaaaugga

SEQ ID NO: 1261959 - RNA, 19 nt, Homo sapiens
  misc_RNA (1)...(19): siRNA sense strand
uaagaggaaggaacuugaa

SEQ ID NO: 1261960 - RNA, 19 nt, Homo sapiens
  misc_RNA (1)...(19): siRNA sense strand
agacuuaugugggcagugu

SEQ ID NO: 1261961 - RNA, 19 nt, Homo sapiens
  misc_RNA (1)...(19): siRNA sense strand
ggaagugaacguggacaug

SEQ ID NO: 1261962 - RNA, 19 nt, Homo sapiens
  misc_RNA (1)...(19): siRNA sense strand
gcccauaggcagcauguca

SEQ ID NO: 1261963 - RNA, 19 nt, Homo sapiens
  misc_RNA (1)...(19): siRNA sense strand
caacuggagaauuacaaga

SEQ ID NO: 1261964 - RNA, 19 nt, Homo sapiens
  misc_RNA (1)...(19): siRNA sense strand
agcaggacauggagcagua

SEQ ID NO: 1261965 - RNA, 19 nt, Homo sapiens
  misc_RNA (1)...(19): siRNA sense strand
acuggagaauuacaagaaa

SEQ ID NO: 1261966 - RNA, 19 nt, Homo sapiens
  misc_RNA (1)...(19): siRNA sense strand
agacuuagaauccaugaca

SEQ ID NO: 1261967 - RNA, 19 nt, Homo sapiens
  misc_RNA (1)...(19): siRNA sense strand
uugaggagguagagaacaa

SEQ ID NO: 1261968 - RNA, 19 nt, Homo sapiens
  misc_RNA (1)...(19): siRNA sense strand
ugacagcaaaucugacuca

SEQ ID NO: 1261969 - RNA, 19 nt, Homo sapiens
  misc_RNA (1)...(19): siRNA sense strand
ggagcacacccagcaaaug

SEQ ID NO: 1261970 - RNA, 19 nt, Homo sapiens
  misc_RNA (1)...(19): siRNA sense strand
cagcuuuaaucgcagacuu

SEQ ID NO: 1261971 - RNA, 19 nt, Homo sapiens
  misc_RNA (1)...(19): siRNA sense strand
gcaucuggaagacuuaugu

SEQ ID NO: 1261972 - RNA, 19 nt, Homo sapiens
  misc_RNA (1)...(19): siRNA sense strand
gcuggauuagaauuacuua

SEQ ID NO: 1261973 - RNA, 19 nt, Homo sapiens
  misc_RNA (1)...(19): siRNA sense strand
agauggaccugauggacau

SEQ ID NO: 1261974 - RNA, 19 nt, Homo sapiens
  misc_RNA (1)...(19): siRNA sense strand
gcacacccagcaaaugaag

SEQ ID NO: 1261975 - RNA, 19 nt, Homo sapiens
  misc_RNA (1)...(19): siRNA sense strand
cuuagcagguaugaggaua

SEQ ID NO: 1261976 - RNA, 19 nt, Homo sapiens
  misc_RNA (1)...(19): siRNA sense strand
cagaagguccuggaaaugg

SEQ ID NO: 1261977 - RNA, 19 nt, Homo sapiens
  misc_RNA (1)...(19): siRNA sense strand
gcaacuggagaauuacaag

SEQ ID NO: 1261978 - RNA, 19 nt, Homo sapiens
  misc_RNA (1)...(19): siRNA sense strand
gaauuagaaagaugcaaac

SEQ ID NO: 1261979 - RNA, 19 nt, Homo sapiens
  misc_RNA (1)...(19): siRNA sense strand
ggauacaugggcugcacuu

SEQ ID NO: 1261980 - RNA, 19 nt, Homo sapiens
  misc_RNA (1)...(19): siRNA sense strand
aagcaaaagugaaaagcaa

SEQ ID NO: 1261981 - RNA, 19 nt, Homo sapiens
  misc_RNA (1)...(19): siRNA sense strand
ggauagcgagguggucaug

SEQ ID NO: 1261982 - RNA, 19 nt, Homo sapiens
  misc_RNA (1)...(19): siRNA sense strand
ugggcagugugaauuagaa

SEQ ID NO: 1261983 - RNA, 19 nt, Homo sapiens
  misc_RNA (1)...(19): siRNA sense strand
gaauuacuuagcagguaug

SEQ ID NO: 1261984 - RNA, 19 nt, Homo sapiens
  misc_RNA (1)...(19): siRNA sense strand
gcagacuuagaauccauga

SEQ ID NO: 1261985 - RNA, 19 nt, Homo sapiens
  misc_RNA (1)...(19): siRNA sense strand
auacaugggcugcacuuca

SEQ ID NO: 1261986 - RNA, 19 nt, Homo sapiens
  misc_RNA (1)...(19): siRNA sense strand
gggcagugugaauuagaaa

SEQ ID NO: 1261987 - RNA, 19 nt, Homo sapiens
  misc_RNA (1)...(19): siRNA sense strand
ucacagaagagccaaagac

SEQ ID NO: 1261988 - RNA, 19 nt, Homo sapiens
  misc_RNA (1)...(19): siRNA sense strand
aauaagaggaaggaacuug

SEQ ID NO: 1261989 - RNA, 19 nt, Homo sapiens
  misc_RNA (1)...(19): siRNA sense strand
ugagcgugcagcaggauuu

SEQ ID NO: 1261990 - RNA, 19 nt, Homo sapiens
  misc_RNA (1)...(19): siRNA sense strand
gaacaaccugcugcaucug

SEQ ID NO: 1261991 - RNA, 19 nt, Homo sapiens
  misc_RNA (1)...(19): siRNA sense strand
uggagcagauggaccugau

SEQ ID NO: 1261992 - RNA, 19 nt, Homo sapiens
  misc_RNA (1)...(19): siRNA sense strand
auaagaggaaggaacuuga

SEQ ID NO: 1261993 - RNA, 19 nt, Homo sapiens
  misc_RNA (1)...(19): siRNA sense strand
gagcacacccagcaaauga

SEQ ID NO: 1261994 - RNA, 19 nt, Homo sapiens
  misc_RNA (1)...(19): siRNA sense strand
ugaaggagcggcagaaguu

SEQ ID NO: 1261995 - RNA, 19 nt, Homo sapiens
  misc_RNA (1)...(19): siRNA sense strand
uagaauccaugacagcaaa

SEQ ID NO: 1261996 - RNA, 19 nt, Homo sapiens
  misc_RNA (1)...(19): siRNA sense strand
ccugaacucuggaggagaa

SEQ ID NO: 1261997 - RNA, 19 nt, Homo sapiens
  misc_RNA (1)...(19): siRNA sense strand
gcagugugaauuagaaaga

SEQ ID NO: 1261998 - RNA, 19 nt, Homo sapiens
  misc_RNA (1)...(19): siRNA sense strand
gaaagaugcaaacauaugc

SEQ ID NO: 1261999 - RNA, 19 nt, Homo sapiens
  misc_RNA (1)...(19): siRNA sense strand
agaacaaccugcugcaucu

SEQ ID NO: 1262000 - RNA, 19 nt, Homo sapiens
  misc_RNA (1)...(19): siRNA sense strand
agaaagaugcaaacauaug

SEQ ID NO: 1262001 - RNA, 19 nt, Homo sapiens
  misc_RNA (1)...(19): siRNA sense strand
gaggagaagagaacacugu

SEQ ID NO: 1262002 - RNA, 19 nt, Homo sapiens
  misc_RNA (1)...(19): siRNA sense strand
gaaggagcggcagaaguuu

SEQ ID NO: 1262003 - RNA, 19 nt, Homo sapiens
  misc_RNA (1)...(19): siRNA sense strand
agacuuaugugggcagugu

SEQ ID NO: 1262004 - RNA, 19 nt, Homo sapiens
  misc_RNA (1)...(19): siRNA sense strand
ugucauccauggaagugaa

SEQ ID NO: 1262005 - RNA, 19 nt, Homo sapiens
  misc_RNA (1)...(19): siRNA sense strand
agaagguccuggaaaugga

SEQ ID NO: 1262006 - RNA, 19 nt, Homo sapiens
  misc_RNA (1)...(19): siRNA sense strand
uaagaggaaggaacuugaa

SEQ ID NO: 1262007 - RNA, 19 nt, Homo sapiens
  misc_RNA (1)...(19): siRNA sense strand
uuuaaucgcagacuuagaa

SEQ ID NO: 1262008 - RNA, 19 nt, Homo sapiens
  misc_RNA (1)...(19): siRNA sense strand
ggaagugaacguggacaug

SEQ ID NO: 1262009 - RNA, 19 nt, Homo sapiens
  misc_RNA (1)...(19): siRNA sense strand
gcccauaggcagcauguca

SEQ ID NO: 1262010 - RNA, 19 nt, Homo sapiens
  misc_RNA (1)...(19): siRNA sense strand
caacuggagaauuacaaga

SEQ ID NO: 1262011 - RNA, 19 nt, Homo sapiens
  misc_RNA (1)...(19): siRNA sense strand
agcaggacauggagcagua

SEQ ID NO: 1262012 - RNA, 19 nt, Homo sapiens
  misc_RNA (1)...(19): siRNA sense strand
acuggagaauuacaagaaa

SEQ ID NO: 1262013 - RNA, 19 nt, Homo sapiens
  misc_RNA (1)...(19): siRNA sense strand
agacuuagaauccaugaca

SEQ ID NO: 1262014 - RNA, 19 nt, Homo sapiens
  misc_RNA (1)...(19): siRNA sense strand
uugaggagguagagaacaa

SEQ ID NO: 1262015 - RNA, 19 nt, Homo sapiens
  misc_RNA (1)...(19): siRNA sense strand
ugacagcaaaucugacuca

SEQ ID NO: 1262016 - RNA, 19 nt, Homo sapiens
  misc_RNA (1)...(19): siRNA sense strand
ggagcacacccagcaaaug

SEQ ID NO: 1262017 - RNA, 19 nt, Homo sapiens
  misc_RNA (1)...(19): siRNA sense strand
gcaucuggaagacuuaugu

SEQ ID NO: 1262018 - RNA, 19 nt, Homo sapiens
  misc_RNA (1)...(19): siRNA sense strand
cagcuuuaaucgcagacuu

SEQ ID NO: 1262019 - RNA, 19 nt, Homo sapiens
  misc_RNA (1)...(19): siRNA sense strand
gcacacccagcaaaugaag

SEQ ID NO: 1262020 - RNA, 19 nt, Homo sapiens
  misc_RNA (1)...(19): siRNA sense strand
agauggaccugauggacau

SEQ ID NO: 1262021 - RNA, 19 nt, Homo sapiens
  misc_RNA (1)...(19): siRNA sense strand
gcaacuggagaauuacaag

SEQ ID NO: 1262022 - RNA, 19 nt, Homo sapiens
  misc_RNA (1)...(19): siRNA sense strand
cagaagguccuggaaaugg

SEQ ID NO: 1262023 - RNA, 19 nt, Homo sapiens
  misc_RNA (1)...(19): siRNA sense strand
gaauuagaaagaugcaaac

SEQ ID NO: 1262024 - RNA, 19 nt, Homo sapiens
  misc_RNA (1)...(19): siRNA sense strand
ugggcagugugaauuagaa

SEQ ID NO: 1262025 - RNA, 19 nt, Homo sapiens
  misc_RNA (1)...(19): siRNA sense strand
gcagacuuagaauccauga

SEQ ID NO: 1262026 - RNA, 19 nt, Homo sapiens
  misc_RNA (1)...(19): siRNA sense strand
gggcagugugaauuagaaa

SEQ ID NO: 1262027 - RNA, 19 nt, Homo sapiens
  misc_RNA (1)...(19): siRNA sense strand
aauaagaggaaggaacuug

SEQ ID NO: 1262028 - RNA, 19 nt, Homo sapiens
  misc_RNA (1)...(19): siRNA sense strand
gaacaaccugcugcaucug

SEQ ID NO: 1262029 - RNA, 19 nt, Homo sapiens
  misc_RNA (1)...(19): siRNA sense strand
uggagcagauggaccugau

SEQ ID NO: 1262030 - RNA, 19 nt, Homo sapiens
  misc_RNA (1)...(19): siRNA sense strand
auaagaggaaggaacuuga

SEQ ID NO: 1262031 - RNA, 19 nt, Homo sapiens
  misc_RNA (1)...(19): siRNA sense strand
gcaagaauauggacagaaa

SEQ ID NO: 1262032 - RNA, 19 nt, Homo sapiens
  misc_RNA (1)...(19): siRNA sense strand
gaggugaacuuucugguuu

SEQ ID NO: 1262033 - RNA, 19 nt, Homo sapiens
  misc_RNA (1)...(19): siRNA sense strand
gcaaagagaucuacaccau

SEQ ID NO: 1262034 - RNA, 19 nt, Homo sapiens
  misc_RNA (1)...(19): siRNA sense strand
gcaagugcuucauuugauu

SEQ ID NO: 1262035 - RNA, 19 nt, Homo sapiens
  misc_RNA (1)...(19): siRNA sense strand
uugaagaucuggaguauga

SEQ ID NO: 1262036 - RNA, 19 nt, Homo sapiens
  misc_RNA (1)...(19): siRNA sense strand
agacucaacugcaaggaua

SEQ ID NO: 1262037 - RNA, 19 nt, Homo sapiens
  misc_RNA (1)...(19): siRNA sense strand
aaagagaucuacaccauca

SEQ ID NO: 1262038 - RNA, 19 nt, Homo sapiens
  misc_RNA (1)...(19): siRNA sense strand
ucacucggcuuucacguuu

SEQ ID NO: 1262039 - RNA, 19 nt, Homo sapiens
  misc_RNA (1)...(19): siRNA sense strand
caacaaagccacaguccuu

SEQ ID NO: 1262040 - RNA, 19 nt, Homo sapiens
  misc_RNA (1)...(19): siRNA sense strand
caacaucaaugggacacua

SEQ ID NO: 1262041 - RNA, 19 nt, Homo sapiens
  misc_RNA (1)...(19): siRNA sense strand
gaauggagcacaugaaauc

SEQ ID NO: 1262042 - RNA, 19 nt, Homo sapiens
  misc_RNA (1)...(19): siRNA sense strand
ggaaaguacuuggcuagug

SEQ ID NO: 1262043 - RNA, 19 nt, Homo sapiens
  misc_RNA (1)...(19): siRNA sense strand
guucauaucuggaauacuc

SEQ ID NO: 1262044 - RNA, 19 nt, Homo sapiens
  misc_RNA (1)...(19): siRNA sense strand
gagaauggagcacaugaaa

SEQ ID NO: 1262045 - RNA, 19 nt, Homo sapiens
  misc_RNA (1)...(19): siRNA sense strand
gagcacaugaaaucaauaa

SEQ ID NO: 1262046 - RNA, 19 nt, Homo sapiens
  misc_RNA (1)...(19): siRNA sense strand
caaagccaauggaaauaga

SEQ ID NO: 1262047 - RNA, 19 nt, Homo sapiens
  misc_RNA (1)...(19): siRNA sense strand
gcacaugaaaucaauaauc

SEQ ID NO: 1262048 - RNA, 19 nt, Homo sapiens
  misc_RNA (1)...(19): siRNA sense strand
uauggaaccugaaugagaa

SEQ ID NO: 1262049 - RNA, 19 nt, Homo sapiens
  misc_RNA (1)...(19): siRNA sense strand
ggauauggaaccugaauga

SEQ ID NO: 1262050 - RNA, 19 nt, Homo sapiens
  misc_RNA (1)...(19): siRNA sense strand
agaagggacugcaguaugu

SEQ ID NO: 1262051 - RNA, 19 nt, Homo sapiens
  misc_RNA (1)...(19): siRNA sense strand
ccugauaguugcugugauu

SEQ ID NO: 1262052 - RNA, 19 nt, Homo sapiens
  misc_RNA (1)...(19): siRNA sense strand
ggaaauagauggggauguu

SEQ ID NO: 1262053 - RNA, 19 nt, Homo sapiens
  misc_RNA (1)...(19): siRNA sense strand
cgaggucaaugccaucaaa

SEQ ID NO: 1262054 - RNA, 19 nt, Homo sapiens
  misc_RNA (1)...(19): siRNA sense strand
gacaugacauugaagaucu

SEQ ID NO: 1262055 - RNA, 19 nt, Homo sapiens
  misc_RNA (1)...(19): siRNA sense strand
guauguagaggcugagaua

SEQ ID NO: 1262056 - RNA, 19 nt, Homo sapiens
  misc_RNA (1)...(19): siRNA sense strand
gcuaguggauccuuugaca

SEQ ID NO: 1262057 - RNA, 19 nt, Homo sapiens
  misc_RNA (1)...(19): siRNA sense strand
ggaagagaauggagcacau

SEQ ID NO: 1262058 - RNA, 19 nt, Homo sapiens
  misc_RNA (1)...(19): siRNA sense strand
gcaaaggcggcaaccauga

SEQ ID NO: 1262059 - RNA, 19 nt, Homo sapiens
  misc_RNA (1)...(19): siRNA sense strand
agucugagguguucauuug

SEQ ID NO: 1262060 - RNA, 19 nt, Homo sapiens
  misc_RNA (1)...(19): siRNA sense strand
guggauccuuugacaagua

SEQ ID NO: 1262061 - RNA, 19 nt, Homo sapiens
  misc_RNA (1)...(19): siRNA sense strand
gauguggacuggcagaaca

SEQ ID NO: 1262062 - RNA, 19 nt, Homo sapiens
  misc_RNA (1)...(19): siRNA sense strand
uaaccuggccagcaccuua

SEQ ID NO: 1262063 - RNA, 19 nt, Homo sapiens
  misc_RNA (1)...(19): siRNA sense strand
guugagacauuguauacga

SEQ ID NO: 1262064 - RNA, 19 nt, Homo sapiens
  misc_RNA (1)...(19): siRNA sense strand
ggcacgacgucccaaguaa

SEQ ID NO: 1262065 - RNA, 19 nt, Homo sapiens
  misc_RNA (1)...(19): siRNA sense strand
ggcaagugcuucauuugau

SEQ ID NO: 1262066 - RNA, 19 nt, Homo sapiens
  misc_RNA (1)...(19): siRNA sense strand
cggaugacaugacauugaa

SEQ ID NO: 1262067 - RNA, 19 nt, Homo sapiens
  misc_RNA (1)...(19): siRNA sense strand
ggaacccugucagugauuu

SEQ ID NO: 1262068 - RNA, 19 nt, Homo sapiens
  misc_RNA (1)...(19): siRNA sense strand
gaagucucguccacagcua

SEQ ID NO: 1262069 - RNA, 19 nt, Homo sapiens
  misc_RNA (1)...(19): siRNA sense strand
guuggcaagugcuucauuu

SEQ ID NO: 1262070 - RNA, 19 nt, Homo sapiens
  misc_RNA (1)...(19): siRNA sense strand
gaagcucacucagcagcaa

SEQ ID NO: 1262071 - RNA, 19 nt, Homo sapiens
  misc_RNA (1)...(19): siRNA sense strand
caucuucgcucugaaaugg

SEQ ID NO: 1262072 - RNA, 19 nt, Homo sapiens
  misc_RNA (1)...(19): siRNA sense strand
ucaccucacuggacuggaa

SEQ ID NO: 1262073 - RNA, 19 nt, Homo sapiens
  misc_RNA (1)...(19): siRNA sense strand
ccacgagucugagguguuc

SEQ ID NO: 1262074 - RNA, 19 nt, Homo sapiens
  misc_RNA (1)...(19): siRNA sense strand
gcucugaaauggaacaaaa

SEQ ID NO: 1262075 - RNA, 19 nt, Homo sapiens
  misc_RNA (1)...(19): siRNA sense strand
caccuuaggccaacauaaa

SEQ ID NO: 1262076 - RNA, 19 nt, Homo sapiens
  misc_RNA (1)...(19): siRNA sense strand
ggaacacuauuggcuaugg

SEQ ID NO: 1262077 - RNA, 19 nt, Homo sapiens
  misc_RNA (1)...(19): siRNA sense strand
gaacgcccgaggagauaaa

SEQ ID NO: 1262078 - RNA, 19 nt, Homo sapiens
  misc_RNA (1)...(19): siRNA sense strand
ccaaggcacuggcgguauc

SEQ ID NO: 1262079 - RNA, 19 nt, Homo sapiens
  misc_RNA (1)...(19): siRNA sense strand
gggcacgacgucccaagua

SEQ ID NO: 1262080 - RNA, 19 nt, Homo sapiens
  misc_RNA (1)...(19): siRNA sense strand
cagcucguguugagacauu

SEQ ID NO: 1262081 - RNA, 19 nt, Homo sapiens
  misc_RNA (1)...(19): siRNA sense strand
cauugaagaucuggaguau

SEQ ID NO: 1262082 - RNA, 19 nt, Homo sapiens
  misc_RNA (1)...(19): siRNA sense strand
gaagggacugcaguaugua

SEQ ID NO: 1262083 - RNA, 19 nt, Homo sapiens
  misc_RNA (1)...(19): siRNA sense strand
gcucggaugacaugacauu

SEQ ID NO: 1262084 - RNA, 19 nt, Homo sapiens
  misc_RNA (1)...(19): siRNA sense strand
cacgacgucccaaguaaua

SEQ ID NO: 1262085 - RNA, 19 nt, Homo sapiens
  misc_RNA (1)...(19): siRNA sense strand
caacugcaaggauauggaa

SEQ ID NO: 1262086 - RNA, 19 nt, Homo sapiens
  misc_RNA (1)...(19): siRNA sense strand
ccacagaggcaucagcaau

SEQ ID NO: 1262087 - RNA, 19 nt, Homo sapiens
  misc_RNA (1)...(19): siRNA sense strand
gcaggcauuuggagagaag

SEQ ID NO: 1262088 - RNA, 19 nt, Homo sapiens
  misc_RNA (1)...(19): siRNA sense strand
agauaagcaucaacaagga

SEQ ID NO: 1262089 - RNA, 19 nt, Homo sapiens
  misc_RNA (1)...(19): siRNA sense strand
gaugacaugacauugaaga

SEQ ID NO: 1262090 - RNA, 19 nt, Homo sapiens
  misc_RNA (1)...(19): siRNA sense strand
cagaacaacaugaccuuug

SEQ ID NO: 1262091 - RNA, 19 nt, Homo sapiens
  misc_RNA (1)...(19): siRNA sense strand
gaugguuucgcaagaauau

SEQ ID NO: 1262092 - RNA, 19 nt, Homo sapiens
  misc_RNA (1)...(19): siRNA sense strand
ccacccagcucguguugag

SEQ ID NO: 1262093 - RNA, 19 nt, Homo sapiens
  misc_RNA (1)...(19): siRNA sense strand
gaagagaauggagcacaug

SEQ ID NO: 1262094 - RNA, 19 nt, Homo sapiens
  misc_RNA (1)...(19): siRNA sense strand
ggauccuucuggaauguug

SEQ ID NO: 1262095 - RNA, 19 nt, Homo sapiens
  misc_RNA (1)...(19): siRNA sense strand
ucacacaggagaagccaaa

SEQ ID NO: 1262096 - RNA, 19 nt, Homo sapiens
  misc_RNA (1)...(19): siRNA sense strand
cagcaggcauuuggagaga

SEQ ID NO: 1262097 - RNA, 19 nt, Homo sapiens
  misc_RNA (1)...(19): siRNA sense strand
ggugaacuuucugguuuau

SEQ ID NO: 1262098 - RNA, 19 nt, Homo sapiens
  misc_RNA (1)...(19): siRNA sense strand
gugacgaggugaacuuucu

SEQ ID NO: 1262099 - RNA, 19 nt, Homo sapiens
  misc_RNA (1)...(19): siRNA sense strand
gcagaacaacaugaccuuu

SEQ ID NO: 1262100 - RNA, 19 nt, Homo sapiens
  misc_RNA (1)...(19): siRNA sense strand
uaugaugguuucgcaagaa

SEQ ID NO: 1262101 - RNA, 19 nt, Homo sapiens
  misc_RNA (1)...(19): siRNA sense strand
cgacgucccaaguaauaaa

SEQ ID NO: 1262102 - RNA, 19 nt, Homo sapiens
  misc_RNA (1)...(19): siRNA sense strand
gcacgacgucccaaguaau

SEQ ID NO: 1262103 - RNA, 19 nt, Homo sapiens
  misc_RNA (1)...(19): siRNA sense strand
auaaagaugucaccucacu

SEQ ID NO: 1262104 - RNA, 19 nt, Homo sapiens
  misc_RNA (1)...(19): siRNA sense strand
gagugcugguguagacaaa

SEQ ID NO: 1262105 - RNA, 19 nt, Homo sapiens
  misc_RNA (1)...(19): siRNA sense strand
acucaaagccaauggaaau

SEQ ID NO: 1262106 - RNA, 19 nt, Homo sapiens
  misc_RNA (1)...(19): siRNA sense strand
gcaguuuccuuuucauuca

SEQ ID NO: 1262107 - RNA, 19 nt, Homo sapiens
  misc_RNA (1)...(19): siRNA sense strand
gcaccuuaggccaacauaa

SEQ ID NO: 1262108 - RNA, 19 nt, Homo sapiens
  misc_RNA (1)...(19): siRNA sense strand
gagacauuguauacgagaa

SEQ ID NO: 1262109 - RNA, 19 nt, Homo sapiens
  misc_RNA (1)...(19): siRNA sense strand
gaagaucuggaguaugaag

SEQ ID NO: 1262110 - RNA, 19 nt, Homo sapiens
  misc_RNA (1)...(19): siRNA sense strand
gcaaaauccuccaaagaac

SEQ ID NO: 1262111 - RNA, 19 nt, Homo sapiens
  misc_RNA (1)...(19): siRNA sense strand
gaaccugaaugagaauagc

SEQ ID NO: 1262112 - RNA, 19 nt, Homo sapiens
  misc_RNA (1)...(19): siRNA sense strand
cagaagggacugcaguaug

SEQ ID NO: 1262113 - RNA, 19 nt, Homo sapiens
  misc_RNA (1)...(19): siRNA sense strand
ccuggaacccugucaguga

SEQ ID NO: 1262114 - RNA, 19 nt, Homo sapiens
  misc_RNA (1)...(19): siRNA sense strand
uggagcacaugaaaucaau

SEQ ID NO: 1262115 - RNA, 19 nt, Homo sapiens
  misc_RNA (1)...(19): siRNA sense strand
aacccaaacuccagcauca

SEQ ID NO: 1262116 - RNA, 19 nt, Homo sapiens
  misc_RNA (1)...(19): siRNA sense strand
ugaacuuucugguuuaucg

SEQ ID NO: 1262117 - RNA, 19 nt, Homo sapiens
  misc_RNA (1)...(19): siRNA sense strand
gagauuccacccaacaaag

SEQ ID NO: 1262118 - RNA, 19 nt, Homo sapiens
  misc_RNA (1)...(19): siRNA sense strand
ggguucauaugaugguuuc

SEQ ID NO: 1262119 - RNA, 19 nt, Homo sapiens
  misc_RNA (1)...(19): siRNA sense strand
acacacucaugaagcauca

SEQ ID NO: 1262120 - RNA, 19 nt, Homo sapiens
  misc_RNA (1)...(19): siRNA sense strand
ggacuggcagaacaacaug

SEQ ID NO: 1262121 - RNA, 19 nt, Homo sapiens
  misc_RNA (1)...(19): siRNA sense strand
gagaagccaaacagcaguu

SEQ ID NO: 1262122 - RNA, 19 nt, Homo sapiens
  misc_RNA (1)...(19): siRNA sense strand
aggugaacuuucugguuua

SEQ ID NO: 1262123 - RNA, 19 nt, Homo sapiens
  misc_RNA (1)...(19): siRNA sense strand
ggagcacaugaaaucaaua

SEQ ID NO: 1262124 - RNA, 19 nt, Homo sapiens
  misc_RNA (1)...(19): siRNA sense strand
uggcaagugcuucauuuga

SEQ ID NO: 1262125 - RNA, 19 nt, Homo sapiens
  misc_RNA (1)...(19): siRNA sense strand
gcugagauaagcaucaaca

SEQ ID NO: 1262126 - RNA, 19 nt, Homo sapiens
  misc_RNA (1)...(19): siRNA sense strand
uagagucccugucccugau

SEQ ID NO: 1262127 - RNA, 19 nt, Homo sapiens
  misc_RNA (1)...(19): siRNA sense strand
ugagauuccacccaacaaa

SEQ ID NO: 1262128 - RNA, 19 nt, Homo sapiens
  misc_RNA (1)...(19): siRNA sense strand
gugcuucauuugauucuac

SEQ ID NO: 1262129 - RNA, 19 nt, Homo sapiens
  misc_RNA (1)...(19): siRNA sense strand
ggaacgcccgaggagauaa

SEQ ID NO: 1262130 - RNA, 19 nt, Homo sapiens
  misc_RNA (1)...(19): siRNA sense strand
gcacccacacacucaugaa

SEQ ID NO: 1262131 - RNA, 19 nt, Homo sapiens
  misc_RNA (1)...(19): siRNA sense strand
gcaagaauauggacagaaa

SEQ ID NO: 1262132 - RNA, 19 nt, Homo sapiens
  misc_RNA (1)...(19): siRNA sense strand
gaggugaacuuucugguuu

SEQ ID NO: 1262133 - RNA, 19 nt, Homo sapiens
  misc_RNA (1)...(19): siRNA sense strand
gcaaagagaucuacaccau

SEQ ID NO: 1262134 - RNA, 19 nt, Homo sapiens
  misc_RNA (1)...(19): siRNA sense strand
gcaagugcuucauuugauu

SEQ ID NO: 1262135 - RNA, 19 nt, Homo sapiens
  misc_RNA (1)...(19): siRNA sense strand
uugaagaucuggaguauga

SEQ ID NO: 1262136 - RNA, 19 nt, Homo sapiens
  misc_RNA (1)...(19): siRNA sense strand
agacucaacugcaaggaua

SEQ ID NO: 1262137 - RNA, 19 nt, Homo sapiens
  misc_RNA (1)...(19): siRNA sense strand
aaagagaucuacaccauca

SEQ ID NO: 1262138 - RNA, 19 nt, Homo sapiens
  misc_RNA (1)...(19): siRNA sense strand
ucacucggcuuucacguuu

SEQ ID NO: 1262139 - RNA, 19 nt, Homo sapiens
  misc_RNA (1)...(19): siRNA sense strand
caacaaagccacaguccuu

SEQ ID NO: 1262140 - RNA, 19 nt, Homo sapiens
  misc_RNA (1)...(19): siRNA sense strand
caacaucaaugggacacua

SEQ ID NO: 1262141 - RNA, 19 nt, Homo sapiens
  misc_RNA (1)...(19): siRNA sense strand
gaauggagcacaugaaauc

SEQ ID NO: 1262142 - RNA, 19 nt, Homo sapiens
  misc_RNA (1)...(19): siRNA sense strand
ggaaaguacuuggcuagug

SEQ ID NO: 1262143 - RNA, 19 nt, Homo sapiens
  misc_RNA (1)...(19): siRNA sense strand
guucauaucuggaauacuc

SEQ ID NO: 1262144 - RNA, 19 nt, Homo sapiens
  misc_RNA (1)...(19): siRNA sense strand
gagaauggagcacaugaaa

SEQ ID NO: 1262145 - RNA, 19 nt, Homo sapiens
  misc_RNA (1)...(19): siRNA sense strand
gagcacaugaaaucaauaa

SEQ ID NO: 1262146 - RNA, 19 nt, Homo sapiens
  misc_RNA (1)...(19): siRNA sense strand
caaagccaauggaaauaga

SEQ ID NO: 1262147 - RNA, 19 nt, Homo sapiens
  misc_RNA (1)...(19): siRNA sense strand
gcacaugaaaucaauaauc

SEQ ID NO: 1262148 - RNA, 19 nt, Homo sapiens
  misc_RNA (1)...(19): siRNA sense strand
uauggaaccugaaugagaa

SEQ ID NO: 1262149 - RNA, 19 nt, Homo sapiens
  misc_RNA (1)...(19): siRNA sense strand
ggauauggaaccugaauga

SEQ ID NO: 1262150 - RNA, 19 nt, Homo sapiens
  misc_RNA (1)...(19): siRNA sense strand
agaagggacugcaguaugu

SEQ ID NO: 1262151 - RNA, 19 nt, Homo sapiens
  misc_RNA (1)...(19): siRNA sense strand
ccugauaguugcugugauu

SEQ ID NO: 1262152 - RNA, 19 nt, Homo sapiens
  misc_RNA (1)...(19): siRNA sense strand
ggaaauagauggggauguu

SEQ ID NO: 1262153 - RNA, 19 nt, Homo sapiens
  misc_RNA (1)...(19): siRNA sense strand
cgaggucaaugccaucaaa

SEQ ID NO: 1262154 - RNA, 19 nt, Homo sapiens
  misc_RNA (1)...(19): siRNA sense strand
gacaugacauugaagaucu

SEQ ID NO: 1262155 - RNA, 19 nt, Homo sapiens
  misc_RNA (1)...(19): siRNA sense strand
guauguagaggcugagaua

SEQ ID NO: 1262156 - RNA, 19 nt, Homo sapiens
  misc_RNA (1)...(19): siRNA sense strand
gcuaguggauccuuugaca

SEQ ID NO: 1262157 - RNA, 19 nt, Homo sapiens
  misc_RNA (1)...(19): siRNA sense strand
ggaagagaauggagcacau

SEQ ID NO: 1262158 - RNA, 19 nt, Homo sapiens
  misc_RNA (1)...(19): siRNA sense strand
gcaaaggcggcaaccauga

SEQ ID NO: 1262159 - RNA, 19 nt, Homo sapiens
  misc_RNA (1)...(19): siRNA sense strand
agucugagguguucauuug

SEQ ID NO: 1262160 - RNA, 19 nt, Homo sapiens
  misc_RNA (1)...(19): siRNA sense strand
guggauccuuugacaagua

SEQ ID NO: 1262161 - RNA, 19 nt, Homo sapiens
  misc_RNA (1)...(19): siRNA sense strand
gauguggacuggcagaaca

SEQ ID NO: 1262162 - RNA, 19 nt, Homo sapiens
  misc_RNA (1)...(19): siRNA sense strand
uaaccuggccagcaccuua

SEQ ID NO: 1262163 - RNA, 19 nt, Homo sapiens
  misc_RNA (1)...(19): siRNA sense strand
guugagacauuguauacga

SEQ ID NO: 1262164 - RNA, 19 nt, Homo sapiens
  misc_RNA (1)...(19): siRNA sense strand
ggcacgacgucccaaguaa

SEQ ID NO: 1262165 - RNA, 19 nt, Homo sapiens
  misc_RNA (1)...(19): siRNA sense strand
ggcaagugcuucauuugau

SEQ ID NO: 1262166 - RNA, 19 nt, Homo sapiens
  misc_RNA (1)...(19): siRNA sense strand
cggaugacaugacauugaa

SEQ ID NO: 1262167 - RNA, 19 nt, Homo sapiens
  misc_RNA (1)...(19): siRNA sense strand
ggaacccugucagugauuu

SEQ ID NO: 1262168 - RNA, 19 nt, Homo sapiens
  misc_RNA (1)...(19): siRNA sense strand
gaagucucguccacagcua

SEQ ID NO: 1262169 - RNA, 19 nt, Homo sapiens
  misc_RNA (1)...(19): siRNA sense strand
guuggcaagugcuucauuu

SEQ ID NO: 1262170 - RNA, 19 nt, Homo sapiens
  misc_RNA (1)...(19): siRNA sense strand
gaagcucacucagcagcaa

SEQ ID NO: 1262171 - RNA, 19 nt, Homo sapiens
  misc_RNA (1)...(19): siRNA sense strand
caucuucgcucugaaaugg

SEQ ID NO: 1262172 - RNA, 19 nt, Homo sapiens
  misc_RNA (1)...(19): siRNA sense strand
ucaccucacuggacuggaa

SEQ ID NO: 1262173 - RNA, 19 nt, Homo sapiens
  misc_RNA (1)...(19): siRNA sense strand
ccacgagucugagguguuc

SEQ ID NO: 1262174 - RNA, 19 nt, Homo sapiens
  misc_RNA (1)...(19): siRNA sense strand
gcucugaaauggaacaaaa

SEQ ID NO: 1262175 - RNA, 19 nt, Homo sapiens
  misc_RNA (1)...(19): siRNA sense strand
caccuuaggccaacauaaa

SEQ ID NO: 1262176 - RNA, 19 nt, Homo sapiens
  misc_RNA (1)...(19): siRNA sense strand
ggaacacuauuggcuaugg

SEQ ID NO: 1262177 - RNA, 19 nt, Homo sapiens
  misc_RNA (1)...(19): siRNA sense strand
gaacgcccgaggagauaaa

SEQ ID NO: 1262178 - RNA, 19 nt, Homo sapiens
  misc_RNA (1)...(19): siRNA sense strand
ccaaggcacuggcgguauc

SEQ ID NO: 1262179 - RNA, 19 nt, Homo sapiens
  misc_RNA (1)...(19): siRNA sense strand
gggcacgacgucccaagua

SEQ ID NO: 1262180 - RNA, 19 nt, Homo sapiens
  misc_RNA (1)...(19): siRNA sense strand
cagcucguguugagacauu

SEQ ID NO: 1262181 - RNA, 19 nt, Homo sapiens
  misc_RNA (1)...(19): siRNA sense strand
cauugaagaucuggaguau

SEQ ID NO: 1262182 - RNA, 19 nt, Homo sapiens
  misc_RNA (1)...(19): siRNA sense strand
gaagggacugcaguaugua

SEQ ID NO: 1262183 - RNA, 19 nt, Homo sapiens
  misc_RNA (1)...(19): siRNA sense strand
gcucggaugacaugacauu

SEQ ID NO: 1262184 - RNA, 19 nt, Homo sapiens
  misc_RNA (1)...(19): siRNA sense strand
cacgacgucccaaguaaua

SEQ ID NO: 1262185 - RNA, 19 nt, Homo sapiens
  misc_RNA (1)...(19): siRNA sense strand
caacugcaaggauauggaa

SEQ ID NO: 1262186 - RNA, 19 nt, Homo sapiens
  misc_RNA (1)...(19): siRNA sense strand
ccacagaggcaucagcaau

SEQ ID NO: 1262187 - RNA, 19 nt, Homo sapiens
  misc_RNA (1)...(19): siRNA sense strand
gcaggcauuuggagagaag

SEQ ID NO: 1262188 - RNA, 19 nt, Homo sapiens
  misc_RNA (1)...(19): siRNA sense strand
agauaagcaucaacaagga

SEQ ID NO: 1262189 - RNA, 19 nt, Homo sapiens
  misc_RNA (1)...(19): siRNA sense strand
gaugacaugacauugaaga

SEQ ID NO: 1262190 - RNA, 19 nt, Homo sapiens
  misc_RNA (1)...(19): siRNA sense strand
cagaacaacaugaccuuug

SEQ ID NO: 1262191 - RNA, 19 nt, Homo sapiens
  misc_RNA (1)...(19): siRNA sense strand
gaugguuucgcaagaauau

SEQ ID NO: 1262192 - RNA, 19 nt, Homo sapiens
  misc_RNA (1)...(19): siRNA sense strand
ccacccagcucguguugag

SEQ ID NO: 1262193 - RNA, 19 nt, Homo sapiens
  misc_RNA (1)...(19): siRNA sense strand
gaagagaauggagcacaug

SEQ ID NO: 1262194 - RNA, 19 nt, Homo sapiens
  misc_RNA (1)...(19): siRNA sense strand
ggauccuucuggaauguug

SEQ ID NO: 1262195 - RNA, 19 nt, Homo sapiens
  misc_RNA (1)...(19): siRNA sense strand
ucacacaggagaagccaaa

SEQ ID NO: 1262196 - RNA, 19 nt, Homo sapiens
  misc_RNA (1)...(19): siRNA sense strand
cagcaggcauuuggagaga

SEQ ID NO: 1262197 - RNA, 19 nt, Homo sapiens
  misc_RNA (1)...(19): siRNA sense strand
ggugaacuuucugguuuau

SEQ ID NO: 1262198 - RNA, 19 nt, Homo sapiens
  misc_RNA (1)...(19): siRNA sense strand
gugacgaggugaacuuucu

SEQ ID NO: 1262199 - RNA, 19 nt, Homo sapiens
  misc_RNA (1)...(19): siRNA sense strand
gcagaacaacaugaccuuu

SEQ ID NO: 1262200 - RNA, 19 nt, Homo sapiens
  misc_RNA (1)...(19): siRNA sense strand
uaugaugguuucgcaagaa

SEQ ID NO: 1262201 - RNA, 19 nt, Homo sapiens
  misc_RNA (1)...(19): siRNA sense strand
cgacgucccaaguaauaaa

SEQ ID NO: 1262202 - RNA, 19 nt, Homo sapiens
  misc_RNA (1)...(19): siRNA sense strand
gcacgacgucccaaguaau

SEQ ID NO: 1262203 - RNA, 19 nt, Homo sapiens
  misc_RNA (1)...(19): siRNA sense strand
auaaagaugucaccucacu

SEQ ID NO: 1262204 - RNA, 19 nt, Homo sapiens
  misc_RNA (1)...(19): siRNA sense strand
gagugcugguguagacaaa

SEQ ID NO: 1262205 - RNA, 19 nt, Homo sapiens
  misc_RNA (1)...(19): siRNA sense strand
acucaaagccaauggaaau

SEQ ID NO: 1262206 - RNA, 19 nt, Homo sapiens
  misc_RNA (1)...(19): siRNA sense strand
gcaguuuccuuuucauuca

SEQ ID NO: 1262207 - RNA, 19 nt, Homo sapiens
  misc_RNA (1)...(19): siRNA sense strand
gcaccuuaggccaacauaa

SEQ ID NO: 1262208 - RNA, 19 nt, Homo sapiens
  misc_RNA (1)...(19): siRNA sense strand
gagacauuguauacgagaa

SEQ ID NO: 1262209 - RNA, 19 nt, Homo sapiens
  misc_RNA (1)...(19): siRNA sense strand
gaagaucuggaguaugaag

SEQ ID NO: 1262210 - RNA, 19 nt, Homo sapiens
  misc_RNA (1)...(19): siRNA sense strand
gcaaaauccuccaaagaac

SEQ ID NO: 1262211 - RNA, 19 nt, Homo sapiens
  misc_RNA (1)...(19): siRNA sense strand
gaaccugaaugagaauagc

SEQ ID NO: 1262212 - RNA, 19 nt, Homo sapiens
  misc_RNA (1)...(19): siRNA sense strand
cagaagggacugcaguaug

SEQ ID NO: 1262213 - RNA, 19 nt, Homo sapiens
  misc_RNA (1)...(19): siRNA sense strand
ccuggaacccugucaguga

SEQ ID NO: 1262214 - RNA, 19 nt, Homo sapiens
  misc_RNA (1)...(19): siRNA sense strand
uggagcacaugaaaucaau

SEQ ID NO: 1262215 - RNA, 19 nt, Homo sapiens
  misc_RNA (1)...(19): siRNA sense strand
aacccaaacuccagcauca

SEQ ID NO: 1262216 - RNA, 19 nt, Homo sapiens
  misc_RNA (1)...(19): siRNA sense strand
ugaacuuucugguuuaucg

SEQ ID NO: 1262217 - RNA, 19 nt, Homo sapiens
  misc_RNA (1)...(19): siRNA sense strand
gagauuccacccaacaaag

SEQ ID NO: 1262218 - RNA, 19 nt, Homo sapiens
  misc_RNA (1)...(19): siRNA sense strand
ggguucauaugaugguuuc

SEQ ID NO: 1262219 - RNA, 19 nt, Homo sapiens
  misc_RNA (1)...(19): siRNA sense strand
acacacucaugaagcauca

SEQ ID NO: 1262220 - RNA, 19 nt, Homo sapiens
  misc_RNA (1)...(19): siRNA sense strand
ggacuggcagaacaacaug

SEQ ID NO: 1262221 - RNA, 19 nt, Homo sapiens
  misc_RNA (1)...(19): siRNA sense strand
gagaagccaaacagcaguu

SEQ ID NO: 1262222 - RNA, 19 nt, Homo sapiens
  misc_RNA (1)...(19): siRNA sense strand
aggugaacuuucugguuua

SEQ ID NO: 1262223 - RNA, 19 nt, Homo sapiens
  misc_RNA (1)...(19): siRNA sense strand
ggagcacaugaaaucaaua

SEQ ID NO: 1262224 - RNA, 19 nt, Homo sapiens
  misc_RNA (1)...(19): siRNA sense strand
uggcaagugcuucauuuga

SEQ ID NO: 1262225 - RNA, 19 nt, Homo sapiens
  misc_RNA (1)...(19): siRNA sense strand
gcugagauaagcaucaaca

SEQ ID NO: 1262226 - RNA, 19 nt, Homo sapiens
  misc_RNA (1)...(19): siRNA sense strand
uagagucccugucccugau

SEQ ID NO: 1262227 - RNA, 19 nt, Homo sapiens
  misc_RNA (1)...(19): siRNA sense strand
ugagauuccacccaacaaa

SEQ ID NO: 1262228 - RNA, 19 nt, Homo sapiens
  misc_RNA (1)...(19): siRNA sense strand
gugcuucauuugauucuac

SEQ ID NO: 1262229 - RNA, 19 nt, Homo sapiens
  misc_RNA (1)...(19): siRNA sense strand
ggaacgcccgaggagauaa

SEQ ID NO: 1262230 - RNA, 19 nt, Homo sapiens
  misc_RNA (1)...(19): siRNA sense strand
gcacccacacacucaugaa

SEQ ID NO: 1262231 - RNA, 19 nt, Homo sapiens
  misc_RNA (1)...(19): siRNA sense strand
gcaagaauauggacagaaa

SEQ ID NO: 1262232 - RNA, 19 nt, Homo sapiens
  misc_RNA (1)...(19): siRNA sense strand
gaggugaacuuucugguuu

SEQ ID NO: 1262233 - RNA, 19 nt, Homo sapiens
  misc_RNA (1)...(19): siRNA sense strand
gcaaagagaucuacaccau

SEQ ID NO: 1262234 - RNA, 19 nt, Homo sapiens
  misc_RNA (1)...(19): siRNA sense strand
gcaagugcuucauuugauu

SEQ ID NO: 1262235 - RNA, 19 nt, Homo sapiens
  misc_RNA (1)...(19): siRNA sense strand
uugaagaucuggaguauga

SEQ ID NO: 1262236 - RNA, 19 nt, Homo sapiens
  misc_RNA (1)...(19): siRNA sense strand
agacucaacugcaaggaua

SEQ ID NO: 1262237 - RNA, 19 nt, Homo sapiens
  misc_RNA (1)...(19): siRNA sense strand
aaagagaucuacaccauca

SEQ ID NO: 1262238 - RNA, 19 nt, Homo sapiens
  misc_RNA (1)...(19): siRNA sense strand
ucacucggcuuucacguuu

SEQ ID NO: 1262239 - RNA, 19 nt, Homo sapiens
  misc_RNA (1)...(19): siRNA sense strand
caacaaagccacaguccuu

SEQ ID NO: 1262240 - RNA, 19 nt, Homo sapiens
  misc_RNA (1)...(19): siRNA sense strand
caacaucaaugggacacua

SEQ ID NO: 1262241 - RNA, 19 nt, Homo sapiens
  misc_RNA (1)...(19): siRNA sense strand
gaauggagcacaugaaauc

SEQ ID NO: 1262242 - RNA, 19 nt, Homo sapiens
  misc_RNA (1)...(19): siRNA sense strand
ggaaaguacuuggcuagug

SEQ ID NO: 1262243 - RNA, 19 nt, Homo sapiens
  misc_RNA (1)...(19): siRNA sense strand
guucauaucuggaauacuc

SEQ ID NO: 1262244 - RNA, 19 nt, Homo sapiens
  misc_RNA (1)...(19): siRNA sense strand
gagaauggagcacaugaaa

SEQ ID NO: 1262245 - RNA, 19 nt, Homo sapiens
  misc_RNA (1)...(19): siRNA sense strand
gagcacaugaaaucaauaa

SEQ ID NO: 1262246 - RNA, 19 nt, Homo sapiens
  misc_RNA (1)...(19): siRNA sense strand
caaagccaauggaaauaga

SEQ ID NO: 1262247 - RNA, 19 nt, Homo sapiens
  misc_RNA (1)...(19): siRNA sense strand
gcacaugaaaucaauaauc

SEQ ID NO: 1262248 - RNA, 19 nt, Homo sapiens
  misc_RNA (1)...(19): siRNA sense strand
uauggaaccugaaugagaa

SEQ ID NO: 1262249 - RNA, 19 nt, Homo sapiens
  misc_RNA (1)...(19): siRNA sense strand
ggauauggaaccugaauga

SEQ ID NO: 1262250 - RNA, 19 nt, Homo sapiens
  misc_RNA (1)...(19): siRNA sense strand
agaagggacugcaguaugu

SEQ ID NO: 1262251 - RNA, 19 nt, Homo sapiens
  misc_RNA (1)...(19): siRNA sense strand
ccugauaguugcugugauu

SEQ ID NO: 1262252 - RNA, 19 nt, Homo sapiens
  misc_RNA (1)...(19): siRNA sense strand
ggaaauagauggggauguu

SEQ ID NO: 1262253 - RNA, 19 nt, Homo sapiens
  misc_RNA (1)...(19): siRNA sense strand
cgaggucaaugccaucaaa

SEQ ID NO: 1262254 - RNA, 19 nt, Homo sapiens
  misc_RNA (1)...(19): siRNA sense strand
gacaugacauugaagaucu

SEQ ID NO: 1262255 - RNA, 19 nt, Homo sapiens
  misc_RNA (1)...(19): siRNA sense strand
guauguagaggcugagaua

SEQ ID NO: 1262256 - RNA, 19 nt, Homo sapiens
  misc_RNA (1)...(19): siRNA sense strand
gcuaguggauccuuugaca

SEQ ID NO: 1262257 - RNA, 19 nt, Homo sapiens
  misc_RNA (1)...(19): siRNA sense strand
ggaagagaauggagcacau

SEQ ID NO: 1262258 - RNA, 19 nt, Homo sapiens
  misc_RNA (1)...(19): siRNA sense strand
gcaaaggcggcaaccauga

SEQ ID NO: 1262259 - RNA, 19 nt, Homo sapiens
  misc_RNA (1)...(19): siRNA sense strand
agucugagguguucauuug

SEQ ID NO: 1262260 - RNA, 19 nt, Homo sapiens
  misc_RNA (1)...(19): siRNA sense strand
guggauccuuugacaagua

SEQ ID NO: 1262261 - RNA, 19 nt, Homo sapiens
  misc_RNA (1)...(19): siRNA sense strand
gauguggacuggcagaaca

SEQ ID NO: 1262262 - RNA, 19 nt, Homo sapiens
  misc_RNA (1)...(19): siRNA sense strand
uaaccuggccagcaccuua

SEQ ID NO: 1262263 - RNA, 19 nt, Homo sapiens
  misc_RNA (1)...(19): siRNA sense strand
guugagacauuguauacga

SEQ ID NO: 1262264 - RNA, 19 nt, Homo sapiens
  misc_RNA (1)...(19): siRNA sense strand
ggcacgacgucccaaguaa

SEQ ID NO: 1262265 - RNA, 19 nt, Homo sapiens
  misc_RNA (1)...(19): siRNA sense strand
ggcaagugcuucauuugau

SEQ ID NO: 1262266 - RNA, 19 nt, Homo sapiens
  misc_RNA (1)...(19): siRNA sense strand
cggaugacaugacauugaa

SEQ ID NO: 1262267 - RNA, 19 nt, Homo sapiens
  misc_RNA (1)...(19): siRNA sense strand
ggaacccugucagugauuu

SEQ ID NO: 1262268 - RNA, 19 nt, Homo sapiens
  misc_RNA (1)...(19): siRNA sense strand
gaagucucguccacagcua

SEQ ID NO: 1262269 - RNA, 19 nt, Homo sapiens
  misc_RNA (1)...(19): siRNA sense strand
guuggcaagugcuucauuu

SEQ ID NO: 1262270 - RNA, 19 nt, Homo sapiens
  misc_RNA (1)...(19): siRNA sense strand
gaagcucacucagcagcaa

SEQ ID NO: 1262271 - RNA, 19 nt, Homo sapiens
  misc_RNA (1)...(19): siRNA sense strand
caucuucgcucugaaaugg

SEQ ID NO: 1262272 - RNA, 19 nt, Homo sapiens
  misc_RNA (1)...(19): siRNA sense strand
ucaccucacuggacuggaa

SEQ ID NO: 1262273 - RNA, 19 nt, Homo sapiens
  misc_RNA (1)...(19): siRNA sense strand
ccacgagucugagguguuc

SEQ ID NO: 1262274 - RNA, 19 nt, Homo sapiens
  misc_RNA (1)...(19): siRNA sense strand
gcucugaaauggaacaaaa

SEQ ID NO: 1262275 - RNA, 19 nt, Homo sapiens
  misc_RNA (1)...(19): siRNA sense strand
caccuuaggccaacauaaa

SEQ ID NO: 1262276 - RNA, 19 nt, Homo sapiens
  misc_RNA (1)...(19): siRNA sense strand
ggaacacuauuggcuaugg

SEQ ID NO: 1262277 - RNA, 19 nt, Homo sapiens
  misc_RNA (1)...(19): siRNA sense strand
gaacgcccgaggagauaaa

SEQ ID NO: 1262278 - RNA, 19 nt, Homo sapiens
  misc_RNA (1)...(19): siRNA sense strand
ccaaggcacuggcgguauc

SEQ ID NO: 1262279 - RNA, 19 nt, Homo sapiens
  misc_RNA (1)...(19): siRNA sense strand
gggcacgacgucccaagua

SEQ ID NO: 1262280 - RNA, 19 nt, Homo sapiens
  misc_RNA (1)...(19): siRNA sense strand
cagcucguguugagacauu

SEQ ID NO: 1262281 - RNA, 19 nt, Homo sapiens
  misc_RNA (1)...(19): siRNA sense strand
cauugaagaucuggaguau

SEQ ID NO: 1262282 - RNA, 19 nt, Homo sapiens
  misc_RNA (1)...(19): siRNA sense strand
gaagggacugcaguaugua

SEQ ID NO: 1262283 - RNA, 19 nt, Homo sapiens
  misc_RNA (1)...(19): siRNA sense strand
gcucggaugacaugacauu

SEQ ID NO: 1262284 - RNA, 19 nt, Homo sapiens
  misc_RNA (1)...(19): siRNA sense strand
cacgacgucccaaguaaua

SEQ ID NO: 1262285 - RNA, 19 nt, Homo sapiens
  misc_RNA (1)...(19): siRNA sense strand
caacugcaaggauauggaa

SEQ ID NO: 1262286 - RNA, 19 nt, Homo sapiens
  misc_RNA (1)...(19): siRNA sense strand
ccacagaggcaucagcaau

SEQ ID NO: 1262287 - RNA, 19 nt, Homo sapiens
  misc_RNA (1)...(19): siRNA sense strand
gcaggcauuuggagagaag

SEQ ID NO: 1262288 - RNA, 19 nt, Homo sapiens
  misc_RNA (1)...(19): siRNA sense strand
agauaagcaucaacaagga

SEQ ID NO: 1262289 - RNA, 19 nt, Homo sapiens
  misc_RNA (1)...(19): siRNA sense strand
gaugacaugacauugaaga

SEQ ID NO: 1262290 - RNA, 19 nt, Homo sapiens
  misc_RNA (1)...(19): siRNA sense strand
cagaacaacaugaccuuug

SEQ ID NO: 1262291 - RNA, 19 nt, Homo sapiens
  misc_RNA (1)...(19): siRNA sense strand
gaugguuucgcaagaauau

SEQ ID NO: 1262292 - RNA, 19 nt, Homo sapiens
  misc_RNA (1)...(19): siRNA sense strand
ccacccagcucguguugag

SEQ ID NO: 1262293 - RNA, 19 nt, Homo sapiens
  misc_RNA (1)...(19): siRNA sense strand
gaagagaauggagcacaug

SEQ ID NO: 1262294 - RNA, 19 nt, Homo sapiens
  misc_RNA (1)...(19): siRNA sense strand
ggauccuucuggaauguug

SEQ ID NO: 1262295 - RNA, 19 nt, Homo sapiens
  misc_RNA (1)...(19): siRNA sense strand
ucacacaggagaagccaaa

SEQ ID NO: 1262296 - RNA, 19 nt, Homo sapiens
  misc_RNA (1)...(19): siRNA sense strand
cagcaggcauuuggagaga

SEQ ID NO: 1262297 - RNA, 19 nt, Homo sapiens
  misc_RNA (1)...(19): siRNA sense strand
ggugaacuuucugguuuau

SEQ ID NO: 1262298 - RNA, 19 nt, Homo sapiens
  misc_RNA (1)...(19): siRNA sense strand
gugacgaggugaacuuucu

SEQ ID NO: 1262299 - RNA, 19 nt, Homo sapiens
  misc_RNA (1)...(19): siRNA sense strand
gcagaacaacaugaccuuu

SEQ ID NO: 1262300 - RNA, 19 nt, Homo sapiens
  misc_RNA (1)...(19): siRNA sense strand
uaugaugguuucgcaagaa

SEQ ID NO: 1262301 - RNA, 19 nt, Homo sapiens
  misc_RNA (1)...(19): siRNA sense strand
cgacgucccaaguaauaaa

SEQ ID NO: 1262302 - RNA, 19 nt, Homo sapiens
  misc_RNA (1)...(19): siRNA sense strand
gcacgacgucccaaguaau

SEQ ID NO: 1262303 - RNA, 19 nt, Homo sapiens
  misc_RNA (1)...(19): siRNA sense strand
auaaagaugucaccucacu

SEQ ID NO: 1262304 - RNA, 19 nt, Homo sapiens
  misc_RNA (1)...(19): siRNA sense strand
gagugcugguguagacaaa

SEQ ID NO: 1262305 - RNA, 19 nt, Homo sapiens
  misc_RNA (1)...(19): siRNA sense strand
acucaaagccaauggaaau

SEQ ID NO: 1262306 - RNA, 19 nt, Homo sapiens
  misc_RNA (1)...(19): siRNA sense strand
gcaguuuccuuuucauuca

SEQ ID NO: 1262307 - RNA, 19 nt, Homo sapiens
  misc_RNA (1)...(19): siRNA sense strand
gcaccuuaggccaacauaa

SEQ ID NO: 1262308 - RNA, 19 nt, Homo sapiens
  misc_RNA (1)...(19): siRNA sense strand
gagacauuguauacgagaa

SEQ ID NO: 1262309 - RNA, 19 nt, Homo sapiens
  misc_RNA (1)...(19): siRNA sense strand
gaagaucuggaguaugaag

SEQ ID NO: 1262310 - RNA, 19 nt, Homo sapiens
  misc_RNA (1)...(19): siRNA sense strand
gcaaaauccuccaaagaac

SEQ ID NO: 1262311 - RNA, 19 nt, Homo sapiens
  misc_RNA (1)...(19): siRNA sense strand
gaaccugaaugagaauagc

SEQ ID NO: 1262312 - RNA, 19 nt, Homo sapiens
  misc_RNA (1)...(19): siRNA sense strand
cagaagggacugcaguaug

SEQ ID NO: 1262313 - RNA, 19 nt, Homo sapiens
  misc_RNA (1)...(19): siRNA sense strand
ccuggaacccugucaguga

SEQ ID NO: 1262314 - RNA, 19 nt, Homo sapiens
  misc_RNA (1)...(19): siRNA sense strand
uggagcacaugaaaucaau

SEQ ID NO: 1262315 - RNA, 19 nt, Homo sapiens
  misc_RNA (1)...(19): siRNA sense strand
aacccaaacuccagcauca

SEQ ID NO: 1262316 - RNA, 19 nt, Homo sapiens
  misc_RNA (1)...(19): siRNA sense strand
ugaacuuucugguuuaucg

SEQ ID NO: 1262317 - RNA, 19 nt, Homo sapiens
  misc_RNA (1)...(19): siRNA sense strand
gagauuccacccaacaaag

SEQ ID NO: 1262318 - RNA, 19 nt, Homo sapiens
  misc_RNA (1)...(19): siRNA sense strand
ggguucauaugaugguuuc

SEQ ID NO: 1262319 - RNA, 19 nt, Homo sapiens
  misc_RNA (1)...(19): siRNA sense strand
acacacucaugaagcauca

SEQ ID NO: 1262320 - RNA, 19 nt, Homo sapiens
  misc_RNA (1)...(19): siRNA sense strand
ggacuggcagaacaacaug

SEQ ID NO: 1262321 - RNA, 19 nt, Homo sapiens
  misc_RNA (1)...(19): siRNA sense strand
gagaagccaaacagcaguu

SEQ ID NO: 1262322 - RNA, 19 nt, Homo sapiens
  misc_RNA (1)...(19): siRNA sense strand
aggugaacuuucugguuua

SEQ ID NO: 1262323 - RNA, 19 nt, Homo sapiens
  misc_RNA (1)...(19): siRNA sense strand
ggagcacaugaaaucaaua

SEQ ID NO: 1262324 - RNA, 19 nt, Homo sapiens
  misc_RNA (1)...(19): siRNA sense strand
uggcaagugcuucauuuga

SEQ ID NO: 1262325 - RNA, 19 nt, Homo sapiens
  misc_RNA (1)...(19): siRNA sense strand
gcugagauaagcaucaaca

SEQ ID NO: 1262326 - RNA, 19 nt, Homo sapiens
  misc_RNA (1)...(19): siRNA sense strand
uagagucccugucccugau

SEQ ID NO: 1262327 - RNA, 19 nt, Homo sapiens
  misc_RNA (1)...(19): siRNA sense strand
ugagauuccacccaacaaa

SEQ ID NO: 1262328 - RNA, 19 nt, Homo sapiens
  misc_RNA (1)...(19): siRNA sense strand
gugcuucauuugauucuac

SEQ ID NO: 1262329 - RNA, 19 nt, Homo sapiens
  misc_RNA (1)...(19): siRNA sense strand
ggaacgcccgaggagauaa

SEQ ID NO: 1262330 - RNA, 19 nt, Homo sapiens
  misc_RNA (1)...(19): siRNA sense strand
gcacccacacacucaugaa

SEQ ID NO: 1262331 - RNA, 19 nt, Homo sapiens
  misc_RNA (1)...(19): siRNA sense strand
gaugugguccaacuucuuc

SEQ ID NO: 1262332 - RNA, 19 nt, Homo sapiens
  misc_RNA (1)...(19): siRNA sense strand
cuggagguguuccggcauu

SEQ ID NO: 1262333 - RNA, 19 nt, Homo sapiens
  misc_RNA (1)...(19): siRNA sense strand
gaugugguccaacuucuuc

SEQ ID NO: 1262334 - RNA, 19 nt, Homo sapiens
  misc_RNA (1)...(19): siRNA sense strand
cuggagguguuccggcauu

SEQ ID NO: 1262335 - RNA, 19 nt, Homo sapiens
  misc_RNA (1)...(19): siRNA sense strand
gaugugguccaacuucuuc

SEQ ID NO: 1262336 - RNA, 19 nt, Homo sapiens
  misc_RNA (1)...(19): siRNA sense strand
cuggagguguuccggcauu

SEQ ID NO: 1262337 - RNA, 19 nt, Homo sapiens
  misc_RNA (1)...(19): siRNA sense strand
gaugugguccaacuucuuc

SEQ ID NO: 1262338 - RNA, 19 nt, Homo sapiens
  misc_RNA (1)...(19): siRNA sense strand
cuggagguguuccggcauu

SEQ ID NO: 1262339 - RNA, 19 nt, Homo sapiens
  misc_RNA (1)...(19): siRNA sense strand
gaugugguccaacuucuuc

SEQ ID NO: 1262340 - RNA, 19 nt, Homo sapiens
  misc_RNA (1)...(19): siRNA sense strand
cuggagguguuccggcauu

SEQ ID NO: 1262341 - RNA, 19 nt, Homo sapiens
  misc_RNA (1)...(19): siRNA sense strand
gaugugguccaacuucuuc

SEQ ID NO: 1262342 - RNA, 19 nt, Homo sapiens
  misc_RNA (1)...(19): siRNA sense strand
cuggagguguuccggcauu

SEQ ID NO: 1262343 - RNA, 19 nt, Homo sapiens
  misc_RNA (1)...(19): siRNA sense strand
gacgaguucuuuaugcuua

SEQ ID NO: 1262344 - RNA, 19 nt, Homo sapiens
  misc_RNA (1)...(19): siRNA sense strand
uggaguauccuaucaugua

SEQ ID NO: 1262345 - RNA, 19 nt, Homo sapiens
  misc_RNA (1)...(19): siRNA sense strand
ccaccuagccaucaauguu

SEQ ID NO: 1262346 - RNA, 19 nt, Homo sapiens
  misc_RNA (1)...(19): siRNA sense strand
ggaguauccuaucauguac

SEQ ID NO: 1262347 - RNA, 19 nt, Homo sapiens
  misc_RNA (1)...(19): siRNA sense strand
aaaguggaguauccuauca

SEQ ID NO: 1262348 - RNA, 19 nt, Homo sapiens
  misc_RNA (1)...(19): siRNA sense strand
gcacaucuucaacugcauu

SEQ ID NO: 1262349 - RNA, 19 nt, Homo sapiens
  misc_RNA (1)...(19): siRNA sense strand
aguguauccucccuucuua

SEQ ID NO: 1262350 - RNA, 19 nt, Homo sapiens
  misc_RNA (1)...(19): siRNA sense strand
ggacgaguucuuuaugcuu

SEQ ID NO: 1262351 - RNA, 19 nt, Homo sapiens
  misc_RNA (1)...(19): siRNA sense strand
gaaguacaaaguggaguau

SEQ ID NO: 1262352 - RNA, 19 nt, Homo sapiens
  misc_RNA (1)...(19): siRNA sense strand
gaacccagcaagcguaguc

SEQ ID NO: 1262353 - RNA, 19 nt, Homo sapiens
  misc_RNA (1)...(19): siRNA sense strand
ggcuuggccuggauuguug

SEQ ID NO: 1262354 - RNA, 19 nt, Homo sapiens
  misc_RNA (1)...(19): siRNA sense strand
ggaauaugguuuugugcuu

SEQ ID NO: 1262355 - RNA, 19 nt, Homo sapiens
  misc_RNA (1)...(19): siRNA sense strand
cagcaucuugguuggguua

SEQ ID NO: 1262356 - RNA, 19 nt, Homo sapiens
  misc_RNA (1)...(19): siRNA sense strand
caccuagccaucaauguuu

SEQ ID NO: 1262357 - RNA, 19 nt, Homo sapiens
  misc_RNA (1)...(19): siRNA sense strand
gcaucuugguuggguuaaa

SEQ ID NO: 1262358 - RNA, 19 nt, Homo sapiens
  misc_RNA (1)...(19): siRNA sense strand
caaaguggaguauccuauc

SEQ ID NO: 1262359 - RNA, 19 nt, Homo sapiens
  misc_RNA (1)...(19): siRNA sense strand
gggcuuggccuggauuguu

SEQ ID NO: 1262360 - RNA, 19 nt, Homo sapiens
  misc_RNA (1)...(19): siRNA sense strand
agaaguacaaaguggagua

SEQ ID NO: 1262361 - RNA, 19 nt, Homo sapiens
  misc_RNA (1)...(19): siRNA sense strand
caacugugugcucugcuuu

SEQ ID NO: 1262362 - RNA, 19 nt, Homo sapiens
  misc_RNA (1)...(19): siRNA sense strand
gaaaaugggcacaucuuca

SEQ ID NO: 1262363 - RNA, 19 nt, Homo sapiens
  misc_RNA (1)...(19): siRNA sense strand
uaaggaauaugguuuugug

SEQ ID NO: 1262364 - RNA, 19 nt, Homo sapiens
  misc_RNA (1)...(19): siRNA sense strand
uauccucccuucuuauuuu

SEQ ID NO: 1262365 - RNA, 19 nt, Homo sapiens
  misc_RNA (1)...(19): siRNA sense strand
gagcccaccagaacacguu

SEQ ID NO: 1262366 - RNA, 19 nt, Homo sapiens
  misc_RNA (1)...(19): siRNA sense strand
ucucuaaggaauaugguuu

SEQ ID NO: 1262367 - RNA, 19 nt, Homo sapiens
  misc_RNA (1)...(19): siRNA sense strand
guauccucccuucuuauuu

SEQ ID NO: 1262368 - RNA, 19 nt, Homo sapiens
  misc_RNA (1)...(19): siRNA sense strand
ucuuuaugcuuauggcuau

SEQ ID NO: 1262369 - RNA, 19 nt, Homo sapiens
  misc_RNA (1)...(19): siRNA sense strand
acaacugugugcucugcuu

SEQ ID NO: 1262370 - RNA, 19 nt, Homo sapiens
  misc_RNA (1)...(19): siRNA sense strand
uguauccucccuucuuauu

SEQ ID NO: 1262371 - RNA, 19 nt, Homo sapiens
  misc_RNA (1)...(19): siRNA sense strand
acaaaguggaguauccuau

SEQ ID NO: 1262372 - RNA, 19 nt, Homo sapiens
  misc_RNA (1)...(19): siRNA sense strand
ccagaacacguuggaagug

SEQ ID NO: 1262373 - RNA, 19 nt, Homo sapiens
  misc_RNA (1)...(19): siRNA sense strand
caucuugguuggguuaaaa

SEQ ID NO: 1262374 - RNA, 19 nt, Homo sapiens
  misc_RNA (1)...(19): siRNA sense strand
aguggaguauccuaucaug

SEQ ID NO: 1262375 - RNA, 19 nt, Homo sapiens
  misc_RNA (1)...(19): siRNA sense strand
cgaguucuuuaugcuuaug

SEQ ID NO: 1262376 - RNA, 19 nt, Homo sapiens
  misc_RNA (1)...(19): siRNA sense strand
ggagugagauuauauagua

SEQ ID NO: 1262377 - RNA, 19 nt, Homo sapiens
  misc_RNA (1)...(19): siRNA sense strand
caacagaguuccacagaug

SEQ ID NO: 1262378 - RNA, 19 nt, Homo sapiens
  misc_RNA (1)...(19): siRNA sense strand
gauaagcagugccuugaaa

SEQ ID NO: 1262379 - RNA, 19 nt, Homo sapiens
  misc_RNA (1)...(19): siRNA sense strand
gagcauuacuugguucaua

SEQ ID NO: 1262380 - RNA, 19 nt, Homo sapiens
  misc_RNA (1)...(19): siRNA sense strand
ggagagaaauugcuggaau

SEQ ID NO: 1262381 - RNA, 19 nt, Homo sapiens
  misc_RNA (1)...(19): siRNA sense strand
ggaauuguauuagauguug

SEQ ID NO: 1262382 - RNA, 19 nt, Homo sapiens
  misc_RNA (1)...(19): siRNA sense strand
ucaaccagaugaugaagua

SEQ ID NO: 1262383 - RNA, 19 nt, Homo sapiens
  misc_RNA (1)...(19): siRNA sense strand
gauaauggauggagcaagu

SEQ ID NO: 1262384 - RNA, 19 nt, Homo sapiens
  misc_RNA (1)...(19): siRNA sense strand
gggaguagauauuguccua

SEQ ID NO: 1262385 - RNA, 19 nt, Homo sapiens
  misc_RNA (1)...(19): siRNA sense strand
gaagcaagguaucauucuu

SEQ ID NO: 1262386 - RNA, 19 nt, Homo sapiens
  misc_RNA (1)...(19): siRNA sense strand
gaguagauauuguccuaga

SEQ ID NO: 1262387 - RNA, 19 nt, Homo sapiens
  misc_RNA (1)...(19): siRNA sense strand
ccagauagccacugccuuu

SEQ ID NO: 1262388 - RNA, 19 nt, Homo sapiens
  misc_RNA (1)...(19): siRNA sense strand
ggaagcagcaggaagcauu

SEQ ID NO: 1262389 - RNA, 19 nt, Homo sapiens
  misc_RNA (1)...(19): siRNA sense strand
gcaagugcauuugguacaa

SEQ ID NO: 1262390 - RNA, 19 nt, Homo sapiens
  misc_RNA (1)...(19): siRNA sense strand
uuccacagaugaagaaaua

SEQ ID NO: 1262391 - RNA, 19 nt, Homo sapiens
  misc_RNA (1)...(19): siRNA sense strand
ccagauaaauacaaagcuu

SEQ ID NO: 1262392 - RNA, 19 nt, Homo sapiens
  misc_RNA (1)...(19): siRNA sense strand
ggauggagcaagugcauuu

SEQ ID NO: 1262393 - RNA, 19 nt, Homo sapiens
  misc_RNA (1)...(19): siRNA sense strand
gaggauaacuuugugaaac

SEQ ID NO: 1262394 - RNA, 19 nt, Homo sapiens
  misc_RNA (1)...(19): siRNA sense strand
gauaucaucacacuucuug

SEQ ID NO: 1262395 - RNA, 19 nt, Homo sapiens
  misc_RNA (1)...(19): siRNA sense strand
cuacaacuacuaccacaua

SEQ ID NO: 1262396 - RNA, 19 nt, Homo sapiens
  misc_RNA (1)...(19): siRNA sense strand
gcaugcagccuugaagaua

SEQ ID NO: 1262397 - RNA, 19 nt, Homo sapiens
  misc_RNA (1)...(19): siRNA sense strand
ugaagacccuggacuuugu

SEQ ID NO: 1262398 - RNA, 19 nt, Homo sapiens
  misc_RNA (1)...(19): siRNA sense strand
gaaagcuguuuggaagaaa

SEQ ID NO: 1262399 - RNA, 19 nt, Homo sapiens
  misc_RNA (1)...(19): siRNA sense strand
ugaaagcuguuuggaagaa

SEQ ID NO: 1262400 - RNA, 19 nt, Homo sapiens
  misc_RNA (1)...(19): siRNA sense strand
caugcagccuugaagauaa

SEQ ID NO: 1262401 - RNA, 19 nt, Homo sapiens
  misc_RNA (1)...(19): siRNA sense strand
uggcagaaaugaagaugaa

SEQ ID NO: 1262402 - RNA, 19 nt, Homo sapiens
  misc_RNA (1)...(19): siRNA sense strand
gcagugccuugaaagauuc

SEQ ID NO: 1262403 - RNA, 19 nt, Homo sapiens
  misc_RNA (1)...(19): siRNA sense strand
ugauguaucuaaugggaaa

SEQ ID NO: 1262404 - RNA, 19 nt, Homo sapiens
  misc_RNA (1)...(19): siRNA sense strand
uagcuuuccugaaugauga

SEQ ID NO: 1262405 - RNA, 19 nt, Homo sapiens
  misc_RNA (1)...(19): siRNA sense strand
caagguaucauucuuucaa

SEQ ID NO: 1262406 - RNA, 19 nt, Homo sapiens
  misc_RNA (1)...(19): siRNA sense strand
ucucaucucucuccuggaa

SEQ ID NO: 1262407 - RNA, 19 nt, Homo sapiens
  misc_RNA (1)...(19): siRNA sense strand
auacagcucugcauuaucu

SEQ ID NO: 1262408 - RNA, 19 nt, Homo sapiens
  misc_RNA (1)...(19): siRNA sense strand
cuauacagcucugcauuau

SEQ ID NO: 1262409 - RNA, 19 nt, Homo sapiens
  misc_RNA (1)...(19): siRNA sense strand
uagaggagccaaagugauu

SEQ ID NO: 1262410 - RNA, 19 nt, Homo sapiens
  misc_RNA (1)...(19): siRNA sense strand
ucaguuagcacaucauaga

SEQ ID NO: 1262411 - RNA, 19 nt, Homo sapiens
  misc_RNA (1)...(19): siRNA sense strand
gaugaaguaguuggaauuu

SEQ ID NO: 1262412 - RNA, 19 nt, Homo sapiens
  misc_RNA (1)...(19): siRNA sense strand
ggagcaagugcauuuggua

SEQ ID NO: 1262413 - RNA, 19 nt, Homo sapiens
  misc_RNA (1)...(19): siRNA sense strand
aacguuagcuuuccugaau

SEQ ID NO: 1262414 - RNA, 19 nt, Homo sapiens
  misc_RNA (1)...(19): siRNA sense strand
gagccaaagugauuucaac

SEQ ID NO: 1262415 - RNA, 19 nt, Homo sapiens
  misc_RNA (1)...(19): siRNA sense strand
ccuauacagcucugcauua

SEQ ID NO: 1262416 - RNA, 19 nt, Homo sapiens
  misc_RNA (1)...(19): siRNA sense strand
ggauaacuuugugaaacuu

SEQ ID NO: 1262417 - RNA, 19 nt, Homo sapiens
  misc_RNA (1)...(19): siRNA sense strand
ugagccagauaaauacaaa

SEQ ID NO: 1262418 - RNA, 19 nt, Homo sapiens
  misc_RNA (1)...(19): siRNA sense strand
gaugaugaaccagcuguaa

SEQ ID NO: 1262419 - RNA, 19 nt, Homo sapiens
  misc_RNA (1)...(19): siRNA sense strand
ccacauaaacaugauauca

SEQ ID NO: 1262420 - RNA, 19 nt, Homo sapiens
  misc_RNA (1)...(19): siRNA sense strand
ugaaccagcuguaaaacua

SEQ ID NO: 1262421 - RNA, 19 nt, Homo sapiens
  misc_RNA (1)...(19): siRNA sense strand
ugaaguaguuggaauuuug

SEQ ID NO: 1262422 - RNA, 19 nt, Homo sapiens
  misc_RNA (1)...(19): siRNA sense strand
ggaggccacuggguaacaa

SEQ ID NO: 1262423 - RNA, 19 nt, Homo sapiens
  misc_RNA (1)...(19): siRNA sense strand
ccuagaugcuggagugaga

SEQ ID NO: 1262424 - RNA, 19 nt, Homo sapiens
  misc_RNA (1)...(19): siRNA sense strand
uuagaguacaugagcauua

SEQ ID NO: 1262425 - RNA, 19 nt, Homo sapiens
  misc_RNA (1)...(19): siRNA sense strand
ccucaagggagcaacguua

SEQ ID NO: 1262426 - RNA, 19 nt, Homo sapiens
  misc_RNA (1)...(19): siRNA sense strand
uaguaaagaugaugaacca

SEQ ID NO: 1262427 - RNA, 19 nt, Homo sapiens
  misc_RNA (1)...(19): siRNA sense strand
uuacagaggauaacuuugu

SEQ ID NO: 1262428 - RNA, 19 nt, Homo sapiens
  misc_RNA (1)...(19): siRNA sense strand
guagauauuguccuagaug

SEQ ID NO: 1262429 - RNA, 19 nt, Homo sapiens
  misc_RNA (1)...(19): siRNA sense strand
caacuacuaccacauaaac

SEQ ID NO: 1262430 - RNA, 19 nt, Homo sapiens
  misc_RNA (1)...(19): siRNA sense strand
agcauuacuugguucauaa

SEQ ID NO: 1262431 - RNA, 19 nt, Homo sapiens
  misc_RNA (1)...(19): siRNA sense strand
uacaacuacuaccacauaa

SEQ ID NO: 1262432 - RNA, 19 nt, Homo sapiens
  misc_RNA (1)...(19): siRNA sense strand
gcuggagugagauuauaua

SEQ ID NO: 1262433 - RNA, 19 nt, Homo sapiens
  misc_RNA (1)...(19): siRNA sense strand
ugcauuaucuuucucaucu

SEQ ID NO: 1262434 - RNA, 19 nt, Homo sapiens
  misc_RNA (1)...(19): siRNA sense strand
guuaaagcuugugcucuga

SEQ ID NO: 1262435 - RNA, 19 nt, Homo sapiens
  misc_RNA (1)...(19): siRNA sense strand
ugauugauguaucuaaugg

SEQ ID NO: 1262436 - RNA, 19 nt, Homo sapiens
  misc_RNA (1)...(19): siRNA sense strand
ccaacagaguuccacagau

SEQ ID NO: 1262437 - RNA, 19 nt, Homo sapiens
  misc_RNA (1)...(19): siRNA sense strand
cguuagcuuuccugaauga

SEQ ID NO: 1262438 - RNA, 19 nt, Homo sapiens
  misc_RNA (1)...(19): siRNA sense strand
aaagugauuucaacagcau

SEQ ID NO: 1262439 - RNA, 19 nt, Homo sapiens
  misc_RNA (1)...(19): siRNA sense strand
cauagaggagccaaaguga

SEQ ID NO: 1262440 - RNA, 19 nt, Homo sapiens
  misc_RNA (1)...(19): siRNA sense strand
aagcaagguaucauucuuu

SEQ ID NO: 1262441 - RNA, 19 nt, Homo sapiens
  misc_RNA (1)...(19): siRNA sense strand
caacagggaaaauaucuuu

SEQ ID NO: 1262442 - RNA, 19 nt, Homo sapiens
  misc_RNA (1)...(19): siRNA sense strand
agcagugccuugaaagauu

SEQ ID NO: 1262443 - RNA, 19 nt, Homo sapiens
  misc_RNA (1)...(19): siRNA sense strand
gcauuugguacaauagcua

SEQ ID NO: 1262444 - RNA, 19 nt, Homo sapiens
  misc_RNA (1)...(19): siRNA sense strand
caagugcauuugguacaau

SEQ ID NO: 1262445 - RNA, 19 nt, Homo sapiens
  misc_RNA (1)...(19): siRNA sense strand
ggaagcaagguaucauucu

SEQ ID NO: 1262446 - RNA, 19 nt, Homo sapiens
  misc_RNA (1)...(19): siRNA sense strand
gauguuggaagcaagguau

SEQ ID NO: 1262447 - RNA, 19 nt, Homo sapiens
  misc_RNA (1)...(19): siRNA sense strand
uugugaaguuguuagagua

SEQ ID NO: 1262448 - RNA, 19 nt, Homo sapiens
  misc_RNA (1)...(19): siRNA sense strand
caaauguacaacagggaaa

SEQ ID NO: 1262449 - RNA, 19 nt, Homo sapiens
  misc_RNA (1)...(19): siRNA sense strand
aagaaaaccuucaguugga

SEQ ID NO: 1262450 - RNA, 19 nt, Homo sapiens
  misc_RNA (1)...(19): siRNA sense strand
aagugcauuugguacaaua

SEQ ID NO: 1262451 - RNA, 19 nt, Homo sapiens
  misc_RNA (1)...(19): siRNA sense strand
gcauuacuugguucauaaa

SEQ ID NO: 1262452 - RNA, 19 nt, Homo sapiens
  misc_RNA (1)...(19): siRNA sense strand
acaugagcauuacuugguu

SEQ ID NO: 1262453 - RNA, 19 nt, Homo sapiens
  misc_RNA (1)...(19): siRNA sense strand
gaagcagcaggaagcauuc

SEQ ID NO: 1262454 - RNA, 19 nt, Homo sapiens
  misc_RNA (1)...(19): siRNA sense strand
uagaguacaugagcauuac

SEQ ID NO: 1262455 - RNA, 19 nt, Homo sapiens
  misc_RNA (1)...(19): siRNA sense strand
caacguuagcuuuccugaa

SEQ ID NO: 1262456 - RNA, 19 nt, Homo sapiens
  misc_RNA (1)...(19): siRNA sense strand
gccacuggguaacaacaga

SEQ ID NO: 1262457 - RNA, 19 nt, Homo sapiens
  misc_RNA (1)...(19): siRNA sense strand
gaugcuggagugagauuau

SEQ ID NO: 1262458 - RNA, 19 nt, Homo sapiens
  misc_RNA (1)...(19): siRNA sense strand
uaagcagugccuugaaaga

SEQ ID NO: 1262459 - RNA, 19 nt, Homo sapiens
  misc_RNA (1)...(19): siRNA sense strand
ucauagaggagccaaagug

SEQ ID NO: 1262460 - RNA, 19 nt, Homo sapiens
  misc_RNA (1)...(19): siRNA sense strand
gcagaaaugaagaugaaaa

SEQ ID NO: 1262461 - RNA, 19 nt, Homo sapiens
  misc_RNA (1)...(19): siRNA sense strand
uugcuggaauuguauuaga

SEQ ID NO: 1262462 - RNA, 19 nt, Homo sapiens
  misc_RNA (1)...(19): siRNA sense strand
ugaugaaguaguuggaauu

SEQ ID NO: 1262463 - RNA, 19 nt, Homo sapiens
  misc_RNA (1)...(19): siRNA sense strand
uauuagauguuggaagcaa

SEQ ID NO: 1262464 - RNA, 19 nt, Homo sapiens
  misc_RNA (1)...(19): siRNA sense strand
cagaggauaacuuugugaa

SEQ ID NO: 1262465 - RNA, 19 nt, Homo sapiens
  misc_RNA (1)...(19): siRNA sense strand
gaugaugaaguaguuggaa

SEQ ID NO: 1262466 - RNA, 19 nt, Homo sapiens
  misc_RNA (1)...(19): siRNA sense strand
gggagcaacguuagcuuuc

SEQ ID NO: 1262467 - RNA, 19 nt, Homo sapiens
  misc_RNA (1)...(19): siRNA sense strand
guuggaggccacuggguaa

SEQ ID NO: 1262468 - RNA, 19 nt, Homo sapiens
  misc_RNA (1)...(19): siRNA sense strand
uacagaggauaacuuugug

SEQ ID NO: 1262469 - RNA, 19 nt, Homo sapiens
  misc_RNA (1)...(19): siRNA sense strand
gauggagugcgugccuaua

SEQ ID NO: 1262470 - RNA, 19 nt, Homo sapiens
  misc_RNA (1)...(19): siRNA sense strand
ggauggagugcgugccuau

SEQ ID NO: 1262471 - RNA, 19 nt, Homo sapiens
  misc_RNA (1)...(19): siRNA sense strand
gaaguuguuagaguacaug

SEQ ID NO: 1262472 - RNA, 19 nt, Homo sapiens
  misc_RNA (1)...(19): siRNA sense strand
gagcaacguuagcuuuccu

SEQ ID NO: 1262473 - RNA, 19 nt, Homo sapiens
  misc_RNA (1)...(19): siRNA sense strand
gagugauugauguaucuaa

SEQ ID NO: 1262474 - RNA, 19 nt, Homo sapiens
  misc_RNA (1)...(19): siRNA sense strand
ccgagugauugauguaucu

SEQ ID NO: 1262475 - RNA, 19 nt, Homo sapiens
  misc_RNA (1)...(19): siRNA sense strand
gaguuccacagaugaagaa

SEQ ID NO: 1262476 - RNA, 19 nt, Homo sapiens
  misc_RNA (1)...(19): siRNA sense strand
caacagaguuccacagaug

SEQ ID NO: 1262477 - RNA, 19 nt, Homo sapiens
  misc_RNA (1)...(19): siRNA sense strand
gauaagcagugccuugaaa

SEQ ID NO: 1262478 - RNA, 19 nt, Homo sapiens
  misc_RNA (1)...(19): siRNA sense strand
gagcauuacuugguucaua

SEQ ID NO: 1262479 - RNA, 19 nt, Homo sapiens
  misc_RNA (1)...(19): siRNA sense strand
ggagagaaauugcuggaau

SEQ ID NO: 1262480 - RNA, 19 nt, Homo sapiens
  misc_RNA (1)...(19): siRNA sense strand
ggaauuguauuagauguug

SEQ ID NO: 1262481 - RNA, 19 nt, Homo sapiens
  misc_RNA (1)...(19): siRNA sense strand
ucaaccagaugaugaagua

SEQ ID NO: 1262482 - RNA, 19 nt, Homo sapiens
  misc_RNA (1)...(19): siRNA sense strand
gauaauggauggagcaagu

SEQ ID NO: 1262483 - RNA, 19 nt, Homo sapiens
  misc_RNA (1)...(19): siRNA sense strand
gaagcaagguaucauucuu

SEQ ID NO: 1262484 - RNA, 19 nt, Homo sapiens
  misc_RNA (1)...(19): siRNA sense strand
ggaagcagcaggaagcauu

SEQ ID NO: 1262485 - RNA, 19 nt, Homo sapiens
  misc_RNA (1)...(19): siRNA sense strand
gcaagugcauuugguacaa

SEQ ID NO: 1262486 - RNA, 19 nt, Homo sapiens
  misc_RNA (1)...(19): siRNA sense strand
uuccacagaugaagaaaua

SEQ ID NO: 1262487 - RNA, 19 nt, Homo sapiens
  misc_RNA (1)...(19): siRNA sense strand
ccagauaaauacaaagcuu

SEQ ID NO: 1262488 - RNA, 19 nt, Homo sapiens
  misc_RNA (1)...(19): siRNA sense strand
ggauggagcaagugcauuu

SEQ ID NO: 1262489 - RNA, 19 nt, Homo sapiens
  misc_RNA (1)...(19): siRNA sense strand
gaggauaacuuugugaaac

SEQ ID NO: 1262490 - RNA, 19 nt, Homo sapiens
  misc_RNA (1)...(19): siRNA sense strand
gcaugcagccuugaagaua

SEQ ID NO: 1262491 - RNA, 19 nt, Homo sapiens
  misc_RNA (1)...(19): siRNA sense strand
ugaagacccuggacuuugu

SEQ ID NO: 1262492 - RNA, 19 nt, Homo sapiens
  misc_RNA (1)...(19): siRNA sense strand
caugcagccuugaagauaa

SEQ ID NO: 1262493 - RNA, 19 nt, Homo sapiens
  misc_RNA (1)...(19): siRNA sense strand
uggcagaaaugaagaugaa

SEQ ID NO: 1262494 - RNA, 19 nt, Homo sapiens
  misc_RNA (1)...(19): siRNA sense strand
gcagugccuugaaagauuc

SEQ ID NO: 1262495 - RNA, 19 nt, Homo sapiens
  misc_RNA (1)...(19): siRNA sense strand
caagguaucauucuuucaa

SEQ ID NO: 1262496 - RNA, 19 nt, Homo sapiens
  misc_RNA (1)...(19): siRNA sense strand
ucucaucucucuccuggaa

SEQ ID NO: 1262497 - RNA, 19 nt, Homo sapiens
  misc_RNA (1)...(19): siRNA sense strand
auacagcucugcauuaucu

SEQ ID NO: 1262498 - RNA, 19 nt, Homo sapiens
  misc_RNA (1)...(19): siRNA sense strand
cuauacagcucugcauuau

SEQ ID NO: 1262499 - RNA, 19 nt, Homo sapiens
  misc_RNA (1)...(19): siRNA sense strand
uagaggagccaaagugauu

SEQ ID NO: 1262500 - RNA, 19 nt, Homo sapiens
  misc_RNA (1)...(19): siRNA sense strand
ucaguuagcacaucauaga

SEQ ID NO: 1262501 - RNA, 19 nt, Homo sapiens
  misc_RNA (1)...(19): siRNA sense strand
gaugaaguaguuggaauuu

SEQ ID NO: 1262502 - RNA, 19 nt, Homo sapiens
  misc_RNA (1)...(19): siRNA sense strand
ggagcaagugcauuuggua

SEQ ID NO: 1262503 - RNA, 19 nt, Homo sapiens
  misc_RNA (1)...(19): siRNA sense strand
gagccaaagugauuucaac

SEQ ID NO: 1262504 - RNA, 19 nt, Homo sapiens
  misc_RNA (1)...(19): siRNA sense strand
ugagccagauaaauacaaa

SEQ ID NO: 1262505 - RNA, 19 nt, Homo sapiens
  misc_RNA (1)...(19): siRNA sense strand
ccuauacagcucugcauua

SEQ ID NO: 1262506 - RNA, 19 nt, Homo sapiens
  misc_RNA (1)...(19): siRNA sense strand
ggauaacuuugugaaacuu

SEQ ID NO: 1262507 - RNA, 19 nt, Homo sapiens
  misc_RNA (1)...(19): siRNA sense strand
ugaaguaguuggaauuuug

SEQ ID NO: 1262508 - RNA, 19 nt, Homo sapiens
  misc_RNA (1)...(19): siRNA sense strand
uuacagaggauaacuuugu

SEQ ID NO: 1262509 - RNA, 19 nt, Homo sapiens
  misc_RNA (1)...(19): siRNA sense strand
uuagaguacaugagcauua

SEQ ID NO: 1262510 - RNA, 19 nt, Homo sapiens
  misc_RNA (1)...(19): siRNA sense strand
agcauuacuugguucauaa

SEQ ID NO: 1262511 - RNA, 19 nt, Homo sapiens
  misc_RNA (1)...(19): siRNA sense strand
ugcauuaucuuucucaucu

SEQ ID NO: 1262512 - RNA, 19 nt, Homo sapiens
  misc_RNA (1)...(19): siRNA sense strand
guuaaagcuugugcucuga

SEQ ID NO: 1262513 - RNA, 19 nt, Homo sapiens
  misc_RNA (1)...(19): siRNA sense strand
ccaacagaguuccacagau

SEQ ID NO: 1262514 - RNA, 19 nt, Homo sapiens
  misc_RNA (1)...(19): siRNA sense strand
aaagugauuucaacagcau

SEQ ID NO: 1262515 - RNA, 19 nt, Homo sapiens
  misc_RNA (1)...(19): siRNA sense strand
cauagaggagccaaaguga

SEQ ID NO: 1262516 - RNA, 19 nt, Homo sapiens
  misc_RNA (1)...(19): siRNA sense strand
aagcaagguaucauucuuu

SEQ ID NO: 1262517 - RNA, 19 nt, Homo sapiens
  misc_RNA (1)...(19): siRNA sense strand
agcagugccuugaaagauu

SEQ ID NO: 1262518 - RNA, 19 nt, Homo sapiens
  misc_RNA (1)...(19): siRNA sense strand
gcauuugguacaauagcua

SEQ ID NO: 1262519 - RNA, 19 nt, Homo sapiens
  misc_RNA (1)...(19): siRNA sense strand
caagugcauuugguacaau

SEQ ID NO: 1262520 - RNA, 19 nt, Homo sapiens
  misc_RNA (1)...(19): siRNA sense strand
gauguuggaagcaagguau

SEQ ID NO: 1262521 - RNA, 19 nt, Homo sapiens
  misc_RNA (1)...(19): siRNA sense strand
ggaagcaagguaucauucu

SEQ ID NO: 1262522 - RNA, 19 nt, Homo sapiens
  misc_RNA (1)...(19): siRNA sense strand
uugugaaguuguuagagua

SEQ ID NO: 1262523 - RNA, 19 nt, Homo sapiens
  misc_RNA (1)...(19): siRNA sense strand
aagugcauuugguacaaua

SEQ ID NO: 1262524 - RNA, 19 nt, Homo sapiens
  misc_RNA (1)...(19): siRNA sense strand
gcauuacuugguucauaaa

SEQ ID NO: 1262525 - RNA, 19 nt, Homo sapiens
  misc_RNA (1)...(19): siRNA sense strand
acaugagcauuacuugguu

SEQ ID NO: 1262526 - RNA, 19 nt, Homo sapiens
  misc_RNA (1)...(19): siRNA sense strand
gaagcagcaggaagcauuc

SEQ ID NO: 1262527 - RNA, 19 nt, Homo sapiens
  misc_RNA (1)...(19): siRNA sense strand
uagaguacaugagcauuac

SEQ ID NO: 1262528 - RNA, 19 nt, Homo sapiens
  misc_RNA (1)...(19): siRNA sense strand
uaagcagugccuugaaaga

SEQ ID NO: 1262529 - RNA, 19 nt, Homo sapiens
  misc_RNA (1)...(19): siRNA sense strand
ucauagaggagccaaagug

SEQ ID NO: 1262530 - RNA, 19 nt, Homo sapiens
  misc_RNA (1)...(19): siRNA sense strand
gcagaaaugaagaugaaaa

SEQ ID NO: 1262531 - RNA, 19 nt, Homo sapiens
  misc_RNA (1)...(19): siRNA sense strand
uugcuggaauuguauuaga

SEQ ID NO: 1262532 - RNA, 19 nt, Homo sapiens
  misc_RNA (1)...(19): siRNA sense strand
uauuagauguuggaagcaa

SEQ ID NO: 1262533 - RNA, 19 nt, Homo sapiens
  misc_RNA (1)...(19): siRNA sense strand
cagaggauaacuuugugaa

SEQ ID NO: 1262534 - RNA, 19 nt, Homo sapiens
  misc_RNA (1)...(19): siRNA sense strand
ugaugaaguaguuggaauu

SEQ ID NO: 1262535 - RNA, 19 nt, Homo sapiens
  misc_RNA (1)...(19): siRNA sense strand
gaugaugaaguaguuggaa

SEQ ID NO: 1262536 - RNA, 19 nt, Homo sapiens
  misc_RNA (1)...(19): siRNA sense strand
uacagaggauaacuuugug

SEQ ID NO: 1262537 - RNA, 19 nt, Homo sapiens
  misc_RNA (1)...(19): siRNA sense strand
gauggagugcgugccuaua

SEQ ID NO: 1262538 - RNA, 19 nt, Homo sapiens
  misc_RNA (1)...(19): siRNA sense strand
ggauggagugcgugccuau

SEQ ID NO: 1262539 - RNA, 19 nt, Homo sapiens
  misc_RNA (1)...(19): siRNA sense strand
gaaguuguuagaguacaug

SEQ ID NO: 1262540 - RNA, 19 nt, Homo sapiens
  misc_RNA (1)...(19): siRNA sense strand
gaguuccacagaugaagaa

SEQ ID NO: 1262541 - RNA, 19 nt, Homo sapiens
  misc_RNA (1)...(19): siRNA sense strand
gcaagguaucauucuuuca

SEQ ID NO: 1262542 - RNA, 19 nt, Homo sapiens
  misc_RNA (1)...(19): siRNA sense strand
aagauaagcagugccuuga

SEQ ID NO: 1262543 - RNA, 19 nt, Homo sapiens
  misc_RNA (1)...(19): siRNA sense strand
cagcaugcagccuugaaga

SEQ ID NO: 1262544 - RNA, 19 nt, Homo sapiens
  misc_RNA (1)...(19): siRNA sense strand
gcuggaauuguauuagaug

SEQ ID NO: 1262545 - RNA, 19 nt, Homo sapiens
  misc_RNA (1)...(19): siRNA sense strand
ugaaguuguuagaguacau

SEQ ID NO: 1262546 - RNA, 19 nt, Homo sapiens
  misc_RNA (1)...(19): siRNA sense strand
accagaugaugaaguaguu

SEQ ID NO: 1262547 - RNA, 19 nt, Homo sapiens
  misc_RNA (1)...(19): siRNA sense strand
ccacagaugaagaaauaac

SEQ ID NO: 1262548 - RNA, 19 nt, Homo sapiens
  misc_RNA (1)...(19): siRNA sense strand
aggcuuauauuuccaacag

SEQ ID NO: 1262549 - RNA, 19 nt, Homo sapiens
  misc_RNA (1)...(19): siRNA sense strand
cauuaucuuucucaucucu

SEQ ID NO: 1262550 - RNA, 19 nt, Homo sapiens
  misc_RNA (1)...(19): siRNA sense strand
gaagacccuggacuuugug

SEQ ID NO: 1262551 - RNA, 19 nt, Homo sapiens
  misc_RNA (1)...(19): siRNA sense strand
ucugaagacccuggacuuu

SEQ ID NO: 1262552 - RNA, 19 nt, Homo sapiens
  misc_RNA (1)...(19): siRNA sense strand
agcaagguaucauucuuuc

SEQ ID NO: 1262553 - RNA, 19 nt, Homo sapiens
  misc_RNA (1)...(19): siRNA sense strand
ggagccaaagugauuucaa

SEQ ID NO: 1262554 - RNA, 19 nt, Homo sapiens
  misc_RNA (1)...(19): siRNA sense strand
gaggagccaaagugauuuc

SEQ ID NO: 1262555 - RNA, 19 nt, Homo sapiens
  misc_RNA (1)...(19): siRNA sense strand
caucauagaggagccaaag

SEQ ID NO: 1262556 - RNA, 19 nt, Homo sapiens
  misc_RNA (1)...(19): siRNA sense strand
cuauucaguuagcacauca

SEQ ID NO: 1262557 - RNA, 19 nt, Homo sapiens
  misc_RNA (1)...(19): siRNA sense strand
aggauaacuuugugaaacu

SEQ ID NO: 1262558 - RNA, 19 nt, Homo sapiens
  misc_RNA (1)...(19): siRNA sense strand
uuugugaaguuguuagagu

SEQ ID NO: 1262559 - RNA, 19 nt, Homo sapiens
  misc_RNA (1)...(19): siRNA sense strand
agaggauaacuuugugaaa

SEQ ID NO: 1262560 - RNA, 19 nt, Homo sapiens
  misc_RNA (1)...(19): siRNA sense strand
caacagcaugcagccuuga

SEQ ID NO: 1262561 - RNA, 19 nt, Homo sapiens
  misc_RNA (1)...(19): siRNA sense strand
gauaacuuugugaaacuuc

SEQ ID NO: 1262562 - RNA, 19 nt, Homo sapiens
  misc_RNA (1)...(19): siRNA sense strand
uacaugagcauuacuuggu

SEQ ID NO: 1262563 - RNA, 19 nt, Homo sapiens
  misc_RNA (1)...(19): siRNA sense strand
cugaagacccuggacuuug

SEQ ID NO: 1262564 - RNA, 19 nt, Homo sapiens
  misc_RNA (1)...(19): siRNA sense strand
caacagaguuccacagaug

SEQ ID NO: 1262565 - RNA, 19 nt, Homo sapiens
  misc_RNA (1)...(19): siRNA sense strand
gauaagcagugccuugaaa

SEQ ID NO: 1262566 - RNA, 19 nt, Homo sapiens
  misc_RNA (1)...(19): siRNA sense strand
gagcauuacuugguucaua

SEQ ID NO: 1262567 - RNA, 19 nt, Homo sapiens
  misc_RNA (1)...(19): siRNA sense strand
ggagagaaauugcuggaau

SEQ ID NO: 1262568 - RNA, 19 nt, Homo sapiens
  misc_RNA (1)...(19): siRNA sense strand
ggaauuguauuagauguug

SEQ ID NO: 1262569 - RNA, 19 nt, Homo sapiens
  misc_RNA (1)...(19): siRNA sense strand
ucaaccagaugaugaagua

SEQ ID NO: 1262570 - RNA, 19 nt, Homo sapiens
  misc_RNA (1)...(19): siRNA sense strand
gauaauggauggagcaagu

SEQ ID NO: 1262571 - RNA, 19 nt, Homo sapiens
  misc_RNA (1)...(19): siRNA sense strand
gaagcaagguaucauucuu

SEQ ID NO: 1262572 - RNA, 19 nt, Homo sapiens
  misc_RNA (1)...(19): siRNA sense strand
ggaagcagcaggaagcauu

SEQ ID NO: 1262573 - RNA, 19 nt, Homo sapiens
  misc_RNA (1)...(19): siRNA sense strand
gcaagugcauuugguacaa

SEQ ID NO: 1262574 - RNA, 19 nt, Homo sapiens
  misc_RNA (1)...(19): siRNA sense strand
uuccacagaugaagaaaua

SEQ ID NO: 1262575 - RNA, 19 nt, Homo sapiens
  misc_RNA (1)...(19): siRNA sense strand
ccagauaaauacaaagcuu

SEQ ID NO: 1262576 - RNA, 19 nt, Homo sapiens
  misc_RNA (1)...(19): siRNA sense strand
ggauggagcaagugcauuu

SEQ ID NO: 1262577 - RNA, 19 nt, Homo sapiens
  misc_RNA (1)...(19): siRNA sense strand
gaggauaacuuugugaaac

SEQ ID NO: 1262578 - RNA, 19 nt, Homo sapiens
  misc_RNA (1)...(19): siRNA sense strand
gcaugcagccuugaagaua

SEQ ID NO: 1262579 - RNA, 19 nt, Homo sapiens
  misc_RNA (1)...(19): siRNA sense strand
ugaagacccuggacuuugu

SEQ ID NO: 1262580 - RNA, 19 nt, Homo sapiens
  misc_RNA (1)...(19): siRNA sense strand
caugcagccuugaagauaa

SEQ ID NO: 1262581 - RNA, 19 nt, Homo sapiens
  misc_RNA (1)...(19): siRNA sense strand
uggcagaaaugaagaugaa

SEQ ID NO: 1262582 - RNA, 19 nt, Homo sapiens
  misc_RNA (1)...(19): siRNA sense strand
gcagugccuugaaagauuc

SEQ ID NO: 1262583 - RNA, 19 nt, Homo sapiens
  misc_RNA (1)...(19): siRNA sense strand
caagguaucauucuuucaa

SEQ ID NO: 1262584 - RNA, 19 nt, Homo sapiens
  misc_RNA (1)...(19): siRNA sense strand
ucucaucucucuccuggaa

SEQ ID NO: 1262585 - RNA, 19 nt, Homo sapiens
  misc_RNA (1)...(19): siRNA sense strand
auacagcucugcauuaucu

SEQ ID NO: 1262586 - RNA, 19 nt, Homo sapiens
  misc_RNA (1)...(19): siRNA sense strand
cuauacagcucugcauuau

SEQ ID NO: 1262587 - RNA, 19 nt, Homo sapiens
  misc_RNA (1)...(19): siRNA sense strand
uagaggagccaaagugauu

SEQ ID NO: 1262588 - RNA, 19 nt, Homo sapiens
  misc_RNA (1)...(19): siRNA sense strand
ucaguuagcacaucauaga

SEQ ID NO: 1262589 - RNA, 19 nt, Homo sapiens
  misc_RNA (1)...(19): siRNA sense strand
gaugaaguaguuggaauuu

SEQ ID NO: 1262590 - RNA, 19 nt, Homo sapiens
  misc_RNA (1)...(19): siRNA sense strand
ggagcaagugcauuuggua

SEQ ID NO: 1262591 - RNA, 19 nt, Homo sapiens
  misc_RNA (1)...(19): siRNA sense strand
gagccaaagugauuucaac

SEQ ID NO: 1262592 - RNA, 19 nt, Homo sapiens
  misc_RNA (1)...(19): siRNA sense strand
ugagccagauaaauacaaa

SEQ ID NO: 1262593 - RNA, 19 nt, Homo sapiens
  misc_RNA (1)...(19): siRNA sense strand
ccuauacagcucugcauua

SEQ ID NO: 1262594 - RNA, 19 nt, Homo sapiens
  misc_RNA (1)...(19): siRNA sense strand
ggauaacuuugugaaacuu

SEQ ID NO: 1262595 - RNA, 19 nt, Homo sapiens
  misc_RNA (1)...(19): siRNA sense strand
ugaaguaguuggaauuuug

SEQ ID NO: 1262596 - RNA, 19 nt, Homo sapiens
  misc_RNA (1)...(19): siRNA sense strand
uuacagaggauaacuuugu

SEQ ID NO: 1262597 - RNA, 19 nt, Homo sapiens
  misc_RNA (1)...(19): siRNA sense strand
uuagaguacaugagcauua

SEQ ID NO: 1262598 - RNA, 19 nt, Homo sapiens
  misc_RNA (1)...(19): siRNA sense strand
agcauuacuugguucauaa

SEQ ID NO: 1262599 - RNA, 19 nt, Homo sapiens
  misc_RNA (1)...(19): siRNA sense strand
ugcauuaucuuucucaucu

SEQ ID NO: 1262600 - RNA, 19 nt, Homo sapiens
  misc_RNA (1)...(19): siRNA sense strand
guuaaagcuugugcucuga

SEQ ID NO: 1262601 - RNA, 19 nt, Homo sapiens
  misc_RNA (1)...(19): siRNA sense strand
ccaacagaguuccacagau

SEQ ID NO: 1262602 - RNA, 19 nt, Homo sapiens
  misc_RNA (1)...(19): siRNA sense strand
aaagugauuucaacagcau

SEQ ID NO: 1262603 - RNA, 19 nt, Homo sapiens
  misc_RNA (1)...(19): siRNA sense strand
cauagaggagccaaaguga

SEQ ID NO: 1262604 - RNA, 19 nt, Homo sapiens
  misc_RNA (1)...(19): siRNA sense strand
aagcaagguaucauucuuu

SEQ ID NO: 1262605 - RNA, 19 nt, Homo sapiens
  misc_RNA (1)...(19): siRNA sense strand
agcagugccuugaaagauu

SEQ ID NO: 1262606 - RNA, 19 nt, Homo sapiens
  misc_RNA (1)...(19): siRNA sense strand
gcauuugguacaauagcua

SEQ ID NO: 1262607 - RNA, 19 nt, Homo sapiens
  misc_RNA (1)...(19): siRNA sense strand
caagugcauuugguacaau

SEQ ID NO: 1262608 - RNA, 19 nt, Homo sapiens
  misc_RNA (1)...(19): siRNA sense strand
gauguuggaagcaagguau

SEQ ID NO: 1262609 - RNA, 19 nt, Homo sapiens
  misc_RNA (1)...(19): siRNA sense strand
ggaagcaagguaucauucu

SEQ ID NO: 1262610 - RNA, 19 nt, Homo sapiens
  misc_RNA (1)...(19): siRNA sense strand
uugugaaguuguuagagua

SEQ ID NO: 1262611 - RNA, 19 nt, Homo sapiens
  misc_RNA (1)...(19): siRNA sense strand
aagugcauuugguacaaua

SEQ ID NO: 1262612 - RNA, 19 nt, Homo sapiens
  misc_RNA (1)...(19): siRNA sense strand
gcauuacuugguucauaaa

SEQ ID NO: 1262613 - RNA, 19 nt, Homo sapiens
  misc_RNA (1)...(19): siRNA sense strand
acaugagcauuacuugguu

SEQ ID NO: 1262614 - RNA, 19 nt, Homo sapiens
  misc_RNA (1)...(19): siRNA sense strand
gaagcagcaggaagcauuc

SEQ ID NO: 1262615 - RNA, 19 nt, Homo sapiens
  misc_RNA (1)...(19): siRNA sense strand
uagaguacaugagcauuac

SEQ ID NO: 1262616 - RNA, 19 nt, Homo sapiens
  misc_RNA (1)...(19): siRNA sense strand
uaagcagugccuugaaaga

SEQ ID NO: 1262617 - RNA, 19 nt, Homo sapiens
  misc_RNA (1)...(19): siRNA sense strand
ucauagaggagccaaagug

SEQ ID NO: 1262618 - RNA, 19 nt, Homo sapiens
  misc_RNA (1)...(19): siRNA sense strand
gcagaaaugaagaugaaaa

SEQ ID NO: 1262619 - RNA, 19 nt, Homo sapiens
  misc_RNA (1)...(19): siRNA sense strand
uugcuggaauuguauuaga

SEQ ID NO: 1262620 - RNA, 19 nt, Homo sapiens
  misc_RNA (1)...(19): siRNA sense strand
uauuagauguuggaagcaa

SEQ ID NO: 1262621 - RNA, 19 nt, Homo sapiens
  misc_RNA (1)...(19): siRNA sense strand
cagaggauaacuuugugaa

SEQ ID NO: 1262622 - RNA, 19 nt, Homo sapiens
  misc_RNA (1)...(19): siRNA sense strand
ugaugaaguaguuggaauu

SEQ ID NO: 1262623 - RNA, 19 nt, Homo sapiens
  misc_RNA (1)...(19): siRNA sense strand
gaugaugaaguaguuggaa

SEQ ID NO: 1262624 - RNA, 19 nt, Homo sapiens
  misc_RNA (1)...(19): siRNA sense strand
uacagaggauaacuuugug

SEQ ID NO: 1262625 - RNA, 19 nt, Homo sapiens
  misc_RNA (1)...(19): siRNA sense strand
gauggagugcgugccuaua

SEQ ID NO: 1262626 - RNA, 19 nt, Homo sapiens
  misc_RNA (1)...(19): siRNA sense strand
ggauggagugcgugccuau

SEQ ID NO: 1262627 - RNA, 19 nt, Homo sapiens
  misc_RNA (1)...(19): siRNA sense strand
gaaguuguuagaguacaug

SEQ ID NO: 1262628 - RNA, 19 nt, Homo sapiens
  misc_RNA (1)...(19): siRNA sense strand
gaguuccacagaugaagaa

SEQ ID NO: 1262629 - RNA, 19 nt, Homo sapiens
  misc_RNA (1)...(19): siRNA sense strand
gcaagguaucauucuuuca

SEQ ID NO: 1262630 - RNA, 19 nt, Homo sapiens
  misc_RNA (1)...(19): siRNA sense strand
aagauaagcagugccuuga

SEQ ID NO: 1262631 - RNA, 19 nt, Homo sapiens
  misc_RNA (1)...(19): siRNA sense strand
cagcaugcagccuugaaga

SEQ ID NO: 1262632 - RNA, 19 nt, Homo sapiens
  misc_RNA (1)...(19): siRNA sense strand
gcuggaauuguauuagaug

SEQ ID NO: 1262633 - RNA, 19 nt, Homo sapiens
  misc_RNA (1)...(19): siRNA sense strand
ugaaguuguuagaguacau

SEQ ID NO: 1262634 - RNA, 19 nt, Homo sapiens
  misc_RNA (1)...(19): siRNA sense strand
accagaugaugaaguaguu

SEQ ID NO: 1262635 - RNA, 19 nt, Homo sapiens
  misc_RNA (1)...(19): siRNA sense strand
ccacagaugaagaaauaac

SEQ ID NO: 1262636 - RNA, 19 nt, Homo sapiens
  misc_RNA (1)...(19): siRNA sense strand
aggcuuauauuuccaacag

SEQ ID NO: 1262637 - RNA, 19 nt, Homo sapiens
  misc_RNA (1)...(19): siRNA sense strand
cauuaucuuucucaucucu

SEQ ID NO: 1262638 - RNA, 19 nt, Homo sapiens
  misc_RNA (1)...(19): siRNA sense strand
gaagacccuggacuuugug

SEQ ID NO: 1262639 - RNA, 19 nt, Homo sapiens
  misc_RNA (1)...(19): siRNA sense strand
ucugaagacccuggacuuu

SEQ ID NO: 1262640 - RNA, 19 nt, Homo sapiens
  misc_RNA (1)...(19): siRNA sense strand
agcaagguaucauucuuuc

SEQ ID NO: 1262641 - RNA, 19 nt, Homo sapiens
  misc_RNA (1)...(19): siRNA sense strand
ggagccaaagugauuucaa

SEQ ID NO: 1262642 - RNA, 19 nt, Homo sapiens
  misc_RNA (1)...(19): siRNA sense strand
gaggagccaaagugauuuc

SEQ ID NO: 1262643 - RNA, 19 nt, Homo sapiens
  misc_RNA (1)...(19): siRNA sense strand
caucauagaggagccaaag

SEQ ID NO: 1262644 - RNA, 19 nt, Homo sapiens
  misc_RNA (1)...(19): siRNA sense strand
cuauucaguuagcacauca

SEQ ID NO: 1262645 - RNA, 19 nt, Homo sapiens
  misc_RNA (1)...(19): siRNA sense strand
aggauaacuuugugaaacu

SEQ ID NO: 1262646 - RNA, 19 nt, Homo sapiens
  misc_RNA (1)...(19): siRNA sense strand
uuugugaaguuguuagagu

SEQ ID NO: 1262647 - RNA, 19 nt, Homo sapiens
  misc_RNA (1)...(19): siRNA sense strand
agaggauaacuuugugaaa

SEQ ID NO: 1262648 - RNA, 19 nt, Homo sapiens
  misc_RNA (1)...(19): siRNA sense strand
caacagcaugcagccuuga

SEQ ID NO: 1262649 - RNA, 19 nt, Homo sapiens
  misc_RNA (1)...(19): siRNA sense strand
gauaacuuugugaaacuuc

SEQ ID NO: 1262650 - RNA, 19 nt, Homo sapiens
  misc_RNA (1)...(19): siRNA sense strand
uacaugagcauuacuuggu

SEQ ID NO: 1262651 - RNA, 19 nt, Homo sapiens
  misc_RNA (1)...(19): siRNA sense strand
cugaagacccuggacuuug

SEQ ID NO: 1262652 - RNA, 19 nt, Homo sapiens
  misc_RNA (1)...(19): siRNA sense strand
ggauauagcuagugcaaua

SEQ ID NO: 1262653 - RNA, 19 nt, Homo sapiens
  misc_RNA (1)...(19): siRNA sense strand
uggaagagaugaagaauga

SEQ ID NO: 1262654 - RNA, 19 nt, Homo sapiens
  misc_RNA (1)...(19): siRNA sense strand
caaaccaacuuaauacuuc

SEQ ID NO: 1262655 - RNA, 19 nt, Homo sapiens
  misc_RNA (1)...(19): siRNA sense strand
ucaguaagaucccagauga

SEQ ID NO: 1262656 - RNA, 19 nt, Homo sapiens
  misc_RNA (1)...(19): siRNA sense strand
ccacauccaugguuucuau

SEQ ID NO: 1262657 - RNA, 19 nt, Homo sapiens
  misc_RNA (1)...(19): siRNA sense strand
guagaagaguauaugauug

SEQ ID NO: 1262658 - RNA, 19 nt, Homo sapiens
  misc_RNA (1)...(19): siRNA sense strand
uauggcagcugaugaugua

SEQ ID NO: 1262659 - RNA, 19 nt, Homo sapiens
  misc_RNA (1)...(19): siRNA sense strand
ggcaauaaauguguucgua

SEQ ID NO: 1262660 - RNA, 19 nt, Homo sapiens
  misc_RNA (1)...(19): siRNA sense strand
gcacgagcacuuaaacaaa

SEQ ID NO: 1262661 - RNA, 19 nt, Homo sapiens
  misc_RNA (1)...(19): siRNA sense strand
gcaauaaauguguucguaa

SEQ ID NO: 1262662 - RNA, 19 nt, Homo sapiens
  misc_RNA (1)...(19): siRNA sense strand
gcacuuaaacaaauucuca

SEQ ID NO: 1262663 - RNA, 19 nt, Homo sapiens
  misc_RNA (1)...(19): siRNA sense strand
gcaaggcaauaaauguguu

SEQ ID NO: 1262664 - RNA, 19 nt, Homo sapiens
  misc_RNA (1)...(19): siRNA sense strand
gagagccgcuuucaucaag

SEQ ID NO: 1262665 - RNA, 19 nt, Homo sapiens
  misc_RNA (1)...(19): siRNA sense strand
caauaaauguguucguaag

SEQ ID NO: 1262666 - RNA, 19 nt, Homo sapiens
  misc_RNA (1)...(19): siRNA sense strand
ucauguauccuguguuuaa

SEQ ID NO: 1262667 - RNA, 19 nt, Homo sapiens
  misc_RNA (1)...(19): siRNA sense strand
agucauguauccuguguuu

SEQ ID NO: 1262668 - RNA, 19 nt, Homo sapiens
  misc_RNA (1)...(19): siRNA sense strand
guaaaguacuccaaaaguu

SEQ ID NO: 1262669 - RNA, 19 nt, Homo sapiens
  misc_RNA (1)...(19): siRNA sense strand
gcagucauguauccugugu

SEQ ID NO: 1262670 - RNA, 19 nt, Homo sapiens
  misc_RNA (1)...(19): siRNA sense strand
cacgagcacuuaaacaaau

SEQ ID NO: 1262671 - RNA, 19 nt, Homo sapiens
  misc_RNA (1)...(19): siRNA sense strand
gaaaaggcacgagcacuua

SEQ ID NO: 1262672 - RNA, 19 nt, Homo sapiens
  misc_RNA (1)...(19): siRNA sense strand
gaacuucuugauacaguga

SEQ ID NO: 1262673 - RNA, 19 nt, Homo sapiens
  misc_RNA (1)...(19): siRNA sense strand
guaagugccaaccgacuaa

SEQ ID NO: 1262674 - RNA, 19 nt, Homo sapiens
  misc_RNA (1)...(19): siRNA sense strand
gaagagaugaagaaugaag

SEQ ID NO: 1262675 - RNA, 19 nt, Homo sapiens
  misc_RNA (1)...(19): siRNA sense strand
ggaugacaauggaagagau

SEQ ID NO: 1262676 - RNA, 19 nt, Homo sapiens
  misc_RNA (1)...(19): siRNA sense strand
aaagauggcaaggcaauaa

SEQ ID NO: 1262677 - RNA, 19 nt, Homo sapiens
  misc_RNA (1)...(19): siRNA sense strand
uguauccuguguuuaauga

SEQ ID NO: 1262678 - RNA, 19 nt, Homo sapiens
  misc_RNA (1)...(19): siRNA sense strand
cugaugauguagaagagua

SEQ ID NO: 1262679 - RNA, 19 nt, Homo sapiens
  misc_RNA (1)...(19): siRNA sense strand
cggagucccuucuucguau

SEQ ID NO: 1262680 - RNA, 19 nt, Homo sapiens
  misc_RNA (1)...(19): siRNA sense strand
caucaaaccaacuuaauac

SEQ ID NO: 1262681 - RNA, 19 nt, Homo sapiens
  misc_RNA (1)...(19): siRNA sense strand
gcagacaaucaaggauaua

SEQ ID NO: 1262682 - RNA, 19 nt, Homo sapiens
  misc_RNA (1)...(19): siRNA sense strand
caauggaagagaugaagaa

SEQ ID NO: 1262683 - RNA, 19 nt, Homo sapiens
  misc_RNA (1)...(19): siRNA sense strand
ucacacaagacaucauuau

SEQ ID NO: 1262684 - RNA, 19 nt, Homo sapiens
  misc_RNA (1)...(19): siRNA sense strand
gugauacucugaaaacgua

SEQ ID NO: 1262685 - RNA, 19 nt, Homo sapiens
  misc_RNA (1)...(19): siRNA sense strand
gauguagaagaguauauga

SEQ ID NO: 1262686 - RNA, 19 nt, Homo sapiens
  misc_RNA (1)...(19): siRNA sense strand
ccaaccgacuaauucauca

SEQ ID NO: 1262687 - RNA, 19 nt, Homo sapiens
  misc_RNA (1)...(19): siRNA sense strand
gauauagcuagugcaauaa

SEQ ID NO: 1262688 - RNA, 19 nt, Homo sapiens
  misc_RNA (1)...(19): siRNA sense strand
ugagguuucugcagacaau

SEQ ID NO: 1262689 - RNA, 19 nt, Homo sapiens
  misc_RNA (1)...(19): siRNA sense strand
ggcagcugaugauguagaa

SEQ ID NO: 1262690 - RNA, 19 nt, Homo sapiens
  misc_RNA (1)...(19): siRNA sense strand
gaaccgcagggcacuugaa

SEQ ID NO: 1262691 - RNA, 19 nt, Homo sapiens
  misc_RNA (1)...(19): siRNA sense strand
gaacgaccagagccagaau

SEQ ID NO: 1262692 - RNA, 19 nt, Homo sapiens
  misc_RNA (1)...(19): siRNA sense strand
auaaauguguucguaagug

SEQ ID NO: 1262693 - RNA, 19 nt, Homo sapiens
  misc_RNA (1)...(19): siRNA sense strand
gauggcaaggcaauaaaug

SEQ ID NO: 1262694 - RNA, 19 nt, Homo sapiens
  misc_RNA (1)...(19): siRNA sense strand
uccaaaaguuucagugaua

SEQ ID NO: 1262695 - RNA, 19 nt, Homo sapiens
  misc_RNA (1)...(19): siRNA sense strand
ggcacgagcacuuaaacaa

SEQ ID NO: 1262696 - RNA, 19 nt, Homo sapiens
  misc_RNA (1)...(19): siRNA sense strand
gaccagagccagaauucca

SEQ ID NO: 1262697 - RNA, 19 nt, Homo sapiens
  misc_RNA (1)...(19): siRNA sense strand
ggagucccuucuucguaug

SEQ ID NO: 1262698 - RNA, 19 nt, Homo sapiens
  misc_RNA (1)...(19): siRNA sense strand
uaaagauggcaaggcaaua

SEQ ID NO: 1262699 - RNA, 19 nt, Homo sapiens
  misc_RNA (1)...(19): siRNA sense strand
cagcugaugauguagaaga

SEQ ID NO: 1262700 - RNA, 19 nt, Homo sapiens
  misc_RNA (1)...(19): siRNA sense strand
aaucaaggauauagcuagu

SEQ ID NO: 1262701 - RNA, 19 nt, Homo sapiens
  misc_RNA (1)...(19): siRNA sense strand
cugcagacaaucaaggaua

SEQ ID NO: 1262702 - RNA, 19 nt, Homo sapiens
  misc_RNA (1)...(19): siRNA sense strand
gaaauaucaauaccagaac

SEQ ID NO: 1262703 - RNA, 19 nt, Homo sapiens
  misc_RNA (1)...(19): siRNA sense strand
ugagcuagaacgaguaaau

SEQ ID NO: 1262704 - RNA, 19 nt, Homo sapiens
  misc_RNA (1)...(19): siRNA sense strand
ugcagacaaucaaggauau

SEQ ID NO: 1262705 - RNA, 19 nt, Homo sapiens
  misc_RNA (1)...(19): siRNA sense strand
cuagaacgaguaaaucugu

SEQ ID NO: 1262706 - RNA, 19 nt, Homo sapiens
  misc_RNA (1)...(19): siRNA sense strand
gagcuagaacgaguaaauc

SEQ ID NO: 1262707 - RNA, 19 nt, Homo sapiens
  misc_RNA (1)...(19): siRNA sense strand
aaauccaggucucacacaa

SEQ ID NO: 1262708 - RNA, 19 nt, Homo sapiens
  misc_RNA (1)...(19): siRNA sense strand
gaugauguagaagaguaua

SEQ ID NO: 1262709 - RNA, 19 nt, Homo sapiens
  misc_RNA (1)...(19): siRNA sense strand
gaugacaauggaagagaug

SEQ ID NO: 1262710 - RNA, 19 nt, Homo sapiens
  misc_RNA (1)...(19): siRNA sense strand
uacagugaauaaugucuuc

SEQ ID NO: 1262711 - RNA, 19 nt, Homo sapiens
  misc_RNA (1)...(19): siRNA sense strand
ucccagaugagaucaauga

SEQ ID NO: 1262712 - RNA, 19 nt, Homo sapiens
  misc_RNA (1)...(19): siRNA sense strand
cauguauccuguguuuaau

SEQ ID NO: 1262713 - RNA, 19 nt, Homo sapiens
  misc_RNA (1)...(19): siRNA sense strand
acgagcacuuaaacaaauu

SEQ ID NO: 1262714 - RNA, 19 nt, Homo sapiens
  misc_RNA (1)...(19): siRNA sense strand
acugagagccgcuuucauc

SEQ ID NO: 1262715 - RNA, 19 nt, Homo sapiens
  misc_RNA (1)...(19): siRNA sense strand
cguaagugccaaccgacua

SEQ ID NO: 1262716 - RNA, 19 nt, Homo sapiens
  misc_RNA (1)...(19): siRNA sense strand
gagaucaaugacagaguga

SEQ ID NO: 1262717 - RNA, 19 nt, Homo sapiens
  misc_RNA (1)...(19): siRNA sense strand
aguaagaucccagaugaga

SEQ ID NO: 1262718 - RNA, 19 nt, Homo sapiens
  misc_RNA (1)...(19): siRNA sense strand
uuaaagauggcaaggcaau

SEQ ID NO: 1262719 - RNA, 19 nt, Homo sapiens
  misc_RNA (1)...(19): siRNA sense strand
cuugauacagugaauaaug

SEQ ID NO: 1262720 - RNA, 19 nt, Homo sapiens
  misc_RNA (1)...(19): siRNA sense strand
ucaaugacagagugagguu

SEQ ID NO: 1262721 - RNA, 19 nt, Homo sapiens
  misc_RNA (1)...(19): siRNA sense strand
auccaggucucacacaaga

SEQ ID NO: 1262722 - RNA, 19 nt, Homo sapiens
  misc_RNA (1)...(19): siRNA sense strand
ccucuaugcagucauguau

SEQ ID NO: 1262723 - RNA, 19 nt, Homo sapiens
  misc_RNA (1)...(19): siRNA sense strand
gccaaccgacuaauucauc

SEQ ID NO: 1262724 - RNA, 19 nt, Homo sapiens
  misc_RNA (1)...(19): siRNA sense strand
gcuagaacgaguaaaucug

SEQ ID NO: 1262725 - RNA, 19 nt, Homo sapiens
  misc_RNA (1)...(19): siRNA sense strand
aaaggcacgagcacuuaaa

SEQ ID NO: 1262726 - RNA, 19 nt, Homo sapiens
  misc_RNA (1)...(19): siRNA sense strand
guaagaucccagaugagau

SEQ ID NO: 1262727 - RNA, 19 nt, Homo sapiens
  misc_RNA (1)...(19): siRNA sense strand
ggcaaggcaauaaaugugu

SEQ ID NO: 1262728 - RNA, 19 nt, Homo sapiens
  misc_RNA (1)...(19): siRNA sense strand
ugagagccgcuuucaucaa

SEQ ID NO: 1262729 - RNA, 19 nt, Homo sapiens
  misc_RNA (1)...(19): siRNA sense strand
ucucacacaagacaucauu

SEQ ID NO: 1262730 - RNA, 19 nt, Homo sapiens
  misc_RNA (1)...(19): siRNA sense strand
ccagaugagaucaaugaca

SEQ ID NO: 1262731 - RNA, 19 nt, Homo sapiens
  misc_RNA (1)...(19): siRNA sense strand
ugacaauggaagagaugaa

SEQ ID NO: 1262732 - RNA, 19 nt, Homo sapiens
  misc_RNA (1)...(19): siRNA sense strand
cuucagaccuucaaaacug

SEQ ID NO: 1262733 - RNA, 19 nt, Homo sapiens
  misc_RNA (1)...(19): siRNA sense strand
gcacuugaacaccaaaaga

SEQ ID NO: 1262734 - RNA, 19 nt, Homo sapiens
  misc_RNA (1)...(19): siRNA sense strand
gaagaguauaugauugaac

SEQ ID NO: 1262735 - RNA, 19 nt, Homo sapiens
  misc_RNA (1)...(19): siRNA sense strand
cacacaagacaucauuaug

SEQ ID NO: 1262736 - RNA, 19 nt, Homo sapiens
  misc_RNA (1)...(19): siRNA sense strand
guauggcagcugaugaugu

SEQ ID NO: 1262737 - RNA, 19 nt, Homo sapiens
  misc_RNA (1)...(19): siRNA sense strand
cagggcacuugaacaccaa

SEQ ID NO: 1262738 - RNA, 19 nt, Homo sapiens
  misc_RNA (1)...(19): siRNA sense strand
cagaaccgcagggcacuug

SEQ ID NO: 1262739 - RNA, 19 nt, Homo sapiens
  misc_RNA (1)...(19): siRNA sense strand
ggauauagcuagugcaaua

SEQ ID NO: 1262740 - RNA, 19 nt, Homo sapiens
  misc_RNA (1)...(19): siRNA sense strand
uggaagagaugaagaauga

SEQ ID NO: 1262741 - RNA, 19 nt, Homo sapiens
  misc_RNA (1)...(19): siRNA sense strand
caaaccaacuuaauacuuc

SEQ ID NO: 1262742 - RNA, 19 nt, Homo sapiens
  misc_RNA (1)...(19): siRNA sense strand
ucaguaagaucccagauga

SEQ ID NO: 1262743 - RNA, 19 nt, Homo sapiens
  misc_RNA (1)...(19): siRNA sense strand
ccacauccaugguuucuau

SEQ ID NO: 1262744 - RNA, 19 nt, Homo sapiens
  misc_RNA (1)...(19): siRNA sense strand
guagaagaguauaugauug

SEQ ID NO: 1262745 - RNA, 19 nt, Homo sapiens
  misc_RNA (1)...(19): siRNA sense strand
uauggcagcugaugaugua

SEQ ID NO: 1262746 - RNA, 19 nt, Homo sapiens
  misc_RNA (1)...(19): siRNA sense strand
ggcaauaaauguguucgua

SEQ ID NO: 1262747 - RNA, 19 nt, Homo sapiens
  misc_RNA (1)...(19): siRNA sense strand
gcacgagcacuuaaacaaa

SEQ ID NO: 1262748 - RNA, 19 nt, Homo sapiens
  misc_RNA (1)...(19): siRNA sense strand
gcaauaaauguguucguaa

SEQ ID NO: 1262749 - RNA, 19 nt, Homo sapiens
  misc_RNA (1)...(19): siRNA sense strand
gcacuuaaacaaauucuca

SEQ ID NO: 1262750 - RNA, 19 nt, Homo sapiens
  misc_RNA (1)...(19): siRNA sense strand
gcaaggcaauaaauguguu

SEQ ID NO: 1262751 - RNA, 19 nt, Homo sapiens
  misc_RNA (1)...(19): siRNA sense strand
gagagccgcuuucaucaag

SEQ ID NO: 1262752 - RNA, 19 nt, Homo sapiens
  misc_RNA (1)...(19): siRNA sense strand
caauaaauguguucguaag

SEQ ID NO: 1262753 - RNA, 19 nt, Homo sapiens
  misc_RNA (1)...(19): siRNA sense strand
ucauguauccuguguuuaa

SEQ ID NO: 1262754 - RNA, 19 nt, Homo sapiens
  misc_RNA (1)...(19): siRNA sense strand
agucauguauccuguguuu

SEQ ID NO: 1262755 - RNA, 19 nt, Homo sapiens
  misc_RNA (1)...(19): siRNA sense strand
guaaaguacuccaaaaguu

SEQ ID NO: 1262756 - RNA, 19 nt, Homo sapiens
  misc_RNA (1)...(19): siRNA sense strand
gcagucauguauccugugu

SEQ ID NO: 1262757 - RNA, 19 nt, Homo sapiens
  misc_RNA (1)...(19): siRNA sense strand
cacgagcacuuaaacaaau

SEQ ID NO: 1262758 - RNA, 19 nt, Homo sapiens
  misc_RNA (1)...(19): siRNA sense strand
gaaaaggcacgagcacuua

SEQ ID NO: 1262759 - RNA, 19 nt, Homo sapiens
  misc_RNA (1)...(19): siRNA sense strand
gaacuucuugauacaguga

SEQ ID NO: 1262760 - RNA, 19 nt, Homo sapiens
  misc_RNA (1)...(19): siRNA sense strand
guaagugccaaccgacuaa

SEQ ID NO: 1262761 - RNA, 19 nt, Homo sapiens
  misc_RNA (1)...(19): siRNA sense strand
gaagagaugaagaaugaag

SEQ ID NO: 1262762 - RNA, 19 nt, Homo sapiens
  misc_RNA (1)...(19): siRNA sense strand
ggaugacaauggaagagau

SEQ ID NO: 1262763 - RNA, 19 nt, Homo sapiens
  misc_RNA (1)...(19): siRNA sense strand
aaagauggcaaggcaauaa

SEQ ID NO: 1262764 - RNA, 19 nt, Homo sapiens
  misc_RNA (1)...(19): siRNA sense strand
uguauccuguguuuaauga

SEQ ID NO: 1262765 - RNA, 19 nt, Homo sapiens
  misc_RNA (1)...(19): siRNA sense strand
cugaugauguagaagagua

SEQ ID NO: 1262766 - RNA, 19 nt, Homo sapiens
  misc_RNA (1)...(19): siRNA sense strand
cggagucccuucuucguau

SEQ ID NO: 1262767 - RNA, 19 nt, Homo sapiens
  misc_RNA (1)...(19): siRNA sense strand
caucaaaccaacuuaauac

SEQ ID NO: 1262768 - RNA, 19 nt, Homo sapiens
  misc_RNA (1)...(19): siRNA sense strand
gcagacaaucaaggauaua

SEQ ID NO: 1262769 - RNA, 19 nt, Homo sapiens
  misc_RNA (1)...(19): siRNA sense strand
caauggaagagaugaagaa

SEQ ID NO: 1262770 - RNA, 19 nt, Homo sapiens
  misc_RNA (1)...(19): siRNA sense strand
ucacacaagacaucauuau

SEQ ID NO: 1262771 - RNA, 19 nt, Homo sapiens
  misc_RNA (1)...(19): siRNA sense strand
gugauacucugaaaacgua

SEQ ID NO: 1262772 - RNA, 19 nt, Homo sapiens
  misc_RNA (1)...(19): siRNA sense strand
gauguagaagaguauauga

SEQ ID NO: 1262773 - RNA, 19 nt, Homo sapiens
  misc_RNA (1)...(19): siRNA sense strand
ccaaccgacuaauucauca

SEQ ID NO: 1262774 - RNA, 19 nt, Homo sapiens
  misc_RNA (1)...(19): siRNA sense strand
gauauagcuagugcaauaa

SEQ ID NO: 1262775 - RNA, 19 nt, Homo sapiens
  misc_RNA (1)...(19): siRNA sense strand
ugagguuucugcagacaau

SEQ ID NO: 1262776 - RNA, 19 nt, Homo sapiens
  misc_RNA (1)...(19): siRNA sense strand
ggcagcugaugauguagaa

SEQ ID NO: 1262777 - RNA, 19 nt, Homo sapiens
  misc_RNA (1)...(19): siRNA sense strand
gaaccgcagggcacuugaa

SEQ ID NO: 1262778 - RNA, 19 nt, Homo sapiens
  misc_RNA (1)...(19): siRNA sense strand
gaacgaccagagccagaau

SEQ ID NO: 1262779 - RNA, 19 nt, Homo sapiens
  misc_RNA (1)...(19): siRNA sense strand
auaaauguguucguaagug

SEQ ID NO: 1262780 - RNA, 19 nt, Homo sapiens
  misc_RNA (1)...(19): siRNA sense strand
gauggcaaggcaauaaaug

SEQ ID NO: 1262781 - RNA, 19 nt, Homo sapiens
  misc_RNA (1)...(19): siRNA sense strand
uccaaaaguuucagugaua

SEQ ID NO: 1262782 - RNA, 19 nt, Homo sapiens
  misc_RNA (1)...(19): siRNA sense strand
ggcacgagcacuuaaacaa

SEQ ID NO: 1262783 - RNA, 19 nt, Homo sapiens
  misc_RNA (1)...(19): siRNA sense strand
gaccagagccagaauucca

SEQ ID NO: 1262784 - RNA, 19 nt, Homo sapiens
  misc_RNA (1)...(19): siRNA sense strand
ggagucccuucuucguaug

SEQ ID NO: 1262785 - RNA, 19 nt, Homo sapiens
  misc_RNA (1)...(19): siRNA sense strand
uaaagauggcaaggcaaua

SEQ ID NO: 1262786 - RNA, 19 nt, Homo sapiens
  misc_RNA (1)...(19): siRNA sense strand
cagcugaugauguagaaga

SEQ ID NO: 1262787 - RNA, 19 nt, Homo sapiens
  misc_RNA (1)...(19): siRNA sense strand
aaucaaggauauagcuagu

SEQ ID NO: 1262788 - RNA, 19 nt, Homo sapiens
  misc_RNA (1)...(19): siRNA sense strand
cugcagacaaucaaggaua

SEQ ID NO: 1262789 - RNA, 19 nt, Homo sapiens
  misc_RNA (1)...(19): siRNA sense strand
gaaauaucaauaccagaac

SEQ ID NO: 1262790 - RNA, 19 nt, Homo sapiens
  misc_RNA (1)...(19): siRNA sense strand
ugagcuagaacgaguaaau

SEQ ID NO: 1262791 - RNA, 19 nt, Homo sapiens
  misc_RNA (1)...(19): siRNA sense strand
ugcagacaaucaaggauau

SEQ ID NO: 1262792 - RNA, 19 nt, Homo sapiens
  misc_RNA (1)...(19): siRNA sense strand
cuagaacgaguaaaucugu

SEQ ID NO: 1262793 - RNA, 19 nt, Homo sapiens
  misc_RNA (1)...(19): siRNA sense strand
gagcuagaacgaguaaauc

SEQ ID NO: 1262794 - RNA, 19 nt, Homo sapiens
  misc_RNA (1)...(19): siRNA sense strand
aaauccaggucucacacaa

SEQ ID NO: 1262795 - RNA, 19 nt, Homo sapiens
  misc_RNA (1)...(19): siRNA sense strand
gaugauguagaagaguaua

SEQ ID NO: 1262796 - RNA, 19 nt, Homo sapiens
  misc_RNA (1)...(19): siRNA sense strand
gaugacaauggaagagaug

SEQ ID NO: 1262797 - RNA, 19 nt, Homo sapiens
  misc_RNA (1)...(19): siRNA sense strand
uacagugaauaaugucuuc

SEQ ID NO: 1262798 - RNA, 19 nt, Homo sapiens
  misc_RNA (1)...(19): siRNA sense strand
ucccagaugagaucaauga

SEQ ID NO: 1262799 - RNA, 19 nt, Homo sapiens
  misc_RNA (1)...(19): siRNA sense strand
cauguauccuguguuuaau

SEQ ID NO: 1262800 - RNA, 19 nt, Homo sapiens
  misc_RNA (1)...(19): siRNA sense strand
acgagcacuuaaacaaauu

SEQ ID NO: 1262801 - RNA, 19 nt, Homo sapiens
  misc_RNA (1)...(19): siRNA sense strand
acugagagccgcuuucauc

SEQ ID NO: 1262802 - RNA, 19 nt, Homo sapiens
  misc_RNA (1)...(19): siRNA sense strand
cguaagugccaaccgacua

SEQ ID NO: 1262803 - RNA, 19 nt, Homo sapiens
  misc_RNA (1)...(19): siRNA sense strand
gagaucaaugacagaguga

SEQ ID NO: 1262804 - RNA, 19 nt, Homo sapiens
  misc_RNA (1)...(19): siRNA sense strand
aguaagaucccagaugaga

SEQ ID NO: 1262805 - RNA, 19 nt, Homo sapiens
  misc_RNA (1)...(19): siRNA sense strand
uuaaagauggcaaggcaau

SEQ ID NO: 1262806 - RNA, 19 nt, Homo sapiens
  misc_RNA (1)...(19): siRNA sense strand
cuugauacagugaauaaug

SEQ ID NO: 1262807 - RNA, 19 nt, Homo sapiens
  misc_RNA (1)...(19): siRNA sense strand
ucaaugacagagugagguu

SEQ ID NO: 1262808 - RNA, 19 nt, Homo sapiens
  misc_RNA (1)...(19): siRNA sense strand
auccaggucucacacaaga

SEQ ID NO: 1262809 - RNA, 19 nt, Homo sapiens
  misc_RNA (1)...(19): siRNA sense strand
ccucuaugcagucauguau

SEQ ID NO: 1262810 - RNA, 19 nt, Homo sapiens
  misc_RNA (1)...(19): siRNA sense strand
gccaaccgacuaauucauc

SEQ ID NO: 1262811 - RNA, 19 nt, Homo sapiens
  misc_RNA (1)...(19): siRNA sense strand
gcuagaacgaguaaaucug

SEQ ID NO: 1262812 - RNA, 19 nt, Homo sapiens
  misc_RNA (1)...(19): siRNA sense strand
aaaggcacgagcacuuaaa

SEQ ID NO: 1262813 - RNA, 19 nt, Homo sapiens
  misc_RNA (1)...(19): siRNA sense strand
guaagaucccagaugagau

SEQ ID NO: 1262814 - RNA, 19 nt, Homo sapiens
  misc_RNA (1)...(19): siRNA sense strand
ggcaaggcaauaaaugugu

SEQ ID NO: 1262815 - RNA, 19 nt, Homo sapiens
  misc_RNA (1)...(19): siRNA sense strand
ugagagccgcuuucaucaa

SEQ ID NO: 1262816 - RNA, 19 nt, Homo sapiens
  misc_RNA (1)...(19): siRNA sense strand
ucucacacaagacaucauu

SEQ ID NO: 1262817 - RNA, 19 nt, Homo sapiens
  misc_RNA (1)...(19): siRNA sense strand
ccagaugagaucaaugaca

SEQ ID NO: 1262818 - RNA, 19 nt, Homo sapiens
  misc_RNA (1)...(19): siRNA sense strand
ugacaauggaagagaugaa

SEQ ID NO: 1262819 - RNA, 19 nt, Homo sapiens
  misc_RNA (1)...(19): siRNA sense strand
cuucagaccuucaaaacug

SEQ ID NO: 1262820 - RNA, 19 nt, Homo sapiens
  misc_RNA (1)...(19): siRNA sense strand
gcacuugaacaccaaaaga

SEQ ID NO: 1262821 - RNA, 19 nt, Homo sapiens
  misc_RNA (1)...(19): siRNA sense strand
gaagaguauaugauugaac

SEQ ID NO: 1262822 - RNA, 19 nt, Homo sapiens
  misc_RNA (1)...(19): siRNA sense strand
cacacaagacaucauuaug

SEQ ID NO: 1262823 - RNA, 19 nt, Homo sapiens
  misc_RNA (1)...(19): siRNA sense strand
guauggcagcugaugaugu

SEQ ID NO: 1262824 - RNA, 19 nt, Homo sapiens
  misc_RNA (1)...(19): siRNA sense strand
cagggcacuugaacaccaa

SEQ ID NO: 1262825 - RNA, 19 nt, Homo sapiens
  misc_RNA (1)...(19): siRNA sense strand
cagaaccgcagggcacuug

SEQ ID NO: 1262826 - RNA, 19 nt, Homo sapiens
  misc_RNA (1)...(19): siRNA sense strand
ggauauagcuagugcaaua

SEQ ID NO: 1262827 - RNA, 19 nt, Homo sapiens
  misc_RNA (1)...(19): siRNA sense strand
uggaagagaugaagaauga

SEQ ID NO: 1262828 - RNA, 19 nt, Homo sapiens
  misc_RNA (1)...(19): siRNA sense strand
caaaccaacuuaauacuuc

SEQ ID NO: 1262829 - RNA, 19 nt, Homo sapiens
  misc_RNA (1)...(19): siRNA sense strand
ucaguaagaucccagauga

SEQ ID NO: 1262830 - RNA, 19 nt, Homo sapiens
  misc_RNA (1)...(19): siRNA sense strand
ccacauccaugguuucuau

SEQ ID NO: 1262831 - RNA, 19 nt, Homo sapiens
  misc_RNA (1)...(19): siRNA sense strand
guagaagaguauaugauug

SEQ ID NO: 1262832 - RNA, 19 nt, Homo sapiens
  misc_RNA (1)...(19): siRNA sense strand
uauggcagcugaugaugua

SEQ ID NO: 1262833 - RNA, 19 nt, Homo sapiens
  misc_RNA (1)...(19): siRNA sense strand
ggcaauaaauguguucgua

SEQ ID NO: 1262834 - RNA, 19 nt, Homo sapiens
  misc_RNA (1)...(19): siRNA sense strand
gcacgagcacuuaaacaaa

SEQ ID NO: 1262835 - RNA, 19 nt, Homo sapiens
  misc_RNA (1)...(19): siRNA sense strand
gcaauaaauguguucguaa

SEQ ID NO: 1262836 - RNA, 19 nt, Homo sapiens
  misc_RNA (1)...(19): siRNA sense strand
gcacuuaaacaaauucuca

SEQ ID NO: 1262837 - RNA, 19 nt, Homo sapiens
  misc_RNA (1)...(19): siRNA sense strand
gcaaggcaauaaauguguu

SEQ ID NO: 1262838 - RNA, 19 nt, Homo sapiens
  misc_RNA (1)...(19): siRNA sense strand
gagagccgcuuucaucaag

SEQ ID NO: 1262839 - RNA, 19 nt, Homo sapiens
  misc_RNA (1)...(19): siRNA sense strand
caauaaauguguucguaag

SEQ ID NO: 1262840 - RNA, 19 nt, Homo sapiens
  misc_RNA (1)...(19): siRNA sense strand
ucauguauccuguguuuaa

SEQ ID NO: 1262841 - RNA, 19 nt, Homo sapiens
  misc_RNA (1)...(19): siRNA sense strand
agucauguauccuguguuu

SEQ ID NO: 1262842 - RNA, 19 nt, Homo sapiens
  misc_RNA (1)...(19): siRNA sense strand
guaaaguacuccaaaaguu

SEQ ID NO: 1262843 - RNA, 19 nt, Homo sapiens
  misc_RNA (1)...(19): siRNA sense strand
gcagucauguauccugugu

SEQ ID NO: 1262844 - RNA, 19 nt, Homo sapiens
  misc_RNA (1)...(19): siRNA sense strand
cacgagcacuuaaacaaau

SEQ ID NO: 1262845 - RNA, 19 nt, Homo sapiens
  misc_RNA (1)...(19): siRNA sense strand
gaaaaggcacgagcacuua

SEQ ID NO: 1262846 - RNA, 19 nt, Homo sapiens
  misc_RNA (1)...(19): siRNA sense strand
gaacuucuugauacaguga

SEQ ID NO: 1262847 - RNA, 19 nt, Homo sapiens
  misc_RNA (1)...(19): siRNA sense strand
guaagugccaaccgacuaa

SEQ ID NO: 1262848 - RNA, 19 nt, Homo sapiens
  misc_RNA (1)...(19): siRNA sense strand
gaagagaugaagaaugaag

SEQ ID NO: 1262849 - RNA, 19 nt, Homo sapiens
  misc_RNA (1)...(19): siRNA sense strand
ggaugacaauggaagagau

SEQ ID NO: 1262850 - RNA, 19 nt, Homo sapiens
  misc_RNA (1)...(19): siRNA sense strand
aaagauggcaaggcaauaa

SEQ ID NO: 1262851 - RNA, 19 nt, Homo sapiens
  misc_RNA (1)...(19): siRNA sense strand
uguauccuguguuuaauga

SEQ ID NO: 1262852 - RNA, 19 nt, Homo sapiens
  misc_RNA (1)...(19): siRNA sense strand
cugaugauguagaagagua

SEQ ID NO: 1262853 - RNA, 19 nt, Homo sapiens
  misc_RNA (1)...(19): siRNA sense strand
cggagucccuucuucguau

SEQ ID NO: 1262854 - RNA, 19 nt, Homo sapiens
  misc_RNA (1)...(19): siRNA sense strand
caucaaaccaacuuaauac

SEQ ID NO: 1262855 - RNA, 19 nt, Homo sapiens
  misc_RNA (1)...(19): siRNA sense strand
gcagacaaucaaggauaua

SEQ ID NO: 1262856 - RNA, 19 nt, Homo sapiens
  misc_RNA (1)...(19): siRNA sense strand
caauggaagagaugaagaa

SEQ ID NO: 1262857 - RNA, 19 nt, Homo sapiens
  misc_RNA (1)...(19): siRNA sense strand
ucacacaagacaucauuau

SEQ ID NO: 1262858 - RNA, 19 nt, Homo sapiens
  misc_RNA (1)...(19): siRNA sense strand
gugauacucugaaaacgua

SEQ ID NO: 1262859 - RNA, 19 nt, Homo sapiens
  misc_RNA (1)...(19): siRNA sense strand
gauguagaagaguauauga

SEQ ID NO: 1262860 - RNA, 19 nt, Homo sapiens
  misc_RNA (1)...(19): siRNA sense strand
ccaaccgacuaauucauca

SEQ ID NO: 1262861 - RNA, 19 nt, Homo sapiens
  misc_RNA (1)...(19): siRNA sense strand
gauauagcuagugcaauaa

SEQ ID NO: 1262862 - RNA, 19 nt, Homo sapiens
  misc_RNA (1)...(19): siRNA sense strand
ugagguuucugcagacaau

SEQ ID NO: 1262863 - RNA, 19 nt, Homo sapiens
  misc_RNA (1)...(19): siRNA sense strand
ggcagcugaugauguagaa

SEQ ID NO: 1262864 - RNA, 19 nt, Homo sapiens
  misc_RNA (1)...(19): siRNA sense strand
gaaccgcagggcacuugaa

SEQ ID NO: 1262865 - RNA, 19 nt, Homo sapiens
  misc_RNA (1)...(19): siRNA sense strand
gaacgaccagagccagaau

SEQ ID NO: 1262866 - RNA, 19 nt, Homo sapiens
  misc_RNA (1)...(19): siRNA sense strand
auaaauguguucguaagug

SEQ ID NO: 1262867 - RNA, 19 nt, Homo sapiens
  misc_RNA (1)...(19): siRNA sense strand
gauggcaaggcaauaaaug

SEQ ID NO: 1262868 - RNA, 19 nt, Homo sapiens
  misc_RNA (1)...(19): siRNA sense strand
uccaaaaguuucagugaua

SEQ ID NO: 1262869 - RNA, 19 nt, Homo sapiens
  misc_RNA (1)...(19): siRNA sense strand
ggcacgagcacuuaaacaa

SEQ ID NO: 1262870 - RNA, 19 nt, Homo sapiens
  misc_RNA (1)...(19): siRNA sense strand
gaccagagccagaauucca

SEQ ID NO: 1262871 - RNA, 19 nt, Homo sapiens
  misc_RNA (1)...(19): siRNA sense strand
ggagucccuucuucguaug

SEQ ID NO: 1262872 - RNA, 19 nt, Homo sapiens
  misc_RNA (1)...(19): siRNA sense strand
uaaagauggcaaggcaaua

SEQ ID NO: 1262873 - RNA, 19 nt, Homo sapiens
  misc_RNA (1)...(19): siRNA sense strand
cagcugaugauguagaaga

SEQ ID NO: 1262874 - RNA, 19 nt, Homo sapiens
  misc_RNA (1)...(19): siRNA sense strand
aaucaaggauauagcuagu

SEQ ID NO: 1262875 - RNA, 19 nt, Homo sapiens
  misc_RNA (1)...(19): siRNA sense strand
cugcagacaaucaaggaua

SEQ ID NO: 1262876 - RNA, 19 nt, Homo sapiens
  misc_RNA (1)...(19): siRNA sense strand
gaaauaucaauaccagaac

SEQ ID NO: 1262877 - RNA, 19 nt, Homo sapiens
  misc_RNA (1)...(19): siRNA sense strand
ugagcuagaacgaguaaau

SEQ ID NO: 1262878 - RNA, 19 nt, Homo sapiens
  misc_RNA (1)...(19): siRNA sense strand
ugcagacaaucaaggauau

SEQ ID NO: 1262879 - RNA, 19 nt, Homo sapiens
  misc_RNA (1)...(19): siRNA sense strand
cuagaacgaguaaaucugu

SEQ ID NO: 1262880 - RNA, 19 nt, Homo sapiens
  misc_RNA (1)...(19): siRNA sense strand
gagcuagaacgaguaaauc

SEQ ID NO: 1262881 - RNA, 19 nt, Homo sapiens
  misc_RNA (1)...(19): siRNA sense strand
aaauccaggucucacacaa

SEQ ID NO: 1262882 - RNA, 19 nt, Homo sapiens
  misc_RNA (1)...(19): siRNA sense strand
gaugauguagaagaguaua

SEQ ID NO: 1262883 - RNA, 19 nt, Homo sapiens
  misc_RNA (1)...(19): siRNA sense strand
gaugacaauggaagagaug

SEQ ID NO: 1262884 - RNA, 19 nt, Homo sapiens
  misc_RNA (1)...(19): siRNA sense strand
uacagugaauaaugucuuc

SEQ ID NO: 1262885 - RNA, 19 nt, Homo sapiens
  misc_RNA (1)...(19): siRNA sense strand
ucccagaugagaucaauga

SEQ ID NO: 1262886 - RNA, 19 nt, Homo sapiens
  misc_RNA (1)...(19): siRNA sense strand
cauguauccuguguuuaau

SEQ ID NO: 1262887 - RNA, 19 nt, Homo sapiens
  misc_RNA (1)...(19): siRNA sense strand
acgagcacuuaaacaaauu

SEQ ID NO: 1262888 - RNA, 19 nt, Homo sapiens
  misc_RNA (1)...(19): siRNA sense strand
acugagagccgcuuucauc

SEQ ID NO: 1262889 - RNA, 19 nt, Homo sapiens
  misc_RNA (1)...(19): siRNA sense strand
cguaagugccaaccgacua

SEQ ID NO: 1262890 - RNA, 19 nt, Homo sapiens
  misc_RNA (1)...(19): siRNA sense strand
gagaucaaugacagaguga

SEQ ID NO: 1262891 - RNA, 19 nt, Homo sapiens
  misc_RNA (1)...(19): siRNA sense strand
aguaagaucccagaugaga

SEQ ID NO: 1262892 - RNA, 19 nt, Homo sapiens
  misc_RNA (1)...(19): siRNA sense strand
uuaaagauggcaaggcaau

SEQ ID NO: 1262893 - RNA, 19 nt, Homo sapiens
  misc_RNA (1)...(19): siRNA sense strand
cuugauacagugaauaaug

SEQ ID NO: 1262894 - RNA, 19 nt, Homo sapiens
  misc_RNA (1)...(19): siRNA sense strand
ucaaugacagagugagguu

SEQ ID NO: 1262895 - RNA, 19 nt, Homo sapiens
  misc_RNA (1)...(19): siRNA sense strand
auccaggucucacacaaga

SEQ ID NO: 1262896 - RNA, 19 nt, Homo sapiens
  misc_RNA (1)...(19): siRNA sense strand
ccucuaugcagucauguau

SEQ ID NO: 1262897 - RNA, 19 nt, Homo sapiens
  misc_RNA (1)...(19): siRNA sense strand
gccaaccgacuaauucauc

SEQ ID NO: 1262898 - RNA, 19 nt, Homo sapiens
  misc_RNA (1)...(19): siRNA sense strand
gcuagaacgaguaaaucug

SEQ ID NO: 1262899 - RNA, 19 nt, Homo sapiens
  misc_RNA (1)...(19): siRNA sense strand
aaaggcacgagcacuuaaa

SEQ ID NO: 1262900 - RNA, 19 nt, Homo sapiens
  misc_RNA (1)...(19): siRNA sense strand
guaagaucccagaugagau

SEQ ID NO: 1262901 - RNA, 19 nt, Homo sapiens
  misc_RNA (1)...(19): siRNA sense strand
ggcaaggcaauaaaugugu

SEQ ID NO: 1262902 - RNA, 19 nt, Homo sapiens
  misc_RNA (1)...(19): siRNA sense strand
ugagagccgcuuucaucaa

SEQ ID NO: 1262903 - RNA, 19 nt, Homo sapiens
  misc_RNA (1)...(19): siRNA sense strand
ucucacacaagacaucauu

SEQ ID NO: 1262904 - RNA, 19 nt, Homo sapiens
  misc_RNA (1)...(19): siRNA sense strand
ccagaugagaucaaugaca

SEQ ID NO: 1262905 - RNA, 19 nt, Homo sapiens
  misc_RNA (1)...(19): siRNA sense strand
ugacaauggaagagaugaa

SEQ ID NO: 1262906 - RNA, 19 nt, Homo sapiens
  misc_RNA (1)...(19): siRNA sense strand
cuucagaccuucaaaacug

SEQ ID NO: 1262907 - RNA, 19 nt, Homo sapiens
  misc_RNA (1)...(19): siRNA sense strand
gcacuugaacaccaaaaga

SEQ ID NO: 1262908 - RNA, 19 nt, Homo sapiens
  misc_RNA (1)...(19): siRNA sense strand
gaagaguauaugauugaac

SEQ ID NO: 1262909 - RNA, 19 nt, Homo sapiens
  misc_RNA (1)...(19): siRNA sense strand
cacacaagacaucauuaug

SEQ ID NO: 1262910 - RNA, 19 nt, Homo sapiens
  misc_RNA (1)...(19): siRNA sense strand
guauggcagcugaugaugu

SEQ ID NO: 1262911 - RNA, 19 nt, Homo sapiens
  misc_RNA (1)...(19): siRNA sense strand
cagggcacuugaacaccaa

SEQ ID NO: 1262912 - RNA, 19 nt, Homo sapiens
  misc_RNA (1)...(19): siRNA sense strand
cagaaccgcagggcacuug

SEQ ID NO: 1262913 - RNA, 19 nt, Homo sapiens
  misc_RNA (1)...(19): siRNA sense strand
ggauauagcuagugcaaua

SEQ ID NO: 1262914 - RNA, 19 nt, Homo sapiens
  misc_RNA (1)...(19): siRNA sense strand
uggaagagaugaagaauga

SEQ ID NO: 1262915 - RNA, 19 nt, Homo sapiens
  misc_RNA (1)...(19): siRNA sense strand
caaaccaacuuaauacuuc

SEQ ID NO: 1262916 - RNA, 19 nt, Homo sapiens
  misc_RNA (1)...(19): siRNA sense strand
ucaguaagaucccagauga

SEQ ID NO: 1262917 - RNA, 19 nt, Homo sapiens
  misc_RNA (1)...(19): siRNA sense strand
ccacauccaugguuucuau

SEQ ID NO: 1262918 - RNA, 19 nt, Homo sapiens
  misc_RNA (1)...(19): siRNA sense strand
guagaagaguauaugauug

SEQ ID NO: 1262919 - RNA, 19 nt, Homo sapiens
  misc_RNA (1)...(19): siRNA sense strand
uauggcagcugaugaugua

SEQ ID NO: 1262920 - RNA, 19 nt, Homo sapiens
  misc_RNA (1)...(19): siRNA sense strand
ggcaauaaauguguucgua

SEQ ID NO: 1262921 - RNA, 19 nt, Homo sapiens
  misc_RNA (1)...(19): siRNA sense strand
gcacgagcacuuaaacaaa

SEQ ID NO: 1262922 - RNA, 19 nt, Homo sapiens
  misc_RNA (1)...(19): siRNA sense strand
gcaauaaauguguucguaa

SEQ ID NO: 1262923 - RNA, 19 nt, Homo sapiens
  misc_RNA (1)...(19): siRNA sense strand
gcacuuaaacaaauucuca

SEQ ID NO: 1262924 - RNA, 19 nt, Homo sapiens
  misc_RNA (1)...(19): siRNA sense strand
gcaaggcaauaaauguguu

SEQ ID NO: 1262925 - RNA, 19 nt, Homo sapiens
  misc_RNA (1)...(19): siRNA sense strand
gagagccgcuuucaucaag

SEQ ID NO: 1262926 - RNA, 19 nt, Homo sapiens
  misc_RNA (1)...(19): siRNA sense strand
caauaaauguguucguaag

SEQ ID NO: 1262927 - RNA, 19 nt, Homo sapiens
  misc_RNA (1)...(19): siRNA sense strand
ucauguauccuguguuuaa

SEQ ID NO: 1262928 - RNA, 19 nt, Homo sapiens
  misc_RNA (1)...(19): siRNA sense strand
agucauguauccuguguuu

SEQ ID NO: 1262929 - RNA, 19 nt, Homo sapiens
  misc_RNA (1)...(19): siRNA sense strand
guaaaguacuccaaaaguu

SEQ ID NO: 1262930 - RNA, 19 nt, Homo sapiens
  misc_RNA (1)...(19): siRNA sense strand
gcagucauguauccugugu

SEQ ID NO: 1262931 - RNA, 19 nt, Homo sapiens
  misc_RNA (1)...(19): siRNA sense strand
cacgagcacuuaaacaaau

SEQ ID NO: 1262932 - RNA, 19 nt, Homo sapiens
  misc_RNA (1)...(19): siRNA sense strand
gaaaaggcacgagcacuua

SEQ ID NO: 1262933 - RNA, 19 nt, Homo sapiens
  misc_RNA (1)...(19): siRNA sense strand
gaacuucuugauacaguga

SEQ ID NO: 1262934 - RNA, 19 nt, Homo sapiens
  misc_RNA (1)...(19): siRNA sense strand
guaagugccaaccgacuaa

SEQ ID NO: 1262935 - RNA, 19 nt, Homo sapiens
  misc_RNA (1)...(19): siRNA sense strand
gaagagaugaagaaugaag

SEQ ID NO: 1262936 - RNA, 19 nt, Homo sapiens
  misc_RNA (1)...(19): siRNA sense strand
ggaugacaauggaagagau

SEQ ID NO: 1262937 - RNA, 19 nt, Homo sapiens
  misc_RNA (1)...(19): siRNA sense strand
aaagauggcaaggcaauaa

SEQ ID NO: 1262938 - RNA, 19 nt, Homo sapiens
  misc_RNA (1)...(19): siRNA sense strand
uguauccuguguuuaauga

SEQ ID NO: 1262939 - RNA, 19 nt, Homo sapiens
  misc_RNA (1)...(19): siRNA sense strand
cugaugauguagaagagua

SEQ ID NO: 1262940 - RNA, 19 nt, Homo sapiens
  misc_RNA (1)...(19): siRNA sense strand
cggagucccuucuucguau

SEQ ID NO: 1262941 - RNA, 19 nt, Homo sapiens
  misc_RNA (1)...(19): siRNA sense strand
caucaaaccaacuuaauac

SEQ ID NO: 1262942 - RNA, 19 nt, Homo sapiens
  misc_RNA (1)...(19): siRNA sense strand
gcagacaaucaaggauaua

SEQ ID NO: 1262943 - RNA, 19 nt, Homo sapiens
  misc_RNA (1)...(19): siRNA sense strand
caauggaagagaugaagaa

SEQ ID NO: 1262944 - RNA, 19 nt, Homo sapiens
  misc_RNA (1)...(19): siRNA sense strand
ucacacaagacaucauuau

SEQ ID NO: 1262945 - RNA, 19 nt, Homo sapiens
  misc_RNA (1)...(19): siRNA sense strand
gugauacucugaaaacgua

SEQ ID NO: 1262946 - RNA, 19 nt, Homo sapiens
  misc_RNA (1)...(19): siRNA sense strand
gauguagaagaguauauga

SEQ ID NO: 1262947 - RNA, 19 nt, Homo sapiens
  misc_RNA (1)...(19): siRNA sense strand
ccaaccgacuaauucauca

SEQ ID NO: 1262948 - RNA, 19 nt, Homo sapiens
  misc_RNA (1)...(19): siRNA sense strand
gauauagcuagugcaauaa

SEQ ID NO: 1262949 - RNA, 19 nt, Homo sapiens
  misc_RNA (1)...(19): siRNA sense strand
ugagguuucugcagacaau

SEQ ID NO: 1262950 - RNA, 19 nt, Homo sapiens
  misc_RNA (1)...(19): siRNA sense strand
ggcagcugaugauguagaa

SEQ ID NO: 1262951 - RNA, 19 nt, Homo sapiens
  misc_RNA (1)...(19): siRNA sense strand
gaaccgcagggcacuugaa

SEQ ID NO: 1262952 - RNA, 19 nt, Homo sapiens
  misc_RNA (1)...(19): siRNA sense strand
gaacgaccagagccagaau

SEQ ID NO: 1262953 - RNA, 19 nt, Homo sapiens
  misc_RNA (1)...(19): siRNA sense strand
auaaauguguucguaagug

SEQ ID NO: 1262954 - RNA, 19 nt, Homo sapiens
  misc_RNA (1)...(19): siRNA sense strand
gauggcaaggcaauaaaug

SEQ ID NO: 1262955 - RNA, 19 nt, Homo sapiens
  misc_RNA (1)...(19): siRNA sense strand
uccaaaaguuucagugaua

SEQ ID NO: 1262956 - RNA, 19 nt, Homo sapiens
  misc_RNA (1)...(19): siRNA sense strand
ggcacgagcacuuaaacaa

SEQ ID NO: 1262957 - RNA, 19 nt, Homo sapiens
  misc_RNA (1)...(19): siRNA sense strand
gaccagagccagaauucca

SEQ ID NO: 1262958 - RNA, 19 nt, Homo sapiens
  misc_RNA (1)...(19): siRNA sense strand
ggagucccuucuucguaug

SEQ ID NO: 1262959 - RNA, 19 nt, Homo sapiens
  misc_RNA (1)...(19): siRNA sense strand
uaaagauggcaaggcaaua

SEQ ID NO: 1262960 - RNA, 19 nt, Homo sapiens
  misc_RNA (1)...(19): siRNA sense strand
cagcugaugauguagaaga

SEQ ID NO: 1262961 - RNA, 19 nt, Homo sapiens
  misc_RNA (1)...(19): siRNA sense strand
aaucaaggauauagcuagu

SEQ ID NO: 1262962 - RNA, 19 nt, Homo sapiens
  misc_RNA (1)...(19): siRNA sense strand
cugcagacaaucaaggaua

SEQ ID NO: 1262963 - RNA, 19 nt, Homo sapiens
  misc_RNA (1)...(19): siRNA sense strand
gaaauaucaauaccagaac

SEQ ID NO: 1262964 - RNA, 19 nt, Homo sapiens
  misc_RNA (1)...(19): siRNA sense strand
ugagcuagaacgaguaaau

SEQ ID NO: 1262965 - RNA, 19 nt, Homo sapiens
  misc_RNA (1)...(19): siRNA sense strand
ugcagacaaucaaggauau

SEQ ID NO: 1262966 - RNA, 19 nt, Homo sapiens
  misc_RNA (1)...(19): siRNA sense strand
cuagaacgaguaaaucugu

SEQ ID NO: 1262967 - RNA, 19 nt, Homo sapiens
  misc_RNA (1)...(19): siRNA sense strand
gagcuagaacgaguaaauc

SEQ ID NO: 1262968 - RNA, 19 nt, Homo sapiens
  misc_RNA (1)...(19): siRNA sense strand
aaauccaggucucacacaa

SEQ ID NO: 1262969 - RNA, 19 nt, Homo sapiens
  misc_RNA (1)...(19): siRNA sense strand
gaugauguagaagaguaua

SEQ ID NO: 1262970 - RNA, 19 nt, Homo sapiens
  misc_RNA (1)...(19): siRNA sense strand
gaugacaauggaagagaug

SEQ ID NO: 1262971 - RNA, 19 nt, Homo sapiens
  misc_RNA (1)...(19): siRNA sense strand
uacagugaauaaugucuuc

SEQ ID NO: 1262972 - RNA, 19 nt, Homo sapiens
  misc_RNA (1)...(19): siRNA sense strand
ucccagaugagaucaauga

SEQ ID NO: 1262973 - RNA, 19 nt, Homo sapiens
  misc_RNA (1)...(19): siRNA sense strand
cauguauccuguguuuaau

SEQ ID NO: 1262974 - RNA, 19 nt, Homo sapiens
  misc_RNA (1)...(19): siRNA sense strand
acgagcacuuaaacaaauu

SEQ ID NO: 1262975 - RNA, 19 nt, Homo sapiens
  misc_RNA (1)...(19): siRNA sense strand
acugagagccgcuuucauc

SEQ ID NO: 1262976 - RNA, 19 nt, Homo sapiens
  misc_RNA (1)...(19): siRNA sense strand
cguaagugccaaccgacua

SEQ ID NO: 1262977 - RNA, 19 nt, Homo sapiens
  misc_RNA (1)...(19): siRNA sense strand
gagaucaaugacagaguga

SEQ ID NO: 1262978 - RNA, 19 nt, Homo sapiens
  misc_RNA (1)...(19): siRNA sense strand
aguaagaucccagaugaga

SEQ ID NO: 1262979 - RNA, 19 nt, Homo sapiens
  misc_RNA (1)...(19): siRNA sense strand
uuaaagauggcaaggcaau

SEQ ID NO: 1262980 - RNA, 19 nt, Homo sapiens
  misc_RNA (1)...(19): siRNA sense strand
cuugauacagugaauaaug

SEQ ID NO: 1262981 - RNA, 19 nt, Homo sapiens
  misc_RNA (1)...(19): siRNA sense strand
ucaaugacagagugagguu

SEQ ID NO: 1262982 - RNA, 19 nt, Homo sapiens
  misc_RNA (1)...(19): siRNA sense strand
auccaggucucacacaaga

SEQ ID NO: 1262983 - RNA, 19 nt, Homo sapiens
  misc_RNA (1)...(19): siRNA sense strand
ccucuaugcagucauguau

SEQ ID NO: 1262984 - RNA, 19 nt, Homo sapiens
  misc_RNA (1)...(19): siRNA sense strand
gccaaccgacuaauucauc

SEQ ID NO: 1262985 - RNA, 19 nt, Homo sapiens
  misc_RNA (1)...(19): siRNA sense strand
gcuagaacgaguaaaucug

SEQ ID NO: 1262986 - RNA, 19 nt, Homo sapiens
  misc_RNA (1)...(19): siRNA sense strand
aaaggcacgagcacuuaaa

SEQ ID NO: 1262987 - RNA, 19 nt, Homo sapiens
  misc_RNA (1)...(19): siRNA sense strand
guaagaucccagaugagau

SEQ ID NO: 1262988 - RNA, 19 nt, Homo sapiens
  misc_RNA (1)...(19): siRNA sense strand
ggcaaggcaauaaaugugu

SEQ ID NO: 1262989 - RNA, 19 nt, Homo sapiens
  misc_RNA (1)...(19): siRNA sense strand
ugagagccgcuuucaucaa

SEQ ID NO: 1262990 - RNA, 19 nt, Homo sapiens
  misc_RNA (1)...(19): siRNA sense strand
ucucacacaagacaucauu

SEQ ID NO: 1262991 - RNA, 19 nt, Homo sapiens
  misc_RNA (1)...(19): siRNA sense strand
ccagaugagaucaaugaca

SEQ ID NO: 1262992 - RNA, 19 nt, Homo sapiens
  misc_RNA (1)...(19): siRNA sense strand
ugacaauggaagagaugaa

SEQ ID NO: 1262993 - RNA, 19 nt, Homo sapiens
  misc_RNA (1)...(19): siRNA sense strand
cuucagaccuucaaaacug

SEQ ID NO: 1262994 - RNA, 19 nt, Homo sapiens
  misc_RNA (1)...(19): siRNA sense strand
gcacuugaacaccaaaaga

SEQ ID NO: 1262995 - RNA, 19 nt, Homo sapiens
  misc_RNA (1)...(19): siRNA sense strand
gaagaguauaugauugaac

SEQ ID NO: 1262996 - RNA, 19 nt, Homo sapiens
  misc_RNA (1)...(19): siRNA sense strand
cacacaagacaucauuaug

SEQ ID NO: 1262997 - RNA, 19 nt, Homo sapiens
  misc_RNA (1)...(19): siRNA sense strand
guauggcagcugaugaugu

SEQ ID NO: 1262998 - RNA, 19 nt, Homo sapiens
  misc_RNA (1)...(19): siRNA sense strand
cagggcacuugaacaccaa

SEQ ID NO: 1262999 - RNA, 19 nt, Homo sapiens
  misc_RNA (1)...(19): siRNA sense strand
cagaaccgcagggcacuug

SEQ ID NO: 1263000 - RNA, 19 nt, Homo sapiens
  misc_RNA (1)...(19): siRNA sense strand
ggauauagcuagugcaaua

SEQ ID NO: 1263001 - RNA, 19 nt, Homo sapiens
  misc_RNA (1)...(19): siRNA sense strand
uggaagagaugaagaauga

SEQ ID NO: 1263002 - RNA, 19 nt, Homo sapiens
  misc_RNA (1)...(19): siRNA sense strand
caaaccaacuuaauacuuc

SEQ ID NO: 1263003 - RNA, 19 nt, Homo sapiens
  misc_RNA (1)...(19): siRNA sense strand
ucaguaagaucccagauga

SEQ ID NO: 1263004 - RNA, 19 nt, Homo sapiens
  misc_RNA (1)...(19): siRNA sense strand
ccacauccaugguuucuau

SEQ ID NO: 1263005 - RNA, 19 nt, Homo sapiens
  misc_RNA (1)...(19): siRNA sense strand
guagaagaguauaugauug

SEQ ID NO: 1263006 - RNA, 19 nt, Homo sapiens
  misc_RNA (1)...(19): siRNA sense strand
uauggcagcugaugaugua

SEQ ID NO: 1263007 - RNA, 19 nt, Homo sapiens
  misc_RNA (1)...(19): siRNA sense strand
ggcaauaaauguguucgua

SEQ ID NO: 1263008 - RNA, 19 nt, Homo sapiens
  misc_RNA (1)...(19): siRNA sense strand
gcacgagcacuuaaacaaa

SEQ ID NO: 1263009 - RNA, 19 nt, Homo sapiens
  misc_RNA (1)...(19): siRNA sense strand
gcaauaaauguguucguaa

SEQ ID NO: 1263010 - RNA, 19 nt, Homo sapiens
  misc_RNA (1)...(19): siRNA sense strand
gcacuuaaacaaauucuca

SEQ ID NO: 1263011 - RNA, 19 nt, Homo sapiens
  misc_RNA (1)...(19): siRNA sense strand
gcaaggcaauaaauguguu

SEQ ID NO: 1263012 - RNA, 19 nt, Homo sapiens
  misc_RNA (1)...(19): siRNA sense strand
gagagccgcuuucaucaag

SEQ ID NO: 1263013 - RNA, 19 nt, Homo sapiens
  misc_RNA (1)...(19): siRNA sense strand
caauaaauguguucguaag

SEQ ID NO: 1263014 - RNA, 19 nt, Homo sapiens
  misc_RNA (1)...(19): siRNA sense strand
ucauguauccuguguuuaa

SEQ ID NO: 1263015 - RNA, 19 nt, Homo sapiens
  misc_RNA (1)...(19): siRNA sense strand
agucauguauccuguguuu

SEQ ID NO: 1263016 - RNA, 19 nt, Homo sapiens
  misc_RNA (1)...(19): siRNA sense strand
guaaaguacuccaaaaguu

SEQ ID NO: 1263017 - RNA, 19 nt, Homo sapiens
  misc_RNA (1)...(19): siRNA sense strand
gcagucauguauccugugu

SEQ ID NO: 1263018 - RNA, 19 nt, Homo sapiens
  misc_RNA (1)...(19): siRNA sense strand
cacgagcacuuaaacaaau

SEQ ID NO: 1263019 - RNA, 19 nt, Homo sapiens
  misc_RNA (1)...(19): siRNA sense strand
gaaaaggcacgagcacuua

SEQ ID NO: 1263020 - RNA, 19 nt, Homo sapiens
  misc_RNA (1)...(19): siRNA sense strand
gaacuucuugauacaguga

SEQ ID NO: 1263021 - RNA, 19 nt, Homo sapiens
  misc_RNA (1)...(19): siRNA sense strand
guaagugccaaccgacuaa

SEQ ID NO: 1263022 - RNA, 19 nt, Homo sapiens
  misc_RNA (1)...(19): siRNA sense strand
gaagagaugaagaaugaag

SEQ ID NO: 1263023 - RNA, 19 nt, Homo sapiens
  misc_RNA (1)...(19): siRNA sense strand
ggaugacaauggaagagau

SEQ ID NO: 1263024 - RNA, 19 nt, Homo sapiens
  misc_RNA (1)...(19): siRNA sense strand
aaagauggcaaggcaauaa

SEQ ID NO: 1263025 - RNA, 19 nt, Homo sapiens
  misc_RNA (1)...(19): siRNA sense strand
uguauccuguguuuaauga

SEQ ID NO: 1263026 - RNA, 19 nt, Homo sapiens
  misc_RNA (1)...(19): siRNA sense strand
cugaugauguagaagagua

SEQ ID NO: 1263027 - RNA, 19 nt, Homo sapiens
  misc_RNA (1)...(19): siRNA sense strand
cggagucccuucuucguau

SEQ ID NO: 1263028 - RNA, 19 nt, Homo sapiens
  misc_RNA (1)...(19): siRNA sense strand
caucaaaccaacuuaauac

SEQ ID NO: 1263029 - RNA, 19 nt, Homo sapiens
  misc_RNA (1)...(19): siRNA sense strand
gcagacaaucaaggauaua

SEQ ID NO: 1263030 - RNA, 19 nt, Homo sapiens
  misc_RNA (1)...(19): siRNA sense strand
caauggaagagaugaagaa

SEQ ID NO: 1263031 - RNA, 19 nt, Homo sapiens
  misc_RNA (1)...(19): siRNA sense strand
ucacacaagacaucauuau

SEQ ID NO: 1263032 - RNA, 19 nt, Homo sapiens
  misc_RNA (1)...(19): siRNA sense strand
gugauacucugaaaacgua

SEQ ID NO: 1263033 - RNA, 19 nt, Homo sapiens
  misc_RNA (1)...(19): siRNA sense strand
gauguagaagaguauauga

SEQ ID NO: 1263034 - RNA, 19 nt, Homo sapiens
  misc_RNA (1)...(19): siRNA sense strand
ccaaccgacuaauucauca

SEQ ID NO: 1263035 - RNA, 19 nt, Homo sapiens
  misc_RNA (1)...(19): siRNA sense strand
gauauagcuagugcaauaa

SEQ ID NO: 1263036 - RNA, 19 nt, Homo sapiens
  misc_RNA (1)...(19): siRNA sense strand
ugagguuucugcagacaau

SEQ ID NO: 1263037 - RNA, 19 nt, Homo sapiens
  misc_RNA (1)...(19): siRNA sense strand
ggcagcugaugauguagaa

SEQ ID NO: 1263038 - RNA, 19 nt, Homo sapiens
  misc_RNA (1)...(19): siRNA sense strand
gaaccgcagggcacuugaa

SEQ ID NO: 1263039 - RNA, 19 nt, Homo sapiens
  misc_RNA (1)...(19): siRNA sense strand
gaacgaccagagccagaau

SEQ ID NO: 1263040 - RNA, 19 nt, Homo sapiens
  misc_RNA (1)...(19): siRNA sense strand
auaaauguguucguaagug

SEQ ID NO: 1263041 - RNA, 19 nt, Homo sapiens
  misc_RNA (1)...(19): siRNA sense strand
gauggcaaggcaauaaaug

SEQ ID NO: 1263042 - RNA, 19 nt, Homo sapiens
  misc_RNA (1)...(19): siRNA sense strand
uccaaaaguuucagugaua

SEQ ID NO: 1263043 - RNA, 19 nt, Homo sapiens
  misc_RNA (1)...(19): siRNA sense strand
ggcacgagcacuuaaacaa

SEQ ID NO: 1263044 - RNA, 19 nt, Homo sapiens
  misc_RNA (1)...(19): siRNA sense strand
gaccagagccagaauucca

SEQ ID NO: 1263045 - RNA, 19 nt, Homo sapiens
  misc_RNA (1)...(19): siRNA sense strand
ggagucccuucuucguaug

SEQ ID NO: 1263046 - RNA, 19 nt, Homo sapiens
  misc_RNA (1)...(19): siRNA sense strand
uaaagauggcaaggcaaua

SEQ ID NO: 1263047 - RNA, 19 nt, Homo sapiens
  misc_RNA (1)...(19): siRNA sense strand
cagcugaugauguagaaga

SEQ ID NO: 1263048 - RNA, 19 nt, Homo sapiens
  misc_RNA (1)...(19): siRNA sense strand
aaucaaggauauagcuagu

SEQ ID NO: 1263049 - RNA, 19 nt, Homo sapiens
  misc_RNA (1)...(19): siRNA sense strand
cugcagacaaucaaggaua

SEQ ID NO: 1263050 - RNA, 19 nt, Homo sapiens
  misc_RNA (1)...(19): siRNA sense strand
gaaauaucaauaccagaac

SEQ ID NO: 1263051 - RNA, 19 nt, Homo sapiens
  misc_RNA (1)...(19): siRNA sense strand
ugagcuagaacgaguaaau

SEQ ID NO: 1263052 - RNA, 19 nt, Homo sapiens
  misc_RNA (1)...(19): siRNA sense strand
ugcagacaaucaaggauau

SEQ ID NO: 1263053 - RNA, 19 nt, Homo sapiens
  misc_RNA (1)...(19): siRNA sense strand
cuagaacgaguaaaucugu

SEQ ID NO: 1263054 - RNA, 19 nt, Homo sapiens
  misc_RNA (1)...(19): siRNA sense strand
gagcuagaacgaguaaauc

SEQ ID NO: 1263055 - RNA, 19 nt, Homo sapiens
  misc_RNA (1)...(19): siRNA sense strand
aaauccaggucucacacaa

SEQ ID NO: 1263056 - RNA, 19 nt, Homo sapiens
  misc_RNA (1)...(19): siRNA sense strand
gaugauguagaagaguaua

SEQ ID NO: 1263057 - RNA, 19 nt, Homo sapiens
  misc_RNA (1)...(19): siRNA sense strand
gaugacaauggaagagaug

SEQ ID NO: 1263058 - RNA, 19 nt, Homo sapiens
  misc_RNA (1)...(19): siRNA sense strand
uacagugaauaaugucuuc

SEQ ID NO: 1263059 - RNA, 19 nt, Homo sapiens
  misc_RNA (1)...(19): siRNA sense strand
ucccagaugagaucaauga

SEQ ID NO: 1263060 - RNA, 19 nt, Homo sapiens
  misc_RNA (1)...(19): siRNA sense strand
cauguauccuguguuuaau

SEQ ID NO: 1263061 - RNA, 19 nt, Homo sapiens
  misc_RNA (1)...(19): siRNA sense strand
acgagcacuuaaacaaauu

SEQ ID NO: 1263062 - RNA, 19 nt, Homo sapiens
  misc_RNA (1)...(19): siRNA sense strand
acugagagccgcuuucauc

SEQ ID NO: 1263063 - RNA, 19 nt, Homo sapiens
  misc_RNA (1)...(19): siRNA sense strand
cguaagugccaaccgacua

SEQ ID NO: 1263064 - RNA, 19 nt, Homo sapiens
  misc_RNA (1)...(19): siRNA sense strand
gagaucaaugacagaguga

SEQ ID NO: 1263065 - RNA, 19 nt, Homo sapiens
  misc_RNA (1)...(19): siRNA sense strand
aguaagaucccagaugaga

SEQ ID NO: 1263066 - RNA, 19 nt, Homo sapiens
  misc_RNA (1)...(19): siRNA sense strand
uuaaagauggcaaggcaau

SEQ ID NO: 1263067 - RNA, 19 nt, Homo sapiens
  misc_RNA (1)...(19): siRNA sense strand
cuugauacagugaauaaug

SEQ ID NO: 1263068 - RNA, 19 nt, Homo sapiens
  misc_RNA (1)...(19): siRNA sense strand
ucaaugacagagugagguu

SEQ ID NO: 1263069 - RNA, 19 nt, Homo sapiens
  misc_RNA (1)...(19): siRNA sense strand
auccaggucucacacaaga

SEQ ID NO: 1263070 - RNA, 19 nt, Homo sapiens
  misc_RNA (1)...(19): siRNA sense strand
ccucuaugcagucauguau

SEQ ID NO: 1263071 - RNA, 19 nt, Homo sapiens
  misc_RNA (1)...(19): siRNA sense strand
gccaaccgacuaauucauc

SEQ ID NO: 1263072 - RNA, 19 nt, Homo sapiens
  misc_RNA (1)...(19): siRNA sense strand
gcuagaacgaguaaaucug

SEQ ID NO: 1263073 - RNA, 19 nt, Homo sapiens
  misc_RNA (1)...(19): siRNA sense strand
aaaggcacgagcacuuaaa

SEQ ID NO: 1263074 - RNA, 19 nt, Homo sapiens
  misc_RNA (1)...(19): siRNA sense strand
guaagaucccagaugagau

SEQ ID NO: 1263075 - RNA, 19 nt, Homo sapiens
  misc_RNA (1)...(19): siRNA sense strand
ggcaaggcaauaaaugugu

SEQ ID NO: 1263076 - RNA, 19 nt, Homo sapiens
  misc_RNA (1)...(19): siRNA sense strand
ugagagccgcuuucaucaa

SEQ ID NO: 1263077 - RNA, 19 nt, Homo sapiens
  misc_RNA (1)...(19): siRNA sense strand
ucucacacaagacaucauu

SEQ ID NO: 1263078 - RNA, 19 nt, Homo sapiens
  misc_RNA (1)...(19): siRNA sense strand
ccagaugagaucaaugaca

SEQ ID NO: 1263079 - RNA, 19 nt, Homo sapiens
  misc_RNA (1)...(19): siRNA sense strand
ugacaauggaagagaugaa

SEQ ID NO: 1263080 - RNA, 19 nt, Homo sapiens
  misc_RNA (1)...(19): siRNA sense strand
cuucagaccuucaaaacug

SEQ ID NO: 1263081 - RNA, 19 nt, Homo sapiens
  misc_RNA (1)...(19): siRNA sense strand
gcacuugaacaccaaaaga

SEQ ID NO: 1263082 - RNA, 19 nt, Homo sapiens
  misc_RNA (1)...(19): siRNA sense strand
gaagaguauaugauugaac

SEQ ID NO: 1263083 - RNA, 19 nt, Homo sapiens
  misc_RNA (1)...(19): siRNA sense strand
cacacaagacaucauuaug

SEQ ID NO: 1263084 - RNA, 19 nt, Homo sapiens
  misc_RNA (1)...(19): siRNA sense strand
guauggcagcugaugaugu

SEQ ID NO: 1263085 - RNA, 19 nt, Homo sapiens
  misc_RNA (1)...(19): siRNA sense strand
cagggcacuugaacaccaa

SEQ ID NO: 1263086 - RNA, 19 nt, Homo sapiens
  misc_RNA (1)...(19): siRNA sense strand
cagaaccgcagggcacuug

SEQ ID NO: 1263087 - RNA, 19 nt, Homo sapiens
  misc_RNA (1)...(19): siRNA sense strand
ggauauagcuagugcaaua

SEQ ID NO: 1263088 - RNA, 19 nt, Homo sapiens
  misc_RNA (1)...(19): siRNA sense strand
uggaagagaugaagaauga

SEQ ID NO: 1263089 - RNA, 19 nt, Homo sapiens
  misc_RNA (1)...(19): siRNA sense strand
caaaccaacuuaauacuuc

SEQ ID NO: 1263090 - RNA, 19 nt, Homo sapiens
  misc_RNA (1)...(19): siRNA sense strand
ucaguaagaucccagauga

SEQ ID NO: 1263091 - RNA, 19 nt, Homo sapiens
  misc_RNA (1)...(19): siRNA sense strand
ccacauccaugguuucuau

SEQ ID NO: 1263092 - RNA, 19 nt, Homo sapiens
  misc_RNA (1)...(19): siRNA sense strand
guagaagaguauaugauug

SEQ ID NO: 1263093 - RNA, 19 nt, Homo sapiens
  misc_RNA (1)...(19): siRNA sense strand
uauggcagcugaugaugua

SEQ ID NO: 1263094 - RNA, 19 nt, Homo sapiens
  misc_RNA (1)...(19): siRNA sense strand
ggcaauaaauguguucgua

SEQ ID NO: 1263095 - RNA, 19 nt, Homo sapiens
  misc_RNA (1)...(19): siRNA sense strand
gcacgagcacuuaaacaaa

SEQ ID NO: 1263096 - RNA, 19 nt, Homo sapiens
  misc_RNA (1)...(19): siRNA sense strand
gcaauaaauguguucguaa

SEQ ID NO: 1263097 - RNA, 19 nt, Homo sapiens
  misc_RNA (1)...(19): siRNA sense strand
gcacuuaaacaaauucuca

SEQ ID NO: 1263098 - RNA, 19 nt, Homo sapiens
  misc_RNA (1)...(19): siRNA sense strand
gcaaggcaauaaauguguu

SEQ ID NO: 1263099 - RNA, 19 nt, Homo sapiens
  misc_RNA (1)...(19): siRNA sense strand
gagagccgcuuucaucaag

SEQ ID NO: 1263100 - RNA, 19 nt, Homo sapiens
  misc_RNA (1)...(19): siRNA sense strand
caauaaauguguucguaag

SEQ ID NO: 1263101 - RNA, 19 nt, Homo sapiens
  misc_RNA (1)...(19): siRNA sense strand
ucauguauccuguguuuaa

SEQ ID NO: 1263102 - RNA, 19 nt, Homo sapiens
  misc_RNA (1)...(19): siRNA sense strand
agucauguauccuguguuu

SEQ ID NO: 1263103 - RNA, 19 nt, Homo sapiens
  misc_RNA (1)...(19): siRNA sense strand
guaaaguacuccaaaaguu

SEQ ID NO: 1263104 - RNA, 19 nt, Homo sapiens
  misc_RNA (1)...(19): siRNA sense strand
gcagucauguauccugugu

SEQ ID NO: 1263105 - RNA, 19 nt, Homo sapiens
  misc_RNA (1)...(19): siRNA sense strand
cacgagcacuuaaacaaau

SEQ ID NO: 1263106 - RNA, 19 nt, Homo sapiens
  misc_RNA (1)...(19): siRNA sense strand
gaaaaggcacgagcacuua

SEQ ID NO: 1263107 - RNA, 19 nt, Homo sapiens
  misc_RNA (1)...(19): siRNA sense strand
gaacuucuugauacaguga

SEQ ID NO: 1263108 - RNA, 19 nt, Homo sapiens
  misc_RNA (1)...(19): siRNA sense strand
guaagugccaaccgacuaa

SEQ ID NO: 1263109 - RNA, 19 nt, Homo sapiens
  misc_RNA (1)...(19): siRNA sense strand
gaagagaugaagaaugaag

SEQ ID NO: 1263110 - RNA, 19 nt, Homo sapiens
  misc_RNA (1)...(19): siRNA sense strand
ggaugacaauggaagagau

SEQ ID NO: 1263111 - RNA, 19 nt, Homo sapiens
  misc_RNA (1)...(19): siRNA sense strand
aaagauggcaaggcaauaa

SEQ ID NO: 1263112 - RNA, 19 nt, Homo sapiens
  misc_RNA (1)...(19): siRNA sense strand
uguauccuguguuuaauga

SEQ ID NO: 1263113 - RNA, 19 nt, Homo sapiens
  misc_RNA (1)...(19): siRNA sense strand
cugaugauguagaagagua

SEQ ID NO: 1263114 - RNA, 19 nt, Homo sapiens
  misc_RNA (1)...(19): siRNA sense strand
cggagucccuucuucguau

SEQ ID NO: 1263115 - RNA, 19 nt, Homo sapiens
  misc_RNA (1)...(19): siRNA sense strand
caucaaaccaacuuaauac

SEQ ID NO: 1263116 - RNA, 19 nt, Homo sapiens
  misc_RNA (1)...(19): siRNA sense strand
gcagacaaucaaggauaua

SEQ ID NO: 1263117 - RNA, 19 nt, Homo sapiens
  misc_RNA (1)...(19): siRNA sense strand
caauggaagagaugaagaa

SEQ ID NO: 1263118 - RNA, 19 nt, Homo sapiens
  misc_RNA (1)...(19): siRNA sense strand
ucacacaagacaucauuau

SEQ ID NO: 1263119 - RNA, 19 nt, Homo sapiens
  misc_RNA (1)...(19): siRNA sense strand
gugauacucugaaaacgua

SEQ ID NO: 1263120 - RNA, 19 nt, Homo sapiens
  misc_RNA (1)...(19): siRNA sense strand
gauguagaagaguauauga

SEQ ID NO: 1263121 - RNA, 19 nt, Homo sapiens
  misc_RNA (1)...(19): siRNA sense strand
ccaaccgacuaauucauca

SEQ ID NO: 1263122 - RNA, 19 nt, Homo sapiens
  misc_RNA (1)...(19): siRNA sense strand
gauauagcuagugcaauaa

SEQ ID NO: 1263123 - RNA, 19 nt, Homo sapiens
  misc_RNA (1)...(19): siRNA sense strand
ugagguuucugcagacaau

SEQ ID NO: 1263124 - RNA, 19 nt, Homo sapiens
  misc_RNA (1)...(19): siRNA sense strand
ggcagcugaugauguagaa

SEQ ID NO: 1263125 - RNA, 19 nt, Homo sapiens
  misc_RNA (1)...(19): siRNA sense strand
gaaccgcagggcacuugaa

SEQ ID NO: 1263126 - RNA, 19 nt, Homo sapiens
  misc_RNA (1)...(19): siRNA sense strand
gaacgaccagagccagaau

SEQ ID NO: 1263127 - RNA, 19 nt, Homo sapiens
  misc_RNA (1)...(19): siRNA sense strand
auaaauguguucguaagug

SEQ ID NO: 1263128 - RNA, 19 nt, Homo sapiens
  misc_RNA (1)...(19): siRNA sense strand
gauggcaaggcaauaaaug

SEQ ID NO: 1263129 - RNA, 19 nt, Homo sapiens
  misc_RNA (1)...(19): siRNA sense strand
uccaaaaguuucagugaua

SEQ ID NO: 1263130 - RNA, 19 nt, Homo sapiens
  misc_RNA (1)...(19): siRNA sense strand
ggcacgagcacuuaaacaa

SEQ ID NO: 1263131 - RNA, 19 nt, Homo sapiens
  misc_RNA (1)...(19): siRNA sense strand
gaccagagccagaauucca

SEQ ID NO: 1263132 - RNA, 19 nt, Homo sapiens
  misc_RNA (1)...(19): siRNA sense strand
ggagucccuucuucguaug

SEQ ID NO: 1263133 - RNA, 19 nt, Homo sapiens
  misc_RNA (1)...(19): siRNA sense strand
uaaagauggcaaggcaaua

SEQ ID NO: 1263134 - RNA, 19 nt, Homo sapiens
  misc_RNA (1)...(19): siRNA sense strand
cagcugaugauguagaaga

SEQ ID NO: 1263135 - RNA, 19 nt, Homo sapiens
  misc_RNA (1)...(19): siRNA sense strand
aaucaaggauauagcuagu

SEQ ID NO: 1263136 - RNA, 19 nt, Homo sapiens
  misc_RNA (1)...(19): siRNA sense strand
cugcagacaaucaaggaua

SEQ ID NO: 1263137 - RNA, 19 nt, Homo sapiens
  misc_RNA (1)...(19): siRNA sense strand
gaaauaucaauaccagaac

SEQ ID NO: 1263138 - RNA, 19 nt, Homo sapiens
  misc_RNA (1)...(19): siRNA sense strand
ugagcuagaacgaguaaau

SEQ ID NO: 1263139 - RNA, 19 nt, Homo sapiens
  misc_RNA (1)...(19): siRNA sense strand
ugcagacaaucaaggauau

SEQ ID NO: 1263140 - RNA, 19 nt, Homo sapiens
  misc_RNA (1)...(19): siRNA sense strand
cuagaacgaguaaaucugu

SEQ ID NO: 1263141 - RNA, 19 nt, Homo sapiens
  misc_RNA (1)...(19): siRNA sense strand
gagcuagaacgaguaaauc

SEQ ID NO: 1263142 - RNA, 19 nt, Homo sapiens
  misc_RNA (1)...(19): siRNA sense strand
aaauccaggucucacacaa

SEQ ID NO: 1263143 - RNA, 19 nt, Homo sapiens
  misc_RNA (1)...(19): siRNA sense strand
gaugauguagaagaguaua

SEQ ID NO: 1263144 - RNA, 19 nt, Homo sapiens
  misc_RNA (1)...(19): siRNA sense strand
gaugacaauggaagagaug

SEQ ID NO: 1263145 - RNA, 19 nt, Homo sapiens
  misc_RNA (1)...(19): siRNA sense strand
uacagugaauaaugucuuc

SEQ ID NO: 1263146 - RNA, 19 nt, Homo sapiens
  misc_RNA (1)...(19): siRNA sense strand
ucccagaugagaucaauga

SEQ ID NO: 1263147 - RNA, 19 nt, Homo sapiens
  misc_RNA (1)...(19): siRNA sense strand
cauguauccuguguuuaau

SEQ ID NO: 1263148 - RNA, 19 nt, Homo sapiens
  misc_RNA (1)...(19): siRNA sense strand
acgagcacuuaaacaaauu

SEQ ID NO: 1263149 - RNA, 19 nt, Homo sapiens
  misc_RNA (1)...(19): siRNA sense strand
acugagagccgcuuucauc

SEQ ID NO: 1263150 - RNA, 19 nt, Homo sapiens
  misc_RNA (1)...(19): siRNA sense strand
cguaagugccaaccgacua

SEQ ID NO: 1263151 - RNA, 19 nt, Homo sapiens
  misc_RNA (1)...(19): siRNA sense strand
gagaucaaugacagaguga

SEQ ID NO: 1263152 - RNA, 19 nt, Homo sapiens
  misc_RNA (1)...(19): siRNA sense strand
aguaagaucccagaugaga

SEQ ID NO: 1263153 - RNA, 19 nt, Homo sapiens
  misc_RNA (1)...(19): siRNA sense strand
uuaaagauggcaaggcaau

SEQ ID NO: 1263154 - RNA, 19 nt, Homo sapiens
  misc_RNA (1)...(19): siRNA sense strand
cuugauacagugaauaaug

SEQ ID NO: 1263155 - RNA, 19 nt, Homo sapiens
  misc_RNA (1)...(19): siRNA sense strand
ucaaugacagagugagguu

SEQ ID NO: 1263156 - RNA, 19 nt, Homo sapiens
  misc_RNA (1)...(19): siRNA sense strand
auccaggucucacacaaga

SEQ ID NO: 1263157 - RNA, 19 nt, Homo sapiens
  misc_RNA (1)...(19): siRNA sense strand
ccucuaugcagucauguau

SEQ ID NO: 1263158 - RNA, 19 nt, Homo sapiens
  misc_RNA (1)...(19): siRNA sense strand
gccaaccgacuaauucauc

SEQ ID NO: 1263159 - RNA, 19 nt, Homo sapiens
  misc_RNA (1)...(19): siRNA sense strand
gcuagaacgaguaaaucug

SEQ ID NO: 1263160 - RNA, 19 nt, Homo sapiens
  misc_RNA (1)...(19): siRNA sense strand
aaaggcacgagcacuuaaa

SEQ ID NO: 1263161 - RNA, 19 nt, Homo sapiens
  misc_RNA (1)...(19): siRNA sense strand
guaagaucccagaugagau

SEQ ID NO: 1263162 - RNA, 19 nt, Homo sapiens
  misc_RNA (1)...(19): siRNA sense strand
ggcaaggcaauaaaugugu

SEQ ID NO: 1263163 - RNA, 19 nt, Homo sapiens
  misc_RNA (1)...(19): siRNA sense strand
ugagagccgcuuucaucaa

SEQ ID NO: 1263164 - RNA, 19 nt, Homo sapiens
  misc_RNA (1)...(19): siRNA sense strand
ucucacacaagacaucauu

SEQ ID NO: 1263165 - RNA, 19 nt, Homo sapiens
  misc_RNA (1)...(19): siRNA sense strand
ccagaugagaucaaugaca

SEQ ID NO: 1263166 - RNA, 19 nt, Homo sapiens
  misc_RNA (1)...(19): siRNA sense strand
ugacaauggaagagaugaa

SEQ ID NO: 1263167 - RNA, 19 nt, Homo sapiens
  misc_RNA (1)...(19): siRNA sense strand
cuucagaccuucaaaacug

SEQ ID NO: 1263168 - RNA, 19 nt, Homo sapiens
  misc_RNA (1)...(19): siRNA sense strand
gcacuugaacaccaaaaga

SEQ ID NO: 1263169 - RNA, 19 nt, Homo sapiens
  misc_RNA (1)...(19): siRNA sense strand
gaagaguauaugauugaac

SEQ ID NO: 1263170 - RNA, 19 nt, Homo sapiens
  misc_RNA (1)...(19): siRNA sense strand
cacacaagacaucauuaug

SEQ ID NO: 1263171 - RNA, 19 nt, Homo sapiens
  misc_RNA (1)...(19): siRNA sense strand
guauggcagcugaugaugu

SEQ ID NO: 1263172 - RNA, 19 nt, Homo sapiens
  misc_RNA (1)...(19): siRNA sense strand
cagggcacuugaacaccaa

SEQ ID NO: 1263173 - RNA, 19 nt, Homo sapiens
  misc_RNA (1)...(19): siRNA sense strand
cagaaccgcagggcacuug

SEQ ID NO: 1263174 - RNA, 19 nt, Homo sapiens
  misc_RNA (1)...(19): siRNA sense strand
ggacaacuccugcaaagaa

SEQ ID NO: 1263175 - RNA, 19 nt, Homo sapiens
  misc_RNA (1)...(19): siRNA sense strand
gcucaaugaucaggacuua

SEQ ID NO: 1263176 - RNA, 19 nt, Homo sapiens
  misc_RNA (1)...(19): siRNA sense strand
agacaaauaucccauucaa

SEQ ID NO: 1263177 - RNA, 19 nt, Homo sapiens
  misc_RNA (1)...(19): siRNA sense strand
ccacgaaauucagauauga

SEQ ID NO: 1263178 - RNA, 19 nt, Homo sapiens
  misc_RNA (1)...(19): siRNA sense strand
acaaauaucccauucaaga

SEQ ID NO: 1263179 - RNA, 19 nt, Homo sapiens
  misc_RNA (1)...(19): siRNA sense strand
gaacugcccacgaaauuca

SEQ ID NO: 1263180 - RNA, 19 nt, Homo sapiens
  misc_RNA (1)...(19): siRNA sense strand
gauguccuaugacgaauug

SEQ ID NO: 1263181 - RNA, 19 nt, Homo sapiens
  misc_RNA (1)...(19): siRNA sense strand
gacaacuccugcaaagaaa

SEQ ID NO: 1263182 - RNA, 19 nt, Homo sapiens
  misc_RNA (1)...(19): siRNA sense strand
ggaacucccuaaagcugaa

SEQ ID NO: 1263183 - RNA, 19 nt, Homo sapiens
  misc_RNA (1)...(19): siRNA sense strand
cacagacccuagcacuuua

SEQ ID NO: 1263184 - RNA, 19 nt, Homo sapiens
  misc_RNA (1)...(19): siRNA sense strand
cccuaaagcugaagaaugu

SEQ ID NO: 1263185 - RNA, 19 nt, Homo sapiens
  misc_RNA (1)...(19): siRNA sense strand
uaaaggaaccaguggaaga

SEQ ID NO: 1263186 - RNA, 19 nt, Homo sapiens
  misc_RNA (1)...(19): siRNA sense strand
ccuagcacuuuauccuuua

SEQ ID NO: 1263187 - RNA, 19 nt, Homo sapiens
  misc_RNA (1)...(19): siRNA sense strand
acacagacccuagcacuuu

SEQ ID NO: 1263188 - RNA, 19 nt, Homo sapiens
  misc_RNA (1)...(19): siRNA sense strand
ucagacaaauaucccauuc

SEQ ID NO: 1263189 - RNA, 19 nt, Homo sapiens
  misc_RNA (1)...(19): siRNA sense strand
gcugaagaaugugauacaa

SEQ ID NO: 1263190 - RNA, 19 nt, Homo sapiens
  misc_RNA (1)...(19): siRNA sense strand
gguaaaggaaccaguggaa

SEQ ID NO: 1263191 - RNA, 19 nt, Homo sapiens
  misc_RNA (1)...(19): siRNA sense strand
gugacuugcucaaugauca

SEQ ID NO: 1263192 - RNA, 19 nt, Homo sapiens
  misc_RNA (1)...(19): siRNA sense strand
cccuagcacuuuauccuuu

SEQ ID NO: 1263193 - RNA, 19 nt, Homo sapiens
  misc_RNA (1)...(19): siRNA sense strand
caaauaucccauucaagau

SEQ ID NO: 1263194 - RNA, 19 nt, Homo sapiens
  misc_RNA (1)...(19): siRNA sense strand
auacggaacucccuaaagc

SEQ ID NO: 1263195 - RNA, 19 nt, Homo sapiens
  misc_RNA (1)...(19): siRNA sense strand
gaagacacagacccuagca

SEQ ID NO: 1263196 - RNA, 19 nt, Homo sapiens
  misc_RNA (1)...(19): siRNA sense strand
cccacgaaauucagauaug

SEQ ID NO: 1263197 - RNA, 19 nt, Homo sapiens
  misc_RNA (1)...(19): siRNA sense strand
cuagcacuuuauccuuuaa

SEQ ID NO: 1263198 - RNA, 19 nt, Homo sapiens
  misc_RNA (1)...(19): siRNA sense strand
gcaaagaaaacuguacuug

SEQ ID NO: 1263199 - RNA, 19 nt, Homo sapiens
  misc_RNA (1)...(19): siRNA sense strand
cuaaagcugaagaauguga

SEQ ID NO: 1263200 - RNA, 19 nt, Homo sapiens
  misc_RNA (1)...(19): siRNA sense strand
acuuugaacugcccacgaa

SEQ ID NO: 1263201 - RNA, 19 nt, Homo sapiens
  misc_RNA (1)...(19): siRNA sense strand
gauacggaacucccuaaag

SEQ ID NO: 1263202 - RNA, 19 nt, Homo sapiens
  misc_RNA (1)...(19): siRNA sense strand
ucaaugaucaggacuuacu

SEQ ID NO: 1263203 - RNA, 19 nt, Homo sapiens
  misc_RNA (1)...(19): siRNA sense strand
guacuuguuccuccugcuu

SEQ ID NO: 1263204 - RNA, 19 nt, Homo sapiens
  misc_RNA (1)...(19): siRNA sense strand
ggauguccuaugacgaauu

SEQ ID NO: 1263205 - RNA, 19 nt, Homo sapiens
  misc_RNA (1)...(19): siRNA sense strand
uuccagagaucagcaagga

SEQ ID NO: 1263206 - RNA, 19 nt, Homo sapiens
  misc_RNA (1)...(19): siRNA sense strand
caaagaaaacuguacuugu

SEQ ID NO: 1263207 - RNA, 19 nt, Homo sapiens
  misc_RNA (1)...(19): siRNA sense strand
gacacagacccuagcacuu

SEQ ID NO: 1263208 - RNA, 19 nt, Homo sapiens
  misc_RNA (1)...(19): siRNA sense strand
ggaaccaguggaagacaca

SEQ ID NO: 1263209 - RNA, 19 nt, Homo sapiens
  misc_RNA (1)...(19): siRNA sense strand
caaugaucaggacuuacua

SEQ ID NO: 1263210 - RNA, 19 nt, Homo sapiens
  misc_RNA (1)...(19): siRNA sense strand
aaagcugaagaaugugaua

SEQ ID NO: 1263211 - RNA, 19 nt, Homo sapiens
  misc_RNA (1)...(19): siRNA sense strand
uugaacugcccacgaaauu

SEQ ID NO: 1263212 - RNA, 19 nt, Homo sapiens
  misc_RNA (1)...(19): siRNA sense strand
ggacaacuccugcaaagaa

SEQ ID NO: 1263213 - RNA, 19 nt, Homo sapiens
  misc_RNA (1)...(19): siRNA sense strand
gcucaaugaucaggacuua

SEQ ID NO: 1263214 - RNA, 19 nt, Homo sapiens
  misc_RNA (1)...(19): siRNA sense strand
agacaaauaucccauucaa

SEQ ID NO: 1263215 - RNA, 19 nt, Homo sapiens
  misc_RNA (1)...(19): siRNA sense strand
ccacgaaauucagauauga

SEQ ID NO: 1263216 - RNA, 19 nt, Homo sapiens
  misc_RNA (1)...(19): siRNA sense strand
acaaauaucccauucaaga

SEQ ID NO: 1263217 - RNA, 19 nt, Homo sapiens
  misc_RNA (1)...(19): siRNA sense strand
gaacugcccacgaaauuca

SEQ ID NO: 1263218 - RNA, 19 nt, Homo sapiens
  misc_RNA (1)...(19): siRNA sense strand
gauguccuaugacgaauug

SEQ ID NO: 1263219 - RNA, 19 nt, Homo sapiens
  misc_RNA (1)...(19): siRNA sense strand
gacaacuccugcaaagaaa

SEQ ID NO: 1263220 - RNA, 19 nt, Homo sapiens
  misc_RNA (1)...(19): siRNA sense strand
ggaacucccuaaagcugaa

SEQ ID NO: 1263221 - RNA, 19 nt, Homo sapiens
  misc_RNA (1)...(19): siRNA sense strand
cacagacccuagcacuuua

SEQ ID NO: 1263222 - RNA, 19 nt, Homo sapiens
  misc_RNA (1)...(19): siRNA sense strand
cccuaaagcugaagaaugu

SEQ ID NO: 1263223 - RNA, 19 nt, Homo sapiens
  misc_RNA (1)...(19): siRNA sense strand
uaaaggaaccaguggaaga

SEQ ID NO: 1263224 - RNA, 19 nt, Homo sapiens
  misc_RNA (1)...(19): siRNA sense strand
ccuagcacuuuauccuuua

SEQ ID NO: 1263225 - RNA, 19 nt, Homo sapiens
  misc_RNA (1)...(19): siRNA sense strand
acacagacccuagcacuuu

SEQ ID NO: 1263226 - RNA, 19 nt, Homo sapiens
  misc_RNA (1)...(19): siRNA sense strand
ucagacaaauaucccauuc

SEQ ID NO: 1263227 - RNA, 19 nt, Homo sapiens
  misc_RNA (1)...(19): siRNA sense strand
gcugaagaaugugauacaa

SEQ ID NO: 1263228 - RNA, 19 nt, Homo sapiens
  misc_RNA (1)...(19): siRNA sense strand
gguaaaggaaccaguggaa

SEQ ID NO: 1263229 - RNA, 19 nt, Homo sapiens
  misc_RNA (1)...(19): siRNA sense strand
gugacuugcucaaugauca

SEQ ID NO: 1263230 - RNA, 19 nt, Homo sapiens
  misc_RNA (1)...(19): siRNA sense strand
cccuagcacuuuauccuuu

SEQ ID NO: 1263231 - RNA, 19 nt, Homo sapiens
  misc_RNA (1)...(19): siRNA sense strand
caaauaucccauucaagau

SEQ ID NO: 1263232 - RNA, 19 nt, Homo sapiens
  misc_RNA (1)...(19): siRNA sense strand
auacggaacucccuaaagc

SEQ ID NO: 1263233 - RNA, 19 nt, Homo sapiens
  misc_RNA (1)...(19): siRNA sense strand
gaagacacagacccuagca

SEQ ID NO: 1263234 - RNA, 19 nt, Homo sapiens
  misc_RNA (1)...(19): siRNA sense strand
cccacgaaauucagauaug

SEQ ID NO: 1263235 - RNA, 19 nt, Homo sapiens
  misc_RNA (1)...(19): siRNA sense strand
cuagcacuuuauccuuuaa

SEQ ID NO: 1263236 - RNA, 19 nt, Homo sapiens
  misc_RNA (1)...(19): siRNA sense strand
gcaaagaaaacuguacuug

SEQ ID NO: 1263237 - RNA, 19 nt, Homo sapiens
  misc_RNA (1)...(19): siRNA sense strand
cuaaagcugaagaauguga

SEQ ID NO: 1263238 - RNA, 19 nt, Homo sapiens
  misc_RNA (1)...(19): siRNA sense strand
acuuugaacugcccacgaa

SEQ ID NO: 1263239 - RNA, 19 nt, Homo sapiens
  misc_RNA (1)...(19): siRNA sense strand
gauacggaacucccuaaag

SEQ ID NO: 1263240 - RNA, 19 nt, Homo sapiens
  misc_RNA (1)...(19): siRNA sense strand
ucaaugaucaggacuuacu

SEQ ID NO: 1263241 - RNA, 19 nt, Homo sapiens
  misc_RNA (1)...(19): siRNA sense strand
guacuuguuccuccugcuu

SEQ ID NO: 1263242 - RNA, 19 nt, Homo sapiens
  misc_RNA (1)...(19): siRNA sense strand
ggauguccuaugacgaauu

SEQ ID NO: 1263243 - RNA, 19 nt, Homo sapiens
  misc_RNA (1)...(19): siRNA sense strand
uuccagagaucagcaagga

SEQ ID NO: 1263244 - RNA, 19 nt, Homo sapiens
  misc_RNA (1)...(19): siRNA sense strand
caaagaaaacuguacuugu

SEQ ID NO: 1263245 - RNA, 19 nt, Homo sapiens
  misc_RNA (1)...(19): siRNA sense strand
gacacagacccuagcacuu

SEQ ID NO: 1263246 - RNA, 19 nt, Homo sapiens
  misc_RNA (1)...(19): siRNA sense strand
ggaaccaguggaagacaca

SEQ ID NO: 1263247 - RNA, 19 nt, Homo sapiens
  misc_RNA (1)...(19): siRNA sense strand
caaugaucaggacuuacua

SEQ ID NO: 1263248 - RNA, 19 nt, Homo sapiens
  misc_RNA (1)...(19): siRNA sense strand
aaagcugaagaaugugaua

SEQ ID NO: 1263249 - RNA, 19 nt, Homo sapiens
  misc_RNA (1)...(19): siRNA sense strand
uugaacugcccacgaaauu

SEQ ID NO: 1263250 - RNA, 19 nt, Homo sapiens
  misc_RNA (1)...(19): siRNA sense strand
gaaauugcacugucacuaa

SEQ ID NO: 1263251 - RNA, 19 nt, Homo sapiens
  misc_RNA (1)...(19): siRNA sense strand
gaaaguagccauaaagauc

SEQ ID NO: 1263252 - RNA, 19 nt, Homo sapiens
  misc_RNA (1)...(19): siRNA sense strand
guaagaaaguagccauaaa

SEQ ID NO: 1263253 - RNA, 19 nt, Homo sapiens
  misc_RNA (1)...(19): siRNA sense strand
ggaauaaacgccugaaaga

SEQ ID NO: 1263254 - RNA, 19 nt, Homo sapiens
  misc_RNA (1)...(19): siRNA sense strand
acacugagcuccuuagaga

SEQ ID NO: 1263255 - RNA, 19 nt, Homo sapiens
  misc_RNA (1)...(19): siRNA sense strand
gaacauacagcaagaaaca

SEQ ID NO: 1263256 - RNA, 19 nt, Homo sapiens
  misc_RNA (1)...(19): siRNA sense strand
gcauaggacucaaguguca

SEQ ID NO: 1263257 - RNA, 19 nt, Homo sapiens
  misc_RNA (1)...(19): siRNA sense strand
gaaguuugcuauugguuca

SEQ ID NO: 1263258 - RNA, 19 nt, Homo sapiens
  misc_RNA (1)...(19): siRNA sense strand
ccauaaagaucaucagcaa

SEQ ID NO: 1263259 - RNA, 19 nt, Homo sapiens
  misc_RNA (1)...(19): siRNA sense strand
caggaacucuauucuauuc

SEQ ID NO: 1263260 - RNA, 19 nt, Homo sapiens
  misc_RNA (1)...(19): siRNA sense strand
gaauaaacgccugaaagaa

SEQ ID NO: 1263261 - RNA, 19 nt, Homo sapiens
  misc_RNA (1)...(19): siRNA sense strand
caauggaaccuuuguaaau

SEQ ID NO: 1263262 - RNA, 19 nt, Homo sapiens
  misc_RNA (1)...(19): siRNA sense strand
gacaaaagcugugaauauu

SEQ ID NO: 1263263 - RNA, 19 nt, Homo sapiens
  misc_RNA (1)...(19): siRNA sense strand
gcaauggaaccuuuguaaa

SEQ ID NO: 1263264 - RNA, 19 nt, Homo sapiens
  misc_RNA (1)...(19): siRNA sense strand
uagaugaucagucaguuua

SEQ ID NO: 1263265 - RNA, 19 nt, Homo sapiens
  misc_RNA (1)...(19): siRNA sense strand
gagcauaggacucaagugu

SEQ ID NO: 1263266 - RNA, 19 nt, Homo sapiens
  misc_RNA (1)...(19): siRNA sense strand
ucacuaagcagaaauaaag

SEQ ID NO: 1263267 - RNA, 19 nt, Homo sapiens
  misc_RNA (1)...(19): siRNA sense strand
gaaugacaacuacugguuu

SEQ ID NO: 1263268 - RNA, 19 nt, Homo sapiens
  misc_RNA (1)...(19): siRNA sense strand
gaauauugcuuugaugaac

SEQ ID NO: 1263269 - RNA, 19 nt, Homo sapiens
  misc_RNA (1)...(19): siRNA sense strand
ggacaaaagcugugaauau

SEQ ID NO: 1263270 - RNA, 19 nt, Homo sapiens
  misc_RNA (1)...(19): siRNA sense strand
ccaagaaccugaggaccaa

SEQ ID NO: 1263271 - RNA, 19 nt, Homo sapiens
  misc_RNA (1)...(19): siRNA sense strand
ggaaaacgccguccuuuga

SEQ ID NO: 1263272 - RNA, 19 nt, Homo sapiens
  misc_RNA (1)...(19): siRNA sense strand
uucaagaucuucugucuga

SEQ ID NO: 1263273 - RNA, 19 nt, Homo sapiens
  misc_RNA (1)...(19): siRNA sense strand
agacccagcucucaauguu

SEQ ID NO: 1263274 - RNA, 19 nt, Homo sapiens
  misc_RNA (1)...(19): siRNA sense strand
gacagaagaagccuuaaga

SEQ ID NO: 1263275 - RNA, 19 nt, Homo sapiens
  misc_RNA (1)...(19): siRNA sense strand
agaaagcucuggaccuugu

SEQ ID NO: 1263276 - RNA, 19 nt, Homo sapiens
  misc_RNA (1)...(19): siRNA sense strand
gaugaagacaugaagagaa

SEQ ID NO: 1263277 - RNA, 19 nt, Homo sapiens
  misc_RNA (1)...(19): siRNA sense strand
gaucuucugucugaggaaa

SEQ ID NO: 1263278 - RNA, 19 nt, Homo sapiens
  misc_RNA (1)...(19): siRNA sense strand
gcuguggacugcuggaguu

SEQ ID NO: 1263279 - RNA, 19 nt, Homo sapiens
  misc_RNA (1)...(19): siRNA sense strand
gauaaauaccgaacauaca

SEQ ID NO: 1263280 - RNA, 19 nt, Homo sapiens
  misc_RNA (1)...(19): siRNA sense strand
aaaggaaguuugcuauugg

SEQ ID NO: 1263281 - RNA, 19 nt, Homo sapiens
  misc_RNA (1)...(19): siRNA sense strand
ccuaaggcauuaagagaug

SEQ ID NO: 1263282 - RNA, 19 nt, Homo sapiens
  misc_RNA (1)...(19): siRNA sense strand
ggcaauggaaccuuuguaa

SEQ ID NO: 1263283 - RNA, 19 nt, Homo sapiens
  misc_RNA (1)...(19): siRNA sense strand
gaagaucacaguggcaaug

SEQ ID NO: 1263284 - RNA, 19 nt, Homo sapiens
  misc_RNA (1)...(19): siRNA sense strand
augaagacaugaagagaaa

SEQ ID NO: 1263285 - RNA, 19 nt, Homo sapiens
  misc_RNA (1)...(19): siRNA sense strand
ucaagaaguuguugguagu

SEQ ID NO: 1263286 - RNA, 19 nt, Homo sapiens
  misc_RNA (1)...(19): siRNA sense strand
gaaguucuuguuucuguug

SEQ ID NO: 1263287 - RNA, 19 nt, Homo sapiens
  misc_RNA (1)...(19): siRNA sense strand
cucaggaacucuauucuau

SEQ ID NO: 1263288 - RNA, 19 nt, Homo sapiens
  misc_RNA (1)...(19): siRNA sense strand
gaugaucagucaguuuauc

SEQ ID NO: 1263289 - RNA, 19 nt, Homo sapiens
  misc_RNA (1)...(19): siRNA sense strand
ugaaagaagcuaccugcaa

SEQ ID NO: 1263290 - RNA, 19 nt, Homo sapiens
  misc_RNA (1)...(19): siRNA sense strand
uaagaaaguagccauaaag

SEQ ID NO: 1263291 - RNA, 19 nt, Homo sapiens
  misc_RNA (1)...(19): siRNA sense strand
ggggagagcuguuugacaa

SEQ ID NO: 1263292 - RNA, 19 nt, Homo sapiens
  misc_RNA (1)...(19): siRNA sense strand
gaucacaguggcaauggaa

SEQ ID NO: 1263293 - RNA, 19 nt, Homo sapiens
  misc_RNA (1)...(19): siRNA sense strand
gaagacaugaagagaaagu

SEQ ID NO: 1263294 - RNA, 19 nt, Homo sapiens
  misc_RNA (1)...(19): siRNA sense strand
gguauccaccuuucucuga

SEQ ID NO: 1263295 - RNA, 19 nt, Homo sapiens
  misc_RNA (1)...(19): siRNA sense strand
ucagggaaguggguccuaa

SEQ ID NO: 1263296 - RNA, 19 nt, Homo sapiens
  misc_RNA (1)...(19): siRNA sense strand
ccaccuuucucugagcaua

SEQ ID NO: 1263297 - RNA, 19 nt, Homo sapiens
  misc_RNA (1)...(19): siRNA sense strand
augagaaccuuauguggaa

SEQ ID NO: 1263298 - RNA, 19 nt, Homo sapiens
  misc_RNA (1)...(19): siRNA sense strand
gggaauaaacgccugaaag

SEQ ID NO: 1263299 - RNA, 19 nt, Homo sapiens
  misc_RNA (1)...(19): siRNA sense strand
aaacgccguccuuugaaua

SEQ ID NO: 1263300 - RNA, 19 nt, Homo sapiens
  misc_RNA (1)...(19): siRNA sense strand
gugaauauugcuuugauga

SEQ ID NO: 1263301 - RNA, 19 nt, Homo sapiens
  misc_RNA (1)...(19): siRNA sense strand
guagaugaucagucaguuu

SEQ ID NO: 1263302 - RNA, 19 nt, Homo sapiens
  misc_RNA (1)...(19): siRNA sense strand
gcacugucacuaagcagaa

SEQ ID NO: 1263303 - RNA, 19 nt, Homo sapiens
  misc_RNA (1)...(19): siRNA sense strand
acagauaaauaccgaacau

SEQ ID NO: 1263304 - RNA, 19 nt, Homo sapiens
  misc_RNA (1)...(19): siRNA sense strand
aaugacaacuacugguuug

SEQ ID NO: 1263305 - RNA, 19 nt, Homo sapiens
  misc_RNA (1)...(19): siRNA sense strand
cagaagaagccuuaagaca

SEQ ID NO: 1263306 - RNA, 19 nt, Homo sapiens
  misc_RNA (1)...(19): siRNA sense strand
gaggaaaacauguaagaaa

SEQ ID NO: 1263307 - RNA, 19 nt, Homo sapiens
  misc_RNA (1)...(19): siRNA sense strand
gaucagucaguuuauccua

SEQ ID NO: 1263308 - RNA, 19 nt, Homo sapiens
  misc_RNA (1)...(19): siRNA sense strand
aaaaggaaguuugcuauug

SEQ ID NO: 1263309 - RNA, 19 nt, Homo sapiens
  misc_RNA (1)...(19): siRNA sense strand
aauaaacgccugaaagaag

SEQ ID NO: 1263310 - RNA, 19 nt, Homo sapiens
  misc_RNA (1)...(19): siRNA sense strand
ugaaugacaacuacugguu

SEQ ID NO: 1263311 - RNA, 19 nt, Homo sapiens
  misc_RNA (1)...(19): siRNA sense strand
acccguggcuucaggauga

SEQ ID NO: 1263312 - RNA, 19 nt, Homo sapiens
  misc_RNA (1)...(19): siRNA sense strand
cugaaguucuuguuucugu

SEQ ID NO: 1263313 - RNA, 19 nt, Homo sapiens
  misc_RNA (1)...(19): siRNA sense strand
aaucauccuugcaucauca

SEQ ID NO: 1263314 - RNA, 19 nt, Homo sapiens
  misc_RNA (1)...(19): siRNA sense strand
uugcauacauagaagauca

SEQ ID NO: 1263315 - RNA, 19 nt, Homo sapiens
  misc_RNA (1)...(19): siRNA sense strand
agacaugaagagaaaguuu

SEQ ID NO: 1263316 - RNA, 19 nt, Homo sapiens
  misc_RNA (1)...(19): siRNA sense strand
ggacacugagcuccuuaga

SEQ ID NO: 1263317 - RNA, 19 nt, Homo sapiens
  misc_RNA (1)...(19): siRNA sense strand
caguuuauccuaaggcauu

SEQ ID NO: 1263318 - RNA, 19 nt, Homo sapiens
  misc_RNA (1)...(19): siRNA sense strand
caguggcaauggaaccuuu

SEQ ID NO: 1263319 - RNA, 19 nt, Homo sapiens
  misc_RNA (1)...(19): siRNA sense strand
ugugugugcugcuguguug

SEQ ID NO: 1263320 - RNA, 19 nt, Homo sapiens
  misc_RNA (1)...(19): siRNA sense strand
gaguuuaggaguuauucuu

SEQ ID NO: 1263321 - RNA, 19 nt, Homo sapiens
  misc_RNA (1)...(19): siRNA sense strand
gagcuuguagggaaaggaa

SEQ ID NO: 1263322 - RNA, 19 nt, Homo sapiens
  misc_RNA (1)...(19): siRNA sense strand
aaaguagccauaaagauca

SEQ ID NO: 1263323 - RNA, 19 nt, Homo sapiens
  misc_RNA (1)...(19): siRNA sense strand
uugccaaucuugaaugugu

SEQ ID NO: 1263324 - RNA, 19 nt, Homo sapiens
  misc_RNA (1)...(19): siRNA sense strand
uaccgaacauacagcaaga

SEQ ID NO: 1263325 - RNA, 19 nt, Homo sapiens
  misc_RNA (1)...(19): siRNA sense strand
ggaugaagacaugaagaga

SEQ ID NO: 1263326 - RNA, 19 nt, Homo sapiens
  misc_RNA (1)...(19): siRNA sense strand
guggacugcuggaguuuag

SEQ ID NO: 1263327 - RNA, 19 nt, Homo sapiens
  misc_RNA (1)...(19): siRNA sense strand
ccacucaggaacucuauuc

SEQ ID NO: 1263328 - RNA, 19 nt, Homo sapiens
  misc_RNA (1)...(19): siRNA sense strand
aaauugcacugucacuaag

SEQ ID NO: 1263329 - RNA, 19 nt, Homo sapiens
  misc_RNA (1)...(19): siRNA sense strand
ugaaauugcacugucacua

SEQ ID NO: 1263330 - RNA, 19 nt, Homo sapiens
  misc_RNA (1)...(19): siRNA sense strand
acucuuacauugcauacau

SEQ ID NO: 1263331 - RNA, 19 nt, Homo sapiens
  misc_RNA (1)...(19): siRNA sense strand
ggacugcuggaguuuagga

SEQ ID NO: 1263332 - RNA, 19 nt, Homo sapiens
  misc_RNA (1)...(19): siRNA sense strand
caaaagcugugaauauugc

SEQ ID NO: 1263333 - RNA, 19 nt, Homo sapiens
  misc_RNA (1)...(19): siRNA sense strand
ucaggaacucuauucuauu

SEQ ID NO: 1263334 - RNA, 19 nt, Homo sapiens
  misc_RNA (1)...(19): siRNA sense strand
uacgacagaagaagccuua

SEQ ID NO: 1263335 - RNA, 19 nt, Homo sapiens
  misc_RNA (1)...(19): siRNA sense strand
cgccugaaguucuuguuuc

SEQ ID NO: 1263336 - RNA, 19 nt, Homo sapiens
  misc_RNA (1)...(19): siRNA sense strand
uguaagaaaguagccauaa

SEQ ID NO: 1263337 - RNA, 19 nt, Homo sapiens
  misc_RNA (1)...(19): siRNA sense strand
gaaaacgccguccuuugaa

SEQ ID NO: 1263338 - RNA, 19 nt, Homo sapiens
  misc_RNA (1)...(19): siRNA sense strand
uugaaugugugaaugacaa

SEQ ID NO: 1263339 - RNA, 19 nt, Homo sapiens
  misc_RNA (1)...(19): siRNA sense strand
cagauaaauaccgaacaua

SEQ ID NO: 1263340 - RNA, 19 nt, Homo sapiens
  misc_RNA (1)...(19): siRNA sense strand
gaaccacugcugaaaagaa

SEQ ID NO: 1263341 - RNA, 19 nt, Homo sapiens
  misc_RNA (1)...(19): siRNA sense strand
gauccaaaggcacguuuua

SEQ ID NO: 1263342 - RNA, 19 nt, Homo sapiens
  misc_RNA (1)...(19): siRNA sense strand
ugaaguucuuguuucuguu

SEQ ID NO: 1263343 - RNA, 19 nt, Homo sapiens
  misc_RNA (1)...(19): siRNA sense strand
cuaaaucauccuugcauca

SEQ ID NO: 1263344 - RNA, 19 nt, Homo sapiens
  misc_RNA (1)...(19): siRNA sense strand
aagaaaguagccauaaaga

SEQ ID NO: 1263345 - RNA, 19 nt, Homo sapiens
  misc_RNA (1)...(19): siRNA sense strand
ucagucaguuuauccuaag

SEQ ID NO: 1263346 - RNA, 19 nt, Homo sapiens
  misc_RNA (1)...(19): siRNA sense strand
auacauagaagaucacagu

SEQ ID NO: 1263347 - RNA, 19 nt, Homo sapiens
  misc_RNA (1)...(19): siRNA sense strand
gcgccugaaguucuuguuu

SEQ ID NO: 1263348 - RNA, 19 nt, Homo sapiens
  misc_RNA (1)...(19): siRNA sense strand
acaaagcgcccagcugugu

SEQ ID NO: 1263349 - RNA, 19 nt, Homo sapiens
  misc_RNA (1)...(19): siRNA sense strand
gcccagccuucuacuaguc

SEQ ID NO: 1263350 - RNA, 19 nt, Homo sapiens
  misc_RNA (1)...(19): siRNA sense strand
gaaauugcacugucacuaa

SEQ ID NO: 1263351 - RNA, 19 nt, Homo sapiens
  misc_RNA (1)...(19): siRNA sense strand
gaaaguagccauaaagauc

SEQ ID NO: 1263352 - RNA, 19 nt, Homo sapiens
  misc_RNA (1)...(19): siRNA sense strand
guaagaaaguagccauaaa

SEQ ID NO: 1263353 - RNA, 19 nt, Homo sapiens
  misc_RNA (1)...(19): siRNA sense strand
ggaauaaacgccugaaaga

SEQ ID NO: 1263354 - RNA, 19 nt, Homo sapiens
  misc_RNA (1)...(19): siRNA sense strand
acacugagcuccuuagaga

SEQ ID NO: 1263355 - RNA, 19 nt, Homo sapiens
  misc_RNA (1)...(19): siRNA sense strand
gaacauacagcaagaaaca

SEQ ID NO: 1263356 - RNA, 19 nt, Homo sapiens
  misc_RNA (1)...(19): siRNA sense strand
gcauaggacucaaguguca

SEQ ID NO: 1263357 - RNA, 19 nt, Homo sapiens
  misc_RNA (1)...(19): siRNA sense strand
gaaguuugcuauugguuca

SEQ ID NO: 1263358 - RNA, 19 nt, Homo sapiens
  misc_RNA (1)...(19): siRNA sense strand
ccauaaagaucaucagcaa

SEQ ID NO: 1263359 - RNA, 19 nt, Homo sapiens
  misc_RNA (1)...(19): siRNA sense strand
caggaacucuauucuauuc

SEQ ID NO: 1263360 - RNA, 19 nt, Homo sapiens
  misc_RNA (1)...(19): siRNA sense strand
gaauaaacgccugaaagaa

SEQ ID NO: 1263361 - RNA, 19 nt, Homo sapiens
  misc_RNA (1)...(19): siRNA sense strand
caauggaaccuuuguaaau

SEQ ID NO: 1263362 - RNA, 19 nt, Homo sapiens
  misc_RNA (1)...(19): siRNA sense strand
gacaaaagcugugaauauu

SEQ ID NO: 1263363 - RNA, 19 nt, Homo sapiens
  misc_RNA (1)...(19): siRNA sense strand
gcaauggaaccuuuguaaa

SEQ ID NO: 1263364 - RNA, 19 nt, Homo sapiens
  misc_RNA (1)...(19): siRNA sense strand
uagaugaucagucaguuua

SEQ ID NO: 1263365 - RNA, 19 nt, Homo sapiens
  misc_RNA (1)...(19): siRNA sense strand
gagcauaggacucaagugu

SEQ ID NO: 1263366 - RNA, 19 nt, Homo sapiens
  misc_RNA (1)...(19): siRNA sense strand
ucacuaagcagaaauaaag

SEQ ID NO: 1263367 - RNA, 19 nt, Homo sapiens
  misc_RNA (1)...(19): siRNA sense strand
gaaugacaacuacugguuu

SEQ ID NO: 1263368 - RNA, 19 nt, Homo sapiens
  misc_RNA (1)...(19): siRNA sense strand
gaauauugcuuugaugaac

SEQ ID NO: 1263369 - RNA, 19 nt, Homo sapiens
  misc_RNA (1)...(19): siRNA sense strand
ggacaaaagcugugaauau

SEQ ID NO: 1263370 - RNA, 19 nt, Homo sapiens
  misc_RNA (1)...(19): siRNA sense strand
ccaagaaccugaggaccaa

SEQ ID NO: 1263371 - RNA, 19 nt, Homo sapiens
  misc_RNA (1)...(19): siRNA sense strand
ggaaaacgccguccuuuga

SEQ ID NO: 1263372 - RNA, 19 nt, Homo sapiens
  misc_RNA (1)...(19): siRNA sense strand
uucaagaucuucugucuga

SEQ ID NO: 1263373 - RNA, 19 nt, Homo sapiens
  misc_RNA (1)...(19): siRNA sense strand
agacccagcucucaauguu

SEQ ID NO: 1263374 - RNA, 19 nt, Homo sapiens
  misc_RNA (1)...(19): siRNA sense strand
gacagaagaagccuuaaga

SEQ ID NO: 1263375 - RNA, 19 nt, Homo sapiens
  misc_RNA (1)...(19): siRNA sense strand
agaaagcucuggaccuugu

SEQ ID NO: 1263376 - RNA, 19 nt, Homo sapiens
  misc_RNA (1)...(19): siRNA sense strand
gaugaagacaugaagagaa

SEQ ID NO: 1263377 - RNA, 19 nt, Homo sapiens
  misc_RNA (1)...(19): siRNA sense strand
gaucuucugucugaggaaa

SEQ ID NO: 1263378 - RNA, 19 nt, Homo sapiens
  misc_RNA (1)...(19): siRNA sense strand
gcuguggacugcuggaguu

SEQ ID NO: 1263379 - RNA, 19 nt, Homo sapiens
  misc_RNA (1)...(19): siRNA sense strand
gauaaauaccgaacauaca

SEQ ID NO: 1263380 - RNA, 19 nt, Homo sapiens
  misc_RNA (1)...(19): siRNA sense strand
aaaggaaguuugcuauugg

SEQ ID NO: 1263381 - RNA, 19 nt, Homo sapiens
  misc_RNA (1)...(19): siRNA sense strand
ccuaaggcauuaagagaug

SEQ ID NO: 1263382 - RNA, 19 nt, Homo sapiens
  misc_RNA (1)...(19): siRNA sense strand
ggcaauggaaccuuuguaa

SEQ ID NO: 1263383 - RNA, 19 nt, Homo sapiens
  misc_RNA (1)...(19): siRNA sense strand
gaagaucacaguggcaaug

SEQ ID NO: 1263384 - RNA, 19 nt, Homo sapiens
  misc_RNA (1)...(19): siRNA sense strand
augaagacaugaagagaaa

SEQ ID NO: 1263385 - RNA, 19 nt, Homo sapiens
  misc_RNA (1)...(19): siRNA sense strand
ucaagaaguuguugguagu

SEQ ID NO: 1263386 - RNA, 19 nt, Homo sapiens
  misc_RNA (1)...(19): siRNA sense strand
gaaguucuuguuucuguug

SEQ ID NO: 1263387 - RNA, 19 nt, Homo sapiens
  misc_RNA (1)...(19): siRNA sense strand
cucaggaacucuauucuau

SEQ ID NO: 1263388 - RNA, 19 nt, Homo sapiens
  misc_RNA (1)...(19): siRNA sense strand
gaugaucagucaguuuauc

SEQ ID NO: 1263389 - RNA, 19 nt, Homo sapiens
  misc_RNA (1)...(19): siRNA sense strand
ugaaagaagcuaccugcaa

SEQ ID NO: 1263390 - RNA, 19 nt, Homo sapiens
  misc_RNA (1)...(19): siRNA sense strand
uaagaaaguagccauaaag

SEQ ID NO: 1263391 - RNA, 19 nt, Homo sapiens
  misc_RNA (1)...(19): siRNA sense strand
ggggagagcuguuugacaa

SEQ ID NO: 1263392 - RNA, 19 nt, Homo sapiens
  misc_RNA (1)...(19): siRNA sense strand
gaucacaguggcaauggaa

SEQ ID NO: 1263393 - RNA, 19 nt, Homo sapiens
  misc_RNA (1)...(19): siRNA sense strand
gaagacaugaagagaaagu

SEQ ID NO: 1263394 - RNA, 19 nt, Homo sapiens
  misc_RNA (1)...(19): siRNA sense strand
gguauccaccuuucucuga

SEQ ID NO: 1263395 - RNA, 19 nt, Homo sapiens
  misc_RNA (1)...(19): siRNA sense strand
ucagggaaguggguccuaa

SEQ ID NO: 1263396 - RNA, 19 nt, Homo sapiens
  misc_RNA (1)...(19): siRNA sense strand
ccaccuuucucugagcaua

SEQ ID NO: 1263397 - RNA, 19 nt, Homo sapiens
  misc_RNA (1)...(19): siRNA sense strand
augagaaccuuauguggaa

SEQ ID NO: 1263398 - RNA, 19 nt, Homo sapiens
  misc_RNA (1)...(19): siRNA sense strand
gggaauaaacgccugaaag

SEQ ID NO: 1263399 - RNA, 19 nt, Homo sapiens
  misc_RNA (1)...(19): siRNA sense strand
aaacgccguccuuugaaua

SEQ ID NO: 1263400 - RNA, 19 nt, Homo sapiens
  misc_RNA (1)...(19): siRNA sense strand
gugaauauugcuuugauga

SEQ ID NO: 1263401 - RNA, 19 nt, Homo sapiens
  misc_RNA (1)...(19): siRNA sense strand
guagaugaucagucaguuu

SEQ ID NO: 1263402 - RNA, 19 nt, Homo sapiens
  misc_RNA (1)...(19): siRNA sense strand
gcacugucacuaagcagaa

SEQ ID NO: 1263403 - RNA, 19 nt, Homo sapiens
  misc_RNA (1)...(19): siRNA sense strand
acagauaaauaccgaacau

SEQ ID NO: 1263404 - RNA, 19 nt, Homo sapiens
  misc_RNA (1)...(19): siRNA sense strand
aaugacaacuacugguuug

SEQ ID NO: 1263405 - RNA, 19 nt, Homo sapiens
  misc_RNA (1)...(19): siRNA sense strand
cagaagaagccuuaagaca

SEQ ID NO: 1263406 - RNA, 19 nt, Homo sapiens
  misc_RNA (1)...(19): siRNA sense strand
gaggaaaacauguaagaaa

SEQ ID NO: 1263407 - RNA, 19 nt, Homo sapiens
  misc_RNA (1)...(19): siRNA sense strand
gaucagucaguuuauccua

SEQ ID NO: 1263408 - RNA, 19 nt, Homo sapiens
  misc_RNA (1)...(19): siRNA sense strand
aaaaggaaguuugcuauug

SEQ ID NO: 1263409 - RNA, 19 nt, Homo sapiens
  misc_RNA (1)...(19): siRNA sense strand
aauaaacgccugaaagaag

SEQ ID NO: 1263410 - RNA, 19 nt, Homo sapiens
  misc_RNA (1)...(19): siRNA sense strand
ugaaugacaacuacugguu

SEQ ID NO: 1263411 - RNA, 19 nt, Homo sapiens
  misc_RNA (1)...(19): siRNA sense strand
acccguggcuucaggauga

SEQ ID NO: 1263412 - RNA, 19 nt, Homo sapiens
  misc_RNA (1)...(19): siRNA sense strand
cugaaguucuuguuucugu

SEQ ID NO: 1263413 - RNA, 19 nt, Homo sapiens
  misc_RNA (1)...(19): siRNA sense strand
aaucauccuugcaucauca

SEQ ID NO: 1263414 - RNA, 19 nt, Homo sapiens
  misc_RNA (1)...(19): siRNA sense strand
uugcauacauagaagauca

SEQ ID NO: 1263415 - RNA, 19 nt, Homo sapiens
  misc_RNA (1)...(19): siRNA sense strand
agacaugaagagaaaguuu

SEQ ID NO: 1263416 - RNA, 19 nt, Homo sapiens
  misc_RNA (1)...(19): siRNA sense strand
ggacacugagcuccuuaga

SEQ ID NO: 1263417 - RNA, 19 nt, Homo sapiens
  misc_RNA (1)...(19): siRNA sense strand
caguuuauccuaaggcauu

SEQ ID NO: 1263418 - RNA, 19 nt, Homo sapiens
  misc_RNA (1)...(19): siRNA sense strand
caguggcaauggaaccuuu

SEQ ID NO: 1263419 - RNA, 19 nt, Homo sapiens
  misc_RNA (1)...(19): siRNA sense strand
ugugugugcugcuguguug

SEQ ID NO: 1263420 - RNA, 19 nt, Homo sapiens
  misc_RNA (1)...(19): siRNA sense strand
gaguuuaggaguuauucuu

SEQ ID NO: 1263421 - RNA, 19 nt, Homo sapiens
  misc_RNA (1)...(19): siRNA sense strand
gagcuuguagggaaaggaa

SEQ ID NO: 1263422 - RNA, 19 nt, Homo sapiens
  misc_RNA (1)...(19): siRNA sense strand
aaaguagccauaaagauca

SEQ ID NO: 1263423 - RNA, 19 nt, Homo sapiens
  misc_RNA (1)...(19): siRNA sense strand
uugccaaucuugaaugugu

SEQ ID NO: 1263424 - RNA, 19 nt, Homo sapiens
  misc_RNA (1)...(19): siRNA sense strand
uaccgaacauacagcaaga

SEQ ID NO: 1263425 - RNA, 19 nt, Homo sapiens
  misc_RNA (1)...(19): siRNA sense strand
ggaugaagacaugaagaga

SEQ ID NO: 1263426 - RNA, 19 nt, Homo sapiens
  misc_RNA (1)...(19): siRNA sense strand
guggacugcuggaguuuag

SEQ ID NO: 1263427 - RNA, 19 nt, Homo sapiens
  misc_RNA (1)...(19): siRNA sense strand
ccacucaggaacucuauuc

SEQ ID NO: 1263428 - RNA, 19 nt, Homo sapiens
  misc_RNA (1)...(19): siRNA sense strand
aaauugcacugucacuaag

SEQ ID NO: 1263429 - RNA, 19 nt, Homo sapiens
  misc_RNA (1)...(19): siRNA sense strand
ugaaauugcacugucacua

SEQ ID NO: 1263430 - RNA, 19 nt, Homo sapiens
  misc_RNA (1)...(19): siRNA sense strand
acucuuacauugcauacau

SEQ ID NO: 1263431 - RNA, 19 nt, Homo sapiens
  misc_RNA (1)...(19): siRNA sense strand
ggacugcuggaguuuagga

SEQ ID NO: 1263432 - RNA, 19 nt, Homo sapiens
  misc_RNA (1)...(19): siRNA sense strand
caaaagcugugaauauugc

SEQ ID NO: 1263433 - RNA, 19 nt, Homo sapiens
  misc_RNA (1)...(19): siRNA sense strand
ucaggaacucuauucuauu

SEQ ID NO: 1263434 - RNA, 19 nt, Homo sapiens
  misc_RNA (1)...(19): siRNA sense strand
uacgacagaagaagccuua

SEQ ID NO: 1263435 - RNA, 19 nt, Homo sapiens
  misc_RNA (1)...(19): siRNA sense strand
cgccugaaguucuuguuuc

SEQ ID NO: 1263436 - RNA, 19 nt, Homo sapiens
  misc_RNA (1)...(19): siRNA sense strand
uguaagaaaguagccauaa

SEQ ID NO: 1263437 - RNA, 19 nt, Homo sapiens
  misc_RNA (1)...(19): siRNA sense strand
gaaaacgccguccuuugaa

SEQ ID NO: 1263438 - RNA, 19 nt, Homo sapiens
  misc_RNA (1)...(19): siRNA sense strand
uugaaugugugaaugacaa

SEQ ID NO: 1263439 - RNA, 19 nt, Homo sapiens
  misc_RNA (1)...(19): siRNA sense strand
cagauaaauaccgaacaua

SEQ ID NO: 1263440 - RNA, 19 nt, Homo sapiens
  misc_RNA (1)...(19): siRNA sense strand
gaaccacugcugaaaagaa

SEQ ID NO: 1263441 - RNA, 19 nt, Homo sapiens
  misc_RNA (1)...(19): siRNA sense strand
gauccaaaggcacguuuua

SEQ ID NO: 1263442 - RNA, 19 nt, Homo sapiens
  misc_RNA (1)...(19): siRNA sense strand
ugaaguucuuguuucuguu

SEQ ID NO: 1263443 - RNA, 19 nt, Homo sapiens
  misc_RNA (1)...(19): siRNA sense strand
cuaaaucauccuugcauca

SEQ ID NO: 1263444 - RNA, 19 nt, Homo sapiens
  misc_RNA (1)...(19): siRNA sense strand
aagaaaguagccauaaaga

SEQ ID NO: 1263445 - RNA, 19 nt, Homo sapiens
  misc_RNA (1)...(19): siRNA sense strand
ucagucaguuuauccuaag

SEQ ID NO: 1263446 - RNA, 19 nt, Homo sapiens
  misc_RNA (1)...(19): siRNA sense strand
auacauagaagaucacagu

SEQ ID NO: 1263447 - RNA, 19 nt, Homo sapiens
  misc_RNA (1)...(19): siRNA sense strand
gcgccugaaguucuuguuu

SEQ ID NO: 1263448 - RNA, 19 nt, Homo sapiens
  misc_RNA (1)...(19): siRNA sense strand
acaaagcgcccagcugugu

SEQ ID NO: 1263449 - RNA, 19 nt, Homo sapiens
  misc_RNA (1)...(19): siRNA sense strand
gcccagccuucuacuaguc

SEQ ID NO: 1263450 - RNA, 19 nt, Homo sapiens
  misc_RNA (1)...(19): siRNA sense strand
ggagagagcacgauuuauu

SEQ ID NO: 1263451 - RNA, 19 nt, Homo sapiens
  misc_RNA (1)...(19): siRNA sense strand
agagaaacauguccauaua

SEQ ID NO: 1263452 - RNA, 19 nt, Homo sapiens
  misc_RNA (1)...(19): siRNA sense strand
cagaugcacuuuauuugua

SEQ ID NO: 1263453 - RNA, 19 nt, Homo sapiens
  misc_RNA (1)...(19): siRNA sense strand
ggacuuacgaguuugguua

SEQ ID NO: 1263454 - RNA, 19 nt, Homo sapiens
  misc_RNA (1)...(19): siRNA sense strand
aaacagauaucaggauuug

SEQ ID NO: 1263455 - RNA, 19 nt, Homo sapiens
  misc_RNA (1)...(19): siRNA sense strand
cuauggagcucauugguaa

SEQ ID NO: 1263456 - RNA, 19 nt, Homo sapiens
  misc_RNA (1)...(19): siRNA sense strand
aaacacaccuuuagugaag

SEQ ID NO: 1263457 - RNA, 19 nt, Homo sapiens
  misc_RNA (1)...(19): siRNA sense strand
gaacuuaaaggaucaguag

SEQ ID NO: 1263458 - RNA, 19 nt, Homo sapiens
  misc_RNA (1)...(19): siRNA sense strand
gaaaacagauaucaggauu

SEQ ID NO: 1263459 - RNA, 19 nt, Homo sapiens
  misc_RNA (1)...(19): siRNA sense strand
uaaaggaucaguagcaauu

SEQ ID NO: 1263460 - RNA, 19 nt, Homo sapiens
  misc_RNA (1)...(19): siRNA sense strand
aaaugggacuuacgaguuu

SEQ ID NO: 1263461 - RNA, 19 nt, Homo sapiens
  misc_RNA (1)...(19): siRNA sense strand
guuaucagaugcacuuuau

SEQ ID NO: 1263462 - RNA, 19 nt, Homo sapiens
  misc_RNA (1)...(19): siRNA sense strand
ugagauuggugaacgagua

SEQ ID NO: 1263463 - RNA, 19 nt, Homo sapiens
  misc_RNA (1)...(19): siRNA sense strand
gugaacgaguagauuauaa

SEQ ID NO: 1263464 - RNA, 19 nt, Homo sapiens
  misc_RNA (1)...(19): siRNA sense strand
gagagagcacgauuuauug

SEQ ID NO: 1263465 - RNA, 19 nt, Homo sapiens
  misc_RNA (1)...(19): siRNA sense strand
caaaugggacuuacgaguu

SEQ ID NO: 1263466 - RNA, 19 nt, Homo sapiens
  misc_RNA (1)...(19): siRNA sense strand
ggucauugcugugauuguu

SEQ ID NO: 1263467 - RNA, 19 nt, Homo sapiens
  misc_RNA (1)...(19): siRNA sense strand
ccagauccauuuucacuua

SEQ ID NO: 1263468 - RNA, 19 nt, Homo sapiens
  misc_RNA (1)...(19): siRNA sense strand
gaaggaauacuugacaguu

SEQ ID NO: 1263469 - RNA, 19 nt, Homo sapiens
  misc_RNA (1)...(19): siRNA sense strand
aaggaauacuugacaguuu

SEQ ID NO: 1263470 - RNA, 19 nt, Homo sapiens
  misc_RNA (1)...(19): siRNA sense strand
ucagaugacgccuguuaua

SEQ ID NO: 1263471 - RNA, 19 nt, Homo sapiens
  misc_RNA (1)...(19): siRNA sense strand
gaaaacacaccuuuaguga

SEQ ID NO: 1263472 - RNA, 19 nt, Homo sapiens
  misc_RNA (1)...(19): siRNA sense strand
gaugacgccuguuauagag

SEQ ID NO: 1263473 - RNA, 19 nt, Homo sapiens
  misc_RNA (1)...(19): siRNA sense strand
gagaaacauguccauauau

SEQ ID NO: 1263474 - RNA, 19 nt, Homo sapiens
  misc_RNA (1)...(19): siRNA sense strand
acgaguagauuauaagugu

SEQ ID NO: 1263475 - RNA, 19 nt, Homo sapiens
  misc_RNA (1)...(19): siRNA sense strand
cuacaaagcaacaguuaug

SEQ ID NO: 1263476 - RNA, 19 nt, Homo sapiens
  misc_RNA (1)...(19): siRNA sense strand
ccaccaacauuugaagcua

SEQ ID NO: 1263477 - RNA, 19 nt, Homo sapiens
  misc_RNA (1)...(19): siRNA sense strand
uauacgggauccuuuaaau

SEQ ID NO: 1263478 - RNA, 19 nt, Homo sapiens
  misc_RNA (1)...(19): siRNA sense strand
cgaguuugguuaucagaug

SEQ ID NO: 1263479 - RNA, 19 nt, Homo sapiens
  misc_RNA (1)...(19): siRNA sense strand
gaacgaguagauuauaagu

SEQ ID NO: 1263480 - RNA, 19 nt, Homo sapiens
  misc_RNA (1)...(19): siRNA sense strand
gugaggagccaccaacauu

SEQ ID NO: 1263481 - RNA, 19 nt, Homo sapiens
  misc_RNA (1)...(19): siRNA sense strand
gauggcagcgacacaauug

SEQ ID NO: 1263482 - RNA, 19 nt, Homo sapiens
  misc_RNA (1)...(19): siRNA sense strand
gcuauggagcucauuggua

SEQ ID NO: 1263483 - RNA, 19 nt, Homo sapiens
  misc_RNA (1)...(19): siRNA sense strand
gaggagccaccaacauuug

SEQ ID NO: 1263484 - RNA, 19 nt, Homo sapiens
  misc_RNA (1)...(19): siRNA sense strand
acacaccuuuagugaagua

SEQ ID NO: 1263485 - RNA, 19 nt, Homo sapiens
  misc_RNA (1)...(19): siRNA sense strand
ucucagaugacgccuguua

SEQ ID NO: 1263486 - RNA, 19 nt, Homo sapiens
  misc_RNA (1)...(19): siRNA sense strand
uagagaaacauguccauau

SEQ ID NO: 1263487 - RNA, 19 nt, Homo sapiens
  misc_RNA (1)...(19): siRNA sense strand
guuccaaagugucuuaaag

SEQ ID NO: 1263488 - RNA, 19 nt, Homo sapiens
  misc_RNA (1)...(19): siRNA sense strand
ggugaacgaguagauuaua

SEQ ID NO: 1263489 - RNA, 19 nt, Homo sapiens
  misc_RNA (1)...(19): siRNA sense strand
gaaguagaaguauuugagu

SEQ ID NO: 1263490 - RNA, 19 nt, Homo sapiens
  misc_RNA (1)...(19): siRNA sense strand
gaaacauguccauauauac

SEQ ID NO: 1263491 - RNA, 19 nt, Homo sapiens
  misc_RNA (1)...(19): siRNA sense strand
ugacgccuguuauagagaa

SEQ ID NO: 1263492 - RNA, 19 nt, Homo sapiens
  misc_RNA (1)...(19): siRNA sense strand
cgaguagauuauaagugua

SEQ ID NO: 1263493 - RNA, 19 nt, Homo sapiens
  misc_RNA (1)...(19): siRNA sense strand
gcacuuuauuuguaaugag

SEQ ID NO: 1263494 - RNA, 19 nt, Homo sapiens
  misc_RNA (1)...(19): siRNA sense strand
guagaaguauuugaguauc

SEQ ID NO: 1263495 - RNA, 19 nt, Homo sapiens
  misc_RNA (1)...(19): siRNA sense strand
guauuugaguaucuugaug

SEQ ID NO: 1263496 - RNA, 19 nt, Homo sapiens
  misc_RNA (1)...(19): siRNA sense strand
aggaauacuugacaguuug

SEQ ID NO: 1263497 - RNA, 19 nt, Homo sapiens
  misc_RNA (1)...(19): siRNA sense strand
ccaaaacccuacuaugaga

SEQ ID NO: 1263498 - RNA, 19 nt, Homo sapiens
  misc_RNA (1)...(19): siRNA sense strand
aguguaaaguggucaaaug

SEQ ID NO: 1263499 - RNA, 19 nt, Homo sapiens
  misc_RNA (1)...(19): siRNA sense strand
ccacccauacuauuuguga

SEQ ID NO: 1263500 - RNA, 19 nt, Homo sapiens
  misc_RNA (1)...(19): siRNA sense strand
caccaacauuugaagcuau

SEQ ID NO: 1263501 - RNA, 19 nt, Homo sapiens
  misc_RNA (1)...(19): siRNA sense strand
uuggagagagcacgauuua

SEQ ID NO: 1263502 - RNA, 19 nt, Homo sapiens
  misc_RNA (1)...(19): siRNA sense strand
gguuaucagaugcacuuua

SEQ ID NO: 1263503 - RNA, 19 nt, Homo sapiens
  misc_RNA (1)...(19): siRNA sense strand
ugaggagccaccaacauuu

SEQ ID NO: 1263504 - RNA, 19 nt, Homo sapiens
  misc_RNA (1)...(19): siRNA sense strand
ggaaggaauacuugacagu

SEQ ID NO: 1263505 - RNA, 19 nt, Homo sapiens
  misc_RNA (1)...(19): siRNA sense strand
gaggaaggaauacuugaca

SEQ ID NO: 1263506 - RNA, 19 nt, Homo sapiens
  misc_RNA (1)...(19): siRNA sense strand
ccaguuccaaagugucuua

SEQ ID NO: 1263507 - RNA, 19 nt, Homo sapiens
  misc_RNA (1)...(19): siRNA sense strand
ugaguaucuugaugcagua

SEQ ID NO: 1263508 - RNA, 19 nt, Homo sapiens
  misc_RNA (1)...(19): siRNA sense strand
caccuuuagugaaguagaa

SEQ ID NO: 1263509 - RNA, 19 nt, Homo sapiens
  misc_RNA (1)...(19): siRNA sense strand
acagauaucaggauuugga

SEQ ID NO: 1263510 - RNA, 19 nt, Homo sapiens
  misc_RNA (1)...(19): siRNA sense strand
ucauugcugugauuguuau

SEQ ID NO: 1263511 - RNA, 19 nt, Homo sapiens
  misc_RNA (1)...(19): siRNA sense strand
ucagaugcacuuuauuugu

SEQ ID NO: 1263512 - RNA, 19 nt, Homo sapiens
  misc_RNA (1)...(19): siRNA sense strand
gugcugcuccagaguguaa

SEQ ID NO: 1263513 - RNA, 19 nt, Homo sapiens
  misc_RNA (1)...(19): siRNA sense strand
ggaaaacacaccuuuagug

SEQ ID NO: 1263514 - RNA, 19 nt, Homo sapiens
  misc_RNA (1)...(19): siRNA sense strand
aaggaucaguagcaauuug

SEQ ID NO: 1263515 - RNA, 19 nt, Homo sapiens
  misc_RNA (1)...(19): siRNA sense strand
uauauacgggauccuuuaa

SEQ ID NO: 1263516 - RNA, 19 nt, Homo sapiens
  misc_RNA (1)...(19): siRNA sense strand
ugaaguagaaguauuugag

SEQ ID NO: 1263517 - RNA, 19 nt, Homo sapiens
  misc_RNA (1)...(19): siRNA sense strand
cuugacaguuuggauguuu

SEQ ID NO: 1263518 - RNA, 19 nt, Homo sapiens
  misc_RNA (1)...(19): siRNA sense strand
cauauauacgggauccuuu

SEQ ID NO: 1263519 - RNA, 19 nt, Homo sapiens
  misc_RNA (1)...(19): siRNA sense strand
auauauacgggauccuuua

SEQ ID NO: 1263520 - RNA, 19 nt, Homo sapiens
  misc_RNA (1)...(19): siRNA sense strand
cuuaaaggaucaguagcaa

SEQ ID NO: 1263521 - RNA, 19 nt, Homo sapiens
  misc_RNA (1)...(19): siRNA sense strand
uaaaccugaggaaggaaua

SEQ ID NO: 1263522 - RNA, 19 nt, Homo sapiens
  misc_RNA (1)...(19): siRNA sense strand
agaugacgccuguuauaga

SEQ ID NO: 1263523 - RNA, 19 nt, Homo sapiens
  misc_RNA (1)...(19): siRNA sense strand
ugugauuguuauugccaua

SEQ ID NO: 1263524 - RNA, 19 nt, Homo sapiens
  misc_RNA (1)...(19): siRNA sense strand
gagagcacgauuuauugug

SEQ ID NO: 1263525 - RNA, 19 nt, Homo sapiens
  misc_RNA (1)...(19): siRNA sense strand
gaaguauuugaguaucuug

SEQ ID NO: 1263526 - RNA, 19 nt, Homo sapiens
  misc_RNA (1)...(19): siRNA sense strand
ggcuaccugucucagauga

SEQ ID NO: 1263527 - RNA, 19 nt, Homo sapiens
  misc_RNA (1)...(19): siRNA sense strand
gauaucaggauuuggaaaa

SEQ ID NO: 1263528 - RNA, 19 nt, Homo sapiens
  misc_RNA (1)...(19): siRNA sense strand
ccucuugccacccauacua

SEQ ID NO: 1263529 - RNA, 19 nt, Homo sapiens
  misc_RNA (1)...(19): siRNA sense strand
ccaugguguugcugcugua

SEQ ID NO: 1263530 - RNA, 19 nt, Homo sapiens
  misc_RNA (1)...(19): siRNA sense strand
cagaugacgccuguuauag

SEQ ID NO: 1263531 - RNA, 19 nt, Homo sapiens
  misc_RNA (1)...(19): siRNA sense strand
uuggugaacgaguagauua

SEQ ID NO: 1263532 - RNA, 19 nt, Homo sapiens
  misc_RNA (1)...(19): siRNA sense strand
gucauugcugugauuguua

SEQ ID NO: 1263533 - RNA, 19 nt, Homo sapiens
  misc_RNA (1)...(19): siRNA sense strand
ggagccaccaacauuugaa

SEQ ID NO: 1263534 - RNA, 19 nt, Homo sapiens
  misc_RNA (1)...(19): siRNA sense strand
gcgcuuuccuggguugcuu

SEQ ID NO: 1263535 - RNA, 19 nt, Homo sapiens
  misc_RNA (1)...(19): siRNA sense strand
uacuacaaagcaacaguua

SEQ ID NO: 1263536 - RNA, 19 nt, Homo sapiens
  misc_RNA (1)...(19): siRNA sense strand
cuugaugcaguaacuuaua

SEQ ID NO: 1263537 - RNA, 19 nt, Homo sapiens
  misc_RNA (1)...(19): siRNA sense strand
aaacauguccauauauacg

SEQ ID NO: 1263538 - RNA, 19 nt, Homo sapiens
  misc_RNA (1)...(19): siRNA sense strand
guguaaaguggucaaaugu

SEQ ID NO: 1263539 - RNA, 19 nt, Homo sapiens
  misc_RNA (1)...(19): siRNA sense strand
cuuacgaguuugguuauca

SEQ ID NO: 1263540 - RNA, 19 nt, Homo sapiens
  misc_RNA (1)...(19): siRNA sense strand
uacgggauccuuuaaaugg

SEQ ID NO: 1263541 - RNA, 19 nt, Homo sapiens
  misc_RNA (1)...(19): siRNA sense strand
aaccaaaacccuacuauga

SEQ ID NO: 1263542 - RNA, 19 nt, Homo sapiens
  misc_RNA (1)...(19): siRNA sense strand
cccaauaugugaaaagguu

SEQ ID NO: 1263543 - RNA, 19 nt, Homo sapiens
  misc_RNA (1)...(19): siRNA sense strand
cgauggcagcgacacaauu

SEQ ID NO: 1263544 - RNA, 19 nt, Homo sapiens
  misc_RNA (1)...(19): siRNA sense strand
gauccauuuucacuuauug

SEQ ID NO: 1263545 - RNA, 19 nt, Homo sapiens
  misc_RNA (1)...(19): siRNA sense strand
uugaugcaguaacuuauag

SEQ ID NO: 1263546 - RNA, 19 nt, Homo sapiens
  misc_RNA (1)...(19): siRNA sense strand
guaucuugaugcaguaacu

SEQ ID NO: 1263547 - RNA, 19 nt, Homo sapiens
  misc_RNA (1)...(19): siRNA sense strand
caacauuugaagcuaugga

SEQ ID NO: 1263548 - RNA, 19 nt, Homo sapiens
  misc_RNA (1)...(19): siRNA sense strand
gagauuggugaacgaguag

SEQ ID NO: 1263549 - RNA, 19 nt, Homo sapiens
  misc_RNA (1)...(19): siRNA sense strand
ggagagagcacgauuuauu

SEQ ID NO: 1263550 - RNA, 19 nt, Homo sapiens
  misc_RNA (1)...(19): siRNA sense strand
agagaaacauguccauaua

SEQ ID NO: 1263551 - RNA, 19 nt, Homo sapiens
  misc_RNA (1)...(19): siRNA sense strand
cagaugcacuuuauuugua

SEQ ID NO: 1263552 - RNA, 19 nt, Homo sapiens
  misc_RNA (1)...(19): siRNA sense strand
ggacuuacgaguuugguua

SEQ ID NO: 1263553 - RNA, 19 nt, Homo sapiens
  misc_RNA (1)...(19): siRNA sense strand
aaacagauaucaggauuug

SEQ ID NO: 1263554 - RNA, 19 nt, Homo sapiens
  misc_RNA (1)...(19): siRNA sense strand
cuauggagcucauugguaa

SEQ ID NO: 1263555 - RNA, 19 nt, Homo sapiens
  misc_RNA (1)...(19): siRNA sense strand
aaacacaccuuuagugaag

SEQ ID NO: 1263556 - RNA, 19 nt, Homo sapiens
  misc_RNA (1)...(19): siRNA sense strand
gaacuuaaaggaucaguag

SEQ ID NO: 1263557 - RNA, 19 nt, Homo sapiens
  misc_RNA (1)...(19): siRNA sense strand
gaaaacagauaucaggauu

SEQ ID NO: 1263558 - RNA, 19 nt, Homo sapiens
  misc_RNA (1)...(19): siRNA sense strand
uaaaggaucaguagcaauu

SEQ ID NO: 1263559 - RNA, 19 nt, Homo sapiens
  misc_RNA (1)...(19): siRNA sense strand
aaaugggacuuacgaguuu

SEQ ID NO: 1263560 - RNA, 19 nt, Homo sapiens
  misc_RNA (1)...(19): siRNA sense strand
guuaucagaugcacuuuau

SEQ ID NO: 1263561 - RNA, 19 nt, Homo sapiens
  misc_RNA (1)...(19): siRNA sense strand
gagcugaauaugccacuua

SEQ ID NO: 1263562 - RNA, 19 nt, Homo sapiens
  misc_RNA (1)...(19): siRNA sense strand
ugagauuggugaacgagua

SEQ ID NO: 1263563 - RNA, 19 nt, Homo sapiens
  misc_RNA (1)...(19): siRNA sense strand
gugaacgaguagauuauaa

SEQ ID NO: 1263564 - RNA, 19 nt, Homo sapiens
  misc_RNA (1)...(19): siRNA sense strand
gagagagcacgauuuauug

SEQ ID NO: 1263565 - RNA, 19 nt, Homo sapiens
  misc_RNA (1)...(19): siRNA sense strand
caaaugggacuuacgaguu

SEQ ID NO: 1263566 - RNA, 19 nt, Homo sapiens
  misc_RNA (1)...(19): siRNA sense strand
ggucauugcugugauuguu

SEQ ID NO: 1263567 - RNA, 19 nt, Homo sapiens
  misc_RNA (1)...(19): siRNA sense strand
ccagauccauuuucacuua

SEQ ID NO: 1263568 - RNA, 19 nt, Homo sapiens
  misc_RNA (1)...(19): siRNA sense strand
gaaggaauacuugacaguu

SEQ ID NO: 1263569 - RNA, 19 nt, Homo sapiens
  misc_RNA (1)...(19): siRNA sense strand
aaggaauacuugacaguuu

SEQ ID NO: 1263570 - RNA, 19 nt, Homo sapiens
  misc_RNA (1)...(19): siRNA sense strand
ucagaugacgccuguuaua

SEQ ID NO: 1263571 - RNA, 19 nt, Homo sapiens
  misc_RNA (1)...(19): siRNA sense strand
gaaaacacaccuuuaguga

SEQ ID NO: 1263572 - RNA, 19 nt, Homo sapiens
  misc_RNA (1)...(19): siRNA sense strand
gaugacgccuguuauagag

SEQ ID NO: 1263573 - RNA, 19 nt, Homo sapiens
  misc_RNA (1)...(19): siRNA sense strand
gagaaacauguccauauau

SEQ ID NO: 1263574 - RNA, 19 nt, Homo sapiens
  misc_RNA (1)...(19): siRNA sense strand
ccacuuaccagacuaaauc

SEQ ID NO: 1263575 - RNA, 19 nt, Homo sapiens
  misc_RNA (1)...(19): siRNA sense strand
acgaguagauuauaagugu

SEQ ID NO: 1263576 - RNA, 19 nt, Homo sapiens
  misc_RNA (1)...(19): siRNA sense strand
cuacaaagcaacaguuaug

SEQ ID NO: 1263577 - RNA, 19 nt, Homo sapiens
  misc_RNA (1)...(19): siRNA sense strand
ccaccaacauuugaagcua

SEQ ID NO: 1263578 - RNA, 19 nt, Homo sapiens
  misc_RNA (1)...(19): siRNA sense strand
uauacgggauccuuuaaau

SEQ ID NO: 1263579 - RNA, 19 nt, Homo sapiens
  misc_RNA (1)...(19): siRNA sense strand
cgaguuugguuaucagaug

SEQ ID NO: 1263580 - RNA, 19 nt, Homo sapiens
  misc_RNA (1)...(19): siRNA sense strand
gaacgaguagauuauaagu

SEQ ID NO: 1263581 - RNA, 19 nt, Homo sapiens
  misc_RNA (1)...(19): siRNA sense strand
gugaggagccaccaacauu

SEQ ID NO: 1263582 - RNA, 19 nt, Homo sapiens
  misc_RNA (1)...(19): siRNA sense strand
gauggcagcgacacaauug

SEQ ID NO: 1263583 - RNA, 19 nt, Homo sapiens
  misc_RNA (1)...(19): siRNA sense strand
ucucagaugacgccuguua

SEQ ID NO: 1263584 - RNA, 19 nt, Homo sapiens
  misc_RNA (1)...(19): siRNA sense strand
gaggagccaccaacauuug

SEQ ID NO: 1263585 - RNA, 19 nt, Homo sapiens
  misc_RNA (1)...(19): siRNA sense strand
gcuauggagcucauuggua

SEQ ID NO: 1263586 - RNA, 19 nt, Homo sapiens
  misc_RNA (1)...(19): siRNA sense strand
acacaccuuuagugaagua

SEQ ID NO: 1263587 - RNA, 19 nt, Homo sapiens
  misc_RNA (1)...(19): siRNA sense strand
uagagaaacauguccauau

SEQ ID NO: 1263588 - RNA, 19 nt, Homo sapiens
  misc_RNA (1)...(19): siRNA sense strand
ggugaacgaguagauuaua

SEQ ID NO: 1263589 - RNA, 19 nt, Homo sapiens
  misc_RNA (1)...(19): siRNA sense strand
gaaguagaaguauuugagu

SEQ ID NO: 1263590 - RNA, 19 nt, Homo sapiens
  misc_RNA (1)...(19): siRNA sense strand
gaaacauguccauauauac

SEQ ID NO: 1263591 - RNA, 19 nt, Homo sapiens
  misc_RNA (1)...(19): siRNA sense strand
ugacgccuguuauagagaa

SEQ ID NO: 1263592 - RNA, 19 nt, Homo sapiens
  misc_RNA (1)...(19): siRNA sense strand
cgaguagauuauaagugua

SEQ ID NO: 1263593 - RNA, 19 nt, Homo sapiens
  misc_RNA (1)...(19): siRNA sense strand
gcacuuuauuuguaaugag

SEQ ID NO: 1263594 - RNA, 19 nt, Homo sapiens
  misc_RNA (1)...(19): siRNA sense strand
guagaaguauuugaguauc

SEQ ID NO: 1263595 - RNA, 19 nt, Homo sapiens
  misc_RNA (1)...(19): siRNA sense strand
guauuugaguaucuugaug

SEQ ID NO: 1263596 - RNA, 19 nt, Homo sapiens
  misc_RNA (1)...(19): siRNA sense strand
aggaauacuugacaguuug

SEQ ID NO: 1263597 - RNA, 19 nt, Homo sapiens
  misc_RNA (1)...(19): siRNA sense strand
ccaaaacccuacuaugaga

SEQ ID NO: 1263598 - RNA, 19 nt, Homo sapiens
  misc_RNA (1)...(19): siRNA sense strand
aguguaaaguggucaaaug

SEQ ID NO: 1263599 - RNA, 19 nt, Homo sapiens
  misc_RNA (1)...(19): siRNA sense strand
ccacccauacuauuuguga

SEQ ID NO: 1263600 - RNA, 19 nt, Homo sapiens
  misc_RNA (1)...(19): siRNA sense strand
uuggagagagcacgauuua

SEQ ID NO: 1263601 - RNA, 19 nt, Homo sapiens
  misc_RNA (1)...(19): siRNA sense strand
gguuaucagaugcacuuua

SEQ ID NO: 1263602 - RNA, 19 nt, Homo sapiens
  misc_RNA (1)...(19): siRNA sense strand
caccaacauuugaagcuau

SEQ ID NO: 1263603 - RNA, 19 nt, Homo sapiens
  misc_RNA (1)...(19): siRNA sense strand
ugaggagccaccaacauuu

SEQ ID NO: 1263604 - RNA, 19 nt, Homo sapiens
  misc_RNA (1)...(19): siRNA sense strand
ggaaggaauacuugacagu

SEQ ID NO: 1263605 - RNA, 19 nt, Homo sapiens
  misc_RNA (1)...(19): siRNA sense strand
gaggaaggaauacuugaca

SEQ ID NO: 1263606 - RNA, 19 nt, Homo sapiens
  misc_RNA (1)...(19): siRNA sense strand
ugaguaucuugaugcagua

SEQ ID NO: 1263607 - RNA, 19 nt, Homo sapiens
  misc_RNA (1)...(19): siRNA sense strand
caccuuuagugaaguagaa

SEQ ID NO: 1263608 - RNA, 19 nt, Homo sapiens
  misc_RNA (1)...(19): siRNA sense strand
acagauaucaggauuugga

SEQ ID NO: 1263609 - RNA, 19 nt, Homo sapiens
  misc_RNA (1)...(19): siRNA sense strand
ucauugcugugauuguuau

SEQ ID NO: 1263610 - RNA, 19 nt, Homo sapiens
  misc_RNA (1)...(19): siRNA sense strand
ucagaugcacuuuauuugu

SEQ ID NO: 1263611 - RNA, 19 nt, Homo sapiens
  misc_RNA (1)...(19): siRNA sense strand
gugcugcuccagaguguaa

SEQ ID NO: 1263612 - RNA, 19 nt, Homo sapiens
  misc_RNA (1)...(19): siRNA sense strand
ggaaaacacaccuuuagug

SEQ ID NO: 1263613 - RNA, 19 nt, Homo sapiens
  misc_RNA (1)...(19): siRNA sense strand
aaggaucaguagcaauuug

SEQ ID NO: 1263614 - RNA, 19 nt, Homo sapiens
  misc_RNA (1)...(19): siRNA sense strand
uauauacgggauccuuuaa

SEQ ID NO: 1263615 - RNA, 19 nt, Homo sapiens
  misc_RNA (1)...(19): siRNA sense strand
ugaaguagaaguauuugag

SEQ ID NO: 1263616 - RNA, 19 nt, Homo sapiens
  misc_RNA (1)...(19): siRNA sense strand
cuugacaguuuggauguuu

SEQ ID NO: 1263617 - RNA, 19 nt, Homo sapiens
  misc_RNA (1)...(19): siRNA sense strand
cauauauacgggauccuuu

SEQ ID NO: 1263618 - RNA, 19 nt, Homo sapiens
  misc_RNA (1)...(19): siRNA sense strand
auauauacgggauccuuua

SEQ ID NO: 1263619 - RNA, 19 nt, Homo sapiens
  misc_RNA (1)...(19): siRNA sense strand
cuuaaaggaucaguagcaa

SEQ ID NO: 1263620 - RNA, 19 nt, Homo sapiens
  misc_RNA (1)...(19): siRNA sense strand
uaaaccugaggaaggaaua

SEQ ID NO: 1263621 - RNA, 19 nt, Homo sapiens
  misc_RNA (1)...(19): siRNA sense strand
agaugacgccuguuauaga

SEQ ID NO: 1263622 - RNA, 19 nt, Homo sapiens
  misc_RNA (1)...(19): siRNA sense strand
ugugauuguuauugccaua

SEQ ID NO: 1263623 - RNA, 19 nt, Homo sapiens
  misc_RNA (1)...(19): siRNA sense strand
gagagcacgauuuauugug

SEQ ID NO: 1263624 - RNA, 19 nt, Homo sapiens
  misc_RNA (1)...(19): siRNA sense strand
gaaguauuugaguaucuug

SEQ ID NO: 1263625 - RNA, 19 nt, Homo sapiens
  misc_RNA (1)...(19): siRNA sense strand
ggcuaccugucucagauga

SEQ ID NO: 1263626 - RNA, 19 nt, Homo sapiens
  misc_RNA (1)...(19): siRNA sense strand
gauaucaggauuuggaaaa

SEQ ID NO: 1263627 - RNA, 19 nt, Homo sapiens
  misc_RNA (1)...(19): siRNA sense strand
ccucuugccacccauacua

SEQ ID NO: 1263628 - RNA, 19 nt, Homo sapiens
  misc_RNA (1)...(19): siRNA sense strand
ccaugguguugcugcugua

SEQ ID NO: 1263629 - RNA, 19 nt, Homo sapiens
  misc_RNA (1)...(19): siRNA sense strand
cagaugacgccuguuauag

SEQ ID NO: 1263630 - RNA, 19 nt, Homo sapiens
  misc_RNA (1)...(19): siRNA sense strand
cagaugguggagcugaaua

SEQ ID NO: 1263631 - RNA, 19 nt, Homo sapiens
  misc_RNA (1)...(19): siRNA sense strand
uuggugaacgaguagauua

SEQ ID NO: 1263632 - RNA, 19 nt, Homo sapiens
  misc_RNA (1)...(19): siRNA sense strand
gucauugcugugauuguua

SEQ ID NO: 1263633 - RNA, 19 nt, Homo sapiens
  misc_RNA (1)...(19): siRNA sense strand
ggagccaccaacauuugaa

SEQ ID NO: 1263634 - RNA, 19 nt, Homo sapiens
  misc_RNA (1)...(19): siRNA sense strand
gcgcuuuccuggguugcuu

SEQ ID NO: 1263635 - RNA, 19 nt, Homo sapiens
  misc_RNA (1)...(19): siRNA sense strand
uacuacaaagcaacaguua

SEQ ID NO: 1263636 - RNA, 19 nt, Homo sapiens
  misc_RNA (1)...(19): siRNA sense strand
cuugaugcaguaacuuaua

SEQ ID NO: 1263637 - RNA, 19 nt, Homo sapiens
  misc_RNA (1)...(19): siRNA sense strand
aaacauguccauauauacg

SEQ ID NO: 1263638 - RNA, 19 nt, Homo sapiens
  misc_RNA (1)...(19): siRNA sense strand
guguaaaguggucaaaugu

SEQ ID NO: 1263639 - RNA, 19 nt, Homo sapiens
  misc_RNA (1)...(19): siRNA sense strand
cuuacgaguuugguuauca

SEQ ID NO: 1263640 - RNA, 19 nt, Homo sapiens
  misc_RNA (1)...(19): siRNA sense strand
uacgggauccuuuaaaugg

SEQ ID NO: 1263641 - RNA, 19 nt, Homo sapiens
  misc_RNA (1)...(19): siRNA sense strand
gcagaugguggagcugaau

SEQ ID NO: 1263642 - RNA, 19 nt, Homo sapiens
  misc_RNA (1)...(19): siRNA sense strand
aaccaaaacccuacuauga

SEQ ID NO: 1263643 - RNA, 19 nt, Homo sapiens
  misc_RNA (1)...(19): siRNA sense strand
cccaauaugugaaaagguu

SEQ ID NO: 1263644 - RNA, 19 nt, Homo sapiens
  misc_RNA (1)...(19): siRNA sense strand
ggagcugaauaugccacuu

SEQ ID NO: 1263645 - RNA, 19 nt, Homo sapiens
  misc_RNA (1)...(19): siRNA sense strand
cgauggcagcgacacaauu

SEQ ID NO: 1263646 - RNA, 19 nt, Homo sapiens
  misc_RNA (1)...(19): siRNA sense strand
gauccauuuucacuuauug

SEQ ID NO: 1263647 - RNA, 19 nt, Homo sapiens
  misc_RNA (1)...(19): siRNA sense strand
uugaugcaguaacuuauag

SEQ ID NO: 1263648 - RNA, 19 nt, Homo sapiens
  misc_RNA (1)...(19): siRNA sense strand
guaucuugaugcaguaacu

SEQ ID NO: 1263649 - RNA, 19 nt, Homo sapiens
  misc_RNA (1)...(19): siRNA sense strand
ggagagagcacgauuuauu

SEQ ID NO: 1263650 - RNA, 19 nt, Homo sapiens
  misc_RNA (1)...(19): siRNA sense strand
agagaaacauguccauaua

SEQ ID NO: 1263651 - RNA, 19 nt, Homo sapiens
  misc_RNA (1)...(19): siRNA sense strand
cagaugcacuuuauuugua

SEQ ID NO: 1263652 - RNA, 19 nt, Homo sapiens
  misc_RNA (1)...(19): siRNA sense strand
ggacuuacgaguuugguua

SEQ ID NO: 1263653 - RNA, 19 nt, Homo sapiens
  misc_RNA (1)...(19): siRNA sense strand
aaacagauaucaggauuug

SEQ ID NO: 1263654 - RNA, 19 nt, Homo sapiens
  misc_RNA (1)...(19): siRNA sense strand
cuauggagcucauugguaa

SEQ ID NO: 1263655 - RNA, 19 nt, Homo sapiens
  misc_RNA (1)...(19): siRNA sense strand
aaacacaccuuuagugaag

SEQ ID NO: 1263656 - RNA, 19 nt, Homo sapiens
  misc_RNA (1)...(19): siRNA sense strand
gaacuuaaaggaucaguag

SEQ ID NO: 1263657 - RNA, 19 nt, Homo sapiens
  misc_RNA (1)...(19): siRNA sense strand
gaaaacagauaucaggauu

SEQ ID NO: 1263658 - RNA, 19 nt, Homo sapiens
  misc_RNA (1)...(19): siRNA sense strand
uaaaggaucaguagcaauu

SEQ ID NO: 1263659 - RNA, 19 nt, Homo sapiens
  misc_RNA (1)...(19): siRNA sense strand
aaaugggacuuacgaguuu

SEQ ID NO: 1263660 - RNA, 19 nt, Homo sapiens
  misc_RNA (1)...(19): siRNA sense strand
guuaucagaugcacuuuau

SEQ ID NO: 1263661 - RNA, 19 nt, Homo sapiens
  misc_RNA (1)...(19): siRNA sense strand
gagcugaauaugccacuua

SEQ ID NO: 1263662 - RNA, 19 nt, Homo sapiens
  misc_RNA (1)...(19): siRNA sense strand
gagcagagaggcugaauag

SEQ ID NO: 1263663 - RNA, 19 nt, Homo sapiens
  misc_RNA (1)...(19): siRNA sense strand
ugagauuggugaacgagua

SEQ ID NO: 1263664 - RNA, 19 nt, Homo sapiens
  misc_RNA (1)...(19): siRNA sense strand
gugaacgaguagauuauaa

SEQ ID NO: 1263665 - RNA, 19 nt, Homo sapiens
  misc_RNA (1)...(19): siRNA sense strand
gagagagcacgauuuauug

SEQ ID NO: 1263666 - RNA, 19 nt, Homo sapiens
  misc_RNA (1)...(19): siRNA sense strand
caaaugggacuuacgaguu

SEQ ID NO: 1263667 - RNA, 19 nt, Homo sapiens
  misc_RNA (1)...(19): siRNA sense strand
ggucauugcugugauuguu

SEQ ID NO: 1263668 - RNA, 19 nt, Homo sapiens
  misc_RNA (1)...(19): siRNA sense strand
ccagauccauuuucacuua

SEQ ID NO: 1263669 - RNA, 19 nt, Homo sapiens
  misc_RNA (1)...(19): siRNA sense strand
gaaggaauacuugacaguu

SEQ ID NO: 1263670 - RNA, 19 nt, Homo sapiens
  misc_RNA (1)...(19): siRNA sense strand
aaggaauacuugacaguuu

SEQ ID NO: 1263671 - RNA, 19 nt, Homo sapiens
  misc_RNA (1)...(19): siRNA sense strand
ucagaugacgccuguuaua

SEQ ID NO: 1263672 - RNA, 19 nt, Homo sapiens
  misc_RNA (1)...(19): siRNA sense strand
gaaaacacaccuuuaguga

SEQ ID NO: 1263673 - RNA, 19 nt, Homo sapiens
  misc_RNA (1)...(19): siRNA sense strand
gaugacgccuguuauagag

SEQ ID NO: 1263674 - RNA, 19 nt, Homo sapiens
  misc_RNA (1)...(19): siRNA sense strand
gagaaacauguccauauau

SEQ ID NO: 1263675 - RNA, 19 nt, Homo sapiens
  misc_RNA (1)...(19): siRNA sense strand
ccacuuaccagacuaaauc

SEQ ID NO: 1263676 - RNA, 19 nt, Homo sapiens
  misc_RNA (1)...(19): siRNA sense strand
acgaguagauuauaagugu

SEQ ID NO: 1263677 - RNA, 19 nt, Homo sapiens
  misc_RNA (1)...(19): siRNA sense strand
cuacaaagcaacaguuaug

SEQ ID NO: 1263678 - RNA, 19 nt, Homo sapiens
  misc_RNA (1)...(19): siRNA sense strand
ccaccaacauuugaagcua

SEQ ID NO: 1263679 - RNA, 19 nt, Homo sapiens
  misc_RNA (1)...(19): siRNA sense strand
uauacgggauccuuuaaau

SEQ ID NO: 1263680 - RNA, 19 nt, Homo sapiens
  misc_RNA (1)...(19): siRNA sense strand
cgaguuugguuaucagaug

SEQ ID NO: 1263681 - RNA, 19 nt, Homo sapiens
  misc_RNA (1)...(19): siRNA sense strand
gaacgaguagauuauaagu

SEQ ID NO: 1263682 - RNA, 19 nt, Homo sapiens
  misc_RNA (1)...(19): siRNA sense strand
gugaggagccaccaacauu

SEQ ID NO: 1263683 - RNA, 19 nt, Homo sapiens
  misc_RNA (1)...(19): siRNA sense strand
gauggcagcgacacaauug

SEQ ID NO: 1263684 - RNA, 19 nt, Homo sapiens
  misc_RNA (1)...(19): siRNA sense strand
ucucagaugacgccuguua

SEQ ID NO: 1263685 - RNA, 19 nt, Homo sapiens
  misc_RNA (1)...(19): siRNA sense strand
acacaccuuuagugaagua

SEQ ID NO: 1263686 - RNA, 19 nt, Homo sapiens
  misc_RNA (1)...(19): siRNA sense strand
gcuauggagcucauuggua

SEQ ID NO: 1263687 - RNA, 19 nt, Homo sapiens
  misc_RNA (1)...(19): siRNA sense strand
gaggagccaccaacauuug

SEQ ID NO: 1263688 - RNA, 19 nt, Homo sapiens
  misc_RNA (1)...(19): siRNA sense strand
uagagaaacauguccauau

SEQ ID NO: 1263689 - RNA, 19 nt, Homo sapiens
  misc_RNA (1)...(19): siRNA sense strand
guuccaaagugucuuaaag

SEQ ID NO: 1263690 - RNA, 19 nt, Homo sapiens
  misc_RNA (1)...(19): siRNA sense strand
ggugaacgaguagauuaua

SEQ ID NO: 1263691 - RNA, 19 nt, Homo sapiens
  misc_RNA (1)...(19): siRNA sense strand
gaaguagaaguauuugagu

SEQ ID NO: 1263692 - RNA, 19 nt, Homo sapiens
  misc_RNA (1)...(19): siRNA sense strand
gaaacauguccauauauac

SEQ ID NO: 1263693 - RNA, 19 nt, Homo sapiens
  misc_RNA (1)...(19): siRNA sense strand
ugacgccuguuauagagaa

SEQ ID NO: 1263694 - RNA, 19 nt, Homo sapiens
  misc_RNA (1)...(19): siRNA sense strand
cgaguagauuauaagugua

SEQ ID NO: 1263695 - RNA, 19 nt, Homo sapiens
  misc_RNA (1)...(19): siRNA sense strand
gcacuuuauuuguaaugag

SEQ ID NO: 1263696 - RNA, 19 nt, Homo sapiens
  misc_RNA (1)...(19): siRNA sense strand
guagaaguauuugaguauc

SEQ ID NO: 1263697 - RNA, 19 nt, Homo sapiens
  misc_RNA (1)...(19): siRNA sense strand
guauuugaguaucuugaug

SEQ ID NO: 1263698 - RNA, 19 nt, Homo sapiens
  misc_RNA (1)...(19): siRNA sense strand
aggaauacuugacaguuug

SEQ ID NO: 1263699 - RNA, 19 nt, Homo sapiens
  misc_RNA (1)...(19): siRNA sense strand
ccaaaacccuacuaugaga

SEQ ID NO: 1263700 - RNA, 19 nt, Homo sapiens
  misc_RNA (1)...(19): siRNA sense strand
aguguaaaguggucaaaug

SEQ ID NO: 1263701 - RNA, 19 nt, Homo sapiens
  misc_RNA (1)...(19): siRNA sense strand
ccacccauacuauuuguga

SEQ ID NO: 1263702 - RNA, 19 nt, Homo sapiens
  misc_RNA (1)...(19): siRNA sense strand
uuggagagagcacgauuua

SEQ ID NO: 1263703 - RNA, 19 nt, Homo sapiens
  misc_RNA (1)...(19): siRNA sense strand
gguuaucagaugcacuuua

SEQ ID NO: 1263704 - RNA, 19 nt, Homo sapiens
  misc_RNA (1)...(19): siRNA sense strand
caccaacauuugaagcuau

SEQ ID NO: 1263705 - RNA, 19 nt, Homo sapiens
  misc_RNA (1)...(19): siRNA sense strand
ugaggagccaccaacauuu

SEQ ID NO: 1263706 - RNA, 19 nt, Homo sapiens
  misc_RNA (1)...(19): siRNA sense strand
ggaaggaauacuugacagu

SEQ ID NO: 1263707 - RNA, 19 nt, Homo sapiens
  misc_RNA (1)...(19): siRNA sense strand
gaggaaggaauacuugaca

SEQ ID NO: 1263708 - RNA, 19 nt, Homo sapiens
  misc_RNA (1)...(19): siRNA sense strand
ccaguuccaaagugucuua

SEQ ID NO: 1263709 - RNA, 19 nt, Homo sapiens
  misc_RNA (1)...(19): siRNA sense strand
ugaguaucuugaugcagua

SEQ ID NO: 1263710 - RNA, 19 nt, Homo sapiens
  misc_RNA (1)...(19): siRNA sense strand
caccuuuagugaaguagaa

SEQ ID NO: 1263711 - RNA, 19 nt, Homo sapiens
  misc_RNA (1)...(19): siRNA sense strand
acagauaucaggauuugga

SEQ ID NO: 1263712 - RNA, 19 nt, Homo sapiens
  misc_RNA (1)...(19): siRNA sense strand
ucauugcugugauuguuau

SEQ ID NO: 1263713 - RNA, 19 nt, Homo sapiens
  misc_RNA (1)...(19): siRNA sense strand
ucagaugcacuuuauuugu

SEQ ID NO: 1263714 - RNA, 19 nt, Homo sapiens
  misc_RNA (1)...(19): siRNA sense strand
gugcugcuccagaguguaa

SEQ ID NO: 1263715 - RNA, 19 nt, Homo sapiens
  misc_RNA (1)...(19): siRNA sense strand
ggaaaacacaccuuuagug

SEQ ID NO: 1263716 - RNA, 19 nt, Homo sapiens
  misc_RNA (1)...(19): siRNA sense strand
aaggaucaguagcaauuug

SEQ ID NO: 1263717 - RNA, 19 nt, Homo sapiens
  misc_RNA (1)...(19): siRNA sense strand
uauauacgggauccuuuaa

SEQ ID NO: 1263718 - RNA, 19 nt, Homo sapiens
  misc_RNA (1)...(19): siRNA sense strand
ugaaguagaaguauuugag

SEQ ID NO: 1263719 - RNA, 19 nt, Homo sapiens
  misc_RNA (1)...(19): siRNA sense strand
cuugacaguuuggauguuu

SEQ ID NO: 1263720 - RNA, 19 nt, Homo sapiens
  misc_RNA (1)...(19): siRNA sense strand
cauauauacgggauccuuu

SEQ ID NO: 1263721 - RNA, 19 nt, Homo sapiens
  misc_RNA (1)...(19): siRNA sense strand
auauauacgggauccuuua

SEQ ID NO: 1263722 - RNA, 19 nt, Homo sapiens
  misc_RNA (1)...(19): siRNA sense strand
cuuaaaggaucaguagcaa

SEQ ID NO: 1263723 - RNA, 19 nt, Homo sapiens
  misc_RNA (1)...(19): siRNA sense strand
uaaaccugaggaaggaaua

SEQ ID NO: 1263724 - RNA, 19 nt, Homo sapiens
  misc_RNA (1)...(19): siRNA sense strand
agaugacgccuguuauaga

SEQ ID NO: 1263725 - RNA, 19 nt, Homo sapiens
  misc_RNA (1)...(19): siRNA sense strand
ugugauuguuauugccaua

SEQ ID NO: 1263726 - RNA, 19 nt, Homo sapiens
  misc_RNA (1)...(19): siRNA sense strand
gagagcacgauuuauugug

SEQ ID NO: 1263727 - RNA, 19 nt, Homo sapiens
  misc_RNA (1)...(19): siRNA sense strand
gaaguauuugaguaucuug

SEQ ID NO: 1263728 - RNA, 19 nt, Homo sapiens
  misc_RNA (1)...(19): siRNA sense strand
ggcuaccugucucagauga

SEQ ID NO: 1263729 - RNA, 19 nt, Homo sapiens
  misc_RNA (1)...(19): siRNA sense strand
ccucuugccacccauacua

SEQ ID NO: 1263730 - RNA, 19 nt, Homo sapiens
  misc_RNA (1)...(19): siRNA sense strand
gauaucaggauuuggaaaa

SEQ ID NO: 1263731 - RNA, 19 nt, Homo sapiens
  misc_RNA (1)...(19): siRNA sense strand
ccaugguguugcugcugua

SEQ ID NO: 1263732 - RNA, 19 nt, Homo sapiens
  misc_RNA (1)...(19): siRNA sense strand
cagaugacgccuguuauag

SEQ ID NO: 1263733 - RNA, 19 nt, Homo sapiens
  misc_RNA (1)...(19): siRNA sense strand
cagaugguggagcugaaua

SEQ ID NO: 1263734 - RNA, 19 nt, Homo sapiens
  misc_RNA (1)...(19): siRNA sense strand
gucauugcugugauuguua

SEQ ID NO: 1263735 - RNA, 19 nt, Homo sapiens
  misc_RNA (1)...(19): siRNA sense strand
uuggugaacgaguagauua

SEQ ID NO: 1263736 - RNA, 19 nt, Homo sapiens
  misc_RNA (1)...(19): siRNA sense strand
ggagccaccaacauuugaa

SEQ ID NO: 1263737 - RNA, 19 nt, Homo sapiens
  misc_RNA (1)...(19): siRNA sense strand
gcgcuuuccuggguugcuu

SEQ ID NO: 1263738 - RNA, 19 nt, Homo sapiens
  misc_RNA (1)...(19): siRNA sense strand
uacuacaaagcaacaguua

SEQ ID NO: 1263739 - RNA, 19 nt, Homo sapiens
  misc_RNA (1)...(19): siRNA sense strand
cuugaugcaguaacuuaua

SEQ ID NO: 1263740 - RNA, 19 nt, Homo sapiens
  misc_RNA (1)...(19): siRNA sense strand
aaacauguccauauauacg

SEQ ID NO: 1263741 - RNA, 19 nt, Homo sapiens
  misc_RNA (1)...(19): siRNA sense strand
guguaaaguggucaaaugu

SEQ ID NO: 1263742 - RNA, 19 nt, Homo sapiens
  misc_RNA (1)...(19): siRNA sense strand
cuuacgaguuugguuauca

SEQ ID NO: 1263743 - RNA, 19 nt, Homo sapiens
  misc_RNA (1)...(19): siRNA sense strand
aaccaaaacccuacuauga

SEQ ID NO: 1263744 - RNA, 19 nt, Homo sapiens
  misc_RNA (1)...(19): siRNA sense strand
gcagaugguggagcugaau

SEQ ID NO: 1263745 - RNA, 19 nt, Homo sapiens
  misc_RNA (1)...(19): siRNA sense strand
uacgggauccuuuaaaugg

SEQ ID NO: 1263746 - RNA, 19 nt, Homo sapiens
  misc_RNA (1)...(19): siRNA sense strand
cgauggcagcgacacaauu

SEQ ID NO: 1263747 - RNA, 19 nt, Homo sapiens
  misc_RNA (1)...(19): siRNA sense strand
ggagcugaauaugccacuu

SEQ ID NO: 1263748 - RNA, 19 nt, Homo sapiens
  misc_RNA (1)...(19): siRNA sense strand
caacauuugaagcuaugga

SEQ ID NO: 1263749 - RNA, 19 nt, Homo sapiens
  misc_RNA (1)...(19): siRNA sense strand
ggagagagcacgauuuauu

SEQ ID NO: 1263750 - RNA, 19 nt, Homo sapiens
  misc_RNA (1)...(19): siRNA sense strand
agagaaacauguccauaua

SEQ ID NO: 1263751 - RNA, 19 nt, Homo sapiens
  misc_RNA (1)...(19): siRNA sense strand
cagaugcacuuuauuugua

SEQ ID NO: 1263752 - RNA, 19 nt, Homo sapiens
  misc_RNA (1)...(19): siRNA sense strand
ggacuuacgaguuugguua

SEQ ID NO: 1263753 - RNA, 19 nt, Homo sapiens
  misc_RNA (1)...(19): siRNA sense strand
aaacagauaucaggauuug

SEQ ID NO: 1263754 - RNA, 19 nt, Homo sapiens
  misc_RNA (1)...(19): siRNA sense strand
cuauggagcucauugguaa

SEQ ID NO: 1263755 - RNA, 19 nt, Homo sapiens
  misc_RNA (1)...(19): siRNA sense strand
aaacacaccuuuagugaag

SEQ ID NO: 1263756 - RNA, 19 nt, Homo sapiens
  misc_RNA (1)...(19): siRNA sense strand
gaacuuaaaggaucaguag

SEQ ID NO: 1263757 - RNA, 19 nt, Homo sapiens
  misc_RNA (1)...(19): siRNA sense strand
gaaaacagauaucaggauu

SEQ ID NO: 1263758 - RNA, 19 nt, Homo sapiens
  misc_RNA (1)...(19): siRNA sense strand
uaaaggaucaguagcaauu

SEQ ID NO: 1263759 - RNA, 19 nt, Homo sapiens
  misc_RNA (1)...(19): siRNA sense strand
aaaugggacuuacgaguuu

SEQ ID NO: 1263760 - RNA, 19 nt, Homo sapiens
  misc_RNA (1)...(19): siRNA sense strand
guuaucagaugcacuuuau

SEQ ID NO: 1263761 - RNA, 19 nt, Homo sapiens
  misc_RNA (1)...(19): siRNA sense strand
ugagauuggugaacgagua

SEQ ID NO: 1263762 - RNA, 19 nt, Homo sapiens
  misc_RNA (1)...(19): siRNA sense strand
gugaacgaguagauuauaa

SEQ ID NO: 1263763 - RNA, 19 nt, Homo sapiens
  misc_RNA (1)...(19): siRNA sense strand
gagagagcacgauuuauug

SEQ ID NO: 1263764 - RNA, 19 nt, Homo sapiens
  misc_RNA (1)...(19): siRNA sense strand
caaaugggacuuacgaguu

SEQ ID NO: 1263765 - RNA, 19 nt, Homo sapiens
  misc_RNA (1)...(19): siRNA sense strand
ggucauugcugugauuguu

SEQ ID NO: 1263766 - RNA, 19 nt, Homo sapiens
  misc_RNA (1)...(19): siRNA sense strand
ccagauccauuuucacuua

SEQ ID NO: 1263767 - RNA, 19 nt, Homo sapiens
  misc_RNA (1)...(19): siRNA sense strand
gaaggaauacuugacaguu

SEQ ID NO: 1263768 - RNA, 19 nt, Homo sapiens
  misc_RNA (1)...(19): siRNA sense strand
aaggaauacuugacaguuu

SEQ ID NO: 1263769 - RNA, 19 nt, Homo sapiens
  misc_RNA (1)...(19): siRNA sense strand
ucagaugacgccuguuaua

SEQ ID NO: 1263770 - RNA, 19 nt, Homo sapiens
  misc_RNA (1)...(19): siRNA sense strand
gaaaacacaccuuuaguga

SEQ ID NO: 1263771 - RNA, 19 nt, Homo sapiens
  misc_RNA (1)...(19): siRNA sense strand
gaugacgccuguuauagag

SEQ ID NO: 1263772 - RNA, 19 nt, Homo sapiens
  misc_RNA (1)...(19): siRNA sense strand
gagaaacauguccauauau

SEQ ID NO: 1263773 - RNA, 19 nt, Homo sapiens
  misc_RNA (1)...(19): siRNA sense strand
acgaguagauuauaagugu

SEQ ID NO: 1263774 - RNA, 19 nt, Homo sapiens
  misc_RNA (1)...(19): siRNA sense strand
cuacaaagcaacaguuaug

SEQ ID NO: 1263775 - RNA, 19 nt, Homo sapiens
  misc_RNA (1)...(19): siRNA sense strand
ccaccaacauuugaagcua

SEQ ID NO: 1263776 - RNA, 19 nt, Homo sapiens
  misc_RNA (1)...(19): siRNA sense strand
uauacgggauccuuuaaau

SEQ ID NO: 1263777 - RNA, 19 nt, Homo sapiens
  misc_RNA (1)...(19): siRNA sense strand
cgaguuugguuaucagaug

SEQ ID NO: 1263778 - RNA, 19 nt, Homo sapiens
  misc_RNA (1)...(19): siRNA sense strand
gaacgaguagauuauaagu

SEQ ID NO: 1263779 - RNA, 19 nt, Homo sapiens
  misc_RNA (1)...(19): siRNA sense strand
gugaggagccaccaacauu

SEQ ID NO: 1263780 - RNA, 19 nt, Homo sapiens
  misc_RNA (1)...(19): siRNA sense strand
gauggcagcgacacaauug

SEQ ID NO: 1263781 - RNA, 19 nt, Homo sapiens
  misc_RNA (1)...(19): siRNA sense strand
gcuauggagcucauuggua

SEQ ID NO: 1263782 - RNA, 19 nt, Homo sapiens
  misc_RNA (1)...(19): siRNA sense strand
gaggagccaccaacauuug

SEQ ID NO: 1263783 - RNA, 19 nt, Homo sapiens
  misc_RNA (1)...(19): siRNA sense strand
acacaccuuuagugaagua

SEQ ID NO: 1263784 - RNA, 19 nt, Homo sapiens
  misc_RNA (1)...(19): siRNA sense strand
ucucagaugacgccuguua

SEQ ID NO: 1263785 - RNA, 19 nt, Homo sapiens
  misc_RNA (1)...(19): siRNA sense strand
uagagaaacauguccauau

SEQ ID NO: 1263786 - RNA, 19 nt, Homo sapiens
  misc_RNA (1)...(19): siRNA sense strand
ggugaacgaguagauuaua

SEQ ID NO: 1263787 - RNA, 19 nt, Homo sapiens
  misc_RNA (1)...(19): siRNA sense strand
gaaguagaaguauuugagu

SEQ ID NO: 1263788 - RNA, 19 nt, Homo sapiens
  misc_RNA (1)...(19): siRNA sense strand
gaaacauguccauauauac

SEQ ID NO: 1263789 - RNA, 19 nt, Homo sapiens
  misc_RNA (1)...(19): siRNA sense strand
ugacgccuguuauagagaa

SEQ ID NO: 1263790 - RNA, 19 nt, Homo sapiens
  misc_RNA (1)...(19): siRNA sense strand
cgaguagauuauaagugua

SEQ ID NO: 1263791 - RNA, 19 nt, Homo sapiens
  misc_RNA (1)...(19): siRNA sense strand
gcacuuuauuuguaaugag

SEQ ID NO: 1263792 - RNA, 19 nt, Homo sapiens
  misc_RNA (1)...(19): siRNA sense strand
guagaaguauuugaguauc

SEQ ID NO: 1263793 - RNA, 19 nt, Homo sapiens
  misc_RNA (1)...(19): siRNA sense strand
guauuugaguaucuugaug

SEQ ID NO: 1263794 - RNA, 19 nt, Homo sapiens
  misc_RNA (1)...(19): siRNA sense strand
aggaauacuugacaguuug

SEQ ID NO: 1263795 - RNA, 19 nt, Homo sapiens
  misc_RNA (1)...(19): siRNA sense strand
aguguaaaguggucaaaug

SEQ ID NO: 1263796 - RNA, 19 nt, Homo sapiens
  misc_RNA (1)...(19): siRNA sense strand
ccaaaacccuacuaugaga

SEQ ID NO: 1263797 - RNA, 19 nt, Homo sapiens
  misc_RNA (1)...(19): siRNA sense strand
ccacccauacuauuuguga

SEQ ID NO: 1263798 - RNA, 19 nt, Homo sapiens
  misc_RNA (1)...(19): siRNA sense strand
caccaacauuugaagcuau

SEQ ID NO: 1263799 - RNA, 19 nt, Homo sapiens
  misc_RNA (1)...(19): siRNA sense strand
uuggagagagcacgauuua

SEQ ID NO: 1263800 - RNA, 19 nt, Homo sapiens
  misc_RNA (1)...(19): siRNA sense strand
gguuaucagaugcacuuua

SEQ ID NO: 1263801 - RNA, 19 nt, Homo sapiens
  misc_RNA (1)...(19): siRNA sense strand
ugaggagccaccaacauuu

SEQ ID NO: 1263802 - RNA, 19 nt, Homo sapiens
  misc_RNA (1)...(19): siRNA sense strand
ggaaggaauacuugacagu

SEQ ID NO: 1263803 - RNA, 19 nt, Homo sapiens
  misc_RNA (1)...(19): siRNA sense strand
gaggaaggaauacuugaca

SEQ ID NO: 1263804 - RNA, 19 nt, Homo sapiens
  misc_RNA (1)...(19): siRNA sense strand
ugaguaucuugaugcagua

SEQ ID NO: 1263805 - RNA, 19 nt, Homo sapiens
  misc_RNA (1)...(19): siRNA sense strand
caccuuuagugaaguagaa

SEQ ID NO: 1263806 - RNA, 19 nt, Homo sapiens
  misc_RNA (1)...(19): siRNA sense strand
acagauaucaggauuugga

SEQ ID NO: 1263807 - RNA, 19 nt, Homo sapiens
  misc_RNA (1)...(19): siRNA sense strand
ucauugcugugauuguuau

SEQ ID NO: 1263808 - RNA, 19 nt, Homo sapiens
  misc_RNA (1)...(19): siRNA sense strand
ucagaugcacuuuauuugu

SEQ ID NO: 1263809 - RNA, 19 nt, Homo sapiens
  misc_RNA (1)...(19): siRNA sense strand
gugcugcuccagaguguaa

SEQ ID NO: 1263810 - RNA, 19 nt, Homo sapiens
  misc_RNA (1)...(19): siRNA sense strand
ggaaaacacaccuuuagug

SEQ ID NO: 1263811 - RNA, 19 nt, Homo sapiens
  misc_RNA (1)...(19): siRNA sense strand
aaggaucaguagcaauuug

SEQ ID NO: 1263812 - RNA, 19 nt, Homo sapiens
  misc_RNA (1)...(19): siRNA sense strand
uauauacgggauccuuuaa

SEQ ID NO: 1263813 - RNA, 19 nt, Homo sapiens
  misc_RNA (1)...(19): siRNA sense strand
ugaaguagaaguauuugag

SEQ ID NO: 1263814 - RNA, 19 nt, Homo sapiens
  misc_RNA (1)...(19): siRNA sense strand
cuugacaguuuggauguuu

SEQ ID NO: 1263815 - RNA, 19 nt, Homo sapiens
  misc_RNA (1)...(19): siRNA sense strand
cauauauacgggauccuuu

SEQ ID NO: 1263816 - RNA, 19 nt, Homo sapiens
  misc_RNA (1)...(19): siRNA sense strand
auauauacgggauccuuua

SEQ ID NO: 1263817 - RNA, 19 nt, Homo sapiens
  misc_RNA (1)...(19): siRNA sense strand
cuuaaaggaucaguagcaa

SEQ ID NO: 1263818 - RNA, 19 nt, Homo sapiens
  misc_RNA (1)...(19): siRNA sense strand
uaaaccugaggaaggaaua

SEQ ID NO: 1263819 - RNA, 19 nt, Homo sapiens
  misc_RNA (1)...(19): siRNA sense strand
agaugacgccuguuauaga

SEQ ID NO: 1263820 - RNA, 19 nt, Homo sapiens
  misc_RNA (1)...(19): siRNA sense strand
ugugauuguuauugccaua

SEQ ID NO: 1263821 - RNA, 19 nt, Homo sapiens
  misc_RNA (1)...(19): siRNA sense strand
gagagcacgauuuauugug

SEQ ID NO: 1263822 - RNA, 19 nt, Homo sapiens
  misc_RNA (1)...(19): siRNA sense strand
gaaguauuugaguaucuug

SEQ ID NO: 1263823 - RNA, 19 nt, Homo sapiens
  misc_RNA (1)...(19): siRNA sense strand
ccucuugccacccauacua

SEQ ID NO: 1263824 - RNA, 19 nt, Homo sapiens
  misc_RNA (1)...(19): siRNA sense strand
gauaucaggauuuggaaaa

SEQ ID NO: 1263825 - RNA, 19 nt, Homo sapiens
  misc_RNA (1)...(19): siRNA sense strand
ggcuaccugucucagauga

SEQ ID NO: 1263826 - RNA, 19 nt, Homo sapiens
  misc_RNA (1)...(19): siRNA sense strand
ccaugguguugcugcugua

SEQ ID NO: 1263827 - RNA, 19 nt, Homo sapiens
  misc_RNA (1)...(19): siRNA sense strand
cagaugacgccuguuauag

SEQ ID NO: 1263828 - RNA, 19 nt, Homo sapiens
  misc_RNA (1)...(19): siRNA sense strand
gucauugcugugauuguua

SEQ ID NO: 1263829 - RNA, 19 nt, Homo sapiens
  misc_RNA (1)...(19): siRNA sense strand
uuggugaacgaguagauua

SEQ ID NO: 1263830 - RNA, 19 nt, Homo sapiens
  misc_RNA (1)...(19): siRNA sense strand
ggagccaccaacauuugaa

SEQ ID NO: 1263831 - RNA, 19 nt, Homo sapiens
  misc_RNA (1)...(19): siRNA sense strand
gcgcuuuccuggguugcuu

SEQ ID NO: 1263832 - RNA, 19 nt, Homo sapiens
  misc_RNA (1)...(19): siRNA sense strand
uacuacaaagcaacaguua

SEQ ID NO: 1263833 - RNA, 19 nt, Homo sapiens
  misc_RNA (1)...(19): siRNA sense strand
cuugaugcaguaacuuaua

SEQ ID NO: 1263834 - RNA, 19 nt, Homo sapiens
  misc_RNA (1)...(19): siRNA sense strand
aaacauguccauauauacg

SEQ ID NO: 1263835 - RNA, 19 nt, Homo sapiens
  misc_RNA (1)...(19): siRNA sense strand
guguaaaguggucaaaugu

SEQ ID NO: 1263836 - RNA, 19 nt, Homo sapiens
  misc_RNA (1)...(19): siRNA sense strand
cuuacgaguuugguuauca

SEQ ID NO: 1263837 - RNA, 19 nt, Homo sapiens
  misc_RNA (1)...(19): siRNA sense strand
uacgggauccuuuaaaugg

SEQ ID NO: 1263838 - RNA, 19 nt, Homo sapiens
  misc_RNA (1)...(19): siRNA sense strand
aaccaaaacccuacuauga

SEQ ID NO: 1263839 - RNA, 19 nt, Homo sapiens
  misc_RNA (1)...(19): siRNA sense strand
cccaauaugugaaaagguu

SEQ ID NO: 1263840 - RNA, 19 nt, Homo sapiens
  misc_RNA (1)...(19): siRNA sense strand
cgauggcagcgacacaauu

SEQ ID NO: 1263841 - RNA, 19 nt, Homo sapiens
  misc_RNA (1)...(19): siRNA sense strand
gauccauuuucacuuauug

SEQ ID NO: 1263842 - RNA, 19 nt, Homo sapiens
  misc_RNA (1)...(19): siRNA sense strand
uugaugcaguaacuuauag

SEQ ID NO: 1263843 - RNA, 19 nt, Homo sapiens
  misc_RNA (1)...(19): siRNA sense strand
guaucuugaugcaguaacu

SEQ ID NO: 1263844 - RNA, 19 nt, Homo sapiens
  misc_RNA (1)...(19): siRNA sense strand
caacauuugaagcuaugga

SEQ ID NO: 1263845 - RNA, 19 nt, Homo sapiens
  misc_RNA (1)...(19): siRNA sense strand
gagauuggugaacgaguag

SEQ ID NO: 1263846 - RNA, 19 nt, Homo sapiens
  misc_RNA (1)...(19): siRNA sense strand
ggagagagcacgauuuauu

SEQ ID NO: 1263847 - RNA, 19 nt, Homo sapiens
  misc_RNA (1)...(19): siRNA sense strand
agagaaacauguccauaua

SEQ ID NO: 1263848 - RNA, 19 nt, Homo sapiens
  misc_RNA (1)...(19): siRNA sense strand
cagaugcacuuuauuugua

SEQ ID NO: 1263849 - RNA, 19 nt, Homo sapiens
  misc_RNA (1)...(19): siRNA sense strand
ggacuuacgaguuugguua

SEQ ID NO: 1263850 - RNA, 19 nt, Homo sapiens
  misc_RNA (1)...(19): siRNA sense strand
aaacagauaucaggauuug

SEQ ID NO: 1263851 - RNA, 19 nt, Homo sapiens
  misc_RNA (1)...(19): siRNA sense strand
cuauggagcucauugguaa

SEQ ID NO: 1263852 - RNA, 19 nt, Homo sapiens
  misc_RNA (1)...(19): siRNA sense strand
aaacacaccuuuagugaag

SEQ ID NO: 1263853 - RNA, 19 nt, Homo sapiens
  misc_RNA (1)...(19): siRNA sense strand
gaacuuaaaggaucaguag

SEQ ID NO: 1263854 - RNA, 19 nt, Homo sapiens
  misc_RNA (1)...(19): siRNA sense strand
gaaaacagauaucaggauu

SEQ ID NO: 1263855 - RNA, 19 nt, Homo sapiens
  misc_RNA (1)...(19): siRNA sense strand
uaaaggaucaguagcaauu

SEQ ID NO: 1263856 - RNA, 19 nt, Homo sapiens
  misc_RNA (1)...(19): siRNA sense strand
aaaugggacuuacgaguuu

SEQ ID NO: 1263857 - RNA, 19 nt, Homo sapiens
  misc_RNA (1)...(19): siRNA sense strand
guuaucagaugcacuuuau

SEQ ID NO: 1263858 - RNA, 19 nt, Homo sapiens
  misc_RNA (1)...(19): siRNA sense strand
ugagauuggugaacgagua

SEQ ID NO: 1263859 - RNA, 19 nt, Homo sapiens
  misc_RNA (1)...(19): siRNA sense strand
gugaacgaguagauuauaa

SEQ ID NO: 1263860 - RNA, 19 nt, Homo sapiens
  misc_RNA (1)...(19): siRNA sense strand
gagagagcacgauuuauug

SEQ ID NO: 1263861 - RNA, 19 nt, Homo sapiens
  misc_RNA (1)...(19): siRNA sense strand
caaaugggacuuacgaguu

SEQ ID NO: 1263862 - RNA, 19 nt, Homo sapiens
  misc_RNA (1)...(19): siRNA sense strand
ggucauugcugugauuguu

SEQ ID NO: 1263863 - RNA, 19 nt, Homo sapiens
  misc_RNA (1)...(19): siRNA sense strand
ccagauccauuuucacuua

SEQ ID NO: 1263864 - RNA, 19 nt, Homo sapiens
  misc_RNA (1)...(19): siRNA sense strand
gaaggaauacuugacaguu

SEQ ID NO: 1263865 - RNA, 19 nt, Homo sapiens
  misc_RNA (1)...(19): siRNA sense strand
aaggaauacuugacaguuu

SEQ ID NO: 1263866 - RNA, 19 nt, Homo sapiens
  misc_RNA (1)...(19): siRNA sense strand
ucagaugacgccuguuaua

SEQ ID NO: 1263867 - RNA, 19 nt, Homo sapiens
  misc_RNA (1)...(19): siRNA sense strand
gaaaacacaccuuuaguga

SEQ ID NO: 1263868 - RNA, 19 nt, Homo sapiens
  misc_RNA (1)...(19): siRNA sense strand
gaugacgccuguuauagag

SEQ ID NO: 1263869 - RNA, 19 nt, Homo sapiens
  misc_RNA (1)...(19): siRNA sense strand
gagaaacauguccauauau

SEQ ID NO: 1263870 - RNA, 19 nt, Homo sapiens
  misc_RNA (1)...(19): siRNA sense strand
acgaguagauuauaagugu

SEQ ID NO: 1263871 - RNA, 19 nt, Homo sapiens
  misc_RNA (1)...(19): siRNA sense strand
cuacaaagcaacaguuaug

SEQ ID NO: 1263872 - RNA, 19 nt, Homo sapiens
  misc_RNA (1)...(19): siRNA sense strand
ccaccaacauuugaagcua

SEQ ID NO: 1263873 - RNA, 19 nt, Homo sapiens
  misc_RNA (1)...(19): siRNA sense strand
uauacgggauccuuuaaau

SEQ ID NO: 1263874 - RNA, 19 nt, Homo sapiens
  misc_RNA (1)...(19): siRNA sense strand
cgaguuugguuaucagaug

SEQ ID NO: 1263875 - RNA, 19 nt, Homo sapiens
  misc_RNA (1)...(19): siRNA sense strand
gaacgaguagauuauaagu

SEQ ID NO: 1263876 - RNA, 19 nt, Homo sapiens
  misc_RNA (1)...(19): siRNA sense strand
gugaggagccaccaacauu

SEQ ID NO: 1263877 - RNA, 19 nt, Homo sapiens
  misc_RNA (1)...(19): siRNA sense strand
gauggcagcgacacaauug

SEQ ID NO: 1263878 - RNA, 19 nt, Homo sapiens
  misc_RNA (1)...(19): siRNA sense strand
gcuauggagcucauuggua

SEQ ID NO: 1263879 - RNA, 19 nt, Homo sapiens
  misc_RNA (1)...(19): siRNA sense strand
gaggagccaccaacauuug

SEQ ID NO: 1263880 - RNA, 19 nt, Homo sapiens
  misc_RNA (1)...(19): siRNA sense strand
acacaccuuuagugaagua

SEQ ID NO: 1263881 - RNA, 19 nt, Homo sapiens
  misc_RNA (1)...(19): siRNA sense strand
ucucagaugacgccuguua

SEQ ID NO: 1263882 - RNA, 19 nt, Homo sapiens
  misc_RNA (1)...(19): siRNA sense strand
uagagaaacauguccauau

SEQ ID NO: 1263883 - RNA, 19 nt, Homo sapiens
  misc_RNA (1)...(19): siRNA sense strand
guuccaaagugucuuaaag

SEQ ID NO: 1263884 - RNA, 19 nt, Homo sapiens
  misc_RNA (1)...(19): siRNA sense strand
ggugaacgaguagauuaua

SEQ ID NO: 1263885 - RNA, 19 nt, Homo sapiens
  misc_RNA (1)...(19): siRNA sense strand
gaaguagaaguauuugagu

SEQ ID NO: 1263886 - RNA, 19 nt, Homo sapiens
  misc_RNA (1)...(19): siRNA sense strand
gaaacauguccauauauac

SEQ ID NO: 1263887 - RNA, 19 nt, Homo sapiens
  misc_RNA (1)...(19): siRNA sense strand
ugacgccuguuauagagaa

SEQ ID NO: 1263888 - RNA, 19 nt, Homo sapiens
  misc_RNA (1)...(19): siRNA sense strand
cgaguagauuauaagugua

SEQ ID NO: 1263889 - RNA, 19 nt, Homo sapiens
  misc_RNA (1)...(19): siRNA sense strand
gcacuuuauuuguaaugag

SEQ ID NO: 1263890 - RNA, 19 nt, Homo sapiens
  misc_RNA (1)...(19): siRNA sense strand
guagaaguauuugaguauc

SEQ ID NO: 1263891 - RNA, 19 nt, Homo sapiens
  misc_RNA (1)...(19): siRNA sense strand
guauuugaguaucuugaug

SEQ ID NO: 1263892 - RNA, 19 nt, Homo sapiens
  misc_RNA (1)...(19): siRNA sense strand
aggaauacuugacaguuug

SEQ ID NO: 1263893 - RNA, 19 nt, Homo sapiens
  misc_RNA (1)...(19): siRNA sense strand
ccaaaacccuacuaugaga

SEQ ID NO: 1263894 - RNA, 19 nt, Homo sapiens
  misc_RNA (1)...(19): siRNA sense strand
aguguaaaguggucaaaug

SEQ ID NO: 1263895 - RNA, 19 nt, Homo sapiens
  misc_RNA (1)...(19): siRNA sense strand
ccacccauacuauuuguga

SEQ ID NO: 1263896 - RNA, 19 nt, Homo sapiens
  misc_RNA (1)...(19): siRNA sense strand
caccaacauuugaagcuau

SEQ ID NO: 1263897 - RNA, 19 nt, Homo sapiens
  misc_RNA (1)...(19): siRNA sense strand
uuggagagagcacgauuua

SEQ ID NO: 1263898 - RNA, 19 nt, Homo sapiens
  misc_RNA (1)...(19): siRNA sense strand
gguuaucagaugcacuuua

SEQ ID NO: 1263899 - RNA, 19 nt, Homo sapiens
  misc_RNA (1)...(19): siRNA sense strand
ugaggagccaccaacauuu

SEQ ID NO: 1263900 - RNA, 19 nt, Homo sapiens
  misc_RNA (1)...(19): siRNA sense strand
ggaaggaauacuugacagu

SEQ ID NO: 1263901 - RNA, 19 nt, Homo sapiens
  misc_RNA (1)...(19): siRNA sense strand
gaggaaggaauacuugaca

SEQ ID NO: 1263902 - RNA, 19 nt, Homo sapiens
  misc_RNA (1)...(19): siRNA sense strand
ccaguuccaaagugucuua

SEQ ID NO: 1263903 - RNA, 19 nt, Homo sapiens
  misc_RNA (1)...(19): siRNA sense strand
ugaguaucuugaugcagua

SEQ ID NO: 1263904 - RNA, 19 nt, Homo sapiens
  misc_RNA (1)...(19): siRNA sense strand
caccuuuagugaaguagaa

SEQ ID NO: 1263905 - RNA, 19 nt, Homo sapiens
  misc_RNA (1)...(19): siRNA sense strand
acagauaucaggauuugga

SEQ ID NO: 1263906 - RNA, 19 nt, Homo sapiens
  misc_RNA (1)...(19): siRNA sense strand
ucauugcugugauuguuau

SEQ ID NO: 1263907 - RNA, 19 nt, Homo sapiens
  misc_RNA (1)...(19): siRNA sense strand
ucagaugcacuuuauuugu

SEQ ID NO: 1263908 - RNA, 19 nt, Homo sapiens
  misc_RNA (1)...(19): siRNA sense strand
gugcugcuccagaguguaa

SEQ ID NO: 1263909 - RNA, 19 nt, Homo sapiens
  misc_RNA (1)...(19): siRNA sense strand
ggaaaacacaccuuuagug

SEQ ID NO: 1263910 - RNA, 19 nt, Homo sapiens
  misc_RNA (1)...(19): siRNA sense strand
aaggaucaguagcaauuug

SEQ ID NO: 1263911 - RNA, 19 nt, Homo sapiens
  misc_RNA (1)...(19): siRNA sense strand
uauauacgggauccuuuaa

SEQ ID NO: 1263912 - RNA, 19 nt, Homo sapiens
  misc_RNA (1)...(19): siRNA sense strand
ugaaguagaaguauuugag

SEQ ID NO: 1263913 - RNA, 19 nt, Homo sapiens
  misc_RNA (1)...(19): siRNA sense strand
cuugacaguuuggauguuu

SEQ ID NO: 1263914 - RNA, 19 nt, Homo sapiens
  misc_RNA (1)...(19): siRNA sense strand
cauauauacgggauccuuu

SEQ ID NO: 1263915 - RNA, 19 nt, Homo sapiens
  misc_RNA (1)...(19): siRNA sense strand
auauauacgggauccuuua

SEQ ID NO: 1263916 - RNA, 19 nt, Homo sapiens
  misc_RNA (1)...(19): siRNA sense strand
cuuaaaggaucaguagcaa

SEQ ID NO: 1263917 - RNA, 19 nt, Homo sapiens
  misc_RNA (1)...(19): siRNA sense strand
uaaaccugaggaaggaaua

SEQ ID NO: 1263918 - RNA, 19 nt, Homo sapiens
  misc_RNA (1)...(19): siRNA sense strand
agaugacgccuguuauaga

SEQ ID NO: 1263919 - RNA, 19 nt, Homo sapiens
  misc_RNA (1)...(19): siRNA sense strand
ugugauuguuauugccaua

SEQ ID NO: 1263920 - RNA, 19 nt, Homo sapiens
  misc_RNA (1)...(19): siRNA sense strand
gagagcacgauuuauugug

SEQ ID NO: 1263921 - RNA, 19 nt, Homo sapiens
  misc_RNA (1)...(19): siRNA sense strand
gaaguauuugaguaucuug

SEQ ID NO: 1263922 - RNA, 19 nt, Homo sapiens
  misc_RNA (1)...(19): siRNA sense strand
ggcuaccugucucagauga

SEQ ID NO: 1263923 - RNA, 19 nt, Homo sapiens
  misc_RNA (1)...(19): siRNA sense strand
gauaucaggauuuggaaaa

SEQ ID NO: 1263924 - RNA, 19 nt, Homo sapiens
  misc_RNA (1)...(19): siRNA sense strand
ccucuugccacccauacua

SEQ ID NO: 1263925 - RNA, 19 nt, Homo sapiens
  misc_RNA (1)...(19): siRNA sense strand
ccaugguguugcugcugua

SEQ ID NO: 1263926 - RNA, 19 nt, Homo sapiens
  misc_RNA (1)...(19): siRNA sense strand
cagaugacgccuguuauag

SEQ ID NO: 1263927 - RNA, 19 nt, Homo sapiens
  misc_RNA (1)...(19): siRNA sense strand
uuggugaacgaguagauua

SEQ ID NO: 1263928 - RNA, 19 nt, Homo sapiens
  misc_RNA (1)...(19): siRNA sense strand
gucauugcugugauuguua

SEQ ID NO: 1263929 - RNA, 19 nt, Homo sapiens
  misc_RNA (1)...(19): siRNA sense strand
ggagccaccaacauuugaa

SEQ ID NO: 1263930 - RNA, 19 nt, Homo sapiens
  misc_RNA (1)...(19): siRNA sense strand
gcgcuuuccuggguugcuu

SEQ ID NO: 1263931 - RNA, 19 nt, Homo sapiens
  misc_RNA (1)...(19): siRNA sense strand
uacuacaaagcaacaguua

SEQ ID NO: 1263932 - RNA, 19 nt, Homo sapiens
  misc_RNA (1)...(19): siRNA sense strand
cuugaugcaguaacuuaua

SEQ ID NO: 1263933 - RNA, 19 nt, Homo sapiens
  misc_RNA (1)...(19): siRNA sense strand
aaacauguccauauauacg

SEQ ID NO: 1263934 - RNA, 19 nt, Homo sapiens
  misc_RNA (1)...(19): siRNA sense strand
guguaaaguggucaaaugu

SEQ ID NO: 1263935 - RNA, 19 nt, Homo sapiens
  misc_RNA (1)...(19): siRNA sense strand
cuuacgaguuugguuauca

SEQ ID NO: 1263936 - RNA, 19 nt, Homo sapiens
  misc_RNA (1)...(19): siRNA sense strand
uacgggauccuuuaaaugg

SEQ ID NO: 1263937 - RNA, 19 nt, Homo sapiens
  misc_RNA (1)...(19): siRNA sense strand
aaccaaaacccuacuauga

SEQ ID NO: 1263938 - RNA, 19 nt, Homo sapiens
  misc_RNA (1)...(19): siRNA sense strand
cccaauaugugaaaagguu

SEQ ID NO: 1263939 - RNA, 19 nt, Homo sapiens
  misc_RNA (1)...(19): siRNA sense strand
cgauggcagcgacacaauu

SEQ ID NO: 1263940 - RNA, 19 nt, Homo sapiens
  misc_RNA (1)...(19): siRNA sense strand
gauccauuuucacuuauug

SEQ ID NO: 1263941 - RNA, 19 nt, Homo sapiens
  misc_RNA (1)...(19): siRNA sense strand
uugaugcaguaacuuauag

SEQ ID NO: 1263942 - RNA, 19 nt, Homo sapiens
  misc_RNA (1)...(19): siRNA sense strand
guaucuugaugcaguaacu

SEQ ID NO: 1263943 - RNA, 19 nt, Homo sapiens
  misc_RNA (1)...(19): siRNA sense strand
caacauuugaagcuaugga

SEQ ID NO: 1263944 - RNA, 19 nt, Homo sapiens
  misc_RNA (1)...(19): siRNA sense strand
gagauuggugaacgaguag

SEQ ID NO: 1263945 - RNA, 19 nt, Homo sapiens
  misc_RNA (1)...(19): siRNA sense strand
ggagagagcacgauuuauu

SEQ ID NO: 1263946 - RNA, 19 nt, Homo sapiens
  misc_RNA (1)...(19): siRNA sense strand
agagaaacauguccauaua

SEQ ID NO: 1263947 - RNA, 19 nt, Homo sapiens
  misc_RNA (1)...(19): siRNA sense strand
cagaugcacuuuauuugua

SEQ ID NO: 1263948 - RNA, 19 nt, Homo sapiens
  misc_RNA (1)...(19): siRNA sense strand
ggacuuacgaguuugguua

SEQ ID NO: 1263949 - RNA, 19 nt, Homo sapiens
  misc_RNA (1)...(19): siRNA sense strand
aaacagauaucaggauuug

SEQ ID NO: 1263950 - RNA, 19 nt, Homo sapiens
  misc_RNA (1)...(19): siRNA sense strand
cuauggagcucauugguaa

SEQ ID NO: 1263951 - RNA, 19 nt, Homo sapiens
  misc_RNA (1)...(19): siRNA sense strand
aaacacaccuuuagugaag

SEQ ID NO: 1263952 - RNA, 19 nt, Homo sapiens
  misc_RNA (1)...(19): siRNA sense strand
gaacuuaaaggaucaguag

SEQ ID NO: 1263953 - RNA, 19 nt, Homo sapiens
  misc_RNA (1)...(19): siRNA sense strand
gaaaacagauaucaggauu

SEQ ID NO: 1263954 - RNA, 19 nt, Homo sapiens
  misc_RNA (1)...(19): siRNA sense strand
uaaaggaucaguagcaauu

SEQ ID NO: 1263955 - RNA, 19 nt, Homo sapiens
  misc_RNA (1)...(19): siRNA sense strand
aaaugggacuuacgaguuu

SEQ ID NO: 1263956 - RNA, 19 nt, Homo sapiens
  misc_RNA (1)...(19): siRNA sense strand
guuaucagaugcacuuuau

SEQ ID NO: 1263957 - RNA, 19 nt, Homo sapiens
  misc_RNA (1)...(19): siRNA sense strand
gagcugaauaugccacuua

SEQ ID NO: 1263958 - RNA, 19 nt, Homo sapiens
  misc_RNA (1)...(19): siRNA sense strand
ugagauuggugaacgagua

SEQ ID NO: 1263959 - RNA, 19 nt, Homo sapiens
  misc_RNA (1)...(19): siRNA sense strand
gugaacgaguagauuauaa

SEQ ID NO: 1263960 - RNA, 19 nt, Homo sapiens
  misc_RNA (1)...(19): siRNA sense strand
gagagagcacgauuuauug

SEQ ID NO: 1263961 - RNA, 19 nt, Homo sapiens
  misc_RNA (1)...(19): siRNA sense strand
caaaugggacuuacgaguu

SEQ ID NO: 1263962 - RNA, 19 nt, Homo sapiens
  misc_RNA (1)...(19): siRNA sense strand
ggucauugcugugauuguu

SEQ ID NO: 1263963 - RNA, 19 nt, Homo sapiens
  misc_RNA (1)...(19): siRNA sense strand
ccagauccauuuucacuua

SEQ ID NO: 1263964 - RNA, 19 nt, Homo sapiens
  misc_RNA (1)...(19): siRNA sense strand
gaaggaauacuugacaguu

SEQ ID NO: 1263965 - RNA, 19 nt, Homo sapiens
  misc_RNA (1)...(19): siRNA sense strand
aaggaauacuugacaguuu

SEQ ID NO: 1263966 - RNA, 19 nt, Homo sapiens
  misc_RNA (1)...(19): siRNA sense strand
ucagaugacgccuguuaua

SEQ ID NO: 1263967 - RNA, 19 nt, Homo sapiens
  misc_RNA (1)...(19): siRNA sense strand
gaaaacacaccuuuaguga

SEQ ID NO: 1263968 - RNA, 19 nt, Homo sapiens
  misc_RNA (1)...(19): siRNA sense strand
gaugacgccuguuauagag

SEQ ID NO: 1263969 - RNA, 19 nt, Homo sapiens
  misc_RNA (1)...(19): siRNA sense strand
gagaaacauguccauauau

SEQ ID NO: 1263970 - RNA, 19 nt, Homo sapiens
  misc_RNA (1)...(19): siRNA sense strand
ccacuuaccagacuaaauc

SEQ ID NO: 1263971 - RNA, 19 nt, Homo sapiens
  misc_RNA (1)...(19): siRNA sense strand
acgaguagauuauaagugu

SEQ ID NO: 1263972 - RNA, 19 nt, Homo sapiens
  misc_RNA (1)...(19): siRNA sense strand
cuacaaagcaacaguuaug

SEQ ID NO: 1263973 - RNA, 19 nt, Homo sapiens
  misc_RNA (1)...(19): siRNA sense strand
ccaccaacauuugaagcua

SEQ ID NO: 1263974 - RNA, 19 nt, Homo sapiens
  misc_RNA (1)...(19): siRNA sense strand
uauacgggauccuuuaaau

SEQ ID NO: 1263975 - RNA, 19 nt, Homo sapiens
  misc_RNA (1)...(19): siRNA sense strand
cgaguuugguuaucagaug

SEQ ID NO: 1263976 - RNA, 19 nt, Homo sapiens
  misc_RNA (1)...(19): siRNA sense strand
gaacgaguagauuauaagu

SEQ ID NO: 1263977 - RNA, 19 nt, Homo sapiens
  misc_RNA (1)...(19): siRNA sense strand
gugaggagccaccaacauu

SEQ ID NO: 1263978 - RNA, 19 nt, Homo sapiens
  misc_RNA (1)...(19): siRNA sense strand
gauggcagcgacacaauug

SEQ ID NO: 1263979 - RNA, 19 nt, Homo sapiens
  misc_RNA (1)...(19): siRNA sense strand
ucucagaugacgccuguua

SEQ ID NO: 1263980 - RNA, 19 nt, Homo sapiens
  misc_RNA (1)...(19): siRNA sense strand
gaggagccaccaacauuug

SEQ ID NO: 1263981 - RNA, 19 nt, Homo sapiens
  misc_RNA (1)...(19): siRNA sense strand
gcuauggagcucauuggua

SEQ ID NO: 1263982 - RNA, 19 nt, Homo sapiens
  misc_RNA (1)...(19): siRNA sense strand
acacaccuuuagugaagua

SEQ ID NO: 1263983 - RNA, 19 nt, Homo sapiens
  misc_RNA (1)...(19): siRNA sense strand
uagagaaacauguccauau

SEQ ID NO: 1263984 - RNA, 19 nt, Homo sapiens
  misc_RNA (1)...(19): siRNA sense strand
guuccaaagugucuuaaag

SEQ ID NO: 1263985 - RNA, 19 nt, Homo sapiens
  misc_RNA (1)...(19): siRNA sense strand
ggugaacgaguagauuaua

SEQ ID NO: 1263986 - RNA, 19 nt, Homo sapiens
  misc_RNA (1)...(19): siRNA sense strand
gaaguagaaguauuugagu

SEQ ID NO: 1263987 - RNA, 19 nt, Homo sapiens
  misc_RNA (1)...(19): siRNA sense strand
gaaacauguccauauauac

SEQ ID NO: 1263988 - RNA, 19 nt, Homo sapiens
  misc_RNA (1)...(19): siRNA sense strand
ugacgccuguuauagagaa

SEQ ID NO: 1263989 - RNA, 19 nt, Homo sapiens
  misc_RNA (1)...(19): siRNA sense strand
cgaguagauuauaagugua

SEQ ID NO: 1263990 - RNA, 19 nt, Homo sapiens
  misc_RNA (1)...(19): siRNA sense strand
gcacuuuauuuguaaugag

SEQ ID NO: 1263991 - RNA, 19 nt, Homo sapiens
  misc_RNA (1)...(19): siRNA sense strand
guagaaguauuugaguauc

SEQ ID NO: 1263992 - RNA, 19 nt, Homo sapiens
  misc_RNA (1)...(19): siRNA sense strand
guauuugaguaucuugaug

SEQ ID NO: 1263993 - RNA, 19 nt, Homo sapiens
  misc_RNA (1)...(19): siRNA sense strand
aggaauacuugacaguuug

SEQ ID NO: 1263994 - RNA, 19 nt, Homo sapiens
  misc_RNA (1)...(19): siRNA sense strand
ccaaaacccuacuaugaga

SEQ ID NO: 1263995 - RNA, 19 nt, Homo sapiens
  misc_RNA (1)...(19): siRNA sense strand
aguguaaaguggucaaaug

SEQ ID NO: 1263996 - RNA, 19 nt, Homo sapiens
  misc_RNA (1)...(19): siRNA sense strand
ccacccauacuauuuguga

SEQ ID NO: 1263997 - RNA, 19 nt, Homo sapiens
  misc_RNA (1)...(19): siRNA sense strand
uuggagagagcacgauuua

SEQ ID NO: 1263998 - RNA, 19 nt, Homo sapiens
  misc_RNA (1)...(19): siRNA sense strand
gguuaucagaugcacuuua

SEQ ID NO: 1263999 - RNA, 19 nt, Homo sapiens
  misc_RNA (1)...(19): siRNA sense strand
caccaacauuugaagcuau

SEQ ID NO: 1264000 - RNA, 19 nt, Homo sapiens
  misc_RNA (1)...(19): siRNA sense strand
ugaggagccaccaacauuu

SEQ ID NO: 1264001 - RNA, 19 nt, Homo sapiens
  misc_RNA (1)...(19): siRNA sense strand
ggaaggaauacuugacagu

SEQ ID NO: 1264002 - RNA, 19 nt, Homo sapiens
  misc_RNA (1)...(19): siRNA sense strand
gaggaaggaauacuugaca

SEQ ID NO: 1264003 - RNA, 19 nt, Homo sapiens
  misc_RNA (1)...(19): siRNA sense strand
ccaguuccaaagugucuua

SEQ ID NO: 1264004 - RNA, 19 nt, Homo sapiens
  misc_RNA (1)...(19): siRNA sense strand
ugaguaucuugaugcagua

SEQ ID NO: 1264005 - RNA, 19 nt, Homo sapiens
  misc_RNA (1)...(19): siRNA sense strand
caccuuuagugaaguagaa

SEQ ID NO: 1264006 - RNA, 19 nt, Homo sapiens
  misc_RNA (1)...(19): siRNA sense strand
acagauaucaggauuugga

SEQ ID NO: 1264007 - RNA, 19 nt, Homo sapiens
  misc_RNA (1)...(19): siRNA sense strand
ucauugcugugauuguuau

SEQ ID NO: 1264008 - RNA, 19 nt, Homo sapiens
  misc_RNA (1)...(19): siRNA sense strand
ucagaugcacuuuauuugu

SEQ ID NO: 1264009 - RNA, 19 nt, Homo sapiens
  misc_RNA (1)...(19): siRNA sense strand
gugcugcuccagaguguaa

SEQ ID NO: 1264010 - RNA, 19 nt, Homo sapiens
  misc_RNA (1)...(19): siRNA sense strand
ggaaaacacaccuuuagug

SEQ ID NO: 1264011 - RNA, 19 nt, Homo sapiens
  misc_RNA (1)...(19): siRNA sense strand
aaggaucaguagcaauuug

SEQ ID NO: 1264012 - RNA, 19 nt, Homo sapiens
  misc_RNA (1)...(19): siRNA sense strand
uauauacgggauccuuuaa

SEQ ID NO: 1264013 - RNA, 19 nt, Homo sapiens
  misc_RNA (1)...(19): siRNA sense strand
ugaaguagaaguauuugag

SEQ ID NO: 1264014 - RNA, 19 nt, Homo sapiens
  misc_RNA (1)...(19): siRNA sense strand
cuugacaguuuggauguuu

SEQ ID NO: 1264015 - RNA, 19 nt, Homo sapiens
  misc_RNA (1)...(19): siRNA sense strand
cauauauacgggauccuuu

SEQ ID NO: 1264016 - RNA, 19 nt, Homo sapiens
  misc_RNA (1)...(19): siRNA sense strand
auauauacgggauccuuua

SEQ ID NO: 1264017 - RNA, 19 nt, Homo sapiens
  misc_RNA (1)...(19): siRNA sense strand
cuuaaaggaucaguagcaa

SEQ ID NO: 1264018 - RNA, 19 nt, Homo sapiens
  misc_RNA (1)...(19): siRNA sense strand
uaaaccugaggaaggaaua

SEQ ID NO: 1264019 - RNA, 19 nt, Homo sapiens
  misc_RNA (1)...(19): siRNA sense strand
agaugacgccuguuauaga

SEQ ID NO: 1264020 - RNA, 19 nt, Homo sapiens
  misc_RNA (1)...(19): siRNA sense strand
ugugauuguuauugccaua

SEQ ID NO: 1264021 - RNA, 19 nt, Homo sapiens
  misc_RNA (1)...(19): siRNA sense strand
gagagcacgauuuauugug

SEQ ID NO: 1264022 - RNA, 19 nt, Homo sapiens
  misc_RNA (1)...(19): siRNA sense strand
gaaguauuugaguaucuug

SEQ ID NO: 1264023 - RNA, 19 nt, Homo sapiens
  misc_RNA (1)...(19): siRNA sense strand
ggcuaccugucucagauga

SEQ ID NO: 1264024 - RNA, 19 nt, Homo sapiens
  misc_RNA (1)...(19): siRNA sense strand
gauaucaggauuuggaaaa

SEQ ID NO: 1264025 - RNA, 19 nt, Homo sapiens
  misc_RNA (1)...(19): siRNA sense strand
ccucuugccacccauacua

SEQ ID NO: 1264026 - RNA, 19 nt, Homo sapiens
  misc_RNA (1)...(19): siRNA sense strand
ccaugguguugcugcugua

SEQ ID NO: 1264027 - RNA, 19 nt, Homo sapiens
  misc_RNA (1)...(19): siRNA sense strand
cagaugacgccuguuauag

SEQ ID NO: 1264028 - RNA, 19 nt, Homo sapiens
  misc_RNA (1)...(19): siRNA sense strand
cagaugguggagcugaaua

SEQ ID NO: 1264029 - RNA, 19 nt, Homo sapiens
  misc_RNA (1)...(19): siRNA sense strand
gucauugcugugauuguua

SEQ ID NO: 1264030 - RNA, 19 nt, Homo sapiens
  misc_RNA (1)...(19): siRNA sense strand
ggagccaccaacauuugaa

SEQ ID NO: 1264031 - RNA, 19 nt, Homo sapiens
  misc_RNA (1)...(19): siRNA sense strand
uuggugaacgaguagauua

SEQ ID NO: 1264032 - RNA, 19 nt, Homo sapiens
  misc_RNA (1)...(19): siRNA sense strand
gcgcuuuccuggguugcuu

SEQ ID NO: 1264033 - RNA, 19 nt, Homo sapiens
  misc_RNA (1)...(19): siRNA sense strand
uacuacaaagcaacaguua

SEQ ID NO: 1264034 - RNA, 19 nt, Homo sapiens
  misc_RNA (1)...(19): siRNA sense strand
cuugaugcaguaacuuaua

SEQ ID NO: 1264035 - RNA, 19 nt, Homo sapiens
  misc_RNA (1)...(19): siRNA sense strand
aaacauguccauauauacg

SEQ ID NO: 1264036 - RNA, 19 nt, Homo sapiens
  misc_RNA (1)...(19): siRNA sense strand
guguaaaguggucaaaugu

SEQ ID NO: 1264037 - RNA, 19 nt, Homo sapiens
  misc_RNA (1)...(19): siRNA sense strand
cuuacgaguuugguuauca

SEQ ID NO: 1264038 - RNA, 19 nt, Homo sapiens
  misc_RNA (1)...(19): siRNA sense strand
uacgggauccuuuaaaugg

SEQ ID NO: 1264039 - RNA, 19 nt, Homo sapiens
  misc_RNA (1)...(19): siRNA sense strand
gcagaugguggagcugaau

SEQ ID NO: 1264040 - RNA, 19 nt, Homo sapiens
  misc_RNA (1)...(19): siRNA sense strand
aaccaaaacccuacuauga

SEQ ID NO: 1264041 - RNA, 19 nt, Homo sapiens
  misc_RNA (1)...(19): siRNA sense strand
uugaugcaguaacuuauag

SEQ ID NO: 1264042 - RNA, 19 nt, Homo sapiens
  misc_RNA (1)...(19): siRNA sense strand
ggagcugaauaugccacuu

SEQ ID NO: 1264043 - RNA, 19 nt, Homo sapiens
  misc_RNA (1)...(19): siRNA sense strand
cgauggcagcgacacaauu

SEQ ID NO: 1264044 - RNA, 19 nt, Homo sapiens
  misc_RNA (1)...(19): siRNA sense strand
gauccauuuucacuuauug

SEQ ID NO: 1264045 - RNA, 19 nt, Homo sapiens
  misc_RNA (1)...(19): siRNA sense strand
ggagagagcacgauuuauu

SEQ ID NO: 1264046 - RNA, 19 nt, Homo sapiens
  misc_RNA (1)...(19): siRNA sense strand
agagaaacauguccauaua

SEQ ID NO: 1264047 - RNA, 19 nt, Homo sapiens
  misc_RNA (1)...(19): siRNA sense strand
cagaugcacuuuauuugua

SEQ ID NO: 1264048 - RNA, 19 nt, Homo sapiens
  misc_RNA (1)...(19): siRNA sense strand
ggacuuacgaguuugguua

SEQ ID NO: 1264049 - RNA, 19 nt, Homo sapiens
  misc_RNA (1)...(19): siRNA sense strand
aaacagauaucaggauuug

SEQ ID NO: 1264050 - RNA, 19 nt, Homo sapiens
  misc_RNA (1)...(19): siRNA sense strand
cuauggagcucauugguaa

SEQ ID NO: 1264051 - RNA, 19 nt, Homo sapiens
  misc_RNA (1)...(19): siRNA sense strand
aaacacaccuuuagugaag

SEQ ID NO: 1264052 - RNA, 19 nt, Homo sapiens
  misc_RNA (1)...(19): siRNA sense strand
gaacuuaaaggaucaguag

SEQ ID NO: 1264053 - RNA, 19 nt, Homo sapiens
  misc_RNA (1)...(19): siRNA sense strand
gaaaacagauaucaggauu

SEQ ID NO: 1264054 - RNA, 19 nt, Homo sapiens
  misc_RNA (1)...(19): siRNA sense strand
uaaaggaucaguagcaauu

SEQ ID NO: 1264055 - RNA, 19 nt, Homo sapiens
  misc_RNA (1)...(19): siRNA sense strand
aaaugggacuuacgaguuu

SEQ ID NO: 1264056 - RNA, 19 nt, Homo sapiens
  misc_RNA (1)...(19): siRNA sense strand
guuaucagaugcacuuuau

SEQ ID NO: 1264057 - RNA, 19 nt, Homo sapiens
  misc_RNA (1)...(19): siRNA sense strand
ugagauuggugaacgagua

SEQ ID NO: 1264058 - RNA, 19 nt, Homo sapiens
  misc_RNA (1)...(19): siRNA sense strand
gugaacgaguagauuauaa

SEQ ID NO: 1264059 - RNA, 19 nt, Homo sapiens
  misc_RNA (1)...(19): siRNA sense strand
gagagagcacgauuuauug

SEQ ID NO: 1264060 - RNA, 19 nt, Homo sapiens
  misc_RNA (1)...(19): siRNA sense strand
caaaugggacuuacgaguu

SEQ ID NO: 1264061 - RNA, 19 nt, Homo sapiens
  misc_RNA (1)...(19): siRNA sense strand
ggucauugcugugauuguu

SEQ ID NO: 1264062 - RNA, 19 nt, Homo sapiens
  misc_RNA (1)...(19): siRNA sense strand
ccagauccauuuucacuua

SEQ ID NO: 1264063 - RNA, 19 nt, Homo sapiens
  misc_RNA (1)...(19): siRNA sense strand
gaaggaauacuugacaguu

SEQ ID NO: 1264064 - RNA, 19 nt, Homo sapiens
  misc_RNA (1)...(19): siRNA sense strand
aaggaauacuugacaguuu

SEQ ID NO: 1264065 - RNA, 19 nt, Homo sapiens
  misc_RNA (1)...(19): siRNA sense strand
ucagaugacgccuguuaua

SEQ ID NO: 1264066 - RNA, 19 nt, Homo sapiens
  misc_RNA (1)...(19): siRNA sense strand
gaaaacacaccuuuaguga

SEQ ID NO: 1264067 - RNA, 19 nt, Homo sapiens
  misc_RNA (1)...(19): siRNA sense strand
gaugacgccuguuauagag

SEQ ID NO: 1264068 - RNA, 19 nt, Homo sapiens
  misc_RNA (1)...(19): siRNA sense strand
gagaaacauguccauauau

SEQ ID NO: 1264069 - RNA, 19 nt, Homo sapiens
  misc_RNA (1)...(19): siRNA sense strand
acgaguagauuauaagugu

SEQ ID NO: 1264070 - RNA, 19 nt, Homo sapiens
  misc_RNA (1)...(19): siRNA sense strand
cuacaaagcaacaguuaug

SEQ ID NO: 1264071 - RNA, 19 nt, Homo sapiens
  misc_RNA (1)...(19): siRNA sense strand
ccaccaacauuugaagcua

SEQ ID NO: 1264072 - RNA, 19 nt, Homo sapiens
  misc_RNA (1)...(19): siRNA sense strand
uauacgggauccuuuaaau

SEQ ID NO: 1264073 - RNA, 19 nt, Homo sapiens
  misc_RNA (1)...(19): siRNA sense strand
cgaguuugguuaucagaug

SEQ ID NO: 1264074 - RNA, 19 nt, Homo sapiens
  misc_RNA (1)...(19): siRNA sense strand
gaacgaguagauuauaagu

SEQ ID NO: 1264075 - RNA, 19 nt, Homo sapiens
  misc_RNA (1)...(19): siRNA sense strand
gugaggagccaccaacauu

SEQ ID NO: 1264076 - RNA, 19 nt, Homo sapiens
  misc_RNA (1)...(19): siRNA sense strand
gauggcagcgacacaauug

SEQ ID NO: 1264077 - RNA, 19 nt, Homo sapiens
  misc_RNA (1)...(19): siRNA sense strand
gcuauggagcucauuggua

SEQ ID NO: 1264078 - RNA, 19 nt, Homo sapiens
  misc_RNA (1)...(19): siRNA sense strand
gaggagccaccaacauuug

SEQ ID NO: 1264079 - RNA, 19 nt, Homo sapiens
  misc_RNA (1)...(19): siRNA sense strand
acacaccuuuagugaagua

SEQ ID NO: 1264080 - RNA, 19 nt, Homo sapiens
  misc_RNA (1)...(19): siRNA sense strand
ucucagaugacgccuguua

SEQ ID NO: 1264081 - RNA, 19 nt, Homo sapiens
  misc_RNA (1)...(19): siRNA sense strand
uagagaaacauguccauau

SEQ ID NO: 1264082 - RNA, 19 nt, Homo sapiens
  misc_RNA (1)...(19): siRNA sense strand
guuccaaagugucuuaaag

SEQ ID NO: 1264083 - RNA, 19 nt, Homo sapiens
  misc_RNA (1)...(19): siRNA sense strand
ggugaacgaguagauuaua

SEQ ID NO: 1264084 - RNA, 19 nt, Homo sapiens
  misc_RNA (1)...(19): siRNA sense strand
gaaguagaaguauuugagu

SEQ ID NO: 1264085 - RNA, 19 nt, Homo sapiens
  misc_RNA (1)...(19): siRNA sense strand
gaaacauguccauauauac

SEQ ID NO: 1264086 - RNA, 19 nt, Homo sapiens
  misc_RNA (1)...(19): siRNA sense strand
ugacgccuguuauagagaa

SEQ ID NO: 1264087 - RNA, 19 nt, Homo sapiens
  misc_RNA (1)...(19): siRNA sense strand
cgaguagauuauaagugua

SEQ ID NO: 1264088 - RNA, 19 nt, Homo sapiens
  misc_RNA (1)...(19): siRNA sense strand
gcacuuuauuuguaaugag

SEQ ID NO: 1264089 - RNA, 19 nt, Homo sapiens
  misc_RNA (1)...(19): siRNA sense strand
guagaaguauuugaguauc

SEQ ID NO: 1264090 - RNA, 19 nt, Homo sapiens
  misc_RNA (1)...(19): siRNA sense strand
guauuugaguaucuugaug

SEQ ID NO: 1264091 - RNA, 19 nt, Homo sapiens
  misc_RNA (1)...(19): siRNA sense strand
aggaauacuugacaguuug

SEQ ID NO: 1264092 - RNA, 19 nt, Homo sapiens
  misc_RNA (1)...(19): siRNA sense strand
ccaaaacccuacuaugaga

SEQ ID NO: 1264093 - RNA, 19 nt, Homo sapiens
  misc_RNA (1)...(19): siRNA sense strand
aguguaaaguggucaaaug

SEQ ID NO: 1264094 - RNA, 19 nt, Homo sapiens
  misc_RNA (1)...(19): siRNA sense strand
ccacccauacuauuuguga

SEQ ID NO: 1264095 - RNA, 19 nt, Homo sapiens
  misc_RNA (1)...(19): siRNA sense strand
caccaacauuugaagcuau

SEQ ID NO: 1264096 - RNA, 19 nt, Homo sapiens
  misc_RNA (1)...(19): siRNA sense strand
uuggagagagcacgauuua

SEQ ID NO: 1264097 - RNA, 19 nt, Homo sapiens
  misc_RNA (1)...(19): siRNA sense strand
gguuaucagaugcacuuua

SEQ ID NO: 1264098 - RNA, 19 nt, Homo sapiens
  misc_RNA (1)...(19): siRNA sense strand
ugaggagccaccaacauuu

SEQ ID NO: 1264099 - RNA, 19 nt, Homo sapiens
  misc_RNA (1)...(19): siRNA sense strand
ggaaggaauacuugacagu

SEQ ID NO: 1264100 - RNA, 19 nt, Homo sapiens
  misc_RNA (1)...(19): siRNA sense strand
gaggaaggaauacuugaca

SEQ ID NO: 1264101 - RNA, 19 nt, Homo sapiens
  misc_RNA (1)...(19): siRNA sense strand
ccaguuccaaagugucuua

SEQ ID NO: 1264102 - RNA, 19 nt, Homo sapiens
  misc_RNA (1)...(19): siRNA sense strand
ugaguaucuugaugcagua

SEQ ID NO: 1264103 - RNA, 19 nt, Homo sapiens
  misc_RNA (1)...(19): siRNA sense strand
caccuuuagugaaguagaa

SEQ ID NO: 1264104 - RNA, 19 nt, Homo sapiens
  misc_RNA (1)...(19): siRNA sense strand
acagauaucaggauuugga

SEQ ID NO: 1264105 - RNA, 19 nt, Homo sapiens
  misc_RNA (1)...(19): siRNA sense strand
ucauugcugugauuguuau

SEQ ID NO: 1264106 - RNA, 19 nt, Homo sapiens
  misc_RNA (1)...(19): siRNA sense strand
ucagaugcacuuuauuugu

SEQ ID NO: 1264107 - RNA, 19 nt, Homo sapiens
  misc_RNA (1)...(19): siRNA sense strand
gugcugcuccagaguguaa

SEQ ID NO: 1264108 - RNA, 19 nt, Homo sapiens
  misc_RNA (1)...(19): siRNA sense strand
ggaaaacacaccuuuagug

SEQ ID NO: 1264109 - RNA, 19 nt, Homo sapiens
  misc_RNA (1)...(19): siRNA sense strand
aaggaucaguagcaauuug

SEQ ID NO: 1264110 - RNA, 19 nt, Homo sapiens
  misc_RNA (1)...(19): siRNA sense strand
uauauacgggauccuuuaa

SEQ ID NO: 1264111 - RNA, 19 nt, Homo sapiens
  misc_RNA (1)...(19): siRNA sense strand
ugaaguagaaguauuugag

SEQ ID NO: 1264112 - RNA, 19 nt, Homo sapiens
  misc_RNA (1)...(19): siRNA sense strand
cuugacaguuuggauguuu

SEQ ID NO: 1264113 - RNA, 19 nt, Homo sapiens
  misc_RNA (1)...(19): siRNA sense strand
cauauauacgggauccuuu

SEQ ID NO: 1264114 - RNA, 19 nt, Homo sapiens
  misc_RNA (1)...(19): siRNA sense strand
auauauacgggauccuuua

SEQ ID NO: 1264115 - RNA, 19 nt, Homo sapiens
  misc_RNA (1)...(19): siRNA sense strand
cuuaaaggaucaguagcaa

SEQ ID NO: 1264116 - RNA, 19 nt, Homo sapiens
  misc_RNA (1)...(19): siRNA sense strand
uaaaccugaggaaggaaua

SEQ ID NO: 1264117 - RNA, 19 nt, Homo sapiens
  misc_RNA (1)...(19): siRNA sense strand
agaugacgccuguuauaga

SEQ ID NO: 1264118 - RNA, 19 nt, Homo sapiens
  misc_RNA (1)...(19): siRNA sense strand
ugugauuguuauugccaua

SEQ ID NO: 1264119 - RNA, 19 nt, Homo sapiens
  misc_RNA (1)...(19): siRNA sense strand
gagagcacgauuuauugug

SEQ ID NO: 1264120 - RNA, 19 nt, Homo sapiens
  misc_RNA (1)...(19): siRNA sense strand
gaaguauuugaguaucuug

SEQ ID NO: 1264121 - RNA, 19 nt, Homo sapiens
  misc_RNA (1)...(19): siRNA sense strand
ggcuaccugucucagauga

SEQ ID NO: 1264122 - RNA, 19 nt, Homo sapiens
  misc_RNA (1)...(19): siRNA sense strand
gauaucaggauuuggaaaa

SEQ ID NO: 1264123 - RNA, 19 nt, Homo sapiens
  misc_RNA (1)...(19): siRNA sense strand
ccucuugccacccauacua

SEQ ID NO: 1264124 - RNA, 19 nt, Homo sapiens
  misc_RNA (1)...(19): siRNA sense strand
ccaugguguugcugcugua

SEQ ID NO: 1264125 - RNA, 19 nt, Homo sapiens
  misc_RNA (1)...(19): siRNA sense strand
cagaugacgccuguuauag

SEQ ID NO: 1264126 - RNA, 19 nt, Homo sapiens
  misc_RNA (1)...(19): siRNA sense strand
uuggugaacgaguagauua

SEQ ID NO: 1264127 - RNA, 19 nt, Homo sapiens
  misc_RNA (1)...(19): siRNA sense strand
gucauugcugugauuguua

SEQ ID NO: 1264128 - RNA, 19 nt, Homo sapiens
  misc_RNA (1)...(19): siRNA sense strand
ggagccaccaacauuugaa

SEQ ID NO: 1264129 - RNA, 19 nt, Homo sapiens
  misc_RNA (1)...(19): siRNA sense strand
gcgcuuuccuggguugcuu

SEQ ID NO: 1264130 - RNA, 19 nt, Homo sapiens
  misc_RNA (1)...(19): siRNA sense strand
uacuacaaagcaacaguua

SEQ ID NO: 1264131 - RNA, 19 nt, Homo sapiens
  misc_RNA (1)...(19): siRNA sense strand
cuugaugcaguaacuuaua

SEQ ID NO: 1264132 - RNA, 19 nt, Homo sapiens
  misc_RNA (1)...(19): siRNA sense strand
aaacauguccauauauacg

SEQ ID NO: 1264133 - RNA, 19 nt, Homo sapiens
  misc_RNA (1)...(19): siRNA sense strand
guguaaaguggucaaaugu

SEQ ID NO: 1264134 - RNA, 19 nt, Homo sapiens
  misc_RNA (1)...(19): siRNA sense strand
cuuacgaguuugguuauca

SEQ ID NO: 1264135 - RNA, 19 nt, Homo sapiens
  misc_RNA (1)...(19): siRNA sense strand
uacgggauccuuuaaaugg

SEQ ID NO: 1264136 - RNA, 19 nt, Homo sapiens
  misc_RNA (1)...(19): siRNA sense strand
aaccaaaacccuacuauga

SEQ ID NO: 1264137 - RNA, 19 nt, Homo sapiens
  misc_RNA (1)...(19): siRNA sense strand
cccaauaugugaaaagguu

SEQ ID NO: 1264138 - RNA, 19 nt, Homo sapiens
  misc_RNA (1)...(19): siRNA sense strand
cgauggcagcgacacaauu

SEQ ID NO: 1264139 - RNA, 19 nt, Homo sapiens
  misc_RNA (1)...(19): siRNA sense strand
gauccauuuucacuuauug

SEQ ID NO: 1264140 - RNA, 19 nt, Homo sapiens
  misc_RNA (1)...(19): siRNA sense strand
uugaugcaguaacuuauag

SEQ ID NO: 1264141 - RNA, 19 nt, Homo sapiens
  misc_RNA (1)...(19): siRNA sense strand
guaucuugaugcaguaacu

SEQ ID NO: 1264142 - RNA, 19 nt, Homo sapiens
  misc_RNA (1)...(19): siRNA sense strand
caacauuugaagcuaugga

SEQ ID NO: 1264143 - RNA, 19 nt, Homo sapiens
  misc_RNA (1)...(19): siRNA sense strand
gagauuggugaacgaguag

SEQ ID NO: 1264144 - RNA, 19 nt, Homo sapiens
  misc_RNA (1)...(19): siRNA sense strand
ggagagagcacgauuuauu

SEQ ID NO: 1264145 - RNA, 19 nt, Homo sapiens
  misc_RNA (1)...(19): siRNA sense strand
agagaaacauguccauaua

SEQ ID NO: 1264146 - RNA, 19 nt, Homo sapiens
  misc_RNA (1)...(19): siRNA sense strand
cagaugcacuuuauuugua

SEQ ID NO: 1264147 - RNA, 19 nt, Homo sapiens
  misc_RNA (1)...(19): siRNA sense strand
ggacuuacgaguuugguua

SEQ ID NO: 1264148 - RNA, 19 nt, Homo sapiens
  misc_RNA (1)...(19): siRNA sense strand
aaacagauaucaggauuug

SEQ ID NO: 1264149 - RNA, 19 nt, Homo sapiens
  misc_RNA (1)...(19): siRNA sense strand
cuauggagcucauugguaa

SEQ ID NO: 1264150 - RNA, 19 nt, Homo sapiens
  misc_RNA (1)...(19): siRNA sense strand
aaacacaccuuuagugaag

SEQ ID NO: 1264151 - RNA, 19 nt, Homo sapiens
  misc_RNA (1)...(19): siRNA sense strand
gaacuuaaaggaucaguag

SEQ ID NO: 1264152 - RNA, 19 nt, Homo sapiens
  misc_RNA (1)...(19): siRNA sense strand
gaaaacagauaucaggauu

SEQ ID NO: 1264153 - RNA, 19 nt, Homo sapiens
  misc_RNA (1)...(19): siRNA sense strand
uaaaggaucaguagcaauu

SEQ ID NO: 1264154 - RNA, 19 nt, Homo sapiens
  misc_RNA (1)...(19): siRNA sense strand
aaaugggacuuacgaguuu

SEQ ID NO: 1264155 - RNA, 19 nt, Homo sapiens
  misc_RNA (1)...(19): siRNA sense strand
guuaucagaugcacuuuau

SEQ ID NO: 1264156 - RNA, 19 nt, Homo sapiens
  misc_RNA (1)...(19): siRNA sense strand
ugagauuggugaacgagua

SEQ ID NO: 1264157 - RNA, 19 nt, Homo sapiens
  misc_RNA (1)...(19): siRNA sense strand
gugaacgaguagauuauaa

SEQ ID NO: 1264158 - RNA, 19 nt, Homo sapiens
  misc_RNA (1)...(19): siRNA sense strand
gagagagcacgauuuauug

SEQ ID NO: 1264159 - RNA, 19 nt, Homo sapiens
  misc_RNA (1)...(19): siRNA sense strand
caaaugggacuuacgaguu

SEQ ID NO: 1264160 - RNA, 19 nt, Homo sapiens
  misc_RNA (1)...(19): siRNA sense strand
ggucauugcugugauuguu

SEQ ID NO: 1264161 - RNA, 19 nt, Homo sapiens
  misc_RNA (1)...(19): siRNA sense strand
ccagauccauuuucacuua

SEQ ID NO: 1264162 - RNA, 19 nt, Homo sapiens
  misc_RNA (1)...(19): siRNA sense strand
gaaggaauacuugacaguu

SEQ ID NO: 1264163 - RNA, 19 nt, Homo sapiens
  misc_RNA (1)...(19): siRNA sense strand
aaggaauacuugacaguuu

SEQ ID NO: 1264164 - RNA, 19 nt, Homo sapiens
  misc_RNA (1)...(19): siRNA sense strand
ucagaugacgccuguuaua

SEQ ID NO: 1264165 - RNA, 19 nt, Homo sapiens
  misc_RNA (1)...(19): siRNA sense strand
gaaaacacaccuuuaguga

SEQ ID NO: 1264166 - RNA, 19 nt, Homo sapiens
  misc_RNA (1)...(19): siRNA sense strand
gaugacgccuguuauagag

SEQ ID NO: 1264167 - RNA, 19 nt, Homo sapiens
  misc_RNA (1)...(19): siRNA sense strand
gagaaacauguccauauau

SEQ ID NO: 1264168 - RNA, 19 nt, Homo sapiens
  misc_RNA (1)...(19): siRNA sense strand
acgaguagauuauaagugu

SEQ ID NO: 1264169 - RNA, 19 nt, Homo sapiens
  misc_RNA (1)...(19): siRNA sense strand
cuacaaagcaacaguuaug

SEQ ID NO: 1264170 - RNA, 19 nt, Homo sapiens
  misc_RNA (1)...(19): siRNA sense strand
ccaccaacauuugaagcua

SEQ ID NO: 1264171 - RNA, 19 nt, Homo sapiens
  misc_RNA (1)...(19): siRNA sense strand
uauacgggauccuuuaaau

SEQ ID NO: 1264172 - RNA, 19 nt, Homo sapiens
  misc_RNA (1)...(19): siRNA sense strand
cgaguuugguuaucagaug

SEQ ID NO: 1264173 - RNA, 19 nt, Homo sapiens
  misc_RNA (1)...(19): siRNA sense strand
gaacgaguagauuauaagu

SEQ ID NO: 1264174 - RNA, 19 nt, Homo sapiens
  misc_RNA (1)...(19): siRNA sense strand
gugaggagccaccaacauu

SEQ ID NO: 1264175 - RNA, 19 nt, Homo sapiens
  misc_RNA (1)...(19): siRNA sense strand
gauggcagcgacacaauug

SEQ ID NO: 1264176 - RNA, 19 nt, Homo sapiens
  misc_RNA (1)...(19): siRNA sense strand
gcuauggagcucauuggua

SEQ ID NO: 1264177 - RNA, 19 nt, Homo sapiens
  misc_RNA (1)...(19): siRNA sense strand
gaggagccaccaacauuug

SEQ ID NO: 1264178 - RNA, 19 nt, Homo sapiens
  misc_RNA (1)...(19): siRNA sense strand
acacaccuuuagugaagua

SEQ ID NO: 1264179 - RNA, 19 nt, Homo sapiens
  misc_RNA (1)...(19): siRNA sense strand
ucucagaugacgccuguua

SEQ ID NO: 1264180 - RNA, 19 nt, Homo sapiens
  misc_RNA (1)...(19): siRNA sense strand
uagagaaacauguccauau

SEQ ID NO: 1264181 - RNA, 19 nt, Homo sapiens
  misc_RNA (1)...(19): siRNA sense strand
ggugaacgaguagauuaua

SEQ ID NO: 1264182 - RNA, 19 nt, Homo sapiens
  misc_RNA (1)...(19): siRNA sense strand
gaaguagaaguauuugagu

SEQ ID NO: 1264183 - RNA, 19 nt, Homo sapiens
  misc_RNA (1)...(19): siRNA sense strand
gaaacauguccauauauac

SEQ ID NO: 1264184 - RNA, 19 nt, Homo sapiens
  misc_RNA (1)...(19): siRNA sense strand
ugacgccuguuauagagaa

SEQ ID NO: 1264185 - RNA, 19 nt, Homo sapiens
  misc_RNA (1)...(19): siRNA sense strand
cgaguagauuauaagugua

SEQ ID NO: 1264186 - RNA, 19 nt, Homo sapiens
  misc_RNA (1)...(19): siRNA sense strand
gcacuuuauuuguaaugag

SEQ ID NO: 1264187 - RNA, 19 nt, Homo sapiens
  misc_RNA (1)...(19): siRNA sense strand
guagaaguauuugaguauc

SEQ ID NO: 1264188 - RNA, 19 nt, Homo sapiens
  misc_RNA (1)...(19): siRNA sense strand
guauuugaguaucuugaug

SEQ ID NO: 1264189 - RNA, 19 nt, Homo sapiens
  misc_RNA (1)...(19): siRNA sense strand
aggaauacuugacaguuug

SEQ ID NO: 1264190 - RNA, 19 nt, Homo sapiens
  misc_RNA (1)...(19): siRNA sense strand
aguguaaaguggucaaaug

SEQ ID NO: 1264191 - RNA, 19 nt, Homo sapiens
  misc_RNA (1)...(19): siRNA sense strand
ccaaaacccuacuaugaga

SEQ ID NO: 1264192 - RNA, 19 nt, Homo sapiens
  misc_RNA (1)...(19): siRNA sense strand
ccacccauacuauuuguga

SEQ ID NO: 1264193 - RNA, 19 nt, Homo sapiens
  misc_RNA (1)...(19): siRNA sense strand
caccaacauuugaagcuau

SEQ ID NO: 1264194 - RNA, 19 nt, Homo sapiens
  misc_RNA (1)...(19): siRNA sense strand
uuggagagagcacgauuua

SEQ ID NO: 1264195 - RNA, 19 nt, Homo sapiens
  misc_RNA (1)...(19): siRNA sense strand
gguuaucagaugcacuuua

SEQ ID NO: 1264196 - RNA, 19 nt, Homo sapiens
  misc_RNA (1)...(19): siRNA sense strand
ugaggagccaccaacauuu

SEQ ID NO: 1264197 - RNA, 19 nt, Homo sapiens
  misc_RNA (1)...(19): siRNA sense strand
ggaaggaauacuugacagu

SEQ ID NO: 1264198 - RNA, 19 nt, Homo sapiens
  misc_RNA (1)...(19): siRNA sense strand
gaggaaggaauacuugaca

SEQ ID NO: 1264199 - RNA, 19 nt, Homo sapiens
  misc_RNA (1)...(19): siRNA sense strand
ugaguaucuugaugcagua

SEQ ID NO: 1264200 - RNA, 19 nt, Homo sapiens
  misc_RNA (1)...(19): siRNA sense strand
caccuuuagugaaguagaa

SEQ ID NO: 1264201 - RNA, 19 nt, Homo sapiens
  misc_RNA (1)...(19): siRNA sense strand
acagauaucaggauuugga

SEQ ID NO: 1264202 - RNA, 19 nt, Homo sapiens
  misc_RNA (1)...(19): siRNA sense strand
ucauugcugugauuguuau

SEQ ID NO: 1264203 - RNA, 19 nt, Homo sapiens
  misc_RNA (1)...(19): siRNA sense strand
ucagaugcacuuuauuugu

SEQ ID NO: 1264204 - RNA, 19 nt, Homo sapiens
  misc_RNA (1)...(19): siRNA sense strand
gugcugcuccagaguguaa

SEQ ID NO: 1264205 - RNA, 19 nt, Homo sapiens
  misc_RNA (1)...(19): siRNA sense strand
ggaaaacacaccuuuagug

SEQ ID NO: 1264206 - RNA, 19 nt, Homo sapiens
  misc_RNA (1)...(19): siRNA sense strand
aaggaucaguagcaauuug

SEQ ID NO: 1264207 - RNA, 19 nt, Homo sapiens
  misc_RNA (1)...(19): siRNA sense strand
uauauacgggauccuuuaa

SEQ ID NO: 1264208 - RNA, 19 nt, Homo sapiens
  misc_RNA (1)...(19): siRNA sense strand
ugaaguagaaguauuugag

SEQ ID NO: 1264209 - RNA, 19 nt, Homo sapiens
  misc_RNA (1)...(19): siRNA sense strand
cuugacaguuuggauguuu

SEQ ID NO: 1264210 - RNA, 19 nt, Homo sapiens
  misc_RNA (1)...(19): siRNA sense strand
cauauauacgggauccuuu

SEQ ID NO: 1264211 - RNA, 19 nt, Homo sapiens
  misc_RNA (1)...(19): siRNA sense strand
auauauacgggauccuuua

SEQ ID NO: 1264212 - RNA, 19 nt, Homo sapiens
  misc_RNA (1)...(19): siRNA sense strand
cuuaaaggaucaguagcaa

SEQ ID NO: 1264213 - RNA, 19 nt, Homo sapiens
  misc_RNA (1)...(19): siRNA sense strand
uaaaccugaggaaggaaua

SEQ ID NO: 1264214 - RNA, 19 nt, Homo sapiens
  misc_RNA (1)...(19): siRNA sense strand
agaugacgccuguuauaga

SEQ ID NO: 1264215 - RNA, 19 nt, Homo sapiens
  misc_RNA (1)...(19): siRNA sense strand
ugugauuguuauugccaua

SEQ ID NO: 1264216 - RNA, 19 nt, Homo sapiens
  misc_RNA (1)...(19): siRNA sense strand
gagagcacgauuuauugug

SEQ ID NO: 1264217 - RNA, 19 nt, Homo sapiens
  misc_RNA (1)...(19): siRNA sense strand
gaaguauuugaguaucuug

SEQ ID NO: 1264218 - RNA, 19 nt, Homo sapiens
  misc_RNA (1)...(19): siRNA sense strand
ccucuugccacccauacua

SEQ ID NO: 1264219 - RNA, 19 nt, Homo sapiens
  misc_RNA (1)...(19): siRNA sense strand
gauaucaggauuuggaaaa

SEQ ID NO: 1264220 - RNA, 19 nt, Homo sapiens
  misc_RNA (1)...(19): siRNA sense strand
ggcuaccugucucagauga

SEQ ID NO: 1264221 - RNA, 19 nt, Homo sapiens
  misc_RNA (1)...(19): siRNA sense strand
ccaugguguugcugcugua

SEQ ID NO: 1264222 - RNA, 19 nt, Homo sapiens
  misc_RNA (1)...(19): siRNA sense strand
cagaugacgccuguuauag

SEQ ID NO: 1264223 - RNA, 19 nt, Homo sapiens
  misc_RNA (1)...(19): siRNA sense strand
gucauugcugugauuguua

SEQ ID NO: 1264224 - RNA, 19 nt, Homo sapiens
  misc_RNA (1)...(19): siRNA sense strand
uuggugaacgaguagauua

SEQ ID NO: 1264225 - RNA, 19 nt, Homo sapiens
  misc_RNA (1)...(19): siRNA sense strand
ggagccaccaacauuugaa

SEQ ID NO: 1264226 - RNA, 19 nt, Homo sapiens
  misc_RNA (1)...(19): siRNA sense strand
gcgcuuuccuggguugcuu

SEQ ID NO: 1264227 - RNA, 19 nt, Homo sapiens
  misc_RNA (1)...(19): siRNA sense strand
uacuacaaagcaacaguua

SEQ ID NO: 1264228 - RNA, 19 nt, Homo sapiens
  misc_RNA (1)...(19): siRNA sense strand
cuugaugcaguaacuuaua

SEQ ID NO: 1264229 - RNA, 19 nt, Homo sapiens
  misc_RNA (1)...(19): siRNA sense strand
aaacauguccauauauacg

SEQ ID NO: 1264230 - RNA, 19 nt, Homo sapiens
  misc_RNA (1)...(19): siRNA sense strand
guguaaaguggucaaaugu

SEQ ID NO: 1264231 - RNA, 19 nt, Homo sapiens
  misc_RNA (1)...(19): siRNA sense strand
cuuacgaguuugguuauca

SEQ ID NO: 1264232 - RNA, 19 nt, Homo sapiens
  misc_RNA (1)...(19): siRNA sense strand
uacgggauccuuuaaaugg

SEQ ID NO: 1264233 - RNA, 19 nt, Homo sapiens
  misc_RNA (1)...(19): siRNA sense strand
aaccaaaacccuacuauga

SEQ ID NO: 1264234 - RNA, 19 nt, Homo sapiens
  misc_RNA (1)...(19): siRNA sense strand
cccaauaugugaaaagguu

SEQ ID NO: 1264235 - RNA, 19 nt, Homo sapiens
  misc_RNA (1)...(19): siRNA sense strand
cgauggcagcgacacaauu

SEQ ID NO: 1264236 - RNA, 19 nt, Homo sapiens
  misc_RNA (1)...(19): siRNA sense strand
gauccauuuucacuuauug

SEQ ID NO: 1264237 - RNA, 19 nt, Homo sapiens
  misc_RNA (1)...(19): siRNA sense strand
uugaugcaguaacuuauag

SEQ ID NO: 1264238 - RNA, 19 nt, Homo sapiens
  misc_RNA (1)...(19): siRNA sense strand
guaucuugaugcaguaacu

SEQ ID NO: 1264239 - RNA, 19 nt, Homo sapiens
  misc_RNA (1)...(19): siRNA sense strand
caacauuugaagcuaugga

SEQ ID NO: 1264240 - RNA, 19 nt, Homo sapiens
  misc_RNA (1)...(19): siRNA sense strand
gagauuggugaacgaguag

SEQ ID NO: 1264241 - RNA, 19 nt, Homo sapiens
  misc_RNA (1)...(19): siRNA sense strand
ggagagagcacgauuuauu

SEQ ID NO: 1264242 - RNA, 19 nt, Homo sapiens
  misc_RNA (1)...(19): siRNA sense strand
agagaaacauguccauaua

SEQ ID NO: 1264243 - RNA, 19 nt, Homo sapiens
  misc_RNA (1)...(19): siRNA sense strand
cagaugcacuuuauuugua

SEQ ID NO: 1264244 - RNA, 19 nt, Homo sapiens
  misc_RNA (1)...(19): siRNA sense strand
ggacuuacgaguuugguua

SEQ ID NO: 1264245 - RNA, 19 nt, Homo sapiens
  misc_RNA (1)...(19): siRNA sense strand
aaacagauaucaggauuug

SEQ ID NO: 1264246 - RNA, 19 nt, Homo sapiens
  misc_RNA (1)...(19): siRNA sense strand
cuauggagcucauugguaa

SEQ ID NO: 1264247 - RNA, 19 nt, Homo sapiens
  misc_RNA (1)...(19): siRNA sense strand
aaacacaccuuuagugaag

SEQ ID NO: 1264248 - RNA, 19 nt, Homo sapiens
  misc_RNA (1)...(19): siRNA sense strand
gaacuuaaaggaucaguag

SEQ ID NO: 1264249 - RNA, 19 nt, Homo sapiens
  misc_RNA (1)...(19): siRNA sense strand
gaaaacagauaucaggauu

SEQ ID NO: 1264250 - RNA, 19 nt, Homo sapiens
  misc_RNA (1)...(19): siRNA sense strand
uaaaggaucaguagcaauu

SEQ ID NO: 1264251 - RNA, 19 nt, Homo sapiens
  misc_RNA (1)...(19): siRNA sense strand
aaaugggacuuacgaguuu

SEQ ID NO: 1264252 - RNA, 19 nt, Homo sapiens
  misc_RNA (1)...(19): siRNA sense strand
guuaucagaugcacuuuau

SEQ ID NO: 1264253 - RNA, 19 nt, Homo sapiens
  misc_RNA (1)...(19): siRNA sense strand
gagcugaauaugccacuua

SEQ ID NO: 1264254 - RNA, 19 nt, Homo sapiens
  misc_RNA (1)...(19): siRNA sense strand
ugagauuggugaacgagua

SEQ ID NO: 1264255 - RNA, 19 nt, Homo sapiens
  misc_RNA (1)...(19): siRNA sense strand
gugaacgaguagauuauaa

SEQ ID NO: 1264256 - RNA, 19 nt, Homo sapiens
  misc_RNA (1)...(19): siRNA sense strand
gagagagcacgauuuauug

SEQ ID NO: 1264257 - RNA, 19 nt, Homo sapiens
  misc_RNA (1)...(19): siRNA sense strand
caaaugggacuuacgaguu

SEQ ID NO: 1264258 - RNA, 19 nt, Homo sapiens
  misc_RNA (1)...(19): siRNA sense strand
ggucauugcugugauuguu

SEQ ID NO: 1264259 - RNA, 19 nt, Homo sapiens
  misc_RNA (1)...(19): siRNA sense strand
ccagauccauuuucacuua

SEQ ID NO: 1264260 - RNA, 19 nt, Homo sapiens
  misc_RNA (1)...(19): siRNA sense strand
gaaggaauacuugacaguu

SEQ ID NO: 1264261 - RNA, 19 nt, Homo sapiens
  misc_RNA (1)...(19): siRNA sense strand
aaggaauacuugacaguuu

SEQ ID NO: 1264262 - RNA, 19 nt, Homo sapiens
  misc_RNA (1)...(19): siRNA sense strand
ucagaugacgccuguuaua

SEQ ID NO: 1264263 - RNA, 19 nt, Homo sapiens
  misc_RNA (1)...(19): siRNA sense strand
gaaaacacaccuuuaguga

SEQ ID NO: 1264264 - RNA, 19 nt, Homo sapiens
  misc_RNA (1)...(19): siRNA sense strand
gaugacgccuguuauagag

SEQ ID NO: 1264265 - RNA, 19 nt, Homo sapiens
  misc_RNA (1)...(19): siRNA sense strand
gagaaacauguccauauau

SEQ ID NO: 1264266 - RNA, 19 nt, Homo sapiens
  misc_RNA (1)...(19): siRNA sense strand
ccacuuaccagacuaaauc

SEQ ID NO: 1264267 - RNA, 19 nt, Homo sapiens
  misc_RNA (1)...(19): siRNA sense strand
acgaguagauuauaagugu

SEQ ID NO: 1264268 - RNA, 19 nt, Homo sapiens
  misc_RNA (1)...(19): siRNA sense strand
cuacaaagcaacaguuaug

SEQ ID NO: 1264269 - RNA, 19 nt, Homo sapiens
  misc_RNA (1)...(19): siRNA sense strand
ccaccaacauuugaagcua

SEQ ID NO: 1264270 - RNA, 19 nt, Homo sapiens
  misc_RNA (1)...(19): siRNA sense strand
uauacgggauccuuuaaau

SEQ ID NO: 1264271 - RNA, 19 nt, Homo sapiens
  misc_RNA (1)...(19): siRNA sense strand
cgaguuugguuaucagaug

SEQ ID NO: 1264272 - RNA, 19 nt, Homo sapiens
  misc_RNA (1)...(19): siRNA sense strand
gaacgaguagauuauaagu

SEQ ID NO: 1264273 - RNA, 19 nt, Homo sapiens
  misc_RNA (1)...(19): siRNA sense strand
gugaggagccaccaacauu

SEQ ID NO: 1264274 - RNA, 19 nt, Homo sapiens
  misc_RNA (1)...(19): siRNA sense strand
gauggcagcgacacaauug

SEQ ID NO: 1264275 - RNA, 19 nt, Homo sapiens
  misc_RNA (1)...(19): siRNA sense strand
ucucagaugacgccuguua

SEQ ID NO: 1264276 - RNA, 19 nt, Homo sapiens
  misc_RNA (1)...(19): siRNA sense strand
gaggagccaccaacauuug

SEQ ID NO: 1264277 - RNA, 19 nt, Homo sapiens
  misc_RNA (1)...(19): siRNA sense strand
gcuauggagcucauuggua

SEQ ID NO: 1264278 - RNA, 19 nt, Homo sapiens
  misc_RNA (1)...(19): siRNA sense strand
acacaccuuuagugaagua

SEQ ID NO: 1264279 - RNA, 19 nt, Homo sapiens
  misc_RNA (1)...(19): siRNA sense strand
uagagaaacauguccauau

SEQ ID NO: 1264280 - RNA, 19 nt, Homo sapiens
  misc_RNA (1)...(19): siRNA sense strand
ggugaacgaguagauuaua

SEQ ID NO: 1264281 - RNA, 19 nt, Homo sapiens
  misc_RNA (1)...(19): siRNA sense strand
gaaguagaaguauuugagu

SEQ ID NO: 1264282 - RNA, 19 nt, Homo sapiens
  misc_RNA (1)...(19): siRNA sense strand
gaaacauguccauauauac

SEQ ID NO: 1264283 - RNA, 19 nt, Homo sapiens
  misc_RNA (1)...(19): siRNA sense strand
ugacgccuguuauagagaa

SEQ ID NO: 1264284 - RNA, 19 nt, Homo sapiens
  misc_RNA (1)...(19): siRNA sense strand
cgaguagauuauaagugua

SEQ ID NO: 1264285 - RNA, 19 nt, Homo sapiens
  misc_RNA (1)...(19): siRNA sense strand
gcacuuuauuuguaaugag

SEQ ID NO: 1264286 - RNA, 19 nt, Homo sapiens
  misc_RNA (1)...(19): siRNA sense strand
guagaaguauuugaguauc

SEQ ID NO: 1264287 - RNA, 19 nt, Homo sapiens
  misc_RNA (1)...(19): siRNA sense strand
guauuugaguaucuugaug

SEQ ID NO: 1264288 - RNA, 19 nt, Homo sapiens
  misc_RNA (1)...(19): siRNA sense strand
aggaauacuugacaguuug

SEQ ID NO: 1264289 - RNA, 19 nt, Homo sapiens
  misc_RNA (1)...(19): siRNA sense strand
ccaaaacccuacuaugaga

SEQ ID NO: 1264290 - RNA, 19 nt, Homo sapiens
  misc_RNA (1)...(19): siRNA sense strand
aguguaaaguggucaaaug

SEQ ID NO: 1264291 - RNA, 19 nt, Homo sapiens
  misc_RNA (1)...(19): siRNA sense strand
ccacccauacuauuuguga

SEQ ID NO: 1264292 - RNA, 19 nt, Homo sapiens
  misc_RNA (1)...(19): siRNA sense strand
uuggagagagcacgauuua

SEQ ID NO: 1264293 - RNA, 19 nt, Homo sapiens
  misc_RNA (1)...(19): siRNA sense strand
gguuaucagaugcacuuua

SEQ ID NO: 1264294 - RNA, 19 nt, Homo sapiens
  misc_RNA (1)...(19): siRNA sense strand
caccaacauuugaagcuau

SEQ ID NO: 1264295 - RNA, 19 nt, Homo sapiens
  misc_RNA (1)...(19): siRNA sense strand
ugaggagccaccaacauuu

SEQ ID NO: 1264296 - RNA, 19 nt, Homo sapiens
  misc_RNA (1)...(19): siRNA sense strand
ggaaggaauacuugacagu

SEQ ID NO: 1264297 - RNA, 19 nt, Homo sapiens
  misc_RNA (1)...(19): siRNA sense strand
gaggaaggaauacuugaca

SEQ ID NO: 1264298 - RNA, 19 nt, Homo sapiens
  misc_RNA (1)...(19): siRNA sense strand
ugaguaucuugaugcagua

SEQ ID NO: 1264299 - RNA, 19 nt, Homo sapiens
  misc_RNA (1)...(19): siRNA sense strand
caccuuuagugaaguagaa

SEQ ID NO: 1264300 - RNA, 19 nt, Homo sapiens
  misc_RNA (1)...(19): siRNA sense strand
acagauaucaggauuugga

SEQ ID NO: 1264301 - RNA, 19 nt, Homo sapiens
  misc_RNA (1)...(19): siRNA sense strand
ucauugcugugauuguuau

SEQ ID NO: 1264302 - RNA, 19 nt, Homo sapiens
  misc_RNA (1)...(19): siRNA sense strand
ucagaugcacuuuauuugu

SEQ ID NO: 1264303 - RNA, 19 nt, Homo sapiens
  misc_RNA (1)...(19): siRNA sense strand
gugcugcuccagaguguaa

SEQ ID NO: 1264304 - RNA, 19 nt, Homo sapiens
  misc_RNA (1)...(19): siRNA sense strand
ggaaaacacaccuuuagug

SEQ ID NO: 1264305 - RNA, 19 nt, Homo sapiens
  misc_RNA (1)...(19): siRNA sense strand
aaggaucaguagcaauuug

SEQ ID NO: 1264306 - RNA, 19 nt, Homo sapiens
  misc_RNA (1)...(19): siRNA sense strand
uauauacgggauccuuuaa

SEQ ID NO: 1264307 - RNA, 19 nt, Homo sapiens
  misc_RNA (1)...(19): siRNA sense strand
ugaaguagaaguauuugag

SEQ ID NO: 1264308 - RNA, 19 nt, Homo sapiens
  misc_RNA (1)...(19): siRNA sense strand
cuugacaguuuggauguuu

SEQ ID NO: 1264309 - RNA, 19 nt, Homo sapiens
  misc_RNA (1)...(19): siRNA sense strand
cauauauacgggauccuuu

SEQ ID NO: 1264310 - RNA, 19 nt, Homo sapiens
  misc_RNA (1)...(19): siRNA sense strand
auauauacgggauccuuua

SEQ ID NO: 1264311 - RNA, 19 nt, Homo sapiens
  misc_RNA (1)...(19): siRNA sense strand
cuuaaaggaucaguagcaa

SEQ ID NO: 1264312 - RNA, 19 nt, Homo sapiens
  misc_RNA (1)...(19): siRNA sense strand
uaaaccugaggaaggaaua

SEQ ID NO: 1264313 - RNA, 19 nt, Homo sapiens
  misc_RNA (1)...(19): siRNA sense strand
agaugacgccuguuauaga

SEQ ID NO: 1264314 - RNA, 19 nt, Homo sapiens
  misc_RNA (1)...(19): siRNA sense strand
ugugauuguuauugccaua

SEQ ID NO: 1264315 - RNA, 19 nt, Homo sapiens
  misc_RNA (1)...(19): siRNA sense strand
gagagcacgauuuauugug

SEQ ID NO: 1264316 - RNA, 19 nt, Homo sapiens
  misc_RNA (1)...(19): siRNA sense strand
gaaguauuugaguaucuug

SEQ ID NO: 1264317 - RNA, 19 nt, Homo sapiens
  misc_RNA (1)...(19): siRNA sense strand
ggcuaccugucucagauga

SEQ ID NO: 1264318 - RNA, 19 nt, Homo sapiens
  misc_RNA (1)...(19): siRNA sense strand
gauaucaggauuuggaaaa

SEQ ID NO: 1264319 - RNA, 19 nt, Homo sapiens
  misc_RNA (1)...(19): siRNA sense strand
ccucuugccacccauacua

SEQ ID NO: 1264320 - RNA, 19 nt, Homo sapiens
  misc_RNA (1)...(19): siRNA sense strand
ccaugguguugcugcugua

SEQ ID NO: 1264321 - RNA, 19 nt, Homo sapiens
  misc_RNA (1)...(19): siRNA sense strand
cagaugacgccuguuauag

SEQ ID NO: 1264322 - RNA, 19 nt, Homo sapiens
  misc_RNA (1)...(19): siRNA sense strand
cagaugguggagcugaaua

SEQ ID NO: 1264323 - RNA, 19 nt, Homo sapiens
  misc_RNA (1)...(19): siRNA sense strand
uuggugaacgaguagauua

SEQ ID NO: 1264324 - RNA, 19 nt, Homo sapiens
  misc_RNA (1)...(19): siRNA sense strand
gucauugcugugauuguua

SEQ ID NO: 1264325 - RNA, 19 nt, Homo sapiens
  misc_RNA (1)...(19): siRNA sense strand
ggagccaccaacauuugaa

SEQ ID NO: 1264326 - RNA, 19 nt, Homo sapiens
  misc_RNA (1)...(19): siRNA sense strand
gcgcuuuccuggguugcuu

SEQ ID NO: 1264327 - RNA, 19 nt, Homo sapiens
  misc_RNA (1)...(19): siRNA sense strand
uacuacaaagcaacaguua

SEQ ID NO: 1264328 - RNA, 19 nt, Homo sapiens
  misc_RNA (1)...(19): siRNA sense strand
cuugaugcaguaacuuaua

SEQ ID NO: 1264329 - RNA, 19 nt, Homo sapiens
  misc_RNA (1)...(19): siRNA sense strand
aaacauguccauauauacg

SEQ ID NO: 1264330 - RNA, 19 nt, Homo sapiens
  misc_RNA (1)...(19): siRNA sense strand
guguaaaguggucaaaugu

SEQ ID NO: 1264331 - RNA, 19 nt, Homo sapiens
  misc_RNA (1)...(19): siRNA sense strand
cuuacgaguuugguuauca

SEQ ID NO: 1264332 - RNA, 19 nt, Homo sapiens
  misc_RNA (1)...(19): siRNA sense strand
uacgggauccuuuaaaugg

SEQ ID NO: 1264333 - RNA, 19 nt, Homo sapiens
  misc_RNA (1)...(19): siRNA sense strand
gcagaugguggagcugaau

SEQ ID NO: 1264334 - RNA, 19 nt, Homo sapiens
  misc_RNA (1)...(19): siRNA sense strand
aaccaaaacccuacuauga

SEQ ID NO: 1264335 - RNA, 19 nt, Homo sapiens
  misc_RNA (1)...(19): siRNA sense strand
cccaauaugugaaaagguu

SEQ ID NO: 1264336 - RNA, 19 nt, Homo sapiens
  misc_RNA (1)...(19): siRNA sense strand
ggagcugaauaugccacuu

SEQ ID NO: 1264337 - RNA, 19 nt, Homo sapiens
  misc_RNA (1)...(19): siRNA sense strand
cgauggcagcgacacaauu

SEQ ID NO: 1264338 - RNA, 19 nt, Homo sapiens
  misc_RNA (1)...(19): siRNA sense strand
gauccauuuucacuuauug

SEQ ID NO: 1264339 - RNA, 19 nt, Homo sapiens
  misc_RNA (1)...(19): siRNA sense strand
uugaugcaguaacuuauag

SEQ ID NO: 1264340 - RNA, 19 nt, Homo sapiens
  misc_RNA (1)...(19): siRNA sense strand
guaucuugaugcaguaacu

SEQ ID NO: 1264341 - RNA, 19 nt, Homo sapiens
  misc_RNA (1)...(19): siRNA sense strand
ggagagagcacgauuuauu

SEQ ID NO: 1264342 - RNA, 19 nt, Homo sapiens
  misc_RNA (1)...(19): siRNA sense strand
agagaaacauguccauaua

SEQ ID NO: 1264343 - RNA, 19 nt, Homo sapiens
  misc_RNA (1)...(19): siRNA sense strand
cagaugcacuuuauuugua

SEQ ID NO: 1264344 - RNA, 19 nt, Homo sapiens
  misc_RNA (1)...(19): siRNA sense strand
ggacuuacgaguuugguua

SEQ ID NO: 1264345 - RNA, 19 nt, Homo sapiens
  misc_RNA (1)...(19): siRNA sense strand
aaacagauaucaggauuug

SEQ ID NO: 1264346 - RNA, 19 nt, Homo sapiens
  misc_RNA (1)...(19): siRNA sense strand
cuauggagcucauugguaa

SEQ ID NO: 1264347 - RNA, 19 nt, Homo sapiens
  misc_RNA (1)...(19): siRNA sense strand
aaacacaccuuuagugaag

SEQ ID NO: 1264348 - RNA, 19 nt, Homo sapiens
  misc_RNA (1)...(19): siRNA sense strand
gaacuuaaaggaucaguag

SEQ ID NO: 1264349 - RNA, 19 nt, Homo sapiens
  misc_RNA (1)...(19): siRNA sense strand
gaaaacagauaucaggauu

SEQ ID NO: 1264350 - RNA, 19 nt, Homo sapiens
  misc_RNA (1)...(19): siRNA sense strand
uaaaggaucaguagcaauu

SEQ ID NO: 1264351 - RNA, 19 nt, Homo sapiens
  misc_RNA (1)...(19): siRNA sense strand
aaaugggacuuacgaguuu

SEQ ID NO: 1264352 - RNA, 19 nt, Homo sapiens
  misc_RNA (1)...(19): siRNA sense strand
guuaucagaugcacuuuau

SEQ ID NO: 1264353 - RNA, 19 nt, Homo sapiens
  misc_RNA (1)...(19): siRNA sense strand
ugagauuggugaacgagua

SEQ ID NO: 1264354 - RNA, 19 nt, Homo sapiens
  misc_RNA (1)...(19): siRNA sense strand
gugaacgaguagauuauaa

SEQ ID NO: 1264355 - RNA, 19 nt, Homo sapiens
  misc_RNA (1)...(19): siRNA sense strand
gagagagcacgauuuauug

SEQ ID NO: 1264356 - RNA, 19 nt, Homo sapiens
  misc_RNA (1)...(19): siRNA sense strand
caaaugggacuuacgaguu

SEQ ID NO: 1264357 - RNA, 19 nt, Homo sapiens
  misc_RNA (1)...(19): siRNA sense strand
ggucauugcugugauuguu

SEQ ID NO: 1264358 - RNA, 19 nt, Homo sapiens
  misc_RNA (1)...(19): siRNA sense strand
ccagauccauuuucacuua

SEQ ID NO: 1264359 - RNA, 19 nt, Homo sapiens
  misc_RNA (1)...(19): siRNA sense strand
gaaggaauacuugacaguu

SEQ ID NO: 1264360 - RNA, 19 nt, Homo sapiens
  misc_RNA (1)...(19): siRNA sense strand
aaggaauacuugacaguuu

SEQ ID NO: 1264361 - RNA, 19 nt, Homo sapiens
  misc_RNA (1)...(19): siRNA sense strand
ucagaugacgccuguuaua

SEQ ID NO: 1264362 - RNA, 19 nt, Homo sapiens
  misc_RNA (1)...(19): siRNA sense strand
gaaaacacaccuuuaguga

SEQ ID NO: 1264363 - RNA, 19 nt, Homo sapiens
  misc_RNA (1)...(19): siRNA sense strand
gaugacgccuguuauagag

SEQ ID NO: 1264364 - RNA, 19 nt, Homo sapiens
  misc_RNA (1)...(19): siRNA sense strand
gagaaacauguccauauau

SEQ ID NO: 1264365 - RNA, 19 nt, Homo sapiens
  misc_RNA (1)...(19): siRNA sense strand
acgaguagauuauaagugu

SEQ ID NO: 1264366 - RNA, 19 nt, Homo sapiens
  misc_RNA (1)...(19): siRNA sense strand
cuacaaagcaacaguuaug

SEQ ID NO: 1264367 - RNA, 19 nt, Homo sapiens
  misc_RNA (1)...(19): siRNA sense strand
ccaccaacauuugaagcua

SEQ ID NO: 1264368 - RNA, 19 nt, Homo sapiens
  misc_RNA (1)...(19): siRNA sense strand
uauacgggauccuuuaaau

SEQ ID NO: 1264369 - RNA, 19 nt, Homo sapiens
  misc_RNA (1)...(19): siRNA sense strand
cgaguuugguuaucagaug

SEQ ID NO: 1264370 - RNA, 19 nt, Homo sapiens
  misc_RNA (1)...(19): siRNA sense strand
gaacgaguagauuauaagu

SEQ ID NO: 1264371 - RNA, 19 nt, Homo sapiens
  misc_RNA (1)...(19): siRNA sense strand
gugaggagccaccaacauu

SEQ ID NO: 1264372 - RNA, 19 nt, Homo sapiens
  misc_RNA (1)...(19): siRNA sense strand
gauggcagcgacacaauug

SEQ ID NO: 1264373 - RNA, 19 nt, Homo sapiens
  misc_RNA (1)...(19): siRNA sense strand
gcuauggagcucauuggua

SEQ ID NO: 1264374 - RNA, 19 nt, Homo sapiens
  misc_RNA (1)...(19): siRNA sense strand
gaggagccaccaacauuug

SEQ ID NO: 1264375 - RNA, 19 nt, Homo sapiens
  misc_RNA (1)...(19): siRNA sense strand
acacaccuuuagugaagua

SEQ ID NO: 1264376 - RNA, 19 nt, Homo sapiens
  misc_RNA (1)...(19): siRNA sense strand
ucucagaugacgccuguua

SEQ ID NO: 1264377 - RNA, 19 nt, Homo sapiens
  misc_RNA (1)...(19): siRNA sense strand
uagagaaacauguccauau

SEQ ID NO: 1264378 - RNA, 19 nt, Homo sapiens
  misc_RNA (1)...(19): siRNA sense strand
guuccaaagugucuuaaag

SEQ ID NO: 1264379 - RNA, 19 nt, Homo sapiens
  misc_RNA (1)...(19): siRNA sense strand
ggugaacgaguagauuaua

SEQ ID NO: 1264380 - RNA, 19 nt, Homo sapiens
  misc_RNA (1)...(19): siRNA sense strand
gaaguagaaguauuugagu

SEQ ID NO: 1264381 - RNA, 19 nt, Homo sapiens
  misc_RNA (1)...(19): siRNA sense strand
gaaacauguccauauauac

SEQ ID NO: 1264382 - RNA, 19 nt, Homo sapiens
  misc_RNA (1)...(19): siRNA sense strand
ugacgccuguuauagagaa

SEQ ID NO: 1264383 - RNA, 19 nt, Homo sapiens
  misc_RNA (1)...(19): siRNA sense strand
cgaguagauuauaagugua

SEQ ID NO: 1264384 - RNA, 19 nt, Homo sapiens
  misc_RNA (1)...(19): siRNA sense strand
gcacuuuauuuguaaugag

SEQ ID NO: 1264385 - RNA, 19 nt, Homo sapiens
  misc_RNA (1)...(19): siRNA sense strand
guagaaguauuugaguauc

SEQ ID NO: 1264386 - RNA, 19 nt, Homo sapiens
  misc_RNA (1)...(19): siRNA sense strand
guauuugaguaucuugaug

SEQ ID NO: 1264387 - RNA, 19 nt, Homo sapiens
  misc_RNA (1)...(19): siRNA sense strand
aggaauacuugacaguuug

SEQ ID NO: 1264388 - RNA, 19 nt, Homo sapiens
  misc_RNA (1)...(19): siRNA sense strand
ccaaaacccuacuaugaga

SEQ ID NO: 1264389 - RNA, 19 nt, Homo sapiens
  misc_RNA (1)...(19): siRNA sense strand
aguguaaaguggucaaaug

SEQ ID NO: 1264390 - RNA, 19 nt, Homo sapiens
  misc_RNA (1)...(19): siRNA sense strand
ccacccauacuauuuguga

SEQ ID NO: 1264391 - RNA, 19 nt, Homo sapiens
  misc_RNA (1)...(19): siRNA sense strand
caccaacauuugaagcuau

SEQ ID NO: 1264392 - RNA, 19 nt, Homo sapiens
  misc_RNA (1)...(19): siRNA sense strand
uuggagagagcacgauuua

SEQ ID NO: 1264393 - RNA, 19 nt, Homo sapiens
  misc_RNA (1)...(19): siRNA sense strand
gguuaucagaugcacuuua

SEQ ID NO: 1264394 - RNA, 19 nt, Homo sapiens
  misc_RNA (1)...(19): siRNA sense strand
ugaggagccaccaacauuu

SEQ ID NO: 1264395 - RNA, 19 nt, Homo sapiens
  misc_RNA (1)...(19): siRNA sense strand
ggaaggaauacuugacagu

SEQ ID NO: 1264396 - RNA, 19 nt, Homo sapiens
  misc_RNA (1)...(19): siRNA sense strand
gaggaaggaauacuugaca

SEQ ID NO: 1264397 - RNA, 19 nt, Homo sapiens
  misc_RNA (1)...(19): siRNA sense strand
ccaguuccaaagugucuua

SEQ ID NO: 1264398 - RNA, 19 nt, Homo sapiens
  misc_RNA (1)...(19): siRNA sense strand
ugaguaucuugaugcagua

SEQ ID NO: 1264399 - RNA, 19 nt, Homo sapiens
  misc_RNA (1)...(19): siRNA sense strand
caccuuuagugaaguagaa

SEQ ID NO: 1264400 - RNA, 19 nt, Homo sapiens
  misc_RNA (1)...(19): siRNA sense strand
acagauaucaggauuugga

SEQ ID NO: 1264401 - RNA, 19 nt, Homo sapiens
  misc_RNA (1)...(19): siRNA sense strand
ucauugcugugauuguuau

SEQ ID NO: 1264402 - RNA, 19 nt, Homo sapiens
  misc_RNA (1)...(19): siRNA sense strand
ucagaugcacuuuauuugu

SEQ ID NO: 1264403 - RNA, 19 nt, Homo sapiens
  misc_RNA (1)...(19): siRNA sense strand
gugcugcuccagaguguaa

SEQ ID NO: 1264404 - RNA, 19 nt, Homo sapiens
  misc_RNA (1)...(19): siRNA sense strand
ggaaaacacaccuuuagug

SEQ ID NO: 1264405 - RNA, 19 nt, Homo sapiens
  misc_RNA (1)...(19): siRNA sense strand
aaggaucaguagcaauuug

SEQ ID NO: 1264406 - RNA, 19 nt, Homo sapiens
  misc_RNA (1)...(19): siRNA sense strand
uauauacgggauccuuuaa

SEQ ID NO: 1264407 - RNA, 19 nt, Homo sapiens
  misc_RNA (1)...(19): siRNA sense strand
ugaaguagaaguauuugag

SEQ ID NO: 1264408 - RNA, 19 nt, Homo sapiens
  misc_RNA (1)...(19): siRNA sense strand
cuugacaguuuggauguuu

SEQ ID NO: 1264409 - RNA, 19 nt, Homo sapiens
  misc_RNA (1)...(19): siRNA sense strand
cauauauacgggauccuuu

SEQ ID NO: 1264410 - RNA, 19 nt, Homo sapiens
  misc_RNA (1)...(19): siRNA sense strand
auauauacgggauccuuua

SEQ ID NO: 1264411 - RNA, 19 nt, Homo sapiens
  misc_RNA (1)...(19): siRNA sense strand
cuuaaaggaucaguagcaa

SEQ ID NO: 1264412 - RNA, 19 nt, Homo sapiens
  misc_RNA (1)...(19): siRNA sense strand
uaaaccugaggaaggaaua

SEQ ID NO: 1264413 - RNA, 19 nt, Homo sapiens
  misc_RNA (1)...(19): siRNA sense strand
agaugacgccuguuauaga

SEQ ID NO: 1264414 - RNA, 19 nt, Homo sapiens
  misc_RNA (1)...(19): siRNA sense strand
ugugauuguuauugccaua

SEQ ID NO: 1264415 - RNA, 19 nt, Homo sapiens
  misc_RNA (1)...(19): siRNA sense strand
gagagcacgauuuauugug

SEQ ID NO: 1264416 - RNA, 19 nt, Homo sapiens
  misc_RNA (1)...(19): siRNA sense strand
gaaguauuugaguaucuug

SEQ ID NO: 1264417 - RNA, 19 nt, Homo sapiens
  misc_RNA (1)...(19): siRNA sense strand
ggcuaccugucucagauga

SEQ ID NO: 1264418 - RNA, 19 nt, Homo sapiens
  misc_RNA (1)...(19): siRNA sense strand
gauaucaggauuuggaaaa

SEQ ID NO: 1264419 - RNA, 19 nt, Homo sapiens
  misc_RNA (1)...(19): siRNA sense strand
ccucuugccacccauacua

SEQ ID NO: 1264420 - RNA, 19 nt, Homo sapiens
  misc_RNA (1)...(19): siRNA sense strand
ccaugguguugcugcugua

SEQ ID NO: 1264421 - RNA, 19 nt, Homo sapiens
  misc_RNA (1)...(19): siRNA sense strand
cagaugacgccuguuauag

SEQ ID NO: 1264422 - RNA, 19 nt, Homo sapiens
  misc_RNA (1)...(19): siRNA sense strand
uuggugaacgaguagauua

SEQ ID NO: 1264423 - RNA, 19 nt, Homo sapiens
  misc_RNA (1)...(19): siRNA sense strand
gucauugcugugauuguua

SEQ ID NO: 1264424 - RNA, 19 nt, Homo sapiens
  misc_RNA (1)...(19): siRNA sense strand
ggagccaccaacauuugaa

SEQ ID NO: 1264425 - RNA, 19 nt, Homo sapiens
  misc_RNA (1)...(19): siRNA sense strand
gcgcuuuccuggguugcuu

SEQ ID NO: 1264426 - RNA, 19 nt, Homo sapiens
  misc_RNA (1)...(19): siRNA sense strand
uacuacaaagcaacaguua

SEQ ID NO: 1264427 - RNA, 19 nt, Homo sapiens
  misc_RNA (1)...(19): siRNA sense strand
cuugaugcaguaacuuaua

SEQ ID NO: 1264428 - RNA, 19 nt, Homo sapiens
  misc_RNA (1)...(19): siRNA sense strand
aaacauguccauauauacg

SEQ ID NO: 1264429 - RNA, 19 nt, Homo sapiens
  misc_RNA (1)...(19): siRNA sense strand
guguaaaguggucaaaugu

SEQ ID NO: 1264430 - RNA, 19 nt, Homo sapiens
  misc_RNA (1)...(19): siRNA sense strand
cuuacgaguuugguuauca

SEQ ID NO: 1264431 - RNA, 19 nt, Homo sapiens
  misc_RNA (1)...(19): siRNA sense strand
uacgggauccuuuaaaugg

SEQ ID NO: 1264432 - RNA, 19 nt, Homo sapiens
  misc_RNA (1)...(19): siRNA sense strand
aaccaaaacccuacuauga

SEQ ID NO: 1264433 - RNA, 19 nt, Homo sapiens
  misc_RNA (1)...(19): siRNA sense strand
cccaauaugugaaaagguu

SEQ ID NO: 1264434 - RNA, 19 nt, Homo sapiens
  misc_RNA (1)...(19): siRNA sense strand
cgauggcagcgacacaauu

SEQ ID NO: 1264435 - RNA, 19 nt, Homo sapiens
  misc_RNA (1)...(19): siRNA sense strand
gauccauuuucacuuauug

SEQ ID NO: 1264436 - RNA, 19 nt, Homo sapiens
  misc_RNA (1)...(19): siRNA sense strand
uugaugcaguaacuuauag

SEQ ID NO: 1264437 - RNA, 19 nt, Homo sapiens
  misc_RNA (1)...(19): siRNA sense strand
guaucuugaugcaguaacu

SEQ ID NO: 1264438 - RNA, 19 nt, Homo sapiens
  misc_RNA (1)...(19): siRNA sense strand
caacauuugaagcuaugga

SEQ ID NO: 1264439 - RNA, 19 nt, Homo sapiens
  misc_RNA (1)...(19): siRNA sense strand
gagauuggugaacgaguag

SEQ ID NO: 1264440 - RNA, 19 nt, Homo sapiens
  misc_RNA (1)...(19): siRNA sense strand
ggagagagcacgauuuauu

SEQ ID NO: 1264441 - RNA, 19 nt, Homo sapiens
  misc_RNA (1)...(19): siRNA sense strand
agagaaacauguccauaua

SEQ ID NO: 1264442 - RNA, 19 nt, Homo sapiens
  misc_RNA (1)...(19): siRNA sense strand
cagaugcacuuuauuugua

SEQ ID NO: 1264443 - RNA, 19 nt, Homo sapiens
  misc_RNA (1)...(19): siRNA sense strand
ggacuuacgaguuugguua

SEQ ID NO: 1264444 - RNA, 19 nt, Homo sapiens
  misc_RNA (1)...(19): siRNA sense strand
aaacagauaucaggauuug

SEQ ID NO: 1264445 - RNA, 19 nt, Homo sapiens
  misc_RNA (1)...(19): siRNA sense strand
cuauggagcucauugguaa

SEQ ID NO: 1264446 - RNA, 19 nt, Homo sapiens
  misc_RNA (1)...(19): siRNA sense strand
aaacacaccuuuagugaag

SEQ ID NO: 1264447 - RNA, 19 nt, Homo sapiens
  misc_RNA (1)...(19): siRNA sense strand
gaacuuaaaggaucaguag

SEQ ID NO: 1264448 - RNA, 19 nt, Homo sapiens
  misc_RNA (1)...(19): siRNA sense strand
gaaaacagauaucaggauu

SEQ ID NO: 1264449 - RNA, 19 nt, Homo sapiens
  misc_RNA (1)...(19): siRNA sense strand
uaaaggaucaguagcaauu

SEQ ID NO: 1264450 - RNA, 19 nt, Homo sapiens
  misc_RNA (1)...(19): siRNA sense strand
aaaugggacuuacgaguuu

SEQ ID NO: 1264451 - RNA, 19 nt, Homo sapiens
  misc_RNA (1)...(19): siRNA sense strand
guuaucagaugcacuuuau

SEQ ID NO: 1264452 - RNA, 19 nt, Homo sapiens
  misc_RNA (1)...(19): siRNA sense strand
gagcugaauaugccacuua

SEQ ID NO: 1264453 - RNA, 19 nt, Homo sapiens
  misc_RNA (1)...(19): siRNA sense strand
gagcagagaggcugaauag

SEQ ID NO: 1264454 - RNA, 19 nt, Homo sapiens
  misc_RNA (1)...(19): siRNA sense strand
ugagauuggugaacgagua

SEQ ID NO: 1264455 - RNA, 19 nt, Homo sapiens
  misc_RNA (1)...(19): siRNA sense strand
gugaacgaguagauuauaa

SEQ ID NO: 1264456 - RNA, 19 nt, Homo sapiens
  misc_RNA (1)...(19): siRNA sense strand
gagagagcacgauuuauug

SEQ ID NO: 1264457 - RNA, 19 nt, Homo sapiens
  misc_RNA (1)...(19): siRNA sense strand
caaaugggacuuacgaguu

SEQ ID NO: 1264458 - RNA, 19 nt, Homo sapiens
  misc_RNA (1)...(19): siRNA sense strand
ggucauugcugugauuguu

SEQ ID NO: 1264459 - RNA, 19 nt, Homo sapiens
  misc_RNA (1)...(19): siRNA sense strand
ccagauccauuuucacuua

SEQ ID NO: 1264460 - RNA, 19 nt, Homo sapiens
  misc_RNA (1)...(19): siRNA sense strand
gaaggaauacuugacaguu

SEQ ID NO: 1264461 - RNA, 19 nt, Homo sapiens
  misc_RNA (1)...(19): siRNA sense strand
aaggaauacuugacaguuu

SEQ ID NO: 1264462 - RNA, 19 nt, Homo sapiens
  misc_RNA (1)...(19): siRNA sense strand
ucagaugacgccuguuaua

SEQ ID NO: 1264463 - RNA, 19 nt, Homo sapiens
  misc_RNA (1)...(19): siRNA sense strand
gaaaacacaccuuuaguga

SEQ ID NO: 1264464 - RNA, 19 nt, Homo sapiens
  misc_RNA (1)...(19): siRNA sense strand
gaugacgccuguuauagag

SEQ ID NO: 1264465 - RNA, 19 nt, Homo sapiens
  misc_RNA (1)...(19): siRNA sense strand
gagaaacauguccauauau

SEQ ID NO: 1264466 - RNA, 19 nt, Homo sapiens
  misc_RNA (1)...(19): siRNA sense strand
ccacuuaccagacuaaauc

SEQ ID NO: 1264467 - RNA, 19 nt, Homo sapiens
  misc_RNA (1)...(19): siRNA sense strand
acgaguagauuauaagugu

SEQ ID NO: 1264468 - RNA, 19 nt, Homo sapiens
  misc_RNA (1)...(19): siRNA sense strand
cuacaaagcaacaguuaug

SEQ ID NO: 1264469 - RNA, 19 nt, Homo sapiens
  misc_RNA (1)...(19): siRNA sense strand
ccaccaacauuugaagcua

SEQ ID NO: 1264470 - RNA, 19 nt, Homo sapiens
  misc_RNA (1)...(19): siRNA sense strand
uauacgggauccuuuaaau

SEQ ID NO: 1264471 - RNA, 19 nt, Homo sapiens
  misc_RNA (1)...(19): siRNA sense strand
cgaguuugguuaucagaug

SEQ ID NO: 1264472 - RNA, 19 nt, Homo sapiens
  misc_RNA (1)...(19): siRNA sense strand
gaacgaguagauuauaagu

SEQ ID NO: 1264473 - RNA, 19 nt, Homo sapiens
  misc_RNA (1)...(19): siRNA sense strand
gugaggagccaccaacauu

SEQ ID NO: 1264474 - RNA, 19 nt, Homo sapiens
  misc_RNA (1)...(19): siRNA sense strand
gauggcagcgacacaauug

SEQ ID NO: 1264475 - RNA, 19 nt, Homo sapiens
  misc_RNA (1)...(19): siRNA sense strand
ucucagaugacgccuguua

SEQ ID NO: 1264476 - RNA, 19 nt, Homo sapiens
  misc_RNA (1)...(19): siRNA sense strand
acacaccuuuagugaagua

SEQ ID NO: 1264477 - RNA, 19 nt, Homo sapiens
  misc_RNA (1)...(19): siRNA sense strand
gcuauggagcucauuggua

SEQ ID NO: 1264478 - RNA, 19 nt, Homo sapiens
  misc_RNA (1)...(19): siRNA sense strand
gaggagccaccaacauuug

SEQ ID NO: 1264479 - RNA, 19 nt, Homo sapiens
  misc_RNA (1)...(19): siRNA sense strand
uagagaaacauguccauau

SEQ ID NO: 1264480 - RNA, 19 nt, Homo sapiens
  misc_RNA (1)...(19): siRNA sense strand
ggugaacgaguagauuaua

SEQ ID NO: 1264481 - RNA, 19 nt, Homo sapiens
  misc_RNA (1)...(19): siRNA sense strand
gaaguagaaguauuugagu

SEQ ID NO: 1264482 - RNA, 19 nt, Homo sapiens
  misc_RNA (1)...(19): siRNA sense strand
gaaacauguccauauauac

SEQ ID NO: 1264483 - RNA, 19 nt, Homo sapiens
  misc_RNA (1)...(19): siRNA sense strand
ugacgccuguuauagagaa

SEQ ID NO: 1264484 - RNA, 19 nt, Homo sapiens
  misc_RNA (1)...(19): siRNA sense strand
cgaguagauuauaagugua

SEQ ID NO: 1264485 - RNA, 19 nt, Homo sapiens
  misc_RNA (1)...(19): siRNA sense strand
gcacuuuauuuguaaugag

SEQ ID NO: 1264486 - RNA, 19 nt, Homo sapiens
  misc_RNA (1)...(19): siRNA sense strand
guagaaguauuugaguauc

SEQ ID NO: 1264487 - RNA, 19 nt, Homo sapiens
  misc_RNA (1)...(19): siRNA sense strand
guauuugaguaucuugaug

SEQ ID NO: 1264488 - RNA, 19 nt, Homo sapiens
  misc_RNA (1)...(19): siRNA sense strand
aggaauacuugacaguuug

SEQ ID NO: 1264489 - RNA, 19 nt, Homo sapiens
  misc_RNA (1)...(19): siRNA sense strand
ccaaaacccuacuaugaga

SEQ ID NO: 1264490 - RNA, 19 nt, Homo sapiens
  misc_RNA (1)...(19): siRNA sense strand
aguguaaaguggucaaaug

SEQ ID NO: 1264491 - RNA, 19 nt, Homo sapiens
  misc_RNA (1)...(19): siRNA sense strand
ccacccauacuauuuguga

SEQ ID NO: 1264492 - RNA, 19 nt, Homo sapiens
  misc_RNA (1)...(19): siRNA sense strand
uuggagagagcacgauuua

SEQ ID NO: 1264493 - RNA, 19 nt, Homo sapiens
  misc_RNA (1)...(19): siRNA sense strand
gguuaucagaugcacuuua

SEQ ID NO: 1264494 - RNA, 19 nt, Homo sapiens
  misc_RNA (1)...(19): siRNA sense strand
caccaacauuugaagcuau

SEQ ID NO: 1264495 - RNA, 19 nt, Homo sapiens
  misc_RNA (1)...(19): siRNA sense strand
ugaggagccaccaacauuu

SEQ ID NO: 1264496 - RNA, 19 nt, Homo sapiens
  misc_RNA (1)...(19): siRNA sense strand
ggaaggaauacuugacagu

SEQ ID NO: 1264497 - RNA, 19 nt, Homo sapiens
  misc_RNA (1)...(19): siRNA sense strand
gaggaaggaauacuugaca

SEQ ID NO: 1264498 - RNA, 19 nt, Homo sapiens
  misc_RNA (1)...(19): siRNA sense strand
ugaguaucuugaugcagua

SEQ ID NO: 1264499 - RNA, 19 nt, Homo sapiens
  misc_RNA (1)...(19): siRNA sense strand
caccuuuagugaaguagaa

SEQ ID NO: 1264500 - RNA, 19 nt, Homo sapiens
  misc_RNA (1)...(19): siRNA sense strand
acagauaucaggauuugga

SEQ ID NO: 1264501 - RNA, 19 nt, Homo sapiens
  misc_RNA (1)...(19): siRNA sense strand
ucauugcugugauuguuau

SEQ ID NO: 1264502 - RNA, 19 nt, Homo sapiens
  misc_RNA (1)...(19): siRNA sense strand
ucagaugcacuuuauuugu

SEQ ID NO: 1264503 - RNA, 19 nt, Homo sapiens
  misc_RNA (1)...(19): siRNA sense strand
gugcugcuccagaguguaa

SEQ ID NO: 1264504 - RNA, 19 nt, Homo sapiens
  misc_RNA (1)...(19): siRNA sense strand
ggaaaacacaccuuuagug

SEQ ID NO: 1264505 - RNA, 19 nt, Homo sapiens
  misc_RNA (1)...(19): siRNA sense strand
aaggaucaguagcaauuug

SEQ ID NO: 1264506 - RNA, 19 nt, Homo sapiens
  misc_RNA (1)...(19): siRNA sense strand
uauauacgggauccuuuaa

SEQ ID NO: 1264507 - RNA, 19 nt, Homo sapiens
  misc_RNA (1)...(19): siRNA sense strand
ugaaguagaaguauuugag

SEQ ID NO: 1264508 - RNA, 19 nt, Homo sapiens
  misc_RNA (1)...(19): siRNA sense strand
cuugacaguuuggauguuu

SEQ ID NO: 1264509 - RNA, 19 nt, Homo sapiens
  misc_RNA (1)...(19): siRNA sense strand
cauauauacgggauccuuu

SEQ ID NO: 1264510 - RNA, 19 nt, Homo sapiens
  misc_RNA (1)...(19): siRNA sense strand
auauauacgggauccuuua

SEQ ID NO: 1264511 - RNA, 19 nt, Homo sapiens
  misc_RNA (1)...(19): siRNA sense strand
cuuaaaggaucaguagcaa

SEQ ID NO: 1264512 - RNA, 19 nt, Homo sapiens
  misc_RNA (1)...(19): siRNA sense strand
uaaaccugaggaaggaaua

SEQ ID NO: 1264513 - RNA, 19 nt, Homo sapiens
  misc_RNA (1)...(19): siRNA sense strand
agaugacgccuguuauaga

SEQ ID NO: 1264514 - RNA, 19 nt, Homo sapiens
  misc_RNA (1)...(19): siRNA sense strand
ugugauuguuauugccaua

SEQ ID NO: 1264515 - RNA, 19 nt, Homo sapiens
  misc_RNA (1)...(19): siRNA sense strand
gagagcacgauuuauugug

SEQ ID NO: 1264516 - RNA, 19 nt, Homo sapiens
  misc_RNA (1)...(19): siRNA sense strand
gaaguauuugaguaucuug

SEQ ID NO: 1264517 - RNA, 19 nt, Homo sapiens
  misc_RNA (1)...(19): siRNA sense strand
ggcuaccugucucagauga

SEQ ID NO: 1264518 - RNA, 19 nt, Homo sapiens
  misc_RNA (1)...(19): siRNA sense strand
gauaucaggauuuggaaaa

SEQ ID NO: 1264519 - RNA, 19 nt, Homo sapiens
  misc_RNA (1)...(19): siRNA sense strand
ccucuugccacccauacua

SEQ ID NO: 1264520 - RNA, 19 nt, Homo sapiens
  misc_RNA (1)...(19): siRNA sense strand
ccaugguguugcugcugua

SEQ ID NO: 1264521 - RNA, 19 nt, Homo sapiens
  misc_RNA (1)...(19): siRNA sense strand
cagaugacgccuguuauag

SEQ ID NO: 1264522 - RNA, 19 nt, Homo sapiens
  misc_RNA (1)...(19): siRNA sense strand
cagaugguggagcugaaua

SEQ ID NO: 1264523 - RNA, 19 nt, Homo sapiens
  misc_RNA (1)...(19): siRNA sense strand
gucauugcugugauuguua

SEQ ID NO: 1264524 - RNA, 19 nt, Homo sapiens
  misc_RNA (1)...(19): siRNA sense strand
ggagccaccaacauuugaa

SEQ ID NO: 1264525 - RNA, 19 nt, Homo sapiens
  misc_RNA (1)...(19): siRNA sense strand
uuggugaacgaguagauua

SEQ ID NO: 1264526 - RNA, 19 nt, Homo sapiens
  misc_RNA (1)...(19): siRNA sense strand
gcgcuuuccuggguugcuu

SEQ ID NO: 1264527 - RNA, 19 nt, Homo sapiens
  misc_RNA (1)...(19): siRNA sense strand
uacuacaaagcaacaguua

SEQ ID NO: 1264528 - RNA, 19 nt, Homo sapiens
  misc_RNA (1)...(19): siRNA sense strand
cuugaugcaguaacuuaua

SEQ ID NO: 1264529 - RNA, 19 nt, Homo sapiens
  misc_RNA (1)...(19): siRNA sense strand
aaacauguccauauauacg

SEQ ID NO: 1264530 - RNA, 19 nt, Homo sapiens
  misc_RNA (1)...(19): siRNA sense strand
guguaaaguggucaaaugu

SEQ ID NO: 1264531 - RNA, 19 nt, Homo sapiens
  misc_RNA (1)...(19): siRNA sense strand
cuuacgaguuugguuauca

SEQ ID NO: 1264532 - RNA, 19 nt, Homo sapiens
  misc_RNA (1)...(19): siRNA sense strand
uacgggauccuuuaaaugg

SEQ ID NO: 1264533 - RNA, 19 nt, Homo sapiens
  misc_RNA (1)...(19): siRNA sense strand
gcagaugguggagcugaau

SEQ ID NO: 1264534 - RNA, 19 nt, Homo sapiens
  misc_RNA (1)...(19): siRNA sense strand
aaccaaaacccuacuauga

SEQ ID NO: 1264535 - RNA, 19 nt, Homo sapiens
  misc_RNA (1)...(19): siRNA sense strand
uugaugcaguaacuuauag

SEQ ID NO: 1264536 - RNA, 19 nt, Homo sapiens
  misc_RNA (1)...(19): siRNA sense strand
ggagcugaauaugccacuu

SEQ ID NO: 1264537 - RNA, 19 nt, Homo sapiens
  misc_RNA (1)...(19): siRNA sense strand
caacauuugaagcuaugga

SEQ ID NO: 1264538 - RNA, 19 nt, Homo sapiens
  misc_RNA (1)...(19): siRNA sense strand
cgauggcagcgacacaauu

SEQ ID NO: 1264539 - RNA, 19 nt, Homo sapiens
  misc_RNA (1)...(19): siRNA sense strand
gauccauuuucacuuauug

SEQ ID NO: 1264540 - RNA, 19 nt, Homo sapiens
  misc_RNA (1)...(19): siRNA sense strand
ggagagagcacgauuuauu

SEQ ID NO: 1264541 - RNA, 19 nt, Homo sapiens
  misc_RNA (1)...(19): siRNA sense strand
agagaaacauguccauaua

SEQ ID NO: 1264542 - RNA, 19 nt, Homo sapiens
  misc_RNA (1)...(19): siRNA sense strand
cagaugcacuuuauuugua

SEQ ID NO: 1264543 - RNA, 19 nt, Homo sapiens
  misc_RNA (1)...(19): siRNA sense strand
ggacuuacgaguuugguua

SEQ ID NO: 1264544 - RNA, 19 nt, Homo sapiens
  misc_RNA (1)...(19): siRNA sense strand
aaacagauaucaggauuug

SEQ ID NO: 1264545 - RNA, 19 nt, Homo sapiens
  misc_RNA (1)...(19): siRNA sense strand
cuauggagcucauugguaa

SEQ ID NO: 1264546 - RNA, 19 nt, Homo sapiens
  misc_RNA (1)...(19): siRNA sense strand
aaacacaccuuuagugaag

SEQ ID NO: 1264547 - RNA, 19 nt, Homo sapiens
  misc_RNA (1)...(19): siRNA sense strand
gaacuuaaaggaucaguag

SEQ ID NO: 1264548 - RNA, 19 nt, Homo sapiens
  misc_RNA (1)...(19): siRNA sense strand
gaaaacagauaucaggauu

SEQ ID NO: 1264549 - RNA, 19 nt, Homo sapiens
  misc_RNA (1)...(19): siRNA sense strand
uaaaggaucaguagcaauu

SEQ ID NO: 1264550 - RNA, 19 nt, Homo sapiens
  misc_RNA (1)...(19): siRNA sense strand
aaaugggacuuacgaguuu

SEQ ID NO: 1264551 - RNA, 19 nt, Homo sapiens
  misc_RNA (1)...(19): siRNA sense strand
guuaucagaugcacuuuau

SEQ ID NO: 1264552 - RNA, 19 nt, Homo sapiens
  misc_RNA (1)...(19): siRNA sense strand
gagcugaauaugccacuua

SEQ ID NO: 1264553 - RNA, 19 nt, Homo sapiens
  misc_RNA (1)...(19): siRNA sense strand
ugagauuggugaacgagua

SEQ ID NO: 1264554 - RNA, 19 nt, Homo sapiens
  misc_RNA (1)...(19): siRNA sense strand
gugaacgaguagauuauaa

SEQ ID NO: 1264555 - RNA, 19 nt, Homo sapiens
  misc_RNA (1)...(19): siRNA sense strand
gagagagcacgauuuauug

SEQ ID NO: 1264556 - RNA, 19 nt, Homo sapiens
  misc_RNA (1)...(19): siRNA sense strand
caaaugggacuuacgaguu

SEQ ID NO: 1264557 - RNA, 19 nt, Homo sapiens
  misc_RNA (1)...(19): siRNA sense strand
ggucauugcugugauuguu

SEQ ID NO: 1264558 - RNA, 19 nt, Homo sapiens
  misc_RNA (1)...(19): siRNA sense strand
ccagauccauuuucacuua

SEQ ID NO: 1264559 - RNA, 19 nt, Homo sapiens
  misc_RNA (1)...(19): siRNA sense strand
gaaggaauacuugacaguu

SEQ ID NO: 1264560 - RNA, 19 nt, Homo sapiens
  misc_RNA (1)...(19): siRNA sense strand
aaggaauacuugacaguuu

SEQ ID NO: 1264561 - RNA, 19 nt, Homo sapiens
  misc_RNA (1)...(19): siRNA sense strand
ucagaugacgccuguuaua

SEQ ID NO: 1264562 - RNA, 19 nt, Homo sapiens
  misc_RNA (1)...(19): siRNA sense strand
gaaaacacaccuuuaguga

SEQ ID NO: 1264563 - RNA, 19 nt, Homo sapiens
  misc_RNA (1)...(19): siRNA sense strand
gaugacgccuguuauagag

SEQ ID NO: 1264564 - RNA, 19 nt, Homo sapiens
  misc_RNA (1)...(19): siRNA sense strand
gagaaacauguccauauau

SEQ ID NO: 1264565 - RNA, 19 nt, Homo sapiens
  misc_RNA (1)...(19): siRNA sense strand
ccacuuaccagacuaaauc

SEQ ID NO: 1264566 - RNA, 19 nt, Homo sapiens
  misc_RNA (1)...(19): siRNA sense strand
acgaguagauuauaagugu

SEQ ID NO: 1264567 - RNA, 19 nt, Homo sapiens
  misc_RNA (1)...(19): siRNA sense strand
cuacaaagcaacaguuaug

SEQ ID NO: 1264568 - RNA, 19 nt, Homo sapiens
  misc_RNA (1)...(19): siRNA sense strand
ccaccaacauuugaagcua

SEQ ID NO: 1264569 - RNA, 19 nt, Homo sapiens
  misc_RNA (1)...(19): siRNA sense strand
uauacgggauccuuuaaau

SEQ ID NO: 1264570 - RNA, 19 nt, Homo sapiens
  misc_RNA (1)...(19): siRNA sense strand
cgaguuugguuaucagaug

SEQ ID NO: 1264571 - RNA, 19 nt, Homo sapiens
  misc_RNA (1)...(19): siRNA sense strand
gaacgaguagauuauaagu

SEQ ID NO: 1264572 - RNA, 19 nt, Homo sapiens
  misc_RNA (1)...(19): siRNA sense strand
gugaggagccaccaacauu

SEQ ID NO: 1264573 - RNA, 19 nt, Homo sapiens
  misc_RNA (1)...(19): siRNA sense strand
gauggcagcgacacaauug

SEQ ID NO: 1264574 - RNA, 19 nt, Homo sapiens
  misc_RNA (1)...(19): siRNA sense strand
ucucagaugacgccuguua

SEQ ID NO: 1264575 - RNA, 19 nt, Homo sapiens
  misc_RNA (1)...(19): siRNA sense strand
gaggagccaccaacauuug

SEQ ID NO: 1264576 - RNA, 19 nt, Homo sapiens
  misc_RNA (1)...(19): siRNA sense strand
gcuauggagcucauuggua

SEQ ID NO: 1264577 - RNA, 19 nt, Homo sapiens
  misc_RNA (1)...(19): siRNA sense strand
acacaccuuuagugaagua

SEQ ID NO: 1264578 - RNA, 19 nt, Homo sapiens
  misc_RNA (1)...(19): siRNA sense strand
uagagaaacauguccauau

SEQ ID NO: 1264579 - RNA, 19 nt, Homo sapiens
  misc_RNA (1)...(19): siRNA sense strand
guuccaaagugucuuaaag

SEQ ID NO: 1264580 - RNA, 19 nt, Homo sapiens
  misc_RNA (1)...(19): siRNA sense strand
ggugaacgaguagauuaua

SEQ ID NO: 1264581 - RNA, 19 nt, Homo sapiens
  misc_RNA (1)...(19): siRNA sense strand
gaaguagaaguauuugagu

SEQ ID NO: 1264582 - RNA, 19 nt, Homo sapiens
  misc_RNA (1)...(19): siRNA sense strand
gaaacauguccauauauac

SEQ ID NO: 1264583 - RNA, 19 nt, Homo sapiens
  misc_RNA (1)...(19): siRNA sense strand
ugacgccuguuauagagaa

SEQ ID NO: 1264584 - RNA, 19 nt, Homo sapiens
  misc_RNA (1)...(19): siRNA sense strand
cgaguagauuauaagugua

SEQ ID NO: 1264585 - RNA, 19 nt, Homo sapiens
  misc_RNA (1)...(19): siRNA sense strand
gcacuuuauuuguaaugag

SEQ ID NO: 1264586 - RNA, 19 nt, Homo sapiens
  misc_RNA (1)...(19): siRNA sense strand
guagaaguauuugaguauc

SEQ ID NO: 1264587 - RNA, 19 nt, Homo sapiens
  misc_RNA (1)...(19): siRNA sense strand
guauuugaguaucuugaug

SEQ ID NO: 1264588 - RNA, 19 nt, Homo sapiens
  misc_RNA (1)...(19): siRNA sense strand
aggaauacuugacaguuug

SEQ ID NO: 1264589 - RNA, 19 nt, Homo sapiens
  misc_RNA (1)...(19): siRNA sense strand
ccaaaacccuacuaugaga

SEQ ID NO: 1264590 - RNA, 19 nt, Homo sapiens
  misc_RNA (1)...(19): siRNA sense strand
aguguaaaguggucaaaug

SEQ ID NO: 1264591 - RNA, 19 nt, Homo sapiens
  misc_RNA (1)...(19): siRNA sense strand
ccacccauacuauuuguga

SEQ ID NO: 1264592 - RNA, 19 nt, Homo sapiens
  misc_RNA (1)...(19): siRNA sense strand
uuggagagagcacgauuua

SEQ ID NO: 1264593 - RNA, 19 nt, Homo sapiens
  misc_RNA (1)...(19): siRNA sense strand
gguuaucagaugcacuuua

SEQ ID NO: 1264594 - RNA, 19 nt, Homo sapiens
  misc_RNA (1)...(19): siRNA sense strand
caccaacauuugaagcuau

SEQ ID NO: 1264595 - RNA, 19 nt, Homo sapiens
  misc_RNA (1)...(19): siRNA sense strand
ugaggagccaccaacauuu

SEQ ID NO: 1264596 - RNA, 19 nt, Homo sapiens
  misc_RNA (1)...(19): siRNA sense strand
ggaaggaauacuugacagu

SEQ ID NO: 1264597 - RNA, 19 nt, Homo sapiens
  misc_RNA (1)...(19): siRNA sense strand
gaggaaggaauacuugaca

SEQ ID NO: 1264598 - RNA, 19 nt, Homo sapiens
  misc_RNA (1)...(19): siRNA sense strand
ccaguuccaaagugucuua

SEQ ID NO: 1264599 - RNA, 19 nt, Homo sapiens
  misc_RNA (1)...(19): siRNA sense strand
ugaguaucuugaugcagua

SEQ ID NO: 1264600 - RNA, 19 nt, Homo sapiens
  misc_RNA (1)...(19): siRNA sense strand
caccuuuagugaaguagaa

SEQ ID NO: 1264601 - RNA, 19 nt, Homo sapiens
  misc_RNA (1)...(19): siRNA sense strand
acagauaucaggauuugga

SEQ ID NO: 1264602 - RNA, 19 nt, Homo sapiens
  misc_RNA (1)...(19): siRNA sense strand
ucauugcugugauuguuau

SEQ ID NO: 1264603 - RNA, 19 nt, Homo sapiens
  misc_RNA (1)...(19): siRNA sense strand
ucagaugcacuuuauuugu

SEQ ID NO: 1264604 - RNA, 19 nt, Homo sapiens
  misc_RNA (1)...(19): siRNA sense strand
gugcugcuccagaguguaa

SEQ ID NO: 1264605 - RNA, 19 nt, Homo sapiens
  misc_RNA (1)...(19): siRNA sense strand
ggaaaacacaccuuuagug

SEQ ID NO: 1264606 - RNA, 19 nt, Homo sapiens
  misc_RNA (1)...(19): siRNA sense strand
aaggaucaguagcaauuug

SEQ ID NO: 1264607 - RNA, 19 nt, Homo sapiens
  misc_RNA (1)...(19): siRNA sense strand
uauauacgggauccuuuaa

SEQ ID NO: 1264608 - RNA, 19 nt, Homo sapiens
  misc_RNA (1)...(19): siRNA sense strand
ugaaguagaaguauuugag

SEQ ID NO: 1264609 - RNA, 19 nt, Homo sapiens
  misc_RNA (1)...(19): siRNA sense strand
cuugacaguuuggauguuu

SEQ ID NO: 1264610 - RNA, 19 nt, Homo sapiens
  misc_RNA (1)...(19): siRNA sense strand
cauauauacgggauccuuu

SEQ ID NO: 1264611 - RNA, 19 nt, Homo sapiens
  misc_RNA (1)...(19): siRNA sense strand
auauauacgggauccuuua

SEQ ID NO: 1264612 - RNA, 19 nt, Homo sapiens
  misc_RNA (1)...(19): siRNA sense strand
cuuaaaggaucaguagcaa

SEQ ID NO: 1264613 - RNA, 19 nt, Homo sapiens
  misc_RNA (1)...(19): siRNA sense strand
uaaaccugaggaaggaaua

SEQ ID NO: 1264614 - RNA, 19 nt, Homo sapiens
  misc_RNA (1)...(19): siRNA sense strand
agaugacgccuguuauaga

SEQ ID NO: 1264615 - RNA, 19 nt, Homo sapiens
  misc_RNA (1)...(19): siRNA sense strand
ugugauuguuauugccaua

SEQ ID NO: 1264616 - RNA, 19 nt, Homo sapiens
  misc_RNA (1)...(19): siRNA sense strand
gagagcacgauuuauugug

SEQ ID NO: 1264617 - RNA, 19 nt, Homo sapiens
  misc_RNA (1)...(19): siRNA sense strand
gaaguauuugaguaucuug

SEQ ID NO: 1264618 - RNA, 19 nt, Homo sapiens
  misc_RNA (1)...(19): siRNA sense strand
ggcuaccugucucagauga

SEQ ID NO: 1264619 - RNA, 19 nt, Homo sapiens
  misc_RNA (1)...(19): siRNA sense strand
gauaucaggauuuggaaaa

SEQ ID NO: 1264620 - RNA, 19 nt, Homo sapiens
  misc_RNA (1)...(19): siRNA sense strand
ccucuugccacccauacua

SEQ ID NO: 1264621 - RNA, 19 nt, Homo sapiens
  misc_RNA (1)...(19): siRNA sense strand
ccaugguguugcugcugua

SEQ ID NO: 1264622 - RNA, 19 nt, Homo sapiens
  misc_RNA (1)...(19): siRNA sense strand
cagaugacgccuguuauag

SEQ ID NO: 1264623 - RNA, 19 nt, Homo sapiens
  misc_RNA (1)...(19): siRNA sense strand
cagaugguggagcugaaua

SEQ ID NO: 1264624 - RNA, 19 nt, Homo sapiens
  misc_RNA (1)...(19): siRNA sense strand
gucauugcugugauuguua

SEQ ID NO: 1264625 - RNA, 19 nt, Homo sapiens
  misc_RNA (1)...(19): siRNA sense strand
ggagccaccaacauuugaa

SEQ ID NO: 1264626 - RNA, 19 nt, Homo sapiens
  misc_RNA (1)...(19): siRNA sense strand
uuggugaacgaguagauua

SEQ ID NO: 1264627 - RNA, 19 nt, Homo sapiens
  misc_RNA (1)...(19): siRNA sense strand
gcgcuuuccuggguugcuu

SEQ ID NO: 1264628 - RNA, 19 nt, Homo sapiens
  misc_RNA (1)...(19): siRNA sense strand
uacuacaaagcaacaguua

SEQ ID NO: 1264629 - RNA, 19 nt, Homo sapiens
  misc_RNA (1)...(19): siRNA sense strand
cuugaugcaguaacuuaua

SEQ ID NO: 1264630 - RNA, 19 nt, Homo sapiens
  misc_RNA (1)...(19): siRNA sense strand
aaacauguccauauauacg

SEQ ID NO: 1264631 - RNA, 19 nt, Homo sapiens
  misc_RNA (1)...(19): siRNA sense strand
guguaaaguggucaaaugu

SEQ ID NO: 1264632 - RNA, 19 nt, Homo sapiens
  misc_RNA (1)...(19): siRNA sense strand
cuuacgaguuugguuauca

SEQ ID NO: 1264633 - RNA, 19 nt, Homo sapiens
  misc_RNA (1)...(19): siRNA sense strand
uacgggauccuuuaaaugg

SEQ ID NO: 1264634 - RNA, 19 nt, Homo sapiens
  misc_RNA (1)...(19): siRNA sense strand
gcagaugguggagcugaau

SEQ ID NO: 1264635 - RNA, 19 nt, Homo sapiens
  misc_RNA (1)...(19): siRNA sense strand
aaccaaaacccuacuauga

SEQ ID NO: 1264636 - RNA, 19 nt, Homo sapiens
  misc_RNA (1)...(19): siRNA sense strand
uugaugcaguaacuuauag

SEQ ID NO: 1264637 - RNA, 19 nt, Homo sapiens
  misc_RNA (1)...(19): siRNA sense strand
ggagcugaauaugccacuu

SEQ ID NO: 1264638 - RNA, 19 nt, Homo sapiens
  misc_RNA (1)...(19): siRNA sense strand
cgauggcagcgacacaauu

SEQ ID NO: 1264639 - RNA, 19 nt, Homo sapiens
  misc_RNA (1)...(19): siRNA sense strand
gauccauuuucacuuauug

SEQ ID NO: 1264640 - RNA, 19 nt, Homo sapiens
  misc_RNA (1)...(19): siRNA sense strand
ggagagagcacgauuuauu

SEQ ID NO: 1264641 - RNA, 19 nt, Homo sapiens
  misc_RNA (1)...(19): siRNA sense strand
agagaaacauguccauaua

SEQ ID NO: 1264642 - RNA, 19 nt, Homo sapiens
  misc_RNA (1)...(19): siRNA sense strand
cagaugcacuuuauuugua

SEQ ID NO: 1264643 - RNA, 19 nt, Homo sapiens
  misc_RNA (1)...(19): siRNA sense strand
ggacuuacgaguuugguua

SEQ ID NO: 1264644 - RNA, 19 nt, Homo sapiens
  misc_RNA (1)...(19): siRNA sense strand
aaacagauaucaggauuug

SEQ ID NO: 1264645 - RNA, 19 nt, Homo sapiens
  misc_RNA (1)...(19): siRNA sense strand
cuauggagcucauugguaa

SEQ ID NO: 1264646 - RNA, 19 nt, Homo sapiens
  misc_RNA (1)...(19): siRNA sense strand
aaacacaccuuuagugaag

SEQ ID NO: 1264647 - RNA, 19 nt, Homo sapiens
  misc_RNA (1)...(19): siRNA sense strand
gaacuuaaaggaucaguag

SEQ ID NO: 1264648 - RNA, 19 nt, Homo sapiens
  misc_RNA (1)...(19): siRNA sense strand
gaaaacagauaucaggauu

SEQ ID NO: 1264649 - RNA, 19 nt, Homo sapiens
  misc_RNA (1)...(19): siRNA sense strand
uaaaggaucaguagcaauu

SEQ ID NO: 1264650 - RNA, 19 nt, Homo sapiens
  misc_RNA (1)...(19): siRNA sense strand
aaaugggacuuacgaguuu

SEQ ID NO: 1264651 - RNA, 19 nt, Homo sapiens
  misc_RNA (1)...(19): siRNA sense strand
guuaucagaugcacuuuau

SEQ ID NO: 1264652 - RNA, 19 nt, Homo sapiens
  misc_RNA (1)...(19): siRNA sense strand
gagcugaauaugccacuua

SEQ ID NO: 1264653 - RNA, 19 nt, Homo sapiens
  misc_RNA (1)...(19): siRNA sense strand
ugagauuggugaacgagua

SEQ ID NO: 1264654 - RNA, 19 nt, Homo sapiens
  misc_RNA (1)...(19): siRNA sense strand
gugaacgaguagauuauaa

SEQ ID NO: 1264655 - RNA, 19 nt, Homo sapiens
  misc_RNA (1)...(19): siRNA sense strand
gagagagcacgauuuauug

SEQ ID NO: 1264656 - RNA, 19 nt, Homo sapiens
  misc_RNA (1)...(19): siRNA sense strand
caaaugggacuuacgaguu

SEQ ID NO: 1264657 - RNA, 19 nt, Homo sapiens
  misc_RNA (1)...(19): siRNA sense strand
ggucauugcugugauuguu

SEQ ID NO: 1264658 - RNA, 19 nt, Homo sapiens
  misc_RNA (1)...(19): siRNA sense strand
ccagauccauuuucacuua

SEQ ID NO: 1264659 - RNA, 19 nt, Homo sapiens
  misc_RNA (1)...(19): siRNA sense strand
gaaggaauacuugacaguu

SEQ ID NO: 1264660 - RNA, 19 nt, Homo sapiens
  misc_RNA (1)...(19): siRNA sense strand
aaggaauacuugacaguuu

SEQ ID NO: 1264661 - RNA, 19 nt, Homo sapiens
  misc_RNA (1)...(19): siRNA sense strand
ucagaugacgccuguuaua

SEQ ID NO: 1264662 - RNA, 19 nt, Homo sapiens
  misc_RNA (1)...(19): siRNA sense strand
gaaaacacaccuuuaguga

SEQ ID NO: 1264663 - RNA, 19 nt, Homo sapiens
  misc_RNA (1)...(19): siRNA sense strand
gaugacgccuguuauagag

SEQ ID NO: 1264664 - RNA, 19 nt, Homo sapiens
  misc_RNA (1)...(19): siRNA sense strand
gagaaacauguccauauau

SEQ ID NO: 1264665 - RNA, 19 nt, Homo sapiens
  misc_RNA (1)...(19): siRNA sense strand
ccacuuaccagacuaaauc

SEQ ID NO: 1264666 - RNA, 19 nt, Homo sapiens
  misc_RNA (1)...(19): siRNA sense strand
acgaguagauuauaagugu

SEQ ID NO: 1264667 - RNA, 19 nt, Homo sapiens
  misc_RNA (1)...(19): siRNA sense strand
cuacaaagcaacaguuaug

SEQ ID NO: 1264668 - RNA, 19 nt, Homo sapiens
  misc_RNA (1)...(19): siRNA sense strand
ccaccaacauuugaagcua

SEQ ID NO: 1264669 - RNA, 19 nt, Homo sapiens
  misc_RNA (1)...(19): siRNA sense strand
uauacgggauccuuuaaau

SEQ ID NO: 1264670 - RNA, 19 nt, Homo sapiens
  misc_RNA (1)...(19): siRNA sense strand
cgaguuugguuaucagaug

SEQ ID NO: 1264671 - RNA, 19 nt, Homo sapiens
  misc_RNA (1)...(19): siRNA sense strand
gaacgaguagauuauaagu

SEQ ID NO: 1264672 - RNA, 19 nt, Homo sapiens
  misc_RNA (1)...(19): siRNA sense strand
gugaggagccaccaacauu

SEQ ID NO: 1264673 - RNA, 19 nt, Homo sapiens
  misc_RNA (1)...(19): siRNA sense strand
gauggcagcgacacaauug

SEQ ID NO: 1264674 - RNA, 19 nt, Homo sapiens
  misc_RNA (1)...(19): siRNA sense strand
ucucagaugacgccuguua

SEQ ID NO: 1264675 - RNA, 19 nt, Homo sapiens
  misc_RNA (1)...(19): siRNA sense strand
gaggagccaccaacauuug

SEQ ID NO: 1264676 - RNA, 19 nt, Homo sapiens
  misc_RNA (1)...(19): siRNA sense strand
gcuauggagcucauuggua

SEQ ID NO: 1264677 - RNA, 19 nt, Homo sapiens
  misc_RNA (1)...(19): siRNA sense strand
acacaccuuuagugaagua

SEQ ID NO: 1264678 - RNA, 19 nt, Homo sapiens
  misc_RNA (1)...(19): siRNA sense strand
uagagaaacauguccauau

SEQ ID NO: 1264679 - RNA, 19 nt, Homo sapiens
  misc_RNA (1)...(19): siRNA sense strand
guuccaaagugucuuaaag

SEQ ID NO: 1264680 - RNA, 19 nt, Homo sapiens
  misc_RNA (1)...(19): siRNA sense strand
ggugaacgaguagauuaua

SEQ ID NO: 1264681 - RNA, 19 nt, Homo sapiens
  misc_RNA (1)...(19): siRNA sense strand
gaaguagaaguauuugagu

SEQ ID NO: 1264682 - RNA, 19 nt, Homo sapiens
  misc_RNA (1)...(19): siRNA sense strand
gaaacauguccauauauac

SEQ ID NO: 1264683 - RNA, 19 nt, Homo sapiens
  misc_RNA (1)...(19): siRNA sense strand
ugacgccuguuauagagaa

SEQ ID NO: 1264684 - RNA, 19 nt, Homo sapiens
  misc_RNA (1)...(19): siRNA sense strand
cgaguagauuauaagugua

SEQ ID NO: 1264685 - RNA, 19 nt, Homo sapiens
  misc_RNA (1)...(19): siRNA sense strand
gcacuuuauuuguaaugag

SEQ ID NO: 1264686 - RNA, 19 nt, Homo sapiens
  misc_RNA (1)...(19): siRNA sense strand
guagaaguauuugaguauc

SEQ ID NO: 1264687 - RNA, 19 nt, Homo sapiens
  misc_RNA (1)...(19): siRNA sense strand
guauuugaguaucuugaug

SEQ ID NO: 1264688 - RNA, 19 nt, Homo sapiens
  misc_RNA (1)...(19): siRNA sense strand
aggaauacuugacaguuug

SEQ ID NO: 1264689 - RNA, 19 nt, Homo sapiens
  misc_RNA (1)...(19): siRNA sense strand
ccaaaacccuacuaugaga

SEQ ID NO: 1264690 - RNA, 19 nt, Homo sapiens
  misc_RNA (1)...(19): siRNA sense strand
aguguaaaguggucaaaug

SEQ ID NO: 1264691 - RNA, 19 nt, Homo sapiens
  misc_RNA (1)...(19): siRNA sense strand
ccacccauacuauuuguga

SEQ ID NO: 1264692 - RNA, 19 nt, Homo sapiens
  misc_RNA (1)...(19): siRNA sense strand
uuggagagagcacgauuua

SEQ ID NO: 1264693 - RNA, 19 nt, Homo sapiens
  misc_RNA (1)...(19): siRNA sense strand
gguuaucagaugcacuuua

SEQ ID NO: 1264694 - RNA, 19 nt, Homo sapiens
  misc_RNA (1)...(19): siRNA sense strand
caccaacauuugaagcuau

SEQ ID NO: 1264695 - RNA, 19 nt, Homo sapiens
  misc_RNA (1)...(19): siRNA sense strand
ugaggagccaccaacauuu

SEQ ID NO: 1264696 - RNA, 19 nt, Homo sapiens
  misc_RNA (1)...(19): siRNA sense strand
ggaaggaauacuugacagu

SEQ ID NO: 1264697 - RNA, 19 nt, Homo sapiens
  misc_RNA (1)...(19): siRNA sense strand
gaggaaggaauacuugaca

SEQ ID NO: 1264698 - RNA, 19 nt, Homo sapiens
  misc_RNA (1)...(19): siRNA sense strand
ccaguuccaaagugucuua

SEQ ID NO: 1264699 - RNA, 19 nt, Homo sapiens
  misc_RNA (1)...(19): siRNA sense strand
ugaguaucuugaugcagua

SEQ ID NO: 1264700 - RNA, 19 nt, Homo sapiens
  misc_RNA (1)...(19): siRNA sense strand
caccuuuagugaaguagaa

SEQ ID NO: 1264701 - RNA, 19 nt, Homo sapiens
  misc_RNA (1)...(19): siRNA sense strand
acagauaucaggauuugga

SEQ ID NO: 1264702 - RNA, 19 nt, Homo sapiens
  misc_RNA (1)...(19): siRNA sense strand
ucauugcugugauuguuau

SEQ ID NO: 1264703 - RNA, 19 nt, Homo sapiens
  misc_RNA (1)...(19): siRNA sense strand
ucagaugcacuuuauuugu

SEQ ID NO: 1264704 - RNA, 19 nt, Homo sapiens
  misc_RNA (1)...(19): siRNA sense strand
gugcugcuccagaguguaa

SEQ ID NO: 1264705 - RNA, 19 nt, Homo sapiens
  misc_RNA (1)...(19): siRNA sense strand
ggaaaacacaccuuuagug

SEQ ID NO: 1264706 - RNA, 19 nt, Homo sapiens
  misc_RNA (1)...(19): siRNA sense strand
aaggaucaguagcaauuug

SEQ ID NO: 1264707 - RNA, 19 nt, Homo sapiens
  misc_RNA (1)...(19): siRNA sense strand
uauauacgggauccuuuaa

SEQ ID NO: 1264708 - RNA, 19 nt, Homo sapiens
  misc_RNA (1)...(19): siRNA sense strand
ugaaguagaaguauuugag

SEQ ID NO: 1264709 - RNA, 19 nt, Homo sapiens
  misc_RNA (1)...(19): siRNA sense strand
cuugacaguuuggauguuu

SEQ ID NO: 1264710 - RNA, 19 nt, Homo sapiens
  misc_RNA (1)...(19): siRNA sense strand
cauauauacgggauccuuu

SEQ ID NO: 1264711 - RNA, 19 nt, Homo sapiens
  misc_RNA (1)...(19): siRNA sense strand
auauauacgggauccuuua

SEQ ID NO: 1264712 - RNA, 19 nt, Homo sapiens
  misc_RNA (1)...(19): siRNA sense strand
cuuaaaggaucaguagcaa

SEQ ID NO: 1264713 - RNA, 19 nt, Homo sapiens
  misc_RNA (1)...(19): siRNA sense strand
uaaaccugaggaaggaaua

SEQ ID NO: 1264714 - RNA, 19 nt, Homo sapiens
  misc_RNA (1)...(19): siRNA sense strand
agaugacgccuguuauaga

SEQ ID NO: 1264715 - RNA, 19 nt, Homo sapiens
  misc_RNA (1)...(19): siRNA sense strand
ugugauuguuauugccaua

SEQ ID NO: 1264716 - RNA, 19 nt, Homo sapiens
  misc_RNA (1)...(19): siRNA sense strand
gagagcacgauuuauugug

SEQ ID NO: 1264717 - RNA, 19 nt, Homo sapiens
  misc_RNA (1)...(19): siRNA sense strand
gaaguauuugaguaucuug

SEQ ID NO: 1264718 - RNA, 19 nt, Homo sapiens
  misc_RNA (1)...(19): siRNA sense strand
ggcuaccugucucagauga

SEQ ID NO: 1264719 - RNA, 19 nt, Homo sapiens
  misc_RNA (1)...(19): siRNA sense strand
gauaucaggauuuggaaaa

SEQ ID NO: 1264720 - RNA, 19 nt, Homo sapiens
  misc_RNA (1)...(19): siRNA sense strand
ccucuugccacccauacua

SEQ ID NO: 1264721 - RNA, 19 nt, Homo sapiens
  misc_RNA (1)...(19): siRNA sense strand
ccaugguguugcugcugua

SEQ ID NO: 1264722 - RNA, 19 nt, Homo sapiens
  misc_RNA (1)...(19): siRNA sense strand
cagaugacgccuguuauag

SEQ ID NO: 1264723 - RNA, 19 nt, Homo sapiens
  misc_RNA (1)...(19): siRNA sense strand
cagaugguggagcugaaua

SEQ ID NO: 1264724 - RNA, 19 nt, Homo sapiens
  misc_RNA (1)...(19): siRNA sense strand
gucauugcugugauuguua

SEQ ID NO: 1264725 - RNA, 19 nt, Homo sapiens
  misc_RNA (1)...(19): siRNA sense strand
ggagccaccaacauuugaa

SEQ ID NO: 1264726 - RNA, 19 nt, Homo sapiens
  misc_RNA (1)...(19): siRNA sense strand
uuggugaacgaguagauua

SEQ ID NO: 1264727 - RNA, 19 nt, Homo sapiens
  misc_RNA (1)...(19): siRNA sense strand
gcgcuuuccuggguugcuu

SEQ ID NO: 1264728 - RNA, 19 nt, Homo sapiens
  misc_RNA (1)...(19): siRNA sense strand
uacuacaaagcaacaguua

SEQ ID NO: 1264729 - RNA, 19 nt, Homo sapiens
  misc_RNA (1)...(19): siRNA sense strand
cuugaugcaguaacuuaua

SEQ ID NO: 1264730 - RNA, 19 nt, Homo sapiens
  misc_RNA (1)...(19): siRNA sense strand
aaacauguccauauauacg

SEQ ID NO: 1264731 - RNA, 19 nt, Homo sapiens
  misc_RNA (1)...(19): siRNA sense strand
guguaaaguggucaaaugu

SEQ ID NO: 1264732 - RNA, 19 nt, Homo sapiens
  misc_RNA (1)...(19): siRNA sense strand
cuuacgaguuugguuauca

SEQ ID NO: 1264733 - RNA, 19 nt, Homo sapiens
  misc_RNA (1)...(19): siRNA sense strand
uacgggauccuuuaaaugg

SEQ ID NO: 1264734 - RNA, 19 nt, Homo sapiens
  misc_RNA (1)...(19): siRNA sense strand
gcagaugguggagcugaau

SEQ ID NO: 1264735 - RNA, 19 nt, Homo sapiens
  misc_RNA (1)...(19): siRNA sense strand
aaccaaaacccuacuauga

SEQ ID NO: 1264736 - RNA, 19 nt, Homo sapiens
  misc_RNA (1)...(19): siRNA sense strand
uugaugcaguaacuuauag

SEQ ID NO: 1264737 - RNA, 19 nt, Homo sapiens
  misc_RNA (1)...(19): siRNA sense strand
ggagcugaauaugccacuu

SEQ ID NO: 1264738 - RNA, 19 nt, Homo sapiens
  misc_RNA (1)...(19): siRNA sense strand
cgauggcagcgacacaauu

SEQ ID NO: 1264739 - RNA, 19 nt, Homo sapiens
  misc_RNA (1)...(19): siRNA sense strand
gauccauuuucacuuauug

SEQ ID NO: 1264740 - RNA, 19 nt, Homo sapiens
  misc_RNA (1)...(19): siRNA sense strand
ggagagagcacgauuuauu

SEQ ID NO: 1264741 - RNA, 19 nt, Homo sapiens
  misc_RNA (1)...(19): siRNA sense strand
agagaaacauguccauaua

SEQ ID NO: 1264742 - RNA, 19 nt, Homo sapiens
  misc_RNA (1)...(19): siRNA sense strand
cagaugcacuuuauuugua

SEQ ID NO: 1264743 - RNA, 19 nt, Homo sapiens
  misc_RNA (1)...(19): siRNA sense strand
ggacuuacgaguuugguua

SEQ ID NO: 1264744 - RNA, 19 nt, Homo sapiens
  misc_RNA (1)...(19): siRNA sense strand
aaacagauaucaggauuug

SEQ ID NO: 1264745 - RNA, 19 nt, Homo sapiens
  misc_RNA (1)...(19): siRNA sense strand
cuauggagcucauugguaa

SEQ ID NO: 1264746 - RNA, 19 nt, Homo sapiens
  misc_RNA (1)...(19): siRNA sense strand
aaacacaccuuuagugaag

SEQ ID NO: 1264747 - RNA, 19 nt, Homo sapiens
  misc_RNA (1)...(19): siRNA sense strand
gaacuuaaaggaucaguag

SEQ ID NO: 1264748 - RNA, 19 nt, Homo sapiens
  misc_RNA (1)...(19): siRNA sense strand
gaaaacagauaucaggauu

SEQ ID NO: 1264749 - RNA, 19 nt, Homo sapiens
  misc_RNA (1)...(19): siRNA sense strand
uaaaggaucaguagcaauu

SEQ ID NO: 1264750 - RNA, 19 nt, Homo sapiens
  misc_RNA (1)...(19): siRNA sense strand
aaaugggacuuacgaguuu

SEQ ID NO: 1264751 - RNA, 19 nt, Homo sapiens
  misc_RNA (1)...(19): siRNA sense strand
guuaucagaugcacuuuau

SEQ ID NO: 1264752 - RNA, 19 nt, Homo sapiens
  misc_RNA (1)...(19): siRNA sense strand
gagcugaauaugccacuua

SEQ ID NO: 1264753 - RNA, 19 nt, Homo sapiens
  misc_RNA (1)...(19): siRNA sense strand
ugagauuggugaacgagua

SEQ ID NO: 1264754 - RNA, 19 nt, Homo sapiens
  misc_RNA (1)...(19): siRNA sense strand
gugaacgaguagauuauaa

SEQ ID NO: 1264755 - RNA, 19 nt, Homo sapiens
  misc_RNA (1)...(19): siRNA sense strand
gagagagcacgauuuauug

SEQ ID NO: 1264756 - RNA, 19 nt, Homo sapiens
  misc_RNA (1)...(19): siRNA sense strand
caaaugggacuuacgaguu

SEQ ID NO: 1264757 - RNA, 19 nt, Homo sapiens
  misc_RNA (1)...(19): siRNA sense strand
ggucauugcugugauuguu

SEQ ID NO: 1264758 - RNA, 19 nt, Homo sapiens
  misc_RNA (1)...(19): siRNA sense strand
ccagauccauuuucacuua

SEQ ID NO: 1264759 - RNA, 19 nt, Homo sapiens
  misc_RNA (1)...(19): siRNA sense strand
gaaggaauacuugacaguu

SEQ ID NO: 1264760 - RNA, 19 nt, Homo sapiens
  misc_RNA (1)...(19): siRNA sense strand
aaggaauacuugacaguuu

SEQ ID NO: 1264761 - RNA, 19 nt, Homo sapiens
  misc_RNA (1)...(19): siRNA sense strand
ucagaugacgccuguuaua

SEQ ID NO: 1264762 - RNA, 19 nt, Homo sapiens
  misc_RNA (1)...(19): siRNA sense strand
gaaaacacaccuuuaguga

SEQ ID NO: 1264763 - RNA, 19 nt, Homo sapiens
  misc_RNA (1)...(19): siRNA sense strand
gaugacgccuguuauagag

SEQ ID NO: 1264764 - RNA, 19 nt, Homo sapiens
  misc_RNA (1)...(19): siRNA sense strand
gagaaacauguccauauau

SEQ ID NO: 1264765 - RNA, 19 nt, Homo sapiens
  misc_RNA (1)...(19): siRNA sense strand
ccacuuaccagacuaaauc

SEQ ID NO: 1264766 - RNA, 19 nt, Homo sapiens
  misc_RNA (1)...(19): siRNA sense strand
acgaguagauuauaagugu

SEQ ID NO: 1264767 - RNA, 19 nt, Homo sapiens
  misc_RNA (1)...(19): siRNA sense strand
cuacaaagcaacaguuaug

SEQ ID NO: 1264768 - RNA, 19 nt, Homo sapiens
  misc_RNA (1)...(19): siRNA sense strand
ccaccaacauuugaagcua

SEQ ID NO: 1264769 - RNA, 19 nt, Homo sapiens
  misc_RNA (1)...(19): siRNA sense strand
uauacgggauccuuuaaau

SEQ ID NO: 1264770 - RNA, 19 nt, Homo sapiens
  misc_RNA (1)...(19): siRNA sense strand
cgaguuugguuaucagaug

SEQ ID NO: 1264771 - RNA, 19 nt, Homo sapiens
  misc_RNA (1)...(19): siRNA sense strand
gaacgaguagauuauaagu

SEQ ID NO: 1264772 - RNA, 19 nt, Homo sapiens
  misc_RNA (1)...(19): siRNA sense strand
gugaggagccaccaacauu

SEQ ID NO: 1264773 - RNA, 19 nt, Homo sapiens
  misc_RNA (1)...(19): siRNA sense strand
gauggcagcgacacaauug

SEQ ID NO: 1264774 - RNA, 19 nt, Homo sapiens
  misc_RNA (1)...(19): siRNA sense strand
ucucagaugacgccuguua

SEQ ID NO: 1264775 - RNA, 19 nt, Homo sapiens
  misc_RNA (1)...(19): siRNA sense strand
gaggagccaccaacauuug

SEQ ID NO: 1264776 - RNA, 19 nt, Homo sapiens
  misc_RNA (1)...(19): siRNA sense strand
gcuauggagcucauuggua

SEQ ID NO: 1264777 - RNA, 19 nt, Homo sapiens
  misc_RNA (1)...(19): siRNA sense strand
acacaccuuuagugaagua

SEQ ID NO: 1264778 - RNA, 19 nt, Homo sapiens
  misc_RNA (1)...(19): siRNA sense strand
uagagaaacauguccauau

SEQ ID NO: 1264779 - RNA, 19 nt, Homo sapiens
  misc_RNA (1)...(19): siRNA sense strand
guuccaaagugucuuaaag

SEQ ID NO: 1264780 - RNA, 19 nt, Homo sapiens
  misc_RNA (1)...(19): siRNA sense strand
ggugaacgaguagauuaua

SEQ ID NO: 1264781 - RNA, 19 nt, Homo sapiens
  misc_RNA (1)...(19): siRNA sense strand
gaaguagaaguauuugagu

SEQ ID NO: 1264782 - RNA, 19 nt, Homo sapiens
  misc_RNA (1)...(19): siRNA sense strand
gaaacauguccauauauac

SEQ ID NO: 1264783 - RNA, 19 nt, Homo sapiens
  misc_RNA (1)...(19): siRNA sense strand
ugacgccuguuauagagaa

SEQ ID NO: 1264784 - RNA, 19 nt, Homo sapiens
  misc_RNA (1)...(19): siRNA sense strand
cgaguagauuauaagugua

SEQ ID NO: 1264785 - RNA, 19 nt, Homo sapiens
  misc_RNA (1)...(19): siRNA sense strand
gcacuuuauuuguaaugag

SEQ ID NO: 1264786 - RNA, 19 nt, Homo sapiens
  misc_RNA (1)...(19): siRNA sense strand
guagaaguauuugaguauc

SEQ ID NO: 1264787 - RNA, 19 nt, Homo sapiens
  misc_RNA (1)...(19): siRNA sense strand
guauuugaguaucuugaug

SEQ ID NO: 1264788 - RNA, 19 nt, Homo sapiens
  misc_RNA (1)...(19): siRNA sense strand
aggaauacuugacaguuug

SEQ ID NO: 1264789 - RNA, 19 nt, Homo sapiens
  misc_RNA (1)...(19): siRNA sense strand
ccaaaacccuacuaugaga

SEQ ID NO: 1264790 - RNA, 19 nt, Homo sapiens
  misc_RNA (1)...(19): siRNA sense strand
aguguaaaguggucaaaug

SEQ ID NO: 1264791 - RNA, 19 nt, Homo sapiens
  misc_RNA (1)...(19): siRNA sense strand
ccacccauacuauuuguga

SEQ ID NO: 1264792 - RNA, 19 nt, Homo sapiens
  misc_RNA (1)...(19): siRNA sense strand
uuggagagagcacgauuua

SEQ ID NO: 1264793 - RNA, 19 nt, Homo sapiens
  misc_RNA (1)...(19): siRNA sense strand
gguuaucagaugcacuuua

SEQ ID NO: 1264794 - RNA, 19 nt, Homo sapiens
  misc_RNA (1)...(19): siRNA sense strand
caccaacauuugaagcuau

SEQ ID NO: 1264795 - RNA, 19 nt, Homo sapiens
  misc_RNA (1)...(19): siRNA sense strand
ugaggagccaccaacauuu

SEQ ID NO: 1264796 - RNA, 19 nt, Homo sapiens
  misc_RNA (1)...(19): siRNA sense strand
ggaaggaauacuugacagu

SEQ ID NO: 1264797 - RNA, 19 nt, Homo sapiens
  misc_RNA (1)...(19): siRNA sense strand
gaggaaggaauacuugaca

SEQ ID NO: 1264798 - RNA, 19 nt, Homo sapiens
  misc_RNA (1)...(19): siRNA sense strand
ccaguuccaaagugucuua

SEQ ID NO: 1264799 - RNA, 19 nt, Homo sapiens
  misc_RNA (1)...(19): siRNA sense strand
ugaguaucuugaugcagua

SEQ ID NO: 1264800 - RNA, 19 nt, Homo sapiens
  misc_RNA (1)...(19): siRNA sense strand
caccuuuagugaaguagaa

SEQ ID NO: 1264801 - RNA, 19 nt, Homo sapiens
  misc_RNA (1)...(19): siRNA sense strand
acagauaucaggauuugga

SEQ ID NO: 1264802 - RNA, 19 nt, Homo sapiens
  misc_RNA (1)...(19): siRNA sense strand
ucauugcugugauuguuau

SEQ ID NO: 1264803 - RNA, 19 nt, Homo sapiens
  misc_RNA (1)...(19): siRNA sense strand
ucagaugcacuuuauuugu

SEQ ID NO: 1264804 - RNA, 19 nt, Homo sapiens
  misc_RNA (1)...(19): siRNA sense strand
gugcugcuccagaguguaa

SEQ ID NO: 1264805 - RNA, 19 nt, Homo sapiens
  misc_RNA (1)...(19): siRNA sense strand
ggaaaacacaccuuuagug

SEQ ID NO: 1264806 - RNA, 19 nt, Homo sapiens
  misc_RNA (1)...(19): siRNA sense strand
aaggaucaguagcaauuug

SEQ ID NO: 1264807 - RNA, 19 nt, Homo sapiens
  misc_RNA (1)...(19): siRNA sense strand
uauauacgggauccuuuaa

SEQ ID NO: 1264808 - RNA, 19 nt, Homo sapiens
  misc_RNA (1)...(19): siRNA sense strand
ugaaguagaaguauuugag

SEQ ID NO: 1264809 - RNA, 19 nt, Homo sapiens
  misc_RNA (1)...(19): siRNA sense strand
cuugacaguuuggauguuu

SEQ ID NO: 1264810 - RNA, 19 nt, Homo sapiens
  misc_RNA (1)...(19): siRNA sense strand
cauauauacgggauccuuu

SEQ ID NO: 1264811 - RNA, 19 nt, Homo sapiens
  misc_RNA (1)...(19): siRNA sense strand
auauauacgggauccuuua

SEQ ID NO: 1264812 - RNA, 19 nt, Homo sapiens
  misc_RNA (1)...(19): siRNA sense strand
cuuaaaggaucaguagcaa

SEQ ID NO: 1264813 - RNA, 19 nt, Homo sapiens
  misc_RNA (1)...(19): siRNA sense strand
uaaaccugaggaaggaaua

SEQ ID NO: 1264814 - RNA, 19 nt, Homo sapiens
  misc_RNA (1)...(19): siRNA sense strand
agaugacgccuguuauaga

SEQ ID NO: 1264815 - RNA, 19 nt, Homo sapiens
  misc_RNA (1)...(19): siRNA sense strand
ugugauuguuauugccaua

SEQ ID NO: 1264816 - RNA, 19 nt, Homo sapiens
  misc_RNA (1)...(19): siRNA sense strand
gagagcacgauuuauugug

SEQ ID NO: 1264817 - RNA, 19 nt, Homo sapiens
  misc_RNA (1)...(19): siRNA sense strand
gaaguauuugaguaucuug

SEQ ID NO: 1264818 - RNA, 19 nt, Homo sapiens
  misc_RNA (1)...(19): siRNA sense strand
ggcuaccugucucagauga

SEQ ID NO: 1264819 - RNA, 19 nt, Homo sapiens
  misc_RNA (1)...(19): siRNA sense strand
gauaucaggauuuggaaaa

SEQ ID NO: 1264820 - RNA, 19 nt, Homo sapiens
  misc_RNA (1)...(19): siRNA sense strand
ccucuugccacccauacua

SEQ ID NO: 1264821 - RNA, 19 nt, Homo sapiens
  misc_RNA (1)...(19): siRNA sense strand
ccaugguguugcugcugua

SEQ ID NO: 1264822 - RNA, 19 nt, Homo sapiens
  misc_RNA (1)...(19): siRNA sense strand
cagaugacgccuguuauag

SEQ ID NO: 1264823 - RNA, 19 nt, Homo sapiens
  misc_RNA (1)...(19): siRNA sense strand
cagaugguggagcugaaua

SEQ ID NO: 1264824 - RNA, 19 nt, Homo sapiens
  misc_RNA (1)...(19): siRNA sense strand
gucauugcugugauuguua

SEQ ID NO: 1264825 - RNA, 19 nt, Homo sapiens
  misc_RNA (1)...(19): siRNA sense strand
ggagccaccaacauuugaa

SEQ ID NO: 1264826 - RNA, 19 nt, Homo sapiens
  misc_RNA (1)...(19): siRNA sense strand
uuggugaacgaguagauua

SEQ ID NO: 1264827 - RNA, 19 nt, Homo sapiens
  misc_RNA (1)...(19): siRNA sense strand
gcgcuuuccuggguugcuu

SEQ ID NO: 1264828 - RNA, 19 nt, Homo sapiens
  misc_RNA (1)...(19): siRNA sense strand
uacuacaaagcaacaguua

SEQ ID NO: 1264829 - RNA, 19 nt, Homo sapiens
  misc_RNA (1)...(19): siRNA sense strand
cuugaugcaguaacuuaua

SEQ ID NO: 1264830 - RNA, 19 nt, Homo sapiens
  misc_RNA (1)...(19): siRNA sense strand
aaacauguccauauauacg

SEQ ID NO: 1264831 - RNA, 19 nt, Homo sapiens
  misc_RNA (1)...(19): siRNA sense strand
guguaaaguggucaaaugu

SEQ ID NO: 1264832 - RNA, 19 nt, Homo sapiens
  misc_RNA (1)...(19): siRNA sense strand
cuuacgaguuugguuauca

SEQ ID NO: 1264833 - RNA, 19 nt, Homo sapiens
  misc_RNA (1)...(19): siRNA sense strand
uacgggauccuuuaaaugg

SEQ ID NO: 1264834 - RNA, 19 nt, Homo sapiens
  misc_RNA (1)...(19): siRNA sense strand
gcagaugguggagcugaau

SEQ ID NO: 1264835 - RNA, 19 nt, Homo sapiens
  misc_RNA (1)...(19): siRNA sense strand
aaccaaaacccuacuauga

SEQ ID NO: 1264836 - RNA, 19 nt, Homo sapiens
  misc_RNA (1)...(19): siRNA sense strand
uugaugcaguaacuuauag

SEQ ID NO: 1264837 - RNA, 19 nt, Homo sapiens
  misc_RNA (1)...(19): siRNA sense strand
ggagcugaauaugccacuu

SEQ ID NO: 1264838 - RNA, 19 nt, Homo sapiens
  misc_RNA (1)...(19): siRNA sense strand
cgauggcagcgacacaauu

SEQ ID NO: 1264839 - RNA, 19 nt, Homo sapiens
  misc_RNA (1)...(19): siRNA sense strand
gauccauuuucacuuauug

SEQ ID NO: 1264840 - RNA, 19 nt, Homo sapiens
  misc_RNA (1)...(19): siRNA sense strand
ggagagagcacgauuuauu

SEQ ID NO: 1264841 - RNA, 19 nt, Homo sapiens
  misc_RNA (1)...(19): siRNA sense strand
agagaaacauguccauaua

SEQ ID NO: 1264842 - RNA, 19 nt, Homo sapiens
  misc_RNA (1)...(19): siRNA sense strand
cagaugcacuuuauuugua

SEQ ID NO: 1264843 - RNA, 19 nt, Homo sapiens
  misc_RNA (1)...(19): siRNA sense strand
ggacuuacgaguuugguua

SEQ ID NO: 1264844 - RNA, 19 nt, Homo sapiens
  misc_RNA (1)...(19): siRNA sense strand
aaacagauaucaggauuug

SEQ ID NO: 1264845 - RNA, 19 nt, Homo sapiens
  misc_RNA (1)...(19): siRNA sense strand
cuauggagcucauugguaa

SEQ ID NO: 1264846 - RNA, 19 nt, Homo sapiens
  misc_RNA (1)...(19): siRNA sense strand
aaacacaccuuuagugaag

SEQ ID NO: 1264847 - RNA, 19 nt, Homo sapiens
  misc_RNA (1)...(19): siRNA sense strand
gaacuuaaaggaucaguag

SEQ ID NO: 1264848 - RNA, 19 nt, Homo sapiens
  misc_RNA (1)...(19): siRNA sense strand
gaaaacagauaucaggauu

SEQ ID NO: 1264849 - RNA, 19 nt, Homo sapiens
  misc_RNA (1)...(19): siRNA sense strand
uaaaggaucaguagcaauu

SEQ ID NO: 1264850 - RNA, 19 nt, Homo sapiens
  misc_RNA (1)...(19): siRNA sense strand
aaaugggacuuacgaguuu

SEQ ID NO: 1264851 - RNA, 19 nt, Homo sapiens
  misc_RNA (1)...(19): siRNA sense strand
guuaucagaugcacuuuau

SEQ ID NO: 1264852 - RNA, 19 nt, Homo sapiens
  misc_RNA (1)...(19): siRNA sense strand
ugagauuggugaacgagua

SEQ ID NO: 1264853 - RNA, 19 nt, Homo sapiens
  misc_RNA (1)...(19): siRNA sense strand
gugaacgaguagauuauaa

SEQ ID NO: 1264854 - RNA, 19 nt, Homo sapiens
  misc_RNA (1)...(19): siRNA sense strand
gagagagcacgauuuauug

SEQ ID NO: 1264855 - RNA, 19 nt, Homo sapiens
  misc_RNA (1)...(19): siRNA sense strand
caaaugggacuuacgaguu

SEQ ID NO: 1264856 - RNA, 19 nt, Homo sapiens
  misc_RNA (1)...(19): siRNA sense strand
ggucauugcugugauuguu

SEQ ID NO: 1264857 - RNA, 19 nt, Homo sapiens
  misc_RNA (1)...(19): siRNA sense strand
ccagauccauuuucacuua

SEQ ID NO: 1264858 - RNA, 19 nt, Homo sapiens
  misc_RNA (1)...(19): siRNA sense strand
gaaggaauacuugacaguu

SEQ ID NO: 1264859 - RNA, 19 nt, Homo sapiens
  misc_RNA (1)...(19): siRNA sense strand
aaggaauacuugacaguuu

SEQ ID NO: 1264860 - RNA, 19 nt, Homo sapiens
  misc_RNA (1)...(19): siRNA sense strand
ucagaugacgccuguuaua

SEQ ID NO: 1264861 - RNA, 19 nt, Homo sapiens
  misc_RNA (1)...(19): siRNA sense strand
gaaaacacaccuuuaguga

SEQ ID NO: 1264862 - RNA, 19 nt, Homo sapiens
  misc_RNA (1)...(19): siRNA sense strand
gaugacgccuguuauagag

SEQ ID NO: 1264863 - RNA, 19 nt, Homo sapiens
  misc_RNA (1)...(19): siRNA sense strand
gagaaacauguccauauau

SEQ ID NO: 1264864 - RNA, 19 nt, Homo sapiens
  misc_RNA (1)...(19): siRNA sense strand
acgaguagauuauaagugu

SEQ ID NO: 1264865 - RNA, 19 nt, Homo sapiens
  misc_RNA (1)...(19): siRNA sense strand
cuacaaagcaacaguuaug

SEQ ID NO: 1264866 - RNA, 19 nt, Homo sapiens
  misc_RNA (1)...(19): siRNA sense strand
ccaccaacauuugaagcua

SEQ ID NO: 1264867 - RNA, 19 nt, Homo sapiens
  misc_RNA (1)...(19): siRNA sense strand
uauacgggauccuuuaaau

SEQ ID NO: 1264868 - RNA, 19 nt, Homo sapiens
  misc_RNA (1)...(19): siRNA sense strand
cgaguuugguuaucagaug

SEQ ID NO: 1264869 - RNA, 19 nt, Homo sapiens
  misc_RNA (1)...(19): siRNA sense strand
gaacgaguagauuauaagu

SEQ ID NO: 1264870 - RNA, 19 nt, Homo sapiens
  misc_RNA (1)...(19): siRNA sense strand
gugaggagccaccaacauu

SEQ ID NO: 1264871 - RNA, 19 nt, Homo sapiens
  misc_RNA (1)...(19): siRNA sense strand
gauggcagcgacacaauug

SEQ ID NO: 1264872 - RNA, 19 nt, Homo sapiens
  misc_RNA (1)...(19): siRNA sense strand
gcuauggagcucauuggua

SEQ ID NO: 1264873 - RNA, 19 nt, Homo sapiens
  misc_RNA (1)...(19): siRNA sense strand
gaggagccaccaacauuug

SEQ ID NO: 1264874 - RNA, 19 nt, Homo sapiens
  misc_RNA (1)...(19): siRNA sense strand
acacaccuuuagugaagua

SEQ ID NO: 1264875 - RNA, 19 nt, Homo sapiens
  misc_RNA (1)...(19): siRNA sense strand
ucucagaugacgccuguua

SEQ ID NO: 1264876 - RNA, 19 nt, Homo sapiens
  misc_RNA (1)...(19): siRNA sense strand
uagagaaacauguccauau

SEQ ID NO: 1264877 - RNA, 19 nt, Homo sapiens
  misc_RNA (1)...(19): siRNA sense strand
guuccaaagugucuuaaag

SEQ ID NO: 1264878 - RNA, 19 nt, Homo sapiens
  misc_RNA (1)...(19): siRNA sense strand
ggugaacgaguagauuaua

SEQ ID NO: 1264879 - RNA, 19 nt, Homo sapiens
  misc_RNA (1)...(19): siRNA sense strand
gaaguagaaguauuugagu

SEQ ID NO: 1264880 - RNA, 19 nt, Homo sapiens
  misc_RNA (1)...(19): siRNA sense strand
gaaacauguccauauauac

SEQ ID NO: 1264881 - RNA, 19 nt, Homo sapiens
  misc_RNA (1)...(19): siRNA sense strand
ugacgccuguuauagagaa

SEQ ID NO: 1264882 - RNA, 19 nt, Homo sapiens
  misc_RNA (1)...(19): siRNA sense strand
cgaguagauuauaagugua

SEQ ID NO: 1264883 - RNA, 19 nt, Homo sapiens
  misc_RNA (1)...(19): siRNA sense strand
gcacuuuauuuguaaugag

SEQ ID NO: 1264884 - RNA, 19 nt, Homo sapiens
  misc_RNA (1)...(19): siRNA sense strand
guagaaguauuugaguauc

SEQ ID NO: 1264885 - RNA, 19 nt, Homo sapiens
  misc_RNA (1)...(19): siRNA sense strand
guauuugaguaucuugaug

SEQ ID NO: 1264886 - RNA, 19 nt, Homo sapiens
  misc_RNA (1)...(19): siRNA sense strand
aggaauacuugacaguuug

SEQ ID NO: 1264887 - RNA, 19 nt, Homo sapiens
  misc_RNA (1)...(19): siRNA sense strand
ccaaaacccuacuaugaga

SEQ ID NO: 1264888 - RNA, 19 nt, Homo sapiens
  misc_RNA (1)...(19): siRNA sense strand
aguguaaaguggucaaaug

SEQ ID NO: 1264889 - RNA, 19 nt, Homo sapiens
  misc_RNA (1)...(19): siRNA sense strand
ccacccauacuauuuguga

SEQ ID NO: 1264890 - RNA, 19 nt, Homo sapiens
  misc_RNA (1)...(19): siRNA sense strand
caccaacauuugaagcuau

SEQ ID NO: 1264891 - RNA, 19 nt, Homo sapiens
  misc_RNA (1)...(19): siRNA sense strand
uuggagagagcacgauuua

SEQ ID NO: 1264892 - RNA, 19 nt, Homo sapiens
  misc_RNA (1)...(19): siRNA sense strand
gguuaucagaugcacuuua

SEQ ID NO: 1264893 - RNA, 19 nt, Homo sapiens
  misc_RNA (1)...(19): siRNA sense strand
ugaggagccaccaacauuu

SEQ ID NO: 1264894 - RNA, 19 nt, Homo sapiens
  misc_RNA (1)...(19): siRNA sense strand
ggaaggaauacuugacagu

SEQ ID NO: 1264895 - RNA, 19 nt, Homo sapiens
  misc_RNA (1)...(19): siRNA sense strand
gaggaaggaauacuugaca

SEQ ID NO: 1264896 - RNA, 19 nt, Homo sapiens
  misc_RNA (1)...(19): siRNA sense strand
ccaguuccaaagugucuua

SEQ ID NO: 1264897 - RNA, 19 nt, Homo sapiens
  misc_RNA (1)...(19): siRNA sense strand
ugaguaucuugaugcagua

SEQ ID NO: 1264898 - RNA, 19 nt, Homo sapiens
  misc_RNA (1)...(19): siRNA sense strand
caccuuuagugaaguagaa

SEQ ID NO: 1264899 - RNA, 19 nt, Homo sapiens
  misc_RNA (1)...(19): siRNA sense strand
acagauaucaggauuugga

SEQ ID NO: 1264900 - RNA, 19 nt, Homo sapiens
  misc_RNA (1)...(19): siRNA sense strand
ucauugcugugauuguuau

SEQ ID NO: 1264901 - RNA, 19 nt, Homo sapiens
  misc_RNA (1)...(19): siRNA sense strand
ucagaugcacuuuauuugu

SEQ ID NO: 1264902 - RNA, 19 nt, Homo sapiens
  misc_RNA (1)...(19): siRNA sense strand
gugcugcuccagaguguaa

SEQ ID NO: 1264903 - RNA, 19 nt, Homo sapiens
  misc_RNA (1)...(19): siRNA sense strand
ggaaaacacaccuuuagug

SEQ ID NO: 1264904 - RNA, 19 nt, Homo sapiens
  misc_RNA (1)...(19): siRNA sense strand
aaggaucaguagcaauuug

SEQ ID NO: 1264905 - RNA, 19 nt, Homo sapiens
  misc_RNA (1)...(19): siRNA sense strand
uauauacgggauccuuuaa

SEQ ID NO: 1264906 - RNA, 19 nt, Homo sapiens
  misc_RNA (1)...(19): siRNA sense strand
ugaaguagaaguauuugag

SEQ ID NO: 1264907 - RNA, 19 nt, Homo sapiens
  misc_RNA (1)...(19): siRNA sense strand
cuugacaguuuggauguuu

SEQ ID NO: 1264908 - RNA, 19 nt, Homo sapiens
  misc_RNA (1)...(19): siRNA sense strand
cauauauacgggauccuuu

SEQ ID NO: 1264909 - RNA, 19 nt, Homo sapiens
  misc_RNA (1)...(19): siRNA sense strand
auauauacgggauccuuua

SEQ ID NO: 1264910 - RNA, 19 nt, Homo sapiens
  misc_RNA (1)...(19): siRNA sense strand
cuuaaaggaucaguagcaa

SEQ ID NO: 1264911 - RNA, 19 nt, Homo sapiens
  misc_RNA (1)...(19): siRNA sense strand
uaaaccugaggaaggaaua

SEQ ID NO: 1264912 - RNA, 19 nt, Homo sapiens
  misc_RNA (1)...(19): siRNA sense strand
agaugacgccuguuauaga

SEQ ID NO: 1264913 - RNA, 19 nt, Homo sapiens
  misc_RNA (1)...(19): siRNA sense strand
ugugauuguuauugccaua

SEQ ID NO: 1264914 - RNA, 19 nt, Homo sapiens
  misc_RNA (1)...(19): siRNA sense strand
gagagcacgauuuauugug

SEQ ID NO: 1264915 - RNA, 19 nt, Homo sapiens
  misc_RNA (1)...(19): siRNA sense strand
gaaguauuugaguaucuug

SEQ ID NO: 1264916 - RNA, 19 nt, Homo sapiens
  misc_RNA (1)...(19): siRNA sense strand
ggcuaccugucucagauga

SEQ ID NO: 1264917 - RNA, 19 nt, Homo sapiens
  misc_RNA (1)...(19): siRNA sense strand
gauaucaggauuuggaaaa

SEQ ID NO: 1264918 - RNA, 19 nt, Homo sapiens
  misc_RNA (1)...(19): siRNA sense strand
ccucuugccacccauacua

SEQ ID NO: 1264919 - RNA, 19 nt, Homo sapiens
  misc_RNA (1)...(19): siRNA sense strand
ccaugguguugcugcugua

SEQ ID NO: 1264920 - RNA, 19 nt, Homo sapiens
  misc_RNA (1)...(19): siRNA sense strand
cagaugacgccuguuauag

SEQ ID NO: 1264921 - RNA, 19 nt, Homo sapiens
  misc_RNA (1)...(19): siRNA sense strand
uuggugaacgaguagauua

SEQ ID NO: 1264922 - RNA, 19 nt, Homo sapiens
  misc_RNA (1)...(19): siRNA sense strand
gucauugcugugauuguua

SEQ ID NO: 1264923 - RNA, 19 nt, Homo sapiens
  misc_RNA (1)...(19): siRNA sense strand
ggagccaccaacauuugaa

SEQ ID NO: 1264924 - RNA, 19 nt, Homo sapiens
  misc_RNA (1)...(19): siRNA sense strand
gcgcuuuccuggguugcuu

SEQ ID NO: 1264925 - RNA, 19 nt, Homo sapiens
  misc_RNA (1)...(19): siRNA sense strand
uacuacaaagcaacaguua

SEQ ID NO: 1264926 - RNA, 19 nt, Homo sapiens
  misc_RNA (1)...(19): siRNA sense strand
cuugaugcaguaacuuaua

SEQ ID NO: 1264927 - RNA, 19 nt, Homo sapiens
  misc_RNA (1)...(19): siRNA sense strand
aaacauguccauauauacg

SEQ ID NO: 1264928 - RNA, 19 nt, Homo sapiens
  misc_RNA (1)...(19): siRNA sense strand
guguaaaguggucaaaugu

SEQ ID NO: 1264929 - RNA, 19 nt, Homo sapiens
  misc_RNA (1)...(19): siRNA sense strand
cuuacgaguuugguuauca

SEQ ID NO: 1264930 - RNA, 19 nt, Homo sapiens
  misc_RNA (1)...(19): siRNA sense strand
uacgggauccuuuaaaugg

SEQ ID NO: 1264931 - RNA, 19 nt, Homo sapiens
  misc_RNA (1)...(19): siRNA sense strand
aaccaaaacccuacuauga

SEQ ID NO: 1264932 - RNA, 19 nt, Homo sapiens
  misc_RNA (1)...(19): siRNA sense strand
cccaauaugugaaaagguu

SEQ ID NO: 1264933 - RNA, 19 nt, Homo sapiens
  misc_RNA (1)...(19): siRNA sense strand
cgauggcagcgacacaauu

SEQ ID NO: 1264934 - RNA, 19 nt, Homo sapiens
  misc_RNA (1)...(19): siRNA sense strand
gauccauuuucacuuauug

SEQ ID NO: 1264935 - RNA, 19 nt, Homo sapiens
  misc_RNA (1)...(19): siRNA sense strand
uugaugcaguaacuuauag

SEQ ID NO: 1264936 - RNA, 19 nt, Homo sapiens
  misc_RNA (1)...(19): siRNA sense strand
guaucuugaugcaguaacu

SEQ ID NO: 1264937 - RNA, 19 nt, Homo sapiens
  misc_RNA (1)...(19): siRNA sense strand
caacauuugaagcuaugga

SEQ ID NO: 1264938 - RNA, 19 nt, Homo sapiens
  misc_RNA (1)...(19): siRNA sense strand
gagauuggugaacgaguag

SEQ ID NO: 1264939 - RNA, 19 nt, Homo sapiens
  misc_RNA (1)...(19): siRNA sense strand
ggagagagcacgauuuauu

SEQ ID NO: 1264940 - RNA, 19 nt, Homo sapiens
  misc_RNA (1)...(19): siRNA sense strand
agagaaacauguccauaua

SEQ ID NO: 1264941 - RNA, 19 nt, Homo sapiens
  misc_RNA (1)...(19): siRNA sense strand
cagaugcacuuuauuugua

SEQ ID NO: 1264942 - RNA, 19 nt, Homo sapiens
  misc_RNA (1)...(19): siRNA sense strand
ggacuuacgaguuugguua

SEQ ID NO: 1264943 - RNA, 19 nt, Homo sapiens
  misc_RNA (1)...(19): siRNA sense strand
aaacagauaucaggauuug

SEQ ID NO: 1264944 - RNA, 19 nt, Homo sapiens
  misc_RNA (1)...(19): siRNA sense strand
cuauggagcucauugguaa

SEQ ID NO: 1264945 - RNA, 19 nt, Homo sapiens
  misc_RNA (1)...(19): siRNA sense strand
aaacacaccuuuagugaag

SEQ ID NO: 1264946 - RNA, 19 nt, Homo sapiens
  misc_RNA (1)...(19): siRNA sense strand
gaacuuaaaggaucaguag

SEQ ID NO: 1264947 - RNA, 19 nt, Homo sapiens
  misc_RNA (1)...(19): siRNA sense strand
gaaaacagauaucaggauu

SEQ ID NO: 1264948 - RNA, 19 nt, Homo sapiens
  misc_RNA (1)...(19): siRNA sense strand
uaaaggaucaguagcaauu

SEQ ID NO: 1264949 - RNA, 19 nt, Homo sapiens
  misc_RNA (1)...(19): siRNA sense strand
aaaugggacuuacgaguuu

SEQ ID NO: 1264950 - RNA, 19 nt, Homo sapiens
  misc_RNA (1)...(19): siRNA sense strand
guuaucagaugcacuuuau

SEQ ID NO: 1264951 - RNA, 19 nt, Homo sapiens
  misc_RNA (1)...(19): siRNA sense strand
gagcugaauaugccacuua

SEQ ID NO: 1264952 - RNA, 19 nt, Homo sapiens
  misc_RNA (1)...(19): siRNA sense strand
ugagauuggugaacgagua

SEQ ID NO: 1264953 - RNA, 19 nt, Homo sapiens
  misc_RNA (1)...(19): siRNA sense strand
gugaacgaguagauuauaa

SEQ ID NO: 1264954 - RNA, 19 nt, Homo sapiens
  misc_RNA (1)...(19): siRNA sense strand
gagagagcacgauuuauug

SEQ ID NO: 1264955 - RNA, 19 nt, Homo sapiens
  misc_RNA (1)...(19): siRNA sense strand
caaaugggacuuacgaguu

SEQ ID NO: 1264956 - RNA, 19 nt, Homo sapiens
  misc_RNA (1)...(19): siRNA sense strand
ggucauugcugugauuguu

SEQ ID NO: 1264957 - RNA, 19 nt, Homo sapiens
  misc_RNA (1)...(19): siRNA sense strand
ccagauccauuuucacuua

SEQ ID NO: 1264958 - RNA, 19 nt, Homo sapiens
  misc_RNA (1)...(19): siRNA sense strand
gaaggaauacuugacaguu

SEQ ID NO: 1264959 - RNA, 19 nt, Homo sapiens
  misc_RNA (1)...(19): siRNA sense strand
aaggaauacuugacaguuu

SEQ ID NO: 1264960 - RNA, 19 nt, Homo sapiens
  misc_RNA (1)...(19): siRNA sense strand
ucagaugacgccuguuaua

SEQ ID NO: 1264961 - RNA, 19 nt, Homo sapiens
  misc_RNA (1)...(19): siRNA sense strand
gaaaacacaccuuuaguga

SEQ ID NO: 1264962 - RNA, 19 nt, Homo sapiens
  misc_RNA (1)...(19): siRNA sense strand
gaugacgccuguuauagag

SEQ ID NO: 1264963 - RNA, 19 nt, Homo sapiens
  misc_RNA (1)...(19): siRNA sense strand
gagaaacauguccauauau

SEQ ID NO: 1264964 - RNA, 19 nt, Homo sapiens
  misc_RNA (1)...(19): siRNA sense strand
ccacuuaccagacuaaauc

SEQ ID NO: 1264965 - RNA, 19 nt, Homo sapiens
  misc_RNA (1)...(19): siRNA sense strand
acgaguagauuauaagugu

SEQ ID NO: 1264966 - RNA, 19 nt, Homo sapiens
  misc_RNA (1)...(19): siRNA sense strand
cuacaaagcaacaguuaug

SEQ ID NO: 1264967 - RNA, 19 nt, Homo sapiens
  misc_RNA (1)...(19): siRNA sense strand
ccaccaacauuugaagcua

SEQ ID NO: 1264968 - RNA, 19 nt, Homo sapiens
  misc_RNA (1)...(19): siRNA sense strand
uauacgggauccuuuaaau

SEQ ID NO: 1264969 - RNA, 19 nt, Homo sapiens
  misc_RNA (1)...(19): siRNA sense strand
cgaguuugguuaucagaug

SEQ ID NO: 1264970 - RNA, 19 nt, Homo sapiens
  misc_RNA (1)...(19): siRNA sense strand
gaacgaguagauuauaagu

SEQ ID NO: 1264971 - RNA, 19 nt, Homo sapiens
  misc_RNA (1)...(19): siRNA sense strand
gugaggagccaccaacauu

SEQ ID NO: 1264972 - RNA, 19 nt, Homo sapiens
  misc_RNA (1)...(19): siRNA sense strand
gauggcagcgacacaauug

SEQ ID NO: 1264973 - RNA, 19 nt, Homo sapiens
  misc_RNA (1)...(19): siRNA sense strand
ucucagaugacgccuguua

SEQ ID NO: 1264974 - RNA, 19 nt, Homo sapiens
  misc_RNA (1)...(19): siRNA sense strand
gaggagccaccaacauuug

SEQ ID NO: 1264975 - RNA, 19 nt, Homo sapiens
  misc_RNA (1)...(19): siRNA sense strand
gcuauggagcucauuggua

SEQ ID NO: 1264976 - RNA, 19 nt, Homo sapiens
  misc_RNA (1)...(19): siRNA sense strand
acacaccuuuagugaagua

SEQ ID NO: 1264977 - RNA, 19 nt, Homo sapiens
  misc_RNA (1)...(19): siRNA sense strand
uagagaaacauguccauau

SEQ ID NO: 1264978 - RNA, 19 nt, Homo sapiens
  misc_RNA (1)...(19): siRNA sense strand
ggugaacgaguagauuaua

SEQ ID NO: 1264979 - RNA, 19 nt, Homo sapiens
  misc_RNA (1)...(19): siRNA sense strand
gaaguagaaguauuugagu

SEQ ID NO: 1264980 - RNA, 19 nt, Homo sapiens
  misc_RNA (1)...(19): siRNA sense strand
gaaacauguccauauauac

SEQ ID NO: 1264981 - RNA, 19 nt, Homo sapiens
  misc_RNA (1)...(19): siRNA sense strand
ugacgccuguuauagagaa

SEQ ID NO: 1264982 - RNA, 19 nt, Homo sapiens
  misc_RNA (1)...(19): siRNA sense strand
cgaguagauuauaagugua

SEQ ID NO: 1264983 - RNA, 19 nt, Homo sapiens
  misc_RNA (1)...(19): siRNA sense strand
gcacuuuauuuguaaugag

SEQ ID NO: 1264984 - RNA, 19 nt, Homo sapiens
  misc_RNA (1)...(19): siRNA sense strand
guagaaguauuugaguauc

SEQ ID NO: 1264985 - RNA, 19 nt, Homo sapiens
  misc_RNA (1)...(19): siRNA sense strand
guauuugaguaucuugaug

SEQ ID NO: 1264986 - RNA, 19 nt, Homo sapiens
  misc_RNA (1)...(19): siRNA sense strand
aggaauacuugacaguuug

SEQ ID NO: 1264987 - RNA, 19 nt, Homo sapiens
  misc_RNA (1)...(19): siRNA sense strand
ccaaaacccuacuaugaga

SEQ ID NO: 1264988 - RNA, 19 nt, Homo sapiens
  misc_RNA (1)...(19): siRNA sense strand
aguguaaaguggucaaaug

SEQ ID NO: 1264989 - RNA, 19 nt, Homo sapiens
  misc_RNA (1)...(19): siRNA sense strand
ccacccauacuauuuguga

SEQ ID NO: 1264990 - RNA, 19 nt, Homo sapiens
  misc_RNA (1)...(19): siRNA sense strand
uuggagagagcacgauuua

SEQ ID NO: 1264991 - RNA, 19 nt, Homo sapiens
  misc_RNA (1)...(19): siRNA sense strand
gguuaucagaugcacuuua

SEQ ID NO: 1264992 - RNA, 19 nt, Homo sapiens
  misc_RNA (1)...(19): siRNA sense strand
caccaacauuugaagcuau

SEQ ID NO: 1264993 - RNA, 19 nt, Homo sapiens
  misc_RNA (1)...(19): siRNA sense strand
ugaggagccaccaacauuu

SEQ ID NO: 1264994 - RNA, 19 nt, Homo sapiens
  misc_RNA (1)...(19): siRNA sense strand
ggaaggaauacuugacagu

SEQ ID NO: 1264995 - RNA, 19 nt, Homo sapiens
  misc_RNA (1)...(19): siRNA sense strand
gaggaaggaauacuugaca

SEQ ID NO: 1264996 - RNA, 19 nt, Homo sapiens
  misc_RNA (1)...(19): siRNA sense strand
ugaguaucuugaugcagua

SEQ ID NO: 1264997 - RNA, 19 nt, Homo sapiens
  misc_RNA (1)...(19): siRNA sense strand
caccuuuagugaaguagaa

SEQ ID NO: 1264998 - RNA, 19 nt, Homo sapiens
  misc_RNA (1)...(19): siRNA sense strand
acagauaucaggauuugga

SEQ ID NO: 1264999 - RNA, 19 nt, Homo sapiens
  misc_RNA (1)...(19): siRNA sense strand
ucauugcugugauuguuau

SEQ ID NO: 1265000 - RNA, 19 nt, Homo sapiens
  misc_RNA (1)...(19): siRNA sense strand
ucagaugcacuuuauuugu

SEQ ID NO: 1265001 - RNA, 19 nt, Homo sapiens
  misc_RNA (1)...(19): siRNA sense strand
gugcugcuccagaguguaa

SEQ ID NO: 1265002 - RNA, 19 nt, Homo sapiens
  misc_RNA (1)...(19): siRNA sense strand
ggaaaacacaccuuuagug

SEQ ID NO: 1265003 - RNA, 19 nt, Homo sapiens
  misc_RNA (1)...(19): siRNA sense strand
aaggaucaguagcaauuug

SEQ ID NO: 1265004 - RNA, 19 nt, Homo sapiens
  misc_RNA (1)...(19): siRNA sense strand
uauauacgggauccuuuaa

SEQ ID NO: 1265005 - RNA, 19 nt, Homo sapiens
  misc_RNA (1)...(19): siRNA sense strand
ugaaguagaaguauuugag

SEQ ID NO: 1265006 - RNA, 19 nt, Homo sapiens
  misc_RNA (1)...(19): siRNA sense strand
cuugacaguuuggauguuu

SEQ ID NO: 1265007 - RNA, 19 nt, Homo sapiens
  misc_RNA (1)...(19): siRNA sense strand
cauauauacgggauccuuu

SEQ ID NO: 1265008 - RNA, 19 nt, Homo sapiens
  misc_RNA (1)...(19): siRNA sense strand
auauauacgggauccuuua

SEQ ID NO: 1265009 - RNA, 19 nt, Homo sapiens
  misc_RNA (1)...(19): siRNA sense strand
cuuaaaggaucaguagcaa

SEQ ID NO: 1265010 - RNA, 19 nt, Homo sapiens
  misc_RNA (1)...(19): siRNA sense strand
uaaaccugaggaaggaaua

SEQ ID NO: 1265011 - RNA, 19 nt, Homo sapiens
  misc_RNA (1)...(19): siRNA sense strand
agaugacgccuguuauaga

SEQ ID NO: 1265012 - RNA, 19 nt, Homo sapiens
  misc_RNA (1)...(19): siRNA sense strand
ugugauuguuauugccaua

SEQ ID NO: 1265013 - RNA, 19 nt, Homo sapiens
  misc_RNA (1)...(19): siRNA sense strand
gagagcacgauuuauugug

SEQ ID NO: 1265014 - RNA, 19 nt, Homo sapiens
  misc_RNA (1)...(19): siRNA sense strand
gaaguauuugaguaucuug

SEQ ID NO: 1265015 - RNA, 19 nt, Homo sapiens
  misc_RNA (1)...(19): siRNA sense strand
ggcuaccugucucagauga

SEQ ID NO: 1265016 - RNA, 19 nt, Homo sapiens
  misc_RNA (1)...(19): siRNA sense strand
gauaucaggauuuggaaaa

SEQ ID NO: 1265017 - RNA, 19 nt, Homo sapiens
  misc_RNA (1)...(19): siRNA sense strand
ccucuugccacccauacua

SEQ ID NO: 1265018 - RNA, 19 nt, Homo sapiens
  misc_RNA (1)...(19): siRNA sense strand
ccaugguguugcugcugua

SEQ ID NO: 1265019 - RNA, 19 nt, Homo sapiens
  misc_RNA (1)...(19): siRNA sense strand
cagaugacgccuguuauag

SEQ ID NO: 1265020 - RNA, 19 nt, Homo sapiens
  misc_RNA (1)...(19): siRNA sense strand
cagaugguggagcugaaua

SEQ ID NO: 1265021 - RNA, 19 nt, Homo sapiens
  misc_RNA (1)...(19): siRNA sense strand
uuggugaacgaguagauua

SEQ ID NO: 1265022 - RNA, 19 nt, Homo sapiens
  misc_RNA (1)...(19): siRNA sense strand
gucauugcugugauuguua

SEQ ID NO: 1265023 - RNA, 19 nt, Homo sapiens
  misc_RNA (1)...(19): siRNA sense strand
ggagccaccaacauuugaa

SEQ ID NO: 1265024 - RNA, 19 nt, Homo sapiens
  misc_RNA (1)...(19): siRNA sense strand
gcgcuuuccuggguugcuu

SEQ ID NO: 1265025 - RNA, 19 nt, Homo sapiens
  misc_RNA (1)...(19): siRNA sense strand
uacuacaaagcaacaguua

SEQ ID NO: 1265026 - RNA, 19 nt, Homo sapiens
  misc_RNA (1)...(19): siRNA sense strand
cuugaugcaguaacuuaua

SEQ ID NO: 1265027 - RNA, 19 nt, Homo sapiens
  misc_RNA (1)...(19): siRNA sense strand
aaacauguccauauauacg

SEQ ID NO: 1265028 - RNA, 19 nt, Homo sapiens
  misc_RNA (1)...(19): siRNA sense strand
guguaaaguggucaaaugu

SEQ ID NO: 1265029 - RNA, 19 nt, Homo sapiens
  misc_RNA (1)...(19): siRNA sense strand
cuuacgaguuugguuauca

SEQ ID NO: 1265030 - RNA, 19 nt, Homo sapiens
  misc_RNA (1)...(19): siRNA sense strand
uacgggauccuuuaaaugg

SEQ ID NO: 1265031 - RNA, 19 nt, Homo sapiens
  misc_RNA (1)...(19): siRNA sense strand
gcagaugguggagcugaau

SEQ ID NO: 1265032 - RNA, 19 nt, Homo sapiens
  misc_RNA (1)...(19): siRNA sense strand
aaccaaaacccuacuauga

SEQ ID NO: 1265033 - RNA, 19 nt, Homo sapiens
  misc_RNA (1)...(19): siRNA sense strand
cccaauaugugaaaagguu

SEQ ID NO: 1265034 - RNA, 19 nt, Homo sapiens
  misc_RNA (1)...(19): siRNA sense strand
ggagcugaauaugccacuu

SEQ ID NO: 1265035 - RNA, 19 nt, Homo sapiens
  misc_RNA (1)...(19): siRNA sense strand
cgauggcagcgacacaauu

SEQ ID NO: 1265036 - RNA, 19 nt, Homo sapiens
  misc_RNA (1)...(19): siRNA sense strand
gauccauuuucacuuauug

SEQ ID NO: 1265037 - RNA, 19 nt, Homo sapiens
  misc_RNA (1)...(19): siRNA sense strand
uugaugcaguaacuuauag

SEQ ID NO: 1265038 - RNA, 19 nt, Homo sapiens
  misc_RNA (1)...(19): siRNA sense strand
guaucuugaugcaguaacu

SEQ ID NO: 1265039 - RNA, 19 nt, Homo sapiens
  misc_RNA (1)...(19): siRNA sense strand
ggagagagcacgauuuauu

SEQ ID NO: 1265040 - RNA, 19 nt, Homo sapiens
  misc_RNA (1)...(19): siRNA sense strand
agagaaacauguccauaua

SEQ ID NO: 1265041 - RNA, 19 nt, Homo sapiens
  misc_RNA (1)...(19): siRNA sense strand
cagaugcacuuuauuugua

SEQ ID NO: 1265042 - RNA, 19 nt, Homo sapiens
  misc_RNA (1)...(19): siRNA sense strand
ggacuuacgaguuugguua

SEQ ID NO: 1265043 - RNA, 19 nt, Homo sapiens
  misc_RNA (1)...(19): siRNA sense strand
aaacagauaucaggauuug

SEQ ID NO: 1265044 - RNA, 19 nt, Homo sapiens
  misc_RNA (1)...(19): siRNA sense strand
cuauggagcucauugguaa

SEQ ID NO: 1265045 - RNA, 19 nt, Homo sapiens
  misc_RNA (1)...(19): siRNA sense strand
aaacacaccuuuagugaag

SEQ ID NO: 1265046 - RNA, 19 nt, Homo sapiens
  misc_RNA (1)...(19): siRNA sense strand
gaacuuaaaggaucaguag

SEQ ID NO: 1265047 - RNA, 19 nt, Homo sapiens
  misc_RNA (1)...(19): siRNA sense strand
gaaaacagauaucaggauu

SEQ ID NO: 1265048 - RNA, 19 nt, Homo sapiens
  misc_RNA (1)...(19): siRNA sense strand
uaaaggaucaguagcaauu

SEQ ID NO: 1265049 - RNA, 19 nt, Homo sapiens
  misc_RNA (1)...(19): siRNA sense strand
aaaugggacuuacgaguuu

SEQ ID NO: 1265050 - RNA, 19 nt, Homo sapiens
  misc_RNA (1)...(19): siRNA sense strand
guuaucagaugcacuuuau

SEQ ID NO: 1265051 - RNA, 19 nt, Homo sapiens
  misc_RNA (1)...(19): siRNA sense strand
gagcugaauaugccacuua

SEQ ID NO: 1265052 - RNA, 19 nt, Homo sapiens
  misc_RNA (1)...(19): siRNA sense strand
gagcagagaggcugaauag

SEQ ID NO: 1265053 - RNA, 19 nt, Homo sapiens
  misc_RNA (1)...(19): siRNA sense strand
ugagauuggugaacgagua

SEQ ID NO: 1265054 - RNA, 19 nt, Homo sapiens
  misc_RNA (1)...(19): siRNA sense strand
gugaacgaguagauuauaa

SEQ ID NO: 1265055 - RNA, 19 nt, Homo sapiens
  misc_RNA (1)...(19): siRNA sense strand
gagagagcacgauuuauug

SEQ ID NO: 1265056 - RNA, 19 nt, Homo sapiens
  misc_RNA (1)...(19): siRNA sense strand
caaaugggacuuacgaguu

SEQ ID NO: 1265057 - RNA, 19 nt, Homo sapiens
  misc_RNA (1)...(19): siRNA sense strand
ggucauugcugugauuguu

SEQ ID NO: 1265058 - RNA, 19 nt, Homo sapiens
  misc_RNA (1)...(19): siRNA sense strand
ccagauccauuuucacuua

SEQ ID NO: 1265059 - RNA, 19 nt, Homo sapiens
  misc_RNA (1)...(19): siRNA sense strand
gaaggaauacuugacaguu

SEQ ID NO: 1265060 - RNA, 19 nt, Homo sapiens
  misc_RNA (1)...(19): siRNA sense strand
aaggaauacuugacaguuu

SEQ ID NO: 1265061 - RNA, 19 nt, Homo sapiens
  misc_RNA (1)...(19): siRNA sense strand
ucagaugacgccuguuaua

SEQ ID NO: 1265062 - RNA, 19 nt, Homo sapiens
  misc_RNA (1)...(19): siRNA sense strand
gaaaacacaccuuuaguga

SEQ ID NO: 1265063 - RNA, 19 nt, Homo sapiens
  misc_RNA (1)...(19): siRNA sense strand
gaugacgccuguuauagag

SEQ ID NO: 1265064 - RNA, 19 nt, Homo sapiens
  misc_RNA (1)...(19): siRNA sense strand
gagaaacauguccauauau

SEQ ID NO: 1265065 - RNA, 19 nt, Homo sapiens
  misc_RNA (1)...(19): siRNA sense strand
ccacuuaccagacuaaauc

SEQ ID NO: 1265066 - RNA, 19 nt, Homo sapiens
  misc_RNA (1)...(19): siRNA sense strand
acgaguagauuauaagugu

SEQ ID NO: 1265067 - RNA, 19 nt, Homo sapiens
  misc_RNA (1)...(19): siRNA sense strand
cuacaaagcaacaguuaug

SEQ ID NO: 1265068 - RNA, 19 nt, Homo sapiens
  misc_RNA (1)...(19): siRNA sense strand
ccaccaacauuugaagcua

SEQ ID NO: 1265069 - RNA, 19 nt, Homo sapiens
  misc_RNA (1)...(19): siRNA sense strand
uauacgggauccuuuaaau

SEQ ID NO: 1265070 - RNA, 19 nt, Homo sapiens
  misc_RNA (1)...(19): siRNA sense strand
cgaguuugguuaucagaug

SEQ ID NO: 1265071 - RNA, 19 nt, Homo sapiens
  misc_RNA (1)...(19): siRNA sense strand
gaacgaguagauuauaagu

SEQ ID NO: 1265072 - RNA, 19 nt, Homo sapiens
  misc_RNA (1)...(19): siRNA sense strand
gugaggagccaccaacauu

SEQ ID NO: 1265073 - RNA, 19 nt, Homo sapiens
  misc_RNA (1)...(19): siRNA sense strand
gauggcagcgacacaauug

SEQ ID NO: 1265074 - RNA, 19 nt, Homo sapiens
  misc_RNA (1)...(19): siRNA sense strand
ucucagaugacgccuguua

SEQ ID NO: 1265075 - RNA, 19 nt, Homo sapiens
  misc_RNA (1)...(19): siRNA sense strand
acacaccuuuagugaagua

SEQ ID NO: 1265076 - RNA, 19 nt, Homo sapiens
  misc_RNA (1)...(19): siRNA sense strand
gcuauggagcucauuggua

SEQ ID NO: 1265077 - RNA, 19 nt, Homo sapiens
  misc_RNA (1)...(19): siRNA sense strand
gaggagccaccaacauuug

SEQ ID NO: 1265078 - RNA, 19 nt, Homo sapiens
  misc_RNA (1)...(19): siRNA sense strand
uagagaaacauguccauau

SEQ ID NO: 1265079 - RNA, 19 nt, Homo sapiens
  misc_RNA (1)...(19): siRNA sense strand
guuccaaagugucuuaaag

SEQ ID NO: 1265080 - RNA, 19 nt, Homo sapiens
  misc_RNA (1)...(19): siRNA sense strand
ggugaacgaguagauuaua

SEQ ID NO: 1265081 - RNA, 19 nt, Homo sapiens
  misc_RNA (1)...(19): siRNA sense strand
gaaguagaaguauuugagu

SEQ ID NO: 1265082 - RNA, 19 nt, Homo sapiens
  misc_RNA (1)...(19): siRNA sense strand
gaaacauguccauauauac

SEQ ID NO: 1265083 - RNA, 19 nt, Homo sapiens
  misc_RNA (1)...(19): siRNA sense strand
ugacgccuguuauagagaa

SEQ ID NO: 1265084 - RNA, 19 nt, Homo sapiens
  misc_RNA (1)...(19): siRNA sense strand
cgaguagauuauaagugua

SEQ ID NO: 1265085 - RNA, 19 nt, Homo sapiens
  misc_RNA (1)...(19): siRNA sense strand
gcacuuuauuuguaaugag

SEQ ID NO: 1265086 - RNA, 19 nt, Homo sapiens
  misc_RNA (1)...(19): siRNA sense strand
guagaaguauuugaguauc

SEQ ID NO: 1265087 - RNA, 19 nt, Homo sapiens
  misc_RNA (1)...(19): siRNA sense strand
guauuugaguaucuugaug

SEQ ID NO: 1265088 - RNA, 19 nt, Homo sapiens
  misc_RNA (1)...(19): siRNA sense strand
aggaauacuugacaguuug

SEQ ID NO: 1265089 - RNA, 19 nt, Homo sapiens
  misc_RNA (1)...(19): siRNA sense strand
ccaaaacccuacuaugaga

SEQ ID NO: 1265090 - RNA, 19 nt, Homo sapiens
  misc_RNA (1)...(19): siRNA sense strand
aguguaaaguggucaaaug

SEQ ID NO: 1265091 - RNA, 19 nt, Homo sapiens
  misc_RNA (1)...(19): siRNA sense strand
ccacccauacuauuuguga

SEQ ID NO: 1265092 - RNA, 19 nt, Homo sapiens
  misc_RNA (1)...(19): siRNA sense strand
uuggagagagcacgauuua

SEQ ID NO: 1265093 - RNA, 19 nt, Homo sapiens
  misc_RNA (1)...(19): siRNA sense strand
gguuaucagaugcacuuua

SEQ ID NO: 1265094 - RNA, 19 nt, Homo sapiens
  misc_RNA (1)...(19): siRNA sense strand
caccaacauuugaagcuau

SEQ ID NO: 1265095 - RNA, 19 nt, Homo sapiens
  misc_RNA (1)...(19): siRNA sense strand
ugaggagccaccaacauuu

SEQ ID NO: 1265096 - RNA, 19 nt, Homo sapiens
  misc_RNA (1)...(19): siRNA sense strand
ggaaggaauacuugacagu

SEQ ID NO: 1265097 - RNA, 19 nt, Homo sapiens
  misc_RNA (1)...(19): siRNA sense strand
gaggaaggaauacuugaca

SEQ ID NO: 1265098 - RNA, 19 nt, Homo sapiens
  misc_RNA (1)...(19): siRNA sense strand
ccaguuccaaagugucuua

SEQ ID NO: 1265099 - RNA, 19 nt, Homo sapiens
  misc_RNA (1)...(19): siRNA sense strand
ugaguaucuugaugcagua

SEQ ID NO: 1265100 - RNA, 19 nt, Homo sapiens
  misc_RNA (1)...(19): siRNA sense strand
caccuuuagugaaguagaa

SEQ ID NO: 1265101 - RNA, 19 nt, Homo sapiens
  misc_RNA (1)...(19): siRNA sense strand
acagauaucaggauuugga

SEQ ID NO: 1265102 - RNA, 19 nt, Homo sapiens
  misc_RNA (1)...(19): siRNA sense strand
ucauugcugugauuguuau

SEQ ID NO: 1265103 - RNA, 19 nt, Homo sapiens
  misc_RNA (1)...(19): siRNA sense strand
ucagaugcacuuuauuugu

SEQ ID NO: 1265104 - RNA, 19 nt, Homo sapiens
  misc_RNA (1)...(19): siRNA sense strand
gugcugcuccagaguguaa

SEQ ID NO: 1265105 - RNA, 19 nt, Homo sapiens
  misc_RNA (1)...(19): siRNA sense strand
ggaaaacacaccuuuagug

SEQ ID NO: 1265106 - RNA, 19 nt, Homo sapiens
  misc_RNA (1)...(19): siRNA sense strand
aaggaucaguagcaauuug

SEQ ID NO: 1265107 - RNA, 19 nt, Homo sapiens
  misc_RNA (1)...(19): siRNA sense strand
uauauacgggauccuuuaa

SEQ ID NO: 1265108 - RNA, 19 nt, Homo sapiens
  misc_RNA (1)...(19): siRNA sense strand
ugaaguagaaguauuugag

SEQ ID NO: 1265109 - RNA, 19 nt, Homo sapiens
  misc_RNA (1)...(19): siRNA sense strand
cuugacaguuuggauguuu

SEQ ID NO: 1265110 - RNA, 19 nt, Homo sapiens
  misc_RNA (1)...(19): siRNA sense strand
cauauauacgggauccuuu

SEQ ID NO: 1265111 - RNA, 19 nt, Homo sapiens
  misc_RNA (1)...(19): siRNA sense strand
auauauacgggauccuuua

SEQ ID NO: 1265112 - RNA, 19 nt, Homo sapiens
  misc_RNA (1)...(19): siRNA sense strand
cuuaaaggaucaguagcaa

SEQ ID NO: 1265113 - RNA, 19 nt, Homo sapiens
  misc_RNA (1)...(19): siRNA sense strand
uaaaccugaggaaggaaua

SEQ ID NO: 1265114 - RNA, 19 nt, Homo sapiens
  misc_RNA (1)...(19): siRNA sense strand
agaugacgccuguuauaga

SEQ ID NO: 1265115 - RNA, 19 nt, Homo sapiens
  misc_RNA (1)...(19): siRNA sense strand
ugugauuguuauugccaua

SEQ ID NO: 1265116 - RNA, 19 nt, Homo sapiens
  misc_RNA (1)...(19): siRNA sense strand
gagagcacgauuuauugug

SEQ ID NO: 1265117 - RNA, 19 nt, Homo sapiens
  misc_RNA (1)...(19): siRNA sense strand
gaaguauuugaguaucuug

SEQ ID NO: 1265118 - RNA, 19 nt, Homo sapiens
  misc_RNA (1)...(19): siRNA sense strand
ggcuaccugucucagauga

SEQ ID NO: 1265119 - RNA, 19 nt, Homo sapiens
  misc_RNA (1)...(19): siRNA sense strand
ccucuugccacccauacua

SEQ ID NO: 1265120 - RNA, 19 nt, Homo sapiens
  misc_RNA (1)...(19): siRNA sense strand
gauaucaggauuuggaaaa

SEQ ID NO: 1265121 - RNA, 19 nt, Homo sapiens
  misc_RNA (1)...(19): siRNA sense strand
ccaugguguugcugcugua

SEQ ID NO: 1265122 - RNA, 19 nt, Homo sapiens
  misc_RNA (1)...(19): siRNA sense strand
cagaugacgccuguuauag

SEQ ID NO: 1265123 - RNA, 19 nt, Homo sapiens
  misc_RNA (1)...(19): siRNA sense strand
cagaugguggagcugaaua

SEQ ID NO: 1265124 - RNA, 19 nt, Homo sapiens
  misc_RNA (1)...(19): siRNA sense strand
gucauugcugugauuguua

SEQ ID NO: 1265125 - RNA, 19 nt, Homo sapiens
  misc_RNA (1)...(19): siRNA sense strand
uuggugaacgaguagauua

SEQ ID NO: 1265126 - RNA, 19 nt, Homo sapiens
  misc_RNA (1)...(19): siRNA sense strand
ggagccaccaacauuugaa

SEQ ID NO: 1265127 - RNA, 19 nt, Homo sapiens
  misc_RNA (1)...(19): siRNA sense strand
gcgcuuuccuggguugcuu

SEQ ID NO: 1265128 - RNA, 19 nt, Homo sapiens
  misc_RNA (1)...(19): siRNA sense strand
uacuacaaagcaacaguua

SEQ ID NO: 1265129 - RNA, 19 nt, Homo sapiens
  misc_RNA (1)...(19): siRNA sense strand
cuugaugcaguaacuuaua

SEQ ID NO: 1265130 - RNA, 19 nt, Homo sapiens
  misc_RNA (1)...(19): siRNA sense strand
aaacauguccauauauacg

SEQ ID NO: 1265131 - RNA, 19 nt, Homo sapiens
  misc_RNA (1)...(19): siRNA sense strand
guguaaaguggucaaaugu

SEQ ID NO: 1265132 - RNA, 19 nt, Homo sapiens
  misc_RNA (1)...(19): siRNA sense strand
cuuacgaguuugguuauca

SEQ ID NO: 1265133 - RNA, 19 nt, Homo sapiens
  misc_RNA (1)...(19): siRNA sense strand
aaccaaaacccuacuauga

SEQ ID NO: 1265134 - RNA, 19 nt, Homo sapiens
  misc_RNA (1)...(19): siRNA sense strand
gcagaugguggagcugaau

SEQ ID NO: 1265135 - RNA, 19 nt, Homo sapiens
  misc_RNA (1)...(19): siRNA sense strand
uacgggauccuuuaaaugg

SEQ ID NO: 1265136 - RNA, 19 nt, Homo sapiens
  misc_RNA (1)...(19): siRNA sense strand
cgauggcagcgacacaauu

SEQ ID NO: 1265137 - RNA, 19 nt, Homo sapiens
  misc_RNA (1)...(19): siRNA sense strand
ggagcugaauaugccacuu

SEQ ID NO: 1265138 - RNA, 19 nt, Homo sapiens
  misc_RNA (1)...(19): siRNA sense strand
caacauuugaagcuaugga

SEQ ID NO: 1265139 - RNA, 19 nt, Homo sapiens
  misc_RNA (1)...(19): siRNA sense strand
ggagagagcacgauuuauu

SEQ ID NO: 1265140 - RNA, 19 nt, Homo sapiens
  misc_RNA (1)...(19): siRNA sense strand
agagaaacauguccauaua

SEQ ID NO: 1265141 - RNA, 19 nt, Homo sapiens
  misc_RNA (1)...(19): siRNA sense strand
cagaugcacuuuauuugua

SEQ ID NO: 1265142 - RNA, 19 nt, Homo sapiens
  misc_RNA (1)...(19): siRNA sense strand
ggacuuacgaguuugguua

SEQ ID NO: 1265143 - RNA, 19 nt, Homo sapiens
  misc_RNA (1)...(19): siRNA sense strand
aaacagauaucaggauuug

SEQ ID NO: 1265144 - RNA, 19 nt, Homo sapiens
  misc_RNA (1)...(19): siRNA sense strand
cuauggagcucauugguaa

SEQ ID NO: 1265145 - RNA, 19 nt, Homo sapiens
  misc_RNA (1)...(19): siRNA sense strand
aaacacaccuuuagugaag

SEQ ID NO: 1265146 - RNA, 19 nt, Homo sapiens
  misc_RNA (1)...(19): siRNA sense strand
gaacuuaaaggaucaguag

SEQ ID NO: 1265147 - RNA, 19 nt, Homo sapiens
  misc_RNA (1)...(19): siRNA sense strand
gaaaacagauaucaggauu

SEQ ID NO: 1265148 - RNA, 19 nt, Homo sapiens
  misc_RNA (1)...(19): siRNA sense strand
uaaaggaucaguagcaauu

SEQ ID NO: 1265149 - RNA, 19 nt, Homo sapiens
  misc_RNA (1)...(19): siRNA sense strand
aaaugggacuuacgaguuu

SEQ ID NO: 1265150 - RNA, 19 nt, Homo sapiens
  misc_RNA (1)...(19): siRNA sense strand
guuaucagaugcacuuuau

SEQ ID NO: 1265151 - RNA, 19 nt, Homo sapiens
  misc_RNA (1)...(19): siRNA sense strand
ugagauuggugaacgagua

SEQ ID NO: 1265152 - RNA, 19 nt, Homo sapiens
  misc_RNA (1)...(19): siRNA sense strand
gugaacgaguagauuauaa

SEQ ID NO: 1265153 - RNA, 19 nt, Homo sapiens
  misc_RNA (1)...(19): siRNA sense strand
gagagagcacgauuuauug

SEQ ID NO: 1265154 - RNA, 19 nt, Homo sapiens
  misc_RNA (1)...(19): siRNA sense strand
caaaugggacuuacgaguu

SEQ ID NO: 1265155 - RNA, 19 nt, Homo sapiens
  misc_RNA (1)...(19): siRNA sense strand
ggucauugcugugauuguu

SEQ ID NO: 1265156 - RNA, 19 nt, Homo sapiens
  misc_RNA (1)...(19): siRNA sense strand
ccagauccauuuucacuua

SEQ ID NO: 1265157 - RNA, 19 nt, Homo sapiens
  misc_RNA (1)...(19): siRNA sense strand
gaaggaauacuugacaguu

SEQ ID NO: 1265158 - RNA, 19 nt, Homo sapiens
  misc_RNA (1)...(19): siRNA sense strand
aaggaauacuugacaguuu

SEQ ID NO: 1265159 - RNA, 19 nt, Homo sapiens
  misc_RNA (1)...(19): siRNA sense strand
ucagaugacgccuguuaua

SEQ ID NO: 1265160 - RNA, 19 nt, Homo sapiens
  misc_RNA (1)...(19): siRNA sense strand
gaaaacacaccuuuaguga

SEQ ID NO: 1265161 - RNA, 19 nt, Homo sapiens
  misc_RNA (1)...(19): siRNA sense strand
gaugacgccuguuauagag

SEQ ID NO: 1265162 - RNA, 19 nt, Homo sapiens
  misc_RNA (1)...(19): siRNA sense strand
gagaaacauguccauauau

SEQ ID NO: 1265163 - RNA, 19 nt, Homo sapiens
  misc_RNA (1)...(19): siRNA sense strand
acgaguagauuauaagugu

SEQ ID NO: 1265164 - RNA, 19 nt, Homo sapiens
  misc_RNA (1)...(19): siRNA sense strand
cuacaaagcaacaguuaug

SEQ ID NO: 1265165 - RNA, 19 nt, Homo sapiens
  misc_RNA (1)...(19): siRNA sense strand
ccaccaacauuugaagcua

SEQ ID NO: 1265166 - RNA, 19 nt, Homo sapiens
  misc_RNA (1)...(19): siRNA sense strand
uauacgggauccuuuaaau

SEQ ID NO: 1265167 - RNA, 19 nt, Homo sapiens
  misc_RNA (1)...(19): siRNA sense strand
cgaguuugguuaucagaug

SEQ ID NO: 1265168 - RNA, 19 nt, Homo sapiens
  misc_RNA (1)...(19): siRNA sense strand
gaacgaguagauuauaagu

SEQ ID NO: 1265169 - RNA, 19 nt, Homo sapiens
  misc_RNA (1)...(19): siRNA sense strand
gugaggagccaccaacauu

SEQ ID NO: 1265170 - RNA, 19 nt, Homo sapiens
  misc_RNA (1)...(19): siRNA sense strand
gauggcagcgacacaauug

SEQ ID NO: 1265171 - RNA, 19 nt, Homo sapiens
  misc_RNA (1)...(19): siRNA sense strand
gcuauggagcucauuggua

SEQ ID NO: 1265172 - RNA, 19 nt, Homo sapiens
  misc_RNA (1)...(19): siRNA sense strand
gaggagccaccaacauuug

SEQ ID NO: 1265173 - RNA, 19 nt, Homo sapiens
  misc_RNA (1)...(19): siRNA sense strand
acacaccuuuagugaagua

SEQ ID NO: 1265174 - RNA, 19 nt, Homo sapiens
  misc_RNA (1)...(19): siRNA sense strand
ucucagaugacgccuguua

SEQ ID NO: 1265175 - RNA, 19 nt, Homo sapiens
  misc_RNA (1)...(19): siRNA sense strand
uagagaaacauguccauau

SEQ ID NO: 1265176 - RNA, 19 nt, Homo sapiens
  misc_RNA (1)...(19): siRNA sense strand
ggugaacgaguagauuaua

SEQ ID NO: 1265177 - RNA, 19 nt, Homo sapiens
  misc_RNA (1)...(19): siRNA sense strand
gaaguagaaguauuugagu

SEQ ID NO: 1265178 - RNA, 19 nt, Homo sapiens
  misc_RNA (1)...(19): siRNA sense strand
gaaacauguccauauauac

SEQ ID NO: 1265179 - RNA, 19 nt, Homo sapiens
  misc_RNA (1)...(19): siRNA sense strand
ugacgccuguuauagagaa

SEQ ID NO: 1265180 - RNA, 19 nt, Homo sapiens
  misc_RNA (1)...(19): siRNA sense strand
cgaguagauuauaagugua

SEQ ID NO: 1265181 - RNA, 19 nt, Homo sapiens
  misc_RNA (1)...(19): siRNA sense strand
gcacuuuauuuguaaugag

SEQ ID NO: 1265182 - RNA, 19 nt, Homo sapiens
  misc_RNA (1)...(19): siRNA sense strand
guagaaguauuugaguauc

SEQ ID NO: 1265183 - RNA, 19 nt, Homo sapiens
  misc_RNA (1)...(19): siRNA sense strand
guauuugaguaucuugaug

SEQ ID NO: 1265184 - RNA, 19 nt, Homo sapiens
  misc_RNA (1)...(19): siRNA sense strand
aggaauacuugacaguuug

SEQ ID NO: 1265185 - RNA, 19 nt, Homo sapiens
  misc_RNA (1)...(19): siRNA sense strand
aguguaaaguggucaaaug

SEQ ID NO: 1265186 - RNA, 19 nt, Homo sapiens
  misc_RNA (1)...(19): siRNA sense strand
ccaaaacccuacuaugaga

SEQ ID NO: 1265187 - RNA, 19 nt, Homo sapiens
  misc_RNA (1)...(19): siRNA sense strand
ccacccauacuauuuguga

SEQ ID NO: 1265188 - RNA, 19 nt, Homo sapiens
  misc_RNA (1)...(19): siRNA sense strand
caccaacauuugaagcuau

SEQ ID NO: 1265189 - RNA, 19 nt, Homo sapiens
  misc_RNA (1)...(19): siRNA sense strand
uuggagagagcacgauuua

SEQ ID NO: 1265190 - RNA, 19 nt, Homo sapiens
  misc_RNA (1)...(19): siRNA sense strand
gguuaucagaugcacuuua

SEQ ID NO: 1265191 - RNA, 19 nt, Homo sapiens
  misc_RNA (1)...(19): siRNA sense strand
ugaggagccaccaacauuu

SEQ ID NO: 1265192 - RNA, 19 nt, Homo sapiens
  misc_RNA (1)...(19): siRNA sense strand
ggaaggaauacuugacagu

SEQ ID NO: 1265193 - RNA, 19 nt, Homo sapiens
  misc_RNA (1)...(19): siRNA sense strand
gaggaaggaauacuugaca

SEQ ID NO: 1265194 - RNA, 19 nt, Homo sapiens
  misc_RNA (1)...(19): siRNA sense strand
ugaguaucuugaugcagua

SEQ ID NO: 1265195 - RNA, 19 nt, Homo sapiens
  misc_RNA (1)...(19): siRNA sense strand
caccuuuagugaaguagaa

SEQ ID NO: 1265196 - RNA, 19 nt, Homo sapiens
  misc_RNA (1)...(19): siRNA sense strand
acagauaucaggauuugga

SEQ ID NO: 1265197 - RNA, 19 nt, Homo sapiens
  misc_RNA (1)...(19): siRNA sense strand
ucauugcugugauuguuau

SEQ ID NO: 1265198 - RNA, 19 nt, Homo sapiens
  misc_RNA (1)...(19): siRNA sense strand
ucagaugcacuuuauuugu

SEQ ID NO: 1265199 - RNA, 19 nt, Homo sapiens
  misc_RNA (1)...(19): siRNA sense strand
gugcugcuccagaguguaa

SEQ ID NO: 1265200 - RNA, 19 nt, Homo sapiens
  misc_RNA (1)...(19): siRNA sense strand
ggaaaacacaccuuuagug

SEQ ID NO: 1265201 - RNA, 19 nt, Homo sapiens
  misc_RNA (1)...(19): siRNA sense strand
aaggaucaguagcaauuug

SEQ ID NO: 1265202 - RNA, 19 nt, Homo sapiens
  misc_RNA (1)...(19): siRNA sense strand
uauauacgggauccuuuaa

SEQ ID NO: 1265203 - RNA, 19 nt, Homo sapiens
  misc_RNA (1)...(19): siRNA sense strand
ugaaguagaaguauuugag

SEQ ID NO: 1265204 - RNA, 19 nt, Homo sapiens
  misc_RNA (1)...(19): siRNA sense strand
cuugacaguuuggauguuu

SEQ ID NO: 1265205 - RNA, 19 nt, Homo sapiens
  misc_RNA (1)...(19): siRNA sense strand
cauauauacgggauccuuu

SEQ ID NO: 1265206 - RNA, 19 nt, Homo sapiens
  misc_RNA (1)...(19): siRNA sense strand
auauauacgggauccuuua

SEQ ID NO: 1265207 - RNA, 19 nt, Homo sapiens
  misc_RNA (1)...(19): siRNA sense strand
cuuaaaggaucaguagcaa

SEQ ID NO: 1265208 - RNA, 19 nt, Homo sapiens
  misc_RNA (1)...(19): siRNA sense strand
uaaaccugaggaaggaaua

SEQ ID NO: 1265209 - RNA, 19 nt, Homo sapiens
  misc_RNA (1)...(19): siRNA sense strand
agaugacgccuguuauaga

SEQ ID NO: 1265210 - RNA, 19 nt, Homo sapiens
  misc_RNA (1)...(19): siRNA sense strand
ugugauuguuauugccaua

SEQ ID NO: 1265211 - RNA, 19 nt, Homo sapiens
  misc_RNA (1)...(19): siRNA sense strand
gagagcacgauuuauugug

SEQ ID NO: 1265212 - RNA, 19 nt, Homo sapiens
  misc_RNA (1)...(19): siRNA sense strand
gaaguauuugaguaucuug

SEQ ID NO: 1265213 - RNA, 19 nt, Homo sapiens
  misc_RNA (1)...(19): siRNA sense strand
ccucuugccacccauacua

SEQ ID NO: 1265214 - RNA, 19 nt, Homo sapiens
  misc_RNA (1)...(19): siRNA sense strand
gauaucaggauuuggaaaa

SEQ ID NO: 1265215 - RNA, 19 nt, Homo sapiens
  misc_RNA (1)...(19): siRNA sense strand
ggcuaccugucucagauga

SEQ ID NO: 1265216 - RNA, 19 nt, Homo sapiens
  misc_RNA (1)...(19): siRNA sense strand
ccaugguguugcugcugua

SEQ ID NO: 1265217 - RNA, 19 nt, Homo sapiens
  misc_RNA (1)...(19): siRNA sense strand
cagaugacgccuguuauag

SEQ ID NO: 1265218 - RNA, 19 nt, Homo sapiens
  misc_RNA (1)...(19): siRNA sense strand
gucauugcugugauuguua

SEQ ID NO: 1265219 - RNA, 19 nt, Homo sapiens
  misc_RNA (1)...(19): siRNA sense strand
uuggugaacgaguagauua

SEQ ID NO: 1265220 - RNA, 19 nt, Homo sapiens
  misc_RNA (1)...(19): siRNA sense strand
ggagccaccaacauuugaa

SEQ ID NO: 1265221 - RNA, 19 nt, Homo sapiens
  misc_RNA (1)...(19): siRNA sense strand
gcgcuuuccuggguugcuu

SEQ ID NO: 1265222 - RNA, 19 nt, Homo sapiens
  misc_RNA (1)...(19): siRNA sense strand
uacuacaaagcaacaguua

SEQ ID NO: 1265223 - RNA, 19 nt, Homo sapiens
  misc_RNA (1)...(19): siRNA sense strand
cuugaugcaguaacuuaua

SEQ ID NO: 1265224 - RNA, 19 nt, Homo sapiens
  misc_RNA (1)...(19): siRNA sense strand
aaacauguccauauauacg

SEQ ID NO: 1265225 - RNA, 19 nt, Homo sapiens
  misc_RNA (1)...(19): siRNA sense strand
guguaaaguggucaaaugu

SEQ ID NO: 1265226 - RNA, 19 nt, Homo sapiens
  misc_RNA (1)...(19): siRNA sense strand
cuuacgaguuugguuauca

SEQ ID NO: 1265227 - RNA, 19 nt, Homo sapiens
  misc_RNA (1)...(19): siRNA sense strand
uacgggauccuuuaaaugg

SEQ ID NO: 1265228 - RNA, 19 nt, Homo sapiens
  misc_RNA (1)...(19): siRNA sense strand
aaccaaaacccuacuauga

SEQ ID NO: 1265229 - RNA, 19 nt, Homo sapiens
  misc_RNA (1)...(19): siRNA sense strand
cccaauaugugaaaagguu

SEQ ID NO: 1265230 - RNA, 19 nt, Homo sapiens
  misc_RNA (1)...(19): siRNA sense strand
cgauggcagcgacacaauu

SEQ ID NO: 1265231 - RNA, 19 nt, Homo sapiens
  misc_RNA (1)...(19): siRNA sense strand
gauccauuuucacuuauug

SEQ ID NO: 1265232 - RNA, 19 nt, Homo sapiens
  misc_RNA (1)...(19): siRNA sense strand
uugaugcaguaacuuauag

SEQ ID NO: 1265233 - RNA, 19 nt, Homo sapiens
  misc_RNA (1)...(19): siRNA sense strand
guaucuugaugcaguaacu

SEQ ID NO: 1265234 - RNA, 19 nt, Homo sapiens
  misc_RNA (1)...(19): siRNA sense strand
caacauuugaagcuaugga

SEQ ID NO: 1265235 - RNA, 19 nt, Homo sapiens
  misc_RNA (1)...(19): siRNA sense strand
gagauuggugaacgaguag

SEQ ID NO: 1265236 - RNA, 19 nt, Homo sapiens
  misc_RNA (1)...(19): siRNA sense strand
ggagagagcacgauuuauu

SEQ ID NO: 1265237 - RNA, 19 nt, Homo sapiens
  misc_RNA (1)...(19): siRNA sense strand
agagaaacauguccauaua

SEQ ID NO: 1265238 - RNA, 19 nt, Homo sapiens
  misc_RNA (1)...(19): siRNA sense strand
cagaugcacuuuauuugua

SEQ ID NO: 1265239 - RNA, 19 nt, Homo sapiens
  misc_RNA (1)...(19): siRNA sense strand
ggacuuacgaguuugguua

SEQ ID NO: 1265240 - RNA, 19 nt, Homo sapiens
  misc_RNA (1)...(19): siRNA sense strand
aaacagauaucaggauuug

SEQ ID NO: 1265241 - RNA, 19 nt, Homo sapiens
  misc_RNA (1)...(19): siRNA sense strand
cuauggagcucauugguaa

SEQ ID NO: 1265242 - RNA, 19 nt, Homo sapiens
  misc_RNA (1)...(19): siRNA sense strand
aaacacaccuuuagugaag

SEQ ID NO: 1265243 - RNA, 19 nt, Homo sapiens
  misc_RNA (1)...(19): siRNA sense strand
gaacuuaaaggaucaguag

SEQ ID NO: 1265244 - RNA, 19 nt, Homo sapiens
  misc_RNA (1)...(19): siRNA sense strand
gaaaacagauaucaggauu

SEQ ID NO: 1265245 - RNA, 19 nt, Homo sapiens
  misc_RNA (1)...(19): siRNA sense strand
uaaaggaucaguagcaauu

SEQ ID NO: 1265246 - RNA, 19 nt, Homo sapiens
  misc_RNA (1)...(19): siRNA sense strand
aaaugggacuuacgaguuu

SEQ ID NO: 1265247 - RNA, 19 nt, Homo sapiens
  misc_RNA (1)...(19): siRNA sense strand
guuaucagaugcacuuuau

SEQ ID NO: 1265248 - RNA, 19 nt, Homo sapiens
  misc_RNA (1)...(19): siRNA sense strand
ugagauuggugaacgagua

SEQ ID NO: 1265249 - RNA, 19 nt, Homo sapiens
  misc_RNA (1)...(19): siRNA sense strand
gugaacgaguagauuauaa

SEQ ID NO: 1265250 - RNA, 19 nt, Homo sapiens
  misc_RNA (1)...(19): siRNA sense strand
gagagagcacgauuuauug

SEQ ID NO: 1265251 - RNA, 19 nt, Homo sapiens
  misc_RNA (1)...(19): siRNA sense strand
caaaugggacuuacgaguu

SEQ ID NO: 1265252 - RNA, 19 nt, Homo sapiens
  misc_RNA (1)...(19): siRNA sense strand
ggucauugcugugauuguu

SEQ ID NO: 1265253 - RNA, 19 nt, Homo sapiens
  misc_RNA (1)...(19): siRNA sense strand
ccagauccauuuucacuua

SEQ ID NO: 1265254 - RNA, 19 nt, Homo sapiens
  misc_RNA (1)...(19): siRNA sense strand
gaaggaauacuugacaguu

SEQ ID NO: 1265255 - RNA, 19 nt, Homo sapiens
  misc_RNA (1)...(19): siRNA sense strand
aaggaauacuugacaguuu

SEQ ID NO: 1265256 - RNA, 19 nt, Homo sapiens
  misc_RNA (1)...(19): siRNA sense strand
ucagaugacgccuguuaua

SEQ ID NO: 1265257 - RNA, 19 nt, Homo sapiens
  misc_RNA (1)...(19): siRNA sense strand
gaaaacacaccuuuaguga

SEQ ID NO: 1265258 - RNA, 19 nt, Homo sapiens
  misc_RNA (1)...(19): siRNA sense strand
gaugacgccuguuauagag

SEQ ID NO: 1265259 - RNA, 19 nt, Homo sapiens
  misc_RNA (1)...(19): siRNA sense strand
gagaaacauguccauauau

SEQ ID NO: 1265260 - RNA, 19 nt, Homo sapiens
  misc_RNA (1)...(19): siRNA sense strand
acgaguagauuauaagugu

SEQ ID NO: 1265261 - RNA, 19 nt, Homo sapiens
  misc_RNA (1)...(19): siRNA sense strand
cuacaaagcaacaguuaug

SEQ ID NO: 1265262 - RNA, 19 nt, Homo sapiens
  misc_RNA (1)...(19): siRNA sense strand
ccaccaacauuugaagcua

SEQ ID NO: 1265263 - RNA, 19 nt, Homo sapiens
  misc_RNA (1)...(19): siRNA sense strand
uauacgggauccuuuaaau

SEQ ID NO: 1265264 - RNA, 19 nt, Homo sapiens
  misc_RNA (1)...(19): siRNA sense strand
cgaguuugguuaucagaug

SEQ ID NO: 1265265 - RNA, 19 nt, Homo sapiens
  misc_RNA (1)...(19): siRNA sense strand
gaacgaguagauuauaagu

SEQ ID NO: 1265266 - RNA, 19 nt, Homo sapiens
  misc_RNA (1)...(19): siRNA sense strand
gugaggagccaccaacauu

SEQ ID NO: 1265267 - RNA, 19 nt, Homo sapiens
  misc_RNA (1)...(19): siRNA sense strand
gauggcagcgacacaauug

SEQ ID NO: 1265268 - RNA, 19 nt, Homo sapiens
  misc_RNA (1)...(19): siRNA sense strand
gcuauggagcucauuggua

SEQ ID NO: 1265269 - RNA, 19 nt, Homo sapiens
  misc_RNA (1)...(19): siRNA sense strand
gaggagccaccaacauuug

SEQ ID NO: 1265270 - RNA, 19 nt, Homo sapiens
  misc_RNA (1)...(19): siRNA sense strand
acacaccuuuagugaagua

SEQ ID NO: 1265271 - RNA, 19 nt, Homo sapiens
  misc_RNA (1)...(19): siRNA sense strand
ucucagaugacgccuguua

SEQ ID NO: 1265272 - RNA, 19 nt, Homo sapiens
  misc_RNA (1)...(19): siRNA sense strand
uagagaaacauguccauau

SEQ ID NO: 1265273 - RNA, 19 nt, Homo sapiens
  misc_RNA (1)...(19): siRNA sense strand
guuccaaagugucuuaaag

SEQ ID NO: 1265274 - RNA, 19 nt, Homo sapiens
  misc_RNA (1)...(19): siRNA sense strand
ggugaacgaguagauuaua

SEQ ID NO: 1265275 - RNA, 19 nt, Homo sapiens
  misc_RNA (1)...(19): siRNA sense strand
gaaguagaaguauuugagu

SEQ ID NO: 1265276 - RNA, 19 nt, Homo sapiens
  misc_RNA (1)...(19): siRNA sense strand
gaaacauguccauauauac

SEQ ID NO: 1265277 - RNA, 19 nt, Homo sapiens
  misc_RNA (1)...(19): siRNA sense strand
ugacgccuguuauagagaa

SEQ ID NO: 1265278 - RNA, 19 nt, Homo sapiens
  misc_RNA (1)...(19): siRNA sense strand
cgaguagauuauaagugua

SEQ ID NO: 1265279 - RNA, 19 nt, Homo sapiens
  misc_RNA (1)...(19): siRNA sense strand
gcacuuuauuuguaaugag

SEQ ID NO: 1265280 - RNA, 19 nt, Homo sapiens
  misc_RNA (1)...(19): siRNA sense strand
guagaaguauuugaguauc

SEQ ID NO: 1265281 - RNA, 19 nt, Homo sapiens
  misc_RNA (1)...(19): siRNA sense strand
guauuugaguaucuugaug

SEQ ID NO: 1265282 - RNA, 19 nt, Homo sapiens
  misc_RNA (1)...(19): siRNA sense strand
aggaauacuugacaguuug

SEQ ID NO: 1265283 - RNA, 19 nt, Homo sapiens
  misc_RNA (1)...(19): siRNA sense strand
ccaaaacccuacuaugaga

SEQ ID NO: 1265284 - RNA, 19 nt, Homo sapiens
  misc_RNA (1)...(19): siRNA sense strand
aguguaaaguggucaaaug

SEQ ID NO: 1265285 - RNA, 19 nt, Homo sapiens
  misc_RNA (1)...(19): siRNA sense strand
ccacccauacuauuuguga

SEQ ID NO: 1265286 - RNA, 19 nt, Homo sapiens
  misc_RNA (1)...(19): siRNA sense strand
caccaacauuugaagcuau

SEQ ID NO: 1265287 - RNA, 19 nt, Homo sapiens
  misc_RNA (1)...(19): siRNA sense strand
uuggagagagcacgauuua

SEQ ID NO: 1265288 - RNA, 19 nt, Homo sapiens
  misc_RNA (1)...(19): siRNA sense strand
gguuaucagaugcacuuua

SEQ ID NO: 1265289 - RNA, 19 nt, Homo sapiens
  misc_RNA (1)...(19): siRNA sense strand
ugaggagccaccaacauuu

SEQ ID NO: 1265290 - RNA, 19 nt, Homo sapiens
  misc_RNA (1)...(19): siRNA sense strand
ggaaggaauacuugacagu

SEQ ID NO: 1265291 - RNA, 19 nt, Homo sapiens
  misc_RNA (1)...(19): siRNA sense strand
gaggaaggaauacuugaca

SEQ ID NO: 1265292 - RNA, 19 nt, Homo sapiens
  misc_RNA (1)...(19): siRNA sense strand
ccaguuccaaagugucuua

SEQ ID NO: 1265293 - RNA, 19 nt, Homo sapiens
  misc_RNA (1)...(19): siRNA sense strand
ugaguaucuugaugcagua

SEQ ID NO: 1265294 - RNA, 19 nt, Homo sapiens
  misc_RNA (1)...(19): siRNA sense strand
caccuuuagugaaguagaa

SEQ ID NO: 1265295 - RNA, 19 nt, Homo sapiens
  misc_RNA (1)...(19): siRNA sense strand
acagauaucaggauuugga

SEQ ID NO: 1265296 - RNA, 19 nt, Homo sapiens
  misc_RNA (1)...(19): siRNA sense strand
ucauugcugugauuguuau

SEQ ID NO: 1265297 - RNA, 19 nt, Homo sapiens
  misc_RNA (1)...(19): siRNA sense strand
ucagaugcacuuuauuugu

SEQ ID NO: 1265298 - RNA, 19 nt, Homo sapiens
  misc_RNA (1)...(19): siRNA sense strand
gugcugcuccagaguguaa

SEQ ID NO: 1265299 - RNA, 19 nt, Homo sapiens
  misc_RNA (1)...(19): siRNA sense strand
ggaaaacacaccuuuagug

SEQ ID NO: 1265300 - RNA, 19 nt, Homo sapiens
  misc_RNA (1)...(19): siRNA sense strand
aaggaucaguagcaauuug

SEQ ID NO: 1265301 - RNA, 19 nt, Homo sapiens
  misc_RNA (1)...(19): siRNA sense strand
uauauacgggauccuuuaa

SEQ ID NO: 1265302 - RNA, 19 nt, Homo sapiens
  misc_RNA (1)...(19): siRNA sense strand
ugaaguagaaguauuugag

SEQ ID NO: 1265303 - RNA, 19 nt, Homo sapiens
  misc_RNA (1)...(19): siRNA sense strand
cuugacaguuuggauguuu

SEQ ID NO: 1265304 - RNA, 19 nt, Homo sapiens
  misc_RNA (1)...(19): siRNA sense strand
cauauauacgggauccuuu

SEQ ID NO: 1265305 - RNA, 19 nt, Homo sapiens
  misc_RNA (1)...(19): siRNA sense strand
auauauacgggauccuuua

SEQ ID NO: 1265306 - RNA, 19 nt, Homo sapiens
  misc_RNA (1)...(19): siRNA sense strand
cuuaaaggaucaguagcaa

SEQ ID NO: 1265307 - RNA, 19 nt, Homo sapiens
  misc_RNA (1)...(19): siRNA sense strand
uaaaccugaggaaggaaua

SEQ ID NO: 1265308 - RNA, 19 nt, Homo sapiens
  misc_RNA (1)...(19): siRNA sense strand
agaugacgccuguuauaga

SEQ ID NO: 1265309 - RNA, 19 nt, Homo sapiens
  misc_RNA (1)...(19): siRNA sense strand
ugugauuguuauugccaua

SEQ ID NO: 1265310 - RNA, 19 nt, Homo sapiens
  misc_RNA (1)...(19): siRNA sense strand
gagagcacgauuuauugug

SEQ ID NO: 1265311 - RNA, 19 nt, Homo sapiens
  misc_RNA (1)...(19): siRNA sense strand
gaaguauuugaguaucuug

SEQ ID NO: 1265312 - RNA, 19 nt, Homo sapiens
  misc_RNA (1)...(19): siRNA sense strand
ggcuaccugucucagauga

SEQ ID NO: 1265313 - RNA, 19 nt, Homo sapiens
  misc_RNA (1)...(19): siRNA sense strand
gauaucaggauuuggaaaa

SEQ ID NO: 1265314 - RNA, 19 nt, Homo sapiens
  misc_RNA (1)...(19): siRNA sense strand
ccucuugccacccauacua

SEQ ID NO: 1265315 - RNA, 19 nt, Homo sapiens
  misc_RNA (1)...(19): siRNA sense strand
ccaugguguugcugcugua

SEQ ID NO: 1265316 - RNA, 19 nt, Homo sapiens
  misc_RNA (1)...(19): siRNA sense strand
cagaugacgccuguuauag

SEQ ID NO: 1265317 - RNA, 19 nt, Homo sapiens
  misc_RNA (1)...(19): siRNA sense strand
uuggugaacgaguagauua

SEQ ID NO: 1265318 - RNA, 19 nt, Homo sapiens
  misc_RNA (1)...(19): siRNA sense strand
gucauugcugugauuguua

SEQ ID NO: 1265319 - RNA, 19 nt, Homo sapiens
  misc_RNA (1)...(19): siRNA sense strand
ggagccaccaacauuugaa

SEQ ID NO: 1265320 - RNA, 19 nt, Homo sapiens
  misc_RNA (1)...(19): siRNA sense strand
gcgcuuuccuggguugcuu

SEQ ID NO: 1265321 - RNA, 19 nt, Homo sapiens
  misc_RNA (1)...(19): siRNA sense strand
uacuacaaagcaacaguua

SEQ ID NO: 1265322 - RNA, 19 nt, Homo sapiens
  misc_RNA (1)...(19): siRNA sense strand
cuugaugcaguaacuuaua

SEQ ID NO: 1265323 - RNA, 19 nt, Homo sapiens
  misc_RNA (1)...(19): siRNA sense strand
aaacauguccauauauacg

SEQ ID NO: 1265324 - RNA, 19 nt, Homo sapiens
  misc_RNA (1)...(19): siRNA sense strand
guguaaaguggucaaaugu

SEQ ID NO: 1265325 - RNA, 19 nt, Homo sapiens
  misc_RNA (1)...(19): siRNA sense strand
cuuacgaguuugguuauca

SEQ ID NO: 1265326 - RNA, 19 nt, Homo sapiens
  misc_RNA (1)...(19): siRNA sense strand
uacgggauccuuuaaaugg

SEQ ID NO: 1265327 - RNA, 19 nt, Homo sapiens
  misc_RNA (1)...(19): siRNA sense strand
aaccaaaacccuacuauga

SEQ ID NO: 1265328 - RNA, 19 nt, Homo sapiens
  misc_RNA (1)...(19): siRNA sense strand
cccaauaugugaaaagguu

SEQ ID NO: 1265329 - RNA, 19 nt, Homo sapiens
  misc_RNA (1)...(19): siRNA sense strand
cgauggcagcgacacaauu

SEQ ID NO: 1265330 - RNA, 19 nt, Homo sapiens
  misc_RNA (1)...(19): siRNA sense strand
gauccauuuucacuuauug

SEQ ID NO: 1265331 - RNA, 19 nt, Homo sapiens
  misc_RNA (1)...(19): siRNA sense strand
uugaugcaguaacuuauag

SEQ ID NO: 1265332 - RNA, 19 nt, Homo sapiens
  misc_RNA (1)...(19): siRNA sense strand
guaucuugaugcaguaacu

SEQ ID NO: 1265333 - RNA, 19 nt, Homo sapiens
  misc_RNA (1)...(19): siRNA sense strand
caacauuugaagcuaugga

SEQ ID NO: 1265334 - RNA, 19 nt, Homo sapiens
  misc_RNA (1)...(19): siRNA sense strand
gagauuggugaacgaguag

SEQ ID NO: 1265335 - RNA, 19 nt, Homo sapiens
  misc_RNA (1)...(19): siRNA sense strand
ggagagagcacgauuuauu

SEQ ID NO: 1265336 - RNA, 19 nt, Homo sapiens
  misc_RNA (1)...(19): siRNA sense strand
agagaaacauguccauaua

SEQ ID NO: 1265337 - RNA, 19 nt, Homo sapiens
  misc_RNA (1)...(19): siRNA sense strand
cagaugcacuuuauuugua

SEQ ID NO: 1265338 - RNA, 19 nt, Homo sapiens
  misc_RNA (1)...(19): siRNA sense strand
ggacuuacgaguuugguua

SEQ ID NO: 1265339 - RNA, 19 nt, Homo sapiens
  misc_RNA (1)...(19): siRNA sense strand
aaacagauaucaggauuug

SEQ ID NO: 1265340 - RNA, 19 nt, Homo sapiens
  misc_RNA (1)...(19): siRNA sense strand
cuauggagcucauugguaa

SEQ ID NO: 1265341 - RNA, 19 nt, Homo sapiens
  misc_RNA (1)...(19): siRNA sense strand
aaacacaccuuuagugaag

SEQ ID NO: 1265342 - RNA, 19 nt, Homo sapiens
  misc_RNA (1)...(19): siRNA sense strand
gaacuuaaaggaucaguag

SEQ ID NO: 1265343 - RNA, 19 nt, Homo sapiens
  misc_RNA (1)...(19): siRNA sense strand
gaaaacagauaucaggauu

SEQ ID NO: 1265344 - RNA, 19 nt, Homo sapiens
  misc_RNA (1)...(19): siRNA sense strand
uaaaggaucaguagcaauu

SEQ ID NO: 1265345 - RNA, 19 nt, Homo sapiens
  misc_RNA (1)...(19): siRNA sense strand
aaaugggacuuacgaguuu

SEQ ID NO: 1265346 - RNA, 19 nt, Homo sapiens
  misc_RNA (1)...(19): siRNA sense strand
guuaucagaugcacuuuau

SEQ ID NO: 1265347 - RNA, 19 nt, Homo sapiens
  misc_RNA (1)...(19): siRNA sense strand
gagcugaauaugccacuua

SEQ ID NO: 1265348 - RNA, 19 nt, Homo sapiens
  misc_RNA (1)...(19): siRNA sense strand
ugagauuggugaacgagua

SEQ ID NO: 1265349 - RNA, 19 nt, Homo sapiens
  misc_RNA (1)...(19): siRNA sense strand
gugaacgaguagauuauaa

SEQ ID NO: 1265350 - RNA, 19 nt, Homo sapiens
  misc_RNA (1)...(19): siRNA sense strand
gagagagcacgauuuauug

SEQ ID NO: 1265351 - RNA, 19 nt, Homo sapiens
  misc_RNA (1)...(19): siRNA sense strand
caaaugggacuuacgaguu

SEQ ID NO: 1265352 - RNA, 19 nt, Homo sapiens
  misc_RNA (1)...(19): siRNA sense strand
ggucauugcugugauuguu

SEQ ID NO: 1265353 - RNA, 19 nt, Homo sapiens
  misc_RNA (1)...(19): siRNA sense strand
ccagauccauuuucacuua

SEQ ID NO: 1265354 - RNA, 19 nt, Homo sapiens
  misc_RNA (1)...(19): siRNA sense strand
gaaggaauacuugacaguu

SEQ ID NO: 1265355 - RNA, 19 nt, Homo sapiens
  misc_RNA (1)...(19): siRNA sense strand
aaggaauacuugacaguuu

SEQ ID NO: 1265356 - RNA, 19 nt, Homo sapiens
  misc_RNA (1)...(19): siRNA sense strand
ucagaugacgccuguuaua

SEQ ID NO: 1265357 - RNA, 19 nt, Homo sapiens
  misc_RNA (1)...(19): siRNA sense strand
gaaaacacaccuuuaguga

SEQ ID NO: 1265358 - RNA, 19 nt, Homo sapiens
  misc_RNA (1)...(19): siRNA sense strand
gaugacgccuguuauagag

SEQ ID NO: 1265359 - RNA, 19 nt, Homo sapiens
  misc_RNA (1)...(19): siRNA sense strand
gagaaacauguccauauau

SEQ ID NO: 1265360 - RNA, 19 nt, Homo sapiens
  misc_RNA (1)...(19): siRNA sense strand
ccacuuaccagacuaaauc

SEQ ID NO: 1265361 - RNA, 19 nt, Homo sapiens
  misc_RNA (1)...(19): siRNA sense strand
acgaguagauuauaagugu

SEQ ID NO: 1265362 - RNA, 19 nt, Homo sapiens
  misc_RNA (1)...(19): siRNA sense strand
cuacaaagcaacaguuaug

SEQ ID NO: 1265363 - RNA, 19 nt, Homo sapiens
  misc_RNA (1)...(19): siRNA sense strand
ccaccaacauuugaagcua

SEQ ID NO: 1265364 - RNA, 19 nt, Homo sapiens
  misc_RNA (1)...(19): siRNA sense strand
uauacgggauccuuuaaau

SEQ ID NO: 1265365 - RNA, 19 nt, Homo sapiens
  misc_RNA (1)...(19): siRNA sense strand
cgaguuugguuaucagaug

SEQ ID NO: 1265366 - RNA, 19 nt, Homo sapiens
  misc_RNA (1)...(19): siRNA sense strand
gaacgaguagauuauaagu

SEQ ID NO: 1265367 - RNA, 19 nt, Homo sapiens
  misc_RNA (1)...(19): siRNA sense strand
gugaggagccaccaacauu

SEQ ID NO: 1265368 - RNA, 19 nt, Homo sapiens
  misc_RNA (1)...(19): siRNA sense strand
gauggcagcgacacaauug

SEQ ID NO: 1265369 - RNA, 19 nt, Homo sapiens
  misc_RNA (1)...(19): siRNA sense strand
ucucagaugacgccuguua

SEQ ID NO: 1265370 - RNA, 19 nt, Homo sapiens
  misc_RNA (1)...(19): siRNA sense strand
gaggagccaccaacauuug

SEQ ID NO: 1265371 - RNA, 19 nt, Homo sapiens
  misc_RNA (1)...(19): siRNA sense strand
gcuauggagcucauuggua

SEQ ID NO: 1265372 - RNA, 19 nt, Homo sapiens
  misc_RNA (1)...(19): siRNA sense strand
acacaccuuuagugaagua

SEQ ID NO: 1265373 - RNA, 19 nt, Homo sapiens
  misc_RNA (1)...(19): siRNA sense strand
uagagaaacauguccauau

SEQ ID NO: 1265374 - RNA, 19 nt, Homo sapiens
  misc_RNA (1)...(19): siRNA sense strand
guuccaaagugucuuaaag

SEQ ID NO: 1265375 - RNA, 19 nt, Homo sapiens
  misc_RNA (1)...(19): siRNA sense strand
ggugaacgaguagauuaua

SEQ ID NO: 1265376 - RNA, 19 nt, Homo sapiens
  misc_RNA (1)...(19): siRNA sense strand
gaaguagaaguauuugagu

SEQ ID NO: 1265377 - RNA, 19 nt, Homo sapiens
  misc_RNA (1)...(19): siRNA sense strand
gaaacauguccauauauac

SEQ ID NO: 1265378 - RNA, 19 nt, Homo sapiens
  misc_RNA (1)...(19): siRNA sense strand
ugacgccuguuauagagaa

SEQ ID NO: 1265379 - RNA, 19 nt, Homo sapiens
  misc_RNA (1)...(19): siRNA sense strand
cgaguagauuauaagugua

SEQ ID NO: 1265380 - RNA, 19 nt, Homo sapiens
  misc_RNA (1)...(19): siRNA sense strand
gcacuuuauuuguaaugag

SEQ ID NO: 1265381 - RNA, 19 nt, Homo sapiens
  misc_RNA (1)...(19): siRNA sense strand
guagaaguauuugaguauc

SEQ ID NO: 1265382 - RNA, 19 nt, Homo sapiens
  misc_RNA (1)...(19): siRNA sense strand
guauuugaguaucuugaug

SEQ ID NO: 1265383 - RNA, 19 nt, Homo sapiens
  misc_RNA (1)...(19): siRNA sense strand
aggaauacuugacaguuug

SEQ ID NO: 1265384 - RNA, 19 nt, Homo sapiens
  misc_RNA (1)...(19): siRNA sense strand
ccaaaacccuacuaugaga

SEQ ID NO: 1265385 - RNA, 19 nt, Homo sapiens
  misc_RNA (1)...(19): siRNA sense strand
aguguaaaguggucaaaug

SEQ ID NO: 1265386 - RNA, 19 nt, Homo sapiens
  misc_RNA (1)...(19): siRNA sense strand
ccacccauacuauuuguga

SEQ ID NO: 1265387 - RNA, 19 nt, Homo sapiens
  misc_RNA (1)...(19): siRNA sense strand
uuggagagagcacgauuua

SEQ ID NO: 1265388 - RNA, 19 nt, Homo sapiens
  misc_RNA (1)...(19): siRNA sense strand
gguuaucagaugcacuuua

SEQ ID NO: 1265389 - RNA, 19 nt, Homo sapiens
  misc_RNA (1)...(19): siRNA sense strand
caccaacauuugaagcuau

SEQ ID NO: 1265390 - RNA, 19 nt, Homo sapiens
  misc_RNA (1)...(19): siRNA sense strand
ugaggagccaccaacauuu

SEQ ID NO: 1265391 - RNA, 19 nt, Homo sapiens
  misc_RNA (1)...(19): siRNA sense strand
ggaaggaauacuugacagu

SEQ ID NO: 1265392 - RNA, 19 nt, Homo sapiens
  misc_RNA (1)...(19): siRNA sense strand
gaggaaggaauacuugaca

SEQ ID NO: 1265393 - RNA, 19 nt, Homo sapiens
  misc_RNA (1)...(19): siRNA sense strand
ccaguuccaaagugucuua

SEQ ID NO: 1265394 - RNA, 19 nt, Homo sapiens
  misc_RNA (1)...(19): siRNA sense strand
ugaguaucuugaugcagua

SEQ ID NO: 1265395 - RNA, 19 nt, Homo sapiens
  misc_RNA (1)...(19): siRNA sense strand
caccuuuagugaaguagaa

SEQ ID NO: 1265396 - RNA, 19 nt, Homo sapiens
  misc_RNA (1)...(19): siRNA sense strand
acagauaucaggauuugga

SEQ ID NO: 1265397 - RNA, 19 nt, Homo sapiens
  misc_RNA (1)...(19): siRNA sense strand
ucauugcugugauuguuau

SEQ ID NO: 1265398 - RNA, 19 nt, Homo sapiens
  misc_RNA (1)...(19): siRNA sense strand
ucagaugcacuuuauuugu

SEQ ID NO: 1265399 - RNA, 19 nt, Homo sapiens
  misc_RNA (1)...(19): siRNA sense strand
gugcugcuccagaguguaa

SEQ ID NO: 1265400 - RNA, 19 nt, Homo sapiens
  misc_RNA (1)...(19): siRNA sense strand
ggaaaacacaccuuuagug

SEQ ID NO: 1265401 - RNA, 19 nt, Homo sapiens
  misc_RNA (1)...(19): siRNA sense strand
aaggaucaguagcaauuug

SEQ ID NO: 1265402 - RNA, 19 nt, Homo sapiens
  misc_RNA (1)...(19): siRNA sense strand
uauauacgggauccuuuaa

SEQ ID NO: 1265403 - RNA, 19 nt, Homo sapiens
  misc_RNA (1)...(19): siRNA sense strand
ugaaguagaaguauuugag

SEQ ID NO: 1265404 - RNA, 19 nt, Homo sapiens
  misc_RNA (1)...(19): siRNA sense strand
cuugacaguuuggauguuu

SEQ ID NO: 1265405 - RNA, 19 nt, Homo sapiens
  misc_RNA (1)...(19): siRNA sense strand
cauauauacgggauccuuu

SEQ ID NO: 1265406 - RNA, 19 nt, Homo sapiens
  misc_RNA (1)...(19): siRNA sense strand
auauauacgggauccuuua

SEQ ID NO: 1265407 - RNA, 19 nt, Homo sapiens
  misc_RNA (1)...(19): siRNA sense strand
cuuaaaggaucaguagcaa

SEQ ID NO: 1265408 - RNA, 19 nt, Homo sapiens
  misc_RNA (1)...(19): siRNA sense strand
uaaaccugaggaaggaaua

SEQ ID NO: 1265409 - RNA, 19 nt, Homo sapiens
  misc_RNA (1)...(19): siRNA sense strand
agaugacgccuguuauaga

SEQ ID NO: 1265410 - RNA, 19 nt, Homo sapiens
  misc_RNA (1)...(19): siRNA sense strand
ugugauuguuauugccaua

SEQ ID NO: 1265411 - RNA, 19 nt, Homo sapiens
  misc_RNA (1)...(19): siRNA sense strand
gagagcacgauuuauugug

SEQ ID NO: 1265412 - RNA, 19 nt, Homo sapiens
  misc_RNA (1)...(19): siRNA sense strand
gaaguauuugaguaucuug

SEQ ID NO: 1265413 - RNA, 19 nt, Homo sapiens
  misc_RNA (1)...(19): siRNA sense strand
ggcuaccugucucagauga

SEQ ID NO: 1265414 - RNA, 19 nt, Homo sapiens
  misc_RNA (1)...(19): siRNA sense strand
gauaucaggauuuggaaaa

SEQ ID NO: 1265415 - RNA, 19 nt, Homo sapiens
  misc_RNA (1)...(19): siRNA sense strand
ccucuugccacccauacua

SEQ ID NO: 1265416 - RNA, 19 nt, Homo sapiens
  misc_RNA (1)...(19): siRNA sense strand
ccaugguguugcugcugua

SEQ ID NO: 1265417 - RNA, 19 nt, Homo sapiens
  misc_RNA (1)...(19): siRNA sense strand
cagaugacgccuguuauag

SEQ ID NO: 1265418 - RNA, 19 nt, Homo sapiens
  misc_RNA (1)...(19): siRNA sense strand
cagaugguggagcugaaua

SEQ ID NO: 1265419 - RNA, 19 nt, Homo sapiens
  misc_RNA (1)...(19): siRNA sense strand
gucauugcugugauuguua

SEQ ID NO: 1265420 - RNA, 19 nt, Homo sapiens
  misc_RNA (1)...(19): siRNA sense strand
ggagccaccaacauuugaa

SEQ ID NO: 1265421 - RNA, 19 nt, Homo sapiens
  misc_RNA (1)...(19): siRNA sense strand
uuggugaacgaguagauua

SEQ ID NO: 1265422 - RNA, 19 nt, Homo sapiens
  misc_RNA (1)...(19): siRNA sense strand
gcgcuuuccuggguugcuu

SEQ ID NO: 1265423 - RNA, 19 nt, Homo sapiens
  misc_RNA (1)...(19): siRNA sense strand
uacuacaaagcaacaguua

SEQ ID NO: 1265424 - RNA, 19 nt, Homo sapiens
  misc_RNA (1)...(19): siRNA sense strand
cuugaugcaguaacuuaua

SEQ ID NO: 1265425 - RNA, 19 nt, Homo sapiens
  misc_RNA (1)...(19): siRNA sense strand
aaacauguccauauauacg

SEQ ID NO: 1265426 - RNA, 19 nt, Homo sapiens
  misc_RNA (1)...(19): siRNA sense strand
guguaaaguggucaaaugu

SEQ ID NO: 1265427 - RNA, 19 nt, Homo sapiens
  misc_RNA (1)...(19): siRNA sense strand
cuuacgaguuugguuauca

SEQ ID NO: 1265428 - RNA, 19 nt, Homo sapiens
  misc_RNA (1)...(19): siRNA sense strand
uacgggauccuuuaaaugg

SEQ ID NO: 1265429 - RNA, 19 nt, Homo sapiens
  misc_RNA (1)...(19): siRNA sense strand
gcagaugguggagcugaau

SEQ ID NO: 1265430 - RNA, 19 nt, Homo sapiens
  misc_RNA (1)...(19): siRNA sense strand
aaccaaaacccuacuauga

SEQ ID NO: 1265431 - RNA, 19 nt, Homo sapiens
  misc_RNA (1)...(19): siRNA sense strand
uugaugcaguaacuuauag

SEQ ID NO: 1265432 - RNA, 19 nt, Homo sapiens
  misc_RNA (1)...(19): siRNA sense strand
ggagcugaauaugccacuu

SEQ ID NO: 1265433 - RNA, 19 nt, Homo sapiens
  misc_RNA (1)...(19): siRNA sense strand
cgauggcagcgacacaauu

SEQ ID NO: 1265434 - RNA, 19 nt, Homo sapiens
  misc_RNA (1)...(19): siRNA sense strand
gauccauuuucacuuauug

SEQ ID NO: 1265435 - RNA, 19 nt, Homo sapiens
  misc_RNA (1)...(19): siRNA sense strand
ggagagagcacgauuuauu

SEQ ID NO: 1265436 - RNA, 19 nt, Homo sapiens
  misc_RNA (1)...(19): siRNA sense strand
agagaaacauguccauaua

SEQ ID NO: 1265437 - RNA, 19 nt, Homo sapiens
  misc_RNA (1)...(19): siRNA sense strand
cagaugcacuuuauuugua

SEQ ID NO: 1265438 - RNA, 19 nt, Homo sapiens
  misc_RNA (1)...(19): siRNA sense strand
ggacuuacgaguuugguua

SEQ ID NO: 1265439 - RNA, 19 nt, Homo sapiens
  misc_RNA (1)...(19): siRNA sense strand
aaacagauaucaggauuug

SEQ ID NO: 1265440 - RNA, 19 nt, Homo sapiens
  misc_RNA (1)...(19): siRNA sense strand
cuauggagcucauugguaa

SEQ ID NO: 1265441 - RNA, 19 nt, Homo sapiens
  misc_RNA (1)...(19): siRNA sense strand
aaacacaccuuuagugaag

SEQ ID NO: 1265442 - RNA, 19 nt, Homo sapiens
  misc_RNA (1)...(19): siRNA sense strand
gaacuuaaaggaucaguag

SEQ ID NO: 1265443 - RNA, 19 nt, Homo sapiens
  misc_RNA (1)...(19): siRNA sense strand
gaaaacagauaucaggauu

SEQ ID NO: 1265444 - RNA, 19 nt, Homo sapiens
  misc_RNA (1)...(19): siRNA sense strand
uaaaggaucaguagcaauu

SEQ ID NO: 1265445 - RNA, 19 nt, Homo sapiens
  misc_RNA (1)...(19): siRNA sense strand
aaaugggacuuacgaguuu

SEQ ID NO: 1265446 - RNA, 19 nt, Homo sapiens
  misc_RNA (1)...(19): siRNA sense strand
guuaucagaugcacuuuau

SEQ ID NO: 1265447 - RNA, 19 nt, Homo sapiens
  misc_RNA (1)...(19): siRNA sense strand
ugagauuggugaacgagua

SEQ ID NO: 1265448 - RNA, 19 nt, Homo sapiens
  misc_RNA (1)...(19): siRNA sense strand
gugaacgaguagauuauaa

SEQ ID NO: 1265449 - RNA, 19 nt, Homo sapiens
  misc_RNA (1)...(19): siRNA sense strand
gagagagcacgauuuauug

SEQ ID NO: 1265450 - RNA, 19 nt, Homo sapiens
  misc_RNA (1)...(19): siRNA sense strand
caaaugggacuuacgaguu

SEQ ID NO: 1265451 - RNA, 19 nt, Homo sapiens
  misc_RNA (1)...(19): siRNA sense strand
ggucauugcugugauuguu

SEQ ID NO: 1265452 - RNA, 19 nt, Homo sapiens
  misc_RNA (1)...(19): siRNA sense strand
ccagauccauuuucacuua

SEQ ID NO: 1265453 - RNA, 19 nt, Homo sapiens
  misc_RNA (1)...(19): siRNA sense strand
gaaggaauacuugacaguu

SEQ ID NO: 1265454 - RNA, 19 nt, Homo sapiens
  misc_RNA (1)...(19): siRNA sense strand
aaggaauacuugacaguuu

SEQ ID NO: 1265455 - RNA, 19 nt, Homo sapiens
  misc_RNA (1)...(19): siRNA sense strand
ucagaugacgccuguuaua

SEQ ID NO: 1265456 - RNA, 19 nt, Homo sapiens
  misc_RNA (1)...(19): siRNA sense strand
gaaaacacaccuuuaguga

SEQ ID NO: 1265457 - RNA, 19 nt, Homo sapiens
  misc_RNA (1)...(19): siRNA sense strand
gaugacgccuguuauagag

SEQ ID NO: 1265458 - RNA, 19 nt, Homo sapiens
  misc_RNA (1)...(19): siRNA sense strand
gagaaacauguccauauau

SEQ ID NO: 1265459 - RNA, 19 nt, Homo sapiens
  misc_RNA (1)...(19): siRNA sense strand
acgaguagauuauaagugu

SEQ ID NO: 1265460 - RNA, 19 nt, Homo sapiens
  misc_RNA (1)...(19): siRNA sense strand
cuacaaagcaacaguuaug

SEQ ID NO: 1265461 - RNA, 19 nt, Homo sapiens
  misc_RNA (1)...(19): siRNA sense strand
ccaccaacauuugaagcua

SEQ ID NO: 1265462 - RNA, 19 nt, Homo sapiens
  misc_RNA (1)...(19): siRNA sense strand
uauacgggauccuuuaaau

SEQ ID NO: 1265463 - RNA, 19 nt, Homo sapiens
  misc_RNA (1)...(19): siRNA sense strand
cgaguuugguuaucagaug

SEQ ID NO: 1265464 - RNA, 19 nt, Homo sapiens
  misc_RNA (1)...(19): siRNA sense strand
gaacgaguagauuauaagu

SEQ ID NO: 1265465 - RNA, 19 nt, Homo sapiens
  misc_RNA (1)...(19): siRNA sense strand
gugaggagccaccaacauu

SEQ ID NO: 1265466 - RNA, 19 nt, Homo sapiens
  misc_RNA (1)...(19): siRNA sense strand
gauggcagcgacacaauug

SEQ ID NO: 1265467 - RNA, 19 nt, Homo sapiens
  misc_RNA (1)...(19): siRNA sense strand
gcuauggagcucauuggua

SEQ ID NO: 1265468 - RNA, 19 nt, Homo sapiens
  misc_RNA (1)...(19): siRNA sense strand
gaggagccaccaacauuug

SEQ ID NO: 1265469 - RNA, 19 nt, Homo sapiens
  misc_RNA (1)...(19): siRNA sense strand
acacaccuuuagugaagua

SEQ ID NO: 1265470 - RNA, 19 nt, Homo sapiens
  misc_RNA (1)...(19): siRNA sense strand
ucucagaugacgccuguua

SEQ ID NO: 1265471 - RNA, 19 nt, Homo sapiens
  misc_RNA (1)...(19): siRNA sense strand
uagagaaacauguccauau

SEQ ID NO: 1265472 - RNA, 19 nt, Homo sapiens
  misc_RNA (1)...(19): siRNA sense strand
guuccaaagugucuuaaag

SEQ ID NO: 1265473 - RNA, 19 nt, Homo sapiens
  misc_RNA (1)...(19): siRNA sense strand
ggugaacgaguagauuaua

SEQ ID NO: 1265474 - RNA, 19 nt, Homo sapiens
  misc_RNA (1)...(19): siRNA sense strand
gaaguagaaguauuugagu

SEQ ID NO: 1265475 - RNA, 19 nt, Homo sapiens
  misc_RNA (1)...(19): siRNA sense strand
gaaacauguccauauauac

SEQ ID NO: 1265476 - RNA, 19 nt, Homo sapiens
  misc_RNA (1)...(19): siRNA sense strand
ugacgccuguuauagagaa

SEQ ID NO: 1265477 - RNA, 19 nt, Homo sapiens
  misc_RNA (1)...(19): siRNA sense strand
cgaguagauuauaagugua

SEQ ID NO: 1265478 - RNA, 19 nt, Homo sapiens
  misc_RNA (1)...(19): siRNA sense strand
gcacuuuauuuguaaugag

SEQ ID NO: 1265479 - RNA, 19 nt, Homo sapiens
  misc_RNA (1)...(19): siRNA sense strand
guagaaguauuugaguauc

SEQ ID NO: 1265480 - RNA, 19 nt, Homo sapiens
  misc_RNA (1)...(19): siRNA sense strand
guauuugaguaucuugaug

SEQ ID NO: 1265481 - RNA, 19 nt, Homo sapiens
  misc_RNA (1)...(19): siRNA sense strand
aggaauacuugacaguuug

SEQ ID NO: 1265482 - RNA, 19 nt, Homo sapiens
  misc_RNA (1)...(19): siRNA sense strand
ccaaaacccuacuaugaga

SEQ ID NO: 1265483 - RNA, 19 nt, Homo sapiens
  misc_RNA (1)...(19): siRNA sense strand
aguguaaaguggucaaaug

SEQ ID NO: 1265484 - RNA, 19 nt, Homo sapiens
  misc_RNA (1)...(19): siRNA sense strand
ccacccauacuauuuguga

SEQ ID NO: 1265485 - RNA, 19 nt, Homo sapiens
  misc_RNA (1)...(19): siRNA sense strand
caccaacauuugaagcuau

SEQ ID NO: 1265486 - RNA, 19 nt, Homo sapiens
  misc_RNA (1)...(19): siRNA sense strand
uuggagagagcacgauuua

SEQ ID NO: 1265487 - RNA, 19 nt, Homo sapiens
  misc_RNA (1)...(19): siRNA sense strand
gguuaucagaugcacuuua

SEQ ID NO: 1265488 - RNA, 19 nt, Homo sapiens
  misc_RNA (1)...(19): siRNA sense strand
ugaggagccaccaacauuu

SEQ ID NO: 1265489 - RNA, 19 nt, Homo sapiens
  misc_RNA (1)...(19): siRNA sense strand
ggaaggaauacuugacagu

SEQ ID NO: 1265490 - RNA, 19 nt, Homo sapiens
  misc_RNA (1)...(19): siRNA sense strand
gaggaaggaauacuugaca

SEQ ID NO: 1265491 - RNA, 19 nt, Homo sapiens
  misc_RNA (1)...(19): siRNA sense strand
ccaguuccaaagugucuua

SEQ ID NO: 1265492 - RNA, 19 nt, Homo sapiens
  misc_RNA (1)...(19): siRNA sense strand
ugaguaucuugaugcagua

SEQ ID NO: 1265493 - RNA, 19 nt, Homo sapiens
  misc_RNA (1)...(19): siRNA sense strand
caccuuuagugaaguagaa

SEQ ID NO: 1265494 - RNA, 19 nt, Homo sapiens
  misc_RNA (1)...(19): siRNA sense strand
acagauaucaggauuugga

SEQ ID NO: 1265495 - RNA, 19 nt, Homo sapiens
  misc_RNA (1)...(19): siRNA sense strand
ucauugcugugauuguuau

SEQ ID NO: 1265496 - RNA, 19 nt, Homo sapiens
  misc_RNA (1)...(19): siRNA sense strand
ucagaugcacuuuauuugu

SEQ ID NO: 1265497 - RNA, 19 nt, Homo sapiens
  misc_RNA (1)...(19): siRNA sense strand
gugcugcuccagaguguaa

SEQ ID NO: 1265498 - RNA, 19 nt, Homo sapiens
  misc_RNA (1)...(19): siRNA sense strand
ggaaaacacaccuuuagug

SEQ ID NO: 1265499 - RNA, 19 nt, Homo sapiens
  misc_RNA (1)...(19): siRNA sense strand
aaggaucaguagcaauuug

SEQ ID NO: 1265500 - RNA, 19 nt, Homo sapiens
  misc_RNA (1)...(19): siRNA sense strand
uauauacgggauccuuuaa

SEQ ID NO: 1265501 - RNA, 19 nt, Homo sapiens
  misc_RNA (1)...(19): siRNA sense strand
ugaaguagaaguauuugag

SEQ ID NO: 1265502 - RNA, 19 nt, Homo sapiens
  misc_RNA (1)...(19): siRNA sense strand
cuugacaguuuggauguuu

SEQ ID NO: 1265503 - RNA, 19 nt, Homo sapiens
  misc_RNA (1)...(19): siRNA sense strand
cauauauacgggauccuuu

SEQ ID NO: 1265504 - RNA, 19 nt, Homo sapiens
  misc_RNA (1)...(19): siRNA sense strand
auauauacgggauccuuua

SEQ ID NO: 1265505 - RNA, 19 nt, Homo sapiens
  misc_RNA (1)...(19): siRNA sense strand
cuuaaaggaucaguagcaa

SEQ ID NO: 1265506 - RNA, 19 nt, Homo sapiens
  misc_RNA (1)...(19): siRNA sense strand
uaaaccugaggaaggaaua

SEQ ID NO: 1265507 - RNA, 19 nt, Homo sapiens
  misc_RNA (1)...(19): siRNA sense strand
agaugacgccuguuauaga

SEQ ID NO: 1265508 - RNA, 19 nt, Homo sapiens
  misc_RNA (1)...(19): siRNA sense strand
ugugauuguuauugccaua

SEQ ID NO: 1265509 - RNA, 19 nt, Homo sapiens
  misc_RNA (1)...(19): siRNA sense strand
gagagcacgauuuauugug

SEQ ID NO: 1265510 - RNA, 19 nt, Homo sapiens
  misc_RNA (1)...(19): siRNA sense strand
gaaguauuugaguaucuug

SEQ ID NO: 1265511 - RNA, 19 nt, Homo sapiens
  misc_RNA (1)...(19): siRNA sense strand
ggcuaccugucucagauga

SEQ ID NO: 1265512 - RNA, 19 nt, Homo sapiens
  misc_RNA (1)...(19): siRNA sense strand
gauaucaggauuuggaaaa

SEQ ID NO: 1265513 - RNA, 19 nt, Homo sapiens
  misc_RNA (1)...(19): siRNA sense strand
ccucuugccacccauacua

SEQ ID NO: 1265514 - RNA, 19 nt, Homo sapiens
  misc_RNA (1)...(19): siRNA sense strand
ccaugguguugcugcugua

SEQ ID NO: 1265515 - RNA, 19 nt, Homo sapiens
  misc_RNA (1)...(19): siRNA sense strand
cagaugacgccuguuauag

SEQ ID NO: 1265516 - RNA, 19 nt, Homo sapiens
  misc_RNA (1)...(19): siRNA sense strand
uuggugaacgaguagauua

SEQ ID NO: 1265517 - RNA, 19 nt, Homo sapiens
  misc_RNA (1)...(19): siRNA sense strand
gucauugcugugauuguua

SEQ ID NO: 1265518 - RNA, 19 nt, Homo sapiens
  misc_RNA (1)...(19): siRNA sense strand
ggagccaccaacauuugaa

SEQ ID NO: 1265519 - RNA, 19 nt, Homo sapiens
  misc_RNA (1)...(19): siRNA sense strand
gcgcuuuccuggguugcuu

SEQ ID NO: 1265520 - RNA, 19 nt, Homo sapiens
  misc_RNA (1)...(19): siRNA sense strand
uacuacaaagcaacaguua

SEQ ID NO: 1265521 - RNA, 19 nt, Homo sapiens
  misc_RNA (1)...(19): siRNA sense strand
cuugaugcaguaacuuaua

SEQ ID NO: 1265522 - RNA, 19 nt, Homo sapiens
  misc_RNA (1)...(19): siRNA sense strand
aaacauguccauauauacg

SEQ ID NO: 1265523 - RNA, 19 nt, Homo sapiens
  misc_RNA (1)...(19): siRNA sense strand
guguaaaguggucaaaugu

SEQ ID NO: 1265524 - RNA, 19 nt, Homo sapiens
  misc_RNA (1)...(19): siRNA sense strand
cuuacgaguuugguuauca

SEQ ID NO: 1265525 - RNA, 19 nt, Homo sapiens
  misc_RNA (1)...(19): siRNA sense strand
uacgggauccuuuaaaugg

SEQ ID NO: 1265526 - RNA, 19 nt, Homo sapiens
  misc_RNA (1)...(19): siRNA sense strand
aaccaaaacccuacuauga

SEQ ID NO: 1265527 - RNA, 19 nt, Homo sapiens
  misc_RNA (1)...(19): siRNA sense strand
cccaauaugugaaaagguu

SEQ ID NO: 1265528 - RNA, 19 nt, Homo sapiens
  misc_RNA (1)...(19): siRNA sense strand
cgauggcagcgacacaauu

SEQ ID NO: 1265529 - RNA, 19 nt, Homo sapiens
  misc_RNA (1)...(19): siRNA sense strand
gauccauuuucacuuauug

SEQ ID NO: 1265530 - RNA, 19 nt, Homo sapiens
  misc_RNA (1)...(19): siRNA sense strand
uugaugcaguaacuuauag

SEQ ID NO: 1265531 - RNA, 19 nt, Homo sapiens
  misc_RNA (1)...(19): siRNA sense strand
guaucuugaugcaguaacu

SEQ ID NO: 1265532 - RNA, 19 nt, Homo sapiens
  misc_RNA (1)...(19): siRNA sense strand
caacauuugaagcuaugga

SEQ ID NO: 1265533 - RNA, 19 nt, Homo sapiens
  misc_RNA (1)...(19): siRNA sense strand
gagauuggugaacgaguag

SEQ ID NO: 1265534 - RNA, 19 nt, Homo sapiens
  misc_RNA (1)...(19): siRNA sense strand
ggagagagcacgauuuauu

SEQ ID NO: 1265535 - RNA, 19 nt, Homo sapiens
  misc_RNA (1)...(19): siRNA sense strand
agagaaacauguccauaua

SEQ ID NO: 1265536 - RNA, 19 nt, Homo sapiens
  misc_RNA (1)...(19): siRNA sense strand
cagaugcacuuuauuugua

SEQ ID NO: 1265537 - RNA, 19 nt, Homo sapiens
  misc_RNA (1)...(19): siRNA sense strand
ggacuuacgaguuugguua

SEQ ID NO: 1265538 - RNA, 19 nt, Homo sapiens
  misc_RNA (1)...(19): siRNA sense strand
aaacagauaucaggauuug

SEQ ID NO: 1265539 - RNA, 19 nt, Homo sapiens
  misc_RNA (1)...(19): siRNA sense strand
cuauggagcucauugguaa

SEQ ID NO: 1265540 - RNA, 19 nt, Homo sapiens
  misc_RNA (1)...(19): siRNA sense strand
aaacacaccuuuagugaag

SEQ ID NO: 1265541 - RNA, 19 nt, Homo sapiens
  misc_RNA (1)...(19): siRNA sense strand
gaacuuaaaggaucaguag

SEQ ID NO: 1265542 - RNA, 19 nt, Homo sapiens
  misc_RNA (1)...(19): siRNA sense strand
gaaaacagauaucaggauu

SEQ ID NO: 1265543 - RNA, 19 nt, Homo sapiens
  misc_RNA (1)...(19): siRNA sense strand
uaaaggaucaguagcaauu

SEQ ID NO: 1265544 - RNA, 19 nt, Homo sapiens
  misc_RNA (1)...(19): siRNA sense strand
aaaugggacuuacgaguuu

SEQ ID NO: 1265545 - RNA, 19 nt, Homo sapiens
  misc_RNA (1)...(19): siRNA sense strand
guuaucagaugcacuuuau

SEQ ID NO: 1265546 - RNA, 19 nt, Homo sapiens
  misc_RNA (1)...(19): siRNA sense strand
ugagauuggugaacgagua

SEQ ID NO: 1265547 - RNA, 19 nt, Homo sapiens
  misc_RNA (1)...(19): siRNA sense strand
gugaacgaguagauuauaa

SEQ ID NO: 1265548 - RNA, 19 nt, Homo sapiens
  misc_RNA (1)...(19): siRNA sense strand
gagagagcacgauuuauug

SEQ ID NO: 1265549 - RNA, 19 nt, Homo sapiens
  misc_RNA (1)...(19): siRNA sense strand
caaaugggacuuacgaguu

SEQ ID NO: 1265550 - RNA, 19 nt, Homo sapiens
  misc_RNA (1)...(19): siRNA sense strand
ggucauugcugugauuguu

SEQ ID NO: 1265551 - RNA, 19 nt, Homo sapiens
  misc_RNA (1)...(19): siRNA sense strand
ccagauccauuuucacuua

SEQ ID NO: 1265552 - RNA, 19 nt, Homo sapiens
  misc_RNA (1)...(19): siRNA sense strand
gaaggaauacuugacaguu

SEQ ID NO: 1265553 - RNA, 19 nt, Homo sapiens
  misc_RNA (1)...(19): siRNA sense strand
aaggaauacuugacaguuu

SEQ ID NO: 1265554 - RNA, 19 nt, Homo sapiens
  misc_RNA (1)...(19): siRNA sense strand
ucagaugacgccuguuaua

SEQ ID NO: 1265555 - RNA, 19 nt, Homo sapiens
  misc_RNA (1)...(19): siRNA sense strand
gaaaacacaccuuuaguga

SEQ ID NO: 1265556 - RNA, 19 nt, Homo sapiens
  misc_RNA (1)...(19): siRNA sense strand
gaugacgccuguuauagag

SEQ ID NO: 1265557 - RNA, 19 nt, Homo sapiens
  misc_RNA (1)...(19): siRNA sense strand
gagaaacauguccauauau

SEQ ID NO: 1265558 - RNA, 19 nt, Homo sapiens
  misc_RNA (1)...(19): siRNA sense strand
acgaguagauuauaagugu

SEQ ID NO: 1265559 - RNA, 19 nt, Homo sapiens
  misc_RNA (1)...(19): siRNA sense strand
cuacaaagcaacaguuaug

SEQ ID NO: 1265560 - RNA, 19 nt, Homo sapiens
  misc_RNA (1)...(19): siRNA sense strand
ccaccaacauuugaagcua

SEQ ID NO: 1265561 - RNA, 19 nt, Homo sapiens
  misc_RNA (1)...(19): siRNA sense strand
uauacgggauccuuuaaau

SEQ ID NO: 1265562 - RNA, 19 nt, Homo sapiens
  misc_RNA (1)...(19): siRNA sense strand
cgaguuugguuaucagaug

SEQ ID NO: 1265563 - RNA, 19 nt, Homo sapiens
  misc_RNA (1)...(19): siRNA sense strand
gaacgaguagauuauaagu

SEQ ID NO: 1265564 - RNA, 19 nt, Homo sapiens
  misc_RNA (1)...(19): siRNA sense strand
gugaggagccaccaacauu

SEQ ID NO: 1265565 - RNA, 19 nt, Homo sapiens
  misc_RNA (1)...(19): siRNA sense strand
gauggcagcgacacaauug

SEQ ID NO: 1265566 - RNA, 19 nt, Homo sapiens
  misc_RNA (1)...(19): siRNA sense strand
gcuauggagcucauuggua

SEQ ID NO: 1265567 - RNA, 19 nt, Homo sapiens
  misc_RNA (1)...(19): siRNA sense strand
gaggagccaccaacauuug

SEQ ID NO: 1265568 - RNA, 19 nt, Homo sapiens
  misc_RNA (1)...(19): siRNA sense strand
acacaccuuuagugaagua

SEQ ID NO: 1265569 - RNA, 19 nt, Homo sapiens
  misc_RNA (1)...(19): siRNA sense strand
ucucagaugacgccuguua

SEQ ID NO: 1265570 - RNA, 19 nt, Homo sapiens
  misc_RNA (1)...(19): siRNA sense strand
uagagaaacauguccauau

SEQ ID NO: 1265571 - RNA, 19 nt, Homo sapiens
  misc_RNA (1)...(19): siRNA sense strand
ggugaacgaguagauuaua

SEQ ID NO: 1265572 - RNA, 19 nt, Homo sapiens
  misc_RNA (1)...(19): siRNA sense strand
gaaguagaaguauuugagu

SEQ ID NO: 1265573 - RNA, 19 nt, Homo sapiens
  misc_RNA (1)...(19): siRNA sense strand
gaaacauguccauauauac

SEQ ID NO: 1265574 - RNA, 19 nt, Homo sapiens
  misc_RNA (1)...(19): siRNA sense strand
ugacgccuguuauagagaa

SEQ ID NO: 1265575 - RNA, 19 nt, Homo sapiens
  misc_RNA (1)...(19): siRNA sense strand
cgaguagauuauaagugua

SEQ ID NO: 1265576 - RNA, 19 nt, Homo sapiens
  misc_RNA (1)...(19): siRNA sense strand
gcacuuuauuuguaaugag

SEQ ID NO: 1265577 - RNA, 19 nt, Homo sapiens
  misc_RNA (1)...(19): siRNA sense strand
guagaaguauuugaguauc

SEQ ID NO: 1265578 - RNA, 19 nt, Homo sapiens
  misc_RNA (1)...(19): siRNA sense strand
guauuugaguaucuugaug

SEQ ID NO: 1265579 - RNA, 19 nt, Homo sapiens
  misc_RNA (1)...(19): siRNA sense strand
aggaauacuugacaguuug

SEQ ID NO: 1265580 - RNA, 19 nt, Homo sapiens
  misc_RNA (1)...(19): siRNA sense strand
aguguaaaguggucaaaug

SEQ ID NO: 1265581 - RNA, 19 nt, Homo sapiens
  misc_RNA (1)...(19): siRNA sense strand
ccaaaacccuacuaugaga

SEQ ID NO: 1265582 - RNA, 19 nt, Homo sapiens
  misc_RNA (1)...(19): siRNA sense strand
ccacccauacuauuuguga

SEQ ID NO: 1265583 - RNA, 19 nt, Homo sapiens
  misc_RNA (1)...(19): siRNA sense strand
caccaacauuugaagcuau

SEQ ID NO: 1265584 - RNA, 19 nt, Homo sapiens
  misc_RNA (1)...(19): siRNA sense strand
uuggagagagcacgauuua

SEQ ID NO: 1265585 - RNA, 19 nt, Homo sapiens
  misc_RNA (1)...(19): siRNA sense strand
gguuaucagaugcacuuua

SEQ ID NO: 1265586 - RNA, 19 nt, Homo sapiens
  misc_RNA (1)...(19): siRNA sense strand
ugaggagccaccaacauuu

SEQ ID NO: 1265587 - RNA, 19 nt, Homo sapiens
  misc_RNA (1)...(19): siRNA sense strand
ggaaggaauacuugacagu

SEQ ID NO: 1265588 - RNA, 19 nt, Homo sapiens
  misc_RNA (1)...(19): siRNA sense strand
gaggaaggaauacuugaca

SEQ ID NO: 1265589 - RNA, 19 nt, Homo sapiens
  misc_RNA (1)...(19): siRNA sense strand
ugaguaucuugaugcagua

SEQ ID NO: 1265590 - RNA, 19 nt, Homo sapiens
  misc_RNA (1)...(19): siRNA sense strand
caccuuuagugaaguagaa

SEQ ID NO: 1265591 - RNA, 19 nt, Homo sapiens
  misc_RNA (1)...(19): siRNA sense strand
acagauaucaggauuugga

SEQ ID NO: 1265592 - RNA, 19 nt, Homo sapiens
  misc_RNA (1)...(19): siRNA sense strand
ucauugcugugauuguuau

SEQ ID NO: 1265593 - RNA, 19 nt, Homo sapiens
  misc_RNA (1)...(19): siRNA sense strand
ucagaugcacuuuauuugu

SEQ ID NO: 1265594 - RNA, 19 nt, Homo sapiens
  misc_RNA (1)...(19): siRNA sense strand
gugcugcuccagaguguaa

SEQ ID NO: 1265595 - RNA, 19 nt, Homo sapiens
  misc_RNA (1)...(19): siRNA sense strand
ggaaaacacaccuuuagug

SEQ ID NO: 1265596 - RNA, 19 nt, Homo sapiens
  misc_RNA (1)...(19): siRNA sense strand
aaggaucaguagcaauuug

SEQ ID NO: 1265597 - RNA, 19 nt, Homo sapiens
  misc_RNA (1)...(19): siRNA sense strand
uauauacgggauccuuuaa

SEQ ID NO: 1265598 - RNA, 19 nt, Homo sapiens
  misc_RNA (1)...(19): siRNA sense strand
ugaaguagaaguauuugag

SEQ ID NO: 1265599 - RNA, 19 nt, Homo sapiens
  misc_RNA (1)...(19): siRNA sense strand
cuugacaguuuggauguuu

SEQ ID NO: 1265600 - RNA, 19 nt, Homo sapiens
  misc_RNA (1)...(19): siRNA sense strand
cauauauacgggauccuuu

SEQ ID NO: 1265601 - RNA, 19 nt, Homo sapiens
  misc_RNA (1)...(19): siRNA sense strand
auauauacgggauccuuua

SEQ ID NO: 1265602 - RNA, 19 nt, Homo sapiens
  misc_RNA (1)...(19): siRNA sense strand
cuuaaaggaucaguagcaa

SEQ ID NO: 1265603 - RNA, 19 nt, Homo sapiens
  misc_RNA (1)...(19): siRNA sense strand
uaaaccugaggaaggaaua

SEQ ID NO: 1265604 - RNA, 19 nt, Homo sapiens
  misc_RNA (1)...(19): siRNA sense strand
agaugacgccuguuauaga

SEQ ID NO: 1265605 - RNA, 19 nt, Homo sapiens
  misc_RNA (1)...(19): siRNA sense strand
ugugauuguuauugccaua

SEQ ID NO: 1265606 - RNA, 19 nt, Homo sapiens
  misc_RNA (1)...(19): siRNA sense strand
gagagcacgauuuauugug

SEQ ID NO: 1265607 - RNA, 19 nt, Homo sapiens
  misc_RNA (1)...(19): siRNA sense strand
gaaguauuugaguaucuug

SEQ ID NO: 1265608 - RNA, 19 nt, Homo sapiens
  misc_RNA (1)...(19): siRNA sense strand
ccucuugccacccauacua

SEQ ID NO: 1265609 - RNA, 19 nt, Homo sapiens
  misc_RNA (1)...(19): siRNA sense strand
gauaucaggauuuggaaaa

SEQ ID NO: 1265610 - RNA, 19 nt, Homo sapiens
  misc_RNA (1)...(19): siRNA sense strand
ggcuaccugucucagauga

SEQ ID NO: 1265611 - RNA, 19 nt, Homo sapiens
  misc_RNA (1)...(19): siRNA sense strand
ccaugguguugcugcugua

SEQ ID NO: 1265612 - RNA, 19 nt, Homo sapiens
  misc_RNA (1)...(19): siRNA sense strand
cagaugacgccuguuauag

SEQ ID NO: 1265613 - RNA, 19 nt, Homo sapiens
  misc_RNA (1)...(19): siRNA sense strand
gucauugcugugauuguua

SEQ ID NO: 1265614 - RNA, 19 nt, Homo sapiens
  misc_RNA (1)...(19): siRNA sense strand
uuggugaacgaguagauua

SEQ ID NO: 1265615 - RNA, 19 nt, Homo sapiens
  misc_RNA (1)...(19): siRNA sense strand
ggagccaccaacauuugaa

SEQ ID NO: 1265616 - RNA, 19 nt, Homo sapiens
  misc_RNA (1)...(19): siRNA sense strand
gcgcuuuccuggguugcuu

SEQ ID NO: 1265617 - RNA, 19 nt, Homo sapiens
  misc_RNA (1)...(19): siRNA sense strand
uacuacaaagcaacaguua

SEQ ID NO: 1265618 - RNA, 19 nt, Homo sapiens
  misc_RNA (1)...(19): siRNA sense strand
cuugaugcaguaacuuaua

SEQ ID NO: 1265619 - RNA, 19 nt, Homo sapiens
  misc_RNA (1)...(19): siRNA sense strand
aaacauguccauauauacg

SEQ ID NO: 1265620 - RNA, 19 nt, Homo sapiens
  misc_RNA (1)...(19): siRNA sense strand
guguaaaguggucaaaugu

SEQ ID NO: 1265621 - RNA, 19 nt, Homo sapiens
  misc_RNA (1)...(19): siRNA sense strand
cuuacgaguuugguuauca

SEQ ID NO: 1265622 - RNA, 19 nt, Homo sapiens
  misc_RNA (1)...(19): siRNA sense strand
uacgggauccuuuaaaugg

SEQ ID NO: 1265623 - RNA, 19 nt, Homo sapiens
  misc_RNA (1)...(19): siRNA sense strand
aaccaaaacccuacuauga

SEQ ID NO: 1265624 - RNA, 19 nt, Homo sapiens
  misc_RNA (1)...(19): siRNA sense strand
cccaauaugugaaaagguu

SEQ ID NO: 1265625 - RNA, 19 nt, Homo sapiens
  misc_RNA (1)...(19): siRNA sense strand
cgauggcagcgacacaauu

SEQ ID NO: 1265626 - RNA, 19 nt, Homo sapiens
  misc_RNA (1)...(19): siRNA sense strand
gauccauuuucacuuauug

SEQ ID NO: 1265627 - RNA, 19 nt, Homo sapiens
  misc_RNA (1)...(19): siRNA sense strand
uugaugcaguaacuuauag

SEQ ID NO: 1265628 - RNA, 19 nt, Homo sapiens
  misc_RNA (1)...(19): siRNA sense strand
guaucuugaugcaguaacu

SEQ ID NO: 1265629 - RNA, 19 nt, Homo sapiens
  misc_RNA (1)...(19): siRNA sense strand
caacauuugaagcuaugga

SEQ ID NO: 1265630 - RNA, 19 nt, Homo sapiens
  misc_RNA (1)...(19): siRNA sense strand
gagauuggugaacgaguag

SEQ ID NO: 1265631 - RNA, 19 nt, Homo sapiens
  misc_RNA (1)...(19): siRNA sense strand
ggagagagcacgauuuauu

SEQ ID NO: 1265632 - RNA, 19 nt, Homo sapiens
  misc_RNA (1)...(19): siRNA sense strand
agagaaacauguccauaua

SEQ ID NO: 1265633 - RNA, 19 nt, Homo sapiens
  misc_RNA (1)...(19): siRNA sense strand
cagaugcacuuuauuugua

SEQ ID NO: 1265634 - RNA, 19 nt, Homo sapiens
  misc_RNA (1)...(19): siRNA sense strand
ggacuuacgaguuugguua

SEQ ID NO: 1265635 - RNA, 19 nt, Homo sapiens
  misc_RNA (1)...(19): siRNA sense strand
aaacagauaucaggauuug

SEQ ID NO: 1265636 - RNA, 19 nt, Homo sapiens
  misc_RNA (1)...(19): siRNA sense strand
cuauggagcucauugguaa

SEQ ID NO: 1265637 - RNA, 19 nt, Homo sapiens
  misc_RNA (1)...(19): siRNA sense strand
aaacacaccuuuagugaag

SEQ ID NO: 1265638 - RNA, 19 nt, Homo sapiens
  misc_RNA (1)...(19): siRNA sense strand
gaacuuaaaggaucaguag

SEQ ID NO: 1265639 - RNA, 19 nt, Homo sapiens
  misc_RNA (1)...(19): siRNA sense strand
gaaaacagauaucaggauu

SEQ ID NO: 1265640 - RNA, 19 nt, Homo sapiens
  misc_RNA (1)...(19): siRNA sense strand
uaaaggaucaguagcaauu

SEQ ID NO: 1265641 - RNA, 19 nt, Homo sapiens
  misc_RNA (1)...(19): siRNA sense strand
aaaugggacuuacgaguuu

SEQ ID NO: 1265642 - RNA, 19 nt, Homo sapiens
  misc_RNA (1)...(19): siRNA sense strand
guuaucagaugcacuuuau

SEQ ID NO: 1265643 - RNA, 19 nt, Homo sapiens
  misc_RNA (1)...(19): siRNA sense strand
gagcugaauaugccacuua

SEQ ID NO: 1265644 - RNA, 19 nt, Homo sapiens
  misc_RNA (1)...(19): siRNA sense strand
ugagauuggugaacgagua

SEQ ID NO: 1265645 - RNA, 19 nt, Homo sapiens
  misc_RNA (1)...(19): siRNA sense strand
gugaacgaguagauuauaa

SEQ ID NO: 1265646 - RNA, 19 nt, Homo sapiens
  misc_RNA (1)...(19): siRNA sense strand
gagagagcacgauuuauug

SEQ ID NO: 1265647 - RNA, 19 nt, Homo sapiens
  misc_RNA (1)...(19): siRNA sense strand
caaaugggacuuacgaguu

SEQ ID NO: 1265648 - RNA, 19 nt, Homo sapiens
  misc_RNA (1)...(19): siRNA sense strand
ggucauugcugugauuguu

SEQ ID NO: 1265649 - RNA, 19 nt, Homo sapiens
  misc_RNA (1)...(19): siRNA sense strand
ccagauccauuuucacuua

SEQ ID NO: 1265650 - RNA, 19 nt, Homo sapiens
  misc_RNA (1)...(19): siRNA sense strand
gaaggaauacuugacaguu

SEQ ID NO: 1265651 - RNA, 19 nt, Homo sapiens
  misc_RNA (1)...(19): siRNA sense strand
aaggaauacuugacaguuu

SEQ ID NO: 1265652 - RNA, 19 nt, Homo sapiens
  misc_RNA (1)...(19): siRNA sense strand
ucagaugacgccuguuaua

SEQ ID NO: 1265653 - RNA, 19 nt, Homo sapiens
  misc_RNA (1)...(19): siRNA sense strand
gaaaacacaccuuuaguga

SEQ ID NO: 1265654 - RNA, 19 nt, Homo sapiens
  misc_RNA (1)...(19): siRNA sense strand
gaugacgccuguuauagag

SEQ ID NO: 1265655 - RNA, 19 nt, Homo sapiens
  misc_RNA (1)...(19): siRNA sense strand
gagaaacauguccauauau

SEQ ID NO: 1265656 - RNA, 19 nt, Homo sapiens
  misc_RNA (1)...(19): siRNA sense strand
ccacuuaccagacuaaauc

SEQ ID NO: 1265657 - RNA, 19 nt, Homo sapiens
  misc_RNA (1)...(19): siRNA sense strand
acgaguagauuauaagugu

SEQ ID NO: 1265658 - RNA, 19 nt, Homo sapiens
  misc_RNA (1)...(19): siRNA sense strand
cuacaaagcaacaguuaug

SEQ ID NO: 1265659 - RNA, 19 nt, Homo sapiens
  misc_RNA (1)...(19): siRNA sense strand
ccaccaacauuugaagcua

SEQ ID NO: 1265660 - RNA, 19 nt, Homo sapiens
  misc_RNA (1)...(19): siRNA sense strand
uauacgggauccuuuaaau

SEQ ID NO: 1265661 - RNA, 19 nt, Homo sapiens
  misc_RNA (1)...(19): siRNA sense strand
cgaguuugguuaucagaug

SEQ ID NO: 1265662 - RNA, 19 nt, Homo sapiens
  misc_RNA (1)...(19): siRNA sense strand
gaacgaguagauuauaagu

SEQ ID NO: 1265663 - RNA, 19 nt, Homo sapiens
  misc_RNA (1)...(19): siRNA sense strand
gugaggagccaccaacauu

SEQ ID NO: 1265664 - RNA, 19 nt, Homo sapiens
  misc_RNA (1)...(19): siRNA sense strand
gauggcagcgacacaauug

SEQ ID NO: 1265665 - RNA, 19 nt, Homo sapiens
  misc_RNA (1)...(19): siRNA sense strand
ucucagaugacgccuguua

SEQ ID NO: 1265666 - RNA, 19 nt, Homo sapiens
  misc_RNA (1)...(19): siRNA sense strand
gaggagccaccaacauuug

SEQ ID NO: 1265667 - RNA, 19 nt, Homo sapiens
  misc_RNA (1)...(19): siRNA sense strand
gcuauggagcucauuggua

SEQ ID NO: 1265668 - RNA, 19 nt, Homo sapiens
  misc_RNA (1)...(19): siRNA sense strand
acacaccuuuagugaagua

SEQ ID NO: 1265669 - RNA, 19 nt, Homo sapiens
  misc_RNA (1)...(19): siRNA sense strand
uagagaaacauguccauau

SEQ ID NO: 1265670 - RNA, 19 nt, Homo sapiens
  misc_RNA (1)...(19): siRNA sense strand
ggugaacgaguagauuaua

SEQ ID NO: 1265671 - RNA, 19 nt, Homo sapiens
  misc_RNA (1)...(19): siRNA sense strand
gaaguagaaguauuugagu

SEQ ID NO: 1265672 - RNA, 19 nt, Homo sapiens
  misc_RNA (1)...(19): siRNA sense strand
gaaacauguccauauauac

SEQ ID NO: 1265673 - RNA, 19 nt, Homo sapiens
  misc_RNA (1)...(19): siRNA sense strand
ugacgccuguuauagagaa

SEQ ID NO: 1265674 - RNA, 19 nt, Homo sapiens
  misc_RNA (1)...(19): siRNA sense strand
cgaguagauuauaagugua

SEQ ID NO: 1265675 - RNA, 19 nt, Homo sapiens
  misc_RNA (1)...(19): siRNA sense strand
gcacuuuauuuguaaugag

SEQ ID NO: 1265676 - RNA, 19 nt, Homo sapiens
  misc_RNA (1)...(19): siRNA sense strand
guagaaguauuugaguauc

SEQ ID NO: 1265677 - RNA, 19 nt, Homo sapiens
  misc_RNA (1)...(19): siRNA sense strand
guauuugaguaucuugaug

SEQ ID NO: 1265678 - RNA, 19 nt, Homo sapiens
  misc_RNA (1)...(19): siRNA sense strand
aggaauacuugacaguuug

SEQ ID NO: 1265679 - RNA, 19 nt, Homo sapiens
  misc_RNA (1)...(19): siRNA sense strand
ccaaaacccuacuaugaga

SEQ ID NO: 1265680 - RNA, 19 nt, Homo sapiens
  misc_RNA (1)...(19): siRNA sense strand
aguguaaaguggucaaaug

SEQ ID NO: 1265681 - RNA, 19 nt, Homo sapiens
  misc_RNA (1)...(19): siRNA sense strand
ccacccauacuauuuguga

SEQ ID NO: 1265682 - RNA, 19 nt, Homo sapiens
  misc_RNA (1)...(19): siRNA sense strand
uuggagagagcacgauuua

SEQ ID NO: 1265683 - RNA, 19 nt, Homo sapiens
  misc_RNA (1)...(19): siRNA sense strand
gguuaucagaugcacuuua

SEQ ID NO: 1265684 - RNA, 19 nt, Homo sapiens
  misc_RNA (1)...(19): siRNA sense strand
caccaacauuugaagcuau

SEQ ID NO: 1265685 - RNA, 19 nt, Homo sapiens
  misc_RNA (1)...(19): siRNA sense strand
ugaggagccaccaacauuu

SEQ ID NO: 1265686 - RNA, 19 nt, Homo sapiens
  misc_RNA (1)...(19): siRNA sense strand
ggaaggaauacuugacagu

SEQ ID NO: 1265687 - RNA, 19 nt, Homo sapiens
  misc_RNA (1)...(19): siRNA sense strand
gaggaaggaauacuugaca

SEQ ID NO: 1265688 - RNA, 19 nt, Homo sapiens
  misc_RNA (1)...(19): siRNA sense strand
ugaguaucuugaugcagua

SEQ ID NO: 1265689 - RNA, 19 nt, Homo sapiens
  misc_RNA (1)...(19): siRNA sense strand
caccuuuagugaaguagaa

SEQ ID NO: 1265690 - RNA, 19 nt, Homo sapiens
  misc_RNA (1)...(19): siRNA sense strand
acagauaucaggauuugga

SEQ ID NO: 1265691 - RNA, 19 nt, Homo sapiens
  misc_RNA (1)...(19): siRNA sense strand
ucauugcugugauuguuau

SEQ ID NO: 1265692 - RNA, 19 nt, Homo sapiens
  misc_RNA (1)...(19): siRNA sense strand
ucagaugcacuuuauuugu

SEQ ID NO: 1265693 - RNA, 19 nt, Homo sapiens
  misc_RNA (1)...(19): siRNA sense strand
gugcugcuccagaguguaa

SEQ ID NO: 1265694 - RNA, 19 nt, Homo sapiens
  misc_RNA (1)...(19): siRNA sense strand
ggaaaacacaccuuuagug

SEQ ID NO: 1265695 - RNA, 19 nt, Homo sapiens
  misc_RNA (1)...(19): siRNA sense strand
aaggaucaguagcaauuug

SEQ ID NO: 1265696 - RNA, 19 nt, Homo sapiens
  misc_RNA (1)...(19): siRNA sense strand
uauauacgggauccuuuaa

SEQ ID NO: 1265697 - RNA, 19 nt, Homo sapiens
  misc_RNA (1)...(19): siRNA sense strand
ugaaguagaaguauuugag

SEQ ID NO: 1265698 - RNA, 19 nt, Homo sapiens
  misc_RNA (1)...(19): siRNA sense strand
cuugacaguuuggauguuu

SEQ ID NO: 1265699 - RNA, 19 nt, Homo sapiens
  misc_RNA (1)...(19): siRNA sense strand
cauauauacgggauccuuu

SEQ ID NO: 1265700 - RNA, 19 nt, Homo sapiens
  misc_RNA (1)...(19): siRNA sense strand
auauauacgggauccuuua

SEQ ID NO: 1265701 - RNA, 19 nt, Homo sapiens
  misc_RNA (1)...(19): siRNA sense strand
cuuaaaggaucaguagcaa

SEQ ID NO: 1265702 - RNA, 19 nt, Homo sapiens
  misc_RNA (1)...(19): siRNA sense strand
uaaaccugaggaaggaaua

SEQ ID NO: 1265703 - RNA, 19 nt, Homo sapiens
  misc_RNA (1)...(19): siRNA sense strand
agaugacgccuguuauaga

SEQ ID NO: 1265704 - RNA, 19 nt, Homo sapiens
  misc_RNA (1)...(19): siRNA sense strand
ugugauuguuauugccaua

SEQ ID NO: 1265705 - RNA, 19 nt, Homo sapiens
  misc_RNA (1)...(19): siRNA sense strand
gagagcacgauuuauugug

SEQ ID NO: 1265706 - RNA, 19 nt, Homo sapiens
  misc_RNA (1)...(19): siRNA sense strand
gaaguauuugaguaucuug

SEQ ID NO: 1265707 - RNA, 19 nt, Homo sapiens
  misc_RNA (1)...(19): siRNA sense strand
ggcuaccugucucagauga

SEQ ID NO: 1265708 - RNA, 19 nt, Homo sapiens
  misc_RNA (1)...(19): siRNA sense strand
gauaucaggauuuggaaaa

SEQ ID NO: 1265709 - RNA, 19 nt, Homo sapiens
  misc_RNA (1)...(19): siRNA sense strand
ccucuugccacccauacua

SEQ ID NO: 1265710 - RNA, 19 nt, Homo sapiens
  misc_RNA (1)...(19): siRNA sense strand
ccaugguguugcugcugua

SEQ ID NO: 1265711 - RNA, 19 nt, Homo sapiens
  misc_RNA (1)...(19): siRNA sense strand
cagaugacgccuguuauag

SEQ ID NO: 1265712 - RNA, 19 nt, Homo sapiens
  misc_RNA (1)...(19): siRNA sense strand
cagaugguggagcugaaua

SEQ ID NO: 1265713 - RNA, 19 nt, Homo sapiens
  misc_RNA (1)...(19): siRNA sense strand
uuggugaacgaguagauua

SEQ ID NO: 1265714 - RNA, 19 nt, Homo sapiens
  misc_RNA (1)...(19): siRNA sense strand
gucauugcugugauuguua

SEQ ID NO: 1265715 - RNA, 19 nt, Homo sapiens
  misc_RNA (1)...(19): siRNA sense strand
ggagccaccaacauuugaa

SEQ ID NO: 1265716 - RNA, 19 nt, Homo sapiens
  misc_RNA (1)...(19): siRNA sense strand
gcgcuuuccuggguugcuu

SEQ ID NO: 1265717 - RNA, 19 nt, Homo sapiens
  misc_RNA (1)...(19): siRNA sense strand
uacuacaaagcaacaguua

SEQ ID NO: 1265718 - RNA, 19 nt, Homo sapiens
  misc_RNA (1)...(19): siRNA sense strand
cuugaugcaguaacuuaua

SEQ ID NO: 1265719 - RNA, 19 nt, Homo sapiens
  misc_RNA (1)...(19): siRNA sense strand
aaacauguccauauauacg

SEQ ID NO: 1265720 - RNA, 19 nt, Homo sapiens
  misc_RNA (1)...(19): siRNA sense strand
guguaaaguggucaaaugu

SEQ ID NO: 1265721 - RNA, 19 nt, Homo sapiens
  misc_RNA (1)...(19): siRNA sense strand
cuuacgaguuugguuauca

SEQ ID NO: 1265722 - RNA, 19 nt, Homo sapiens
  misc_RNA (1)...(19): siRNA sense strand
uacgggauccuuuaaaugg

SEQ ID NO: 1265723 - RNA, 19 nt, Homo sapiens
  misc_RNA (1)...(19): siRNA sense strand
gcagaugguggagcugaau

SEQ ID NO: 1265724 - RNA, 19 nt, Homo sapiens
  misc_RNA (1)...(19): siRNA sense strand
aaccaaaacccuacuauga

SEQ ID NO: 1265725 - RNA, 19 nt, Homo sapiens
  misc_RNA (1)...(19): siRNA sense strand
cccaauaugugaaaagguu

SEQ ID NO: 1265726 - RNA, 19 nt, Homo sapiens
  misc_RNA (1)...(19): siRNA sense strand
ggagcugaauaugccacuu

SEQ ID NO: 1265727 - RNA, 19 nt, Homo sapiens
  misc_RNA (1)...(19): siRNA sense strand
cgauggcagcgacacaauu

SEQ ID NO: 1265728 - RNA, 19 nt, Homo sapiens
  misc_RNA (1)...(19): siRNA sense strand
gauccauuuucacuuauug

SEQ ID NO: 1265729 - RNA, 19 nt, Homo sapiens
  misc_RNA (1)...(19): siRNA sense strand
uugaugcaguaacuuauag

SEQ ID NO: 1265730 - RNA, 19 nt, Homo sapiens
  misc_RNA (1)...(19): siRNA sense strand
guaucuugaugcaguaacu

SEQ ID NO: 1265731 - RNA, 19 nt, Homo sapiens
  misc_RNA (1)...(19): siRNA sense strand
ggagagagcacgauuuauu

SEQ ID NO: 1265732 - RNA, 19 nt, Homo sapiens
  misc_RNA (1)...(19): siRNA sense strand
agagaaacauguccauaua

SEQ ID NO: 1265733 - RNA, 19 nt, Homo sapiens
  misc_RNA (1)...(19): siRNA sense strand
cagaugcacuuuauuugua

SEQ ID NO: 1265734 - RNA, 19 nt, Homo sapiens
  misc_RNA (1)...(19): siRNA sense strand
ggacuuacgaguuugguua

SEQ ID NO: 1265735 - RNA, 19 nt, Homo sapiens
  misc_RNA (1)...(19): siRNA sense strand
aaacagauaucaggauuug

SEQ ID NO: 1265736 - RNA, 19 nt, Homo sapiens
  misc_RNA (1)...(19): siRNA sense strand
cuauggagcucauugguaa

SEQ ID NO: 1265737 - RNA, 19 nt, Homo sapiens
  misc_RNA (1)...(19): siRNA sense strand
aaacacaccuuuagugaag

SEQ ID NO: 1265738 - RNA, 19 nt, Homo sapiens
  misc_RNA (1)...(19): siRNA sense strand
gaacuuaaaggaucaguag

SEQ ID NO: 1265739 - RNA, 19 nt, Homo sapiens
  misc_RNA (1)...(19): siRNA sense strand
gaaaacagauaucaggauu

SEQ ID NO: 1265740 - RNA, 19 nt, Homo sapiens
  misc_RNA (1)...(19): siRNA sense strand
uaaaggaucaguagcaauu

SEQ ID NO: 1265741 - RNA, 19 nt, Homo sapiens
  misc_RNA (1)...(19): siRNA sense strand
aaaugggacuuacgaguuu

SEQ ID NO: 1265742 - RNA, 19 nt, Homo sapiens
  misc_RNA (1)...(19): siRNA sense strand
guuaucagaugcacuuuau

SEQ ID NO: 1265743 - RNA, 19 nt, Homo sapiens
  misc_RNA (1)...(19): siRNA sense strand
ugagauuggugaacgagua

SEQ ID NO: 1265744 - RNA, 19 nt, Homo sapiens
  misc_RNA (1)...(19): siRNA sense strand
gugaacgaguagauuauaa

SEQ ID NO: 1265745 - RNA, 19 nt, Homo sapiens
  misc_RNA (1)...(19): siRNA sense strand
gagagagcacgauuuauug

SEQ ID NO: 1265746 - RNA, 19 nt, Homo sapiens
  misc_RNA (1)...(19): siRNA sense strand
caaaugggacuuacgaguu

SEQ ID NO: 1265747 - RNA, 19 nt, Homo sapiens
  misc_RNA (1)...(19): siRNA sense strand
ggucauugcugugauuguu

SEQ ID NO: 1265748 - RNA, 19 nt, Homo sapiens
  misc_RNA (1)...(19): siRNA sense strand
ccagauccauuuucacuua

SEQ ID NO: 1265749 - RNA, 19 nt, Homo sapiens
  misc_RNA (1)...(19): siRNA sense strand
gaaggaauacuugacaguu

SEQ ID NO: 1265750 - RNA, 19 nt, Homo sapiens
  misc_RNA (1)...(19): siRNA sense strand
aaggaauacuugacaguuu

SEQ ID NO: 1265751 - RNA, 19 nt, Homo sapiens
  misc_RNA (1)...(19): siRNA sense strand
ucagaugacgccuguuaua

SEQ ID NO: 1265752 - RNA, 19 nt, Homo sapiens
  misc_RNA (1)...(19): siRNA sense strand
gaaaacacaccuuuaguga

SEQ ID NO: 1265753 - RNA, 19 nt, Homo sapiens
  misc_RNA (1)...(19): siRNA sense strand
gaugacgccuguuauagag

SEQ ID NO: 1265754 - RNA, 19 nt, Homo sapiens
  misc_RNA (1)...(19): siRNA sense strand
gagaaacauguccauauau

SEQ ID NO: 1265755 - RNA, 19 nt, Homo sapiens
  misc_RNA (1)...(19): siRNA sense strand
acgaguagauuauaagugu

SEQ ID NO: 1265756 - RNA, 19 nt, Homo sapiens
  misc_RNA (1)...(19): siRNA sense strand
cuacaaagcaacaguuaug

SEQ ID NO: 1265757 - RNA, 19 nt, Homo sapiens
  misc_RNA (1)...(19): siRNA sense strand
ccaccaacauuugaagcua

SEQ ID NO: 1265758 - RNA, 19 nt, Homo sapiens
  misc_RNA (1)...(19): siRNA sense strand
uauacgggauccuuuaaau

SEQ ID NO: 1265759 - RNA, 19 nt, Homo sapiens
  misc_RNA (1)...(19): siRNA sense strand
cgaguuugguuaucagaug

SEQ ID NO: 1265760 - RNA, 19 nt, Homo sapiens
  misc_RNA (1)...(19): siRNA sense strand
gaacgaguagauuauaagu

SEQ ID NO: 1265761 - RNA, 19 nt, Homo sapiens
  misc_RNA (1)...(19): siRNA sense strand
gugaggagccaccaacauu

SEQ ID NO: 1265762 - RNA, 19 nt, Homo sapiens
  misc_RNA (1)...(19): siRNA sense strand
gauggcagcgacacaauug

SEQ ID NO: 1265763 - RNA, 19 nt, Homo sapiens
  misc_RNA (1)...(19): siRNA sense strand
gcuauggagcucauuggua

SEQ ID NO: 1265764 - RNA, 19 nt, Homo sapiens
  misc_RNA (1)...(19): siRNA sense strand
gaggagccaccaacauuug

SEQ ID NO: 1265765 - RNA, 19 nt, Homo sapiens
  misc_RNA (1)...(19): siRNA sense strand
acacaccuuuagugaagua

SEQ ID NO: 1265766 - RNA, 19 nt, Homo sapiens
  misc_RNA (1)...(19): siRNA sense strand
ucucagaugacgccuguua

SEQ ID NO: 1265767 - RNA, 19 nt, Homo sapiens
  misc_RNA (1)...(19): siRNA sense strand
uagagaaacauguccauau

SEQ ID NO: 1265768 - RNA, 19 nt, Homo sapiens
  misc_RNA (1)...(19): siRNA sense strand
guuccaaagugucuuaaag

SEQ ID NO: 1265769 - RNA, 19 nt, Homo sapiens
  misc_RNA (1)...(19): siRNA sense strand
ggugaacgaguagauuaua

SEQ ID NO: 1265770 - RNA, 19 nt, Homo sapiens
  misc_RNA (1)...(19): siRNA sense strand
gaaguagaaguauuugagu

SEQ ID NO: 1265771 - RNA, 19 nt, Homo sapiens
  misc_RNA (1)...(19): siRNA sense strand
gaaacauguccauauauac

SEQ ID NO: 1265772 - RNA, 19 nt, Homo sapiens
  misc_RNA (1)...(19): siRNA sense strand
ugacgccuguuauagagaa

SEQ ID NO: 1265773 - RNA, 19 nt, Homo sapiens
  misc_RNA (1)...(19): siRNA sense strand
cgaguagauuauaagugua

SEQ ID NO: 1265774 - RNA, 19 nt, Homo sapiens
  misc_RNA (1)...(19): siRNA sense strand
gcacuuuauuuguaaugag

SEQ ID NO: 1265775 - RNA, 19 nt, Homo sapiens
  misc_RNA (1)...(19): siRNA sense strand
guagaaguauuugaguauc

SEQ ID NO: 1265776 - RNA, 19 nt, Homo sapiens
  misc_RNA (1)...(19): siRNA sense strand
guauuugaguaucuugaug

SEQ ID NO: 1265777 - RNA, 19 nt, Homo sapiens
  misc_RNA (1)...(19): siRNA sense strand
aggaauacuugacaguuug

SEQ ID NO: 1265778 - RNA, 19 nt, Homo sapiens
  misc_RNA (1)...(19): siRNA sense strand
ccaaaacccuacuaugaga

SEQ ID NO: 1265779 - RNA, 19 nt, Homo sapiens
  misc_RNA (1)...(19): siRNA sense strand
aguguaaaguggucaaaug

SEQ ID NO: 1265780 - RNA, 19 nt, Homo sapiens
  misc_RNA (1)...(19): siRNA sense strand
ccacccauacuauuuguga

SEQ ID NO: 1265781 - RNA, 19 nt, Homo sapiens
  misc_RNA (1)...(19): siRNA sense strand
caccaacauuugaagcuau

SEQ ID NO: 1265782 - RNA, 19 nt, Homo sapiens
  misc_RNA (1)...(19): siRNA sense strand
uuggagagagcacgauuua

SEQ ID NO: 1265783 - RNA, 19 nt, Homo sapiens
  misc_RNA (1)...(19): siRNA sense strand
gguuaucagaugcacuuua

SEQ ID NO: 1265784 - RNA, 19 nt, Homo sapiens
  misc_RNA (1)...(19): siRNA sense strand
ugaggagccaccaacauuu

SEQ ID NO: 1265785 - RNA, 19 nt, Homo sapiens
  misc_RNA (1)...(19): siRNA sense strand
ggaaggaauacuugacagu

SEQ ID NO: 1265786 - RNA, 19 nt, Homo sapiens
  misc_RNA (1)...(19): siRNA sense strand
gaggaaggaauacuugaca

SEQ ID NO: 1265787 - RNA, 19 nt, Homo sapiens
  misc_RNA (1)...(19): siRNA sense strand
ccaguuccaaagugucuua

SEQ ID NO: 1265788 - RNA, 19 nt, Homo sapiens
  misc_RNA (1)...(19): siRNA sense strand
ugaguaucuugaugcagua

SEQ ID NO: 1265789 - RNA, 19 nt, Homo sapiens
  misc_RNA (1)...(19): siRNA sense strand
caccuuuagugaaguagaa

SEQ ID NO: 1265790 - RNA, 19 nt, Homo sapiens
  misc_RNA (1)...(19): siRNA sense strand
acagauaucaggauuugga

SEQ ID NO: 1265791 - RNA, 19 nt, Homo sapiens
  misc_RNA (1)...(19): siRNA sense strand
ucauugcugugauuguuau

SEQ ID NO: 1265792 - RNA, 19 nt, Homo sapiens
  misc_RNA (1)...(19): siRNA sense strand
ucagaugcacuuuauuugu

SEQ ID NO: 1265793 - RNA, 19 nt, Homo sapiens
  misc_RNA (1)...(19): siRNA sense strand
gugcugcuccagaguguaa

SEQ ID NO: 1265794 - RNA, 19 nt, Homo sapiens
  misc_RNA (1)...(19): siRNA sense strand
ggaaaacacaccuuuagug

SEQ ID NO: 1265795 - RNA, 19 nt, Homo sapiens
  misc_RNA (1)...(19): siRNA sense strand
aaggaucaguagcaauuug

SEQ ID NO: 1265796 - RNA, 19 nt, Homo sapiens
  misc_RNA (1)...(19): siRNA sense strand
uauauacgggauccuuuaa

SEQ ID NO: 1265797 - RNA, 19 nt, Homo sapiens
  misc_RNA (1)...(19): siRNA sense strand
ugaaguagaaguauuugag

SEQ ID NO: 1265798 - RNA, 19 nt, Homo sapiens
  misc_RNA (1)...(19): siRNA sense strand
cuugacaguuuggauguuu

SEQ ID NO: 1265799 - RNA, 19 nt, Homo sapiens
  misc_RNA (1)...(19): siRNA sense strand
cauauauacgggauccuuu

SEQ ID NO: 1265800 - RNA, 19 nt, Homo sapiens
  misc_RNA (1)...(19): siRNA sense strand
auauauacgggauccuuua

SEQ ID NO: 1265801 - RNA, 19 nt, Homo sapiens
  misc_RNA (1)...(19): siRNA sense strand
cuuaaaggaucaguagcaa

SEQ ID NO: 1265802 - RNA, 19 nt, Homo sapiens
  misc_RNA (1)...(19): siRNA sense strand
uaaaccugaggaaggaaua

SEQ ID NO: 1265803 - RNA, 19 nt, Homo sapiens
  misc_RNA (1)...(19): siRNA sense strand
agaugacgccuguuauaga

SEQ ID NO: 1265804 - RNA, 19 nt, Homo sapiens
  misc_RNA (1)...(19): siRNA sense strand
ugugauuguuauugccaua

SEQ ID NO: 1265805 - RNA, 19 nt, Homo sapiens
  misc_RNA (1)...(19): siRNA sense strand
gagagcacgauuuauugug

SEQ ID NO: 1265806 - RNA, 19 nt, Homo sapiens
  misc_RNA (1)...(19): siRNA sense strand
gaaguauuugaguaucuug

SEQ ID NO: 1265807 - RNA, 19 nt, Homo sapiens
  misc_RNA (1)...(19): siRNA sense strand
ggcuaccugucucagauga

SEQ ID NO: 1265808 - RNA, 19 nt, Homo sapiens
  misc_RNA (1)...(19): siRNA sense strand
gauaucaggauuuggaaaa

SEQ ID NO: 1265809 - RNA, 19 nt, Homo sapiens
  misc_RNA (1)...(19): siRNA sense strand
ccucuugccacccauacua

SEQ ID NO: 1265810 - RNA, 19 nt, Homo sapiens
  misc_RNA (1)...(19): siRNA sense strand
ccaugguguugcugcugua

SEQ ID NO: 1265811 - RNA, 19 nt, Homo sapiens
  misc_RNA (1)...(19): siRNA sense strand
cagaugacgccuguuauag

SEQ ID NO: 1265812 - RNA, 19 nt, Homo sapiens
  misc_RNA (1)...(19): siRNA sense strand
uuggugaacgaguagauua

SEQ ID NO: 1265813 - RNA, 19 nt, Homo sapiens
  misc_RNA (1)...(19): siRNA sense strand
gucauugcugugauuguua

SEQ ID NO: 1265814 - RNA, 19 nt, Homo sapiens
  misc_RNA (1)...(19): siRNA sense strand
ggagccaccaacauuugaa

SEQ ID NO: 1265815 - RNA, 19 nt, Homo sapiens
  misc_RNA (1)...(19): siRNA sense strand
gcgcuuuccuggguugcuu

SEQ ID NO: 1265816 - RNA, 19 nt, Homo sapiens
  misc_RNA (1)...(19): siRNA sense strand
uacuacaaagcaacaguua

SEQ ID NO: 1265817 - RNA, 19 nt, Homo sapiens
  misc_RNA (1)...(19): siRNA sense strand
cuugaugcaguaacuuaua

SEQ ID NO: 1265818 - RNA, 19 nt, Homo sapiens
  misc_RNA (1)...(19): siRNA sense strand
aaacauguccauauauacg

SEQ ID NO: 1265819 - RNA, 19 nt, Homo sapiens
  misc_RNA (1)...(19): siRNA sense strand
guguaaaguggucaaaugu

SEQ ID NO: 1265820 - RNA, 19 nt, Homo sapiens
  misc_RNA (1)...(19): siRNA sense strand
cuuacgaguuugguuauca

SEQ ID NO: 1265821 - RNA, 19 nt, Homo sapiens
  misc_RNA (1)...(19): siRNA sense strand
uacgggauccuuuaaaugg

SEQ ID NO: 1265822 - RNA, 19 nt, Homo sapiens
  misc_RNA (1)...(19): siRNA sense strand
aaccaaaacccuacuauga

SEQ ID NO: 1265823 - RNA, 19 nt, Homo sapiens
  misc_RNA (1)...(19): siRNA sense strand
cccaauaugugaaaagguu

SEQ ID NO: 1265824 - RNA, 19 nt, Homo sapiens
  misc_RNA (1)...(19): siRNA sense strand
cgauggcagcgacacaauu

SEQ ID NO: 1265825 - RNA, 19 nt, Homo sapiens
  misc_RNA (1)...(19): siRNA sense strand
gauccauuuucacuuauug

SEQ ID NO: 1265826 - RNA, 19 nt, Homo sapiens
  misc_RNA (1)...(19): siRNA sense strand
uugaugcaguaacuuauag

SEQ ID NO: 1265827 - RNA, 19 nt, Homo sapiens
  misc_RNA (1)...(19): siRNA sense strand
guaucuugaugcaguaacu

SEQ ID NO: 1265828 - RNA, 19 nt, Homo sapiens
  misc_RNA (1)...(19): siRNA sense strand
caacauuugaagcuaugga

SEQ ID NO: 1265829 - RNA, 19 nt, Homo sapiens
  misc_RNA (1)...(19): siRNA sense strand
gagauuggugaacgaguag

SEQ ID NO: 1265830 - RNA, 19 nt, Homo sapiens
  misc_RNA (1)...(19): siRNA sense strand
ggagagagcacgauuuauu

SEQ ID NO: 1265831 - RNA, 19 nt, Homo sapiens
  misc_RNA (1)...(19): siRNA sense strand
agagaaacauguccauaua

SEQ ID NO: 1265832 - RNA, 19 nt, Homo sapiens
  misc_RNA (1)...(19): siRNA sense strand
cagaugcacuuuauuugua

SEQ ID NO: 1265833 - RNA, 19 nt, Homo sapiens
  misc_RNA (1)...(19): siRNA sense strand
ggacuuacgaguuugguua

SEQ ID NO: 1265834 - RNA, 19 nt, Homo sapiens
  misc_RNA (1)...(19): siRNA sense strand
aaacagauaucaggauuug

SEQ ID NO: 1265835 - RNA, 19 nt, Homo sapiens
  misc_RNA (1)...(19): siRNA sense strand
cuauggagcucauugguaa

SEQ ID NO: 1265836 - RNA, 19 nt, Homo sapiens
  misc_RNA (1)...(19): siRNA sense strand
aaacacaccuuuagugaag

SEQ ID NO: 1265837 - RNA, 19 nt, Homo sapiens
  misc_RNA (1)...(19): siRNA sense strand
gaacuuaaaggaucaguag

SEQ ID NO: 1265838 - RNA, 19 nt, Homo sapiens
  misc_RNA (1)...(19): siRNA sense strand
gaaaacagauaucaggauu

SEQ ID NO: 1265839 - RNA, 19 nt, Homo sapiens
  misc_RNA (1)...(19): siRNA sense strand
uaaaggaucaguagcaauu

SEQ ID NO: 1265840 - RNA, 19 nt, Homo sapiens
  misc_RNA (1)...(19): siRNA sense strand
aaaugggacuuacgaguuu

SEQ ID NO: 1265841 - RNA, 19 nt, Homo sapiens
  misc_RNA (1)...(19): siRNA sense strand
guuaucagaugcacuuuau

SEQ ID NO: 1265842 - RNA, 19 nt, Homo sapiens
  misc_RNA (1)...(19): siRNA sense strand
gagcugaauaugccacuua

SEQ ID NO: 1265843 - RNA, 19 nt, Homo sapiens
  misc_RNA (1)...(19): siRNA sense strand
gagcagagaggcugaauag

SEQ ID NO: 1265844 - RNA, 19 nt, Homo sapiens
  misc_RNA (1)...(19): siRNA sense strand
ugagauuggugaacgagua

SEQ ID NO: 1265845 - RNA, 19 nt, Homo sapiens
  misc_RNA (1)...(19): siRNA sense strand
gugaacgaguagauuauaa

SEQ ID NO: 1265846 - RNA, 19 nt, Homo sapiens
  misc_RNA (1)...(19): siRNA sense strand
gagagagcacgauuuauug

SEQ ID NO: 1265847 - RNA, 19 nt, Homo sapiens
  misc_RNA (1)...(19): siRNA sense strand
caaaugggacuuacgaguu

SEQ ID NO: 1265848 - RNA, 19 nt, Homo sapiens
  misc_RNA (1)...(19): siRNA sense strand
ggucauugcugugauuguu

SEQ ID NO: 1265849 - RNA, 19 nt, Homo sapiens
  misc_RNA (1)...(19): siRNA sense strand
ccagauccauuuucacuua

SEQ ID NO: 1265850 - RNA, 19 nt, Homo sapiens
  misc_RNA (1)...(19): siRNA sense strand
gaaggaauacuugacaguu

SEQ ID NO: 1265851 - RNA, 19 nt, Homo sapiens
  misc_RNA (1)...(19): siRNA sense strand
aaggaauacuugacaguuu

SEQ ID NO: 1265852 - RNA, 19 nt, Homo sapiens
  misc_RNA (1)...(19): siRNA sense strand
ucagaugacgccuguuaua

SEQ ID NO: 1265853 - RNA, 19 nt, Homo sapiens
  misc_RNA (1)...(19): siRNA sense strand
gaaaacacaccuuuaguga

SEQ ID NO: 1265854 - RNA, 19 nt, Homo sapiens
  misc_RNA (1)...(19): siRNA sense strand
gaugacgccuguuauagag

SEQ ID NO: 1265855 - RNA, 19 nt, Homo sapiens
  misc_RNA (1)...(19): siRNA sense strand
gagaaacauguccauauau

SEQ ID NO: 1265856 - RNA, 19 nt, Homo sapiens
  misc_RNA (1)...(19): siRNA sense strand
ccacuuaccagacuaaauc

SEQ ID NO: 1265857 - RNA, 19 nt, Homo sapiens
  misc_RNA (1)...(19): siRNA sense strand
acgaguagauuauaagugu

SEQ ID NO: 1265858 - RNA, 19 nt, Homo sapiens
  misc_RNA (1)...(19): siRNA sense strand
cuacaaagcaacaguuaug

SEQ ID NO: 1265859 - RNA, 19 nt, Homo sapiens
  misc_RNA (1)...(19): siRNA sense strand
ccaccaacauuugaagcua

SEQ ID NO: 1265860 - RNA, 19 nt, Homo sapiens
  misc_RNA (1)...(19): siRNA sense strand
uauacgggauccuuuaaau

SEQ ID NO: 1265861 - RNA, 19 nt, Homo sapiens
  misc_RNA (1)...(19): siRNA sense strand
cgaguuugguuaucagaug

SEQ ID NO: 1265862 - RNA, 19 nt, Homo sapiens
  misc_RNA (1)...(19): siRNA sense strand
gaacgaguagauuauaagu

SEQ ID NO: 1265863 - RNA, 19 nt, Homo sapiens
  misc_RNA (1)...(19): siRNA sense strand
gugaggagccaccaacauu

SEQ ID NO: 1265864 - RNA, 19 nt, Homo sapiens
  misc_RNA (1)...(19): siRNA sense strand
gauggcagcgacacaauug

SEQ ID NO: 1265865 - RNA, 19 nt, Homo sapiens
  misc_RNA (1)...(19): siRNA sense strand
ucucagaugacgccuguua

SEQ ID NO: 1265866 - RNA, 19 nt, Homo sapiens
  misc_RNA (1)...(19): siRNA sense strand
acacaccuuuagugaagua

SEQ ID NO: 1265867 - RNA, 19 nt, Homo sapiens
  misc_RNA (1)...(19): siRNA sense strand
gcuauggagcucauuggua

SEQ ID NO: 1265868 - RNA, 19 nt, Homo sapiens
  misc_RNA (1)...(19): siRNA sense strand
gaggagccaccaacauuug

SEQ ID NO: 1265869 - RNA, 19 nt, Homo sapiens
  misc_RNA (1)...(19): siRNA sense strand
uagagaaacauguccauau

SEQ ID NO: 1265870 - RNA, 19 nt, Homo sapiens
  misc_RNA (1)...(19): siRNA sense strand
ggugaacgaguagauuaua

SEQ ID NO: 1265871 - RNA, 19 nt, Homo sapiens
  misc_RNA (1)...(19): siRNA sense strand
gaaguagaaguauuugagu

SEQ ID NO: 1265872 - RNA, 19 nt, Homo sapiens
  misc_RNA (1)...(19): siRNA sense strand
gaaacauguccauauauac

SEQ ID NO: 1265873 - RNA, 19 nt, Homo sapiens
  misc_RNA (1)...(19): siRNA sense strand
ugacgccuguuauagagaa

SEQ ID NO: 1265874 - RNA, 19 nt, Homo sapiens
  misc_RNA (1)...(19): siRNA sense strand
cgaguagauuauaagugua

SEQ ID NO: 1265875 - RNA, 19 nt, Homo sapiens
  misc_RNA (1)...(19): siRNA sense strand
gcacuuuauuuguaaugag

SEQ ID NO: 1265876 - RNA, 19 nt, Homo sapiens
  misc_RNA (1)...(19): siRNA sense strand
guagaaguauuugaguauc

SEQ ID NO: 1265877 - RNA, 19 nt, Homo sapiens
  misc_RNA (1)...(19): siRNA sense strand
guauuugaguaucuugaug

SEQ ID NO: 1265878 - RNA, 19 nt, Homo sapiens
  misc_RNA (1)...(19): siRNA sense strand
aggaauacuugacaguuug

SEQ ID NO: 1265879 - RNA, 19 nt, Homo sapiens
  misc_RNA (1)...(19): siRNA sense strand
ccaaaacccuacuaugaga

SEQ ID NO: 1265880 - RNA, 19 nt, Homo sapiens
  misc_RNA (1)...(19): siRNA sense strand
aguguaaaguggucaaaug

SEQ ID NO: 1265881 - RNA, 19 nt, Homo sapiens
  misc_RNA (1)...(19): siRNA sense strand
ccacccauacuauuuguga

SEQ ID NO: 1265882 - RNA, 19 nt, Homo sapiens
  misc_RNA (1)...(19): siRNA sense strand
uuggagagagcacgauuua

SEQ ID NO: 1265883 - RNA, 19 nt, Homo sapiens
  misc_RNA (1)...(19): siRNA sense strand
gguuaucagaugcacuuua

SEQ ID NO: 1265884 - RNA, 19 nt, Homo sapiens
  misc_RNA (1)...(19): siRNA sense strand
caccaacauuugaagcuau

SEQ ID NO: 1265885 - RNA, 19 nt, Homo sapiens
  misc_RNA (1)...(19): siRNA sense strand
ugaggagccaccaacauuu

SEQ ID NO: 1265886 - RNA, 19 nt, Homo sapiens
  misc_RNA (1)...(19): siRNA sense strand
ggaaggaauacuugacagu

SEQ ID NO: 1265887 - RNA, 19 nt, Homo sapiens
  misc_RNA (1)...(19): siRNA sense strand
gaggaaggaauacuugaca

SEQ ID NO: 1265888 - RNA, 19 nt, Homo sapiens
  misc_RNA (1)...(19): siRNA sense strand
ugaguaucuugaugcagua

SEQ ID NO: 1265889 - RNA, 19 nt, Homo sapiens
  misc_RNA (1)...(19): siRNA sense strand
caccuuuagugaaguagaa

SEQ ID NO: 1265890 - RNA, 19 nt, Homo sapiens
  misc_RNA (1)...(19): siRNA sense strand
acagauaucaggauuugga

SEQ ID NO: 1265891 - RNA, 19 nt, Homo sapiens
  misc_RNA (1)...(19): siRNA sense strand
ucauugcugugauuguuau

SEQ ID NO: 1265892 - RNA, 19 nt, Homo sapiens
  misc_RNA (1)...(19): siRNA sense strand
ucagaugcacuuuauuugu

SEQ ID NO: 1265893 - RNA, 19 nt, Homo sapiens
  misc_RNA (1)...(19): siRNA sense strand
gugcugcuccagaguguaa

SEQ ID NO: 1265894 - RNA, 19 nt, Homo sapiens
  misc_RNA (1)...(19): siRNA sense strand
ggaaaacacaccuuuagug

SEQ ID NO: 1265895 - RNA, 19 nt, Homo sapiens
  misc_RNA (1)...(19): siRNA sense strand
aaggaucaguagcaauuug

SEQ ID NO: 1265896 - RNA, 19 nt, Homo sapiens
  misc_RNA (1)...(19): siRNA sense strand
uauauacgggauccuuuaa

SEQ ID NO: 1265897 - RNA, 19 nt, Homo sapiens
  misc_RNA (1)...(19): siRNA sense strand
ugaaguagaaguauuugag

SEQ ID NO: 1265898 - RNA, 19 nt, Homo sapiens
  misc_RNA (1)...(19): siRNA sense strand
cuugacaguuuggauguuu

SEQ ID NO: 1265899 - RNA, 19 nt, Homo sapiens
  misc_RNA (1)...(19): siRNA sense strand
cauauauacgggauccuuu

SEQ ID NO: 1265900 - RNA, 19 nt, Homo sapiens
  misc_RNA (1)...(19): siRNA sense strand
auauauacgggauccuuua

SEQ ID NO: 1265901 - RNA, 19 nt, Homo sapiens
  misc_RNA (1)...(19): siRNA sense strand
cuuaaaggaucaguagcaa

SEQ ID NO: 1265902 - RNA, 19 nt, Homo sapiens
  misc_RNA (1)...(19): siRNA sense strand
uaaaccugaggaaggaaua

SEQ ID NO: 1265903 - RNA, 19 nt, Homo sapiens
  misc_RNA (1)...(19): siRNA sense strand
agaugacgccuguuauaga

SEQ ID NO: 1265904 - RNA, 19 nt, Homo sapiens
  misc_RNA (1)...(19): siRNA sense strand
ugugauuguuauugccaua

SEQ ID NO: 1265905 - RNA, 19 nt, Homo sapiens
  misc_RNA (1)...(19): siRNA sense strand
gagagcacgauuuauugug

SEQ ID NO: 1265906 - RNA, 19 nt, Homo sapiens
  misc_RNA (1)...(19): siRNA sense strand
gaaguauuugaguaucuug

SEQ ID NO: 1265907 - RNA, 19 nt, Homo sapiens
  misc_RNA (1)...(19): siRNA sense strand
ggcuaccugucucagauga

SEQ ID NO: 1265908 - RNA, 19 nt, Homo sapiens
  misc_RNA (1)...(19): siRNA sense strand
gauaucaggauuuggaaaa

SEQ ID NO: 1265909 - RNA, 19 nt, Homo sapiens
  misc_RNA (1)...(19): siRNA sense strand
ccucuugccacccauacua

SEQ ID NO: 1265910 - RNA, 19 nt, Homo sapiens
  misc_RNA (1)...(19): siRNA sense strand
ccaugguguugcugcugua

SEQ ID NO: 1265911 - RNA, 19 nt, Homo sapiens
  misc_RNA (1)...(19): siRNA sense strand
cagaugacgccuguuauag

SEQ ID NO: 1265912 - RNA, 19 nt, Homo sapiens
  misc_RNA (1)...(19): siRNA sense strand
cagaugguggagcugaaua

SEQ ID NO: 1265913 - RNA, 19 nt, Homo sapiens
  misc_RNA (1)...(19): siRNA sense strand
gucauugcugugauuguua

SEQ ID NO: 1265914 - RNA, 19 nt, Homo sapiens
  misc_RNA (1)...(19): siRNA sense strand
ggagccaccaacauuugaa

SEQ ID NO: 1265915 - RNA, 19 nt, Homo sapiens
  misc_RNA (1)...(19): siRNA sense strand
uuggugaacgaguagauua

SEQ ID NO: 1265916 - RNA, 19 nt, Homo sapiens
  misc_RNA (1)...(19): siRNA sense strand
gcgcuuuccuggguugcuu

SEQ ID NO: 1265917 - RNA, 19 nt, Homo sapiens
  misc_RNA (1)...(19): siRNA sense strand
uacuacaaagcaacaguua

SEQ ID NO: 1265918 - RNA, 19 nt, Homo sapiens
  misc_RNA (1)...(19): siRNA sense strand
cuugaugcaguaacuuaua

SEQ ID NO: 1265919 - RNA, 19 nt, Homo sapiens
  misc_RNA (1)...(19): siRNA sense strand
aaacauguccauauauacg

SEQ ID NO: 1265920 - RNA, 19 nt, Homo sapiens
  misc_RNA (1)...(19): siRNA sense strand
guguaaaguggucaaaugu

SEQ ID NO: 1265921 - RNA, 19 nt, Homo sapiens
  misc_RNA (1)...(19): siRNA sense strand
cuuacgaguuugguuauca

SEQ ID NO: 1265922 - RNA, 19 nt, Homo sapiens
  misc_RNA (1)...(19): siRNA sense strand
uacgggauccuuuaaaugg

SEQ ID NO: 1265923 - RNA, 19 nt, Homo sapiens
  misc_RNA (1)...(19): siRNA sense strand
gcagaugguggagcugaau

SEQ ID NO: 1265924 - RNA, 19 nt, Homo sapiens
  misc_RNA (1)...(19): siRNA sense strand
aaccaaaacccuacuauga

SEQ ID NO: 1265925 - RNA, 19 nt, Homo sapiens
  misc_RNA (1)...(19): siRNA sense strand
uugaugcaguaacuuauag

SEQ ID NO: 1265926 - RNA, 19 nt, Homo sapiens
  misc_RNA (1)...(19): siRNA sense strand
ggagcugaauaugccacuu

SEQ ID NO: 1265927 - RNA, 19 nt, Homo sapiens
  misc_RNA (1)...(19): siRNA sense strand
caacauuugaagcuaugga

SEQ ID NO: 1265928 - RNA, 19 nt, Homo sapiens
  misc_RNA (1)...(19): siRNA sense strand
cgauggcagcgacacaauu

SEQ ID NO: 1265929 - RNA, 19 nt, Homo sapiens
  misc_RNA (1)...(19): siRNA sense strand
gauccauuuucacuuauug

SEQ ID NO: 1265930 - RNA, 19 nt, Homo sapiens
  misc_RNA (1)...(19): siRNA sense strand
ggagagagcacgauuuauu

SEQ ID NO: 1265931 - RNA, 19 nt, Homo sapiens
  misc_RNA (1)...(19): siRNA sense strand
agagaaacauguccauaua

SEQ ID NO: 1265932 - RNA, 19 nt, Homo sapiens
  misc_RNA (1)...(19): siRNA sense strand
cagaugcacuuuauuugua

SEQ ID NO: 1265933 - RNA, 19 nt, Homo sapiens
  misc_RNA (1)...(19): siRNA sense strand
ggacuuacgaguuugguua

SEQ ID NO: 1265934 - RNA, 19 nt, Homo sapiens
  misc_RNA (1)...(19): siRNA sense strand
aaacagauaucaggauuug

SEQ ID NO: 1265935 - RNA, 19 nt, Homo sapiens
  misc_RNA (1)...(19): siRNA sense strand
cuauggagcucauugguaa

SEQ ID NO: 1265936 - RNA, 19 nt, Homo sapiens
  misc_RNA (1)...(19): siRNA sense strand
aaacacaccuuuagugaag

SEQ ID NO: 1265937 - RNA, 19 nt, Homo sapiens
  misc_RNA (1)...(19): siRNA sense strand
gaacuuaaaggaucaguag

SEQ ID NO: 1265938 - RNA, 19 nt, Homo sapiens
  misc_RNA (1)...(19): siRNA sense strand
gaaaacagauaucaggauu

SEQ ID NO: 1265939 - RNA, 19 nt, Homo sapiens
  misc_RNA (1)...(19): siRNA sense strand
uaaaggaucaguagcaauu

SEQ ID NO: 1265940 - RNA, 19 nt, Homo sapiens
  misc_RNA (1)...(19): siRNA sense strand
aaaugggacuuacgaguuu

SEQ ID NO: 1265941 - RNA, 19 nt, Homo sapiens
  misc_RNA (1)...(19): siRNA sense strand
guuaucagaugcacuuuau

SEQ ID NO: 1265942 - RNA, 19 nt, Homo sapiens
  misc_RNA (1)...(19): siRNA sense strand
gagcugaauaugccacuua

SEQ ID NO: 1265943 - RNA, 19 nt, Homo sapiens
  misc_RNA (1)...(19): siRNA sense strand
ugagauuggugaacgagua

SEQ ID NO: 1265944 - RNA, 19 nt, Homo sapiens
  misc_RNA (1)...(19): siRNA sense strand
gugaacgaguagauuauaa

SEQ ID NO: 1265945 - RNA, 19 nt, Homo sapiens
  misc_RNA (1)...(19): siRNA sense strand
gagagagcacgauuuauug

SEQ ID NO: 1265946 - RNA, 19 nt, Homo sapiens
  misc_RNA (1)...(19): siRNA sense strand
caaaugggacuuacgaguu

SEQ ID NO: 1265947 - RNA, 19 nt, Homo sapiens
  misc_RNA (1)...(19): siRNA sense strand
ggucauugcugugauuguu

SEQ ID NO: 1265948 - RNA, 19 nt, Homo sapiens
  misc_RNA (1)...(19): siRNA sense strand
ccagauccauuuucacuua

SEQ ID NO: 1265949 - RNA, 19 nt, Homo sapiens
  misc_RNA (1)...(19): siRNA sense strand
gaaggaauacuugacaguu

SEQ ID NO: 1265950 - RNA, 19 nt, Homo sapiens
  misc_RNA (1)...(19): siRNA sense strand
aaggaauacuugacaguuu

SEQ ID NO: 1265951 - RNA, 19 nt, Homo sapiens
  misc_RNA (1)...(19): siRNA sense strand
ucagaugacgccuguuaua

SEQ ID NO: 1265952 - RNA, 19 nt, Homo sapiens
  misc_RNA (1)...(19): siRNA sense strand
gaaaacacaccuuuaguga

SEQ ID NO: 1265953 - RNA, 19 nt, Homo sapiens
  misc_RNA (1)...(19): siRNA sense strand
gaugacgccuguuauagag

SEQ ID NO: 1265954 - RNA, 19 nt, Homo sapiens
  misc_RNA (1)...(19): siRNA sense strand
gagaaacauguccauauau

SEQ ID NO: 1265955 - RNA, 19 nt, Homo sapiens
  misc_RNA (1)...(19): siRNA sense strand
ccacuuaccagacuaaauc

SEQ ID NO: 1265956 - RNA, 19 nt, Homo sapiens
  misc_RNA (1)...(19): siRNA sense strand
acgaguagauuauaagugu

SEQ ID NO: 1265957 - RNA, 19 nt, Homo sapiens
  misc_RNA (1)...(19): siRNA sense strand
cuacaaagcaacaguuaug

SEQ ID NO: 1265958 - RNA, 19 nt, Homo sapiens
  misc_RNA (1)...(19): siRNA sense strand
ccaccaacauuugaagcua

SEQ ID NO: 1265959 - RNA, 19 nt, Homo sapiens
  misc_RNA (1)...(19): siRNA sense strand
uauacgggauccuuuaaau

SEQ ID NO: 1265960 - RNA, 19 nt, Homo sapiens
  misc_RNA (1)...(19): siRNA sense strand
cgaguuugguuaucagaug

SEQ ID NO: 1265961 - RNA, 19 nt, Homo sapiens
  misc_RNA (1)...(19): siRNA sense strand
gaacgaguagauuauaagu

SEQ ID NO: 1265962 - RNA, 19 nt, Homo sapiens
  misc_RNA (1)...(19): siRNA sense strand
gugaggagccaccaacauu

SEQ ID NO: 1265963 - RNA, 19 nt, Homo sapiens
  misc_RNA (1)...(19): siRNA sense strand
gauggcagcgacacaauug

SEQ ID NO: 1265964 - RNA, 19 nt, Homo sapiens
  misc_RNA (1)...(19): siRNA sense strand
ucucagaugacgccuguua

SEQ ID NO: 1265965 - RNA, 19 nt, Homo sapiens
  misc_RNA (1)...(19): siRNA sense strand
gaggagccaccaacauuug

SEQ ID NO: 1265966 - RNA, 19 nt, Homo sapiens
  misc_RNA (1)...(19): siRNA sense strand
gcuauggagcucauuggua

SEQ ID NO: 1265967 - RNA, 19 nt, Homo sapiens
  misc_RNA (1)...(19): siRNA sense strand
acacaccuuuagugaagua

SEQ ID NO: 1265968 - RNA, 19 nt, Homo sapiens
  misc_RNA (1)...(19): siRNA sense strand
uagagaaacauguccauau

SEQ ID NO: 1265969 - RNA, 19 nt, Homo sapiens
  misc_RNA (1)...(19): siRNA sense strand
guuccaaagugucuuaaag

SEQ ID NO: 1265970 - RNA, 19 nt, Homo sapiens
  misc_RNA (1)...(19): siRNA sense strand
ggugaacgaguagauuaua

SEQ ID NO: 1265971 - RNA, 19 nt, Homo sapiens
  misc_RNA (1)...(19): siRNA sense strand
gaaguagaaguauuugagu

SEQ ID NO: 1265972 - RNA, 19 nt, Homo sapiens
  misc_RNA (1)...(19): siRNA sense strand
gaaacauguccauauauac

SEQ ID NO: 1265973 - RNA, 19 nt, Homo sapiens
  misc_RNA (1)...(19): siRNA sense strand
ugacgccuguuauagagaa

SEQ ID NO: 1265974 - RNA, 19 nt, Homo sapiens
  misc_RNA (1)...(19): siRNA sense strand
cgaguagauuauaagugua

SEQ ID NO: 1265975 - RNA, 19 nt, Homo sapiens
  misc_RNA (1)...(19): siRNA sense strand
gcacuuuauuuguaaugag

SEQ ID NO: 1265976 - RNA, 19 nt, Homo sapiens
  misc_RNA (1)...(19): siRNA sense strand
guagaaguauuugaguauc

SEQ ID NO: 1265977 - RNA, 19 nt, Homo sapiens
  misc_RNA (1)...(19): siRNA sense strand
guauuugaguaucuugaug

SEQ ID NO: 1265978 - RNA, 19 nt, Homo sapiens
  misc_RNA (1)...(19): siRNA sense strand
aggaauacuugacaguuug

SEQ ID NO: 1265979 - RNA, 19 nt, Homo sapiens
  misc_RNA (1)...(19): siRNA sense strand
ccaaaacccuacuaugaga

SEQ ID NO: 1265980 - RNA, 19 nt, Homo sapiens
  misc_RNA (1)...(19): siRNA sense strand
aguguaaaguggucaaaug

SEQ ID NO: 1265981 - RNA, 19 nt, Homo sapiens
  misc_RNA (1)...(19): siRNA sense strand
ccacccauacuauuuguga

SEQ ID NO: 1265982 - RNA, 19 nt, Homo sapiens
  misc_RNA (1)...(19): siRNA sense strand
uuggagagagcacgauuua

SEQ ID NO: 1265983 - RNA, 19 nt, Homo sapiens
  misc_RNA (1)...(19): siRNA sense strand
gguuaucagaugcacuuua

SEQ ID NO: 1265984 - RNA, 19 nt, Homo sapiens
  misc_RNA (1)...(19): siRNA sense strand
caccaacauuugaagcuau

SEQ ID NO: 1265985 - RNA, 19 nt, Homo sapiens
  misc_RNA (1)...(19): siRNA sense strand
ugaggagccaccaacauuu

SEQ ID NO: 1265986 - RNA, 19 nt, Homo sapiens
  misc_RNA (1)...(19): siRNA sense strand
ggaaggaauacuugacagu

SEQ ID NO: 1265987 - RNA, 19 nt, Homo sapiens
  misc_RNA (1)...(19): siRNA sense strand
gaggaaggaauacuugaca

SEQ ID NO: 1265988 - RNA, 19 nt, Homo sapiens
  misc_RNA (1)...(19): siRNA sense strand
ccaguuccaaagugucuua

SEQ ID NO: 1265989 - RNA, 19 nt, Homo sapiens
  misc_RNA (1)...(19): siRNA sense strand
ugaguaucuugaugcagua

SEQ ID NO: 1265990 - RNA, 19 nt, Homo sapiens
  misc_RNA (1)...(19): siRNA sense strand
caccuuuagugaaguagaa

SEQ ID NO: 1265991 - RNA, 19 nt, Homo sapiens
  misc_RNA (1)...(19): siRNA sense strand
acagauaucaggauuugga

SEQ ID NO: 1265992 - RNA, 19 nt, Homo sapiens
  misc_RNA (1)...(19): siRNA sense strand
ucauugcugugauuguuau

SEQ ID NO: 1265993 - RNA, 19 nt, Homo sapiens
  misc_RNA (1)...(19): siRNA sense strand
ucagaugcacuuuauuugu

SEQ ID NO: 1265994 - RNA, 19 nt, Homo sapiens
  misc_RNA (1)...(19): siRNA sense strand
gugcugcuccagaguguaa

SEQ ID NO: 1265995 - RNA, 19 nt, Homo sapiens
  misc_RNA (1)...(19): siRNA sense strand
ggaaaacacaccuuuagug

SEQ ID NO: 1265996 - RNA, 19 nt, Homo sapiens
  misc_RNA (1)...(19): siRNA sense strand
aaggaucaguagcaauuug

SEQ ID NO: 1265997 - RNA, 19 nt, Homo sapiens
  misc_RNA (1)...(19): siRNA sense strand
uauauacgggauccuuuaa

SEQ ID NO: 1265998 - RNA, 19 nt, Homo sapiens
  misc_RNA (1)...(19): siRNA sense strand
ugaaguagaaguauuugag

SEQ ID NO: 1265999 - RNA, 19 nt, Homo sapiens
  misc_RNA (1)...(19): siRNA sense strand
cuugacaguuuggauguuu

SEQ ID NO: 1266000 - RNA, 19 nt, Homo sapiens
  misc_RNA (1)...(19): siRNA sense strand
cauauauacgggauccuuu

SEQ ID NO: 1266001 - RNA, 19 nt, Homo sapiens
  misc_RNA (1)...(19): siRNA sense strand
auauauacgggauccuuua

SEQ ID NO: 1266002 - RNA, 19 nt, Homo sapiens
  misc_RNA (1)...(19): siRNA sense strand
cuuaaaggaucaguagcaa

SEQ ID NO: 1266003 - RNA, 19 nt, Homo sapiens
  misc_RNA (1)...(19): siRNA sense strand
uaaaccugaggaaggaaua

SEQ ID NO: 1266004 - RNA, 19 nt, Homo sapiens
  misc_RNA (1)...(19): siRNA sense strand
agaugacgccuguuauaga

SEQ ID NO: 1266005 - RNA, 19 nt, Homo sapiens
  misc_RNA (1)...(19): siRNA sense strand
ugugauuguuauugccaua

SEQ ID NO: 1266006 - RNA, 19 nt, Homo sapiens
  misc_RNA (1)...(19): siRNA sense strand
gagagcacgauuuauugug

SEQ ID NO: 1266007 - RNA, 19 nt, Homo sapiens
  misc_RNA (1)...(19): siRNA sense strand
gaaguauuugaguaucuug

SEQ ID NO: 1266008 - RNA, 19 nt, Homo sapiens
  misc_RNA (1)...(19): siRNA sense strand
ggcuaccugucucagauga

SEQ ID NO: 1266009 - RNA, 19 nt, Homo sapiens
  misc_RNA (1)...(19): siRNA sense strand
gauaucaggauuuggaaaa

SEQ ID NO: 1266010 - RNA, 19 nt, Homo sapiens
  misc_RNA (1)...(19): siRNA sense strand
ccucuugccacccauacua

SEQ ID NO: 1266011 - RNA, 19 nt, Homo sapiens
  misc_RNA (1)...(19): siRNA sense strand
ccaugguguugcugcugua

SEQ ID NO: 1266012 - RNA, 19 nt, Homo sapiens
  misc_RNA (1)...(19): siRNA sense strand
cagaugacgccuguuauag

SEQ ID NO: 1266013 - RNA, 19 nt, Homo sapiens
  misc_RNA (1)...(19): siRNA sense strand
cagaugguggagcugaaua

SEQ ID NO: 1266014 - RNA, 19 nt, Homo sapiens
  misc_RNA (1)...(19): siRNA sense strand
gucauugcugugauuguua

SEQ ID NO: 1266015 - RNA, 19 nt, Homo sapiens
  misc_RNA (1)...(19): siRNA sense strand
ggagccaccaacauuugaa

SEQ ID NO: 1266016 - RNA, 19 nt, Homo sapiens
  misc_RNA (1)...(19): siRNA sense strand
uuggugaacgaguagauua

SEQ ID NO: 1266017 - RNA, 19 nt, Homo sapiens
  misc_RNA (1)...(19): siRNA sense strand
gcgcuuuccuggguugcuu

SEQ ID NO: 1266018 - RNA, 19 nt, Homo sapiens
  misc_RNA (1)...(19): siRNA sense strand
uacuacaaagcaacaguua

SEQ ID NO: 1266019 - RNA, 19 nt, Homo sapiens
  misc_RNA (1)...(19): siRNA sense strand
cuugaugcaguaacuuaua

SEQ ID NO: 1266020 - RNA, 19 nt, Homo sapiens
  misc_RNA (1)...(19): siRNA sense strand
aaacauguccauauauacg

SEQ ID NO: 1266021 - RNA, 19 nt, Homo sapiens
  misc_RNA (1)...(19): siRNA sense strand
guguaaaguggucaaaugu

SEQ ID NO: 1266022 - RNA, 19 nt, Homo sapiens
  misc_RNA (1)...(19): siRNA sense strand
cuuacgaguuugguuauca

SEQ ID NO: 1266023 - RNA, 19 nt, Homo sapiens
  misc_RNA (1)...(19): siRNA sense strand
uacgggauccuuuaaaugg

SEQ ID NO: 1266024 - RNA, 19 nt, Homo sapiens
  misc_RNA (1)...(19): siRNA sense strand
gcagaugguggagcugaau

SEQ ID NO: 1266025 - RNA, 19 nt, Homo sapiens
  misc_RNA (1)...(19): siRNA sense strand
aaccaaaacccuacuauga

SEQ ID NO: 1266026 - RNA, 19 nt, Homo sapiens
  misc_RNA (1)...(19): siRNA sense strand
uugaugcaguaacuuauag

SEQ ID NO: 1266027 - RNA, 19 nt, Homo sapiens
  misc_RNA (1)...(19): siRNA sense strand
ggagcugaauaugccacuu

SEQ ID NO: 1266028 - RNA, 19 nt, Homo sapiens
  misc_RNA (1)...(19): siRNA sense strand
cgauggcagcgacacaauu

SEQ ID NO: 1266029 - RNA, 19 nt, Homo sapiens
  misc_RNA (1)...(19): siRNA sense strand
gauccauuuucacuuauug

SEQ ID NO: 1266030 - RNA, 19 nt, Homo sapiens
  misc_RNA (1)...(19): siRNA sense strand
ggagagagcacgauuuauu

SEQ ID NO: 1266031 - RNA, 19 nt, Homo sapiens
  misc_RNA (1)...(19): siRNA sense strand
agagaaacauguccauaua

SEQ ID NO: 1266032 - RNA, 19 nt, Homo sapiens
  misc_RNA (1)...(19): siRNA sense strand
cagaugcacuuuauuugua

SEQ ID NO: 1266033 - RNA, 19 nt, Homo sapiens
  misc_RNA (1)...(19): siRNA sense strand
ggacuuacgaguuugguua

SEQ ID NO: 1266034 - RNA, 19 nt, Homo sapiens
  misc_RNA (1)...(19): siRNA sense strand
aaacagauaucaggauuug

SEQ ID NO: 1266035 - RNA, 19 nt, Homo sapiens
  misc_RNA (1)...(19): siRNA sense strand
cuauggagcucauugguaa

SEQ ID NO: 1266036 - RNA, 19 nt, Homo sapiens
  misc_RNA (1)...(19): siRNA sense strand
aaacacaccuuuagugaag

SEQ ID NO: 1266037 - RNA, 19 nt, Homo sapiens
  misc_RNA (1)...(19): siRNA sense strand
gaacuuaaaggaucaguag

SEQ ID NO: 1266038 - RNA, 19 nt, Homo sapiens
  misc_RNA (1)...(19): siRNA sense strand
gaaaacagauaucaggauu

SEQ ID NO: 1266039 - RNA, 19 nt, Homo sapiens
  misc_RNA (1)...(19): siRNA sense strand
uaaaggaucaguagcaauu

SEQ ID NO: 1266040 - RNA, 19 nt, Homo sapiens
  misc_RNA (1)...(19): siRNA sense strand
aaaugggacuuacgaguuu

SEQ ID NO: 1266041 - RNA, 19 nt, Homo sapiens
  misc_RNA (1)...(19): siRNA sense strand
guuaucagaugcacuuuau

SEQ ID NO: 1266042 - RNA, 19 nt, Homo sapiens
  misc_RNA (1)...(19): siRNA sense strand
gagcugaauaugccacuua

SEQ ID NO: 1266043 - RNA, 19 nt, Homo sapiens
  misc_RNA (1)...(19): siRNA sense strand
ugagauuggugaacgagua

SEQ ID NO: 1266044 - RNA, 19 nt, Homo sapiens
  misc_RNA (1)...(19): siRNA sense strand
gugaacgaguagauuauaa

SEQ ID NO: 1266045 - RNA, 19 nt, Homo sapiens
  misc_RNA (1)...(19): siRNA sense strand
gagagagcacgauuuauug

SEQ ID NO: 1266046 - RNA, 19 nt, Homo sapiens
  misc_RNA (1)...(19): siRNA sense strand
caaaugggacuuacgaguu

SEQ ID NO: 1266047 - RNA, 19 nt, Homo sapiens
  misc_RNA (1)...(19): siRNA sense strand
ggucauugcugugauuguu

SEQ ID NO: 1266048 - RNA, 19 nt, Homo sapiens
  misc_RNA (1)...(19): siRNA sense strand
ccagauccauuuucacuua

SEQ ID NO: 1266049 - RNA, 19 nt, Homo sapiens
  misc_RNA (1)...(19): siRNA sense strand
gaaggaauacuugacaguu

SEQ ID NO: 1266050 - RNA, 19 nt, Homo sapiens
  misc_RNA (1)...(19): siRNA sense strand
aaggaauacuugacaguuu

SEQ ID NO: 1266051 - RNA, 19 nt, Homo sapiens
  misc_RNA (1)...(19): siRNA sense strand
ucagaugacgccuguuaua

SEQ ID NO: 1266052 - RNA, 19 nt, Homo sapiens
  misc_RNA (1)...(19): siRNA sense strand
gaaaacacaccuuuaguga

SEQ ID NO: 1266053 - RNA, 19 nt, Homo sapiens
  misc_RNA (1)...(19): siRNA sense strand
gaugacgccuguuauagag

SEQ ID NO: 1266054 - RNA, 19 nt, Homo sapiens
  misc_RNA (1)...(19): siRNA sense strand
gagaaacauguccauauau

SEQ ID NO: 1266055 - RNA, 19 nt, Homo sapiens
  misc_RNA (1)...(19): siRNA sense strand
ccacuuaccagacuaaauc

SEQ ID NO: 1266056 - RNA, 19 nt, Homo sapiens
  misc_RNA (1)...(19): siRNA sense strand
acgaguagauuauaagugu

SEQ ID NO: 1266057 - RNA, 19 nt, Homo sapiens
  misc_RNA (1)...(19): siRNA sense strand
cuacaaagcaacaguuaug

SEQ ID NO: 1266058 - RNA, 19 nt, Homo sapiens
  misc_RNA (1)...(19): siRNA sense strand
ccaccaacauuugaagcua

SEQ ID NO: 1266059 - RNA, 19 nt, Homo sapiens
  misc_RNA (1)...(19): siRNA sense strand
uauacgggauccuuuaaau

SEQ ID NO: 1266060 - RNA, 19 nt, Homo sapiens
  misc_RNA (1)...(19): siRNA sense strand
cgaguuugguuaucagaug

SEQ ID NO: 1266061 - RNA, 19 nt, Homo sapiens
  misc_RNA (1)...(19): siRNA sense strand
gaacgaguagauuauaagu

SEQ ID NO: 1266062 - RNA, 19 nt, Homo sapiens
  misc_RNA (1)...(19): siRNA sense strand
gugaggagccaccaacauu

SEQ ID NO: 1266063 - RNA, 19 nt, Homo sapiens
  misc_RNA (1)...(19): siRNA sense strand
gauggcagcgacacaauug

SEQ ID NO: 1266064 - RNA, 19 nt, Homo sapiens
  misc_RNA (1)...(19): siRNA sense strand
ucucagaugacgccuguua

SEQ ID NO: 1266065 - RNA, 19 nt, Homo sapiens
  misc_RNA (1)...(19): siRNA sense strand
gaggagccaccaacauuug

SEQ ID NO: 1266066 - RNA, 19 nt, Homo sapiens
  misc_RNA (1)...(19): siRNA sense strand
gcuauggagcucauuggua

SEQ ID NO: 1266067 - RNA, 19 nt, Homo sapiens
  misc_RNA (1)...(19): siRNA sense strand
acacaccuuuagugaagua

SEQ ID NO: 1266068 - RNA, 19 nt, Homo sapiens
  misc_RNA (1)...(19): siRNA sense strand
uagagaaacauguccauau

SEQ ID NO: 1266069 - RNA, 19 nt, Homo sapiens
  misc_RNA (1)...(19): siRNA sense strand
guuccaaagugucuuaaag

SEQ ID NO: 1266070 - RNA, 19 nt, Homo sapiens
  misc_RNA (1)...(19): siRNA sense strand
ggugaacgaguagauuaua

SEQ ID NO: 1266071 - RNA, 19 nt, Homo sapiens
  misc_RNA (1)...(19): siRNA sense strand
gaaguagaaguauuugagu

SEQ ID NO: 1266072 - RNA, 19 nt, Homo sapiens
  misc_RNA (1)...(19): siRNA sense strand
gaaacauguccauauauac

SEQ ID NO: 1266073 - RNA, 19 nt, Homo sapiens
  misc_RNA (1)...(19): siRNA sense strand
ugacgccuguuauagagaa

SEQ ID NO: 1266074 - RNA, 19 nt, Homo sapiens
  misc_RNA (1)...(19): siRNA sense strand
cgaguagauuauaagugua

SEQ ID NO: 1266075 - RNA, 19 nt, Homo sapiens
  misc_RNA (1)...(19): siRNA sense strand
gcacuuuauuuguaaugag

SEQ ID NO: 1266076 - RNA, 19 nt, Homo sapiens
  misc_RNA (1)...(19): siRNA sense strand
guagaaguauuugaguauc

SEQ ID NO: 1266077 - RNA, 19 nt, Homo sapiens
  misc_RNA (1)...(19): siRNA sense strand
guauuugaguaucuugaug

SEQ ID NO: 1266078 - RNA, 19 nt, Homo sapiens
  misc_RNA (1)...(19): siRNA sense strand
aggaauacuugacaguuug

SEQ ID NO: 1266079 - RNA, 19 nt, Homo sapiens
  misc_RNA (1)...(19): siRNA sense strand
ccaaaacccuacuaugaga

SEQ ID NO: 1266080 - RNA, 19 nt, Homo sapiens
  misc_RNA (1)...(19): siRNA sense strand
aguguaaaguggucaaaug

SEQ ID NO: 1266081 - RNA, 19 nt, Homo sapiens
  misc_RNA (1)...(19): siRNA sense strand
ccacccauacuauuuguga

SEQ ID NO: 1266082 - RNA, 19 nt, Homo sapiens
  misc_RNA (1)...(19): siRNA sense strand
uuggagagagcacgauuua

SEQ ID NO: 1266083 - RNA, 19 nt, Homo sapiens
  misc_RNA (1)...(19): siRNA sense strand
gguuaucagaugcacuuua

SEQ ID NO: 1266084 - RNA, 19 nt, Homo sapiens
  misc_RNA (1)...(19): siRNA sense strand
caccaacauuugaagcuau

SEQ ID NO: 1266085 - RNA, 19 nt, Homo sapiens
  misc_RNA (1)...(19): siRNA sense strand
ugaggagccaccaacauuu

SEQ ID NO: 1266086 - RNA, 19 nt, Homo sapiens
  misc_RNA (1)...(19): siRNA sense strand
ggaaggaauacuugacagu

SEQ ID NO: 1266087 - RNA, 19 nt, Homo sapiens
  misc_RNA (1)...(19): siRNA sense strand
gaggaaggaauacuugaca

SEQ ID NO: 1266088 - RNA, 19 nt, Homo sapiens
  misc_RNA (1)...(19): siRNA sense strand
ccaguuccaaagugucuua

SEQ ID NO: 1266089 - RNA, 19 nt, Homo sapiens
  misc_RNA (1)...(19): siRNA sense strand
ugaguaucuugaugcagua

SEQ ID NO: 1266090 - RNA, 19 nt, Homo sapiens
  misc_RNA (1)...(19): siRNA sense strand
caccuuuagugaaguagaa

SEQ ID NO: 1266091 - RNA, 19 nt, Homo sapiens
  misc_RNA (1)...(19): siRNA sense strand
acagauaucaggauuugga

SEQ ID NO: 1266092 - RNA, 19 nt, Homo sapiens
  misc_RNA (1)...(19): siRNA sense strand
ucauugcugugauuguuau

SEQ ID NO: 1266093 - RNA, 19 nt, Homo sapiens
  misc_RNA (1)...(19): siRNA sense strand
ucagaugcacuuuauuugu

SEQ ID NO: 1266094 - RNA, 19 nt, Homo sapiens
  misc_RNA (1)...(19): siRNA sense strand
gugcugcuccagaguguaa

SEQ ID NO: 1266095 - RNA, 19 nt, Homo sapiens
  misc_RNA (1)...(19): siRNA sense strand
ggaaaacacaccuuuagug

SEQ ID NO: 1266096 - RNA, 19 nt, Homo sapiens
  misc_RNA (1)...(19): siRNA sense strand
aaggaucaguagcaauuug

SEQ ID NO: 1266097 - RNA, 19 nt, Homo sapiens
  misc_RNA (1)...(19): siRNA sense strand
uauauacgggauccuuuaa

SEQ ID NO: 1266098 - RNA, 19 nt, Homo sapiens
  misc_RNA (1)...(19): siRNA sense strand
ugaaguagaaguauuugag

SEQ ID NO: 1266099 - RNA, 19 nt, Homo sapiens
  misc_RNA (1)...(19): siRNA sense strand
cuugacaguuuggauguuu

SEQ ID NO: 1266100 - RNA, 19 nt, Homo sapiens
  misc_RNA (1)...(19): siRNA sense strand
cauauauacgggauccuuu

SEQ ID NO: 1266101 - RNA, 19 nt, Homo sapiens
  misc_RNA (1)...(19): siRNA sense strand
auauauacgggauccuuua

SEQ ID NO: 1266102 - RNA, 19 nt, Homo sapiens
  misc_RNA (1)...(19): siRNA sense strand
cuuaaaggaucaguagcaa

SEQ ID NO: 1266103 - RNA, 19 nt, Homo sapiens
  misc_RNA (1)...(19): siRNA sense strand
uaaaccugaggaaggaaua

SEQ ID NO: 1266104 - RNA, 19 nt, Homo sapiens
  misc_RNA (1)...(19): siRNA sense strand
agaugacgccuguuauaga

SEQ ID NO: 1266105 - RNA, 19 nt, Homo sapiens
  misc_RNA (1)...(19): siRNA sense strand
ugugauuguuauugccaua

SEQ ID NO: 1266106 - RNA, 19 nt, Homo sapiens
  misc_RNA (1)...(19): siRNA sense strand
gagagcacgauuuauugug

SEQ ID NO: 1266107 - RNA, 19 nt, Homo sapiens
  misc_RNA (1)...(19): siRNA sense strand
gaaguauuugaguaucuug

SEQ ID NO: 1266108 - RNA, 19 nt, Homo sapiens
  misc_RNA (1)...(19): siRNA sense strand
ggcuaccugucucagauga

SEQ ID NO: 1266109 - RNA, 19 nt, Homo sapiens
  misc_RNA (1)...(19): siRNA sense strand
gauaucaggauuuggaaaa

SEQ ID NO: 1266110 - RNA, 19 nt, Homo sapiens
  misc_RNA (1)...(19): siRNA sense strand
ccucuugccacccauacua

SEQ ID NO: 1266111 - RNA, 19 nt, Homo sapiens
  misc_RNA (1)...(19): siRNA sense strand
ccaugguguugcugcugua

SEQ ID NO: 1266112 - RNA, 19 nt, Homo sapiens
  misc_RNA (1)...(19): siRNA sense strand
cagaugacgccuguuauag

SEQ ID NO: 1266113 - RNA, 19 nt, Homo sapiens
  misc_RNA (1)...(19): siRNA sense strand
cagaugguggagcugaaua

SEQ ID NO: 1266114 - RNA, 19 nt, Homo sapiens
  misc_RNA (1)...(19): siRNA sense strand
gucauugcugugauuguua

SEQ ID NO: 1266115 - RNA, 19 nt, Homo sapiens
  misc_RNA (1)...(19): siRNA sense strand
ggagccaccaacauuugaa

SEQ ID NO: 1266116 - RNA, 19 nt, Homo sapiens
  misc_RNA (1)...(19): siRNA sense strand
uuggugaacgaguagauua

SEQ ID NO: 1266117 - RNA, 19 nt, Homo sapiens
  misc_RNA (1)...(19): siRNA sense strand
gcgcuuuccuggguugcuu

SEQ ID NO: 1266118 - RNA, 19 nt, Homo sapiens
  misc_RNA (1)...(19): siRNA sense strand
uacuacaaagcaacaguua

SEQ ID NO: 1266119 - RNA, 19 nt, Homo sapiens
  misc_RNA (1)...(19): siRNA sense strand
cuugaugcaguaacuuaua

SEQ ID NO: 1266120 - RNA, 19 nt, Homo sapiens
  misc_RNA (1)...(19): siRNA sense strand
aaacauguccauauauacg

SEQ ID NO: 1266121 - RNA, 19 nt, Homo sapiens
  misc_RNA (1)...(19): siRNA sense strand
guguaaaguggucaaaugu

SEQ ID NO: 1266122 - RNA, 19 nt, Homo sapiens
  misc_RNA (1)...(19): siRNA sense strand
cuuacgaguuugguuauca

SEQ ID NO: 1266123 - RNA, 19 nt, Homo sapiens
  misc_RNA (1)...(19): siRNA sense strand
uacgggauccuuuaaaugg

SEQ ID NO: 1266124 - RNA, 19 nt, Homo sapiens
  misc_RNA (1)...(19): siRNA sense strand
gcagaugguggagcugaau

SEQ ID NO: 1266125 - RNA, 19 nt, Homo sapiens
  misc_RNA (1)...(19): siRNA sense strand
aaccaaaacccuacuauga

SEQ ID NO: 1266126 - RNA, 19 nt, Homo sapiens
  misc_RNA (1)...(19): siRNA sense strand
uugaugcaguaacuuauag

SEQ ID NO: 1266127 - RNA, 19 nt, Homo sapiens
  misc_RNA (1)...(19): siRNA sense strand
ggagcugaauaugccacuu

SEQ ID NO: 1266128 - RNA, 19 nt, Homo sapiens
  misc_RNA (1)...(19): siRNA sense strand
cgauggcagcgacacaauu

SEQ ID NO: 1266129 - RNA, 19 nt, Homo sapiens
  misc_RNA (1)...(19): siRNA sense strand
gauccauuuucacuuauug

SEQ ID NO: 1266130 - RNA, 19 nt, Homo sapiens
  misc_RNA (1)...(19): siRNA sense strand
ggagagagcacgauuuauu

SEQ ID NO: 1266131 - RNA, 19 nt, Homo sapiens
  misc_RNA (1)...(19): siRNA sense strand
agagaaacauguccauaua

SEQ ID NO: 1266132 - RNA, 19 nt, Homo sapiens
  misc_RNA (1)...(19): siRNA sense strand
cagaugcacuuuauuugua

SEQ ID NO: 1266133 - RNA, 19 nt, Homo sapiens
  misc_RNA (1)...(19): siRNA sense strand
ggacuuacgaguuugguua

SEQ ID NO: 1266134 - RNA, 19 nt, Homo sapiens
  misc_RNA (1)...(19): siRNA sense strand
aaacagauaucaggauuug

SEQ ID NO: 1266135 - RNA, 19 nt, Homo sapiens
  misc_RNA (1)...(19): siRNA sense strand
cuauggagcucauugguaa

SEQ ID NO: 1266136 - RNA, 19 nt, Homo sapiens
  misc_RNA (1)...(19): siRNA sense strand
aaacacaccuuuagugaag

SEQ ID NO: 1266137 - RNA, 19 nt, Homo sapiens
  misc_RNA (1)...(19): siRNA sense strand
gaacuuaaaggaucaguag

SEQ ID NO: 1266138 - RNA, 19 nt, Homo sapiens
  misc_RNA (1)...(19): siRNA sense strand
gaaaacagauaucaggauu

SEQ ID NO: 1266139 - RNA, 19 nt, Homo sapiens
  misc_RNA (1)...(19): siRNA sense strand
uaaaggaucaguagcaauu

SEQ ID NO: 1266140 - RNA, 19 nt, Homo sapiens
  misc_RNA (1)...(19): siRNA sense strand
aaaugggacuuacgaguuu

SEQ ID NO: 1266141 - RNA, 19 nt, Homo sapiens
  misc_RNA (1)...(19): siRNA sense strand
guuaucagaugcacuuuau

SEQ ID NO: 1266142 - RNA, 19 nt, Homo sapiens
  misc_RNA (1)...(19): siRNA sense strand
gagcugaauaugccacuua

SEQ ID NO: 1266143 - RNA, 19 nt, Homo sapiens
  misc_RNA (1)...(19): siRNA sense strand
ugagauuggugaacgagua

SEQ ID NO: 1266144 - RNA, 19 nt, Homo sapiens
  misc_RNA (1)...(19): siRNA sense strand
gugaacgaguagauuauaa

SEQ ID NO: 1266145 - RNA, 19 nt, Homo sapiens
  misc_RNA (1)...(19): siRNA sense strand
gagagagcacgauuuauug

SEQ ID NO: 1266146 - RNA, 19 nt, Homo sapiens
  misc_RNA (1)...(19): siRNA sense strand
caaaugggacuuacgaguu

SEQ ID NO: 1266147 - RNA, 19 nt, Homo sapiens
  misc_RNA (1)...(19): siRNA sense strand
ggucauugcugugauuguu

SEQ ID NO: 1266148 - RNA, 19 nt, Homo sapiens
  misc_RNA (1)...(19): siRNA sense strand
ccagauccauuuucacuua

SEQ ID NO: 1266149 - RNA, 19 nt, Homo sapiens
  misc_RNA (1)...(19): siRNA sense strand
gaaggaauacuugacaguu

SEQ ID NO: 1266150 - RNA, 19 nt, Homo sapiens
  misc_RNA (1)...(19): siRNA sense strand
aaggaauacuugacaguuu

SEQ ID NO: 1266151 - RNA, 19 nt, Homo sapiens
  misc_RNA (1)...(19): siRNA sense strand
ucagaugacgccuguuaua

SEQ ID NO: 1266152 - RNA, 19 nt, Homo sapiens
  misc_RNA (1)...(19): siRNA sense strand
gaaaacacaccuuuaguga

SEQ ID NO: 1266153 - RNA, 19 nt, Homo sapiens
  misc_RNA (1)...(19): siRNA sense strand
gaugacgccuguuauagag

SEQ ID NO: 1266154 - RNA, 19 nt, Homo sapiens
  misc_RNA (1)...(19): siRNA sense strand
gagaaacauguccauauau

SEQ ID NO: 1266155 - RNA, 19 nt, Homo sapiens
  misc_RNA (1)...(19): siRNA sense strand
ccacuuaccagacuaaauc

SEQ ID NO: 1266156 - RNA, 19 nt, Homo sapiens
  misc_RNA (1)...(19): siRNA sense strand
acgaguagauuauaagugu

SEQ ID NO: 1266157 - RNA, 19 nt, Homo sapiens
  misc_RNA (1)...(19): siRNA sense strand
cuacaaagcaacaguuaug

SEQ ID NO: 1266158 - RNA, 19 nt, Homo sapiens
  misc_RNA (1)...(19): siRNA sense strand
ccaccaacauuugaagcua

SEQ ID NO: 1266159 - RNA, 19 nt, Homo sapiens
  misc_RNA (1)...(19): siRNA sense strand
uauacgggauccuuuaaau

SEQ ID NO: 1266160 - RNA, 19 nt, Homo sapiens
  misc_RNA (1)...(19): siRNA sense strand
cgaguuugguuaucagaug

SEQ ID NO: 1266161 - RNA, 19 nt, Homo sapiens
  misc_RNA (1)...(19): siRNA sense strand
gaacgaguagauuauaagu

SEQ ID NO: 1266162 - RNA, 19 nt, Homo sapiens
  misc_RNA (1)...(19): siRNA sense strand
gugaggagccaccaacauu

SEQ ID NO: 1266163 - RNA, 19 nt, Homo sapiens
  misc_RNA (1)...(19): siRNA sense strand
gauggcagcgacacaauug

SEQ ID NO: 1266164 - RNA, 19 nt, Homo sapiens
  misc_RNA (1)...(19): siRNA sense strand
ucucagaugacgccuguua

SEQ ID NO: 1266165 - RNA, 19 nt, Homo sapiens
  misc_RNA (1)...(19): siRNA sense strand
gaggagccaccaacauuug

SEQ ID NO: 1266166 - RNA, 19 nt, Homo sapiens
  misc_RNA (1)...(19): siRNA sense strand
gcuauggagcucauuggua

SEQ ID NO: 1266167 - RNA, 19 nt, Homo sapiens
  misc_RNA (1)...(19): siRNA sense strand
acacaccuuuagugaagua

SEQ ID NO: 1266168 - RNA, 19 nt, Homo sapiens
  misc_RNA (1)...(19): siRNA sense strand
uagagaaacauguccauau

SEQ ID NO: 1266169 - RNA, 19 nt, Homo sapiens
  misc_RNA (1)...(19): siRNA sense strand
guuccaaagugucuuaaag

SEQ ID NO: 1266170 - RNA, 19 nt, Homo sapiens
  misc_RNA (1)...(19): siRNA sense strand
ggugaacgaguagauuaua

SEQ ID NO: 1266171 - RNA, 19 nt, Homo sapiens
  misc_RNA (1)...(19): siRNA sense strand
gaaguagaaguauuugagu

SEQ ID NO: 1266172 - RNA, 19 nt, Homo sapiens
  misc_RNA (1)...(19): siRNA sense strand
gaaacauguccauauauac

SEQ ID NO: 1266173 - RNA, 19 nt, Homo sapiens
  misc_RNA (1)...(19): siRNA sense strand
ugacgccuguuauagagaa

SEQ ID NO: 1266174 - RNA, 19 nt, Homo sapiens
  misc_RNA (1)...(19): siRNA sense strand
cgaguagauuauaagugua

SEQ ID NO: 1266175 - RNA, 19 nt, Homo sapiens
  misc_RNA (1)...(19): siRNA sense strand
gcacuuuauuuguaaugag

SEQ ID NO: 1266176 - RNA, 19 nt, Homo sapiens
  misc_RNA (1)...(19): siRNA sense strand
guagaaguauuugaguauc

SEQ ID NO: 1266177 - RNA, 19 nt, Homo sapiens
  misc_RNA (1)...(19): siRNA sense strand
guauuugaguaucuugaug

SEQ ID NO: 1266178 - RNA, 19 nt, Homo sapiens
  misc_RNA (1)...(19): siRNA sense strand
aggaauacuugacaguuug

SEQ ID NO: 1266179 - RNA, 19 nt, Homo sapiens
  misc_RNA (1)...(19): siRNA sense strand
ccaaaacccuacuaugaga

SEQ ID NO: 1266180 - RNA, 19 nt, Homo sapiens
  misc_RNA (1)...(19): siRNA sense strand
aguguaaaguggucaaaug

SEQ ID NO: 1266181 - RNA, 19 nt, Homo sapiens
  misc_RNA (1)...(19): siRNA sense strand
ccacccauacuauuuguga

SEQ ID NO: 1266182 - RNA, 19 nt, Homo sapiens
  misc_RNA (1)...(19): siRNA sense strand
uuggagagagcacgauuua

SEQ ID NO: 1266183 - RNA, 19 nt, Homo sapiens
  misc_RNA (1)...(19): siRNA sense strand
gguuaucagaugcacuuua

SEQ ID NO: 1266184 - RNA, 19 nt, Homo sapiens
  misc_RNA (1)...(19): siRNA sense strand
caccaacauuugaagcuau

SEQ ID NO: 1266185 - RNA, 19 nt, Homo sapiens
  misc_RNA (1)...(19): siRNA sense strand
ugaggagccaccaacauuu

SEQ ID NO: 1266186 - RNA, 19 nt, Homo sapiens
  misc_RNA (1)...(19): siRNA sense strand
ggaaggaauacuugacagu

SEQ ID NO: 1266187 - RNA, 19 nt, Homo sapiens
  misc_RNA (1)...(19): siRNA sense strand
gaggaaggaauacuugaca

SEQ ID NO: 1266188 - RNA, 19 nt, Homo sapiens
  misc_RNA (1)...(19): siRNA sense strand
ccaguuccaaagugucuua

SEQ ID NO: 1266189 - RNA, 19 nt, Homo sapiens
  misc_RNA (1)...(19): siRNA sense strand
ugaguaucuugaugcagua

SEQ ID NO: 1266190 - RNA, 19 nt, Homo sapiens
  misc_RNA (1)...(19): siRNA sense strand
caccuuuagugaaguagaa

SEQ ID NO: 1266191 - RNA, 19 nt, Homo sapiens
  misc_RNA (1)...(19): siRNA sense strand
acagauaucaggauuugga

SEQ ID NO: 1266192 - RNA, 19 nt, Homo sapiens
  misc_RNA (1)...(19): siRNA sense strand
ucauugcugugauuguuau

SEQ ID NO: 1266193 - RNA, 19 nt, Homo sapiens
  misc_RNA (1)...(19): siRNA sense strand
ucagaugcacuuuauuugu

SEQ ID NO: 1266194 - RNA, 19 nt, Homo sapiens
  misc_RNA (1)...(19): siRNA sense strand
gugcugcuccagaguguaa

SEQ ID NO: 1266195 - RNA, 19 nt, Homo sapiens
  misc_RNA (1)...(19): siRNA sense strand
ggaaaacacaccuuuagug

SEQ ID NO: 1266196 - RNA, 19 nt, Homo sapiens
  misc_RNA (1)...(19): siRNA sense strand
aaggaucaguagcaauuug

SEQ ID NO: 1266197 - RNA, 19 nt, Homo sapiens
  misc_RNA (1)...(19): siRNA sense strand
uauauacgggauccuuuaa

SEQ ID NO: 1266198 - RNA, 19 nt, Homo sapiens
  misc_RNA (1)...(19): siRNA sense strand
ugaaguagaaguauuugag

SEQ ID NO: 1266199 - RNA, 19 nt, Homo sapiens
  misc_RNA (1)...(19): siRNA sense strand
cuugacaguuuggauguuu

SEQ ID NO: 1266200 - RNA, 19 nt, Homo sapiens
  misc_RNA (1)...(19): siRNA sense strand
cauauauacgggauccuuu

SEQ ID NO: 1266201 - RNA, 19 nt, Homo sapiens
  misc_RNA (1)...(19): siRNA sense strand
auauauacgggauccuuua

SEQ ID NO: 1266202 - RNA, 19 nt, Homo sapiens
  misc_RNA (1)...(19): siRNA sense strand
cuuaaaggaucaguagcaa

SEQ ID NO: 1266203 - RNA, 19 nt, Homo sapiens
  misc_RNA (1)...(19): siRNA sense strand
uaaaccugaggaaggaaua

SEQ ID NO: 1266204 - RNA, 19 nt, Homo sapiens
  misc_RNA (1)...(19): siRNA sense strand
agaugacgccuguuauaga

SEQ ID NO: 1266205 - RNA, 19 nt, Homo sapiens
  misc_RNA (1)...(19): siRNA sense strand
ugugauuguuauugccaua

SEQ ID NO: 1266206 - RNA, 19 nt, Homo sapiens
  misc_RNA (1)...(19): siRNA sense strand
gagagcacgauuuauugug

SEQ ID NO: 1266207 - RNA, 19 nt, Homo sapiens
  misc_RNA (1)...(19): siRNA sense strand
gaaguauuugaguaucuug

SEQ ID NO: 1266208 - RNA, 19 nt, Homo sapiens
  misc_RNA (1)...(19): siRNA sense strand
ggcuaccugucucagauga

SEQ ID NO: 1266209 - RNA, 19 nt, Homo sapiens
  misc_RNA (1)...(19): siRNA sense strand
gauaucaggauuuggaaaa

SEQ ID NO: 1266210 - RNA, 19 nt, Homo sapiens
  misc_RNA (1)...(19): siRNA sense strand
ccucuugccacccauacua

SEQ ID NO: 1266211 - RNA, 19 nt, Homo sapiens
  misc_RNA (1)...(19): siRNA sense strand
ccaugguguugcugcugua

SEQ ID NO: 1266212 - RNA, 19 nt, Homo sapiens
  misc_RNA (1)...(19): siRNA sense strand
cagaugacgccuguuauag

SEQ ID NO: 1266213 - RNA, 19 nt, Homo sapiens
  misc_RNA (1)...(19): siRNA sense strand
cagaugguggagcugaaua

SEQ ID NO: 1266214 - RNA, 19 nt, Homo sapiens
  misc_RNA (1)...(19): siRNA sense strand
gucauugcugugauuguua

SEQ ID NO: 1266215 - RNA, 19 nt, Homo sapiens
  misc_RNA (1)...(19): siRNA sense strand
ggagccaccaacauuugaa

SEQ ID NO: 1266216 - RNA, 19 nt, Homo sapiens
  misc_RNA (1)...(19): siRNA sense strand
uuggugaacgaguagauua

SEQ ID NO: 1266217 - RNA, 19 nt, Homo sapiens
  misc_RNA (1)...(19): siRNA sense strand
gcgcuuuccuggguugcuu

SEQ ID NO: 1266218 - RNA, 19 nt, Homo sapiens
  misc_RNA (1)...(19): siRNA sense strand
uacuacaaagcaacaguua

SEQ ID NO: 1266219 - RNA, 19 nt, Homo sapiens
  misc_RNA (1)...(19): siRNA sense strand
cuugaugcaguaacuuaua

SEQ ID NO: 1266220 - RNA, 19 nt, Homo sapiens
  misc_RNA (1)...(19): siRNA sense strand
aaacauguccauauauacg

SEQ ID NO: 1266221 - RNA, 19 nt, Homo sapiens
  misc_RNA (1)...(19): siRNA sense strand
guguaaaguggucaaaugu

SEQ ID NO: 1266222 - RNA, 19 nt, Homo sapiens
  misc_RNA (1)...(19): siRNA sense strand
cuuacgaguuugguuauca

SEQ ID NO: 1266223 - RNA, 19 nt, Homo sapiens
  misc_RNA (1)...(19): siRNA sense strand
uacgggauccuuuaaaugg

SEQ ID NO: 1266224 - RNA, 19 nt, Homo sapiens
  misc_RNA (1)...(19): siRNA sense strand
gcagaugguggagcugaau

SEQ ID NO: 1266225 - RNA, 19 nt, Homo sapiens
  misc_RNA (1)...(19): siRNA sense strand
aaccaaaacccuacuauga

SEQ ID NO: 1266226 - RNA, 19 nt, Homo sapiens
  misc_RNA (1)...(19): siRNA sense strand
uugaugcaguaacuuauag

SEQ ID NO: 1266227 - RNA, 19 nt, Homo sapiens
  misc_RNA (1)...(19): siRNA sense strand
ggagcugaauaugccacuu

SEQ ID NO: 1266228 - RNA, 19 nt, Homo sapiens
  misc_RNA (1)...(19): siRNA sense strand
cgauggcagcgacacaauu

SEQ ID NO: 1266229 - RNA, 19 nt, Homo sapiens
  misc_RNA (1)...(19): siRNA sense strand
gauccauuuucacuuauug

SEQ ID NO: 1266230 - RNA, 19 nt, Homo sapiens
  misc_RNA (1)...(19): siRNA sense strand
ggagagagcacgauuuauu

SEQ ID NO: 1266231 - RNA, 19 nt, Homo sapiens
  misc_RNA (1)...(19): siRNA sense strand
agagaaacauguccauaua

SEQ ID NO: 1266232 - RNA, 19 nt, Homo sapiens
  misc_RNA (1)...(19): siRNA sense strand
cagaugcacuuuauuugua

SEQ ID NO: 1266233 - RNA, 19 nt, Homo sapiens
  misc_RNA (1)...(19): siRNA sense strand
ggacuuacgaguuugguua

SEQ ID NO: 1266234 - RNA, 19 nt, Homo sapiens
  misc_RNA (1)...(19): siRNA sense strand
aaacagauaucaggauuug

SEQ ID NO: 1266235 - RNA, 19 nt, Homo sapiens
  misc_RNA (1)...(19): siRNA sense strand
cuauggagcucauugguaa

SEQ ID NO: 1266236 - RNA, 19 nt, Homo sapiens
  misc_RNA (1)...(19): siRNA sense strand
aaacacaccuuuagugaag

SEQ ID NO: 1266237 - RNA, 19 nt, Homo sapiens
  misc_RNA (1)...(19): siRNA sense strand
gaacuuaaaggaucaguag

SEQ ID NO: 1266238 - RNA, 19 nt, Homo sapiens
  misc_RNA (1)...(19): siRNA sense strand
gaaaacagauaucaggauu

SEQ ID NO: 1266239 - RNA, 19 nt, Homo sapiens
  misc_RNA (1)...(19): siRNA sense strand
uaaaggaucaguagcaauu

SEQ ID NO: 1266240 - RNA, 19 nt, Homo sapiens
  misc_RNA (1)...(19): siRNA sense strand
aaaugggacuuacgaguuu

SEQ ID NO: 1266241 - RNA, 19 nt, Homo sapiens
  misc_RNA (1)...(19): siRNA sense strand
guuaucagaugcacuuuau

SEQ ID NO: 1266242 - RNA, 19 nt, Homo sapiens
  misc_RNA (1)...(19): siRNA sense strand
ugagauuggugaacgagua

SEQ ID NO: 1266243 - RNA, 19 nt, Homo sapiens
  misc_RNA (1)...(19): siRNA sense strand
gugaacgaguagauuauaa

SEQ ID NO: 1266244 - RNA, 19 nt, Homo sapiens
  misc_RNA (1)...(19): siRNA sense strand
gagagagcacgauuuauug

SEQ ID NO: 1266245 - RNA, 19 nt, Homo sapiens
  misc_RNA (1)...(19): siRNA sense strand
caaaugggacuuacgaguu

SEQ ID NO: 1266246 - RNA, 19 nt, Homo sapiens
  misc_RNA (1)...(19): siRNA sense strand
ggucauugcugugauuguu

SEQ ID NO: 1266247 - RNA, 19 nt, Homo sapiens
  misc_RNA (1)...(19): siRNA sense strand
ccagauccauuuucacuua

SEQ ID NO: 1266248 - RNA, 19 nt, Homo sapiens
  misc_RNA (1)...(19): siRNA sense strand
gaaggaauacuugacaguu

SEQ ID NO: 1266249 - RNA, 19 nt, Homo sapiens
  misc_RNA (1)...(19): siRNA sense strand
aaggaauacuugacaguuu

SEQ ID NO: 1266250 - RNA, 19 nt, Homo sapiens
  misc_RNA (1)...(19): siRNA sense strand
ucagaugacgccuguuaua

SEQ ID NO: 1266251 - RNA, 19 nt, Homo sapiens
  misc_RNA (1)...(19): siRNA sense strand
gaaaacacaccuuuaguga

SEQ ID NO: 1266252 - RNA, 19 nt, Homo sapiens
  misc_RNA (1)...(19): siRNA sense strand
gaugacgccuguuauagag

SEQ ID NO: 1266253 - RNA, 19 nt, Homo sapiens
  misc_RNA (1)...(19): siRNA sense strand
gagaaacauguccauauau

SEQ ID NO: 1266254 - RNA, 19 nt, Homo sapiens
  misc_RNA (1)...(19): siRNA sense strand
acgaguagauuauaagugu

SEQ ID NO: 1266255 - RNA, 19 nt, Homo sapiens
  misc_RNA (1)...(19): siRNA sense strand
cuacaaagcaacaguuaug

SEQ ID NO: 1266256 - RNA, 19 nt, Homo sapiens
  misc_RNA (1)...(19): siRNA sense strand
ccaccaacauuugaagcua

SEQ ID NO: 1266257 - RNA, 19 nt, Homo sapiens
  misc_RNA (1)...(19): siRNA sense strand
uauacgggauccuuuaaau

SEQ ID NO: 1266258 - RNA, 19 nt, Homo sapiens
  misc_RNA (1)...(19): siRNA sense strand
cgaguuugguuaucagaug

SEQ ID NO: 1266259 - RNA, 19 nt, Homo sapiens
  misc_RNA (1)...(19): siRNA sense strand
gaacgaguagauuauaagu

SEQ ID NO: 1266260 - RNA, 19 nt, Homo sapiens
  misc_RNA (1)...(19): siRNA sense strand
gugaggagccaccaacauu

SEQ ID NO: 1266261 - RNA, 19 nt, Homo sapiens
  misc_RNA (1)...(19): siRNA sense strand
gauggcagcgacacaauug

SEQ ID NO: 1266262 - RNA, 19 nt, Homo sapiens
  misc_RNA (1)...(19): siRNA sense strand
gcuauggagcucauuggua

SEQ ID NO: 1266263 - RNA, 19 nt, Homo sapiens
  misc_RNA (1)...(19): siRNA sense strand
gaggagccaccaacauuug

SEQ ID NO: 1266264 - RNA, 19 nt, Homo sapiens
  misc_RNA (1)...(19): siRNA sense strand
acacaccuuuagugaagua

SEQ ID NO: 1266265 - RNA, 19 nt, Homo sapiens
  misc_RNA (1)...(19): siRNA sense strand
ucucagaugacgccuguua

SEQ ID NO: 1266266 - RNA, 19 nt, Homo sapiens
  misc_RNA (1)...(19): siRNA sense strand
uagagaaacauguccauau

SEQ ID NO: 1266267 - RNA, 19 nt, Homo sapiens
  misc_RNA (1)...(19): siRNA sense strand
guuccaaagugucuuaaag

SEQ ID NO: 1266268 - RNA, 19 nt, Homo sapiens
  misc_RNA (1)...(19): siRNA sense strand
ggugaacgaguagauuaua

SEQ ID NO: 1266269 - RNA, 19 nt, Homo sapiens
  misc_RNA (1)...(19): siRNA sense strand
gaaguagaaguauuugagu

SEQ ID NO: 1266270 - RNA, 19 nt, Homo sapiens
  misc_RNA (1)...(19): siRNA sense strand
gaaacauguccauauauac

SEQ ID NO: 1266271 - RNA, 19 nt, Homo sapiens
  misc_RNA (1)...(19): siRNA sense strand
ugacgccuguuauagagaa

SEQ ID NO: 1266272 - RNA, 19 nt, Homo sapiens
  misc_RNA (1)...(19): siRNA sense strand
cgaguagauuauaagugua

SEQ ID NO: 1266273 - RNA, 19 nt, Homo sapiens
  misc_RNA (1)...(19): siRNA sense strand
gcacuuuauuuguaaugag

SEQ ID NO: 1266274 - RNA, 19 nt, Homo sapiens
  misc_RNA (1)...(19): siRNA sense strand
guagaaguauuugaguauc

SEQ ID NO: 1266275 - RNA, 19 nt, Homo sapiens
  misc_RNA (1)...(19): siRNA sense strand
guauuugaguaucuugaug

SEQ ID NO: 1266276 - RNA, 19 nt, Homo sapiens
  misc_RNA (1)...(19): siRNA sense strand
aggaauacuugacaguuug

SEQ ID NO: 1266277 - RNA, 19 nt, Homo sapiens
  misc_RNA (1)...(19): siRNA sense strand
ccaaaacccuacuaugaga

SEQ ID NO: 1266278 - RNA, 19 nt, Homo sapiens
  misc_RNA (1)...(19): siRNA sense strand
aguguaaaguggucaaaug

SEQ ID NO: 1266279 - RNA, 19 nt, Homo sapiens
  misc_RNA (1)...(19): siRNA sense strand
ccacccauacuauuuguga

SEQ ID NO: 1266280 - RNA, 19 nt, Homo sapiens
  misc_RNA (1)...(19): siRNA sense strand
caccaacauuugaagcuau

SEQ ID NO: 1266281 - RNA, 19 nt, Homo sapiens
  misc_RNA (1)...(19): siRNA sense strand
uuggagagagcacgauuua

SEQ ID NO: 1266282 - RNA, 19 nt, Homo sapiens
  misc_RNA (1)...(19): siRNA sense strand
gguuaucagaugcacuuua

SEQ ID NO: 1266283 - RNA, 19 nt, Homo sapiens
  misc_RNA (1)...(19): siRNA sense strand
ugaggagccaccaacauuu

SEQ ID NO: 1266284 - RNA, 19 nt, Homo sapiens
  misc_RNA (1)...(19): siRNA sense strand
ggaaggaauacuugacagu

SEQ ID NO: 1266285 - RNA, 19 nt, Homo sapiens
  misc_RNA (1)...(19): siRNA sense strand
gaggaaggaauacuugaca

SEQ ID NO: 1266286 - RNA, 19 nt, Homo sapiens
  misc_RNA (1)...(19): siRNA sense strand
ccaguuccaaagugucuua

SEQ ID NO: 1266287 - RNA, 19 nt, Homo sapiens
  misc_RNA (1)...(19): siRNA sense strand
ugaguaucuugaugcagua

SEQ ID NO: 1266288 - RNA, 19 nt, Homo sapiens
  misc_RNA (1)...(19): siRNA sense strand
caccuuuagugaaguagaa

SEQ ID NO: 1266289 - RNA, 19 nt, Homo sapiens
  misc_RNA (1)...(19): siRNA sense strand
acagauaucaggauuugga

SEQ ID NO: 1266290 - RNA, 19 nt, Homo sapiens
  misc_RNA (1)...(19): siRNA sense strand
ucauugcugugauuguuau

SEQ ID NO: 1266291 - RNA, 19 nt, Homo sapiens
  misc_RNA (1)...(19): siRNA sense strand
ucagaugcacuuuauuugu

SEQ ID NO: 1266292 - RNA, 19 nt, Homo sapiens
  misc_RNA (1)...(19): siRNA sense strand
gugcugcuccagaguguaa

SEQ ID NO: 1266293 - RNA, 19 nt, Homo sapiens
  misc_RNA (1)...(19): siRNA sense strand
ggaaaacacaccuuuagug

SEQ ID NO: 1266294 - RNA, 19 nt, Homo sapiens
  misc_RNA (1)...(19): siRNA sense strand
aaggaucaguagcaauuug

SEQ ID NO: 1266295 - RNA, 19 nt, Homo sapiens
  misc_RNA (1)...(19): siRNA sense strand
uauauacgggauccuuuaa

SEQ ID NO: 1266296 - RNA, 19 nt, Homo sapiens
  misc_RNA (1)...(19): siRNA sense strand
ugaaguagaaguauuugag

SEQ ID NO: 1266297 - RNA, 19 nt, Homo sapiens
  misc_RNA (1)...(19): siRNA sense strand
cuugacaguuuggauguuu

SEQ ID NO: 1266298 - RNA, 19 nt, Homo sapiens
  misc_RNA (1)...(19): siRNA sense strand
cauauauacgggauccuuu

SEQ ID NO: 1266299 - RNA, 19 nt, Homo sapiens
  misc_RNA (1)...(19): siRNA sense strand
auauauacgggauccuuua

SEQ ID NO: 1266300 - RNA, 19 nt, Homo sapiens
  misc_RNA (1)...(19): siRNA sense strand
cuuaaaggaucaguagcaa

SEQ ID NO: 1266301 - RNA, 19 nt, Homo sapiens
  misc_RNA (1)...(19): siRNA sense strand
uaaaccugaggaaggaaua

SEQ ID NO: 1266302 - RNA, 19 nt, Homo sapiens
  misc_RNA (1)...(19): siRNA sense strand
agaugacgccuguuauaga

SEQ ID NO: 1266303 - RNA, 19 nt, Homo sapiens
  misc_RNA (1)...(19): siRNA sense strand
ugugauuguuauugccaua

SEQ ID NO: 1266304 - RNA, 19 nt, Homo sapiens
  misc_RNA (1)...(19): siRNA sense strand
gagagcacgauuuauugug

SEQ ID NO: 1266305 - RNA, 19 nt, Homo sapiens
  misc_RNA (1)...(19): siRNA sense strand
gaaguauuugaguaucuug

SEQ ID NO: 1266306 - RNA, 19 nt, Homo sapiens
  misc_RNA (1)...(19): siRNA sense strand
ggcuaccugucucagauga

SEQ ID NO: 1266307 - RNA, 19 nt, Homo sapiens
  misc_RNA (1)...(19): siRNA sense strand
gauaucaggauuuggaaaa

SEQ ID NO: 1266308 - RNA, 19 nt, Homo sapiens
  misc_RNA (1)...(19): siRNA sense strand
ccucuugccacccauacua

SEQ ID NO: 1266309 - RNA, 19 nt, Homo sapiens
  misc_RNA (1)...(19): siRNA sense strand
ccaugguguugcugcugua

SEQ ID NO: 1266310 - RNA, 19 nt, Homo sapiens
  misc_RNA (1)...(19): siRNA sense strand
cagaugacgccuguuauag

SEQ ID NO: 1266311 - RNA, 19 nt, Homo sapiens
  misc_RNA (1)...(19): siRNA sense strand
uuggugaacgaguagauua

SEQ ID NO: 1266312 - RNA, 19 nt, Homo sapiens
  misc_RNA (1)...(19): siRNA sense strand
gucauugcugugauuguua

SEQ ID NO: 1266313 - RNA, 19 nt, Homo sapiens
  misc_RNA (1)...(19): siRNA sense strand
ggagccaccaacauuugaa

SEQ ID NO: 1266314 - RNA, 19 nt, Homo sapiens
  misc_RNA (1)...(19): siRNA sense strand
gcgcuuuccuggguugcuu

SEQ ID NO: 1266315 - RNA, 19 nt, Homo sapiens
  misc_RNA (1)...(19): siRNA sense strand
uacuacaaagcaacaguua

SEQ ID NO: 1266316 - RNA, 19 nt, Homo sapiens
  misc_RNA (1)...(19): siRNA sense strand
cuugaugcaguaacuuaua

SEQ ID NO: 1266317 - RNA, 19 nt, Homo sapiens
  misc_RNA (1)...(19): siRNA sense strand
aaacauguccauauauacg

SEQ ID NO: 1266318 - RNA, 19 nt, Homo sapiens
  misc_RNA (1)...(19): siRNA sense strand
guguaaaguggucaaaugu

SEQ ID NO: 1266319 - RNA, 19 nt, Homo sapiens
  misc_RNA (1)...(19): siRNA sense strand
cuuacgaguuugguuauca

SEQ ID NO: 1266320 - RNA, 19 nt, Homo sapiens
  misc_RNA (1)...(19): siRNA sense strand
uacgggauccuuuaaaugg

SEQ ID NO: 1266321 - RNA, 19 nt, Homo sapiens
  misc_RNA (1)...(19): siRNA sense strand
aaccaaaacccuacuauga

SEQ ID NO: 1266322 - RNA, 19 nt, Homo sapiens
  misc_RNA (1)...(19): siRNA sense strand
cccaauaugugaaaagguu

SEQ ID NO: 1266323 - RNA, 19 nt, Homo sapiens
  misc_RNA (1)...(19): siRNA sense strand
cgauggcagcgacacaauu

SEQ ID NO: 1266324 - RNA, 19 nt, Homo sapiens
  misc_RNA (1)...(19): siRNA sense strand
gauccauuuucacuuauug

SEQ ID NO: 1266325 - RNA, 19 nt, Homo sapiens
  misc_RNA (1)...(19): siRNA sense strand
uugaugcaguaacuuauag

SEQ ID NO: 1266326 - RNA, 19 nt, Homo sapiens
  misc_RNA (1)...(19): siRNA sense strand
guaucuugaugcaguaacu

SEQ ID NO: 1266327 - RNA, 19 nt, Homo sapiens
  misc_RNA (1)...(19): siRNA sense strand
caacauuugaagcuaugga

SEQ ID NO: 1266328 - RNA, 19 nt, Homo sapiens
  misc_RNA (1)...(19): siRNA sense strand
gagauuggugaacgaguag

SEQ ID NO: 1266329 - RNA, 19 nt, Homo sapiens
  misc_RNA (1)...(19): siRNA sense strand
ggagagagcacgauuuauu

SEQ ID NO: 1266330 - RNA, 19 nt, Homo sapiens
  misc_RNA (1)...(19): siRNA sense strand
agagaaacauguccauaua

SEQ ID NO: 1266331 - RNA, 19 nt, Homo sapiens
  misc_RNA (1)...(19): siRNA sense strand
cagaugcacuuuauuugua

SEQ ID NO: 1266332 - RNA, 19 nt, Homo sapiens
  misc_RNA (1)...(19): siRNA sense strand
ggacuuacgaguuugguua

SEQ ID NO: 1266333 - RNA, 19 nt, Homo sapiens
  misc_RNA (1)...(19): siRNA sense strand
aaacagauaucaggauuug

SEQ ID NO: 1266334 - RNA, 19 nt, Homo sapiens
  misc_RNA (1)...(19): siRNA sense strand
cuauggagcucauugguaa

SEQ ID NO: 1266335 - RNA, 19 nt, Homo sapiens
  misc_RNA (1)...(19): siRNA sense strand
aaacacaccuuuagugaag

SEQ ID NO: 1266336 - RNA, 19 nt, Homo sapiens
  misc_RNA (1)...(19): siRNA sense strand
gaacuuaaaggaucaguag

SEQ ID NO: 1266337 - RNA, 19 nt, Homo sapiens
  misc_RNA (1)...(19): siRNA sense strand
gaaaacagauaucaggauu

SEQ ID NO: 1266338 - RNA, 19 nt, Homo sapiens
  misc_RNA (1)...(19): siRNA sense strand
uaaaggaucaguagcaauu

SEQ ID NO: 1266339 - RNA, 19 nt, Homo sapiens
  misc_RNA (1)...(19): siRNA sense strand
aaaugggacuuacgaguuu

SEQ ID NO: 1266340 - RNA, 19 nt, Homo sapiens
  misc_RNA (1)...(19): siRNA sense strand
guuaucagaugcacuuuau

SEQ ID NO: 1266341 - RNA, 19 nt, Homo sapiens
  misc_RNA (1)...(19): siRNA sense strand
gagcugaauaugccacuua

SEQ ID NO: 1266342 - RNA, 19 nt, Homo sapiens
  misc_RNA (1)...(19): siRNA sense strand
ugagauuggugaacgagua

SEQ ID NO: 1266343 - RNA, 19 nt, Homo sapiens
  misc_RNA (1)...(19): siRNA sense strand
gugaacgaguagauuauaa

SEQ ID NO: 1266344 - RNA, 19 nt, Homo sapiens
  misc_RNA (1)...(19): siRNA sense strand
gagagagcacgauuuauug

SEQ ID NO: 1266345 - RNA, 19 nt, Homo sapiens
  misc_RNA (1)...(19): siRNA sense strand
caaaugggacuuacgaguu

SEQ ID NO: 1266346 - RNA, 19 nt, Homo sapiens
  misc_RNA (1)...(19): siRNA sense strand
ggucauugcugugauuguu

SEQ ID NO: 1266347 - RNA, 19 nt, Homo sapiens
  misc_RNA (1)...(19): siRNA sense strand
ccagauccauuuucacuua

SEQ ID NO: 1266348 - RNA, 19 nt, Homo sapiens
  misc_RNA (1)...(19): siRNA sense strand
gaaggaauacuugacaguu

SEQ ID NO: 1266349 - RNA, 19 nt, Homo sapiens
  misc_RNA (1)...(19): siRNA sense strand
aaggaauacuugacaguuu

SEQ ID NO: 1266350 - RNA, 19 nt, Homo sapiens
  misc_RNA (1)...(19): siRNA sense strand
ucagaugacgccuguuaua

SEQ ID NO: 1266351 - RNA, 19 nt, Homo sapiens
  misc_RNA (1)...(19): siRNA sense strand
gaaaacacaccuuuaguga

SEQ ID NO: 1266352 - RNA, 19 nt, Homo sapiens
  misc_RNA (1)...(19): siRNA sense strand
gaugacgccuguuauagag

SEQ ID NO: 1266353 - RNA, 19 nt, Homo sapiens
  misc_RNA (1)...(19): siRNA sense strand
gagaaacauguccauauau

SEQ ID NO: 1266354 - RNA, 19 nt, Homo sapiens
  misc_RNA (1)...(19): siRNA sense strand
ccacuuaccagacuaaauc

SEQ ID NO: 1266355 - RNA, 19 nt, Homo sapiens
  misc_RNA (1)...(19): siRNA sense strand
acgaguagauuauaagugu

SEQ ID NO: 1266356 - RNA, 19 nt, Homo sapiens
  misc_RNA (1)...(19): siRNA sense strand
cuacaaagcaacaguuaug

SEQ ID NO: 1266357 - RNA, 19 nt, Homo sapiens
  misc_RNA (1)...(19): siRNA sense strand
ccaccaacauuugaagcua

SEQ ID NO: 1266358 - RNA, 19 nt, Homo sapiens
  misc_RNA (1)...(19): siRNA sense strand
uauacgggauccuuuaaau

SEQ ID NO: 1266359 - RNA, 19 nt, Homo sapiens
  misc_RNA (1)...(19): siRNA sense strand
cgaguuugguuaucagaug

SEQ ID NO: 1266360 - RNA, 19 nt, Homo sapiens
  misc_RNA (1)...(19): siRNA sense strand
gaacgaguagauuauaagu

SEQ ID NO: 1266361 - RNA, 19 nt, Homo sapiens
  misc_RNA (1)...(19): siRNA sense strand
gugaggagccaccaacauu

SEQ ID NO: 1266362 - RNA, 19 nt, Homo sapiens
  misc_RNA (1)...(19): siRNA sense strand
gauggcagcgacacaauug

SEQ ID NO: 1266363 - RNA, 19 nt, Homo sapiens
  misc_RNA (1)...(19): siRNA sense strand
ucucagaugacgccuguua

SEQ ID NO: 1266364 - RNA, 19 nt, Homo sapiens
  misc_RNA (1)...(19): siRNA sense strand
gaggagccaccaacauuug

SEQ ID NO: 1266365 - RNA, 19 nt, Homo sapiens
  misc_RNA (1)...(19): siRNA sense strand
gcuauggagcucauuggua

SEQ ID NO: 1266366 - RNA, 19 nt, Homo sapiens
  misc_RNA (1)...(19): siRNA sense strand
acacaccuuuagugaagua

SEQ ID NO: 1266367 - RNA, 19 nt, Homo sapiens
  misc_RNA (1)...(19): siRNA sense strand
uagagaaacauguccauau

SEQ ID NO: 1266368 - RNA, 19 nt, Homo sapiens
  misc_RNA (1)...(19): siRNA sense strand
ggugaacgaguagauuaua

SEQ ID NO: 1266369 - RNA, 19 nt, Homo sapiens
  misc_RNA (1)...(19): siRNA sense strand
gaaguagaaguauuugagu

SEQ ID NO: 1266370 - RNA, 19 nt, Homo sapiens
  misc_RNA (1)...(19): siRNA sense strand
gaaacauguccauauauac

SEQ ID NO: 1266371 - RNA, 19 nt, Homo sapiens
  misc_RNA (1)...(19): siRNA sense strand
ugacgccuguuauagagaa

SEQ ID NO: 1266372 - RNA, 19 nt, Homo sapiens
  misc_RNA (1)...(19): siRNA sense strand
cgaguagauuauaagugua

SEQ ID NO: 1266373 - RNA, 19 nt, Homo sapiens
  misc_RNA (1)...(19): siRNA sense strand
gcacuuuauuuguaaugag

SEQ ID NO: 1266374 - RNA, 19 nt, Homo sapiens
  misc_RNA (1)...(19): siRNA sense strand
guagaaguauuugaguauc

SEQ ID NO: 1266375 - RNA, 19 nt, Homo sapiens
  misc_RNA (1)...(19): siRNA sense strand
guauuugaguaucuugaug

SEQ ID NO: 1266376 - RNA, 19 nt, Homo sapiens
  misc_RNA (1)...(19): siRNA sense strand
aggaauacuugacaguuug

SEQ ID NO: 1266377 - RNA, 19 nt, Homo sapiens
  misc_RNA (1)...(19): siRNA sense strand
ccaaaacccuacuaugaga

SEQ ID NO: 1266378 - RNA, 19 nt, Homo sapiens
  misc_RNA (1)...(19): siRNA sense strand
aguguaaaguggucaaaug

SEQ ID NO: 1266379 - RNA, 19 nt, Homo sapiens
  misc_RNA (1)...(19): siRNA sense strand
ccacccauacuauuuguga

SEQ ID NO: 1266380 - RNA, 19 nt, Homo sapiens
  misc_RNA (1)...(19): siRNA sense strand
uuggagagagcacgauuua

SEQ ID NO: 1266381 - RNA, 19 nt, Homo sapiens
  misc_RNA (1)...(19): siRNA sense strand
gguuaucagaugcacuuua

SEQ ID NO: 1266382 - RNA, 19 nt, Homo sapiens
  misc_RNA (1)...(19): siRNA sense strand
caccaacauuugaagcuau

SEQ ID NO: 1266383 - RNA, 19 nt, Homo sapiens
  misc_RNA (1)...(19): siRNA sense strand
ugaggagccaccaacauuu

SEQ ID NO: 1266384 - RNA, 19 nt, Homo sapiens
  misc_RNA (1)...(19): siRNA sense strand
ggaaggaauacuugacagu

SEQ ID NO: 1266385 - RNA, 19 nt, Homo sapiens
  misc_RNA (1)...(19): siRNA sense strand
gaggaaggaauacuugaca

SEQ ID NO: 1266386 - RNA, 19 nt, Homo sapiens
  misc_RNA (1)...(19): siRNA sense strand
ugaguaucuugaugcagua

SEQ ID NO: 1266387 - RNA, 19 nt, Homo sapiens
  misc_RNA (1)...(19): siRNA sense strand
caccuuuagugaaguagaa

SEQ ID NO: 1266388 - RNA, 19 nt, Homo sapiens
  misc_RNA (1)...(19): siRNA sense strand
acagauaucaggauuugga

SEQ ID NO: 1266389 - RNA, 19 nt, Homo sapiens
  misc_RNA (1)...(19): siRNA sense strand
ucauugcugugauuguuau

SEQ ID NO: 1266390 - RNA, 19 nt, Homo sapiens
  misc_RNA (1)...(19): siRNA sense strand
ucagaugcacuuuauuugu

SEQ ID NO: 1266391 - RNA, 19 nt, Homo sapiens
  misc_RNA (1)...(19): siRNA sense strand
gugcugcuccagaguguaa

SEQ ID NO: 1266392 - RNA, 19 nt, Homo sapiens
  misc_RNA (1)...(19): siRNA sense strand
ggaaaacacaccuuuagug

SEQ ID NO: 1266393 - RNA, 19 nt, Homo sapiens
  misc_RNA (1)...(19): siRNA sense strand
aaggaucaguagcaauuug

SEQ ID NO: 1266394 - RNA, 19 nt, Homo sapiens
  misc_RNA (1)...(19): siRNA sense strand
uauauacgggauccuuuaa

SEQ ID NO: 1266395 - RNA, 19 nt, Homo sapiens
  misc_RNA (1)...(19): siRNA sense strand
ugaaguagaaguauuugag

SEQ ID NO: 1266396 - RNA, 19 nt, Homo sapiens
  misc_RNA (1)...(19): siRNA sense strand
cuugacaguuuggauguuu

SEQ ID NO: 1266397 - RNA, 19 nt, Homo sapiens
  misc_RNA (1)...(19): siRNA sense strand
cauauauacgggauccuuu

SEQ ID NO: 1266398 - RNA, 19 nt, Homo sapiens
  misc_RNA (1)...(19): siRNA sense strand
auauauacgggauccuuua

SEQ ID NO: 1266399 - RNA, 19 nt, Homo sapiens
  misc_RNA (1)...(19): siRNA sense strand
cuuaaaggaucaguagcaa

SEQ ID NO: 1266400 - RNA, 19 nt, Homo sapiens
  misc_RNA (1)...(19): siRNA sense strand
uaaaccugaggaaggaaua

SEQ ID NO: 1266401 - RNA, 19 nt, Homo sapiens
  misc_RNA (1)...(19): siRNA sense strand
agaugacgccuguuauaga

SEQ ID NO: 1266402 - RNA, 19 nt, Homo sapiens
  misc_RNA (1)...(19): siRNA sense strand
ugugauuguuauugccaua

SEQ ID NO: 1266403 - RNA, 19 nt, Homo sapiens
  misc_RNA (1)...(19): siRNA sense strand
gagagcacgauuuauugug

SEQ ID NO: 1266404 - RNA, 19 nt, Homo sapiens
  misc_RNA (1)...(19): siRNA sense strand
gaaguauuugaguaucuug

SEQ ID NO: 1266405 - RNA, 19 nt, Homo sapiens
  misc_RNA (1)...(19): siRNA sense strand
ggcuaccugucucagauga

SEQ ID NO: 1266406 - RNA, 19 nt, Homo sapiens
  misc_RNA (1)...(19): siRNA sense strand
gauaucaggauuuggaaaa

SEQ ID NO: 1266407 - RNA, 19 nt, Homo sapiens
  misc_RNA (1)...(19): siRNA sense strand
ccucuugccacccauacua

SEQ ID NO: 1266408 - RNA, 19 nt, Homo sapiens
  misc_RNA (1)...(19): siRNA sense strand
ccaugguguugcugcugua

SEQ ID NO: 1266409 - RNA, 19 nt, Homo sapiens
  misc_RNA (1)...(19): siRNA sense strand
cagaugacgccuguuauag

SEQ ID NO: 1266410 - RNA, 19 nt, Homo sapiens
  misc_RNA (1)...(19): siRNA sense strand
cagaugguggagcugaaua

SEQ ID NO: 1266411 - RNA, 19 nt, Homo sapiens
  misc_RNA (1)...(19): siRNA sense strand
uuggugaacgaguagauua

SEQ ID NO: 1266412 - RNA, 19 nt, Homo sapiens
  misc_RNA (1)...(19): siRNA sense strand
gucauugcugugauuguua

SEQ ID NO: 1266413 - RNA, 19 nt, Homo sapiens
  misc_RNA (1)...(19): siRNA sense strand
ggagccaccaacauuugaa

SEQ ID NO: 1266414 - RNA, 19 nt, Homo sapiens
  misc_RNA (1)...(19): siRNA sense strand
gcgcuuuccuggguugcuu

SEQ ID NO: 1266415 - RNA, 19 nt, Homo sapiens
  misc_RNA (1)...(19): siRNA sense strand
uacuacaaagcaacaguua

SEQ ID NO: 1266416 - RNA, 19 nt, Homo sapiens
  misc_RNA (1)...(19): siRNA sense strand
cuugaugcaguaacuuaua

SEQ ID NO: 1266417 - RNA, 19 nt, Homo sapiens
  misc_RNA (1)...(19): siRNA sense strand
aaacauguccauauauacg

SEQ ID NO: 1266418 - RNA, 19 nt, Homo sapiens
  misc_RNA (1)...(19): siRNA sense strand
guguaaaguggucaaaugu

SEQ ID NO: 1266419 - RNA, 19 nt, Homo sapiens
  misc_RNA (1)...(19): siRNA sense strand
cuuacgaguuugguuauca

SEQ ID NO: 1266420 - RNA, 19 nt, Homo sapiens
  misc_RNA (1)...(19): siRNA sense strand
uacgggauccuuuaaaugg

SEQ ID NO: 1266421 - RNA, 19 nt, Homo sapiens
  misc_RNA (1)...(19): siRNA sense strand
gcagaugguggagcugaau

SEQ ID NO: 1266422 - RNA, 19 nt, Homo sapiens
  misc_RNA (1)...(19): siRNA sense strand
aaccaaaacccuacuauga

SEQ ID NO: 1266423 - RNA, 19 nt, Homo sapiens
  misc_RNA (1)...(19): siRNA sense strand
cccaauaugugaaaagguu

SEQ ID NO: 1266424 - RNA, 19 nt, Homo sapiens
  misc_RNA (1)...(19): siRNA sense strand
ggagcugaauaugccacuu

SEQ ID NO: 1266425 - RNA, 19 nt, Homo sapiens
  misc_RNA (1)...(19): siRNA sense strand
cgauggcagcgacacaauu

SEQ ID NO: 1266426 - RNA, 19 nt, Homo sapiens
  misc_RNA (1)...(19): siRNA sense strand
gauccauuuucacuuauug

SEQ ID NO: 1266427 - RNA, 19 nt, Homo sapiens
  misc_RNA (1)...(19): siRNA sense strand
uugaugcaguaacuuauag

SEQ ID NO: 1266428 - RNA, 19 nt, Homo sapiens
  misc_RNA (1)...(19): siRNA sense strand
guaucuugaugcaguaacu

SEQ ID NO: 1266429 - RNA, 19 nt, Homo sapiens
  misc_RNA (1)...(19): siRNA sense strand
ggagagagcacgauuuauu

SEQ ID NO: 1266430 - RNA, 19 nt, Homo sapiens
  misc_RNA (1)...(19): siRNA sense strand
agagaaacauguccauaua

SEQ ID NO: 1266431 - RNA, 19 nt, Homo sapiens
  misc_RNA (1)...(19): siRNA sense strand
cagaugcacuuuauuugua

SEQ ID NO: 1266432 - RNA, 19 nt, Homo sapiens
  misc_RNA (1)...(19): siRNA sense strand
ggacuuacgaguuugguua

SEQ ID NO: 1266433 - RNA, 19 nt, Homo sapiens
  misc_RNA (1)...(19): siRNA sense strand
aaacagauaucaggauuug

SEQ ID NO: 1266434 - RNA, 19 nt, Homo sapiens
  misc_RNA (1)...(19): siRNA sense strand
cuauggagcucauugguaa

SEQ ID NO: 1266435 - RNA, 19 nt, Homo sapiens
  misc_RNA (1)...(19): siRNA sense strand
aaacacaccuuuagugaag

SEQ ID NO: 1266436 - RNA, 19 nt, Homo sapiens
  misc_RNA (1)...(19): siRNA sense strand
gaacuuaaaggaucaguag

SEQ ID NO: 1266437 - RNA, 19 nt, Homo sapiens
  misc_RNA (1)...(19): siRNA sense strand
gaaaacagauaucaggauu

SEQ ID NO: 1266438 - RNA, 19 nt, Homo sapiens
  misc_RNA (1)...(19): siRNA sense strand
uaaaggaucaguagcaauu

SEQ ID NO: 1266439 - RNA, 19 nt, Homo sapiens
  misc_RNA (1)...(19): siRNA sense strand
aaaugggacuuacgaguuu

SEQ ID NO: 1266440 - RNA, 19 nt, Homo sapiens
  misc_RNA (1)...(19): siRNA sense strand
guuaucagaugcacuuuau

SEQ ID NO: 1266441 - RNA, 19 nt, Homo sapiens
  misc_RNA (1)...(19): siRNA sense strand
gagcugaauaugccacuua

SEQ ID NO: 1266442 - RNA, 19 nt, Homo sapiens
  misc_RNA (1)...(19): siRNA sense strand
gagcagagaggcugaauag

SEQ ID NO: 1266443 - RNA, 19 nt, Homo sapiens
  misc_RNA (1)...(19): siRNA sense strand
ugagauuggugaacgagua

SEQ ID NO: 1266444 - RNA, 19 nt, Homo sapiens
  misc_RNA (1)...(19): siRNA sense strand
gugaacgaguagauuauaa

SEQ ID NO: 1266445 - RNA, 19 nt, Homo sapiens
  misc_RNA (1)...(19): siRNA sense strand
gagagagcacgauuuauug

SEQ ID NO: 1266446 - RNA, 19 nt, Homo sapiens
  misc_RNA (1)...(19): siRNA sense strand
caaaugggacuuacgaguu

SEQ ID NO: 1266447 - RNA, 19 nt, Homo sapiens
  misc_RNA (1)...(19): siRNA sense strand
ggucauugcugugauuguu

SEQ ID NO: 1266448 - RNA, 19 nt, Homo sapiens
  misc_RNA (1)...(19): siRNA sense strand
ccagauccauuuucacuua

SEQ ID NO: 1266449 - RNA, 19 nt, Homo sapiens
  misc_RNA (1)...(19): siRNA sense strand
gaaggaauacuugacaguu

SEQ ID NO: 1266450 - RNA, 19 nt, Homo sapiens
  misc_RNA (1)...(19): siRNA sense strand
aaggaauacuugacaguuu

SEQ ID NO: 1266451 - RNA, 19 nt, Homo sapiens
  misc_RNA (1)...(19): siRNA sense strand
ucagaugacgccuguuaua

SEQ ID NO: 1266452 - RNA, 19 nt, Homo sapiens
  misc_RNA (1)...(19): siRNA sense strand
gaaaacacaccuuuaguga

SEQ ID NO: 1266453 - RNA, 19 nt, Homo sapiens
  misc_RNA (1)...(19): siRNA sense strand
gaugacgccuguuauagag

SEQ ID NO: 1266454 - RNA, 19 nt, Homo sapiens
  misc_RNA (1)...(19): siRNA sense strand
gagaaacauguccauauau

SEQ ID NO: 1266455 - RNA, 19 nt, Homo sapiens
  misc_RNA (1)...(19): siRNA sense strand
ccacuuaccagacuaaauc

SEQ ID NO: 1266456 - RNA, 19 nt, Homo sapiens
  misc_RNA (1)...(19): siRNA sense strand
acgaguagauuauaagugu

SEQ ID NO: 1266457 - RNA, 19 nt, Homo sapiens
  misc_RNA (1)...(19): siRNA sense strand
cuacaaagcaacaguuaug

SEQ ID NO: 1266458 - RNA, 19 nt, Homo sapiens
  misc_RNA (1)...(19): siRNA sense strand
ccaccaacauuugaagcua

SEQ ID NO: 1266459 - RNA, 19 nt, Homo sapiens
  misc_RNA (1)...(19): siRNA sense strand
uauacgggauccuuuaaau

SEQ ID NO: 1266460 - RNA, 19 nt, Homo sapiens
  misc_RNA (1)...(19): siRNA sense strand
cgaguuugguuaucagaug

SEQ ID NO: 1266461 - RNA, 19 nt, Homo sapiens
  misc_RNA (1)...(19): siRNA sense strand
gaacgaguagauuauaagu

SEQ ID NO: 1266462 - RNA, 19 nt, Homo sapiens
  misc_RNA (1)...(19): siRNA sense strand
gugaggagccaccaacauu

SEQ ID NO: 1266463 - RNA, 19 nt, Homo sapiens
  misc_RNA (1)...(19): siRNA sense strand
gauggcagcgacacaauug

SEQ ID NO: 1266464 - RNA, 19 nt, Homo sapiens
  misc_RNA (1)...(19): siRNA sense strand
ucucagaugacgccuguua

SEQ ID NO: 1266465 - RNA, 19 nt, Homo sapiens
  misc_RNA (1)...(19): siRNA sense strand
acacaccuuuagugaagua

SEQ ID NO: 1266466 - RNA, 19 nt, Homo sapiens
  misc_RNA (1)...(19): siRNA sense strand
gcuauggagcucauuggua

SEQ ID NO: 1266467 - RNA, 19 nt, Homo sapiens
  misc_RNA (1)...(19): siRNA sense strand
gaggagccaccaacauuug

SEQ ID NO: 1266468 - RNA, 19 nt, Homo sapiens
  misc_RNA (1)...(19): siRNA sense strand
uagagaaacauguccauau

SEQ ID NO: 1266469 - RNA, 19 nt, Homo sapiens
  misc_RNA (1)...(19): siRNA sense strand
guuccaaagugucuuaaag

SEQ ID NO: 1266470 - RNA, 19 nt, Homo sapiens
  misc_RNA (1)...(19): siRNA sense strand
ggugaacgaguagauuaua

SEQ ID NO: 1266471 - RNA, 19 nt, Homo sapiens
  misc_RNA (1)...(19): siRNA sense strand
gaaguagaaguauuugagu

SEQ ID NO: 1266472 - RNA, 19 nt, Homo sapiens
  misc_RNA (1)...(19): siRNA sense strand
gaaacauguccauauauac

SEQ ID NO: 1266473 - RNA, 19 nt, Homo sapiens
  misc_RNA (1)...(19): siRNA sense strand
ugacgccuguuauagagaa

SEQ ID NO: 1266474 - RNA, 19 nt, Homo sapiens
  misc_RNA (1)...(19): siRNA sense strand
cgaguagauuauaagugua

SEQ ID NO: 1266475 - RNA, 19 nt, Homo sapiens
  misc_RNA (1)...(19): siRNA sense strand
gcacuuuauuuguaaugag

SEQ ID NO: 1266476 - RNA, 19 nt, Homo sapiens
  misc_RNA (1)...(19): siRNA sense strand
guagaaguauuugaguauc

SEQ ID NO: 1266477 - RNA, 19 nt, Homo sapiens
  misc_RNA (1)...(19): siRNA sense strand
guauuugaguaucuugaug

SEQ ID NO: 1266478 - RNA, 19 nt, Homo sapiens
  misc_RNA (1)...(19): siRNA sense strand
aggaauacuugacaguuug

SEQ ID NO: 1266479 - RNA, 19 nt, Homo sapiens
  misc_RNA (1)...(19): siRNA sense strand
ccaaaacccuacuaugaga

SEQ ID NO: 1266480 - RNA, 19 nt, Homo sapiens
  misc_RNA (1)...(19): siRNA sense strand
aguguaaaguggucaaaug

SEQ ID NO: 1266481 - RNA, 19 nt, Homo sapiens
  misc_RNA (1)...(19): siRNA sense strand
ccacccauacuauuuguga

SEQ ID NO: 1266482 - RNA, 19 nt, Homo sapiens
  misc_RNA (1)...(19): siRNA sense strand
uuggagagagcacgauuua

SEQ ID NO: 1266483 - RNA, 19 nt, Homo sapiens
  misc_RNA (1)...(19): siRNA sense strand
gguuaucagaugcacuuua

SEQ ID NO: 1266484 - RNA, 19 nt, Homo sapiens
  misc_RNA (1)...(19): siRNA sense strand
caccaacauuugaagcuau

SEQ ID NO: 1266485 - RNA, 19 nt, Homo sapiens
  misc_RNA (1)...(19): siRNA sense strand
ugaggagccaccaacauuu

SEQ ID NO: 1266486 - RNA, 19 nt, Homo sapiens
  misc_RNA (1)...(19): siRNA sense strand
ggaaggaauacuugacagu

SEQ ID NO: 1266487 - RNA, 19 nt, Homo sapiens
  misc_RNA (1)...(19): siRNA sense strand
gaggaaggaauacuugaca

SEQ ID NO: 1266488 - RNA, 19 nt, Homo sapiens
  misc_RNA (1)...(19): siRNA sense strand
ccaguuccaaagugucuua

SEQ ID NO: 1266489 - RNA, 19 nt, Homo sapiens
  misc_RNA (1)...(19): siRNA sense strand
ugaguaucuugaugcagua

SEQ ID NO: 1266490 - RNA, 19 nt, Homo sapiens
  misc_RNA (1)...(19): siRNA sense strand
caccuuuagugaaguagaa

SEQ ID NO: 1266491 - RNA, 19 nt, Homo sapiens
  misc_RNA (1)...(19): siRNA sense strand
acagauaucaggauuugga

SEQ ID NO: 1266492 - RNA, 19 nt, Homo sapiens
  misc_RNA (1)...(19): siRNA sense strand
ucauugcugugauuguuau

SEQ ID NO: 1266493 - RNA, 19 nt, Homo sapiens
  misc_RNA (1)...(19): siRNA sense strand
ucagaugcacuuuauuugu

SEQ ID NO: 1266494 - RNA, 19 nt, Homo sapiens
  misc_RNA (1)...(19): siRNA sense strand
gugcugcuccagaguguaa

SEQ ID NO: 1266495 - RNA, 19 nt, Homo sapiens
  misc_RNA (1)...(19): siRNA sense strand
ggaaaacacaccuuuagug

SEQ ID NO: 1266496 - RNA, 19 nt, Homo sapiens
  misc_RNA (1)...(19): siRNA sense strand
aaggaucaguagcaauuug

SEQ ID NO: 1266497 - RNA, 19 nt, Homo sapiens
  misc_RNA (1)...(19): siRNA sense strand
uauauacgggauccuuuaa

SEQ ID NO: 1266498 - RNA, 19 nt, Homo sapiens
  misc_RNA (1)...(19): siRNA sense strand
ugaaguagaaguauuugag

SEQ ID NO: 1266499 - RNA, 19 nt, Homo sapiens
  misc_RNA (1)...(19): siRNA sense strand
cuugacaguuuggauguuu

SEQ ID NO: 1266500 - RNA, 19 nt, Homo sapiens
  misc_RNA (1)...(19): siRNA sense strand
cauauauacgggauccuuu

SEQ ID NO: 1266501 - RNA, 19 nt, Homo sapiens
  misc_RNA (1)...(19): siRNA sense strand
auauauacgggauccuuua

SEQ ID NO: 1266502 - RNA, 19 nt, Homo sapiens
  misc_RNA (1)...(19): siRNA sense strand
cuuaaaggaucaguagcaa

SEQ ID NO: 1266503 - RNA, 19 nt, Homo sapiens
  misc_RNA (1)...(19): siRNA sense strand
uaaaccugaggaaggaaua

SEQ ID NO: 1266504 - RNA, 19 nt, Homo sapiens
  misc_RNA (1)...(19): siRNA sense strand
agaugacgccuguuauaga

SEQ ID NO: 1266505 - RNA, 19 nt, Homo sapiens
  misc_RNA (1)...(19): siRNA sense strand
ugugauuguuauugccaua

SEQ ID NO: 1266506 - RNA, 19 nt, Homo sapiens
  misc_RNA (1)...(19): siRNA sense strand
gagagcacgauuuauugug

SEQ ID NO: 1266507 - RNA, 19 nt, Homo sapiens
  misc_RNA (1)...(19): siRNA sense strand
gaaguauuugaguaucuug

SEQ ID NO: 1266508 - RNA, 19 nt, Homo sapiens
  misc_RNA (1)...(19): siRNA sense strand
ggcuaccugucucagauga

SEQ ID NO: 1266509 - RNA, 19 nt, Homo sapiens
  misc_RNA (1)...(19): siRNA sense strand
ccucuugccacccauacua

SEQ ID NO: 1266510 - RNA, 19 nt, Homo sapiens
  misc_RNA (1)...(19): siRNA sense strand
gauaucaggauuuggaaaa

SEQ ID NO: 1266511 - RNA, 19 nt, Homo sapiens
  misc_RNA (1)...(19): siRNA sense strand
ccaugguguugcugcugua

SEQ ID NO: 1266512 - RNA, 19 nt, Homo sapiens
  misc_RNA (1)...(19): siRNA sense strand
cagaugacgccuguuauag

SEQ ID NO: 1266513 - RNA, 19 nt, Homo sapiens
  misc_RNA (1)...(19): siRNA sense strand
cagaugguggagcugaaua

SEQ ID NO: 1266514 - RNA, 19 nt, Homo sapiens
  misc_RNA (1)...(19): siRNA sense strand
gucauugcugugauuguua

SEQ ID NO: 1266515 - RNA, 19 nt, Homo sapiens
  misc_RNA (1)...(19): siRNA sense strand
uuggugaacgaguagauua

SEQ ID NO: 1266516 - RNA, 19 nt, Homo sapiens
  misc_RNA (1)...(19): siRNA sense strand
ggagccaccaacauuugaa

SEQ ID NO: 1266517 - RNA, 19 nt, Homo sapiens
  misc_RNA (1)...(19): siRNA sense strand
gcgcuuuccuggguugcuu

SEQ ID NO: 1266518 - RNA, 19 nt, Homo sapiens
  misc_RNA (1)...(19): siRNA sense strand
uacuacaaagcaacaguua

SEQ ID NO: 1266519 - RNA, 19 nt, Homo sapiens
  misc_RNA (1)...(19): siRNA sense strand
cuugaugcaguaacuuaua

SEQ ID NO: 1266520 - RNA, 19 nt, Homo sapiens
  misc_RNA (1)...(19): siRNA sense strand
aaacauguccauauauacg

SEQ ID NO: 1266521 - RNA, 19 nt, Homo sapiens
  misc_RNA (1)...(19): siRNA sense strand
guguaaaguggucaaaugu

SEQ ID NO: 1266522 - RNA, 19 nt, Homo sapiens
  misc_RNA (1)...(19): siRNA sense strand
cuuacgaguuugguuauca

SEQ ID NO: 1266523 - RNA, 19 nt, Homo sapiens
  misc_RNA (1)...(19): siRNA sense strand
aaccaaaacccuacuauga

SEQ ID NO: 1266524 - RNA, 19 nt, Homo sapiens
  misc_RNA (1)...(19): siRNA sense strand
gcagaugguggagcugaau

SEQ ID NO: 1266525 - RNA, 19 nt, Homo sapiens
  misc_RNA (1)...(19): siRNA sense strand
uacgggauccuuuaaaugg

SEQ ID NO: 1266526 - RNA, 19 nt, Homo sapiens
  misc_RNA (1)...(19): siRNA sense strand
cgauggcagcgacacaauu

SEQ ID NO: 1266527 - RNA, 19 nt, Homo sapiens
  misc_RNA (1)...(19): siRNA sense strand
ggagcugaauaugccacuu

SEQ ID NO: 1266528 - RNA, 19 nt, Homo sapiens
  misc_RNA (1)...(19): siRNA sense strand
caacauuugaagcuaugga

SEQ ID NO: 1266529 - RNA, 19 nt, Homo sapiens
  misc_RNA (1)...(19): siRNA sense strand
ggagagagcacgauuuauu

SEQ ID NO: 1266530 - RNA, 19 nt, Homo sapiens
  misc_RNA (1)...(19): siRNA sense strand
agagaaacauguccauaua

SEQ ID NO: 1266531 - RNA, 19 nt, Homo sapiens
  misc_RNA (1)...(19): siRNA sense strand
cagaugcacuuuauuugua

SEQ ID NO: 1266532 - RNA, 19 nt, Homo sapiens
  misc_RNA (1)...(19): siRNA sense strand
ggacuuacgaguuugguua

SEQ ID NO: 1266533 - RNA, 19 nt, Homo sapiens
  misc_RNA (1)...(19): siRNA sense strand
aaacagauaucaggauuug

SEQ ID NO: 1266534 - RNA, 19 nt, Homo sapiens
  misc_RNA (1)...(19): siRNA sense strand
cuauggagcucauugguaa

SEQ ID NO: 1266535 - RNA, 19 nt, Homo sapiens
  misc_RNA (1)...(19): siRNA sense strand
aaacacaccuuuagugaag

SEQ ID NO: 1266536 - RNA, 19 nt, Homo sapiens
  misc_RNA (1)...(19): siRNA sense strand
gaacuuaaaggaucaguag

SEQ ID NO: 1266537 - RNA, 19 nt, Homo sapiens
  misc_RNA (1)...(19): siRNA sense strand
gaaaacagauaucaggauu

SEQ ID NO: 1266538 - RNA, 19 nt, Homo sapiens
  misc_RNA (1)...(19): siRNA sense strand
uaaaggaucaguagcaauu

SEQ ID NO: 1266539 - RNA, 19 nt, Homo sapiens
  misc_RNA (1)...(19): siRNA sense strand
aaaugggacuuacgaguuu

SEQ ID NO: 1266540 - RNA, 19 nt, Homo sapiens
  misc_RNA (1)...(19): siRNA sense strand
guuaucagaugcacuuuau

SEQ ID NO: 1266541 - RNA, 19 nt, Homo sapiens
  misc_RNA (1)...(19): siRNA sense strand
ugagauuggugaacgagua

SEQ ID NO: 1266542 - RNA, 19 nt, Homo sapiens
  misc_RNA (1)...(19): siRNA sense strand
gugaacgaguagauuauaa

SEQ ID NO: 1266543 - RNA, 19 nt, Homo sapiens
  misc_RNA (1)...(19): siRNA sense strand
gagagagcacgauuuauug

SEQ ID NO: 1266544 - RNA, 19 nt, Homo sapiens
  misc_RNA (1)...(19): siRNA sense strand
caaaugggacuuacgaguu

SEQ ID NO: 1266545 - RNA, 19 nt, Homo sapiens
  misc_RNA (1)...(19): siRNA sense strand
ggucauugcugugauuguu

SEQ ID NO: 1266546 - RNA, 19 nt, Homo sapiens
  misc_RNA (1)...(19): siRNA sense strand
ccagauccauuuucacuua

SEQ ID NO: 1266547 - RNA, 19 nt, Homo sapiens
  misc_RNA (1)...(19): siRNA sense strand
gaaggaauacuugacaguu

SEQ ID NO: 1266548 - RNA, 19 nt, Homo sapiens
  misc_RNA (1)...(19): siRNA sense strand
aaggaauacuugacaguuu

SEQ ID NO: 1266549 - RNA, 19 nt, Homo sapiens
  misc_RNA (1)...(19): siRNA sense strand
ucagaugacgccuguuaua

SEQ ID NO: 1266550 - RNA, 19 nt, Homo sapiens
  misc_RNA (1)...(19): siRNA sense strand
gaaaacacaccuuuaguga

SEQ ID NO: 1266551 - RNA, 19 nt, Homo sapiens
  misc_RNA (1)...(19): siRNA sense strand
gaugacgccuguuauagag

SEQ ID NO: 1266552 - RNA, 19 nt, Homo sapiens
  misc_RNA (1)...(19): siRNA sense strand
gagaaacauguccauauau

SEQ ID NO: 1266553 - RNA, 19 nt, Homo sapiens
  misc_RNA (1)...(19): siRNA sense strand
acgaguagauuauaagugu

SEQ ID NO: 1266554 - RNA, 19 nt, Homo sapiens
  misc_RNA (1)...(19): siRNA sense strand
cuacaaagcaacaguuaug

SEQ ID NO: 1266555 - RNA, 19 nt, Homo sapiens
  misc_RNA (1)...(19): siRNA sense strand
ccaccaacauuugaagcua

SEQ ID NO: 1266556 - RNA, 19 nt, Homo sapiens
  misc_RNA (1)...(19): siRNA sense strand
uauacgggauccuuuaaau

SEQ ID NO: 1266557 - RNA, 19 nt, Homo sapiens
  misc_RNA (1)...(19): siRNA sense strand
cgaguuugguuaucagaug

SEQ ID NO: 1266558 - RNA, 19 nt, Homo sapiens
  misc_RNA (1)...(19): siRNA sense strand
gaacgaguagauuauaagu

SEQ ID NO: 1266559 - RNA, 19 nt, Homo sapiens
  misc_RNA (1)...(19): siRNA sense strand
gugaggagccaccaacauu

SEQ ID NO: 1266560 - RNA, 19 nt, Homo sapiens
  misc_RNA (1)...(19): siRNA sense strand
gauggcagcgacacaauug

SEQ ID NO: 1266561 - RNA, 19 nt, Homo sapiens
  misc_RNA (1)...(19): siRNA sense strand
gcuauggagcucauuggua

SEQ ID NO: 1266562 - RNA, 19 nt, Homo sapiens
  misc_RNA (1)...(19): siRNA sense strand
gaggagccaccaacauuug

SEQ ID NO: 1266563 - RNA, 19 nt, Homo sapiens
  misc_RNA (1)...(19): siRNA sense strand
acacaccuuuagugaagua

SEQ ID NO: 1266564 - RNA, 19 nt, Homo sapiens
  misc_RNA (1)...(19): siRNA sense strand
ucucagaugacgccuguua

SEQ ID NO: 1266565 - RNA, 19 nt, Homo sapiens
  misc_RNA (1)...(19): siRNA sense strand
uagagaaacauguccauau

SEQ ID NO: 1266566 - RNA, 19 nt, Homo sapiens
  misc_RNA (1)...(19): siRNA sense strand
ggugaacgaguagauuaua

SEQ ID NO: 1266567 - RNA, 19 nt, Homo sapiens
  misc_RNA (1)...(19): siRNA sense strand
gaaguagaaguauuugagu

SEQ ID NO: 1266568 - RNA, 19 nt, Homo sapiens
  misc_RNA (1)...(19): siRNA sense strand
gaaacauguccauauauac

SEQ ID NO: 1266569 - RNA, 19 nt, Homo sapiens
  misc_RNA (1)...(19): siRNA sense strand
ugacgccuguuauagagaa

SEQ ID NO: 1266570 - RNA, 19 nt, Homo sapiens
  misc_RNA (1)...(19): siRNA sense strand
cgaguagauuauaagugua

SEQ ID NO: 1266571 - RNA, 19 nt, Homo sapiens
  misc_RNA (1)...(19): siRNA sense strand
gcacuuuauuuguaaugag

SEQ ID NO: 1266572 - RNA, 19 nt, Homo sapiens
  misc_RNA (1)...(19): siRNA sense strand
guagaaguauuugaguauc

SEQ ID NO: 1266573 - RNA, 19 nt, Homo sapiens
  misc_RNA (1)...(19): siRNA sense strand
guauuugaguaucuugaug

SEQ ID NO: 1266574 - RNA, 19 nt, Homo sapiens
  misc_RNA (1)...(19): siRNA sense strand
aggaauacuugacaguuug

SEQ ID NO: 1266575 - RNA, 19 nt, Homo sapiens
  misc_RNA (1)...(19): siRNA sense strand
aguguaaaguggucaaaug

SEQ ID NO: 1266576 - RNA, 19 nt, Homo sapiens
  misc_RNA (1)...(19): siRNA sense strand
ccaaaacccuacuaugaga

SEQ ID NO: 1266577 - RNA, 19 nt, Homo sapiens
  misc_RNA (1)...(19): siRNA sense strand
ccacccauacuauuuguga

SEQ ID NO: 1266578 - RNA, 19 nt, Homo sapiens
  misc_RNA (1)...(19): siRNA sense strand
caccaacauuugaagcuau

SEQ ID NO: 1266579 - RNA, 19 nt, Homo sapiens
  misc_RNA (1)...(19): siRNA sense strand
uuggagagagcacgauuua

SEQ ID NO: 1266580 - RNA, 19 nt, Homo sapiens
  misc_RNA (1)...(19): siRNA sense strand
gguuaucagaugcacuuua

SEQ ID NO: 1266581 - RNA, 19 nt, Homo sapiens
  misc_RNA (1)...(19): siRNA sense strand
ugaggagccaccaacauuu

SEQ ID NO: 1266582 - RNA, 19 nt, Homo sapiens
  misc_RNA (1)...(19): siRNA sense strand
ggaaggaauacuugacagu

SEQ ID NO: 1266583 - RNA, 19 nt, Homo sapiens
  misc_RNA (1)...(19): siRNA sense strand
gaggaaggaauacuugaca

SEQ ID NO: 1266584 - RNA, 19 nt, Homo sapiens
  misc_RNA (1)...(19): siRNA sense strand
ugaguaucuugaugcagua

SEQ ID NO: 1266585 - RNA, 19 nt, Homo sapiens
  misc_RNA (1)...(19): siRNA sense strand
caccuuuagugaaguagaa

SEQ ID NO: 1266586 - RNA, 19 nt, Homo sapiens
  misc_RNA (1)...(19): siRNA sense strand
acagauaucaggauuugga

SEQ ID NO: 1266587 - RNA, 19 nt, Homo sapiens
  misc_RNA (1)...(19): siRNA sense strand
ucauugcugugauuguuau

SEQ ID NO: 1266588 - RNA, 19 nt, Homo sapiens
  misc_RNA (1)...(19): siRNA sense strand
ucagaugcacuuuauuugu

SEQ ID NO: 1266589 - RNA, 19 nt, Homo sapiens
  misc_RNA (1)...(19): siRNA sense strand
gugcugcuccagaguguaa

SEQ ID NO: 1266590 - RNA, 19 nt, Homo sapiens
  misc_RNA (1)...(19): siRNA sense strand
ggaaaacacaccuuuagug

SEQ ID NO: 1266591 - RNA, 19 nt, Homo sapiens
  misc_RNA (1)...(19): siRNA sense strand
aaggaucaguagcaauuug

SEQ ID NO: 1266592 - RNA, 19 nt, Homo sapiens
  misc_RNA (1)...(19): siRNA sense strand
uauauacgggauccuuuaa

SEQ ID NO: 1266593 - RNA, 19 nt, Homo sapiens
  misc_RNA (1)...(19): siRNA sense strand
ugaaguagaaguauuugag

SEQ ID NO: 1266594 - RNA, 19 nt, Homo sapiens
  misc_RNA (1)...(19): siRNA sense strand
cuugacaguuuggauguuu

SEQ ID NO: 1266595 - RNA, 19 nt, Homo sapiens
  misc_RNA (1)...(19): siRNA sense strand
cauauauacgggauccuuu

SEQ ID NO: 1266596 - RNA, 19 nt, Homo sapiens
  misc_RNA (1)...(19): siRNA sense strand
auauauacgggauccuuua

SEQ ID NO: 1266597 - RNA, 19 nt, Homo sapiens
  misc_RNA (1)...(19): siRNA sense strand
cuuaaaggaucaguagcaa

SEQ ID NO: 1266598 - RNA, 19 nt, Homo sapiens
  misc_RNA (1)...(19): siRNA sense strand
uaaaccugaggaaggaaua

SEQ ID NO: 1266599 - RNA, 19 nt, Homo sapiens
  misc_RNA (1)...(19): siRNA sense strand
agaugacgccuguuauaga

SEQ ID NO: 1266600 - RNA, 19 nt, Homo sapiens
  misc_RNA (1)...(19): siRNA sense strand
ugugauuguuauugccaua

SEQ ID NO: 1266601 - RNA, 19 nt, Homo sapiens
  misc_RNA (1)...(19): siRNA sense strand
gagagcacgauuuauugug

SEQ ID NO: 1266602 - RNA, 19 nt, Homo sapiens
  misc_RNA (1)...(19): siRNA sense strand
gaaguauuugaguaucuug

SEQ ID NO: 1266603 - RNA, 19 nt, Homo sapiens
  misc_RNA (1)...(19): siRNA sense strand
ccucuugccacccauacua

SEQ ID NO: 1266604 - RNA, 19 nt, Homo sapiens
  misc_RNA (1)...(19): siRNA sense strand
gauaucaggauuuggaaaa

SEQ ID NO: 1266605 - RNA, 19 nt, Homo sapiens
  misc_RNA (1)...(19): siRNA sense strand
ggcuaccugucucagauga

SEQ ID NO: 1266606 - RNA, 19 nt, Homo sapiens
  misc_RNA (1)...(19): siRNA sense strand
ccaugguguugcugcugua

SEQ ID NO: 1266607 - RNA, 19 nt, Homo sapiens
  misc_RNA (1)...(19): siRNA sense strand
cagaugacgccuguuauag

SEQ ID NO: 1266608 - RNA, 19 nt, Homo sapiens
  misc_RNA (1)...(19): siRNA sense strand
gucauugcugugauuguua

SEQ ID NO: 1266609 - RNA, 19 nt, Homo sapiens
  misc_RNA (1)...(19): siRNA sense strand
uuggugaacgaguagauua

SEQ ID NO: 1266610 - RNA, 19 nt, Homo sapiens
  misc_RNA (1)...(19): siRNA sense strand
ggagccaccaacauuugaa

SEQ ID NO: 1266611 - RNA, 19 nt, Homo sapiens
  misc_RNA (1)...(19): siRNA sense strand
gcgcuuuccuggguugcuu

SEQ ID NO: 1266612 - RNA, 19 nt, Homo sapiens
  misc_RNA (1)...(19): siRNA sense strand
uacuacaaagcaacaguua

SEQ ID NO: 1266613 - RNA, 19 nt, Homo sapiens
  misc_RNA (1)...(19): siRNA sense strand
cuugaugcaguaacuuaua

SEQ ID NO: 1266614 - RNA, 19 nt, Homo sapiens
  misc_RNA (1)...(19): siRNA sense strand
aaacauguccauauauacg

SEQ ID NO: 1266615 - RNA, 19 nt, Homo sapiens
  misc_RNA (1)...(19): siRNA sense strand
guguaaaguggucaaaugu

SEQ ID NO: 1266616 - RNA, 19 nt, Homo sapiens
  misc_RNA (1)...(19): siRNA sense strand
cuuacgaguuugguuauca

SEQ ID NO: 1266617 - RNA, 19 nt, Homo sapiens
  misc_RNA (1)...(19): siRNA sense strand
uacgggauccuuuaaaugg

SEQ ID NO: 1266618 - RNA, 19 nt, Homo sapiens
  misc_RNA (1)...(19): siRNA sense strand
aaccaaaacccuacuauga

SEQ ID NO: 1266619 - RNA, 19 nt, Homo sapiens
  misc_RNA (1)...(19): siRNA sense strand
cccaauaugugaaaagguu

SEQ ID NO: 1266620 - RNA, 19 nt, Homo sapiens
  misc_RNA (1)...(19): siRNA sense strand
cgauggcagcgacacaauu

SEQ ID NO: 1266621 - RNA, 19 nt, Homo sapiens
  misc_RNA (1)...(19): siRNA sense strand
gauccauuuucacuuauug

SEQ ID NO: 1266622 - RNA, 19 nt, Homo sapiens
  misc_RNA (1)...(19): siRNA sense strand
uugaugcaguaacuuauag

SEQ ID NO: 1266623 - RNA, 19 nt, Homo sapiens
  misc_RNA (1)...(19): siRNA sense strand
guaucuugaugcaguaacu

SEQ ID NO: 1266624 - RNA, 19 nt, Homo sapiens
  misc_RNA (1)...(19): siRNA sense strand
caacauuugaagcuaugga

SEQ ID NO: 1266625 - RNA, 19 nt, Homo sapiens
  misc_RNA (1)...(19): siRNA sense strand
gagauuggugaacgaguag

SEQ ID NO: 1266626 - RNA, 19 nt, Homo sapiens
  misc_RNA (1)...(19): siRNA sense strand
ggagagagcacgauuuauu

SEQ ID NO: 1266627 - RNA, 19 nt, Homo sapiens
  misc_RNA (1)...(19): siRNA sense strand
agagaaacauguccauaua

SEQ ID NO: 1266628 - RNA, 19 nt, Homo sapiens
  misc_RNA (1)...(19): siRNA sense strand
cagaugcacuuuauuugua

SEQ ID NO: 1266629 - RNA, 19 nt, Homo sapiens
  misc_RNA (1)...(19): siRNA sense strand
ggacuuacgaguuugguua

SEQ ID NO: 1266630 - RNA, 19 nt, Homo sapiens
  misc_RNA (1)...(19): siRNA sense strand
aaacagauaucaggauuug

SEQ ID NO: 1266631 - RNA, 19 nt, Homo sapiens
  misc_RNA (1)...(19): siRNA sense strand
cuauggagcucauugguaa

SEQ ID NO: 1266632 - RNA, 19 nt, Homo sapiens
  misc_RNA (1)...(19): siRNA sense strand
aaacacaccuuuagugaag

SEQ ID NO: 1266633 - RNA, 19 nt, Homo sapiens
  misc_RNA (1)...(19): siRNA sense strand
gaacuuaaaggaucaguag

SEQ ID NO: 1266634 - RNA, 19 nt, Homo sapiens
  misc_RNA (1)...(19): siRNA sense strand
gaaaacagauaucaggauu

SEQ ID NO: 1266635 - RNA, 19 nt, Homo sapiens
  misc_RNA (1)...(19): siRNA sense strand
uaaaggaucaguagcaauu

SEQ ID NO: 1266636 - RNA, 19 nt, Homo sapiens
  misc_RNA (1)...(19): siRNA sense strand
aaaugggacuuacgaguuu

SEQ ID NO: 1266637 - RNA, 19 nt, Homo sapiens
  misc_RNA (1)...(19): siRNA sense strand
guuaucagaugcacuuuau

SEQ ID NO: 1266638 - RNA, 19 nt, Homo sapiens
  misc_RNA (1)...(19): siRNA sense strand
ugagauuggugaacgagua

SEQ ID NO: 1266639 - RNA, 19 nt, Homo sapiens
  misc_RNA (1)...(19): siRNA sense strand
gugaacgaguagauuauaa

SEQ ID NO: 1266640 - RNA, 19 nt, Homo sapiens
  misc_RNA (1)...(19): siRNA sense strand
gagagagcacgauuuauug

SEQ ID NO: 1266641 - RNA, 19 nt, Homo sapiens
  misc_RNA (1)...(19): siRNA sense strand
caaaugggacuuacgaguu

SEQ ID NO: 1266642 - RNA, 19 nt, Homo sapiens
  misc_RNA (1)...(19): siRNA sense strand
ggucauugcugugauuguu

SEQ ID NO: 1266643 - RNA, 19 nt, Homo sapiens
  misc_RNA (1)...(19): siRNA sense strand
ccagauccauuuucacuua

SEQ ID NO: 1266644 - RNA, 19 nt, Homo sapiens
  misc_RNA (1)...(19): siRNA sense strand
gaaggaauacuugacaguu

SEQ ID NO: 1266645 - RNA, 19 nt, Homo sapiens
  misc_RNA (1)...(19): siRNA sense strand
aaggaauacuugacaguuu

SEQ ID NO: 1266646 - RNA, 19 nt, Homo sapiens
  misc_RNA (1)...(19): siRNA sense strand
ucagaugacgccuguuaua

SEQ ID NO: 1266647 - RNA, 19 nt, Homo sapiens
  misc_RNA (1)...(19): siRNA sense strand
gaaaacacaccuuuaguga

SEQ ID NO: 1266648 - RNA, 19 nt, Homo sapiens
  misc_RNA (1)...(19): siRNA sense strand
gaugacgccuguuauagag

SEQ ID NO: 1266649 - RNA, 19 nt, Homo sapiens
  misc_RNA (1)...(19): siRNA sense strand
gagaaacauguccauauau

SEQ ID NO: 1266650 - RNA, 19 nt, Homo sapiens
  misc_RNA (1)...(19): siRNA sense strand
acgaguagauuauaagugu

SEQ ID NO: 1266651 - RNA, 19 nt, Homo sapiens
  misc_RNA (1)...(19): siRNA sense strand
cuacaaagcaacaguuaug

SEQ ID NO: 1266652 - RNA, 19 nt, Homo sapiens
  misc_RNA (1)...(19): siRNA sense strand
ccaccaacauuugaagcua

SEQ ID NO: 1266653 - RNA, 19 nt, Homo sapiens
  misc_RNA (1)...(19): siRNA sense strand
uauacgggauccuuuaaau

SEQ ID NO: 1266654 - RNA, 19 nt, Homo sapiens
  misc_RNA (1)...(19): siRNA sense strand
cgaguuugguuaucagaug

SEQ ID NO: 1266655 - RNA, 19 nt, Homo sapiens
  misc_RNA (1)...(19): siRNA sense strand
gaacgaguagauuauaagu

SEQ ID NO: 1266656 - RNA, 19 nt, Homo sapiens
  misc_RNA (1)...(19): siRNA sense strand
gugaggagccaccaacauu

SEQ ID NO: 1266657 - RNA, 19 nt, Homo sapiens
  misc_RNA (1)...(19): siRNA sense strand
gauggcagcgacacaauug

SEQ ID NO: 1266658 - RNA, 19 nt, Homo sapiens
  misc_RNA (1)...(19): siRNA sense strand
gcuauggagcucauuggua

SEQ ID NO: 1266659 - RNA, 19 nt, Homo sapiens
  misc_RNA (1)...(19): siRNA sense strand
gaggagccaccaacauuug

SEQ ID NO: 1266660 - RNA, 19 nt, Homo sapiens
  misc_RNA (1)...(19): siRNA sense strand
acacaccuuuagugaagua

SEQ ID NO: 1266661 - RNA, 19 nt, Homo sapiens
  misc_RNA (1)...(19): siRNA sense strand
ucucagaugacgccuguua

SEQ ID NO: 1266662 - RNA, 19 nt, Homo sapiens
  misc_RNA (1)...(19): siRNA sense strand
uagagaaacauguccauau

SEQ ID NO: 1266663 - RNA, 19 nt, Homo sapiens
  misc_RNA (1)...(19): siRNA sense strand
guuccaaagugucuuaaag

SEQ ID NO: 1266664 - RNA, 19 nt, Homo sapiens
  misc_RNA (1)...(19): siRNA sense strand
ggugaacgaguagauuaua

SEQ ID NO: 1266665 - RNA, 19 nt, Homo sapiens
  misc_RNA (1)...(19): siRNA sense strand
gaaguagaaguauuugagu

SEQ ID NO: 1266666 - RNA, 19 nt, Homo sapiens
  misc_RNA (1)...(19): siRNA sense strand
gaaacauguccauauauac

SEQ ID NO: 1266667 - RNA, 19 nt, Homo sapiens
  misc_RNA (1)...(19): siRNA sense strand
ugacgccuguuauagagaa

SEQ ID NO: 1266668 - RNA, 19 nt, Homo sapiens
  misc_RNA (1)...(19): siRNA sense strand
cgaguagauuauaagugua

SEQ ID NO: 1266669 - RNA, 19 nt, Homo sapiens
  misc_RNA (1)...(19): siRNA sense strand
gcacuuuauuuguaaugag

SEQ ID NO: 1266670 - RNA, 19 nt, Homo sapiens
  misc_RNA (1)...(19): siRNA sense strand
guagaaguauuugaguauc

SEQ ID NO: 1266671 - RNA, 19 nt, Homo sapiens
  misc_RNA (1)...(19): siRNA sense strand
guauuugaguaucuugaug

SEQ ID NO: 1266672 - RNA, 19 nt, Homo sapiens
  misc_RNA (1)...(19): siRNA sense strand
aggaauacuugacaguuug

SEQ ID NO: 1266673 - RNA, 19 nt, Homo sapiens
  misc_RNA (1)...(19): siRNA sense strand
ccaaaacccuacuaugaga

SEQ ID NO: 1266674 - RNA, 19 nt, Homo sapiens
  misc_RNA (1)...(19): siRNA sense strand
aguguaaaguggucaaaug

SEQ ID NO: 1266675 - RNA, 19 nt, Homo sapiens
  misc_RNA (1)...(19): siRNA sense strand
ccacccauacuauuuguga

SEQ ID NO: 1266676 - RNA, 19 nt, Homo sapiens
  misc_RNA (1)...(19): siRNA sense strand
caccaacauuugaagcuau

SEQ ID NO: 1266677 - RNA, 19 nt, Homo sapiens
  misc_RNA (1)...(19): siRNA sense strand
uuggagagagcacgauuua

SEQ ID NO: 1266678 - RNA, 19 nt, Homo sapiens
  misc_RNA (1)...(19): siRNA sense strand
gguuaucagaugcacuuua

SEQ ID NO: 1266679 - RNA, 19 nt, Homo sapiens
  misc_RNA (1)...(19): siRNA sense strand
ugaggagccaccaacauuu

SEQ ID NO: 1266680 - RNA, 19 nt, Homo sapiens
  misc_RNA (1)...(19): siRNA sense strand
ggaaggaauacuugacagu

SEQ ID NO: 1266681 - RNA, 19 nt, Homo sapiens
  misc_RNA (1)...(19): siRNA sense strand
gaggaaggaauacuugaca

SEQ ID NO: 1266682 - RNA, 19 nt, Homo sapiens
  misc_RNA (1)...(19): siRNA sense strand
ccaguuccaaagugucuua

SEQ ID NO: 1266683 - RNA, 19 nt, Homo sapiens
  misc_RNA (1)...(19): siRNA sense strand
ugaguaucuugaugcagua

SEQ ID NO: 1266684 - RNA, 19 nt, Homo sapiens
  misc_RNA (1)...(19): siRNA sense strand
caccuuuagugaaguagaa

SEQ ID NO: 1266685 - RNA, 19 nt, Homo sapiens
  misc_RNA (1)...(19): siRNA sense strand
acagauaucaggauuugga

SEQ ID NO: 1266686 - RNA, 19 nt, Homo sapiens
  misc_RNA (1)...(19): siRNA sense strand
ucauugcugugauuguuau

SEQ ID NO: 1266687 - RNA, 19 nt, Homo sapiens
  misc_RNA (1)...(19): siRNA sense strand
ucagaugcacuuuauuugu

SEQ ID NO: 1266688 - RNA, 19 nt, Homo sapiens
  misc_RNA (1)...(19): siRNA sense strand
gugcugcuccagaguguaa

SEQ ID NO: 1266689 - RNA, 19 nt, Homo sapiens
  misc_RNA (1)...(19): siRNA sense strand
ggaaaacacaccuuuagug

SEQ ID NO: 1266690 - RNA, 19 nt, Homo sapiens
  misc_RNA (1)...(19): siRNA sense strand
aaggaucaguagcaauuug

SEQ ID NO: 1266691 - RNA, 19 nt, Homo sapiens
  misc_RNA (1)...(19): siRNA sense strand
uauauacgggauccuuuaa

SEQ ID NO: 1266692 - RNA, 19 nt, Homo sapiens
  misc_RNA (1)...(19): siRNA sense strand
ugaaguagaaguauuugag

SEQ ID NO: 1266693 - RNA, 19 nt, Homo sapiens
  misc_RNA (1)...(19): siRNA sense strand
cuugacaguuuggauguuu

SEQ ID NO: 1266694 - RNA, 19 nt, Homo sapiens
  misc_RNA (1)...(19): siRNA sense strand
cauauauacgggauccuuu

SEQ ID NO: 1266695 - RNA, 19 nt, Homo sapiens
  misc_RNA (1)...(19): siRNA sense strand
auauauacgggauccuuua

SEQ ID NO: 1266696 - RNA, 19 nt, Homo sapiens
  misc_RNA (1)...(19): siRNA sense strand
cuuaaaggaucaguagcaa

SEQ ID NO: 1266697 - RNA, 19 nt, Homo sapiens
  misc_RNA (1)...(19): siRNA sense strand
uaaaccugaggaaggaaua

SEQ ID NO: 1266698 - RNA, 19 nt, Homo sapiens
  misc_RNA (1)...(19): siRNA sense strand
agaugacgccuguuauaga

SEQ ID NO: 1266699 - RNA, 19 nt, Homo sapiens
  misc_RNA (1)...(19): siRNA sense strand
ugugauuguuauugccaua

SEQ ID NO: 1266700 - RNA, 19 nt, Homo sapiens
  misc_RNA (1)...(19): siRNA sense strand
gagagcacgauuuauugug

SEQ ID NO: 1266701 - RNA, 19 nt, Homo sapiens
  misc_RNA (1)...(19): siRNA sense strand
gaaguauuugaguaucuug

SEQ ID NO: 1266702 - RNA, 19 nt, Homo sapiens
  misc_RNA (1)...(19): siRNA sense strand
ggcuaccugucucagauga

SEQ ID NO: 1266703 - RNA, 19 nt, Homo sapiens
  misc_RNA (1)...(19): siRNA sense strand
gauaucaggauuuggaaaa

SEQ ID NO: 1266704 - RNA, 19 nt, Homo sapiens
  misc_RNA (1)...(19): siRNA sense strand
ccucuugccacccauacua

SEQ ID NO: 1266705 - RNA, 19 nt, Homo sapiens
  misc_RNA (1)...(19): siRNA sense strand
ccaugguguugcugcugua

SEQ ID NO: 1266706 - RNA, 19 nt, Homo sapiens
  misc_RNA (1)...(19): siRNA sense strand
cagaugacgccuguuauag

SEQ ID NO: 1266707 - RNA, 19 nt, Homo sapiens
  misc_RNA (1)...(19): siRNA sense strand
uuggugaacgaguagauua

SEQ ID NO: 1266708 - RNA, 19 nt, Homo sapiens
  misc_RNA (1)...(19): siRNA sense strand
gucauugcugugauuguua

SEQ ID NO: 1266709 - RNA, 19 nt, Homo sapiens
  misc_RNA (1)...(19): siRNA sense strand
ggagccaccaacauuugaa

SEQ ID NO: 1266710 - RNA, 19 nt, Homo sapiens
  misc_RNA (1)...(19): siRNA sense strand
gcgcuuuccuggguugcuu

SEQ ID NO: 1266711 - RNA, 19 nt, Homo sapiens
  misc_RNA (1)...(19): siRNA sense strand
uacuacaaagcaacaguua

SEQ ID NO: 1266712 - RNA, 19 nt, Homo sapiens
  misc_RNA (1)...(19): siRNA sense strand
cuugaugcaguaacuuaua

SEQ ID NO: 1266713 - RNA, 19 nt, Homo sapiens
  misc_RNA (1)...(19): siRNA sense strand
aaacauguccauauauacg

SEQ ID NO: 1266714 - RNA, 19 nt, Homo sapiens
  misc_RNA (1)...(19): siRNA sense strand
guguaaaguggucaaaugu

SEQ ID NO: 1266715 - RNA, 19 nt, Homo sapiens
  misc_RNA (1)...(19): siRNA sense strand
cuuacgaguuugguuauca

SEQ ID NO: 1266716 - RNA, 19 nt, Homo sapiens
  misc_RNA (1)...(19): siRNA sense strand
uacgggauccuuuaaaugg

SEQ ID NO: 1266717 - RNA, 19 nt, Homo sapiens
  misc_RNA (1)...(19): siRNA sense strand
aaccaaaacccuacuauga

SEQ ID NO: 1266718 - RNA, 19 nt, Homo sapiens
  misc_RNA (1)...(19): siRNA sense strand
cccaauaugugaaaagguu

SEQ ID NO: 1266719 - RNA, 19 nt, Homo sapiens
  misc_RNA (1)...(19): siRNA sense strand
cgauggcagcgacacaauu

SEQ ID NO: 1266720 - RNA, 19 nt, Homo sapiens
  misc_RNA (1)...(19): siRNA sense strand
gauccauuuucacuuauug

SEQ ID NO: 1266721 - RNA, 19 nt, Homo sapiens
  misc_RNA (1)...(19): siRNA sense strand
uugaugcaguaacuuauag

SEQ ID NO: 1266722 - RNA, 19 nt, Homo sapiens
  misc_RNA (1)...(19): siRNA sense strand
guaucuugaugcaguaacu

SEQ ID NO: 1266723 - RNA, 19 nt, Homo sapiens
  misc_RNA (1)...(19): siRNA sense strand
caacauuugaagcuaugga

SEQ ID NO: 1266724 - RNA, 19 nt, Homo sapiens
  misc_RNA (1)...(19): siRNA sense strand
gagauuggugaacgaguag

SEQ ID NO: 1266725 - RNA, 19 nt, Homo sapiens
  misc_RNA (1)...(19): siRNA sense strand
ggagagagcacgauuuauu

SEQ ID NO: 1266726 - RNA, 19 nt, Homo sapiens
  misc_RNA (1)...(19): siRNA sense strand
agagaaacauguccauaua

SEQ ID NO: 1266727 - RNA, 19 nt, Homo sapiens
  misc_RNA (1)...(19): siRNA sense strand
cagaugcacuuuauuugua

SEQ ID NO: 1266728 - RNA, 19 nt, Homo sapiens
  misc_RNA (1)...(19): siRNA sense strand
ggacuuacgaguuugguua

SEQ ID NO: 1266729 - RNA, 19 nt, Homo sapiens
  misc_RNA (1)...(19): siRNA sense strand
aaacagauaucaggauuug

SEQ ID NO: 1266730 - RNA, 19 nt, Homo sapiens
  misc_RNA (1)...(19): siRNA sense strand
cuauggagcucauugguaa

SEQ ID NO: 1266731 - RNA, 19 nt, Homo sapiens
  misc_RNA (1)...(19): siRNA sense strand
aaacacaccuuuagugaag

SEQ ID NO: 1266732 - RNA, 19 nt, Homo sapiens
  misc_RNA (1)...(19): siRNA sense strand
gaacuuaaaggaucaguag

SEQ ID NO: 1266733 - RNA, 19 nt, Homo sapiens
  misc_RNA (1)...(19): siRNA sense strand
gaaaacagauaucaggauu

SEQ ID NO: 1266734 - RNA, 19 nt, Homo sapiens
  misc_RNA (1)...(19): siRNA sense strand
uaaaggaucaguagcaauu

SEQ ID NO: 1266735 - RNA, 19 nt, Homo sapiens
  misc_RNA (1)...(19): siRNA sense strand
aaaugggacuuacgaguuu

SEQ ID NO: 1266736 - RNA, 19 nt, Homo sapiens
  misc_RNA (1)...(19): siRNA sense strand
guuaucagaugcacuuuau

SEQ ID NO: 1266737 - RNA, 19 nt, Homo sapiens
  misc_RNA (1)...(19): siRNA sense strand
gagcugaauaugccacuua

SEQ ID NO: 1266738 - RNA, 19 nt, Homo sapiens
  misc_RNA (1)...(19): siRNA sense strand
ugagauuggugaacgagua

SEQ ID NO: 1266739 - RNA, 19 nt, Homo sapiens
  misc_RNA (1)...(19): siRNA sense strand
gugaacgaguagauuauaa

SEQ ID NO: 1266740 - RNA, 19 nt, Homo sapiens
  misc_RNA (1)...(19): siRNA sense strand
gagagagcacgauuuauug

SEQ ID NO: 1266741 - RNA, 19 nt, Homo sapiens
  misc_RNA (1)...(19): siRNA sense strand
caaaugggacuuacgaguu

SEQ ID NO: 1266742 - RNA, 19 nt, Homo sapiens
  misc_RNA (1)...(19): siRNA sense strand
ggucauugcugugauuguu

SEQ ID NO: 1266743 - RNA, 19 nt, Homo sapiens
  misc_RNA (1)...(19): siRNA sense strand
ccagauccauuuucacuua

SEQ ID NO: 1266744 - RNA, 19 nt, Homo sapiens
  misc_RNA (1)...(19): siRNA sense strand
gaaggaauacuugacaguu

SEQ ID NO: 1266745 - RNA, 19 nt, Homo sapiens
  misc_RNA (1)...(19): siRNA sense strand
aaggaauacuugacaguuu

SEQ ID NO: 1266746 - RNA, 19 nt, Homo sapiens
  misc_RNA (1)...(19): siRNA sense strand
ucagaugacgccuguuaua

SEQ ID NO: 1266747 - RNA, 19 nt, Homo sapiens
  misc_RNA (1)...(19): siRNA sense strand
gaaaacacaccuuuaguga

SEQ ID NO: 1266748 - RNA, 19 nt, Homo sapiens
  misc_RNA (1)...(19): siRNA sense strand
gaugacgccuguuauagag

SEQ ID NO: 1266749 - RNA, 19 nt, Homo sapiens
  misc_RNA (1)...(19): siRNA sense strand
gagaaacauguccauauau

SEQ ID NO: 1266750 - RNA, 19 nt, Homo sapiens
  misc_RNA (1)...(19): siRNA sense strand
ccacuuaccagacuaaauc

SEQ ID NO: 1266751 - RNA, 19 nt, Homo sapiens
  misc_RNA (1)...(19): siRNA sense strand
acgaguagauuauaagugu

SEQ ID NO: 1266752 - RNA, 19 nt, Homo sapiens
  misc_RNA (1)...(19): siRNA sense strand
cuacaaagcaacaguuaug

SEQ ID NO: 1266753 - RNA, 19 nt, Homo sapiens
  misc_RNA (1)...(19): siRNA sense strand
ccaccaacauuugaagcua

SEQ ID NO: 1266754 - RNA, 19 nt, Homo sapiens
  misc_RNA (1)...(19): siRNA sense strand
uauacgggauccuuuaaau

SEQ ID NO: 1266755 - RNA, 19 nt, Homo sapiens
  misc_RNA (1)...(19): siRNA sense strand
cgaguuugguuaucagaug

SEQ ID NO: 1266756 - RNA, 19 nt, Homo sapiens
  misc_RNA (1)...(19): siRNA sense strand
gaacgaguagauuauaagu

SEQ ID NO: 1266757 - RNA, 19 nt, Homo sapiens
  misc_RNA (1)...(19): siRNA sense strand
gugaggagccaccaacauu

SEQ ID NO: 1266758 - RNA, 19 nt, Homo sapiens
  misc_RNA (1)...(19): siRNA sense strand
gauggcagcgacacaauug

SEQ ID NO: 1266759 - RNA, 19 nt, Homo sapiens
  misc_RNA (1)...(19): siRNA sense strand
ucucagaugacgccuguua

SEQ ID NO: 1266760 - RNA, 19 nt, Homo sapiens
  misc_RNA (1)...(19): siRNA sense strand
gaggagccaccaacauuug

SEQ ID NO: 1266761 - RNA, 19 nt, Homo sapiens
  misc_RNA (1)...(19): siRNA sense strand
gcuauggagcucauuggua

SEQ ID NO: 1266762 - RNA, 19 nt, Homo sapiens
  misc_RNA (1)...(19): siRNA sense strand
acacaccuuuagugaagua

SEQ ID NO: 1266763 - RNA, 19 nt, Homo sapiens
  misc_RNA (1)...(19): siRNA sense strand
uagagaaacauguccauau

SEQ ID NO: 1266764 - RNA, 19 nt, Homo sapiens
  misc_RNA (1)...(19): siRNA sense strand
guuccaaagugucuuaaag

SEQ ID NO: 1266765 - RNA, 19 nt, Homo sapiens
  misc_RNA (1)...(19): siRNA sense strand
ggugaacgaguagauuaua

SEQ ID NO: 1266766 - RNA, 19 nt, Homo sapiens
  misc_RNA (1)...(19): siRNA sense strand
gaaguagaaguauuugagu

SEQ ID NO: 1266767 - RNA, 19 nt, Homo sapiens
  misc_RNA (1)...(19): siRNA sense strand
gaaacauguccauauauac

SEQ ID NO: 1266768 - RNA, 19 nt, Homo sapiens
  misc_RNA (1)...(19): siRNA sense strand
ugacgccuguuauagagaa

SEQ ID NO: 1266769 - RNA, 19 nt, Homo sapiens
  misc_RNA (1)...(19): siRNA sense strand
cgaguagauuauaagugua

SEQ ID NO: 1266770 - RNA, 19 nt, Homo sapiens
  misc_RNA (1)...(19): siRNA sense strand
gcacuuuauuuguaaugag

SEQ ID NO: 1266771 - RNA, 19 nt, Homo sapiens
  misc_RNA (1)...(19): siRNA sense strand
guagaaguauuugaguauc

SEQ ID NO: 1266772 - RNA, 19 nt, Homo sapiens
  misc_RNA (1)...(19): siRNA sense strand
guauuugaguaucuugaug

SEQ ID NO: 1266773 - RNA, 19 nt, Homo sapiens
  misc_RNA (1)...(19): siRNA sense strand
aggaauacuugacaguuug

SEQ ID NO: 1266774 - RNA, 19 nt, Homo sapiens
  misc_RNA (1)...(19): siRNA sense strand
ccaaaacccuacuaugaga

SEQ ID NO: 1266775 - RNA, 19 nt, Homo sapiens
  misc_RNA (1)...(19): siRNA sense strand
aguguaaaguggucaaaug

SEQ ID NO: 1266776 - RNA, 19 nt, Homo sapiens
  misc_RNA (1)...(19): siRNA sense strand
ccacccauacuauuuguga

SEQ ID NO: 1266777 - RNA, 19 nt, Homo sapiens
  misc_RNA (1)...(19): siRNA sense strand
uuggagagagcacgauuua

SEQ ID NO: 1266778 - RNA, 19 nt, Homo sapiens
  misc_RNA (1)...(19): siRNA sense strand
gguuaucagaugcacuuua

SEQ ID NO: 1266779 - RNA, 19 nt, Homo sapiens
  misc_RNA (1)...(19): siRNA sense strand
caccaacauuugaagcuau

SEQ ID NO: 1266780 - RNA, 19 nt, Homo sapiens
  misc_RNA (1)...(19): siRNA sense strand
ugaggagccaccaacauuu

SEQ ID NO: 1266781 - RNA, 19 nt, Homo sapiens
  misc_RNA (1)...(19): siRNA sense strand
ggaaggaauacuugacagu

SEQ ID NO: 1266782 - RNA, 19 nt, Homo sapiens
  misc_RNA (1)...(19): siRNA sense strand
gaggaaggaauacuugaca

SEQ ID NO: 1266783 - RNA, 19 nt, Homo sapiens
  misc_RNA (1)...(19): siRNA sense strand
ccaguuccaaagugucuua

SEQ ID NO: 1266784 - RNA, 19 nt, Homo sapiens
  misc_RNA (1)...(19): siRNA sense strand
ugaguaucuugaugcagua

SEQ ID NO: 1266785 - RNA, 19 nt, Homo sapiens
  misc_RNA (1)...(19): siRNA sense strand
caccuuuagugaaguagaa

SEQ ID NO: 1266786 - RNA, 19 nt, Homo sapiens
  misc_RNA (1)...(19): siRNA sense strand
acagauaucaggauuugga

SEQ ID NO: 1266787 - RNA, 19 nt, Homo sapiens
  misc_RNA (1)...(19): siRNA sense strand
ucauugcugugauuguuau

SEQ ID NO: 1266788 - RNA, 19 nt, Homo sapiens
  misc_RNA (1)...(19): siRNA sense strand
ucagaugcacuuuauuugu

SEQ ID NO: 1266789 - RNA, 19 nt, Homo sapiens
  misc_RNA (1)...(19): siRNA sense strand
gugcugcuccagaguguaa

SEQ ID NO: 1266790 - RNA, 19 nt, Homo sapiens
  misc_RNA (1)...(19): siRNA sense strand
ggaaaacacaccuuuagug

SEQ ID NO: 1266791 - RNA, 19 nt, Homo sapiens
  misc_RNA (1)...(19): siRNA sense strand
aaggaucaguagcaauuug

SEQ ID NO: 1266792 - RNA, 19 nt, Homo sapiens
  misc_RNA (1)...(19): siRNA sense strand
uauauacgggauccuuuaa

SEQ ID NO: 1266793 - RNA, 19 nt, Homo sapiens
  misc_RNA (1)...(19): siRNA sense strand
ugaaguagaaguauuugag

SEQ ID NO: 1266794 - RNA, 19 nt, Homo sapiens
  misc_RNA (1)...(19): siRNA sense strand
cuugacaguuuggauguuu

SEQ ID NO: 1266795 - RNA, 19 nt, Homo sapiens
  misc_RNA (1)...(19): siRNA sense strand
cauauauacgggauccuuu

SEQ ID NO: 1266796 - RNA, 19 nt, Homo sapiens
  misc_RNA (1)...(19): siRNA sense strand
auauauacgggauccuuua

SEQ ID NO: 1266797 - RNA, 19 nt, Homo sapiens
  misc_RNA (1)...(19): siRNA sense strand
cuuaaaggaucaguagcaa

SEQ ID NO: 1266798 - RNA, 19 nt, Homo sapiens
  misc_RNA (1)...(19): siRNA sense strand
uaaaccugaggaaggaaua

SEQ ID NO: 1266799 - RNA, 19 nt, Homo sapiens
  misc_RNA (1)...(19): siRNA sense strand
agaugacgccuguuauaga

SEQ ID NO: 1266800 - RNA, 19 nt, Homo sapiens
  misc_RNA (1)...(19): siRNA sense strand
ugugauuguuauugccaua

SEQ ID NO: 1266801 - RNA, 19 nt, Homo sapiens
  misc_RNA (1)...(19): siRNA sense strand
gagagcacgauuuauugug

SEQ ID NO: 1266802 - RNA, 19 nt, Homo sapiens
  misc_RNA (1)...(19): siRNA sense strand
gaaguauuugaguaucuug

SEQ ID NO: 1266803 - RNA, 19 nt, Homo sapiens
  misc_RNA (1)...(19): siRNA sense strand
ggcuaccugucucagauga

SEQ ID NO: 1266804 - RNA, 19 nt, Homo sapiens
  misc_RNA (1)...(19): siRNA sense strand
gauaucaggauuuggaaaa

SEQ ID NO: 1266805 - RNA, 19 nt, Homo sapiens
  misc_RNA (1)...(19): siRNA sense strand
ccucuugccacccauacua

SEQ ID NO: 1266806 - RNA, 19 nt, Homo sapiens
  misc_RNA (1)...(19): siRNA sense strand
ccaugguguugcugcugua

SEQ ID NO: 1266807 - RNA, 19 nt, Homo sapiens
  misc_RNA (1)...(19): siRNA sense strand
cagaugacgccuguuauag

SEQ ID NO: 1266808 - RNA, 19 nt, Homo sapiens
  misc_RNA (1)...(19): siRNA sense strand
cagaugguggagcugaaua

SEQ ID NO: 1266809 - RNA, 19 nt, Homo sapiens
  misc_RNA (1)...(19): siRNA sense strand
gucauugcugugauuguua

SEQ ID NO: 1266810 - RNA, 19 nt, Homo sapiens
  misc_RNA (1)...(19): siRNA sense strand
ggagccaccaacauuugaa

SEQ ID NO: 1266811 - RNA, 19 nt, Homo sapiens
  misc_RNA (1)...(19): siRNA sense strand
uuggugaacgaguagauua

SEQ ID NO: 1266812 - RNA, 19 nt, Homo sapiens
  misc_RNA (1)...(19): siRNA sense strand
gcgcuuuccuggguugcuu

SEQ ID NO: 1266813 - RNA, 19 nt, Homo sapiens
  misc_RNA (1)...(19): siRNA sense strand
uacuacaaagcaacaguua

SEQ ID NO: 1266814 - RNA, 19 nt, Homo sapiens
  misc_RNA (1)...(19): siRNA sense strand
cuugaugcaguaacuuaua

SEQ ID NO: 1266815 - RNA, 19 nt, Homo sapiens
  misc_RNA (1)...(19): siRNA sense strand
aaacauguccauauauacg

SEQ ID NO: 1266816 - RNA, 19 nt, Homo sapiens
  misc_RNA (1)...(19): siRNA sense strand
guguaaaguggucaaaugu

SEQ ID NO: 1266817 - RNA, 19 nt, Homo sapiens
  misc_RNA (1)...(19): siRNA sense strand
cuuacgaguuugguuauca

SEQ ID NO: 1266818 - RNA, 19 nt, Homo sapiens
  misc_RNA (1)...(19): siRNA sense strand
uacgggauccuuuaaaugg

SEQ ID NO: 1266819 - RNA, 19 nt, Homo sapiens
  misc_RNA (1)...(19): siRNA sense strand
gcagaugguggagcugaau

SEQ ID NO: 1266820 - RNA, 19 nt, Homo sapiens
  misc_RNA (1)...(19): siRNA sense strand
aaccaaaacccuacuauga

SEQ ID NO: 1266821 - RNA, 19 nt, Homo sapiens
  misc_RNA (1)...(19): siRNA sense strand
uugaugcaguaacuuauag

SEQ ID NO: 1266822 - RNA, 19 nt, Homo sapiens
  misc_RNA (1)...(19): siRNA sense strand
ggagcugaauaugccacuu

SEQ ID NO: 1266823 - RNA, 19 nt, Homo sapiens
  misc_RNA (1)...(19): siRNA sense strand
cgauggcagcgacacaauu

SEQ ID NO: 1266824 - RNA, 19 nt, Homo sapiens
  misc_RNA (1)...(19): siRNA sense strand
gauccauuuucacuuauug

SEQ ID NO: 1266825 - RNA, 19 nt, Homo sapiens
  misc_RNA (1)...(19): siRNA sense strand
ggagagagcacgauuuauu

SEQ ID NO: 1266826 - RNA, 19 nt, Homo sapiens
  misc_RNA (1)...(19): siRNA sense strand
agagaaacauguccauaua

SEQ ID NO: 1266827 - RNA, 19 nt, Homo sapiens
  misc_RNA (1)...(19): siRNA sense strand
cagaugcacuuuauuugua

SEQ ID NO: 1266828 - RNA, 19 nt, Homo sapiens
  misc_RNA (1)...(19): siRNA sense strand
ggacuuacgaguuugguua

SEQ ID NO: 1266829 - RNA, 19 nt, Homo sapiens
  misc_RNA (1)...(19): siRNA sense strand
aaacagauaucaggauuug

SEQ ID NO: 1266830 - RNA, 19 nt, Homo sapiens
  misc_RNA (1)...(19): siRNA sense strand
cuauggagcucauugguaa

SEQ ID NO: 1266831 - RNA, 19 nt, Homo sapiens
  misc_RNA (1)...(19): siRNA sense strand
aaacacaccuuuagugaag

SEQ ID NO: 1266832 - RNA, 19 nt, Homo sapiens
  misc_RNA (1)...(19): siRNA sense strand
gaacuuaaaggaucaguag

SEQ ID NO: 1266833 - RNA, 19 nt, Homo sapiens
  misc_RNA (1)...(19): siRNA sense strand
gaaaacagauaucaggauu

SEQ ID NO: 1266834 - RNA, 19 nt, Homo sapiens
  misc_RNA (1)...(19): siRNA sense strand
uaaaggaucaguagcaauu

SEQ ID NO: 1266835 - RNA, 19 nt, Homo sapiens
  misc_RNA (1)...(19): siRNA sense strand
aaaugggacuuacgaguuu

SEQ ID NO: 1266836 - RNA, 19 nt, Homo sapiens
  misc_RNA (1)...(19): siRNA sense strand
guuaucagaugcacuuuau

SEQ ID NO: 1266837 - RNA, 19 nt, Homo sapiens
  misc_RNA (1)...(19): siRNA sense strand
ugagauuggugaacgagua

SEQ ID NO: 1266838 - RNA, 19 nt, Homo sapiens
  misc_RNA (1)...(19): siRNA sense strand
gugaacgaguagauuauaa

SEQ ID NO: 1266839 - RNA, 19 nt, Homo sapiens
  misc_RNA (1)...(19): siRNA sense strand
gagagagcacgauuuauug

SEQ ID NO: 1266840 - RNA, 19 nt, Homo sapiens
  misc_RNA (1)...(19): siRNA sense strand
caaaugggacuuacgaguu

SEQ ID NO: 1266841 - RNA, 19 nt, Homo sapiens
  misc_RNA (1)...(19): siRNA sense strand
ggucauugcugugauuguu

SEQ ID NO: 1266842 - RNA, 19 nt, Homo sapiens
  misc_RNA (1)...(19): siRNA sense strand
ccagauccauuuucacuua

SEQ ID NO: 1266843 - RNA, 19 nt, Homo sapiens
  misc_RNA (1)...(19): siRNA sense strand
gaaggaauacuugacaguu

SEQ ID NO: 1266844 - RNA, 19 nt, Homo sapiens
  misc_RNA (1)...(19): siRNA sense strand
aaggaauacuugacaguuu

SEQ ID NO: 1266845 - RNA, 19 nt, Homo sapiens
  misc_RNA (1)...(19): siRNA sense strand
ucagaugacgccuguuaua

SEQ ID NO: 1266846 - RNA, 19 nt, Homo sapiens
  misc_RNA (1)...(19): siRNA sense strand
gaaaacacaccuuuaguga

SEQ ID NO: 1266847 - RNA, 19 nt, Homo sapiens
  misc_RNA (1)...(19): siRNA sense strand
gaugacgccuguuauagag

SEQ ID NO: 1266848 - RNA, 19 nt, Homo sapiens
  misc_RNA (1)...(19): siRNA sense strand
gagaaacauguccauauau

SEQ ID NO: 1266849 - RNA, 19 nt, Homo sapiens
  misc_RNA (1)...(19): siRNA sense strand
acgaguagauuauaagugu

SEQ ID NO: 1266850 - RNA, 19 nt, Homo sapiens
  misc_RNA (1)...(19): siRNA sense strand
cuacaaagcaacaguuaug

SEQ ID NO: 1266851 - RNA, 19 nt, Homo sapiens
  misc_RNA (1)...(19): siRNA sense strand
ccaccaacauuugaagcua

SEQ ID NO: 1266852 - RNA, 19 nt, Homo sapiens
  misc_RNA (1)...(19): siRNA sense strand
uauacgggauccuuuaaau

SEQ ID NO: 1266853 - RNA, 19 nt, Homo sapiens
  misc_RNA (1)...(19): siRNA sense strand
cgaguuugguuaucagaug

SEQ ID NO: 1266854 - RNA, 19 nt, Homo sapiens
  misc_RNA (1)...(19): siRNA sense strand
gaacgaguagauuauaagu

SEQ ID NO: 1266855 - RNA, 19 nt, Homo sapiens
  misc_RNA (1)...(19): siRNA sense strand
gugaggagccaccaacauu

SEQ ID NO: 1266856 - RNA, 19 nt, Homo sapiens
  misc_RNA (1)...(19): siRNA sense strand
gauggcagcgacacaauug

SEQ ID NO: 1266857 - RNA, 19 nt, Homo sapiens
  misc_RNA (1)...(19): siRNA sense strand
gcuauggagcucauuggua

SEQ ID NO: 1266858 - RNA, 19 nt, Homo sapiens
  misc_RNA (1)...(19): siRNA sense strand
gaggagccaccaacauuug

SEQ ID NO: 1266859 - RNA, 19 nt, Homo sapiens
  misc_RNA (1)...(19): siRNA sense strand
acacaccuuuagugaagua

SEQ ID NO: 1266860 - RNA, 19 nt, Homo sapiens
  misc_RNA (1)...(19): siRNA sense strand
ucucagaugacgccuguua

SEQ ID NO: 1266861 - RNA, 19 nt, Homo sapiens
  misc_RNA (1)...(19): siRNA sense strand
uagagaaacauguccauau

SEQ ID NO: 1266862 - RNA, 19 nt, Homo sapiens
  misc_RNA (1)...(19): siRNA sense strand
guuccaaagugucuuaaag

SEQ ID NO: 1266863 - RNA, 19 nt, Homo sapiens
  misc_RNA (1)...(19): siRNA sense strand
ggugaacgaguagauuaua

SEQ ID NO: 1266864 - RNA, 19 nt, Homo sapiens
  misc_RNA (1)...(19): siRNA sense strand
gaaguagaaguauuugagu

SEQ ID NO: 1266865 - RNA, 19 nt, Homo sapiens
  misc_RNA (1)...(19): siRNA sense strand
gaaacauguccauauauac

SEQ ID NO: 1266866 - RNA, 19 nt, Homo sapiens
  misc_RNA (1)...(19): siRNA sense strand
ugacgccuguuauagagaa

SEQ ID NO: 1266867 - RNA, 19 nt, Homo sapiens
  misc_RNA (1)...(19): siRNA sense strand
cgaguagauuauaagugua

SEQ ID NO: 1266868 - RNA, 19 nt, Homo sapiens
  misc_RNA (1)...(19): siRNA sense strand
gcacuuuauuuguaaugag

SEQ ID NO: 1266869 - RNA, 19 nt, Homo sapiens
  misc_RNA (1)...(19): siRNA sense strand
guagaaguauuugaguauc

SEQ ID NO: 1266870 - RNA, 19 nt, Homo sapiens
  misc_RNA (1)...(19): siRNA sense strand
guauuugaguaucuugaug

SEQ ID NO: 1266871 - RNA, 19 nt, Homo sapiens
  misc_RNA (1)...(19): siRNA sense strand
aggaauacuugacaguuug

SEQ ID NO: 1266872 - RNA, 19 nt, Homo sapiens
  misc_RNA (1)...(19): siRNA sense strand
ccaaaacccuacuaugaga

SEQ ID NO: 1266873 - RNA, 19 nt, Homo sapiens
  misc_RNA (1)...(19): siRNA sense strand
aguguaaaguggucaaaug

SEQ ID NO: 1266874 - RNA, 19 nt, Homo sapiens
  misc_RNA (1)...(19): siRNA sense strand
ccacccauacuauuuguga

SEQ ID NO: 1266875 - RNA, 19 nt, Homo sapiens
  misc_RNA (1)...(19): siRNA sense strand
caccaacauuugaagcuau

SEQ ID NO: 1266876 - RNA, 19 nt, Homo sapiens
  misc_RNA (1)...(19): siRNA sense strand
uuggagagagcacgauuua

SEQ ID NO: 1266877 - RNA, 19 nt, Homo sapiens
  misc_RNA (1)...(19): siRNA sense strand
gguuaucagaugcacuuua

SEQ ID NO: 1266878 - RNA, 19 nt, Homo sapiens
  misc_RNA (1)...(19): siRNA sense strand
ugaggagccaccaacauuu

SEQ ID NO: 1266879 - RNA, 19 nt, Homo sapiens
  misc_RNA (1)...(19): siRNA sense strand
ggaaggaauacuugacagu

SEQ ID NO: 1266880 - RNA, 19 nt, Homo sapiens
  misc_RNA (1)...(19): siRNA sense strand
gaggaaggaauacuugaca

SEQ ID NO: 1266881 - RNA, 19 nt, Homo sapiens
  misc_RNA (1)...(19): siRNA sense strand
ccaguuccaaagugucuua

SEQ ID NO: 1266882 - RNA, 19 nt, Homo sapiens
  misc_RNA (1)...(19): siRNA sense strand
ugaguaucuugaugcagua

SEQ ID NO: 1266883 - RNA, 19 nt, Homo sapiens
  misc_RNA (1)...(19): siRNA sense strand
caccuuuagugaaguagaa

SEQ ID NO: 1266884 - RNA, 19 nt, Homo sapiens
  misc_RNA (1)...(19): siRNA sense strand
acagauaucaggauuugga

SEQ ID NO: 1266885 - RNA, 19 nt, Homo sapiens
  misc_RNA (1)...(19): siRNA sense strand
ucauugcugugauuguuau

SEQ ID NO: 1266886 - RNA, 19 nt, Homo sapiens
  misc_RNA (1)...(19): siRNA sense strand
ucagaugcacuuuauuugu

SEQ ID NO: 1266887 - RNA, 19 nt, Homo sapiens
  misc_RNA (1)...(19): siRNA sense strand
gugcugcuccagaguguaa

SEQ ID NO: 1266888 - RNA, 19 nt, Homo sapiens
  misc_RNA (1)...(19): siRNA sense strand
ggaaaacacaccuuuagug

SEQ ID NO: 1266889 - RNA, 19 nt, Homo sapiens
  misc_RNA (1)...(19): siRNA sense strand
aaggaucaguagcaauuug

SEQ ID NO: 1266890 - RNA, 19 nt, Homo sapiens
  misc_RNA (1)...(19): siRNA sense strand
uauauacgggauccuuuaa

SEQ ID NO: 1266891 - RNA, 19 nt, Homo sapiens
  misc_RNA (1)...(19): siRNA sense strand
ugaaguagaaguauuugag

SEQ ID NO: 1266892 - RNA, 19 nt, Homo sapiens
  misc_RNA (1)...(19): siRNA sense strand
cuugacaguuuggauguuu

SEQ ID NO: 1266893 - RNA, 19 nt, Homo sapiens
  misc_RNA (1)...(19): siRNA sense strand
cauauauacgggauccuuu

SEQ ID NO: 1266894 - RNA, 19 nt, Homo sapiens
  misc_RNA (1)...(19): siRNA sense strand
auauauacgggauccuuua

SEQ ID NO: 1266895 - RNA, 19 nt, Homo sapiens
  misc_RNA (1)...(19): siRNA sense strand
cuuaaaggaucaguagcaa

SEQ ID NO: 1266896 - RNA, 19 nt, Homo sapiens
  misc_RNA (1)...(19): siRNA sense strand
uaaaccugaggaaggaaua

SEQ ID NO: 1266897 - RNA, 19 nt, Homo sapiens
  misc_RNA (1)...(19): siRNA sense strand
agaugacgccuguuauaga

SEQ ID NO: 1266898 - RNA, 19 nt, Homo sapiens
  misc_RNA (1)...(19): siRNA sense strand
ugugauuguuauugccaua

SEQ ID NO: 1266899 - RNA, 19 nt, Homo sapiens
  misc_RNA (1)...(19): siRNA sense strand
gagagcacgauuuauugug

SEQ ID NO: 1266900 - RNA, 19 nt, Homo sapiens
  misc_RNA (1)...(19): siRNA sense strand
gaaguauuugaguaucuug

SEQ ID NO: 1266901 - RNA, 19 nt, Homo sapiens
  misc_RNA (1)...(19): siRNA sense strand
ggcuaccugucucagauga

SEQ ID NO: 1266902 - RNA, 19 nt, Homo sapiens
  misc_RNA (1)...(19): siRNA sense strand
gauaucaggauuuggaaaa

SEQ ID NO: 1266903 - RNA, 19 nt, Homo sapiens
  misc_RNA (1)...(19): siRNA sense strand
ccucuugccacccauacua

SEQ ID NO: 1266904 - RNA, 19 nt, Homo sapiens
  misc_RNA (1)...(19): siRNA sense strand
ccaugguguugcugcugua

SEQ ID NO: 1266905 - RNA, 19 nt, Homo sapiens
  misc_RNA (1)...(19): siRNA sense strand
cagaugacgccuguuauag

SEQ ID NO: 1266906 - RNA, 19 nt, Homo sapiens
  misc_RNA (1)...(19): siRNA sense strand
uuggugaacgaguagauua

SEQ ID NO: 1266907 - RNA, 19 nt, Homo sapiens
  misc_RNA (1)...(19): siRNA sense strand
gucauugcugugauuguua

SEQ ID NO: 1266908 - RNA, 19 nt, Homo sapiens
  misc_RNA (1)...(19): siRNA sense strand
ggagccaccaacauuugaa

SEQ ID NO: 1266909 - RNA, 19 nt, Homo sapiens
  misc_RNA (1)...(19): siRNA sense strand
gcgcuuuccuggguugcuu

SEQ ID NO: 1266910 - RNA, 19 nt, Homo sapiens
  misc_RNA (1)...(19): siRNA sense strand
uacuacaaagcaacaguua

SEQ ID NO: 1266911 - RNA, 19 nt, Homo sapiens
  misc_RNA (1)...(19): siRNA sense strand
cuugaugcaguaacuuaua

SEQ ID NO: 1266912 - RNA, 19 nt, Homo sapiens
  misc_RNA (1)...(19): siRNA sense strand
aaacauguccauauauacg

SEQ ID NO: 1266913 - RNA, 19 nt, Homo sapiens
  misc_RNA (1)...(19): siRNA sense strand
guguaaaguggucaaaugu

SEQ ID NO: 1266914 - RNA, 19 nt, Homo sapiens
  misc_RNA (1)...(19): siRNA sense strand
cuuacgaguuugguuauca

SEQ ID NO: 1266915 - RNA, 19 nt, Homo sapiens
  misc_RNA (1)...(19): siRNA sense strand
uacgggauccuuuaaaugg

SEQ ID NO: 1266916 - RNA, 19 nt, Homo sapiens
  misc_RNA (1)...(19): siRNA sense strand
aaccaaaacccuacuauga

SEQ ID NO: 1266917 - RNA, 19 nt, Homo sapiens
  misc_RNA (1)...(19): siRNA sense strand
cccaauaugugaaaagguu

SEQ ID NO: 1266918 - RNA, 19 nt, Homo sapiens
  misc_RNA (1)...(19): siRNA sense strand
cgauggcagcgacacaauu

SEQ ID NO: 1266919 - RNA, 19 nt, Homo sapiens
  misc_RNA (1)...(19): siRNA sense strand
gauccauuuucacuuauug

SEQ ID NO: 1266920 - RNA, 19 nt, Homo sapiens
  misc_RNA (1)...(19): siRNA sense strand
uugaugcaguaacuuauag

SEQ ID NO: 1266921 - RNA, 19 nt, Homo sapiens
  misc_RNA (1)...(19): siRNA sense strand
guaucuugaugcaguaacu

SEQ ID NO: 1266922 - RNA, 19 nt, Homo sapiens
  misc_RNA (1)...(19): siRNA sense strand
caacauuugaagcuaugga

SEQ ID NO: 1266923 - RNA, 19 nt, Homo sapiens
  misc_RNA (1)...(19): siRNA sense strand
gagauuggugaacgaguag

SEQ ID NO: 1266924 - RNA, 19 nt, Homo sapiens
  misc_RNA (1)...(19): siRNA sense strand
ggagagagcacgauuuauu

SEQ ID NO: 1266925 - RNA, 19 nt, Homo sapiens
  misc_RNA (1)...(19): siRNA sense strand
agagaaacauguccauaua

SEQ ID NO: 1266926 - RNA, 19 nt, Homo sapiens
  misc_RNA (1)...(19): siRNA sense strand
cagaugcacuuuauuugua

SEQ ID NO: 1266927 - RNA, 19 nt, Homo sapiens
  misc_RNA (1)...(19): siRNA sense strand
ggacuuacgaguuugguua

SEQ ID NO: 1266928 - RNA, 19 nt, Homo sapiens
  misc_RNA (1)...(19): siRNA sense strand
aaacagauaucaggauuug

SEQ ID NO: 1266929 - RNA, 19 nt, Homo sapiens
  misc_RNA (1)...(19): siRNA sense strand
cuauggagcucauugguaa

SEQ ID NO: 1266930 - RNA, 19 nt, Homo sapiens
  misc_RNA (1)...(19): siRNA sense strand
aaacacaccuuuagugaag

SEQ ID NO: 1266931 - RNA, 19 nt, Homo sapiens
  misc_RNA (1)...(19): siRNA sense strand
gaacuuaaaggaucaguag

SEQ ID NO: 1266932 - RNA, 19 nt, Homo sapiens
  misc_RNA (1)...(19): siRNA sense strand
gaaaacagauaucaggauu

SEQ ID NO: 1266933 - RNA, 19 nt, Homo sapiens
  misc_RNA (1)...(19): siRNA sense strand
uaaaggaucaguagcaauu

SEQ ID NO: 1266934 - RNA, 19 nt, Homo sapiens
  misc_RNA (1)...(19): siRNA sense strand
aaaugggacuuacgaguuu

SEQ ID NO: 1266935 - RNA, 19 nt, Homo sapiens
  misc_RNA (1)...(19): siRNA sense strand
guuaucagaugcacuuuau

SEQ ID NO: 1266936 - RNA, 19 nt, Homo sapiens
  misc_RNA (1)...(19): siRNA sense strand
ugagauuggugaacgagua

SEQ ID NO: 1266937 - RNA, 19 nt, Homo sapiens
  misc_RNA (1)...(19): siRNA sense strand
gugaacgaguagauuauaa

SEQ ID NO: 1266938 - RNA, 19 nt, Homo sapiens
  misc_RNA (1)...(19): siRNA sense strand
gagagagcacgauuuauug

SEQ ID NO: 1266939 - RNA, 19 nt, Homo sapiens
  misc_RNA (1)...(19): siRNA sense strand
caaaugggacuuacgaguu

SEQ ID NO: 1266940 - RNA, 19 nt, Homo sapiens
  misc_RNA (1)...(19): siRNA sense strand
ggucauugcugugauuguu

SEQ ID NO: 1266941 - RNA, 19 nt, Homo sapiens
  misc_RNA (1)...(19): siRNA sense strand
ccagauccauuuucacuua

SEQ ID NO: 1266942 - RNA, 19 nt, Homo sapiens
  misc_RNA (1)...(19): siRNA sense strand
gaaggaauacuugacaguu

SEQ ID NO: 1266943 - RNA, 19 nt, Homo sapiens
  misc_RNA (1)...(19): siRNA sense strand
aaggaauacuugacaguuu

SEQ ID NO: 1266944 - RNA, 19 nt, Homo sapiens
  misc_RNA (1)...(19): siRNA sense strand
ucagaugacgccuguuaua

SEQ ID NO: 1266945 - RNA, 19 nt, Homo sapiens
  misc_RNA (1)...(19): siRNA sense strand
gaaaacacaccuuuaguga

SEQ ID NO: 1266946 - RNA, 19 nt, Homo sapiens
  misc_RNA (1)...(19): siRNA sense strand
gaugacgccuguuauagag

SEQ ID NO: 1266947 - RNA, 19 nt, Homo sapiens
  misc_RNA (1)...(19): siRNA sense strand
gagaaacauguccauauau

SEQ ID NO: 1266948 - RNA, 19 nt, Homo sapiens
  misc_RNA (1)...(19): siRNA sense strand
acgaguagauuauaagugu

SEQ ID NO: 1266949 - RNA, 19 nt, Homo sapiens
  misc_RNA (1)...(19): siRNA sense strand
cuacaaagcaacaguuaug

SEQ ID NO: 1266950 - RNA, 19 nt, Homo sapiens
  misc_RNA (1)...(19): siRNA sense strand
ccaccaacauuugaagcua

SEQ ID NO: 1266951 - RNA, 19 nt, Homo sapiens
  misc_RNA (1)...(19): siRNA sense strand
uauacgggauccuuuaaau

SEQ ID NO: 1266952 - RNA, 19 nt, Homo sapiens
  misc_RNA (1)...(19): siRNA sense strand
cgaguuugguuaucagaug

SEQ ID NO: 1266953 - RNA, 19 nt, Homo sapiens
  misc_RNA (1)...(19): siRNA sense strand
gaacgaguagauuauaagu

SEQ ID NO: 1266954 - RNA, 19 nt, Homo sapiens
  misc_RNA (1)...(19): siRNA sense strand
gugaggagccaccaacauu

SEQ ID NO: 1266955 - RNA, 19 nt, Homo sapiens
  misc_RNA (1)...(19): siRNA sense strand
gauggcagcgacacaauug

SEQ ID NO: 1266956 - RNA, 19 nt, Homo sapiens
  misc_RNA (1)...(19): siRNA sense strand
gcuauggagcucauuggua

SEQ ID NO: 1266957 - RNA, 19 nt, Homo sapiens
  misc_RNA (1)...(19): siRNA sense strand
gaggagccaccaacauuug

SEQ ID NO: 1266958 - RNA, 19 nt, Homo sapiens
  misc_RNA (1)...(19): siRNA sense strand
acacaccuuuagugaagua

SEQ ID NO: 1266959 - RNA, 19 nt, Homo sapiens
  misc_RNA (1)...(19): siRNA sense strand
ucucagaugacgccuguua

SEQ ID NO: 1266960 - RNA, 19 nt, Homo sapiens
  misc_RNA (1)...(19): siRNA sense strand
uagagaaacauguccauau

SEQ ID NO: 1266961 - RNA, 19 nt, Homo sapiens
  misc_RNA (1)...(19): siRNA sense strand
ggugaacgaguagauuaua

SEQ ID NO: 1266962 - RNA, 19 nt, Homo sapiens
  misc_RNA (1)...(19): siRNA sense strand
gaaguagaaguauuugagu

SEQ ID NO: 1266963 - RNA, 19 nt, Homo sapiens
  misc_RNA (1)...(19): siRNA sense strand
gaaacauguccauauauac

SEQ ID NO: 1266964 - RNA, 19 nt, Homo sapiens
  misc_RNA (1)...(19): siRNA sense strand
ugacgccuguuauagagaa

SEQ ID NO: 1266965 - RNA, 19 nt, Homo sapiens
  misc_RNA (1)...(19): siRNA sense strand
cgaguagauuauaagugua

SEQ ID NO: 1266966 - RNA, 19 nt, Homo sapiens
  misc_RNA (1)...(19): siRNA sense strand
gcacuuuauuuguaaugag

SEQ ID NO: 1266967 - RNA, 19 nt, Homo sapiens
  misc_RNA (1)...(19): siRNA sense strand
guagaaguauuugaguauc

SEQ ID NO: 1266968 - RNA, 19 nt, Homo sapiens
  misc_RNA (1)...(19): siRNA sense strand
guauuugaguaucuugaug

SEQ ID NO: 1266969 - RNA, 19 nt, Homo sapiens
  misc_RNA (1)...(19): siRNA sense strand
aggaauacuugacaguuug

SEQ ID NO: 1266970 - RNA, 19 nt, Homo sapiens
  misc_RNA (1)...(19): siRNA sense strand
aguguaaaguggucaaaug

SEQ ID NO: 1266971 - RNA, 19 nt, Homo sapiens
  misc_RNA (1)...(19): siRNA sense strand
ccaaaacccuacuaugaga

SEQ ID NO: 1266972 - RNA, 19 nt, Homo sapiens
  misc_RNA (1)...(19): siRNA sense strand
ccacccauacuauuuguga

SEQ ID NO: 1266973 - RNA, 19 nt, Homo sapiens
  misc_RNA (1)...(19): siRNA sense strand
caccaacauuugaagcuau

SEQ ID NO: 1266974 - RNA, 19 nt, Homo sapiens
  misc_RNA (1)...(19): siRNA sense strand
uuggagagagcacgauuua

SEQ ID NO: 1266975 - RNA, 19 nt, Homo sapiens
  misc_RNA (1)...(19): siRNA sense strand
gguuaucagaugcacuuua

SEQ ID NO: 1266976 - RNA, 19 nt, Homo sapiens
  misc_RNA (1)...(19): siRNA sense strand
ugaggagccaccaacauuu

SEQ ID NO: 1266977 - RNA, 19 nt, Homo sapiens
  misc_RNA (1)...(19): siRNA sense strand
ggaaggaauacuugacagu

SEQ ID NO: 1266978 - RNA, 19 nt, Homo sapiens
  misc_RNA (1)...(19): siRNA sense strand
gaggaaggaauacuugaca

SEQ ID NO: 1266979 - RNA, 19 nt, Homo sapiens
  misc_RNA (1)...(19): siRNA sense strand
ugaguaucuugaugcagua

SEQ ID NO: 1266980 - RNA, 19 nt, Homo sapiens
  misc_RNA (1)...(19): siRNA sense strand
caccuuuagugaaguagaa

SEQ ID NO: 1266981 - RNA, 19 nt, Homo sapiens
  misc_RNA (1)...(19): siRNA sense strand
acagauaucaggauuugga

SEQ ID NO: 1266982 - RNA, 19 nt, Homo sapiens
  misc_RNA (1)...(19): siRNA sense strand
ucauugcugugauuguuau

SEQ ID NO: 1266983 - RNA, 19 nt, Homo sapiens
  misc_RNA (1)...(19): siRNA sense strand
ucagaugcacuuuauuugu

SEQ ID NO: 1266984 - RNA, 19 nt, Homo sapiens
  misc_RNA (1)...(19): siRNA sense strand
gugcugcuccagaguguaa

SEQ ID NO: 1266985 - RNA, 19 nt, Homo sapiens
  misc_RNA (1)...(19): siRNA sense strand
ggaaaacacaccuuuagug

SEQ ID NO: 1266986 - RNA, 19 nt, Homo sapiens
  misc_RNA (1)...(19): siRNA sense strand
aaggaucaguagcaauuug

SEQ ID NO: 1266987 - RNA, 19 nt, Homo sapiens
  misc_RNA (1)...(19): siRNA sense strand
uauauacgggauccuuuaa

SEQ ID NO: 1266988 - RNA, 19 nt, Homo sapiens
  misc_RNA (1)...(19): siRNA sense strand
ugaaguagaaguauuugag

SEQ ID NO: 1266989 - RNA, 19 nt, Homo sapiens
  misc_RNA (1)...(19): siRNA sense strand
cuugacaguuuggauguuu

SEQ ID NO: 1266990 - RNA, 19 nt, Homo sapiens
  misc_RNA (1)...(19): siRNA sense strand
cauauauacgggauccuuu

SEQ ID NO: 1266991 - RNA, 19 nt, Homo sapiens
  misc_RNA (1)...(19): siRNA sense strand
auauauacgggauccuuua

SEQ ID NO: 1266992 - RNA, 19 nt, Homo sapiens
  misc_RNA (1)...(19): siRNA sense strand
cuuaaaggaucaguagcaa

SEQ ID NO: 1266993 - RNA, 19 nt, Homo sapiens
  misc_RNA (1)...(19): siRNA sense strand
uaaaccugaggaaggaaua

SEQ ID NO: 1266994 - RNA, 19 nt, Homo sapiens
  misc_RNA (1)...(19): siRNA sense strand
agaugacgccuguuauaga

SEQ ID NO: 1266995 - RNA, 19 nt, Homo sapiens
  misc_RNA (1)...(19): siRNA sense strand
ugugauuguuauugccaua

SEQ ID NO: 1266996 - RNA, 19 nt, Homo sapiens
  misc_RNA (1)...(19): siRNA sense strand
gagagcacgauuuauugug

SEQ ID NO: 1266997 - RNA, 19 nt, Homo sapiens
  misc_RNA (1)...(19): siRNA sense strand
gaaguauuugaguaucuug

SEQ ID NO: 1266998 - RNA, 19 nt, Homo sapiens
  misc_RNA (1)...(19): siRNA sense strand
ccucuugccacccauacua

SEQ ID NO: 1266999 - RNA, 19 nt, Homo sapiens
  misc_RNA (1)...(19): siRNA sense strand
gauaucaggauuuggaaaa

SEQ ID NO: 1267000 - RNA, 19 nt, Homo sapiens
  misc_RNA (1)...(19): siRNA sense strand
ggcuaccugucucagauga

SEQ ID NO: 1267001 - RNA, 19 nt, Homo sapiens
  misc_RNA (1)...(19): siRNA sense strand
ccaugguguugcugcugua

SEQ ID NO: 1267002 - RNA, 19 nt, Homo sapiens
  misc_RNA (1)...(19): siRNA sense strand
cagaugacgccuguuauag

SEQ ID NO: 1267003 - RNA, 19 nt, Homo sapiens
  misc_RNA (1)...(19): siRNA sense strand
gucauugcugugauuguua

SEQ ID NO: 1267004 - RNA, 19 nt, Homo sapiens
  misc_RNA (1)...(19): siRNA sense strand
uuggugaacgaguagauua

SEQ ID NO: 1267005 - RNA, 19 nt, Homo sapiens
  misc_RNA (1)...(19): siRNA sense strand
ggagccaccaacauuugaa

SEQ ID NO: 1267006 - RNA, 19 nt, Homo sapiens
  misc_RNA (1)...(19): siRNA sense strand
gcgcuuuccuggguugcuu

SEQ ID NO: 1267007 - RNA, 19 nt, Homo sapiens
  misc_RNA (1)...(19): siRNA sense strand
uacuacaaagcaacaguua

SEQ ID NO: 1267008 - RNA, 19 nt, Homo sapiens
  misc_RNA (1)...(19): siRNA sense strand
cuugaugcaguaacuuaua

SEQ ID NO: 1267009 - RNA, 19 nt, Homo sapiens
  misc_RNA (1)...(19): siRNA sense strand
aaacauguccauauauacg

SEQ ID NO: 1267010 - RNA, 19 nt, Homo sapiens
  misc_RNA (1)...(19): siRNA sense strand
guguaaaguggucaaaugu

SEQ ID NO: 1267011 - RNA, 19 nt, Homo sapiens
  misc_RNA (1)...(19): siRNA sense strand
cuuacgaguuugguuauca

SEQ ID NO: 1267012 - RNA, 19 nt, Homo sapiens
  misc_RNA (1)...(19): siRNA sense strand
uacgggauccuuuaaaugg

SEQ ID NO: 1267013 - RNA, 19 nt, Homo sapiens
  misc_RNA (1)...(19): siRNA sense strand
aaccaaaacccuacuauga

SEQ ID NO: 1267014 - RNA, 19 nt, Homo sapiens
  misc_RNA (1)...(19): siRNA sense strand
cccaauaugugaaaagguu

SEQ ID NO: 1267015 - RNA, 19 nt, Homo sapiens
  misc_RNA (1)...(19): siRNA sense strand
cgauggcagcgacacaauu

SEQ ID NO: 1267016 - RNA, 19 nt, Homo sapiens
  misc_RNA (1)...(19): siRNA sense strand
gauccauuuucacuuauug

SEQ ID NO: 1267017 - RNA, 19 nt, Homo sapiens
  misc_RNA (1)...(19): siRNA sense strand
uugaugcaguaacuuauag

SEQ ID NO: 1267018 - RNA, 19 nt, Homo sapiens
  misc_RNA (1)...(19): siRNA sense strand
guaucuugaugcaguaacu

SEQ ID NO: 1267019 - RNA, 19 nt, Homo sapiens
  misc_RNA (1)...(19): siRNA sense strand
caacauuugaagcuaugga

SEQ ID NO: 1267020 - RNA, 19 nt, Homo sapiens
  misc_RNA (1)...(19): siRNA sense strand
gagauuggugaacgaguag

SEQ ID NO: 1267021 - RNA, 19 nt, Homo sapiens
  misc_RNA (1)...(19): siRNA sense strand
ggagagagcacgauuuauu

SEQ ID NO: 1267022 - RNA, 19 nt, Homo sapiens
  misc_RNA (1)...(19): siRNA sense strand
agagaaacauguccauaua

SEQ ID NO: 1267023 - RNA, 19 nt, Homo sapiens
  misc_RNA (1)...(19): siRNA sense strand
cagaugcacuuuauuugua

SEQ ID NO: 1267024 - RNA, 19 nt, Homo sapiens
  misc_RNA (1)...(19): siRNA sense strand
ggacuuacgaguuugguua

SEQ ID NO: 1267025 - RNA, 19 nt, Homo sapiens
  misc_RNA (1)...(19): siRNA sense strand
aaacagauaucaggauuug

SEQ ID NO: 1267026 - RNA, 19 nt, Homo sapiens
  misc_RNA (1)...(19): siRNA sense strand
cuauggagcucauugguaa

SEQ ID NO: 1267027 - RNA, 19 nt, Homo sapiens
  misc_RNA (1)...(19): siRNA sense strand
aaacacaccuuuagugaag

SEQ ID NO: 1267028 - RNA, 19 nt, Homo sapiens
  misc_RNA (1)...(19): siRNA sense strand
gaacuuaaaggaucaguag

SEQ ID NO: 1267029 - RNA, 19 nt, Homo sapiens
  misc_RNA (1)...(19): siRNA sense strand
gaaaacagauaucaggauu

SEQ ID NO: 1267030 - RNA, 19 nt, Homo sapiens
  misc_RNA (1)...(19): siRNA sense strand
uaaaggaucaguagcaauu

SEQ ID NO: 1267031 - RNA, 19 nt, Homo sapiens
  misc_RNA (1)...(19): siRNA sense strand
aaaugggacuuacgaguuu

SEQ ID NO: 1267032 - RNA, 19 nt, Homo sapiens
  misc_RNA (1)...(19): siRNA sense strand
guuaucagaugcacuuuau

SEQ ID NO: 1267033 - RNA, 19 nt, Homo sapiens
  misc_RNA (1)...(19): siRNA sense strand
gagcugaauaugccacuua

SEQ ID NO: 1267034 - RNA, 19 nt, Homo sapiens
  misc_RNA (1)...(19): siRNA sense strand
ugagauuggugaacgagua

SEQ ID NO: 1267035 - RNA, 19 nt, Homo sapiens
  misc_RNA (1)...(19): siRNA sense strand
gugaacgaguagauuauaa

SEQ ID NO: 1267036 - RNA, 19 nt, Homo sapiens
  misc_RNA (1)...(19): siRNA sense strand
gagagagcacgauuuauug

SEQ ID NO: 1267037 - RNA, 19 nt, Homo sapiens
  misc_RNA (1)...(19): siRNA sense strand
caaaugggacuuacgaguu

SEQ ID NO: 1267038 - RNA, 19 nt, Homo sapiens
  misc_RNA (1)...(19): siRNA sense strand
ggucauugcugugauuguu

SEQ ID NO: 1267039 - RNA, 19 nt, Homo sapiens
  misc_RNA (1)...(19): siRNA sense strand
ccagauccauuuucacuua

SEQ ID NO: 1267040 - RNA, 19 nt, Homo sapiens
  misc_RNA (1)...(19): siRNA sense strand
gaaggaauacuugacaguu

SEQ ID NO: 1267041 - RNA, 19 nt, Homo sapiens
  misc_RNA (1)...(19): siRNA sense strand
aaggaauacuugacaguuu

SEQ ID NO: 1267042 - RNA, 19 nt, Homo sapiens
  misc_RNA (1)...(19): siRNA sense strand
ucagaugacgccuguuaua

SEQ ID NO: 1267043 - RNA, 19 nt, Homo sapiens
  misc_RNA (1)...(19): siRNA sense strand
gaaaacacaccuuuaguga

SEQ ID NO: 1267044 - RNA, 19 nt, Homo sapiens
  misc_RNA (1)...(19): siRNA sense strand
gaugacgccuguuauagag

SEQ ID NO: 1267045 - RNA, 19 nt, Homo sapiens
  misc_RNA (1)...(19): siRNA sense strand
gagaaacauguccauauau

SEQ ID NO: 1267046 - RNA, 19 nt, Homo sapiens
  misc_RNA (1)...(19): siRNA sense strand
ccacuuaccagacuaaauc

SEQ ID NO: 1267047 - RNA, 19 nt, Homo sapiens
  misc_RNA (1)...(19): siRNA sense strand
acgaguagauuauaagugu

SEQ ID NO: 1267048 - RNA, 19 nt, Homo sapiens
  misc_RNA (1)...(19): siRNA sense strand
cuacaaagcaacaguuaug

SEQ ID NO: 1267049 - RNA, 19 nt, Homo sapiens
  misc_RNA (1)...(19): siRNA sense strand
ccaccaacauuugaagcua

SEQ ID NO: 1267050 - RNA, 19 nt, Homo sapiens
  misc_RNA (1)...(19): siRNA sense strand
uauacgggauccuuuaaau

SEQ ID NO: 1267051 - RNA, 19 nt, Homo sapiens
  misc_RNA (1)...(19): siRNA sense strand
cgaguuugguuaucagaug

SEQ ID NO: 1267052 - RNA, 19 nt, Homo sapiens
  misc_RNA (1)...(19): siRNA sense strand
gaacgaguagauuauaagu

SEQ ID NO: 1267053 - RNA, 19 nt, Homo sapiens
  misc_RNA (1)...(19): siRNA sense strand
gugaggagccaccaacauu

SEQ ID NO: 1267054 - RNA, 19 nt, Homo sapiens
  misc_RNA (1)...(19): siRNA sense strand
gauggcagcgacacaauug

SEQ ID NO: 1267055 - RNA, 19 nt, Homo sapiens
  misc_RNA (1)...(19): siRNA sense strand
ucucagaugacgccuguua

SEQ ID NO: 1267056 - RNA, 19 nt, Homo sapiens
  misc_RNA (1)...(19): siRNA sense strand
gaggagccaccaacauuug

SEQ ID NO: 1267057 - RNA, 19 nt, Homo sapiens
  misc_RNA (1)...(19): siRNA sense strand
gcuauggagcucauuggua

SEQ ID NO: 1267058 - RNA, 19 nt, Homo sapiens
  misc_RNA (1)...(19): siRNA sense strand
acacaccuuuagugaagua

SEQ ID NO: 1267059 - RNA, 19 nt, Homo sapiens
  misc_RNA (1)...(19): siRNA sense strand
uagagaaacauguccauau

SEQ ID NO: 1267060 - RNA, 19 nt, Homo sapiens
  misc_RNA (1)...(19): siRNA sense strand
ggugaacgaguagauuaua

SEQ ID NO: 1267061 - RNA, 19 nt, Homo sapiens
  misc_RNA (1)...(19): siRNA sense strand
gaaguagaaguauuugagu

SEQ ID NO: 1267062 - RNA, 19 nt, Homo sapiens
  misc_RNA (1)...(19): siRNA sense strand
gaaacauguccauauauac

SEQ ID NO: 1267063 - RNA, 19 nt, Homo sapiens
  misc_RNA (1)...(19): siRNA sense strand
ugacgccuguuauagagaa

SEQ ID NO: 1267064 - RNA, 19 nt, Homo sapiens
  misc_RNA (1)...(19): siRNA sense strand
cgaguagauuauaagugua

SEQ ID NO: 1267065 - RNA, 19 nt, Homo sapiens
  misc_RNA (1)...(19): siRNA sense strand
gcacuuuauuuguaaugag

SEQ ID NO: 1267066 - RNA, 19 nt, Homo sapiens
  misc_RNA (1)...(19): siRNA sense strand
guagaaguauuugaguauc

SEQ ID NO: 1267067 - RNA, 19 nt, Homo sapiens
  misc_RNA (1)...(19): siRNA sense strand
guauuugaguaucuugaug

SEQ ID NO: 1267068 - RNA, 19 nt, Homo sapiens
  misc_RNA (1)...(19): siRNA sense strand
aggaauacuugacaguuug

SEQ ID NO: 1267069 - RNA, 19 nt, Homo sapiens
  misc_RNA (1)...(19): siRNA sense strand
ccaaaacccuacuaugaga

SEQ ID NO: 1267070 - RNA, 19 nt, Homo sapiens
  misc_RNA (1)...(19): siRNA sense strand
aguguaaaguggucaaaug

SEQ ID NO: 1267071 - RNA, 19 nt, Homo sapiens
  misc_RNA (1)...(19): siRNA sense strand
ccacccauacuauuuguga

SEQ ID NO: 1267072 - RNA, 19 nt, Homo sapiens
  misc_RNA (1)...(19): siRNA sense strand
uuggagagagcacgauuua

SEQ ID NO: 1267073 - RNA, 19 nt, Homo sapiens
  misc_RNA (1)...(19): siRNA sense strand
gguuaucagaugcacuuua

SEQ ID NO: 1267074 - RNA, 19 nt, Homo sapiens
  misc_RNA (1)...(19): siRNA sense strand
caccaacauuugaagcuau

SEQ ID NO: 1267075 - RNA, 19 nt, Homo sapiens
  misc_RNA (1)...(19): siRNA sense strand
ugaggagccaccaacauuu

SEQ ID NO: 1267076 - RNA, 19 nt, Homo sapiens
  misc_RNA (1)...(19): siRNA sense strand
ggaaggaauacuugacagu

SEQ ID NO: 1267077 - RNA, 19 nt, Homo sapiens
  misc_RNA (1)...(19): siRNA sense strand
gaggaaggaauacuugaca

SEQ ID NO: 1267078 - RNA, 19 nt, Homo sapiens
  misc_RNA (1)...(19): siRNA sense strand
ugaguaucuugaugcagua

SEQ ID NO: 1267079 - RNA, 19 nt, Homo sapiens
  misc_RNA (1)...(19): siRNA sense strand
caccuuuagugaaguagaa

SEQ ID NO: 1267080 - RNA, 19 nt, Homo sapiens
  misc_RNA (1)...(19): siRNA sense strand
acagauaucaggauuugga

SEQ ID NO: 1267081 - RNA, 19 nt, Homo sapiens
  misc_RNA (1)...(19): siRNA sense strand
ucauugcugugauuguuau

SEQ ID NO: 1267082 - RNA, 19 nt, Homo sapiens
  misc_RNA (1)...(19): siRNA sense strand
ucagaugcacuuuauuugu

SEQ ID NO: 1267083 - RNA, 19 nt, Homo sapiens
  misc_RNA (1)...(19): siRNA sense strand
gugcugcuccagaguguaa

SEQ ID NO: 1267084 - RNA, 19 nt, Homo sapiens
  misc_RNA (1)...(19): siRNA sense strand
ggaaaacacaccuuuagug

SEQ ID NO: 1267085 - RNA, 19 nt, Homo sapiens
  misc_RNA (1)...(19): siRNA sense strand
aaggaucaguagcaauuug

SEQ ID NO: 1267086 - RNA, 19 nt, Homo sapiens
  misc_RNA (1)...(19): siRNA sense strand
uauauacgggauccuuuaa

SEQ ID NO: 1267087 - RNA, 19 nt, Homo sapiens
  misc_RNA (1)...(19): siRNA sense strand
ugaaguagaaguauuugag

SEQ ID NO: 1267088 - RNA, 19 nt, Homo sapiens
  misc_RNA (1)...(19): siRNA sense strand
cuugacaguuuggauguuu

SEQ ID NO: 1267089 - RNA, 19 nt, Homo sapiens
  misc_RNA (1)...(19): siRNA sense strand
cauauauacgggauccuuu

SEQ ID NO: 1267090 - RNA, 19 nt, Homo sapiens
  misc_RNA (1)...(19): siRNA sense strand
auauauacgggauccuuua

SEQ ID NO: 1267091 - RNA, 19 nt, Homo sapiens
  misc_RNA (1)...(19): siRNA sense strand
cuuaaaggaucaguagcaa

SEQ ID NO: 1267092 - RNA, 19 nt, Homo sapiens
  misc_RNA (1)...(19): siRNA sense strand
uaaaccugaggaaggaaua

SEQ ID NO: 1267093 - RNA, 19 nt, Homo sapiens
  misc_RNA (1)...(19): siRNA sense strand
agaugacgccuguuauaga

SEQ ID NO: 1267094 - RNA, 19 nt, Homo sapiens
  misc_RNA (1)...(19): siRNA sense strand
ugugauuguuauugccaua

SEQ ID NO: 1267095 - RNA, 19 nt, Homo sapiens
  misc_RNA (1)...(19): siRNA sense strand
gagagcacgauuuauugug

SEQ ID NO: 1267096 - RNA, 19 nt, Homo sapiens
  misc_RNA (1)...(19): siRNA sense strand
gaaguauuugaguaucuug

SEQ ID NO: 1267097 - RNA, 19 nt, Homo sapiens
  misc_RNA (1)...(19): siRNA sense strand
ggcuaccugucucagauga

SEQ ID NO: 1267098 - RNA, 19 nt, Homo sapiens
  misc_RNA (1)...(19): siRNA sense strand
gauaucaggauuuggaaaa

SEQ ID NO: 1267099 - RNA, 19 nt, Homo sapiens
  misc_RNA (1)...(19): siRNA sense strand
ccucuugccacccauacua

SEQ ID NO: 1267100 - RNA, 19 nt, Homo sapiens
  misc_RNA (1)...(19): siRNA sense strand
ccaugguguugcugcugua

SEQ ID NO: 1267101 - RNA, 19 nt, Homo sapiens
  misc_RNA (1)...(19): siRNA sense strand
cagaugacgccuguuauag

SEQ ID NO: 1267102 - RNA, 19 nt, Homo sapiens
  misc_RNA (1)...(19): siRNA sense strand
cagaugguggagcugaaua

SEQ ID NO: 1267103 - RNA, 19 nt, Homo sapiens
  misc_RNA (1)...(19): siRNA sense strand
uuggugaacgaguagauua

SEQ ID NO: 1267104 - RNA, 19 nt, Homo sapiens
  misc_RNA (1)...(19): siRNA sense strand
gucauugcugugauuguua

SEQ ID NO: 1267105 - RNA, 19 nt, Homo sapiens
  misc_RNA (1)...(19): siRNA sense strand
ggagccaccaacauuugaa

SEQ ID NO: 1267106 - RNA, 19 nt, Homo sapiens
  misc_RNA (1)...(19): siRNA sense strand
gcgcuuuccuggguugcuu

SEQ ID NO: 1267107 - RNA, 19 nt, Homo sapiens
  misc_RNA (1)...(19): siRNA sense strand
uacuacaaagcaacaguua

SEQ ID NO: 1267108 - RNA, 19 nt, Homo sapiens
  misc_RNA (1)...(19): siRNA sense strand
cuugaugcaguaacuuaua

SEQ ID NO: 1267109 - RNA, 19 nt, Homo sapiens
  misc_RNA (1)...(19): siRNA sense strand
aaacauguccauauauacg

SEQ ID NO: 1267110 - RNA, 19 nt, Homo sapiens
  misc_RNA (1)...(19): siRNA sense strand
guguaaaguggucaaaugu

SEQ ID NO: 1267111 - RNA, 19 nt, Homo sapiens
  misc_RNA (1)...(19): siRNA sense strand
cuuacgaguuugguuauca

SEQ ID NO: 1267112 - RNA, 19 nt, Homo sapiens
  misc_RNA (1)...(19): siRNA sense strand
uacgggauccuuuaaaugg

SEQ ID NO: 1267113 - RNA, 19 nt, Homo sapiens
  misc_RNA (1)...(19): siRNA sense strand
gcagaugguggagcugaau

SEQ ID NO: 1267114 - RNA, 19 nt, Homo sapiens
  misc_RNA (1)...(19): siRNA sense strand
aaccaaaacccuacuauga

SEQ ID NO: 1267115 - RNA, 19 nt, Homo sapiens
  misc_RNA (1)...(19): siRNA sense strand
cccaauaugugaaaagguu

SEQ ID NO: 1267116 - RNA, 19 nt, Homo sapiens
  misc_RNA (1)...(19): siRNA sense strand
ggagcugaauaugccacuu

SEQ ID NO: 1267117 - RNA, 19 nt, Homo sapiens
  misc_RNA (1)...(19): siRNA sense strand
cgauggcagcgacacaauu

SEQ ID NO: 1267118 - RNA, 19 nt, Homo sapiens
  misc_RNA (1)...(19): siRNA sense strand
gauccauuuucacuuauug

SEQ ID NO: 1267119 - RNA, 19 nt, Homo sapiens
  misc_RNA (1)...(19): siRNA sense strand
uugaugcaguaacuuauag

SEQ ID NO: 1267120 - RNA, 19 nt, Homo sapiens
  misc_RNA (1)...(19): siRNA sense strand
guaucuugaugcaguaacu

SEQ ID NO: 1267121 - RNA, 19 nt, Homo sapiens
  misc_RNA (1)...(19): siRNA sense strand
ggagagagcacgauuuauu

SEQ ID NO: 1267122 - RNA, 19 nt, Homo sapiens
  misc_RNA (1)...(19): siRNA sense strand
agagaaacauguccauaua

SEQ ID NO: 1267123 - RNA, 19 nt, Homo sapiens
  misc_RNA (1)...(19): siRNA sense strand
cagaugcacuuuauuugua

SEQ ID NO: 1267124 - RNA, 19 nt, Homo sapiens
  misc_RNA (1)...(19): siRNA sense strand
ggacuuacgaguuugguua

SEQ ID NO: 1267125 - RNA, 19 nt, Homo sapiens
  misc_RNA (1)...(19): siRNA sense strand
aaacagauaucaggauuug

SEQ ID NO: 1267126 - RNA, 19 nt, Homo sapiens
  misc_RNA (1)...(19): siRNA sense strand
cuauggagcucauugguaa

SEQ ID NO: 1267127 - RNA, 19 nt, Homo sapiens
  misc_RNA (1)...(19): siRNA sense strand
aaacacaccuuuagugaag

SEQ ID NO: 1267128 - RNA, 19 nt, Homo sapiens
  misc_RNA (1)...(19): siRNA sense strand
gaacuuaaaggaucaguag

SEQ ID NO: 1267129 - RNA, 19 nt, Homo sapiens
  misc_RNA (1)...(19): siRNA sense strand
gaaaacagauaucaggauu

SEQ ID NO: 1267130 - RNA, 19 nt, Homo sapiens
  misc_RNA (1)...(19): siRNA sense strand
uaaaggaucaguagcaauu

SEQ ID NO: 1267131 - RNA, 19 nt, Homo sapiens
  misc_RNA (1)...(19): siRNA sense strand
aaaugggacuuacgaguuu

SEQ ID NO: 1267132 - RNA, 19 nt, Homo sapiens
  misc_RNA (1)...(19): siRNA sense strand
guuaucagaugcacuuuau

SEQ ID NO: 1267133 - RNA, 19 nt, Homo sapiens
  misc_RNA (1)...(19): siRNA sense strand
ugagauuggugaacgagua

SEQ ID NO: 1267134 - RNA, 19 nt, Homo sapiens
  misc_RNA (1)...(19): siRNA sense strand
gugaacgaguagauuauaa

SEQ ID NO: 1267135 - RNA, 19 nt, Homo sapiens
  misc_RNA (1)...(19): siRNA sense strand
gagagagcacgauuuauug

SEQ ID NO: 1267136 - RNA, 19 nt, Homo sapiens
  misc_RNA (1)...(19): siRNA sense strand
caaaugggacuuacgaguu

SEQ ID NO: 1267137 - RNA, 19 nt, Homo sapiens
  misc_RNA (1)...(19): siRNA sense strand
ggucauugcugugauuguu

SEQ ID NO: 1267138 - RNA, 19 nt, Homo sapiens
  misc_RNA (1)...(19): siRNA sense strand
ccagauccauuuucacuua

SEQ ID NO: 1267139 - RNA, 19 nt, Homo sapiens
  misc_RNA (1)...(19): siRNA sense strand
gaaggaauacuugacaguu

SEQ ID NO: 1267140 - RNA, 19 nt, Homo sapiens
  misc_RNA (1)...(19): siRNA sense strand
aaggaauacuugacaguuu

SEQ ID NO: 1267141 - RNA, 19 nt, Homo sapiens
  misc_RNA (1)...(19): siRNA sense strand
ucagaugacgccuguuaua

SEQ ID NO: 1267142 - RNA, 19 nt, Homo sapiens
  misc_RNA (1)...(19): siRNA sense strand
gaaaacacaccuuuaguga

SEQ ID NO: 1267143 - RNA, 19 nt, Homo sapiens
  misc_RNA (1)...(19): siRNA sense strand
gaugacgccuguuauagag

SEQ ID NO: 1267144 - RNA, 19 nt, Homo sapiens
  misc_RNA (1)...(19): siRNA sense strand
gagaaacauguccauauau

SEQ ID NO: 1267145 - RNA, 19 nt, Homo sapiens
  misc_RNA (1)...(19): siRNA sense strand
acgaguagauuauaagugu

SEQ ID NO: 1267146 - RNA, 19 nt, Homo sapiens
  misc_RNA (1)...(19): siRNA sense strand
cuacaaagcaacaguuaug

SEQ ID NO: 1267147 - RNA, 19 nt, Homo sapiens
  misc_RNA (1)...(19): siRNA sense strand
ccaccaacauuugaagcua

SEQ ID NO: 1267148 - RNA, 19 nt, Homo sapiens
  misc_RNA (1)...(19): siRNA sense strand
uauacgggauccuuuaaau

SEQ ID NO: 1267149 - RNA, 19 nt, Homo sapiens
  misc_RNA (1)...(19): siRNA sense strand
cgaguuugguuaucagaug

SEQ ID NO: 1267150 - RNA, 19 nt, Homo sapiens
  misc_RNA (1)...(19): siRNA sense strand
gaacgaguagauuauaagu

SEQ ID NO: 1267151 - RNA, 19 nt, Homo sapiens
  misc_RNA (1)...(19): siRNA sense strand
gugaggagccaccaacauu

SEQ ID NO: 1267152 - RNA, 19 nt, Homo sapiens
  misc_RNA (1)...(19): siRNA sense strand
gauggcagcgacacaauug

SEQ ID NO: 1267153 - RNA, 19 nt, Homo sapiens
  misc_RNA (1)...(19): siRNA sense strand
gcuauggagcucauuggua

SEQ ID NO: 1267154 - RNA, 19 nt, Homo sapiens
  misc_RNA (1)...(19): siRNA sense strand
gaggagccaccaacauuug

SEQ ID NO: 1267155 - RNA, 19 nt, Homo sapiens
  misc_RNA (1)...(19): siRNA sense strand
acacaccuuuagugaagua

SEQ ID NO: 1267156 - RNA, 19 nt, Homo sapiens
  misc_RNA (1)...(19): siRNA sense strand
ucucagaugacgccuguua

SEQ ID NO: 1267157 - RNA, 19 nt, Homo sapiens
  misc_RNA (1)...(19): siRNA sense strand
uagagaaacauguccauau

SEQ ID NO: 1267158 - RNA, 19 nt, Homo sapiens
  misc_RNA (1)...(19): siRNA sense strand
guuccaaagugucuuaaag

SEQ ID NO: 1267159 - RNA, 19 nt, Homo sapiens
  misc_RNA (1)...(19): siRNA sense strand
ggugaacgaguagauuaua

SEQ ID NO: 1267160 - RNA, 19 nt, Homo sapiens
  misc_RNA (1)...(19): siRNA sense strand
gaaguagaaguauuugagu

SEQ ID NO: 1267161 - RNA, 19 nt, Homo sapiens
  misc_RNA (1)...(19): siRNA sense strand
gaaacauguccauauauac

SEQ ID NO: 1267162 - RNA, 19 nt, Homo sapiens
  misc_RNA (1)...(19): siRNA sense strand
ugacgccuguuauagagaa

SEQ ID NO: 1267163 - RNA, 19 nt, Homo sapiens
  misc_RNA (1)...(19): siRNA sense strand
cgaguagauuauaagugua

SEQ ID NO: 1267164 - RNA, 19 nt, Homo sapiens
  misc_RNA (1)...(19): siRNA sense strand
gcacuuuauuuguaaugag

SEQ ID NO: 1267165 - RNA, 19 nt, Homo sapiens
  misc_RNA (1)...(19): siRNA sense strand
guagaaguauuugaguauc

SEQ ID NO: 1267166 - RNA, 19 nt, Homo sapiens
  misc_RNA (1)...(19): siRNA sense strand
guauuugaguaucuugaug

SEQ ID NO: 1267167 - RNA, 19 nt, Homo sapiens
  misc_RNA (1)...(19): siRNA sense strand
aggaauacuugacaguuug

SEQ ID NO: 1267168 - RNA, 19 nt, Homo sapiens
  misc_RNA (1)...(19): siRNA sense strand
ccaaaacccuacuaugaga

SEQ ID NO: 1267169 - RNA, 19 nt, Homo sapiens
  misc_RNA (1)...(19): siRNA sense strand
aguguaaaguggucaaaug

SEQ ID NO: 1267170 - RNA, 19 nt, Homo sapiens
  misc_RNA (1)...(19): siRNA sense strand
ccacccauacuauuuguga

SEQ ID NO: 1267171 - RNA, 19 nt, Homo sapiens
  misc_RNA (1)...(19): siRNA sense strand
caccaacauuugaagcuau

SEQ ID NO: 1267172 - RNA, 19 nt, Homo sapiens
  misc_RNA (1)...(19): siRNA sense strand
uuggagagagcacgauuua

SEQ ID NO: 1267173 - RNA, 19 nt, Homo sapiens
  misc_RNA (1)...(19): siRNA sense strand
gguuaucagaugcacuuua

SEQ ID NO: 1267174 - RNA, 19 nt, Homo sapiens
  misc_RNA (1)...(19): siRNA sense strand
ugaggagccaccaacauuu

SEQ ID NO: 1267175 - RNA, 19 nt, Homo sapiens
  misc_RNA (1)...(19): siRNA sense strand
ggaaggaauacuugacagu

SEQ ID NO: 1267176 - RNA, 19 nt, Homo sapiens
  misc_RNA (1)...(19): siRNA sense strand
gaggaaggaauacuugaca

SEQ ID NO: 1267177 - RNA, 19 nt, Homo sapiens
  misc_RNA (1)...(19): siRNA sense strand
ccaguuccaaagugucuua

SEQ ID NO: 1267178 - RNA, 19 nt, Homo sapiens
  misc_RNA (1)...(19): siRNA sense strand
ugaguaucuugaugcagua

SEQ ID NO: 1267179 - RNA, 19 nt, Homo sapiens
  misc_RNA (1)...(19): siRNA sense strand
caccuuuagugaaguagaa

SEQ ID NO: 1267180 - RNA, 19 nt, Homo sapiens
  misc_RNA (1)...(19): siRNA sense strand
acagauaucaggauuugga

SEQ ID NO: 1267181 - RNA, 19 nt, Homo sapiens
  misc_RNA (1)...(19): siRNA sense strand
ucauugcugugauuguuau

SEQ ID NO: 1267182 - RNA, 19 nt, Homo sapiens
  misc_RNA (1)...(19): siRNA sense strand
ucagaugcacuuuauuugu

SEQ ID NO: 1267183 - RNA, 19 nt, Homo sapiens
  misc_RNA (1)...(19): siRNA sense strand
gugcugcuccagaguguaa

SEQ ID NO: 1267184 - RNA, 19 nt, Homo sapiens
  misc_RNA (1)...(19): siRNA sense strand
ggaaaacacaccuuuagug

SEQ ID NO: 1267185 - RNA, 19 nt, Homo sapiens
  misc_RNA (1)...(19): siRNA sense strand
aaggaucaguagcaauuug

SEQ ID NO: 1267186 - RNA, 19 nt, Homo sapiens
  misc_RNA (1)...(19): siRNA sense strand
uauauacgggauccuuuaa

SEQ ID NO: 1267187 - RNA, 19 nt, Homo sapiens
  misc_RNA (1)...(19): siRNA sense strand
ugaaguagaaguauuugag

SEQ ID NO: 1267188 - RNA, 19 nt, Homo sapiens
  misc_RNA (1)...(19): siRNA sense strand
cuugacaguuuggauguuu

SEQ ID NO: 1267189 - RNA, 19 nt, Homo sapiens
  misc_RNA (1)...(19): siRNA sense strand
cauauauacgggauccuuu

SEQ ID NO: 1267190 - RNA, 19 nt, Homo sapiens
  misc_RNA (1)...(19): siRNA sense strand
auauauacgggauccuuua

SEQ ID NO: 1267191 - RNA, 19 nt, Homo sapiens
  misc_RNA (1)...(19): siRNA sense strand
cuuaaaggaucaguagcaa

SEQ ID NO: 1267192 - RNA, 19 nt, Homo sapiens
  misc_RNA (1)...(19): siRNA sense strand
uaaaccugaggaaggaaua

SEQ ID NO: 1267193 - RNA, 19 nt, Homo sapiens
  misc_RNA (1)...(19): siRNA sense strand
agaugacgccuguuauaga

SEQ ID NO: 1267194 - RNA, 19 nt, Homo sapiens
  misc_RNA (1)...(19): siRNA sense strand
ugugauuguuauugccaua

SEQ ID NO: 1267195 - RNA, 19 nt, Homo sapiens
  misc_RNA (1)...(19): siRNA sense strand
gagagcacgauuuauugug

SEQ ID NO: 1267196 - RNA, 19 nt, Homo sapiens
  misc_RNA (1)...(19): siRNA sense strand
gaaguauuugaguaucuug

SEQ ID NO: 1267197 - RNA, 19 nt, Homo sapiens
  misc_RNA (1)...(19): siRNA sense strand
ggcuaccugucucagauga

SEQ ID NO: 1267198 - RNA, 19 nt, Homo sapiens
  misc_RNA (1)...(19): siRNA sense strand
gauaucaggauuuggaaaa

SEQ ID NO: 1267199 - RNA, 19 nt, Homo sapiens
  misc_RNA (1)...(19): siRNA sense strand
ccucuugccacccauacua

SEQ ID NO: 1267200 - RNA, 19 nt, Homo sapiens
  misc_RNA (1)...(19): siRNA sense strand
ccaugguguugcugcugua

SEQ ID NO: 1267201 - RNA, 19 nt, Homo sapiens
  misc_RNA (1)...(19): siRNA sense strand
cagaugacgccuguuauag

SEQ ID NO: 1267202 - RNA, 19 nt, Homo sapiens
  misc_RNA (1)...(19): siRNA sense strand
uuggugaacgaguagauua

SEQ ID NO: 1267203 - RNA, 19 nt, Homo sapiens
  misc_RNA (1)...(19): siRNA sense strand
gucauugcugugauuguua

SEQ ID NO: 1267204 - RNA, 19 nt, Homo sapiens
  misc_RNA (1)...(19): siRNA sense strand
ggagccaccaacauuugaa

SEQ ID NO: 1267205 - RNA, 19 nt, Homo sapiens
  misc_RNA (1)...(19): siRNA sense strand
gcgcuuuccuggguugcuu

SEQ ID NO: 1267206 - RNA, 19 nt, Homo sapiens
  misc_RNA (1)...(19): siRNA sense strand
uacuacaaagcaacaguua

SEQ ID NO: 1267207 - RNA, 19 nt, Homo sapiens
  misc_RNA (1)...(19): siRNA sense strand
cuugaugcaguaacuuaua

SEQ ID NO: 1267208 - RNA, 19 nt, Homo sapiens
  misc_RNA (1)...(19): siRNA sense strand
aaacauguccauauauacg

SEQ ID NO: 1267209 - RNA, 19 nt, Homo sapiens
  misc_RNA (1)...(19): siRNA sense strand
guguaaaguggucaaaugu

SEQ ID NO: 1267210 - RNA, 19 nt, Homo sapiens
  misc_RNA (1)...(19): siRNA sense strand
cuuacgaguuugguuauca

SEQ ID NO: 1267211 - RNA, 19 nt, Homo sapiens
  misc_RNA (1)...(19): siRNA sense strand
uacgggauccuuuaaaugg

SEQ ID NO: 1267212 - RNA, 19 nt, Homo sapiens
  misc_RNA (1)...(19): siRNA sense strand
aaccaaaacccuacuauga

SEQ ID NO: 1267213 - RNA, 19 nt, Homo sapiens
  misc_RNA (1)...(19): siRNA sense strand
cccaauaugugaaaagguu

SEQ ID NO: 1267214 - RNA, 19 nt, Homo sapiens
  misc_RNA (1)...(19): siRNA sense strand
cgauggcagcgacacaauu

SEQ ID NO: 1267215 - RNA, 19 nt, Homo sapiens
  misc_RNA (1)...(19): siRNA sense strand
gauccauuuucacuuauug

SEQ ID NO: 1267216 - RNA, 19 nt, Homo sapiens
  misc_RNA (1)...(19): siRNA sense strand
uugaugcaguaacuuauag

SEQ ID NO: 1267217 - RNA, 19 nt, Homo sapiens
  misc_RNA (1)...(19): siRNA sense strand
guaucuugaugcaguaacu

SEQ ID NO: 1267218 - RNA, 19 nt, Homo sapiens
  misc_RNA (1)...(19): siRNA sense strand
caacauuugaagcuaugga

SEQ ID NO: 1267219 - RNA, 19 nt, Homo sapiens
  misc_RNA (1)...(19): siRNA sense strand
gagauuggugaacgaguag

SEQ ID NO: 1267220 - RNA, 19 nt, Homo sapiens
  misc_RNA (1)...(19): siRNA sense strand
ggagagagcacgauuuauu

SEQ ID NO: 1267221 - RNA, 19 nt, Homo sapiens
  misc_RNA (1)...(19): siRNA sense strand
agagaaacauguccauaua

SEQ ID NO: 1267222 - RNA, 19 nt, Homo sapiens
  misc_RNA (1)...(19): siRNA sense strand
cagaugcacuuuauuugua

SEQ ID NO: 1267223 - RNA, 19 nt, Homo sapiens
  misc_RNA (1)...(19): siRNA sense strand
ggacuuacgaguuugguua

SEQ ID NO: 1267224 - RNA, 19 nt, Homo sapiens
  misc_RNA (1)...(19): siRNA sense strand
aaacagauaucaggauuug

SEQ ID NO: 1267225 - RNA, 19 nt, Homo sapiens
  misc_RNA (1)...(19): siRNA sense strand
cuauggagcucauugguaa

SEQ ID NO: 1267226 - RNA, 19 nt, Homo sapiens
  misc_RNA (1)...(19): siRNA sense strand
aaacacaccuuuagugaag

SEQ ID NO: 1267227 - RNA, 19 nt, Homo sapiens
  misc_RNA (1)...(19): siRNA sense strand
gaacuuaaaggaucaguag

SEQ ID NO: 1267228 - RNA, 19 nt, Homo sapiens
  misc_RNA (1)...(19): siRNA sense strand
gaaaacagauaucaggauu

SEQ ID NO: 1267229 - RNA, 19 nt, Homo sapiens
  misc_RNA (1)...(19): siRNA sense strand
uaaaggaucaguagcaauu

SEQ ID NO: 1267230 - RNA, 19 nt, Homo sapiens
  misc_RNA (1)...(19): siRNA sense strand
aaaugggacuuacgaguuu

SEQ ID NO: 1267231 - RNA, 19 nt, Homo sapiens
  misc_RNA (1)...(19): siRNA sense strand
guuaucagaugcacuuuau

SEQ ID NO: 1267232 - RNA, 19 nt, Homo sapiens
  misc_RNA (1)...(19): siRNA sense strand
gagcugaauaugccacuua

SEQ ID NO: 1267233 - RNA, 19 nt, Homo sapiens
  misc_RNA (1)...(19): siRNA sense strand
gagcagagaggcugaauag

SEQ ID NO: 1267234 - RNA, 19 nt, Homo sapiens
  misc_RNA (1)...(19): siRNA sense strand
ugagauuggugaacgagua

SEQ ID NO: 1267235 - RNA, 19 nt, Homo sapiens
  misc_RNA (1)...(19): siRNA sense strand
gugaacgaguagauuauaa

SEQ ID NO: 1267236 - RNA, 19 nt, Homo sapiens
  misc_RNA (1)...(19): siRNA sense strand
gagagagcacgauuuauug

SEQ ID NO: 1267237 - RNA, 19 nt, Homo sapiens
  misc_RNA (1)...(19): siRNA sense strand
caaaugggacuuacgaguu

SEQ ID NO: 1267238 - RNA, 19 nt, Homo sapiens
  misc_RNA (1)...(19): siRNA sense strand
ggucauugcugugauuguu

SEQ ID NO: 1267239 - RNA, 19 nt, Homo sapiens
  misc_RNA (1)...(19): siRNA sense strand
ccagauccauuuucacuua

SEQ ID NO: 1267240 - RNA, 19 nt, Homo sapiens
  misc_RNA (1)...(19): siRNA sense strand
gaaggaauacuugacaguu

SEQ ID NO: 1267241 - RNA, 19 nt, Homo sapiens
  misc_RNA (1)...(19): siRNA sense strand
aaggaauacuugacaguuu

SEQ ID NO: 1267242 - RNA, 19 nt, Homo sapiens
  misc_RNA (1)...(19): siRNA sense strand
ucagaugacgccuguuaua

SEQ ID NO: 1267243 - RNA, 19 nt, Homo sapiens
  misc_RNA (1)...(19): siRNA sense strand
gaaaacacaccuuuaguga

SEQ ID NO: 1267244 - RNA, 19 nt, Homo sapiens
  misc_RNA (1)...(19): siRNA sense strand
gaugacgccuguuauagag

SEQ ID NO: 1267245 - RNA, 19 nt, Homo sapiens
  misc_RNA (1)...(19): siRNA sense strand
gagaaacauguccauauau

SEQ ID NO: 1267246 - RNA, 19 nt, Homo sapiens
  misc_RNA (1)...(19): siRNA sense strand
ccacuuaccagacuaaauc

SEQ ID NO: 1267247 - RNA, 19 nt, Homo sapiens
  misc_RNA (1)...(19): siRNA sense strand
acgaguagauuauaagugu

SEQ ID NO: 1267248 - RNA, 19 nt, Homo sapiens
  misc_RNA (1)...(19): siRNA sense strand
cuacaaagcaacaguuaug

SEQ ID NO: 1267249 - RNA, 19 nt, Homo sapiens
  misc_RNA (1)...(19): siRNA sense strand
ccaccaacauuugaagcua

SEQ ID NO: 1267250 - RNA, 19 nt, Homo sapiens
  misc_RNA (1)...(19): siRNA sense strand
uauacgggauccuuuaaau

SEQ ID NO: 1267251 - RNA, 19 nt, Homo sapiens
  misc_RNA (1)...(19): siRNA sense strand
cgaguuugguuaucagaug

SEQ ID NO: 1267252 - RNA, 19 nt, Homo sapiens
  misc_RNA (1)...(19): siRNA sense strand
gaacgaguagauuauaagu

SEQ ID NO: 1267253 - RNA, 19 nt, Homo sapiens
  misc_RNA (1)...(19): siRNA sense strand
gugaggagccaccaacauu

SEQ ID NO: 1267254 - RNA, 19 nt, Homo sapiens
  misc_RNA (1)...(19): siRNA sense strand
gauggcagcgacacaauug

SEQ ID NO: 1267255 - RNA, 19 nt, Homo sapiens
  misc_RNA (1)...(19): siRNA sense strand
ucucagaugacgccuguua

SEQ ID NO: 1267256 - RNA, 19 nt, Homo sapiens
  misc_RNA (1)...(19): siRNA sense strand
acacaccuuuagugaagua

SEQ ID NO: 1267257 - RNA, 19 nt, Homo sapiens
  misc_RNA (1)...(19): siRNA sense strand
gcuauggagcucauuggua

SEQ ID NO: 1267258 - RNA, 19 nt, Homo sapiens
  misc_RNA (1)...(19): siRNA sense strand
gaggagccaccaacauuug

SEQ ID NO: 1267259 - RNA, 19 nt, Homo sapiens
  misc_RNA (1)...(19): siRNA sense strand
uagagaaacauguccauau

SEQ ID NO: 1267260 - RNA, 19 nt, Homo sapiens
  misc_RNA (1)...(19): siRNA sense strand
ggugaacgaguagauuaua

SEQ ID NO: 1267261 - RNA, 19 nt, Homo sapiens
  misc_RNA (1)...(19): siRNA sense strand
gaaguagaaguauuugagu

SEQ ID NO: 1267262 - RNA, 19 nt, Homo sapiens
  misc_RNA (1)...(19): siRNA sense strand
gaaacauguccauauauac

SEQ ID NO: 1267263 - RNA, 19 nt, Homo sapiens
  misc_RNA (1)...(19): siRNA sense strand
ugacgccuguuauagagaa

SEQ ID NO: 1267264 - RNA, 19 nt, Homo sapiens
  misc_RNA (1)...(19): siRNA sense strand
cgaguagauuauaagugua

SEQ ID NO: 1267265 - RNA, 19 nt, Homo sapiens
  misc_RNA (1)...(19): siRNA sense strand
gcacuuuauuuguaaugag

SEQ ID NO: 1267266 - RNA, 19 nt, Homo sapiens
  misc_RNA (1)...(19): siRNA sense strand
guagaaguauuugaguauc

SEQ ID NO: 1267267 - RNA, 19 nt, Homo sapiens
  misc_RNA (1)...(19): siRNA sense strand
guauuugaguaucuugaug

SEQ ID NO: 1267268 - RNA, 19 nt, Homo sapiens
  misc_RNA (1)...(19): siRNA sense strand
aggaauacuugacaguuug

SEQ ID NO: 1267269 - RNA, 19 nt, Homo sapiens
  misc_RNA (1)...(19): siRNA sense strand
ccaaaacccuacuaugaga

SEQ ID NO: 1267270 - RNA, 19 nt, Homo sapiens
  misc_RNA (1)...(19): siRNA sense strand
aguguaaaguggucaaaug

SEQ ID NO: 1267271 - RNA, 19 nt, Homo sapiens
  misc_RNA (1)...(19): siRNA sense strand
ccacccauacuauuuguga

SEQ ID NO: 1267272 - RNA, 19 nt, Homo sapiens
  misc_RNA (1)...(19): siRNA sense strand
uuggagagagcacgauuua

SEQ ID NO: 1267273 - RNA, 19 nt, Homo sapiens
  misc_RNA (1)...(19): siRNA sense strand
gguuaucagaugcacuuua

SEQ ID NO: 1267274 - RNA, 19 nt, Homo sapiens
  misc_RNA (1)...(19): siRNA sense strand
caccaacauuugaagcuau

SEQ ID NO: 1267275 - RNA, 19 nt, Homo sapiens
  misc_RNA (1)...(19): siRNA sense strand
ugaggagccaccaacauuu

SEQ ID NO: 1267276 - RNA, 19 nt, Homo sapiens
  misc_RNA (1)...(19): siRNA sense strand
ggaaggaauacuugacagu

SEQ ID NO: 1267277 - RNA, 19 nt, Homo sapiens
  misc_RNA (1)...(19): siRNA sense strand
gaggaaggaauacuugaca

SEQ ID NO: 1267278 - RNA, 19 nt, Homo sapiens
  misc_RNA (1)...(19): siRNA sense strand
ugaguaucuugaugcagua

SEQ ID NO: 1267279 - RNA, 19 nt, Homo sapiens
  misc_RNA (1)...(19): siRNA sense strand
caccuuuagugaaguagaa

SEQ ID NO: 1267280 - RNA, 19 nt, Homo sapiens
  misc_RNA (1)...(19): siRNA sense strand
acagauaucaggauuugga

SEQ ID NO: 1267281 - RNA, 19 nt, Homo sapiens
  misc_RNA (1)...(19): siRNA sense strand
ucauugcugugauuguuau

SEQ ID NO: 1267282 - RNA, 19 nt, Homo sapiens
  misc_RNA (1)...(19): siRNA sense strand
ucagaugcacuuuauuugu

SEQ ID NO: 1267283 - RNA, 19 nt, Homo sapiens
  misc_RNA (1)...(19): siRNA sense strand
gugcugcuccagaguguaa

SEQ ID NO: 1267284 - RNA, 19 nt, Homo sapiens
  misc_RNA (1)...(19): siRNA sense strand
ggaaaacacaccuuuagug

SEQ ID NO: 1267285 - RNA, 19 nt, Homo sapiens
  misc_RNA (1)...(19): siRNA sense strand
aaggaucaguagcaauuug

SEQ ID NO: 1267286 - RNA, 19 nt, Homo sapiens
  misc_RNA (1)...(19): siRNA sense strand
uauauacgggauccuuuaa

SEQ ID NO: 1267287 - RNA, 19 nt, Homo sapiens
  misc_RNA (1)...(19): siRNA sense strand
ugaaguagaaguauuugag

SEQ ID NO: 1267288 - RNA, 19 nt, Homo sapiens
  misc_RNA (1)...(19): siRNA sense strand
cuugacaguuuggauguuu

SEQ ID NO: 1267289 - RNA, 19 nt, Homo sapiens
  misc_RNA (1)...(19): siRNA sense strand
cauauauacgggauccuuu

SEQ ID NO: 1267290 - RNA, 19 nt, Homo sapiens
  misc_RNA (1)...(19): siRNA sense strand
auauauacgggauccuuua

SEQ ID NO: 1267291 - RNA, 19 nt, Homo sapiens
  misc_RNA (1)...(19): siRNA sense strand
cuuaaaggaucaguagcaa

SEQ ID NO: 1267292 - RNA, 19 nt, Homo sapiens
  misc_RNA (1)...(19): siRNA sense strand
uaaaccugaggaaggaaua

SEQ ID NO: 1267293 - RNA, 19 nt, Homo sapiens
  misc_RNA (1)...(19): siRNA sense strand
agaugacgccuguuauaga

SEQ ID NO: 1267294 - RNA, 19 nt, Homo sapiens
  misc_RNA (1)...(19): siRNA sense strand
ugugauuguuauugccaua

SEQ ID NO: 1267295 - RNA, 19 nt, Homo sapiens
  misc_RNA (1)...(19): siRNA sense strand
gagagcacgauuuauugug

SEQ ID NO: 1267296 - RNA, 19 nt, Homo sapiens
  misc_RNA (1)...(19): siRNA sense strand
gaaguauuugaguaucuug

SEQ ID NO: 1267297 - RNA, 19 nt, Homo sapiens
  misc_RNA (1)...(19): siRNA sense strand
ggcuaccugucucagauga

SEQ ID NO: 1267298 - RNA, 19 nt, Homo sapiens
  misc_RNA (1)...(19): siRNA sense strand
gauaucaggauuuggaaaa

SEQ ID NO: 1267299 - RNA, 19 nt, Homo sapiens
  misc_RNA (1)...(19): siRNA sense strand
ccucuugccacccauacua

SEQ ID NO: 1267300 - RNA, 19 nt, Homo sapiens
  misc_RNA (1)...(19): siRNA sense strand
ccaugguguugcugcugua

SEQ ID NO: 1267301 - RNA, 19 nt, Homo sapiens
  misc_RNA (1)...(19): siRNA sense strand
cagaugacgccuguuauag

SEQ ID NO: 1267302 - RNA, 19 nt, Homo sapiens
  misc_RNA (1)...(19): siRNA sense strand
cagaugguggagcugaaua

SEQ ID NO: 1267303 - RNA, 19 nt, Homo sapiens
  misc_RNA (1)...(19): siRNA sense strand
gucauugcugugauuguua

SEQ ID NO: 1267304 - RNA, 19 nt, Homo sapiens
  misc_RNA (1)...(19): siRNA sense strand
ggagccaccaacauuugaa

SEQ ID NO: 1267305 - RNA, 19 nt, Homo sapiens
  misc_RNA (1)...(19): siRNA sense strand
uuggugaacgaguagauua

SEQ ID NO: 1267306 - RNA, 19 nt, Homo sapiens
  misc_RNA (1)...(19): siRNA sense strand
gcgcuuuccuggguugcuu

SEQ ID NO: 1267307 - RNA, 19 nt, Homo sapiens
  misc_RNA (1)...(19): siRNA sense strand
uacuacaaagcaacaguua

SEQ ID NO: 1267308 - RNA, 19 nt, Homo sapiens
  misc_RNA (1)...(19): siRNA sense strand
cuugaugcaguaacuuaua

SEQ ID NO: 1267309 - RNA, 19 nt, Homo sapiens
  misc_RNA (1)...(19): siRNA sense strand
aaacauguccauauauacg

SEQ ID NO: 1267310 - RNA, 19 nt, Homo sapiens
  misc_RNA (1)...(19): siRNA sense strand
guguaaaguggucaaaugu

SEQ ID NO: 1267311 - RNA, 19 nt, Homo sapiens
  misc_RNA (1)...(19): siRNA sense strand
cuuacgaguuugguuauca

SEQ ID NO: 1267312 - RNA, 19 nt, Homo sapiens
  misc_RNA (1)...(19): siRNA sense strand
uacgggauccuuuaaaugg

SEQ ID NO: 1267313 - RNA, 19 nt, Homo sapiens
  misc_RNA (1)...(19): siRNA sense strand
gcagaugguggagcugaau

SEQ ID NO: 1267314 - RNA, 19 nt, Homo sapiens
  misc_RNA (1)...(19): siRNA sense strand
aaccaaaacccuacuauga

SEQ ID NO: 1267315 - RNA, 19 nt, Homo sapiens
  misc_RNA (1)...(19): siRNA sense strand
uugaugcaguaacuuauag

SEQ ID NO: 1267316 - RNA, 19 nt, Homo sapiens
  misc_RNA (1)...(19): siRNA sense strand
ggagcugaauaugccacuu

SEQ ID NO: 1267317 - RNA, 19 nt, Homo sapiens
  misc_RNA (1)...(19): siRNA sense strand
caacauuugaagcuaugga

SEQ ID NO: 1267318 - RNA, 19 nt, Homo sapiens
  misc_RNA (1)...(19): siRNA sense strand
cgauggcagcgacacaauu

SEQ ID NO: 1267319 - RNA, 19 nt, Homo sapiens
  misc_RNA (1)...(19): siRNA sense strand
gauccauuuucacuuauug

SEQ ID NO: 1267320 - RNA, 19 nt, Homo sapiens
  misc_RNA (1)...(19): siRNA sense strand
ggagagagcacgauuuauu

SEQ ID NO: 1267321 - RNA, 19 nt, Homo sapiens
  misc_RNA (1)...(19): siRNA sense strand
agagaaacauguccauaua

SEQ ID NO: 1267322 - RNA, 19 nt, Homo sapiens
  misc_RNA (1)...(19): siRNA sense strand
cagaugcacuuuauuugua

SEQ ID NO: 1267323 - RNA, 19 nt, Homo sapiens
  misc_RNA (1)...(19): siRNA sense strand
ggacuuacgaguuugguua

SEQ ID NO: 1267324 - RNA, 19 nt, Homo sapiens
  misc_RNA (1)...(19): siRNA sense strand
aaacagauaucaggauuug

SEQ ID NO: 1267325 - RNA, 19 nt, Homo sapiens
  misc_RNA (1)...(19): siRNA sense strand
cuauggagcucauugguaa

SEQ ID NO: 1267326 - RNA, 19 nt, Homo sapiens
  misc_RNA (1)...(19): siRNA sense strand
aaacacaccuuuagugaag

SEQ ID NO: 1267327 - RNA, 19 nt, Homo sapiens
  misc_RNA (1)...(19): siRNA sense strand
gaacuuaaaggaucaguag

SEQ ID NO: 1267328 - RNA, 19 nt, Homo sapiens
  misc_RNA (1)...(19): siRNA sense strand
gaaaacagauaucaggauu

SEQ ID NO: 1267329 - RNA, 19 nt, Homo sapiens
  misc_RNA (1)...(19): siRNA sense strand
uaaaggaucaguagcaauu

SEQ ID NO: 1267330 - RNA, 19 nt, Homo sapiens
  misc_RNA (1)...(19): siRNA sense strand
aaaugggacuuacgaguuu

SEQ ID NO: 1267331 - RNA, 19 nt, Homo sapiens
  misc_RNA (1)...(19): siRNA sense strand
guuaucagaugcacuuuau

SEQ ID NO: 1267332 - RNA, 19 nt, Homo sapiens
  misc_RNA (1)...(19): siRNA sense strand
gagcugaauaugccacuua

SEQ ID NO: 1267333 - RNA, 19 nt, Homo sapiens
  misc_RNA (1)...(19): siRNA sense strand
ugagauuggugaacgagua

SEQ ID NO: 1267334 - RNA, 19 nt, Homo sapiens
  misc_RNA (1)...(19): siRNA sense strand
gugaacgaguagauuauaa

SEQ ID NO: 1267335 - RNA, 19 nt, Homo sapiens
  misc_RNA (1)...(19): siRNA sense strand
gagagagcacgauuuauug

SEQ ID NO: 1267336 - RNA, 19 nt, Homo sapiens
  misc_RNA (1)...(19): siRNA sense strand
caaaugggacuuacgaguu

SEQ ID NO: 1267337 - RNA, 19 nt, Homo sapiens
  misc_RNA (1)...(19): siRNA sense strand
ggucauugcugugauuguu

SEQ ID NO: 1267338 - RNA, 19 nt, Homo sapiens
  misc_RNA (1)...(19): siRNA sense strand
ccagauccauuuucacuua

SEQ ID NO: 1267339 - RNA, 19 nt, Homo sapiens
  misc_RNA (1)...(19): siRNA sense strand
gaaggaauacuugacaguu

SEQ ID NO: 1267340 - RNA, 19 nt, Homo sapiens
  misc_RNA (1)...(19): siRNA sense strand
aaggaauacuugacaguuu

SEQ ID NO: 1267341 - RNA, 19 nt, Homo sapiens
  misc_RNA (1)...(19): siRNA sense strand
ucagaugacgccuguuaua

SEQ ID NO: 1267342 - RNA, 19 nt, Homo sapiens
  misc_RNA (1)...(19): siRNA sense strand
gaaaacacaccuuuaguga

SEQ ID NO: 1267343 - RNA, 19 nt, Homo sapiens
  misc_RNA (1)...(19): siRNA sense strand
gaugacgccuguuauagag

SEQ ID NO: 1267344 - RNA, 19 nt, Homo sapiens
  misc_RNA (1)...(19): siRNA sense strand
gagaaacauguccauauau

SEQ ID NO: 1267345 - RNA, 19 nt, Homo sapiens
  misc_RNA (1)...(19): siRNA sense strand
ccacuuaccagacuaaauc

SEQ ID NO: 1267346 - RNA, 19 nt, Homo sapiens
  misc_RNA (1)...(19): siRNA sense strand
acgaguagauuauaagugu

SEQ ID NO: 1267347 - RNA, 19 nt, Homo sapiens
  misc_RNA (1)...(19): siRNA sense strand
cuacaaagcaacaguuaug

SEQ ID NO: 1267348 - RNA, 19 nt, Homo sapiens
  misc_RNA (1)...(19): siRNA sense strand
ccaccaacauuugaagcua

SEQ ID NO: 1267349 - RNA, 19 nt, Homo sapiens
  misc_RNA (1)...(19): siRNA sense strand
uauacgggauccuuuaaau

SEQ ID NO: 1267350 - RNA, 19 nt, Homo sapiens
  misc_RNA (1)...(19): siRNA sense strand
cgaguuugguuaucagaug

SEQ ID NO: 1267351 - RNA, 19 nt, Homo sapiens
  misc_RNA (1)...(19): siRNA sense strand
gaacgaguagauuauaagu

SEQ ID NO: 1267352 - RNA, 19 nt, Homo sapiens
  misc_RNA (1)...(19): siRNA sense strand
gugaggagccaccaacauu

SEQ ID NO: 1267353 - RNA, 19 nt, Homo sapiens
  misc_RNA (1)...(19): siRNA sense strand
gauggcagcgacacaauug

SEQ ID NO: 1267354 - RNA, 19 nt, Homo sapiens
  misc_RNA (1)...(19): siRNA sense strand
ucucagaugacgccuguua

SEQ ID NO: 1267355 - RNA, 19 nt, Homo sapiens
  misc_RNA (1)...(19): siRNA sense strand
gaggagccaccaacauuug

SEQ ID NO: 1267356 - RNA, 19 nt, Homo sapiens
  misc_RNA (1)...(19): siRNA sense strand
gcuauggagcucauuggua

SEQ ID NO: 1267357 - RNA, 19 nt, Homo sapiens
  misc_RNA (1)...(19): siRNA sense strand
acacaccuuuagugaagua

SEQ ID NO: 1267358 - RNA, 19 nt, Homo sapiens
  misc_RNA (1)...(19): siRNA sense strand
uagagaaacauguccauau

SEQ ID NO: 1267359 - RNA, 19 nt, Homo sapiens
  misc_RNA (1)...(19): siRNA sense strand
guuccaaagugucuuaaag

SEQ ID NO: 1267360 - RNA, 19 nt, Homo sapiens
  misc_RNA (1)...(19): siRNA sense strand
ggugaacgaguagauuaua

SEQ ID NO: 1267361 - RNA, 19 nt, Homo sapiens
  misc_RNA (1)...(19): siRNA sense strand
gaaguagaaguauuugagu

SEQ ID NO: 1267362 - RNA, 19 nt, Homo sapiens
  misc_RNA (1)...(19): siRNA sense strand
gaaacauguccauauauac

SEQ ID NO: 1267363 - RNA, 19 nt, Homo sapiens
  misc_RNA (1)...(19): siRNA sense strand
ugacgccuguuauagagaa

SEQ ID NO: 1267364 - RNA, 19 nt, Homo sapiens
  misc_RNA (1)...(19): siRNA sense strand
cgaguagauuauaagugua

SEQ ID NO: 1267365 - RNA, 19 nt, Homo sapiens
  misc_RNA (1)...(19): siRNA sense strand
gcacuuuauuuguaaugag

SEQ ID NO: 1267366 - RNA, 19 nt, Homo sapiens
  misc_RNA (1)...(19): siRNA sense strand
guagaaguauuugaguauc

SEQ ID NO: 1267367 - RNA, 19 nt, Homo sapiens
  misc_RNA (1)...(19): siRNA sense strand
guauuugaguaucuugaug

SEQ ID NO: 1267368 - RNA, 19 nt, Homo sapiens
  misc_RNA (1)...(19): siRNA sense strand
aggaauacuugacaguuug

SEQ ID NO: 1267369 - RNA, 19 nt, Homo sapiens
  misc_RNA (1)...(19): siRNA sense strand
ccaaaacccuacuaugaga

SEQ ID NO: 1267370 - RNA, 19 nt, Homo sapiens
  misc_RNA (1)...(19): siRNA sense strand
aguguaaaguggucaaaug

SEQ ID NO: 1267371 - RNA, 19 nt, Homo sapiens
  misc_RNA (1)...(19): siRNA sense strand
ccacccauacuauuuguga

SEQ ID NO: 1267372 - RNA, 19 nt, Homo sapiens
  misc_RNA (1)...(19): siRNA sense strand
uuggagagagcacgauuua

SEQ ID NO: 1267373 - RNA, 19 nt, Homo sapiens
  misc_RNA (1)...(19): siRNA sense strand
gguuaucagaugcacuuua

SEQ ID NO: 1267374 - RNA, 19 nt, Homo sapiens
  misc_RNA (1)...(19): siRNA sense strand
caccaacauuugaagcuau

SEQ ID NO: 1267375 - RNA, 19 nt, Homo sapiens
  misc_RNA (1)...(19): siRNA sense strand
ugaggagccaccaacauuu

SEQ ID NO: 1267376 - RNA, 19 nt, Homo sapiens
  misc_RNA (1)...(19): siRNA sense strand
ggaaggaauacuugacagu

SEQ ID NO: 1267377 - RNA, 19 nt, Homo sapiens
  misc_RNA (1)...(19): siRNA sense strand
gaggaaggaauacuugaca

SEQ ID NO: 1267378 - RNA, 19 nt, Homo sapiens
  misc_RNA (1)...(19): siRNA sense strand
ccaguuccaaagugucuua

SEQ ID NO: 1267379 - RNA, 19 nt, Homo sapiens
  misc_RNA (1)...(19): siRNA sense strand
ugaguaucuugaugcagua

SEQ ID NO: 1267380 - RNA, 19 nt, Homo sapiens
  misc_RNA (1)...(19): siRNA sense strand
caccuuuagugaaguagaa

SEQ ID NO: 1267381 - RNA, 19 nt, Homo sapiens
  misc_RNA (1)...(19): siRNA sense strand
acagauaucaggauuugga

SEQ ID NO: 1267382 - RNA, 19 nt, Homo sapiens
  misc_RNA (1)...(19): siRNA sense strand
ucauugcugugauuguuau

SEQ ID NO: 1267383 - RNA, 19 nt, Homo sapiens
  misc_RNA (1)...(19): siRNA sense strand
ucagaugcacuuuauuugu

SEQ ID NO: 1267384 - RNA, 19 nt, Homo sapiens
  misc_RNA (1)...(19): siRNA sense strand
gugcugcuccagaguguaa

SEQ ID NO: 1267385 - RNA, 19 nt, Homo sapiens
  misc_RNA (1)...(19): siRNA sense strand
ggaaaacacaccuuuagug

SEQ ID NO: 1267386 - RNA, 19 nt, Homo sapiens
  misc_RNA (1)...(19): siRNA sense strand
aaggaucaguagcaauuug

SEQ ID NO: 1267387 - RNA, 19 nt, Homo sapiens
  misc_RNA (1)...(19): siRNA sense strand
uauauacgggauccuuuaa

SEQ ID NO: 1267388 - RNA, 19 nt, Homo sapiens
  misc_RNA (1)...(19): siRNA sense strand
ugaaguagaaguauuugag

SEQ ID NO: 1267389 - RNA, 19 nt, Homo sapiens
  misc_RNA (1)...(19): siRNA sense strand
cuugacaguuuggauguuu

SEQ ID NO: 1267390 - RNA, 19 nt, Homo sapiens
  misc_RNA (1)...(19): siRNA sense strand
cauauauacgggauccuuu

SEQ ID NO: 1267391 - RNA, 19 nt, Homo sapiens
  misc_RNA (1)...(19): siRNA sense strand
auauauacgggauccuuua

SEQ ID NO: 1267392 - RNA, 19 nt, Homo sapiens
  misc_RNA (1)...(19): siRNA sense strand
cuuaaaggaucaguagcaa

SEQ ID NO: 1267393 - RNA, 19 nt, Homo sapiens
  misc_RNA (1)...(19): siRNA sense strand
uaaaccugaggaaggaaua

SEQ ID NO: 1267394 - RNA, 19 nt, Homo sapiens
  misc_RNA (1)...(19): siRNA sense strand
agaugacgccuguuauaga

SEQ ID NO: 1267395 - RNA, 19 nt, Homo sapiens
  misc_RNA (1)...(19): siRNA sense strand
ugugauuguuauugccaua

SEQ ID NO: 1267396 - RNA, 19 nt, Homo sapiens
  misc_RNA (1)...(19): siRNA sense strand
gagagcacgauuuauugug

SEQ ID NO: 1267397 - RNA, 19 nt, Homo sapiens
  misc_RNA (1)...(19): siRNA sense strand
gaaguauuugaguaucuug

SEQ ID NO: 1267398 - RNA, 19 nt, Homo sapiens
  misc_RNA (1)...(19): siRNA sense strand
ggcuaccugucucagauga

SEQ ID NO: 1267399 - RNA, 19 nt, Homo sapiens
  misc_RNA (1)...(19): siRNA sense strand
gauaucaggauuuggaaaa

SEQ ID NO: 1267400 - RNA, 19 nt, Homo sapiens
  misc_RNA (1)...(19): siRNA sense strand
ccucuugccacccauacua

SEQ ID NO: 1267401 - RNA, 19 nt, Homo sapiens
  misc_RNA (1)...(19): siRNA sense strand
ccaugguguugcugcugua

SEQ ID NO: 1267402 - RNA, 19 nt, Homo sapiens
  misc_RNA (1)...(19): siRNA sense strand
cagaugacgccuguuauag

SEQ ID NO: 1267403 - RNA, 19 nt, Homo sapiens
  misc_RNA (1)...(19): siRNA sense strand
cagaugguggagcugaaua

SEQ ID NO: 1267404 - RNA, 19 nt, Homo sapiens
  misc_RNA (1)...(19): siRNA sense strand
gucauugcugugauuguua

SEQ ID NO: 1267405 - RNA, 19 nt, Homo sapiens
  misc_RNA (1)...(19): siRNA sense strand
ggagccaccaacauuugaa

SEQ ID NO: 1267406 - RNA, 19 nt, Homo sapiens
  misc_RNA (1)...(19): siRNA sense strand
uuggugaacgaguagauua

SEQ ID NO: 1267407 - RNA, 19 nt, Homo sapiens
  misc_RNA (1)...(19): siRNA sense strand
gcgcuuuccuggguugcuu

SEQ ID NO: 1267408 - RNA, 19 nt, Homo sapiens
  misc_RNA (1)...(19): siRNA sense strand
uacuacaaagcaacaguua

SEQ ID NO: 1267409 - RNA, 19 nt, Homo sapiens
  misc_RNA (1)...(19): siRNA sense strand
cuugaugcaguaacuuaua

SEQ ID NO: 1267410 - RNA, 19 nt, Homo sapiens
  misc_RNA (1)...(19): siRNA sense strand
aaacauguccauauauacg

SEQ ID NO: 1267411 - RNA, 19 nt, Homo sapiens
  misc_RNA (1)...(19): siRNA sense strand
guguaaaguggucaaaugu

SEQ ID NO: 1267412 - RNA, 19 nt, Homo sapiens
  misc_RNA (1)...(19): siRNA sense strand
cuuacgaguuugguuauca

SEQ ID NO: 1267413 - RNA, 19 nt, Homo sapiens
  misc_RNA (1)...(19): siRNA sense strand
uacgggauccuuuaaaugg

SEQ ID NO: 1267414 - RNA, 19 nt, Homo sapiens
  misc_RNA (1)...(19): siRNA sense strand
gcagaugguggagcugaau

SEQ ID NO: 1267415 - RNA, 19 nt, Homo sapiens
  misc_RNA (1)...(19): siRNA sense strand
aaccaaaacccuacuauga

SEQ ID NO: 1267416 - RNA, 19 nt, Homo sapiens
  misc_RNA (1)...(19): siRNA sense strand
uugaugcaguaacuuauag

SEQ ID NO: 1267417 - RNA, 19 nt, Homo sapiens
  misc_RNA (1)...(19): siRNA sense strand
ggagcugaauaugccacuu

SEQ ID NO: 1267418 - RNA, 19 nt, Homo sapiens
  misc_RNA (1)...(19): siRNA sense strand
cgauggcagcgacacaauu

SEQ ID NO: 1267419 - RNA, 19 nt, Homo sapiens
  misc_RNA (1)...(19): siRNA sense strand
gauccauuuucacuuauug

SEQ ID NO: 1267420 - RNA, 19 nt, Homo sapiens
  misc_RNA (1)...(19): siRNA sense strand
ggagagagcacgauuuauu

SEQ ID NO: 1267421 - RNA, 19 nt, Homo sapiens
  misc_RNA (1)...(19): siRNA sense strand
agagaaacauguccauaua

SEQ ID NO: 1267422 - RNA, 19 nt, Homo sapiens
  misc_RNA (1)...(19): siRNA sense strand
cagaugcacuuuauuugua

SEQ ID NO: 1267423 - RNA, 19 nt, Homo sapiens
  misc_RNA (1)...(19): siRNA sense strand
ggacuuacgaguuugguua

SEQ ID NO: 1267424 - RNA, 19 nt, Homo sapiens
  misc_RNA (1)...(19): siRNA sense strand
aaacagauaucaggauuug

SEQ ID NO: 1267425 - RNA, 19 nt, Homo sapiens
  misc_RNA (1)...(19): siRNA sense strand
cuauggagcucauugguaa

SEQ ID NO: 1267426 - RNA, 19 nt, Homo sapiens
  misc_RNA (1)...(19): siRNA sense strand
aaacacaccuuuagugaag

SEQ ID NO: 1267427 - RNA, 19 nt, Homo sapiens
  misc_RNA (1)...(19): siRNA sense strand
gaacuuaaaggaucaguag

SEQ ID NO: 1267428 - RNA, 19 nt, Homo sapiens
  misc_RNA (1)...(19): siRNA sense strand
gaaaacagauaucaggauu

SEQ ID NO: 1267429 - RNA, 19 nt, Homo sapiens
  misc_RNA (1)...(19): siRNA sense strand
uaaaggaucaguagcaauu

SEQ ID NO: 1267430 - RNA, 19 nt, Homo sapiens
  misc_RNA (1)...(19): siRNA sense strand
aaaugggacuuacgaguuu

SEQ ID NO: 1267431 - RNA, 19 nt, Homo sapiens
  misc_RNA (1)...(19): siRNA sense strand
guuaucagaugcacuuuau

SEQ ID NO: 1267432 - RNA, 19 nt, Homo sapiens
  misc_RNA (1)...(19): siRNA sense strand
gagcugaauaugccacuua

SEQ ID NO: 1267433 - RNA, 19 nt, Homo sapiens
  misc_RNA (1)...(19): siRNA sense strand
ugagauuggugaacgagua

SEQ ID NO: 1267434 - RNA, 19 nt, Homo sapiens
  misc_RNA (1)...(19): siRNA sense strand
gugaacgaguagauuauaa

SEQ ID NO: 1267435 - RNA, 19 nt, Homo sapiens
  misc_RNA (1)...(19): siRNA sense strand
gagagagcacgauuuauug

SEQ ID NO: 1267436 - RNA, 19 nt, Homo sapiens
  misc_RNA (1)...(19): siRNA sense strand
caaaugggacuuacgaguu

SEQ ID NO: 1267437 - RNA, 19 nt, Homo sapiens
  misc_RNA (1)...(19): siRNA sense strand
ggucauugcugugauuguu

SEQ ID NO: 1267438 - RNA, 19 nt, Homo sapiens
  misc_RNA (1)...(19): siRNA sense strand
ccagauccauuuucacuua

SEQ ID NO: 1267439 - RNA, 19 nt, Homo sapiens
  misc_RNA (1)...(19): siRNA sense strand
gaaggaauacuugacaguu

SEQ ID NO: 1267440 - RNA, 19 nt, Homo sapiens
  misc_RNA (1)...(19): siRNA sense strand
aaggaauacuugacaguuu

SEQ ID NO: 1267441 - RNA, 19 nt, Homo sapiens
  misc_RNA (1)...(19): siRNA sense strand
ucagaugacgccuguuaua

SEQ ID NO: 1267442 - RNA, 19 nt, Homo sapiens
  misc_RNA (1)...(19): siRNA sense strand
gaaaacacaccuuuaguga

SEQ ID NO: 1267443 - RNA, 19 nt, Homo sapiens
  misc_RNA (1)...(19): siRNA sense strand
gaugacgccuguuauagag

SEQ ID NO: 1267444 - RNA, 19 nt, Homo sapiens
  misc_RNA (1)...(19): siRNA sense strand
gagaaacauguccauauau

SEQ ID NO: 1267445 - RNA, 19 nt, Homo sapiens
  misc_RNA (1)...(19): siRNA sense strand
ccacuuaccagacuaaauc

SEQ ID NO: 1267446 - RNA, 19 nt, Homo sapiens
  misc_RNA (1)...(19): siRNA sense strand
acgaguagauuauaagugu

SEQ ID NO: 1267447 - RNA, 19 nt, Homo sapiens
  misc_RNA (1)...(19): siRNA sense strand
cuacaaagcaacaguuaug

SEQ ID NO: 1267448 - RNA, 19 nt, Homo sapiens
  misc_RNA (1)...(19): siRNA sense strand
ccaccaacauuugaagcua

SEQ ID NO: 1267449 - RNA, 19 nt, Homo sapiens
  misc_RNA (1)...(19): siRNA sense strand
uauacgggauccuuuaaau

SEQ ID NO: 1267450 - RNA, 19 nt, Homo sapiens
  misc_RNA (1)...(19): siRNA sense strand
cgaguuugguuaucagaug

SEQ ID NO: 1267451 - RNA, 19 nt, Homo sapiens
  misc_RNA (1)...(19): siRNA sense strand
gaacgaguagauuauaagu

SEQ ID NO: 1267452 - RNA, 19 nt, Homo sapiens
  misc_RNA (1)...(19): siRNA sense strand
gugaggagccaccaacauu

SEQ ID NO: 1267453 - RNA, 19 nt, Homo sapiens
  misc_RNA (1)...(19): siRNA sense strand
gauggcagcgacacaauug

SEQ ID NO: 1267454 - RNA, 19 nt, Homo sapiens
  misc_RNA (1)...(19): siRNA sense strand
ucucagaugacgccuguua

SEQ ID NO: 1267455 - RNA, 19 nt, Homo sapiens
  misc_RNA (1)...(19): siRNA sense strand
gaggagccaccaacauuug

SEQ ID NO: 1267456 - RNA, 19 nt, Homo sapiens
  misc_RNA (1)...(19): siRNA sense strand
gcuauggagcucauuggua

SEQ ID NO: 1267457 - RNA, 19 nt, Homo sapiens
  misc_RNA (1)...(19): siRNA sense strand
acacaccuuuagugaagua

SEQ ID NO: 1267458 - RNA, 19 nt, Homo sapiens
  misc_RNA (1)...(19): siRNA sense strand
uagagaaacauguccauau

SEQ ID NO: 1267459 - RNA, 19 nt, Homo sapiens
  misc_RNA (1)...(19): siRNA sense strand
guuccaaagugucuuaaag

SEQ ID NO: 1267460 - RNA, 19 nt, Homo sapiens
  misc_RNA (1)...(19): siRNA sense strand
ggugaacgaguagauuaua

SEQ ID NO: 1267461 - RNA, 19 nt, Homo sapiens
  misc_RNA (1)...(19): siRNA sense strand
gaaguagaaguauuugagu

SEQ ID NO: 1267462 - RNA, 19 nt, Homo sapiens
  misc_RNA (1)...(19): siRNA sense strand
gaaacauguccauauauac

SEQ ID NO: 1267463 - RNA, 19 nt, Homo sapiens
  misc_RNA (1)...(19): siRNA sense strand
ugacgccuguuauagagaa

SEQ ID NO: 1267464 - RNA, 19 nt, Homo sapiens
  misc_RNA (1)...(19): siRNA sense strand
cgaguagauuauaagugua

SEQ ID NO: 1267465 - RNA, 19 nt, Homo sapiens
  misc_RNA (1)...(19): siRNA sense strand
gcacuuuauuuguaaugag

SEQ ID NO: 1267466 - RNA, 19 nt, Homo sapiens
  misc_RNA (1)...(19): siRNA sense strand
guagaaguauuugaguauc

SEQ ID NO: 1267467 - RNA, 19 nt, Homo sapiens
  misc_RNA (1)...(19): siRNA sense strand
guauuugaguaucuugaug

SEQ ID NO: 1267468 - RNA, 19 nt, Homo sapiens
  misc_RNA (1)...(19): siRNA sense strand
aggaauacuugacaguuug

SEQ ID NO: 1267469 - RNA, 19 nt, Homo sapiens
  misc_RNA (1)...(19): siRNA sense strand
ccaaaacccuacuaugaga

SEQ ID NO: 1267470 - RNA, 19 nt, Homo sapiens
  misc_RNA (1)...(19): siRNA sense strand
aguguaaaguggucaaaug

SEQ ID NO: 1267471 - RNA, 19 nt, Homo sapiens
  misc_RNA (1)...(19): siRNA sense strand
ccacccauacuauuuguga

SEQ ID NO: 1267472 - RNA, 19 nt, Homo sapiens
  misc_RNA (1)...(19): siRNA sense strand
uuggagagagcacgauuua

SEQ ID NO: 1267473 - RNA, 19 nt, Homo sapiens
  misc_RNA (1)...(19): siRNA sense strand
gguuaucagaugcacuuua

SEQ ID NO: 1267474 - RNA, 19 nt, Homo sapiens
  misc_RNA (1)...(19): siRNA sense strand
caccaacauuugaagcuau

SEQ ID NO: 1267475 - RNA, 19 nt, Homo sapiens
  misc_RNA (1)...(19): siRNA sense strand
ugaggagccaccaacauuu

SEQ ID NO: 1267476 - RNA, 19 nt, Homo sapiens
  misc_RNA (1)...(19): siRNA sense strand
ggaaggaauacuugacagu

SEQ ID NO: 1267477 - RNA, 19 nt, Homo sapiens
  misc_RNA (1)...(19): siRNA sense strand
gaggaaggaauacuugaca

SEQ ID NO: 1267478 - RNA, 19 nt, Homo sapiens
  misc_RNA (1)...(19): siRNA sense strand
ccaguuccaaagugucuua

SEQ ID NO: 1267479 - RNA, 19 nt, Homo sapiens
  misc_RNA (1)...(19): siRNA sense strand
ugaguaucuugaugcagua

SEQ ID NO: 1267480 - RNA, 19 nt, Homo sapiens
  misc_RNA (1)...(19): siRNA sense strand
caccuuuagugaaguagaa

SEQ ID NO: 1267481 - RNA, 19 nt, Homo sapiens
  misc_RNA (1)...(19): siRNA sense strand
acagauaucaggauuugga

SEQ ID NO: 1267482 - RNA, 19 nt, Homo sapiens
  misc_RNA (1)...(19): siRNA sense strand
ucauugcugugauuguuau

SEQ ID NO: 1267483 - RNA, 19 nt, Homo sapiens
  misc_RNA (1)...(19): siRNA sense strand
ucagaugcacuuuauuugu

SEQ ID NO: 1267484 - RNA, 19 nt, Homo sapiens
  misc_RNA (1)...(19): siRNA sense strand
gugcugcuccagaguguaa

SEQ ID NO: 1267485 - RNA, 19 nt, Homo sapiens
  misc_RNA (1)...(19): siRNA sense strand
ggaaaacacaccuuuagug

SEQ ID NO: 1267486 - RNA, 19 nt, Homo sapiens
  misc_RNA (1)...(19): siRNA sense strand
aaggaucaguagcaauuug

SEQ ID NO: 1267487 - RNA, 19 nt, Homo sapiens
  misc_RNA (1)...(19): siRNA sense strand
uauauacgggauccuuuaa

SEQ ID NO: 1267488 - RNA, 19 nt, Homo sapiens
  misc_RNA (1)...(19): siRNA sense strand
ugaaguagaaguauuugag

SEQ ID NO: 1267489 - RNA, 19 nt, Homo sapiens
  misc_RNA (1)...(19): siRNA sense strand
cuugacaguuuggauguuu

SEQ ID NO: 1267490 - RNA, 19 nt, Homo sapiens
  misc_RNA (1)...(19): siRNA sense strand
cauauauacgggauccuuu

SEQ ID NO: 1267491 - RNA, 19 nt, Homo sapiens
  misc_RNA (1)...(19): siRNA sense strand
auauauacgggauccuuua

SEQ ID NO: 1267492 - RNA, 19 nt, Homo sapiens
  misc_RNA (1)...(19): siRNA sense strand
cuuaaaggaucaguagcaa

SEQ ID NO: 1267493 - RNA, 19 nt, Homo sapiens
  misc_RNA (1)...(19): siRNA sense strand
uaaaccugaggaaggaaua

SEQ ID NO: 1267494 - RNA, 19 nt, Homo sapiens
  misc_RNA (1)...(19): siRNA sense strand
agaugacgccuguuauaga

SEQ ID NO: 1267495 - RNA, 19 nt, Homo sapiens
  misc_RNA (1)...(19): siRNA sense strand
ugugauuguuauugccaua

SEQ ID NO: 1267496 - RNA, 19 nt, Homo sapiens
  misc_RNA (1)...(19): siRNA sense strand
gagagcacgauuuauugug

SEQ ID NO: 1267497 - RNA, 19 nt, Homo sapiens
  misc_RNA (1)...(19): siRNA sense strand
gaaguauuugaguaucuug

SEQ ID NO: 1267498 - RNA, 19 nt, Homo sapiens
  misc_RNA (1)...(19): siRNA sense strand
ggcuaccugucucagauga

SEQ ID NO: 1267499 - RNA, 19 nt, Homo sapiens
  misc_RNA (1)...(19): siRNA sense strand
gauaucaggauuuggaaaa

SEQ ID NO: 1267500 - RNA, 19 nt, Homo sapiens
  misc_RNA (1)...(19): siRNA sense strand
ccucuugccacccauacua

SEQ ID NO: 1267501 - RNA, 19 nt, Homo sapiens
  misc_RNA (1)...(19): siRNA sense strand
ccaugguguugcugcugua

SEQ ID NO: 1267502 - RNA, 19 nt, Homo sapiens
  misc_RNA (1)...(19): siRNA sense strand
cagaugacgccuguuauag

SEQ ID NO: 1267503 - RNA, 19 nt, Homo sapiens
  misc_RNA (1)...(19): siRNA sense strand
cagaugguggagcugaaua

SEQ ID NO: 1267504 - RNA, 19 nt, Homo sapiens
  misc_RNA (1)...(19): siRNA sense strand
gucauugcugugauuguua

SEQ ID NO: 1267505 - RNA, 19 nt, Homo sapiens
  misc_RNA (1)...(19): siRNA sense strand
ggagccaccaacauuugaa

SEQ ID NO: 1267506 - RNA, 19 nt, Homo sapiens
  misc_RNA (1)...(19): siRNA sense strand
uuggugaacgaguagauua

SEQ ID NO: 1267507 - RNA, 19 nt, Homo sapiens
  misc_RNA (1)...(19): siRNA sense strand
gcgcuuuccuggguugcuu

SEQ ID NO: 1267508 - RNA, 19 nt, Homo sapiens
  misc_RNA (1)...(19): siRNA sense strand
uacuacaaagcaacaguua

SEQ ID NO: 1267509 - RNA, 19 nt, Homo sapiens
  misc_RNA (1)...(19): siRNA sense strand
cuugaugcaguaacuuaua

SEQ ID NO: 1267510 - RNA, 19 nt, Homo sapiens
  misc_RNA (1)...(19): siRNA sense strand
aaacauguccauauauacg

SEQ ID NO: 1267511 - RNA, 19 nt, Homo sapiens
  misc_RNA (1)...(19): siRNA sense strand
guguaaaguggucaaaugu

SEQ ID NO: 1267512 - RNA, 19 nt, Homo sapiens
  misc_RNA (1)...(19): siRNA sense strand
cuuacgaguuugguuauca

SEQ ID NO: 1267513 - RNA, 19 nt, Homo sapiens
  misc_RNA (1)...(19): siRNA sense strand
uacgggauccuuuaaaugg

SEQ ID NO: 1267514 - RNA, 19 nt, Homo sapiens
  misc_RNA (1)...(19): siRNA sense strand
gcagaugguggagcugaau

SEQ ID NO: 1267515 - RNA, 19 nt, Homo sapiens
  misc_RNA (1)...(19): siRNA sense strand
aaccaaaacccuacuauga

SEQ ID NO: 1267516 - RNA, 19 nt, Homo sapiens
  misc_RNA (1)...(19): siRNA sense strand
uugaugcaguaacuuauag

SEQ ID NO: 1267517 - RNA, 19 nt, Homo sapiens
  misc_RNA (1)...(19): siRNA sense strand
ggagcugaauaugccacuu

SEQ ID NO: 1267518 - RNA, 19 nt, Homo sapiens
  misc_RNA (1)...(19): siRNA sense strand
cgauggcagcgacacaauu

SEQ ID NO: 1267519 - RNA, 19 nt, Homo sapiens
  misc_RNA (1)...(19): siRNA sense strand
gauccauuuucacuuauug

SEQ ID NO: 1267520 - RNA, 19 nt, Homo sapiens
  misc_RNA (1)...(19): siRNA sense strand
ggagagagcacgauuuauu

SEQ ID NO: 1267521 - RNA, 19 nt, Homo sapiens
  misc_RNA (1)...(19): siRNA sense strand
agagaaacauguccauaua

SEQ ID NO: 1267522 - RNA, 19 nt, Homo sapiens
  misc_RNA (1)...(19): siRNA sense strand
cagaugcacuuuauuugua

SEQ ID NO: 1267523 - RNA, 19 nt, Homo sapiens
  misc_RNA (1)...(19): siRNA sense strand
ggacuuacgaguuugguua

SEQ ID NO: 1267524 - RNA, 19 nt, Homo sapiens
  misc_RNA (1)...(19): siRNA sense strand
aaacagauaucaggauuug

SEQ ID NO: 1267525 - RNA, 19 nt, Homo sapiens
  misc_RNA (1)...(19): siRNA sense strand
cuauggagcucauugguaa

SEQ ID NO: 1267526 - RNA, 19 nt, Homo sapiens
  misc_RNA (1)...(19): siRNA sense strand
aaacacaccuuuagugaag

SEQ ID NO: 1267527 - RNA, 19 nt, Homo sapiens
  misc_RNA (1)...(19): siRNA sense strand
gaacuuaaaggaucaguag

SEQ ID NO: 1267528 - RNA, 19 nt, Homo sapiens
  misc_RNA (1)...(19): siRNA sense strand
gaaaacagauaucaggauu

SEQ ID NO: 1267529 - RNA, 19 nt, Homo sapiens
  misc_RNA (1)...(19): siRNA sense strand
uaaaggaucaguagcaauu

SEQ ID NO: 1267530 - RNA, 19 nt, Homo sapiens
  misc_RNA (1)...(19): siRNA sense strand
aaaugggacuuacgaguuu

SEQ ID NO: 1267531 - RNA, 19 nt, Homo sapiens
  misc_RNA (1)...(19): siRNA sense strand
guuaucagaugcacuuuau

SEQ ID NO: 1267532 - RNA, 19 nt, Homo sapiens
  misc_RNA (1)...(19): siRNA sense strand
gagcugaauaugccacuua

SEQ ID NO: 1267533 - RNA, 19 nt, Homo sapiens
  misc_RNA (1)...(19): siRNA sense strand
ugagauuggugaacgagua

SEQ ID NO: 1267534 - RNA, 19 nt, Homo sapiens
  misc_RNA (1)...(19): siRNA sense strand
gugaacgaguagauuauaa

SEQ ID NO: 1267535 - RNA, 19 nt, Homo sapiens
  misc_RNA (1)...(19): siRNA sense strand
gagagagcacgauuuauug

SEQ ID NO: 1267536 - RNA, 19 nt, Homo sapiens
  misc_RNA (1)...(19): siRNA sense strand
caaaugggacuuacgaguu

SEQ ID NO: 1267537 - RNA, 19 nt, Homo sapiens
  misc_RNA (1)...(19): siRNA sense strand
ggucauugcugugauuguu

SEQ ID NO: 1267538 - RNA, 19 nt, Homo sapiens
  misc_RNA (1)...(19): siRNA sense strand
ccagauccauuuucacuua

SEQ ID NO: 1267539 - RNA, 19 nt, Homo sapiens
  misc_RNA (1)...(19): siRNA sense strand
gaaggaauacuugacaguu

SEQ ID NO: 1267540 - RNA, 19 nt, Homo sapiens
  misc_RNA (1)...(19): siRNA sense strand
aaggaauacuugacaguuu

SEQ ID NO: 1267541 - RNA, 19 nt, Homo sapiens
  misc_RNA (1)...(19): siRNA sense strand
ucagaugacgccuguuaua

SEQ ID NO: 1267542 - RNA, 19 nt, Homo sapiens
  misc_RNA (1)...(19): siRNA sense strand
gaaaacacaccuuuaguga

SEQ ID NO: 1267543 - RNA, 19 nt, Homo sapiens
  misc_RNA (1)...(19): siRNA sense strand
gaugacgccuguuauagag

SEQ ID NO: 1267544 - RNA, 19 nt, Homo sapiens
  misc_RNA (1)...(19): siRNA sense strand
gagaaacauguccauauau

SEQ ID NO: 1267545 - RNA, 19 nt, Homo sapiens
  misc_RNA (1)...(19): siRNA sense strand
ccacuuaccagacuaaauc

SEQ ID NO: 1267546 - RNA, 19 nt, Homo sapiens
  misc_RNA (1)...(19): siRNA sense strand
acgaguagauuauaagugu

SEQ ID NO: 1267547 - RNA, 19 nt, Homo sapiens
  misc_RNA (1)...(19): siRNA sense strand
cuacaaagcaacaguuaug

SEQ ID NO: 1267548 - RNA, 19 nt, Homo sapiens
  misc_RNA (1)...(19): siRNA sense strand
ccaccaacauuugaagcua

SEQ ID NO: 1267549 - RNA, 19 nt, Homo sapiens
  misc_RNA (1)...(19): siRNA sense strand
uauacgggauccuuuaaau

SEQ ID NO: 1267550 - RNA, 19 nt, Homo sapiens
  misc_RNA (1)...(19): siRNA sense strand
cgaguuugguuaucagaug

SEQ ID NO: 1267551 - RNA, 19 nt, Homo sapiens
  misc_RNA (1)...(19): siRNA sense strand
gaacgaguagauuauaagu

SEQ ID NO: 1267552 - RNA, 19 nt, Homo sapiens
  misc_RNA (1)...(19): siRNA sense strand
gugaggagccaccaacauu

SEQ ID NO: 1267553 - RNA, 19 nt, Homo sapiens
  misc_RNA (1)...(19): siRNA sense strand
gauggcagcgacacaauug

SEQ ID NO: 1267554 - RNA, 19 nt, Homo sapiens
  misc_RNA (1)...(19): siRNA sense strand
ucucagaugacgccuguua

SEQ ID NO: 1267555 - RNA, 19 nt, Homo sapiens
  misc_RNA (1)...(19): siRNA sense strand
gaggagccaccaacauuug

SEQ ID NO: 1267556 - RNA, 19 nt, Homo sapiens
  misc_RNA (1)...(19): siRNA sense strand
gcuauggagcucauuggua

SEQ ID NO: 1267557 - RNA, 19 nt, Homo sapiens
  misc_RNA (1)...(19): siRNA sense strand
acacaccuuuagugaagua

SEQ ID NO: 1267558 - RNA, 19 nt, Homo sapiens
  misc_RNA (1)...(19): siRNA sense strand
uagagaaacauguccauau

SEQ ID NO: 1267559 - RNA, 19 nt, Homo sapiens
  misc_RNA (1)...(19): siRNA sense strand
guuccaaagugucuuaaag

SEQ ID NO: 1267560 - RNA, 19 nt, Homo sapiens
  misc_RNA (1)...(19): siRNA sense strand
ggugaacgaguagauuaua

SEQ ID NO: 1267561 - RNA, 19 nt, Homo sapiens
  misc_RNA (1)...(19): siRNA sense strand
gaaguagaaguauuugagu

SEQ ID NO: 1267562 - RNA, 19 nt, Homo sapiens
  misc_RNA (1)...(19): siRNA sense strand
gaaacauguccauauauac

SEQ ID NO: 1267563 - RNA, 19 nt, Homo sapiens
  misc_RNA (1)...(19): siRNA sense strand
ugacgccuguuauagagaa

SEQ ID NO: 1267564 - RNA, 19 nt, Homo sapiens
  misc_RNA (1)...(19): siRNA sense strand
cgaguagauuauaagugua

SEQ ID NO: 1267565 - RNA, 19 nt, Homo sapiens
  misc_RNA (1)...(19): siRNA sense strand
gcacuuuauuuguaaugag

SEQ ID NO: 1267566 - RNA, 19 nt, Homo sapiens
  misc_RNA (1)...(19): siRNA sense strand
guagaaguauuugaguauc

SEQ ID NO: 1267567 - RNA, 19 nt, Homo sapiens
  misc_RNA (1)...(19): siRNA sense strand
guauuugaguaucuugaug

SEQ ID NO: 1267568 - RNA, 19 nt, Homo sapiens
  misc_RNA (1)...(19): siRNA sense strand
aggaauacuugacaguuug

SEQ ID NO: 1267569 - RNA, 19 nt, Homo sapiens
  misc_RNA (1)...(19): siRNA sense strand
ccaaaacccuacuaugaga

SEQ ID NO: 1267570 - RNA, 19 nt, Homo sapiens
  misc_RNA (1)...(19): siRNA sense strand
aguguaaaguggucaaaug

SEQ ID NO: 1267571 - RNA, 19 nt, Homo sapiens
  misc_RNA (1)...(19): siRNA sense strand
ccacccauacuauuuguga

SEQ ID NO: 1267572 - RNA, 19 nt, Homo sapiens
  misc_RNA (1)...(19): siRNA sense strand
uuggagagagcacgauuua

SEQ ID NO: 1267573 - RNA, 19 nt, Homo sapiens
  misc_RNA (1)...(19): siRNA sense strand
gguuaucagaugcacuuua

SEQ ID NO: 1267574 - RNA, 19 nt, Homo sapiens
  misc_RNA (1)...(19): siRNA sense strand
caccaacauuugaagcuau

SEQ ID NO: 1267575 - RNA, 19 nt, Homo sapiens
  misc_RNA (1)...(19): siRNA sense strand
ugaggagccaccaacauuu

SEQ ID NO: 1267576 - RNA, 19 nt, Homo sapiens
  misc_RNA (1)...(19): siRNA sense strand
ggaaggaauacuugacagu

SEQ ID NO: 1267577 - RNA, 19 nt, Homo sapiens
  misc_RNA (1)...(19): siRNA sense strand
gaggaaggaauacuugaca

SEQ ID NO: 1267578 - RNA, 19 nt, Homo sapiens
  misc_RNA (1)...(19): siRNA sense strand
ccaguuccaaagugucuua

SEQ ID NO: 1267579 - RNA, 19 nt, Homo sapiens
  misc_RNA (1)...(19): siRNA sense strand
ugaguaucuugaugcagua

SEQ ID NO: 1267580 - RNA, 19 nt, Homo sapiens
  misc_RNA (1)...(19): siRNA sense strand
caccuuuagugaaguagaa

SEQ ID NO: 1267581 - RNA, 19 nt, Homo sapiens
  misc_RNA (1)...(19): siRNA sense strand
acagauaucaggauuugga

SEQ ID NO: 1267582 - RNA, 19 nt, Homo sapiens
  misc_RNA (1)...(19): siRNA sense strand
ucauugcugugauuguuau

SEQ ID NO: 1267583 - RNA, 19 nt, Homo sapiens
  misc_RNA (1)...(19): siRNA sense strand
ucagaugcacuuuauuugu

SEQ ID NO: 1267584 - RNA, 19 nt, Homo sapiens
  misc_RNA (1)...(19): siRNA sense strand
gugcugcuccagaguguaa

SEQ ID NO: 1267585 - RNA, 19 nt, Homo sapiens
  misc_RNA (1)...(19): siRNA sense strand
ggaaaacacaccuuuagug

SEQ ID NO: 1267586 - RNA, 19 nt, Homo sapiens
  misc_RNA (1)...(19): siRNA sense strand
aaggaucaguagcaauuug

SEQ ID NO: 1267587 - RNA, 19 nt, Homo sapiens
  misc_RNA (1)...(19): siRNA sense strand
uauauacgggauccuuuaa

SEQ ID NO: 1267588 - RNA, 19 nt, Homo sapiens
  misc_RNA (1)...(19): siRNA sense strand
ugaaguagaaguauuugag

SEQ ID NO: 1267589 - RNA, 19 nt, Homo sapiens
  misc_RNA (1)...(19): siRNA sense strand
cuugacaguuuggauguuu

SEQ ID NO: 1267590 - RNA, 19 nt, Homo sapiens
  misc_RNA (1)...(19): siRNA sense strand
cauauauacgggauccuuu

SEQ ID NO: 1267591 - RNA, 19 nt, Homo sapiens
  misc_RNA (1)...(19): siRNA sense strand
auauauacgggauccuuua

SEQ ID NO: 1267592 - RNA, 19 nt, Homo sapiens
  misc_RNA (1)...(19): siRNA sense strand
cuuaaaggaucaguagcaa

SEQ ID NO: 1267593 - RNA, 19 nt, Homo sapiens
  misc_RNA (1)...(19): siRNA sense strand
uaaaccugaggaaggaaua

SEQ ID NO: 1267594 - RNA, 19 nt, Homo sapiens
  misc_RNA (1)...(19): siRNA sense strand
agaugacgccuguuauaga

SEQ ID NO: 1267595 - RNA, 19 nt, Homo sapiens
  misc_RNA (1)...(19): siRNA sense strand
ugugauuguuauugccaua

SEQ ID NO: 1267596 - RNA, 19 nt, Homo sapiens
  misc_RNA (1)...(19): siRNA sense strand
gagagcacgauuuauugug

SEQ ID NO: 1267597 - RNA, 19 nt, Homo sapiens
  misc_RNA (1)...(19): siRNA sense strand
gaaguauuugaguaucuug

SEQ ID NO: 1267598 - RNA, 19 nt, Homo sapiens
  misc_RNA (1)...(19): siRNA sense strand
ggcuaccugucucagauga

SEQ ID NO: 1267599 - RNA, 19 nt, Homo sapiens
  misc_RNA (1)...(19): siRNA sense strand
gauaucaggauuuggaaaa

SEQ ID NO: 1267600 - RNA, 19 nt, Homo sapiens
  misc_RNA (1)...(19): siRNA sense strand
ccucuugccacccauacua

SEQ ID NO: 1267601 - RNA, 19 nt, Homo sapiens
  misc_RNA (1)...(19): siRNA sense strand
ccaugguguugcugcugua

SEQ ID NO: 1267602 - RNA, 19 nt, Homo sapiens
  misc_RNA (1)...(19): siRNA sense strand
cagaugacgccuguuauag

SEQ ID NO: 1267603 - RNA, 19 nt, Homo sapiens
  misc_RNA (1)...(19): siRNA sense strand
cagaugguggagcugaaua

SEQ ID NO: 1267604 - RNA, 19 nt, Homo sapiens
  misc_RNA (1)...(19): siRNA sense strand
gucauugcugugauuguua

SEQ ID NO: 1267605 - RNA, 19 nt, Homo sapiens
  misc_RNA (1)...(19): siRNA sense strand
ggagccaccaacauuugaa

SEQ ID NO: 1267606 - RNA, 19 nt, Homo sapiens
  misc_RNA (1)...(19): siRNA sense strand
uuggugaacgaguagauua

SEQ ID NO: 1267607 - RNA, 19 nt, Homo sapiens
  misc_RNA (1)...(19): siRNA sense strand
gcgcuuuccuggguugcuu

SEQ ID NO: 1267608 - RNA, 19 nt, Homo sapiens
  misc_RNA (1)...(19): siRNA sense strand
uacuacaaagcaacaguua

SEQ ID NO: 1267609 - RNA, 19 nt, Homo sapiens
  misc_RNA (1)...(19): siRNA sense strand
cuugaugcaguaacuuaua

SEQ ID NO: 1267610 - RNA, 19 nt, Homo sapiens
  misc_RNA (1)...(19): siRNA sense strand
aaacauguccauauauacg

SEQ ID NO: 1267611 - RNA, 19 nt, Homo sapiens
  misc_RNA (1)...(19): siRNA sense strand
guguaaaguggucaaaugu

SEQ ID NO: 1267612 - RNA, 19 nt, Homo sapiens
  misc_RNA (1)...(19): siRNA sense strand
cuuacgaguuugguuauca

SEQ ID NO: 1267613 - RNA, 19 nt, Homo sapiens
  misc_RNA (1)...(19): siRNA sense strand
uacgggauccuuuaaaugg

SEQ ID NO: 1267614 - RNA, 19 nt, Homo sapiens
  misc_RNA (1)...(19): siRNA sense strand
gcagaugguggagcugaau

SEQ ID NO: 1267615 - RNA, 19 nt, Homo sapiens
  misc_RNA (1)...(19): siRNA sense strand
aaccaaaacccuacuauga

SEQ ID NO: 1267616 - RNA, 19 nt, Homo sapiens
  misc_RNA (1)...(19): siRNA sense strand
uugaugcaguaacuuauag

SEQ ID NO: 1267617 - RNA, 19 nt, Homo sapiens
  misc_RNA (1)...(19): siRNA sense strand
ggagcugaauaugccacuu

SEQ ID NO: 1267618 - RNA, 19 nt, Homo sapiens
  misc_RNA (1)...(19): siRNA sense strand
cgauggcagcgacacaauu

SEQ ID NO: 1267619 - RNA, 19 nt, Homo sapiens
  misc_RNA (1)...(19): siRNA sense strand
gauccauuuucacuuauug

SEQ ID NO: 1267620 - RNA, 19 nt, Homo sapiens
  misc_RNA (1)...(19): siRNA sense strand
ggagagagcacgauuuauu

SEQ ID NO: 1267621 - RNA, 19 nt, Homo sapiens
  misc_RNA (1)...(19): siRNA sense strand
agagaaacauguccauaua

SEQ ID NO: 1267622 - RNA, 19 nt, Homo sapiens
  misc_RNA (1)...(19): siRNA sense strand
cagaugcacuuuauuugua

SEQ ID NO: 1267623 - RNA, 19 nt, Homo sapiens
  misc_RNA (1)...(19): siRNA sense strand
ggacuuacgaguuugguua

SEQ ID NO: 1267624 - RNA, 19 nt, Homo sapiens
  misc_RNA (1)...(19): siRNA sense strand
aaacagauaucaggauuug

SEQ ID NO: 1267625 - RNA, 19 nt, Homo sapiens
  misc_RNA (1)...(19): siRNA sense strand
cuauggagcucauugguaa

SEQ ID NO: 1267626 - RNA, 19 nt, Homo sapiens
  misc_RNA (1)...(19): siRNA sense strand
aaacacaccuuuagugaag

SEQ ID NO: 1267627 - RNA, 19 nt, Homo sapiens
  misc_RNA (1)...(19): siRNA sense strand
gaacuuaaaggaucaguag

SEQ ID NO: 1267628 - RNA, 19 nt, Homo sapiens
  misc_RNA (1)...(19): siRNA sense strand
gaaaacagauaucaggauu

SEQ ID NO: 1267629 - RNA, 19 nt, Homo sapiens
  misc_RNA (1)...(19): siRNA sense strand
uaaaggaucaguagcaauu

SEQ ID NO: 1267630 - RNA, 19 nt, Homo sapiens
  misc_RNA (1)...(19): siRNA sense strand
aaaugggacuuacgaguuu

SEQ ID NO: 1267631 - RNA, 19 nt, Homo sapiens
  misc_RNA (1)...(19): siRNA sense strand
guuaucagaugcacuuuau

SEQ ID NO: 1267632 - RNA, 19 nt, Homo sapiens
  misc_RNA (1)...(19): siRNA sense strand
ugagauuggugaacgagua

SEQ ID NO: 1267633 - RNA, 19 nt, Homo sapiens
  misc_RNA (1)...(19): siRNA sense strand
gugaacgaguagauuauaa

SEQ ID NO: 1267634 - RNA, 19 nt, Homo sapiens
  misc_RNA (1)...(19): siRNA sense strand
gagagagcacgauuuauug

SEQ ID NO: 1267635 - RNA, 19 nt, Homo sapiens
  misc_RNA (1)...(19): siRNA sense strand
caaaugggacuuacgaguu

SEQ ID NO: 1267636 - RNA, 19 nt, Homo sapiens
  misc_RNA (1)...(19): siRNA sense strand
ggucauugcugugauuguu

SEQ ID NO: 1267637 - RNA, 19 nt, Homo sapiens
  misc_RNA (1)...(19): siRNA sense strand
ccagauccauuuucacuua

SEQ ID NO: 1267638 - RNA, 19 nt, Homo sapiens
  misc_RNA (1)...(19): siRNA sense strand
gaaggaauacuugacaguu

SEQ ID NO: 1267639 - RNA, 19 nt, Homo sapiens
  misc_RNA (1)...(19): siRNA sense strand
aaggaauacuugacaguuu

SEQ ID NO: 1267640 - RNA, 19 nt, Homo sapiens
  misc_RNA (1)...(19): siRNA sense strand
ucagaugacgccuguuaua

SEQ ID NO: 1267641 - RNA, 19 nt, Homo sapiens
  misc_RNA (1)...(19): siRNA sense strand
gaaaacacaccuuuaguga

SEQ ID NO: 1267642 - RNA, 19 nt, Homo sapiens
  misc_RNA (1)...(19): siRNA sense strand
gaugacgccuguuauagag

SEQ ID NO: 1267643 - RNA, 19 nt, Homo sapiens
  misc_RNA (1)...(19): siRNA sense strand
gagaaacauguccauauau

SEQ ID NO: 1267644 - RNA, 19 nt, Homo sapiens
  misc_RNA (1)...(19): siRNA sense strand
acgaguagauuauaagugu

SEQ ID NO: 1267645 - RNA, 19 nt, Homo sapiens
  misc_RNA (1)...(19): siRNA sense strand
cuacaaagcaacaguuaug

SEQ ID NO: 1267646 - RNA, 19 nt, Homo sapiens
  misc_RNA (1)...(19): siRNA sense strand
ccaccaacauuugaagcua

SEQ ID NO: 1267647 - RNA, 19 nt, Homo sapiens
  misc_RNA (1)...(19): siRNA sense strand
uauacgggauccuuuaaau

SEQ ID NO: 1267648 - RNA, 19 nt, Homo sapiens
  misc_RNA (1)...(19): siRNA sense strand
cgaguuugguuaucagaug

SEQ ID NO: 1267649 - RNA, 19 nt, Homo sapiens
  misc_RNA (1)...(19): siRNA sense strand
gaacgaguagauuauaagu

SEQ ID NO: 1267650 - RNA, 19 nt, Homo sapiens
  misc_RNA (1)...(19): siRNA sense strand
gugaggagccaccaacauu

SEQ ID NO: 1267651 - RNA, 19 nt, Homo sapiens
  misc_RNA (1)...(19): siRNA sense strand
gauggcagcgacacaauug

SEQ ID NO: 1267652 - RNA, 19 nt, Homo sapiens
  misc_RNA (1)...(19): siRNA sense strand
gcuauggagcucauuggua

SEQ ID NO: 1267653 - RNA, 19 nt, Homo sapiens
  misc_RNA (1)...(19): siRNA sense strand
gaggagccaccaacauuug

SEQ ID NO: 1267654 - RNA, 19 nt, Homo sapiens
  misc_RNA (1)...(19): siRNA sense strand
acacaccuuuagugaagua

SEQ ID NO: 1267655 - RNA, 19 nt, Homo sapiens
  misc_RNA (1)...(19): siRNA sense strand
ucucagaugacgccuguua

SEQ ID NO: 1267656 - RNA, 19 nt, Homo sapiens
  misc_RNA (1)...(19): siRNA sense strand
uagagaaacauguccauau

SEQ ID NO: 1267657 - RNA, 19 nt, Homo sapiens
  misc_RNA (1)...(19): siRNA sense strand
guuccaaagugucuuaaag

SEQ ID NO: 1267658 - RNA, 19 nt, Homo sapiens
  misc_RNA (1)...(19): siRNA sense strand
ggugaacgaguagauuaua

SEQ ID NO: 1267659 - RNA, 19 nt, Homo sapiens
  misc_RNA (1)...(19): siRNA sense strand
gaaguagaaguauuugagu

SEQ ID NO: 1267660 - RNA, 19 nt, Homo sapiens
  misc_RNA (1)...(19): siRNA sense strand
gaaacauguccauauauac

SEQ ID NO: 1267661 - RNA, 19 nt, Homo sapiens
  misc_RNA (1)...(19): siRNA sense strand
ugacgccuguuauagagaa

SEQ ID NO: 1267662 - RNA, 19 nt, Homo sapiens
  misc_RNA (1)...(19): siRNA sense strand
cgaguagauuauaagugua

SEQ ID NO: 1267663 - RNA, 19 nt, Homo sapiens
  misc_RNA (1)...(19): siRNA sense strand
gcacuuuauuuguaaugag

SEQ ID NO: 1267664 - RNA, 19 nt, Homo sapiens
  misc_RNA (1)...(19): siRNA sense strand
guagaaguauuugaguauc

SEQ ID NO: 1267665 - RNA, 19 nt, Homo sapiens
  misc_RNA (1)...(19): siRNA sense strand
guauuugaguaucuugaug

SEQ ID NO: 1267666 - RNA, 19 nt, Homo sapiens
  misc_RNA (1)...(19): siRNA sense strand
aggaauacuugacaguuug

SEQ ID NO: 1267667 - RNA, 19 nt, Homo sapiens
  misc_RNA (1)...(19): siRNA sense strand
ccaaaacccuacuaugaga

SEQ ID NO: 1267668 - RNA, 19 nt, Homo sapiens
  misc_RNA (1)...(19): siRNA sense strand
aguguaaaguggucaaaug

SEQ ID NO: 1267669 - RNA, 19 nt, Homo sapiens
  misc_RNA (1)...(19): siRNA sense strand
ccacccauacuauuuguga

SEQ ID NO: 1267670 - RNA, 19 nt, Homo sapiens
  misc_RNA (1)...(19): siRNA sense strand
caccaacauuugaagcuau

SEQ ID NO: 1267671 - RNA, 19 nt, Homo sapiens
  misc_RNA (1)...(19): siRNA sense strand
uuggagagagcacgauuua

SEQ ID NO: 1267672 - RNA, 19 nt, Homo sapiens
  misc_RNA (1)...(19): siRNA sense strand
gguuaucagaugcacuuua

SEQ ID NO: 1267673 - RNA, 19 nt, Homo sapiens
  misc_RNA (1)...(19): siRNA sense strand
ugaggagccaccaacauuu

SEQ ID NO: 1267674 - RNA, 19 nt, Homo sapiens
  misc_RNA (1)...(19): siRNA sense strand
ggaaggaauacuugacagu

SEQ ID NO: 1267675 - RNA, 19 nt, Homo sapiens
  misc_RNA (1)...(19): siRNA sense strand
gaggaaggaauacuugaca

SEQ ID NO: 1267676 - RNA, 19 nt, Homo sapiens
  misc_RNA (1)...(19): siRNA sense strand
ccaguuccaaagugucuua

SEQ ID NO: 1267677 - RNA, 19 nt, Homo sapiens
  misc_RNA (1)...(19): siRNA sense strand
ugaguaucuugaugcagua

SEQ ID NO: 1267678 - RNA, 19 nt, Homo sapiens
  misc_RNA (1)...(19): siRNA sense strand
caccuuuagugaaguagaa

SEQ ID NO: 1267679 - RNA, 19 nt, Homo sapiens
  misc_RNA (1)...(19): siRNA sense strand
acagauaucaggauuugga

SEQ ID NO: 1267680 - RNA, 19 nt, Homo sapiens
  misc_RNA (1)...(19): siRNA sense strand
ucauugcugugauuguuau

SEQ ID NO: 1267681 - RNA, 19 nt, Homo sapiens
  misc_RNA (1)...(19): siRNA sense strand
ucagaugcacuuuauuugu

SEQ ID NO: 1267682 - RNA, 19 nt, Homo sapiens
  misc_RNA (1)...(19): siRNA sense strand
gugcugcuccagaguguaa

SEQ ID NO: 1267683 - RNA, 19 nt, Homo sapiens
  misc_RNA (1)...(19): siRNA sense strand
ggaaaacacaccuuuagug

SEQ ID NO: 1267684 - RNA, 19 nt, Homo sapiens
  misc_RNA (1)...(19): siRNA sense strand
aaggaucaguagcaauuug

SEQ ID NO: 1267685 - RNA, 19 nt, Homo sapiens
  misc_RNA (1)...(19): siRNA sense strand
uauauacgggauccuuuaa

SEQ ID NO: 1267686 - RNA, 19 nt, Homo sapiens
  misc_RNA (1)...(19): siRNA sense strand
ugaaguagaaguauuugag

SEQ ID NO: 1267687 - RNA, 19 nt, Homo sapiens
  misc_RNA (1)...(19): siRNA sense strand
cuugacaguuuggauguuu

SEQ ID NO: 1267688 - RNA, 19 nt, Homo sapiens
  misc_RNA (1)...(19): siRNA sense strand
cauauauacgggauccuuu

SEQ ID NO: 1267689 - RNA, 19 nt, Homo sapiens
  misc_RNA (1)...(19): siRNA sense strand
auauauacgggauccuuua

SEQ ID NO: 1267690 - RNA, 19 nt, Homo sapiens
  misc_RNA (1)...(19): siRNA sense strand
cuuaaaggaucaguagcaa

SEQ ID NO: 1267691 - RNA, 19 nt, Homo sapiens
  misc_RNA (1)...(19): siRNA sense strand
uaaaccugaggaaggaaua

SEQ ID NO: 1267692 - RNA, 19 nt, Homo sapiens
  misc_RNA (1)...(19): siRNA sense strand
agaugacgccuguuauaga

SEQ ID NO: 1267693 - RNA, 19 nt, Homo sapiens
  misc_RNA (1)...(19): siRNA sense strand
ugugauuguuauugccaua

SEQ ID NO: 1267694 - RNA, 19 nt, Homo sapiens
  misc_RNA (1)...(19): siRNA sense strand
gagagcacgauuuauugug

SEQ ID NO: 1267695 - RNA, 19 nt, Homo sapiens
  misc_RNA (1)...(19): siRNA sense strand
gaaguauuugaguaucuug

SEQ ID NO: 1267696 - RNA, 19 nt, Homo sapiens
  misc_RNA (1)...(19): siRNA sense strand
ggcuaccugucucagauga

SEQ ID NO: 1267697 - RNA, 19 nt, Homo sapiens
  misc_RNA (1)...(19): siRNA sense strand
gauaucaggauuuggaaaa

SEQ ID NO: 1267698 - RNA, 19 nt, Homo sapiens
  misc_RNA (1)...(19): siRNA sense strand
ccucuugccacccauacua

SEQ ID NO: 1267699 - RNA, 19 nt, Homo sapiens
  misc_RNA (1)...(19): siRNA sense strand
ccaugguguugcugcugua

SEQ ID NO: 1267700 - RNA, 19 nt, Homo sapiens
  misc_RNA (1)...(19): siRNA sense strand
cagaugacgccuguuauag

SEQ ID NO: 1267701 - RNA, 19 nt, Homo sapiens
  misc_RNA (1)...(19): siRNA sense strand
uuggugaacgaguagauua

SEQ ID NO: 1267702 - RNA, 19 nt, Homo sapiens
  misc_RNA (1)...(19): siRNA sense strand
gucauugcugugauuguua

SEQ ID NO: 1267703 - RNA, 19 nt, Homo sapiens
  misc_RNA (1)...(19): siRNA sense strand
ggagccaccaacauuugaa

SEQ ID NO: 1267704 - RNA, 19 nt, Homo sapiens
  misc_RNA (1)...(19): siRNA sense strand
gcgcuuuccuggguugcuu

SEQ ID NO: 1267705 - RNA, 19 nt, Homo sapiens
  misc_RNA (1)...(19): siRNA sense strand
uacuacaaagcaacaguua

SEQ ID NO: 1267706 - RNA, 19 nt, Homo sapiens
  misc_RNA (1)...(19): siRNA sense strand
cuugaugcaguaacuuaua

SEQ ID NO: 1267707 - RNA, 19 nt, Homo sapiens
  misc_RNA (1)...(19): siRNA sense strand
aaacauguccauauauacg

SEQ ID NO: 1267708 - RNA, 19 nt, Homo sapiens
  misc_RNA (1)...(19): siRNA sense strand
guguaaaguggucaaaugu

SEQ ID NO: 1267709 - RNA, 19 nt, Homo sapiens
  misc_RNA (1)...(19): siRNA sense strand
cuuacgaguuugguuauca

SEQ ID NO: 1267710 - RNA, 19 nt, Homo sapiens
  misc_RNA (1)...(19): siRNA sense strand
uacgggauccuuuaaaugg

SEQ ID NO: 1267711 - RNA, 19 nt, Homo sapiens
  misc_RNA (1)...(19): siRNA sense strand
aaccaaaacccuacuauga

SEQ ID NO: 1267712 - RNA, 19 nt, Homo sapiens
  misc_RNA (1)...(19): siRNA sense strand
cccaauaugugaaaagguu

SEQ ID NO: 1267713 - RNA, 19 nt, Homo sapiens
  misc_RNA (1)...(19): siRNA sense strand
cgauggcagcgacacaauu

SEQ ID NO: 1267714 - RNA, 19 nt, Homo sapiens
  misc_RNA (1)...(19): siRNA sense strand
gauccauuuucacuuauug

SEQ ID NO: 1267715 - RNA, 19 nt, Homo sapiens
  misc_RNA (1)...(19): siRNA sense strand
uugaugcaguaacuuauag

SEQ ID NO: 1267716 - RNA, 19 nt, Homo sapiens
  misc_RNA (1)...(19): siRNA sense strand
guaucuugaugcaguaacu

SEQ ID NO: 1267717 - RNA, 19 nt, Homo sapiens
  misc_RNA (1)...(19): siRNA sense strand
caacauuugaagcuaugga

SEQ ID NO: 1267718 - RNA, 19 nt, Homo sapiens
  misc_RNA (1)...(19): siRNA sense strand
gagauuggugaacgaguag

SEQ ID NO: 1267719 - RNA, 19 nt, Homo sapiens
  misc_RNA (1)...(19): siRNA sense strand
ggagagagcacgauuuauu

SEQ ID NO: 1267720 - RNA, 19 nt, Homo sapiens
  misc_RNA (1)...(19): siRNA sense strand
agagaaacauguccauaua

SEQ ID NO: 1267721 - RNA, 19 nt, Homo sapiens
  misc_RNA (1)...(19): siRNA sense strand
cagaugcacuuuauuugua

SEQ ID NO: 1267722 - RNA, 19 nt, Homo sapiens
  misc_RNA (1)...(19): siRNA sense strand
ggacuuacgaguuugguua

SEQ ID NO: 1267723 - RNA, 19 nt, Homo sapiens
  misc_RNA (1)...(19): siRNA sense strand
aaacagauaucaggauuug

SEQ ID NO: 1267724 - RNA, 19 nt, Homo sapiens
  misc_RNA (1)...(19): siRNA sense strand
cuauggagcucauugguaa

SEQ ID NO: 1267725 - RNA, 19 nt, Homo sapiens
  misc_RNA (1)...(19): siRNA sense strand
aaacacaccuuuagugaag

SEQ ID NO: 1267726 - RNA, 19 nt, Homo sapiens
  misc_RNA (1)...(19): siRNA sense strand
gaacuuaaaggaucaguag

SEQ ID NO: 1267727 - RNA, 19 nt, Homo sapiens
  misc_RNA (1)...(19): siRNA sense strand
gaaaacagauaucaggauu

SEQ ID NO: 1267728 - RNA, 19 nt, Homo sapiens
  misc_RNA (1)...(19): siRNA sense strand
uaaaggaucaguagcaauu

SEQ ID NO: 1267729 - RNA, 19 nt, Homo sapiens
  misc_RNA (1)...(19): siRNA sense strand
aaaugggacuuacgaguuu

SEQ ID NO: 1267730 - RNA, 19 nt, Homo sapiens
  misc_RNA (1)...(19): siRNA sense strand
guuaucagaugcacuuuau

SEQ ID NO: 1267731 - RNA, 19 nt, Homo sapiens
  misc_RNA (1)...(19): siRNA sense strand
gagcugaauaugccacuua

SEQ ID NO: 1267732 - RNA, 19 nt, Homo sapiens
  misc_RNA (1)...(19): siRNA sense strand
ugagauuggugaacgagua

SEQ ID NO: 1267733 - RNA, 19 nt, Homo sapiens
  misc_RNA (1)...(19): siRNA sense strand
gugaacgaguagauuauaa

SEQ ID NO: 1267734 - RNA, 19 nt, Homo sapiens
  misc_RNA (1)...(19): siRNA sense strand
gagagagcacgauuuauug

SEQ ID NO: 1267735 - RNA, 19 nt, Homo sapiens
  misc_RNA (1)...(19): siRNA sense strand
caaaugggacuuacgaguu

SEQ ID NO: 1267736 - RNA, 19 nt, Homo sapiens
  misc_RNA (1)...(19): siRNA sense strand
ggucauugcugugauuguu

SEQ ID NO: 1267737 - RNA, 19 nt, Homo sapiens
  misc_RNA (1)...(19): siRNA sense strand
ccagauccauuuucacuua

SEQ ID NO: 1267738 - RNA, 19 nt, Homo sapiens
  misc_RNA (1)...(19): siRNA sense strand
gaaggaauacuugacaguu

SEQ ID NO: 1267739 - RNA, 19 nt, Homo sapiens
  misc_RNA (1)...(19): siRNA sense strand
aaggaauacuugacaguuu

SEQ ID NO: 1267740 - RNA, 19 nt, Homo sapiens
  misc_RNA (1)...(19): siRNA sense strand
ucagaugacgccuguuaua

SEQ ID NO: 1267741 - RNA, 19 nt, Homo sapiens
  misc_RNA (1)...(19): siRNA sense strand
gaaaacacaccuuuaguga

SEQ ID NO: 1267742 - RNA, 19 nt, Homo sapiens
  misc_RNA (1)...(19): siRNA sense strand
gaugacgccuguuauagag

SEQ ID NO: 1267743 - RNA, 19 nt, Homo sapiens
  misc_RNA (1)...(19): siRNA sense strand
gagaaacauguccauauau

SEQ ID NO: 1267744 - RNA, 19 nt, Homo sapiens
  misc_RNA (1)...(19): siRNA sense strand
ccacuuaccagacuaaauc

SEQ ID NO: 1267745 - RNA, 19 nt, Homo sapiens
  misc_RNA (1)...(19): siRNA sense strand
acgaguagauuauaagugu

SEQ ID NO: 1267746 - RNA, 19 nt, Homo sapiens
  misc_RNA (1)...(19): siRNA sense strand
cuacaaagcaacaguuaug

SEQ ID NO: 1267747 - RNA, 19 nt, Homo sapiens
  misc_RNA (1)...(19): siRNA sense strand
ccaccaacauuugaagcua

SEQ ID NO: 1267748 - RNA, 19 nt, Homo sapiens
  misc_RNA (1)...(19): siRNA sense strand
uauacgggauccuuuaaau

SEQ ID NO: 1267749 - RNA, 19 nt, Homo sapiens
  misc_RNA (1)...(19): siRNA sense strand
cgaguuugguuaucagaug

SEQ ID NO: 1267750 - RNA, 19 nt, Homo sapiens
  misc_RNA (1)...(19): siRNA sense strand
gaacgaguagauuauaagu

SEQ ID NO: 1267751 - RNA, 19 nt, Homo sapiens
  misc_RNA (1)...(19): siRNA sense strand
gugaggagccaccaacauu

SEQ ID NO: 1267752 - RNA, 19 nt, Homo sapiens
  misc_RNA (1)...(19): siRNA sense strand
gauggcagcgacacaauug

SEQ ID NO: 1267753 - RNA, 19 nt, Homo sapiens
  misc_RNA (1)...(19): siRNA sense strand
ucucagaugacgccuguua

SEQ ID NO: 1267754 - RNA, 19 nt, Homo sapiens
  misc_RNA (1)...(19): siRNA sense strand
gaggagccaccaacauuug

SEQ ID NO: 1267755 - RNA, 19 nt, Homo sapiens
  misc_RNA (1)...(19): siRNA sense strand
gcuauggagcucauuggua

SEQ ID NO: 1267756 - RNA, 19 nt, Homo sapiens
  misc_RNA (1)...(19): siRNA sense strand
acacaccuuuagugaagua

SEQ ID NO: 1267757 - RNA, 19 nt, Homo sapiens
  misc_RNA (1)...(19): siRNA sense strand
uagagaaacauguccauau

SEQ ID NO: 1267758 - RNA, 19 nt, Homo sapiens
  misc_RNA (1)...(19): siRNA sense strand
ggugaacgaguagauuaua

SEQ ID NO: 1267759 - RNA, 19 nt, Homo sapiens
  misc_RNA (1)...(19): siRNA sense strand
gaaguagaaguauuugagu

SEQ ID NO: 1267760 - RNA, 19 nt, Homo sapiens
  misc_RNA (1)...(19): siRNA sense strand
gaaacauguccauauauac

SEQ ID NO: 1267761 - RNA, 19 nt, Homo sapiens
  misc_RNA (1)...(19): siRNA sense strand
ugacgccuguuauagagaa

SEQ ID NO: 1267762 - RNA, 19 nt, Homo sapiens
  misc_RNA (1)...(19): siRNA sense strand
cgaguagauuauaagugua

SEQ ID NO: 1267763 - RNA, 19 nt, Homo sapiens
  misc_RNA (1)...(19): siRNA sense strand
gcacuuuauuuguaaugag

SEQ ID NO: 1267764 - RNA, 19 nt, Homo sapiens
  misc_RNA (1)...(19): siRNA sense strand
guagaaguauuugaguauc

SEQ ID NO: 1267765 - RNA, 19 nt, Homo sapiens
  misc_RNA (1)...(19): siRNA sense strand
guauuugaguaucuugaug

SEQ ID NO: 1267766 - RNA, 19 nt, Homo sapiens
  misc_RNA (1)...(19): siRNA sense strand
aggaauacuugacaguuug

SEQ ID NO: 1267767 - RNA, 19 nt, Homo sapiens
  misc_RNA (1)...(19): siRNA sense strand
ccaaaacccuacuaugaga

SEQ ID NO: 1267768 - RNA, 19 nt, Homo sapiens
  misc_RNA (1)...(19): siRNA sense strand
aguguaaaguggucaaaug

SEQ ID NO: 1267769 - RNA, 19 nt, Homo sapiens
  misc_RNA (1)...(19): siRNA sense strand
ccacccauacuauuuguga

SEQ ID NO: 1267770 - RNA, 19 nt, Homo sapiens
  misc_RNA (1)...(19): siRNA sense strand
uuggagagagcacgauuua

SEQ ID NO: 1267771 - RNA, 19 nt, Homo sapiens
  misc_RNA (1)...(19): siRNA sense strand
gguuaucagaugcacuuua

SEQ ID NO: 1267772 - RNA, 19 nt, Homo sapiens
  misc_RNA (1)...(19): siRNA sense strand
caccaacauuugaagcuau

SEQ ID NO: 1267773 - RNA, 19 nt, Homo sapiens
  misc_RNA (1)...(19): siRNA sense strand
ugaggagccaccaacauuu

SEQ ID NO: 1267774 - RNA, 19 nt, Homo sapiens
  misc_RNA (1)...(19): siRNA sense strand
ggaaggaauacuugacagu

SEQ ID NO: 1267775 - RNA, 19 nt, Homo sapiens
  misc_RNA (1)...(19): siRNA sense strand
gaggaaggaauacuugaca

SEQ ID NO: 1267776 - RNA, 19 nt, Homo sapiens
  misc_RNA (1)...(19): siRNA sense strand
ugaguaucuugaugcagua

SEQ ID NO: 1267777 - RNA, 19 nt, Homo sapiens
  misc_RNA (1)...(19): siRNA sense strand
caccuuuagugaaguagaa

SEQ ID NO: 1267778 - RNA, 19 nt, Homo sapiens
  misc_RNA (1)...(19): siRNA sense strand
acagauaucaggauuugga

SEQ ID NO: 1267779 - RNA, 19 nt, Homo sapiens
  misc_RNA (1)...(19): siRNA sense strand
ucauugcugugauuguuau

SEQ ID NO: 1267780 - RNA, 19 nt, Homo sapiens
  misc_RNA (1)...(19): siRNA sense strand
ucagaugcacuuuauuugu

SEQ ID NO: 1267781 - RNA, 19 nt, Homo sapiens
  misc_RNA (1)...(19): siRNA sense strand
gugcugcuccagaguguaa

SEQ ID NO: 1267782 - RNA, 19 nt, Homo sapiens
  misc_RNA (1)...(19): siRNA sense strand
ggaaaacacaccuuuagug

SEQ ID NO: 1267783 - RNA, 19 nt, Homo sapiens
  misc_RNA (1)...(19): siRNA sense strand
aaggaucaguagcaauuug

SEQ ID NO: 1267784 - RNA, 19 nt, Homo sapiens
  misc_RNA (1)...(19): siRNA sense strand
uauauacgggauccuuuaa

SEQ ID NO: 1267785 - RNA, 19 nt, Homo sapiens
  misc_RNA (1)...(19): siRNA sense strand
ugaaguagaaguauuugag

SEQ ID NO: 1267786 - RNA, 19 nt, Homo sapiens
  misc_RNA (1)...(19): siRNA sense strand
cuugacaguuuggauguuu

SEQ ID NO: 1267787 - RNA, 19 nt, Homo sapiens
  misc_RNA (1)...(19): siRNA sense strand
cauauauacgggauccuuu

SEQ ID NO: 1267788 - RNA, 19 nt, Homo sapiens
  misc_RNA (1)...(19): siRNA sense strand
auauauacgggauccuuua

SEQ ID NO: 1267789 - RNA, 19 nt, Homo sapiens
  misc_RNA (1)...(19): siRNA sense strand
cuuaaaggaucaguagcaa

SEQ ID NO: 1267790 - RNA, 19 nt, Homo sapiens
  misc_RNA (1)...(19): siRNA sense strand
uaaaccugaggaaggaaua

SEQ ID NO: 1267791 - RNA, 19 nt, Homo sapiens
  misc_RNA (1)...(19): siRNA sense strand
agaugacgccuguuauaga

SEQ ID NO: 1267792 - RNA, 19 nt, Homo sapiens
  misc_RNA (1)...(19): siRNA sense strand
ugugauuguuauugccaua

SEQ ID NO: 1267793 - RNA, 19 nt, Homo sapiens
  misc_RNA (1)...(19): siRNA sense strand
gagagcacgauuuauugug

SEQ ID NO: 1267794 - RNA, 19 nt, Homo sapiens
  misc_RNA (1)...(19): siRNA sense strand
gaaguauuugaguaucuug

SEQ ID NO: 1267795 - RNA, 19 nt, Homo sapiens
  misc_RNA (1)...(19): siRNA sense strand
ggcuaccugucucagauga

SEQ ID NO: 1267796 - RNA, 19 nt, Homo sapiens
  misc_RNA (1)...(19): siRNA sense strand
gauaucaggauuuggaaaa

SEQ ID NO: 1267797 - RNA, 19 nt, Homo sapiens
  misc_RNA (1)...(19): siRNA sense strand
ccucuugccacccauacua

SEQ ID NO: 1267798 - RNA, 19 nt, Homo sapiens
  misc_RNA (1)...(19): siRNA sense strand
ccaugguguugcugcugua

SEQ ID NO: 1267799 - RNA, 19 nt, Homo sapiens
  misc_RNA (1)...(19): siRNA sense strand
cagaugacgccuguuauag

SEQ ID NO: 1267800 - RNA, 19 nt, Homo sapiens
  misc_RNA (1)...(19): siRNA sense strand
cagaugguggagcugaaua

SEQ ID NO: 1267801 - RNA, 19 nt, Homo sapiens
  misc_RNA (1)...(19): siRNA sense strand
uuggugaacgaguagauua

SEQ ID NO: 1267802 - RNA, 19 nt, Homo sapiens
  misc_RNA (1)...(19): siRNA sense strand
gucauugcugugauuguua

SEQ ID NO: 1267803 - RNA, 19 nt, Homo sapiens
  misc_RNA (1)...(19): siRNA sense strand
ggagccaccaacauuugaa

SEQ ID NO: 1267804 - RNA, 19 nt, Homo sapiens
  misc_RNA (1)...(19): siRNA sense strand
gcgcuuuccuggguugcuu

SEQ ID NO: 1267805 - RNA, 19 nt, Homo sapiens
  misc_RNA (1)...(19): siRNA sense strand
uacuacaaagcaacaguua

SEQ ID NO: 1267806 - RNA, 19 nt, Homo sapiens
  misc_RNA (1)...(19): siRNA sense strand
cuugaugcaguaacuuaua

SEQ ID NO: 1267807 - RNA, 19 nt, Homo sapiens
  misc_RNA (1)...(19): siRNA sense strand
aaacauguccauauauacg

SEQ ID NO: 1267808 - RNA, 19 nt, Homo sapiens
  misc_RNA (1)...(19): siRNA sense strand
guguaaaguggucaaaugu

SEQ ID NO: 1267809 - RNA, 19 nt, Homo sapiens
  misc_RNA (1)...(19): siRNA sense strand
cuuacgaguuugguuauca

SEQ ID NO: 1267810 - RNA, 19 nt, Homo sapiens
  misc_RNA (1)...(19): siRNA sense strand
uacgggauccuuuaaaugg

SEQ ID NO: 1267811 - RNA, 19 nt, Homo sapiens
  misc_RNA (1)...(19): siRNA sense strand
gcagaugguggagcugaau

SEQ ID NO: 1267812 - RNA, 19 nt, Homo sapiens
  misc_RNA (1)...(19): siRNA sense strand
aaccaaaacccuacuauga

SEQ ID NO: 1267813 - RNA, 19 nt, Homo sapiens
  misc_RNA (1)...(19): siRNA sense strand
cccaauaugugaaaagguu

SEQ ID NO: 1267814 - RNA, 19 nt, Homo sapiens
  misc_RNA (1)...(19): siRNA sense strand
ggagcugaauaugccacuu

SEQ ID NO: 1267815 - RNA, 19 nt, Homo sapiens
  misc_RNA (1)...(19): siRNA sense strand
cgauggcagcgacacaauu

SEQ ID NO: 1267816 - RNA, 19 nt, Homo sapiens
  misc_RNA (1)...(19): siRNA sense strand
gauccauuuucacuuauug

SEQ ID NO: 1267817 - RNA, 19 nt, Homo sapiens
  misc_RNA (1)...(19): siRNA sense strand
uugaugcaguaacuuauag

SEQ ID NO: 1267818 - RNA, 19 nt, Homo sapiens
  misc_RNA (1)...(19): siRNA sense strand
guaucuugaugcaguaacu

SEQ ID NO: 1267819 - RNA, 19 nt, Homo sapiens
  misc_RNA (1)...(19): siRNA sense strand
ggagagagcacgauuuauu

SEQ ID NO: 1267820 - RNA, 19 nt, Homo sapiens
  misc_RNA (1)...(19): siRNA sense strand
agagaaacauguccauaua

SEQ ID NO: 1267821 - RNA, 19 nt, Homo sapiens
  misc_RNA (1)...(19): siRNA sense strand
cagaugcacuuuauuugua

SEQ ID NO: 1267822 - RNA, 19 nt, Homo sapiens
  misc_RNA (1)...(19): siRNA sense strand
ggacuuacgaguuugguua

SEQ ID NO: 1267823 - RNA, 19 nt, Homo sapiens
  misc_RNA (1)...(19): siRNA sense strand
aaacagauaucaggauuug

SEQ ID NO: 1267824 - RNA, 19 nt, Homo sapiens
  misc_RNA (1)...(19): siRNA sense strand
cuauggagcucauugguaa

SEQ ID NO: 1267825 - RNA, 19 nt, Homo sapiens
  misc_RNA (1)...(19): siRNA sense strand
aaacacaccuuuagugaag

SEQ ID NO: 1267826 - RNA, 19 nt, Homo sapiens
  misc_RNA (1)...(19): siRNA sense strand
gaacuuaaaggaucaguag

SEQ ID NO: 1267827 - RNA, 19 nt, Homo sapiens
  misc_RNA (1)...(19): siRNA sense strand
gaaaacagauaucaggauu

SEQ ID NO: 1267828 - RNA, 19 nt, Homo sapiens
  misc_RNA (1)...(19): siRNA sense strand
uaaaggaucaguagcaauu

SEQ ID NO: 1267829 - RNA, 19 nt, Homo sapiens
  misc_RNA (1)...(19): siRNA sense strand
aaaugggacuuacgaguuu

SEQ ID NO: 1267830 - RNA, 19 nt, Homo sapiens
  misc_RNA (1)...(19): siRNA sense strand
guuaucagaugcacuuuau

SEQ ID NO: 1267831 - RNA, 19 nt, Homo sapiens
  misc_RNA (1)...(19): siRNA sense strand
gagcugaauaugccacuua

SEQ ID NO: 1267832 - RNA, 19 nt, Homo sapiens
  misc_RNA (1)...(19): siRNA sense strand
gagcagagaggcugaauag

SEQ ID NO: 1267833 - RNA, 19 nt, Homo sapiens
  misc_RNA (1)...(19): siRNA sense strand
ugagauuggugaacgagua

SEQ ID NO: 1267834 - RNA, 19 nt, Homo sapiens
  misc_RNA (1)...(19): siRNA sense strand
gugaacgaguagauuauaa

SEQ ID NO: 1267835 - RNA, 19 nt, Homo sapiens
  misc_RNA (1)...(19): siRNA sense strand
gagagagcacgauuuauug

SEQ ID NO: 1267836 - RNA, 19 nt, Homo sapiens
  misc_RNA (1)...(19): siRNA sense strand
caaaugggacuuacgaguu

SEQ ID NO: 1267837 - RNA, 19 nt, Homo sapiens
  misc_RNA (1)...(19): siRNA sense strand
ggucauugcugugauuguu

SEQ ID NO: 1267838 - RNA, 19 nt, Homo sapiens
  misc_RNA (1)...(19): siRNA sense strand
ccagauccauuuucacuua

SEQ ID NO: 1267839 - RNA, 19 nt, Homo sapiens
  misc_RNA (1)...(19): siRNA sense strand
gaaggaauacuugacaguu

SEQ ID NO: 1267840 - RNA, 19 nt, Homo sapiens
  misc_RNA (1)...(19): siRNA sense strand
aaggaauacuugacaguuu

SEQ ID NO: 1267841 - RNA, 19 nt, Homo sapiens
  misc_RNA (1)...(19): siRNA sense strand
ucagaugacgccuguuaua

SEQ ID NO: 1267842 - RNA, 19 nt, Homo sapiens
  misc_RNA (1)...(19): siRNA sense strand
gaaaacacaccuuuaguga

SEQ ID NO: 1267843 - RNA, 19 nt, Homo sapiens
  misc_RNA (1)...(19): siRNA sense strand
gaugacgccuguuauagag

SEQ ID NO: 1267844 - RNA, 19 nt, Homo sapiens
  misc_RNA (1)...(19): siRNA sense strand
gagaaacauguccauauau

SEQ ID NO: 1267845 - RNA, 19 nt, Homo sapiens
  misc_RNA (1)...(19): siRNA sense strand
ccacuuaccagacuaaauc

SEQ ID NO: 1267846 - RNA, 19 nt, Homo sapiens
  misc_RNA (1)...(19): siRNA sense strand
acgaguagauuauaagugu

SEQ ID NO: 1267847 - RNA, 19 nt, Homo sapiens
  misc_RNA (1)...(19): siRNA sense strand
cuacaaagcaacaguuaug

SEQ ID NO: 1267848 - RNA, 19 nt, Homo sapiens
  misc_RNA (1)...(19): siRNA sense strand
ccaccaacauuugaagcua

SEQ ID NO: 1267849 - RNA, 19 nt, Homo sapiens
  misc_RNA (1)...(19): siRNA sense strand
uauacgggauccuuuaaau

SEQ ID NO: 1267850 - RNA, 19 nt, Homo sapiens
  misc_RNA (1)...(19): siRNA sense strand
cgaguuugguuaucagaug

SEQ ID NO: 1267851 - RNA, 19 nt, Homo sapiens
  misc_RNA (1)...(19): siRNA sense strand
gaacgaguagauuauaagu

SEQ ID NO: 1267852 - RNA, 19 nt, Homo sapiens
  misc_RNA (1)...(19): siRNA sense strand
gugaggagccaccaacauu

SEQ ID NO: 1267853 - RNA, 19 nt, Homo sapiens
  misc_RNA (1)...(19): siRNA sense strand
gauggcagcgacacaauug

SEQ ID NO: 1267854 - RNA, 19 nt, Homo sapiens
  misc_RNA (1)...(19): siRNA sense strand
ucucagaugacgccuguua

SEQ ID NO: 1267855 - RNA, 19 nt, Homo sapiens
  misc_RNA (1)...(19): siRNA sense strand
acacaccuuuagugaagua

SEQ ID NO: 1267856 - RNA, 19 nt, Homo sapiens
  misc_RNA (1)...(19): siRNA sense strand
gcuauggagcucauuggua

SEQ ID NO: 1267857 - RNA, 19 nt, Homo sapiens
  misc_RNA (1)...(19): siRNA sense strand
gaggagccaccaacauuug

SEQ ID NO: 1267858 - RNA, 19 nt, Homo sapiens
  misc_RNA (1)...(19): siRNA sense strand
uagagaaacauguccauau

SEQ ID NO: 1267859 - RNA, 19 nt, Homo sapiens
  misc_RNA (1)...(19): siRNA sense strand
guuccaaagugucuuaaag

SEQ ID NO: 1267860 - RNA, 19 nt, Homo sapiens
  misc_RNA (1)...(19): siRNA sense strand
ggugaacgaguagauuaua

SEQ ID NO: 1267861 - RNA, 19 nt, Homo sapiens
  misc_RNA (1)...(19): siRNA sense strand
gaaguagaaguauuugagu

SEQ ID NO: 1267862 - RNA, 19 nt, Homo sapiens
  misc_RNA (1)...(19): siRNA sense strand
gaaacauguccauauauac

SEQ ID NO: 1267863 - RNA, 19 nt, Homo sapiens
  misc_RNA (1)...(19): siRNA sense strand
ugacgccuguuauagagaa

SEQ ID NO: 1267864 - RNA, 19 nt, Homo sapiens
  misc_RNA (1)...(19): siRNA sense strand
cgaguagauuauaagugua

SEQ ID NO: 1267865 - RNA, 19 nt, Homo sapiens
  misc_RNA (1)...(19): siRNA sense strand
gcacuuuauuuguaaugag

SEQ ID NO: 1267866 - RNA, 19 nt, Homo sapiens
  misc_RNA (1)...(19): siRNA sense strand
guagaaguauuugaguauc

SEQ ID NO: 1267867 - RNA, 19 nt, Homo sapiens
  misc_RNA (1)...(19): siRNA sense strand
guauuugaguaucuugaug

SEQ ID NO: 1267868 - RNA, 19 nt, Homo sapiens
  misc_RNA (1)...(19): siRNA sense strand
aggaauacuugacaguuug

SEQ ID NO: 1267869 - RNA, 19 nt, Homo sapiens
  misc_RNA (1)...(19): siRNA sense strand
ccaaaacccuacuaugaga

SEQ ID NO: 1267870 - RNA, 19 nt, Homo sapiens
  misc_RNA (1)...(19): siRNA sense strand
aguguaaaguggucaaaug

SEQ ID NO: 1267871 - RNA, 19 nt, Homo sapiens
  misc_RNA (1)...(19): siRNA sense strand
ccacccauacuauuuguga

SEQ ID NO: 1267872 - RNA, 19 nt, Homo sapiens
  misc_RNA (1)...(19): siRNA sense strand
uuggagagagcacgauuua

SEQ ID NO: 1267873 - RNA, 19 nt, Homo sapiens
  misc_RNA (1)...(19): siRNA sense strand
gguuaucagaugcacuuua

SEQ ID NO: 1267874 - RNA, 19 nt, Homo sapiens
  misc_RNA (1)...(19): siRNA sense strand
caccaacauuugaagcuau

SEQ ID NO: 1267875 - RNA, 19 nt, Homo sapiens
  misc_RNA (1)...(19): siRNA sense strand
ugaggagccaccaacauuu

SEQ ID NO: 1267876 - RNA, 19 nt, Homo sapiens
  misc_RNA (1)...(19): siRNA sense strand
ggaaggaauacuugacagu

SEQ ID NO: 1267877 - RNA, 19 nt, Homo sapiens
  misc_RNA (1)...(19): siRNA sense strand
gaggaaggaauacuugaca

SEQ ID NO: 1267878 - RNA, 19 nt, Homo sapiens
  misc_RNA (1)...(19): siRNA sense strand
ccaguuccaaagugucuua

SEQ ID NO: 1267879 - RNA, 19 nt, Homo sapiens
  misc_RNA (1)...(19): siRNA sense strand
ugaguaucuugaugcagua

SEQ ID NO: 1267880 - RNA, 19 nt, Homo sapiens
  misc_RNA (1)...(19): siRNA sense strand
caccuuuagugaaguagaa

SEQ ID NO: 1267881 - RNA, 19 nt, Homo sapiens
  misc_RNA (1)...(19): siRNA sense strand
acagauaucaggauuugga

SEQ ID NO: 1267882 - RNA, 19 nt, Homo sapiens
  misc_RNA (1)...(19): siRNA sense strand
ucauugcugugauuguuau

SEQ ID NO: 1267883 - RNA, 19 nt, Homo sapiens
  misc_RNA (1)...(19): siRNA sense strand
ucagaugcacuuuauuugu

SEQ ID NO: 1267884 - RNA, 19 nt, Homo sapiens
  misc_RNA (1)...(19): siRNA sense strand
gugcugcuccagaguguaa

SEQ ID NO: 1267885 - RNA, 19 nt, Homo sapiens
  misc_RNA (1)...(19): siRNA sense strand
ggaaaacacaccuuuagug

SEQ ID NO: 1267886 - RNA, 19 nt, Homo sapiens
  misc_RNA (1)...(19): siRNA sense strand
aaggaucaguagcaauuug

SEQ ID NO: 1267887 - RNA, 19 nt, Homo sapiens
  misc_RNA (1)...(19): siRNA sense strand
uauauacgggauccuuuaa

SEQ ID NO: 1267888 - RNA, 19 nt, Homo sapiens
  misc_RNA (1)...(19): siRNA sense strand
ugaaguagaaguauuugag

SEQ ID NO: 1267889 - RNA, 19 nt, Homo sapiens
  misc_RNA (1)...(19): siRNA sense strand
cuugacaguuuggauguuu

SEQ ID NO: 1267890 - RNA, 19 nt, Homo sapiens
  misc_RNA (1)...(19): siRNA sense strand
cauauauacgggauccuuu

SEQ ID NO: 1267891 - RNA, 19 nt, Homo sapiens
  misc_RNA (1)...(19): siRNA sense strand
auauauacgggauccuuua

SEQ ID NO: 1267892 - RNA, 19 nt, Homo sapiens
  misc_RNA (1)...(19): siRNA sense strand
cuuaaaggaucaguagcaa

SEQ ID NO: 1267893 - RNA, 19 nt, Homo sapiens
  misc_RNA (1)...(19): siRNA sense strand
uaaaccugaggaaggaaua

SEQ ID NO: 1267894 - RNA, 19 nt, Homo sapiens
  misc_RNA (1)...(19): siRNA sense strand
agaugacgccuguuauaga

SEQ ID NO: 1267895 - RNA, 19 nt, Homo sapiens
  misc_RNA (1)...(19): siRNA sense strand
ugugauuguuauugccaua

SEQ ID NO: 1267896 - RNA, 19 nt, Homo sapiens
  misc_RNA (1)...(19): siRNA sense strand
gagagcacgauuuauugug

SEQ ID NO: 1267897 - RNA, 19 nt, Homo sapiens
  misc_RNA (1)...(19): siRNA sense strand
gaaguauuugaguaucuug

SEQ ID NO: 1267898 - RNA, 19 nt, Homo sapiens
  misc_RNA (1)...(19): siRNA sense strand
ggcuaccugucucagauga

SEQ ID NO: 1267899 - RNA, 19 nt, Homo sapiens
  misc_RNA (1)...(19): siRNA sense strand
ccucuugccacccauacua

SEQ ID NO: 1267900 - RNA, 19 nt, Homo sapiens
  misc_RNA (1)...(19): siRNA sense strand
gauaucaggauuuggaaaa

SEQ ID NO: 1267901 - RNA, 19 nt, Homo sapiens
  misc_RNA (1)...(19): siRNA sense strand
ccaugguguugcugcugua

SEQ ID NO: 1267902 - RNA, 19 nt, Homo sapiens
  misc_RNA (1)...(19): siRNA sense strand
cagaugacgccuguuauag

SEQ ID NO: 1267903 - RNA, 19 nt, Homo sapiens
  misc_RNA (1)...(19): siRNA sense strand
cagaugguggagcugaaua

SEQ ID NO: 1267904 - RNA, 19 nt, Homo sapiens
  misc_RNA (1)...(19): siRNA sense strand
gucauugcugugauuguua

SEQ ID NO: 1267905 - RNA, 19 nt, Homo sapiens
  misc_RNA (1)...(19): siRNA sense strand
uuggugaacgaguagauua

SEQ ID NO: 1267906 - RNA, 19 nt, Homo sapiens
  misc_RNA (1)...(19): siRNA sense strand
ggagccaccaacauuugaa

SEQ ID NO: 1267907 - RNA, 19 nt, Homo sapiens
  misc_RNA (1)...(19): siRNA sense strand
gcgcuuuccuggguugcuu

SEQ ID NO: 1267908 - RNA, 19 nt, Homo sapiens
  misc_RNA (1)...(19): siRNA sense strand
uacuacaaagcaacaguua

SEQ ID NO: 1267909 - RNA, 19 nt, Homo sapiens
  misc_RNA (1)...(19): siRNA sense strand
cuugaugcaguaacuuaua

SEQ ID NO: 1267910 - RNA, 19 nt, Homo sapiens
  misc_RNA (1)...(19): siRNA sense strand
aaacauguccauauauacg

SEQ ID NO: 1267911 - RNA, 19 nt, Homo sapiens
  misc_RNA (1)...(19): siRNA sense strand
guguaaaguggucaaaugu

SEQ ID NO: 1267912 - RNA, 19 nt, Homo sapiens
  misc_RNA (1)...(19): siRNA sense strand
cuuacgaguuugguuauca

SEQ ID NO: 1267913 - RNA, 19 nt, Homo sapiens
  misc_RNA (1)...(19): siRNA sense strand
aaccaaaacccuacuauga

SEQ ID NO: 1267914 - RNA, 19 nt, Homo sapiens
  misc_RNA (1)...(19): siRNA sense strand
gcagaugguggagcugaau

SEQ ID NO: 1267915 - RNA, 19 nt, Homo sapiens
  misc_RNA (1)...(19): siRNA sense strand
uacgggauccuuuaaaugg

SEQ ID NO: 1267916 - RNA, 19 nt, Homo sapiens
  misc_RNA (1)...(19): siRNA sense strand
cgauggcagcgacacaauu

SEQ ID NO: 1267917 - RNA, 19 nt, Homo sapiens
  misc_RNA (1)...(19): siRNA sense strand
ggagcugaauaugccacuu

SEQ ID NO: 1267918 - RNA, 19 nt, Homo sapiens
  misc_RNA (1)...(19): siRNA sense strand
caacauuugaagcuaugga

SEQ ID NO: 1267919 - RNA, 19 nt, Homo sapiens
  misc_RNA (1)...(19): siRNA sense strand
ggagagagcacgauuuauu

SEQ ID NO: 1267920 - RNA, 19 nt, Homo sapiens
  misc_RNA (1)...(19): siRNA sense strand
agagaaacauguccauaua

SEQ ID NO: 1267921 - RNA, 19 nt, Homo sapiens
  misc_RNA (1)...(19): siRNA sense strand
cagaugcacuuuauuugua

SEQ ID NO: 1267922 - RNA, 19 nt, Homo sapiens
  misc_RNA (1)...(19): siRNA sense strand
ggacuuacgaguuugguua

SEQ ID NO: 1267923 - RNA, 19 nt, Homo sapiens
  misc_RNA (1)...(19): siRNA sense strand
aaacagauaucaggauuug

SEQ ID NO: 1267924 - RNA, 19 nt, Homo sapiens
  misc_RNA (1)...(19): siRNA sense strand
cuauggagcucauugguaa

SEQ ID NO: 1267925 - RNA, 19 nt, Homo sapiens
  misc_RNA (1)...(19): siRNA sense strand
aaacacaccuuuagugaag

SEQ ID NO: 1267926 - RNA, 19 nt, Homo sapiens
  misc_RNA (1)...(19): siRNA sense strand
gaacuuaaaggaucaguag

SEQ ID NO: 1267927 - RNA, 19 nt, Homo sapiens
  misc_RNA (1)...(19): siRNA sense strand
gaaaacagauaucaggauu

SEQ ID NO: 1267928 - RNA, 19 nt, Homo sapiens
  misc_RNA (1)...(19): siRNA sense strand
uaaaggaucaguagcaauu

SEQ ID NO: 1267929 - RNA, 19 nt, Homo sapiens
  misc_RNA (1)...(19): siRNA sense strand
aaaugggacuuacgaguuu

SEQ ID NO: 1267930 - RNA, 19 nt, Homo sapiens
  misc_RNA (1)...(19): siRNA sense strand
guuaucagaugcacuuuau

SEQ ID NO: 1267931 - RNA, 19 nt, Homo sapiens
  misc_RNA (1)...(19): siRNA sense strand
ugagauuggugaacgagua

SEQ ID NO: 1267932 - RNA, 19 nt, Homo sapiens
  misc_RNA (1)...(19): siRNA sense strand
gugaacgaguagauuauaa

SEQ ID NO: 1267933 - RNA, 19 nt, Homo sapiens
  misc_RNA (1)...(19): siRNA sense strand
gagagagcacgauuuauug

SEQ ID NO: 1267934 - RNA, 19 nt, Homo sapiens
  misc_RNA (1)...(19): siRNA sense strand
caaaugggacuuacgaguu

SEQ ID NO: 1267935 - RNA, 19 nt, Homo sapiens
  misc_RNA (1)...(19): siRNA sense strand
ggucauugcugugauuguu

SEQ ID NO: 1267936 - RNA, 19 nt, Homo sapiens
  misc_RNA (1)...(19): siRNA sense strand
ccagauccauuuucacuua

SEQ ID NO: 1267937 - RNA, 19 nt, Homo sapiens
  misc_RNA (1)...(19): siRNA sense strand
gaaggaauacuugacaguu

SEQ ID NO: 1267938 - RNA, 19 nt, Homo sapiens
  misc_RNA (1)...(19): siRNA sense strand
aaggaauacuugacaguuu

SEQ ID NO: 1267939 - RNA, 19 nt, Homo sapiens
  misc_RNA (1)...(19): siRNA sense strand
ucagaugacgccuguuaua

SEQ ID NO: 1267940 - RNA, 19 nt, Homo sapiens
  misc_RNA (1)...(19): siRNA sense strand
gaaaacacaccuuuaguga

SEQ ID NO: 1267941 - RNA, 19 nt, Homo sapiens
  misc_RNA (1)...(19): siRNA sense strand
gaugacgccuguuauagag

SEQ ID NO: 1267942 - RNA, 19 nt, Homo sapiens
  misc_RNA (1)...(19): siRNA sense strand
gagaaacauguccauauau

SEQ ID NO: 1267943 - RNA, 19 nt, Homo sapiens
  misc_RNA (1)...(19): siRNA sense strand
acgaguagauuauaagugu

SEQ ID NO: 1267944 - RNA, 19 nt, Homo sapiens
  misc_RNA (1)...(19): siRNA sense strand
cuacaaagcaacaguuaug

SEQ ID NO: 1267945 - RNA, 19 nt, Homo sapiens
  misc_RNA (1)...(19): siRNA sense strand
ccaccaacauuugaagcua

SEQ ID NO: 1267946 - RNA, 19 nt, Homo sapiens
  misc_RNA (1)...(19): siRNA sense strand
uauacgggauccuuuaaau

SEQ ID NO: 1267947 - RNA, 19 nt, Homo sapiens
  misc_RNA (1)...(19): siRNA sense strand
cgaguuugguuaucagaug

SEQ ID NO: 1267948 - RNA, 19 nt, Homo sapiens
  misc_RNA (1)...(19): siRNA sense strand
gaacgaguagauuauaagu

SEQ ID NO: 1267949 - RNA, 19 nt, Homo sapiens
  misc_RNA (1)...(19): siRNA sense strand
gugaggagccaccaacauu

SEQ ID NO: 1267950 - RNA, 19 nt, Homo sapiens
  misc_RNA (1)...(19): siRNA sense strand
gauggcagcgacacaauug

SEQ ID NO: 1267951 - RNA, 19 nt, Homo sapiens
  misc_RNA (1)...(19): siRNA sense strand
gcuauggagcucauuggua

SEQ ID NO: 1267952 - RNA, 19 nt, Homo sapiens
  misc_RNA (1)...(19): siRNA sense strand
gaggagccaccaacauuug

SEQ ID NO: 1267953 - RNA, 19 nt, Homo sapiens
  misc_RNA (1)...(19): siRNA sense strand
acacaccuuuagugaagua

SEQ ID NO: 1267954 - RNA, 19 nt, Homo sapiens
  misc_RNA (1)...(19): siRNA sense strand
ucucagaugacgccuguua

SEQ ID NO: 1267955 - RNA, 19 nt, Homo sapiens
  misc_RNA (1)...(19): siRNA sense strand
uagagaaacauguccauau

SEQ ID NO: 1267956 - RNA, 19 nt, Homo sapiens
  misc_RNA (1)...(19): siRNA sense strand
ggugaacgaguagauuaua

SEQ ID NO: 1267957 - RNA, 19 nt, Homo sapiens
  misc_RNA (1)...(19): siRNA sense strand
gaaguagaaguauuugagu

SEQ ID NO: 1267958 - RNA, 19 nt, Homo sapiens
  misc_RNA (1)...(19): siRNA sense strand
gaaacauguccauauauac

SEQ ID NO: 1267959 - RNA, 19 nt, Homo sapiens
  misc_RNA (1)...(19): siRNA sense strand
ugacgccuguuauagagaa

SEQ ID NO: 1267960 - RNA, 19 nt, Homo sapiens
  misc_RNA (1)...(19): siRNA sense strand
cgaguagauuauaagugua

SEQ ID NO: 1267961 - RNA, 19 nt, Homo sapiens
  misc_RNA (1)...(19): siRNA sense strand
gcacuuuauuuguaaugag

SEQ ID NO: 1267962 - RNA, 19 nt, Homo sapiens
  misc_RNA (1)...(19): siRNA sense strand
guagaaguauuugaguauc

SEQ ID NO: 1267963 - RNA, 19 nt, Homo sapiens
  misc_RNA (1)...(19): siRNA sense strand
guauuugaguaucuugaug

SEQ ID NO: 1267964 - RNA, 19 nt, Homo sapiens
  misc_RNA (1)...(19): siRNA sense strand
aggaauacuugacaguuug

SEQ ID NO: 1267965 - RNA, 19 nt, Homo sapiens
  misc_RNA (1)...(19): siRNA sense strand
aguguaaaguggucaaaug

SEQ ID NO: 1267966 - RNA, 19 nt, Homo sapiens
  misc_RNA (1)...(19): siRNA sense strand
ccaaaacccuacuaugaga

SEQ ID NO: 1267967 - RNA, 19 nt, Homo sapiens
  misc_RNA (1)...(19): siRNA sense strand
ccacccauacuauuuguga

SEQ ID NO: 1267968 - RNA, 19 nt, Homo sapiens
  misc_RNA (1)...(19): siRNA sense strand
caccaacauuugaagcuau

SEQ ID NO: 1267969 - RNA, 19 nt, Homo sapiens
  misc_RNA (1)...(19): siRNA sense strand
uuggagagagcacgauuua

SEQ ID NO: 1267970 - RNA, 19 nt, Homo sapiens
  misc_RNA (1)...(19): siRNA sense strand
gguuaucagaugcacuuua

SEQ ID NO: 1267971 - RNA, 19 nt, Homo sapiens
  misc_RNA (1)...(19): siRNA sense strand
ugaggagccaccaacauuu

SEQ ID NO: 1267972 - RNA, 19 nt, Homo sapiens
  misc_RNA (1)...(19): siRNA sense strand
ggaaggaauacuugacagu

SEQ ID NO: 1267973 - RNA, 19 nt, Homo sapiens
  misc_RNA (1)...(19): siRNA sense strand
gaggaaggaauacuugaca

SEQ ID NO: 1267974 - RNA, 19 nt, Homo sapiens
  misc_RNA (1)...(19): siRNA sense strand
ugaguaucuugaugcagua

SEQ ID NO: 1267975 - RNA, 19 nt, Homo sapiens
  misc_RNA (1)...(19): siRNA sense strand
caccuuuagugaaguagaa

SEQ ID NO: 1267976 - RNA, 19 nt, Homo sapiens
  misc_RNA (1)...(19): siRNA sense strand
acagauaucaggauuugga

SEQ ID NO: 1267977 - RNA, 19 nt, Homo sapiens
  misc_RNA (1)...(19): siRNA sense strand
ucauugcugugauuguuau

SEQ ID NO: 1267978 - RNA, 19 nt, Homo sapiens
  misc_RNA (1)...(19): siRNA sense strand
ucagaugcacuuuauuugu

SEQ ID NO: 1267979 - RNA, 19 nt, Homo sapiens
  misc_RNA (1)...(19): siRNA sense strand
gugcugcuccagaguguaa

SEQ ID NO: 1267980 - RNA, 19 nt, Homo sapiens
  misc_RNA (1)...(19): siRNA sense strand
ggaaaacacaccuuuagug

SEQ ID NO: 1267981 - RNA, 19 nt, Homo sapiens
  misc_RNA (1)...(19): siRNA sense strand
aaggaucaguagcaauuug

SEQ ID NO: 1267982 - RNA, 19 nt, Homo sapiens
  misc_RNA (1)...(19): siRNA sense strand
uauauacgggauccuuuaa

SEQ ID NO: 1267983 - RNA, 19 nt, Homo sapiens
  misc_RNA (1)...(19): siRNA sense strand
ugaaguagaaguauuugag

SEQ ID NO: 1267984 - RNA, 19 nt, Homo sapiens
  misc_RNA (1)...(19): siRNA sense strand
cuugacaguuuggauguuu

SEQ ID NO: 1267985 - RNA, 19 nt, Homo sapiens
  misc_RNA (1)...(19): siRNA sense strand
cauauauacgggauccuuu

SEQ ID NO: 1267986 - RNA, 19 nt, Homo sapiens
  misc_RNA (1)...(19): siRNA sense strand
auauauacgggauccuuua

SEQ ID NO: 1267987 - RNA, 19 nt, Homo sapiens
  misc_RNA (1)...(19): siRNA sense strand
cuuaaaggaucaguagcaa

SEQ ID NO: 1267988 - RNA, 19 nt, Homo sapiens
  misc_RNA (1)...(19): siRNA sense strand
uaaaccugaggaaggaaua

SEQ ID NO: 1267989 - RNA, 19 nt, Homo sapiens
  misc_RNA (1)...(19): siRNA sense strand
agaugacgccuguuauaga

SEQ ID NO: 1267990 - RNA, 19 nt, Homo sapiens
  misc_RNA (1)...(19): siRNA sense strand
ugugauuguuauugccaua

SEQ ID NO: 1267991 - RNA, 19 nt, Homo sapiens
  misc_RNA (1)...(19): siRNA sense strand
gagagcacgauuuauugug

SEQ ID NO: 1267992 - RNA, 19 nt, Homo sapiens
  misc_RNA (1)...(19): siRNA sense strand
gaaguauuugaguaucuug

SEQ ID NO: 1267993 - RNA, 19 nt, Homo sapiens
  misc_RNA (1)...(19): siRNA sense strand
ccucuugccacccauacua

SEQ ID NO: 1267994 - RNA, 19 nt, Homo sapiens
  misc_RNA (1)...(19): siRNA sense strand
gauaucaggauuuggaaaa

SEQ ID NO: 1267995 - RNA, 19 nt, Homo sapiens
  misc_RNA (1)...(19): siRNA sense strand
ggcuaccugucucagauga

SEQ ID NO: 1267996 - RNA, 19 nt, Homo sapiens
  misc_RNA (1)...(19): siRNA sense strand
ccaugguguugcugcugua

SEQ ID NO: 1267997 - RNA, 19 nt, Homo sapiens
  misc_RNA (1)...(19): siRNA sense strand
cagaugacgccuguuauag

SEQ ID NO: 1267998 - RNA, 19 nt, Homo sapiens
  misc_RNA (1)...(19): siRNA sense strand
gucauugcugugauuguua

SEQ ID NO: 1267999 - RNA, 19 nt, Homo sapiens
  misc_RNA (1)...(19): siRNA sense strand
uuggugaacgaguagauua

SEQ ID NO: 1268000 - RNA, 19 nt, Homo sapiens
  misc_RNA (1)...(19): siRNA sense strand
ggagccaccaacauuugaa

SEQ ID NO: 1268001 - RNA, 19 nt, Homo sapiens
  misc_RNA (1)...(19): siRNA sense strand
gcgcuuuccuggguugcuu

SEQ ID NO: 1268002 - RNA, 19 nt, Homo sapiens
  misc_RNA (1)...(19): siRNA sense strand
uacuacaaagcaacaguua

SEQ ID NO: 1268003 - RNA, 19 nt, Homo sapiens
  misc_RNA (1)...(19): siRNA sense strand
cuugaugcaguaacuuaua

SEQ ID NO: 1268004 - RNA, 19 nt, Homo sapiens
  misc_RNA (1)...(19): siRNA sense strand
aaacauguccauauauacg

SEQ ID NO: 1268005 - RNA, 19 nt, Homo sapiens
  misc_RNA (1)...(19): siRNA sense strand
guguaaaguggucaaaugu

SEQ ID NO: 1268006 - RNA, 19 nt, Homo sapiens
  misc_RNA (1)...(19): siRNA sense strand
cuuacgaguuugguuauca

SEQ ID NO: 1268007 - RNA, 19 nt, Homo sapiens
  misc_RNA (1)...(19): siRNA sense strand
uacgggauccuuuaaaugg

SEQ ID NO: 1268008 - RNA, 19 nt, Homo sapiens
  misc_RNA (1)...(19): siRNA sense strand
aaccaaaacccuacuauga

SEQ ID NO: 1268009 - RNA, 19 nt, Homo sapiens
  misc_RNA (1)...(19): siRNA sense strand
cccaauaugugaaaagguu

SEQ ID NO: 1268010 - RNA, 19 nt, Homo sapiens
  misc_RNA (1)...(19): siRNA sense strand
cgauggcagcgacacaauu

SEQ ID NO: 1268011 - RNA, 19 nt, Homo sapiens
  misc_RNA (1)...(19): siRNA sense strand
gauccauuuucacuuauug

SEQ ID NO: 1268012 - RNA, 19 nt, Homo sapiens
  misc_RNA (1)...(19): siRNA sense strand
uugaugcaguaacuuauag

SEQ ID NO: 1268013 - RNA, 19 nt, Homo sapiens
  misc_RNA (1)...(19): siRNA sense strand
guaucuugaugcaguaacu

SEQ ID NO: 1268014 - RNA, 19 nt, Homo sapiens
  misc_RNA (1)...(19): siRNA sense strand
caacauuugaagcuaugga

SEQ ID NO: 1268015 - RNA, 19 nt, Homo sapiens
  misc_RNA (1)...(19): siRNA sense strand
gagauuggugaacgaguag

SEQ ID NO: 1268016 - RNA, 19 nt, Homo sapiens
  misc_RNA (1)...(19): siRNA sense strand
ggagagagcacgauuuauu

SEQ ID NO: 1268017 - RNA, 19 nt, Homo sapiens
  misc_RNA (1)...(19): siRNA sense strand
agagaaacauguccauaua

SEQ ID NO: 1268018 - RNA, 19 nt, Homo sapiens
  misc_RNA (1)...(19): siRNA sense strand
cagaugcacuuuauuugua

SEQ ID NO: 1268019 - RNA, 19 nt, Homo sapiens
  misc_RNA (1)...(19): siRNA sense strand
ggacuuacgaguuugguua

SEQ ID NO: 1268020 - RNA, 19 nt, Homo sapiens
  misc_RNA (1)...(19): siRNA sense strand
aaacagauaucaggauuug

SEQ ID NO: 1268021 - RNA, 19 nt, Homo sapiens
  misc_RNA (1)...(19): siRNA sense strand
cuauggagcucauugguaa

SEQ ID NO: 1268022 - RNA, 19 nt, Homo sapiens
  misc_RNA (1)...(19): siRNA sense strand
aaacacaccuuuagugaag

SEQ ID NO: 1268023 - RNA, 19 nt, Homo sapiens
  misc_RNA (1)...(19): siRNA sense strand
gaacuuaaaggaucaguag

SEQ ID NO: 1268024 - RNA, 19 nt, Homo sapiens
  misc_RNA (1)...(19): siRNA sense strand
gaaaacagauaucaggauu

SEQ ID NO: 1268025 - RNA, 19 nt, Homo sapiens
  misc_RNA (1)...(19): siRNA sense strand
uaaaggaucaguagcaauu

SEQ ID NO: 1268026 - RNA, 19 nt, Homo sapiens
  misc_RNA (1)...(19): siRNA sense strand
aaaugggacuuacgaguuu

SEQ ID NO: 1268027 - RNA, 19 nt, Homo sapiens
  misc_RNA (1)...(19): siRNA sense strand
guuaucagaugcacuuuau

SEQ ID NO: 1268028 - RNA, 19 nt, Homo sapiens
  misc_RNA (1)...(19): siRNA sense strand
ugagauuggugaacgagua

SEQ ID NO: 1268029 - RNA, 19 nt, Homo sapiens
  misc_RNA (1)...(19): siRNA sense strand
gugaacgaguagauuauaa

SEQ ID NO: 1268030 - RNA, 19 nt, Homo sapiens
  misc_RNA (1)...(19): siRNA sense strand
gagagagcacgauuuauug

SEQ ID NO: 1268031 - RNA, 19 nt, Homo sapiens
  misc_RNA (1)...(19): siRNA sense strand
caaaugggacuuacgaguu

SEQ ID NO: 1268032 - RNA, 19 nt, Homo sapiens
  misc_RNA (1)...(19): siRNA sense strand
ggucauugcugugauuguu

SEQ ID NO: 1268033 - RNA, 19 nt, Homo sapiens
  misc_RNA (1)...(19): siRNA sense strand
ccagauccauuuucacuua

SEQ ID NO: 1268034 - RNA, 19 nt, Homo sapiens
  misc_RNA (1)...(19): siRNA sense strand
gaaggaauacuugacaguu

SEQ ID NO: 1268035 - RNA, 19 nt, Homo sapiens
  misc_RNA (1)...(19): siRNA sense strand
aaggaauacuugacaguuu

SEQ ID NO: 1268036 - RNA, 19 nt, Homo sapiens
  misc_RNA (1)...(19): siRNA sense strand
ucagaugacgccuguuaua

SEQ ID NO: 1268037 - RNA, 19 nt, Homo sapiens
  misc_RNA (1)...(19): siRNA sense strand
gaaaacacaccuuuaguga

SEQ ID NO: 1268038 - RNA, 19 nt, Homo sapiens
  misc_RNA (1)...(19): siRNA sense strand
gaugacgccuguuauagag

SEQ ID NO: 1268039 - RNA, 19 nt, Homo sapiens
  misc_RNA (1)...(19): siRNA sense strand
gagaaacauguccauauau

SEQ ID NO: 1268040 - RNA, 19 nt, Homo sapiens
  misc_RNA (1)...(19): siRNA sense strand
acgaguagauuauaagugu

SEQ ID NO: 1268041 - RNA, 19 nt, Homo sapiens
  misc_RNA (1)...(19): siRNA sense strand
cuacaaagcaacaguuaug

SEQ ID NO: 1268042 - RNA, 19 nt, Homo sapiens
  misc_RNA (1)...(19): siRNA sense strand
ccaccaacauuugaagcua

SEQ ID NO: 1268043 - RNA, 19 nt, Homo sapiens
  misc_RNA (1)...(19): siRNA sense strand
uauacgggauccuuuaaau

SEQ ID NO: 1268044 - RNA, 19 nt, Homo sapiens
  misc_RNA (1)...(19): siRNA sense strand
cgaguuugguuaucagaug

SEQ ID NO: 1268045 - RNA, 19 nt, Homo sapiens
  misc_RNA (1)...(19): siRNA sense strand
gaacgaguagauuauaagu

SEQ ID NO: 1268046 - RNA, 19 nt, Homo sapiens
  misc_RNA (1)...(19): siRNA sense strand
gugaggagccaccaacauu

SEQ ID NO: 1268047 - RNA, 19 nt, Homo sapiens
  misc_RNA (1)...(19): siRNA sense strand
gauggcagcgacacaauug

SEQ ID NO: 1268048 - RNA, 19 nt, Homo sapiens
  misc_RNA (1)...(19): siRNA sense strand
gcuauggagcucauuggua

SEQ ID NO: 1268049 - RNA, 19 nt, Homo sapiens
  misc_RNA (1)...(19): siRNA sense strand
gaggagccaccaacauuug

SEQ ID NO: 1268050 - RNA, 19 nt, Homo sapiens
  misc_RNA (1)...(19): siRNA sense strand
acacaccuuuagugaagua

SEQ ID NO: 1268051 - RNA, 19 nt, Homo sapiens
  misc_RNA (1)...(19): siRNA sense strand
ucucagaugacgccuguua

SEQ ID NO: 1268052 - RNA, 19 nt, Homo sapiens
  misc_RNA (1)...(19): siRNA sense strand
uagagaaacauguccauau

SEQ ID NO: 1268053 - RNA, 19 nt, Homo sapiens
  misc_RNA (1)...(19): siRNA sense strand
guuccaaagugucuuaaag

SEQ ID NO: 1268054 - RNA, 19 nt, Homo sapiens
  misc_RNA (1)...(19): siRNA sense strand
ggugaacgaguagauuaua

SEQ ID NO: 1268055 - RNA, 19 nt, Homo sapiens
  misc_RNA (1)...(19): siRNA sense strand
gaaguagaaguauuugagu

SEQ ID NO: 1268056 - RNA, 19 nt, Homo sapiens
  misc_RNA (1)...(19): siRNA sense strand
gaaacauguccauauauac

SEQ ID NO: 1268057 - RNA, 19 nt, Homo sapiens
  misc_RNA (1)...(19): siRNA sense strand
ugacgccuguuauagagaa

SEQ ID NO: 1268058 - RNA, 19 nt, Homo sapiens
  misc_RNA (1)...(19): siRNA sense strand
cgaguagauuauaagugua

SEQ ID NO: 1268059 - RNA, 19 nt, Homo sapiens
  misc_RNA (1)...(19): siRNA sense strand
gcacuuuauuuguaaugag

SEQ ID NO: 1268060 - RNA, 19 nt, Homo sapiens
  misc_RNA (1)...(19): siRNA sense strand
guagaaguauuugaguauc

SEQ ID NO: 1268061 - RNA, 19 nt, Homo sapiens
  misc_RNA (1)...(19): siRNA sense strand
guauuugaguaucuugaug

SEQ ID NO: 1268062 - RNA, 19 nt, Homo sapiens
  misc_RNA (1)...(19): siRNA sense strand
aggaauacuugacaguuug

SEQ ID NO: 1268063 - RNA, 19 nt, Homo sapiens
  misc_RNA (1)...(19): siRNA sense strand
ccaaaacccuacuaugaga

SEQ ID NO: 1268064 - RNA, 19 nt, Homo sapiens
  misc_RNA (1)...(19): siRNA sense strand
aguguaaaguggucaaaug

SEQ ID NO: 1268065 - RNA, 19 nt, Homo sapiens
  misc_RNA (1)...(19): siRNA sense strand
ccacccauacuauuuguga

SEQ ID NO: 1268066 - RNA, 19 nt, Homo sapiens
  misc_RNA (1)...(19): siRNA sense strand
caccaacauuugaagcuau

SEQ ID NO: 1268067 - RNA, 19 nt, Homo sapiens
  misc_RNA (1)...(19): siRNA sense strand
uuggagagagcacgauuua

SEQ ID NO: 1268068 - RNA, 19 nt, Homo sapiens
  misc_RNA (1)...(19): siRNA sense strand
gguuaucagaugcacuuua

SEQ ID NO: 1268069 - RNA, 19 nt, Homo sapiens
  misc_RNA (1)...(19): siRNA sense strand
ugaggagccaccaacauuu

SEQ ID NO: 1268070 - RNA, 19 nt, Homo sapiens
  misc_RNA (1)...(19): siRNA sense strand
ggaaggaauacuugacagu

SEQ ID NO: 1268071 - RNA, 19 nt, Homo sapiens
  misc_RNA (1)...(19): siRNA sense strand
gaggaaggaauacuugaca

SEQ ID NO: 1268072 - RNA, 19 nt, Homo sapiens
  misc_RNA (1)...(19): siRNA sense strand
ccaguuccaaagugucuua

SEQ ID NO: 1268073 - RNA, 19 nt, Homo sapiens
  misc_RNA (1)...(19): siRNA sense strand
ugaguaucuugaugcagua

SEQ ID NO: 1268074 - RNA, 19 nt, Homo sapiens
  misc_RNA (1)...(19): siRNA sense strand
caccuuuagugaaguagaa

SEQ ID NO: 1268075 - RNA, 19 nt, Homo sapiens
  misc_RNA (1)...(19): siRNA sense strand
acagauaucaggauuugga

SEQ ID NO: 1268076 - RNA, 19 nt, Homo sapiens
  misc_RNA (1)...(19): siRNA sense strand
ucauugcugugauuguuau

SEQ ID NO: 1268077 - RNA, 19 nt, Homo sapiens
  misc_RNA (1)...(19): siRNA sense strand
ucagaugcacuuuauuugu

SEQ ID NO: 1268078 - RNA, 19 nt, Homo sapiens
  misc_RNA (1)...(19): siRNA sense strand
gugcugcuccagaguguaa

SEQ ID NO: 1268079 - RNA, 19 nt, Homo sapiens
  misc_RNA (1)...(19): siRNA sense strand
ggaaaacacaccuuuagug

SEQ ID NO: 1268080 - RNA, 19 nt, Homo sapiens
  misc_RNA (1)...(19): siRNA sense strand
aaggaucaguagcaauuug

SEQ ID NO: 1268081 - RNA, 19 nt, Homo sapiens
  misc_RNA (1)...(19): siRNA sense strand
uauauacgggauccuuuaa

SEQ ID NO: 1268082 - RNA, 19 nt, Homo sapiens
  misc_RNA (1)...(19): siRNA sense strand
ugaaguagaaguauuugag

SEQ ID NO: 1268083 - RNA, 19 nt, Homo sapiens
  misc_RNA (1)...(19): siRNA sense strand
cuugacaguuuggauguuu

SEQ ID NO: 1268084 - RNA, 19 nt, Homo sapiens
  misc_RNA (1)...(19): siRNA sense strand
cauauauacgggauccuuu

SEQ ID NO: 1268085 - RNA, 19 nt, Homo sapiens
  misc_RNA (1)...(19): siRNA sense strand
auauauacgggauccuuua

SEQ ID NO: 1268086 - RNA, 19 nt, Homo sapiens
  misc_RNA (1)...(19): siRNA sense strand
cuuaaaggaucaguagcaa

SEQ ID NO: 1268087 - RNA, 19 nt, Homo sapiens
  misc_RNA (1)...(19): siRNA sense strand
uaaaccugaggaaggaaua

SEQ ID NO: 1268088 - RNA, 19 nt, Homo sapiens
  misc_RNA (1)...(19): siRNA sense strand
agaugacgccuguuauaga

SEQ ID NO: 1268089 - RNA, 19 nt, Homo sapiens
  misc_RNA (1)...(19): siRNA sense strand
ugugauuguuauugccaua

SEQ ID NO: 1268090 - RNA, 19 nt, Homo sapiens
  misc_RNA (1)...(19): siRNA sense strand
gagagcacgauuuauugug

SEQ ID NO: 1268091 - RNA, 19 nt, Homo sapiens
  misc_RNA (1)...(19): siRNA sense strand
gaaguauuugaguaucuug

SEQ ID NO: 1268092 - RNA, 19 nt, Homo sapiens
  misc_RNA (1)...(19): siRNA sense strand
ggcuaccugucucagauga

SEQ ID NO: 1268093 - RNA, 19 nt, Homo sapiens
  misc_RNA (1)...(19): siRNA sense strand
gauaucaggauuuggaaaa

SEQ ID NO: 1268094 - RNA, 19 nt, Homo sapiens
  misc_RNA (1)...(19): siRNA sense strand
ccucuugccacccauacua

SEQ ID NO: 1268095 - RNA, 19 nt, Homo sapiens
  misc_RNA (1)...(19): siRNA sense strand
ccaugguguugcugcugua

SEQ ID NO: 1268096 - RNA, 19 nt, Homo sapiens
  misc_RNA (1)...(19): siRNA sense strand
cagaugacgccuguuauag

SEQ ID NO: 1268097 - RNA, 19 nt, Homo sapiens
  misc_RNA (1)...(19): siRNA sense strand
uuggugaacgaguagauua

SEQ ID NO: 1268098 - RNA, 19 nt, Homo sapiens
  misc_RNA (1)...(19): siRNA sense strand
gucauugcugugauuguua

SEQ ID NO: 1268099 - RNA, 19 nt, Homo sapiens
  misc_RNA (1)...(19): siRNA sense strand
ggagccaccaacauuugaa

SEQ ID NO: 1268100 - RNA, 19 nt, Homo sapiens
  misc_RNA (1)...(19): siRNA sense strand
gcgcuuuccuggguugcuu

SEQ ID NO: 1268101 - RNA, 19 nt, Homo sapiens
  misc_RNA (1)...(19): siRNA sense strand
uacuacaaagcaacaguua

SEQ ID NO: 1268102 - RNA, 19 nt, Homo sapiens
  misc_RNA (1)...(19): siRNA sense strand
cuugaugcaguaacuuaua

SEQ ID NO: 1268103 - RNA, 19 nt, Homo sapiens
  misc_RNA (1)...(19): siRNA sense strand
aaacauguccauauauacg

SEQ ID NO: 1268104 - RNA, 19 nt, Homo sapiens
  misc_RNA (1)...(19): siRNA sense strand
guguaaaguggucaaaugu

SEQ ID NO: 1268105 - RNA, 19 nt, Homo sapiens
  misc_RNA (1)...(19): siRNA sense strand
cuuacgaguuugguuauca

SEQ ID NO: 1268106 - RNA, 19 nt, Homo sapiens
  misc_RNA (1)...(19): siRNA sense strand
uacgggauccuuuaaaugg

SEQ ID NO: 1268107 - RNA, 19 nt, Homo sapiens
  misc_RNA (1)...(19): siRNA sense strand
aaccaaaacccuacuauga

SEQ ID NO: 1268108 - RNA, 19 nt, Homo sapiens
  misc_RNA (1)...(19): siRNA sense strand
cccaauaugugaaaagguu

SEQ ID NO: 1268109 - RNA, 19 nt, Homo sapiens
  misc_RNA (1)...(19): siRNA sense strand
cgauggcagcgacacaauu

SEQ ID NO: 1268110 - RNA, 19 nt, Homo sapiens
  misc_RNA (1)...(19): siRNA sense strand
gauccauuuucacuuauug

SEQ ID NO: 1268111 - RNA, 19 nt, Homo sapiens
  misc_RNA (1)...(19): siRNA sense strand
uugaugcaguaacuuauag

SEQ ID NO: 1268112 - RNA, 19 nt, Homo sapiens
  misc_RNA (1)...(19): siRNA sense strand
guaucuugaugcaguaacu

SEQ ID NO: 1268113 - RNA, 19 nt, Homo sapiens
  misc_RNA (1)...(19): siRNA sense strand
caacauuugaagcuaugga

SEQ ID NO: 1268114 - RNA, 19 nt, Homo sapiens
  misc_RNA (1)...(19): siRNA sense strand
gagauuggugaacgaguag

SEQ ID NO: 1268115 - RNA, 19 nt, Homo sapiens
  misc_RNA (1)...(19): siRNA sense strand
ggagagagcacgauuuauu

SEQ ID NO: 1268116 - RNA, 19 nt, Homo sapiens
  misc_RNA (1)...(19): siRNA sense strand
agagaaacauguccauaua

SEQ ID NO: 1268117 - RNA, 19 nt, Homo sapiens
  misc_RNA (1)...(19): siRNA sense strand
cagaugcacuuuauuugua

SEQ ID NO: 1268118 - RNA, 19 nt, Homo sapiens
  misc_RNA (1)...(19): siRNA sense strand
ggacuuacgaguuugguua

SEQ ID NO: 1268119 - RNA, 19 nt, Homo sapiens
  misc_RNA (1)...(19): siRNA sense strand
aaacagauaucaggauuug

SEQ ID NO: 1268120 - RNA, 19 nt, Homo sapiens
  misc_RNA (1)...(19): siRNA sense strand
cuauggagcucauugguaa

SEQ ID NO: 1268121 - RNA, 19 nt, Homo sapiens
  misc_RNA (1)...(19): siRNA sense strand
aaacacaccuuuagugaag

SEQ ID NO: 1268122 - RNA, 19 nt, Homo sapiens
  misc_RNA (1)...(19): siRNA sense strand
gaacuuaaaggaucaguag

SEQ ID NO: 1268123 - RNA, 19 nt, Homo sapiens
  misc_RNA (1)...(19): siRNA sense strand
gaaaacagauaucaggauu

SEQ ID NO: 1268124 - RNA, 19 nt, Homo sapiens
  misc_RNA (1)...(19): siRNA sense strand
uaaaggaucaguagcaauu

SEQ ID NO: 1268125 - RNA, 19 nt, Homo sapiens
  misc_RNA (1)...(19): siRNA sense strand
aaaugggacuuacgaguuu

SEQ ID NO: 1268126 - RNA, 19 nt, Homo sapiens
  misc_RNA (1)...(19): siRNA sense strand
guuaucagaugcacuuuau

SEQ ID NO: 1268127 - RNA, 19 nt, Homo sapiens
  misc_RNA (1)...(19): siRNA sense strand
gagcugaauaugccacuua

SEQ ID NO: 1268128 - RNA, 19 nt, Homo sapiens
  misc_RNA (1)...(19): siRNA sense strand
ugagauuggugaacgagua

SEQ ID NO: 1268129 - RNA, 19 nt, Homo sapiens
  misc_RNA (1)...(19): siRNA sense strand
gugaacgaguagauuauaa

SEQ ID NO: 1268130 - RNA, 19 nt, Homo sapiens
  misc_RNA (1)...(19): siRNA sense strand
gagagagcacgauuuauug

SEQ ID NO: 1268131 - RNA, 19 nt, Homo sapiens
  misc_RNA (1)...(19): siRNA sense strand
caaaugggacuuacgaguu

SEQ ID NO: 1268132 - RNA, 19 nt, Homo sapiens
  misc_RNA (1)...(19): siRNA sense strand
ggucauugcugugauuguu

SEQ ID NO: 1268133 - RNA, 19 nt, Homo sapiens
  misc_RNA (1)...(19): siRNA sense strand
ccagauccauuuucacuua

SEQ ID NO: 1268134 - RNA, 19 nt, Homo sapiens
  misc_RNA (1)...(19): siRNA sense strand
gaaggaauacuugacaguu

SEQ ID NO: 1268135 - RNA, 19 nt, Homo sapiens
  misc_RNA (1)...(19): siRNA sense strand
aaggaauacuugacaguuu

SEQ ID NO: 1268136 - RNA, 19 nt, Homo sapiens
  misc_RNA (1)...(19): siRNA sense strand
ucagaugacgccuguuaua

SEQ ID NO: 1268137 - RNA, 19 nt, Homo sapiens
  misc_RNA (1)...(19): siRNA sense strand
gaaaacacaccuuuaguga

SEQ ID NO: 1268138 - RNA, 19 nt, Homo sapiens
  misc_RNA (1)...(19): siRNA sense strand
gaugacgccuguuauagag

SEQ ID NO: 1268139 - RNA, 19 nt, Homo sapiens
  misc_RNA (1)...(19): siRNA sense strand
gagaaacauguccauauau

SEQ ID NO: 1268140 - RNA, 19 nt, Homo sapiens
  misc_RNA (1)...(19): siRNA sense strand
ccacuuaccagacuaaauc

SEQ ID NO: 1268141 - RNA, 19 nt, Homo sapiens
  misc_RNA (1)...(19): siRNA sense strand
acgaguagauuauaagugu

SEQ ID NO: 1268142 - RNA, 19 nt, Homo sapiens
  misc_RNA (1)...(19): siRNA sense strand
cuacaaagcaacaguuaug

SEQ ID NO: 1268143 - RNA, 19 nt, Homo sapiens
  misc_RNA (1)...(19): siRNA sense strand
ccaccaacauuugaagcua

SEQ ID NO: 1268144 - RNA, 19 nt, Homo sapiens
  misc_RNA (1)...(19): siRNA sense strand
uauacgggauccuuuaaau

SEQ ID NO: 1268145 - RNA, 19 nt, Homo sapiens
  misc_RNA (1)...(19): siRNA sense strand
cgaguuugguuaucagaug

SEQ ID NO: 1268146 - RNA, 19 nt, Homo sapiens
  misc_RNA (1)...(19): siRNA sense strand
gaacgaguagauuauaagu

SEQ ID NO: 1268147 - RNA, 19 nt, Homo sapiens
  misc_RNA (1)...(19): siRNA sense strand
gugaggagccaccaacauu

SEQ ID NO: 1268148 - RNA, 19 nt, Homo sapiens
  misc_RNA (1)...(19): siRNA sense strand
gauggcagcgacacaauug

SEQ ID NO: 1268149 - RNA, 19 nt, Homo sapiens
  misc_RNA (1)...(19): siRNA sense strand
ucucagaugacgccuguua

SEQ ID NO: 1268150 - RNA, 19 nt, Homo sapiens
  misc_RNA (1)...(19): siRNA sense strand
gaggagccaccaacauuug

SEQ ID NO: 1268151 - RNA, 19 nt, Homo sapiens
  misc_RNA (1)...(19): siRNA sense strand
gcuauggagcucauuggua

SEQ ID NO: 1268152 - RNA, 19 nt, Homo sapiens
  misc_RNA (1)...(19): siRNA sense strand
acacaccuuuagugaagua

SEQ ID NO: 1268153 - RNA, 19 nt, Homo sapiens
  misc_RNA (1)...(19): siRNA sense strand
uagagaaacauguccauau

SEQ ID NO: 1268154 - RNA, 19 nt, Homo sapiens
  misc_RNA (1)...(19): siRNA sense strand
guuccaaagugucuuaaag

SEQ ID NO: 1268155 - RNA, 19 nt, Homo sapiens
  misc_RNA (1)...(19): siRNA sense strand
ggugaacgaguagauuaua

SEQ ID NO: 1268156 - RNA, 19 nt, Homo sapiens
  misc_RNA (1)...(19): siRNA sense strand
gaaguagaaguauuugagu

SEQ ID NO: 1268157 - RNA, 19 nt, Homo sapiens
  misc_RNA (1)...(19): siRNA sense strand
gaaacauguccauauauac

SEQ ID NO: 1268158 - RNA, 19 nt, Homo sapiens
  misc_RNA (1)...(19): siRNA sense strand
ugacgccuguuauagagaa

SEQ ID NO: 1268159 - RNA, 19 nt, Homo sapiens
  misc_RNA (1)...(19): siRNA sense strand
cgaguagauuauaagugua

SEQ ID NO: 1268160 - RNA, 19 nt, Homo sapiens
  misc_RNA (1)...(19): siRNA sense strand
gcacuuuauuuguaaugag

SEQ ID NO: 1268161 - RNA, 19 nt, Homo sapiens
  misc_RNA (1)...(19): siRNA sense strand
guagaaguauuugaguauc

SEQ ID NO: 1268162 - RNA, 19 nt, Homo sapiens
  misc_RNA (1)...(19): siRNA sense strand
guauuugaguaucuugaug

SEQ ID NO: 1268163 - RNA, 19 nt, Homo sapiens
  misc_RNA (1)...(19): siRNA sense strand
aggaauacuugacaguuug

SEQ ID NO: 1268164 - RNA, 19 nt, Homo sapiens
  misc_RNA (1)...(19): siRNA sense strand
ccaaaacccuacuaugaga

SEQ ID NO: 1268165 - RNA, 19 nt, Homo sapiens
  misc_RNA (1)...(19): siRNA sense strand
aguguaaaguggucaaaug

SEQ ID NO: 1268166 - RNA, 19 nt, Homo sapiens
  misc_RNA (1)...(19): siRNA sense strand
ccacccauacuauuuguga

SEQ ID NO: 1268167 - RNA, 19 nt, Homo sapiens
  misc_RNA (1)...(19): siRNA sense strand
uuggagagagcacgauuua

SEQ ID NO: 1268168 - RNA, 19 nt, Homo sapiens
  misc_RNA (1)...(19): siRNA sense strand
gguuaucagaugcacuuua

SEQ ID NO: 1268169 - RNA, 19 nt, Homo sapiens
  misc_RNA (1)...(19): siRNA sense strand
caccaacauuugaagcuau

SEQ ID NO: 1268170 - RNA, 19 nt, Homo sapiens
  misc_RNA (1)...(19): siRNA sense strand
ugaggagccaccaacauuu

SEQ ID NO: 1268171 - RNA, 19 nt, Homo sapiens
  misc_RNA (1)...(19): siRNA sense strand
ggaaggaauacuugacagu

SEQ ID NO: 1268172 - RNA, 19 nt, Homo sapiens
  misc_RNA (1)...(19): siRNA sense strand
gaggaaggaauacuugaca

SEQ ID NO: 1268173 - RNA, 19 nt, Homo sapiens
  misc_RNA (1)...(19): siRNA sense strand
ccaguuccaaagugucuua

SEQ ID NO: 1268174 - RNA, 19 nt, Homo sapiens
  misc_RNA (1)...(19): siRNA sense strand
ugaguaucuugaugcagua

SEQ ID NO: 1268175 - RNA, 19 nt, Homo sapiens
  misc_RNA (1)...(19): siRNA sense strand
caccuuuagugaaguagaa

SEQ ID NO: 1268176 - RNA, 19 nt, Homo sapiens
  misc_RNA (1)...(19): siRNA sense strand
acagauaucaggauuugga

SEQ ID NO: 1268177 - RNA, 19 nt, Homo sapiens
  misc_RNA (1)...(19): siRNA sense strand
ucauugcugugauuguuau

SEQ ID NO: 1268178 - RNA, 19 nt, Homo sapiens
  misc_RNA (1)...(19): siRNA sense strand
ucagaugcacuuuauuugu

SEQ ID NO: 1268179 - RNA, 19 nt, Homo sapiens
  misc_RNA (1)...(19): siRNA sense strand
gugcugcuccagaguguaa

SEQ ID NO: 1268180 - RNA, 19 nt, Homo sapiens
  misc_RNA (1)...(19): siRNA sense strand
ggaaaacacaccuuuagug

SEQ ID NO: 1268181 - RNA, 19 nt, Homo sapiens
  misc_RNA (1)...(19): siRNA sense strand
aaggaucaguagcaauuug

SEQ ID NO: 1268182 - RNA, 19 nt, Homo sapiens
  misc_RNA (1)...(19): siRNA sense strand
uauauacgggauccuuuaa

SEQ ID NO: 1268183 - RNA, 19 nt, Homo sapiens
  misc_RNA (1)...(19): siRNA sense strand
ugaaguagaaguauuugag

SEQ ID NO: 1268184 - RNA, 19 nt, Homo sapiens
  misc_RNA (1)...(19): siRNA sense strand
cuugacaguuuggauguuu

SEQ ID NO: 1268185 - RNA, 19 nt, Homo sapiens
  misc_RNA (1)...(19): siRNA sense strand
cauauauacgggauccuuu

SEQ ID NO: 1268186 - RNA, 19 nt, Homo sapiens
  misc_RNA (1)...(19): siRNA sense strand
auauauacgggauccuuua

SEQ ID NO: 1268187 - RNA, 19 nt, Homo sapiens
  misc_RNA (1)...(19): siRNA sense strand
cuuaaaggaucaguagcaa

SEQ ID NO: 1268188 - RNA, 19 nt, Homo sapiens
  misc_RNA (1)...(19): siRNA sense strand
uaaaccugaggaaggaaua

SEQ ID NO: 1268189 - RNA, 19 nt, Homo sapiens
  misc_RNA (1)...(19): siRNA sense strand
agaugacgccuguuauaga

SEQ ID NO: 1268190 - RNA, 19 nt, Homo sapiens
  misc_RNA (1)...(19): siRNA sense strand
ugugauuguuauugccaua

SEQ ID NO: 1268191 - RNA, 19 nt, Homo sapiens
  misc_RNA (1)...(19): siRNA sense strand
gagagcacgauuuauugug

SEQ ID NO: 1268192 - RNA, 19 nt, Homo sapiens
  misc_RNA (1)...(19): siRNA sense strand
gaaguauuugaguaucuug

SEQ ID NO: 1268193 - RNA, 19 nt, Homo sapiens
  misc_RNA (1)...(19): siRNA sense strand
ggcuaccugucucagauga

SEQ ID NO: 1268194 - RNA, 19 nt, Homo sapiens
  misc_RNA (1)...(19): siRNA sense strand
gauaucaggauuuggaaaa

SEQ ID NO: 1268195 - RNA, 19 nt, Homo sapiens
  misc_RNA (1)...(19): siRNA sense strand
ccucuugccacccauacua

SEQ ID NO: 1268196 - RNA, 19 nt, Homo sapiens
  misc_RNA (1)...(19): siRNA sense strand
ccaugguguugcugcugua

SEQ ID NO: 1268197 - RNA, 19 nt, Homo sapiens
  misc_RNA (1)...(19): siRNA sense strand
cagaugacgccuguuauag

SEQ ID NO: 1268198 - RNA, 19 nt, Homo sapiens
  misc_RNA (1)...(19): siRNA sense strand
cagaugguggagcugaaua

SEQ ID NO: 1268199 - RNA, 19 nt, Homo sapiens
  misc_RNA (1)...(19): siRNA sense strand
gucauugcugugauuguua

SEQ ID NO: 1268200 - RNA, 19 nt, Homo sapiens
  misc_RNA (1)...(19): siRNA sense strand
ggagccaccaacauuugaa

SEQ ID NO: 1268201 - RNA, 19 nt, Homo sapiens
  misc_RNA (1)...(19): siRNA sense strand
uuggugaacgaguagauua

SEQ ID NO: 1268202 - RNA, 19 nt, Homo sapiens
  misc_RNA (1)...(19): siRNA sense strand
gcgcuuuccuggguugcuu

SEQ ID NO: 1268203 - RNA, 19 nt, Homo sapiens
  misc_RNA (1)...(19): siRNA sense strand
uacuacaaagcaacaguua

SEQ ID NO: 1268204 - RNA, 19 nt, Homo sapiens
  misc_RNA (1)...(19): siRNA sense strand
cuugaugcaguaacuuaua

SEQ ID NO: 1268205 - RNA, 19 nt, Homo sapiens
  misc_RNA (1)...(19): siRNA sense strand
aaacauguccauauauacg

SEQ ID NO: 1268206 - RNA, 19 nt, Homo sapiens
  misc_RNA (1)...(19): siRNA sense strand
guguaaaguggucaaaugu

SEQ ID NO: 1268207 - RNA, 19 nt, Homo sapiens
  misc_RNA (1)...(19): siRNA sense strand
cuuacgaguuugguuauca

SEQ ID NO: 1268208 - RNA, 19 nt, Homo sapiens
  misc_RNA (1)...(19): siRNA sense strand
uacgggauccuuuaaaugg

SEQ ID NO: 1268209 - RNA, 19 nt, Homo sapiens
  misc_RNA (1)...(19): siRNA sense strand
gcagaugguggagcugaau

SEQ ID NO: 1268210 - RNA, 19 nt, Homo sapiens
  misc_RNA (1)...(19): siRNA sense strand
aaccaaaacccuacuauga

SEQ ID NO: 1268211 - RNA, 19 nt, Homo sapiens
  misc_RNA (1)...(19): siRNA sense strand
uugaugcaguaacuuauag

SEQ ID NO: 1268212 - RNA, 19 nt, Homo sapiens
  misc_RNA (1)...(19): siRNA sense strand
ggagcugaauaugccacuu

SEQ ID NO: 1268213 - RNA, 19 nt, Homo sapiens
  misc_RNA (1)...(19): siRNA sense strand
cgauggcagcgacacaauu

SEQ ID NO: 1268214 - RNA, 19 nt, Homo sapiens
  misc_RNA (1)...(19): siRNA sense strand
gauccauuuucacuuauug

SEQ ID NO: 1268215 - RNA, 19 nt, Homo sapiens
  misc_RNA (1)...(19): siRNA sense strand
ggagagagcacgauuuauu

SEQ ID NO: 1268216 - RNA, 19 nt, Homo sapiens
  misc_RNA (1)...(19): siRNA sense strand
agagaaacauguccauaua

SEQ ID NO: 1268217 - RNA, 19 nt, Homo sapiens
  misc_RNA (1)...(19): siRNA sense strand
cagaugcacuuuauuugua

SEQ ID NO: 1268218 - RNA, 19 nt, Homo sapiens
  misc_RNA (1)...(19): siRNA sense strand
ggacuuacgaguuugguua

SEQ ID NO: 1268219 - RNA, 19 nt, Homo sapiens
  misc_RNA (1)...(19): siRNA sense strand
aaacagauaucaggauuug

SEQ ID NO: 1268220 - RNA, 19 nt, Homo sapiens
  misc_RNA (1)...(19): siRNA sense strand
cuauggagcucauugguaa

SEQ ID NO: 1268221 - RNA, 19 nt, Homo sapiens
  misc_RNA (1)...(19): siRNA sense strand
aaacacaccuuuagugaag

SEQ ID NO: 1268222 - RNA, 19 nt, Homo sapiens
  misc_RNA (1)...(19): siRNA sense strand
gaacuuaaaggaucaguag

SEQ ID NO: 1268223 - RNA, 19 nt, Homo sapiens
  misc_RNA (1)...(19): siRNA sense strand
gaaaacagauaucaggauu

SEQ ID NO: 1268224 - RNA, 19 nt, Homo sapiens
  misc_RNA (1)...(19): siRNA sense strand
uaaaggaucaguagcaauu

SEQ ID NO: 1268225 - RNA, 19 nt, Homo sapiens
  misc_RNA (1)...(19): siRNA sense strand
aaaugggacuuacgaguuu

SEQ ID NO: 1268226 - RNA, 19 nt, Homo sapiens
  misc_RNA (1)...(19): siRNA sense strand
guuaucagaugcacuuuau

SEQ ID NO: 1268227 - RNA, 19 nt, Homo sapiens
  misc_RNA (1)...(19): siRNA sense strand
ugagauuggugaacgagua

SEQ ID NO: 1268228 - RNA, 19 nt, Homo sapiens
  misc_RNA (1)...(19): siRNA sense strand
gugaacgaguagauuauaa

SEQ ID NO: 1268229 - RNA, 19 nt, Homo sapiens
  misc_RNA (1)...(19): siRNA sense strand
gagagagcacgauuuauug

SEQ ID NO: 1268230 - RNA, 19 nt, Homo sapiens
  misc_RNA (1)...(19): siRNA sense strand
caaaugggacuuacgaguu

SEQ ID NO: 1268231 - RNA, 19 nt, Homo sapiens
  misc_RNA (1)...(19): siRNA sense strand
ggucauugcugugauuguu

SEQ ID NO: 1268232 - RNA, 19 nt, Homo sapiens
  misc_RNA (1)...(19): siRNA sense strand
ccagauccauuuucacuua

SEQ ID NO: 1268233 - RNA, 19 nt, Homo sapiens
  misc_RNA (1)...(19): siRNA sense strand
gaaggaauacuugacaguu

SEQ ID NO: 1268234 - RNA, 19 nt, Homo sapiens
  misc_RNA (1)...(19): siRNA sense strand
aaggaauacuugacaguuu

SEQ ID NO: 1268235 - RNA, 19 nt, Homo sapiens
  misc_RNA (1)...(19): siRNA sense strand
ucagaugacgccuguuaua

SEQ ID NO: 1268236 - RNA, 19 nt, Homo sapiens
  misc_RNA (1)...(19): siRNA sense strand
gaaaacacaccuuuaguga

SEQ ID NO: 1268237 - RNA, 19 nt, Homo sapiens
  misc_RNA (1)...(19): siRNA sense strand
gaugacgccuguuauagag

SEQ ID NO: 1268238 - RNA, 19 nt, Homo sapiens
  misc_RNA (1)...(19): siRNA sense strand
gagaaacauguccauauau

SEQ ID NO: 1268239 - RNA, 19 nt, Homo sapiens
  misc_RNA (1)...(19): siRNA sense strand
acgaguagauuauaagugu

SEQ ID NO: 1268240 - RNA, 19 nt, Homo sapiens
  misc_RNA (1)...(19): siRNA sense strand
cuacaaagcaacaguuaug

SEQ ID NO: 1268241 - RNA, 19 nt, Homo sapiens
  misc_RNA (1)...(19): siRNA sense strand
ccaccaacauuugaagcua

SEQ ID NO: 1268242 - RNA, 19 nt, Homo sapiens
  misc_RNA (1)...(19): siRNA sense strand
uauacgggauccuuuaaau

SEQ ID NO: 1268243 - RNA, 19 nt, Homo sapiens
  misc_RNA (1)...(19): siRNA sense strand
cgaguuugguuaucagaug

SEQ ID NO: 1268244 - RNA, 19 nt, Homo sapiens
  misc_RNA (1)...(19): siRNA sense strand
gaacgaguagauuauaagu

SEQ ID NO: 1268245 - RNA, 19 nt, Homo sapiens
  misc_RNA (1)...(19): siRNA sense strand
gugaggagccaccaacauu

SEQ ID NO: 1268246 - RNA, 19 nt, Homo sapiens
  misc_RNA (1)...(19): siRNA sense strand
gauggcagcgacacaauug

SEQ ID NO: 1268247 - RNA, 19 nt, Homo sapiens
  misc_RNA (1)...(19): siRNA sense strand
gcuauggagcucauuggua

SEQ ID NO: 1268248 - RNA, 19 nt, Homo sapiens
  misc_RNA (1)...(19): siRNA sense strand
gaggagccaccaacauuug

SEQ ID NO: 1268249 - RNA, 19 nt, Homo sapiens
  misc_RNA (1)...(19): siRNA sense strand
acacaccuuuagugaagua

SEQ ID NO: 1268250 - RNA, 19 nt, Homo sapiens
  misc_RNA (1)...(19): siRNA sense strand
ucucagaugacgccuguua

SEQ ID NO: 1268251 - RNA, 19 nt, Homo sapiens
  misc_RNA (1)...(19): siRNA sense strand
uagagaaacauguccauau

SEQ ID NO: 1268252 - RNA, 19 nt, Homo sapiens
  misc_RNA (1)...(19): siRNA sense strand
guuccaaagugucuuaaag

SEQ ID NO: 1268253 - RNA, 19 nt, Homo sapiens
  misc_RNA (1)...(19): siRNA sense strand
ggugaacgaguagauuaua

SEQ ID NO: 1268254 - RNA, 19 nt, Homo sapiens
  misc_RNA (1)...(19): siRNA sense strand
gaaguagaaguauuugagu

SEQ ID NO: 1268255 - RNA, 19 nt, Homo sapiens
  misc_RNA (1)...(19): siRNA sense strand
gaaacauguccauauauac

SEQ ID NO: 1268256 - RNA, 19 nt, Homo sapiens
  misc_RNA (1)...(19): siRNA sense strand
ugacgccuguuauagagaa

SEQ ID NO: 1268257 - RNA, 19 nt, Homo sapiens
  misc_RNA (1)...(19): siRNA sense strand
cgaguagauuauaagugua

SEQ ID NO: 1268258 - RNA, 19 nt, Homo sapiens
  misc_RNA (1)...(19): siRNA sense strand
gcacuuuauuuguaaugag

SEQ ID NO: 1268259 - RNA, 19 nt, Homo sapiens
  misc_RNA (1)...(19): siRNA sense strand
guagaaguauuugaguauc

SEQ ID NO: 1268260 - RNA, 19 nt, Homo sapiens
  misc_RNA (1)...(19): siRNA sense strand
guauuugaguaucuugaug

SEQ ID NO: 1268261 - RNA, 19 nt, Homo sapiens
  misc_RNA (1)...(19): siRNA sense strand
aggaauacuugacaguuug

SEQ ID NO: 1268262 - RNA, 19 nt, Homo sapiens
  misc_RNA (1)...(19): siRNA sense strand
ccaaaacccuacuaugaga

SEQ ID NO: 1268263 - RNA, 19 nt, Homo sapiens
  misc_RNA (1)...(19): siRNA sense strand
aguguaaaguggucaaaug

SEQ ID NO: 1268264 - RNA, 19 nt, Homo sapiens
  misc_RNA (1)...(19): siRNA sense strand
ccacccauacuauuuguga

SEQ ID NO: 1268265 - RNA, 19 nt, Homo sapiens
  misc_RNA (1)...(19): siRNA sense strand
caccaacauuugaagcuau

SEQ ID NO: 1268266 - RNA, 19 nt, Homo sapiens
  misc_RNA (1)...(19): siRNA sense strand
uuggagagagcacgauuua

SEQ ID NO: 1268267 - RNA, 19 nt, Homo sapiens
  misc_RNA (1)...(19): siRNA sense strand
gguuaucagaugcacuuua

SEQ ID NO: 1268268 - RNA, 19 nt, Homo sapiens
  misc_RNA (1)...(19): siRNA sense strand
ugaggagccaccaacauuu

SEQ ID NO: 1268269 - RNA, 19 nt, Homo sapiens
  misc_RNA (1)...(19): siRNA sense strand
ggaaggaauacuugacagu

SEQ ID NO: 1268270 - RNA, 19 nt, Homo sapiens
  misc_RNA (1)...(19): siRNA sense strand
gaggaaggaauacuugaca

SEQ ID NO: 1268271 - RNA, 19 nt, Homo sapiens
  misc_RNA (1)...(19): siRNA sense strand
ccaguuccaaagugucuua

SEQ ID NO: 1268272 - RNA, 19 nt, Homo sapiens
  misc_RNA (1)...(19): siRNA sense strand
ugaguaucuugaugcagua

SEQ ID NO: 1268273 - RNA, 19 nt, Homo sapiens
  misc_RNA (1)...(19): siRNA sense strand
caccuuuagugaaguagaa

SEQ ID NO: 1268274 - RNA, 19 nt, Homo sapiens
  misc_RNA (1)...(19): siRNA sense strand
acagauaucaggauuugga

SEQ ID NO: 1268275 - RNA, 19 nt, Homo sapiens
  misc_RNA (1)...(19): siRNA sense strand
ucauugcugugauuguuau

SEQ ID NO: 1268276 - RNA, 19 nt, Homo sapiens
  misc_RNA (1)...(19): siRNA sense strand
ucagaugcacuuuauuugu

SEQ ID NO: 1268277 - RNA, 19 nt, Homo sapiens
  misc_RNA (1)...(19): siRNA sense strand
gugcugcuccagaguguaa

SEQ ID NO: 1268278 - RNA, 19 nt, Homo sapiens
  misc_RNA (1)...(19): siRNA sense strand
ggaaaacacaccuuuagug

SEQ ID NO: 1268279 - RNA, 19 nt, Homo sapiens
  misc_RNA (1)...(19): siRNA sense strand
aaggaucaguagcaauuug

SEQ ID NO: 1268280 - RNA, 19 nt, Homo sapiens
  misc_RNA (1)...(19): siRNA sense strand
uauauacgggauccuuuaa

SEQ ID NO: 1268281 - RNA, 19 nt, Homo sapiens
  misc_RNA (1)...(19): siRNA sense strand
ugaaguagaaguauuugag

SEQ ID NO: 1268282 - RNA, 19 nt, Homo sapiens
  misc_RNA (1)...(19): siRNA sense strand
cuugacaguuuggauguuu

SEQ ID NO: 1268283 - RNA, 19 nt, Homo sapiens
  misc_RNA (1)...(19): siRNA sense strand
cauauauacgggauccuuu

SEQ ID NO: 1268284 - RNA, 19 nt, Homo sapiens
  misc_RNA (1)...(19): siRNA sense strand
auauauacgggauccuuua

SEQ ID NO: 1268285 - RNA, 19 nt, Homo sapiens
  misc_RNA (1)...(19): siRNA sense strand
cuuaaaggaucaguagcaa

SEQ ID NO: 1268286 - RNA, 19 nt, Homo sapiens
  misc_RNA (1)...(19): siRNA sense strand
uaaaccugaggaaggaaua

SEQ ID NO: 1268287 - RNA, 19 nt, Homo sapiens
  misc_RNA (1)...(19): siRNA sense strand
agaugacgccuguuauaga

SEQ ID NO: 1268288 - RNA, 19 nt, Homo sapiens
  misc_RNA (1)...(19): siRNA sense strand
ugugauuguuauugccaua

SEQ ID NO: 1268289 - RNA, 19 nt, Homo sapiens
  misc_RNA (1)...(19): siRNA sense strand
gagagcacgauuuauugug

SEQ ID NO: 1268290 - RNA, 19 nt, Homo sapiens
  misc_RNA (1)...(19): siRNA sense strand
gaaguauuugaguaucuug

SEQ ID NO: 1268291 - RNA, 19 nt, Homo sapiens
  misc_RNA (1)...(19): siRNA sense strand
ggcuaccugucucagauga

SEQ ID NO: 1268292 - RNA, 19 nt, Homo sapiens
  misc_RNA (1)...(19): siRNA sense strand
gauaucaggauuuggaaaa

SEQ ID NO: 1268293 - RNA, 19 nt, Homo sapiens
  misc_RNA (1)...(19): siRNA sense strand
ccucuugccacccauacua

SEQ ID NO: 1268294 - RNA, 19 nt, Homo sapiens
  misc_RNA (1)...(19): siRNA sense strand
ccaugguguugcugcugua

SEQ ID NO: 1268295 - RNA, 19 nt, Homo sapiens
  misc_RNA (1)...(19): siRNA sense strand
cagaugacgccuguuauag

SEQ ID NO: 1268296 - RNA, 19 nt, Homo sapiens
  misc_RNA (1)...(19): siRNA sense strand
uuggugaacgaguagauua

SEQ ID NO: 1268297 - RNA, 19 nt, Homo sapiens
  misc_RNA (1)...(19): siRNA sense strand
gucauugcugugauuguua

SEQ ID NO: 1268298 - RNA, 19 nt, Homo sapiens
  misc_RNA (1)...(19): siRNA sense strand
ggagccaccaacauuugaa

SEQ ID NO: 1268299 - RNA, 19 nt, Homo sapiens
  misc_RNA (1)...(19): siRNA sense strand
gcgcuuuccuggguugcuu

SEQ ID NO: 1268300 - RNA, 19 nt, Homo sapiens
  misc_RNA (1)...(19): siRNA sense strand
uacuacaaagcaacaguua

SEQ ID NO: 1268301 - RNA, 19 nt, Homo sapiens
  misc_RNA (1)...(19): siRNA sense strand
cuugaugcaguaacuuaua

SEQ ID NO: 1268302 - RNA, 19 nt, Homo sapiens
  misc_RNA (1)...(19): siRNA sense strand
aaacauguccauauauacg

SEQ ID NO: 1268303 - RNA, 19 nt, Homo sapiens
  misc_RNA (1)...(19): siRNA sense strand
guguaaaguggucaaaugu

SEQ ID NO: 1268304 - RNA, 19 nt, Homo sapiens
  misc_RNA (1)...(19): siRNA sense strand
cuuacgaguuugguuauca

SEQ ID NO: 1268305 - RNA, 19 nt, Homo sapiens
  misc_RNA (1)...(19): siRNA sense strand
uacgggauccuuuaaaugg

SEQ ID NO: 1268306 - RNA, 19 nt, Homo sapiens
  misc_RNA (1)...(19): siRNA sense strand
aaccaaaacccuacuauga

SEQ ID NO: 1268307 - RNA, 19 nt, Homo sapiens
  misc_RNA (1)...(19): siRNA sense strand
cccaauaugugaaaagguu

SEQ ID NO: 1268308 - RNA, 19 nt, Homo sapiens
  misc_RNA (1)...(19): siRNA sense strand
cgauggcagcgacacaauu

SEQ ID NO: 1268309 - RNA, 19 nt, Homo sapiens
  misc_RNA (1)...(19): siRNA sense strand
gauccauuuucacuuauug

SEQ ID NO: 1268310 - RNA, 19 nt, Homo sapiens
  misc_RNA (1)...(19): siRNA sense strand
uugaugcaguaacuuauag

SEQ ID NO: 1268311 - RNA, 19 nt, Homo sapiens
  misc_RNA (1)...(19): siRNA sense strand
guaucuugaugcaguaacu

SEQ ID NO: 1268312 - RNA, 19 nt, Homo sapiens
  misc_RNA (1)...(19): siRNA sense strand
caacauuugaagcuaugga

SEQ ID NO: 1268313 - RNA, 19 nt, Homo sapiens
  misc_RNA (1)...(19): siRNA sense strand
gagauuggugaacgaguag

SEQ ID NO: 1268314 - RNA, 19 nt, Homo sapiens
  misc_RNA (1)...(19): siRNA sense strand
ggagagagcacgauuuauu

SEQ ID NO: 1268315 - RNA, 19 nt, Homo sapiens
  misc_RNA (1)...(19): siRNA sense strand
agagaaacauguccauaua

SEQ ID NO: 1268316 - RNA, 19 nt, Homo sapiens
  misc_RNA (1)...(19): siRNA sense strand
cagaugcacuuuauuugua

SEQ ID NO: 1268317 - RNA, 19 nt, Homo sapiens
  misc_RNA (1)...(19): siRNA sense strand
ggacuuacgaguuugguua

SEQ ID NO: 1268318 - RNA, 19 nt, Homo sapiens
  misc_RNA (1)...(19): siRNA sense strand
aaacagauaucaggauuug

SEQ ID NO: 1268319 - RNA, 19 nt, Homo sapiens
  misc_RNA (1)...(19): siRNA sense strand
cuauggagcucauugguaa

SEQ ID NO: 1268320 - RNA, 19 nt, Homo sapiens
  misc_RNA (1)...(19): siRNA sense strand
aaacacaccuuuagugaag

SEQ ID NO: 1268321 - RNA, 19 nt, Homo sapiens
  misc_RNA (1)...(19): siRNA sense strand
gaacuuaaaggaucaguag

SEQ ID NO: 1268322 - RNA, 19 nt, Homo sapiens
  misc_RNA (1)...(19): siRNA sense strand
gaaaacagauaucaggauu

SEQ ID NO: 1268323 - RNA, 19 nt, Homo sapiens
  misc_RNA (1)...(19): siRNA sense strand
uaaaggaucaguagcaauu

SEQ ID NO: 1268324 - RNA, 19 nt, Homo sapiens
  misc_RNA (1)...(19): siRNA sense strand
aaaugggacuuacgaguuu

SEQ ID NO: 1268325 - RNA, 19 nt, Homo sapiens
  misc_RNA (1)...(19): siRNA sense strand
guuaucagaugcacuuuau

SEQ ID NO: 1268326 - RNA, 19 nt, Homo sapiens
  misc_RNA (1)...(19): siRNA sense strand
ugagauuggugaacgagua

SEQ ID NO: 1268327 - RNA, 19 nt, Homo sapiens
  misc_RNA (1)...(19): siRNA sense strand
gugaacgaguagauuauaa

SEQ ID NO: 1268328 - RNA, 19 nt, Homo sapiens
  misc_RNA (1)...(19): siRNA sense strand
gagagagcacgauuuauug

SEQ ID NO: 1268329 - RNA, 19 nt, Homo sapiens
  misc_RNA (1)...(19): siRNA sense strand
caaaugggacuuacgaguu

SEQ ID NO: 1268330 - RNA, 19 nt, Homo sapiens
  misc_RNA (1)...(19): siRNA sense strand
ggucauugcugugauuguu

SEQ ID NO: 1268331 - RNA, 19 nt, Homo sapiens
  misc_RNA (1)...(19): siRNA sense strand
ccagauccauuuucacuua

SEQ ID NO: 1268332 - RNA, 19 nt, Homo sapiens
  misc_RNA (1)...(19): siRNA sense strand
gaaggaauacuugacaguu

SEQ ID NO: 1268333 - RNA, 19 nt, Homo sapiens
  misc_RNA (1)...(19): siRNA sense strand
aaggaauacuugacaguuu

SEQ ID NO: 1268334 - RNA, 19 nt, Homo sapiens
  misc_RNA (1)...(19): siRNA sense strand
ucagaugacgccuguuaua

SEQ ID NO: 1268335 - RNA, 19 nt, Homo sapiens
  misc_RNA (1)...(19): siRNA sense strand
gaaaacacaccuuuaguga

SEQ ID NO: 1268336 - RNA, 19 nt, Homo sapiens
  misc_RNA (1)...(19): siRNA sense strand
gaugacgccuguuauagag

SEQ ID NO: 1268337 - RNA, 19 nt, Homo sapiens
  misc_RNA (1)...(19): siRNA sense strand
gagaaacauguccauauau

SEQ ID NO: 1268338 - RNA, 19 nt, Homo sapiens
  misc_RNA (1)...(19): siRNA sense strand
acgaguagauuauaagugu

SEQ ID NO: 1268339 - RNA, 19 nt, Homo sapiens
  misc_RNA (1)...(19): siRNA sense strand
cuacaaagcaacaguuaug

SEQ ID NO: 1268340 - RNA, 19 nt, Homo sapiens
  misc_RNA (1)...(19): siRNA sense strand
ccaccaacauuugaagcua

SEQ ID NO: 1268341 - RNA, 19 nt, Homo sapiens
  misc_RNA (1)...(19): siRNA sense strand
uauacgggauccuuuaaau

SEQ ID NO: 1268342 - RNA, 19 nt, Homo sapiens
  misc_RNA (1)...(19): siRNA sense strand
cgaguuugguuaucagaug

SEQ ID NO: 1268343 - RNA, 19 nt, Homo sapiens
  misc_RNA (1)...(19): siRNA sense strand
gaacgaguagauuauaagu

SEQ ID NO: 1268344 - RNA, 19 nt, Homo sapiens
  misc_RNA (1)...(19): siRNA sense strand
gugaggagccaccaacauu

SEQ ID NO: 1268345 - RNA, 19 nt, Homo sapiens
  misc_RNA (1)...(19): siRNA sense strand
gauggcagcgacacaauug

SEQ ID NO: 1268346 - RNA, 19 nt, Homo sapiens
  misc_RNA (1)...(19): siRNA sense strand
gcuauggagcucauuggua

SEQ ID NO: 1268347 - RNA, 19 nt, Homo sapiens
  misc_RNA (1)...(19): siRNA sense strand
gaggagccaccaacauuug

SEQ ID NO: 1268348 - RNA, 19 nt, Homo sapiens
  misc_RNA (1)...(19): siRNA sense strand
acacaccuuuagugaagua

SEQ ID NO: 1268349 - RNA, 19 nt, Homo sapiens
  misc_RNA (1)...(19): siRNA sense strand
ucucagaugacgccuguua

SEQ ID NO: 1268350 - RNA, 19 nt, Homo sapiens
  misc_RNA (1)...(19): siRNA sense strand
uagagaaacauguccauau

SEQ ID NO: 1268351 - RNA, 19 nt, Homo sapiens
  misc_RNA (1)...(19): siRNA sense strand
ggugaacgaguagauuaua

SEQ ID NO: 1268352 - RNA, 19 nt, Homo sapiens
  misc_RNA (1)...(19): siRNA sense strand
gaaguagaaguauuugagu

SEQ ID NO: 1268353 - RNA, 19 nt, Homo sapiens
  misc_RNA (1)...(19): siRNA sense strand
gaaacauguccauauauac

SEQ ID NO: 1268354 - RNA, 19 nt, Homo sapiens
  misc_RNA (1)...(19): siRNA sense strand
ugacgccuguuauagagaa

SEQ ID NO: 1268355 - RNA, 19 nt, Homo sapiens
  misc_RNA (1)...(19): siRNA sense strand
cgaguagauuauaagugua

SEQ ID NO: 1268356 - RNA, 19 nt, Homo sapiens
  misc_RNA (1)...(19): siRNA sense strand
gcacuuuauuuguaaugag

SEQ ID NO: 1268357 - RNA, 19 nt, Homo sapiens
  misc_RNA (1)...(19): siRNA sense strand
guagaaguauuugaguauc

SEQ ID NO: 1268358 - RNA, 19 nt, Homo sapiens
  misc_RNA (1)...(19): siRNA sense strand
guauuugaguaucuugaug

SEQ ID NO: 1268359 - RNA, 19 nt, Homo sapiens
  misc_RNA (1)...(19): siRNA sense strand
aggaauacuugacaguuug

SEQ ID NO: 1268360 - RNA, 19 nt, Homo sapiens
  misc_RNA (1)...(19): siRNA sense strand
aguguaaaguggucaaaug

SEQ ID NO: 1268361 - RNA, 19 nt, Homo sapiens
  misc_RNA (1)...(19): siRNA sense strand
ccaaaacccuacuaugaga

SEQ ID NO: 1268362 - RNA, 19 nt, Homo sapiens
  misc_RNA (1)...(19): siRNA sense strand
ccacccauacuauuuguga

SEQ ID NO: 1268363 - RNA, 19 nt, Homo sapiens
  misc_RNA (1)...(19): siRNA sense strand
caccaacauuugaagcuau

SEQ ID NO: 1268364 - RNA, 19 nt, Homo sapiens
  misc_RNA (1)...(19): siRNA sense strand
uuggagagagcacgauuua

SEQ ID NO: 1268365 - RNA, 19 nt, Homo sapiens
  misc_RNA (1)...(19): siRNA sense strand
gguuaucagaugcacuuua

SEQ ID NO: 1268366 - RNA, 19 nt, Homo sapiens
  misc_RNA (1)...(19): siRNA sense strand
ugaggagccaccaacauuu

SEQ ID NO: 1268367 - RNA, 19 nt, Homo sapiens
  misc_RNA (1)...(19): siRNA sense strand
ggaaggaauacuugacagu

SEQ ID NO: 1268368 - RNA, 19 nt, Homo sapiens
  misc_RNA (1)...(19): siRNA sense strand
gaggaaggaauacuugaca

SEQ ID NO: 1268369 - RNA, 19 nt, Homo sapiens
  misc_RNA (1)...(19): siRNA sense strand
ugaguaucuugaugcagua

SEQ ID NO: 1268370 - RNA, 19 nt, Homo sapiens
  misc_RNA (1)...(19): siRNA sense strand
caccuuuagugaaguagaa

SEQ ID NO: 1268371 - RNA, 19 nt, Homo sapiens
  misc_RNA (1)...(19): siRNA sense strand
acagauaucaggauuugga

SEQ ID NO: 1268372 - RNA, 19 nt, Homo sapiens
  misc_RNA (1)...(19): siRNA sense strand
ucauugcugugauuguuau

SEQ ID NO: 1268373 - RNA, 19 nt, Homo sapiens
  misc_RNA (1)...(19): siRNA sense strand
ucagaugcacuuuauuugu

SEQ ID NO: 1268374 - RNA, 19 nt, Homo sapiens
  misc_RNA (1)...(19): siRNA sense strand
gugcugcuccagaguguaa

SEQ ID NO: 1268375 - RNA, 19 nt, Homo sapiens
  misc_RNA (1)...(19): siRNA sense strand
ggaaaacacaccuuuagug

SEQ ID NO: 1268376 - RNA, 19 nt, Homo sapiens
  misc_RNA (1)...(19): siRNA sense strand
aaggaucaguagcaauuug

SEQ ID NO: 1268377 - RNA, 19 nt, Homo sapiens
  misc_RNA (1)...(19): siRNA sense strand
uauauacgggauccuuuaa

SEQ ID NO: 1268378 - RNA, 19 nt, Homo sapiens
  misc_RNA (1)...(19): siRNA sense strand
ugaaguagaaguauuugag

SEQ ID NO: 1268379 - RNA, 19 nt, Homo sapiens
  misc_RNA (1)...(19): siRNA sense strand
cuugacaguuuggauguuu

SEQ ID NO: 1268380 - RNA, 19 nt, Homo sapiens
  misc_RNA (1)...(19): siRNA sense strand
cauauauacgggauccuuu

SEQ ID NO: 1268381 - RNA, 19 nt, Homo sapiens
  misc_RNA (1)...(19): siRNA sense strand
auauauacgggauccuuua

SEQ ID NO: 1268382 - RNA, 19 nt, Homo sapiens
  misc_RNA (1)...(19): siRNA sense strand
cuuaaaggaucaguagcaa

SEQ ID NO: 1268383 - RNA, 19 nt, Homo sapiens
  misc_RNA (1)...(19): siRNA sense strand
uaaaccugaggaaggaaua

SEQ ID NO: 1268384 - RNA, 19 nt, Homo sapiens
  misc_RNA (1)...(19): siRNA sense strand
agaugacgccuguuauaga

SEQ ID NO: 1268385 - RNA, 19 nt, Homo sapiens
  misc_RNA (1)...(19): siRNA sense strand
ugugauuguuauugccaua

SEQ ID NO: 1268386 - RNA, 19 nt, Homo sapiens
  misc_RNA (1)...(19): siRNA sense strand
gagagcacgauuuauugug

SEQ ID NO: 1268387 - RNA, 19 nt, Homo sapiens
  misc_RNA (1)...(19): siRNA sense strand
gaaguauuugaguaucuug

SEQ ID NO: 1268388 - RNA, 19 nt, Homo sapiens
  misc_RNA (1)...(19): siRNA sense strand
ccucuugccacccauacua

SEQ ID NO: 1268389 - RNA, 19 nt, Homo sapiens
  misc_RNA (1)...(19): siRNA sense strand
gauaucaggauuuggaaaa

SEQ ID NO: 1268390 - RNA, 19 nt, Homo sapiens
  misc_RNA (1)...(19): siRNA sense strand
ggcuaccugucucagauga

SEQ ID NO: 1268391 - RNA, 19 nt, Homo sapiens
  misc_RNA (1)...(19): siRNA sense strand
ccaugguguugcugcugua

SEQ ID NO: 1268392 - RNA, 19 nt, Homo sapiens
  misc_RNA (1)...(19): siRNA sense strand
cagaugacgccuguuauag

SEQ ID NO: 1268393 - RNA, 19 nt, Homo sapiens
  misc_RNA (1)...(19): siRNA sense strand
gucauugcugugauuguua

SEQ ID NO: 1268394 - RNA, 19 nt, Homo sapiens
  misc_RNA (1)...(19): siRNA sense strand
uuggugaacgaguagauua

SEQ ID NO: 1268395 - RNA, 19 nt, Homo sapiens
  misc_RNA (1)...(19): siRNA sense strand
ggagccaccaacauuugaa

SEQ ID NO: 1268396 - RNA, 19 nt, Homo sapiens
  misc_RNA (1)...(19): siRNA sense strand
gcgcuuuccuggguugcuu

SEQ ID NO: 1268397 - RNA, 19 nt, Homo sapiens
  misc_RNA (1)...(19): siRNA sense strand
uacuacaaagcaacaguua

SEQ ID NO: 1268398 - RNA, 19 nt, Homo sapiens
  misc_RNA (1)...(19): siRNA sense strand
cuugaugcaguaacuuaua

SEQ ID NO: 1268399 - RNA, 19 nt, Homo sapiens
  misc_RNA (1)...(19): siRNA sense strand
aaacauguccauauauacg

SEQ ID NO: 1268400 - RNA, 19 nt, Homo sapiens
  misc_RNA (1)...(19): siRNA sense strand
guguaaaguggucaaaugu

SEQ ID NO: 1268401 - RNA, 19 nt, Homo sapiens
  misc_RNA (1)...(19): siRNA sense strand
cuuacgaguuugguuauca

SEQ ID NO: 1268402 - RNA, 19 nt, Homo sapiens
  misc_RNA (1)...(19): siRNA sense strand
uacgggauccuuuaaaugg

SEQ ID NO: 1268403 - RNA, 19 nt, Homo sapiens
  misc_RNA (1)...(19): siRNA sense strand
aaccaaaacccuacuauga

SEQ ID NO: 1268404 - RNA, 19 nt, Homo sapiens
  misc_RNA (1)...(19): siRNA sense strand
cccaauaugugaaaagguu

SEQ ID NO: 1268405 - RNA, 19 nt, Homo sapiens
  misc_RNA (1)...(19): siRNA sense strand
cgauggcagcgacacaauu

SEQ ID NO: 1268406 - RNA, 19 nt, Homo sapiens
  misc_RNA (1)...(19): siRNA sense strand
gauccauuuucacuuauug

SEQ ID NO: 1268407 - RNA, 19 nt, Homo sapiens
  misc_RNA (1)...(19): siRNA sense strand
uugaugcaguaacuuauag

SEQ ID NO: 1268408 - RNA, 19 nt, Homo sapiens
  misc_RNA (1)...(19): siRNA sense strand
guaucuugaugcaguaacu

SEQ ID NO: 1268409 - RNA, 19 nt, Homo sapiens
  misc_RNA (1)...(19): siRNA sense strand
caacauuugaagcuaugga

SEQ ID NO: 1268410 - RNA, 19 nt, Homo sapiens
  misc_RNA (1)...(19): siRNA sense strand
gagauuggugaacgaguag

SEQ ID NO: 1268411 - RNA, 19 nt, Homo sapiens
  misc_RNA (1)...(19): siRNA sense strand
ggagagagcacgauuuauu

SEQ ID NO: 1268412 - RNA, 19 nt, Homo sapiens
  misc_RNA (1)...(19): siRNA sense strand
agagaaacauguccauaua

SEQ ID NO: 1268413 - RNA, 19 nt, Homo sapiens
  misc_RNA (1)...(19): siRNA sense strand
cagaugcacuuuauuugua

SEQ ID NO: 1268414 - RNA, 19 nt, Homo sapiens
  misc_RNA (1)...(19): siRNA sense strand
ggacuuacgaguuugguua

SEQ ID NO: 1268415 - RNA, 19 nt, Homo sapiens
  misc_RNA (1)...(19): siRNA sense strand
aaacagauaucaggauuug

SEQ ID NO: 1268416 - RNA, 19 nt, Homo sapiens
  misc_RNA (1)...(19): siRNA sense strand
cuauggagcucauugguaa

SEQ ID NO: 1268417 - RNA, 19 nt, Homo sapiens
  misc_RNA (1)...(19): siRNA sense strand
aaacacaccuuuagugaag

SEQ ID NO: 1268418 - RNA, 19 nt, Homo sapiens
  misc_RNA (1)...(19): siRNA sense strand
gaacuuaaaggaucaguag

SEQ ID NO: 1268419 - RNA, 19 nt, Homo sapiens
  misc_RNA (1)...(19): siRNA sense strand
gaaaacagauaucaggauu

SEQ ID NO: 1268420 - RNA, 19 nt, Homo sapiens
  misc_RNA (1)...(19): siRNA sense strand
uaaaggaucaguagcaauu

SEQ ID NO: 1268421 - RNA, 19 nt, Homo sapiens
  misc_RNA (1)...(19): siRNA sense strand
aaaugggacuuacgaguuu

SEQ ID NO: 1268422 - RNA, 19 nt, Homo sapiens
  misc_RNA (1)...(19): siRNA sense strand
guuaucagaugcacuuuau

SEQ ID NO: 1268423 - RNA, 19 nt, Homo sapiens
  misc_RNA (1)...(19): siRNA sense strand
gagcugaauaugccacuua

SEQ ID NO: 1268424 - RNA, 19 nt, Homo sapiens
  misc_RNA (1)...(19): siRNA sense strand
ugagauuggugaacgagua

SEQ ID NO: 1268425 - RNA, 19 nt, Homo sapiens
  misc_RNA (1)...(19): siRNA sense strand
gugaacgaguagauuauaa

SEQ ID NO: 1268426 - RNA, 19 nt, Homo sapiens
  misc_RNA (1)...(19): siRNA sense strand
gagagagcacgauuuauug

SEQ ID NO: 1268427 - RNA, 19 nt, Homo sapiens
  misc_RNA (1)...(19): siRNA sense strand
caaaugggacuuacgaguu

SEQ ID NO: 1268428 - RNA, 19 nt, Homo sapiens
  misc_RNA (1)...(19): siRNA sense strand
ggucauugcugugauuguu

SEQ ID NO: 1268429 - RNA, 19 nt, Homo sapiens
  misc_RNA (1)...(19): siRNA sense strand
ccagauccauuuucacuua

SEQ ID NO: 1268430 - RNA, 19 nt, Homo sapiens
  misc_RNA (1)...(19): siRNA sense strand
gaaggaauacuugacaguu

SEQ ID NO: 1268431 - RNA, 19 nt, Homo sapiens
  misc_RNA (1)...(19): siRNA sense strand
aaggaauacuugacaguuu

SEQ ID NO: 1268432 - RNA, 19 nt, Homo sapiens
  misc_RNA (1)...(19): siRNA sense strand
ucagaugacgccuguuaua

SEQ ID NO: 1268433 - RNA, 19 nt, Homo sapiens
  misc_RNA (1)...(19): siRNA sense strand
gaaaacacaccuuuaguga

SEQ ID NO: 1268434 - RNA, 19 nt, Homo sapiens
  misc_RNA (1)...(19): siRNA sense strand
gaugacgccuguuauagag

SEQ ID NO: 1268435 - RNA, 19 nt, Homo sapiens
  misc_RNA (1)...(19): siRNA sense strand
gagaaacauguccauauau

SEQ ID NO: 1268436 - RNA, 19 nt, Homo sapiens
  misc_RNA (1)...(19): siRNA sense strand
ccacuuaccagacuaaauc

SEQ ID NO: 1268437 - RNA, 19 nt, Homo sapiens
  misc_RNA (1)...(19): siRNA sense strand
acgaguagauuauaagugu

SEQ ID NO: 1268438 - RNA, 19 nt, Homo sapiens
  misc_RNA (1)...(19): siRNA sense strand
cuacaaagcaacaguuaug

SEQ ID NO: 1268439 - RNA, 19 nt, Homo sapiens
  misc_RNA (1)...(19): siRNA sense strand
ccaccaacauuugaagcua

SEQ ID NO: 1268440 - RNA, 19 nt, Homo sapiens
  misc_RNA (1)...(19): siRNA sense strand
uauacgggauccuuuaaau

SEQ ID NO: 1268441 - RNA, 19 nt, Homo sapiens
  misc_RNA (1)...(19): siRNA sense strand
cgaguuugguuaucagaug

SEQ ID NO: 1268442 - RNA, 19 nt, Homo sapiens
  misc_RNA (1)...(19): siRNA sense strand
gaacgaguagauuauaagu

SEQ ID NO: 1268443 - RNA, 19 nt, Homo sapiens
  misc_RNA (1)...(19): siRNA sense strand
gugaggagccaccaacauu

SEQ ID NO: 1268444 - RNA, 19 nt, Homo sapiens
  misc_RNA (1)...(19): siRNA sense strand
gauggcagcgacacaauug

SEQ ID NO: 1268445 - RNA, 19 nt, Homo sapiens
  misc_RNA (1)...(19): siRNA sense strand
ucucagaugacgccuguua

SEQ ID NO: 1268446 - RNA, 19 nt, Homo sapiens
  misc_RNA (1)...(19): siRNA sense strand
gaggagccaccaacauuug

SEQ ID NO: 1268447 - RNA, 19 nt, Homo sapiens
  misc_RNA (1)...(19): siRNA sense strand
gcuauggagcucauuggua

SEQ ID NO: 1268448 - RNA, 19 nt, Homo sapiens
  misc_RNA (1)...(19): siRNA sense strand
acacaccuuuagugaagua

SEQ ID NO: 1268449 - RNA, 19 nt, Homo sapiens
  misc_RNA (1)...(19): siRNA sense strand
uagagaaacauguccauau

SEQ ID NO: 1268450 - RNA, 19 nt, Homo sapiens
  misc_RNA (1)...(19): siRNA sense strand
ggugaacgaguagauuaua

SEQ ID NO: 1268451 - RNA, 19 nt, Homo sapiens
  misc_RNA (1)...(19): siRNA sense strand
gaaguagaaguauuugagu

SEQ ID NO: 1268452 - RNA, 19 nt, Homo sapiens
  misc_RNA (1)...(19): siRNA sense strand
gaaacauguccauauauac

SEQ ID NO: 1268453 - RNA, 19 nt, Homo sapiens
  misc_RNA (1)...(19): siRNA sense strand
ugacgccuguuauagagaa

SEQ ID NO: 1268454 - RNA, 19 nt, Homo sapiens
  misc_RNA (1)...(19): siRNA sense strand
cgaguagauuauaagugua

SEQ ID NO: 1268455 - RNA, 19 nt, Homo sapiens
  misc_RNA (1)...(19): siRNA sense strand
gcacuuuauuuguaaugag

SEQ ID NO: 1268456 - RNA, 19 nt, Homo sapiens
  misc_RNA (1)...(19): siRNA sense strand
guagaaguauuugaguauc

SEQ ID NO: 1268457 - RNA, 19 nt, Homo sapiens
  misc_RNA (1)...(19): siRNA sense strand
guauuugaguaucuugaug

SEQ ID NO: 1268458 - RNA, 19 nt, Homo sapiens
  misc_RNA (1)...(19): siRNA sense strand
aggaauacuugacaguuug

SEQ ID NO: 1268459 - RNA, 19 nt, Homo sapiens
  misc_RNA (1)...(19): siRNA sense strand
ccaaaacccuacuaugaga

SEQ ID NO: 1268460 - RNA, 19 nt, Homo sapiens
  misc_RNA (1)...(19): siRNA sense strand
aguguaaaguggucaaaug

SEQ ID NO: 1268461 - RNA, 19 nt, Homo sapiens
  misc_RNA (1)...(19): siRNA sense strand
ccacccauacuauuuguga

SEQ ID NO: 1268462 - RNA, 19 nt, Homo sapiens
  misc_RNA (1)...(19): siRNA sense strand
uuggagagagcacgauuua

SEQ ID NO: 1268463 - RNA, 19 nt, Homo sapiens
  misc_RNA (1)...(19): siRNA sense strand
gguuaucagaugcacuuua

SEQ ID NO: 1268464 - RNA, 19 nt, Homo sapiens
  misc_RNA (1)...(19): siRNA sense strand
caccaacauuugaagcuau

SEQ ID NO: 1268465 - RNA, 19 nt, Homo sapiens
  misc_RNA (1)...(19): siRNA sense strand
ugaggagccaccaacauuu

SEQ ID NO: 1268466 - RNA, 19 nt, Homo sapiens
  misc_RNA (1)...(19): siRNA sense strand
ggaaggaauacuugacagu

SEQ ID NO: 1268467 - RNA, 19 nt, Homo sapiens
  misc_RNA (1)...(19): siRNA sense strand
gaggaaggaauacuugaca

SEQ ID NO: 1268468 - RNA, 19 nt, Homo sapiens
  misc_RNA (1)...(19): siRNA sense strand
ugaguaucuugaugcagua

SEQ ID NO: 1268469 - RNA, 19 nt, Homo sapiens
  misc_RNA (1)...(19): siRNA sense strand
caccuuuagugaaguagaa

SEQ ID NO: 1268470 - RNA, 19 nt, Homo sapiens
  misc_RNA (1)...(19): siRNA sense strand
acagauaucaggauuugga

SEQ ID NO: 1268471 - RNA, 19 nt, Homo sapiens
  misc_RNA (1)...(19): siRNA sense strand
ucauugcugugauuguuau

SEQ ID NO: 1268472 - RNA, 19 nt, Homo sapiens
  misc_RNA (1)...(19): siRNA sense strand
ucagaugcacuuuauuugu

SEQ ID NO: 1268473 - RNA, 19 nt, Homo sapiens
  misc_RNA (1)...(19): siRNA sense strand
gugcugcuccagaguguaa

SEQ ID NO: 1268474 - RNA, 19 nt, Homo sapiens
  misc_RNA (1)...(19): siRNA sense strand
ggaaaacacaccuuuagug

SEQ ID NO: 1268475 - RNA, 19 nt, Homo sapiens
  misc_RNA (1)...(19): siRNA sense strand
aaggaucaguagcaauuug

SEQ ID NO: 1268476 - RNA, 19 nt, Homo sapiens
  misc_RNA (1)...(19): siRNA sense strand
uauauacgggauccuuuaa

SEQ ID NO: 1268477 - RNA, 19 nt, Homo sapiens
  misc_RNA (1)...(19): siRNA sense strand
ugaaguagaaguauuugag

SEQ ID NO: 1268478 - RNA, 19 nt, Homo sapiens
  misc_RNA (1)...(19): siRNA sense strand
cuugacaguuuggauguuu

SEQ ID NO: 1268479 - RNA, 19 nt, Homo sapiens
  misc_RNA (1)...(19): siRNA sense strand
cauauauacgggauccuuu

SEQ ID NO: 1268480 - RNA, 19 nt, Homo sapiens
  misc_RNA (1)...(19): siRNA sense strand
auauauacgggauccuuua

SEQ ID NO: 1268481 - RNA, 19 nt, Homo sapiens
  misc_RNA (1)...(19): siRNA sense strand
cuuaaaggaucaguagcaa

SEQ ID NO: 1268482 - RNA, 19 nt, Homo sapiens
  misc_RNA (1)...(19): siRNA sense strand
uaaaccugaggaaggaaua

SEQ ID NO: 1268483 - RNA, 19 nt, Homo sapiens
  misc_RNA (1)...(19): siRNA sense strand
agaugacgccuguuauaga

SEQ ID NO: 1268484 - RNA, 19 nt, Homo sapiens
  misc_RNA (1)...(19): siRNA sense strand
ugugauuguuauugccaua

SEQ ID NO: 1268485 - RNA, 19 nt, Homo sapiens
  misc_RNA (1)...(19): siRNA sense strand
gagagcacgauuuauugug

SEQ ID NO: 1268486 - RNA, 19 nt, Homo sapiens
  misc_RNA (1)...(19): siRNA sense strand
gaaguauuugaguaucuug

SEQ ID NO: 1268487 - RNA, 19 nt, Homo sapiens
  misc_RNA (1)...(19): siRNA sense strand
ggcuaccugucucagauga

SEQ ID NO: 1268488 - RNA, 19 nt, Homo sapiens
  misc_RNA (1)...(19): siRNA sense strand
gauaucaggauuuggaaaa

SEQ ID NO: 1268489 - RNA, 19 nt, Homo sapiens
  misc_RNA (1)...(19): siRNA sense strand
ccucuugccacccauacua

SEQ ID NO: 1268490 - RNA, 19 nt, Homo sapiens
  misc_RNA (1)...(19): siRNA sense strand
ccaugguguugcugcugua

SEQ ID NO: 1268491 - RNA, 19 nt, Homo sapiens
  misc_RNA (1)...(19): siRNA sense strand
cagaugacgccuguuauag

SEQ ID NO: 1268492 - RNA, 19 nt, Homo sapiens
  misc_RNA (1)...(19): siRNA sense strand
cagaugguggagcugaaua

SEQ ID NO: 1268493 - RNA, 19 nt, Homo sapiens
  misc_RNA (1)...(19): siRNA sense strand
uuggugaacgaguagauua

SEQ ID NO: 1268494 - RNA, 19 nt, Homo sapiens
  misc_RNA (1)...(19): siRNA sense strand
gucauugcugugauuguua

SEQ ID NO: 1268495 - RNA, 19 nt, Homo sapiens
  misc_RNA (1)...(19): siRNA sense strand
ggagccaccaacauuugaa

SEQ ID NO: 1268496 - RNA, 19 nt, Homo sapiens
  misc_RNA (1)...(19): siRNA sense strand
gcgcuuuccuggguugcuu

SEQ ID NO: 1268497 - RNA, 19 nt, Homo sapiens
  misc_RNA (1)...(19): siRNA sense strand
uacuacaaagcaacaguua

SEQ ID NO: 1268498 - RNA, 19 nt, Homo sapiens
  misc_RNA (1)...(19): siRNA sense strand
cuugaugcaguaacuuaua

SEQ ID NO: 1268499 - RNA, 19 nt, Homo sapiens
  misc_RNA (1)...(19): siRNA sense strand
aaacauguccauauauacg

SEQ ID NO: 1268500 - RNA, 19 nt, Homo sapiens
  misc_RNA (1)...(19): siRNA sense strand
guguaaaguggucaaaugu

SEQ ID NO: 1268501 - RNA, 19 nt, Homo sapiens
  misc_RNA (1)...(19): siRNA sense strand
cuuacgaguuugguuauca

SEQ ID NO: 1268502 - RNA, 19 nt, Homo sapiens
  misc_RNA (1)...(19): siRNA sense strand
uacgggauccuuuaaaugg

SEQ ID NO: 1268503 - RNA, 19 nt, Homo sapiens
  misc_RNA (1)...(19): siRNA sense strand
gcagaugguggagcugaau

SEQ ID NO: 1268504 - RNA, 19 nt, Homo sapiens
  misc_RNA (1)...(19): siRNA sense strand
aaccaaaacccuacuauga

SEQ ID NO: 1268505 - RNA, 19 nt, Homo sapiens
  misc_RNA (1)...(19): siRNA sense strand
cccaauaugugaaaagguu

SEQ ID NO: 1268506 - RNA, 19 nt, Homo sapiens
  misc_RNA (1)...(19): siRNA sense strand
ggagcugaauaugccacuu

SEQ ID NO: 1268507 - RNA, 19 nt, Homo sapiens
  misc_RNA (1)...(19): siRNA sense strand
cgauggcagcgacacaauu

SEQ ID NO: 1268508 - RNA, 19 nt, Homo sapiens
  misc_RNA (1)...(19): siRNA sense strand
gauccauuuucacuuauug

SEQ ID NO: 1268509 - RNA, 19 nt, Homo sapiens
  misc_RNA (1)...(19): siRNA sense strand
uugaugcaguaacuuauag

SEQ ID NO: 1268510 - RNA, 19 nt, Homo sapiens
  misc_RNA (1)...(19): siRNA sense strand
guaucuugaugcaguaacu

SEQ ID NO: 1268511 - RNA, 19 nt, Homo sapiens
  misc_RNA (1)...(19): siRNA sense strand
ggagagagcacgauuuauu

SEQ ID NO: 1268512 - RNA, 19 nt, Homo sapiens
  misc_RNA (1)...(19): siRNA sense strand
agagaaacauguccauaua

SEQ ID NO: 1268513 - RNA, 19 nt, Homo sapiens
  misc_RNA (1)...(19): siRNA sense strand
cagaugcacuuuauuugua

SEQ ID NO: 1268514 - RNA, 19 nt, Homo sapiens
  misc_RNA (1)...(19): siRNA sense strand
ggacuuacgaguuugguua

SEQ ID NO: 1268515 - RNA, 19 nt, Homo sapiens
  misc_RNA (1)...(19): siRNA sense strand
aaacagauaucaggauuug

SEQ ID NO: 1268516 - RNA, 19 nt, Homo sapiens
  misc_RNA (1)...(19): siRNA sense strand
cuauggagcucauugguaa

SEQ ID NO: 1268517 - RNA, 19 nt, Homo sapiens
  misc_RNA (1)...(19): siRNA sense strand
aaacacaccuuuagugaag

SEQ ID NO: 1268518 - RNA, 19 nt, Homo sapiens
  misc_RNA (1)...(19): siRNA sense strand
gaacuuaaaggaucaguag

SEQ ID NO: 1268519 - RNA, 19 nt, Homo sapiens
  misc_RNA (1)...(19): siRNA sense strand
gaaaacagauaucaggauu

SEQ ID NO: 1268520 - RNA, 19 nt, Homo sapiens
  misc_RNA (1)...(19): siRNA sense strand
uaaaggaucaguagcaauu

SEQ ID NO: 1268521 - RNA, 19 nt, Homo sapiens
  misc_RNA (1)...(19): siRNA sense strand
aaaugggacuuacgaguuu

SEQ ID NO: 1268522 - RNA, 19 nt, Homo sapiens
  misc_RNA (1)...(19): siRNA sense strand
guuaucagaugcacuuuau

SEQ ID NO: 1268523 - RNA, 19 nt, Homo sapiens
  misc_RNA (1)...(19): siRNA sense strand
ugagauuggugaacgagua

SEQ ID NO: 1268524 - RNA, 19 nt, Homo sapiens
  misc_RNA (1)...(19): siRNA sense strand
gugaacgaguagauuauaa

SEQ ID NO: 1268525 - RNA, 19 nt, Homo sapiens
  misc_RNA (1)...(19): siRNA sense strand
gagagagcacgauuuauug

SEQ ID NO: 1268526 - RNA, 19 nt, Homo sapiens
  misc_RNA (1)...(19): siRNA sense strand
caaaugggacuuacgaguu

SEQ ID NO: 1268527 - RNA, 19 nt, Homo sapiens
  misc_RNA (1)...(19): siRNA sense strand
ggucauugcugugauuguu

SEQ ID NO: 1268528 - RNA, 19 nt, Homo sapiens
  misc_RNA (1)...(19): siRNA sense strand
ccagauccauuuucacuua

SEQ ID NO: 1268529 - RNA, 19 nt, Homo sapiens
  misc_RNA (1)...(19): siRNA sense strand
gaaggaauacuugacaguu

SEQ ID NO: 1268530 - RNA, 19 nt, Homo sapiens
  misc_RNA (1)...(19): siRNA sense strand
aaggaauacuugacaguuu

SEQ ID NO: 1268531 - RNA, 19 nt, Homo sapiens
  misc_RNA (1)...(19): siRNA sense strand
ucagaugacgccuguuaua

SEQ ID NO: 1268532 - RNA, 19 nt, Homo sapiens
  misc_RNA (1)...(19): siRNA sense strand
gaaaacacaccuuuaguga

SEQ ID NO: 1268533 - RNA, 19 nt, Homo sapiens
  misc_RNA (1)...(19): siRNA sense strand
gaugacgccuguuauagag

SEQ ID NO: 1268534 - RNA, 19 nt, Homo sapiens
  misc_RNA (1)...(19): siRNA sense strand
gagaaacauguccauauau

SEQ ID NO: 1268535 - RNA, 19 nt, Homo sapiens
  misc_RNA (1)...(19): siRNA sense strand
acgaguagauuauaagugu

SEQ ID NO: 1268536 - RNA, 19 nt, Homo sapiens
  misc_RNA (1)...(19): siRNA sense strand
cuacaaagcaacaguuaug

SEQ ID NO: 1268537 - RNA, 19 nt, Homo sapiens
  misc_RNA (1)...(19): siRNA sense strand
ccaccaacauuugaagcua

SEQ ID NO: 1268538 - RNA, 19 nt, Homo sapiens
  misc_RNA (1)...(19): siRNA sense strand
uauacgggauccuuuaaau

SEQ ID NO: 1268539 - RNA, 19 nt, Homo sapiens
  misc_RNA (1)...(19): siRNA sense strand
cgaguuugguuaucagaug

SEQ ID NO: 1268540 - RNA, 19 nt, Homo sapiens
  misc_RNA (1)...(19): siRNA sense strand
gaacgaguagauuauaagu

SEQ ID NO: 1268541 - RNA, 19 nt, Homo sapiens
  misc_RNA (1)...(19): siRNA sense strand
gugaggagccaccaacauu

SEQ ID NO: 1268542 - RNA, 19 nt, Homo sapiens
  misc_RNA (1)...(19): siRNA sense strand
gauggcagcgacacaauug

SEQ ID NO: 1268543 - RNA, 19 nt, Homo sapiens
  misc_RNA (1)...(19): siRNA sense strand
gcuauggagcucauuggua

SEQ ID NO: 1268544 - RNA, 19 nt, Homo sapiens
  misc_RNA (1)...(19): siRNA sense strand
gaggagccaccaacauuug

SEQ ID NO: 1268545 - RNA, 19 nt, Homo sapiens
  misc_RNA (1)...(19): siRNA sense strand
acacaccuuuagugaagua

SEQ ID NO: 1268546 - RNA, 19 nt, Homo sapiens
  misc_RNA (1)...(19): siRNA sense strand
ucucagaugacgccuguua

SEQ ID NO: 1268547 - RNA, 19 nt, Homo sapiens
  misc_RNA (1)...(19): siRNA sense strand
uagagaaacauguccauau

SEQ ID NO: 1268548 - RNA, 19 nt, Homo sapiens
  misc_RNA (1)...(19): siRNA sense strand
guuccaaagugucuuaaag

SEQ ID NO: 1268549 - RNA, 19 nt, Homo sapiens
  misc_RNA (1)...(19): siRNA sense strand
ggugaacgaguagauuaua

SEQ ID NO: 1268550 - RNA, 19 nt, Homo sapiens
  misc_RNA (1)...(19): siRNA sense strand
gaaguagaaguauuugagu

SEQ ID NO: 1268551 - RNA, 19 nt, Homo sapiens
  misc_RNA (1)...(19): siRNA sense strand
gaaacauguccauauauac

SEQ ID NO: 1268552 - RNA, 19 nt, Homo sapiens
  misc_RNA (1)...(19): siRNA sense strand
ugacgccuguuauagagaa

SEQ ID NO: 1268553 - RNA, 19 nt, Homo sapiens
  misc_RNA (1)...(19): siRNA sense strand
cgaguagauuauaagugua

SEQ ID NO: 1268554 - RNA, 19 nt, Homo sapiens
  misc_RNA (1)...(19): siRNA sense strand
gcacuuuauuuguaaugag

SEQ ID NO: 1268555 - RNA, 19 nt, Homo sapiens
  misc_RNA (1)...(19): siRNA sense strand
guagaaguauuugaguauc

SEQ ID NO: 1268556 - RNA, 19 nt, Homo sapiens
  misc_RNA (1)...(19): siRNA sense strand
guauuugaguaucuugaug

SEQ ID NO: 1268557 - RNA, 19 nt, Homo sapiens
  misc_RNA (1)...(19): siRNA sense strand
aggaauacuugacaguuug

SEQ ID NO: 1268558 - RNA, 19 nt, Homo sapiens
  misc_RNA (1)...(19): siRNA sense strand
ccaaaacccuacuaugaga

SEQ ID NO: 1268559 - RNA, 19 nt, Homo sapiens
  misc_RNA (1)...(19): siRNA sense strand
aguguaaaguggucaaaug

SEQ ID NO: 1268560 - RNA, 19 nt, Homo sapiens
  misc_RNA (1)...(19): siRNA sense strand
ccacccauacuauuuguga

SEQ ID NO: 1268561 - RNA, 19 nt, Homo sapiens
  misc_RNA (1)...(19): siRNA sense strand
caccaacauuugaagcuau

SEQ ID NO: 1268562 - RNA, 19 nt, Homo sapiens
  misc_RNA (1)...(19): siRNA sense strand
uuggagagagcacgauuua

SEQ ID NO: 1268563 - RNA, 19 nt, Homo sapiens
  misc_RNA (1)...(19): siRNA sense strand
gguuaucagaugcacuuua

SEQ ID NO: 1268564 - RNA, 19 nt, Homo sapiens
  misc_RNA (1)...(19): siRNA sense strand
ugaggagccaccaacauuu

SEQ ID NO: 1268565 - RNA, 19 nt, Homo sapiens
  misc_RNA (1)...(19): siRNA sense strand
ggaaggaauacuugacagu

SEQ ID NO: 1268566 - RNA, 19 nt, Homo sapiens
  misc_RNA (1)...(19): siRNA sense strand
gaggaaggaauacuugaca

SEQ ID NO: 1268567 - RNA, 19 nt, Homo sapiens
  misc_RNA (1)...(19): siRNA sense strand
ccaguuccaaagugucuua

SEQ ID NO: 1268568 - RNA, 19 nt, Homo sapiens
  misc_RNA (1)...(19): siRNA sense strand
ugaguaucuugaugcagua

SEQ ID NO: 1268569 - RNA, 19 nt, Homo sapiens
  misc_RNA (1)...(19): siRNA sense strand
caccuuuagugaaguagaa

SEQ ID NO: 1268570 - RNA, 19 nt, Homo sapiens
  misc_RNA (1)...(19): siRNA sense strand
acagauaucaggauuugga

SEQ ID NO: 1268571 - RNA, 19 nt, Homo sapiens
  misc_RNA (1)...(19): siRNA sense strand
ucauugcugugauuguuau

SEQ ID NO: 1268572 - RNA, 19 nt, Homo sapiens
  misc_RNA (1)...(19): siRNA sense strand
ucagaugcacuuuauuugu

SEQ ID NO: 1268573 - RNA, 19 nt, Homo sapiens
  misc_RNA (1)...(19): siRNA sense strand
gugcugcuccagaguguaa

SEQ ID NO: 1268574 - RNA, 19 nt, Homo sapiens
  misc_RNA (1)...(19): siRNA sense strand
ggaaaacacaccuuuagug

SEQ ID NO: 1268575 - RNA, 19 nt, Homo sapiens
  misc_RNA (1)...(19): siRNA sense strand
aaggaucaguagcaauuug

SEQ ID NO: 1268576 - RNA, 19 nt, Homo sapiens
  misc_RNA (1)...(19): siRNA sense strand
uauauacgggauccuuuaa

SEQ ID NO: 1268577 - RNA, 19 nt, Homo sapiens
  misc_RNA (1)...(19): siRNA sense strand
ugaaguagaaguauuugag

SEQ ID NO: 1268578 - RNA, 19 nt, Homo sapiens
  misc_RNA (1)...(19): siRNA sense strand
cuugacaguuuggauguuu

SEQ ID NO: 1268579 - RNA, 19 nt, Homo sapiens
  misc_RNA (1)...(19): siRNA sense strand
cauauauacgggauccuuu

SEQ ID NO: 1268580 - RNA, 19 nt, Homo sapiens
  misc_RNA (1)...(19): siRNA sense strand
auauauacgggauccuuua

SEQ ID NO: 1268581 - RNA, 19 nt, Homo sapiens
  misc_RNA (1)...(19): siRNA sense strand
cuuaaaggaucaguagcaa

SEQ ID NO: 1268582 - RNA, 19 nt, Homo sapiens
  misc_RNA (1)...(19): siRNA sense strand
uaaaccugaggaaggaaua

SEQ ID NO: 1268583 - RNA, 19 nt, Homo sapiens
  misc_RNA (1)...(19): siRNA sense strand
agaugacgccuguuauaga

SEQ ID NO: 1268584 - RNA, 19 nt, Homo sapiens
  misc_RNA (1)...(19): siRNA sense strand
ugugauuguuauugccaua

SEQ ID NO: 1268585 - RNA, 19 nt, Homo sapiens
  misc_RNA (1)...(19): siRNA sense strand
gagagcacgauuuauugug

SEQ ID NO: 1268586 - RNA, 19 nt, Homo sapiens
  misc_RNA (1)...(19): siRNA sense strand
gaaguauuugaguaucuug

SEQ ID NO: 1268587 - RNA, 19 nt, Homo sapiens
  misc_RNA (1)...(19): siRNA sense strand
ggcuaccugucucagauga

SEQ ID NO: 1268588 - RNA, 19 nt, Homo sapiens
  misc_RNA (1)...(19): siRNA sense strand
gauaucaggauuuggaaaa

SEQ ID NO: 1268589 - RNA, 19 nt, Homo sapiens
  misc_RNA (1)...(19): siRNA sense strand
ccucuugccacccauacua

SEQ ID NO: 1268590 - RNA, 19 nt, Homo sapiens
  misc_RNA (1)...(19): siRNA sense strand
ccaugguguugcugcugua

SEQ ID NO: 1268591 - RNA, 19 nt, Homo sapiens
  misc_RNA (1)...(19): siRNA sense strand
cagaugacgccuguuauag

SEQ ID NO: 1268592 - RNA, 19 nt, Homo sapiens
  misc_RNA (1)...(19): siRNA sense strand
uuggugaacgaguagauua

SEQ ID NO: 1268593 - RNA, 19 nt, Homo sapiens
  misc_RNA (1)...(19): siRNA sense strand
gucauugcugugauuguua

SEQ ID NO: 1268594 - RNA, 19 nt, Homo sapiens
  misc_RNA (1)...(19): siRNA sense strand
ggagccaccaacauuugaa

SEQ ID NO: 1268595 - RNA, 19 nt, Homo sapiens
  misc_RNA (1)...(19): siRNA sense strand
gcgcuuuccuggguugcuu

SEQ ID NO: 1268596 - RNA, 19 nt, Homo sapiens
  misc_RNA (1)...(19): siRNA sense strand
uacuacaaagcaacaguua

SEQ ID NO: 1268597 - RNA, 19 nt, Homo sapiens
  misc_RNA (1)...(19): siRNA sense strand
cuugaugcaguaacuuaua

SEQ ID NO: 1268598 - RNA, 19 nt, Homo sapiens
  misc_RNA (1)...(19): siRNA sense strand
aaacauguccauauauacg

SEQ ID NO: 1268599 - RNA, 19 nt, Homo sapiens
  misc_RNA (1)...(19): siRNA sense strand
guguaaaguggucaaaugu

SEQ ID NO: 1268600 - RNA, 19 nt, Homo sapiens
  misc_RNA (1)...(19): siRNA sense strand
cuuacgaguuugguuauca

SEQ ID NO: 1268601 - RNA, 19 nt, Homo sapiens
  misc_RNA (1)...(19): siRNA sense strand
uacgggauccuuuaaaugg

SEQ ID NO: 1268602 - RNA, 19 nt, Homo sapiens
  misc_RNA (1)...(19): siRNA sense strand
aaccaaaacccuacuauga

SEQ ID NO: 1268603 - RNA, 19 nt, Homo sapiens
  misc_RNA (1)...(19): siRNA sense strand
cccaauaugugaaaagguu

SEQ ID NO: 1268604 - RNA, 19 nt, Homo sapiens
  misc_RNA (1)...(19): siRNA sense strand
cgauggcagcgacacaauu

SEQ ID NO: 1268605 - RNA, 19 nt, Homo sapiens
  misc_RNA (1)...(19): siRNA sense strand
gauccauuuucacuuauug

SEQ ID NO: 1268606 - RNA, 19 nt, Homo sapiens
  misc_RNA (1)...(19): siRNA sense strand
uugaugcaguaacuuauag

SEQ ID NO: 1268607 - RNA, 19 nt, Homo sapiens
  misc_RNA (1)...(19): siRNA sense strand
guaucuugaugcaguaacu

SEQ ID NO: 1268608 - RNA, 19 nt, Homo sapiens
  misc_RNA (1)...(19): siRNA sense strand
caacauuugaagcuaugga

SEQ ID NO: 1268609 - RNA, 19 nt, Homo sapiens
  misc_RNA (1)...(19): siRNA sense strand
gagauuggugaacgaguag

SEQ ID NO: 1268610 - RNA, 19 nt, Homo sapiens
  misc_RNA (1)...(19): siRNA sense strand
ggagagagcacgauuuauu

SEQ ID NO: 1268611 - RNA, 19 nt, Homo sapiens
  misc_RNA (1)...(19): siRNA sense strand
agagaaacauguccauaua

SEQ ID NO: 1268612 - RNA, 19 nt, Homo sapiens
  misc_RNA (1)...(19): siRNA sense strand
cagaugcacuuuauuugua

SEQ ID NO: 1268613 - RNA, 19 nt, Homo sapiens
  misc_RNA (1)...(19): siRNA sense strand
ggacuuacgaguuugguua

SEQ ID NO: 1268614 - RNA, 19 nt, Homo sapiens
  misc_RNA (1)...(19): siRNA sense strand
aaacagauaucaggauuug

SEQ ID NO: 1268615 - RNA, 19 nt, Homo sapiens
  misc_RNA (1)...(19): siRNA sense strand
cuauggagcucauugguaa

SEQ ID NO: 1268616 - RNA, 19 nt, Homo sapiens
  misc_RNA (1)...(19): siRNA sense strand
aaacacaccuuuagugaag

SEQ ID NO: 1268617 - RNA, 19 nt, Homo sapiens
  misc_RNA (1)...(19): siRNA sense strand
gaacuuaaaggaucaguag

SEQ ID NO: 1268618 - RNA, 19 nt, Homo sapiens
  misc_RNA (1)...(19): siRNA sense strand
gaaaacagauaucaggauu

SEQ ID NO: 1268619 - RNA, 19 nt, Homo sapiens
  misc_RNA (1)...(19): siRNA sense strand
uaaaggaucaguagcaauu

SEQ ID NO: 1268620 - RNA, 19 nt, Homo sapiens
  misc_RNA (1)...(19): siRNA sense strand
aaaugggacuuacgaguuu

SEQ ID NO: 1268621 - RNA, 19 nt, Homo sapiens
  misc_RNA (1)...(19): siRNA sense strand
guuaucagaugcacuuuau

SEQ ID NO: 1268622 - RNA, 19 nt, Homo sapiens
  misc_RNA (1)...(19): siRNA sense strand
gagcugaauaugccacuua

SEQ ID NO: 1268623 - RNA, 19 nt, Homo sapiens
  misc_RNA (1)...(19): siRNA sense strand
gagcagagaggcugaauag

SEQ ID NO: 1268624 - RNA, 19 nt, Homo sapiens
  misc_RNA (1)...(19): siRNA sense strand
ugagauuggugaacgagua

SEQ ID NO: 1268625 - RNA, 19 nt, Homo sapiens
  misc_RNA (1)...(19): siRNA sense strand
gugaacgaguagauuauaa

SEQ ID NO: 1268626 - RNA, 19 nt, Homo sapiens
  misc_RNA (1)...(19): siRNA sense strand
gagagagcacgauuuauug

SEQ ID NO: 1268627 - RNA, 19 nt, Homo sapiens
  misc_RNA (1)...(19): siRNA sense strand
caaaugggacuuacgaguu

SEQ ID NO: 1268628 - RNA, 19 nt, Homo sapiens
  misc_RNA (1)...(19): siRNA sense strand
ggucauugcugugauuguu

SEQ ID NO: 1268629 - RNA, 19 nt, Homo sapiens
  misc_RNA (1)...(19): siRNA sense strand
ccagauccauuuucacuua

SEQ ID NO: 1268630 - RNA, 19 nt, Homo sapiens
  misc_RNA (1)...(19): siRNA sense strand
gaaggaauacuugacaguu

SEQ ID NO: 1268631 - RNA, 19 nt, Homo sapiens
  misc_RNA (1)...(19): siRNA sense strand
aaggaauacuugacaguuu

SEQ ID NO: 1268632 - RNA, 19 nt, Homo sapiens
  misc_RNA (1)...(19): siRNA sense strand
ucagaugacgccuguuaua

SEQ ID NO: 1268633 - RNA, 19 nt, Homo sapiens
  misc_RNA (1)...(19): siRNA sense strand
gaaaacacaccuuuaguga

SEQ ID NO: 1268634 - RNA, 19 nt, Homo sapiens
  misc_RNA (1)...(19): siRNA sense strand
gaugacgccuguuauagag

SEQ ID NO: 1268635 - RNA, 19 nt, Homo sapiens
  misc_RNA (1)...(19): siRNA sense strand
gagaaacauguccauauau

SEQ ID NO: 1268636 - RNA, 19 nt, Homo sapiens
  misc_RNA (1)...(19): siRNA sense strand
ccacuuaccagacuaaauc

SEQ ID NO: 1268637 - RNA, 19 nt, Homo sapiens
  misc_RNA (1)...(19): siRNA sense strand
acgaguagauuauaagugu

SEQ ID NO: 1268638 - RNA, 19 nt, Homo sapiens
  misc_RNA (1)...(19): siRNA sense strand
cuacaaagcaacaguuaug

SEQ ID NO: 1268639 - RNA, 19 nt, Homo sapiens
  misc_RNA (1)...(19): siRNA sense strand
ccaccaacauuugaagcua

SEQ ID NO: 1268640 - RNA, 19 nt, Homo sapiens
  misc_RNA (1)...(19): siRNA sense strand
uauacgggauccuuuaaau

SEQ ID NO: 1268641 - RNA, 19 nt, Homo sapiens
  misc_RNA (1)...(19): siRNA sense strand
cgaguuugguuaucagaug

SEQ ID NO: 1268642 - RNA, 19 nt, Homo sapiens
  misc_RNA (1)...(19): siRNA sense strand
gaacgaguagauuauaagu

SEQ ID NO: 1268643 - RNA, 19 nt, Homo sapiens
  misc_RNA (1)...(19): siRNA sense strand
gugaggagccaccaacauu

SEQ ID NO: 1268644 - RNA, 19 nt, Homo sapiens
  misc_RNA (1)...(19): siRNA sense strand
gauggcagcgacacaauug

SEQ ID NO: 1268645 - RNA, 19 nt, Homo sapiens
  misc_RNA (1)...(19): siRNA sense strand
ucucagaugacgccuguua

SEQ ID NO: 1268646 - RNA, 19 nt, Homo sapiens
  misc_RNA (1)...(19): siRNA sense strand
acacaccuuuagugaagua

SEQ ID NO: 1268647 - RNA, 19 nt, Homo sapiens
  misc_RNA (1)...(19): siRNA sense strand
gcuauggagcucauuggua

SEQ ID NO: 1268648 - RNA, 19 nt, Homo sapiens
  misc_RNA (1)...(19): siRNA sense strand
gaggagccaccaacauuug

SEQ ID NO: 1268649 - RNA, 19 nt, Homo sapiens
  misc_RNA (1)...(19): siRNA sense strand
uagagaaacauguccauau

SEQ ID NO: 1268650 - RNA, 19 nt, Homo sapiens
  misc_RNA (1)...(19): siRNA sense strand
ggugaacgaguagauuaua

SEQ ID NO: 1268651 - RNA, 19 nt, Homo sapiens
  misc_RNA (1)...(19): siRNA sense strand
gaaguagaaguauuugagu

SEQ ID NO: 1268652 - RNA, 19 nt, Homo sapiens
  misc_RNA (1)...(19): siRNA sense strand
gaaacauguccauauauac

SEQ ID NO: 1268653 - RNA, 19 nt, Homo sapiens
  misc_RNA (1)...(19): siRNA sense strand
ugacgccuguuauagagaa

SEQ ID NO: 1268654 - RNA, 19 nt, Homo sapiens
  misc_RNA (1)...(19): siRNA sense strand
cgaguagauuauaagugua

SEQ ID NO: 1268655 - RNA, 19 nt, Homo sapiens
  misc_RNA (1)...(19): siRNA sense strand
gcacuuuauuuguaaugag

SEQ ID NO: 1268656 - RNA, 19 nt, Homo sapiens
  misc_RNA (1)...(19): siRNA sense strand
guagaaguauuugaguauc

SEQ ID NO: 1268657 - RNA, 19 nt, Homo sapiens
  misc_RNA (1)...(19): siRNA sense strand
guauuugaguaucuugaug

SEQ ID NO: 1268658 - RNA, 19 nt, Homo sapiens
  misc_RNA (1)...(19): siRNA sense strand
aggaauacuugacaguuug

SEQ ID NO: 1268659 - RNA, 19 nt, Homo sapiens
  misc_RNA (1)...(19): siRNA sense strand
ccaaaacccuacuaugaga

SEQ ID NO: 1268660 - RNA, 19 nt, Homo sapiens
  misc_RNA (1)...(19): siRNA sense strand
aguguaaaguggucaaaug

SEQ ID NO: 1268661 - RNA, 19 nt, Homo sapiens
  misc_RNA (1)...(19): siRNA sense strand
ccacccauacuauuuguga

SEQ ID NO: 1268662 - RNA, 19 nt, Homo sapiens
  misc_RNA (1)...(19): siRNA sense strand
uuggagagagcacgauuua

SEQ ID NO: 1268663 - RNA, 19 nt, Homo sapiens
  misc_RNA (1)...(19): siRNA sense strand
gguuaucagaugcacuuua

SEQ ID NO: 1268664 - RNA, 19 nt, Homo sapiens
  misc_RNA (1)...(19): siRNA sense strand
caccaacauuugaagcuau

SEQ ID NO: 1268665 - RNA, 19 nt, Homo sapiens
  misc_RNA (1)...(19): siRNA sense strand
ugaggagccaccaacauuu

SEQ ID NO: 1268666 - RNA, 19 nt, Homo sapiens
  misc_RNA (1)...(19): siRNA sense strand
ggaaggaauacuugacagu

SEQ ID NO: 1268667 - RNA, 19 nt, Homo sapiens
  misc_RNA (1)...(19): siRNA sense strand
gaggaaggaauacuugaca

SEQ ID NO: 1268668 - RNA, 19 nt, Homo sapiens
  misc_RNA (1)...(19): siRNA sense strand
ugaguaucuugaugcagua

SEQ ID NO: 1268669 - RNA, 19 nt, Homo sapiens
  misc_RNA (1)...(19): siRNA sense strand
caccuuuagugaaguagaa

SEQ ID NO: 1268670 - RNA, 19 nt, Homo sapiens
  misc_RNA (1)...(19): siRNA sense strand
acagauaucaggauuugga

SEQ ID NO: 1268671 - RNA, 19 nt, Homo sapiens
  misc_RNA (1)...(19): siRNA sense strand
ucauugcugugauuguuau

SEQ ID NO: 1268672 - RNA, 19 nt, Homo sapiens
  misc_RNA (1)...(19): siRNA sense strand
ucagaugcacuuuauuugu

SEQ ID NO: 1268673 - RNA, 19 nt, Homo sapiens
  misc_RNA (1)...(19): siRNA sense strand
gugcugcuccagaguguaa

SEQ ID NO: 1268674 - RNA, 19 nt, Homo sapiens
  misc_RNA (1)...(19): siRNA sense strand
ggaaaacacaccuuuagug

SEQ ID NO: 1268675 - RNA, 19 nt, Homo sapiens
  misc_RNA (1)...(19): siRNA sense strand
aaggaucaguagcaauuug

SEQ ID NO: 1268676 - RNA, 19 nt, Homo sapiens
  misc_RNA (1)...(19): siRNA sense strand
uauauacgggauccuuuaa

SEQ ID NO: 1268677 - RNA, 19 nt, Homo sapiens
  misc_RNA (1)...(19): siRNA sense strand
ugaaguagaaguauuugag

SEQ ID NO: 1268678 - RNA, 19 nt, Homo sapiens
  misc_RNA (1)...(19): siRNA sense strand
cuugacaguuuggauguuu

SEQ ID NO: 1268679 - RNA, 19 nt, Homo sapiens
  misc_RNA (1)...(19): siRNA sense strand
cauauauacgggauccuuu

SEQ ID NO: 1268680 - RNA, 19 nt, Homo sapiens
  misc_RNA (1)...(19): siRNA sense strand
auauauacgggauccuuua

SEQ ID NO: 1268681 - RNA, 19 nt, Homo sapiens
  misc_RNA (1)...(19): siRNA sense strand
cuuaaaggaucaguagcaa

SEQ ID NO: 1268682 - RNA, 19 nt, Homo sapiens
  misc_RNA (1)...(19): siRNA sense strand
uaaaccugaggaaggaaua

SEQ ID NO: 1268683 - RNA, 19 nt, Homo sapiens
  misc_RNA (1)...(19): siRNA sense strand
agaugacgccuguuauaga

SEQ ID NO: 1268684 - RNA, 19 nt, Homo sapiens
  misc_RNA (1)...(19): siRNA sense strand
ugugauuguuauugccaua

SEQ ID NO: 1268685 - RNA, 19 nt, Homo sapiens
  misc_RNA (1)...(19): siRNA sense strand
gagagcacgauuuauugug

SEQ ID NO: 1268686 - RNA, 19 nt, Homo sapiens
  misc_RNA (1)...(19): siRNA sense strand
gaaguauuugaguaucuug

SEQ ID NO: 1268687 - RNA, 19 nt, Homo sapiens
  misc_RNA (1)...(19): siRNA sense strand
ggcuaccugucucagauga

SEQ ID NO: 1268688 - RNA, 19 nt, Homo sapiens
  misc_RNA (1)...(19): siRNA sense strand
gauaucaggauuuggaaaa

SEQ ID NO: 1268689 - RNA, 19 nt, Homo sapiens
  misc_RNA (1)...(19): siRNA sense strand
ccucuugccacccauacua

SEQ ID NO: 1268690 - RNA, 19 nt, Homo sapiens
  misc_RNA (1)...(19): siRNA sense strand
ccaugguguugcugcugua

SEQ ID NO: 1268691 - RNA, 19 nt, Homo sapiens
  misc_RNA (1)...(19): siRNA sense strand
cagaugacgccuguuauag

SEQ ID NO: 1268692 - RNA, 19 nt, Homo sapiens
  misc_RNA (1)...(19): siRNA sense strand
cagaugguggagcugaaua

SEQ ID NO: 1268693 - RNA, 19 nt, Homo sapiens
  misc_RNA (1)...(19): siRNA sense strand
gucauugcugugauuguua

SEQ ID NO: 1268694 - RNA, 19 nt, Homo sapiens
  misc_RNA (1)...(19): siRNA sense strand
ggagccaccaacauuugaa

SEQ ID NO: 1268695 - RNA, 19 nt, Homo sapiens
  misc_RNA (1)...(19): siRNA sense strand
uuggugaacgaguagauua

SEQ ID NO: 1268696 - RNA, 19 nt, Homo sapiens
  misc_RNA (1)...(19): siRNA sense strand
gcgcuuuccuggguugcuu

SEQ ID NO: 1268697 - RNA, 19 nt, Homo sapiens
  misc_RNA (1)...(19): siRNA sense strand
uacuacaaagcaacaguua

SEQ ID NO: 1268698 - RNA, 19 nt, Homo sapiens
  misc_RNA (1)...(19): siRNA sense strand
cuugaugcaguaacuuaua

SEQ ID NO: 1268699 - RNA, 19 nt, Homo sapiens
  misc_RNA (1)...(19): siRNA sense strand
aaacauguccauauauacg

SEQ ID NO: 1268700 - RNA, 19 nt, Homo sapiens
  misc_RNA (1)...(19): siRNA sense strand
guguaaaguggucaaaugu

SEQ ID NO: 1268701 - RNA, 19 nt, Homo sapiens
  misc_RNA (1)...(19): siRNA sense strand
cuuacgaguuugguuauca

SEQ ID NO: 1268702 - RNA, 19 nt, Homo sapiens
  misc_RNA (1)...(19): siRNA sense strand
uacgggauccuuuaaaugg

SEQ ID NO: 1268703 - RNA, 19 nt, Homo sapiens
  misc_RNA (1)...(19): siRNA sense strand
gcagaugguggagcugaau

SEQ ID NO: 1268704 - RNA, 19 nt, Homo sapiens
  misc_RNA (1)...(19): siRNA sense strand
aaccaaaacccuacuauga

SEQ ID NO: 1268705 - RNA, 19 nt, Homo sapiens
  misc_RNA (1)...(19): siRNA sense strand
uugaugcaguaacuuauag

SEQ ID NO: 1268706 - RNA, 19 nt, Homo sapiens
  misc_RNA (1)...(19): siRNA sense strand
ggagcugaauaugccacuu

SEQ ID NO: 1268707 - RNA, 19 nt, Homo sapiens
  misc_RNA (1)...(19): siRNA sense strand
caacauuugaagcuaugga

SEQ ID NO: 1268708 - RNA, 19 nt, Homo sapiens
  misc_RNA (1)...(19): siRNA sense strand
cgauggcagcgacacaauu

SEQ ID NO: 1268709 - RNA, 19 nt, Homo sapiens
  misc_RNA (1)...(19): siRNA sense strand
gauccauuuucacuuauug

SEQ ID NO: 1268710 - RNA, 19 nt, Homo sapiens
  misc_RNA (1)...(19): siRNA sense strand
ggagagagcacgauuuauu

SEQ ID NO: 1268711 - RNA, 19 nt, Homo sapiens
  misc_RNA (1)...(19): siRNA sense strand
agagaaacauguccauaua

SEQ ID NO: 1268712 - RNA, 19 nt, Homo sapiens
  misc_RNA (1)...(19): siRNA sense strand
cagaugcacuuuauuugua

SEQ ID NO: 1268713 - RNA, 19 nt, Homo sapiens
  misc_RNA (1)...(19): siRNA sense strand
ggacuuacgaguuugguua

SEQ ID NO: 1268714 - RNA, 19 nt, Homo sapiens
  misc_RNA (1)...(19): siRNA sense strand
aaacagauaucaggauuug

SEQ ID NO: 1268715 - RNA, 19 nt, Homo sapiens
  misc_RNA (1)...(19): siRNA sense strand
cuauggagcucauugguaa

SEQ ID NO: 1268716 - RNA, 19 nt, Homo sapiens
  misc_RNA (1)...(19): siRNA sense strand
aaacacaccuuuagugaag

SEQ ID NO: 1268717 - RNA, 19 nt, Homo sapiens
  misc_RNA (1)...(19): siRNA sense strand
gaacuuaaaggaucaguag

SEQ ID NO: 1268718 - RNA, 19 nt, Homo sapiens
  misc_RNA (1)...(19): siRNA sense strand
gaaaacagauaucaggauu

SEQ ID NO: 1268719 - RNA, 19 nt, Homo sapiens
  misc_RNA (1)...(19): siRNA sense strand
uaaaggaucaguagcaauu

SEQ ID NO: 1268720 - RNA, 19 nt, Homo sapiens
  misc_RNA (1)...(19): siRNA sense strand
aaaugggacuuacgaguuu

SEQ ID NO: 1268721 - RNA, 19 nt, Homo sapiens
  misc_RNA (1)...(19): siRNA sense strand
guuaucagaugcacuuuau

SEQ ID NO: 1268722 - RNA, 19 nt, Homo sapiens
  misc_RNA (1)...(19): siRNA sense strand
gagcugaauaugccacuua

SEQ ID NO: 1268723 - RNA, 19 nt, Homo sapiens
  misc_RNA (1)...(19): siRNA sense strand
ugagauuggugaacgagua

SEQ ID NO: 1268724 - RNA, 19 nt, Homo sapiens
  misc_RNA (1)...(19): siRNA sense strand
gugaacgaguagauuauaa

SEQ ID NO: 1268725 - RNA, 19 nt, Homo sapiens
  misc_RNA (1)...(19): siRNA sense strand
gagagagcacgauuuauug

SEQ ID NO: 1268726 - RNA, 19 nt, Homo sapiens
  misc_RNA (1)...(19): siRNA sense strand
caaaugggacuuacgaguu

SEQ ID NO: 1268727 - RNA, 19 nt, Homo sapiens
  misc_RNA (1)...(19): siRNA sense strand
ggucauugcugugauuguu

SEQ ID NO: 1268728 - RNA, 19 nt, Homo sapiens
  misc_RNA (1)...(19): siRNA sense strand
ccagauccauuuucacuua

SEQ ID NO: 1268729 - RNA, 19 nt, Homo sapiens
  misc_RNA (1)...(19): siRNA sense strand
gaaggaauacuugacaguu

SEQ ID NO: 1268730 - RNA, 19 nt, Homo sapiens
  misc_RNA (1)...(19): siRNA sense strand
aaggaauacuugacaguuu

SEQ ID NO: 1268731 - RNA, 19 nt, Homo sapiens
  misc_RNA (1)...(19): siRNA sense strand
ucagaugacgccuguuaua

SEQ ID NO: 1268732 - RNA, 19 nt, Homo sapiens
  misc_RNA (1)...(19): siRNA sense strand
gaaaacacaccuuuaguga

SEQ ID NO: 1268733 - RNA, 19 nt, Homo sapiens
  misc_RNA (1)...(19): siRNA sense strand
gaugacgccuguuauagag

SEQ ID NO: 1268734 - RNA, 19 nt, Homo sapiens
  misc_RNA (1)...(19): siRNA sense strand
gagaaacauguccauauau

SEQ ID NO: 1268735 - RNA, 19 nt, Homo sapiens
  misc_RNA (1)...(19): siRNA sense strand
ccacuuaccagacuaaauc

SEQ ID NO: 1268736 - RNA, 19 nt, Homo sapiens
  misc_RNA (1)...(19): siRNA sense strand
acgaguagauuauaagugu

SEQ ID NO: 1268737 - RNA, 19 nt, Homo sapiens
  misc_RNA (1)...(19): siRNA sense strand
cuacaaagcaacaguuaug

SEQ ID NO: 1268738 - RNA, 19 nt, Homo sapiens
  misc_RNA (1)...(19): siRNA sense strand
ccaccaacauuugaagcua

SEQ ID NO: 1268739 - RNA, 19 nt, Homo sapiens
  misc_RNA (1)...(19): siRNA sense strand
uauacgggauccuuuaaau

SEQ ID NO: 1268740 - RNA, 19 nt, Homo sapiens
  misc_RNA (1)...(19): siRNA sense strand
cgaguuugguuaucagaug

SEQ ID NO: 1268741 - RNA, 19 nt, Homo sapiens
  misc_RNA (1)...(19): siRNA sense strand
gaacgaguagauuauaagu

SEQ ID NO: 1268742 - RNA, 19 nt, Homo sapiens
  misc_RNA (1)...(19): siRNA sense strand
gugaggagccaccaacauu

SEQ ID NO: 1268743 - RNA, 19 nt, Homo sapiens
  misc_RNA (1)...(19): siRNA sense strand
gauggcagcgacacaauug

SEQ ID NO: 1268744 - RNA, 19 nt, Homo sapiens
  misc_RNA (1)...(19): siRNA sense strand
ucucagaugacgccuguua

SEQ ID NO: 1268745 - RNA, 19 nt, Homo sapiens
  misc_RNA (1)...(19): siRNA sense strand
gaggagccaccaacauuug

SEQ ID NO: 1268746 - RNA, 19 nt, Homo sapiens
  misc_RNA (1)...(19): siRNA sense strand
gcuauggagcucauuggua

SEQ ID NO: 1268747 - RNA, 19 nt, Homo sapiens
  misc_RNA (1)...(19): siRNA sense strand
acacaccuuuagugaagua

SEQ ID NO: 1268748 - RNA, 19 nt, Homo sapiens
  misc_RNA (1)...(19): siRNA sense strand
uagagaaacauguccauau

SEQ ID NO: 1268749 - RNA, 19 nt, Homo sapiens
  misc_RNA (1)...(19): siRNA sense strand
guuccaaagugucuuaaag

SEQ ID NO: 1268750 - RNA, 19 nt, Homo sapiens
  misc_RNA (1)...(19): siRNA sense strand
ggugaacgaguagauuaua

SEQ ID NO: 1268751 - RNA, 19 nt, Homo sapiens
  misc_RNA (1)...(19): siRNA sense strand
gaaguagaaguauuugagu

SEQ ID NO: 1268752 - RNA, 19 nt, Homo sapiens
  misc_RNA (1)...(19): siRNA sense strand
gaaacauguccauauauac

SEQ ID NO: 1268753 - RNA, 19 nt, Homo sapiens
  misc_RNA (1)...(19): siRNA sense strand
ugacgccuguuauagagaa

SEQ ID NO: 1268754 - RNA, 19 nt, Homo sapiens
  misc_RNA (1)...(19): siRNA sense strand
cgaguagauuauaagugua

SEQ ID NO: 1268755 - RNA, 19 nt, Homo sapiens
  misc_RNA (1)...(19): siRNA sense strand
gcacuuuauuuguaaugag

SEQ ID NO: 1268756 - RNA, 19 nt, Homo sapiens
  misc_RNA (1)...(19): siRNA sense strand
guagaaguauuugaguauc

SEQ ID NO: 1268757 - RNA, 19 nt, Homo sapiens
  misc_RNA (1)...(19): siRNA sense strand
guauuugaguaucuugaug

SEQ ID NO: 1268758 - RNA, 19 nt, Homo sapiens
  misc_RNA (1)...(19): siRNA sense strand
aggaauacuugacaguuug

SEQ ID NO: 1268759 - RNA, 19 nt, Homo sapiens
  misc_RNA (1)...(19): siRNA sense strand
ccaaaacccuacuaugaga

SEQ ID NO: 1268760 - RNA, 19 nt, Homo sapiens
  misc_RNA (1)...(19): siRNA sense strand
aguguaaaguggucaaaug

SEQ ID NO: 1268761 - RNA, 19 nt, Homo sapiens
  misc_RNA (1)...(19): siRNA sense strand
ccacccauacuauuuguga

SEQ ID NO: 1268762 - RNA, 19 nt, Homo sapiens
  misc_RNA (1)...(19): siRNA sense strand
uuggagagagcacgauuua

SEQ ID NO: 1268763 - RNA, 19 nt, Homo sapiens
  misc_RNA (1)...(19): siRNA sense strand
gguuaucagaugcacuuua

SEQ ID NO: 1268764 - RNA, 19 nt, Homo sapiens
  misc_RNA (1)...(19): siRNA sense strand
caccaacauuugaagcuau

SEQ ID NO: 1268765 - RNA, 19 nt, Homo sapiens
  misc_RNA (1)...(19): siRNA sense strand
ugaggagccaccaacauuu

SEQ ID NO: 1268766 - RNA, 19 nt, Homo sapiens
  misc_RNA (1)...(19): siRNA sense strand
ggaaggaauacuugacagu

SEQ ID NO: 1268767 - RNA, 19 nt, Homo sapiens
  misc_RNA (1)...(19): siRNA sense strand
gaggaaggaauacuugaca

SEQ ID NO: 1268768 - RNA, 19 nt, Homo sapiens
  misc_RNA (1)...(19): siRNA sense strand
ccaguuccaaagugucuua

SEQ ID NO: 1268769 - RNA, 19 nt, Homo sapiens
  misc_RNA (1)...(19): siRNA sense strand
ugaguaucuugaugcagua

SEQ ID NO: 1268770 - RNA, 19 nt, Homo sapiens
  misc_RNA (1)...(19): siRNA sense strand
caccuuuagugaaguagaa

SEQ ID NO: 1268771 - RNA, 19 nt, Homo sapiens
  misc_RNA (1)...(19): siRNA sense strand
acagauaucaggauuugga

SEQ ID NO: 1268772 - RNA, 19 nt, Homo sapiens
  misc_RNA (1)...(19): siRNA sense strand
ucauugcugugauuguuau

SEQ ID NO: 1268773 - RNA, 19 nt, Homo sapiens
  misc_RNA (1)...(19): siRNA sense strand
ucagaugcacuuuauuugu

SEQ ID NO: 1268774 - RNA, 19 nt, Homo sapiens
  misc_RNA (1)...(19): siRNA sense strand
gugcugcuccagaguguaa

SEQ ID NO: 1268775 - RNA, 19 nt, Homo sapiens
  misc_RNA (1)...(19): siRNA sense strand
ggaaaacacaccuuuagug

SEQ ID NO: 1268776 - RNA, 19 nt, Homo sapiens
  misc_RNA (1)...(19): siRNA sense strand
aaggaucaguagcaauuug

SEQ ID NO: 1268777 - RNA, 19 nt, Homo sapiens
  misc_RNA (1)...(19): siRNA sense strand
uauauacgggauccuuuaa

SEQ ID NO: 1268778 - RNA, 19 nt, Homo sapiens
  misc_RNA (1)...(19): siRNA sense strand
ugaaguagaaguauuugag

SEQ ID NO: 1268779 - RNA, 19 nt, Homo sapiens
  misc_RNA (1)...(19): siRNA sense strand
cuugacaguuuggauguuu

SEQ ID NO: 1268780 - RNA, 19 nt, Homo sapiens
  misc_RNA (1)...(19): siRNA sense strand
cauauauacgggauccuuu

SEQ ID NO: 1268781 - RNA, 19 nt, Homo sapiens
  misc_RNA (1)...(19): siRNA sense strand
auauauacgggauccuuua

SEQ ID NO: 1268782 - RNA, 19 nt, Homo sapiens
  misc_RNA (1)...(19): siRNA sense strand
cuuaaaggaucaguagcaa

SEQ ID NO: 1268783 - RNA, 19 nt, Homo sapiens
  misc_RNA (1)...(19): siRNA sense strand
uaaaccugaggaaggaaua

SEQ ID NO: 1268784 - RNA, 19 nt, Homo sapiens
  misc_RNA (1)...(19): siRNA sense strand
agaugacgccuguuauaga

SEQ ID NO: 1268785 - RNA, 19 nt, Homo sapiens
  misc_RNA (1)...(19): siRNA sense strand
ugugauuguuauugccaua

SEQ ID NO: 1268786 - RNA, 19 nt, Homo sapiens
  misc_RNA (1)...(19): siRNA sense strand
gagagcacgauuuauugug

SEQ ID NO: 1268787 - RNA, 19 nt, Homo sapiens
  misc_RNA (1)...(19): siRNA sense strand
gaaguauuugaguaucuug

SEQ ID NO: 1268788 - RNA, 19 nt, Homo sapiens
  misc_RNA (1)...(19): siRNA sense strand
ggcuaccugucucagauga

SEQ ID NO: 1268789 - RNA, 19 nt, Homo sapiens
  misc_RNA (1)...(19): siRNA sense strand
gauaucaggauuuggaaaa

SEQ ID NO: 1268790 - RNA, 19 nt, Homo sapiens
  misc_RNA (1)...(19): siRNA sense strand
ccucuugccacccauacua

SEQ ID NO: 1268791 - RNA, 19 nt, Homo sapiens
  misc_RNA (1)...(19): siRNA sense strand
ccaugguguugcugcugua

SEQ ID NO: 1268792 - RNA, 19 nt, Homo sapiens
  misc_RNA (1)...(19): siRNA sense strand
cagaugacgccuguuauag

SEQ ID NO: 1268793 - RNA, 19 nt, Homo sapiens
  misc_RNA (1)...(19): siRNA sense strand
cagaugguggagcugaaua

SEQ ID NO: 1268794 - RNA, 19 nt, Homo sapiens
  misc_RNA (1)...(19): siRNA sense strand
gucauugcugugauuguua

SEQ ID NO: 1268795 - RNA, 19 nt, Homo sapiens
  misc_RNA (1)...(19): siRNA sense strand
ggagccaccaacauuugaa

SEQ ID NO: 1268796 - RNA, 19 nt, Homo sapiens
  misc_RNA (1)...(19): siRNA sense strand
uuggugaacgaguagauua

SEQ ID NO: 1268797 - RNA, 19 nt, Homo sapiens
  misc_RNA (1)...(19): siRNA sense strand
gcgcuuuccuggguugcuu

SEQ ID NO: 1268798 - RNA, 19 nt, Homo sapiens
  misc_RNA (1)...(19): siRNA sense strand
uacuacaaagcaacaguua

SEQ ID NO: 1268799 - RNA, 19 nt, Homo sapiens
  misc_RNA (1)...(19): siRNA sense strand
cuugaugcaguaacuuaua

SEQ ID NO: 1268800 - RNA, 19 nt, Homo sapiens
  misc_RNA (1)...(19): siRNA sense strand
aaacauguccauauauacg

SEQ ID NO: 1268801 - RNA, 19 nt, Homo sapiens
  misc_RNA (1)...(19): siRNA sense strand
guguaaaguggucaaaugu

SEQ ID NO: 1268802 - RNA, 19 nt, Homo sapiens
  misc_RNA (1)...(19): siRNA sense strand
cuuacgaguuugguuauca

SEQ ID NO: 1268803 - RNA, 19 nt, Homo sapiens
  misc_RNA (1)...(19): siRNA sense strand
uacgggauccuuuaaaugg

SEQ ID NO: 1268804 - RNA, 19 nt, Homo sapiens
  misc_RNA (1)...(19): siRNA sense strand
gcagaugguggagcugaau

SEQ ID NO: 1268805 - RNA, 19 nt, Homo sapiens
  misc_RNA (1)...(19): siRNA sense strand
aaccaaaacccuacuauga

SEQ ID NO: 1268806 - RNA, 19 nt, Homo sapiens
  misc_RNA (1)...(19): siRNA sense strand
uugaugcaguaacuuauag

SEQ ID NO: 1268807 - RNA, 19 nt, Homo sapiens
  misc_RNA (1)...(19): siRNA sense strand
ggagcugaauaugccacuu

SEQ ID NO: 1268808 - RNA, 19 nt, Homo sapiens
  misc_RNA (1)...(19): siRNA sense strand
cgauggcagcgacacaauu

SEQ ID NO: 1268809 - RNA, 19 nt, Homo sapiens
  misc_RNA (1)...(19): siRNA sense strand
gauccauuuucacuuauug

SEQ ID NO: 1268810 - RNA, 19 nt, Homo sapiens
  misc_RNA (1)...(19): siRNA sense strand
ggagagagcacgauuuauu

SEQ ID NO: 1268811 - RNA, 19 nt, Homo sapiens
  misc_RNA (1)...(19): siRNA sense strand
agagaaacauguccauaua

SEQ ID NO: 1268812 - RNA, 19 nt, Homo sapiens
  misc_RNA (1)...(19): siRNA sense strand
cagaugcacuuuauuugua

SEQ ID NO: 1268813 - RNA, 19 nt, Homo sapiens
  misc_RNA (1)...(19): siRNA sense strand
ggacuuacgaguuugguua

SEQ ID NO: 1268814 - RNA, 19 nt, Homo sapiens
  misc_RNA (1)...(19): siRNA sense strand
aaacagauaucaggauuug

SEQ ID NO: 1268815 - RNA, 19 nt, Homo sapiens
  misc_RNA (1)...(19): siRNA sense strand
cuauggagcucauugguaa

SEQ ID NO: 1268816 - RNA, 19 nt, Homo sapiens
  misc_RNA (1)...(19): siRNA sense strand
aaacacaccuuuagugaag

SEQ ID NO: 1268817 - RNA, 19 nt, Homo sapiens
  misc_RNA (1)...(19): siRNA sense strand
gaacuuaaaggaucaguag

SEQ ID NO: 1268818 - RNA, 19 nt, Homo sapiens
  misc_RNA (1)...(19): siRNA sense strand
gaaaacagauaucaggauu

SEQ ID NO: 1268819 - RNA, 19 nt, Homo sapiens
  misc_RNA (1)...(19): siRNA sense strand
uaaaggaucaguagcaauu

SEQ ID NO: 1268820 - RNA, 19 nt, Homo sapiens
  misc_RNA (1)...(19): siRNA sense strand
aaaugggacuuacgaguuu

SEQ ID NO: 1268821 - RNA, 19 nt, Homo sapiens
  misc_RNA (1)...(19): siRNA sense strand
guuaucagaugcacuuuau

SEQ ID NO: 1268822 - RNA, 19 nt, Homo sapiens
  misc_RNA (1)...(19): siRNA sense strand
gagcugaauaugccacuua

SEQ ID NO: 1268823 - RNA, 19 nt, Homo sapiens
  misc_RNA (1)...(19): siRNA sense strand
ugagauuggugaacgagua

SEQ ID NO: 1268824 - RNA, 19 nt, Homo sapiens
  misc_RNA (1)...(19): siRNA sense strand
gugaacgaguagauuauaa

SEQ ID NO: 1268825 - RNA, 19 nt, Homo sapiens
  misc_RNA (1)...(19): siRNA sense strand
gagagagcacgauuuauug

SEQ ID NO: 1268826 - RNA, 19 nt, Homo sapiens
  misc_RNA (1)...(19): siRNA sense strand
caaaugggacuuacgaguu

SEQ ID NO: 1268827 - RNA, 19 nt, Homo sapiens
  misc_RNA (1)...(19): siRNA sense strand
ggucauugcugugauuguu

SEQ ID NO: 1268828 - RNA, 19 nt, Homo sapiens
  misc_RNA (1)...(19): siRNA sense strand
ccagauccauuuucacuua

SEQ ID NO: 1268829 - RNA, 19 nt, Homo sapiens
  misc_RNA (1)...(19): siRNA sense strand
gaaggaauacuugacaguu

SEQ ID NO: 1268830 - RNA, 19 nt, Homo sapiens
  misc_RNA (1)...(19): siRNA sense strand
aaggaauacuugacaguuu

SEQ ID NO: 1268831 - RNA, 19 nt, Homo sapiens
  misc_RNA (1)...(19): siRNA sense strand
ucagaugacgccuguuaua

SEQ ID NO: 1268832 - RNA, 19 nt, Homo sapiens
  misc_RNA (1)...(19): siRNA sense strand
gaaaacacaccuuuaguga

SEQ ID NO: 1268833 - RNA, 19 nt, Homo sapiens
  misc_RNA (1)...(19): siRNA sense strand
gaugacgccuguuauagag

SEQ ID NO: 1268834 - RNA, 19 nt, Homo sapiens
  misc_RNA (1)...(19): siRNA sense strand
gagaaacauguccauauau

SEQ ID NO: 1268835 - RNA, 19 nt, Homo sapiens
  misc_RNA (1)...(19): siRNA sense strand
ccacuuaccagacuaaauc

SEQ ID NO: 1268836 - RNA, 19 nt, Homo sapiens
  misc_RNA (1)...(19): siRNA sense strand
acgaguagauuauaagugu

SEQ ID NO: 1268837 - RNA, 19 nt, Homo sapiens
  misc_RNA (1)...(19): siRNA sense strand
cuacaaagcaacaguuaug

SEQ ID NO: 1268838 - RNA, 19 nt, Homo sapiens
  misc_RNA (1)...(19): siRNA sense strand
ccaccaacauuugaagcua

SEQ ID NO: 1268839 - RNA, 19 nt, Homo sapiens
  misc_RNA (1)...(19): siRNA sense strand
uauacgggauccuuuaaau

SEQ ID NO: 1268840 - RNA, 19 nt, Homo sapiens
  misc_RNA (1)...(19): siRNA sense strand
cgaguuugguuaucagaug

SEQ ID NO: 1268841 - RNA, 19 nt, Homo sapiens
  misc_RNA (1)...(19): siRNA sense strand
gaacgaguagauuauaagu

SEQ ID NO: 1268842 - RNA, 19 nt, Homo sapiens
  misc_RNA (1)...(19): siRNA sense strand
gugaggagccaccaacauu

SEQ ID NO: 1268843 - RNA, 19 nt, Homo sapiens
  misc_RNA (1)...(19): siRNA sense strand
gauggcagcgacacaauug

SEQ ID NO: 1268844 - RNA, 19 nt, Homo sapiens
  misc_RNA (1)...(19): siRNA sense strand
ucucagaugacgccuguua

SEQ ID NO: 1268845 - RNA, 19 nt, Homo sapiens
  misc_RNA (1)...(19): siRNA sense strand
gaggagccaccaacauuug

SEQ ID NO: 1268846 - RNA, 19 nt, Homo sapiens
  misc_RNA (1)...(19): siRNA sense strand
gcuauggagcucauuggua

SEQ ID NO: 1268847 - RNA, 19 nt, Homo sapiens
  misc_RNA (1)...(19): siRNA sense strand
acacaccuuuagugaagua

SEQ ID NO: 1268848 - RNA, 19 nt, Homo sapiens
  misc_RNA (1)...(19): siRNA sense strand
uagagaaacauguccauau

SEQ ID NO: 1268849 - RNA, 19 nt, Homo sapiens
  misc_RNA (1)...(19): siRNA sense strand
guuccaaagugucuuaaag

SEQ ID NO: 1268850 - RNA, 19 nt, Homo sapiens
  misc_RNA (1)...(19): siRNA sense strand
ggugaacgaguagauuaua

SEQ ID NO: 1268851 - RNA, 19 nt, Homo sapiens
  misc_RNA (1)...(19): siRNA sense strand
gaaguagaaguauuugagu

SEQ ID NO: 1268852 - RNA, 19 nt, Homo sapiens
  misc_RNA (1)...(19): siRNA sense strand
gaaacauguccauauauac

SEQ ID NO: 1268853 - RNA, 19 nt, Homo sapiens
  misc_RNA (1)...(19): siRNA sense strand
ugacgccuguuauagagaa

SEQ ID NO: 1268854 - RNA, 19 nt, Homo sapiens
  misc_RNA (1)...(19): siRNA sense strand
cgaguagauuauaagugua

SEQ ID NO: 1268855 - RNA, 19 nt, Homo sapiens
  misc_RNA (1)...(19): siRNA sense strand
gcacuuuauuuguaaugag

SEQ ID NO: 1268856 - RNA, 19 nt, Homo sapiens
  misc_RNA (1)...(19): siRNA sense strand
guagaaguauuugaguauc

SEQ ID NO: 1268857 - RNA, 19 nt, Homo sapiens
  misc_RNA (1)...(19): siRNA sense strand
guauuugaguaucuugaug

SEQ ID NO: 1268858 - RNA, 19 nt, Homo sapiens
  misc_RNA (1)...(19): siRNA sense strand
aggaauacuugacaguuug

SEQ ID NO: 1268859 - RNA, 19 nt, Homo sapiens
  misc_RNA (1)...(19): siRNA sense strand
ccaaaacccuacuaugaga

SEQ ID NO: 1268860 - RNA, 19 nt, Homo sapiens
  misc_RNA (1)...(19): siRNA sense strand
aguguaaaguggucaaaug

SEQ ID NO: 1268861 - RNA, 19 nt, Homo sapiens
  misc_RNA (1)...(19): siRNA sense strand
ccacccauacuauuuguga

SEQ ID NO: 1268862 - RNA, 19 nt, Homo sapiens
  misc_RNA (1)...(19): siRNA sense strand
uuggagagagcacgauuua

SEQ ID NO: 1268863 - RNA, 19 nt, Homo sapiens
  misc_RNA (1)...(19): siRNA sense strand
gguuaucagaugcacuuua

SEQ ID NO: 1268864 - RNA, 19 nt, Homo sapiens
  misc_RNA (1)...(19): siRNA sense strand
caccaacauuugaagcuau

SEQ ID NO: 1268865 - RNA, 19 nt, Homo sapiens
  misc_RNA (1)...(19): siRNA sense strand
ugaggagccaccaacauuu

SEQ ID NO: 1268866 - RNA, 19 nt, Homo sapiens
  misc_RNA (1)...(19): siRNA sense strand
ggaaggaauacuugacagu

SEQ ID NO: 1268867 - RNA, 19 nt, Homo sapiens
  misc_RNA (1)...(19): siRNA sense strand
gaggaaggaauacuugaca

SEQ ID NO: 1268868 - RNA, 19 nt, Homo sapiens
  misc_RNA (1)...(19): siRNA sense strand
ccaguuccaaagugucuua

SEQ ID NO: 1268869 - RNA, 19 nt, Homo sapiens
  misc_RNA (1)...(19): siRNA sense strand
ugaguaucuugaugcagua

SEQ ID NO: 1268870 - RNA, 19 nt, Homo sapiens
  misc_RNA (1)...(19): siRNA sense strand
caccuuuagugaaguagaa

SEQ ID NO: 1268871 - RNA, 19 nt, Homo sapiens
  misc_RNA (1)...(19): siRNA sense strand
acagauaucaggauuugga

SEQ ID NO: 1268872 - RNA, 19 nt, Homo sapiens
  misc_RNA (1)...(19): siRNA sense strand
ucauugcugugauuguuau

SEQ ID NO: 1268873 - RNA, 19 nt, Homo sapiens
  misc_RNA (1)...(19): siRNA sense strand
ucagaugcacuuuauuugu

SEQ ID NO: 1268874 - RNA, 19 nt, Homo sapiens
  misc_RNA (1)...(19): siRNA sense strand
gugcugcuccagaguguaa

SEQ ID NO: 1268875 - RNA, 19 nt, Homo sapiens
  misc_RNA (1)...(19): siRNA sense strand
ggaaaacacaccuuuagug

SEQ ID NO: 1268876 - RNA, 19 nt, Homo sapiens
  misc_RNA (1)...(19): siRNA sense strand
aaggaucaguagcaauuug

SEQ ID NO: 1268877 - RNA, 19 nt, Homo sapiens
  misc_RNA (1)...(19): siRNA sense strand
uauauacgggauccuuuaa

SEQ ID NO: 1268878 - RNA, 19 nt, Homo sapiens
  misc_RNA (1)...(19): siRNA sense strand
ugaaguagaaguauuugag

SEQ ID NO: 1268879 - RNA, 19 nt, Homo sapiens
  misc_RNA (1)...(19): siRNA sense strand
cuugacaguuuggauguuu

SEQ ID NO: 1268880 - RNA, 19 nt, Homo sapiens
  misc_RNA (1)...(19): siRNA sense strand
cauauauacgggauccuuu

SEQ ID NO: 1268881 - RNA, 19 nt, Homo sapiens
  misc_RNA (1)...(19): siRNA sense strand
auauauacgggauccuuua

SEQ ID NO: 1268882 - RNA, 19 nt, Homo sapiens
  misc_RNA (1)...(19): siRNA sense strand
cuuaaaggaucaguagcaa

SEQ ID NO: 1268883 - RNA, 19 nt, Homo sapiens
  misc_RNA (1)...(19): siRNA sense strand
uaaaccugaggaaggaaua

SEQ ID NO: 1268884 - RNA, 19 nt, Homo sapiens
  misc_RNA (1)...(19): siRNA sense strand
agaugacgccuguuauaga

SEQ ID NO: 1268885 - RNA, 19 nt, Homo sapiens
  misc_RNA (1)...(19): siRNA sense strand
ugugauuguuauugccaua

SEQ ID NO: 1268886 - RNA, 19 nt, Homo sapiens
  misc_RNA (1)...(19): siRNA sense strand
gagagcacgauuuauugug

SEQ ID NO: 1268887 - RNA, 19 nt, Homo sapiens
  misc_RNA (1)...(19): siRNA sense strand
gaaguauuugaguaucuug

SEQ ID NO: 1268888 - RNA, 19 nt, Homo sapiens
  misc_RNA (1)...(19): siRNA sense strand
ggcuaccugucucagauga

SEQ ID NO: 1268889 - RNA, 19 nt, Homo sapiens
  misc_RNA (1)...(19): siRNA sense strand
gauaucaggauuuggaaaa

SEQ ID NO: 1268890 - RNA, 19 nt, Homo sapiens
  misc_RNA (1)...(19): siRNA sense strand
ccucuugccacccauacua

SEQ ID NO: 1268891 - RNA, 19 nt, Homo sapiens
  misc_RNA (1)...(19): siRNA sense strand
ccaugguguugcugcugua

SEQ ID NO: 1268892 - RNA, 19 nt, Homo sapiens
  misc_RNA (1)...(19): siRNA sense strand
cagaugacgccuguuauag

SEQ ID NO: 1268893 - RNA, 19 nt, Homo sapiens
  misc_RNA (1)...(19): siRNA sense strand
cagaugguggagcugaaua

SEQ ID NO: 1268894 - RNA, 19 nt, Homo sapiens
  misc_RNA (1)...(19): siRNA sense strand
gucauugcugugauuguua

SEQ ID NO: 1268895 - RNA, 19 nt, Homo sapiens
  misc_RNA (1)...(19): siRNA sense strand
ggagccaccaacauuugaa

SEQ ID NO: 1268896 - RNA, 19 nt, Homo sapiens
  misc_RNA (1)...(19): siRNA sense strand
uuggugaacgaguagauua

SEQ ID NO: 1268897 - RNA, 19 nt, Homo sapiens
  misc_RNA (1)...(19): siRNA sense strand
gcgcuuuccuggguugcuu

SEQ ID NO: 1268898 - RNA, 19 nt, Homo sapiens
  misc_RNA (1)...(19): siRNA sense strand
uacuacaaagcaacaguua

SEQ ID NO: 1268899 - RNA, 19 nt, Homo sapiens
  misc_RNA (1)...(19): siRNA sense strand
cuugaugcaguaacuuaua

SEQ ID NO: 1268900 - RNA, 19 nt, Homo sapiens
  misc_RNA (1)...(19): siRNA sense strand
aaacauguccauauauacg

SEQ ID NO: 1268901 - RNA, 19 nt, Homo sapiens
  misc_RNA (1)...(19): siRNA sense strand
guguaaaguggucaaaugu

SEQ ID NO: 1268902 - RNA, 19 nt, Homo sapiens
  misc_RNA (1)...(19): siRNA sense strand
cuuacgaguuugguuauca

SEQ ID NO: 1268903 - RNA, 19 nt, Homo sapiens
  misc_RNA (1)...(19): siRNA sense strand
uacgggauccuuuaaaugg

SEQ ID NO: 1268904 - RNA, 19 nt, Homo sapiens
  misc_RNA (1)...(19): siRNA sense strand
gcagaugguggagcugaau

SEQ ID NO: 1268905 - RNA, 19 nt, Homo sapiens
  misc_RNA (1)...(19): siRNA sense strand
aaccaaaacccuacuauga

SEQ ID NO: 1268906 - RNA, 19 nt, Homo sapiens
  misc_RNA (1)...(19): siRNA sense strand
uugaugcaguaacuuauag

SEQ ID NO: 1268907 - RNA, 19 nt, Homo sapiens
  misc_RNA (1)...(19): siRNA sense strand
ggagcugaauaugccacuu

SEQ ID NO: 1268908 - RNA, 19 nt, Homo sapiens
  misc_RNA (1)...(19): siRNA sense strand
cgauggcagcgacacaauu

SEQ ID NO: 1268909 - RNA, 19 nt, Homo sapiens
  misc_RNA (1)...(19): siRNA sense strand
gauccauuuucacuuauug

SEQ ID NO: 1268910 - RNA, 19 nt, Homo sapiens
  misc_RNA (1)...(19): siRNA sense strand
ggagagagcacgauuuauu

SEQ ID NO: 1268911 - RNA, 19 nt, Homo sapiens
  misc_RNA (1)...(19): siRNA sense strand
agagaaacauguccauaua

SEQ ID NO: 1268912 - RNA, 19 nt, Homo sapiens
  misc_RNA (1)...(19): siRNA sense strand
cagaugcacuuuauuugua

SEQ ID NO: 1268913 - RNA, 19 nt, Homo sapiens
  misc_RNA (1)...(19): siRNA sense strand
ggacuuacgaguuugguua

SEQ ID NO: 1268914 - RNA, 19 nt, Homo sapiens
  misc_RNA (1)...(19): siRNA sense strand
aaacagauaucaggauuug

SEQ ID NO: 1268915 - RNA, 19 nt, Homo sapiens
  misc_RNA (1)...(19): siRNA sense strand
cuauggagcucauugguaa

SEQ ID NO: 1268916 - RNA, 19 nt, Homo sapiens
  misc_RNA (1)...(19): siRNA sense strand
aaacacaccuuuagugaag

SEQ ID NO: 1268917 - RNA, 19 nt, Homo sapiens
  misc_RNA (1)...(19): siRNA sense strand
gaacuuaaaggaucaguag

SEQ ID NO: 1268918 - RNA, 19 nt, Homo sapiens
  misc_RNA (1)...(19): siRNA sense strand
gaaaacagauaucaggauu

SEQ ID NO: 1268919 - RNA, 19 nt, Homo sapiens
  misc_RNA (1)...(19): siRNA sense strand
uaaaggaucaguagcaauu

SEQ ID NO: 1268920 - RNA, 19 nt, Homo sapiens
  misc_RNA (1)...(19): siRNA sense strand
aaaugggacuuacgaguuu

SEQ ID NO: 1268921 - RNA, 19 nt, Homo sapiens
  misc_RNA (1)...(19): siRNA sense strand
guuaucagaugcacuuuau

SEQ ID NO: 1268922 - RNA, 19 nt, Homo sapiens
  misc_RNA (1)...(19): siRNA sense strand
gagcugaauaugccacuua

SEQ ID NO: 1268923 - RNA, 19 nt, Homo sapiens
  misc_RNA (1)...(19): siRNA sense strand
ugagauuggugaacgagua

SEQ ID NO: 1268924 - RNA, 19 nt, Homo sapiens
  misc_RNA (1)...(19): siRNA sense strand
gugaacgaguagauuauaa

SEQ ID NO: 1268925 - RNA, 19 nt, Homo sapiens
  misc_RNA (1)...(19): siRNA sense strand
gagagagcacgauuuauug

SEQ ID NO: 1268926 - RNA, 19 nt, Homo sapiens
  misc_RNA (1)...(19): siRNA sense strand
caaaugggacuuacgaguu

SEQ ID NO: 1268927 - RNA, 19 nt, Homo sapiens
  misc_RNA (1)...(19): siRNA sense strand
ggucauugcugugauuguu

SEQ ID NO: 1268928 - RNA, 19 nt, Homo sapiens
  misc_RNA (1)...(19): siRNA sense strand
ccagauccauuuucacuua

SEQ ID NO: 1268929 - RNA, 19 nt, Homo sapiens
  misc_RNA (1)...(19): siRNA sense strand
gaaggaauacuugacaguu

SEQ ID NO: 1268930 - RNA, 19 nt, Homo sapiens
  misc_RNA (1)...(19): siRNA sense strand
aaggaauacuugacaguuu

SEQ ID NO: 1268931 - RNA, 19 nt, Homo sapiens
  misc_RNA (1)...(19): siRNA sense strand
ucagaugacgccuguuaua

SEQ ID NO: 1268932 - RNA, 19 nt, Homo sapiens
  misc_RNA (1)...(19): siRNA sense strand
gaaaacacaccuuuaguga

SEQ ID NO: 1268933 - RNA, 19 nt, Homo sapiens
  misc_RNA (1)...(19): siRNA sense strand
gaugacgccuguuauagag

SEQ ID NO: 1268934 - RNA, 19 nt, Homo sapiens
  misc_RNA (1)...(19): siRNA sense strand
gagaaacauguccauauau

SEQ ID NO: 1268935 - RNA, 19 nt, Homo sapiens
  misc_RNA (1)...(19): siRNA sense strand
ccacuuaccagacuaaauc

SEQ ID NO: 1268936 - RNA, 19 nt, Homo sapiens
  misc_RNA (1)...(19): siRNA sense strand
acgaguagauuauaagugu

SEQ ID NO: 1268937 - RNA, 19 nt, Homo sapiens
  misc_RNA (1)...(19): siRNA sense strand
cuacaaagcaacaguuaug

SEQ ID NO: 1268938 - RNA, 19 nt, Homo sapiens
  misc_RNA (1)...(19): siRNA sense strand
ccaccaacauuugaagcua

SEQ ID NO: 1268939 - RNA, 19 nt, Homo sapiens
  misc_RNA (1)...(19): siRNA sense strand
uauacgggauccuuuaaau

SEQ ID NO: 1268940 - RNA, 19 nt, Homo sapiens
  misc_RNA (1)...(19): siRNA sense strand
cgaguuugguuaucagaug

SEQ ID NO: 1268941 - RNA, 19 nt, Homo sapiens
  misc_RNA (1)...(19): siRNA sense strand
gaacgaguagauuauaagu

SEQ ID NO: 1268942 - RNA, 19 nt, Homo sapiens
  misc_RNA (1)...(19): siRNA sense strand
gugaggagccaccaacauu

SEQ ID NO: 1268943 - RNA, 19 nt, Homo sapiens
  misc_RNA (1)...(19): siRNA sense strand
gauggcagcgacacaauug

SEQ ID NO: 1268944 - RNA, 19 nt, Homo sapiens
  misc_RNA (1)...(19): siRNA sense strand
ucucagaugacgccuguua

SEQ ID NO: 1268945 - RNA, 19 nt, Homo sapiens
  misc_RNA (1)...(19): siRNA sense strand
gaggagccaccaacauuug

SEQ ID NO: 1268946 - RNA, 19 nt, Homo sapiens
  misc_RNA (1)...(19): siRNA sense strand
gcuauggagcucauuggua

SEQ ID NO: 1268947 - RNA, 19 nt, Homo sapiens
  misc_RNA (1)...(19): siRNA sense strand
acacaccuuuagugaagua

SEQ ID NO: 1268948 - RNA, 19 nt, Homo sapiens
  misc_RNA (1)...(19): siRNA sense strand
uagagaaacauguccauau

SEQ ID NO: 1268949 - RNA, 19 nt, Homo sapiens
  misc_RNA (1)...(19): siRNA sense strand
guuccaaagugucuuaaag

SEQ ID NO: 1268950 - RNA, 19 nt, Homo sapiens
  misc_RNA (1)...(19): siRNA sense strand
ggugaacgaguagauuaua

SEQ ID NO: 1268951 - RNA, 19 nt, Homo sapiens
  misc_RNA (1)...(19): siRNA sense strand
gaaguagaaguauuugagu

SEQ ID NO: 1268952 - RNA, 19 nt, Homo sapiens
  misc_RNA (1)...(19): siRNA sense strand
gaaacauguccauauauac

SEQ ID NO: 1268953 - RNA, 19 nt, Homo sapiens
  misc_RNA (1)...(19): siRNA sense strand
ugacgccuguuauagagaa

SEQ ID NO: 1268954 - RNA, 19 nt, Homo sapiens
  misc_RNA (1)...(19): siRNA sense strand
cgaguagauuauaagugua

SEQ ID NO: 1268955 - RNA, 19 nt, Homo sapiens
  misc_RNA (1)...(19): siRNA sense strand
gcacuuuauuuguaaugag

SEQ ID NO: 1268956 - RNA, 19 nt, Homo sapiens
  misc_RNA (1)...(19): siRNA sense strand
guagaaguauuugaguauc

SEQ ID NO: 1268957 - RNA, 19 nt, Homo sapiens
  misc_RNA (1)...(19): siRNA sense strand
guauuugaguaucuugaug

SEQ ID NO: 1268958 - RNA, 19 nt, Homo sapiens
  misc_RNA (1)...(19): siRNA sense strand
aggaauacuugacaguuug

SEQ ID NO: 1268959 - RNA, 19 nt, Homo sapiens
  misc_RNA (1)...(19): siRNA sense strand
ccaaaacccuacuaugaga

SEQ ID NO: 1268960 - RNA, 19 nt, Homo sapiens
  misc_RNA (1)...(19): siRNA sense strand
aguguaaaguggucaaaug

SEQ ID NO: 1268961 - RNA, 19 nt, Homo sapiens
  misc_RNA (1)...(19): siRNA sense strand
ccacccauacuauuuguga

SEQ ID NO: 1268962 - RNA, 19 nt, Homo sapiens
  misc_RNA (1)...(19): siRNA sense strand
uuggagagagcacgauuua

SEQ ID NO: 1268963 - RNA, 19 nt, Homo sapiens
  misc_RNA (1)...(19): siRNA sense strand
gguuaucagaugcacuuua

SEQ ID NO: 1268964 - RNA, 19 nt, Homo sapiens
  misc_RNA (1)...(19): siRNA sense strand
caccaacauuugaagcuau

SEQ ID NO: 1268965 - RNA, 19 nt, Homo sapiens
  misc_RNA (1)...(19): siRNA sense strand
ugaggagccaccaacauuu

SEQ ID NO: 1268966 - RNA, 19 nt, Homo sapiens
  misc_RNA (1)...(19): siRNA sense strand
ggaaggaauacuugacagu

SEQ ID NO: 1268967 - RNA, 19 nt, Homo sapiens
  misc_RNA (1)...(19): siRNA sense strand
gaggaaggaauacuugaca

SEQ ID NO: 1268968 - RNA, 19 nt, Homo sapiens
  misc_RNA (1)...(19): siRNA sense strand
ccaguuccaaagugucuua

SEQ ID NO: 1268969 - RNA, 19 nt, Homo sapiens
  misc_RNA (1)...(19): siRNA sense strand
ugaguaucuugaugcagua

SEQ ID NO: 1268970 - RNA, 19 nt, Homo sapiens
  misc_RNA (1)...(19): siRNA sense strand
caccuuuagugaaguagaa

SEQ ID NO: 1268971 - RNA, 19 nt, Homo sapiens
  misc_RNA (1)...(19): siRNA sense strand
acagauaucaggauuugga

SEQ ID NO: 1268972 - RNA, 19 nt, Homo sapiens
  misc_RNA (1)...(19): siRNA sense strand
ucauugcugugauuguuau

SEQ ID NO: 1268973 - RNA, 19 nt, Homo sapiens
  misc_RNA (1)...(19): siRNA sense strand
ucagaugcacuuuauuugu

SEQ ID NO: 1268974 - RNA, 19 nt, Homo sapiens
  misc_RNA (1)...(19): siRNA sense strand
gugcugcuccagaguguaa

SEQ ID NO: 1268975 - RNA, 19 nt, Homo sapiens
  misc_RNA (1)...(19): siRNA sense strand
ggaaaacacaccuuuagug

SEQ ID NO: 1268976 - RNA, 19 nt, Homo sapiens
  misc_RNA (1)...(19): siRNA sense strand
aaggaucaguagcaauuug

SEQ ID NO: 1268977 - RNA, 19 nt, Homo sapiens
  misc_RNA (1)...(19): siRNA sense strand
uauauacgggauccuuuaa

SEQ ID NO: 1268978 - RNA, 19 nt, Homo sapiens
  misc_RNA (1)...(19): siRNA sense strand
ugaaguagaaguauuugag

SEQ ID NO: 1268979 - RNA, 19 nt, Homo sapiens
  misc_RNA (1)...(19): siRNA sense strand
cuugacaguuuggauguuu

SEQ ID NO: 1268980 - RNA, 19 nt, Homo sapiens
  misc_RNA (1)...(19): siRNA sense strand
cauauauacgggauccuuu

SEQ ID NO: 1268981 - RNA, 19 nt, Homo sapiens
  misc_RNA (1)...(19): siRNA sense strand
auauauacgggauccuuua

SEQ ID NO: 1268982 - RNA, 19 nt, Homo sapiens
  misc_RNA (1)...(19): siRNA sense strand
cuuaaaggaucaguagcaa

SEQ ID NO: 1268983 - RNA, 19 nt, Homo sapiens
  misc_RNA (1)...(19): siRNA sense strand
uaaaccugaggaaggaaua

SEQ ID NO: 1268984 - RNA, 19 nt, Homo sapiens
  misc_RNA (1)...(19): siRNA sense strand
agaugacgccuguuauaga

SEQ ID NO: 1268985 - RNA, 19 nt, Homo sapiens
  misc_RNA (1)...(19): siRNA sense strand
ugugauuguuauugccaua

SEQ ID NO: 1268986 - RNA, 19 nt, Homo sapiens
  misc_RNA (1)...(19): siRNA sense strand
gagagcacgauuuauugug

SEQ ID NO: 1268987 - RNA, 19 nt, Homo sapiens
  misc_RNA (1)...(19): siRNA sense strand
gaaguauuugaguaucuug

SEQ ID NO: 1268988 - RNA, 19 nt, Homo sapiens
  misc_RNA (1)...(19): siRNA sense strand
ggcuaccugucucagauga

SEQ ID NO: 1268989 - RNA, 19 nt, Homo sapiens
  misc_RNA (1)...(19): siRNA sense strand
gauaucaggauuuggaaaa

SEQ ID NO: 1268990 - RNA, 19 nt, Homo sapiens
  misc_RNA (1)...(19): siRNA sense strand
ccucuugccacccauacua

SEQ ID NO: 1268991 - RNA, 19 nt, Homo sapiens
  misc_RNA (1)...(19): siRNA sense strand
ccaugguguugcugcugua

SEQ ID NO: 1268992 - RNA, 19 nt, Homo sapiens
  misc_RNA (1)...(19): siRNA sense strand
cagaugacgccuguuauag

SEQ ID NO: 1268993 - RNA, 19 nt, Homo sapiens
  misc_RNA (1)...(19): siRNA sense strand
cagaugguggagcugaaua

SEQ ID NO: 1268994 - RNA, 19 nt, Homo sapiens
  misc_RNA (1)...(19): siRNA sense strand
gucauugcugugauuguua

SEQ ID NO: 1268995 - RNA, 19 nt, Homo sapiens
  misc_RNA (1)...(19): siRNA sense strand
ggagccaccaacauuugaa

SEQ ID NO: 1268996 - RNA, 19 nt, Homo sapiens
  misc_RNA (1)...(19): siRNA sense strand
uuggugaacgaguagauua

SEQ ID NO: 1268997 - RNA, 19 nt, Homo sapiens
  misc_RNA (1)...(19): siRNA sense strand
gcgcuuuccuggguugcuu

SEQ ID NO: 1268998 - RNA, 19 nt, Homo sapiens
  misc_RNA (1)...(19): siRNA sense strand
uacuacaaagcaacaguua

SEQ ID NO: 1268999 - RNA, 19 nt, Homo sapiens
  misc_RNA (1)...(19): siRNA sense strand
cuugaugcaguaacuuaua

SEQ ID NO: 1269000 - RNA, 19 nt, Homo sapiens
  misc_RNA (1)...(19): siRNA sense strand
aaacauguccauauauacg

SEQ ID NO: 1269001 - RNA, 19 nt, Homo sapiens
  misc_RNA (1)...(19): siRNA sense strand
guguaaaguggucaaaugu

SEQ ID NO: 1269002 - RNA, 19 nt, Homo sapiens
  misc_RNA (1)...(19): siRNA sense strand
cuuacgaguuugguuauca

SEQ ID NO: 1269003 - RNA, 19 nt, Homo sapiens
  misc_RNA (1)...(19): siRNA sense strand
uacgggauccuuuaaaugg

SEQ ID NO: 1269004 - RNA, 19 nt, Homo sapiens
  misc_RNA (1)...(19): siRNA sense strand
gcagaugguggagcugaau

SEQ ID NO: 1269005 - RNA, 19 nt, Homo sapiens
  misc_RNA (1)...(19): siRNA sense strand
aaccaaaacccuacuauga

SEQ ID NO: 1269006 - RNA, 19 nt, Homo sapiens
  misc_RNA (1)...(19): siRNA sense strand
uugaugcaguaacuuauag

SEQ ID NO: 1269007 - RNA, 19 nt, Homo sapiens
  misc_RNA (1)...(19): siRNA sense strand
ggagcugaauaugccacuu

SEQ ID NO: 1269008 - RNA, 19 nt, Homo sapiens
  misc_RNA (1)...(19): siRNA sense strand
cgauggcagcgacacaauu

SEQ ID NO: 1269009 - RNA, 19 nt, Homo sapiens
  misc_RNA (1)...(19): siRNA sense strand
gauccauuuucacuuauug

SEQ ID NO: 1269010 - RNA, 19 nt, Homo sapiens
  misc_RNA (1)...(19): siRNA sense strand
ggagagagcacgauuuauu

SEQ ID NO: 1269011 - RNA, 19 nt, Homo sapiens
  misc_RNA (1)...(19): siRNA sense strand
agagaaacauguccauaua

SEQ ID NO: 1269012 - RNA, 19 nt, Homo sapiens
  misc_RNA (1)...(19): siRNA sense strand
cagaugcacuuuauuugua

SEQ ID NO: 1269013 - RNA, 19 nt, Homo sapiens
  misc_RNA (1)...(19): siRNA sense strand
ggacuuacgaguuugguua

SEQ ID NO: 1269014 - RNA, 19 nt, Homo sapiens
  misc_RNA (1)...(19): siRNA sense strand
aaacagauaucaggauuug

SEQ ID NO: 1269015 - RNA, 19 nt, Homo sapiens
  misc_RNA (1)...(19): siRNA sense strand
cuauggagcucauugguaa

SEQ ID NO: 1269016 - RNA, 19 nt, Homo sapiens
  misc_RNA (1)...(19): siRNA sense strand
aaacacaccuuuagugaag

SEQ ID NO: 1269017 - RNA, 19 nt, Homo sapiens
  misc_RNA (1)...(19): siRNA sense strand
gaacuuaaaggaucaguag

SEQ ID NO: 1269018 - RNA, 19 nt, Homo sapiens
  misc_RNA (1)...(19): siRNA sense strand
gaaaacagauaucaggauu

SEQ ID NO: 1269019 - RNA, 19 nt, Homo sapiens
  misc_RNA (1)...(19): siRNA sense strand
uaaaggaucaguagcaauu

SEQ ID NO: 1269020 - RNA, 19 nt, Homo sapiens
  misc_RNA (1)...(19): siRNA sense strand
aaaugggacuuacgaguuu

SEQ ID NO: 1269021 - RNA, 19 nt, Homo sapiens
  misc_RNA (1)...(19): siRNA sense strand
guuaucagaugcacuuuau

SEQ ID NO: 1269022 - RNA, 19 nt, Homo sapiens
  misc_RNA (1)...(19): siRNA sense strand
ugagauuggugaacgagua

SEQ ID NO: 1269023 - RNA, 19 nt, Homo sapiens
  misc_RNA (1)...(19): siRNA sense strand
gugaacgaguagauuauaa

SEQ ID NO: 1269024 - RNA, 19 nt, Homo sapiens
  misc_RNA (1)...(19): siRNA sense strand
gagagagcacgauuuauug

SEQ ID NO: 1269025 - RNA, 19 nt, Homo sapiens
  misc_RNA (1)...(19): siRNA sense strand
caaaugggacuuacgaguu

SEQ ID NO: 1269026 - RNA, 19 nt, Homo sapiens
  misc_RNA (1)...(19): siRNA sense strand
ggucauugcugugauuguu

SEQ ID NO: 1269027 - RNA, 19 nt, Homo sapiens
  misc_RNA (1)...(19): siRNA sense strand
ccagauccauuuucacuua

SEQ ID NO: 1269028 - RNA, 19 nt, Homo sapiens
  misc_RNA (1)...(19): siRNA sense strand
gaaggaauacuugacaguu

SEQ ID NO: 1269029 - RNA, 19 nt, Homo sapiens
  misc_RNA (1)...(19): siRNA sense strand
aaggaauacuugacaguuu

SEQ ID NO: 1269030 - RNA, 19 nt, Homo sapiens
  misc_RNA (1)...(19): siRNA sense strand
ucagaugacgccuguuaua

SEQ ID NO: 1269031 - RNA, 19 nt, Homo sapiens
  misc_RNA (1)...(19): siRNA sense strand
gaaaacacaccuuuaguga

SEQ ID NO: 1269032 - RNA, 19 nt, Homo sapiens
  misc_RNA (1)...(19): siRNA sense strand
gaugacgccuguuauagag

SEQ ID NO: 1269033 - RNA, 19 nt, Homo sapiens
  misc_RNA (1)...(19): siRNA sense strand
gagaaacauguccauauau

SEQ ID NO: 1269034 - RNA, 19 nt, Homo sapiens
  misc_RNA (1)...(19): siRNA sense strand
acgaguagauuauaagugu

SEQ ID NO: 1269035 - RNA, 19 nt, Homo sapiens
  misc_RNA (1)...(19): siRNA sense strand
cuacaaagcaacaguuaug

SEQ ID NO: 1269036 - RNA, 19 nt, Homo sapiens
  misc_RNA (1)...(19): siRNA sense strand
ccaccaacauuugaagcua

SEQ ID NO: 1269037 - RNA, 19 nt, Homo sapiens
  misc_RNA (1)...(19): siRNA sense strand
uauacgggauccuuuaaau

SEQ ID NO: 1269038 - RNA, 19 nt, Homo sapiens
  misc_RNA (1)...(19): siRNA sense strand
cgaguuugguuaucagaug

SEQ ID NO: 1269039 - RNA, 19 nt, Homo sapiens
  misc_RNA (1)...(19): siRNA sense strand
gaacgaguagauuauaagu

SEQ ID NO: 1269040 - RNA, 19 nt, Homo sapiens
  misc_RNA (1)...(19): siRNA sense strand
gugaggagccaccaacauu

SEQ ID NO: 1269041 - RNA, 19 nt, Homo sapiens
  misc_RNA (1)...(19): siRNA sense strand
gauggcagcgacacaauug

SEQ ID NO: 1269042 - RNA, 19 nt, Homo sapiens
  misc_RNA (1)...(19): siRNA sense strand
gcuauggagcucauuggua

SEQ ID NO: 1269043 - RNA, 19 nt, Homo sapiens
  misc_RNA (1)...(19): siRNA sense strand
gaggagccaccaacauuug

SEQ ID NO: 1269044 - RNA, 19 nt, Homo sapiens
  misc_RNA (1)...(19): siRNA sense strand
acacaccuuuagugaagua

SEQ ID NO: 1269045 - RNA, 19 nt, Homo sapiens
  misc_RNA (1)...(19): siRNA sense strand
ucucagaugacgccuguua

SEQ ID NO: 1269046 - RNA, 19 nt, Homo sapiens
  misc_RNA (1)...(19): siRNA sense strand
uagagaaacauguccauau

SEQ ID NO: 1269047 - RNA, 19 nt, Homo sapiens
  misc_RNA (1)...(19): siRNA sense strand
guuccaaagugucuuaaag

SEQ ID NO: 1269048 - RNA, 19 nt, Homo sapiens
  misc_RNA (1)...(19): siRNA sense strand
ggugaacgaguagauuaua

SEQ ID NO: 1269049 - RNA, 19 nt, Homo sapiens
  misc_RNA (1)...(19): siRNA sense strand
gaaguagaaguauuugagu

SEQ ID NO: 1269050 - RNA, 19 nt, Homo sapiens
  misc_RNA (1)...(19): siRNA sense strand
gaaacauguccauauauac

SEQ ID NO: 1269051 - RNA, 19 nt, Homo sapiens
  misc_RNA (1)...(19): siRNA sense strand
ugacgccuguuauagagaa

SEQ ID NO: 1269052 - RNA, 19 nt, Homo sapiens
  misc_RNA (1)...(19): siRNA sense strand
cgaguagauuauaagugua

SEQ ID NO: 1269053 - RNA, 19 nt, Homo sapiens
  misc_RNA (1)...(19): siRNA sense strand
gcacuuuauuuguaaugag

SEQ ID NO: 1269054 - RNA, 19 nt, Homo sapiens
  misc_RNA (1)...(19): siRNA sense strand
guagaaguauuugaguauc

SEQ ID NO: 1269055 - RNA, 19 nt, Homo sapiens
  misc_RNA (1)...(19): siRNA sense strand
guauuugaguaucuugaug

SEQ ID NO: 1269056 - RNA, 19 nt, Homo sapiens
  misc_RNA (1)...(19): siRNA sense strand
aggaauacuugacaguuug

SEQ ID NO: 1269057 - RNA, 19 nt, Homo sapiens
  misc_RNA (1)...(19): siRNA sense strand
ccaaaacccuacuaugaga

SEQ ID NO: 1269058 - RNA, 19 nt, Homo sapiens
  misc_RNA (1)...(19): siRNA sense strand
aguguaaaguggucaaaug

SEQ ID NO: 1269059 - RNA, 19 nt, Homo sapiens
  misc_RNA (1)...(19): siRNA sense strand
ccacccauacuauuuguga

SEQ ID NO: 1269060 - RNA, 19 nt, Homo sapiens
  misc_RNA (1)...(19): siRNA sense strand
caccaacauuugaagcuau

SEQ ID NO: 1269061 - RNA, 19 nt, Homo sapiens
  misc_RNA (1)...(19): siRNA sense strand
uuggagagagcacgauuua

SEQ ID NO: 1269062 - RNA, 19 nt, Homo sapiens
  misc_RNA (1)...(19): siRNA sense strand
gguuaucagaugcacuuua

SEQ ID NO: 1269063 - RNA, 19 nt, Homo sapiens
  misc_RNA (1)...(19): siRNA sense strand
ugaggagccaccaacauuu

SEQ ID NO: 1269064 - RNA, 19 nt, Homo sapiens
  misc_RNA (1)...(19): siRNA sense strand
ggaaggaauacuugacagu

SEQ ID NO: 1269065 - RNA, 19 nt, Homo sapiens
  misc_RNA (1)...(19): siRNA sense strand
gaggaaggaauacuugaca

SEQ ID NO: 1269066 - RNA, 19 nt, Homo sapiens
  misc_RNA (1)...(19): siRNA sense strand
ccaguuccaaagugucuua

SEQ ID NO: 1269067 - RNA, 19 nt, Homo sapiens
  misc_RNA (1)...(19): siRNA sense strand
ugaguaucuugaugcagua

SEQ ID NO: 1269068 - RNA, 19 nt, Homo sapiens
  misc_RNA (1)...(19): siRNA sense strand
caccuuuagugaaguagaa

SEQ ID NO: 1269069 - RNA, 19 nt, Homo sapiens
  misc_RNA (1)...(19): siRNA sense strand
acagauaucaggauuugga

SEQ ID NO: 1269070 - RNA, 19 nt, Homo sapiens
  misc_RNA (1)...(19): siRNA sense strand
ucauugcugugauuguuau

SEQ ID NO: 1269071 - RNA, 19 nt, Homo sapiens
  misc_RNA (1)...(19): siRNA sense strand
ucagaugcacuuuauuugu

SEQ ID NO: 1269072 - RNA, 19 nt, Homo sapiens
  misc_RNA (1)...(19): siRNA sense strand
gugcugcuccagaguguaa

SEQ ID NO: 1269073 - RNA, 19 nt, Homo sapiens
  misc_RNA (1)...(19): siRNA sense strand
ggaaaacacaccuuuagug

SEQ ID NO: 1269074 - RNA, 19 nt, Homo sapiens
  misc_RNA (1)...(19): siRNA sense strand
aaggaucaguagcaauuug

SEQ ID NO: 1269075 - RNA, 19 nt, Homo sapiens
  misc_RNA (1)...(19): siRNA sense strand
uauauacgggauccuuuaa

SEQ ID NO: 1269076 - RNA, 19 nt, Homo sapiens
  misc_RNA (1)...(19): siRNA sense strand
ugaaguagaaguauuugag

SEQ ID NO: 1269077 - RNA, 19 nt, Homo sapiens
  misc_RNA (1)...(19): siRNA sense strand
cuugacaguuuggauguuu

SEQ ID NO: 1269078 - RNA, 19 nt, Homo sapiens
  misc_RNA (1)...(19): siRNA sense strand
cauauauacgggauccuuu

SEQ ID NO: 1269079 - RNA, 19 nt, Homo sapiens
  misc_RNA (1)...(19): siRNA sense strand
auauauacgggauccuuua

SEQ ID NO: 1269080 - RNA, 19 nt, Homo sapiens
  misc_RNA (1)...(19): siRNA sense strand
cuuaaaggaucaguagcaa

SEQ ID NO: 1269081 - RNA, 19 nt, Homo sapiens
  misc_RNA (1)...(19): siRNA sense strand
uaaaccugaggaaggaaua

SEQ ID NO: 1269082 - RNA, 19 nt, Homo sapiens
  misc_RNA (1)...(19): siRNA sense strand
agaugacgccuguuauaga

SEQ ID NO: 1269083 - RNA, 19 nt, Homo sapiens
  misc_RNA (1)...(19): siRNA sense strand
ugugauuguuauugccaua

SEQ ID NO: 1269084 - RNA, 19 nt, Homo sapiens
  misc_RNA (1)...(19): siRNA sense strand
gagagcacgauuuauugug

SEQ ID NO: 1269085 - RNA, 19 nt, Homo sapiens
  misc_RNA (1)...(19): siRNA sense strand
gaaguauuugaguaucuug

SEQ ID NO: 1269086 - RNA, 19 nt, Homo sapiens
  misc_RNA (1)...(19): siRNA sense strand
ggcuaccugucucagauga

SEQ ID NO: 1269087 - RNA, 19 nt, Homo sapiens
  misc_RNA (1)...(19): siRNA sense strand
gauaucaggauuuggaaaa

SEQ ID NO: 1269088 - RNA, 19 nt, Homo sapiens
  misc_RNA (1)...(19): siRNA sense strand
ccucuugccacccauacua

SEQ ID NO: 1269089 - RNA, 19 nt, Homo sapiens
  misc_RNA (1)...(19): siRNA sense strand
ccaugguguugcugcugua

SEQ ID NO: 1269090 - RNA, 19 nt, Homo sapiens
  misc_RNA (1)...(19): siRNA sense strand
cagaugacgccuguuauag

SEQ ID NO: 1269091 - RNA, 19 nt, Homo sapiens
  misc_RNA (1)...(19): siRNA sense strand
uuggugaacgaguagauua

SEQ ID NO: 1269092 - RNA, 19 nt, Homo sapiens
  misc_RNA (1)...(19): siRNA sense strand
gucauugcugugauuguua

SEQ ID NO: 1269093 - RNA, 19 nt, Homo sapiens
  misc_RNA (1)...(19): siRNA sense strand
ggagccaccaacauuugaa

SEQ ID NO: 1269094 - RNA, 19 nt, Homo sapiens
  misc_RNA (1)...(19): siRNA sense strand
gcgcuuuccuggguugcuu

SEQ ID NO: 1269095 - RNA, 19 nt, Homo sapiens
  misc_RNA (1)...(19): siRNA sense strand
uacuacaaagcaacaguua

SEQ ID NO: 1269096 - RNA, 19 nt, Homo sapiens
  misc_RNA (1)...(19): siRNA sense strand
cuugaugcaguaacuuaua

SEQ ID NO: 1269097 - RNA, 19 nt, Homo sapiens
  misc_RNA (1)...(19): siRNA sense strand
aaacauguccauauauacg

SEQ ID NO: 1269098 - RNA, 19 nt, Homo sapiens
  misc_RNA (1)...(19): siRNA sense strand
guguaaaguggucaaaugu

SEQ ID NO: 1269099 - RNA, 19 nt, Homo sapiens
  misc_RNA (1)...(19): siRNA sense strand
cuuacgaguuugguuauca

SEQ ID NO: 1269100 - RNA, 19 nt, Homo sapiens
  misc_RNA (1)...(19): siRNA sense strand
uacgggauccuuuaaaugg

SEQ ID NO: 1269101 - RNA, 19 nt, Homo sapiens
  misc_RNA (1)...(19): siRNA sense strand
aaccaaaacccuacuauga

SEQ ID NO: 1269102 - RNA, 19 nt, Homo sapiens
  misc_RNA (1)...(19): siRNA sense strand
cccaauaugugaaaagguu

SEQ ID NO: 1269103 - RNA, 19 nt, Homo sapiens
  misc_RNA (1)...(19): siRNA sense strand
cgauggcagcgacacaauu

SEQ ID NO: 1269104 - RNA, 19 nt, Homo sapiens
  misc_RNA (1)...(19): siRNA sense strand
gauccauuuucacuuauug

SEQ ID NO: 1269105 - RNA, 19 nt, Homo sapiens
  misc_RNA (1)...(19): siRNA sense strand
uugaugcaguaacuuauag

SEQ ID NO: 1269106 - RNA, 19 nt, Homo sapiens
  misc_RNA (1)...(19): siRNA sense strand
guaucuugaugcaguaacu

SEQ ID NO: 1269107 - RNA, 19 nt, Homo sapiens
  misc_RNA (1)...(19): siRNA sense strand
caacauuugaagcuaugga

SEQ ID NO: 1269108 - RNA, 19 nt, Homo sapiens
  misc_RNA (1)...(19): siRNA sense strand
gagauuggugaacgaguag

SEQ ID NO: 1269109 - RNA, 19 nt, Homo sapiens
  misc_RNA (1)...(19): siRNA sense strand
ggagagagcacgauuuauu

SEQ ID NO: 1269110 - RNA, 19 nt, Homo sapiens
  misc_RNA (1)...(19): siRNA sense strand
agagaaacauguccauaua

SEQ ID NO: 1269111 - RNA, 19 nt, Homo sapiens
  misc_RNA (1)...(19): siRNA sense strand
cagaugcacuuuauuugua

SEQ ID NO: 1269112 - RNA, 19 nt, Homo sapiens
  misc_RNA (1)...(19): siRNA sense strand
ggacuuacgaguuugguua

SEQ ID NO: 1269113 - RNA, 19 nt, Homo sapiens
  misc_RNA (1)...(19): siRNA sense strand
aaacagauaucaggauuug

SEQ ID NO: 1269114 - RNA, 19 nt, Homo sapiens
  misc_RNA (1)...(19): siRNA sense strand
cuauggagcucauugguaa

SEQ ID NO: 1269115 - RNA, 19 nt, Homo sapiens
  misc_RNA (1)...(19): siRNA sense strand
aaacacaccuuuagugaag

SEQ ID NO: 1269116 - RNA, 19 nt, Homo sapiens
  misc_RNA (1)...(19): siRNA sense strand
gaacuuaaaggaucaguag

SEQ ID NO: 1269117 - RNA, 19 nt, Homo sapiens
  misc_RNA (1)...(19): siRNA sense strand
gaaaacagauaucaggauu

SEQ ID NO: 1269118 - RNA, 19 nt, Homo sapiens
  misc_RNA (1)...(19): siRNA sense strand
uaaaggaucaguagcaauu

SEQ ID NO: 1269119 - RNA, 19 nt, Homo sapiens
  misc_RNA (1)...(19): siRNA sense strand
aaaugggacuuacgaguuu

SEQ ID NO: 1269120 - RNA, 19 nt, Homo sapiens
  misc_RNA (1)...(19): siRNA sense strand
guuaucagaugcacuuuau

SEQ ID NO: 1269121 - RNA, 19 nt, Homo sapiens
  misc_RNA (1)...(19): siRNA sense strand
gagcugaauaugccacuua

SEQ ID NO: 1269122 - RNA, 19 nt, Homo sapiens
  misc_RNA (1)...(19): siRNA sense strand
ugagauuggugaacgagua

SEQ ID NO: 1269123 - RNA, 19 nt, Homo sapiens
  misc_RNA (1)...(19): siRNA sense strand
gugaacgaguagauuauaa

SEQ ID NO: 1269124 - RNA, 19 nt, Homo sapiens
  misc_RNA (1)...(19): siRNA sense strand
gagagagcacgauuuauug

SEQ ID NO: 1269125 - RNA, 19 nt, Homo sapiens
  misc_RNA (1)...(19): siRNA sense strand
caaaugggacuuacgaguu

SEQ ID NO: 1269126 - RNA, 19 nt, Homo sapiens
  misc_RNA (1)...(19): siRNA sense strand
ggucauugcugugauuguu

SEQ ID NO: 1269127 - RNA, 19 nt, Homo sapiens
  misc_RNA (1)...(19): siRNA sense strand
ccagauccauuuucacuua

SEQ ID NO: 1269128 - RNA, 19 nt, Homo sapiens
  misc_RNA (1)...(19): siRNA sense strand
gaaggaauacuugacaguu

SEQ ID NO: 1269129 - RNA, 19 nt, Homo sapiens
  misc_RNA (1)...(19): siRNA sense strand
aaggaauacuugacaguuu

SEQ ID NO: 1269130 - RNA, 19 nt, Homo sapiens
  misc_RNA (1)...(19): siRNA sense strand
ucagaugacgccuguuaua

SEQ ID NO: 1269131 - RNA, 19 nt, Homo sapiens
  misc_RNA (1)...(19): siRNA sense strand
gaaaacacaccuuuaguga

SEQ ID NO: 1269132 - RNA, 19 nt, Homo sapiens
  misc_RNA (1)...(19): siRNA sense strand
gaugacgccuguuauagag

SEQ ID NO: 1269133 - RNA, 19 nt, Homo sapiens
  misc_RNA (1)...(19): siRNA sense strand
gagaaacauguccauauau

SEQ ID NO: 1269134 - RNA, 19 nt, Homo sapiens
  misc_RNA (1)...(19): siRNA sense strand
ccacuuaccagacuaaauc

SEQ ID NO: 1269135 - RNA, 19 nt, Homo sapiens
  misc_RNA (1)...(19): siRNA sense strand
acgaguagauuauaagugu

SEQ ID NO: 1269136 - RNA, 19 nt, Homo sapiens
  misc_RNA (1)...(19): siRNA sense strand
cuacaaagcaacaguuaug

SEQ ID NO: 1269137 - RNA, 19 nt, Homo sapiens
  misc_RNA (1)...(19): siRNA sense strand
ccaccaacauuugaagcua

SEQ ID NO: 1269138 - RNA, 19 nt, Homo sapiens
  misc_RNA (1)...(19): siRNA sense strand
uauacgggauccuuuaaau

SEQ ID NO: 1269139 - RNA, 19 nt, Homo sapiens
  misc_RNA (1)...(19): siRNA sense strand
cgaguuugguuaucagaug

SEQ ID NO: 1269140 - RNA, 19 nt, Homo sapiens
  misc_RNA (1)...(19): siRNA sense strand
gaacgaguagauuauaagu

SEQ ID NO: 1269141 - RNA, 19 nt, Homo sapiens
  misc_RNA (1)...(19): siRNA sense strand
gugaggagccaccaacauu

SEQ ID NO: 1269142 - RNA, 19 nt, Homo sapiens
  misc_RNA (1)...(19): siRNA sense strand
gauggcagcgacacaauug

SEQ ID NO: 1269143 - RNA, 19 nt, Homo sapiens
  misc_RNA (1)...(19): siRNA sense strand
ucucagaugacgccuguua

SEQ ID NO: 1269144 - RNA, 19 nt, Homo sapiens
  misc_RNA (1)...(19): siRNA sense strand
gaggagccaccaacauuug

SEQ ID NO: 1269145 - RNA, 19 nt, Homo sapiens
  misc_RNA (1)...(19): siRNA sense strand
gcuauggagcucauuggua

SEQ ID NO: 1269146 - RNA, 19 nt, Homo sapiens
  misc_RNA (1)...(19): siRNA sense strand
acacaccuuuagugaagua

SEQ ID NO: 1269147 - RNA, 19 nt, Homo sapiens
  misc_RNA (1)...(19): siRNA sense strand
uagagaaacauguccauau

SEQ ID NO: 1269148 - RNA, 19 nt, Homo sapiens
  misc_RNA (1)...(19): siRNA sense strand
ggugaacgaguagauuaua

SEQ ID NO: 1269149 - RNA, 19 nt, Homo sapiens
  misc_RNA (1)...(19): siRNA sense strand
gaaguagaaguauuugagu

SEQ ID NO: 1269150 - RNA, 19 nt, Homo sapiens
  misc_RNA (1)...(19): siRNA sense strand
gaaacauguccauauauac

SEQ ID NO: 1269151 - RNA, 19 nt, Homo sapiens
  misc_RNA (1)...(19): siRNA sense strand
ugacgccuguuauagagaa

SEQ ID NO: 1269152 - RNA, 19 nt, Homo sapiens
  misc_RNA (1)...(19): siRNA sense strand
cgaguagauuauaagugua

SEQ ID NO: 1269153 - RNA, 19 nt, Homo sapiens
  misc_RNA (1)...(19): siRNA sense strand
gcacuuuauuuguaaugag

SEQ ID NO: 1269154 - RNA, 19 nt, Homo sapiens
  misc_RNA (1)...(19): siRNA sense strand
guagaaguauuugaguauc

SEQ ID NO: 1269155 - RNA, 19 nt, Homo sapiens
  misc_RNA (1)...(19): siRNA sense strand
guauuugaguaucuugaug

SEQ ID NO: 1269156 - RNA, 19 nt, Homo sapiens
  misc_RNA (1)...(19): siRNA sense strand
aggaauacuugacaguuug

SEQ ID NO: 1269157 - RNA, 19 nt, Homo sapiens
  misc_RNA (1)...(19): siRNA sense strand
ccaaaacccuacuaugaga

SEQ ID NO: 1269158 - RNA, 19 nt, Homo sapiens
  misc_RNA (1)...(19): siRNA sense strand
aguguaaaguggucaaaug

SEQ ID NO: 1269159 - RNA, 19 nt, Homo sapiens
  misc_RNA (1)...(19): siRNA sense strand
ccacccauacuauuuguga

SEQ ID NO: 1269160 - RNA, 19 nt, Homo sapiens
  misc_RNA (1)...(19): siRNA sense strand
uuggagagagcacgauuua

SEQ ID NO: 1269161 - RNA, 19 nt, Homo sapiens
  misc_RNA (1)...(19): siRNA sense strand
gguuaucagaugcacuuua

SEQ ID NO: 1269162 - RNA, 19 nt, Homo sapiens
  misc_RNA (1)...(19): siRNA sense strand
caccaacauuugaagcuau

SEQ ID NO: 1269163 - RNA, 19 nt, Homo sapiens
  misc_RNA (1)...(19): siRNA sense strand
ugaggagccaccaacauuu

SEQ ID NO: 1269164 - RNA, 19 nt, Homo sapiens
  misc_RNA (1)...(19): siRNA sense strand
ggaaggaauacuugacagu

SEQ ID NO: 1269165 - RNA, 19 nt, Homo sapiens
  misc_RNA (1)...(19): siRNA sense strand
gaggaaggaauacuugaca

SEQ ID NO: 1269166 - RNA, 19 nt, Homo sapiens
  misc_RNA (1)...(19): siRNA sense strand
ugaguaucuugaugcagua

SEQ ID NO: 1269167 - RNA, 19 nt, Homo sapiens
  misc_RNA (1)...(19): siRNA sense strand
caccuuuagugaaguagaa

SEQ ID NO: 1269168 - RNA, 19 nt, Homo sapiens
  misc_RNA (1)...(19): siRNA sense strand
acagauaucaggauuugga

SEQ ID NO: 1269169 - RNA, 19 nt, Homo sapiens
  misc_RNA (1)...(19): siRNA sense strand
ucauugcugugauuguuau

SEQ ID NO: 1269170 - RNA, 19 nt, Homo sapiens
  misc_RNA (1)...(19): siRNA sense strand
ucagaugcacuuuauuugu

SEQ ID NO: 1269171 - RNA, 19 nt, Homo sapiens
  misc_RNA (1)...(19): siRNA sense strand
gugcugcuccagaguguaa

SEQ ID NO: 1269172 - RNA, 19 nt, Homo sapiens
  misc_RNA (1)...(19): siRNA sense strand
ggaaaacacaccuuuagug

SEQ ID NO: 1269173 - RNA, 19 nt, Homo sapiens
  misc_RNA (1)...(19): siRNA sense strand
aaggaucaguagcaauuug

SEQ ID NO: 1269174 - RNA, 19 nt, Homo sapiens
  misc_RNA (1)...(19): siRNA sense strand
uauauacgggauccuuuaa

SEQ ID NO: 1269175 - RNA, 19 nt, Homo sapiens
  misc_RNA (1)...(19): siRNA sense strand
ugaaguagaaguauuugag

SEQ ID NO: 1269176 - RNA, 19 nt, Homo sapiens
  misc_RNA (1)...(19): siRNA sense strand
cuugacaguuuggauguuu

SEQ ID NO: 1269177 - RNA, 19 nt, Homo sapiens
  misc_RNA (1)...(19): siRNA sense strand
cauauauacgggauccuuu

SEQ ID NO: 1269178 - RNA, 19 nt, Homo sapiens
  misc_RNA (1)...(19): siRNA sense strand
auauauacgggauccuuua

SEQ ID NO: 1269179 - RNA, 19 nt, Homo sapiens
  misc_RNA (1)...(19): siRNA sense strand
cuuaaaggaucaguagcaa

SEQ ID NO: 1269180 - RNA, 19 nt, Homo sapiens
  misc_RNA (1)...(19): siRNA sense strand
uaaaccugaggaaggaaua

SEQ ID NO: 1269181 - RNA, 19 nt, Homo sapiens
  misc_RNA (1)...(19): siRNA sense strand
agaugacgccuguuauaga

SEQ ID NO: 1269182 - RNA, 19 nt, Homo sapiens
  misc_RNA (1)...(19): siRNA sense strand
ugugauuguuauugccaua

SEQ ID NO: 1269183 - RNA, 19 nt, Homo sapiens
  misc_RNA (1)...(19): siRNA sense strand
gagagcacgauuuauugug

SEQ ID NO: 1269184 - RNA, 19 nt, Homo sapiens
  misc_RNA (1)...(19): siRNA sense strand
gaaguauuugaguaucuug

SEQ ID NO: 1269185 - RNA, 19 nt, Homo sapiens
  misc_RNA (1)...(19): siRNA sense strand
ggcuaccugucucagauga

SEQ ID NO: 1269186 - RNA, 19 nt, Homo sapiens
  misc_RNA (1)...(19): siRNA sense strand
gauaucaggauuuggaaaa

SEQ ID NO: 1269187 - RNA, 19 nt, Homo sapiens
  misc_RNA (1)...(19): siRNA sense strand
ccucuugccacccauacua

SEQ ID NO: 1269188 - RNA, 19 nt, Homo sapiens
  misc_RNA (1)...(19): siRNA sense strand
ccaugguguugcugcugua

SEQ ID NO: 1269189 - RNA, 19 nt, Homo sapiens
  misc_RNA (1)...(19): siRNA sense strand
cagaugacgccuguuauag

SEQ ID NO: 1269190 - RNA, 19 nt, Homo sapiens
  misc_RNA (1)...(19): siRNA sense strand
cagaugguggagcugaaua

SEQ ID NO: 1269191 - RNA, 19 nt, Homo sapiens
  misc_RNA (1)...(19): siRNA sense strand
uuggugaacgaguagauua

SEQ ID NO: 1269192 - RNA, 19 nt, Homo sapiens
  misc_RNA (1)...(19): siRNA sense strand
gucauugcugugauuguua

SEQ ID NO: 1269193 - RNA, 19 nt, Homo sapiens
  misc_RNA (1)...(19): siRNA sense strand
ggagccaccaacauuugaa

SEQ ID NO: 1269194 - RNA, 19 nt, Homo sapiens
  misc_RNA (1)...(19): siRNA sense strand
gcgcuuuccuggguugcuu

SEQ ID NO: 1269195 - RNA, 19 nt, Homo sapiens
  misc_RNA (1)...(19): siRNA sense strand
uacuacaaagcaacaguua

SEQ ID NO: 1269196 - RNA, 19 nt, Homo sapiens
  misc_RNA (1)...(19): siRNA sense strand
cuugaugcaguaacuuaua

SEQ ID NO: 1269197 - RNA, 19 nt, Homo sapiens
  misc_RNA (1)...(19): siRNA sense strand
aaacauguccauauauacg

SEQ ID NO: 1269198 - RNA, 19 nt, Homo sapiens
  misc_RNA (1)...(19): siRNA sense strand
guguaaaguggucaaaugu

SEQ ID NO: 1269199 - RNA, 19 nt, Homo sapiens
  misc_RNA (1)...(19): siRNA sense strand
cuuacgaguuugguuauca

SEQ ID NO: 1269200 - RNA, 19 nt, Homo sapiens
  misc_RNA (1)...(19): siRNA sense strand
uacgggauccuuuaaaugg

SEQ ID NO: 1269201 - RNA, 19 nt, Homo sapiens
  misc_RNA (1)...(19): siRNA sense strand
gcagaugguggagcugaau

SEQ ID NO: 1269202 - RNA, 19 nt, Homo sapiens
  misc_RNA (1)...(19): siRNA sense strand
aaccaaaacccuacuauga

SEQ ID NO: 1269203 - RNA, 19 nt, Homo sapiens
  misc_RNA (1)...(19): siRNA sense strand
cccaauaugugaaaagguu

SEQ ID NO: 1269204 - RNA, 19 nt, Homo sapiens
  misc_RNA (1)...(19): siRNA sense strand
ggagcugaauaugccacuu

SEQ ID NO: 1269205 - RNA, 19 nt, Homo sapiens
  misc_RNA (1)...(19): siRNA sense strand
cgauggcagcgacacaauu

SEQ ID NO: 1269206 - RNA, 19 nt, Homo sapiens
  misc_RNA (1)...(19): siRNA sense strand
gauccauuuucacuuauug

SEQ ID NO: 1269207 - RNA, 19 nt, Homo sapiens
  misc_RNA (1)...(19): siRNA sense strand
uugaugcaguaacuuauag

SEQ ID NO: 1269208 - RNA, 19 nt, Homo sapiens
  misc_RNA (1)...(19): siRNA sense strand
guaucuugaugcaguaacu

SEQ ID NO: 1269209 - RNA, 19 nt, Homo sapiens
  misc_RNA (1)...(19): siRNA sense strand
ggagagagcacgauuuauu

SEQ ID NO: 1269210 - RNA, 19 nt, Homo sapiens
  misc_RNA (1)...(19): siRNA sense strand
agagaaacauguccauaua

SEQ ID NO: 1269211 - RNA, 19 nt, Homo sapiens
  misc_RNA (1)...(19): siRNA sense strand
cagaugcacuuuauuugua

SEQ ID NO: 1269212 - RNA, 19 nt, Homo sapiens
  misc_RNA (1)...(19): siRNA sense strand
ggacuuacgaguuugguua

SEQ ID NO: 1269213 - RNA, 19 nt, Homo sapiens
  misc_RNA (1)...(19): siRNA sense strand
aaacagauaucaggauuug

SEQ ID NO: 1269214 - RNA, 19 nt, Homo sapiens
  misc_RNA (1)...(19): siRNA sense strand
cuauggagcucauugguaa

SEQ ID NO: 1269215 - RNA, 19 nt, Homo sapiens
  misc_RNA (1)...(19): siRNA sense strand
aaacacaccuuuagugaag

SEQ ID NO: 1269216 - RNA, 19 nt, Homo sapiens
  misc_RNA (1)...(19): siRNA sense strand
gaacuuaaaggaucaguag

SEQ ID NO: 1269217 - RNA, 19 nt, Homo sapiens
  misc_RNA (1)...(19): siRNA sense strand
gaaaacagauaucaggauu

SEQ ID NO: 1269218 - RNA, 19 nt, Homo sapiens
  misc_RNA (1)...(19): siRNA sense strand
uaaaggaucaguagcaauu

SEQ ID NO: 1269219 - RNA, 19 nt, Homo sapiens
  misc_RNA (1)...(19): siRNA sense strand
aaaugggacuuacgaguuu

SEQ ID NO: 1269220 - RNA, 19 nt, Homo sapiens
  misc_RNA (1)...(19): siRNA sense strand
guuaucagaugcacuuuau

SEQ ID NO: 1269221 - RNA, 19 nt, Homo sapiens
  misc_RNA (1)...(19): siRNA sense strand
gagcugaauaugccacuua

SEQ ID NO: 1269222 - RNA, 19 nt, Homo sapiens
  misc_RNA (1)...(19): siRNA sense strand
gagcagagaggcugaauag

SEQ ID NO: 1269223 - RNA, 19 nt, Homo sapiens
  misc_RNA (1)...(19): siRNA sense strand
ugagauuggugaacgagua

SEQ ID NO: 1269224 - RNA, 19 nt, Homo sapiens
  misc_RNA (1)...(19): siRNA sense strand
gugaacgaguagauuauaa

SEQ ID NO: 1269225 - RNA, 19 nt, Homo sapiens
  misc_RNA (1)...(19): siRNA sense strand
gagagagcacgauuuauug

SEQ ID NO: 1269226 - RNA, 19 nt, Homo sapiens
  misc_RNA (1)...(19): siRNA sense strand
caaaugggacuuacgaguu

SEQ ID NO: 1269227 - RNA, 19 nt, Homo sapiens
  misc_RNA (1)...(19): siRNA sense strand
ggucauugcugugauuguu

SEQ ID NO: 1269228 - RNA, 19 nt, Homo sapiens
  misc_RNA (1)...(19): siRNA sense strand
ccagauccauuuucacuua

SEQ ID NO: 1269229 - RNA, 19 nt, Homo sapiens
  misc_RNA (1)...(19): siRNA sense strand
gaaggaauacuugacaguu

SEQ ID NO: 1269230 - RNA, 19 nt, Homo sapiens
  misc_RNA (1)...(19): siRNA sense strand
aaggaauacuugacaguuu

SEQ ID NO: 1269231 - RNA, 19 nt, Homo sapiens
  misc_RNA (1)...(19): siRNA sense strand
ucagaugacgccuguuaua

SEQ ID NO: 1269232 - RNA, 19 nt, Homo sapiens
  misc_RNA (1)...(19): siRNA sense strand
gaaaacacaccuuuaguga

SEQ ID NO: 1269233 - RNA, 19 nt, Homo sapiens
  misc_RNA (1)...(19): siRNA sense strand
gaugacgccuguuauagag

SEQ ID NO: 1269234 - RNA, 19 nt, Homo sapiens
  misc_RNA (1)...(19): siRNA sense strand
gagaaacauguccauauau

SEQ ID NO: 1269235 - RNA, 19 nt, Homo sapiens
  misc_RNA (1)...(19): siRNA sense strand
ccacuuaccagacuaaauc

SEQ ID NO: 1269236 - RNA, 19 nt, Homo sapiens
  misc_RNA (1)...(19): siRNA sense strand
acgaguagauuauaagugu

SEQ ID NO: 1269237 - RNA, 19 nt, Homo sapiens
  misc_RNA (1)...(19): siRNA sense strand
cuacaaagcaacaguuaug

SEQ ID NO: 1269238 - RNA, 19 nt, Homo sapiens
  misc_RNA (1)...(19): siRNA sense strand
ccaccaacauuugaagcua

SEQ ID NO: 1269239 - RNA, 19 nt, Homo sapiens
  misc_RNA (1)...(19): siRNA sense strand
uauacgggauccuuuaaau

SEQ ID NO: 1269240 - RNA, 19 nt, Homo sapiens
  misc_RNA (1)...(19): siRNA sense strand
cgaguuugguuaucagaug

SEQ ID NO: 1269241 - RNA, 19 nt, Homo sapiens
  misc_RNA (1)...(19): siRNA sense strand
gaacgaguagauuauaagu

SEQ ID NO: 1269242 - RNA, 19 nt, Homo sapiens
  misc_RNA (1)...(19): siRNA sense strand
gugaggagccaccaacauu

SEQ ID NO: 1269243 - RNA, 19 nt, Homo sapiens
  misc_RNA (1)...(19): siRNA sense strand
gauggcagcgacacaauug

SEQ ID NO: 1269244 - RNA, 19 nt, Homo sapiens
  misc_RNA (1)...(19): siRNA sense strand
ucucagaugacgccuguua

SEQ ID NO: 1269245 - RNA, 19 nt, Homo sapiens
  misc_RNA (1)...(19): siRNA sense strand
acacaccuuuagugaagua

SEQ ID NO: 1269246 - RNA, 19 nt, Homo sapiens
  misc_RNA (1)...(19): siRNA sense strand
gcuauggagcucauuggua

SEQ ID NO: 1269247 - RNA, 19 nt, Homo sapiens
  misc_RNA (1)...(19): siRNA sense strand
gaggagccaccaacauuug

SEQ ID NO: 1269248 - RNA, 19 nt, Homo sapiens
  misc_RNA (1)...(19): siRNA sense strand
uagagaaacauguccauau

SEQ ID NO: 1269249 - RNA, 19 nt, Homo sapiens
  misc_RNA (1)...(19): siRNA sense strand
guuccaaagugucuuaaag

SEQ ID NO: 1269250 - RNA, 19 nt, Homo sapiens
  misc_RNA (1)...(19): siRNA sense strand
ggugaacgaguagauuaua

SEQ ID NO: 1269251 - RNA, 19 nt, Homo sapiens
  misc_RNA (1)...(19): siRNA sense strand
gaaguagaaguauuugagu

SEQ ID NO: 1269252 - RNA, 19 nt, Homo sapiens
  misc_RNA (1)...(19): siRNA sense strand
gaaacauguccauauauac

SEQ ID NO: 1269253 - RNA, 19 nt, Homo sapiens
  misc_RNA (1)...(19): siRNA sense strand
ugacgccuguuauagagaa

SEQ ID NO: 1269254 - RNA, 19 nt, Homo sapiens
  misc_RNA (1)...(19): siRNA sense strand
cgaguagauuauaagugua

SEQ ID NO: 1269255 - RNA, 19 nt, Homo sapiens
  misc_RNA (1)...(19): siRNA sense strand
gcacuuuauuuguaaugag

SEQ ID NO: 1269256 - RNA, 19 nt, Homo sapiens
  misc_RNA (1)...(19): siRNA sense strand
guagaaguauuugaguauc

SEQ ID NO: 1269257 - RNA, 19 nt, Homo sapiens
  misc_RNA (1)...(19): siRNA sense strand
guauuugaguaucuugaug

SEQ ID NO: 1269258 - RNA, 19 nt, Homo sapiens
  misc_RNA (1)...(19): siRNA sense strand
aggaauacuugacaguuug

SEQ ID NO: 1269259 - RNA, 19 nt, Homo sapiens
  misc_RNA (1)...(19): siRNA sense strand
ccaaaacccuacuaugaga

SEQ ID NO: 1269260 - RNA, 19 nt, Homo sapiens
  misc_RNA (1)...(19): siRNA sense strand
aguguaaaguggucaaaug

SEQ ID NO: 1269261 - RNA, 19 nt, Homo sapiens
  misc_RNA (1)...(19): siRNA sense strand
ccacccauacuauuuguga

SEQ ID NO: 1269262 - RNA, 19 nt, Homo sapiens
  misc_RNA (1)...(19): siRNA sense strand
uuggagagagcacgauuua

SEQ ID NO: 1269263 - RNA, 19 nt, Homo sapiens
  misc_RNA (1)...(19): siRNA sense strand
gguuaucagaugcacuuua

SEQ ID NO: 1269264 - RNA, 19 nt, Homo sapiens
  misc_RNA (1)...(19): siRNA sense strand
caccaacauuugaagcuau

SEQ ID NO: 1269265 - RNA, 19 nt, Homo sapiens
  misc_RNA (1)...(19): siRNA sense strand
ugaggagccaccaacauuu

SEQ ID NO: 1269266 - RNA, 19 nt, Homo sapiens
  misc_RNA (1)...(19): siRNA sense strand
ggaaggaauacuugacagu

SEQ ID NO: 1269267 - RNA, 19 nt, Homo sapiens
  misc_RNA (1)...(19): siRNA sense strand
gaggaaggaauacuugaca

SEQ ID NO: 1269268 - RNA, 19 nt, Homo sapiens
  misc_RNA (1)...(19): siRNA sense strand
ccaguuccaaagugucuua

SEQ ID NO: 1269269 - RNA, 19 nt, Homo sapiens
  misc_RNA (1)...(19): siRNA sense strand
ugaguaucuugaugcagua

SEQ ID NO: 1269270 - RNA, 19 nt, Homo sapiens
  misc_RNA (1)...(19): siRNA sense strand
caccuuuagugaaguagaa

SEQ ID NO: 1269271 - RNA, 19 nt, Homo sapiens
  misc_RNA (1)...(19): siRNA sense strand
acagauaucaggauuugga

SEQ ID NO: 1269272 - RNA, 19 nt, Homo sapiens
  misc_RNA (1)...(19): siRNA sense strand
ucauugcugugauuguuau

SEQ ID NO: 1269273 - RNA, 19 nt, Homo sapiens
  misc_RNA (1)...(19): siRNA sense strand
ucagaugcacuuuauuugu

SEQ ID NO: 1269274 - RNA, 19 nt, Homo sapiens
  misc_RNA (1)...(19): siRNA sense strand
gugcugcuccagaguguaa

SEQ ID NO: 1269275 - RNA, 19 nt, Homo sapiens
  misc_RNA (1)...(19): siRNA sense strand
ggaaaacacaccuuuagug

SEQ ID NO: 1269276 - RNA, 19 nt, Homo sapiens
  misc_RNA (1)...(19): siRNA sense strand
aaggaucaguagcaauuug

SEQ ID NO: 1269277 - RNA, 19 nt, Homo sapiens
  misc_RNA (1)...(19): siRNA sense strand
uauauacgggauccuuuaa

SEQ ID NO: 1269278 - RNA, 19 nt, Homo sapiens
  misc_RNA (1)...(19): siRNA sense strand
ugaaguagaaguauuugag

SEQ ID NO: 1269279 - RNA, 19 nt, Homo sapiens
  misc_RNA (1)...(19): siRNA sense strand
cuugacaguuuggauguuu

SEQ ID NO: 1269280 - RNA, 19 nt, Homo sapiens
  misc_RNA (1)...(19): siRNA sense strand
cauauauacgggauccuuu

SEQ ID NO: 1269281 - RNA, 19 nt, Homo sapiens
  misc_RNA (1)...(19): siRNA sense strand
auauauacgggauccuuua

SEQ ID NO: 1269282 - RNA, 19 nt, Homo sapiens
  misc_RNA (1)...(19): siRNA sense strand
cuuaaaggaucaguagcaa

SEQ ID NO: 1269283 - RNA, 19 nt, Homo sapiens
  misc_RNA (1)...(19): siRNA sense strand
uaaaccugaggaaggaaua

SEQ ID NO: 1269284 - RNA, 19 nt, Homo sapiens
  misc_RNA (1)...(19): siRNA sense strand
agaugacgccuguuauaga

SEQ ID NO: 1269285 - RNA, 19 nt, Homo sapiens
  misc_RNA (1)...(19): siRNA sense strand
ugugauuguuauugccaua

SEQ ID NO: 1269286 - RNA, 19 nt, Homo sapiens
  misc_RNA (1)...(19): siRNA sense strand
gagagcacgauuuauugug

SEQ ID NO: 1269287 - RNA, 19 nt, Homo sapiens
  misc_RNA (1)...(19): siRNA sense strand
gaaguauuugaguaucuug

SEQ ID NO: 1269288 - RNA, 19 nt, Homo sapiens
  misc_RNA (1)...(19): siRNA sense strand
ggcuaccugucucagauga

SEQ ID NO: 1269289 - RNA, 19 nt, Homo sapiens
  misc_RNA (1)...(19): siRNA sense strand
ccucuugccacccauacua

SEQ ID NO: 1269290 - RNA, 19 nt, Homo sapiens
  misc_RNA (1)...(19): siRNA sense strand
gauaucaggauuuggaaaa

SEQ ID NO: 1269291 - RNA, 19 nt, Homo sapiens
  misc_RNA (1)...(19): siRNA sense strand
ccaugguguugcugcugua

SEQ ID NO: 1269292 - RNA, 19 nt, Homo sapiens
  misc_RNA (1)...(19): siRNA sense strand
cagaugacgccuguuauag

SEQ ID NO: 1269293 - RNA, 19 nt, Homo sapiens
  misc_RNA (1)...(19): siRNA sense strand
cagaugguggagcugaaua

SEQ ID NO: 1269294 - RNA, 19 nt, Homo sapiens
  misc_RNA (1)...(19): siRNA sense strand
gucauugcugugauuguua

SEQ ID NO: 1269295 - RNA, 19 nt, Homo sapiens
  misc_RNA (1)...(19): siRNA sense strand
uuggugaacgaguagauua

SEQ ID NO: 1269296 - RNA, 19 nt, Homo sapiens
  misc_RNA (1)...(19): siRNA sense strand
ggagccaccaacauuugaa

SEQ ID NO: 1269297 - RNA, 19 nt, Homo sapiens
  misc_RNA (1)...(19): siRNA sense strand
gcgcuuuccuggguugcuu

SEQ ID NO: 1269298 - RNA, 19 nt, Homo sapiens
  misc_RNA (1)...(19): siRNA sense strand
uacuacaaagcaacaguua

SEQ ID NO: 1269299 - RNA, 19 nt, Homo sapiens
  misc_RNA (1)...(19): siRNA sense strand
cuugaugcaguaacuuaua

SEQ ID NO: 1269300 - RNA, 19 nt, Homo sapiens
  misc_RNA (1)...(19): siRNA sense strand
aaacauguccauauauacg

SEQ ID NO: 1269301 - RNA, 19 nt, Homo sapiens
  misc_RNA (1)...(19): siRNA sense strand
guguaaaguggucaaaugu

SEQ ID NO: 1269302 - RNA, 19 nt, Homo sapiens
  misc_RNA (1)...(19): siRNA sense strand
cuuacgaguuugguuauca

SEQ ID NO: 1269303 - RNA, 19 nt, Homo sapiens
  misc_RNA (1)...(19): siRNA sense strand
aaccaaaacccuacuauga

SEQ ID NO: 1269304 - RNA, 19 nt, Homo sapiens
  misc_RNA (1)...(19): siRNA sense strand
gcagaugguggagcugaau

SEQ ID NO: 1269305 - RNA, 19 nt, Homo sapiens
  misc_RNA (1)...(19): siRNA sense strand
uacgggauccuuuaaaugg

SEQ ID NO: 1269306 - RNA, 19 nt, Homo sapiens
  misc_RNA (1)...(19): siRNA sense strand
cgauggcagcgacacaauu

SEQ ID NO: 1269307 - RNA, 19 nt, Homo sapiens
  misc_RNA (1)...(19): siRNA sense strand
ggagcugaauaugccacuu

SEQ ID NO: 1269308 - RNA, 19 nt, Homo sapiens
  misc_RNA (1)...(19): siRNA sense strand
caacauuugaagcuaugga

SEQ ID NO: 1269309 - RNA, 19 nt, Homo sapiens
  misc_RNA (1)...(19): siRNA sense strand
ggagagagcacgauuuauu

SEQ ID NO: 1269310 - RNA, 19 nt, Homo sapiens
  misc_RNA (1)...(19): siRNA sense strand
agagaaacauguccauaua

SEQ ID NO: 1269311 - RNA, 19 nt, Homo sapiens
  misc_RNA (1)...(19): siRNA sense strand
cagaugcacuuuauuugua

SEQ ID NO: 1269312 - RNA, 19 nt, Homo sapiens
  misc_RNA (1)...(19): siRNA sense strand
ggacuuacgaguuugguua

SEQ ID NO: 1269313 - RNA, 19 nt, Homo sapiens
  misc_RNA (1)...(19): siRNA sense strand
aaacagauaucaggauuug

SEQ ID NO: 1269314 - RNA, 19 nt, Homo sapiens
  misc_RNA (1)...(19): siRNA sense strand
cuauggagcucauugguaa

SEQ ID NO: 1269315 - RNA, 19 nt, Homo sapiens
  misc_RNA (1)...(19): siRNA sense strand
aaacacaccuuuagugaag

SEQ ID NO: 1269316 - RNA, 19 nt, Homo sapiens
  misc_RNA (1)...(19): siRNA sense strand
gaacuuaaaggaucaguag

SEQ ID NO: 1269317 - RNA, 19 nt, Homo sapiens
  misc_RNA (1)...(19): siRNA sense strand
gaaaacagauaucaggauu

SEQ ID NO: 1269318 - RNA, 19 nt, Homo sapiens
  misc_RNA (1)...(19): siRNA sense strand
uaaaggaucaguagcaauu

SEQ ID NO: 1269319 - RNA, 19 nt, Homo sapiens
  misc_RNA (1)...(19): siRNA sense strand
aaaugggacuuacgaguuu

SEQ ID NO: 1269320 - RNA, 19 nt, Homo sapiens
  misc_RNA (1)...(19): siRNA sense strand
guuaucagaugcacuuuau

SEQ ID NO: 1269321 - RNA, 19 nt, Homo sapiens
  misc_RNA (1)...(19): siRNA sense strand
ugagauuggugaacgagua

SEQ ID NO: 1269322 - RNA, 19 nt, Homo sapiens
  misc_RNA (1)...(19): siRNA sense strand
gugaacgaguagauuauaa

SEQ ID NO: 1269323 - RNA, 19 nt, Homo sapiens
  misc_RNA (1)...(19): siRNA sense strand
gagagagcacgauuuauug

SEQ ID NO: 1269324 - RNA, 19 nt, Homo sapiens
  misc_RNA (1)...(19): siRNA sense strand
caaaugggacuuacgaguu

SEQ ID NO: 1269325 - RNA, 19 nt, Homo sapiens
  misc_RNA (1)...(19): siRNA sense strand
ggucauugcugugauuguu

SEQ ID NO: 1269326 - RNA, 19 nt, Homo sapiens
  misc_RNA (1)...(19): siRNA sense strand
ccagauccauuuucacuua

SEQ ID NO: 1269327 - RNA, 19 nt, Homo sapiens
  misc_RNA (1)...(19): siRNA sense strand
gaaggaauacuugacaguu

SEQ ID NO: 1269328 - RNA, 19 nt, Homo sapiens
  misc_RNA (1)...(19): siRNA sense strand
aaggaauacuugacaguuu

SEQ ID NO: 1269329 - RNA, 19 nt, Homo sapiens
  misc_RNA (1)...(19): siRNA sense strand
ucagaugacgccuguuaua

SEQ ID NO: 1269330 - RNA, 19 nt, Homo sapiens
  misc_RNA (1)...(19): siRNA sense strand
gaaaacacaccuuuaguga

SEQ ID NO: 1269331 - RNA, 19 nt, Homo sapiens
  misc_RNA (1)...(19): siRNA sense strand
gaugacgccuguuauagag

SEQ ID NO: 1269332 - RNA, 19 nt, Homo sapiens
  misc_RNA (1)...(19): siRNA sense strand
gagaaacauguccauauau

SEQ ID NO: 1269333 - RNA, 19 nt, Homo sapiens
  misc_RNA (1)...(19): siRNA sense strand
acgaguagauuauaagugu

SEQ ID NO: 1269334 - RNA, 19 nt, Homo sapiens
  misc_RNA (1)...(19): siRNA sense strand
cuacaaagcaacaguuaug

SEQ ID NO: 1269335 - RNA, 19 nt, Homo sapiens
  misc_RNA (1)...(19): siRNA sense strand
ccaccaacauuugaagcua

SEQ ID NO: 1269336 - RNA, 19 nt, Homo sapiens
  misc_RNA (1)...(19): siRNA sense strand
uauacgggauccuuuaaau

SEQ ID NO: 1269337 - RNA, 19 nt, Homo sapiens
  misc_RNA (1)...(19): siRNA sense strand
cgaguuugguuaucagaug

SEQ ID NO: 1269338 - RNA, 19 nt, Homo sapiens
  misc_RNA (1)...(19): siRNA sense strand
gaacgaguagauuauaagu

SEQ ID NO: 1269339 - RNA, 19 nt, Homo sapiens
  misc_RNA (1)...(19): siRNA sense strand
gugaggagccaccaacauu

SEQ ID NO: 1269340 - RNA, 19 nt, Homo sapiens
  misc_RNA (1)...(19): siRNA sense strand
gauggcagcgacacaauug

SEQ ID NO: 1269341 - RNA, 19 nt, Homo sapiens
  misc_RNA (1)...(19): siRNA sense strand
gcuauggagcucauuggua

SEQ ID NO: 1269342 - RNA, 19 nt, Homo sapiens
  misc_RNA (1)...(19): siRNA sense strand
gaggagccaccaacauuug

SEQ ID NO: 1269343 - RNA, 19 nt, Homo sapiens
  misc_RNA (1)...(19): siRNA sense strand
acacaccuuuagugaagua

SEQ ID NO: 1269344 - RNA, 19 nt, Homo sapiens
  misc_RNA (1)...(19): siRNA sense strand
ucucagaugacgccuguua

SEQ ID NO: 1269345 - RNA, 19 nt, Homo sapiens
  misc_RNA (1)...(19): siRNA sense strand
uagagaaacauguccauau

SEQ ID NO: 1269346 - RNA, 19 nt, Homo sapiens
  misc_RNA (1)...(19): siRNA sense strand
ggugaacgaguagauuaua

SEQ ID NO: 1269347 - RNA, 19 nt, Homo sapiens
  misc_RNA (1)...(19): siRNA sense strand
gaaguagaaguauuugagu

SEQ ID NO: 1269348 - RNA, 19 nt, Homo sapiens
  misc_RNA (1)...(19): siRNA sense strand
gaaacauguccauauauac

SEQ ID NO: 1269349 - RNA, 19 nt, Homo sapiens
  misc_RNA (1)...(19): siRNA sense strand
ugacgccuguuauagagaa

SEQ ID NO: 1269350 - RNA, 19 nt, Homo sapiens
  misc_RNA (1)...(19): siRNA sense strand
cgaguagauuauaagugua

SEQ ID NO: 1269351 - RNA, 19 nt, Homo sapiens
  misc_RNA (1)...(19): siRNA sense strand
gcacuuuauuuguaaugag

SEQ ID NO: 1269352 - RNA, 19 nt, Homo sapiens
  misc_RNA (1)...(19): siRNA sense strand
guagaaguauuugaguauc

SEQ ID NO: 1269353 - RNA, 19 nt, Homo sapiens
  misc_RNA (1)...(19): siRNA sense strand
guauuugaguaucuugaug

SEQ ID NO: 1269354 - RNA, 19 nt, Homo sapiens
  misc_RNA (1)...(19): siRNA sense strand
aggaauacuugacaguuug

SEQ ID NO: 1269355 - RNA, 19 nt, Homo sapiens
  misc_RNA (1)...(19): siRNA sense strand
aguguaaaguggucaaaug

SEQ ID NO: 1269356 - RNA, 19 nt, Homo sapiens
  misc_RNA (1)...(19): siRNA sense strand
ccaaaacccuacuaugaga

SEQ ID NO: 1269357 - RNA, 19 nt, Homo sapiens
  misc_RNA (1)...(19): siRNA sense strand
ccacccauacuauuuguga

SEQ ID NO: 1269358 - RNA, 19 nt, Homo sapiens
  misc_RNA (1)...(19): siRNA sense strand
caccaacauuugaagcuau

SEQ ID NO: 1269359 - RNA, 19 nt, Homo sapiens
  misc_RNA (1)...(19): siRNA sense strand
uuggagagagcacgauuua

SEQ ID NO: 1269360 - RNA, 19 nt, Homo sapiens
  misc_RNA (1)...(19): siRNA sense strand
gguuaucagaugcacuuua

SEQ ID NO: 1269361 - RNA, 19 nt, Homo sapiens
  misc_RNA (1)...(19): siRNA sense strand
ugaggagccaccaacauuu

SEQ ID NO: 1269362 - RNA, 19 nt, Homo sapiens
  misc_RNA (1)...(19): siRNA sense strand
ggaaggaauacuugacagu

SEQ ID NO: 1269363 - RNA, 19 nt, Homo sapiens
  misc_RNA (1)...(19): siRNA sense strand
gaggaaggaauacuugaca

SEQ ID NO: 1269364 - RNA, 19 nt, Homo sapiens
  misc_RNA (1)...(19): siRNA sense strand
ugaguaucuugaugcagua

SEQ ID NO: 1269365 - RNA, 19 nt, Homo sapiens
  misc_RNA (1)...(19): siRNA sense strand
caccuuuagugaaguagaa

SEQ ID NO: 1269366 - RNA, 19 nt, Homo sapiens
  misc_RNA (1)...(19): siRNA sense strand
acagauaucaggauuugga

SEQ ID NO: 1269367 - RNA, 19 nt, Homo sapiens
  misc_RNA (1)...(19): siRNA sense strand
ucauugcugugauuguuau

SEQ ID NO: 1269368 - RNA, 19 nt, Homo sapiens
  misc_RNA (1)...(19): siRNA sense strand
ucagaugcacuuuauuugu

SEQ ID NO: 1269369 - RNA, 19 nt, Homo sapiens
  misc_RNA (1)...(19): siRNA sense strand
gugcugcuccagaguguaa

SEQ ID NO: 1269370 - RNA, 19 nt, Homo sapiens
  misc_RNA (1)...(19): siRNA sense strand
ggaaaacacaccuuuagug

SEQ ID NO: 1269371 - RNA, 19 nt, Homo sapiens
  misc_RNA (1)...(19): siRNA sense strand
aaggaucaguagcaauuug

SEQ ID NO: 1269372 - RNA, 19 nt, Homo sapiens
  misc_RNA (1)...(19): siRNA sense strand
uauauacgggauccuuuaa

SEQ ID NO: 1269373 - RNA, 19 nt, Homo sapiens
  misc_RNA (1)...(19): siRNA sense strand
ugaaguagaaguauuugag

SEQ ID NO: 1269374 - RNA, 19 nt, Homo sapiens
  misc_RNA (1)...(19): siRNA sense strand
cuugacaguuuggauguuu

SEQ ID NO: 1269375 - RNA, 19 nt, Homo sapiens
  misc_RNA (1)...(19): siRNA sense strand
cauauauacgggauccuuu

SEQ ID NO: 1269376 - RNA, 19 nt, Homo sapiens
  misc_RNA (1)...(19): siRNA sense strand
auauauacgggauccuuua

SEQ ID NO: 1269377 - RNA, 19 nt, Homo sapiens
  misc_RNA (1)...(19): siRNA sense strand
cuuaaaggaucaguagcaa

SEQ ID NO: 1269378 - RNA, 19 nt, Homo sapiens
  misc_RNA (1)...(19): siRNA sense strand
uaaaccugaggaaggaaua

SEQ ID NO: 1269379 - RNA, 19 nt, Homo sapiens
  misc_RNA (1)...(19): siRNA sense strand
agaugacgccuguuauaga

SEQ ID NO: 1269380 - RNA, 19 nt, Homo sapiens
  misc_RNA (1)...(19): siRNA sense strand
ugugauuguuauugccaua

SEQ ID NO: 1269381 - RNA, 19 nt, Homo sapiens
  misc_RNA (1)...(19): siRNA sense strand
gagagcacgauuuauugug

SEQ ID NO: 1269382 - RNA, 19 nt, Homo sapiens
  misc_RNA (1)...(19): siRNA sense strand
gaaguauuugaguaucuug

SEQ ID NO: 1269383 - RNA, 19 nt, Homo sapiens
  misc_RNA (1)...(19): siRNA sense strand
ccucuugccacccauacua

SEQ ID NO: 1269384 - RNA, 19 nt, Homo sapiens
  misc_RNA (1)...(19): siRNA sense strand
gauaucaggauuuggaaaa

SEQ ID NO: 1269385 - RNA, 19 nt, Homo sapiens
  misc_RNA (1)...(19): siRNA sense strand
ggcuaccugucucagauga

SEQ ID NO: 1269386 - RNA, 19 nt, Homo sapiens
  misc_RNA (1)...(19): siRNA sense strand
ccaugguguugcugcugua

SEQ ID NO: 1269387 - RNA, 19 nt, Homo sapiens
  misc_RNA (1)...(19): siRNA sense strand
cagaugacgccuguuauag

SEQ ID NO: 1269388 - RNA, 19 nt, Homo sapiens
  misc_RNA (1)...(19): siRNA sense strand
gucauugcugugauuguua

SEQ ID NO: 1269389 - RNA, 19 nt, Homo sapiens
  misc_RNA (1)...(19): siRNA sense strand
uuggugaacgaguagauua

SEQ ID NO: 1269390 - RNA, 19 nt, Homo sapiens
  misc_RNA (1)...(19): siRNA sense strand
ggagccaccaacauuugaa

SEQ ID NO: 1269391 - RNA, 19 nt, Homo sapiens
  misc_RNA (1)...(19): siRNA sense strand
gcgcuuuccuggguugcuu

SEQ ID NO: 1269392 - RNA, 19 nt, Homo sapiens
  misc_RNA (1)...(19): siRNA sense strand
uacuacaaagcaacaguua

SEQ ID NO: 1269393 - RNA, 19 nt, Homo sapiens
  misc_RNA (1)...(19): siRNA sense strand
cuugaugcaguaacuuaua

SEQ ID NO: 1269394 - RNA, 19 nt, Homo sapiens
  misc_RNA (1)...(19): siRNA sense strand
aaacauguccauauauacg

SEQ ID NO: 1269395 - RNA, 19 nt, Homo sapiens
  misc_RNA (1)...(19): siRNA sense strand
guguaaaguggucaaaugu

SEQ ID NO: 1269396 - RNA, 19 nt, Homo sapiens
  misc_RNA (1)...(19): siRNA sense strand
cuuacgaguuugguuauca

SEQ ID NO: 1269397 - RNA, 19 nt, Homo sapiens
  misc_RNA (1)...(19): siRNA sense strand
uacgggauccuuuaaaugg

SEQ ID NO: 1269398 - RNA, 19 nt, Homo sapiens
  misc_RNA (1)...(19): siRNA sense strand
aaccaaaacccuacuauga

SEQ ID NO: 1269399 - RNA, 19 nt, Homo sapiens
  misc_RNA (1)...(19): siRNA sense strand
cccaauaugugaaaagguu

SEQ ID NO: 1269400 - RNA, 19 nt, Homo sapiens
  misc_RNA (1)...(19): siRNA sense strand
cgauggcagcgacacaauu

SEQ ID NO: 1269401 - RNA, 19 nt, Homo sapiens
  misc_RNA (1)...(19): siRNA sense strand
gauccauuuucacuuauug

SEQ ID NO: 1269402 - RNA, 19 nt, Homo sapiens
  misc_RNA (1)...(19): siRNA sense strand
uugaugcaguaacuuauag

SEQ ID NO: 1269403 - RNA, 19 nt, Homo sapiens
  misc_RNA (1)...(19): siRNA sense strand
guaucuugaugcaguaacu

SEQ ID NO: 1269404 - RNA, 19 nt, Homo sapiens
  misc_RNA (1)...(19): siRNA sense strand
caacauuugaagcuaugga

SEQ ID NO: 1269405 - RNA, 19 nt, Homo sapiens
  misc_RNA (1)...(19): siRNA sense strand
gagauuggugaacgaguag

SEQ ID NO: 1269406 - RNA, 19 nt, Homo sapiens
  misc_RNA (1)...(19): siRNA sense strand
ggagagagcacgauuuauu

SEQ ID NO: 1269407 - RNA, 19 nt, Homo sapiens
  misc_RNA (1)...(19): siRNA sense strand
agagaaacauguccauaua

SEQ ID NO: 1269408 - RNA, 19 nt, Homo sapiens
  misc_RNA (1)...(19): siRNA sense strand
cagaugcacuuuauuugua

SEQ ID NO: 1269409 - RNA, 19 nt, Homo sapiens
  misc_RNA (1)...(19): siRNA sense strand
ggacuuacgaguuugguua

SEQ ID NO: 1269410 - RNA, 19 nt, Homo sapiens
  misc_RNA (1)...(19): siRNA sense strand
aaacagauaucaggauuug

SEQ ID NO: 1269411 - RNA, 19 nt, Homo sapiens
  misc_RNA (1)...(19): siRNA sense strand
cuauggagcucauugguaa

SEQ ID NO: 1269412 - RNA, 19 nt, Homo sapiens
  misc_RNA (1)...(19): siRNA sense strand
aaacacaccuuuagugaag

SEQ ID NO: 1269413 - RNA, 19 nt, Homo sapiens
  misc_RNA (1)...(19): siRNA sense strand
gaacuuaaaggaucaguag

SEQ ID NO: 1269414 - RNA, 19 nt, Homo sapiens
  misc_RNA (1)...(19): siRNA sense strand
gaaaacagauaucaggauu

SEQ ID NO: 1269415 - RNA, 19 nt, Homo sapiens
  misc_RNA (1)...(19): siRNA sense strand
uaaaggaucaguagcaauu

SEQ ID NO: 1269416 - RNA, 19 nt, Homo sapiens
  misc_RNA (1)...(19): siRNA sense strand
aaaugggacuuacgaguuu

SEQ ID NO: 1269417 - RNA, 19 nt, Homo sapiens
  misc_RNA (1)...(19): siRNA sense strand
guuaucagaugcacuuuau

SEQ ID NO: 1269418 - RNA, 19 nt, Homo sapiens
  misc_RNA (1)...(19): siRNA sense strand
ugagauuggugaacgagua

SEQ ID NO: 1269419 - RNA, 19 nt, Homo sapiens
  misc_RNA (1)...(19): siRNA sense strand
gugaacgaguagauuauaa

SEQ ID NO: 1269420 - RNA, 19 nt, Homo sapiens
  misc_RNA (1)...(19): siRNA sense strand
gagagagcacgauuuauug

SEQ ID NO: 1269421 - RNA, 19 nt, Homo sapiens
  misc_RNA (1)...(19): siRNA sense strand
caaaugggacuuacgaguu

SEQ ID NO: 1269422 - RNA, 19 nt, Homo sapiens
  misc_RNA (1)...(19): siRNA sense strand
ggucauugcugugauuguu

SEQ ID NO: 1269423 - RNA, 19 nt, Homo sapiens
  misc_RNA (1)...(19): siRNA sense strand
ccagauccauuuucacuua

SEQ ID NO: 1269424 - RNA, 19 nt, Homo sapiens
  misc_RNA (1)...(19): siRNA sense strand
gaaggaauacuugacaguu

SEQ ID NO: 1269425 - RNA, 19 nt, Homo sapiens
  misc_RNA (1)...(19): siRNA sense strand
aaggaauacuugacaguuu

SEQ ID NO: 1269426 - RNA, 19 nt, Homo sapiens
  misc_RNA (1)...(19): siRNA sense strand
ucagaugacgccuguuaua

SEQ ID NO: 1269427 - RNA, 19 nt, Homo sapiens
  misc_RNA (1)...(19): siRNA sense strand
gaaaacacaccuuuaguga

SEQ ID NO: 1269428 - RNA, 19 nt, Homo sapiens
  misc_RNA (1)...(19): siRNA sense strand
gaugacgccuguuauagag

SEQ ID NO: 1269429 - RNA, 19 nt, Homo sapiens
  misc_RNA (1)...(19): siRNA sense strand
gagaaacauguccauauau

SEQ ID NO: 1269430 - RNA, 19 nt, Homo sapiens
  misc_RNA (1)...(19): siRNA sense strand
acgaguagauuauaagugu

SEQ ID NO: 1269431 - RNA, 19 nt, Homo sapiens
  misc_RNA (1)...(19): siRNA sense strand
cuacaaagcaacaguuaug

SEQ ID NO: 1269432 - RNA, 19 nt, Homo sapiens
  misc_RNA (1)...(19): siRNA sense strand
ccaccaacauuugaagcua

SEQ ID NO: 1269433 - RNA, 19 nt, Homo sapiens
  misc_RNA (1)...(19): siRNA sense strand
uauacgggauccuuuaaau

SEQ ID NO: 1269434 - RNA, 19 nt, Homo sapiens
  misc_RNA (1)...(19): siRNA sense strand
cgaguuugguuaucagaug

SEQ ID NO: 1269435 - RNA, 19 nt, Homo sapiens
  misc_RNA (1)...(19): siRNA sense strand
gaacgaguagauuauaagu

SEQ ID NO: 1269436 - RNA, 19 nt, Homo sapiens
  misc_RNA (1)...(19): siRNA sense strand
gugaggagccaccaacauu

SEQ ID NO: 1269437 - RNA, 19 nt, Homo sapiens
  misc_RNA (1)...(19): siRNA sense strand
gauggcagcgacacaauug

SEQ ID NO: 1269438 - RNA, 19 nt, Homo sapiens
  misc_RNA (1)...(19): siRNA sense strand
gcuauggagcucauuggua

SEQ ID NO: 1269439 - RNA, 19 nt, Homo sapiens
  misc_RNA (1)...(19): siRNA sense strand
gaggagccaccaacauuug

SEQ ID NO: 1269440 - RNA, 19 nt, Homo sapiens
  misc_RNA (1)...(19): siRNA sense strand
acacaccuuuagugaagua

SEQ ID NO: 1269441 - RNA, 19 nt, Homo sapiens
  misc_RNA (1)...(19): siRNA sense strand
ucucagaugacgccuguua

SEQ ID NO: 1269442 - RNA, 19 nt, Homo sapiens
  misc_RNA (1)...(19): siRNA sense strand
uagagaaacauguccauau

SEQ ID NO: 1269443 - RNA, 19 nt, Homo sapiens
  misc_RNA (1)...(19): siRNA sense strand
guuccaaagugucuuaaag

SEQ ID NO: 1269444 - RNA, 19 nt, Homo sapiens
  misc_RNA (1)...(19): siRNA sense strand
ggugaacgaguagauuaua

SEQ ID NO: 1269445 - RNA, 19 nt, Homo sapiens
  misc_RNA (1)...(19): siRNA sense strand
gaaguagaaguauuugagu

SEQ ID NO: 1269446 - RNA, 19 nt, Homo sapiens
  misc_RNA (1)...(19): siRNA sense strand
gaaacauguccauauauac

SEQ ID NO: 1269447 - RNA, 19 nt, Homo sapiens
  misc_RNA (1)...(19): siRNA sense strand
ugacgccuguuauagagaa

SEQ ID NO: 1269448 - RNA, 19 nt, Homo sapiens
  misc_RNA (1)...(19): siRNA sense strand
cgaguagauuauaagugua

SEQ ID NO: 1269449 - RNA, 19 nt, Homo sapiens
  misc_RNA (1)...(19): siRNA sense strand
gcacuuuauuuguaaugag

SEQ ID NO: 1269450 - RNA, 19 nt, Homo sapiens
  misc_RNA (1)...(19): siRNA sense strand
guagaaguauuugaguauc

SEQ ID NO: 1269451 - RNA, 19 nt, Homo sapiens
  misc_RNA (1)...(19): siRNA sense strand
guauuugaguaucuugaug

SEQ ID NO: 1269452 - RNA, 19 nt, Homo sapiens
  misc_RNA (1)...(19): siRNA sense strand
aggaauacuugacaguuug

SEQ ID NO: 1269453 - RNA, 19 nt, Homo sapiens
  misc_RNA (1)...(19): siRNA sense strand
ccaaaacccuacuaugaga

SEQ ID NO: 1269454 - RNA, 19 nt, Homo sapiens
  misc_RNA (1)...(19): siRNA sense strand
aguguaaaguggucaaaug

SEQ ID NO: 1269455 - RNA, 19 nt, Homo sapiens
  misc_RNA (1)...(19): siRNA sense strand
ccacccauacuauuuguga

SEQ ID NO: 1269456 - RNA, 19 nt, Homo sapiens
  misc_RNA (1)...(19): siRNA sense strand
caccaacauuugaagcuau

SEQ ID NO: 1269457 - RNA, 19 nt, Homo sapiens
  misc_RNA (1)...(19): siRNA sense strand
uuggagagagcacgauuua

SEQ ID NO: 1269458 - RNA, 19 nt, Homo sapiens
  misc_RNA (1)...(19): siRNA sense strand
gguuaucagaugcacuuua

SEQ ID NO: 1269459 - RNA, 19 nt, Homo sapiens
  misc_RNA (1)...(19): siRNA sense strand
ugaggagccaccaacauuu

SEQ ID NO: 1269460 - RNA, 19 nt, Homo sapiens
  misc_RNA (1)...(19): siRNA sense strand
ggaaggaauacuugacagu

SEQ ID NO: 1269461 - RNA, 19 nt, Homo sapiens
  misc_RNA (1)...(19): siRNA sense strand
gaggaaggaauacuugaca

SEQ ID NO: 1269462 - RNA, 19 nt, Homo sapiens
  misc_RNA (1)...(19): siRNA sense strand
ccaguuccaaagugucuua

SEQ ID NO: 1269463 - RNA, 19 nt, Homo sapiens
  misc_RNA (1)...(19): siRNA sense strand
ugaguaucuugaugcagua

SEQ ID NO: 1269464 - RNA, 19 nt, Homo sapiens
  misc_RNA (1)...(19): siRNA sense strand
caccuuuagugaaguagaa

SEQ ID NO: 1269465 - RNA, 19 nt, Homo sapiens
  misc_RNA (1)...(19): siRNA sense strand
acagauaucaggauuugga

SEQ ID NO: 1269466 - RNA, 19 nt, Homo sapiens
  misc_RNA (1)...(19): siRNA sense strand
ucauugcugugauuguuau

SEQ ID NO: 1269467 - RNA, 19 nt, Homo sapiens
  misc_RNA (1)...(19): siRNA sense strand
ucagaugcacuuuauuugu

SEQ ID NO: 1269468 - RNA, 19 nt, Homo sapiens
  misc_RNA (1)...(19): siRNA sense strand
gugcugcuccagaguguaa

SEQ ID NO: 1269469 - RNA, 19 nt, Homo sapiens
  misc_RNA (1)...(19): siRNA sense strand
ggaaaacacaccuuuagug

SEQ ID NO: 1269470 - RNA, 19 nt, Homo sapiens
  misc_RNA (1)...(19): siRNA sense strand
aaggaucaguagcaauuug

SEQ ID NO: 1269471 - RNA, 19 nt, Homo sapiens
  misc_RNA (1)...(19): siRNA sense strand
uauauacgggauccuuuaa

SEQ ID NO: 1269472 - RNA, 19 nt, Homo sapiens
  misc_RNA (1)...(19): siRNA sense strand
ugaaguagaaguauuugag

SEQ ID NO: 1269473 - RNA, 19 nt, Homo sapiens
  misc_RNA (1)...(19): siRNA sense strand
cuugacaguuuggauguuu

SEQ ID NO: 1269474 - RNA, 19 nt, Homo sapiens
  misc_RNA (1)...(19): siRNA sense strand
cauauauacgggauccuuu

SEQ ID NO: 1269475 - RNA, 19 nt, Homo sapiens
  misc_RNA (1)...(19): siRNA sense strand
auauauacgggauccuuua

SEQ ID NO: 1269476 - RNA, 19 nt, Homo sapiens
  misc_RNA (1)...(19): siRNA sense strand
cuuaaaggaucaguagcaa

SEQ ID NO: 1269477 - RNA, 19 nt, Homo sapiens
  misc_RNA (1)...(19): siRNA sense strand
uaaaccugaggaaggaaua

SEQ ID NO: 1269478 - RNA, 19 nt, Homo sapiens
  misc_RNA (1)...(19): siRNA sense strand
agaugacgccuguuauaga

SEQ ID NO: 1269479 - RNA, 19 nt, Homo sapiens
  misc_RNA (1)...(19): siRNA sense strand
ugugauuguuauugccaua

SEQ ID NO: 1269480 - RNA, 19 nt, Homo sapiens
  misc_RNA (1)...(19): siRNA sense strand
gagagcacgauuuauugug

SEQ ID NO: 1269481 - RNA, 19 nt, Homo sapiens
  misc_RNA (1)...(19): siRNA sense strand
gaaguauuugaguaucuug

SEQ ID NO: 1269482 - RNA, 19 nt, Homo sapiens
  misc_RNA (1)...(19): siRNA sense strand
ggcuaccugucucagauga

SEQ ID NO: 1269483 - RNA, 19 nt, Homo sapiens
  misc_RNA (1)...(19): siRNA sense strand
gauaucaggauuuggaaaa

SEQ ID NO: 1269484 - RNA, 19 nt, Homo sapiens
  misc_RNA (1)...(19): siRNA sense strand
ccucuugccacccauacua

SEQ ID NO: 1269485 - RNA, 19 nt, Homo sapiens
  misc_RNA (1)...(19): siRNA sense strand
ccaugguguugcugcugua

SEQ ID NO: 1269486 - RNA, 19 nt, Homo sapiens
  misc_RNA (1)...(19): siRNA sense strand
cagaugacgccuguuauag

SEQ ID NO: 1269487 - RNA, 19 nt, Homo sapiens
  misc_RNA (1)...(19): siRNA sense strand
uuggugaacgaguagauua

SEQ ID NO: 1269488 - RNA, 19 nt, Homo sapiens
  misc_RNA (1)...(19): siRNA sense strand
gucauugcugugauuguua

SEQ ID NO: 1269489 - RNA, 19 nt, Homo sapiens
  misc_RNA (1)...(19): siRNA sense strand
ggagccaccaacauuugaa

SEQ ID NO: 1269490 - RNA, 19 nt, Homo sapiens
  misc_RNA (1)...(19): siRNA sense strand
gcgcuuuccuggguugcuu

SEQ ID NO: 1269491 - RNA, 19 nt, Homo sapiens
  misc_RNA (1)...(19): siRNA sense strand
uacuacaaagcaacaguua

SEQ ID NO: 1269492 - RNA, 19 nt, Homo sapiens
  misc_RNA (1)...(19): siRNA sense strand
cuugaugcaguaacuuaua

SEQ ID NO: 1269493 - RNA, 19 nt, Homo sapiens
  misc_RNA (1)...(19): siRNA sense strand
aaacauguccauauauacg

SEQ ID NO: 1269494 - RNA, 19 nt, Homo sapiens
  misc_RNA (1)...(19): siRNA sense strand
guguaaaguggucaaaugu

SEQ ID NO: 1269495 - RNA, 19 nt, Homo sapiens
  misc_RNA (1)...(19): siRNA sense strand
cuuacgaguuugguuauca

SEQ ID NO: 1269496 - RNA, 19 nt, Homo sapiens
  misc_RNA (1)...(19): siRNA sense strand
uacgggauccuuuaaaugg

SEQ ID NO: 1269497 - RNA, 19 nt, Homo sapiens
  misc_RNA (1)...(19): siRNA sense strand
aaccaaaacccuacuauga

SEQ ID NO: 1269498 - RNA, 19 nt, Homo sapiens
  misc_RNA (1)...(19): siRNA sense strand
cccaauaugugaaaagguu

SEQ ID NO: 1269499 - RNA, 19 nt, Homo sapiens
  misc_RNA (1)...(19): siRNA sense strand
cgauggcagcgacacaauu

SEQ ID NO: 1269500 - RNA, 19 nt, Homo sapiens
  misc_RNA (1)...(19): siRNA sense strand
gauccauuuucacuuauug

SEQ ID NO: 1269501 - RNA, 19 nt, Homo sapiens
  misc_RNA (1)...(19): siRNA sense strand
uugaugcaguaacuuauag

SEQ ID NO: 1269502 - RNA, 19 nt, Homo sapiens
  misc_RNA (1)...(19): siRNA sense strand
guaucuugaugcaguaacu

SEQ ID NO: 1269503 - RNA, 19 nt, Homo sapiens
  misc_RNA (1)...(19): siRNA sense strand
caacauuugaagcuaugga

SEQ ID NO: 1269504 - RNA, 19 nt, Homo sapiens
  misc_RNA (1)...(19): siRNA sense strand
gagauuggugaacgaguag

SEQ ID NO: 1269505 - RNA, 19 nt, Homo sapiens
  misc_RNA (1)...(19): siRNA sense strand
ggagagagcacgauuuauu

SEQ ID NO: 1269506 - RNA, 19 nt, Homo sapiens
  misc_RNA (1)...(19): siRNA sense strand
agagaaacauguccauaua

SEQ ID NO: 1269507 - RNA, 19 nt, Homo sapiens
  misc_RNA (1)...(19): siRNA sense strand
cagaugcacuuuauuugua

SEQ ID NO: 1269508 - RNA, 19 nt, Homo sapiens
  misc_RNA (1)...(19): siRNA sense strand
ggacuuacgaguuugguua

SEQ ID NO: 1269509 - RNA, 19 nt, Homo sapiens
  misc_RNA (1)...(19): siRNA sense strand
aaacagauaucaggauuug

SEQ ID NO: 1269510 - RNA, 19 nt, Homo sapiens
  misc_RNA (1)...(19): siRNA sense strand
cuauggagcucauugguaa

SEQ ID NO: 1269511 - RNA, 19 nt, Homo sapiens
  misc_RNA (1)...(19): siRNA sense strand
aaacacaccuuuagugaag

SEQ ID NO: 1269512 - RNA, 19 nt, Homo sapiens
  misc_RNA (1)...(19): siRNA sense strand
gaacuuaaaggaucaguag

SEQ ID NO: 1269513 - RNA, 19 nt, Homo sapiens
  misc_RNA (1)...(19): siRNA sense strand
gaaaacagauaucaggauu

SEQ ID NO: 1269514 - RNA, 19 nt, Homo sapiens
  misc_RNA (1)...(19): siRNA sense strand
uaaaggaucaguagcaauu

SEQ ID NO: 1269515 - RNA, 19 nt, Homo sapiens
  misc_RNA (1)...(19): siRNA sense strand
aaaugggacuuacgaguuu

SEQ ID NO: 1269516 - RNA, 19 nt, Homo sapiens
  misc_RNA (1)...(19): siRNA sense strand
guuaucagaugcacuuuau

SEQ ID NO: 1269517 - RNA, 19 nt, Homo sapiens
  misc_RNA (1)...(19): siRNA sense strand
gagcugaauaugccacuua

SEQ ID NO: 1269518 - RNA, 19 nt, Homo sapiens
  misc_RNA (1)...(19): siRNA sense strand
ugagauuggugaacgagua

SEQ ID NO: 1269519 - RNA, 19 nt, Homo sapiens
  misc_RNA (1)...(19): siRNA sense strand
gugaacgaguagauuauaa

SEQ ID NO: 1269520 - RNA, 19 nt, Homo sapiens
  misc_RNA (1)...(19): siRNA sense strand
gagagagcacgauuuauug

SEQ ID NO: 1269521 - RNA, 19 nt, Homo sapiens
  misc_RNA (1)...(19): siRNA sense strand
caaaugggacuuacgaguu

SEQ ID NO: 1269522 - RNA, 19 nt, Homo sapiens
  misc_RNA (1)...(19): siRNA sense strand
ggucauugcugugauuguu

SEQ ID NO: 1269523 - RNA, 19 nt, Homo sapiens
  misc_RNA (1)...(19): siRNA sense strand
ccagauccauuuucacuua

SEQ ID NO: 1269524 - RNA, 19 nt, Homo sapiens
  misc_RNA (1)...(19): siRNA sense strand
gaaggaauacuugacaguu

SEQ ID NO: 1269525 - RNA, 19 nt, Homo sapiens
  misc_RNA (1)...(19): siRNA sense strand
aaggaauacuugacaguuu

SEQ ID NO: 1269526 - RNA, 19 nt, Homo sapiens
  misc_RNA (1)...(19): siRNA sense strand
ucagaugacgccuguuaua

SEQ ID NO: 1269527 - RNA, 19 nt, Homo sapiens
  misc_RNA (1)...(19): siRNA sense strand
gaaaacacaccuuuaguga

SEQ ID NO: 1269528 - RNA, 19 nt, Homo sapiens
  misc_RNA (1)...(19): siRNA sense strand
gaugacgccuguuauagag

SEQ ID NO: 1269529 - RNA, 19 nt, Homo sapiens
  misc_RNA (1)...(19): siRNA sense strand
gagaaacauguccauauau

SEQ ID NO: 1269530 - RNA, 19 nt, Homo sapiens
  misc_RNA (1)...(19): siRNA sense strand
ccacuuaccagacuaaauc

SEQ ID NO: 1269531 - RNA, 19 nt, Homo sapiens
  misc_RNA (1)...(19): siRNA sense strand
acgaguagauuauaagugu

SEQ ID NO: 1269532 - RNA, 19 nt, Homo sapiens
  misc_RNA (1)...(19): siRNA sense strand
cuacaaagcaacaguuaug

SEQ ID NO: 1269533 - RNA, 19 nt, Homo sapiens
  misc_RNA (1)...(19): siRNA sense strand
ccaccaacauuugaagcua

SEQ ID NO: 1269534 - RNA, 19 nt, Homo sapiens
  misc_RNA (1)...(19): siRNA sense strand
uauacgggauccuuuaaau

SEQ ID NO: 1269535 - RNA, 19 nt, Homo sapiens
  misc_RNA (1)...(19): siRNA sense strand
cgaguuugguuaucagaug

SEQ ID NO: 1269536 - RNA, 19 nt, Homo sapiens
  misc_RNA (1)...(19): siRNA sense strand
gaacgaguagauuauaagu

SEQ ID NO: 1269537 - RNA, 19 nt, Homo sapiens
  misc_RNA (1)...(19): siRNA sense strand
gugaggagccaccaacauu

SEQ ID NO: 1269538 - RNA, 19 nt, Homo sapiens
  misc_RNA (1)...(19): siRNA sense strand
gauggcagcgacacaauug

SEQ ID NO: 1269539 - RNA, 19 nt, Homo sapiens
  misc_RNA (1)...(19): siRNA sense strand
ucucagaugacgccuguua

SEQ ID NO: 1269540 - RNA, 19 nt, Homo sapiens
  misc_RNA (1)...(19): siRNA sense strand
gaggagccaccaacauuug

SEQ ID NO: 1269541 - RNA, 19 nt, Homo sapiens
  misc_RNA (1)...(19): siRNA sense strand
gcuauggagcucauuggua

SEQ ID NO: 1269542 - RNA, 19 nt, Homo sapiens
  misc_RNA (1)...(19): siRNA sense strand
acacaccuuuagugaagua

SEQ ID NO: 1269543 - RNA, 19 nt, Homo sapiens
  misc_RNA (1)...(19): siRNA sense strand
uagagaaacauguccauau

SEQ ID NO: 1269544 - RNA, 19 nt, Homo sapiens
  misc_RNA (1)...(19): siRNA sense strand
guuccaaagugucuuaaag

SEQ ID NO: 1269545 - RNA, 19 nt, Homo sapiens
  misc_RNA (1)...(19): siRNA sense strand
ggugaacgaguagauuaua

SEQ ID NO: 1269546 - RNA, 19 nt, Homo sapiens
  misc_RNA (1)...(19): siRNA sense strand
gaaguagaaguauuugagu

SEQ ID NO: 1269547 - RNA, 19 nt, Homo sapiens
  misc_RNA (1)...(19): siRNA sense strand
gaaacauguccauauauac

SEQ ID NO: 1269548 - RNA, 19 nt, Homo sapiens
  misc_RNA (1)...(19): siRNA sense strand
ugacgccuguuauagagaa

SEQ ID NO: 1269549 - RNA, 19 nt, Homo sapiens
  misc_RNA (1)...(19): siRNA sense strand
cgaguagauuauaagugua

SEQ ID NO: 1269550 - RNA, 19 nt, Homo sapiens
  misc_RNA (1)...(19): siRNA sense strand
gcacuuuauuuguaaugag

SEQ ID NO: 1269551 - RNA, 19 nt, Homo sapiens
  misc_RNA (1)...(19): siRNA sense strand
guagaaguauuugaguauc

SEQ ID NO: 1269552 - RNA, 19 nt, Homo sapiens
  misc_RNA (1)...(19): siRNA sense strand
guauuugaguaucuugaug

SEQ ID NO: 1269553 - RNA, 19 nt, Homo sapiens
  misc_RNA (1)...(19): siRNA sense strand
aggaauacuugacaguuug

SEQ ID NO: 1269554 - RNA, 19 nt, Homo sapiens
  misc_RNA (1)...(19): siRNA sense strand
ccaaaacccuacuaugaga

SEQ ID NO: 1269555 - RNA, 19 nt, Homo sapiens
  misc_RNA (1)...(19): siRNA sense strand
aguguaaaguggucaaaug

SEQ ID NO: 1269556 - RNA, 19 nt, Homo sapiens
  misc_RNA (1)...(19): siRNA sense strand
ccacccauacuauuuguga

SEQ ID NO: 1269557 - RNA, 19 nt, Homo sapiens
  misc_RNA (1)...(19): siRNA sense strand
uuggagagagcacgauuua

SEQ ID NO: 1269558 - RNA, 19 nt, Homo sapiens
  misc_RNA (1)...(19): siRNA sense strand
gguuaucagaugcacuuua

SEQ ID NO: 1269559 - RNA, 19 nt, Homo sapiens
  misc_RNA (1)...(19): siRNA sense strand
caccaacauuugaagcuau

SEQ ID NO: 1269560 - RNA, 19 nt, Homo sapiens
  misc_RNA (1)...(19): siRNA sense strand
ugaggagccaccaacauuu

SEQ ID NO: 1269561 - RNA, 19 nt, Homo sapiens
  misc_RNA (1)...(19): siRNA sense strand
ggaaggaauacuugacagu

SEQ ID NO: 1269562 - RNA, 19 nt, Homo sapiens
  misc_RNA (1)...(19): siRNA sense strand
gaggaaggaauacuugaca

SEQ ID NO: 1269563 - RNA, 19 nt, Homo sapiens
  misc_RNA (1)...(19): siRNA sense strand
ccaguuccaaagugucuua

SEQ ID NO: 1269564 - RNA, 19 nt, Homo sapiens
  misc_RNA (1)...(19): siRNA sense strand
ugaguaucuugaugcagua

SEQ ID NO: 1269565 - RNA, 19 nt, Homo sapiens
  misc_RNA (1)...(19): siRNA sense strand
caccuuuagugaaguagaa

SEQ ID NO: 1269566 - RNA, 19 nt, Homo sapiens
  misc_RNA (1)...(19): siRNA sense strand
acagauaucaggauuugga

SEQ ID NO: 1269567 - RNA, 19 nt, Homo sapiens
  misc_RNA (1)...(19): siRNA sense strand
ucauugcugugauuguuau

SEQ ID NO: 1269568 - RNA, 19 nt, Homo sapiens
  misc_RNA (1)...(19): siRNA sense strand
ucagaugcacuuuauuugu

SEQ ID NO: 1269569 - RNA, 19 nt, Homo sapiens
  misc_RNA (1)...(19): siRNA sense strand
gugcugcuccagaguguaa

SEQ ID NO: 1269570 - RNA, 19 nt, Homo sapiens
  misc_RNA (1)...(19): siRNA sense strand
ggaaaacacaccuuuagug

SEQ ID NO: 1269571 - RNA, 19 nt, Homo sapiens
  misc_RNA (1)...(19): siRNA sense strand
aaggaucaguagcaauuug

SEQ ID NO: 1269572 - RNA, 19 nt, Homo sapiens
  misc_RNA (1)...(19): siRNA sense strand
uauauacgggauccuuuaa

SEQ ID NO: 1269573 - RNA, 19 nt, Homo sapiens
  misc_RNA (1)...(19): siRNA sense strand
ugaaguagaaguauuugag

SEQ ID NO: 1269574 - RNA, 19 nt, Homo sapiens
  misc_RNA (1)...(19): siRNA sense strand
cuugacaguuuggauguuu

SEQ ID NO: 1269575 - RNA, 19 nt, Homo sapiens
  misc_RNA (1)...(19): siRNA sense strand
cauauauacgggauccuuu

SEQ ID NO: 1269576 - RNA, 19 nt, Homo sapiens
  misc_RNA (1)...(19): siRNA sense strand
auauauacgggauccuuua

SEQ ID NO: 1269577 - RNA, 19 nt, Homo sapiens
  misc_RNA (1)...(19): siRNA sense strand
cuuaaaggaucaguagcaa

SEQ ID NO: 1269578 - RNA, 19 nt, Homo sapiens
  misc_RNA (1)...(19): siRNA sense strand
uaaaccugaggaaggaaua

SEQ ID NO: 1269579 - RNA, 19 nt, Homo sapiens
  misc_RNA (1)...(19): siRNA sense strand
agaugacgccuguuauaga

SEQ ID NO: 1269580 - RNA, 19 nt, Homo sapiens
  misc_RNA (1)...(19): siRNA sense strand
ugugauuguuauugccaua

SEQ ID NO: 1269581 - RNA, 19 nt, Homo sapiens
  misc_RNA (1)...(19): siRNA sense strand
gagagcacgauuuauugug

SEQ ID NO: 1269582 - RNA, 19 nt, Homo sapiens
  misc_RNA (1)...(19): siRNA sense strand
gaaguauuugaguaucuug

SEQ ID NO: 1269583 - RNA, 19 nt, Homo sapiens
  misc_RNA (1)...(19): siRNA sense strand
ggcuaccugucucagauga

SEQ ID NO: 1269584 - RNA, 19 nt, Homo sapiens
  misc_RNA (1)...(19): siRNA sense strand
gauaucaggauuuggaaaa

SEQ ID NO: 1269585 - RNA, 19 nt, Homo sapiens
  misc_RNA (1)...(19): siRNA sense strand
ccucuugccacccauacua

SEQ ID NO: 1269586 - RNA, 19 nt, Homo sapiens
  misc_RNA (1)...(19): siRNA sense strand
ccaugguguugcugcugua

SEQ ID NO: 1269587 - RNA, 19 nt, Homo sapiens
  misc_RNA (1)...(19): siRNA sense strand
cagaugacgccuguuauag

SEQ ID NO: 1269588 - RNA, 19 nt, Homo sapiens
  misc_RNA (1)...(19): siRNA sense strand
cagaugguggagcugaaua

SEQ ID NO: 1269589 - RNA, 19 nt, Homo sapiens
  misc_RNA (1)...(19): siRNA sense strand
gucauugcugugauuguua

SEQ ID NO: 1269590 - RNA, 19 nt, Homo sapiens
  misc_RNA (1)...(19): siRNA sense strand
ggagccaccaacauuugaa

SEQ ID NO: 1269591 - RNA, 19 nt, Homo sapiens
  misc_RNA (1)...(19): siRNA sense strand
uuggugaacgaguagauua

SEQ ID NO: 1269592 - RNA, 19 nt, Homo sapiens
  misc_RNA (1)...(19): siRNA sense strand
gcgcuuuccuggguugcuu

SEQ ID NO: 1269593 - RNA, 19 nt, Homo sapiens
  misc_RNA (1)...(19): siRNA sense strand
uacuacaaagcaacaguua

SEQ ID NO: 1269594 - RNA, 19 nt, Homo sapiens
  misc_RNA (1)...(19): siRNA sense strand
cuugaugcaguaacuuaua

SEQ ID NO: 1269595 - RNA, 19 nt, Homo sapiens
  misc_RNA (1)...(19): siRNA sense strand
aaacauguccauauauacg

SEQ ID NO: 1269596 - RNA, 19 nt, Homo sapiens
  misc_RNA (1)...(19): siRNA sense strand
guguaaaguggucaaaugu

SEQ ID NO: 1269597 - RNA, 19 nt, Homo sapiens
  misc_RNA (1)...(19): siRNA sense strand
cuuacgaguuugguuauca

SEQ ID NO: 1269598 - RNA, 19 nt, Homo sapiens
  misc_RNA (1)...(19): siRNA sense strand
uacgggauccuuuaaaugg

SEQ ID NO: 1269599 - RNA, 19 nt, Homo sapiens
  misc_RNA (1)...(19): siRNA sense strand
gcagaugguggagcugaau

SEQ ID NO: 1269600 - RNA, 19 nt, Homo sapiens
  misc_RNA (1)...(19): siRNA sense strand
aaccaaaacccuacuauga

SEQ ID NO: 1269601 - RNA, 19 nt, Homo sapiens
  misc_RNA (1)...(19): siRNA sense strand
uugaugcaguaacuuauag

SEQ ID NO: 1269602 - RNA, 19 nt, Homo sapiens
  misc_RNA (1)...(19): siRNA sense strand
ggagcugaauaugccacuu

SEQ ID NO: 1269603 - RNA, 19 nt, Homo sapiens
  misc_RNA (1)...(19): siRNA sense strand
cgauggcagcgacacaauu

SEQ ID NO: 1269604 - RNA, 19 nt, Homo sapiens
  misc_RNA (1)...(19): siRNA sense strand
gauccauuuucacuuauug

SEQ ID NO: 1269605 - RNA, 19 nt, Homo sapiens
  misc_RNA (1)...(19): siRNA sense strand
ggagagagcacgauuuauu

SEQ ID NO: 1269606 - RNA, 19 nt, Homo sapiens
  misc_RNA (1)...(19): siRNA sense strand
agagaaacauguccauaua

SEQ ID NO: 1269607 - RNA, 19 nt, Homo sapiens
  misc_RNA (1)...(19): siRNA sense strand
cagaugcacuuuauuugua

SEQ ID NO: 1269608 - RNA, 19 nt, Homo sapiens
  misc_RNA (1)...(19): siRNA sense strand
ggacuuacgaguuugguua

SEQ ID NO: 1269609 - RNA, 19 nt, Homo sapiens
  misc_RNA (1)...(19): siRNA sense strand
aaacagauaucaggauuug

SEQ ID NO: 1269610 - RNA, 19 nt, Homo sapiens
  misc_RNA (1)...(19): siRNA sense strand
cuauggagcucauugguaa

SEQ ID NO: 1269611 - RNA, 19 nt, Homo sapiens
  misc_RNA (1)...(19): siRNA sense strand
aaacacaccuuuagugaag

SEQ ID NO: 1269612 - RNA, 19 nt, Homo sapiens
  misc_RNA (1)...(19): siRNA sense strand
gaacuuaaaggaucaguag

SEQ ID NO: 1269613 - RNA, 19 nt, Homo sapiens
  misc_RNA (1)...(19): siRNA sense strand
gaaaacagauaucaggauu

SEQ ID NO: 1269614 - RNA, 19 nt, Homo sapiens
  misc_RNA (1)...(19): siRNA sense strand
uaaaggaucaguagcaauu

SEQ ID NO: 1269615 - RNA, 19 nt, Homo sapiens
  misc_RNA (1)...(19): siRNA sense strand
aaaugggacuuacgaguuu

SEQ ID NO: 1269616 - RNA, 19 nt, Homo sapiens
  misc_RNA (1)...(19): siRNA sense strand
guuaucagaugcacuuuau

SEQ ID NO: 1269617 - RNA, 19 nt, Homo sapiens
  misc_RNA (1)...(19): siRNA sense strand
ugagauuggugaacgagua

SEQ ID NO: 1269618 - RNA, 19 nt, Homo sapiens
  misc_RNA (1)...(19): siRNA sense strand
gugaacgaguagauuauaa

SEQ ID NO: 1269619 - RNA, 19 nt, Homo sapiens
  misc_RNA (1)...(19): siRNA sense strand
gagagagcacgauuuauug

SEQ ID NO: 1269620 - RNA, 19 nt, Homo sapiens
  misc_RNA (1)...(19): siRNA sense strand
caaaugggacuuacgaguu

SEQ ID NO: 1269621 - RNA, 19 nt, Homo sapiens
  misc_RNA (1)...(19): siRNA sense strand
ggucauugcugugauuguu

SEQ ID NO: 1269622 - RNA, 19 nt, Homo sapiens
  misc_RNA (1)...(19): siRNA sense strand
ccagauccauuuucacuua

SEQ ID NO: 1269623 - RNA, 19 nt, Homo sapiens
  misc_RNA (1)...(19): siRNA sense strand
gaaggaauacuugacaguu

SEQ ID NO: 1269624 - RNA, 19 nt, Homo sapiens
  misc_RNA (1)...(19): siRNA sense strand
aaggaauacuugacaguuu

SEQ ID NO: 1269625 - RNA, 19 nt, Homo sapiens
  misc_RNA (1)...(19): siRNA sense strand
ucagaugacgccuguuaua

SEQ ID NO: 1269626 - RNA, 19 nt, Homo sapiens
  misc_RNA (1)...(19): siRNA sense strand
gaaaacacaccuuuaguga

SEQ ID NO: 1269627 - RNA, 19 nt, Homo sapiens
  misc_RNA (1)...(19): siRNA sense strand
gaugacgccuguuauagag

SEQ ID NO: 1269628 - RNA, 19 nt, Homo sapiens
  misc_RNA (1)...(19): siRNA sense strand
gagaaacauguccauauau

SEQ ID NO: 1269629 - RNA, 19 nt, Homo sapiens
  misc_RNA (1)...(19): siRNA sense strand
acgaguagauuauaagugu

SEQ ID NO: 1269630 - RNA, 19 nt, Homo sapiens
  misc_RNA (1)...(19): siRNA sense strand
cuacaaagcaacaguuaug

SEQ ID NO: 1269631 - RNA, 19 nt, Homo sapiens
  misc_RNA (1)...(19): siRNA sense strand
ccaccaacauuugaagcua

SEQ ID NO: 1269632 - RNA, 19 nt, Homo sapiens
  misc_RNA (1)...(19): siRNA sense strand
uauacgggauccuuuaaau

SEQ ID NO: 1269633 - RNA, 19 nt, Homo sapiens
  misc_RNA (1)...(19): siRNA sense strand
cgaguuugguuaucagaug

SEQ ID NO: 1269634 - RNA, 19 nt, Homo sapiens
  misc_RNA (1)...(19): siRNA sense strand
gaacgaguagauuauaagu

SEQ ID NO: 1269635 - RNA, 19 nt, Homo sapiens
  misc_RNA (1)...(19): siRNA sense strand
gugaggagccaccaacauu

SEQ ID NO: 1269636 - RNA, 19 nt, Homo sapiens
  misc_RNA (1)...(19): siRNA sense strand
gauggcagcgacacaauug

SEQ ID NO: 1269637 - RNA, 19 nt, Homo sapiens
  misc_RNA (1)...(19): siRNA sense strand
gcuauggagcucauuggua

SEQ ID NO: 1269638 - RNA, 19 nt, Homo sapiens
  misc_RNA (1)...(19): siRNA sense strand
gaggagccaccaacauuug

SEQ ID NO: 1269639 - RNA, 19 nt, Homo sapiens
  misc_RNA (1)...(19): siRNA sense strand
acacaccuuuagugaagua

SEQ ID NO: 1269640 - RNA, 19 nt, Homo sapiens
  misc_RNA (1)...(19): siRNA sense strand
ucucagaugacgccuguua

SEQ ID NO: 1269641 - RNA, 19 nt, Homo sapiens
  misc_RNA (1)...(19): siRNA sense strand
uagagaaacauguccauau

SEQ ID NO: 1269642 - RNA, 19 nt, Homo sapiens
  misc_RNA (1)...(19): siRNA sense strand
guuccaaagugucuuaaag

SEQ ID NO: 1269643 - RNA, 19 nt, Homo sapiens
  misc_RNA (1)...(19): siRNA sense strand
ggugaacgaguagauuaua

SEQ ID NO: 1269644 - RNA, 19 nt, Homo sapiens
  misc_RNA (1)...(19): siRNA sense strand
gaaguagaaguauuugagu

SEQ ID NO: 1269645 - RNA, 19 nt, Homo sapiens
  misc_RNA (1)...(19): siRNA sense strand
gaaacauguccauauauac

SEQ ID NO: 1269646 - RNA, 19 nt, Homo sapiens
  misc_RNA (1)...(19): siRNA sense strand
ugacgccuguuauagagaa

SEQ ID NO: 1269647 - RNA, 19 nt, Homo sapiens
  misc_RNA (1)...(19): siRNA sense strand
cgaguagauuauaagugua

SEQ ID NO: 1269648 - RNA, 19 nt, Homo sapiens
  misc_RNA (1)...(19): siRNA sense strand
gcacuuuauuuguaaugag

SEQ ID NO: 1269649 - RNA, 19 nt, Homo sapiens
  misc_RNA (1)...(19): siRNA sense strand
guagaaguauuugaguauc

SEQ ID NO: 1269650 - RNA, 19 nt, Homo sapiens
  misc_RNA (1)...(19): siRNA sense strand
guauuugaguaucuugaug

SEQ ID NO: 1269651 - RNA, 19 nt, Homo sapiens
  misc_RNA (1)...(19): siRNA sense strand
aggaauacuugacaguuug

SEQ ID NO: 1269652 - RNA, 19 nt, Homo sapiens
  misc_RNA (1)...(19): siRNA sense strand
ccaaaacccuacuaugaga

SEQ ID NO: 1269653 - RNA, 19 nt, Homo sapiens
  misc_RNA (1)...(19): siRNA sense strand
aguguaaaguggucaaaug

SEQ ID NO: 1269654 - RNA, 19 nt, Homo sapiens
  misc_RNA (1)...(19): siRNA sense strand
ccacccauacuauuuguga

SEQ ID NO: 1269655 - RNA, 19 nt, Homo sapiens
  misc_RNA (1)...(19): siRNA sense strand
caccaacauuugaagcuau

SEQ ID NO: 1269656 - RNA, 19 nt, Homo sapiens
  misc_RNA (1)...(19): siRNA sense strand
uuggagagagcacgauuua

SEQ ID NO: 1269657 - RNA, 19 nt, Homo sapiens
  misc_RNA (1)...(19): siRNA sense strand
gguuaucagaugcacuuua

SEQ ID NO: 1269658 - RNA, 19 nt, Homo sapiens
  misc_RNA (1)...(19): siRNA sense strand
ugaggagccaccaacauuu

SEQ ID NO: 1269659 - RNA, 19 nt, Homo sapiens
  misc_RNA (1)...(19): siRNA sense strand
ggaaggaauacuugacagu

SEQ ID NO: 1269660 - RNA, 19 nt, Homo sapiens
  misc_RNA (1)...(19): siRNA sense strand
gaggaaggaauacuugaca

SEQ ID NO: 1269661 - RNA, 19 nt, Homo sapiens
  misc_RNA (1)...(19): siRNA sense strand
ccaguuccaaagugucuua

SEQ ID NO: 1269662 - RNA, 19 nt, Homo sapiens
  misc_RNA (1)...(19): siRNA sense strand
ugaguaucuugaugcagua

SEQ ID NO: 1269663 - RNA, 19 nt, Homo sapiens
  misc_RNA (1)...(19): siRNA sense strand
caccuuuagugaaguagaa

SEQ ID NO: 1269664 - RNA, 19 nt, Homo sapiens
  misc_RNA (1)...(19): siRNA sense strand
acagauaucaggauuugga

SEQ ID NO: 1269665 - RNA, 19 nt, Homo sapiens
  misc_RNA (1)...(19): siRNA sense strand
ucauugcugugauuguuau

SEQ ID NO: 1269666 - RNA, 19 nt, Homo sapiens
  misc_RNA (1)...(19): siRNA sense strand
ucagaugcacuuuauuugu

SEQ ID NO: 1269667 - RNA, 19 nt, Homo sapiens
  misc_RNA (1)...(19): siRNA sense strand
gugcugcuccagaguguaa

SEQ ID NO: 1269668 - RNA, 19 nt, Homo sapiens
  misc_RNA (1)...(19): siRNA sense strand
ggaaaacacaccuuuagug

SEQ ID NO: 1269669 - RNA, 19 nt, Homo sapiens
  misc_RNA (1)...(19): siRNA sense strand
aaggaucaguagcaauuug

SEQ ID NO: 1269670 - RNA, 19 nt, Homo sapiens
  misc_RNA (1)...(19): siRNA sense strand
uauauacgggauccuuuaa

SEQ ID NO: 1269671 - RNA, 19 nt, Homo sapiens
  misc_RNA (1)...(19): siRNA sense strand
ugaaguagaaguauuugag

SEQ ID NO: 1269672 - RNA, 19 nt, Homo sapiens
  misc_RNA (1)...(19): siRNA sense strand
cuugacaguuuggauguuu

SEQ ID NO: 1269673 - RNA, 19 nt, Homo sapiens
  misc_RNA (1)...(19): siRNA sense strand
cauauauacgggauccuuu

SEQ ID NO: 1269674 - RNA, 19 nt, Homo sapiens
  misc_RNA (1)...(19): siRNA sense strand
auauauacgggauccuuua

SEQ ID NO: 1269675 - RNA, 19 nt, Homo sapiens
  misc_RNA (1)...(19): siRNA sense strand
cuuaaaggaucaguagcaa

SEQ ID NO: 1269676 - RNA, 19 nt, Homo sapiens
  misc_RNA (1)...(19): siRNA sense strand
uaaaccugaggaaggaaua

SEQ ID NO: 1269677 - RNA, 19 nt, Homo sapiens
  misc_RNA (1)...(19): siRNA sense strand
agaugacgccuguuauaga

SEQ ID NO: 1269678 - RNA, 19 nt, Homo sapiens
  misc_RNA (1)...(19): siRNA sense strand
ugugauuguuauugccaua

SEQ ID NO: 1269679 - RNA, 19 nt, Homo sapiens
  misc_RNA (1)...(19): siRNA sense strand
gagagcacgauuuauugug

SEQ ID NO: 1269680 - RNA, 19 nt, Homo sapiens
  misc_RNA (1)...(19): siRNA sense strand
gaaguauuugaguaucuug

SEQ ID NO: 1269681 - RNA, 19 nt, Homo sapiens
  misc_RNA (1)...(19): siRNA sense strand
ggcuaccugucucagauga

SEQ ID NO: 1269682 - RNA, 19 nt, Homo sapiens
  misc_RNA (1)...(19): siRNA sense strand
gauaucaggauuuggaaaa

SEQ ID NO: 1269683 - RNA, 19 nt, Homo sapiens
  misc_RNA (1)...(19): siRNA sense strand
ccucuugccacccauacua

SEQ ID NO: 1269684 - RNA, 19 nt, Homo sapiens
  misc_RNA (1)...(19): siRNA sense strand
ccaugguguugcugcugua

SEQ ID NO: 1269685 - RNA, 19 nt, Homo sapiens
  misc_RNA (1)...(19): siRNA sense strand
cagaugacgccuguuauag

SEQ ID NO: 1269686 - RNA, 19 nt, Homo sapiens
  misc_RNA (1)...(19): siRNA sense strand
uuggugaacgaguagauua

SEQ ID NO: 1269687 - RNA, 19 nt, Homo sapiens
  misc_RNA (1)...(19): siRNA sense strand
gucauugcugugauuguua

SEQ ID NO: 1269688 - RNA, 19 nt, Homo sapiens
  misc_RNA (1)...(19): siRNA sense strand
ggagccaccaacauuugaa

SEQ ID NO: 1269689 - RNA, 19 nt, Homo sapiens
  misc_RNA (1)...(19): siRNA sense strand
gcgcuuuccuggguugcuu

SEQ ID NO: 1269690 - RNA, 19 nt, Homo sapiens
  misc_RNA (1)...(19): siRNA sense strand
uacuacaaagcaacaguua

SEQ ID NO: 1269691 - RNA, 19 nt, Homo sapiens
  misc_RNA (1)...(19): siRNA sense strand
cuugaugcaguaacuuaua

SEQ ID NO: 1269692 - RNA, 19 nt, Homo sapiens
  misc_RNA (1)...(19): siRNA sense strand
aaacauguccauauauacg

SEQ ID NO: 1269693 - RNA, 19 nt, Homo sapiens
  misc_RNA (1)...(19): siRNA sense strand
guguaaaguggucaaaugu

SEQ ID NO: 1269694 - RNA, 19 nt, Homo sapiens
  misc_RNA (1)...(19): siRNA sense strand
cuuacgaguuugguuauca

SEQ ID NO: 1269695 - RNA, 19 nt, Homo sapiens
  misc_RNA (1)...(19): siRNA sense strand
uacgggauccuuuaaaugg

SEQ ID NO: 1269696 - RNA, 19 nt, Homo sapiens
  misc_RNA (1)...(19): siRNA sense strand
aaccaaaacccuacuauga

SEQ ID NO: 1269697 - RNA, 19 nt, Homo sapiens
  misc_RNA (1)...(19): siRNA sense strand
cccaauaugugaaaagguu

SEQ ID NO: 1269698 - RNA, 19 nt, Homo sapiens
  misc_RNA (1)...(19): siRNA sense strand
cgauggcagcgacacaauu

SEQ ID NO: 1269699 - RNA, 19 nt, Homo sapiens
  misc_RNA (1)...(19): siRNA sense strand
gauccauuuucacuuauug

SEQ ID NO: 1269700 - RNA, 19 nt, Homo sapiens
  misc_RNA (1)...(19): siRNA sense strand
uugaugcaguaacuuauag

SEQ ID NO: 1269701 - RNA, 19 nt, Homo sapiens
  misc_RNA (1)...(19): siRNA sense strand
guaucuugaugcaguaacu

SEQ ID NO: 1269702 - RNA, 19 nt, Homo sapiens
  misc_RNA (1)...(19): siRNA sense strand
caacauuugaagcuaugga

SEQ ID NO: 1269703 - RNA, 19 nt, Homo sapiens
  misc_RNA (1)...(19): siRNA sense strand
gagauuggugaacgaguag

SEQ ID NO: 1269704 - RNA, 19 nt, Homo sapiens
  misc_RNA (1)...(19): siRNA sense strand
ggagagagcacgauuuauu

SEQ ID NO: 1269705 - RNA, 19 nt, Homo sapiens
  misc_RNA (1)...(19): siRNA sense strand
agagaaacauguccauaua

SEQ ID NO: 1269706 - RNA, 19 nt, Homo sapiens
  misc_RNA (1)...(19): siRNA sense strand
cagaugcacuuuauuugua

SEQ ID NO: 1269707 - RNA, 19 nt, Homo sapiens
  misc_RNA (1)...(19): siRNA sense strand
ggacuuacgaguuugguua

SEQ ID NO: 1269708 - RNA, 19 nt, Homo sapiens
  misc_RNA (1)...(19): siRNA sense strand
aaacagauaucaggauuug

SEQ ID NO: 1269709 - RNA, 19 nt, Homo sapiens
  misc_RNA (1)...(19): siRNA sense strand
cuauggagcucauugguaa

SEQ ID NO: 1269710 - RNA, 19 nt, Homo sapiens
  misc_RNA (1)...(19): siRNA sense strand
aaacacaccuuuagugaag

SEQ ID NO: 1269711 - RNA, 19 nt, Homo sapiens
  misc_RNA (1)...(19): siRNA sense strand
gaacuuaaaggaucaguag

SEQ ID NO: 1269712 - RNA, 19 nt, Homo sapiens
  misc_RNA (1)...(19): siRNA sense strand
gaaaacagauaucaggauu

SEQ ID NO: 1269713 - RNA, 19 nt, Homo sapiens
  misc_RNA (1)...(19): siRNA sense strand
uaaaggaucaguagcaauu

SEQ ID NO: 1269714 - RNA, 19 nt, Homo sapiens
  misc_RNA (1)...(19): siRNA sense strand
aaaugggacuuacgaguuu

SEQ ID NO: 1269715 - RNA, 19 nt, Homo sapiens
  misc_RNA (1)...(19): siRNA sense strand
guuaucagaugcacuuuau

SEQ ID NO: 1269716 - RNA, 19 nt, Homo sapiens
  misc_RNA (1)...(19): siRNA sense strand
ugagauuggugaacgagua

SEQ ID NO: 1269717 - RNA, 19 nt, Homo sapiens
  misc_RNA (1)...(19): siRNA sense strand
gugaacgaguagauuauaa

SEQ ID NO: 1269718 - RNA, 19 nt, Homo sapiens
  misc_RNA (1)...(19): siRNA sense strand
gagagagcacgauuuauug

SEQ ID NO: 1269719 - RNA, 19 nt, Homo sapiens
  misc_RNA (1)...(19): siRNA sense strand
caaaugggacuuacgaguu

SEQ ID NO: 1269720 - RNA, 19 nt, Homo sapiens
  misc_RNA (1)...(19): siRNA sense strand
ggucauugcugugauuguu

SEQ ID NO: 1269721 - RNA, 19 nt, Homo sapiens
  misc_RNA (1)...(19): siRNA sense strand
ccagauccauuuucacuua

SEQ ID NO: 1269722 - RNA, 19 nt, Homo sapiens
  misc_RNA (1)...(19): siRNA sense strand
gaaggaauacuugacaguu

SEQ ID NO: 1269723 - RNA, 19 nt, Homo sapiens
  misc_RNA (1)...(19): siRNA sense strand
aaggaauacuugacaguuu

SEQ ID NO: 1269724 - RNA, 19 nt, Homo sapiens
  misc_RNA (1)...(19): siRNA sense strand
ucagaugacgccuguuaua

SEQ ID NO: 1269725 - RNA, 19 nt, Homo sapiens
  misc_RNA (1)...(19): siRNA sense strand
gaaaacacaccuuuaguga

SEQ ID NO: 1269726 - RNA, 19 nt, Homo sapiens
  misc_RNA (1)...(19): siRNA sense strand
gaugacgccuguuauagag

SEQ ID NO: 1269727 - RNA, 19 nt, Homo sapiens
  misc_RNA (1)...(19): siRNA sense strand
gagaaacauguccauauau

SEQ ID NO: 1269728 - RNA, 19 nt, Homo sapiens
  misc_RNA (1)...(19): siRNA sense strand
acgaguagauuauaagugu

SEQ ID NO: 1269729 - RNA, 19 nt, Homo sapiens
  misc_RNA (1)...(19): siRNA sense strand
cuacaaagcaacaguuaug

SEQ ID NO: 1269730 - RNA, 19 nt, Homo sapiens
  misc_RNA (1)...(19): siRNA sense strand
ccaccaacauuugaagcua

SEQ ID NO: 1269731 - RNA, 19 nt, Homo sapiens
  misc_RNA (1)...(19): siRNA sense strand
uauacgggauccuuuaaau

SEQ ID NO: 1269732 - RNA, 19 nt, Homo sapiens
  misc_RNA (1)...(19): siRNA sense strand
cgaguuugguuaucagaug

SEQ ID NO: 1269733 - RNA, 19 nt, Homo sapiens
  misc_RNA (1)...(19): siRNA sense strand
gaacgaguagauuauaagu

SEQ ID NO: 1269734 - RNA, 19 nt, Homo sapiens
  misc_RNA (1)...(19): siRNA sense strand
gugaggagccaccaacauu

SEQ ID NO: 1269735 - RNA, 19 nt, Homo sapiens
  misc_RNA (1)...(19): siRNA sense strand
gauggcagcgacacaauug

SEQ ID NO: 1269736 - RNA, 19 nt, Homo sapiens
  misc_RNA (1)...(19): siRNA sense strand
gcuauggagcucauuggua

SEQ ID NO: 1269737 - RNA, 19 nt, Homo sapiens
  misc_RNA (1)...(19): siRNA sense strand
gaggagccaccaacauuug

SEQ ID NO: 1269738 - RNA, 19 nt, Homo sapiens
  misc_RNA (1)...(19): siRNA sense strand
acacaccuuuagugaagua

SEQ ID NO: 1269739 - RNA, 19 nt, Homo sapiens
  misc_RNA (1)...(19): siRNA sense strand
ucucagaugacgccuguua

SEQ ID NO: 1269740 - RNA, 19 nt, Homo sapiens
  misc_RNA (1)...(19): siRNA sense strand
uagagaaacauguccauau

SEQ ID NO: 1269741 - RNA, 19 nt, Homo sapiens
  misc_RNA (1)...(19): siRNA sense strand
ggugaacgaguagauuaua

SEQ ID NO: 1269742 - RNA, 19 nt, Homo sapiens
  misc_RNA (1)...(19): siRNA sense strand
gaaguagaaguauuugagu

SEQ ID NO: 1269743 - RNA, 19 nt, Homo sapiens
  misc_RNA (1)...(19): siRNA sense strand
gaaacauguccauauauac

SEQ ID NO: 1269744 - RNA, 19 nt, Homo sapiens
  misc_RNA (1)...(19): siRNA sense strand
ugacgccuguuauagagaa

SEQ ID NO: 1269745 - RNA, 19 nt, Homo sapiens
  misc_RNA (1)...(19): siRNA sense strand
cgaguagauuauaagugua

SEQ ID NO: 1269746 - RNA, 19 nt, Homo sapiens
  misc_RNA (1)...(19): siRNA sense strand
gcacuuuauuuguaaugag

SEQ ID NO: 1269747 - RNA, 19 nt, Homo sapiens
  misc_RNA (1)...(19): siRNA sense strand
guagaaguauuugaguauc

SEQ ID NO: 1269748 - RNA, 19 nt, Homo sapiens
  misc_RNA (1)...(19): siRNA sense strand
guauuugaguaucuugaug

SEQ ID NO: 1269749 - RNA, 19 nt, Homo sapiens
  misc_RNA (1)...(19): siRNA sense strand
aggaauacuugacaguuug

SEQ ID NO: 1269750 - RNA, 19 nt, Homo sapiens
  misc_RNA (1)...(19): siRNA sense strand
aguguaaaguggucaaaug

SEQ ID NO: 1269751 - RNA, 19 nt, Homo sapiens
  misc_RNA (1)...(19): siRNA sense strand
ccaaaacccuacuaugaga

SEQ ID NO: 1269752 - RNA, 19 nt, Homo sapiens
  misc_RNA (1)...(19): siRNA sense strand
ccacccauacuauuuguga

SEQ ID NO: 1269753 - RNA, 19 nt, Homo sapiens
  misc_RNA (1)...(19): siRNA sense strand
caccaacauuugaagcuau

SEQ ID NO: 1269754 - RNA, 19 nt, Homo sapiens
  misc_RNA (1)...(19): siRNA sense strand
uuggagagagcacgauuua

SEQ ID NO: 1269755 - RNA, 19 nt, Homo sapiens
  misc_RNA (1)...(19): siRNA sense strand
gguuaucagaugcacuuua

SEQ ID NO: 1269756 - RNA, 19 nt, Homo sapiens
  misc_RNA (1)...(19): siRNA sense strand
ugaggagccaccaacauuu

SEQ ID NO: 1269757 - RNA, 19 nt, Homo sapiens
  misc_RNA (1)...(19): siRNA sense strand
ggaaggaauacuugacagu

SEQ ID NO: 1269758 - RNA, 19 nt, Homo sapiens
  misc_RNA (1)...(19): siRNA sense strand
gaggaaggaauacuugaca

SEQ ID NO: 1269759 - RNA, 19 nt, Homo sapiens
  misc_RNA (1)...(19): siRNA sense strand
ugaguaucuugaugcagua

SEQ ID NO: 1269760 - RNA, 19 nt, Homo sapiens
  misc_RNA (1)...(19): siRNA sense strand
caccuuuagugaaguagaa

SEQ ID NO: 1269761 - RNA, 19 nt, Homo sapiens
  misc_RNA (1)...(19): siRNA sense strand
acagauaucaggauuugga

SEQ ID NO: 1269762 - RNA, 19 nt, Homo sapiens
  misc_RNA (1)...(19): siRNA sense strand
ucauugcugugauuguuau

SEQ ID NO: 1269763 - RNA, 19 nt, Homo sapiens
  misc_RNA (1)...(19): siRNA sense strand
ucagaugcacuuuauuugu

SEQ ID NO: 1269764 - RNA, 19 nt, Homo sapiens
  misc_RNA (1)...(19): siRNA sense strand
gugcugcuccagaguguaa

SEQ ID NO: 1269765 - RNA, 19 nt, Homo sapiens
  misc_RNA (1)...(19): siRNA sense strand
ggaaaacacaccuuuagug

SEQ ID NO: 1269766 - RNA, 19 nt, Homo sapiens
  misc_RNA (1)...(19): siRNA sense strand
aaggaucaguagcaauuug

SEQ ID NO: 1269767 - RNA, 19 nt, Homo sapiens
  misc_RNA (1)...(19): siRNA sense strand
uauauacgggauccuuuaa

SEQ ID NO: 1269768 - RNA, 19 nt, Homo sapiens
  misc_RNA (1)...(19): siRNA sense strand
ugaaguagaaguauuugag

SEQ ID NO: 1269769 - RNA, 19 nt, Homo sapiens
  misc_RNA (1)...(19): siRNA sense strand
cuugacaguuuggauguuu

SEQ ID NO: 1269770 - RNA, 19 nt, Homo sapiens
  misc_RNA (1)...(19): siRNA sense strand
cauauauacgggauccuuu

SEQ ID NO: 1269771 - RNA, 19 nt, Homo sapiens
  misc_RNA (1)...(19): siRNA sense strand
auauauacgggauccuuua

SEQ ID NO: 1269772 - RNA, 19 nt, Homo sapiens
  misc_RNA (1)...(19): siRNA sense strand
cuuaaaggaucaguagcaa

SEQ ID NO: 1269773 - RNA, 19 nt, Homo sapiens
  misc_RNA (1)...(19): siRNA sense strand
uaaaccugaggaaggaaua

SEQ ID NO: 1269774 - RNA, 19 nt, Homo sapiens
  misc_RNA (1)...(19): siRNA sense strand
agaugacgccuguuauaga

SEQ ID NO: 1269775 - RNA, 19 nt, Homo sapiens
  misc_RNA (1)...(19): siRNA sense strand
ugugauuguuauugccaua

SEQ ID NO: 1269776 - RNA, 19 nt, Homo sapiens
  misc_RNA (1)...(19): siRNA sense strand
gagagcacgauuuauugug

SEQ ID NO: 1269777 - RNA, 19 nt, Homo sapiens
  misc_RNA (1)...(19): siRNA sense strand
gaaguauuugaguaucuug

SEQ ID NO: 1269778 - RNA, 19 nt, Homo sapiens
  misc_RNA (1)...(19): siRNA sense strand
ccucuugccacccauacua

SEQ ID NO: 1269779 - RNA, 19 nt, Homo sapiens
  misc_RNA (1)...(19): siRNA sense strand
gauaucaggauuuggaaaa

SEQ ID NO: 1269780 - RNA, 19 nt, Homo sapiens
  misc_RNA (1)...(19): siRNA sense strand
ggcuaccugucucagauga

SEQ ID NO: 1269781 - RNA, 19 nt, Homo sapiens
  misc_RNA (1)...(19): siRNA sense strand
ccaugguguugcugcugua

SEQ ID NO: 1269782 - RNA, 19 nt, Homo sapiens
  misc_RNA (1)...(19): siRNA sense strand
cagaugacgccuguuauag

SEQ ID NO: 1269783 - RNA, 19 nt, Homo sapiens
  misc_RNA (1)...(19): siRNA sense strand
gucauugcugugauuguua

SEQ ID NO: 1269784 - RNA, 19 nt, Homo sapiens
  misc_RNA (1)...(19): siRNA sense strand
uuggugaacgaguagauua

SEQ ID NO: 1269785 - RNA, 19 nt, Homo sapiens
  misc_RNA (1)...(19): siRNA sense strand
ggagccaccaacauuugaa

SEQ ID NO: 1269786 - RNA, 19 nt, Homo sapiens
  misc_RNA (1)...(19): siRNA sense strand
gcgcuuuccuggguugcuu

SEQ ID NO: 1269787 - RNA, 19 nt, Homo sapiens
  misc_RNA (1)...(19): siRNA sense strand
uacuacaaagcaacaguua

SEQ ID NO: 1269788 - RNA, 19 nt, Homo sapiens
  misc_RNA (1)...(19): siRNA sense strand
cuugaugcaguaacuuaua

SEQ ID NO: 1269789 - RNA, 19 nt, Homo sapiens
  misc_RNA (1)...(19): siRNA sense strand
aaacauguccauauauacg

SEQ ID NO: 1269790 - RNA, 19 nt, Homo sapiens
  misc_RNA (1)...(19): siRNA sense strand
guguaaaguggucaaaugu

SEQ ID NO: 1269791 - RNA, 19 nt, Homo sapiens
  misc_RNA (1)...(19): siRNA sense strand
cuuacgaguuugguuauca

SEQ ID NO: 1269792 - RNA, 19 nt, Homo sapiens
  misc_RNA (1)...(19): siRNA sense strand
uacgggauccuuuaaaugg

SEQ ID NO: 1269793 - RNA, 19 nt, Homo sapiens
  misc_RNA (1)...(19): siRNA sense strand
aaccaaaacccuacuauga

SEQ ID NO: 1269794 - RNA, 19 nt, Homo sapiens
  misc_RNA (1)...(19): siRNA sense strand
cccaauaugugaaaagguu

SEQ ID NO: 1269795 - RNA, 19 nt, Homo sapiens
  misc_RNA (1)...(19): siRNA sense strand
cgauggcagcgacacaauu

SEQ ID NO: 1269796 - RNA, 19 nt, Homo sapiens
  misc_RNA (1)...(19): siRNA sense strand
gauccauuuucacuuauug

SEQ ID NO: 1269797 - RNA, 19 nt, Homo sapiens
  misc_RNA (1)...(19): siRNA sense strand
uugaugcaguaacuuauag

SEQ ID NO: 1269798 - RNA, 19 nt, Homo sapiens
  misc_RNA (1)...(19): siRNA sense strand
guaucuugaugcaguaacu

SEQ ID NO: 1269799 - RNA, 19 nt, Homo sapiens
  misc_RNA (1)...(19): siRNA sense strand
caacauuugaagcuaugga

SEQ ID NO: 1269800 - RNA, 19 nt, Homo sapiens
  misc_RNA (1)...(19): siRNA sense strand
gagauuggugaacgaguag

SEQ ID NO: 1269801 - RNA, 19 nt, Homo sapiens
  misc_RNA (1)...(19): siRNA sense strand
ggagagagcacgauuuauu

SEQ ID NO: 1269802 - RNA, 19 nt, Homo sapiens
  misc_RNA (1)...(19): siRNA sense strand
agagaaacauguccauaua

SEQ ID NO: 1269803 - RNA, 19 nt, Homo sapiens
  misc_RNA (1)...(19): siRNA sense strand
cagaugcacuuuauuugua

SEQ ID NO: 1269804 - RNA, 19 nt, Homo sapiens
  misc_RNA (1)...(19): siRNA sense strand
ggacuuacgaguuugguua

SEQ ID NO: 1269805 - RNA, 19 nt, Homo sapiens
  misc_RNA (1)...(19): siRNA sense strand
aaacagauaucaggauuug

SEQ ID NO: 1269806 - RNA, 19 nt, Homo sapiens
  misc_RNA (1)...(19): siRNA sense strand
cuauggagcucauugguaa

SEQ ID NO: 1269807 - RNA, 19 nt, Homo sapiens
  misc_RNA (1)...(19): siRNA sense strand
aaacacaccuuuagugaag

SEQ ID NO: 1269808 - RNA, 19 nt, Homo sapiens
  misc_RNA (1)...(19): siRNA sense strand
gaacuuaaaggaucaguag

SEQ ID NO: 1269809 - RNA, 19 nt, Homo sapiens
  misc_RNA (1)...(19): siRNA sense strand
gaaaacagauaucaggauu

SEQ ID NO: 1269810 - RNA, 19 nt, Homo sapiens
  misc_RNA (1)...(19): siRNA sense strand
uaaaggaucaguagcaauu

SEQ ID NO: 1269811 - RNA, 19 nt, Homo sapiens
  misc_RNA (1)...(19): siRNA sense strand
aaaugggacuuacgaguuu

SEQ ID NO: 1269812 - RNA, 19 nt, Homo sapiens
  misc_RNA (1)...(19): siRNA sense strand
guuaucagaugcacuuuau

SEQ ID NO: 1269813 - RNA, 19 nt, Homo sapiens
  misc_RNA (1)...(19): siRNA sense strand
gagcugaauaugccacuua

SEQ ID NO: 1269814 - RNA, 19 nt, Homo sapiens
  misc_RNA (1)...(19): siRNA sense strand
ugagauuggugaacgagua

SEQ ID NO: 1269815 - RNA, 19 nt, Homo sapiens
  misc_RNA (1)...(19): siRNA sense strand
gugaacgaguagauuauaa

SEQ ID NO: 1269816 - RNA, 19 nt, Homo sapiens
  misc_RNA (1)...(19): siRNA sense strand
gagagagcacgauuuauug

SEQ ID NO: 1269817 - RNA, 19 nt, Homo sapiens
  misc_RNA (1)...(19): siRNA sense strand
caaaugggacuuacgaguu

SEQ ID NO: 1269818 - RNA, 19 nt, Homo sapiens
  misc_RNA (1)...(19): siRNA sense strand
ggucauugcugugauuguu

SEQ ID NO: 1269819 - RNA, 19 nt, Homo sapiens
  misc_RNA (1)...(19): siRNA sense strand
ccagauccauuuucacuua

SEQ ID NO: 1269820 - RNA, 19 nt, Homo sapiens
  misc_RNA (1)...(19): siRNA sense strand
gaaggaauacuugacaguu

SEQ ID NO: 1269821 - RNA, 19 nt, Homo sapiens
  misc_RNA (1)...(19): siRNA sense strand
aaggaauacuugacaguuu

SEQ ID NO: 1269822 - RNA, 19 nt, Homo sapiens
  misc_RNA (1)...(19): siRNA sense strand
ucagaugacgccuguuaua

SEQ ID NO: 1269823 - RNA, 19 nt, Homo sapiens
  misc_RNA (1)...(19): siRNA sense strand
gaaaacacaccuuuaguga

SEQ ID NO: 1269824 - RNA, 19 nt, Homo sapiens
  misc_RNA (1)...(19): siRNA sense strand
gaugacgccuguuauagag

SEQ ID NO: 1269825 - RNA, 19 nt, Homo sapiens
  misc_RNA (1)...(19): siRNA sense strand
gagaaacauguccauauau

SEQ ID NO: 1269826 - RNA, 19 nt, Homo sapiens
  misc_RNA (1)...(19): siRNA sense strand
ccacuuaccagacuaaauc

SEQ ID NO: 1269827 - RNA, 19 nt, Homo sapiens
  misc_RNA (1)...(19): siRNA sense strand
acgaguagauuauaagugu

SEQ ID NO: 1269828 - RNA, 19 nt, Homo sapiens
  misc_RNA (1)...(19): siRNA sense strand
cuacaaagcaacaguuaug

SEQ ID NO: 1269829 - RNA, 19 nt, Homo sapiens
  misc_RNA (1)...(19): siRNA sense strand
ccaccaacauuugaagcua

SEQ ID NO: 1269830 - RNA, 19 nt, Homo sapiens
  misc_RNA (1)...(19): siRNA sense strand
uauacgggauccuuuaaau

SEQ ID NO: 1269831 - RNA, 19 nt, Homo sapiens
  misc_RNA (1)...(19): siRNA sense strand
cgaguuugguuaucagaug

SEQ ID NO: 1269832 - RNA, 19 nt, Homo sapiens
  misc_RNA (1)...(19): siRNA sense strand
gaacgaguagauuauaagu

SEQ ID NO: 1269833 - RNA, 19 nt, Homo sapiens
  misc_RNA (1)...(19): siRNA sense strand
gugaggagccaccaacauu

SEQ ID NO: 1269834 - RNA, 19 nt, Homo sapiens
  misc_RNA (1)...(19): siRNA sense strand
gauggcagcgacacaauug

SEQ ID NO: 1269835 - RNA, 19 nt, Homo sapiens
  misc_RNA (1)...(19): siRNA sense strand
ucucagaugacgccuguua

SEQ ID NO: 1269836 - RNA, 19 nt, Homo sapiens
  misc_RNA (1)...(19): siRNA sense strand
gaggagccaccaacauuug

SEQ ID NO: 1269837 - RNA, 19 nt, Homo sapiens
  misc_RNA (1)...(19): siRNA sense strand
gcuauggagcucauuggua

SEQ ID NO: 1269838 - RNA, 19 nt, Homo sapiens
  misc_RNA (1)...(19): siRNA sense strand
acacaccuuuagugaagua

SEQ ID NO: 1269839 - RNA, 19 nt, Homo sapiens
  misc_RNA (1)...(19): siRNA sense strand
uagagaaacauguccauau

SEQ ID NO: 1269840 - RNA, 19 nt, Homo sapiens
  misc_RNA (1)...(19): siRNA sense strand
ggugaacgaguagauuaua

SEQ ID NO: 1269841 - RNA, 19 nt, Homo sapiens
  misc_RNA (1)...(19): siRNA sense strand
gaaguagaaguauuugagu

SEQ ID NO: 1269842 - RNA, 19 nt, Homo sapiens
  misc_RNA (1)...(19): siRNA sense strand
gaaacauguccauauauac

SEQ ID NO: 1269843 - RNA, 19 nt, Homo sapiens
  misc_RNA (1)...(19): siRNA sense strand
ugacgccuguuauagagaa

SEQ ID NO: 1269844 - RNA, 19 nt, Homo sapiens
  misc_RNA (1)...(19): siRNA sense strand
cgaguagauuauaagugua

SEQ ID NO: 1269845 - RNA, 19 nt, Homo sapiens
  misc_RNA (1)...(19): siRNA sense strand
gcacuuuauuuguaaugag

SEQ ID NO: 1269846 - RNA, 19 nt, Homo sapiens
  misc_RNA (1)...(19): siRNA sense strand
guagaaguauuugaguauc

SEQ ID NO: 1269847 - RNA, 19 nt, Homo sapiens
  misc_RNA (1)...(19): siRNA sense strand
guauuugaguaucuugaug

SEQ ID NO: 1269848 - RNA, 19 nt, Homo sapiens
  misc_RNA (1)...(19): siRNA sense strand
aggaauacuugacaguuug

SEQ ID NO: 1269849 - RNA, 19 nt, Homo sapiens
  misc_RNA (1)...(19): siRNA sense strand
ccaaaacccuacuaugaga

SEQ ID NO: 1269850 - RNA, 19 nt, Homo sapiens
  misc_RNA (1)...(19): siRNA sense strand
aguguaaaguggucaaaug

SEQ ID NO: 1269851 - RNA, 19 nt, Homo sapiens
  misc_RNA (1)...(19): siRNA sense strand
ccacccauacuauuuguga

SEQ ID NO: 1269852 - RNA, 19 nt, Homo sapiens
  misc_RNA (1)...(19): siRNA sense strand
uuggagagagcacgauuua

SEQ ID NO: 1269853 - RNA, 19 nt, Homo sapiens
  misc_RNA (1)...(19): siRNA sense strand
gguuaucagaugcacuuua

SEQ ID NO: 1269854 - RNA, 19 nt, Homo sapiens
  misc_RNA (1)...(19): siRNA sense strand
caccaacauuugaagcuau

SEQ ID NO: 1269855 - RNA, 19 nt, Homo sapiens
  misc_RNA (1)...(19): siRNA sense strand
ugaggagccaccaacauuu

SEQ ID NO: 1269856 - RNA, 19 nt, Homo sapiens
  misc_RNA (1)...(19): siRNA sense strand
ggaaggaauacuugacagu

SEQ ID NO: 1269857 - RNA, 19 nt, Homo sapiens
  misc_RNA (1)...(19): siRNA sense strand
gaggaaggaauacuugaca

SEQ ID NO: 1269858 - RNA, 19 nt, Homo sapiens
  misc_RNA (1)...(19): siRNA sense strand
ugaguaucuugaugcagua

SEQ ID NO: 1269859 - RNA, 19 nt, Homo sapiens
  misc_RNA (1)...(19): siRNA sense strand
caccuuuagugaaguagaa

SEQ ID NO: 1269860 - RNA, 19 nt, Homo sapiens
  misc_RNA (1)...(19): siRNA sense strand
acagauaucaggauuugga

SEQ ID NO: 1269861 - RNA, 19 nt, Homo sapiens
  misc_RNA (1)...(19): siRNA sense strand
ucauugcugugauuguuau

SEQ ID NO: 1269862 - RNA, 19 nt, Homo sapiens
  misc_RNA (1)...(19): siRNA sense strand
ucagaugcacuuuauuugu

SEQ ID NO: 1269863 - RNA, 19 nt, Homo sapiens
  misc_RNA (1)...(19): siRNA sense strand
gugcugcuccagaguguaa

SEQ ID NO: 1269864 - RNA, 19 nt, Homo sapiens
  misc_RNA (1)...(19): siRNA sense strand
ggaaaacacaccuuuagug

SEQ ID NO: 1269865 - RNA, 19 nt, Homo sapiens
  misc_RNA (1)...(19): siRNA sense strand
aaggaucaguagcaauuug

SEQ ID NO: 1269866 - RNA, 19 nt, Homo sapiens
  misc_RNA (1)...(19): siRNA sense strand
uauauacgggauccuuuaa

SEQ ID NO: 1269867 - RNA, 19 nt, Homo sapiens
  misc_RNA (1)...(19): siRNA sense strand
ugaaguagaaguauuugag

SEQ ID NO: 1269868 - RNA, 19 nt, Homo sapiens
  misc_RNA (1)...(19): siRNA sense strand
cuugacaguuuggauguuu

SEQ ID NO: 1269869 - RNA, 19 nt, Homo sapiens
  misc_RNA (1)...(19): siRNA sense strand
cauauauacgggauccuuu

SEQ ID NO: 1269870 - RNA, 19 nt, Homo sapiens
  misc_RNA (1)...(19): siRNA sense strand
auauauacgggauccuuua

SEQ ID NO: 1269871 - RNA, 19 nt, Homo sapiens
  misc_RNA (1)...(19): siRNA sense strand
cuuaaaggaucaguagcaa

SEQ ID NO: 1269872 - RNA, 19 nt, Homo sapiens
  misc_RNA (1)...(19): siRNA sense strand
uaaaccugaggaaggaaua

SEQ ID NO: 1269873 - RNA, 19 nt, Homo sapiens
  misc_RNA (1)...(19): siRNA sense strand
agaugacgccuguuauaga

SEQ ID NO: 1269874 - RNA, 19 nt, Homo sapiens
  misc_RNA (1)...(19): siRNA sense strand
ugugauuguuauugccaua

SEQ ID NO: 1269875 - RNA, 19 nt, Homo sapiens
  misc_RNA (1)...(19): siRNA sense strand
gagagcacgauuuauugug

SEQ ID NO: 1269876 - RNA, 19 nt, Homo sapiens
  misc_RNA (1)...(19): siRNA sense strand
gaaguauuugaguaucuug

SEQ ID NO: 1269877 - RNA, 19 nt, Homo sapiens
  misc_RNA (1)...(19): siRNA sense strand
ggcuaccugucucagauga

SEQ ID NO: 1269878 - RNA, 19 nt, Homo sapiens
  misc_RNA (1)...(19): siRNA sense strand
gauaucaggauuuggaaaa

SEQ ID NO: 1269879 - RNA, 19 nt, Homo sapiens
  misc_RNA (1)...(19): siRNA sense strand
ccucuugccacccauacua

SEQ ID NO: 1269880 - RNA, 19 nt, Homo sapiens
  misc_RNA (1)...(19): siRNA sense strand
ccaugguguugcugcugua

SEQ ID NO: 1269881 - RNA, 19 nt, Homo sapiens
  misc_RNA (1)...(19): siRNA sense strand
cagaugacgccuguuauag

SEQ ID NO: 1269882 - RNA, 19 nt, Homo sapiens
  misc_RNA (1)...(19): siRNA sense strand
cagaugguggagcugaaua

SEQ ID NO: 1269883 - RNA, 19 nt, Homo sapiens
  misc_RNA (1)...(19): siRNA sense strand
uuggugaacgaguagauua

SEQ ID NO: 1269884 - RNA, 19 nt, Homo sapiens
  misc_RNA (1)...(19): siRNA sense strand
gucauugcugugauuguua

SEQ ID NO: 1269885 - RNA, 19 nt, Homo sapiens
  misc_RNA (1)...(19): siRNA sense strand
ggagccaccaacauuugaa

SEQ ID NO: 1269886 - RNA, 19 nt, Homo sapiens
  misc_RNA (1)...(19): siRNA sense strand
gcgcuuuccuggguugcuu

SEQ ID NO: 1269887 - RNA, 19 nt, Homo sapiens
  misc_RNA (1)...(19): siRNA sense strand
uacuacaaagcaacaguua

SEQ ID NO: 1269888 - RNA, 19 nt, Homo sapiens
  misc_RNA (1)...(19): siRNA sense strand
cuugaugcaguaacuuaua

SEQ ID NO: 1269889 - RNA, 19 nt, Homo sapiens
  misc_RNA (1)...(19): siRNA sense strand
aaacauguccauauauacg

SEQ ID NO: 1269890 - RNA, 19 nt, Homo sapiens
  misc_RNA (1)...(19): siRNA sense strand
guguaaaguggucaaaugu

SEQ ID NO: 1269891 - RNA, 19 nt, Homo sapiens
  misc_RNA (1)...(19): siRNA sense strand
cuuacgaguuugguuauca

SEQ ID NO: 1269892 - RNA, 19 nt, Homo sapiens
  misc_RNA (1)...(19): siRNA sense strand
uacgggauccuuuaaaugg

SEQ ID NO: 1269893 - RNA, 19 nt, Homo sapiens
  misc_RNA (1)...(19): siRNA sense strand
gcagaugguggagcugaau

SEQ ID NO: 1269894 - RNA, 19 nt, Homo sapiens
  misc_RNA (1)...(19): siRNA sense strand
aaccaaaacccuacuauga

SEQ ID NO: 1269895 - RNA, 19 nt, Homo sapiens
  misc_RNA (1)...(19): siRNA sense strand
cccaauaugugaaaagguu

SEQ ID NO: 1269896 - RNA, 19 nt, Homo sapiens
  misc_RNA (1)...(19): siRNA sense strand
ggagcugaauaugccacuu

SEQ ID NO: 1269897 - RNA, 19 nt, Homo sapiens
  misc_RNA (1)...(19): siRNA sense strand
cgauggcagcgacacaauu

SEQ ID NO: 1269898 - RNA, 19 nt, Homo sapiens
  misc_RNA (1)...(19): siRNA sense strand
gauccauuuucacuuauug

SEQ ID NO: 1269899 - RNA, 19 nt, Homo sapiens
  misc_RNA (1)...(19): siRNA sense strand
uugaugcaguaacuuauag

SEQ ID NO: 1269900 - RNA, 19 nt, Homo sapiens
  misc_RNA (1)...(19): siRNA sense strand
guaucuugaugcaguaacu

SEQ ID NO: 1269901 - RNA, 19 nt, Homo sapiens
  misc_RNA (1)...(19): siRNA sense strand
ggagagagcacgauuuauu

SEQ ID NO: 1269902 - RNA, 19 nt, Homo sapiens
  misc_RNA (1)...(19): siRNA sense strand
agagaaacauguccauaua

SEQ ID NO: 1269903 - RNA, 19 nt, Homo sapiens
  misc_RNA (1)...(19): siRNA sense strand
cagaugcacuuuauuugua

SEQ ID NO: 1269904 - RNA, 19 nt, Homo sapiens
  misc_RNA (1)...(19): siRNA sense strand
ggacuuacgaguuugguua

SEQ ID NO: 1269905 - RNA, 19 nt, Homo sapiens
  misc_RNA (1)...(19): siRNA sense strand
aaacagauaucaggauuug

SEQ ID NO: 1269906 - RNA, 19 nt, Homo sapiens
  misc_RNA (1)...(19): siRNA sense strand
cuauggagcucauugguaa

SEQ ID NO: 1269907 - RNA, 19 nt, Homo sapiens
  misc_RNA (1)...(19): siRNA sense strand
aaacacaccuuuagugaag

SEQ ID NO: 1269908 - RNA, 19 nt, Homo sapiens
  misc_RNA (1)...(19): siRNA sense strand
gaacuuaaaggaucaguag

SEQ ID NO: 1269909 - RNA, 19 nt, Homo sapiens
  misc_RNA (1)...(19): siRNA sense strand
gaaaacagauaucaggauu

SEQ ID NO: 1269910 - RNA, 19 nt, Homo sapiens
  misc_RNA (1)...(19): siRNA sense strand
uaaaggaucaguagcaauu

SEQ ID NO: 1269911 - RNA, 19 nt, Homo sapiens
  misc_RNA (1)...(19): siRNA sense strand
aaaugggacuuacgaguuu

SEQ ID NO: 1269912 - RNA, 19 nt, Homo sapiens
  misc_RNA (1)...(19): siRNA sense strand
guuaucagaugcacuuuau

SEQ ID NO: 1269913 - RNA, 19 nt, Homo sapiens
  misc_RNA (1)...(19): siRNA sense strand
ugagauuggugaacgagua

SEQ ID NO: 1269914 - RNA, 19 nt, Homo sapiens
  misc_RNA (1)...(19): siRNA sense strand
gugaacgaguagauuauaa

SEQ ID NO: 1269915 - RNA, 19 nt, Homo sapiens
  misc_RNA (1)...(19): siRNA sense strand
gagagagcacgauuuauug

SEQ ID NO: 1269916 - RNA, 19 nt, Homo sapiens
  misc_RNA (1)...(19): siRNA sense strand
caaaugggacuuacgaguu

SEQ ID NO: 1269917 - RNA, 19 nt, Homo sapiens
  misc_RNA (1)...(19): siRNA sense strand
ggucauugcugugauuguu

SEQ ID NO: 1269918 - RNA, 19 nt, Homo sapiens
  misc_RNA (1)...(19): siRNA sense strand
ccagauccauuuucacuua

SEQ ID NO: 1269919 - RNA, 19 nt, Homo sapiens
  misc_RNA (1)...(19): siRNA sense strand
gaaggaauacuugacaguu

SEQ ID NO: 1269920 - RNA, 19 nt, Homo sapiens
  misc_RNA (1)...(19): siRNA sense strand
aaggaauacuugacaguuu

SEQ ID NO: 1269921 - RNA, 19 nt, Homo sapiens
  misc_RNA (1)...(19): siRNA sense strand
ucagaugacgccuguuaua

SEQ ID NO: 1269922 - RNA, 19 nt, Homo sapiens
  misc_RNA (1)...(19): siRNA sense strand
gaaaacacaccuuuaguga

SEQ ID NO: 1269923 - RNA, 19 nt, Homo sapiens
  misc_RNA (1)...(19): siRNA sense strand
gaugacgccuguuauagag

SEQ ID NO: 1269924 - RNA, 19 nt, Homo sapiens
  misc_RNA (1)...(19): siRNA sense strand
gagaaacauguccauauau

SEQ ID NO: 1269925 - RNA, 19 nt, Homo sapiens
  misc_RNA (1)...(19): siRNA sense strand
acgaguagauuauaagugu

SEQ ID NO: 1269926 - RNA, 19 nt, Homo sapiens
  misc_RNA (1)...(19): siRNA sense strand
cuacaaagcaacaguuaug

SEQ ID NO: 1269927 - RNA, 19 nt, Homo sapiens
  misc_RNA (1)...(19): siRNA sense strand
ccaccaacauuugaagcua

SEQ ID NO: 1269928 - RNA, 19 nt, Homo sapiens
  misc_RNA (1)...(19): siRNA sense strand
uauacgggauccuuuaaau

SEQ ID NO: 1269929 - RNA, 19 nt, Homo sapiens
  misc_RNA (1)...(19): siRNA sense strand
cgaguuugguuaucagaug

SEQ ID NO: 1269930 - RNA, 19 nt, Homo sapiens
  misc_RNA (1)...(19): siRNA sense strand
gaacgaguagauuauaagu

SEQ ID NO: 1269931 - RNA, 19 nt, Homo sapiens
  misc_RNA (1)...(19): siRNA sense strand
gugaggagccaccaacauu

SEQ ID NO: 1269932 - RNA, 19 nt, Homo sapiens
  misc_RNA (1)...(19): siRNA sense strand
gauggcagcgacacaauug

SEQ ID NO: 1269933 - RNA, 19 nt, Homo sapiens
  misc_RNA (1)...(19): siRNA sense strand
gcuauggagcucauuggua

SEQ ID NO: 1269934 - RNA, 19 nt, Homo sapiens
  misc_RNA (1)...(19): siRNA sense strand
gaggagccaccaacauuug

SEQ ID NO: 1269935 - RNA, 19 nt, Homo sapiens
  misc_RNA (1)...(19): siRNA sense strand
acacaccuuuagugaagua

SEQ ID NO: 1269936 - RNA, 19 nt, Homo sapiens
  misc_RNA (1)...(19): siRNA sense strand
ucucagaugacgccuguua

SEQ ID NO: 1269937 - RNA, 19 nt, Homo sapiens
  misc_RNA (1)...(19): siRNA sense strand
uagagaaacauguccauau

SEQ ID NO: 1269938 - RNA, 19 nt, Homo sapiens
  misc_RNA (1)...(19): siRNA sense strand
guuccaaagugucuuaaag

SEQ ID NO: 1269939 - RNA, 19 nt, Homo sapiens
  misc_RNA (1)...(19): siRNA sense strand
ggugaacgaguagauuaua

SEQ ID NO: 1269940 - RNA, 19 nt, Homo sapiens
  misc_RNA (1)...(19): siRNA sense strand
gaaguagaaguauuugagu

SEQ ID NO: 1269941 - RNA, 19 nt, Homo sapiens
  misc_RNA (1)...(19): siRNA sense strand
gaaacauguccauauauac

SEQ ID NO: 1269942 - RNA, 19 nt, Homo sapiens
  misc_RNA (1)...(19): siRNA sense strand
ugacgccuguuauagagaa

SEQ ID NO: 1269943 - RNA, 19 nt, Homo sapiens
  misc_RNA (1)...(19): siRNA sense strand
cgaguagauuauaagugua

SEQ ID NO: 1269944 - RNA, 19 nt, Homo sapiens
  misc_RNA (1)...(19): siRNA sense strand
gcacuuuauuuguaaugag

SEQ ID NO: 1269945 - RNA, 19 nt, Homo sapiens
  misc_RNA (1)...(19): siRNA sense strand
guagaaguauuugaguauc

SEQ ID NO: 1269946 - RNA, 19 nt, Homo sapiens
  misc_RNA (1)...(19): siRNA sense strand
guauuugaguaucuugaug

SEQ ID NO: 1269947 - RNA, 19 nt, Homo sapiens
  misc_RNA (1)...(19): siRNA sense strand
aggaauacuugacaguuug

SEQ ID NO: 1269948 - RNA, 19 nt, Homo sapiens
  misc_RNA (1)...(19): siRNA sense strand
ccaaaacccuacuaugaga

SEQ ID NO: 1269949 - RNA, 19 nt, Homo sapiens
  misc_RNA (1)...(19): siRNA sense strand
aguguaaaguggucaaaug

SEQ ID NO: 1269950 - RNA, 19 nt, Homo sapiens
  misc_RNA (1)...(19): siRNA sense strand
ccacccauacuauuuguga

SEQ ID NO: 1269951 - RNA, 19 nt, Homo sapiens
  misc_RNA (1)...(19): siRNA sense strand
caccaacauuugaagcuau

SEQ ID NO: 1269952 - RNA, 19 nt, Homo sapiens
  misc_RNA (1)...(19): siRNA sense strand
uuggagagagcacgauuua

SEQ ID NO: 1269953 - RNA, 19 nt, Homo sapiens
  misc_RNA (1)...(19): siRNA sense strand
gguuaucagaugcacuuua

SEQ ID NO: 1269954 - RNA, 19 nt, Homo sapiens
  misc_RNA (1)...(19): siRNA sense strand
ugaggagccaccaacauuu

SEQ ID NO: 1269955 - RNA, 19 nt, Homo sapiens
  misc_RNA (1)...(19): siRNA sense strand
ggaaggaauacuugacagu

SEQ ID NO: 1269956 - RNA, 19 nt, Homo sapiens
  misc_RNA (1)...(19): siRNA sense strand
gaggaaggaauacuugaca

SEQ ID NO: 1269957 - RNA, 19 nt, Homo sapiens
  misc_RNA (1)...(19): siRNA sense strand
ccaguuccaaagugucuua

SEQ ID NO: 1269958 - RNA, 19 nt, Homo sapiens
  misc_RNA (1)...(19): siRNA sense strand
ugaguaucuugaugcagua

SEQ ID NO: 1269959 - RNA, 19 nt, Homo sapiens
  misc_RNA (1)...(19): siRNA sense strand
caccuuuagugaaguagaa

SEQ ID NO: 1269960 - RNA, 19 nt, Homo sapiens
  misc_RNA (1)...(19): siRNA sense strand
acagauaucaggauuugga

SEQ ID NO: 1269961 - RNA, 19 nt, Homo sapiens
  misc_RNA (1)...(19): siRNA sense strand
ucauugcugugauuguuau

SEQ ID NO: 1269962 - RNA, 19 nt, Homo sapiens
  misc_RNA (1)...(19): siRNA sense strand
ucagaugcacuuuauuugu

SEQ ID NO: 1269963 - RNA, 19 nt, Homo sapiens
  misc_RNA (1)...(19): siRNA sense strand
gugcugcuccagaguguaa

SEQ ID NO: 1269964 - RNA, 19 nt, Homo sapiens
  misc_RNA (1)...(19): siRNA sense strand
ggaaaacacaccuuuagug

SEQ ID NO: 1269965 - RNA, 19 nt, Homo sapiens
  misc_RNA (1)...(19): siRNA sense strand
aaggaucaguagcaauuug

SEQ ID NO: 1269966 - RNA, 19 nt, Homo sapiens
  misc_RNA (1)...(19): siRNA sense strand
uauauacgggauccuuuaa

SEQ ID NO: 1269967 - RNA, 19 nt, Homo sapiens
  misc_RNA (1)...(19): siRNA sense strand
ugaaguagaaguauuugag

SEQ ID NO: 1269968 - RNA, 19 nt, Homo sapiens
  misc_RNA (1)...(19): siRNA sense strand
cuugacaguuuggauguuu

SEQ ID NO: 1269969 - RNA, 19 nt, Homo sapiens
  misc_RNA (1)...(19): siRNA sense strand
cauauauacgggauccuuu

SEQ ID NO: 1269970 - RNA, 19 nt, Homo sapiens
  misc_RNA (1)...(19): siRNA sense strand
auauauacgggauccuuua

SEQ ID NO: 1269971 - RNA, 19 nt, Homo sapiens
  misc_RNA (1)...(19): siRNA sense strand
cuuaaaggaucaguagcaa

SEQ ID NO: 1269972 - RNA, 19 nt, Homo sapiens
  misc_RNA (1)...(19): siRNA sense strand
uaaaccugaggaaggaaua

SEQ ID NO: 1269973 - RNA, 19 nt, Homo sapiens
  misc_RNA (1)...(19): siRNA sense strand
agaugacgccuguuauaga

SEQ ID NO: 1269974 - RNA, 19 nt, Homo sapiens
  misc_RNA (1)...(19): siRNA sense strand
ugugauuguuauugccaua

SEQ ID NO: 1269975 - RNA, 19 nt, Homo sapiens
  misc_RNA (1)...(19): siRNA sense strand
gagagcacgauuuauugug

SEQ ID NO: 1269976 - RNA, 19 nt, Homo sapiens
  misc_RNA (1)...(19): siRNA sense strand
gaaguauuugaguaucuug

SEQ ID NO: 1269977 - RNA, 19 nt, Homo sapiens
  misc_RNA (1)...(19): siRNA sense strand
ggcuaccugucucagauga

SEQ ID NO: 1269978 - RNA, 19 nt, Homo sapiens
  misc_RNA (1)...(19): siRNA sense strand
gauaucaggauuuggaaaa

SEQ ID NO: 1269979 - RNA, 19 nt, Homo sapiens
  misc_RNA (1)...(19): siRNA sense strand
ccucuugccacccauacua

SEQ ID NO: 1269980 - RNA, 19 nt, Homo sapiens
  misc_RNA (1)...(19): siRNA sense strand
ccaugguguugcugcugua

SEQ ID NO: 1269981 - RNA, 19 nt, Homo sapiens
  misc_RNA (1)...(19): siRNA sense strand
cagaugacgccuguuauag

SEQ ID NO: 1269982 - RNA, 19 nt, Homo sapiens
  misc_RNA (1)...(19): siRNA sense strand
uuggugaacgaguagauua

SEQ ID NO: 1269983 - RNA, 19 nt, Homo sapiens
  misc_RNA (1)...(19): siRNA sense strand
gucauugcugugauuguua

SEQ ID NO: 1269984 - RNA, 19 nt, Homo sapiens
  misc_RNA (1)...(19): siRNA sense strand
ggagccaccaacauuugaa

SEQ ID NO: 1269985 - RNA, 19 nt, Homo sapiens
  misc_RNA (1)...(19): siRNA sense strand
gcgcuuuccuggguugcuu

SEQ ID NO: 1269986 - RNA, 19 nt, Homo sapiens
  misc_RNA (1)...(19): siRNA sense strand
uacuacaaagcaacaguua

SEQ ID NO: 1269987 - RNA, 19 nt, Homo sapiens
  misc_RNA (1)...(19): siRNA sense strand
cuugaugcaguaacuuaua

SEQ ID NO: 1269988 - RNA, 19 nt, Homo sapiens
  misc_RNA (1)...(19): siRNA sense strand
aaacauguccauauauacg

SEQ ID NO: 1269989 - RNA, 19 nt, Homo sapiens
  misc_RNA (1)...(19): siRNA sense strand
guguaaaguggucaaaugu

SEQ ID NO: 1269990 - RNA, 19 nt, Homo sapiens
  misc_RNA (1)...(19): siRNA sense strand
cuuacgaguuugguuauca

SEQ ID NO: 1269991 - RNA, 19 nt, Homo sapiens
  misc_RNA (1)...(19): siRNA sense strand
uacgggauccuuuaaaugg

SEQ ID NO: 1269992 - RNA, 19 nt, Homo sapiens
  misc_RNA (1)...(19): siRNA sense strand
aaccaaaacccuacuauga

SEQ ID NO: 1269993 - RNA, 19 nt, Homo sapiens
  misc_RNA (1)...(19): siRNA sense strand
cccaauaugugaaaagguu

SEQ ID NO: 1269994 - RNA, 19 nt, Homo sapiens
  misc_RNA (1)...(19): siRNA sense strand
cgauggcagcgacacaauu

SEQ ID NO: 1269995 - RNA, 19 nt, Homo sapiens
  misc_RNA (1)...(19): siRNA sense strand
gauccauuuucacuuauug

SEQ ID NO: 1269996 - RNA, 19 nt, Homo sapiens
  misc_RNA (1)...(19): siRNA sense strand
uugaugcaguaacuuauag

SEQ ID NO: 1269997 - RNA, 19 nt, Homo sapiens
  misc_RNA (1)...(19): siRNA sense strand
guaucuugaugcaguaacu

SEQ ID NO: 1269998 - RNA, 19 nt, Homo sapiens
  misc_RNA (1)...(19): siRNA sense strand
caacauuugaagcuaugga

SEQ ID NO: 1269999 - RNA, 19 nt, Homo sapiens
  misc_RNA (1)...(19): siRNA sense strand
gagauuggugaacgaguag

SEQ ID NO: 1270000 - RNA, 19 nt, Homo sapiens
  misc_RNA (1)...(19): siRNA sense strand
ggagagagcacgauuuauu

SEQ ID NO: 1270001 - RNA, 19 nt, Homo sapiens
  misc_RNA (1)...(19): siRNA sense strand
agagaaacauguccauaua

SEQ ID NO: 1270002 - RNA, 19 nt, Homo sapiens
  misc_RNA (1)...(19): siRNA sense strand
cagaugcacuuuauuugua

SEQ ID NO: 1270003 - RNA, 19 nt, Homo sapiens
  misc_RNA (1)...(19): siRNA sense strand
ggacuuacgaguuugguua

SEQ ID NO: 1270004 - RNA, 19 nt, Homo sapiens
  misc_RNA (1)...(19): siRNA sense strand
aaacagauaucaggauuug

SEQ ID NO: 1270005 - RNA, 19 nt, Homo sapiens
  misc_RNA (1)...(19): siRNA sense strand
cuauggagcucauugguaa

SEQ ID NO: 1270006 - RNA, 19 nt, Homo sapiens
  misc_RNA (1)...(19): siRNA sense strand
aaacacaccuuuagugaag

SEQ ID NO: 1270007 - RNA, 19 nt, Homo sapiens
  misc_RNA (1)...(19): siRNA sense strand
gaacuuaaaggaucaguag

SEQ ID NO: 1270008 - RNA, 19 nt, Homo sapiens
  misc_RNA (1)...(19): siRNA sense strand
gaaaacagauaucaggauu

SEQ ID NO: 1270009 - RNA, 19 nt, Homo sapiens
  misc_RNA (1)...(19): siRNA sense strand
uaaaggaucaguagcaauu

SEQ ID NO: 1270010 - RNA, 19 nt, Homo sapiens
  misc_RNA (1)...(19): siRNA sense strand
aaaugggacuuacgaguuu

SEQ ID NO: 1270011 - RNA, 19 nt, Homo sapiens
  misc_RNA (1)...(19): siRNA sense strand
guuaucagaugcacuuuau

SEQ ID NO: 1270012 - RNA, 19 nt, Homo sapiens
  misc_RNA (1)...(19): siRNA sense strand
gagcugaauaugccacuua

SEQ ID NO: 1270013 - RNA, 19 nt, Homo sapiens
  misc_RNA (1)...(19): siRNA sense strand
gagcagagaggcugaauag

SEQ ID NO: 1270014 - RNA, 19 nt, Homo sapiens
  misc_RNA (1)...(19): siRNA sense strand
ugagauuggugaacgagua

SEQ ID NO: 1270015 - RNA, 19 nt, Homo sapiens
  misc_RNA (1)...(19): siRNA sense strand
gugaacgaguagauuauaa

SEQ ID NO: 1270016 - RNA, 19 nt, Homo sapiens
  misc_RNA (1)...(19): siRNA sense strand
gagagagcacgauuuauug

SEQ ID NO: 1270017 - RNA, 19 nt, Homo sapiens
  misc_RNA (1)...(19): siRNA sense strand
caaaugggacuuacgaguu

SEQ ID NO: 1270018 - RNA, 19 nt, Homo sapiens
  misc_RNA (1)...(19): siRNA sense strand
ggucauugcugugauuguu

SEQ ID NO: 1270019 - RNA, 19 nt, Homo sapiens
  misc_RNA (1)...(19): siRNA sense strand
ccagauccauuuucacuua

SEQ ID NO: 1270020 - RNA, 19 nt, Homo sapiens
  misc_RNA (1)...(19): siRNA sense strand
gaaggaauacuugacaguu

SEQ ID NO: 1270021 - RNA, 19 nt, Homo sapiens
  misc_RNA (1)...(19): siRNA sense strand
aaggaauacuugacaguuu

SEQ ID NO: 1270022 - RNA, 19 nt, Homo sapiens
  misc_RNA (1)...(19): siRNA sense strand
ucagaugacgccuguuaua

SEQ ID NO: 1270023 - RNA, 19 nt, Homo sapiens
  misc_RNA (1)...(19): siRNA sense strand
gaaaacacaccuuuaguga

SEQ ID NO: 1270024 - RNA, 19 nt, Homo sapiens
  misc_RNA (1)...(19): siRNA sense strand
gaugacgccuguuauagag

SEQ ID NO: 1270025 - RNA, 19 nt, Homo sapiens
  misc_RNA (1)...(19): siRNA sense strand
gagaaacauguccauauau

SEQ ID NO: 1270026 - RNA, 19 nt, Homo sapiens
  misc_RNA (1)...(19): siRNA sense strand
ccacuuaccagacuaaauc

SEQ ID NO: 1270027 - RNA, 19 nt, Homo sapiens
  misc_RNA (1)...(19): siRNA sense strand
acgaguagauuauaagugu

SEQ ID NO: 1270028 - RNA, 19 nt, Homo sapiens
  misc_RNA (1)...(19): siRNA sense strand
cuacaaagcaacaguuaug

SEQ ID NO: 1270029 - RNA, 19 nt, Homo sapiens
  misc_RNA (1)...(19): siRNA sense strand
ccaccaacauuugaagcua

SEQ ID NO: 1270030 - RNA, 19 nt, Homo sapiens
  misc_RNA (1)...(19): siRNA sense strand
uauacgggauccuuuaaau

SEQ ID NO: 1270031 - RNA, 19 nt, Homo sapiens
  misc_RNA (1)...(19): siRNA sense strand
cgaguuugguuaucagaug

SEQ ID NO: 1270032 - RNA, 19 nt, Homo sapiens
  misc_RNA (1)...(19): siRNA sense strand
gaacgaguagauuauaagu

SEQ ID NO: 1270033 - RNA, 19 nt, Homo sapiens
  misc_RNA (1)...(19): siRNA sense strand
gugaggagccaccaacauu

SEQ ID NO: 1270034 - RNA, 19 nt, Homo sapiens
  misc_RNA (1)...(19): siRNA sense strand
gauggcagcgacacaauug

SEQ ID NO: 1270035 - RNA, 19 nt, Homo sapiens
  misc_RNA (1)...(19): siRNA sense strand
ucucagaugacgccuguua

SEQ ID NO: 1270036 - RNA, 19 nt, Homo sapiens
  misc_RNA (1)...(19): siRNA sense strand
acacaccuuuagugaagua

SEQ ID NO: 1270037 - RNA, 19 nt, Homo sapiens
  misc_RNA (1)...(19): siRNA sense strand
gcuauggagcucauuggua

SEQ ID NO: 1270038 - RNA, 19 nt, Homo sapiens
  misc_RNA (1)...(19): siRNA sense strand
gaggagccaccaacauuug

SEQ ID NO: 1270039 - RNA, 19 nt, Homo sapiens
  misc_RNA (1)...(19): siRNA sense strand
uagagaaacauguccauau

SEQ ID NO: 1270040 - RNA, 19 nt, Homo sapiens
  misc_RNA (1)...(19): siRNA sense strand
ggugaacgaguagauuaua

SEQ ID NO: 1270041 - RNA, 19 nt, Homo sapiens
  misc_RNA (1)...(19): siRNA sense strand
gaaguagaaguauuugagu

SEQ ID NO: 1270042 - RNA, 19 nt, Homo sapiens
  misc_RNA (1)...(19): siRNA sense strand
gaaacauguccauauauac

SEQ ID NO: 1270043 - RNA, 19 nt, Homo sapiens
  misc_RNA (1)...(19): siRNA sense strand
ugacgccuguuauagagaa

SEQ ID NO: 1270044 - RNA, 19 nt, Homo sapiens
  misc_RNA (1)...(19): siRNA sense strand
cgaguagauuauaagugua

SEQ ID NO: 1270045 - RNA, 19 nt, Homo sapiens
  misc_RNA (1)...(19): siRNA sense strand
gcacuuuauuuguaaugag

SEQ ID NO: 1270046 - RNA, 19 nt, Homo sapiens
  misc_RNA (1)...(19): siRNA sense strand
guagaaguauuugaguauc

SEQ ID NO: 1270047 - RNA, 19 nt, Homo sapiens
  misc_RNA (1)...(19): siRNA sense strand
guauuugaguaucuugaug

SEQ ID NO: 1270048 - RNA, 19 nt, Homo sapiens
  misc_RNA (1)...(19): siRNA sense strand
aggaauacuugacaguuug

SEQ ID NO: 1270049 - RNA, 19 nt, Homo sapiens
  misc_RNA (1)...(19): siRNA sense strand
ccaaaacccuacuaugaga

SEQ ID NO: 1270050 - RNA, 19 nt, Homo sapiens
  misc_RNA (1)...(19): siRNA sense strand
aguguaaaguggucaaaug

SEQ ID NO: 1270051 - RNA, 19 nt, Homo sapiens
  misc_RNA (1)...(19): siRNA sense strand
ccacccauacuauuuguga

SEQ ID NO: 1270052 - RNA, 19 nt, Homo sapiens
  misc_RNA (1)...(19): siRNA sense strand
uuggagagagcacgauuua

SEQ ID NO: 1270053 - RNA, 19 nt, Homo sapiens
  misc_RNA (1)...(19): siRNA sense strand
gguuaucagaugcacuuua

SEQ ID NO: 1270054 - RNA, 19 nt, Homo sapiens
  misc_RNA (1)...(19): siRNA sense strand
caccaacauuugaagcuau

SEQ ID NO: 1270055 - RNA, 19 nt, Homo sapiens
  misc_RNA (1)...(19): siRNA sense strand
ugaggagccaccaacauuu

SEQ ID NO: 1270056 - RNA, 19 nt, Homo sapiens
  misc_RNA (1)...(19): siRNA sense strand
ggaaggaauacuugacagu

SEQ ID NO: 1270057 - RNA, 19 nt, Homo sapiens
  misc_RNA (1)...(19): siRNA sense strand
gaggaaggaauacuugaca

SEQ ID NO: 1270058 - RNA, 19 nt, Homo sapiens
  misc_RNA (1)...(19): siRNA sense strand
ugaguaucuugaugcagua

SEQ ID NO: 1270059 - RNA, 19 nt, Homo sapiens
  misc_RNA (1)...(19): siRNA sense strand
caccuuuagugaaguagaa

SEQ ID NO: 1270060 - RNA, 19 nt, Homo sapiens
  misc_RNA (1)...(19): siRNA sense strand
acagauaucaggauuugga

SEQ ID NO: 1270061 - RNA, 19 nt, Homo sapiens
  misc_RNA (1)...(19): siRNA sense strand
ucauugcugugauuguuau

SEQ ID NO: 1270062 - RNA, 19 nt, Homo sapiens
  misc_RNA (1)...(19): siRNA sense strand
ucagaugcacuuuauuugu

SEQ ID NO: 1270063 - RNA, 19 nt, Homo sapiens
  misc_RNA (1)...(19): siRNA sense strand
gugcugcuccagaguguaa

SEQ ID NO: 1270064 - RNA, 19 nt, Homo sapiens
  misc_RNA (1)...(19): siRNA sense strand
ggaaaacacaccuuuagug

SEQ ID NO: 1270065 - RNA, 19 nt, Homo sapiens
  misc_RNA (1)...(19): siRNA sense strand
aaggaucaguagcaauuug

SEQ ID NO: 1270066 - RNA, 19 nt, Homo sapiens
  misc_RNA (1)...(19): siRNA sense strand
uauauacgggauccuuuaa

SEQ ID NO: 1270067 - RNA, 19 nt, Homo sapiens
  misc_RNA (1)...(19): siRNA sense strand
ugaaguagaaguauuugag

SEQ ID NO: 1270068 - RNA, 19 nt, Homo sapiens
  misc_RNA (1)...(19): siRNA sense strand
cuugacaguuuggauguuu

SEQ ID NO: 1270069 - RNA, 19 nt, Homo sapiens
  misc_RNA (1)...(19): siRNA sense strand
cauauauacgggauccuuu

SEQ ID NO: 1270070 - RNA, 19 nt, Homo sapiens
  misc_RNA (1)...(19): siRNA sense strand
auauauacgggauccuuua

SEQ ID NO: 1270071 - RNA, 19 nt, Homo sapiens
  misc_RNA (1)...(19): siRNA sense strand
cuuaaaggaucaguagcaa

SEQ ID NO: 1270072 - RNA, 19 nt, Homo sapiens
  misc_RNA (1)...(19): siRNA sense strand
uaaaccugaggaaggaaua

SEQ ID NO: 1270073 - RNA, 19 nt, Homo sapiens
  misc_RNA (1)...(19): siRNA sense strand
agaugacgccuguuauaga

SEQ ID NO: 1270074 - RNA, 19 nt, Homo sapiens
  misc_RNA (1)...(19): siRNA sense strand
ugugauuguuauugccaua

SEQ ID NO: 1270075 - RNA, 19 nt, Homo sapiens
  misc_RNA (1)...(19): siRNA sense strand
gagagcacgauuuauugug

SEQ ID NO: 1270076 - RNA, 19 nt, Homo sapiens
  misc_RNA (1)...(19): siRNA sense strand
gaaguauuugaguaucuug

SEQ ID NO: 1270077 - RNA, 19 nt, Homo sapiens
  misc_RNA (1)...(19): siRNA sense strand
ggcuaccugucucagauga

SEQ ID NO: 1270078 - RNA, 19 nt, Homo sapiens
  misc_RNA (1)...(19): siRNA sense strand
gauaucaggauuuggaaaa

SEQ ID NO: 1270079 - RNA, 19 nt, Homo sapiens
  misc_RNA (1)...(19): siRNA sense strand
ccucuugccacccauacua

SEQ ID NO: 1270080 - RNA, 19 nt, Homo sapiens
  misc_RNA (1)...(19): siRNA sense strand
ccaugguguugcugcugua

SEQ ID NO: 1270081 - RNA, 19 nt, Homo sapiens
  misc_RNA (1)...(19): siRNA sense strand
cagaugacgccuguuauag

SEQ ID NO: 1270082 - RNA, 19 nt, Homo sapiens
  misc_RNA (1)...(19): siRNA sense strand
cagaugguggagcugaaua

SEQ ID NO: 1270083 - RNA, 19 nt, Homo sapiens
  misc_RNA (1)...(19): siRNA sense strand
gucauugcugugauuguua

SEQ ID NO: 1270084 - RNA, 19 nt, Homo sapiens
  misc_RNA (1)...(19): siRNA sense strand
ggagccaccaacauuugaa

SEQ ID NO: 1270085 - RNA, 19 nt, Homo sapiens
  misc_RNA (1)...(19): siRNA sense strand
uuggugaacgaguagauua

SEQ ID NO: 1270086 - RNA, 19 nt, Homo sapiens
  misc_RNA (1)...(19): siRNA sense strand
gcgcuuuccuggguugcuu

SEQ ID NO: 1270087 - RNA, 19 nt, Homo sapiens
  misc_RNA (1)...(19): siRNA sense strand
uacuacaaagcaacaguua

SEQ ID NO: 1270088 - RNA, 19 nt, Homo sapiens
  misc_RNA (1)...(19): siRNA sense strand
cuugaugcaguaacuuaua

SEQ ID NO: 1270089 - RNA, 19 nt, Homo sapiens
  misc_RNA (1)...(19): siRNA sense strand
aaacauguccauauauacg

SEQ ID NO: 1270090 - RNA, 19 nt, Homo sapiens
  misc_RNA (1)...(19): siRNA sense strand
guguaaaguggucaaaugu

SEQ ID NO: 1270091 - RNA, 19 nt, Homo sapiens
  misc_RNA (1)...(19): siRNA sense strand
cuuacgaguuugguuauca

SEQ ID NO: 1270092 - RNA, 19 nt, Homo sapiens
  misc_RNA (1)...(19): siRNA sense strand
uacgggauccuuuaaaugg

SEQ ID NO: 1270093 - RNA, 19 nt, Homo sapiens
  misc_RNA (1)...(19): siRNA sense strand
gcagaugguggagcugaau

SEQ ID NO: 1270094 - RNA, 19 nt, Homo sapiens
  misc_RNA (1)...(19): siRNA sense strand
aaccaaaacccuacuauga

SEQ ID NO: 1270095 - RNA, 19 nt, Homo sapiens
  misc_RNA (1)...(19): siRNA sense strand
uugaugcaguaacuuauag

SEQ ID NO: 1270096 - RNA, 19 nt, Homo sapiens
  misc_RNA (1)...(19): siRNA sense strand
ggagcugaauaugccacuu

SEQ ID NO: 1270097 - RNA, 19 nt, Homo sapiens
  misc_RNA (1)...(19): siRNA sense strand
caacauuugaagcuaugga

SEQ ID NO: 1270098 - RNA, 19 nt, Homo sapiens
  misc_RNA (1)...(19): siRNA sense strand
cgauggcagcgacacaauu

SEQ ID NO: 1270099 - RNA, 19 nt, Homo sapiens
  misc_RNA (1)...(19): siRNA sense strand
gauccauuuucacuuauug

SEQ ID NO: 1270100 - RNA, 19 nt, Homo sapiens
  misc_RNA (1)...(19): siRNA sense strand
ggagagagcacgauuuauu

SEQ ID NO: 1270101 - RNA, 19 nt, Homo sapiens
  misc_RNA (1)...(19): siRNA sense strand
agagaaacauguccauaua

SEQ ID NO: 1270102 - RNA, 19 nt, Homo sapiens
  misc_RNA (1)...(19): siRNA sense strand
cagaugcacuuuauuugua

SEQ ID NO: 1270103 - RNA, 19 nt, Homo sapiens
  misc_RNA (1)...(19): siRNA sense strand
ggacuuacgaguuugguua

SEQ ID NO: 1270104 - RNA, 19 nt, Homo sapiens
  misc_RNA (1)...(19): siRNA sense strand
aaacagauaucaggauuug

SEQ ID NO: 1270105 - RNA, 19 nt, Homo sapiens
  misc_RNA (1)...(19): siRNA sense strand
cuauggagcucauugguaa

SEQ ID NO: 1270106 - RNA, 19 nt, Homo sapiens
  misc_RNA (1)...(19): siRNA sense strand
aaacacaccuuuagugaag

SEQ ID NO: 1270107 - RNA, 19 nt, Homo sapiens
  misc_RNA (1)...(19): siRNA sense strand
gaacuuaaaggaucaguag

SEQ ID NO: 1270108 - RNA, 19 nt, Homo sapiens
  misc_RNA (1)...(19): siRNA sense strand
gaaaacagauaucaggauu

SEQ ID NO: 1270109 - RNA, 19 nt, Homo sapiens
  misc_RNA (1)...(19): siRNA sense strand
uaaaggaucaguagcaauu

SEQ ID NO: 1270110 - RNA, 19 nt, Homo sapiens
  misc_RNA (1)...(19): siRNA sense strand
aaaugggacuuacgaguuu

SEQ ID NO: 1270111 - RNA, 19 nt, Homo sapiens
  misc_RNA (1)...(19): siRNA sense strand
guuaucagaugcacuuuau

SEQ ID NO: 1270112 - RNA, 19 nt, Homo sapiens
  misc_RNA (1)...(19): siRNA sense strand
gagcugaauaugccacuua

SEQ ID NO: 1270113 - RNA, 19 nt, Homo sapiens
  misc_RNA (1)...(19): siRNA sense strand
ugagauuggugaacgagua

SEQ ID NO: 1270114 - RNA, 19 nt, Homo sapiens
  misc_RNA (1)...(19): siRNA sense strand
gugaacgaguagauuauaa

SEQ ID NO: 1270115 - RNA, 19 nt, Homo sapiens
  misc_RNA (1)...(19): siRNA sense strand
gagagagcacgauuuauug

SEQ ID NO: 1270116 - RNA, 19 nt, Homo sapiens
  misc_RNA (1)...(19): siRNA sense strand
caaaugggacuuacgaguu

SEQ ID NO: 1270117 - RNA, 19 nt, Homo sapiens
  misc_RNA (1)...(19): siRNA sense strand
ggucauugcugugauuguu

SEQ ID NO: 1270118 - RNA, 19 nt, Homo sapiens
  misc_RNA (1)...(19): siRNA sense strand
ccagauccauuuucacuua

SEQ ID NO: 1270119 - RNA, 19 nt, Homo sapiens
  misc_RNA (1)...(19): siRNA sense strand
gaaggaauacuugacaguu

SEQ ID NO: 1270120 - RNA, 19 nt, Homo sapiens
  misc_RNA (1)...(19): siRNA sense strand
aaggaauacuugacaguuu

SEQ ID NO: 1270121 - RNA, 19 nt, Homo sapiens
  misc_RNA (1)...(19): siRNA sense strand
ucagaugacgccuguuaua

SEQ ID NO: 1270122 - RNA, 19 nt, Homo sapiens
  misc_RNA (1)...(19): siRNA sense strand
gaaaacacaccuuuaguga

SEQ ID NO: 1270123 - RNA, 19 nt, Homo sapiens
  misc_RNA (1)...(19): siRNA sense strand
gaugacgccuguuauagag

SEQ ID NO: 1270124 - RNA, 19 nt, Homo sapiens
  misc_RNA (1)...(19): siRNA sense strand
gagaaacauguccauauau

SEQ ID NO: 1270125 - RNA, 19 nt, Homo sapiens
  misc_RNA (1)...(19): siRNA sense strand
ccacuuaccagacuaaauc

SEQ ID NO: 1270126 - RNA, 19 nt, Homo sapiens
  misc_RNA (1)...(19): siRNA sense strand
acgaguagauuauaagugu

SEQ ID NO: 1270127 - RNA, 19 nt, Homo sapiens
  misc_RNA (1)...(19): siRNA sense strand
cuacaaagcaacaguuaug

SEQ ID NO: 1270128 - RNA, 19 nt, Homo sapiens
  misc_RNA (1)...(19): siRNA sense strand
ccaccaacauuugaagcua

SEQ ID NO: 1270129 - RNA, 19 nt, Homo sapiens
  misc_RNA (1)...(19): siRNA sense strand
uauacgggauccuuuaaau

SEQ ID NO: 1270130 - RNA, 19 nt, Homo sapiens
  misc_RNA (1)...(19): siRNA sense strand
cgaguuugguuaucagaug

SEQ ID NO: 1270131 - RNA, 19 nt, Homo sapiens
  misc_RNA (1)...(19): siRNA sense strand
gaacgaguagauuauaagu

SEQ ID NO: 1270132 - RNA, 19 nt, Homo sapiens
  misc_RNA (1)...(19): siRNA sense strand
gugaggagccaccaacauu

SEQ ID NO: 1270133 - RNA, 19 nt, Homo sapiens
  misc_RNA (1)...(19): siRNA sense strand
gauggcagcgacacaauug

SEQ ID NO: 1270134 - RNA, 19 nt, Homo sapiens
  misc_RNA (1)...(19): siRNA sense strand
ucucagaugacgccuguua

SEQ ID NO: 1270135 - RNA, 19 nt, Homo sapiens
  misc_RNA (1)...(19): siRNA sense strand
gaggagccaccaacauuug

SEQ ID NO: 1270136 - RNA, 19 nt, Homo sapiens
  misc_RNA (1)...(19): siRNA sense strand
gcuauggagcucauuggua

SEQ ID NO: 1270137 - RNA, 19 nt, Homo sapiens
  misc_RNA (1)...(19): siRNA sense strand
acacaccuuuagugaagua

SEQ ID NO: 1270138 - RNA, 19 nt, Homo sapiens
  misc_RNA (1)...(19): siRNA sense strand
uagagaaacauguccauau

SEQ ID NO: 1270139 - RNA, 19 nt, Homo sapiens
  misc_RNA (1)...(19): siRNA sense strand
guuccaaagugucuuaaag

SEQ ID NO: 1270140 - RNA, 19 nt, Homo sapiens
  misc_RNA (1)...(19): siRNA sense strand
ggugaacgaguagauuaua

SEQ ID NO: 1270141 - RNA, 19 nt, Homo sapiens
  misc_RNA (1)...(19): siRNA sense strand
gaaguagaaguauuugagu

SEQ ID NO: 1270142 - RNA, 19 nt, Homo sapiens
  misc_RNA (1)...(19): siRNA sense strand
gaaacauguccauauauac

SEQ ID NO: 1270143 - RNA, 19 nt, Homo sapiens
  misc_RNA (1)...(19): siRNA sense strand
ugacgccuguuauagagaa

SEQ ID NO: 1270144 - RNA, 19 nt, Homo sapiens
  misc_RNA (1)...(19): siRNA sense strand
cgaguagauuauaagugua

SEQ ID NO: 1270145 - RNA, 19 nt, Homo sapiens
  misc_RNA (1)...(19): siRNA sense strand
gcacuuuauuuguaaugag

SEQ ID NO: 1270146 - RNA, 19 nt, Homo sapiens
  misc_RNA (1)...(19): siRNA sense strand
guagaaguauuugaguauc

SEQ ID NO: 1270147 - RNA, 19 nt, Homo sapiens
  misc_RNA (1)...(19): siRNA sense strand
guauuugaguaucuugaug

SEQ ID NO: 1270148 - RNA, 19 nt, Homo sapiens
  misc_RNA (1)...(19): siRNA sense strand
aggaauacuugacaguuug

SEQ ID NO: 1270149 - RNA, 19 nt, Homo sapiens
  misc_RNA (1)...(19): siRNA sense strand
ccaaaacccuacuaugaga

SEQ ID NO: 1270150 - RNA, 19 nt, Homo sapiens
  misc_RNA (1)...(19): siRNA sense strand
aguguaaaguggucaaaug

SEQ ID NO: 1270151 - RNA, 19 nt, Homo sapiens
  misc_RNA (1)...(19): siRNA sense strand
ccacccauacuauuuguga

SEQ ID NO: 1270152 - RNA, 19 nt, Homo sapiens
  misc_RNA (1)...(19): siRNA sense strand
uuggagagagcacgauuua

SEQ ID NO: 1270153 - RNA, 19 nt, Homo sapiens
  misc_RNA (1)...(19): siRNA sense strand
gguuaucagaugcacuuua

SEQ ID NO: 1270154 - RNA, 19 nt, Homo sapiens
  misc_RNA (1)...(19): siRNA sense strand
caccaacauuugaagcuau

SEQ ID NO: 1270155 - RNA, 19 nt, Homo sapiens
  misc_RNA (1)...(19): siRNA sense strand
ugaggagccaccaacauuu

SEQ ID NO: 1270156 - RNA, 19 nt, Homo sapiens
  misc_RNA (1)...(19): siRNA sense strand
ggaaggaauacuugacagu

SEQ ID NO: 1270157 - RNA, 19 nt, Homo sapiens
  misc_RNA (1)...(19): siRNA sense strand
gaggaaggaauacuugaca

SEQ ID NO: 1270158 - RNA, 19 nt, Homo sapiens
  misc_RNA (1)...(19): siRNA sense strand
ccaguuccaaagugucuua

SEQ ID NO: 1270159 - RNA, 19 nt, Homo sapiens
  misc_RNA (1)...(19): siRNA sense strand
ugaguaucuugaugcagua

SEQ ID NO: 1270160 - RNA, 19 nt, Homo sapiens
  misc_RNA (1)...(19): siRNA sense strand
caccuuuagugaaguagaa

SEQ ID NO: 1270161 - RNA, 19 nt, Homo sapiens
  misc_RNA (1)...(19): siRNA sense strand
acagauaucaggauuugga

SEQ ID NO: 1270162 - RNA, 19 nt, Homo sapiens
  misc_RNA (1)...(19): siRNA sense strand
ucauugcugugauuguuau

SEQ ID NO: 1270163 - RNA, 19 nt, Homo sapiens
  misc_RNA (1)...(19): siRNA sense strand
ucagaugcacuuuauuugu

SEQ ID NO: 1270164 - RNA, 19 nt, Homo sapiens
  misc_RNA (1)...(19): siRNA sense strand
gugcugcuccagaguguaa

SEQ ID NO: 1270165 - RNA, 19 nt, Homo sapiens
  misc_RNA (1)...(19): siRNA sense strand
ggaaaacacaccuuuagug

SEQ ID NO: 1270166 - RNA, 19 nt, Homo sapiens
  misc_RNA (1)...(19): siRNA sense strand
aaggaucaguagcaauuug

SEQ ID NO: 1270167 - RNA, 19 nt, Homo sapiens
  misc_RNA (1)...(19): siRNA sense strand
uauauacgggauccuuuaa

SEQ ID NO: 1270168 - RNA, 19 nt, Homo sapiens
  misc_RNA (1)...(19): siRNA sense strand
ugaaguagaaguauuugag

SEQ ID NO: 1270169 - RNA, 19 nt, Homo sapiens
  misc_RNA (1)...(19): siRNA sense strand
cuugacaguuuggauguuu

SEQ ID NO: 1270170 - RNA, 19 nt, Homo sapiens
  misc_RNA (1)...(19): siRNA sense strand
cauauauacgggauccuuu

SEQ ID NO: 1270171 - RNA, 19 nt, Homo sapiens
  misc_RNA (1)...(19): siRNA sense strand
auauauacgggauccuuua

SEQ ID NO: 1270172 - RNA, 19 nt, Homo sapiens
  misc_RNA (1)...(19): siRNA sense strand
cuuaaaggaucaguagcaa

SEQ ID NO: 1270173 - RNA, 19 nt, Homo sapiens
  misc_RNA (1)...(19): siRNA sense strand
uaaaccugaggaaggaaua

SEQ ID NO: 1270174 - RNA, 19 nt, Homo sapiens
  misc_RNA (1)...(19): siRNA sense strand
agaugacgccuguuauaga

SEQ ID NO: 1270175 - RNA, 19 nt, Homo sapiens
  misc_RNA (1)...(19): siRNA sense strand
ugugauuguuauugccaua

SEQ ID NO: 1270176 - RNA, 19 nt, Homo sapiens
  misc_RNA (1)...(19): siRNA sense strand
gagagcacgauuuauugug

SEQ ID NO: 1270177 - RNA, 19 nt, Homo sapiens
  misc_RNA (1)...(19): siRNA sense strand
gaaguauuugaguaucuug

SEQ ID NO: 1270178 - RNA, 19 nt, Homo sapiens
  misc_RNA (1)...(19): siRNA sense strand
ggcuaccugucucagauga

SEQ ID NO: 1270179 - RNA, 19 nt, Homo sapiens
  misc_RNA (1)...(19): siRNA sense strand
gauaucaggauuuggaaaa

SEQ ID NO: 1270180 - RNA, 19 nt, Homo sapiens
  misc_RNA (1)...(19): siRNA sense strand
ccucuugccacccauacua

SEQ ID NO: 1270181 - RNA, 19 nt, Homo sapiens
  misc_RNA (1)...(19): siRNA sense strand
ccaugguguugcugcugua

SEQ ID NO: 1270182 - RNA, 19 nt, Homo sapiens
  misc_RNA (1)...(19): siRNA sense strand
cagaugacgccuguuauag

SEQ ID NO: 1270183 - RNA, 19 nt, Homo sapiens
  misc_RNA (1)...(19): siRNA sense strand
cagaugguggagcugaaua

SEQ ID NO: 1270184 - RNA, 19 nt, Homo sapiens
  misc_RNA (1)...(19): siRNA sense strand
gucauugcugugauuguua

SEQ ID NO: 1270185 - RNA, 19 nt, Homo sapiens
  misc_RNA (1)...(19): siRNA sense strand
ggagccaccaacauuugaa

SEQ ID NO: 1270186 - RNA, 19 nt, Homo sapiens
  misc_RNA (1)...(19): siRNA sense strand
uuggugaacgaguagauua

SEQ ID NO: 1270187 - RNA, 19 nt, Homo sapiens
  misc_RNA (1)...(19): siRNA sense strand
gcgcuuuccuggguugcuu

SEQ ID NO: 1270188 - RNA, 19 nt, Homo sapiens
  misc_RNA (1)...(19): siRNA sense strand
uacuacaaagcaacaguua

SEQ ID NO: 1270189 - RNA, 19 nt, Homo sapiens
  misc_RNA (1)...(19): siRNA sense strand
cuugaugcaguaacuuaua

SEQ ID NO: 1270190 - RNA, 19 nt, Homo sapiens
  misc_RNA (1)...(19): siRNA sense strand
aaacauguccauauauacg

SEQ ID NO: 1270191 - RNA, 19 nt, Homo sapiens
  misc_RNA (1)...(19): siRNA sense strand
guguaaaguggucaaaugu

SEQ ID NO: 1270192 - RNA, 19 nt, Homo sapiens
  misc_RNA (1)...(19): siRNA sense strand
cuuacgaguuugguuauca

SEQ ID NO: 1270193 - RNA, 19 nt, Homo sapiens
  misc_RNA (1)...(19): siRNA sense strand
uacgggauccuuuaaaugg

SEQ ID NO: 1270194 - RNA, 19 nt, Homo sapiens
  misc_RNA (1)...(19): siRNA sense strand
gcagaugguggagcugaau

SEQ ID NO: 1270195 - RNA, 19 nt, Homo sapiens
  misc_RNA (1)...(19): siRNA sense strand
aaccaaaacccuacuauga

SEQ ID NO: 1270196 - RNA, 19 nt, Homo sapiens
  misc_RNA (1)...(19): siRNA sense strand
uugaugcaguaacuuauag

SEQ ID NO: 1270197 - RNA, 19 nt, Homo sapiens
  misc_RNA (1)...(19): siRNA sense strand
ggagcugaauaugccacuu

SEQ ID NO: 1270198 - RNA, 19 nt, Homo sapiens
  misc_RNA (1)...(19): siRNA sense strand
cgauggcagcgacacaauu

SEQ ID NO: 1270199 - RNA, 19 nt, Homo sapiens
  misc_RNA (1)...(19): siRNA sense strand
gauccauuuucacuuauug

SEQ ID NO: 1270200 - RNA, 19 nt, Homo sapiens
  misc_RNA (1)...(19): siRNA sense strand
ggagagagcacgauuuauu

SEQ ID NO: 1270201 - RNA, 19 nt, Homo sapiens
  misc_RNA (1)...(19): siRNA sense strand
agagaaacauguccauaua

SEQ ID NO: 1270202 - RNA, 19 nt, Homo sapiens
  misc_RNA (1)...(19): siRNA sense strand
cagaugcacuuuauuugua

SEQ ID NO: 1270203 - RNA, 19 nt, Homo sapiens
  misc_RNA (1)...(19): siRNA sense strand
ggacuuacgaguuugguua

SEQ ID NO: 1270204 - RNA, 19 nt, Homo sapiens
  misc_RNA (1)...(19): siRNA sense strand
aaacagauaucaggauuug

SEQ ID NO: 1270205 - RNA, 19 nt, Homo sapiens
  misc_RNA (1)...(19): siRNA sense strand
cuauggagcucauugguaa

SEQ ID NO: 1270206 - RNA, 19 nt, Homo sapiens
  misc_RNA (1)...(19): siRNA sense strand
aaacacaccuuuagugaag

SEQ ID NO: 1270207 - RNA, 19 nt, Homo sapiens
  misc_RNA (1)...(19): siRNA sense strand
gaacuuaaaggaucaguag

SEQ ID NO: 1270208 - RNA, 19 nt, Homo sapiens
  misc_RNA (1)...(19): siRNA sense strand
gaaaacagauaucaggauu

SEQ ID NO: 1270209 - RNA, 19 nt, Homo sapiens
  misc_RNA (1)...(19): siRNA sense strand
uaaaggaucaguagcaauu

SEQ ID NO: 1270210 - RNA, 19 nt, Homo sapiens
  misc_RNA (1)...(19): siRNA sense strand
aaaugggacuuacgaguuu

SEQ ID NO: 1270211 - RNA, 19 nt, Homo sapiens
  misc_RNA (1)...(19): siRNA sense strand
guuaucagaugcacuuuau

SEQ ID NO: 1270212 - RNA, 19 nt, Homo sapiens
  misc_RNA (1)...(19): siRNA sense strand
gagcugaauaugccacuua

SEQ ID NO: 1270213 - RNA, 19 nt, Homo sapiens
  misc_RNA (1)...(19): siRNA sense strand
ugagauuggugaacgagua

SEQ ID NO: 1270214 - RNA, 19 nt, Homo sapiens
  misc_RNA (1)...(19): siRNA sense strand
gugaacgaguagauuauaa

SEQ ID NO: 1270215 - RNA, 19 nt, Homo sapiens
  misc_RNA (1)...(19): siRNA sense strand
gagagagcacgauuuauug

SEQ ID NO: 1270216 - RNA, 19 nt, Homo sapiens
  misc_RNA (1)...(19): siRNA sense strand
caaaugggacuuacgaguu

SEQ ID NO: 1270217 - RNA, 19 nt, Homo sapiens
  misc_RNA (1)...(19): siRNA sense strand
ggucauugcugugauuguu

SEQ ID NO: 1270218 - RNA, 19 nt, Homo sapiens
  misc_RNA (1)...(19): siRNA sense strand
ccagauccauuuucacuua

SEQ ID NO: 1270219 - RNA, 19 nt, Homo sapiens
  misc_RNA (1)...(19): siRNA sense strand
gaaggaauacuugacaguu

SEQ ID NO: 1270220 - RNA, 19 nt, Homo sapiens
  misc_RNA (1)...(19): siRNA sense strand
aaggaauacuugacaguuu

SEQ ID NO: 1270221 - RNA, 19 nt, Homo sapiens
  misc_RNA (1)...(19): siRNA sense strand
ucagaugacgccuguuaua

SEQ ID NO: 1270222 - RNA, 19 nt, Homo sapiens
  misc_RNA (1)...(19): siRNA sense strand
gaaaacacaccuuuaguga

SEQ ID NO: 1270223 - RNA, 19 nt, Homo sapiens
  misc_RNA (1)...(19): siRNA sense strand
gaugacgccuguuauagag

SEQ ID NO: 1270224 - RNA, 19 nt, Homo sapiens
  misc_RNA (1)...(19): siRNA sense strand
gagaaacauguccauauau

SEQ ID NO: 1270225 - RNA, 19 nt, Homo sapiens
  misc_RNA (1)...(19): siRNA sense strand
ccacuuaccagacuaaauc

SEQ ID NO: 1270226 - RNA, 19 nt, Homo sapiens
  misc_RNA (1)...(19): siRNA sense strand
acgaguagauuauaagugu

SEQ ID NO: 1270227 - RNA, 19 nt, Homo sapiens
  misc_RNA (1)...(19): siRNA sense strand
cuacaaagcaacaguuaug

SEQ ID NO: 1270228 - RNA, 19 nt, Homo sapiens
  misc_RNA (1)...(19): siRNA sense strand
ccaccaacauuugaagcua

SEQ ID NO: 1270229 - RNA, 19 nt, Homo sapiens
  misc_RNA (1)...(19): siRNA sense strand
uauacgggauccuuuaaau

SEQ ID NO: 1270230 - RNA, 19 nt, Homo sapiens
  misc_RNA (1)...(19): siRNA sense strand
cgaguuugguuaucagaug

SEQ ID NO: 1270231 - RNA, 19 nt, Homo sapiens
  misc_RNA (1)...(19): siRNA sense strand
gaacgaguagauuauaagu

SEQ ID NO: 1270232 - RNA, 19 nt, Homo sapiens
  misc_RNA (1)...(19): siRNA sense strand
gugaggagccaccaacauu

SEQ ID NO: 1270233 - RNA, 19 nt, Homo sapiens
  misc_RNA (1)...(19): siRNA sense strand
gauggcagcgacacaauug

SEQ ID NO: 1270234 - RNA, 19 nt, Homo sapiens
  misc_RNA (1)...(19): siRNA sense strand
ucucagaugacgccuguua

SEQ ID NO: 1270235 - RNA, 19 nt, Homo sapiens
  misc_RNA (1)...(19): siRNA sense strand
gaggagccaccaacauuug

SEQ ID NO: 1270236 - RNA, 19 nt, Homo sapiens
  misc_RNA (1)...(19): siRNA sense strand
gcuauggagcucauuggua

SEQ ID NO: 1270237 - RNA, 19 nt, Homo sapiens
  misc_RNA (1)...(19): siRNA sense strand
acacaccuuuagugaagua

SEQ ID NO: 1270238 - RNA, 19 nt, Homo sapiens
  misc_RNA (1)...(19): siRNA sense strand
uagagaaacauguccauau

SEQ ID NO: 1270239 - RNA, 19 nt, Homo sapiens
  misc_RNA (1)...(19): siRNA sense strand
guuccaaagugucuuaaag

SEQ ID NO: 1270240 - RNA, 19 nt, Homo sapiens
  misc_RNA (1)...(19): siRNA sense strand
ggugaacgaguagauuaua

SEQ ID NO: 1270241 - RNA, 19 nt, Homo sapiens
  misc_RNA (1)...(19): siRNA sense strand
gaaguagaaguauuugagu

SEQ ID NO: 1270242 - RNA, 19 nt, Homo sapiens
  misc_RNA (1)...(19): siRNA sense strand
gaaacauguccauauauac

SEQ ID NO: 1270243 - RNA, 19 nt, Homo sapiens
  misc_RNA (1)...(19): siRNA sense strand
ugacgccuguuauagagaa

SEQ ID NO: 1270244 - RNA, 19 nt, Homo sapiens
  misc_RNA (1)...(19): siRNA sense strand
cgaguagauuauaagugua

SEQ ID NO: 1270245 - RNA, 19 nt, Homo sapiens
  misc_RNA (1)...(19): siRNA sense strand
gcacuuuauuuguaaugag

SEQ ID NO: 1270246 - RNA, 19 nt, Homo sapiens
  misc_RNA (1)...(19): siRNA sense strand
guagaaguauuugaguauc

SEQ ID NO: 1270247 - RNA, 19 nt, Homo sapiens
  misc_RNA (1)...(19): siRNA sense strand
guauuugaguaucuugaug

SEQ ID NO: 1270248 - RNA, 19 nt, Homo sapiens
  misc_RNA (1)...(19): siRNA sense strand
aggaauacuugacaguuug

SEQ ID NO: 1270249 - RNA, 19 nt, Homo sapiens
  misc_RNA (1)...(19): siRNA sense strand
ccaaaacccuacuaugaga

SEQ ID NO: 1270250 - RNA, 19 nt, Homo sapiens
  misc_RNA (1)...(19): siRNA sense strand
aguguaaaguggucaaaug

SEQ ID NO: 1270251 - RNA, 19 nt, Homo sapiens
  misc_RNA (1)...(19): siRNA sense strand
ccacccauacuauuuguga

SEQ ID NO: 1270252 - RNA, 19 nt, Homo sapiens
  misc_RNA (1)...(19): siRNA sense strand
uuggagagagcacgauuua

SEQ ID NO: 1270253 - RNA, 19 nt, Homo sapiens
  misc_RNA (1)...(19): siRNA sense strand
gguuaucagaugcacuuua

SEQ ID NO: 1270254 - RNA, 19 nt, Homo sapiens
  misc_RNA (1)...(19): siRNA sense strand
caccaacauuugaagcuau

SEQ ID NO: 1270255 - RNA, 19 nt, Homo sapiens
  misc_RNA (1)...(19): siRNA sense strand
ugaggagccaccaacauuu

SEQ ID NO: 1270256 - RNA, 19 nt, Homo sapiens
  misc_RNA (1)...(19): siRNA sense strand
ggaaggaauacuugacagu

SEQ ID NO: 1270257 - RNA, 19 nt, Homo sapiens
  misc_RNA (1)...(19): siRNA sense strand
gaggaaggaauacuugaca

SEQ ID NO: 1270258 - RNA, 19 nt, Homo sapiens
  misc_RNA (1)...(19): siRNA sense strand
ccaguuccaaagugucuua

SEQ ID NO: 1270259 - RNA, 19 nt, Homo sapiens
  misc_RNA (1)...(19): siRNA sense strand
ugaguaucuugaugcagua

SEQ ID NO: 1270260 - RNA, 19 nt, Homo sapiens
  misc_RNA (1)...(19): siRNA sense strand
caccuuuagugaaguagaa

SEQ ID NO: 1270261 - RNA, 19 nt, Homo sapiens
  misc_RNA (1)...(19): siRNA sense strand
acagauaucaggauuugga

SEQ ID NO: 1270262 - RNA, 19 nt, Homo sapiens
  misc_RNA (1)...(19): siRNA sense strand
ucauugcugugauuguuau

SEQ ID NO: 1270263 - RNA, 19 nt, Homo sapiens
  misc_RNA (1)...(19): siRNA sense strand
ucagaugcacuuuauuugu

SEQ ID NO: 1270264 - RNA, 19 nt, Homo sapiens
  misc_RNA (1)...(19): siRNA sense strand
gugcugcuccagaguguaa

SEQ ID NO: 1270265 - RNA, 19 nt, Homo sapiens
  misc_RNA (1)...(19): siRNA sense strand
ggaaaacacaccuuuagug

SEQ ID NO: 1270266 - RNA, 19 nt, Homo sapiens
  misc_RNA (1)...(19): siRNA sense strand
aaggaucaguagcaauuug

SEQ ID NO: 1270267 - RNA, 19 nt, Homo sapiens
  misc_RNA (1)...(19): siRNA sense strand
uauauacgggauccuuuaa

SEQ ID NO: 1270268 - RNA, 19 nt, Homo sapiens
  misc_RNA (1)...(19): siRNA sense strand
ugaaguagaaguauuugag

SEQ ID NO: 1270269 - RNA, 19 nt, Homo sapiens
  misc_RNA (1)...(19): siRNA sense strand
cuugacaguuuggauguuu

SEQ ID NO: 1270270 - RNA, 19 nt, Homo sapiens
  misc_RNA (1)...(19): siRNA sense strand
cauauauacgggauccuuu

SEQ ID NO: 1270271 - RNA, 19 nt, Homo sapiens
  misc_RNA (1)...(19): siRNA sense strand
auauauacgggauccuuua

SEQ ID NO: 1270272 - RNA, 19 nt, Homo sapiens
  misc_RNA (1)...(19): siRNA sense strand
cuuaaaggaucaguagcaa

SEQ ID NO: 1270273 - RNA, 19 nt, Homo sapiens
  misc_RNA (1)...(19): siRNA sense strand
uaaaccugaggaaggaaua

SEQ ID NO: 1270274 - RNA, 19 nt, Homo sapiens
  misc_RNA (1)...(19): siRNA sense strand
agaugacgccuguuauaga

SEQ ID NO: 1270275 - RNA, 19 nt, Homo sapiens
  misc_RNA (1)...(19): siRNA sense strand
ugugauuguuauugccaua

SEQ ID NO: 1270276 - RNA, 19 nt, Homo sapiens
  misc_RNA (1)...(19): siRNA sense strand
gagagcacgauuuauugug

SEQ ID NO: 1270277 - RNA, 19 nt, Homo sapiens
  misc_RNA (1)...(19): siRNA sense strand
gaaguauuugaguaucuug

SEQ ID NO: 1270278 - RNA, 19 nt, Homo sapiens
  misc_RNA (1)...(19): siRNA sense strand
ggcuaccugucucagauga

SEQ ID NO: 1270279 - RNA, 19 nt, Homo sapiens
  misc_RNA (1)...(19): siRNA sense strand
gauaucaggauuuggaaaa

SEQ ID NO: 1270280 - RNA, 19 nt, Homo sapiens
  misc_RNA (1)...(19): siRNA sense strand
ccucuugccacccauacua

SEQ ID NO: 1270281 - RNA, 19 nt, Homo sapiens
  misc_RNA (1)...(19): siRNA sense strand
ccaugguguugcugcugua

SEQ ID NO: 1270282 - RNA, 19 nt, Homo sapiens
  misc_RNA (1)...(19): siRNA sense strand
cagaugacgccuguuauag

SEQ ID NO: 1270283 - RNA, 19 nt, Homo sapiens
  misc_RNA (1)...(19): siRNA sense strand
cagaugguggagcugaaua

SEQ ID NO: 1270284 - RNA, 19 nt, Homo sapiens
  misc_RNA (1)...(19): siRNA sense strand
gucauugcugugauuguua

SEQ ID NO: 1270285 - RNA, 19 nt, Homo sapiens
  misc_RNA (1)...(19): siRNA sense strand
ggagccaccaacauuugaa

SEQ ID NO: 1270286 - RNA, 19 nt, Homo sapiens
  misc_RNA (1)...(19): siRNA sense strand
uuggugaacgaguagauua

SEQ ID NO: 1270287 - RNA, 19 nt, Homo sapiens
  misc_RNA (1)...(19): siRNA sense strand
gcgcuuuccuggguugcuu

SEQ ID NO: 1270288 - RNA, 19 nt, Homo sapiens
  misc_RNA (1)...(19): siRNA sense strand
uacuacaaagcaacaguua

SEQ ID NO: 1270289 - RNA, 19 nt, Homo sapiens
  misc_RNA (1)...(19): siRNA sense strand
cuugaugcaguaacuuaua

SEQ ID NO: 1270290 - RNA, 19 nt, Homo sapiens
  misc_RNA (1)...(19): siRNA sense strand
aaacauguccauauauacg

SEQ ID NO: 1270291 - RNA, 19 nt, Homo sapiens
  misc_RNA (1)...(19): siRNA sense strand
guguaaaguggucaaaugu

SEQ ID NO: 1270292 - RNA, 19 nt, Homo sapiens
  misc_RNA (1)...(19): siRNA sense strand
cuuacgaguuugguuauca

SEQ ID NO: 1270293 - RNA, 19 nt, Homo sapiens
  misc_RNA (1)...(19): siRNA sense strand
uacgggauccuuuaaaugg

SEQ ID NO: 1270294 - RNA, 19 nt, Homo sapiens
  misc_RNA (1)...(19): siRNA sense strand
gcagaugguggagcugaau

SEQ ID NO: 1270295 - RNA, 19 nt, Homo sapiens
  misc_RNA (1)...(19): siRNA sense strand
aaccaaaacccuacuauga

SEQ ID NO: 1270296 - RNA, 19 nt, Homo sapiens
  misc_RNA (1)...(19): siRNA sense strand
uugaugcaguaacuuauag

SEQ ID NO: 1270297 - RNA, 19 nt, Homo sapiens
  misc_RNA (1)...(19): siRNA sense strand
ggagcugaauaugccacuu

SEQ ID NO: 1270298 - RNA, 19 nt, Homo sapiens
  misc_RNA (1)...(19): siRNA sense strand
cgauggcagcgacacaauu

SEQ ID NO: 1270299 - RNA, 19 nt, Homo sapiens
  misc_RNA (1)...(19): siRNA sense strand
gauccauuuucacuuauug

SEQ ID NO: 1270300 - RNA, 19 nt, Homo sapiens
  misc_RNA (1)...(19): siRNA sense strand
ggagagagcacgauuuauu

SEQ ID NO: 1270301 - RNA, 19 nt, Homo sapiens
  misc_RNA (1)...(19): siRNA sense strand
agagaaacauguccauaua

SEQ ID NO: 1270302 - RNA, 19 nt, Homo sapiens
  misc_RNA (1)...(19): siRNA sense strand
cagaugcacuuuauuugua

SEQ ID NO: 1270303 - RNA, 19 nt, Homo sapiens
  misc_RNA (1)...(19): siRNA sense strand
ggacuuacgaguuugguua

SEQ ID NO: 1270304 - RNA, 19 nt, Homo sapiens
  misc_RNA (1)...(19): siRNA sense strand
aaacagauaucaggauuug

SEQ ID NO: 1270305 - RNA, 19 nt, Homo sapiens
  misc_RNA (1)...(19): siRNA sense strand
cuauggagcucauugguaa

SEQ ID NO: 1270306 - RNA, 19 nt, Homo sapiens
  misc_RNA (1)...(19): siRNA sense strand
aaacacaccuuuagugaag

SEQ ID NO: 1270307 - RNA, 19 nt, Homo sapiens
  misc_RNA (1)...(19): siRNA sense strand
gaacuuaaaggaucaguag

SEQ ID NO: 1270308 - RNA, 19 nt, Homo sapiens
  misc_RNA (1)...(19): siRNA sense strand
gaaaacagauaucaggauu

SEQ ID NO: 1270309 - RNA, 19 nt, Homo sapiens
  misc_RNA (1)...(19): siRNA sense strand
uaaaggaucaguagcaauu

SEQ ID NO: 1270310 - RNA, 19 nt, Homo sapiens
  misc_RNA (1)...(19): siRNA sense strand
aaaugggacuuacgaguuu

SEQ ID NO: 1270311 - RNA, 19 nt, Homo sapiens
  misc_RNA (1)...(19): siRNA sense strand
guuaucagaugcacuuuau

SEQ ID NO: 1270312 - RNA, 19 nt, Homo sapiens
  misc_RNA (1)...(19): siRNA sense strand
gagcugaauaugccacuua

SEQ ID NO: 1270313 - RNA, 19 nt, Homo sapiens
  misc_RNA (1)...(19): siRNA sense strand
ugagauuggugaacgagua

SEQ ID NO: 1270314 - RNA, 19 nt, Homo sapiens
  misc_RNA (1)...(19): siRNA sense strand
gugaacgaguagauuauaa

SEQ ID NO: 1270315 - RNA, 19 nt, Homo sapiens
  misc_RNA (1)...(19): siRNA sense strand
gagagagcacgauuuauug

SEQ ID NO: 1270316 - RNA, 19 nt, Homo sapiens
  misc_RNA (1)...(19): siRNA sense strand
caaaugggacuuacgaguu

SEQ ID NO: 1270317 - RNA, 19 nt, Homo sapiens
  misc_RNA (1)...(19): siRNA sense strand
ggucauugcugugauuguu

SEQ ID NO: 1270318 - RNA, 19 nt, Homo sapiens
  misc_RNA (1)...(19): siRNA sense strand
ccagauccauuuucacuua

SEQ ID NO: 1270319 - RNA, 19 nt, Homo sapiens
  misc_RNA (1)...(19): siRNA sense strand
gaaggaauacuugacaguu

SEQ ID NO: 1270320 - RNA, 19 nt, Homo sapiens
  misc_RNA (1)...(19): siRNA sense strand
aaggaauacuugacaguuu

SEQ ID NO: 1270321 - RNA, 19 nt, Homo sapiens
  misc_RNA (1)...(19): siRNA sense strand
ucagaugacgccuguuaua

SEQ ID NO: 1270322 - RNA, 19 nt, Homo sapiens
  misc_RNA (1)...(19): siRNA sense strand
gaaaacacaccuuuaguga

SEQ ID NO: 1270323 - RNA, 19 nt, Homo sapiens
  misc_RNA (1)...(19): siRNA sense strand
gaugacgccuguuauagag

SEQ ID NO: 1270324 - RNA, 19 nt, Homo sapiens
  misc_RNA (1)...(19): siRNA sense strand
gagaaacauguccauauau

SEQ ID NO: 1270325 - RNA, 19 nt, Homo sapiens
  misc_RNA (1)...(19): siRNA sense strand
ccacuuaccagacuaaauc

SEQ ID NO: 1270326 - RNA, 19 nt, Homo sapiens
  misc_RNA (1)...(19): siRNA sense strand
acgaguagauuauaagugu

SEQ ID NO: 1270327 - RNA, 19 nt, Homo sapiens
  misc_RNA (1)...(19): siRNA sense strand
cuacaaagcaacaguuaug

SEQ ID NO: 1270328 - RNA, 19 nt, Homo sapiens
  misc_RNA (1)...(19): siRNA sense strand
ccaccaacauuugaagcua

SEQ ID NO: 1270329 - RNA, 19 nt, Homo sapiens
  misc_RNA (1)...(19): siRNA sense strand
uauacgggauccuuuaaau

SEQ ID NO: 1270330 - RNA, 19 nt, Homo sapiens
  misc_RNA (1)...(19): siRNA sense strand
cgaguuugguuaucagaug

SEQ ID NO: 1270331 - RNA, 19 nt, Homo sapiens
  misc_RNA (1)...(19): siRNA sense strand
gaacgaguagauuauaagu

SEQ ID NO: 1270332 - RNA, 19 nt, Homo sapiens
  misc_RNA (1)...(19): siRNA sense strand
gugaggagccaccaacauu

SEQ ID NO: 1270333 - RNA, 19 nt, Homo sapiens
  misc_RNA (1)...(19): siRNA sense strand
gauggcagcgacacaauug

SEQ ID NO: 1270334 - RNA, 19 nt, Homo sapiens
  misc_RNA (1)...(19): siRNA sense strand
ucucagaugacgccuguua

SEQ ID NO: 1270335 - RNA, 19 nt, Homo sapiens
  misc_RNA (1)...(19): siRNA sense strand
gaggagccaccaacauuug

SEQ ID NO: 1270336 - RNA, 19 nt, Homo sapiens
  misc_RNA (1)...(19): siRNA sense strand
gcuauggagcucauuggua

SEQ ID NO: 1270337 - RNA, 19 nt, Homo sapiens
  misc_RNA (1)...(19): siRNA sense strand
acacaccuuuagugaagua

SEQ ID NO: 1270338 - RNA, 19 nt, Homo sapiens
  misc_RNA (1)...(19): siRNA sense strand
uagagaaacauguccauau

SEQ ID NO: 1270339 - RNA, 19 nt, Homo sapiens
  misc_RNA (1)...(19): siRNA sense strand
guuccaaagugucuuaaag

SEQ ID NO: 1270340 - RNA, 19 nt, Homo sapiens
  misc_RNA (1)...(19): siRNA sense strand
ggugaacgaguagauuaua

SEQ ID NO: 1270341 - RNA, 19 nt, Homo sapiens
  misc_RNA (1)...(19): siRNA sense strand
gaaguagaaguauuugagu

SEQ ID NO: 1270342 - RNA, 19 nt, Homo sapiens
  misc_RNA (1)...(19): siRNA sense strand
gaaacauguccauauauac

SEQ ID NO: 1270343 - RNA, 19 nt, Homo sapiens
  misc_RNA (1)...(19): siRNA sense strand
ugacgccuguuauagagaa

SEQ ID NO: 1270344 - RNA, 19 nt, Homo sapiens
  misc_RNA (1)...(19): siRNA sense strand
cgaguagauuauaagugua

SEQ ID NO: 1270345 - RNA, 19 nt, Homo sapiens
  misc_RNA (1)...(19): siRNA sense strand
gcacuuuauuuguaaugag

SEQ ID NO: 1270346 - RNA, 19 nt, Homo sapiens
  misc_RNA (1)...(19): siRNA sense strand
guagaaguauuugaguauc

SEQ ID NO: 1270347 - RNA, 19 nt, Homo sapiens
  misc_RNA (1)...(19): siRNA sense strand
guauuugaguaucuugaug

SEQ ID NO: 1270348 - RNA, 19 nt, Homo sapiens
  misc_RNA (1)...(19): siRNA sense strand
aggaauacuugacaguuug

SEQ ID NO: 1270349 - RNA, 19 nt, Homo sapiens
  misc_RNA (1)...(19): siRNA sense strand
ccaaaacccuacuaugaga

SEQ ID NO: 1270350 - RNA, 19 nt, Homo sapiens
  misc_RNA (1)...(19): siRNA sense strand
aguguaaaguggucaaaug

SEQ ID NO: 1270351 - RNA, 19 nt, Homo sapiens
  misc_RNA (1)...(19): siRNA sense strand
ccacccauacuauuuguga

SEQ ID NO: 1270352 - RNA, 19 nt, Homo sapiens
  misc_RNA (1)...(19): siRNA sense strand
uuggagagagcacgauuua

SEQ ID NO: 1270353 - RNA, 19 nt, Homo sapiens
  misc_RNA (1)...(19): siRNA sense strand
gguuaucagaugcacuuua

SEQ ID NO: 1270354 - RNA, 19 nt, Homo sapiens
  misc_RNA (1)...(19): siRNA sense strand
caccaacauuugaagcuau

SEQ ID NO: 1270355 - RNA, 19 nt, Homo sapiens
  misc_RNA (1)...(19): siRNA sense strand
ugaggagccaccaacauuu

SEQ ID NO: 1270356 - RNA, 19 nt, Homo sapiens
  misc_RNA (1)...(19): siRNA sense strand
ggaaggaauacuugacagu

SEQ ID NO: 1270357 - RNA, 19 nt, Homo sapiens
  misc_RNA (1)...(19): siRNA sense strand
gaggaaggaauacuugaca

SEQ ID NO: 1270358 - RNA, 19 nt, Homo sapiens
  misc_RNA (1)...(19): siRNA sense strand
ccaguuccaaagugucuua

SEQ ID NO: 1270359 - RNA, 19 nt, Homo sapiens
  misc_RNA (1)...(19): siRNA sense strand
ugaguaucuugaugcagua

SEQ ID NO: 1270360 - RNA, 19 nt, Homo sapiens
  misc_RNA (1)...(19): siRNA sense strand
caccuuuagugaaguagaa

SEQ ID NO: 1270361 - RNA, 19 nt, Homo sapiens
  misc_RNA (1)...(19): siRNA sense strand
acagauaucaggauuugga

SEQ ID NO: 1270362 - RNA, 19 nt, Homo sapiens
  misc_RNA (1)...(19): siRNA sense strand
ucauugcugugauuguuau

SEQ ID NO: 1270363 - RNA, 19 nt, Homo sapiens
  misc_RNA (1)...(19): siRNA sense strand
ucagaugcacuuuauuugu

SEQ ID NO: 1270364 - RNA, 19 nt, Homo sapiens
  misc_RNA (1)...(19): siRNA sense strand
gugcugcuccagaguguaa

SEQ ID NO: 1270365 - RNA, 19 nt, Homo sapiens
  misc_RNA (1)...(19): siRNA sense strand
ggaaaacacaccuuuagug

SEQ ID NO: 1270366 - RNA, 19 nt, Homo sapiens
  misc_RNA (1)...(19): siRNA sense strand
aaggaucaguagcaauuug

SEQ ID NO: 1270367 - RNA, 19 nt, Homo sapiens
  misc_RNA (1)...(19): siRNA sense strand
uauauacgggauccuuuaa

SEQ ID NO: 1270368 - RNA, 19 nt, Homo sapiens
  misc_RNA (1)...(19): siRNA sense strand
ugaaguagaaguauuugag

SEQ ID NO: 1270369 - RNA, 19 nt, Homo sapiens
  misc_RNA (1)...(19): siRNA sense strand
cuugacaguuuggauguuu

SEQ ID NO: 1270370 - RNA, 19 nt, Homo sapiens
  misc_RNA (1)...(19): siRNA sense strand
cauauauacgggauccuuu

SEQ ID NO: 1270371 - RNA, 19 nt, Homo sapiens
  misc_RNA (1)...(19): siRNA sense strand
auauauacgggauccuuua

SEQ ID NO: 1270372 - RNA, 19 nt, Homo sapiens
  misc_RNA (1)...(19): siRNA sense strand
cuuaaaggaucaguagcaa

SEQ ID NO: 1270373 - RNA, 19 nt, Homo sapiens
  misc_RNA (1)...(19): siRNA sense strand
uaaaccugaggaaggaaua

SEQ ID NO: 1270374 - RNA, 19 nt, Homo sapiens
  misc_RNA (1)...(19): siRNA sense strand
agaugacgccuguuauaga

SEQ ID NO: 1270375 - RNA, 19 nt, Homo sapiens
  misc_RNA (1)...(19): siRNA sense strand
ugugauuguuauugccaua

SEQ ID NO: 1270376 - RNA, 19 nt, Homo sapiens
  misc_RNA (1)...(19): siRNA sense strand
gagagcacgauuuauugug

SEQ ID NO: 1270377 - RNA, 19 nt, Homo sapiens
  misc_RNA (1)...(19): siRNA sense strand
gaaguauuugaguaucuug

SEQ ID NO: 1270378 - RNA, 19 nt, Homo sapiens
  misc_RNA (1)...(19): siRNA sense strand
ggcuaccugucucagauga

SEQ ID NO: 1270379 - RNA, 19 nt, Homo sapiens
  misc_RNA (1)...(19): siRNA sense strand
gauaucaggauuuggaaaa

SEQ ID NO: 1270380 - RNA, 19 nt, Homo sapiens
  misc_RNA (1)...(19): siRNA sense strand
ccucuugccacccauacua

SEQ ID NO: 1270381 - RNA, 19 nt, Homo sapiens
  misc_RNA (1)...(19): siRNA sense strand
ccaugguguugcugcugua

SEQ ID NO: 1270382 - RNA, 19 nt, Homo sapiens
  misc_RNA (1)...(19): siRNA sense strand
cagaugacgccuguuauag

SEQ ID NO: 1270383 - RNA, 19 nt, Homo sapiens
  misc_RNA (1)...(19): siRNA sense strand
cagaugguggagcugaaua

SEQ ID NO: 1270384 - RNA, 19 nt, Homo sapiens
  misc_RNA (1)...(19): siRNA sense strand
gucauugcugugauuguua

SEQ ID NO: 1270385 - RNA, 19 nt, Homo sapiens
  misc_RNA (1)...(19): siRNA sense strand
ggagccaccaacauuugaa

SEQ ID NO: 1270386 - RNA, 19 nt, Homo sapiens
  misc_RNA (1)...(19): siRNA sense strand
uuggugaacgaguagauua

SEQ ID NO: 1270387 - RNA, 19 nt, Homo sapiens
  misc_RNA (1)...(19): siRNA sense strand
gcgcuuuccuggguugcuu

SEQ ID NO: 1270388 - RNA, 19 nt, Homo sapiens
  misc_RNA (1)...(19): siRNA sense strand
uacuacaaagcaacaguua

SEQ ID NO: 1270389 - RNA, 19 nt, Homo sapiens
  misc_RNA (1)...(19): siRNA sense strand
cuugaugcaguaacuuaua

SEQ ID NO: 1270390 - RNA, 19 nt, Homo sapiens
  misc_RNA (1)...(19): siRNA sense strand
aaacauguccauauauacg

SEQ ID NO: 1270391 - RNA, 19 nt, Homo sapiens
  misc_RNA (1)...(19): siRNA sense strand
guguaaaguggucaaaugu

SEQ ID NO: 1270392 - RNA, 19 nt, Homo sapiens
  misc_RNA (1)...(19): siRNA sense strand
cuuacgaguuugguuauca

SEQ ID NO: 1270393 - RNA, 19 nt, Homo sapiens
  misc_RNA (1)...(19): siRNA sense strand
uacgggauccuuuaaaugg

SEQ ID NO: 1270394 - RNA, 19 nt, Homo sapiens
  misc_RNA (1)...(19): siRNA sense strand
gcagaugguggagcugaau

SEQ ID NO: 1270395 - RNA, 19 nt, Homo sapiens
  misc_RNA (1)...(19): siRNA sense strand
aaccaaaacccuacuauga

SEQ ID NO: 1270396 - RNA, 19 nt, Homo sapiens
  misc_RNA (1)...(19): siRNA sense strand
uugaugcaguaacuuauag

SEQ ID NO: 1270397 - RNA, 19 nt, Homo sapiens
  misc_RNA (1)...(19): siRNA sense strand
ggagcugaauaugccacuu

SEQ ID NO: 1270398 - RNA, 19 nt, Homo sapiens
  misc_RNA (1)...(19): siRNA sense strand
cgauggcagcgacacaauu

SEQ ID NO: 1270399 - RNA, 19 nt, Homo sapiens
  misc_RNA (1)...(19): siRNA sense strand
gauccauuuucacuuauug

SEQ ID NO: 1270400 - RNA, 19 nt, Homo sapiens
  misc_RNA (1)...(19): siRNA sense strand
gaacaagcauguggaguuu

SEQ ID NO: 1270401 - RNA, 19 nt, Homo sapiens
  misc_RNA (1)...(19): siRNA sense strand
caaaguggcucauaucaug

SEQ ID NO: 1270402 - RNA, 19 nt, Homo sapiens
  misc_RNA (1)...(19): siRNA sense strand
ggaacaaaguggcucauau

SEQ ID NO: 1270403 - RNA, 19 nt, Homo sapiens
  misc_RNA (1)...(19): siRNA sense strand
aaacauuacucugggauuu

SEQ ID NO: 1270404 - RNA, 19 nt, Homo sapiens
  misc_RNA (1)...(19): siRNA sense strand
uguaugggcucuaugagua

SEQ ID NO: 1270405 - RNA, 19 nt, Homo sapiens
  misc_RNA (1)...(19): siRNA sense strand
gaacaaaguggcucauauc

SEQ ID NO: 1270406 - RNA, 19 nt, Homo sapiens
  misc_RNA (1)...(19): siRNA sense strand
ccucugcacuuccaccuua

SEQ ID NO: 1270407 - RNA, 19 nt, Homo sapiens
  misc_RNA (1)...(19): siRNA sense strand
gagcucaagucugaaguuu

SEQ ID NO: 1270408 - RNA, 19 nt, Homo sapiens
  misc_RNA (1)...(19): siRNA sense strand
caucagcacucccuacaug

SEQ ID NO: 1270409 - RNA, 19 nt, Homo sapiens
  misc_RNA (1)...(19): siRNA sense strand
ggucaaauccguccuguuc

SEQ ID NO: 1270410 - RNA, 19 nt, Homo sapiens
  misc_RNA (1)...(19): siRNA sense strand
ccaagaagcuccgggugaa

SEQ ID NO: 1270411 - RNA, 19 nt, Homo sapiens
  misc_RNA (1)...(19): siRNA sense strand
gauaagcugcggaagauga

SEQ ID NO: 1270412 - RNA, 19 nt, Homo sapiens
  misc_RNA (1)...(19): siRNA sense strand
ugacacggauaucaccuuu

SEQ ID NO: 1270413 - RNA, 19 nt, Homo sapiens
  misc_RNA (1)...(19): siRNA sense strand
ggaaagcccgugucucugu

SEQ ID NO: 1270414 - RNA, 19 nt, Homo sapiens
  misc_RNA (1)...(19): siRNA sense strand
uaaaggucauucacuggaa

SEQ ID NO: 1270415 - RNA, 19 nt, Homo sapiens
  misc_RNA (1)...(19): siRNA sense strand
gcucugaggugcuuaugag

SEQ ID NO: 1270416 - RNA, 19 nt, Homo sapiens
  misc_RNA (1)...(19): siRNA sense strand
ugaccuuccuggaguauga

SEQ ID NO: 1270417 - RNA, 19 nt, Homo sapiens
  misc_RNA (1)...(19): siRNA sense strand
caugcucucuacauccuua

SEQ ID NO: 1270418 - RNA, 19 nt, Homo sapiens
  misc_RNA (1)...(19): siRNA sense strand
ucaaugccgucaucaaaca

SEQ ID NO: 1270419 - RNA, 19 nt, Homo sapiens
  misc_RNA (1)...(19): siRNA sense strand
ggaaugugcagcugucaga

SEQ ID NO: 1270420 - RNA, 19 nt, Homo sapiens
  misc_RNA (1)...(19): siRNA sense strand
guucaaaggucagcaaguc

SEQ ID NO: 1270421 - RNA, 19 nt, Homo sapiens
  misc_RNA (1)...(19): siRNA sense strand
cggcuuugcugcccugaaa

SEQ ID NO: 1270422 - RNA, 19 nt, Homo sapiens
  misc_RNA (1)...(19): siRNA sense strand
gcucaagucugaaguuucc

SEQ ID NO: 1270423 - RNA, 19 nt, Homo sapiens
  misc_RNA (1)...(19): siRNA sense strand
caaguuccguuccaacaag

SEQ ID NO: 1270424 - RNA, 19 nt, Homo sapiens
  misc_RNA (1)...(19): siRNA sense strand
gcagagcugugggcugugu

SEQ ID NO: 1270425 - RNA, 19 nt, Homo sapiens
  misc_RNA (1)...(19): siRNA sense strand
ucaccuggauuuaccuguu

SEQ ID NO: 1270426 - RNA, 19 nt, Homo sapiens
  misc_RNA (1)...(19): siRNA sense strand
gcuucgacauuaccaaguu

SEQ ID NO: 1270427 - RNA, 19 nt, Homo sapiens
  misc_RNA (1)...(19): siRNA sense strand
guacaaggagggccaguuc

SEQ ID NO: 1270428 - RNA, 19 nt, Homo sapiens
  misc_RNA (1)...(19): siRNA sense strand
uggauaagcugcggaagau

SEQ ID NO: 1270429 - RNA, 19 nt, Homo sapiens
  misc_RNA (1)...(19): siRNA sense strand
gcuaccacaucguguacaa

SEQ ID NO: 1270430 - RNA, 19 nt, Homo sapiens
  misc_RNA (1)...(19): siRNA sense strand
aggcugaugucaacaguga

SEQ ID NO: 1270431 - RNA, 19 nt, Homo sapiens
  misc_RNA (1)...(19): siRNA sense strand
caccuggauuuaccuguuu

SEQ ID NO: 1270432 - RNA, 19 nt, Homo sapiens
  misc_RNA (1)...(19): siRNA sense strand
gacaauccacguugcuauu

SEQ ID NO: 1270433 - RNA, 19 nt, Homo sapiens
  misc_RNA (1)...(19): siRNA sense strand
ucaaaacccucaaggaaga

SEQ ID NO: 1270434 - RNA, 19 nt, Homo sapiens
  misc_RNA (1)...(19): siRNA sense strand
ggagagagucaucguccuu

SEQ ID NO: 1270435 - RNA, 19 nt, Homo sapiens
  misc_RNA (1)...(19): siRNA sense strand
ggauuuauggucugaugaa

SEQ ID NO: 1270436 - RNA, 19 nt, Homo sapiens
  misc_RNA (1)...(19): siRNA sense strand
ggagaaaugcgagacaauc

SEQ ID NO: 1270437 - RNA, 19 nt, Homo sapiens
  misc_RNA (1)...(19): siRNA sense strand
cguguggacuucuacaaug

SEQ ID NO: 1270438 - RNA, 19 nt, Homo sapiens
  misc_RNA (1)...(19): siRNA sense strand
caaaaccccuuccuugugu

SEQ ID NO: 1270439 - RNA, 19 nt, Homo sapiens
  misc_RNA (1)...(19): siRNA sense strand
ggaguacgaccggagguuu

SEQ ID NO: 1270440 - RNA, 19 nt, Homo sapiens
  misc_RNA (1)...(19): siRNA sense strand
ccuuauugcugacuccauu

SEQ ID NO: 1270441 - RNA, 19 nt, Homo sapiens
  misc_RNA (1)...(19): siRNA sense strand
gcuuugcugcccugaaaua

SEQ ID NO: 1270442 - RNA, 19 nt, Homo sapiens
  misc_RNA (1)...(19): siRNA sense strand
gcccaacgccuacaugauc

SEQ ID NO: 1270443 - RNA, 19 nt, Homo sapiens
  misc_RNA (1)...(19): siRNA sense strand
gggacccucuucacauuca

SEQ ID NO: 1270444 - RNA, 19 nt, Homo sapiens
  misc_RNA (1)...(19): siRNA sense strand
aagcggaguugcugucaau

SEQ ID NO: 1270445 - RNA, 19 nt, Homo sapiens
  misc_RNA (1)...(19): siRNA sense strand
ucgcucagcuguccaugga

SEQ ID NO: 1270446 - RNA, 19 nt, Homo sapiens
  misc_RNA (1)...(19): siRNA sense strand
agaacaagcauguggaguu

SEQ ID NO: 1270447 - RNA, 19 nt, Homo sapiens
  misc_RNA (1)...(19): siRNA sense strand
acacggauaucaccuuugc

SEQ ID NO: 1270448 - RNA, 19 nt, Homo sapiens
  misc_RNA (1)...(19): siRNA sense strand
gcugaugucaacagugaaa

SEQ ID NO: 1270449 - RNA, 19 nt, Homo sapiens
  misc_RNA (1)...(19): siRNA sense strand
ucugggagcuucgaagaug

SEQ ID NO: 1270450 - RNA, 19 nt, Homo sapiens
  misc_RNA (1)...(19): siRNA sense strand
ucaaauccguccuguucca

SEQ ID NO: 1270451 - RNA, 19 nt, Homo sapiens
  misc_RNA (1)...(19): siRNA sense strand
caauaccgcaucugucuca

SEQ ID NO: 1270452 - RNA, 19 nt, Homo sapiens
  misc_RNA (1)...(19): siRNA sense strand
acaaggagggccaguucua

SEQ ID NO: 1270453 - RNA, 19 nt, Homo sapiens
  misc_RNA (1)...(19): siRNA sense strand
gaguaugacggcaaucuuc

SEQ ID NO: 1270454 - RNA, 19 nt, Homo sapiens
  misc_RNA (1)...(19): siRNA sense strand
gcaaccacuccaagaccua

SEQ ID NO: 1270455 - RNA, 19 nt, Homo sapiens
  misc_RNA (1)...(19): siRNA sense strand
caagcaauaccgcaucugu

SEQ ID NO: 1270456 - RNA, 19 nt, Homo sapiens
  misc_RNA (1)...(19): siRNA sense strand
ggcgagagcgcuucacugu

SEQ ID NO: 1270457 - RNA, 19 nt, Homo sapiens
  misc_RNA (1)...(19): siRNA sense strand
gagacaauccacguugcua

SEQ ID NO: 1270458 - RNA, 19 nt, Homo sapiens
  misc_RNA (1)...(19): siRNA sense strand
ccggagguuuguaggcuuu

SEQ ID NO: 1270459 - RNA, 19 nt, Homo sapiens
  misc_RNA (1)...(19): siRNA sense strand
gcacccaccuguacuuccu

SEQ ID NO: 1270460 - RNA, 19 nt, Homo sapiens
  misc_RNA (1)...(19): siRNA sense strand
aggacgaccugugcuauga

SEQ ID NO: 1270461 - RNA, 19 nt, Homo sapiens
  misc_RNA (1)...(19): siRNA sense strand
gugaaaaccuccagaagca

SEQ ID NO: 1270462 - RNA, 19 nt, Homo sapiens
  misc_RNA (1)...(19): siRNA sense strand
ggaguaugacggcaaucuu

SEQ ID NO: 1270463 - RNA, 19 nt, Homo sapiens
  misc_RNA (1)...(19): siRNA sense strand
acauuacucugggauuuau

SEQ ID NO: 1270464 - RNA, 19 nt, Homo sapiens
  misc_RNA (1)...(19): siRNA sense strand
gacggaacccucugcacuu

SEQ ID NO: 1270465 - RNA, 19 nt, Homo sapiens
  misc_RNA (1)...(19): siRNA sense strand
ccacgcacccacaaacuuc

SEQ ID NO: 1270466 - RNA, 19 nt, Homo sapiens
  misc_RNA (1)...(19): siRNA sense strand
ccagugaggcugaugucaa

SEQ ID NO: 1270467 - RNA, 19 nt, Homo sapiens
  misc_RNA (1)...(19): siRNA sense strand
agagagucaucguccuuga

SEQ ID NO: 1270468 - RNA, 19 nt, Homo sapiens
  misc_RNA (1)...(19): siRNA sense strand
guggagaaaugcgagacaa

SEQ ID NO: 1270469 - RNA, 19 nt, Homo sapiens
  misc_RNA (1)...(19): siRNA sense strand
gagcuucgaagauggaaag

SEQ ID NO: 1270470 - RNA, 19 nt, Homo sapiens
  misc_RNA (1)...(19): siRNA sense strand
uggaagaggcuacaacaca

SEQ ID NO: 1270471 - RNA, 19 nt, Homo sapiens
  misc_RNA (1)...(19): siRNA sense strand
gaucuaaaggucauucacu

SEQ ID NO: 1270472 - RNA, 19 nt, Homo sapiens
  misc_RNA (1)...(19): siRNA sense strand
ugaaaugggagcagaugug

SEQ ID NO: 1270473 - RNA, 19 nt, Homo sapiens
  misc_RNA (1)...(19): siRNA sense strand
gaugaaaugggagcagaug

SEQ ID NO: 1270474 - RNA, 19 nt, Homo sapiens
  misc_RNA (1)...(19): siRNA sense strand
gaggacgaccugugcuaug

SEQ ID NO: 1270475 - RNA, 19 nt, Homo sapiens
  misc_RNA (1)...(19): siRNA sense strand
uuucaaugccgucaucaaa

SEQ ID NO: 1270476 - RNA, 19 nt, Homo sapiens
  misc_RNA (1)...(19): siRNA sense strand
agucugaaguuuccuggau

SEQ ID NO: 1270477 - RNA, 19 nt, Homo sapiens
  misc_RNA (1)...(19): siRNA sense strand
cagccgagaacaacagcua

SEQ ID NO: 1270478 - RNA, 19 nt, Homo sapiens
  misc_RNA (1)...(19): siRNA sense strand
uugcugcccugaaauaucu

SEQ ID NO: 1270479 - RNA, 19 nt, Homo sapiens
  misc_RNA (1)...(19): siRNA sense strand
ccaaguuccguuccaacaa

SEQ ID NO: 1270480 - RNA, 19 nt, Homo sapiens
  misc_RNA (1)...(19): siRNA sense strand
caccaagaaagcaaugauu

SEQ ID NO: 1270481 - RNA, 19 nt, Homo sapiens
  misc_RNA (1)...(19): siRNA sense strand
caacaccaagaaagcaaug

SEQ ID NO: 1270482 - RNA, 19 nt, Homo sapiens
  misc_RNA (1)...(19): siRNA sense strand
gacgaccugugcuaugagu

SEQ ID NO: 1270483 - RNA, 19 nt, Homo sapiens
  misc_RNA (1)...(19): siRNA sense strand
cagugaggcugaugucaac

SEQ ID NO: 1270484 - RNA, 19 nt, Homo sapiens
  misc_RNA (1)...(19): siRNA sense strand
ccaucagccuggcccucua

SEQ ID NO: 1270485 - RNA, 19 nt, Homo sapiens
  misc_RNA (1)...(19): siRNA sense strand
gaguacgaccggagguuug

SEQ ID NO: 1270486 - RNA, 19 nt, Homo sapiens
  misc_RNA (1)...(19): siRNA sense strand
gcacuuccaccuuauugcu

SEQ ID NO: 1270487 - RNA, 19 nt, Homo sapiens
  misc_RNA (1)...(19): siRNA sense strand
gcacacagccccagguaca

SEQ ID NO: 1270488 - RNA, 19 nt, Homo sapiens
  misc_RNA (1)...(19): siRNA sense strand
uaaacauuacucugggauu

SEQ ID NO: 1270489 - RNA, 19 nt, Homo sapiens
  misc_RNA (1)...(19): siRNA sense strand
uggaugugcaggaguauga

SEQ ID NO: 1270490 - RNA, 19 nt, Homo sapiens
  misc_RNA (1)...(19): siRNA sense strand
gcaacguggccaugaagca

SEQ ID NO: 1270491 - RNA, 19 nt, Homo sapiens
  misc_RNA (1)...(19): siRNA sense strand
cgaggcaaccacuccaaga

SEQ ID NO: 1270492 - RNA, 19 nt, Homo sapiens
  misc_RNA (1)...(19): siRNA sense strand
caaguucaaaggucagcaa

SEQ ID NO: 1270493 - RNA, 19 nt, Homo sapiens
  misc_RNA (1)...(19): siRNA sense strand
ugucugaucuaaaggucau

SEQ ID NO: 1270494 - RNA, 19 nt, Homo sapiens
  misc_RNA (1)...(19): siRNA sense strand
gccguauguuguugugaga

SEQ ID NO: 1270495 - RNA, 19 nt, Homo sapiens
  misc_RNA (1)...(19): siRNA sense strand
ccuacauguuccugucuga

SEQ ID NO: 1270496 - RNA, 19 nt, Homo sapiens
  misc_RNA (1)...(19): siRNA sense strand
cgaccugugcuaugaguuc

SEQ ID NO: 1270497 - RNA, 19 nt, Homo sapiens
  misc_RNA (1)...(19): siRNA sense strand
gcacuggagacagcgagaa

SEQ ID NO: 1270498 - RNA, 19 nt, Homo sapiens
  misc_RNA (1)...(19): siRNA sense strand
aacauuacucugggauuua

SEQ ID NO: 1270499 - RNA, 19 nt, Homo sapiens
  misc_RNA (1)...(19): siRNA sense strand
gggugaagaacaagcaugu

SEQ ID NO: 1270500 - RNA, 19 nt, Homo sapiens
  misc_RNA (1)...(19): siRNA sense strand
gaacaagcauguggaguuu

SEQ ID NO: 1270501 - RNA, 19 nt, Homo sapiens
  misc_RNA (1)...(19): siRNA sense strand
caaaguggcucauaucaug

SEQ ID NO: 1270502 - RNA, 19 nt, Homo sapiens
  misc_RNA (1)...(19): siRNA sense strand
ggaacaaaguggcucauau

SEQ ID NO: 1270503 - RNA, 19 nt, Homo sapiens
  misc_RNA (1)...(19): siRNA sense strand
aaacauuacucugggauuu

SEQ ID NO: 1270504 - RNA, 19 nt, Homo sapiens
  misc_RNA (1)...(19): siRNA sense strand
uguaugggcucuaugagua

SEQ ID NO: 1270505 - RNA, 19 nt, Homo sapiens
  misc_RNA (1)...(19): siRNA sense strand
gaacaaaguggcucauauc

SEQ ID NO: 1270506 - RNA, 19 nt, Homo sapiens
  misc_RNA (1)...(19): siRNA sense strand
ccucugcacuuccaccuua

SEQ ID NO: 1270507 - RNA, 19 nt, Homo sapiens
  misc_RNA (1)...(19): siRNA sense strand
gagcucaagucugaaguuu

SEQ ID NO: 1270508 - RNA, 19 nt, Homo sapiens
  misc_RNA (1)...(19): siRNA sense strand
caucagcacucccuacaug

SEQ ID NO: 1270509 - RNA, 19 nt, Homo sapiens
  misc_RNA (1)...(19): siRNA sense strand
ggucaaauccguccuguuc

SEQ ID NO: 1270510 - RNA, 19 nt, Homo sapiens
  misc_RNA (1)...(19): siRNA sense strand
ccaagaagcuccgggugaa

SEQ ID NO: 1270511 - RNA, 19 nt, Homo sapiens
  misc_RNA (1)...(19): siRNA sense strand
gauaagcugcggaagauga

SEQ ID NO: 1270512 - RNA, 19 nt, Homo sapiens
  misc_RNA (1)...(19): siRNA sense strand
ugacacggauaucaccuuu

SEQ ID NO: 1270513 - RNA, 19 nt, Homo sapiens
  misc_RNA (1)...(19): siRNA sense strand
ggaaagcccgugucucugu

SEQ ID NO: 1270514 - RNA, 19 nt, Homo sapiens
  misc_RNA (1)...(19): siRNA sense strand
uaaaggucauucacuggaa

SEQ ID NO: 1270515 - RNA, 19 nt, Homo sapiens
  misc_RNA (1)...(19): siRNA sense strand
gcucugaggugcuuaugag

SEQ ID NO: 1270516 - RNA, 19 nt, Homo sapiens
  misc_RNA (1)...(19): siRNA sense strand
ugaccuuccuggaguauga

SEQ ID NO: 1270517 - RNA, 19 nt, Homo sapiens
  misc_RNA (1)...(19): siRNA sense strand
caugcucucuacauccuua

SEQ ID NO: 1270518 - RNA, 19 nt, Homo sapiens
  misc_RNA (1)...(19): siRNA sense strand
ucaaugccgucaucaaaca

SEQ ID NO: 1270519 - RNA, 19 nt, Homo sapiens
  misc_RNA (1)...(19): siRNA sense strand
ggaaugugcagcugucaga

SEQ ID NO: 1270520 - RNA, 19 nt, Homo sapiens
  misc_RNA (1)...(19): siRNA sense strand
guucaaaggucagcaaguc

SEQ ID NO: 1270521 - RNA, 19 nt, Homo sapiens
  misc_RNA (1)...(19): siRNA sense strand
cggcuuugcugcccugaaa

SEQ ID NO: 1270522 - RNA, 19 nt, Homo sapiens
  misc_RNA (1)...(19): siRNA sense strand
gcucaagucugaaguuucc

SEQ ID NO: 1270523 - RNA, 19 nt, Homo sapiens
  misc_RNA (1)...(19): siRNA sense strand
caaguuccguuccaacaag

SEQ ID NO: 1270524 - RNA, 19 nt, Homo sapiens
  misc_RNA (1)...(19): siRNA sense strand
gcagagcugugggcugugu

SEQ ID NO: 1270525 - RNA, 19 nt, Homo sapiens
  misc_RNA (1)...(19): siRNA sense strand
ucaccuggauuuaccuguu

SEQ ID NO: 1270526 - RNA, 19 nt, Homo sapiens
  misc_RNA (1)...(19): siRNA sense strand
gcuucgacauuaccaaguu

SEQ ID NO: 1270527 - RNA, 19 nt, Homo sapiens
  misc_RNA (1)...(19): siRNA sense strand
guacaaggagggccaguuc

SEQ ID NO: 1270528 - RNA, 19 nt, Homo sapiens
  misc_RNA (1)...(19): siRNA sense strand
uggauaagcugcggaagau

SEQ ID NO: 1270529 - RNA, 19 nt, Homo sapiens
  misc_RNA (1)...(19): siRNA sense strand
gcuaccacaucguguacaa

SEQ ID NO: 1270530 - RNA, 19 nt, Homo sapiens
  misc_RNA (1)...(19): siRNA sense strand
aggcugaugucaacaguga

SEQ ID NO: 1270531 - RNA, 19 nt, Homo sapiens
  misc_RNA (1)...(19): siRNA sense strand
caccuggauuuaccuguuu

SEQ ID NO: 1270532 - RNA, 19 nt, Homo sapiens
  misc_RNA (1)...(19): siRNA sense strand
gacaauccacguugcuauu

SEQ ID NO: 1270533 - RNA, 19 nt, Homo sapiens
  misc_RNA (1)...(19): siRNA sense strand
ucaaaacccucaaggaaga

SEQ ID NO: 1270534 - RNA, 19 nt, Homo sapiens
  misc_RNA (1)...(19): siRNA sense strand
ggagagagucaucguccuu

SEQ ID NO: 1270535 - RNA, 19 nt, Homo sapiens
  misc_RNA (1)...(19): siRNA sense strand
ggauuuauggucugaugaa

SEQ ID NO: 1270536 - RNA, 19 nt, Homo sapiens
  misc_RNA (1)...(19): siRNA sense strand
ggagaaaugcgagacaauc

SEQ ID NO: 1270537 - RNA, 19 nt, Homo sapiens
  misc_RNA (1)...(19): siRNA sense strand
cguguggacuucuacaaug

SEQ ID NO: 1270538 - RNA, 19 nt, Homo sapiens
  misc_RNA (1)...(19): siRNA sense strand
caaaaccccuuccuugugu

SEQ ID NO: 1270539 - RNA, 19 nt, Homo sapiens
  misc_RNA (1)...(19): siRNA sense strand
ggaguacgaccggagguuu

SEQ ID NO: 1270540 - RNA, 19 nt, Homo sapiens
  misc_RNA (1)...(19): siRNA sense strand
ccuuauugcugacuccauu

SEQ ID NO: 1270541 - RNA, 19 nt, Homo sapiens
  misc_RNA (1)...(19): siRNA sense strand
gcuuugcugcccugaaaua

SEQ ID NO: 1270542 - RNA, 19 nt, Homo sapiens
  misc_RNA (1)...(19): siRNA sense strand
gcccaacgccuacaugauc

SEQ ID NO: 1270543 - RNA, 19 nt, Homo sapiens
  misc_RNA (1)...(19): siRNA sense strand
gggacccucuucacauuca

SEQ ID NO: 1270544 - RNA, 19 nt, Homo sapiens
  misc_RNA (1)...(19): siRNA sense strand
aagcggaguugcugucaau

SEQ ID NO: 1270545 - RNA, 19 nt, Homo sapiens
  misc_RNA (1)...(19): siRNA sense strand
ucgcucagcuguccaugga

SEQ ID NO: 1270546 - RNA, 19 nt, Homo sapiens
  misc_RNA (1)...(19): siRNA sense strand
agaacaagcauguggaguu

SEQ ID NO: 1270547 - RNA, 19 nt, Homo sapiens
  misc_RNA (1)...(19): siRNA sense strand
acacggauaucaccuuugc

SEQ ID NO: 1270548 - RNA, 19 nt, Homo sapiens
  misc_RNA (1)...(19): siRNA sense strand
gcugaugucaacagugaaa

SEQ ID NO: 1270549 - RNA, 19 nt, Homo sapiens
  misc_RNA (1)...(19): siRNA sense strand
ucugggagcuucgaagaug

SEQ ID NO: 1270550 - RNA, 19 nt, Homo sapiens
  misc_RNA (1)...(19): siRNA sense strand
ucaaauccguccuguucca

SEQ ID NO: 1270551 - RNA, 19 nt, Homo sapiens
  misc_RNA (1)...(19): siRNA sense strand
caauaccgcaucugucuca

SEQ ID NO: 1270552 - RNA, 19 nt, Homo sapiens
  misc_RNA (1)...(19): siRNA sense strand
acaaggagggccaguucua

SEQ ID NO: 1270553 - RNA, 19 nt, Homo sapiens
  misc_RNA (1)...(19): siRNA sense strand
gaguaugacggcaaucuuc

SEQ ID NO: 1270554 - RNA, 19 nt, Homo sapiens
  misc_RNA (1)...(19): siRNA sense strand
gcaaccacuccaagaccua

SEQ ID NO: 1270555 - RNA, 19 nt, Homo sapiens
  misc_RNA (1)...(19): siRNA sense strand
caagcaauaccgcaucugu

SEQ ID NO: 1270556 - RNA, 19 nt, Homo sapiens
  misc_RNA (1)...(19): siRNA sense strand
ggcgagagcgcuucacugu

SEQ ID NO: 1270557 - RNA, 19 nt, Homo sapiens
  misc_RNA (1)...(19): siRNA sense strand
gagacaauccacguugcua

SEQ ID NO: 1270558 - RNA, 19 nt, Homo sapiens
  misc_RNA (1)...(19): siRNA sense strand
ccggagguuuguaggcuuu

SEQ ID NO: 1270559 - RNA, 19 nt, Homo sapiens
  misc_RNA (1)...(19): siRNA sense strand
gcacccaccuguacuuccu

SEQ ID NO: 1270560 - RNA, 19 nt, Homo sapiens
  misc_RNA (1)...(19): siRNA sense strand
aggacgaccugugcuauga

SEQ ID NO: 1270561 - RNA, 19 nt, Homo sapiens
  misc_RNA (1)...(19): siRNA sense strand
gugaaaaccuccagaagca

SEQ ID NO: 1270562 - RNA, 19 nt, Homo sapiens
  misc_RNA (1)...(19): siRNA sense strand
ggaguaugacggcaaucuu

SEQ ID NO: 1270563 - RNA, 19 nt, Homo sapiens
  misc_RNA (1)...(19): siRNA sense strand
acauuacucugggauuuau

SEQ ID NO: 1270564 - RNA, 19 nt, Homo sapiens
  misc_RNA (1)...(19): siRNA sense strand
gacggaacccucugcacuu

SEQ ID NO: 1270565 - RNA, 19 nt, Homo sapiens
  misc_RNA (1)...(19): siRNA sense strand
ccacgcacccacaaacuuc

SEQ ID NO: 1270566 - RNA, 19 nt, Homo sapiens
  misc_RNA (1)...(19): siRNA sense strand
ccagugaggcugaugucaa

SEQ ID NO: 1270567 - RNA, 19 nt, Homo sapiens
  misc_RNA (1)...(19): siRNA sense strand
agagagucaucguccuuga

SEQ ID NO: 1270568 - RNA, 19 nt, Homo sapiens
  misc_RNA (1)...(19): siRNA sense strand
guggagaaaugcgagacaa

SEQ ID NO: 1270569 - RNA, 19 nt, Homo sapiens
  misc_RNA (1)...(19): siRNA sense strand
gagcuucgaagauggaaag

SEQ ID NO: 1270570 - RNA, 19 nt, Homo sapiens
  misc_RNA (1)...(19): siRNA sense strand
uggaagaggcuacaacaca

SEQ ID NO: 1270571 - RNA, 19 nt, Homo sapiens
  misc_RNA (1)...(19): siRNA sense strand
gaucuaaaggucauucacu

SEQ ID NO: 1270572 - RNA, 19 nt, Homo sapiens
  misc_RNA (1)...(19): siRNA sense strand
ugaaaugggagcagaugug

SEQ ID NO: 1270573 - RNA, 19 nt, Homo sapiens
  misc_RNA (1)...(19): siRNA sense strand
gaugaaaugggagcagaug

SEQ ID NO: 1270574 - RNA, 19 nt, Homo sapiens
  misc_RNA (1)...(19): siRNA sense strand
gaggacgaccugugcuaug

SEQ ID NO: 1270575 - RNA, 19 nt, Homo sapiens
  misc_RNA (1)...(19): siRNA sense strand
uuucaaugccgucaucaaa

SEQ ID NO: 1270576 - RNA, 19 nt, Homo sapiens
  misc_RNA (1)...(19): siRNA sense strand
agucugaaguuuccuggau

SEQ ID NO: 1270577 - RNA, 19 nt, Homo sapiens
  misc_RNA (1)...(19): siRNA sense strand
cagccgagaacaacagcua

SEQ ID NO: 1270578 - RNA, 19 nt, Homo sapiens
  misc_RNA (1)...(19): siRNA sense strand
uugcugcccugaaauaucu

SEQ ID NO: 1270579 - RNA, 19 nt, Homo sapiens
  misc_RNA (1)...(19): siRNA sense strand
ccaaguuccguuccaacaa

SEQ ID NO: 1270580 - RNA, 19 nt, Homo sapiens
  misc_RNA (1)...(19): siRNA sense strand
caccaagaaagcaaugauu

SEQ ID NO: 1270581 - RNA, 19 nt, Homo sapiens
  misc_RNA (1)...(19): siRNA sense strand
caacaccaagaaagcaaug

SEQ ID NO: 1270582 - RNA, 19 nt, Homo sapiens
  misc_RNA (1)...(19): siRNA sense strand
gacgaccugugcuaugagu

SEQ ID NO: 1270583 - RNA, 19 nt, Homo sapiens
  misc_RNA (1)...(19): siRNA sense strand
cagugaggcugaugucaac

SEQ ID NO: 1270584 - RNA, 19 nt, Homo sapiens
  misc_RNA (1)...(19): siRNA sense strand
ccaucagccuggcccucua

SEQ ID NO: 1270585 - RNA, 19 nt, Homo sapiens
  misc_RNA (1)...(19): siRNA sense strand
gaguacgaccggagguuug

SEQ ID NO: 1270586 - RNA, 19 nt, Homo sapiens
  misc_RNA (1)...(19): siRNA sense strand
gcacuuccaccuuauugcu

SEQ ID NO: 1270587 - RNA, 19 nt, Homo sapiens
  misc_RNA (1)...(19): siRNA sense strand
gcacacagccccagguaca

SEQ ID NO: 1270588 - RNA, 19 nt, Homo sapiens
  misc_RNA (1)...(19): siRNA sense strand
uaaacauuacucugggauu

SEQ ID NO: 1270589 - RNA, 19 nt, Homo sapiens
  misc_RNA (1)...(19): siRNA sense strand
uggaugugcaggaguauga

SEQ ID NO: 1270590 - RNA, 19 nt, Homo sapiens
  misc_RNA (1)...(19): siRNA sense strand
gcaacguggccaugaagca

SEQ ID NO: 1270591 - RNA, 19 nt, Homo sapiens
  misc_RNA (1)...(19): siRNA sense strand
cgaggcaaccacuccaaga

SEQ ID NO: 1270592 - RNA, 19 nt, Homo sapiens
  misc_RNA (1)...(19): siRNA sense strand
caaguucaaaggucagcaa

SEQ ID NO: 1270593 - RNA, 19 nt, Homo sapiens
  misc_RNA (1)...(19): siRNA sense strand
ugucugaucuaaaggucau

SEQ ID NO: 1270594 - RNA, 19 nt, Homo sapiens
  misc_RNA (1)...(19): siRNA sense strand
gccguauguuguugugaga

SEQ ID NO: 1270595 - RNA, 19 nt, Homo sapiens
  misc_RNA (1)...(19): siRNA sense strand
ccuacauguuccugucuga

SEQ ID NO: 1270596 - RNA, 19 nt, Homo sapiens
  misc_RNA (1)...(19): siRNA sense strand
cgaccugugcuaugaguuc

SEQ ID NO: 1270597 - RNA, 19 nt, Homo sapiens
  misc_RNA (1)...(19): siRNA sense strand
gcacuggagacagcgagaa

SEQ ID NO: 1270598 - RNA, 19 nt, Homo sapiens
  misc_RNA (1)...(19): siRNA sense strand
aacauuacucugggauuua

SEQ ID NO: 1270599 - RNA, 19 nt, Homo sapiens
  misc_RNA (1)...(19): siRNA sense strand
gggugaagaacaagcaugu

SEQ ID NO: 1270600 - RNA, 19 nt, Homo sapiens
  misc_RNA (1)...(19): siRNA sense strand
ggaccaaccuccucuacaa

SEQ ID NO: 1270601 - RNA, 19 nt, Homo sapiens
  misc_RNA (1)...(19): siRNA sense strand
gaagauccgugacgacgaa

SEQ ID NO: 1270602 - RNA, 19 nt, Homo sapiens
  misc_RNA (1)...(19): siRNA sense strand
gaacgggaccggaagaaga

SEQ ID NO: 1270603 - RNA, 19 nt, Homo sapiens
  misc_RNA (1)...(19): siRNA sense strand
aagaagaucugcucccauu

SEQ ID NO: 1270604 - RNA, 19 nt, Homo sapiens
  misc_RNA (1)...(19): siRNA sense strand
ggaagaagaggaagcgaaa

SEQ ID NO: 1270605 - RNA, 19 nt, Homo sapiens
  misc_RNA (1)...(19): siRNA sense strand
gggcugaucuucaauaagg

SEQ ID NO: 1270606 - RNA, 19 nt, Homo sapiens
  misc_RNA (1)...(19): siRNA sense strand
ccacugagccugagucugu

SEQ ID NO: 1270607 - RNA, 19 nt, Homo sapiens
  misc_RNA (1)...(19): siRNA sense strand
cgaaagagaaggccaggaa

SEQ ID NO: 1270608 - RNA, 19 nt, Homo sapiens
  misc_RNA (1)...(19): siRNA sense strand
gacagcgacugcaugagaa

SEQ ID NO: 1270609 - RNA, 19 nt, Homo sapiens
  misc_RNA (1)...(19): siRNA sense strand
cgacagcgacugcaugaga

SEQ ID NO: 1270610 - RNA, 19 nt, Homo sapiens
  misc_RNA (1)...(19): siRNA sense strand
gaagaucugcucccauucg

SEQ ID NO: 1270611 - RNA, 19 nt, Homo sapiens
  misc_RNA (1)...(19): siRNA sense strand
ggaagaaaacacaaaagaa

SEQ ID NO: 1270612 - RNA, 19 nt, Homo sapiens
  misc_RNA (1)...(19): siRNA sense strand
ccgggcugaucuucaauaa

SEQ ID NO: 1270613 - RNA, 19 nt, Homo sapiens
  misc_RNA (1)...(19): siRNA sense strand
gagcuggaggcgaagauga

SEQ ID NO: 1270614 - RNA, 19 nt, Homo sapiens
  misc_RNA (1)...(19): siRNA sense strand
gagccugagucugucuuug

SEQ ID NO: 1270615 - RNA, 19 nt, Homo sapiens
  misc_RNA (1)...(19): siRNA sense strand
ugcagagccuggccaagaa

SEQ ID NO: 1270616 - RNA, 19 nt, Homo sapiens
  misc_RNA (1)...(19): siRNA sense strand
acucaaggcucagaaacug

SEQ ID NO: 1270617 - RNA, 19 nt, Homo sapiens
  misc_RNA (1)...(19): siRNA sense strand
ugaggcagccaaagaggaa

SEQ ID NO: 1270618 - RNA, 19 nt, Homo sapiens
  misc_RNA (1)...(19): siRNA sense strand
gaaauuccggaagcgagaa

SEQ ID NO: 1270619 - RNA, 19 nt, Homo sapiens
  misc_RNA (1)...(19): siRNA sense strand
ugucuuugcucuggauguu

SEQ ID NO: 1270620 - RNA, 19 nt, Homo sapiens
  misc_RNA (1)...(19): siRNA sense strand
cugcagagccuggccaaga

SEQ ID NO: 1270621 - RNA, 19 nt, Homo sapiens
  misc_RNA (1)...(19): siRNA sense strand
gaaaaggaagaaaacacaa

SEQ ID NO: 1270622 - RNA, 19 nt, Homo sapiens
  misc_RNA (1)...(19): siRNA sense strand
ccucucuacucgccaagga

SEQ ID NO: 1270623 - RNA, 19 nt, Homo sapiens
  misc_RNA (1)...(19): siRNA sense strand
gaaauucgguccagucuaa

SEQ ID NO: 1270624 - RNA, 19 nt, Homo sapiens
  misc_RNA (1)...(19): siRNA sense strand
ccagaagccuacauaauua

SEQ ID NO: 1270625 - RNA, 19 nt, Homo sapiens
  misc_RNA (1)...(19): siRNA sense strand
gaggaaagguugcucauug

SEQ ID NO: 1270626 - RNA, 19 nt, Homo sapiens
  misc_RNA (1)...(19): siRNA sense strand
gaagauugccuagaaauau

SEQ ID NO: 1270627 - RNA, 19 nt, Homo sapiens
  misc_RNA (1)...(19): siRNA sense strand
cuagaaagcuugagcauac

SEQ ID NO: 1270628 - RNA, 19 nt, Homo sapiens
  misc_RNA (1)...(19): siRNA sense strand
gaaauauggagcccagaua

SEQ ID NO: 1270629 - RNA, 19 nt, Homo sapiens
  misc_RNA (1)...(19): siRNA sense strand
gugcaaaugucaauuguca

SEQ ID NO: 1270630 - RNA, 19 nt, Homo sapiens
  misc_RNA (1)...(19): siRNA sense strand
gcaacuacuuuagaagaaa

SEQ ID NO: 1270631 - RNA, 19 nt, Homo sapiens
  misc_RNA (1)...(19): siRNA sense strand
ggaaucacaccuuuauuug

SEQ ID NO: 1270632 - RNA, 19 nt, Homo sapiens
  misc_RNA (1)...(19): siRNA sense strand
gcaguuaccuauucaugca

SEQ ID NO: 1270633 - RNA, 19 nt, Homo sapiens
  misc_RNA (1)...(19): siRNA sense strand
gcuacacccuuguucauug

SEQ ID NO: 1270634 - RNA, 19 nt, Homo sapiens
  misc_RNA (1)...(19): siRNA sense strand
gaagaaacgacaccauugu

SEQ ID NO: 1270635 - RNA, 19 nt, Homo sapiens
  misc_RNA (1)...(19): siRNA sense strand
gaaagcuugagcauacuua

SEQ ID NO: 1270636 - RNA, 19 nt, Homo sapiens
  misc_RNA (1)...(19): siRNA sense strand
uaucuucacuuuggaguuu

SEQ ID NO: 1270637 - RNA, 19 nt, Homo sapiens
  misc_RNA (1)...(19): siRNA sense strand
ggaaugccaggaugacuuu

SEQ ID NO: 1270638 - RNA, 19 nt, Homo sapiens
  misc_RNA (1)...(19): siRNA sense strand
acaugaagauugccuagaa

SEQ ID NO: 1270639 - RNA, 19 nt, Homo sapiens
  misc_RNA (1)...(19): siRNA sense strand
gaaauauuacuccggaaug

SEQ ID NO: 1270640 - RNA, 19 nt, Homo sapiens
  misc_RNA (1)...(19): siRNA sense strand
cccagaagccuacauaauu

SEQ ID NO: 1270641 - RNA, 19 nt, Homo sapiens
  misc_RNA (1)...(19): siRNA sense strand
gcaauuaaagcacaagcaa

SEQ ID NO: 1270642 - RNA, 19 nt, Homo sapiens
  misc_RNA (1)...(19): siRNA sense strand
acacugggcuaaacaaagu

SEQ ID NO: 1270643 - RNA, 19 nt, Homo sapiens
  misc_RNA (1)...(19): siRNA sense strand
ggacagauagauguguuaa

SEQ ID NO: 1270644 - RNA, 19 nt, Homo sapiens
  misc_RNA (1)...(19): siRNA sense strand
ugaggacaguuggcaguua

SEQ ID NO: 1270645 - RNA, 19 nt, Homo sapiens
  misc_RNA (1)...(19): siRNA sense strand
caggaugacuuuggaauca

SEQ ID NO: 1270646 - RNA, 19 nt, Homo sapiens
  misc_RNA (1)...(19): siRNA sense strand
uggaaucacaccuuuauuu

SEQ ID NO: 1270647 - RNA, 19 nt, Homo sapiens
  misc_RNA (1)...(19): siRNA sense strand
ggauucaguucuccugugu

SEQ ID NO: 1270648 - RNA, 19 nt, Homo sapiens
  misc_RNA (1)...(19): siRNA sense strand
ugaagauugccuagaaaua

SEQ ID NO: 1270649 - RNA, 19 nt, Homo sapiens
  misc_RNA (1)...(19): siRNA sense strand
caugaagauugccuagaaa

SEQ ID NO: 1270650 - RNA, 19 nt, Homo sapiens
  misc_RNA (1)...(19): siRNA sense strand
gaacgucuacggucugaca

SEQ ID NO: 1270651 - RNA, 19 nt, Homo sapiens
  misc_RNA (1)...(19): siRNA sense strand
gaaucacaccuuuauuugu

SEQ ID NO: 1270652 - RNA, 19 nt, Homo sapiens
  misc_RNA (1)...(19): siRNA sense strand
guucauugcugcucaagag

SEQ ID NO: 1270653 - RNA, 19 nt, Homo sapiens
  misc_RNA (1)...(19): siRNA sense strand
gcaaaugucaauugucaag

SEQ ID NO: 1270654 - RNA, 19 nt, Homo sapiens
  misc_RNA (1)...(19): siRNA sense strand
gcaucucgcugcaagucaa

SEQ ID NO: 1270655 - RNA, 19 nt, Homo sapiens
  misc_RNA (1)...(19): siRNA sense strand
ugacccaucuuugucguuu

SEQ ID NO: 1270656 - RNA, 19 nt, Homo sapiens
  misc_RNA (1)...(19): siRNA sense strand
acauuaagaugaagaccuu

SEQ ID NO: 1270657 - RNA, 19 nt, Homo sapiens
  misc_RNA (1)...(19): siRNA sense strand
ggauuugacccacugauuc

SEQ ID NO: 1270658 - RNA, 19 nt, Homo sapiens
  misc_RNA (1)...(19): siRNA sense strand
uagaagaaacgacaccauu

SEQ ID NO: 1270659 - RNA, 19 nt, Homo sapiens
  misc_RNA (1)...(19): siRNA sense strand
gcuagaaagcuugagcaua

SEQ ID NO: 1270660 - RNA, 19 nt, Homo sapiens
  misc_RNA (1)...(19): siRNA sense strand
acagauagauguguuaagg

SEQ ID NO: 1270661 - RNA, 19 nt, Homo sapiens
  misc_RNA (1)...(19): siRNA sense strand
gaaaauggacagauagaug

SEQ ID NO: 1270662 - RNA, 19 nt, Homo sapiens
  misc_RNA (1)...(19): siRNA sense strand
aaauauggagcccagauaa

SEQ ID NO: 1270663 - RNA, 19 nt, Homo sapiens
  misc_RNA (1)...(19): siRNA sense strand
gaacuucauuuggcauacu

SEQ ID NO: 1270664 - RNA, 19 nt, Homo sapiens
  misc_RNA (1)...(19): siRNA sense strand
gaacuggcagcuauucaag

SEQ ID NO: 1270665 - RNA, 19 nt, Homo sapiens
  misc_RNA (1)...(19): siRNA sense strand
gaggauguaugaaguucca

SEQ ID NO: 1270666 - RNA, 19 nt, Homo sapiens
  misc_RNA (1)...(19): siRNA sense strand
gaggacaguuggcaguuac

SEQ ID NO: 1270667 - RNA, 19 nt, Homo sapiens
  misc_RNA (1)...(19): siRNA sense strand
cuuuggaguuuacuaauug

SEQ ID NO: 1270668 - RNA, 19 nt, Homo sapiens
  misc_RNA (1)...(19): siRNA sense strand
ucacuuuggaguuuacuaa

SEQ ID NO: 1270669 - RNA, 19 nt, Homo sapiens
  misc_RNA (1)...(19): siRNA sense strand
ggaugacuuuggaaucaca

SEQ ID NO: 1270670 - RNA, 19 nt, Homo sapiens
  misc_RNA (1)...(19): siRNA sense strand
gcauugacacccuuaucuu

SEQ ID NO: 1270671 - RNA, 19 nt, Homo sapiens
  misc_RNA (1)...(19): siRNA sense strand
gaagguuucugugcuuugc

SEQ ID NO: 1270672 - RNA, 19 nt, Homo sapiens
  misc_RNA (1)...(19): siRNA sense strand
gcaagucaaggacauugga

SEQ ID NO: 1270673 - RNA, 19 nt, Homo sapiens
  misc_RNA (1)...(19): siRNA sense strand
gaagacguucugaggaugu

SEQ ID NO: 1270674 - RNA, 19 nt, Homo sapiens
  misc_RNA (1)...(19): siRNA sense strand
ggucugacaguuauauuag

SEQ ID NO: 1270675 - RNA, 19 nt, Homo sapiens
  misc_RNA (1)...(19): siRNA sense strand
caacuacuuuagaagaaac

SEQ ID NO: 1270676 - RNA, 19 nt, Homo sapiens
  misc_RNA (1)...(19): siRNA sense strand
ggaaauucgguccagucua

SEQ ID NO: 1270677 - RNA, 19 nt, Homo sapiens
  misc_RNA (1)...(19): siRNA sense strand
cucaaacgcuuggauucua

SEQ ID NO: 1270678 - RNA, 19 nt, Homo sapiens
  misc_RNA (1)...(19): siRNA sense strand
caauuaaagcacaagcaaa

SEQ ID NO: 1270679 - RNA, 19 nt, Homo sapiens
  misc_RNA (1)...(19): siRNA sense strand
gacugugaguucuuuggaa

SEQ ID NO: 1270680 - RNA, 19 nt, Homo sapiens
  misc_RNA (1)...(19): siRNA sense strand
agaagaaacgacaccauug

SEQ ID NO: 1270681 - RNA, 19 nt, Homo sapiens
  misc_RNA (1)...(19): siRNA sense strand
uguuaaggcuguugcuuca

SEQ ID NO: 1270682 - RNA, 19 nt, Homo sapiens
  misc_RNA (1)...(19): siRNA sense strand
acacggagcaaauguuaau

SEQ ID NO: 1270683 - RNA, 19 nt, Homo sapiens
  misc_RNA (1)...(19): siRNA sense strand
cggagcaaauguuaaugga

SEQ ID NO: 1270684 - RNA, 19 nt, Homo sapiens
  misc_RNA (1)...(19): siRNA sense strand
ugugaguucuuuggaauug

SEQ ID NO: 1270685 - RNA, 19 nt, Homo sapiens
  misc_RNA (1)...(19): siRNA sense strand
ggacugugaguucuuugga

SEQ ID NO: 1270686 - RNA, 19 nt, Homo sapiens
  misc_RNA (1)...(19): siRNA sense strand
acaaaguaagcccuguuua

SEQ ID NO: 1270687 - RNA, 19 nt, Homo sapiens
  misc_RNA (1)...(19): siRNA sense strand
ugcaacuacuuuagaagaa

SEQ ID NO: 1270688 - RNA, 19 nt, Homo sapiens
  misc_RNA (1)...(19): siRNA sense strand
caccagcuguugaaaggau

SEQ ID NO: 1270689 - RNA, 19 nt, Homo sapiens
  misc_RNA (1)...(19): siRNA sense strand
gagcccagauaaaugaacu

SEQ ID NO: 1270690 - RNA, 19 nt, Homo sapiens
  misc_RNA (1)...(19): siRNA sense strand
gggugcaaaugucaauugu

SEQ ID NO: 1270691 - RNA, 19 nt, Homo sapiens
  misc_RNA (1)...(19): siRNA sense strand
aaacaaggaaugccaggau

SEQ ID NO: 1270692 - RNA, 19 nt, Homo sapiens
  misc_RNA (1)...(19): siRNA sense strand
caaaauauaaggagugguu

SEQ ID NO: 1270693 - RNA, 19 nt, Homo sapiens
  misc_RNA (1)...(19): siRNA sense strand
uucgauauuucgcuacuuu

SEQ ID NO: 1270694 - RNA, 19 nt, Homo sapiens
  misc_RNA (1)...(19): siRNA sense strand
gaaaaggagcaaacaagga

SEQ ID NO: 1270695 - RNA, 19 nt, Homo sapiens
  misc_RNA (1)...(19): siRNA sense strand
ugagcauacuuauuucauc

SEQ ID NO: 1270696 - RNA, 19 nt, Homo sapiens
  misc_RNA (1)...(19): siRNA sense strand
ugaguucuuuggaauugug

SEQ ID NO: 1270697 - RNA, 19 nt, Homo sapiens
  misc_RNA (1)...(19): siRNA sense strand
ucuacggucugacaguuau

SEQ ID NO: 1270698 - RNA, 19 nt, Homo sapiens
  misc_RNA (1)...(19): siRNA sense strand
ucaaacgcuuggauucuac

SEQ ID NO: 1270699 - RNA, 19 nt, Homo sapiens
  misc_RNA (1)...(19): siRNA sense strand
cgagaaguuuucgauauuu

SEQ ID NO: 1270700 - RNA, 19 nt, Homo sapiens
  misc_RNA (1)...(19): siRNA sense strand
gcuugagcauacuuauuuc

SEQ ID NO: 1270701 - RNA, 19 nt, Homo sapiens
  misc_RNA (1)...(19): siRNA sense strand
cgucuacggucugacaguu

SEQ ID NO: 1270702 - RNA, 19 nt, Homo sapiens
  misc_RNA (1)...(19): siRNA sense strand
gauccuaaugcaacuacuu

SEQ ID NO: 1270703 - RNA, 19 nt, Homo sapiens
  misc_RNA (1)...(19): siRNA sense strand
gauucuacagcaacauauu

SEQ ID NO: 1270704 - RNA, 19 nt, Homo sapiens
  misc_RNA (1)...(19): siRNA sense strand
acacccuuaucuucacuuu

SEQ ID NO: 1270705 - RNA, 19 nt, Homo sapiens
  misc_RNA (1)...(19): siRNA sense strand
uaagaugaagaccuuugaa

SEQ ID NO: 1270706 - RNA, 19 nt, Homo sapiens
  misc_RNA (1)...(19): siRNA sense strand
gauguaugaaguuccagaa

SEQ ID NO: 1270707 - RNA, 19 nt, Homo sapiens
  misc_RNA (1)...(19): siRNA sense strand
cggucugacaguuauauua

SEQ ID NO: 1270708 - RNA, 19 nt, Homo sapiens
  misc_RNA (1)...(19): siRNA sense strand
acccuuaucuucacuuugg

SEQ ID NO: 1270709 - RNA, 19 nt, Homo sapiens
  misc_RNA (1)...(19): siRNA sense strand
aaauauuacuccggaaugg

SEQ ID NO: 1270710 - RNA, 19 nt, Homo sapiens
  misc_RNA (1)...(19): siRNA sense strand
caguauggcaagcuagaaa

SEQ ID NO: 1270711 - RNA, 19 nt, Homo sapiens
  misc_RNA (1)...(19): siRNA sense strand
cagaagccuacauaauuau

SEQ ID NO: 1270712 - RNA, 19 nt, Homo sapiens
  misc_RNA (1)...(19): siRNA sense strand
agcuugagcauacuuauuu

SEQ ID NO: 1270713 - RNA, 19 nt, Homo sapiens
  misc_RNA (1)...(19): siRNA sense strand
ugacacugggcuaaacaaa

SEQ ID NO: 1270714 - RNA, 19 nt, Homo sapiens
  misc_RNA (1)...(19): siRNA sense strand
acaguuggcaguuaccuau

SEQ ID NO: 1270715 - RNA, 19 nt, Homo sapiens
  misc_RNA (1)...(19): siRNA sense strand
gacuuguuaauaccacuua

SEQ ID NO: 1270716 - RNA, 19 nt, Homo sapiens
  misc_RNA (1)...(19): siRNA sense strand
acuggcagcuauucaagau

SEQ ID NO: 1270717 - RNA, 19 nt, Homo sapiens
  misc_RNA (1)...(19): siRNA sense strand
guucugaggauguaugaag

SEQ ID NO: 1270718 - RNA, 19 nt, Homo sapiens
  misc_RNA (1)...(19): siRNA sense strand
gagaaguuuucgauauuuc

SEQ ID NO: 1270719 - RNA, 19 nt, Homo sapiens
  misc_RNA (1)...(19): siRNA sense strand
aagaaacgacaccauuguu

SEQ ID NO: 1270720 - RNA, 19 nt, Homo sapiens
  misc_RNA (1)...(19): siRNA sense strand
aauauggagcccagauaaa

SEQ ID NO: 1270721 - RNA, 19 nt, Homo sapiens
  misc_RNA (1)...(19): siRNA sense strand
uggauucuacagcaacaua

SEQ ID NO: 1270722 - RNA, 19 nt, Homo sapiens
  misc_RNA (1)...(19): siRNA sense strand
augaagacguucugaggau

SEQ ID NO: 1270723 - RNA, 19 nt, Homo sapiens
  misc_RNA (1)...(19): siRNA sense strand
gaaauucgguccagucuaa

SEQ ID NO: 1270724 - RNA, 19 nt, Homo sapiens
  misc_RNA (1)...(19): siRNA sense strand
ccagaagccuacauaauua

SEQ ID NO: 1270725 - RNA, 19 nt, Homo sapiens
  misc_RNA (1)...(19): siRNA sense strand
gaggaaagguugcucauug

SEQ ID NO: 1270726 - RNA, 19 nt, Homo sapiens
  misc_RNA (1)...(19): siRNA sense strand
gaagauugccuagaaauau

SEQ ID NO: 1270727 - RNA, 19 nt, Homo sapiens
  misc_RNA (1)...(19): siRNA sense strand
cuagaaagcuugagcauac

SEQ ID NO: 1270728 - RNA, 19 nt, Homo sapiens
  misc_RNA (1)...(19): siRNA sense strand
gaaauauggagcccagaua

SEQ ID NO: 1270729 - RNA, 19 nt, Homo sapiens
  misc_RNA (1)...(19): siRNA sense strand
gugcaaaugucaauuguca

SEQ ID NO: 1270730 - RNA, 19 nt, Homo sapiens
  misc_RNA (1)...(19): siRNA sense strand
gcaacuacuuuagaagaaa

SEQ ID NO: 1270731 - RNA, 19 nt, Homo sapiens
  misc_RNA (1)...(19): siRNA sense strand
ggaaucacaccuuuauuug

SEQ ID NO: 1270732 - RNA, 19 nt, Homo sapiens
  misc_RNA (1)...(19): siRNA sense strand
gcaguuaccuauucaugca

SEQ ID NO: 1270733 - RNA, 19 nt, Homo sapiens
  misc_RNA (1)...(19): siRNA sense strand
gcuacacccuuguucauug

SEQ ID NO: 1270734 - RNA, 19 nt, Homo sapiens
  misc_RNA (1)...(19): siRNA sense strand
gaagaaacgacaccauugu

SEQ ID NO: 1270735 - RNA, 19 nt, Homo sapiens
  misc_RNA (1)...(19): siRNA sense strand
gaaagcuugagcauacuua

SEQ ID NO: 1270736 - RNA, 19 nt, Homo sapiens
  misc_RNA (1)...(19): siRNA sense strand
uaucuucacuuuggaguuu

SEQ ID NO: 1270737 - RNA, 19 nt, Homo sapiens
  misc_RNA (1)...(19): siRNA sense strand
ggaaugccaggaugacuuu

SEQ ID NO: 1270738 - RNA, 19 nt, Homo sapiens
  misc_RNA (1)...(19): siRNA sense strand
acaugaagauugccuagaa

SEQ ID NO: 1270739 - RNA, 19 nt, Homo sapiens
  misc_RNA (1)...(19): siRNA sense strand
gaaauauuacuccggaaug

SEQ ID NO: 1270740 - RNA, 19 nt, Homo sapiens
  misc_RNA (1)...(19): siRNA sense strand
cccagaagccuacauaauu

SEQ ID NO: 1270741 - RNA, 19 nt, Homo sapiens
  misc_RNA (1)...(19): siRNA sense strand
gcaauuaaagcacaagcaa

SEQ ID NO: 1270742 - RNA, 19 nt, Homo sapiens
  misc_RNA (1)...(19): siRNA sense strand
acacugggcuaaacaaagu

SEQ ID NO: 1270743 - RNA, 19 nt, Homo sapiens
  misc_RNA (1)...(19): siRNA sense strand
ggacagauagauguguuaa

SEQ ID NO: 1270744 - RNA, 19 nt, Homo sapiens
  misc_RNA (1)...(19): siRNA sense strand
ugaggacaguuggcaguua

SEQ ID NO: 1270745 - RNA, 19 nt, Homo sapiens
  misc_RNA (1)...(19): siRNA sense strand
caggaugacuuuggaauca

SEQ ID NO: 1270746 - RNA, 19 nt, Homo sapiens
  misc_RNA (1)...(19): siRNA sense strand
uggaaucacaccuuuauuu

SEQ ID NO: 1270747 - RNA, 19 nt, Homo sapiens
  misc_RNA (1)...(19): siRNA sense strand
ggauucaguucuccugugu

SEQ ID NO: 1270748 - RNA, 19 nt, Homo sapiens
  misc_RNA (1)...(19): siRNA sense strand
ugaagauugccuagaaaua

SEQ ID NO: 1270749 - RNA, 19 nt, Homo sapiens
  misc_RNA (1)...(19): siRNA sense strand
caugaagauugccuagaaa

SEQ ID NO: 1270750 - RNA, 19 nt, Homo sapiens
  misc_RNA (1)...(19): siRNA sense strand
gaacgucuacggucugaca

SEQ ID NO: 1270751 - RNA, 19 nt, Homo sapiens
  misc_RNA (1)...(19): siRNA sense strand
gaaucacaccuuuauuugu

SEQ ID NO: 1270752 - RNA, 19 nt, Homo sapiens
  misc_RNA (1)...(19): siRNA sense strand
guucauugcugcucaagag

SEQ ID NO: 1270753 - RNA, 19 nt, Homo sapiens
  misc_RNA (1)...(19): siRNA sense strand
gcaaaugucaauugucaag

SEQ ID NO: 1270754 - RNA, 19 nt, Homo sapiens
  misc_RNA (1)...(19): siRNA sense strand
gcaucucgcugcaagucaa

SEQ ID NO: 1270755 - RNA, 19 nt, Homo sapiens
  misc_RNA (1)...(19): siRNA sense strand
ugacccaucuuugucguuu

SEQ ID NO: 1270756 - RNA, 19 nt, Homo sapiens
  misc_RNA (1)...(19): siRNA sense strand
ggauuugacccacugauuc

SEQ ID NO: 1270757 - RNA, 19 nt, Homo sapiens
  misc_RNA (1)...(19): siRNA sense strand
uagaagaaacgacaccauu

SEQ ID NO: 1270758 - RNA, 19 nt, Homo sapiens
  misc_RNA (1)...(19): siRNA sense strand
gcuagaaagcuugagcaua

SEQ ID NO: 1270759 - RNA, 19 nt, Homo sapiens
  misc_RNA (1)...(19): siRNA sense strand
acagauagauguguuaagg

SEQ ID NO: 1270760 - RNA, 19 nt, Homo sapiens
  misc_RNA (1)...(19): siRNA sense strand
gaaaauggacagauagaug

SEQ ID NO: 1270761 - RNA, 19 nt, Homo sapiens
  misc_RNA (1)...(19): siRNA sense strand
aaauauggagcccagauaa

SEQ ID NO: 1270762 - RNA, 19 nt, Homo sapiens
  misc_RNA (1)...(19): siRNA sense strand
gaacuucauuuggcauacu

SEQ ID NO: 1270763 - RNA, 19 nt, Homo sapiens
  misc_RNA (1)...(19): siRNA sense strand
gaacuggcagcuauucaag

SEQ ID NO: 1270764 - RNA, 19 nt, Homo sapiens
  misc_RNA (1)...(19): siRNA sense strand
gaggauguaugaaguucca

SEQ ID NO: 1270765 - RNA, 19 nt, Homo sapiens
  misc_RNA (1)...(19): siRNA sense strand
gaggacaguuggcaguuac

SEQ ID NO: 1270766 - RNA, 19 nt, Homo sapiens
  misc_RNA (1)...(19): siRNA sense strand
cuuuggaguuuacuaauug

SEQ ID NO: 1270767 - RNA, 19 nt, Homo sapiens
  misc_RNA (1)...(19): siRNA sense strand
ucacuuuggaguuuacuaa

SEQ ID NO: 1270768 - RNA, 19 nt, Homo sapiens
  misc_RNA (1)...(19): siRNA sense strand
ggaugacuuuggaaucaca

SEQ ID NO: 1270769 - RNA, 19 nt, Homo sapiens
  misc_RNA (1)...(19): siRNA sense strand
gcauugacacccuuaucuu

SEQ ID NO: 1270770 - RNA, 19 nt, Homo sapiens
  misc_RNA (1)...(19): siRNA sense strand
gaagguuucugugcuuugc

SEQ ID NO: 1270771 - RNA, 19 nt, Homo sapiens
  misc_RNA (1)...(19): siRNA sense strand
gcaagucaaggacauugga

SEQ ID NO: 1270772 - RNA, 19 nt, Homo sapiens
  misc_RNA (1)...(19): siRNA sense strand
gaagacguucugaggaugu

SEQ ID NO: 1270773 - RNA, 19 nt, Homo sapiens
  misc_RNA (1)...(19): siRNA sense strand
ggucugacaguuauauuag

SEQ ID NO: 1270774 - RNA, 19 nt, Homo sapiens
  misc_RNA (1)...(19): siRNA sense strand
agaagaaacgacaccauug

SEQ ID NO: 1270775 - RNA, 19 nt, Homo sapiens
  misc_RNA (1)...(19): siRNA sense strand
ggaaauucgguccagucua

SEQ ID NO: 1270776 - RNA, 19 nt, Homo sapiens
  misc_RNA (1)...(19): siRNA sense strand
caacuacuuuagaagaaac

SEQ ID NO: 1270777 - RNA, 19 nt, Homo sapiens
  misc_RNA (1)...(19): siRNA sense strand
cucaaacgcuuggauucua

SEQ ID NO: 1270778 - RNA, 19 nt, Homo sapiens
  misc_RNA (1)...(19): siRNA sense strand
caauuaaagcacaagcaaa

SEQ ID NO: 1270779 - RNA, 19 nt, Homo sapiens
  misc_RNA (1)...(19): siRNA sense strand
gacugugaguucuuuggaa

SEQ ID NO: 1270780 - RNA, 19 nt, Homo sapiens
  misc_RNA (1)...(19): siRNA sense strand
uguuaaggcuguugcuuca

SEQ ID NO: 1270781 - RNA, 19 nt, Homo sapiens
  misc_RNA (1)...(19): siRNA sense strand
acacggagcaaauguuaau

SEQ ID NO: 1270782 - RNA, 19 nt, Homo sapiens
  misc_RNA (1)...(19): siRNA sense strand
cggagcaaauguuaaugga

SEQ ID NO: 1270783 - RNA, 19 nt, Homo sapiens
  misc_RNA (1)...(19): siRNA sense strand
ugugaguucuuuggaauug

SEQ ID NO: 1270784 - RNA, 19 nt, Homo sapiens
  misc_RNA (1)...(19): siRNA sense strand
ggacugugaguucuuugga

SEQ ID NO: 1270785 - RNA, 19 nt, Homo sapiens
  misc_RNA (1)...(19): siRNA sense strand
acaaaguaagcccuguuua

SEQ ID NO: 1270786 - RNA, 19 nt, Homo sapiens
  misc_RNA (1)...(19): siRNA sense strand
gggugcaaaugucaauugu

SEQ ID NO: 1270787 - RNA, 19 nt, Homo sapiens
  misc_RNA (1)...(19): siRNA sense strand
ugcaacuacuuuagaagaa

SEQ ID NO: 1270788 - RNA, 19 nt, Homo sapiens
  misc_RNA (1)...(19): siRNA sense strand
caccagcuguugaaaggau

SEQ ID NO: 1270789 - RNA, 19 nt, Homo sapiens
  misc_RNA (1)...(19): siRNA sense strand
gagcccagauaaaugaacu

SEQ ID NO: 1270790 - RNA, 19 nt, Homo sapiens
  misc_RNA (1)...(19): siRNA sense strand
aaacaaggaaugccaggau

SEQ ID NO: 1270791 - RNA, 19 nt, Homo sapiens
  misc_RNA (1)...(19): siRNA sense strand
caaaauauaaggagugguu

SEQ ID NO: 1270792 - RNA, 19 nt, Homo sapiens
  misc_RNA (1)...(19): siRNA sense strand
uucgauauuucgcuacuuu

SEQ ID NO: 1270793 - RNA, 19 nt, Homo sapiens
  misc_RNA (1)...(19): siRNA sense strand
gaaaaggagcaaacaagga

SEQ ID NO: 1270794 - RNA, 19 nt, Homo sapiens
  misc_RNA (1)...(19): siRNA sense strand
ugagcauacuuauuucauc

SEQ ID NO: 1270795 - RNA, 19 nt, Homo sapiens
  misc_RNA (1)...(19): siRNA sense strand
ugaguucuuuggaauugug

SEQ ID NO: 1270796 - RNA, 19 nt, Homo sapiens
  misc_RNA (1)...(19): siRNA sense strand
ucuacggucugacaguuau

SEQ ID NO: 1270797 - RNA, 19 nt, Homo sapiens
  misc_RNA (1)...(19): siRNA sense strand
ucaaacgcuuggauucuac

SEQ ID NO: 1270798 - RNA, 19 nt, Homo sapiens
  misc_RNA (1)...(19): siRNA sense strand
cgagaaguuuucgauauuu

SEQ ID NO: 1270799 - RNA, 19 nt, Homo sapiens
  misc_RNA (1)...(19): siRNA sense strand
gcuugagcauacuuauuuc

SEQ ID NO: 1270800 - RNA, 19 nt, Homo sapiens
  misc_RNA (1)...(19): siRNA sense strand
cgucuacggucugacaguu

SEQ ID NO: 1270801 - RNA, 19 nt, Homo sapiens
  misc_RNA (1)...(19): siRNA sense strand
gauucuacagcaacauauu

SEQ ID NO: 1270802 - RNA, 19 nt, Homo sapiens
  misc_RNA (1)...(19): siRNA sense strand
acacccuuaucuucacuuu

SEQ ID NO: 1270803 - RNA, 19 nt, Homo sapiens
  misc_RNA (1)...(19): siRNA sense strand
gauccuaaugcaacuacuu

SEQ ID NO: 1270804 - RNA, 19 nt, Homo sapiens
  misc_RNA (1)...(19): siRNA sense strand
aaauauuacuccggaaugg

SEQ ID NO: 1270805 - RNA, 19 nt, Homo sapiens
  misc_RNA (1)...(19): siRNA sense strand
gauguaugaaguuccagaa

SEQ ID NO: 1270806 - RNA, 19 nt, Homo sapiens
  misc_RNA (1)...(19): siRNA sense strand
cggucugacaguuauauua

SEQ ID NO: 1270807 - RNA, 19 nt, Homo sapiens
  misc_RNA (1)...(19): siRNA sense strand
acccuuaucuucacuuugg

SEQ ID NO: 1270808 - RNA, 19 nt, Homo sapiens
  misc_RNA (1)...(19): siRNA sense strand
caguauggcaagcuagaaa

SEQ ID NO: 1270809 - RNA, 19 nt, Homo sapiens
  misc_RNA (1)...(19): siRNA sense strand
cagaagccuacauaauuau

SEQ ID NO: 1270810 - RNA, 19 nt, Homo sapiens
  misc_RNA (1)...(19): siRNA sense strand
agcuugagcauacuuauuu

SEQ ID NO: 1270811 - RNA, 19 nt, Homo sapiens
  misc_RNA (1)...(19): siRNA sense strand
ugacacugggcuaaacaaa

SEQ ID NO: 1270812 - RNA, 19 nt, Homo sapiens
  misc_RNA (1)...(19): siRNA sense strand
acaguuggcaguuaccuau

SEQ ID NO: 1270813 - RNA, 19 nt, Homo sapiens
  misc_RNA (1)...(19): siRNA sense strand
gacuuguuaauaccacuua

SEQ ID NO: 1270814 - RNA, 19 nt, Homo sapiens
  misc_RNA (1)...(19): siRNA sense strand
acuggcagcuauucaagau

SEQ ID NO: 1270815 - RNA, 19 nt, Homo sapiens
  misc_RNA (1)...(19): siRNA sense strand
guucugaggauguaugaag

SEQ ID NO: 1270816 - RNA, 19 nt, Homo sapiens
  misc_RNA (1)...(19): siRNA sense strand
aagaaacgacaccauuguu

SEQ ID NO: 1270817 - RNA, 19 nt, Homo sapiens
  misc_RNA (1)...(19): siRNA sense strand
gagaaguuuucgauauuuc

SEQ ID NO: 1270818 - RNA, 19 nt, Homo sapiens
  misc_RNA (1)...(19): siRNA sense strand
aauauggagcccagauaaa

SEQ ID NO: 1270819 - RNA, 19 nt, Homo sapiens
  misc_RNA (1)...(19): siRNA sense strand
guuggcaguuaccuauuca

SEQ ID NO: 1270820 - RNA, 19 nt, Homo sapiens
  misc_RNA (1)...(19): siRNA sense strand
augaagacguucugaggau

SEQ ID NO: 1270821 - RNA, 19 nt, Homo sapiens
  misc_RNA (1)...(19): siRNA sense strand
uggauucuacagcaacaua

SEQ ID NO: 1270822 - RNA, 19 nt, Homo sapiens
  misc_RNA (1)...(19): siRNA sense strand
gauuugacccacugauucu

SEQ ID NO: 1270823 - RNA, 19 nt, Homo sapiens
  misc_RNA (1)...(19): siRNA sense strand
gaaauucgguccagucuaa

SEQ ID NO: 1270824 - RNA, 19 nt, Homo sapiens
  misc_RNA (1)...(19): siRNA sense strand
ccagaagccuacauaauua

SEQ ID NO: 1270825 - RNA, 19 nt, Homo sapiens
  misc_RNA (1)...(19): siRNA sense strand
gaggaaagguugcucauug

SEQ ID NO: 1270826 - RNA, 19 nt, Homo sapiens
  misc_RNA (1)...(19): siRNA sense strand
gaagauugccuagaaauau

SEQ ID NO: 1270827 - RNA, 19 nt, Homo sapiens
  misc_RNA (1)...(19): siRNA sense strand
cuagaaagcuugagcauac

SEQ ID NO: 1270828 - RNA, 19 nt, Homo sapiens
  misc_RNA (1)...(19): siRNA sense strand
gaaauauggagcccagaua

SEQ ID NO: 1270829 - RNA, 19 nt, Homo sapiens
  misc_RNA (1)...(19): siRNA sense strand
gugcaaaugucaauuguca

SEQ ID NO: 1270830 - RNA, 19 nt, Homo sapiens
  misc_RNA (1)...(19): siRNA sense strand
gcaacuacuuuagaagaaa

SEQ ID NO: 1270831 - RNA, 19 nt, Homo sapiens
  misc_RNA (1)...(19): siRNA sense strand
ggaaucacaccuuuauuug

SEQ ID NO: 1270832 - RNA, 19 nt, Homo sapiens
  misc_RNA (1)...(19): siRNA sense strand
gcaguuaccuauucaugca

SEQ ID NO: 1270833 - RNA, 19 nt, Homo sapiens
  misc_RNA (1)...(19): siRNA sense strand
gcuacacccuuguucauug

SEQ ID NO: 1270834 - RNA, 19 nt, Homo sapiens
  misc_RNA (1)...(19): siRNA sense strand
gaagaaacgacaccauugu

SEQ ID NO: 1270835 - RNA, 19 nt, Homo sapiens
  misc_RNA (1)...(19): siRNA sense strand
gaaagcuugagcauacuua

SEQ ID NO: 1270836 - RNA, 19 nt, Homo sapiens
  misc_RNA (1)...(19): siRNA sense strand
uaucuucacuuuggaguuu

SEQ ID NO: 1270837 - RNA, 19 nt, Homo sapiens
  misc_RNA (1)...(19): siRNA sense strand
ggaaugccaggaugacuuu

SEQ ID NO: 1270838 - RNA, 19 nt, Homo sapiens
  misc_RNA (1)...(19): siRNA sense strand
acaugaagauugccuagaa

SEQ ID NO: 1270839 - RNA, 19 nt, Homo sapiens
  misc_RNA (1)...(19): siRNA sense strand
gaaauauuacuccggaaug

SEQ ID NO: 1270840 - RNA, 19 nt, Homo sapiens
  misc_RNA (1)...(19): siRNA sense strand
cccagaagccuacauaauu

SEQ ID NO: 1270841 - RNA, 19 nt, Homo sapiens
  misc_RNA (1)...(19): siRNA sense strand
gcaauuaaagcacaagcaa

SEQ ID NO: 1270842 - RNA, 19 nt, Homo sapiens
  misc_RNA (1)...(19): siRNA sense strand
acacugggcuaaacaaagu

SEQ ID NO: 1270843 - RNA, 19 nt, Homo sapiens
  misc_RNA (1)...(19): siRNA sense strand
ggacagauagauguguuaa

SEQ ID NO: 1270844 - RNA, 19 nt, Homo sapiens
  misc_RNA (1)...(19): siRNA sense strand
ugaggacaguuggcaguua

SEQ ID NO: 1270845 - RNA, 19 nt, Homo sapiens
  misc_RNA (1)...(19): siRNA sense strand
caggaugacuuuggaauca

SEQ ID NO: 1270846 - RNA, 19 nt, Homo sapiens
  misc_RNA (1)...(19): siRNA sense strand
uggaaucacaccuuuauuu

SEQ ID NO: 1270847 - RNA, 19 nt, Homo sapiens
  misc_RNA (1)...(19): siRNA sense strand
ggauucaguucuccugugu

SEQ ID NO: 1270848 - RNA, 19 nt, Homo sapiens
  misc_RNA (1)...(19): siRNA sense strand
ugaagauugccuagaaaua

SEQ ID NO: 1270849 - RNA, 19 nt, Homo sapiens
  misc_RNA (1)...(19): siRNA sense strand
caugaagauugccuagaaa

SEQ ID NO: 1270850 - RNA, 19 nt, Homo sapiens
  misc_RNA (1)...(19): siRNA sense strand
gaacgucuacggucugaca

SEQ ID NO: 1270851 - RNA, 19 nt, Homo sapiens
  misc_RNA (1)...(19): siRNA sense strand
gaaucacaccuuuauuugu

SEQ ID NO: 1270852 - RNA, 19 nt, Homo sapiens
  misc_RNA (1)...(19): siRNA sense strand
guucauugcugcucaagag

SEQ ID NO: 1270853 - RNA, 19 nt, Homo sapiens
  misc_RNA (1)...(19): siRNA sense strand
gcaaaugucaauugucaag

SEQ ID NO: 1270854 - RNA, 19 nt, Homo sapiens
  misc_RNA (1)...(19): siRNA sense strand
gcaucucgcugcaagucaa

SEQ ID NO: 1270855 - RNA, 19 nt, Homo sapiens
  misc_RNA (1)...(19): siRNA sense strand
ugacccaucuuugucguuu

SEQ ID NO: 1270856 - RNA, 19 nt, Homo sapiens
  misc_RNA (1)...(19): siRNA sense strand
acauuaagaugaagaccuu

SEQ ID NO: 1270857 - RNA, 19 nt, Homo sapiens
  misc_RNA (1)...(19): siRNA sense strand
ggauuugacccacugauuc

SEQ ID NO: 1270858 - RNA, 19 nt, Homo sapiens
  misc_RNA (1)...(19): siRNA sense strand
uagaagaaacgacaccauu

SEQ ID NO: 1270859 - RNA, 19 nt, Homo sapiens
  misc_RNA (1)...(19): siRNA sense strand
gcuagaaagcuugagcaua

SEQ ID NO: 1270860 - RNA, 19 nt, Homo sapiens
  misc_RNA (1)...(19): siRNA sense strand
acagauagauguguuaagg

SEQ ID NO: 1270861 - RNA, 19 nt, Homo sapiens
  misc_RNA (1)...(19): siRNA sense strand
gaaaauggacagauagaug

SEQ ID NO: 1270862 - RNA, 19 nt, Homo sapiens
  misc_RNA (1)...(19): siRNA sense strand
aaauauggagcccagauaa

SEQ ID NO: 1270863 - RNA, 19 nt, Homo sapiens
  misc_RNA (1)...(19): siRNA sense strand
gaacuucauuuggcauacu

SEQ ID NO: 1270864 - RNA, 19 nt, Homo sapiens
  misc_RNA (1)...(19): siRNA sense strand
gaacuggcagcuauucaag

SEQ ID NO: 1270865 - RNA, 19 nt, Homo sapiens
  misc_RNA (1)...(19): siRNA sense strand
gaggauguaugaaguucca

SEQ ID NO: 1270866 - RNA, 19 nt, Homo sapiens
  misc_RNA (1)...(19): siRNA sense strand
gaggacaguuggcaguuac

SEQ ID NO: 1270867 - RNA, 19 nt, Homo sapiens
  misc_RNA (1)...(19): siRNA sense strand
cuuuggaguuuacuaauug

SEQ ID NO: 1270868 - RNA, 19 nt, Homo sapiens
  misc_RNA (1)...(19): siRNA sense strand
ucacuuuggaguuuacuaa

SEQ ID NO: 1270869 - RNA, 19 nt, Homo sapiens
  misc_RNA (1)...(19): siRNA sense strand
ggaugacuuuggaaucaca

SEQ ID NO: 1270870 - RNA, 19 nt, Homo sapiens
  misc_RNA (1)...(19): siRNA sense strand
gcauugacacccuuaucuu

SEQ ID NO: 1270871 - RNA, 19 nt, Homo sapiens
  misc_RNA (1)...(19): siRNA sense strand
gaagguuucugugcuuugc

SEQ ID NO: 1270872 - RNA, 19 nt, Homo sapiens
  misc_RNA (1)...(19): siRNA sense strand
gcaagucaaggacauugga

SEQ ID NO: 1270873 - RNA, 19 nt, Homo sapiens
  misc_RNA (1)...(19): siRNA sense strand
gaagacguucugaggaugu

SEQ ID NO: 1270874 - RNA, 19 nt, Homo sapiens
  misc_RNA (1)...(19): siRNA sense strand
ggucugacaguuauauuag

SEQ ID NO: 1270875 - RNA, 19 nt, Homo sapiens
  misc_RNA (1)...(19): siRNA sense strand
caacuacuuuagaagaaac

SEQ ID NO: 1270876 - RNA, 19 nt, Homo sapiens
  misc_RNA (1)...(19): siRNA sense strand
ggaaauucgguccagucua

SEQ ID NO: 1270877 - RNA, 19 nt, Homo sapiens
  misc_RNA (1)...(19): siRNA sense strand
cucaaacgcuuggauucua

SEQ ID NO: 1270878 - RNA, 19 nt, Homo sapiens
  misc_RNA (1)...(19): siRNA sense strand
caauuaaagcacaagcaaa

SEQ ID NO: 1270879 - RNA, 19 nt, Homo sapiens
  misc_RNA (1)...(19): siRNA sense strand
gacugugaguucuuuggaa

SEQ ID NO: 1270880 - RNA, 19 nt, Homo sapiens
  misc_RNA (1)...(19): siRNA sense strand
agaagaaacgacaccauug

SEQ ID NO: 1270881 - RNA, 19 nt, Homo sapiens
  misc_RNA (1)...(19): siRNA sense strand
uguuaaggcuguugcuuca

SEQ ID NO: 1270882 - RNA, 19 nt, Homo sapiens
  misc_RNA (1)...(19): siRNA sense strand
acacggagcaaauguuaau

SEQ ID NO: 1270883 - RNA, 19 nt, Homo sapiens
  misc_RNA (1)...(19): siRNA sense strand
cggagcaaauguuaaugga

SEQ ID NO: 1270884 - RNA, 19 nt, Homo sapiens
  misc_RNA (1)...(19): siRNA sense strand
ugugaguucuuuggaauug

SEQ ID NO: 1270885 - RNA, 19 nt, Homo sapiens
  misc_RNA (1)...(19): siRNA sense strand
ggacugugaguucuuugga

SEQ ID NO: 1270886 - RNA, 19 nt, Homo sapiens
  misc_RNA (1)...(19): siRNA sense strand
acaaaguaagcccuguuua

SEQ ID NO: 1270887 - RNA, 19 nt, Homo sapiens
  misc_RNA (1)...(19): siRNA sense strand
ugcaacuacuuuagaagaa

SEQ ID NO: 1270888 - RNA, 19 nt, Homo sapiens
  misc_RNA (1)...(19): siRNA sense strand
caccagcuguugaaaggau

SEQ ID NO: 1270889 - RNA, 19 nt, Homo sapiens
  misc_RNA (1)...(19): siRNA sense strand
gagcccagauaaaugaacu

SEQ ID NO: 1270890 - RNA, 19 nt, Homo sapiens
  misc_RNA (1)...(19): siRNA sense strand
gggugcaaaugucaauugu

SEQ ID NO: 1270891 - RNA, 19 nt, Homo sapiens
  misc_RNA (1)...(19): siRNA sense strand
aaacaaggaaugccaggau

SEQ ID NO: 1270892 - RNA, 19 nt, Homo sapiens
  misc_RNA (1)...(19): siRNA sense strand
caaaauauaaggagugguu

SEQ ID NO: 1270893 - RNA, 19 nt, Homo sapiens
  misc_RNA (1)...(19): siRNA sense strand
uucgauauuucgcuacuuu

SEQ ID NO: 1270894 - RNA, 19 nt, Homo sapiens
  misc_RNA (1)...(19): siRNA sense strand
gaaaaggagcaaacaagga

SEQ ID NO: 1270895 - RNA, 19 nt, Homo sapiens
  misc_RNA (1)...(19): siRNA sense strand
ugagcauacuuauuucauc

SEQ ID NO: 1270896 - RNA, 19 nt, Homo sapiens
  misc_RNA (1)...(19): siRNA sense strand
ugaguucuuuggaauugug

SEQ ID NO: 1270897 - RNA, 19 nt, Homo sapiens
  misc_RNA (1)...(19): siRNA sense strand
ucuacggucugacaguuau

SEQ ID NO: 1270898 - RNA, 19 nt, Homo sapiens
  misc_RNA (1)...(19): siRNA sense strand
ucaaacgcuuggauucuac

SEQ ID NO: 1270899 - RNA, 19 nt, Homo sapiens
  misc_RNA (1)...(19): siRNA sense strand
cgagaaguuuucgauauuu

SEQ ID NO: 1270900 - RNA, 19 nt, Homo sapiens
  misc_RNA (1)...(19): siRNA sense strand
gcuugagcauacuuauuuc

SEQ ID NO: 1270901 - RNA, 19 nt, Homo sapiens
  misc_RNA (1)...(19): siRNA sense strand
cgucuacggucugacaguu

SEQ ID NO: 1270902 - RNA, 19 nt, Homo sapiens
  misc_RNA (1)...(19): siRNA sense strand
gauccuaaugcaacuacuu

SEQ ID NO: 1270903 - RNA, 19 nt, Homo sapiens
  misc_RNA (1)...(19): siRNA sense strand
gauucuacagcaacauauu

SEQ ID NO: 1270904 - RNA, 19 nt, Homo sapiens
  misc_RNA (1)...(19): siRNA sense strand
acacccuuaucuucacuuu

SEQ ID NO: 1270905 - RNA, 19 nt, Homo sapiens
  misc_RNA (1)...(19): siRNA sense strand
uaagaugaagaccuuugaa

SEQ ID NO: 1270906 - RNA, 19 nt, Homo sapiens
  misc_RNA (1)...(19): siRNA sense strand
gauguaugaaguuccagaa

SEQ ID NO: 1270907 - RNA, 19 nt, Homo sapiens
  misc_RNA (1)...(19): siRNA sense strand
cggucugacaguuauauua

SEQ ID NO: 1270908 - RNA, 19 nt, Homo sapiens
  misc_RNA (1)...(19): siRNA sense strand
acccuuaucuucacuuugg

SEQ ID NO: 1270909 - RNA, 19 nt, Homo sapiens
  misc_RNA (1)...(19): siRNA sense strand
aaauauuacuccggaaugg

SEQ ID NO: 1270910 - RNA, 19 nt, Homo sapiens
  misc_RNA (1)...(19): siRNA sense strand
caguauggcaagcuagaaa

SEQ ID NO: 1270911 - RNA, 19 nt, Homo sapiens
  misc_RNA (1)...(19): siRNA sense strand
cagaagccuacauaauuau

SEQ ID NO: 1270912 - RNA, 19 nt, Homo sapiens
  misc_RNA (1)...(19): siRNA sense strand
agcuugagcauacuuauuu

SEQ ID NO: 1270913 - RNA, 19 nt, Homo sapiens
  misc_RNA (1)...(19): siRNA sense strand
ugacacugggcuaaacaaa

SEQ ID NO: 1270914 - RNA, 19 nt, Homo sapiens
  misc_RNA (1)...(19): siRNA sense strand
acaguuggcaguuaccuau

SEQ ID NO: 1270915 - RNA, 19 nt, Homo sapiens
  misc_RNA (1)...(19): siRNA sense strand
gacuuguuaauaccacuua

SEQ ID NO: 1270916 - RNA, 19 nt, Homo sapiens
  misc_RNA (1)...(19): siRNA sense strand
acuggcagcuauucaagau

SEQ ID NO: 1270917 - RNA, 19 nt, Homo sapiens
  misc_RNA (1)...(19): siRNA sense strand
guucugaggauguaugaag

SEQ ID NO: 1270918 - RNA, 19 nt, Homo sapiens
  misc_RNA (1)...(19): siRNA sense strand
gagaaguuuucgauauuuc

SEQ ID NO: 1270919 - RNA, 19 nt, Homo sapiens
  misc_RNA (1)...(19): siRNA sense strand
aagaaacgacaccauuguu

SEQ ID NO: 1270920 - RNA, 19 nt, Homo sapiens
  misc_RNA (1)...(19): siRNA sense strand
aauauggagcccagauaaa

SEQ ID NO: 1270921 - RNA, 19 nt, Homo sapiens
  misc_RNA (1)...(19): siRNA sense strand
uggauucuacagcaacaua

SEQ ID NO: 1270922 - RNA, 19 nt, Homo sapiens
  misc_RNA (1)...(19): siRNA sense strand
augaagacguucugaggau

SEQ ID NO: 1270923 - RNA, 19 nt, Homo sapiens
  misc_RNA (1)...(19): siRNA sense strand
gaaauucgguccagucuaa

SEQ ID NO: 1270924 - RNA, 19 nt, Homo sapiens
  misc_RNA (1)...(19): siRNA sense strand
ccagaagccuacauaauua

SEQ ID NO: 1270925 - RNA, 19 nt, Homo sapiens
  misc_RNA (1)...(19): siRNA sense strand
gaggaaagguugcucauug

SEQ ID NO: 1270926 - RNA, 19 nt, Homo sapiens
  misc_RNA (1)...(19): siRNA sense strand
gaagauugccuagaaauau

SEQ ID NO: 1270927 - RNA, 19 nt, Homo sapiens
  misc_RNA (1)...(19): siRNA sense strand
cuagaaagcuugagcauac

SEQ ID NO: 1270928 - RNA, 19 nt, Homo sapiens
  misc_RNA (1)...(19): siRNA sense strand
gaaauauggagcccagaua

SEQ ID NO: 1270929 - RNA, 19 nt, Homo sapiens
  misc_RNA (1)...(19): siRNA sense strand
gugcaaaugucaauuguca

SEQ ID NO: 1270930 - RNA, 19 nt, Homo sapiens
  misc_RNA (1)...(19): siRNA sense strand
gcaacuacuuuagaagaaa

SEQ ID NO: 1270931 - RNA, 19 nt, Homo sapiens
  misc_RNA (1)...(19): siRNA sense strand
ggaaucacaccuuuauuug

SEQ ID NO: 1270932 - RNA, 19 nt, Homo sapiens
  misc_RNA (1)...(19): siRNA sense strand
gcaguuaccuauucaugca

SEQ ID NO: 1270933 - RNA, 19 nt, Homo sapiens
  misc_RNA (1)...(19): siRNA sense strand
gcuacacccuuguucauug

SEQ ID NO: 1270934 - RNA, 19 nt, Homo sapiens
  misc_RNA (1)...(19): siRNA sense strand
gaagaaacgacaccauugu

SEQ ID NO: 1270935 - RNA, 19 nt, Homo sapiens
  misc_RNA (1)...(19): siRNA sense strand
gaaagcuugagcauacuua

SEQ ID NO: 1270936 - RNA, 19 nt, Homo sapiens
  misc_RNA (1)...(19): siRNA sense strand
uaucuucacuuuggaguuu

SEQ ID NO: 1270937 - RNA, 19 nt, Homo sapiens
  misc_RNA (1)...(19): siRNA sense strand
ggaaugccaggaugacuuu

SEQ ID NO: 1270938 - RNA, 19 nt, Homo sapiens
  misc_RNA (1)...(19): siRNA sense strand
acaugaagauugccuagaa

SEQ ID NO: 1270939 - RNA, 19 nt, Homo sapiens
  misc_RNA (1)...(19): siRNA sense strand
gaaauauuacuccggaaug

SEQ ID NO: 1270940 - RNA, 19 nt, Homo sapiens
  misc_RNA (1)...(19): siRNA sense strand
cccagaagccuacauaauu

SEQ ID NO: 1270941 - RNA, 19 nt, Homo sapiens
  misc_RNA (1)...(19): siRNA sense strand
gcaauuaaagcacaagcaa

SEQ ID NO: 1270942 - RNA, 19 nt, Homo sapiens
  misc_RNA (1)...(19): siRNA sense strand
acacugggcuaaacaaagu

SEQ ID NO: 1270943 - RNA, 19 nt, Homo sapiens
  misc_RNA (1)...(19): siRNA sense strand
ggacagauagauguguuaa

SEQ ID NO: 1270944 - RNA, 19 nt, Homo sapiens
  misc_RNA (1)...(19): siRNA sense strand
ugaggacaguuggcaguua

SEQ ID NO: 1270945 - RNA, 19 nt, Homo sapiens
  misc_RNA (1)...(19): siRNA sense strand
caggaugacuuuggaauca

SEQ ID NO: 1270946 - RNA, 19 nt, Homo sapiens
  misc_RNA (1)...(19): siRNA sense strand
uggaaucacaccuuuauuu

SEQ ID NO: 1270947 - RNA, 19 nt, Homo sapiens
  misc_RNA (1)...(19): siRNA sense strand
ggauucaguucuccugugu

SEQ ID NO: 1270948 - RNA, 19 nt, Homo sapiens
  misc_RNA (1)...(19): siRNA sense strand
ugaagauugccuagaaaua

SEQ ID NO: 1270949 - RNA, 19 nt, Homo sapiens
  misc_RNA (1)...(19): siRNA sense strand
caugaagauugccuagaaa

SEQ ID NO: 1270950 - RNA, 19 nt, Homo sapiens
  misc_RNA (1)...(19): siRNA sense strand
gaacgucuacggucugaca

SEQ ID NO: 1270951 - RNA, 19 nt, Homo sapiens
  misc_RNA (1)...(19): siRNA sense strand
gaaucacaccuuuauuugu

SEQ ID NO: 1270952 - RNA, 19 nt, Homo sapiens
  misc_RNA (1)...(19): siRNA sense strand
guucauugcugcucaagag

SEQ ID NO: 1270953 - RNA, 19 nt, Homo sapiens
  misc_RNA (1)...(19): siRNA sense strand
gcaaaugucaauugucaag

SEQ ID NO: 1270954 - RNA, 19 nt, Homo sapiens
  misc_RNA (1)...(19): siRNA sense strand
gcaucucgcugcaagucaa

SEQ ID NO: 1270955 - RNA, 19 nt, Homo sapiens
  misc_RNA (1)...(19): siRNA sense strand
ugacccaucuuugucguuu

SEQ ID NO: 1270956 - RNA, 19 nt, Homo sapiens
  misc_RNA (1)...(19): siRNA sense strand
ggauuugacccacugauuc

SEQ ID NO: 1270957 - RNA, 19 nt, Homo sapiens
  misc_RNA (1)...(19): siRNA sense strand
uagaagaaacgacaccauu

SEQ ID NO: 1270958 - RNA, 19 nt, Homo sapiens
  misc_RNA (1)...(19): siRNA sense strand
gcuagaaagcuugagcaua

SEQ ID NO: 1270959 - RNA, 19 nt, Homo sapiens
  misc_RNA (1)...(19): siRNA sense strand
acagauagauguguuaagg

SEQ ID NO: 1270960 - RNA, 19 nt, Homo sapiens
  misc_RNA (1)...(19): siRNA sense strand
gaaaauggacagauagaug

SEQ ID NO: 1270961 - RNA, 19 nt, Homo sapiens
  misc_RNA (1)...(19): siRNA sense strand
aaauauggagcccagauaa

SEQ ID NO: 1270962 - RNA, 19 nt, Homo sapiens
  misc_RNA (1)...(19): siRNA sense strand
gaacuucauuuggcauacu

SEQ ID NO: 1270963 - RNA, 19 nt, Homo sapiens
  misc_RNA (1)...(19): siRNA sense strand
gaacuggcagcuauucaag

SEQ ID NO: 1270964 - RNA, 19 nt, Homo sapiens
  misc_RNA (1)...(19): siRNA sense strand
gaggauguaugaaguucca

SEQ ID NO: 1270965 - RNA, 19 nt, Homo sapiens
  misc_RNA (1)...(19): siRNA sense strand
gaggacaguuggcaguuac

SEQ ID NO: 1270966 - RNA, 19 nt, Homo sapiens
  misc_RNA (1)...(19): siRNA sense strand
cuuuggaguuuacuaauug

SEQ ID NO: 1270967 - RNA, 19 nt, Homo sapiens
  misc_RNA (1)...(19): siRNA sense strand
ucacuuuggaguuuacuaa

SEQ ID NO: 1270968 - RNA, 19 nt, Homo sapiens
  misc_RNA (1)...(19): siRNA sense strand
ggaugacuuuggaaucaca

SEQ ID NO: 1270969 - RNA, 19 nt, Homo sapiens
  misc_RNA (1)...(19): siRNA sense strand
gcauugacacccuuaucuu

SEQ ID NO: 1270970 - RNA, 19 nt, Homo sapiens
  misc_RNA (1)...(19): siRNA sense strand
gaagguuucugugcuuugc

SEQ ID NO: 1270971 - RNA, 19 nt, Homo sapiens
  misc_RNA (1)...(19): siRNA sense strand
gcaagucaaggacauugga

SEQ ID NO: 1270972 - RNA, 19 nt, Homo sapiens
  misc_RNA (1)...(19): siRNA sense strand
gaagacguucugaggaugu

SEQ ID NO: 1270973 - RNA, 19 nt, Homo sapiens
  misc_RNA (1)...(19): siRNA sense strand
ggucugacaguuauauuag

SEQ ID NO: 1270974 - RNA, 19 nt, Homo sapiens
  misc_RNA (1)...(19): siRNA sense strand
agaagaaacgacaccauug

SEQ ID NO: 1270975 - RNA, 19 nt, Homo sapiens
  misc_RNA (1)...(19): siRNA sense strand
ggaaauucgguccagucua

SEQ ID NO: 1270976 - RNA, 19 nt, Homo sapiens
  misc_RNA (1)...(19): siRNA sense strand
caacuacuuuagaagaaac

SEQ ID NO: 1270977 - RNA, 19 nt, Homo sapiens
  misc_RNA (1)...(19): siRNA sense strand
cucaaacgcuuggauucua

SEQ ID NO: 1270978 - RNA, 19 nt, Homo sapiens
  misc_RNA (1)...(19): siRNA sense strand
caauuaaagcacaagcaaa

SEQ ID NO: 1270979 - RNA, 19 nt, Homo sapiens
  misc_RNA (1)...(19): siRNA sense strand
gacugugaguucuuuggaa

SEQ ID NO: 1270980 - RNA, 19 nt, Homo sapiens
  misc_RNA (1)...(19): siRNA sense strand
uguuaaggcuguugcuuca

SEQ ID NO: 1270981 - RNA, 19 nt, Homo sapiens
  misc_RNA (1)...(19): siRNA sense strand
acacggagcaaauguuaau

SEQ ID NO: 1270982 - RNA, 19 nt, Homo sapiens
  misc_RNA (1)...(19): siRNA sense strand
cggagcaaauguuaaugga

SEQ ID NO: 1270983 - RNA, 19 nt, Homo sapiens
  misc_RNA (1)...(19): siRNA sense strand
ugugaguucuuuggaauug

SEQ ID NO: 1270984 - RNA, 19 nt, Homo sapiens
  misc_RNA (1)...(19): siRNA sense strand
ggacugugaguucuuugga

SEQ ID NO: 1270985 - RNA, 19 nt, Homo sapiens
  misc_RNA (1)...(19): siRNA sense strand
acaaaguaagcccuguuua

SEQ ID NO: 1270986 - RNA, 19 nt, Homo sapiens
  misc_RNA (1)...(19): siRNA sense strand
gggugcaaaugucaauugu

SEQ ID NO: 1270987 - RNA, 19 nt, Homo sapiens
  misc_RNA (1)...(19): siRNA sense strand
ugcaacuacuuuagaagaa

SEQ ID NO: 1270988 - RNA, 19 nt, Homo sapiens
  misc_RNA (1)...(19): siRNA sense strand
caccagcuguugaaaggau

SEQ ID NO: 1270989 - RNA, 19 nt, Homo sapiens
  misc_RNA (1)...(19): siRNA sense strand
gagcccagauaaaugaacu

SEQ ID NO: 1270990 - RNA, 19 nt, Homo sapiens
  misc_RNA (1)...(19): siRNA sense strand
aaacaaggaaugccaggau

SEQ ID NO: 1270991 - RNA, 19 nt, Homo sapiens
  misc_RNA (1)...(19): siRNA sense strand
caaaauauaaggagugguu

SEQ ID NO: 1270992 - RNA, 19 nt, Homo sapiens
  misc_RNA (1)...(19): siRNA sense strand
uucgauauuucgcuacuuu

SEQ ID NO: 1270993 - RNA, 19 nt, Homo sapiens
  misc_RNA (1)...(19): siRNA sense strand
gaaaaggagcaaacaagga

SEQ ID NO: 1270994 - RNA, 19 nt, Homo sapiens
  misc_RNA (1)...(19): siRNA sense strand
ugagcauacuuauuucauc

SEQ ID NO: 1270995 - RNA, 19 nt, Homo sapiens
  misc_RNA (1)...(19): siRNA sense strand
ugaguucuuuggaauugug

SEQ ID NO: 1270996 - RNA, 19 nt, Homo sapiens
  misc_RNA (1)...(19): siRNA sense strand
ucuacggucugacaguuau

SEQ ID NO: 1270997 - RNA, 19 nt, Homo sapiens
  misc_RNA (1)...(19): siRNA sense strand
ucaaacgcuuggauucuac

SEQ ID NO: 1270998 - RNA, 19 nt, Homo sapiens
  misc_RNA (1)...(19): siRNA sense strand
cgagaaguuuucgauauuu

SEQ ID NO: 1270999 - RNA, 19 nt, Homo sapiens
  misc_RNA (1)...(19): siRNA sense strand
gcuugagcauacuuauuuc

SEQ ID NO: 1271000 - RNA, 19 nt, Homo sapiens
  misc_RNA (1)...(19): siRNA sense strand
cgucuacggucugacaguu

SEQ ID NO: 1271001 - RNA, 19 nt, Homo sapiens
  misc_RNA (1)...(19): siRNA sense strand
gauucuacagcaacauauu

SEQ ID NO: 1271002 - RNA, 19 nt, Homo sapiens
  misc_RNA (1)...(19): siRNA sense strand
acacccuuaucuucacuuu

SEQ ID NO: 1271003 - RNA, 19 nt, Homo sapiens
  misc_RNA (1)...(19): siRNA sense strand
gauccuaaugcaacuacuu

SEQ ID NO: 1271004 - RNA, 19 nt, Homo sapiens
  misc_RNA (1)...(19): siRNA sense strand
aaauauuacuccggaaugg

SEQ ID NO: 1271005 - RNA, 19 nt, Homo sapiens
  misc_RNA (1)...(19): siRNA sense strand
gauguaugaaguuccagaa

SEQ ID NO: 1271006 - RNA, 19 nt, Homo sapiens
  misc_RNA (1)...(19): siRNA sense strand
cggucugacaguuauauua

SEQ ID NO: 1271007 - RNA, 19 nt, Homo sapiens
  misc_RNA (1)...(19): siRNA sense strand
acccuuaucuucacuuugg

SEQ ID NO: 1271008 - RNA, 19 nt, Homo sapiens
  misc_RNA (1)...(19): siRNA sense strand
caguauggcaagcuagaaa

SEQ ID NO: 1271009 - RNA, 19 nt, Homo sapiens
  misc_RNA (1)...(19): siRNA sense strand
cagaagccuacauaauuau

SEQ ID NO: 1271010 - RNA, 19 nt, Homo sapiens
  misc_RNA (1)...(19): siRNA sense strand
agcuugagcauacuuauuu

SEQ ID NO: 1271011 - RNA, 19 nt, Homo sapiens
  misc_RNA (1)...(19): siRNA sense strand
ugacacugggcuaaacaaa

SEQ ID NO: 1271012 - RNA, 19 nt, Homo sapiens
  misc_RNA (1)...(19): siRNA sense strand
acaguuggcaguuaccuau

SEQ ID NO: 1271013 - RNA, 19 nt, Homo sapiens
  misc_RNA (1)...(19): siRNA sense strand
gacuuguuaauaccacuua

SEQ ID NO: 1271014 - RNA, 19 nt, Homo sapiens
  misc_RNA (1)...(19): siRNA sense strand
acuggcagcuauucaagau

SEQ ID NO: 1271015 - RNA, 19 nt, Homo sapiens
  misc_RNA (1)...(19): siRNA sense strand
guucugaggauguaugaag

SEQ ID NO: 1271016 - RNA, 19 nt, Homo sapiens
  misc_RNA (1)...(19): siRNA sense strand
aagaaacgacaccauuguu

SEQ ID NO: 1271017 - RNA, 19 nt, Homo sapiens
  misc_RNA (1)...(19): siRNA sense strand
gagaaguuuucgauauuuc

SEQ ID NO: 1271018 - RNA, 19 nt, Homo sapiens
  misc_RNA (1)...(19): siRNA sense strand
aauauggagcccagauaaa

SEQ ID NO: 1271019 - RNA, 19 nt, Homo sapiens
  misc_RNA (1)...(19): siRNA sense strand
guuggcaguuaccuauuca

SEQ ID NO: 1271020 - RNA, 19 nt, Homo sapiens
  misc_RNA (1)...(19): siRNA sense strand
augaagacguucugaggau

SEQ ID NO: 1271021 - RNA, 19 nt, Homo sapiens
  misc_RNA (1)...(19): siRNA sense strand
uggauucuacagcaacaua

SEQ ID NO: 1271022 - RNA, 19 nt, Homo sapiens
  misc_RNA (1)...(19): siRNA sense strand
gauuugacccacugauucu

SEQ ID NO: 1271023 - RNA, 19 nt, Homo sapiens
  misc_RNA (1)...(19): siRNA sense strand
gaacaaagcccggaagaag

SEQ ID NO: 1271024 - RNA, 19 nt, Homo sapiens
  misc_RNA (1)...(19): siRNA sense strand
ccaacaagcuggcggagaa

SEQ ID NO: 1271025 - RNA, 19 nt, Homo sapiens
  misc_RNA (1)...(19): siRNA sense strand
ugaagaagcgggagaagua

SEQ ID NO: 1271026 - RNA, 19 nt, Homo sapiens
  misc_RNA (1)...(19): siRNA sense strand
caacgaaggugauggugau

SEQ ID NO: 1271027 - RNA, 19 nt, Homo sapiens
  misc_RNA (1)...(19): siRNA sense strand
cagcagaccucagucauug

SEQ ID NO: 1271028 - RNA, 19 nt, Homo sapiens
  misc_RNA (1)...(19): siRNA sense strand
gaaggaaggagauuacguu

SEQ ID NO: 1271029 - RNA, 19 nt, Homo sapiens
  misc_RNA (1)...(19): siRNA sense strand
ccuugaagcuggaggauaa

SEQ ID NO: 1271030 - RNA, 19 nt, Homo sapiens
  misc_RNA (1)...(19): siRNA sense strand
gagcuuggcugacuuuagg

SEQ ID NO: 1271031 - RNA, 19 nt, Homo sapiens
  misc_RNA (1)...(19): siRNA sense strand
acaauaagcccaacuacaa

SEQ ID NO: 1271032 - RNA, 19 nt, Homo sapiens
  misc_RNA (1)...(19): siRNA sense strand
ucaacaaguuccgugaaua

SEQ ID NO: 1271033 - RNA, 19 nt, Homo sapiens
  misc_RNA (1)...(19): siRNA sense strand
ggaacacuguagagcguuu

SEQ ID NO: 1271034 - RNA, 19 nt, Homo sapiens
  misc_RNA (1)...(19): siRNA sense strand
uaucaaagacaucagguuu

SEQ ID NO: 1271035 - RNA, 19 nt, Homo sapiens
  misc_RNA (1)...(19): siRNA sense strand
ccaagcgccuggccauuau

SEQ ID NO: 1271036 - RNA, 19 nt, Homo sapiens
  misc_RNA (1)...(19): siRNA sense strand
cgaaggugauggugaugaa

SEQ ID NO: 1271037 - RNA, 19 nt, Homo sapiens
  misc_RNA (1)...(19): siRNA sense strand
gaagaagaaguaugaacga

SEQ ID NO: 1271038 - RNA, 19 nt, Homo sapiens
  misc_RNA (1)...(19): siRNA sense strand
cgacagacguggacuacag

SEQ ID NO: 1271039 - RNA, 19 nt, Homo sapiens
  misc_RNA (1)...(19): siRNA sense strand
ccauuaugaugaugaagaa

SEQ ID NO: 1271040 - RNA, 19 nt, Homo sapiens
  misc_RNA (1)...(19): siRNA sense strand
caaguuccgugaauacaag

SEQ ID NO: 1271041 - RNA, 19 nt, Homo sapiens
  misc_RNA (1)...(19): siRNA sense strand
caauaagcccaacuacaaa

SEQ ID NO: 1271042 - RNA, 19 nt, Homo sapiens
  misc_RNA (1)...(19): siRNA sense strand
aaacacaagaagaagguua

SEQ ID NO: 1271043 - RNA, 19 nt, Homo sapiens
  misc_RNA (1)...(19): siRNA sense strand
gcagcagaccucagucauu

SEQ ID NO: 1271044 - RNA, 19 nt, Homo sapiens
  misc_RNA (1)...(19): siRNA sense strand
ucaaaggcauuuacuacca

SEQ ID NO: 1271045 - RNA, 19 nt, Homo sapiens
  misc_RNA (1)...(19): siRNA sense strand
gcccuggccuucaucauca

SEQ ID NO: 1271046 - RNA, 19 nt, Homo sapiens
  misc_RNA (1)...(19): siRNA sense strand
ucaaagacaucagguuucu

SEQ ID NO: 1271047 - RNA, 19 nt, Homo sapiens
  misc_RNA (1)...(19): siRNA sense strand
ggaagaagcccagggugau

SEQ ID NO: 1271048 - RNA, 19 nt, Homo sapiens
  misc_RNA (1)...(19): siRNA sense strand
gcggugaggucugagaaga

SEQ ID NO: 1271049 - RNA, 19 nt, Homo sapiens
  misc_RNA (1)...(19): siRNA sense strand
gaacccaaacacaagaaga

SEQ ID NO: 1271050 - RNA, 19 nt, Homo sapiens
  misc_RNA (1)...(19): siRNA sense strand
gaguucaugcacuacauua

SEQ ID NO: 1271051 - RNA, 19 nt, Homo sapiens
  misc_RNA (1)...(19): siRNA sense strand
acaagaagaagguuaacaa

SEQ ID NO: 1271052 - RNA, 19 nt, Homo sapiens
  misc_RNA (1)...(19): siRNA sense strand
cagaagaggaggaggaaga

SEQ ID NO: 1271053 - RNA, 19 nt, Homo sapiens
  misc_RNA (1)...(19): siRNA sense strand
gaacacuguagagcguuua

SEQ ID NO: 1271054 - RNA, 19 nt, Homo sapiens
  misc_RNA (1)...(19): siRNA sense strand
caacaaguuccgugaauac

SEQ ID NO: 1271055 - RNA, 19 nt, Homo sapiens
  misc_RNA (1)...(19): siRNA sense strand
ccacaccuuucacccuuug

SEQ ID NO: 1271056 - RNA, 19 nt, Homo sapiens
  misc_RNA (1)...(19): siRNA sense strand
ggaacaaagcccggaagaa

SEQ ID NO: 1271057 - RNA, 19 nt, Homo sapiens
  misc_RNA (1)...(19): siRNA sense strand
gcccgaacguuuuaccuua

SEQ ID NO: 1271058 - RNA, 19 nt, Homo sapiens
  misc_RNA (1)...(19): siRNA sense strand
gaagaagcccagggugaug

SEQ ID NO: 1271059 - RNA, 19 nt, Homo sapiens
  misc_RNA (1)...(19): siRNA sense strand
ggaagaggacgacaacaac

SEQ ID NO: 1271060 - RNA, 19 nt, Homo sapiens
  misc_RNA (1)...(19): siRNA sense strand
ccgcaucacccaucagauu

SEQ ID NO: 1271061 - RNA, 19 nt, Homo sapiens
  misc_RNA (1)...(19): siRNA sense strand
gggaagagcgaguggaaca

SEQ ID NO: 1271062 - RNA, 19 nt, Homo sapiens
  misc_RNA (1)...(19): siRNA sense strand
caucaaaggcauuuacuac

SEQ ID NO: 1271063 - RNA, 19 nt, Homo sapiens
  misc_RNA (1)...(19): siRNA sense strand
gucaacaaguuccgugaau

SEQ ID NO: 1271064 - RNA, 19 nt, Homo sapiens
  misc_RNA (1)...(19): siRNA sense strand
gcagaggcugguucagaaa

SEQ ID NO: 1271065 - RNA, 19 nt, Homo sapiens
  misc_RNA (1)...(19): siRNA sense strand
ugcagaggcugguucagaa

SEQ ID NO: 1271066 - RNA, 19 nt, Homo sapiens
  misc_RNA (1)...(19): siRNA sense strand
cuacaucacccggaacaaa

SEQ ID NO: 1271067 - RNA, 19 nt, Homo sapiens
  misc_RNA (1)...(19): siRNA sense strand
gcggaaagcccacgaugag

SEQ ID NO: 1271068 - RNA, 19 nt, Homo sapiens
  misc_RNA (1)...(19): siRNA sense strand
gacaauaagcccaacuaca

SEQ ID NO: 1271069 - RNA, 19 nt, Homo sapiens
  misc_RNA (1)...(19): siRNA sense strand
caaacucgaccacaucauc

SEQ ID NO: 1271070 - RNA, 19 nt, Homo sapiens
  misc_RNA (1)...(19): siRNA sense strand
ggugaggucugagaagaag

SEQ ID NO: 1271071 - RNA, 19 nt, Homo sapiens
  misc_RNA (1)...(19): siRNA sense strand
ggaguucaugcacuacauu

SEQ ID NO: 1271072 - RNA, 19 nt, Homo sapiens
  misc_RNA (1)...(19): siRNA sense strand
caacaacgaaggugauggu

SEQ ID NO: 1271073 - RNA, 19 nt, Homo sapiens
  misc_RNA (1)...(19): siRNA sense strand
gccuugagaagaagaagua

SEQ ID NO: 1271074 - RNA, 19 nt, Homo sapiens
  misc_RNA (1)...(19): siRNA sense strand
uacagcagcccgaacguuu

SEQ ID NO: 1271075 - RNA, 19 nt, Homo sapiens
  misc_RNA (1)...(19): siRNA sense strand
gaggcucggccaccaacua

SEQ ID NO: 1271076 - RNA, 19 nt, Homo sapiens
  misc_RNA (1)...(19): siRNA sense strand
ccuaugccuucucccauga

SEQ ID NO: 1271077 - RNA, 19 nt, Homo sapiens
  misc_RNA (1)...(19): siRNA sense strand
gacgaugcccucuccaugu

SEQ ID NO: 1271078 - RNA, 19 nt, Homo sapiens
  misc_RNA (1)...(19): siRNA sense strand
uugagaagaagaaguauga

SEQ ID NO: 1271079 - RNA, 19 nt, Homo sapiens
  misc_RNA (1)...(19): siRNA sense strand
caagaagaagguuaacaag

SEQ ID NO: 1271080 - RNA, 19 nt, Homo sapiens
  misc_RNA (1)...(19): siRNA sense strand
uuugucaacuuccgccuuu

SEQ ID NO: 1271081 - RNA, 19 nt, Homo sapiens
  misc_RNA (1)...(19): siRNA sense strand
gcugggcuuugucaacuuc

SEQ ID NO: 1271082 - RNA, 19 nt, Homo sapiens
  misc_RNA (1)...(19): siRNA sense strand
ggaggaagaggacgacaac

SEQ ID NO: 1271083 - RNA, 19 nt, Homo sapiens
  misc_RNA (1)...(19): siRNA sense strand
guaccagaagaucauguuu

SEQ ID NO: 1271084 - RNA, 19 nt, Homo sapiens
  misc_RNA (1)...(19): siRNA sense strand
gccauuaugaugaugaaga

SEQ ID NO: 1271085 - RNA, 19 nt, Homo sapiens
  misc_RNA (1)...(19): siRNA sense strand
gagaagaagaaguaugaac

SEQ ID NO: 1271086 - RNA, 19 nt, Homo sapiens
  misc_RNA (1)...(19): siRNA sense strand
cgagaguuguauggagaaa

SEQ ID NO: 1271087 - RNA, 19 nt, Homo sapiens
  misc_RNA (1)...(19): siRNA sense strand
gcaaggucuuccuguccau

SEQ ID NO: 1271088 - RNA, 19 nt, Homo sapiens
  misc_RNA (1)...(19): siRNA sense strand
ggacaauaagcccaacuac

SEQ ID NO: 1271089 - RNA, 19 nt, Homo sapiens
  misc_RNA (1)...(19): siRNA sense strand
guucaugcacuacauuauc

SEQ ID NO: 1271090 - RNA, 19 nt, Homo sapiens
  misc_RNA (1)...(19): siRNA sense strand
gaaggcaaggccggaguga

SEQ ID NO: 1271091 - RNA, 19 nt, Homo sapiens
  misc_RNA (1)...(19): siRNA sense strand
ggacgacaacaacgaaggu

SEQ ID NO: 1271092 - RNA, 19 nt, Homo sapiens
  misc_RNA (1)...(19): siRNA sense strand
ccgagaaggaaggagauua

SEQ ID NO: 1271093 - RNA, 19 nt, Homo sapiens
  misc_RNA (1)...(19): siRNA sense strand
ccaaacacaagaagaaggu

SEQ ID NO: 1271094 - RNA, 19 nt, Homo sapiens
  misc_RNA (1)...(19): siRNA sense strand
ccacgaacccauugucaac

SEQ ID NO: 1271095 - RNA, 19 nt, Homo sapiens
  misc_RNA (1)...(19): siRNA sense strand
gcgccuggccauuaugaug

SEQ ID NO: 1271096 - RNA, 19 nt, Homo sapiens
  misc_RNA (1)...(19): siRNA sense strand
cgacaacaacgaaggugau

SEQ ID NO: 1271097 - RNA, 19 nt, Homo sapiens
  misc_RNA (1)...(19): siRNA sense strand
aggccgagguggaugaguu

SEQ ID NO: 1271098 - RNA, 19 nt, Homo sapiens
  misc_RNA (1)...(19): siRNA sense strand
cuacaaacucgaccacauc

SEQ ID NO: 1271099 - RNA, 19 nt, Homo sapiens
  misc_RNA (1)...(19): siRNA sense strand
aggcggcugugcauucuga

SEQ ID NO: 1271100 - RNA, 19 nt, Homo sapiens
  misc_RNA (1)...(19): siRNA sense strand
accagaagaucauguuugg

SEQ ID NO: 1271101 - RNA, 19 nt, Homo sapiens
  misc_RNA (1)...(19): siRNA sense strand
gcugagcuuggcugacuuu

SEQ ID NO: 1271102 - RNA, 19 nt, Homo sapiens
  misc_RNA (1)...(19): siRNA sense strand
ggccaccuaugacgucaca

SEQ ID NO: 1271103 - RNA, 19 nt, Homo sapiens
  misc_RNA (1)...(19): siRNA sense strand
gaugucagcgcaggaggaa

SEQ ID NO: 1271104 - RNA, 19 nt, Homo sapiens
  misc_RNA (1)...(19): siRNA sense strand
ccacgcugcugggcuuugu

SEQ ID NO: 1271105 - RNA, 19 nt, Homo sapiens
  misc_RNA (1)...(19): siRNA sense strand
ccaucaaaggcauuuacua

SEQ ID NO: 1271106 - RNA, 19 nt, Homo sapiens
  misc_RNA (1)...(19): siRNA sense strand
caucaucaaggaacgguau

SEQ ID NO: 1271107 - RNA, 19 nt, Homo sapiens
  misc_RNA (1)...(19): siRNA sense strand
cguuuuaccuuaucaaaga

SEQ ID NO: 1271108 - RNA, 19 nt, Homo sapiens
  misc_RNA (1)...(19): siRNA sense strand
ugucagcgcaggaggaaga

SEQ ID NO: 1271109 - RNA, 19 nt, Homo sapiens
  misc_RNA (1)...(19): siRNA sense strand
aagaucauguuuggcaaga

SEQ ID NO: 1271110 - RNA, 19 nt, Homo sapiens
  misc_RNA (1)...(19): siRNA sense strand
cgagaaggaaggagauuac

SEQ ID NO: 1271111 - RNA, 19 nt, Homo sapiens
  misc_RNA (1)...(19): siRNA sense strand
gucacagacucccgcauca

SEQ ID NO: 1271112 - RNA, 19 nt, Homo sapiens
  misc_RNA (1)...(19): siRNA sense strand
ccaccuaugacgucacaga

SEQ ID NO: 1271113 - RNA, 19 nt, Homo sapiens
  misc_RNA (1)...(19): siRNA sense strand
aaacucgaccacaucauca

SEQ ID NO: 1271114 - RNA, 19 nt, Homo sapiens
  misc_RNA (1)...(19): siRNA sense strand
cugagaagaaggccaagaa

SEQ ID NO: 1271115 - RNA, 19 nt, Homo sapiens
  misc_RNA (1)...(19): siRNA sense strand
uaccagaagaucauguuug

SEQ ID NO: 1271116 - RNA, 19 nt, Homo sapiens
  misc_RNA (1)...(19): siRNA sense strand
gaagaagcgggagaaguac

SEQ ID NO: 1271117 - RNA, 19 nt, Homo sapiens
  misc_RNA (1)...(19): siRNA sense strand
gaagaugcagaggcugguu

SEQ ID NO: 1271118 - RNA, 19 nt, Homo sapiens
  misc_RNA (1)...(19): siRNA sense strand
cuguagagcguuuaaagga

SEQ ID NO: 1271119 - RNA, 19 nt, Homo sapiens
  misc_RNA (1)...(19): siRNA sense strand
ggaggaggaggaagaugca

SEQ ID NO: 1271120 - RNA, 19 nt, Homo sapiens
  misc_RNA (1)...(19): siRNA sense strand
aggaagaggacgacaacaa

SEQ ID NO: 1271121 - RNA, 19 nt, Homo sapiens
  misc_RNA (1)...(19): siRNA sense strand
ggucuuccuguccaucaaa

SEQ ID NO: 1271122 - RNA, 19 nt, Homo sapiens
  misc_RNA (1)...(19): siRNA sense strand
cccaugaacccaaacacaa

SEQ ID NO: 1271123 - RNA, 19 nt, Homo sapiens
  misc_RNA (1)...(19): siRNA sense strand
gaaggacgagguagcucua

SEQ ID NO: 1271124 - RNA, 19 nt, Homo sapiens
  misc_RNA (1)...(19): siRNA sense strand
gaaggacgagguagcucua

SEQ ID NO: 1271125 - RNA, 19 nt, Homo sapiens
  misc_RNA (1)...(19): siRNA sense strand
gaacugcagcgaguacuuc

SEQ ID NO: 1271126 - RNA, 19 nt, Homo sapiens
  misc_RNA (1)...(19): siRNA sense strand
gccggcaucuucuuucaug

SEQ ID NO: 1271127 - RNA, 19 nt, Homo sapiens
  misc_RNA (1)...(19): siRNA sense strand
gcgaguacuucccgcuguu

SEQ ID NO: 1271128 - RNA, 19 nt, Homo sapiens
  misc_RNA (1)...(19): siRNA sense strand
cggcaucuucuuucaugaa

SEQ ID NO: 1271129 - RNA, 19 nt, Homo sapiens
  misc_RNA (1)...(19): siRNA sense strand
gaugaagccugccugauug

SEQ ID NO: 1271130 - RNA, 19 nt, Homo sapiens
  misc_RNA (1)...(19): siRNA sense strand
gaacagacgaguccaaguu

SEQ ID NO: 1271131 - RNA, 19 nt, Homo sapiens
  misc_RNA (1)...(19): siRNA sense strand
ugaaaugucucaagaauac

SEQ ID NO: 1271132 - RNA, 19 nt, Homo sapiens
  misc_RNA (1)...(19): siRNA sense strand
gcacaaacguggacauguc

SEQ ID NO: 1271133 - RNA, 19 nt, Homo sapiens
  misc_RNA (1)...(19): siRNA sense strand
cuacaaagcagaauucaaa

SEQ ID NO: 1271134 - RNA, 19 nt, Homo sapiens
  misc_RNA (1)...(19): siRNA sense strand
ggaagauucugcugaagau

SEQ ID NO: 1271135 - RNA, 19 nt, Homo sapiens
  misc_RNA (1)...(19): siRNA sense strand
gaagaucugugguggcaau

SEQ ID NO: 1271136 - RNA, 19 nt, Homo sapiens
  misc_RNA (1)...(19): siRNA sense strand
aaacagagccuacaaagca

SEQ ID NO: 1271137 - RNA, 19 nt, Homo sapiens
  misc_RNA (1)...(19): siRNA sense strand
ggugaaaugucucaagaau

SEQ ID NO: 1271138 - RNA, 19 nt, Homo sapiens
  misc_RNA (1)...(19): siRNA sense strand
gagcacauccgagaauuaa

SEQ ID NO: 1271139 - RNA, 19 nt, Homo sapiens
  misc_RNA (1)...(19): siRNA sense strand
gacaucagaucagaguaua

SEQ ID NO: 1271140 - RNA, 19 nt, Homo sapiens
  misc_RNA (1)...(19): siRNA sense strand
gaucugaaaucugaacugu

SEQ ID NO: 1271141 - RNA, 19 nt, Homo sapiens
  misc_RNA (1)...(19): siRNA sense strand
ucugaaaucugaacuguca

SEQ ID NO: 1271142 - RNA, 19 nt, Homo sapiens
  misc_RNA (1)...(19): siRNA sense strand
ggacaucagaucagaguau

SEQ ID NO: 1271143 - RNA, 19 nt, Homo sapiens
  misc_RNA (1)...(19): siRNA sense strand
ucaggaaacuuugagaaga

SEQ ID NO: 1271144 - RNA, 19 nt, Homo sapiens
  misc_RNA (1)...(19): siRNA sense strand
ccaguccucuuugacauuu

SEQ ID NO: 1271145 - RNA, 19 nt, Homo sapiens
  misc_RNA (1)...(19): siRNA sense strand
ccuccaggaugcccucaua

SEQ ID NO: 1271146 - RNA, 19 nt, Homo sapiens
  misc_RNA (1)...(19): siRNA sense strand
guggugaaaugucucaaga

SEQ ID NO: 1271147 - RNA, 19 nt, Homo sapiens
  misc_RNA (1)...(19): siRNA sense strand
ugaugaagccugccugauu

SEQ ID NO: 1271148 - RNA, 19 nt, Homo sapiens
  misc_RNA (1)...(19): siRNA sense strand
gauccuacuuuccuucaag

SEQ ID NO: 1271149 - RNA, 19 nt, Homo sapiens
  misc_RNA (1)...(19): siRNA sense strand
gugaaaugucucaagaaua

SEQ ID NO: 1271150 - RNA, 19 nt, Homo sapiens
  misc_RNA (1)...(19): siRNA sense strand
gaacugucaggaaacuuug

SEQ ID NO: 1271151 - RNA, 19 nt, Homo sapiens
  misc_RNA (1)...(19): siRNA sense strand
gcacauccgagaauuaaac

SEQ ID NO: 1271152 - RNA, 19 nt, Homo sapiens
  misc_RNA (1)...(19): siRNA sense strand
gauaaaggaagccaucaag

SEQ ID NO: 1271153 - RNA, 19 nt, Homo sapiens
  misc_RNA (1)...(19): siRNA sense strand
ggcagcagauccuacuuuc

SEQ ID NO: 1271154 - RNA, 19 nt, Homo sapiens
  misc_RNA (1)...(19): siRNA sense strand
gagaugcccaggagcugua

SEQ ID NO: 1271155 - RNA, 19 nt, Homo sapiens
  misc_RNA (1)...(19): siRNA sense strand
caacaugcccaaccuguac

SEQ ID NO: 1271156 - RNA, 19 nt, Homo sapiens
  misc_RNA (1)...(19): siRNA sense strand
gggaaaccgugaugaaagc

SEQ ID NO: 1271157 - RNA, 19 nt, Homo sapiens
  misc_RNA (1)...(19): siRNA sense strand
ugaacugucaggaaacuuu

SEQ ID NO: 1271158 - RNA, 19 nt, Homo sapiens
  misc_RNA (1)...(19): siRNA sense strand
gaagccugccugauugaga

SEQ ID NO: 1271159 - RNA, 19 nt, Homo sapiens
  misc_RNA (1)...(19): siRNA sense strand
ugagcacauccgagaauua

SEQ ID NO: 1271160 - RNA, 19 nt, Homo sapiens
  misc_RNA (1)...(19): siRNA sense strand
ccaacaugcccaaccugua

SEQ ID NO: 1271161 - RNA, 19 nt, Homo sapiens
  misc_RNA (1)...(19): siRNA sense strand
gaaacccacccuccaggau

SEQ ID NO: 1271162 - RNA, 19 nt, Homo sapiens
  misc_RNA (1)...(19): siRNA sense strand
caaaggaccggacccugau

SEQ ID NO: 1271163 - RNA, 19 nt, Homo sapiens
  misc_RNA (1)...(19): siRNA sense strand
gaaacuuugagaagacaau

SEQ ID NO: 1271164 - RNA, 19 nt, Homo sapiens
  misc_RNA (1)...(19): siRNA sense strand
gggauuaccggaagauucu

SEQ ID NO: 1271165 - RNA, 19 nt, Homo sapiens
  misc_RNA (1)...(19): siRNA sense strand
cauccgagaauuaaacaga

SEQ ID NO: 1271166 - RNA, 19 nt, Homo sapiens
  misc_RNA (1)...(19): siRNA sense strand
caggaaacuuugagaagac

SEQ ID NO: 1271167 - RNA, 19 nt, Homo sapiens
  misc_RNA (1)...(19): siRNA sense strand
ucaaugaguaccagagaau

SEQ ID NO: 1271168 - RNA, 19 nt, Homo sapiens
  misc_RNA (1)...(19): siRNA sense strand
gcaguucaaccaggacuau

SEQ ID NO: 1271169 - RNA, 19 nt, Homo sapiens
  misc_RNA (1)...(19): siRNA sense strand
gugccgagcuacccaggau

SEQ ID NO: 1271170 - RNA, 19 nt, Homo sapiens
  misc_RNA (1)...(19): siRNA sense strand
cagggaaaccgugaugaaa

SEQ ID NO: 1271171 - RNA, 19 nt, Homo sapiens
  misc_RNA (1)...(19): siRNA sense strand
aaucuuggcucugaugaag

SEQ ID NO: 1271172 - RNA, 19 nt, Homo sapiens
  misc_RNA (1)...(19): siRNA sense strand
ucagggaaaccgugaugaa

SEQ ID NO: 1271173 - RNA, 19 nt, Homo sapiens
  misc_RNA (1)...(19): siRNA sense strand
gagccuacaaagcagaauu

SEQ ID NO: 1271174 - RNA, 19 nt, Homo sapiens
  misc_RNA (1)...(19): siRNA sense strand
gacuaucucucgggaaugg

SEQ ID NO: 1271175 - RNA, 19 nt, Homo sapiens
  misc_RNA (1)...(19): siRNA sense strand
cggcuuacggcaaggauuu

SEQ ID NO: 1271176 - RNA, 19 nt, Homo sapiens
  misc_RNA (1)...(19): siRNA sense strand
gaucugugguggcaaugac

SEQ ID NO: 1271177 - RNA, 19 nt, Homo sapiens
  misc_RNA (1)...(19): siRNA sense strand
agaccgaccuccuggacau

SEQ ID NO: 1271178 - RNA, 19 nt, Homo sapiens
  misc_RNA (1)...(19): siRNA sense strand
gaauuaaacagagccuaca

SEQ ID NO: 1271179 - RNA, 19 nt, Homo sapiens
  misc_RNA (1)...(19): siRNA sense strand
gagccaacaugcccaaccu

SEQ ID NO: 1271180 - RNA, 19 nt, Homo sapiens
  misc_RNA (1)...(19): siRNA sense strand
cggaagauucugcugaaga

SEQ ID NO: 1271181 - RNA, 19 nt, Homo sapiens
  misc_RNA (1)...(19): siRNA sense strand
gccgggacauugagaagag

SEQ ID NO: 1271182 - RNA, 19 nt, Homo sapiens
  misc_RNA (1)...(19): siRNA sense strand
caaguucaaugcgguucug

SEQ ID NO: 1271183 - RNA, 19 nt, Homo sapiens
  misc_RNA (1)...(19): siRNA sense strand
ggagauacuucaggggauu

SEQ ID NO: 1271184 - RNA, 19 nt, Homo sapiens
  misc_RNA (1)...(19): siRNA sense strand
caucagaucagaguauaag

SEQ ID NO: 1271185 - RNA, 19 nt, Homo sapiens
  misc_RNA (1)...(19): siRNA sense strand
cggcagcagauccuacuuu

SEQ ID NO: 1271186 - RNA, 19 nt, Homo sapiens
  misc_RNA (1)...(19): siRNA sense strand
cgacacaucagggcacuuc

SEQ ID NO: 1271187 - RNA, 19 nt, Homo sapiens
  misc_RNA (1)...(19): siRNA sense strand
cagaguauaagcggaugua

SEQ ID NO: 1271188 - RNA, 19 nt, Homo sapiens
  misc_RNA (1)...(19): siRNA sense strand
cacugaugcucccggcuuu

SEQ ID NO: 1271189 - RNA, 19 nt, Homo sapiens
  misc_RNA (1)...(19): siRNA sense strand
aggacuaucucucgggaau

SEQ ID NO: 1271190 - RNA, 19 nt, Homo sapiens
  misc_RNA (1)...(19): siRNA sense strand
acagacgaguccaaguuca

SEQ ID NO: 1271191 - RNA, 19 nt, Homo sapiens
  misc_RNA (1)...(19): siRNA sense strand
gaauaccccagccuucuuu

SEQ ID NO: 1271192 - RNA, 19 nt, Homo sapiens
  misc_RNA (1)...(19): siRNA sense strand
aagccugccugauugagau

SEQ ID NO: 1271193 - RNA, 19 nt, Homo sapiens
  misc_RNA (1)...(19): siRNA sense strand
uuaaacagagccuacaaag

SEQ ID NO: 1271194 - RNA, 19 nt, Homo sapiens
  misc_RNA (1)...(19): siRNA sense strand
gacaaucuuggcucugaug

SEQ ID NO: 1271195 - RNA, 19 nt, Homo sapiens
  misc_RNA (1)...(19): siRNA sense strand
cagcagauccuacuuuccu

SEQ ID NO: 1271196 - RNA, 19 nt, Homo sapiens
  misc_RNA (1)...(19): siRNA sense strand
aaugaguaccagagaauga

SEQ ID NO: 1271197 - RNA, 19 nt, Homo sapiens
  misc_RNA (1)...(19): siRNA sense strand
gcagccuguuccucccuau

SEQ ID NO: 1271198 - RNA, 19 nt, Homo sapiens
  misc_RNA (1)...(19): siRNA sense strand
ggaacagacgaguccaagu

SEQ ID NO: 1271199 - RNA, 19 nt, Homo sapiens
  misc_RNA (1)...(19): siRNA sense strand
gagauaaaggaagccauca

SEQ ID NO: 1271200 - RNA, 19 nt, Homo sapiens
  misc_RNA (1)...(19): siRNA sense strand
ggagaaccgccugggaaca

SEQ ID NO: 1271201 - RNA, 19 nt, Homo sapiens
  misc_RNA (1)...(19): siRNA sense strand
acaagcagcggcagcagau

SEQ ID NO: 1271202 - RNA, 19 nt, Homo sapiens
  misc_RNA (1)...(19): siRNA sense strand
accggaagauucugcugaa

SEQ ID NO: 1271203 - RNA, 19 nt, Homo sapiens
  misc_RNA (1)...(19): siRNA sense strand
cagacgaguccaaguucaa

SEQ ID NO: 1271204 - RNA, 19 nt, Homo sapiens
  misc_RNA (1)...(19): siRNA sense strand
gagaaccgccugggaacag

SEQ ID NO: 1271205 - RNA, 19 nt, Homo sapiens
  misc_RNA (1)...(19): siRNA sense strand
gaugaagccugccugauug

SEQ ID NO: 1271206 - RNA, 19 nt, Homo sapiens
  misc_RNA (1)...(19): siRNA sense strand
gaacagacgaguccaaguu

SEQ ID NO: 1271207 - RNA, 19 nt, Homo sapiens
  misc_RNA (1)...(19): siRNA sense strand
ugaaaugucucaagaauac

SEQ ID NO: 1271208 - RNA, 19 nt, Homo sapiens
  misc_RNA (1)...(19): siRNA sense strand
gcacaaacguggacauguc

SEQ ID NO: 1271209 - RNA, 19 nt, Homo sapiens
  misc_RNA (1)...(19): siRNA sense strand
cuacaaagcagaauucaaa

SEQ ID NO: 1271210 - RNA, 19 nt, Homo sapiens
  misc_RNA (1)...(19): siRNA sense strand
ggaagauucugcugaagau

SEQ ID NO: 1271211 - RNA, 19 nt, Homo sapiens
  misc_RNA (1)...(19): siRNA sense strand
gaagaucugugguggcaau

SEQ ID NO: 1271212 - RNA, 19 nt, Homo sapiens
  misc_RNA (1)...(19): siRNA sense strand
aaacagagccuacaaagca

SEQ ID NO: 1271213 - RNA, 19 nt, Homo sapiens
  misc_RNA (1)...(19): siRNA sense strand
ggugaaaugucucaagaau

SEQ ID NO: 1271214 - RNA, 19 nt, Homo sapiens
  misc_RNA (1)...(19): siRNA sense strand
gagcacauccgagaauuaa

SEQ ID NO: 1271215 - RNA, 19 nt, Homo sapiens
  misc_RNA (1)...(19): siRNA sense strand
gacaucagaucagaguaua

SEQ ID NO: 1271216 - RNA, 19 nt, Homo sapiens
  misc_RNA (1)...(19): siRNA sense strand
gaucugaaaucugaacugu

SEQ ID NO: 1271217 - RNA, 19 nt, Homo sapiens
  misc_RNA (1)...(19): siRNA sense strand
ucugaaaucugaacuguca

SEQ ID NO: 1271218 - RNA, 19 nt, Homo sapiens
  misc_RNA (1)...(19): siRNA sense strand
ggacaucagaucagaguau

SEQ ID NO: 1271219 - RNA, 19 nt, Homo sapiens
  misc_RNA (1)...(19): siRNA sense strand
ucaggaaacuuugagaaga

SEQ ID NO: 1271220 - RNA, 19 nt, Homo sapiens
  misc_RNA (1)...(19): siRNA sense strand
ccaguccucuuugacauuu

SEQ ID NO: 1271221 - RNA, 19 nt, Homo sapiens
  misc_RNA (1)...(19): siRNA sense strand
ccuccaggaugcccucaua

SEQ ID NO: 1271222 - RNA, 19 nt, Homo sapiens
  misc_RNA (1)...(19): siRNA sense strand
guggugaaaugucucaaga

SEQ ID NO: 1271223 - RNA, 19 nt, Homo sapiens
  misc_RNA (1)...(19): siRNA sense strand
ugaugaagccugccugauu

SEQ ID NO: 1271224 - RNA, 19 nt, Homo sapiens
  misc_RNA (1)...(19): siRNA sense strand
gauccuacuuuccuucaag

SEQ ID NO: 1271225 - RNA, 19 nt, Homo sapiens
  misc_RNA (1)...(19): siRNA sense strand
gugaaaugucucaagaaua

SEQ ID NO: 1271226 - RNA, 19 nt, Homo sapiens
  misc_RNA (1)...(19): siRNA sense strand
gaacugucaggaaacuuug

SEQ ID NO: 1271227 - RNA, 19 nt, Homo sapiens
  misc_RNA (1)...(19): siRNA sense strand
gcacauccgagaauuaaac

SEQ ID NO: 1271228 - RNA, 19 nt, Homo sapiens
  misc_RNA (1)...(19): siRNA sense strand
gauaaaggaagccaucaag

SEQ ID NO: 1271229 - RNA, 19 nt, Homo sapiens
  misc_RNA (1)...(19): siRNA sense strand
ggcagcagauccuacuuuc

SEQ ID NO: 1271230 - RNA, 19 nt, Homo sapiens
  misc_RNA (1)...(19): siRNA sense strand
gagaugcccaggagcugua

SEQ ID NO: 1271231 - RNA, 19 nt, Homo sapiens
  misc_RNA (1)...(19): siRNA sense strand
caacaugcccaaccuguac

SEQ ID NO: 1271232 - RNA, 19 nt, Homo sapiens
  misc_RNA (1)...(19): siRNA sense strand
gggaaaccgugaugaaagc

SEQ ID NO: 1271233 - RNA, 19 nt, Homo sapiens
  misc_RNA (1)...(19): siRNA sense strand
ugaacugucaggaaacuuu

SEQ ID NO: 1271234 - RNA, 19 nt, Homo sapiens
  misc_RNA (1)...(19): siRNA sense strand
gaagccugccugauugaga

SEQ ID NO: 1271235 - RNA, 19 nt, Homo sapiens
  misc_RNA (1)...(19): siRNA sense strand
ugagcacauccgagaauua

SEQ ID NO: 1271236 - RNA, 19 nt, Homo sapiens
  misc_RNA (1)...(19): siRNA sense strand
ccaacaugcccaaccugua

SEQ ID NO: 1271237 - RNA, 19 nt, Homo sapiens
  misc_RNA (1)...(19): siRNA sense strand
gaaacccacccuccaggau

SEQ ID NO: 1271238 - RNA, 19 nt, Homo sapiens
  misc_RNA (1)...(19): siRNA sense strand
caaaggaccggacccugau

SEQ ID NO: 1271239 - RNA, 19 nt, Homo sapiens
  misc_RNA (1)...(19): siRNA sense strand
gaaacuuugagaagacaau

SEQ ID NO: 1271240 - RNA, 19 nt, Homo sapiens
  misc_RNA (1)...(19): siRNA sense strand
gggauuaccggaagauucu

SEQ ID NO: 1271241 - RNA, 19 nt, Homo sapiens
  misc_RNA (1)...(19): siRNA sense strand
cauccgagaauuaaacaga

SEQ ID NO: 1271242 - RNA, 19 nt, Homo sapiens
  misc_RNA (1)...(19): siRNA sense strand
caggaaacuuugagaagac

SEQ ID NO: 1271243 - RNA, 19 nt, Homo sapiens
  misc_RNA (1)...(19): siRNA sense strand
ucaaugaguaccagagaau

SEQ ID NO: 1271244 - RNA, 19 nt, Homo sapiens
  misc_RNA (1)...(19): siRNA sense strand
gcaguucaaccaggacuau

SEQ ID NO: 1271245 - RNA, 19 nt, Homo sapiens
  misc_RNA (1)...(19): siRNA sense strand
gugccgagcuacccaggau

SEQ ID NO: 1271246 - RNA, 19 nt, Homo sapiens
  misc_RNA (1)...(19): siRNA sense strand
cagggaaaccgugaugaaa

SEQ ID NO: 1271247 - RNA, 19 nt, Homo sapiens
  misc_RNA (1)...(19): siRNA sense strand
aaucuuggcucugaugaag

SEQ ID NO: 1271248 - RNA, 19 nt, Homo sapiens
  misc_RNA (1)...(19): siRNA sense strand
ucagggaaaccgugaugaa

SEQ ID NO: 1271249 - RNA, 19 nt, Homo sapiens
  misc_RNA (1)...(19): siRNA sense strand
gagccuacaaagcagaauu

SEQ ID NO: 1271250 - RNA, 19 nt, Homo sapiens
  misc_RNA (1)...(19): siRNA sense strand
gacuaucucucgggaaugg

SEQ ID NO: 1271251 - RNA, 19 nt, Homo sapiens
  misc_RNA (1)...(19): siRNA sense strand
cggcuuacggcaaggauuu

SEQ ID NO: 1271252 - RNA, 19 nt, Homo sapiens
  misc_RNA (1)...(19): siRNA sense strand
gaucugugguggcaaugac

SEQ ID NO: 1271253 - RNA, 19 nt, Homo sapiens
  misc_RNA (1)...(19): siRNA sense strand
agaccgaccuccuggacau

SEQ ID NO: 1271254 - RNA, 19 nt, Homo sapiens
  misc_RNA (1)...(19): siRNA sense strand
gaauuaaacagagccuaca

SEQ ID NO: 1271255 - RNA, 19 nt, Homo sapiens
  misc_RNA (1)...(19): siRNA sense strand
gagccaacaugcccaaccu

SEQ ID NO: 1271256 - RNA, 19 nt, Homo sapiens
  misc_RNA (1)...(19): siRNA sense strand
cggaagauucugcugaaga

SEQ ID NO: 1271257 - RNA, 19 nt, Homo sapiens
  misc_RNA (1)...(19): siRNA sense strand
gccgggacauugagaagag

SEQ ID NO: 1271258 - RNA, 19 nt, Homo sapiens
  misc_RNA (1)...(19): siRNA sense strand
caaguucaaugcgguucug

SEQ ID NO: 1271259 - RNA, 19 nt, Homo sapiens
  misc_RNA (1)...(19): siRNA sense strand
ggagauacuucaggggauu

SEQ ID NO: 1271260 - RNA, 19 nt, Homo sapiens
  misc_RNA (1)...(19): siRNA sense strand
caucagaucagaguauaag

SEQ ID NO: 1271261 - RNA, 19 nt, Homo sapiens
  misc_RNA (1)...(19): siRNA sense strand
cggcagcagauccuacuuu

SEQ ID NO: 1271262 - RNA, 19 nt, Homo sapiens
  misc_RNA (1)...(19): siRNA sense strand
cgacacaucagggcacuuc

SEQ ID NO: 1271263 - RNA, 19 nt, Homo sapiens
  misc_RNA (1)...(19): siRNA sense strand
cagaguauaagcggaugua

SEQ ID NO: 1271264 - RNA, 19 nt, Homo sapiens
  misc_RNA (1)...(19): siRNA sense strand
cacugaugcucccggcuuu

SEQ ID NO: 1271265 - RNA, 19 nt, Homo sapiens
  misc_RNA (1)...(19): siRNA sense strand
aggacuaucucucgggaau

SEQ ID NO: 1271266 - RNA, 19 nt, Homo sapiens
  misc_RNA (1)...(19): siRNA sense strand
acagacgaguccaaguuca

SEQ ID NO: 1271267 - RNA, 19 nt, Homo sapiens
  misc_RNA (1)...(19): siRNA sense strand
gaauaccccagccuucuuu

SEQ ID NO: 1271268 - RNA, 19 nt, Homo sapiens
  misc_RNA (1)...(19): siRNA sense strand
aagccugccugauugagau

SEQ ID NO: 1271269 - RNA, 19 nt, Homo sapiens
  misc_RNA (1)...(19): siRNA sense strand
uuaaacagagccuacaaag

SEQ ID NO: 1271270 - RNA, 19 nt, Homo sapiens
  misc_RNA (1)...(19): siRNA sense strand
gacaaucuuggcucugaug

SEQ ID NO: 1271271 - RNA, 19 nt, Homo sapiens
  misc_RNA (1)...(19): siRNA sense strand
cagcagauccuacuuuccu

SEQ ID NO: 1271272 - RNA, 19 nt, Homo sapiens
  misc_RNA (1)...(19): siRNA sense strand
aaugaguaccagagaauga

SEQ ID NO: 1271273 - RNA, 19 nt, Homo sapiens
  misc_RNA (1)...(19): siRNA sense strand
gcagccuguuccucccuau

SEQ ID NO: 1271274 - RNA, 19 nt, Homo sapiens
  misc_RNA (1)...(19): siRNA sense strand
ggaacagacgaguccaagu

SEQ ID NO: 1271275 - RNA, 19 nt, Homo sapiens
  misc_RNA (1)...(19): siRNA sense strand
gagauaaaggaagccauca

SEQ ID NO: 1271276 - RNA, 19 nt, Homo sapiens
  misc_RNA (1)...(19): siRNA sense strand
ggagaaccgccugggaaca

SEQ ID NO: 1271277 - RNA, 19 nt, Homo sapiens
  misc_RNA (1)...(19): siRNA sense strand
acaagcagcggcagcagau

SEQ ID NO: 1271278 - RNA, 19 nt, Homo sapiens
  misc_RNA (1)...(19): siRNA sense strand
accggaagauucugcugaa

SEQ ID NO: 1271279 - RNA, 19 nt, Homo sapiens
  misc_RNA (1)...(19): siRNA sense strand
cagacgaguccaaguucaa

SEQ ID NO: 1271280 - RNA, 19 nt, Homo sapiens
  misc_RNA (1)...(19): siRNA sense strand
gagaaccgccugggaacag

SEQ ID NO: 1271281 - RNA, 19 nt, Homo sapiens
  misc_RNA (1)...(19): siRNA sense strand
gaugaagccugccugauug

SEQ ID NO: 1271282 - RNA, 19 nt, Homo sapiens
  misc_RNA (1)...(19): siRNA sense strand
gaacagacgaguccaaguu

SEQ ID NO: 1271283 - RNA, 19 nt, Homo sapiens
  misc_RNA (1)...(19): siRNA sense strand
ugaaaugucucaagaauac

SEQ ID NO: 1271284 - RNA, 19 nt, Homo sapiens
  misc_RNA (1)...(19): siRNA sense strand
gcacaaacguggacauguc

SEQ ID NO: 1271285 - RNA, 19 nt, Homo sapiens
  misc_RNA (1)...(19): siRNA sense strand
cuacaaagcagaauucaaa

SEQ ID NO: 1271286 - RNA, 19 nt, Homo sapiens
  misc_RNA (1)...(19): siRNA sense strand
ggaagauucugcugaagau

SEQ ID NO: 1271287 - RNA, 19 nt, Homo sapiens
  misc_RNA (1)...(19): siRNA sense strand
gaagaucugugguggcaau

SEQ ID NO: 1271288 - RNA, 19 nt, Homo sapiens
  misc_RNA (1)...(19): siRNA sense strand
aaacagagccuacaaagca

SEQ ID NO: 1271289 - RNA, 19 nt, Homo sapiens
  misc_RNA (1)...(19): siRNA sense strand
ggugaaaugucucaagaau

SEQ ID NO: 1271290 - RNA, 19 nt, Homo sapiens
  misc_RNA (1)...(19): siRNA sense strand
gagcacauccgagaauuaa

SEQ ID NO: 1271291 - RNA, 19 nt, Homo sapiens
  misc_RNA (1)...(19): siRNA sense strand
gacaucagaucagaguaua

SEQ ID NO: 1271292 - RNA, 19 nt, Homo sapiens
  misc_RNA (1)...(19): siRNA sense strand
gaucugaaaucugaacugu

SEQ ID NO: 1271293 - RNA, 19 nt, Homo sapiens
  misc_RNA (1)...(19): siRNA sense strand
ucugaaaucugaacuguca

SEQ ID NO: 1271294 - RNA, 19 nt, Homo sapiens
  misc_RNA (1)...(19): siRNA sense strand
ggacaucagaucagaguau

SEQ ID NO: 1271295 - RNA, 19 nt, Homo sapiens
  misc_RNA (1)...(19): siRNA sense strand
ucaggaaacuuugagaaga

SEQ ID NO: 1271296 - RNA, 19 nt, Homo sapiens
  misc_RNA (1)...(19): siRNA sense strand
ccaguccucuuugacauuu

SEQ ID NO: 1271297 - RNA, 19 nt, Homo sapiens
  misc_RNA (1)...(19): siRNA sense strand
ccuccaggaugcccucaua

SEQ ID NO: 1271298 - RNA, 19 nt, Homo sapiens
  misc_RNA (1)...(19): siRNA sense strand
guggugaaaugucucaaga

SEQ ID NO: 1271299 - RNA, 19 nt, Homo sapiens
  misc_RNA (1)...(19): siRNA sense strand
ugaugaagccugccugauu

SEQ ID NO: 1271300 - RNA, 19 nt, Homo sapiens
  misc_RNA (1)...(19): siRNA sense strand
gauccuacuuuccuucaag

SEQ ID NO: 1271301 - RNA, 19 nt, Homo sapiens
  misc_RNA (1)...(19): siRNA sense strand
gugaaaugucucaagaaua

SEQ ID NO: 1271302 - RNA, 19 nt, Homo sapiens
  misc_RNA (1)...(19): siRNA sense strand
gaacugucaggaaacuuug

SEQ ID NO: 1271303 - RNA, 19 nt, Homo sapiens
  misc_RNA (1)...(19): siRNA sense strand
gcacauccgagaauuaaac

SEQ ID NO: 1271304 - RNA, 19 nt, Homo sapiens
  misc_RNA (1)...(19): siRNA sense strand
gauaaaggaagccaucaag

SEQ ID NO: 1271305 - RNA, 19 nt, Homo sapiens
  misc_RNA (1)...(19): siRNA sense strand
ggcagcagauccuacuuuc

SEQ ID NO: 1271306 - RNA, 19 nt, Homo sapiens
  misc_RNA (1)...(19): siRNA sense strand
gagaugcccaggagcugua

SEQ ID NO: 1271307 - RNA, 19 nt, Homo sapiens
  misc_RNA (1)...(19): siRNA sense strand
caacaugcccaaccuguac

SEQ ID NO: 1271308 - RNA, 19 nt, Homo sapiens
  misc_RNA (1)...(19): siRNA sense strand
gggaaaccgugaugaaagc

SEQ ID NO: 1271309 - RNA, 19 nt, Homo sapiens
  misc_RNA (1)...(19): siRNA sense strand
ugaacugucaggaaacuuu

SEQ ID NO: 1271310 - RNA, 19 nt, Homo sapiens
  misc_RNA (1)...(19): siRNA sense strand
gaagccugccugauugaga

SEQ ID NO: 1271311 - RNA, 19 nt, Homo sapiens
  misc_RNA (1)...(19): siRNA sense strand
ugagcacauccgagaauua

SEQ ID NO: 1271312 - RNA, 19 nt, Homo sapiens
  misc_RNA (1)...(19): siRNA sense strand
ccaacaugcccaaccugua

SEQ ID NO: 1271313 - RNA, 19 nt, Homo sapiens
  misc_RNA (1)...(19): siRNA sense strand
gaaacccacccuccaggau

SEQ ID NO: 1271314 - RNA, 19 nt, Homo sapiens
  misc_RNA (1)...(19): siRNA sense strand
caaaggaccggacccugau

SEQ ID NO: 1271315 - RNA, 19 nt, Homo sapiens
  misc_RNA (1)...(19): siRNA sense strand
gaaacuuugagaagacaau

SEQ ID NO: 1271316 - RNA, 19 nt, Homo sapiens
  misc_RNA (1)...(19): siRNA sense strand
gggauuaccggaagauucu

SEQ ID NO: 1271317 - RNA, 19 nt, Homo sapiens
  misc_RNA (1)...(19): siRNA sense strand
cauccgagaauuaaacaga

SEQ ID NO: 1271318 - RNA, 19 nt, Homo sapiens
  misc_RNA (1)...(19): siRNA sense strand
caggaaacuuugagaagac

SEQ ID NO: 1271319 - RNA, 19 nt, Homo sapiens
  misc_RNA (1)...(19): siRNA sense strand
ucaaugaguaccagagaau

SEQ ID NO: 1271320 - RNA, 19 nt, Homo sapiens
  misc_RNA (1)...(19): siRNA sense strand
gcaguucaaccaggacuau

SEQ ID NO: 1271321 - RNA, 19 nt, Homo sapiens
  misc_RNA (1)...(19): siRNA sense strand
gugccgagcuacccaggau

SEQ ID NO: 1271322 - RNA, 19 nt, Homo sapiens
  misc_RNA (1)...(19): siRNA sense strand
cagggaaaccgugaugaaa

SEQ ID NO: 1271323 - RNA, 19 nt, Homo sapiens
  misc_RNA (1)...(19): siRNA sense strand
aaucuuggcucugaugaag

SEQ ID NO: 1271324 - RNA, 19 nt, Homo sapiens
  misc_RNA (1)...(19): siRNA sense strand
ucagggaaaccgugaugaa

SEQ ID NO: 1271325 - RNA, 19 nt, Homo sapiens
  misc_RNA (1)...(19): siRNA sense strand
gagccuacaaagcagaauu

SEQ ID NO: 1271326 - RNA, 19 nt, Homo sapiens
  misc_RNA (1)...(19): siRNA sense strand
gacuaucucucgggaaugg

SEQ ID NO: 1271327 - RNA, 19 nt, Homo sapiens
  misc_RNA (1)...(19): siRNA sense strand
cggcuuacggcaaggauuu

SEQ ID NO: 1271328 - RNA, 19 nt, Homo sapiens
  misc_RNA (1)...(19): siRNA sense strand
gaucugugguggcaaugac

SEQ ID NO: 1271329 - RNA, 19 nt, Homo sapiens
  misc_RNA (1)...(19): siRNA sense strand
agaccgaccuccuggacau

SEQ ID NO: 1271330 - RNA, 19 nt, Homo sapiens
  misc_RNA (1)...(19): siRNA sense strand
gaauuaaacagagccuaca

SEQ ID NO: 1271331 - RNA, 19 nt, Homo sapiens
  misc_RNA (1)...(19): siRNA sense strand
gagccaacaugcccaaccu

SEQ ID NO: 1271332 - RNA, 19 nt, Homo sapiens
  misc_RNA (1)...(19): siRNA sense strand
cggaagauucugcugaaga

SEQ ID NO: 1271333 - RNA, 19 nt, Homo sapiens
  misc_RNA (1)...(19): siRNA sense strand
gccgggacauugagaagag

SEQ ID NO: 1271334 - RNA, 19 nt, Homo sapiens
  misc_RNA (1)...(19): siRNA sense strand
caaguucaaugcgguucug

SEQ ID NO: 1271335 - RNA, 19 nt, Homo sapiens
  misc_RNA (1)...(19): siRNA sense strand
ggagauacuucaggggauu

SEQ ID NO: 1271336 - RNA, 19 nt, Homo sapiens
  misc_RNA (1)...(19): siRNA sense strand
caucagaucagaguauaag

SEQ ID NO: 1271337 - RNA, 19 nt, Homo sapiens
  misc_RNA (1)...(19): siRNA sense strand
cggcagcagauccuacuuu

SEQ ID NO: 1271338 - RNA, 19 nt, Homo sapiens
  misc_RNA (1)...(19): siRNA sense strand
cgacacaucagggcacuuc

SEQ ID NO: 1271339 - RNA, 19 nt, Homo sapiens
  misc_RNA (1)...(19): siRNA sense strand
cagaguauaagcggaugua

SEQ ID NO: 1271340 - RNA, 19 nt, Homo sapiens
  misc_RNA (1)...(19): siRNA sense strand
cacugaugcucccggcuuu

SEQ ID NO: 1271341 - RNA, 19 nt, Homo sapiens
  misc_RNA (1)...(19): siRNA sense strand
aggacuaucucucgggaau

SEQ ID NO: 1271342 - RNA, 19 nt, Homo sapiens
  misc_RNA (1)...(19): siRNA sense strand
acagacgaguccaaguuca

SEQ ID NO: 1271343 - RNA, 19 nt, Homo sapiens
  misc_RNA (1)...(19): siRNA sense strand
gaauaccccagccuucuuu

SEQ ID NO: 1271344 - RNA, 19 nt, Homo sapiens
  misc_RNA (1)...(19): siRNA sense strand
aagccugccugauugagau

SEQ ID NO: 1271345 - RNA, 19 nt, Homo sapiens
  misc_RNA (1)...(19): siRNA sense strand
uuaaacagagccuacaaag

SEQ ID NO: 1271346 - RNA, 19 nt, Homo sapiens
  misc_RNA (1)...(19): siRNA sense strand
gacaaucuuggcucugaug

SEQ ID NO: 1271347 - RNA, 19 nt, Homo sapiens
  misc_RNA (1)...(19): siRNA sense strand
cagcagauccuacuuuccu

SEQ ID NO: 1271348 - RNA, 19 nt, Homo sapiens
  misc_RNA (1)...(19): siRNA sense strand
aaugaguaccagagaauga

SEQ ID NO: 1271349 - RNA, 19 nt, Homo sapiens
  misc_RNA (1)...(19): siRNA sense strand
gcagccuguuccucccuau

SEQ ID NO: 1271350 - RNA, 19 nt, Homo sapiens
  misc_RNA (1)...(19): siRNA sense strand
ggaacagacgaguccaagu

SEQ ID NO: 1271351 - RNA, 19 nt, Homo sapiens
  misc_RNA (1)...(19): siRNA sense strand
gagauaaaggaagccauca

SEQ ID NO: 1271352 - RNA, 19 nt, Homo sapiens
  misc_RNA (1)...(19): siRNA sense strand
ggagaaccgccugggaaca

SEQ ID NO: 1271353 - RNA, 19 nt, Homo sapiens
  misc_RNA (1)...(19): siRNA sense strand
acaagcagcggcagcagau

SEQ ID NO: 1271354 - RNA, 19 nt, Homo sapiens
  misc_RNA (1)...(19): siRNA sense strand
accggaagauucugcugaa

SEQ ID NO: 1271355 - RNA, 19 nt, Homo sapiens
  misc_RNA (1)...(19): siRNA sense strand
cagacgaguccaaguucaa

SEQ ID NO: 1271356 - RNA, 19 nt, Homo sapiens
  misc_RNA (1)...(19): siRNA sense strand
gagaaccgccugggaacag

SEQ ID NO: 1271357 - RNA, 19 nt, Homo sapiens
  misc_RNA (1)...(19): siRNA sense strand
gaugaagccugccugauug

SEQ ID NO: 1271358 - RNA, 19 nt, Homo sapiens
  misc_RNA (1)...(19): siRNA sense strand
gaacagacgaguccaaguu

SEQ ID NO: 1271359 - RNA, 19 nt, Homo sapiens
  misc_RNA (1)...(19): siRNA sense strand
ugaaaugucucaagaauac

SEQ ID NO: 1271360 - RNA, 19 nt, Homo sapiens
  misc_RNA (1)...(19): siRNA sense strand
gcacaaacguggacauguc

SEQ ID NO: 1271361 - RNA, 19 nt, Homo sapiens
  misc_RNA (1)...(19): siRNA sense strand
cuacaaagcagaauucaaa

SEQ ID NO: 1271362 - RNA, 19 nt, Homo sapiens
  misc_RNA (1)...(19): siRNA sense strand
ggaagauucugcugaagau

SEQ ID NO: 1271363 - RNA, 19 nt, Homo sapiens
  misc_RNA (1)...(19): siRNA sense strand
gaagaucugugguggcaau

SEQ ID NO: 1271364 - RNA, 19 nt, Homo sapiens
  misc_RNA (1)...(19): siRNA sense strand
aaacagagccuacaaagca

SEQ ID NO: 1271365 - RNA, 19 nt, Homo sapiens
  misc_RNA (1)...(19): siRNA sense strand
ggugaaaugucucaagaau

SEQ ID NO: 1271366 - RNA, 19 nt, Homo sapiens
  misc_RNA (1)...(19): siRNA sense strand
gagcacauccgagaauuaa

SEQ ID NO: 1271367 - RNA, 19 nt, Homo sapiens
  misc_RNA (1)...(19): siRNA sense strand
gacaucagaucagaguaua

SEQ ID NO: 1271368 - RNA, 19 nt, Homo sapiens
  misc_RNA (1)...(19): siRNA sense strand
gaucugaaaucugaacugu

SEQ ID NO: 1271369 - RNA, 19 nt, Homo sapiens
  misc_RNA (1)...(19): siRNA sense strand
ucugaaaucugaacuguca

SEQ ID NO: 1271370 - RNA, 19 nt, Homo sapiens
  misc_RNA (1)...(19): siRNA sense strand
ggacaucagaucagaguau

SEQ ID NO: 1271371 - RNA, 19 nt, Homo sapiens
  misc_RNA (1)...(19): siRNA sense strand
ucaggaaacuuugagaaga

SEQ ID NO: 1271372 - RNA, 19 nt, Homo sapiens
  misc_RNA (1)...(19): siRNA sense strand
ccaguccucuuugacauuu

SEQ ID NO: 1271373 - RNA, 19 nt, Homo sapiens
  misc_RNA (1)...(19): siRNA sense strand
ccuccaggaugcccucaua

SEQ ID NO: 1271374 - RNA, 19 nt, Homo sapiens
  misc_RNA (1)...(19): siRNA sense strand
guggugaaaugucucaaga

SEQ ID NO: 1271375 - RNA, 19 nt, Homo sapiens
  misc_RNA (1)...(19): siRNA sense strand
ugaugaagccugccugauu

SEQ ID NO: 1271376 - RNA, 19 nt, Homo sapiens
  misc_RNA (1)...(19): siRNA sense strand
gauccuacuuuccuucaag

SEQ ID NO: 1271377 - RNA, 19 nt, Homo sapiens
  misc_RNA (1)...(19): siRNA sense strand
gugaaaugucucaagaaua

SEQ ID NO: 1271378 - RNA, 19 nt, Homo sapiens
  misc_RNA (1)...(19): siRNA sense strand
gaacugucaggaaacuuug

SEQ ID NO: 1271379 - RNA, 19 nt, Homo sapiens
  misc_RNA (1)...(19): siRNA sense strand
gcacauccgagaauuaaac

SEQ ID NO: 1271380 - RNA, 19 nt, Homo sapiens
  misc_RNA (1)...(19): siRNA sense strand
gauaaaggaagccaucaag

SEQ ID NO: 1271381 - RNA, 19 nt, Homo sapiens
  misc_RNA (1)...(19): siRNA sense strand
ggcagcagauccuacuuuc

SEQ ID NO: 1271382 - RNA, 19 nt, Homo sapiens
  misc_RNA (1)...(19): siRNA sense strand
gagaugcccaggagcugua

SEQ ID NO: 1271383 - RNA, 19 nt, Homo sapiens
  misc_RNA (1)...(19): siRNA sense strand
caacaugcccaaccuguac

SEQ ID NO: 1271384 - RNA, 19 nt, Homo sapiens
  misc_RNA (1)...(19): siRNA sense strand
gggaaaccgugaugaaagc

SEQ ID NO: 1271385 - RNA, 19 nt, Homo sapiens
  misc_RNA (1)...(19): siRNA sense strand
ugaacugucaggaaacuuu

SEQ ID NO: 1271386 - RNA, 19 nt, Homo sapiens
  misc_RNA (1)...(19): siRNA sense strand
gaagccugccugauugaga

SEQ ID NO: 1271387 - RNA, 19 nt, Homo sapiens
  misc_RNA (1)...(19): siRNA sense strand
ugagcacauccgagaauua

SEQ ID NO: 1271388 - RNA, 19 nt, Homo sapiens
  misc_RNA (1)...(19): siRNA sense strand
ccaacaugcccaaccugua

SEQ ID NO: 1271389 - RNA, 19 nt, Homo sapiens
  misc_RNA (1)...(19): siRNA sense strand
gaaacccacccuccaggau

SEQ ID NO: 1271390 - RNA, 19 nt, Homo sapiens
  misc_RNA (1)...(19): siRNA sense strand
caaaggaccggacccugau

SEQ ID NO: 1271391 - RNA, 19 nt, Homo sapiens
  misc_RNA (1)...(19): siRNA sense strand
gaaacuuugagaagacaau

SEQ ID NO: 1271392 - RNA, 19 nt, Homo sapiens
  misc_RNA (1)...(19): siRNA sense strand
gggauuaccggaagauucu

SEQ ID NO: 1271393 - RNA, 19 nt, Homo sapiens
  misc_RNA (1)...(19): siRNA sense strand
cauccgagaauuaaacaga

SEQ ID NO: 1271394 - RNA, 19 nt, Homo sapiens
  misc_RNA (1)...(19): siRNA sense strand
caggaaacuuugagaagac

SEQ ID NO: 1271395 - RNA, 19 nt, Homo sapiens
  misc_RNA (1)...(19): siRNA sense strand
ucaaugaguaccagagaau

SEQ ID NO: 1271396 - RNA, 19 nt, Homo sapiens
  misc_RNA (1)...(19): siRNA sense strand
gcaguucaaccaggacuau

SEQ ID NO: 1271397 - RNA, 19 nt, Homo sapiens
  misc_RNA (1)...(19): siRNA sense strand
gugccgagcuacccaggau

SEQ ID NO: 1271398 - RNA, 19 nt, Homo sapiens
  misc_RNA (1)...(19): siRNA sense strand
cagggaaaccgugaugaaa

SEQ ID NO: 1271399 - RNA, 19 nt, Homo sapiens
  misc_RNA (1)...(19): siRNA sense strand
aaucuuggcucugaugaag

SEQ ID NO: 1271400 - RNA, 19 nt, Homo sapiens
  misc_RNA (1)...(19): siRNA sense strand
ucagggaaaccgugaugaa

SEQ ID NO: 1271401 - RNA, 19 nt, Homo sapiens
  misc_RNA (1)...(19): siRNA sense strand
gagccuacaaagcagaauu

SEQ ID NO: 1271402 - RNA, 19 nt, Homo sapiens
  misc_RNA (1)...(19): siRNA sense strand
gacuaucucucgggaaugg

SEQ ID NO: 1271403 - RNA, 19 nt, Homo sapiens
  misc_RNA (1)...(19): siRNA sense strand
cggcuuacggcaaggauuu

SEQ ID NO: 1271404 - RNA, 19 nt, Homo sapiens
  misc_RNA (1)...(19): siRNA sense strand
gaucugugguggcaaugac

SEQ ID NO: 1271405 - RNA, 19 nt, Homo sapiens
  misc_RNA (1)...(19): siRNA sense strand
agaccgaccuccuggacau

SEQ ID NO: 1271406 - RNA, 19 nt, Homo sapiens
  misc_RNA (1)...(19): siRNA sense strand
gaauuaaacagagccuaca

SEQ ID NO: 1271407 - RNA, 19 nt, Homo sapiens
  misc_RNA (1)...(19): siRNA sense strand
gagccaacaugcccaaccu

SEQ ID NO: 1271408 - RNA, 19 nt, Homo sapiens
  misc_RNA (1)...(19): siRNA sense strand
cggaagauucugcugaaga

SEQ ID NO: 1271409 - RNA, 19 nt, Homo sapiens
  misc_RNA (1)...(19): siRNA sense strand
gccgggacauugagaagag

SEQ ID NO: 1271410 - RNA, 19 nt, Homo sapiens
  misc_RNA (1)...(19): siRNA sense strand
caaguucaaugcgguucug

SEQ ID NO: 1271411 - RNA, 19 nt, Homo sapiens
  misc_RNA (1)...(19): siRNA sense strand
ggagauacuucaggggauu

SEQ ID NO: 1271412 - RNA, 19 nt, Homo sapiens
  misc_RNA (1)...(19): siRNA sense strand
caucagaucagaguauaag

SEQ ID NO: 1271413 - RNA, 19 nt, Homo sapiens
  misc_RNA (1)...(19): siRNA sense strand
cggcagcagauccuacuuu

SEQ ID NO: 1271414 - RNA, 19 nt, Homo sapiens
  misc_RNA (1)...(19): siRNA sense strand
cgacacaucagggcacuuc

SEQ ID NO: 1271415 - RNA, 19 nt, Homo sapiens
  misc_RNA (1)...(19): siRNA sense strand
cagaguauaagcggaugua

SEQ ID NO: 1271416 - RNA, 19 nt, Homo sapiens
  misc_RNA (1)...(19): siRNA sense strand
cacugaugcucccggcuuu

SEQ ID NO: 1271417 - RNA, 19 nt, Homo sapiens
  misc_RNA (1)...(19): siRNA sense strand
aggacuaucucucgggaau

SEQ ID NO: 1271418 - RNA, 19 nt, Homo sapiens
  misc_RNA (1)...(19): siRNA sense strand
acagacgaguccaaguuca

SEQ ID NO: 1271419 - RNA, 19 nt, Homo sapiens
  misc_RNA (1)...(19): siRNA sense strand
gaauaccccagccuucuuu

SEQ ID NO: 1271420 - RNA, 19 nt, Homo sapiens
  misc_RNA (1)...(19): siRNA sense strand
aagccugccugauugagau

SEQ ID NO: 1271421 - RNA, 19 nt, Homo sapiens
  misc_RNA (1)...(19): siRNA sense strand
uuaaacagagccuacaaag

SEQ ID NO: 1271422 - RNA, 19 nt, Homo sapiens
  misc_RNA (1)...(19): siRNA sense strand
gacaaucuuggcucugaug

SEQ ID NO: 1271423 - RNA, 19 nt, Homo sapiens
  misc_RNA (1)...(19): siRNA sense strand
cagcagauccuacuuuccu

SEQ ID NO: 1271424 - RNA, 19 nt, Homo sapiens
  misc_RNA (1)...(19): siRNA sense strand
aaugaguaccagagaauga

SEQ ID NO: 1271425 - RNA, 19 nt, Homo sapiens
  misc_RNA (1)...(19): siRNA sense strand
gcagccuguuccucccuau

SEQ ID NO: 1271426 - RNA, 19 nt, Homo sapiens
  misc_RNA (1)...(19): siRNA sense strand
ggaacagacgaguccaagu

SEQ ID NO: 1271427 - RNA, 19 nt, Homo sapiens
  misc_RNA (1)...(19): siRNA sense strand
gagauaaaggaagccauca

SEQ ID NO: 1271428 - RNA, 19 nt, Homo sapiens
  misc_RNA (1)...(19): siRNA sense strand
ggagaaccgccugggaaca

SEQ ID NO: 1271429 - RNA, 19 nt, Homo sapiens
  misc_RNA (1)...(19): siRNA sense strand
acaagcagcggcagcagau

SEQ ID NO: 1271430 - RNA, 19 nt, Homo sapiens
  misc_RNA (1)...(19): siRNA sense strand
accggaagauucugcugaa

SEQ ID NO: 1271431 - RNA, 19 nt, Homo sapiens
  misc_RNA (1)...(19): siRNA sense strand
cagacgaguccaaguucaa

SEQ ID NO: 1271432 - RNA, 19 nt, Homo sapiens
  misc_RNA (1)...(19): siRNA sense strand
gagaaccgccugggaacag

SEQ ID NO: 1271433 - RNA, 19 nt, Homo sapiens
  misc_RNA (1)...(19): siRNA sense strand
gaugaagccugccugauug

SEQ ID NO: 1271434 - RNA, 19 nt, Homo sapiens
  misc_RNA (1)...(19): siRNA sense strand
gaacagacgaguccaaguu

SEQ ID NO: 1271435 - RNA, 19 nt, Homo sapiens
  misc_RNA (1)...(19): siRNA sense strand
ugaaaugucucaagaauac

SEQ ID NO: 1271436 - RNA, 19 nt, Homo sapiens
  misc_RNA (1)...(19): siRNA sense strand
gcacaaacguggacauguc

SEQ ID NO: 1271437 - RNA, 19 nt, Homo sapiens
  misc_RNA (1)...(19): siRNA sense strand
cuacaaagcagaauucaaa

SEQ ID NO: 1271438 - RNA, 19 nt, Homo sapiens
  misc_RNA (1)...(19): siRNA sense strand
ggaagauucugcugaagau

SEQ ID NO: 1271439 - RNA, 19 nt, Homo sapiens
  misc_RNA (1)...(19): siRNA sense strand
gaagaucugugguggcaau

SEQ ID NO: 1271440 - RNA, 19 nt, Homo sapiens
  misc_RNA (1)...(19): siRNA sense strand
aaacagagccuacaaagca

SEQ ID NO: 1271441 - RNA, 19 nt, Homo sapiens
  misc_RNA (1)...(19): siRNA sense strand
ggugaaaugucucaagaau

SEQ ID NO: 1271442 - RNA, 19 nt, Homo sapiens
  misc_RNA (1)...(19): siRNA sense strand
gagcacauccgagaauuaa

SEQ ID NO: 1271443 - RNA, 19 nt, Homo sapiens
  misc_RNA (1)...(19): siRNA sense strand
gacaucagaucagaguaua

SEQ ID NO: 1271444 - RNA, 19 nt, Homo sapiens
  misc_RNA (1)...(19): siRNA sense strand
gaucugaaaucugaacugu

SEQ ID NO: 1271445 - RNA, 19 nt, Homo sapiens
  misc_RNA (1)...(19): siRNA sense strand
ucugaaaucugaacuguca

SEQ ID NO: 1271446 - RNA, 19 nt, Homo sapiens
  misc_RNA (1)...(19): siRNA sense strand
ggacaucagaucagaguau

SEQ ID NO: 1271447 - RNA, 19 nt, Homo sapiens
  misc_RNA (1)...(19): siRNA sense strand
ucaggaaacuuugagaaga

SEQ ID NO: 1271448 - RNA, 19 nt, Homo sapiens
  misc_RNA (1)...(19): siRNA sense strand
ccaguccucuuugacauuu

SEQ ID NO: 1271449 - RNA, 19 nt, Homo sapiens
  misc_RNA (1)...(19): siRNA sense strand
ccuccaggaugcccucaua

SEQ ID NO: 1271450 - RNA, 19 nt, Homo sapiens
  misc_RNA (1)...(19): siRNA sense strand
guggugaaaugucucaaga

SEQ ID NO: 1271451 - RNA, 19 nt, Homo sapiens
  misc_RNA (1)...(19): siRNA sense strand
ugaugaagccugccugauu

SEQ ID NO: 1271452 - RNA, 19 nt, Homo sapiens
  misc_RNA (1)...(19): siRNA sense strand
gauccuacuuuccuucaag

SEQ ID NO: 1271453 - RNA, 19 nt, Homo sapiens
  misc_RNA (1)...(19): siRNA sense strand
gugaaaugucucaagaaua

SEQ ID NO: 1271454 - RNA, 19 nt, Homo sapiens
  misc_RNA (1)...(19): siRNA sense strand
gaacugucaggaaacuuug

SEQ ID NO: 1271455 - RNA, 19 nt, Homo sapiens
  misc_RNA (1)...(19): siRNA sense strand
gcacauccgagaauuaaac

SEQ ID NO: 1271456 - RNA, 19 nt, Homo sapiens
  misc_RNA (1)...(19): siRNA sense strand
gauaaaggaagccaucaag

SEQ ID NO: 1271457 - RNA, 19 nt, Homo sapiens
  misc_RNA (1)...(19): siRNA sense strand
ggcagcagauccuacuuuc

SEQ ID NO: 1271458 - RNA, 19 nt, Homo sapiens
  misc_RNA (1)...(19): siRNA sense strand
gagaugcccaggagcugua

SEQ ID NO: 1271459 - RNA, 19 nt, Homo sapiens
  misc_RNA (1)...(19): siRNA sense strand
caacaugcccaaccuguac

SEQ ID NO: 1271460 - RNA, 19 nt, Homo sapiens
  misc_RNA (1)...(19): siRNA sense strand
gggaaaccgugaugaaagc

SEQ ID NO: 1271461 - RNA, 19 nt, Homo sapiens
  misc_RNA (1)...(19): siRNA sense strand
ugaacugucaggaaacuuu

SEQ ID NO: 1271462 - RNA, 19 nt, Homo sapiens
  misc_RNA (1)...(19): siRNA sense strand
gaagccugccugauugaga

SEQ ID NO: 1271463 - RNA, 19 nt, Homo sapiens
  misc_RNA (1)...(19): siRNA sense strand
ugagcacauccgagaauua

SEQ ID NO: 1271464 - RNA, 19 nt, Homo sapiens
  misc_RNA (1)...(19): siRNA sense strand
ccaacaugcccaaccugua

SEQ ID NO: 1271465 - RNA, 19 nt, Homo sapiens
  misc_RNA (1)...(19): siRNA sense strand
gaaacccacccuccaggau

SEQ ID NO: 1271466 - RNA, 19 nt, Homo sapiens
  misc_RNA (1)...(19): siRNA sense strand
caaaggaccggacccugau

SEQ ID NO: 1271467 - RNA, 19 nt, Homo sapiens
  misc_RNA (1)...(19): siRNA sense strand
gaaacuuugagaagacaau

SEQ ID NO: 1271468 - RNA, 19 nt, Homo sapiens
  misc_RNA (1)...(19): siRNA sense strand
gggauuaccggaagauucu

SEQ ID NO: 1271469 - RNA, 19 nt, Homo sapiens
  misc_RNA (1)...(19): siRNA sense strand
cauccgagaauuaaacaga

SEQ ID NO: 1271470 - RNA, 19 nt, Homo sapiens
  misc_RNA (1)...(19): siRNA sense strand
caggaaacuuugagaagac

SEQ ID NO: 1271471 - RNA, 19 nt, Homo sapiens
  misc_RNA (1)...(19): siRNA sense strand
ucaaugaguaccagagaau

SEQ ID NO: 1271472 - RNA, 19 nt, Homo sapiens
  misc_RNA (1)...(19): siRNA sense strand
gcaguucaaccaggacuau

SEQ ID NO: 1271473 - RNA, 19 nt, Homo sapiens
  misc_RNA (1)...(19): siRNA sense strand
gugccgagcuacccaggau

SEQ ID NO: 1271474 - RNA, 19 nt, Homo sapiens
  misc_RNA (1)...(19): siRNA sense strand
cagggaaaccgugaugaaa

SEQ ID NO: 1271475 - RNA, 19 nt, Homo sapiens
  misc_RNA (1)...(19): siRNA sense strand
aaucuuggcucugaugaag

SEQ ID NO: 1271476 - RNA, 19 nt, Homo sapiens
  misc_RNA (1)...(19): siRNA sense strand
ucagggaaaccgugaugaa

SEQ ID NO: 1271477 - RNA, 19 nt, Homo sapiens
  misc_RNA (1)...(19): siRNA sense strand
gagccuacaaagcagaauu

SEQ ID NO: 1271478 - RNA, 19 nt, Homo sapiens
  misc_RNA (1)...(19): siRNA sense strand
gacuaucucucgggaaugg

SEQ ID NO: 1271479 - RNA, 19 nt, Homo sapiens
  misc_RNA (1)...(19): siRNA sense strand
cggcuuacggcaaggauuu

SEQ ID NO: 1271480 - RNA, 19 nt, Homo sapiens
  misc_RNA (1)...(19): siRNA sense strand
gaucugugguggcaaugac

SEQ ID NO: 1271481 - RNA, 19 nt, Homo sapiens
  misc_RNA (1)...(19): siRNA sense strand
agaccgaccuccuggacau

SEQ ID NO: 1271482 - RNA, 19 nt, Homo sapiens
  misc_RNA (1)...(19): siRNA sense strand
gaauuaaacagagccuaca

SEQ ID NO: 1271483 - RNA, 19 nt, Homo sapiens
  misc_RNA (1)...(19): siRNA sense strand
gagccaacaugcccaaccu

SEQ ID NO: 1271484 - RNA, 19 nt, Homo sapiens
  misc_RNA (1)...(19): siRNA sense strand
cggaagauucugcugaaga

SEQ ID NO: 1271485 - RNA, 19 nt, Homo sapiens
  misc_RNA (1)...(19): siRNA sense strand
gccgggacauugagaagag

SEQ ID NO: 1271486 - RNA, 19 nt, Homo sapiens
  misc_RNA (1)...(19): siRNA sense strand
caaguucaaugcgguucug

SEQ ID NO: 1271487 - RNA, 19 nt, Homo sapiens
  misc_RNA (1)...(19): siRNA sense strand
ggagauacuucaggggauu

SEQ ID NO: 1271488 - RNA, 19 nt, Homo sapiens
  misc_RNA (1)...(19): siRNA sense strand
caucagaucagaguauaag

SEQ ID NO: 1271489 - RNA, 19 nt, Homo sapiens
  misc_RNA (1)...(19): siRNA sense strand
cggcagcagauccuacuuu

SEQ ID NO: 1271490 - RNA, 19 nt, Homo sapiens
  misc_RNA (1)...(19): siRNA sense strand
cgacacaucagggcacuuc

SEQ ID NO: 1271491 - RNA, 19 nt, Homo sapiens
  misc_RNA (1)...(19): siRNA sense strand
cagaguauaagcggaugua

SEQ ID NO: 1271492 - RNA, 19 nt, Homo sapiens
  misc_RNA (1)...(19): siRNA sense strand
cacugaugcucccggcuuu

SEQ ID NO: 1271493 - RNA, 19 nt, Homo sapiens
  misc_RNA (1)...(19): siRNA sense strand
aggacuaucucucgggaau

SEQ ID NO: 1271494 - RNA, 19 nt, Homo sapiens
  misc_RNA (1)...(19): siRNA sense strand
acagacgaguccaaguuca

SEQ ID NO: 1271495 - RNA, 19 nt, Homo sapiens
  misc_RNA (1)...(19): siRNA sense strand
gaauaccccagccuucuuu

SEQ ID NO: 1271496 - RNA, 19 nt, Homo sapiens
  misc_RNA (1)...(19): siRNA sense strand
aagccugccugauugagau

SEQ ID NO: 1271497 - RNA, 19 nt, Homo sapiens
  misc_RNA (1)...(19): siRNA sense strand
uuaaacagagccuacaaag

SEQ ID NO: 1271498 - RNA, 19 nt, Homo sapiens
  misc_RNA (1)...(19): siRNA sense strand
gacaaucuuggcucugaug

SEQ ID NO: 1271499 - RNA, 19 nt, Homo sapiens
  misc_RNA (1)...(19): siRNA sense strand
cagcagauccuacuuuccu

SEQ ID NO: 1271500 - RNA, 19 nt, Homo sapiens
  misc_RNA (1)...(19): siRNA sense strand
aaugaguaccagagaauga

SEQ ID NO: 1271501 - RNA, 19 nt, Homo sapiens
  misc_RNA (1)...(19): siRNA sense strand
gcagccuguuccucccuau

SEQ ID NO: 1271502 - RNA, 19 nt, Homo sapiens
  misc_RNA (1)...(19): siRNA sense strand
ggaacagacgaguccaagu

SEQ ID NO: 1271503 - RNA, 19 nt, Homo sapiens
  misc_RNA (1)...(19): siRNA sense strand
gagauaaaggaagccauca

SEQ ID NO: 1271504 - RNA, 19 nt, Homo sapiens
  misc_RNA (1)...(19): siRNA sense strand
ggagaaccgccugggaaca

SEQ ID NO: 1271505 - RNA, 19 nt, Homo sapiens
  misc_RNA (1)...(19): siRNA sense strand
acaagcagcggcagcagau

SEQ ID NO: 1271506 - RNA, 19 nt, Homo sapiens
  misc_RNA (1)...(19): siRNA sense strand
accggaagauucugcugaa

SEQ ID NO: 1271507 - RNA, 19 nt, Homo sapiens
  misc_RNA (1)...(19): siRNA sense strand
cagacgaguccaaguucaa

SEQ ID NO: 1271508 - RNA, 19 nt, Homo sapiens
  misc_RNA (1)...(19): siRNA sense strand
gagaaccgccugggaacag

SEQ ID NO: 1271509 - RNA, 19 nt, Homo sapiens
  misc_RNA (1)...(19): siRNA sense strand
gaugaagccugccugauug

SEQ ID NO: 1271510 - RNA, 19 nt, Homo sapiens
  misc_RNA (1)...(19): siRNA sense strand
gaacagacgaguccaaguu

SEQ ID NO: 1271511 - RNA, 19 nt, Homo sapiens
  misc_RNA (1)...(19): siRNA sense strand
ugaaaugucucaagaauac

SEQ ID NO: 1271512 - RNA, 19 nt, Homo sapiens
  misc_RNA (1)...(19): siRNA sense strand
gcacaaacguggacauguc

SEQ ID NO: 1271513 - RNA, 19 nt, Homo sapiens
  misc_RNA (1)...(19): siRNA sense strand
cuacaaagcagaauucaaa

SEQ ID NO: 1271514 - RNA, 19 nt, Homo sapiens
  misc_RNA (1)...(19): siRNA sense strand
ggaagauucugcugaagau

SEQ ID NO: 1271515 - RNA, 19 nt, Homo sapiens
  misc_RNA (1)...(19): siRNA sense strand
gaagaucugugguggcaau

SEQ ID NO: 1271516 - RNA, 19 nt, Homo sapiens
  misc_RNA (1)...(19): siRNA sense strand
aaacagagccuacaaagca

SEQ ID NO: 1271517 - RNA, 19 nt, Homo sapiens
  misc_RNA (1)...(19): siRNA sense strand
ggugaaaugucucaagaau

SEQ ID NO: 1271518 - RNA, 19 nt, Homo sapiens
  misc_RNA (1)...(19): siRNA sense strand
gagcacauccgagaauuaa

SEQ ID NO: 1271519 - RNA, 19 nt, Homo sapiens
  misc_RNA (1)...(19): siRNA sense strand
gacaucagaucagaguaua

SEQ ID NO: 1271520 - RNA, 19 nt, Homo sapiens
  misc_RNA (1)...(19): siRNA sense strand
gaucugaaaucugaacugu

SEQ ID NO: 1271521 - RNA, 19 nt, Homo sapiens
  misc_RNA (1)...(19): siRNA sense strand
ucugaaaucugaacuguca

SEQ ID NO: 1271522 - RNA, 19 nt, Homo sapiens
  misc_RNA (1)...(19): siRNA sense strand
ggacaucagaucagaguau

SEQ ID NO: 1271523 - RNA, 19 nt, Homo sapiens
  misc_RNA (1)...(19): siRNA sense strand
ucaggaaacuuugagaaga

SEQ ID NO: 1271524 - RNA, 19 nt, Homo sapiens
  misc_RNA (1)...(19): siRNA sense strand
ccaguccucuuugacauuu

SEQ ID NO: 1271525 - RNA, 19 nt, Homo sapiens
  misc_RNA (1)...(19): siRNA sense strand
ccuccaggaugcccucaua

SEQ ID NO: 1271526 - RNA, 19 nt, Homo sapiens
  misc_RNA (1)...(19): siRNA sense strand
guggugaaaugucucaaga

SEQ ID NO: 1271527 - RNA, 19 nt, Homo sapiens
  misc_RNA (1)...(19): siRNA sense strand
ugaugaagccugccugauu

SEQ ID NO: 1271528 - RNA, 19 nt, Homo sapiens
  misc_RNA (1)...(19): siRNA sense strand
gauccuacuuuccuucaag

SEQ ID NO: 1271529 - RNA, 19 nt, Homo sapiens
  misc_RNA (1)...(19): siRNA sense strand
gugaaaugucucaagaaua

SEQ ID NO: 1271530 - RNA, 19 nt, Homo sapiens
  misc_RNA (1)...(19): siRNA sense strand
gaacugucaggaaacuuug

SEQ ID NO: 1271531 - RNA, 19 nt, Homo sapiens
  misc_RNA (1)...(19): siRNA sense strand
gcacauccgagaauuaaac

SEQ ID NO: 1271532 - RNA, 19 nt, Homo sapiens
  misc_RNA (1)...(19): siRNA sense strand
gauaaaggaagccaucaag

SEQ ID NO: 1271533 - RNA, 19 nt, Homo sapiens
  misc_RNA (1)...(19): siRNA sense strand
ggcagcagauccuacuuuc

SEQ ID NO: 1271534 - RNA, 19 nt, Homo sapiens
  misc_RNA (1)...(19): siRNA sense strand
gagaugcccaggagcugua

SEQ ID NO: 1271535 - RNA, 19 nt, Homo sapiens
  misc_RNA (1)...(19): siRNA sense strand
caacaugcccaaccuguac

SEQ ID NO: 1271536 - RNA, 19 nt, Homo sapiens
  misc_RNA (1)...(19): siRNA sense strand
gggaaaccgugaugaaagc

SEQ ID NO: 1271537 - RNA, 19 nt, Homo sapiens
  misc_RNA (1)...(19): siRNA sense strand
ugaacugucaggaaacuuu

SEQ ID NO: 1271538 - RNA, 19 nt, Homo sapiens
  misc_RNA (1)...(19): siRNA sense strand
gaagccugccugauugaga

SEQ ID NO: 1271539 - RNA, 19 nt, Homo sapiens
  misc_RNA (1)...(19): siRNA sense strand
ugagcacauccgagaauua

SEQ ID NO: 1271540 - RNA, 19 nt, Homo sapiens
  misc_RNA (1)...(19): siRNA sense strand
ccaacaugcccaaccugua

SEQ ID NO: 1271541 - RNA, 19 nt, Homo sapiens
  misc_RNA (1)...(19): siRNA sense strand
gaaacccacccuccaggau

SEQ ID NO: 1271542 - RNA, 19 nt, Homo sapiens
  misc_RNA (1)...(19): siRNA sense strand
caaaggaccggacccugau

SEQ ID NO: 1271543 - RNA, 19 nt, Homo sapiens
  misc_RNA (1)...(19): siRNA sense strand
gaaacuuugagaagacaau

SEQ ID NO: 1271544 - RNA, 19 nt, Homo sapiens
  misc_RNA (1)...(19): siRNA sense strand
gggauuaccggaagauucu

SEQ ID NO: 1271545 - RNA, 19 nt, Homo sapiens
  misc_RNA (1)...(19): siRNA sense strand
cauccgagaauuaaacaga

SEQ ID NO: 1271546 - RNA, 19 nt, Homo sapiens
  misc_RNA (1)...(19): siRNA sense strand
caggaaacuuugagaagac

SEQ ID NO: 1271547 - RNA, 19 nt, Homo sapiens
  misc_RNA (1)...(19): siRNA sense strand
ucaaugaguaccagagaau

SEQ ID NO: 1271548 - RNA, 19 nt, Homo sapiens
  misc_RNA (1)...(19): siRNA sense strand
gcaguucaaccaggacuau

SEQ ID NO: 1271549 - RNA, 19 nt, Homo sapiens
  misc_RNA (1)...(19): siRNA sense strand
gugccgagcuacccaggau

SEQ ID NO: 1271550 - RNA, 19 nt, Homo sapiens
  misc_RNA (1)...(19): siRNA sense strand
cagggaaaccgugaugaaa

SEQ ID NO: 1271551 - RNA, 19 nt, Homo sapiens
  misc_RNA (1)...(19): siRNA sense strand
aaucuuggcucugaugaag

SEQ ID NO: 1271552 - RNA, 19 nt, Homo sapiens
  misc_RNA (1)...(19): siRNA sense strand
ucagggaaaccgugaugaa

SEQ ID NO: 1271553 - RNA, 19 nt, Homo sapiens
  misc_RNA (1)...(19): siRNA sense strand
gagccuacaaagcagaauu

SEQ ID NO: 1271554 - RNA, 19 nt, Homo sapiens
  misc_RNA (1)...(19): siRNA sense strand
gacuaucucucgggaaugg

SEQ ID NO: 1271555 - RNA, 19 nt, Homo sapiens
  misc_RNA (1)...(19): siRNA sense strand
cggcuuacggcaaggauuu

SEQ ID NO: 1271556 - RNA, 19 nt, Homo sapiens
  misc_RNA (1)...(19): siRNA sense strand
gaucugugguggcaaugac

SEQ ID NO: 1271557 - RNA, 19 nt, Homo sapiens
  misc_RNA (1)...(19): siRNA sense strand
agaccgaccuccuggacau

SEQ ID NO: 1271558 - RNA, 19 nt, Homo sapiens
  misc_RNA (1)...(19): siRNA sense strand
gaauuaaacagagccuaca

SEQ ID NO: 1271559 - RNA, 19 nt, Homo sapiens
  misc_RNA (1)...(19): siRNA sense strand
gagccaacaugcccaaccu

SEQ ID NO: 1271560 - RNA, 19 nt, Homo sapiens
  misc_RNA (1)...(19): siRNA sense strand
cggaagauucugcugaaga

SEQ ID NO: 1271561 - RNA, 19 nt, Homo sapiens
  misc_RNA (1)...(19): siRNA sense strand
gccgggacauugagaagag

SEQ ID NO: 1271562 - RNA, 19 nt, Homo sapiens
  misc_RNA (1)...(19): siRNA sense strand
caaguucaaugcgguucug

SEQ ID NO: 1271563 - RNA, 19 nt, Homo sapiens
  misc_RNA (1)...(19): siRNA sense strand
ggagauacuucaggggauu

SEQ ID NO: 1271564 - RNA, 19 nt, Homo sapiens
  misc_RNA (1)...(19): siRNA sense strand
caucagaucagaguauaag

SEQ ID NO: 1271565 - RNA, 19 nt, Homo sapiens
  misc_RNA (1)...(19): siRNA sense strand
cggcagcagauccuacuuu

SEQ ID NO: 1271566 - RNA, 19 nt, Homo sapiens
  misc_RNA (1)...(19): siRNA sense strand
cgacacaucagggcacuuc

SEQ ID NO: 1271567 - RNA, 19 nt, Homo sapiens
  misc_RNA (1)...(19): siRNA sense strand
cagaguauaagcggaugua

SEQ ID NO: 1271568 - RNA, 19 nt, Homo sapiens
  misc_RNA (1)...(19): siRNA sense strand
cacugaugcucccggcuuu

SEQ ID NO: 1271569 - RNA, 19 nt, Homo sapiens
  misc_RNA (1)...(19): siRNA sense strand
aggacuaucucucgggaau

SEQ ID NO: 1271570 - RNA, 19 nt, Homo sapiens
  misc_RNA (1)...(19): siRNA sense strand
acagacgaguccaaguuca

SEQ ID NO: 1271571 - RNA, 19 nt, Homo sapiens
  misc_RNA (1)...(19): siRNA sense strand
gaauaccccagccuucuuu

SEQ ID NO: 1271572 - RNA, 19 nt, Homo sapiens
  misc_RNA (1)...(19): siRNA sense strand
aagccugccugauugagau

SEQ ID NO: 1271573 - RNA, 19 nt, Homo sapiens
  misc_RNA (1)...(19): siRNA sense strand
uuaaacagagccuacaaag

SEQ ID NO: 1271574 - RNA, 19 nt, Homo sapiens
  misc_RNA (1)...(19): siRNA sense strand
gacaaucuuggcucugaug

SEQ ID NO: 1271575 - RNA, 19 nt, Homo sapiens
  misc_RNA (1)...(19): siRNA sense strand
cagcagauccuacuuuccu

SEQ ID NO: 1271576 - RNA, 19 nt, Homo sapiens
  misc_RNA (1)...(19): siRNA sense strand
aaugaguaccagagaauga

SEQ ID NO: 1271577 - RNA, 19 nt, Homo sapiens
  misc_RNA (1)...(19): siRNA sense strand
gcagccuguuccucccuau

SEQ ID NO: 1271578 - RNA, 19 nt, Homo sapiens
  misc_RNA (1)...(19): siRNA sense strand
ggaacagacgaguccaagu

SEQ ID NO: 1271579 - RNA, 19 nt, Homo sapiens
  misc_RNA (1)...(19): siRNA sense strand
gagauaaaggaagccauca

SEQ ID NO: 1271580 - RNA, 19 nt, Homo sapiens
  misc_RNA (1)...(19): siRNA sense strand
ggagaaccgccugggaaca

SEQ ID NO: 1271581 - RNA, 19 nt, Homo sapiens
  misc_RNA (1)...(19): siRNA sense strand
acaagcagcggcagcagau

SEQ ID NO: 1271582 - RNA, 19 nt, Homo sapiens
  misc_RNA (1)...(19): siRNA sense strand
accggaagauucugcugaa

SEQ ID NO: 1271583 - RNA, 19 nt, Homo sapiens
  misc_RNA (1)...(19): siRNA sense strand
cagacgaguccaaguucaa

SEQ ID NO: 1271584 - RNA, 19 nt, Homo sapiens
  misc_RNA (1)...(19): siRNA sense strand
gagaaccgccugggaacag

SEQ ID NO: 1271585 - RNA, 19 nt, Homo sapiens
  misc_RNA (1)...(19): siRNA sense strand
cauuuaacgucauauguga

SEQ ID NO: 1271586 - RNA, 19 nt, Homo sapiens
  misc_RNA (1)...(19): siRNA sense strand
cgucauaugugauaaugug

SEQ ID NO: 1271587 - RNA, 19 nt, Homo sapiens
  misc_RNA (1)...(19): siRNA sense strand
ggaagaacacagagaagga

SEQ ID NO: 1271588 - RNA, 19 nt, Homo sapiens
  misc_RNA (1)...(19): siRNA sense strand
ccugguggcugaccuggua

SEQ ID NO: 1271589 - RNA, 19 nt, Homo sapiens
  misc_RNA (1)...(19): siRNA sense strand
uggcugaccugguacaaga

SEQ ID NO: 1271590 - RNA, 19 nt, Homo sapiens
  misc_RNA (1)...(19): siRNA sense strand
agaccugugugcagcauuu

SEQ ID NO: 1271591 - RNA, 19 nt, Homo sapiens
  misc_RNA (1)...(19): siRNA sense strand
gcauuuaacgucauaugug

SEQ ID NO: 1271592 - RNA, 19 nt, Homo sapiens
  misc_RNA (1)...(19): siRNA sense strand
ucacugagaaucuggaaga

SEQ ID NO: 1271593 - RNA, 19 nt, Homo sapiens
  misc_RNA (1)...(19): siRNA sense strand
cugagaaucuggaagaaca

SEQ ID NO: 1271594 - RNA, 19 nt, Homo sapiens
  misc_RNA (1)...(19): siRNA sense strand
gugcgggagucacugagaa

SEQ ID NO: 1271595 - RNA, 19 nt, Homo sapiens
  misc_RNA (1)...(19): siRNA sense strand
gaagaccugugugcagcau

SEQ ID NO: 1271596 - RNA, 19 nt, Homo sapiens
  misc_RNA (1)...(19): siRNA sense strand
acaccaagaucgacagcau

SEQ ID NO: 1271597 - RNA, 19 nt, Homo sapiens
  misc_RNA (1)...(19): siRNA sense strand
gccuagaccucuucuccau

SEQ ID NO: 1271598 - RNA, 19 nt, Homo sapiens
  misc_RNA (1)...(19): siRNA sense strand
ugaccgagcucaaguuccu

SEQ ID NO: 1271599 - RNA, 19 nt, Homo sapiens
  misc_RNA (1)...(19): siRNA sense strand
gggagucacugagaaucug

SEQ ID NO: 1271600 - RNA, 19 nt, Homo sapiens
  misc_RNA (1)...(19): siRNA sense strand
gaacacagagaaggagaac

SEQ ID NO: 1271601 - RNA, 19 nt, Homo sapiens
  misc_RNA (1)...(19): siRNA sense strand
ugcagcauuuaacgucaua

SEQ ID NO: 1271602 - RNA, 19 nt, Homo sapiens
  misc_RNA (1)...(19): siRNA sense strand
gauaauguggggaaagauu

SEQ ID NO: 1271603 - RNA, 19 nt, Homo sapiens
  misc_RNA (1)...(19): siRNA sense strand
agaaggagaacgcaacagu

SEQ ID NO: 1271604 - RNA, 19 nt, Homo sapiens
  misc_RNA (1)...(19): siRNA sense strand
gaccugugugcagcauuua

SEQ ID NO: 1271605 - RNA, 19 nt, Homo sapiens
  misc_RNA (1)...(19): siRNA sense strand
gugcagcauuuaacgucau

SEQ ID NO: 1271606 - RNA, 19 nt, Homo sapiens
  misc_RNA (1)...(19): siRNA sense strand
ggaacucagacgcaucuac

SEQ ID NO: 1271607 - RNA, 19 nt, Homo sapiens
  misc_RNA (1)...(19): siRNA sense strand
ggcaaaugcugaaagauuc

SEQ ID NO: 1271608 - RNA, 19 nt, Homo sapiens
  misc_RNA (1)...(19): siRNA sense strand
gggcauauacuguguagga

SEQ ID NO: 1271609 - RNA, 19 nt, Homo sapiens
  misc_RNA (1)...(19): siRNA sense strand
gagcacagcgggcauauac

SEQ ID NO: 1271610 - RNA, 19 nt, Homo sapiens
  misc_RNA (1)...(19): siRNA sense strand
gguggcaaaugcugaaaga

SEQ ID NO: 1271611 - RNA, 19 nt, Homo sapiens
  misc_RNA (1)...(19): siRNA sense strand
gcacagcgggcauauacug

SEQ ID NO: 1271612 - RNA, 19 nt, Homo sapiens
  misc_RNA (1)...(19): siRNA sense strand
ugccaacccugaagauuga

SEQ ID NO: 1271613 - RNA, 19 nt, Homo sapiens
  misc_RNA (1)...(19): siRNA sense strand
uggcaaaugcugaaagauu

SEQ ID NO: 1271614 - RNA, 19 nt, Homo sapiens
  misc_RNA (1)...(19): siRNA sense strand
gugccaacccugaagauug

SEQ ID NO: 1271615 - RNA, 19 nt, Homo sapiens
  misc_RNA (1)...(19): siRNA sense strand
ccagaacgccaucacuugu

SEQ ID NO: 1271616 - RNA, 19 nt, Homo sapiens
  misc_RNA (1)...(19): siRNA sense strand
gcaagugggagaggagaug

SEQ ID NO: 1271617 - RNA, 19 nt, Homo sapiens
  misc_RNA (1)...(19): siRNA sense strand
gcccagaacgccaucacuu

SEQ ID NO: 1271618 - RNA, 19 nt, Homo sapiens
  misc_RNA (1)...(19): siRNA sense strand
cagcgggcauauacugugu

SEQ ID NO: 1271619 - RNA, 19 nt, Homo sapiens
  misc_RNA (1)...(19): siRNA sense strand
gcgggcauauacuguguag

SEQ ID NO: 1271620 - RNA, 19 nt, Homo sapiens
  misc_RNA (1)...(19): siRNA sense strand
accaucagcuccaucaaca

SEQ ID NO: 1271621 - RNA, 19 nt, Homo sapiens
  misc_RNA (1)...(19): siRNA sense strand
uuaacgcccuggagcagau

SEQ ID NO: 1271622 - RNA, 19 nt, Homo sapiens
  misc_RNA (1)...(19): siRNA sense strand
caucagcuccaucaacaag

SEQ ID NO: 1271623 - RNA, 19 nt, Homo sapiens
  misc_RNA (1)...(19): siRNA sense strand
aaucaccauucaccaguca

SEQ ID NO: 1271624 - RNA, 19 nt, Homo sapiens
  misc_RNA (1)...(19): siRNA sense strand
cccugaagauugauggaau

SEQ ID NO: 1271625 - RNA, 19 nt, Homo sapiens
  misc_RNA (1)...(19): siRNA sense strand
ucagcuccaucaacaagag

SEQ ID NO: 1271626 - RNA, 19 nt, Homo sapiens
  misc_RNA (1)...(19): siRNA sense strand
agaggcugcuggucuugga

SEQ ID NO: 1271627 - RNA, 19 nt, Homo sapiens
  misc_RNA (1)...(19): siRNA sense strand
cccagaacgccaucacuug

SEQ ID NO: 1271628 - RNA, 19 nt, Homo sapiens
  misc_RNA (1)...(19): siRNA sense strand
ugucuguccugaagcaagu

SEQ ID NO: 1271629 - RNA, 19 nt, Homo sapiens
  misc_RNA (1)...(19): siRNA sense strand
gaauugcucuggccuugaa

SEQ ID NO: 1271630 - RNA, 19 nt, Homo sapiens
  misc_RNA (1)...(19): siRNA sense strand
ggcaaaugcugaaagauuc

SEQ ID NO: 1271631 - RNA, 19 nt, Homo sapiens
  misc_RNA (1)...(19): siRNA sense strand
ccaucaaucucauaaagga

SEQ ID NO: 1271632 - RNA, 19 nt, Homo sapiens
  misc_RNA (1)...(19): siRNA sense strand
gggcauauacuguguagga

SEQ ID NO: 1271633 - RNA, 19 nt, Homo sapiens
  misc_RNA (1)...(19): siRNA sense strand
gagcacagcgggcauauac

SEQ ID NO: 1271634 - RNA, 19 nt, Homo sapiens
  misc_RNA (1)...(19): siRNA sense strand
gguggcaaaugcugaaaga

SEQ ID NO: 1271635 - RNA, 19 nt, Homo sapiens
  misc_RNA (1)...(19): siRNA sense strand
gcccaucaaucucauaaag

SEQ ID NO: 1271636 - RNA, 19 nt, Homo sapiens
  misc_RNA (1)...(19): siRNA sense strand
gcacagcgggcauauacug

SEQ ID NO: 1271637 - RNA, 19 nt, Homo sapiens
  misc_RNA (1)...(19): siRNA sense strand
ugccaacccugaagauuga

SEQ ID NO: 1271638 - RNA, 19 nt, Homo sapiens
  misc_RNA (1)...(19): siRNA sense strand
uggcaaaugcugaaagauu

SEQ ID NO: 1271639 - RNA, 19 nt, Homo sapiens
  misc_RNA (1)...(19): siRNA sense strand
cauccucuauuccuauuuc

SEQ ID NO: 1271640 - RNA, 19 nt, Homo sapiens
  misc_RNA (1)...(19): siRNA sense strand
ucauggagaguucgaauug

SEQ ID NO: 1271641 - RNA, 19 nt, Homo sapiens
  misc_RNA (1)...(19): siRNA sense strand
gugccaacccugaagauug

SEQ ID NO: 1271642 - RNA, 19 nt, Homo sapiens
  misc_RNA (1)...(19): siRNA sense strand
ggacuuccaggcacugaau

SEQ ID NO: 1271643 - RNA, 19 nt, Homo sapiens
  misc_RNA (1)...(19): siRNA sense strand
ccagaacgccaucacuugu

SEQ ID NO: 1271644 - RNA, 19 nt, Homo sapiens
  misc_RNA (1)...(19): siRNA sense strand
cgaagcuccugcucaugga

SEQ ID NO: 1271645 - RNA, 19 nt, Homo sapiens
  misc_RNA (1)...(19): siRNA sense strand
gcaagugggagaggagaug

SEQ ID NO: 1271646 - RNA, 19 nt, Homo sapiens
  misc_RNA (1)...(19): siRNA sense strand
gcccagaacgccaucacuu

SEQ ID NO: 1271647 - RNA, 19 nt, Homo sapiens
  misc_RNA (1)...(19): siRNA sense strand
cagcgggcauauacugugu

SEQ ID NO: 1271648 - RNA, 19 nt, Homo sapiens
  misc_RNA (1)...(19): siRNA sense strand
uccaggcacugaauccuau

SEQ ID NO: 1271649 - RNA, 19 nt, Homo sapiens
  misc_RNA (1)...(19): siRNA sense strand
gcgggcauauacuguguag

SEQ ID NO: 1271650 - RNA, 19 nt, Homo sapiens
  misc_RNA (1)...(19): siRNA sense strand
accaucagcuccaucaaca

SEQ ID NO: 1271651 - RNA, 19 nt, Homo sapiens
  misc_RNA (1)...(19): siRNA sense strand
uuaacgcccuggagcagau

SEQ ID NO: 1271652 - RNA, 19 nt, Homo sapiens
  misc_RNA (1)...(19): siRNA sense strand
caucagcuccaucaacaag

SEQ ID NO: 1271653 - RNA, 19 nt, Homo sapiens
  misc_RNA (1)...(19): siRNA sense strand
gccaacaguuuucuaagga

SEQ ID NO: 1271654 - RNA, 19 nt, Homo sapiens
  misc_RNA (1)...(19): siRNA sense strand
aaucaccauucaccaguca

SEQ ID NO: 1271655 - RNA, 19 nt, Homo sapiens
  misc_RNA (1)...(19): siRNA sense strand
agacggugcccaucaaucu

SEQ ID NO: 1271656 - RNA, 19 nt, Homo sapiens
  misc_RNA (1)...(19): siRNA sense strand
gcucauggagaguucgaau

SEQ ID NO: 1271657 - RNA, 19 nt, Homo sapiens
  misc_RNA (1)...(19): siRNA sense strand
ggcacugaauccuaugaag

SEQ ID NO: 1271658 - RNA, 19 nt, Homo sapiens
  misc_RNA (1)...(19): siRNA sense strand
gugcccaucaaucucauaa

SEQ ID NO: 1271659 - RNA, 19 nt, Homo sapiens
  misc_RNA (1)...(19): siRNA sense strand
cccugaagauugauggaau

SEQ ID NO: 1271660 - RNA, 19 nt, Homo sapiens
  misc_RNA (1)...(19): siRNA sense strand
cccauccucuauuccuauu

SEQ ID NO: 1271661 - RNA, 19 nt, Homo sapiens
  misc_RNA (1)...(19): siRNA sense strand
agaggcugcuggucuugga

SEQ ID NO: 1271662 - RNA, 19 nt, Homo sapiens
  misc_RNA (1)...(19): siRNA sense strand
ucagcuccaucaacaagag

SEQ ID NO: 1271663 - RNA, 19 nt, Homo sapiens
  misc_RNA (1)...(19): siRNA sense strand
ugucuguccugaagcaagu

SEQ ID NO: 1271664 - RNA, 19 nt, Homo sapiens
  misc_RNA (1)...(19): siRNA sense strand
gcccauccucuauuccuau

SEQ ID NO: 1271665 - RNA, 19 nt, Homo sapiens
  misc_RNA (1)...(19): siRNA sense strand
cccagaacgccaucacuug

SEQ ID NO: 1271666 - RNA, 19 nt, Homo sapiens
  misc_RNA (1)...(19): siRNA sense strand
gaauugcucuggccuugaa

SEQ ID NO: 1271667 - RNA, 19 nt, Homo sapiens
  misc_RNA (1)...(19): siRNA sense strand
ggcaaaugcugaaagauuc

SEQ ID NO: 1271668 - RNA, 19 nt, Homo sapiens
  misc_RNA (1)...(19): siRNA sense strand
ccaucaaucucauaaagga

SEQ ID NO: 1271669 - RNA, 19 nt, Homo sapiens
  misc_RNA (1)...(19): siRNA sense strand
gggcauauacuguguagga

SEQ ID NO: 1271670 - RNA, 19 nt, Homo sapiens
  misc_RNA (1)...(19): siRNA sense strand
gagcacagcgggcauauac

SEQ ID NO: 1271671 - RNA, 19 nt, Homo sapiens
  misc_RNA (1)...(19): siRNA sense strand
gguggcaaaugcugaaaga

SEQ ID NO: 1271672 - RNA, 19 nt, Homo sapiens
  misc_RNA (1)...(19): siRNA sense strand
gcccaucaaucucauaaag

SEQ ID NO: 1271673 - RNA, 19 nt, Homo sapiens
  misc_RNA (1)...(19): siRNA sense strand
gcacagcgggcauauacug

SEQ ID NO: 1271674 - RNA, 19 nt, Homo sapiens
  misc_RNA (1)...(19): siRNA sense strand
ugccaacccugaagauuga

SEQ ID NO: 1271675 - RNA, 19 nt, Homo sapiens
  misc_RNA (1)...(19): siRNA sense strand
uggcaaaugcugaaagauu

SEQ ID NO: 1271676 - RNA, 19 nt, Homo sapiens
  misc_RNA (1)...(19): siRNA sense strand
cauccucuauuccuauuuc

SEQ ID NO: 1271677 - RNA, 19 nt, Homo sapiens
  misc_RNA (1)...(19): siRNA sense strand
ucauggagaguucgaauug

SEQ ID NO: 1271678 - RNA, 19 nt, Homo sapiens
  misc_RNA (1)...(19): siRNA sense strand
gugccaacccugaagauug

SEQ ID NO: 1271679 - RNA, 19 nt, Homo sapiens
  misc_RNA (1)...(19): siRNA sense strand
ggacuuccaggcacugaau

SEQ ID NO: 1271680 - RNA, 19 nt, Homo sapiens
  misc_RNA (1)...(19): siRNA sense strand
ccagaacgccaucacuugu

SEQ ID NO: 1271681 - RNA, 19 nt, Homo sapiens
  misc_RNA (1)...(19): siRNA sense strand
cgaagcuccugcucaugga

SEQ ID NO: 1271682 - RNA, 19 nt, Homo sapiens
  misc_RNA (1)...(19): siRNA sense strand
gcaagugggagaggagaug

SEQ ID NO: 1271683 - RNA, 19 nt, Homo sapiens
  misc_RNA (1)...(19): siRNA sense strand
gcccagaacgccaucacuu

SEQ ID NO: 1271684 - RNA, 19 nt, Homo sapiens
  misc_RNA (1)...(19): siRNA sense strand
cagcgggcauauacugugu

SEQ ID NO: 1271685 - RNA, 19 nt, Homo sapiens
  misc_RNA (1)...(19): siRNA sense strand
uccaggcacugaauccuau

SEQ ID NO: 1271686 - RNA, 19 nt, Homo sapiens
  misc_RNA (1)...(19): siRNA sense strand
gcgggcauauacuguguag

SEQ ID NO: 1271687 - RNA, 19 nt, Homo sapiens
  misc_RNA (1)...(19): siRNA sense strand
accaucagcuccaucaaca

SEQ ID NO: 1271688 - RNA, 19 nt, Homo sapiens
  misc_RNA (1)...(19): siRNA sense strand
uuaacgcccuggagcagau

SEQ ID NO: 1271689 - RNA, 19 nt, Homo sapiens
  misc_RNA (1)...(19): siRNA sense strand
caucagcuccaucaacaag

SEQ ID NO: 1271690 - RNA, 19 nt, Homo sapiens
  misc_RNA (1)...(19): siRNA sense strand
gccaacaguuuucuaagga

SEQ ID NO: 1271691 - RNA, 19 nt, Homo sapiens
  misc_RNA (1)...(19): siRNA sense strand
aaucaccauucaccaguca

SEQ ID NO: 1271692 - RNA, 19 nt, Homo sapiens
  misc_RNA (1)...(19): siRNA sense strand
agacggugcccaucaaucu

SEQ ID NO: 1271693 - RNA, 19 nt, Homo sapiens
  misc_RNA (1)...(19): siRNA sense strand
gcucauggagaguucgaau

SEQ ID NO: 1271694 - RNA, 19 nt, Homo sapiens
  misc_RNA (1)...(19): siRNA sense strand
ggcacugaauccuaugaag

SEQ ID NO: 1271695 - RNA, 19 nt, Homo sapiens
  misc_RNA (1)...(19): siRNA sense strand
gugcccaucaaucucauaa

SEQ ID NO: 1271696 - RNA, 19 nt, Homo sapiens
  misc_RNA (1)...(19): siRNA sense strand
cccugaagauugauggaau

SEQ ID NO: 1271697 - RNA, 19 nt, Homo sapiens
  misc_RNA (1)...(19): siRNA sense strand
cccauccucuauuccuauu

SEQ ID NO: 1271698 - RNA, 19 nt, Homo sapiens
  misc_RNA (1)...(19): siRNA sense strand
agaggcugcuggucuugga

SEQ ID NO: 1271699 - RNA, 19 nt, Homo sapiens
  misc_RNA (1)...(19): siRNA sense strand
ucagcuccaucaacaagag

SEQ ID NO: 1271700 - RNA, 19 nt, Homo sapiens
  misc_RNA (1)...(19): siRNA sense strand
ugucuguccugaagcaagu

SEQ ID NO: 1271701 - RNA, 19 nt, Homo sapiens
  misc_RNA (1)...(19): siRNA sense strand
gcccauccucuauuccuau

SEQ ID NO: 1271702 - RNA, 19 nt, Homo sapiens
  misc_RNA (1)...(19): siRNA sense strand
cccagaacgccaucacuug

SEQ ID NO: 1271703 - RNA, 19 nt, Homo sapiens
  misc_RNA (1)...(19): siRNA sense strand
ggcaaaugcugaaagauuc

SEQ ID NO: 1271704 - RNA, 19 nt, Homo sapiens
  misc_RNA (1)...(19): siRNA sense strand
gggcauauacuguguagga

SEQ ID NO: 1271705 - RNA, 19 nt, Homo sapiens
  misc_RNA (1)...(19): siRNA sense strand
gagcacagcgggcauauac

SEQ ID NO: 1271706 - RNA, 19 nt, Homo sapiens
  misc_RNA (1)...(19): siRNA sense strand
gguggcaaaugcugaaaga

SEQ ID NO: 1271707 - RNA, 19 nt, Homo sapiens
  misc_RNA (1)...(19): siRNA sense strand
gcacagcgggcauauacug

SEQ ID NO: 1271708 - RNA, 19 nt, Homo sapiens
  misc_RNA (1)...(19): siRNA sense strand
ugccaacccugaagauuga

SEQ ID NO: 1271709 - RNA, 19 nt, Homo sapiens
  misc_RNA (1)...(19): siRNA sense strand
uggcaaaugcugaaagauu

SEQ ID NO: 1271710 - RNA, 19 nt, Homo sapiens
  misc_RNA (1)...(19): siRNA sense strand
gugccaacccugaagauug

SEQ ID NO: 1271711 - RNA, 19 nt, Homo sapiens
  misc_RNA (1)...(19): siRNA sense strand
ccagaacgccaucacuugu

SEQ ID NO: 1271712 - RNA, 19 nt, Homo sapiens
  misc_RNA (1)...(19): siRNA sense strand
gcaagugggagaggagaug

SEQ ID NO: 1271713 - RNA, 19 nt, Homo sapiens
  misc_RNA (1)...(19): siRNA sense strand
gcccagaacgccaucacuu

SEQ ID NO: 1271714 - RNA, 19 nt, Homo sapiens
  misc_RNA (1)...(19): siRNA sense strand
cagcgggcauauacugugu

SEQ ID NO: 1271715 - RNA, 19 nt, Homo sapiens
  misc_RNA (1)...(19): siRNA sense strand
gcgggcauauacuguguag

SEQ ID NO: 1271716 - RNA, 19 nt, Homo sapiens
  misc_RNA (1)...(19): siRNA sense strand
accaucagcuccaucaaca

SEQ ID NO: 1271717 - RNA, 19 nt, Homo sapiens
  misc_RNA (1)...(19): siRNA sense strand
uuaacgcccuggagcagau

SEQ ID NO: 1271718 - RNA, 19 nt, Homo sapiens
  misc_RNA (1)...(19): siRNA sense strand
caucagcuccaucaacaag

SEQ ID NO: 1271719 - RNA, 19 nt, Homo sapiens
  misc_RNA (1)...(19): siRNA sense strand
aaucaccauucaccaguca

SEQ ID NO: 1271720 - RNA, 19 nt, Homo sapiens
  misc_RNA (1)...(19): siRNA sense strand
cccugaagauugauggaau

SEQ ID NO: 1271721 - RNA, 19 nt, Homo sapiens
  misc_RNA (1)...(19): siRNA sense strand
ucagcuccaucaacaagag

SEQ ID NO: 1271722 - RNA, 19 nt, Homo sapiens
  misc_RNA (1)...(19): siRNA sense strand
agaggcugcuggucuugga

SEQ ID NO: 1271723 - RNA, 19 nt, Homo sapiens
  misc_RNA (1)...(19): siRNA sense strand
cccagaacgccaucacuug

SEQ ID NO: 1271724 - RNA, 19 nt, Homo sapiens
  misc_RNA (1)...(19): siRNA sense strand
ugucuguccugaagcaagu

SEQ ID NO: 1271725 - RNA, 19 nt, Homo sapiens
  misc_RNA (1)...(19): siRNA sense strand
gaauugcucuggccuugaa

SEQ ID NO: 1271726 - RNA, 19 nt, Homo sapiens
  misc_RNA (1)...(19): siRNA sense strand
ggcaaaugcugaaagauuc

SEQ ID NO: 1271727 - RNA, 19 nt, Homo sapiens
  misc_RNA (1)...(19): siRNA sense strand
ccaucaaucucauaaagga

SEQ ID NO: 1271728 - RNA, 19 nt, Homo sapiens
  misc_RNA (1)...(19): siRNA sense strand
gggcauauacuguguagga

SEQ ID NO: 1271729 - RNA, 19 nt, Homo sapiens
  misc_RNA (1)...(19): siRNA sense strand
gagcacagcgggcauauac

SEQ ID NO: 1271730 - RNA, 19 nt, Homo sapiens
  misc_RNA (1)...(19): siRNA sense strand
gguggcaaaugcugaaaga

SEQ ID NO: 1271731 - RNA, 19 nt, Homo sapiens
  misc_RNA (1)...(19): siRNA sense strand
gcccaucaaucucauaaag

SEQ ID NO: 1271732 - RNA, 19 nt, Homo sapiens
  misc_RNA (1)...(19): siRNA sense strand
gcacagcgggcauauacug

SEQ ID NO: 1271733 - RNA, 19 nt, Homo sapiens
  misc_RNA (1)...(19): siRNA sense strand
ugccaacccugaagauuga

SEQ ID NO: 1271734 - RNA, 19 nt, Homo sapiens
  misc_RNA (1)...(19): siRNA sense strand
uggcaaaugcugaaagauu

SEQ ID NO: 1271735 - RNA, 19 nt, Homo sapiens
  misc_RNA (1)...(19): siRNA sense strand
cauccucuauuccuauuuc

SEQ ID NO: 1271736 - RNA, 19 nt, Homo sapiens
  misc_RNA (1)...(19): siRNA sense strand
ucauggagaguucgaauug

SEQ ID NO: 1271737 - RNA, 19 nt, Homo sapiens
  misc_RNA (1)...(19): siRNA sense strand
gugccaacccugaagauug

SEQ ID NO: 1271738 - RNA, 19 nt, Homo sapiens
  misc_RNA (1)...(19): siRNA sense strand
ggacuuccaggcacugaau

SEQ ID NO: 1271739 - RNA, 19 nt, Homo sapiens
  misc_RNA (1)...(19): siRNA sense strand
ccagaacgccaucacuugu

SEQ ID NO: 1271740 - RNA, 19 nt, Homo sapiens
  misc_RNA (1)...(19): siRNA sense strand
cgaagcuccugcucaugga

SEQ ID NO: 1271741 - RNA, 19 nt, Homo sapiens
  misc_RNA (1)...(19): siRNA sense strand
gcaagugggagaggagaug

SEQ ID NO: 1271742 - RNA, 19 nt, Homo sapiens
  misc_RNA (1)...(19): siRNA sense strand
gcccagaacgccaucacuu

SEQ ID NO: 1271743 - RNA, 19 nt, Homo sapiens
  misc_RNA (1)...(19): siRNA sense strand
cagcgggcauauacugugu

SEQ ID NO: 1271744 - RNA, 19 nt, Homo sapiens
  misc_RNA (1)...(19): siRNA sense strand
uccaggcacugaauccuau

SEQ ID NO: 1271745 - RNA, 19 nt, Homo sapiens
  misc_RNA (1)...(19): siRNA sense strand
gcgggcauauacuguguag

SEQ ID NO: 1271746 - RNA, 19 nt, Homo sapiens
  misc_RNA (1)...(19): siRNA sense strand
accaucagcuccaucaaca

SEQ ID NO: 1271747 - RNA, 19 nt, Homo sapiens
  misc_RNA (1)...(19): siRNA sense strand
uuaacgcccuggagcagau

SEQ ID NO: 1271748 - RNA, 19 nt, Homo sapiens
  misc_RNA (1)...(19): siRNA sense strand
caucagcuccaucaacaag

SEQ ID NO: 1271749 - RNA, 19 nt, Homo sapiens
  misc_RNA (1)...(19): siRNA sense strand
gccaacaguuuucuaagga

SEQ ID NO: 1271750 - RNA, 19 nt, Homo sapiens
  misc_RNA (1)...(19): siRNA sense strand
aaucaccauucaccaguca

SEQ ID NO: 1271751 - RNA, 19 nt, Homo sapiens
  misc_RNA (1)...(19): siRNA sense strand
agacggugcccaucaaucu

SEQ ID NO: 1271752 - RNA, 19 nt, Homo sapiens
  misc_RNA (1)...(19): siRNA sense strand
gcucauggagaguucgaau

SEQ ID NO: 1271753 - RNA, 19 nt, Homo sapiens
  misc_RNA (1)...(19): siRNA sense strand
ggcacugaauccuaugaag

SEQ ID NO: 1271754 - RNA, 19 nt, Homo sapiens
  misc_RNA (1)...(19): siRNA sense strand
gugcccaucaaucucauaa

SEQ ID NO: 1271755 - RNA, 19 nt, Homo sapiens
  misc_RNA (1)...(19): siRNA sense strand
cccugaagauugauggaau

SEQ ID NO: 1271756 - RNA, 19 nt, Homo sapiens
  misc_RNA (1)...(19): siRNA sense strand
cccauccucuauuccuauu

SEQ ID NO: 1271757 - RNA, 19 nt, Homo sapiens
  misc_RNA (1)...(19): siRNA sense strand
agaggcugcuggucuugga

SEQ ID NO: 1271758 - RNA, 19 nt, Homo sapiens
  misc_RNA (1)...(19): siRNA sense strand
ucagcuccaucaacaagag

SEQ ID NO: 1271759 - RNA, 19 nt, Homo sapiens
  misc_RNA (1)...(19): siRNA sense strand
ugucuguccugaagcaagu

SEQ ID NO: 1271760 - RNA, 19 nt, Homo sapiens
  misc_RNA (1)...(19): siRNA sense strand
gcccauccucuauuccuau

SEQ ID NO: 1271761 - RNA, 19 nt, Homo sapiens
  misc_RNA (1)...(19): siRNA sense strand
cccagaacgccaucacuug

SEQ ID NO: 1271762 - RNA, 19 nt, Homo sapiens
  misc_RNA (1)...(19): siRNA sense strand
gaauugcucuggccuugaa

SEQ ID NO: 1271763 - RNA, 19 nt, Homo sapiens
  misc_RNA (1)...(19): siRNA sense strand
ggcaaaugcugaaagauuc

SEQ ID NO: 1271764 - RNA, 19 nt, Homo sapiens
  misc_RNA (1)...(19): siRNA sense strand
ccaucaaucucauaaagga

SEQ ID NO: 1271765 - RNA, 19 nt, Homo sapiens
  misc_RNA (1)...(19): siRNA sense strand
gggcauauacuguguagga

SEQ ID NO: 1271766 - RNA, 19 nt, Homo sapiens
  misc_RNA (1)...(19): siRNA sense strand
gagcacagcgggcauauac

SEQ ID NO: 1271767 - RNA, 19 nt, Homo sapiens
  misc_RNA (1)...(19): siRNA sense strand
gguggcaaaugcugaaaga

SEQ ID NO: 1271768 - RNA, 19 nt, Homo sapiens
  misc_RNA (1)...(19): siRNA sense strand
gcccaucaaucucauaaag

SEQ ID NO: 1271769 - RNA, 19 nt, Homo sapiens
  misc_RNA (1)...(19): siRNA sense strand
gcacagcgggcauauacug

SEQ ID NO: 1271770 - RNA, 19 nt, Homo sapiens
  misc_RNA (1)...(19): siRNA sense strand
ugccaacccugaagauuga

SEQ ID NO: 1271771 - RNA, 19 nt, Homo sapiens
  misc_RNA (1)...(19): siRNA sense strand
uggcaaaugcugaaagauu

SEQ ID NO: 1271772 - RNA, 19 nt, Homo sapiens
  misc_RNA (1)...(19): siRNA sense strand
cauccucuauuccuauuuc

SEQ ID NO: 1271773 - RNA, 19 nt, Homo sapiens
  misc_RNA (1)...(19): siRNA sense strand
ucauggagaguucgaauug

SEQ ID NO: 1271774 - RNA, 19 nt, Homo sapiens
  misc_RNA (1)...(19): siRNA sense strand
gugccaacccugaagauug

SEQ ID NO: 1271775 - RNA, 19 nt, Homo sapiens
  misc_RNA (1)...(19): siRNA sense strand
ggacuuccaggcacugaau

SEQ ID NO: 1271776 - RNA, 19 nt, Homo sapiens
  misc_RNA (1)...(19): siRNA sense strand
ccagaacgccaucacuugu

SEQ ID NO: 1271777 - RNA, 19 nt, Homo sapiens
  misc_RNA (1)...(19): siRNA sense strand
cgaagcuccugcucaugga

SEQ ID NO: 1271778 - RNA, 19 nt, Homo sapiens
  misc_RNA (1)...(19): siRNA sense strand
gcaagugggagaggagaug

SEQ ID NO: 1271779 - RNA, 19 nt, Homo sapiens
  misc_RNA (1)...(19): siRNA sense strand
gcccagaacgccaucacuu

SEQ ID NO: 1271780 - RNA, 19 nt, Homo sapiens
  misc_RNA (1)...(19): siRNA sense strand
cagcgggcauauacugugu

SEQ ID NO: 1271781 - RNA, 19 nt, Homo sapiens
  misc_RNA (1)...(19): siRNA sense strand
uccaggcacugaauccuau

SEQ ID NO: 1271782 - RNA, 19 nt, Homo sapiens
  misc_RNA (1)...(19): siRNA sense strand
gcgggcauauacuguguag

SEQ ID NO: 1271783 - RNA, 19 nt, Homo sapiens
  misc_RNA (1)...(19): siRNA sense strand
accaucagcuccaucaaca

SEQ ID NO: 1271784 - RNA, 19 nt, Homo sapiens
  misc_RNA (1)...(19): siRNA sense strand
uuaacgcccuggagcagau

SEQ ID NO: 1271785 - RNA, 19 nt, Homo sapiens
  misc_RNA (1)...(19): siRNA sense strand
caucagcuccaucaacaag

SEQ ID NO: 1271786 - RNA, 19 nt, Homo sapiens
  misc_RNA (1)...(19): siRNA sense strand
gccaacaguuuucuaagga

SEQ ID NO: 1271787 - RNA, 19 nt, Homo sapiens
  misc_RNA (1)...(19): siRNA sense strand
aaucaccauucaccaguca

SEQ ID NO: 1271788 - RNA, 19 nt, Homo sapiens
  misc_RNA (1)...(19): siRNA sense strand
agacggugcccaucaaucu

SEQ ID NO: 1271789 - RNA, 19 nt, Homo sapiens
  misc_RNA (1)...(19): siRNA sense strand
gcucauggagaguucgaau

SEQ ID NO: 1271790 - RNA, 19 nt, Homo sapiens
  misc_RNA (1)...(19): siRNA sense strand
ggcacugaauccuaugaag

SEQ ID NO: 1271791 - RNA, 19 nt, Homo sapiens
  misc_RNA (1)...(19): siRNA sense strand
gugcccaucaaucucauaa

SEQ ID NO: 1271792 - RNA, 19 nt, Homo sapiens
  misc_RNA (1)...(19): siRNA sense strand
cccugaagauugauggaau

SEQ ID NO: 1271793 - RNA, 19 nt, Homo sapiens
  misc_RNA (1)...(19): siRNA sense strand
cccauccucuauuccuauu

SEQ ID NO: 1271794 - RNA, 19 nt, Homo sapiens
  misc_RNA (1)...(19): siRNA sense strand
agaggcugcuggucuugga

SEQ ID NO: 1271795 - RNA, 19 nt, Homo sapiens
  misc_RNA (1)...(19): siRNA sense strand
ucagcuccaucaacaagag

SEQ ID NO: 1271796 - RNA, 19 nt, Homo sapiens
  misc_RNA (1)...(19): siRNA sense strand
ugucuguccugaagcaagu

SEQ ID NO: 1271797 - RNA, 19 nt, Homo sapiens
  misc_RNA (1)...(19): siRNA sense strand
gcccauccucuauuccuau

SEQ ID NO: 1271798 - RNA, 19 nt, Homo sapiens
  misc_RNA (1)...(19): siRNA sense strand
cccagaacgccaucacuug

SEQ ID NO: 1271799 - RNA, 19 nt, Homo sapiens
  misc_RNA (1)...(19): siRNA sense strand
aaacagaggugguccauaa

SEQ ID NO: 1271800 - RNA, 19 nt, Homo sapiens
  misc_RNA (1)...(19): siRNA sense strand
cuaggaaacuggaccauua

SEQ ID NO: 1271801 - RNA, 19 nt, Homo sapiens
  misc_RNA (1)...(19): siRNA sense strand
acaaauagccgaaguguuu

SEQ ID NO: 1271802 - RNA, 19 nt, Homo sapiens
  misc_RNA (1)...(19): siRNA sense strand
caugagagcugauaucugu

SEQ ID NO: 1271803 - RNA, 19 nt, Homo sapiens
  misc_RNA (1)...(19): siRNA sense strand
ggaauugacugacaagaag

SEQ ID NO: 1271804 - RNA, 19 nt, Homo sapiens
  misc_RNA (1)...(19): siRNA sense strand
cauaggauuuggaaacaua

SEQ ID NO: 1271805 - RNA, 19 nt, Homo sapiens
  misc_RNA (1)...(19): siRNA sense strand
ggacgaaauuugcccgauu

SEQ ID NO: 1271806 - RNA, 19 nt, Homo sapiens
  misc_RNA (1)...(19): siRNA sense strand
ggauuggccuguaguuuau

SEQ ID NO: 1271807 - RNA, 19 nt, Homo sapiens
  misc_RNA (1)...(19): siRNA sense strand
guggagaggucauuucuga

SEQ ID NO: 1271808 - RNA, 19 nt, Homo sapiens
  misc_RNA (1)...(19): siRNA sense strand
ccauaaacauucaagacua

SEQ ID NO: 1271809 - RNA, 19 nt, Homo sapiens
  misc_RNA (1)...(19): siRNA sense strand
gagcugacgucaugcagaa

SEQ ID NO: 1271810 - RNA, 19 nt, Homo sapiens
  misc_RNA (1)...(19): siRNA sense strand
ucaaggauauuacguuguu

SEQ ID NO: 1271811 - RNA, 19 nt, Homo sapiens
  misc_RNA (1)...(19): siRNA sense strand
gaaacuggaccauuaccua

SEQ ID NO: 1271812 - RNA, 19 nt, Homo sapiens
  misc_RNA (1)...(19): siRNA sense strand
gauauuacguuguucaaac

SEQ ID NO: 1271813 - RNA, 19 nt, Homo sapiens
  misc_RNA (1)...(19): siRNA sense strand
gaaauuugcccgauugaca

SEQ ID NO: 1271814 - RNA, 19 nt, Homo sapiens
  misc_RNA (1)...(19): siRNA sense strand
accaugagaugcugaauaa

SEQ ID NO: 1271815 - RNA, 19 nt, Homo sapiens
  misc_RNA (1)...(19): siRNA sense strand
caagaagaccauugagaaa

SEQ ID NO: 1271816 - RNA, 19 nt, Homo sapiens
  misc_RNA (1)...(19): siRNA sense strand
aaacaaagcagaacaacau

SEQ ID NO: 1271817 - RNA, 19 nt, Homo sapiens
  misc_RNA (1)...(19): siRNA sense strand
cagauauccuuccucagua

SEQ ID NO: 1271818 - RNA, 19 nt, Homo sapiens
  misc_RNA (1)...(19): siRNA sense strand
gacgaaauuugcccgauug

SEQ ID NO: 1271819 - RNA, 19 nt, Homo sapiens
  misc_RNA (1)...(19): siRNA sense strand
cagcaaggauucauuguac

SEQ ID NO: 1271820 - RNA, 19 nt, Homo sapiens
  misc_RNA (1)...(19): siRNA sense strand
gcugauaucuguguucauc

SEQ ID NO: 1271821 - RNA, 19 nt, Homo sapiens
  misc_RNA (1)...(19): siRNA sense strand
gugagcgagucauggauua

SEQ ID NO: 1271822 - RNA, 19 nt, Homo sapiens
  misc_RNA (1)...(19): siRNA sense strand
ggaaucagcagucucuuca

SEQ ID NO: 1271823 - RNA, 19 nt, Homo sapiens
  misc_RNA (1)...(19): siRNA sense strand
ugacaagccuuacaaccau

SEQ ID NO: 1271824 - RNA, 19 nt, Homo sapiens
  misc_RNA (1)...(19): siRNA sense strand
gacaagccuuacaaccaua

SEQ ID NO: 1271825 - RNA, 19 nt, Homo sapiens
  misc_RNA (1)...(19): siRNA sense strand
gaucugcugucuuguuuac

SEQ ID NO: 1271826 - RNA, 19 nt, Homo sapiens
  misc_RNA (1)...(19): siRNA sense strand
uuuguaaacucucuggaua

SEQ ID NO: 1271827 - RNA, 19 nt, Homo sapiens
  misc_RNA (1)...(19): siRNA sense strand
uggauuggccuguaguuua

SEQ ID NO: 1271828 - RNA, 19 nt, Homo sapiens
  misc_RNA (1)...(19): siRNA sense strand
gagcugauaucuguguuca

SEQ ID NO: 1271829 - RNA, 19 nt, Homo sapiens
  misc_RNA (1)...(19): siRNA sense strand
cauaaacauucaagacuag

SEQ ID NO: 1271830 - RNA, 19 nt, Homo sapiens
  misc_RNA (1)...(19): siRNA sense strand
ugauaucuguguucaucua

SEQ ID NO: 1271831 - RNA, 19 nt, Homo sapiens
  misc_RNA (1)...(19): siRNA sense strand
gguuggcucucuucuuuau

SEQ ID NO: 1271832 - RNA, 19 nt, Homo sapiens
  misc_RNA (1)...(19): siRNA sense strand
ggccuguaguuuauaguaa

SEQ ID NO: 1271833 - RNA, 19 nt, Homo sapiens
  misc_RNA (1)...(19): siRNA sense strand
acaagaagaccauugagaa

SEQ ID NO: 1271834 - RNA, 19 nt, Homo sapiens
  misc_RNA (1)...(19): siRNA sense strand
gggaauugacugacaagaa

SEQ ID NO: 1271835 - RNA, 19 nt, Homo sapiens
  misc_RNA (1)...(19): siRNA sense strand
caaaaggcauugauacaga

SEQ ID NO: 1271836 - RNA, 19 nt, Homo sapiens
  misc_RNA (1)...(19): siRNA sense strand
gagcgagucauggauuaua

SEQ ID NO: 1271837 - RNA, 19 nt, Homo sapiens
  misc_RNA (1)...(19): siRNA sense strand
caugagaugcugaauaaug

SEQ ID NO: 1271838 - RNA, 19 nt, Homo sapiens
  misc_RNA (1)...(19): siRNA sense strand
uaaacucucuggauaucau

SEQ ID NO: 1271839 - RNA, 19 nt, Homo sapiens
  misc_RNA (1)...(19): siRNA sense strand
ugaucgaucugcugucuug

SEQ ID NO: 1271840 - RNA, 19 nt, Homo sapiens
  misc_RNA (1)...(19): siRNA sense strand
ucaucgagcugacgucaug

SEQ ID NO: 1271841 - RNA, 19 nt, Homo sapiens
  misc_RNA (1)...(19): siRNA sense strand
gaugaugguuggcucucuu

SEQ ID NO: 1271842 - RNA, 19 nt, Homo sapiens
  misc_RNA (1)...(19): siRNA sense strand
uuaaugaacauccugcuuu

SEQ ID NO: 1271843 - RNA, 19 nt, Homo sapiens
  misc_RNA (1)...(19): siRNA sense strand
ugaacuaucugaaaacuug

SEQ ID NO: 1271844 - RNA, 19 nt, Homo sapiens
  misc_RNA (1)...(19): siRNA sense strand
gacaagaagaccauugaga

SEQ ID NO: 1271845 - RNA, 19 nt, Homo sapiens
  misc_RNA (1)...(19): siRNA sense strand
caaccgauaccaugagaug

SEQ ID NO: 1271846 - RNA, 19 nt, Homo sapiens
  misc_RNA (1)...(19): siRNA sense strand
ggaccauuaccuagaauau

SEQ ID NO: 1271847 - RNA, 19 nt, Homo sapiens
  misc_RNA (1)...(19): siRNA sense strand
ucgaucugcugucuuguuu

SEQ ID NO: 1271848 - RNA, 19 nt, Homo sapiens
  misc_RNA (1)...(19): siRNA sense strand
cagcagcucacgccaauga

SEQ ID NO: 1271849 - RNA, 19 nt, Homo sapiens
  misc_RNA (1)...(19): siRNA sense strand
agaagaccauugagaaagu

SEQ ID NO: 1271850 - RNA, 19 nt, Homo sapiens
  misc_RNA (1)...(19): siRNA sense strand
gccaauagaggaugauuca

SEQ ID NO: 1271851 - RNA, 19 nt, Homo sapiens
  misc_RNA (1)...(19): siRNA sense strand
cguguccucucucuacuuu

SEQ ID NO: 1271852 - RNA, 19 nt, Homo sapiens
  misc_RNA (1)...(19): siRNA sense strand
ccauaucgcuacaauacca

SEQ ID NO: 1271853 - RNA, 19 nt, Homo sapiens
  misc_RNA (1)...(19): siRNA sense strand
ucagauauccuuccucagu

SEQ ID NO: 1271854 - RNA, 19 nt, Homo sapiens
  misc_RNA (1)...(19): siRNA sense strand
gaggugguccauaaacauu

SEQ ID NO: 1271855 - RNA, 19 nt, Homo sapiens
  misc_RNA (1)...(19): siRNA sense strand
cagcucacgccaaugaaua

SEQ ID NO: 1271856 - RNA, 19 nt, Homo sapiens
  misc_RNA (1)...(19): siRNA sense strand
aauagaggaugauucaaca

SEQ ID NO: 1271857 - RNA, 19 nt, Homo sapiens
  misc_RNA (1)...(19): siRNA sense strand
ggacaugagagcugauauc

SEQ ID NO: 1271858 - RNA, 19 nt, Homo sapiens
  misc_RNA (1)...(19): siRNA sense strand
gguauagcaucggagacua

SEQ ID NO: 1271859 - RNA, 19 nt, Homo sapiens
  misc_RNA (1)...(19): siRNA sense strand
gaagaccauugagaaaguc

SEQ ID NO: 1271860 - RNA, 19 nt, Homo sapiens
  misc_RNA (1)...(19): siRNA sense strand
uauauugucucaacauggu

SEQ ID NO: 1271861 - RNA, 19 nt, Homo sapiens
  misc_RNA (1)...(19): siRNA sense strand
augguuggcucucuucuuu

SEQ ID NO: 1271862 - RNA, 19 nt, Homo sapiens
  misc_RNA (1)...(19): siRNA sense strand
gauuguggauuggccugua

SEQ ID NO: 1271863 - RNA, 19 nt, Homo sapiens
  misc_RNA (1)...(19): siRNA sense strand
ccagcaaggauucauugua

SEQ ID NO: 1271864 - RNA, 19 nt, Homo sapiens
  misc_RNA (1)...(19): siRNA sense strand
ucacuaacaccauccaaau

SEQ ID NO: 1271865 - RNA, 19 nt, Homo sapiens
  misc_RNA (1)...(19): siRNA sense strand
ucagcagucucuucaguuc

SEQ ID NO: 1271866 - RNA, 19 nt, Homo sapiens
  misc_RNA (1)...(19): siRNA sense strand
aaacaagaagcgccaaaga

SEQ ID NO: 1271867 - RNA, 19 nt, Homo sapiens
  misc_RNA (1)...(19): siRNA sense strand
cuacgaaucaaacugcuuu

SEQ ID NO: 1271868 - RNA, 19 nt, Homo sapiens
  misc_RNA (1)...(19): siRNA sense strand
cagcuggcuuugagcauug

SEQ ID NO: 1271869 - RNA, 19 nt, Homo sapiens
  misc_RNA (1)...(19): siRNA sense strand
ccagcuggcuuugagcauu

SEQ ID NO: 1271870 - RNA, 19 nt, Homo sapiens
  misc_RNA (1)...(19): siRNA sense strand
cuaacaccauccaaauaga

SEQ ID NO: 1271871 - RNA, 19 nt, Homo sapiens
  misc_RNA (1)...(19): siRNA sense strand
ccaaagacgccaccacaca

SEQ ID NO: 1271872 - RNA, 19 nt, Homo sapiens
  misc_RNA (1)...(19): siRNA sense strand
cagaggugguccauaaaca

SEQ ID NO: 1271873 - RNA, 19 nt, Homo sapiens
  misc_RNA (1)...(19): siRNA sense strand
gaaaugaacaugaaaaggu

SEQ ID NO: 1271874 - RNA, 19 nt, Homo sapiens
  misc_RNA (1)...(19): siRNA sense strand
gagacuacgaggucauuga

SEQ ID NO: 1271875 - RNA, 19 nt, Homo sapiens
  misc_RNA (1)...(19): siRNA sense strand
ggaggacccagcaaggauu

SEQ ID NO: 1271876 - RNA, 19 nt, Homo sapiens
  misc_RNA (1)...(19): siRNA sense strand
gauauccuuccucaguaua

SEQ ID NO: 1271877 - RNA, 19 nt, Homo sapiens
  misc_RNA (1)...(19): siRNA sense strand
gaugaggugguggcuauuu

SEQ ID NO: 1271878 - RNA, 19 nt, Homo sapiens
  misc_RNA (1)...(19): siRNA sense strand
guacguguccucucucuac

SEQ ID NO: 1271879 - RNA, 19 nt, Homo sapiens
  misc_RNA (1)...(19): siRNA sense strand
gauagugugguggacguua

SEQ ID NO: 1271880 - RNA, 19 nt, Homo sapiens
  misc_RNA (1)...(19): siRNA sense strand
acccuaagcucauaaggau

SEQ ID NO: 1271881 - RNA, 19 nt, Homo sapiens
  misc_RNA (1)...(19): siRNA sense strand
uagaggaugauucaacaaa

SEQ ID NO: 1271882 - RNA, 19 nt, Homo sapiens
  misc_RNA (1)...(19): siRNA sense strand
gaaaagguccucuccaucu

SEQ ID NO: 1271883 - RNA, 19 nt, Homo sapiens
  misc_RNA (1)...(19): siRNA sense strand
agucauggauuauauuguc

SEQ ID NO: 1271884 - RNA, 19 nt, Homo sapiens
  misc_RNA (1)...(19): siRNA sense strand
ggaaacauagcuccuacca

SEQ ID NO: 1271885 - RNA, 19 nt, Homo sapiens
  misc_RNA (1)...(19): siRNA sense strand
cacuaacaccauccaaaua

SEQ ID NO: 1271886 - RNA, 19 nt, Homo sapiens
  misc_RNA (1)...(19): siRNA sense strand
ggugguccauaaacauuca

SEQ ID NO: 1271887 - RNA, 19 nt, Homo sapiens
  misc_RNA (1)...(19): siRNA sense strand
ggauauuacguuguucaaa

SEQ ID NO: 1271888 - RNA, 19 nt, Homo sapiens
  misc_RNA (1)...(19): siRNA sense strand
uuaccaugcuggagaaagu

SEQ ID NO: 1271889 - RNA, 19 nt, Homo sapiens
  misc_RNA (1)...(19): siRNA sense strand
gauaucuguguucaucuaa

SEQ ID NO: 1271890 - RNA, 19 nt, Homo sapiens
  misc_RNA (1)...(19): siRNA sense strand
cagcaaauguaugccaaca

SEQ ID NO: 1271891 - RNA, 19 nt, Homo sapiens
  misc_RNA (1)...(19): siRNA sense strand
ugucuuguuuaccuuauga

SEQ ID NO: 1271892 - RNA, 19 nt, Homo sapiens
  misc_RNA (1)...(19): siRNA sense strand
caaagacgccaccacacau

SEQ ID NO: 1271893 - RNA, 19 nt, Homo sapiens
  misc_RNA (1)...(19): siRNA sense strand
uguaaacucucuggauauc

SEQ ID NO: 1271894 - RNA, 19 nt, Homo sapiens
  misc_RNA (1)...(19): siRNA sense strand
uaaugaacauccugcuuuu

SEQ ID NO: 1271895 - RNA, 19 nt, Homo sapiens
  misc_RNA (1)...(19): siRNA sense strand
gagagcugauaucuguguu

SEQ ID NO: 1271896 - RNA, 19 nt, Homo sapiens
  misc_RNA (1)...(19): siRNA sense strand
ugaauaauguacgggacuu

SEQ ID NO: 1271897 - RNA, 19 nt, Homo sapiens
  misc_RNA (1)...(19): siRNA sense strand
augagaugcugaauaaugu

SEQ ID NO: 1271898 - RNA, 19 nt, Homo sapiens
  misc_RNA (1)...(19): siRNA sense strand
ucucucuacuuuaccauga

SEQ ID NO: 1271899 - RNA, 19 nt, Homo sapiens
  misc_RNA (1)...(19): siRNA sense strand
aaacagaggugguccauaa

SEQ ID NO: 1271900 - RNA, 19 nt, Homo sapiens
  misc_RNA (1)...(19): siRNA sense strand
cuaggaaacuggaccauua

SEQ ID NO: 1271901 - RNA, 19 nt, Homo sapiens
  misc_RNA (1)...(19): siRNA sense strand
acaaauagccgaaguguuu

SEQ ID NO: 1271902 - RNA, 19 nt, Homo sapiens
  misc_RNA (1)...(19): siRNA sense strand
caugagagcugauaucugu

SEQ ID NO: 1271903 - RNA, 19 nt, Homo sapiens
  misc_RNA (1)...(19): siRNA sense strand
ggaauugacugacaagaag

SEQ ID NO: 1271904 - RNA, 19 nt, Homo sapiens
  misc_RNA (1)...(19): siRNA sense strand
cauaggauuuggaaacaua

SEQ ID NO: 1271905 - RNA, 19 nt, Homo sapiens
  misc_RNA (1)...(19): siRNA sense strand
ggacgaaauuugcccgauu

SEQ ID NO: 1271906 - RNA, 19 nt, Homo sapiens
  misc_RNA (1)...(19): siRNA sense strand
ggauuggccuguaguuuau

SEQ ID NO: 1271907 - RNA, 19 nt, Homo sapiens
  misc_RNA (1)...(19): siRNA sense strand
guggagaggucauuucuga

SEQ ID NO: 1271908 - RNA, 19 nt, Homo sapiens
  misc_RNA (1)...(19): siRNA sense strand
ccauaaacauucaagacua

SEQ ID NO: 1271909 - RNA, 19 nt, Homo sapiens
  misc_RNA (1)...(19): siRNA sense strand
gagcugacgucaugcagaa

SEQ ID NO: 1271910 - RNA, 19 nt, Homo sapiens
  misc_RNA (1)...(19): siRNA sense strand
ucaaggauauuacguuguu

SEQ ID NO: 1271911 - RNA, 19 nt, Homo sapiens
  misc_RNA (1)...(19): siRNA sense strand
gaaacuggaccauuaccua

SEQ ID NO: 1271912 - RNA, 19 nt, Homo sapiens
  misc_RNA (1)...(19): siRNA sense strand
gauauuacguuguucaaac

SEQ ID NO: 1271913 - RNA, 19 nt, Homo sapiens
  misc_RNA (1)...(19): siRNA sense strand
gaaauuugcccgauugaca

SEQ ID NO: 1271914 - RNA, 19 nt, Homo sapiens
  misc_RNA (1)...(19): siRNA sense strand
accaugagaugcugaauaa

SEQ ID NO: 1271915 - RNA, 19 nt, Homo sapiens
  misc_RNA (1)...(19): siRNA sense strand
caagaagaccauugagaaa

SEQ ID NO: 1271916 - RNA, 19 nt, Homo sapiens
  misc_RNA (1)...(19): siRNA sense strand
aaacaaagcagaacaacau

SEQ ID NO: 1271917 - RNA, 19 nt, Homo sapiens
  misc_RNA (1)...(19): siRNA sense strand
cagauauccuuccucagua

SEQ ID NO: 1271918 - RNA, 19 nt, Homo sapiens
  misc_RNA (1)...(19): siRNA sense strand
gacgaaauuugcccgauug

SEQ ID NO: 1271919 - RNA, 19 nt, Homo sapiens
  misc_RNA (1)...(19): siRNA sense strand
cagcaaggauucauuguac

SEQ ID NO: 1271920 - RNA, 19 nt, Homo sapiens
  misc_RNA (1)...(19): siRNA sense strand
gcugauaucuguguucauc

SEQ ID NO: 1271921 - RNA, 19 nt, Homo sapiens
  misc_RNA (1)...(19): siRNA sense strand
gugagcgagucauggauua

SEQ ID NO: 1271922 - RNA, 19 nt, Homo sapiens
  misc_RNA (1)...(19): siRNA sense strand
ggaaucagcagucucuuca

SEQ ID NO: 1271923 - RNA, 19 nt, Homo sapiens
  misc_RNA (1)...(19): siRNA sense strand
ugacaagccuuacaaccau

SEQ ID NO: 1271924 - RNA, 19 nt, Homo sapiens
  misc_RNA (1)...(19): siRNA sense strand
gacaagccuuacaaccaua

SEQ ID NO: 1271925 - RNA, 19 nt, Homo sapiens
  misc_RNA (1)...(19): siRNA sense strand
gaucugcugucuuguuuac

SEQ ID NO: 1271926 - RNA, 19 nt, Homo sapiens
  misc_RNA (1)...(19): siRNA sense strand
uuuguaaacucucuggaua

SEQ ID NO: 1271927 - RNA, 19 nt, Homo sapiens
  misc_RNA (1)...(19): siRNA sense strand
uggauuggccuguaguuua

SEQ ID NO: 1271928 - RNA, 19 nt, Homo sapiens
  misc_RNA (1)...(19): siRNA sense strand
gagcugauaucuguguuca

SEQ ID NO: 1271929 - RNA, 19 nt, Homo sapiens
  misc_RNA (1)...(19): siRNA sense strand
cauaaacauucaagacuag

SEQ ID NO: 1271930 - RNA, 19 nt, Homo sapiens
  misc_RNA (1)...(19): siRNA sense strand
ugauaucuguguucaucua

SEQ ID NO: 1271931 - RNA, 19 nt, Homo sapiens
  misc_RNA (1)...(19): siRNA sense strand
gguuggcucucuucuuuau

SEQ ID NO: 1271932 - RNA, 19 nt, Homo sapiens
  misc_RNA (1)...(19): siRNA sense strand
ggccuguaguuuauaguaa

SEQ ID NO: 1271933 - RNA, 19 nt, Homo sapiens
  misc_RNA (1)...(19): siRNA sense strand
acaagaagaccauugagaa

SEQ ID NO: 1271934 - RNA, 19 nt, Homo sapiens
  misc_RNA (1)...(19): siRNA sense strand
gggaauugacugacaagaa

SEQ ID NO: 1271935 - RNA, 19 nt, Homo sapiens
  misc_RNA (1)...(19): siRNA sense strand
caaaaggcauugauacaga

SEQ ID NO: 1271936 - RNA, 19 nt, Homo sapiens
  misc_RNA (1)...(19): siRNA sense strand
gagcgagucauggauuaua

SEQ ID NO: 1271937 - RNA, 19 nt, Homo sapiens
  misc_RNA (1)...(19): siRNA sense strand
caugagaugcugaauaaug

SEQ ID NO: 1271938 - RNA, 19 nt, Homo sapiens
  misc_RNA (1)...(19): siRNA sense strand
uaaacucucuggauaucau

SEQ ID NO: 1271939 - RNA, 19 nt, Homo sapiens
  misc_RNA (1)...(19): siRNA sense strand
ugaucgaucugcugucuug

SEQ ID NO: 1271940 - RNA, 19 nt, Homo sapiens
  misc_RNA (1)...(19): siRNA sense strand
ucaucgagcugacgucaug

SEQ ID NO: 1271941 - RNA, 19 nt, Homo sapiens
  misc_RNA (1)...(19): siRNA sense strand
gaugaugguuggcucucuu

SEQ ID NO: 1271942 - RNA, 19 nt, Homo sapiens
  misc_RNA (1)...(19): siRNA sense strand
uuaaugaacauccugcuuu

SEQ ID NO: 1271943 - RNA, 19 nt, Homo sapiens
  misc_RNA (1)...(19): siRNA sense strand
ugaacuaucugaaaacuug

SEQ ID NO: 1271944 - RNA, 19 nt, Homo sapiens
  misc_RNA (1)...(19): siRNA sense strand
gacaagaagaccauugaga

SEQ ID NO: 1271945 - RNA, 19 nt, Homo sapiens
  misc_RNA (1)...(19): siRNA sense strand
caaccgauaccaugagaug

SEQ ID NO: 1271946 - RNA, 19 nt, Homo sapiens
  misc_RNA (1)...(19): siRNA sense strand
ggaccauuaccuagaauau

SEQ ID NO: 1271947 - RNA, 19 nt, Homo sapiens
  misc_RNA (1)...(19): siRNA sense strand
ucgaucugcugucuuguuu

SEQ ID NO: 1271948 - RNA, 19 nt, Homo sapiens
  misc_RNA (1)...(19): siRNA sense strand
cagcagcucacgccaauga

SEQ ID NO: 1271949 - RNA, 19 nt, Homo sapiens
  misc_RNA (1)...(19): siRNA sense strand
agaagaccauugagaaagu

SEQ ID NO: 1271950 - RNA, 19 nt, Homo sapiens
  misc_RNA (1)...(19): siRNA sense strand
gccaauagaggaugauuca

SEQ ID NO: 1271951 - RNA, 19 nt, Homo sapiens
  misc_RNA (1)...(19): siRNA sense strand
cguguccucucucuacuuu

SEQ ID NO: 1271952 - RNA, 19 nt, Homo sapiens
  misc_RNA (1)...(19): siRNA sense strand
ccauaucgcuacaauacca

SEQ ID NO: 1271953 - RNA, 19 nt, Homo sapiens
  misc_RNA (1)...(19): siRNA sense strand
ucagauauccuuccucagu

SEQ ID NO: 1271954 - RNA, 19 nt, Homo sapiens
  misc_RNA (1)...(19): siRNA sense strand
gaggugguccauaaacauu

SEQ ID NO: 1271955 - RNA, 19 nt, Homo sapiens
  misc_RNA (1)...(19): siRNA sense strand
cagcucacgccaaugaaua

SEQ ID NO: 1271956 - RNA, 19 nt, Homo sapiens
  misc_RNA (1)...(19): siRNA sense strand
aauagaggaugauucaaca

SEQ ID NO: 1271957 - RNA, 19 nt, Homo sapiens
  misc_RNA (1)...(19): siRNA sense strand
ggacaugagagcugauauc

SEQ ID NO: 1271958 - RNA, 19 nt, Homo sapiens
  misc_RNA (1)...(19): siRNA sense strand
gguauagcaucggagacua

SEQ ID NO: 1271959 - RNA, 19 nt, Homo sapiens
  misc_RNA (1)...(19): siRNA sense strand
gaagaccauugagaaaguc

SEQ ID NO: 1271960 - RNA, 19 nt, Homo sapiens
  misc_RNA (1)...(19): siRNA sense strand
uauauugucucaacauggu

SEQ ID NO: 1271961 - RNA, 19 nt, Homo sapiens
  misc_RNA (1)...(19): siRNA sense strand
augguuggcucucuucuuu

SEQ ID NO: 1271962 - RNA, 19 nt, Homo sapiens
  misc_RNA (1)...(19): siRNA sense strand
gauuguggauuggccugua

SEQ ID NO: 1271963 - RNA, 19 nt, Homo sapiens
  misc_RNA (1)...(19): siRNA sense strand
ccagcaaggauucauugua

SEQ ID NO: 1271964 - RNA, 19 nt, Homo sapiens
  misc_RNA (1)...(19): siRNA sense strand
ucacuaacaccauccaaau

SEQ ID NO: 1271965 - RNA, 19 nt, Homo sapiens
  misc_RNA (1)...(19): siRNA sense strand
ucagcagucucuucaguuc

SEQ ID NO: 1271966 - RNA, 19 nt, Homo sapiens
  misc_RNA (1)...(19): siRNA sense strand
aaacaagaagcgccaaaga

SEQ ID NO: 1271967 - RNA, 19 nt, Homo sapiens
  misc_RNA (1)...(19): siRNA sense strand
cuacgaaucaaacugcuuu

SEQ ID NO: 1271968 - RNA, 19 nt, Homo sapiens
  misc_RNA (1)...(19): siRNA sense strand
cagcuggcuuugagcauug

SEQ ID NO: 1271969 - RNA, 19 nt, Homo sapiens
  misc_RNA (1)...(19): siRNA sense strand
ccagcuggcuuugagcauu

SEQ ID NO: 1271970 - RNA, 19 nt, Homo sapiens
  misc_RNA (1)...(19): siRNA sense strand
cuaacaccauccaaauaga

SEQ ID NO: 1271971 - RNA, 19 nt, Homo sapiens
  misc_RNA (1)...(19): siRNA sense strand
ccaaagacgccaccacaca

SEQ ID NO: 1271972 - RNA, 19 nt, Homo sapiens
  misc_RNA (1)...(19): siRNA sense strand
cagaggugguccauaaaca

SEQ ID NO: 1271973 - RNA, 19 nt, Homo sapiens
  misc_RNA (1)...(19): siRNA sense strand
gaaaugaacaugaaaaggu

SEQ ID NO: 1271974 - RNA, 19 nt, Homo sapiens
  misc_RNA (1)...(19): siRNA sense strand
gagacuacgaggucauuga

SEQ ID NO: 1271975 - RNA, 19 nt, Homo sapiens
  misc_RNA (1)...(19): siRNA sense strand
ggaggacccagcaaggauu

SEQ ID NO: 1271976 - RNA, 19 nt, Homo sapiens
  misc_RNA (1)...(19): siRNA sense strand
gauauccuuccucaguaua

SEQ ID NO: 1271977 - RNA, 19 nt, Homo sapiens
  misc_RNA (1)...(19): siRNA sense strand
gaugaggugguggcuauuu

SEQ ID NO: 1271978 - RNA, 19 nt, Homo sapiens
  misc_RNA (1)...(19): siRNA sense strand
guacguguccucucucuac

SEQ ID NO: 1271979 - RNA, 19 nt, Homo sapiens
  misc_RNA (1)...(19): siRNA sense strand
gauagugugguggacguua

SEQ ID NO: 1271980 - RNA, 19 nt, Homo sapiens
  misc_RNA (1)...(19): siRNA sense strand
acccuaagcucauaaggau

SEQ ID NO: 1271981 - RNA, 19 nt, Homo sapiens
  misc_RNA (1)...(19): siRNA sense strand
uagaggaugauucaacaaa

SEQ ID NO: 1271982 - RNA, 19 nt, Homo sapiens
  misc_RNA (1)...(19): siRNA sense strand
gaaaagguccucuccaucu

SEQ ID NO: 1271983 - RNA, 19 nt, Homo sapiens
  misc_RNA (1)...(19): siRNA sense strand
agucauggauuauauuguc

SEQ ID NO: 1271984 - RNA, 19 nt, Homo sapiens
  misc_RNA (1)...(19): siRNA sense strand
ggaaacauagcuccuacca

SEQ ID NO: 1271985 - RNA, 19 nt, Homo sapiens
  misc_RNA (1)...(19): siRNA sense strand
cacuaacaccauccaaaua

SEQ ID NO: 1271986 - RNA, 19 nt, Homo sapiens
  misc_RNA (1)...(19): siRNA sense strand
ggugguccauaaacauuca

SEQ ID NO: 1271987 - RNA, 19 nt, Homo sapiens
  misc_RNA (1)...(19): siRNA sense strand
ggauauuacguuguucaaa

SEQ ID NO: 1271988 - RNA, 19 nt, Homo sapiens
  misc_RNA (1)...(19): siRNA sense strand
uuaccaugcuggagaaagu

SEQ ID NO: 1271989 - RNA, 19 nt, Homo sapiens
  misc_RNA (1)...(19): siRNA sense strand
gauaucuguguucaucuaa

SEQ ID NO: 1271990 - RNA, 19 nt, Homo sapiens
  misc_RNA (1)...(19): siRNA sense strand
cagcaaauguaugccaaca

SEQ ID NO: 1271991 - RNA, 19 nt, Homo sapiens
  misc_RNA (1)...(19): siRNA sense strand
ugucuuguuuaccuuauga

SEQ ID NO: 1271992 - RNA, 19 nt, Homo sapiens
  misc_RNA (1)...(19): siRNA sense strand
caaagacgccaccacacau

SEQ ID NO: 1271993 - RNA, 19 nt, Homo sapiens
  misc_RNA (1)...(19): siRNA sense strand
uguaaacucucuggauauc

SEQ ID NO: 1271994 - RNA, 19 nt, Homo sapiens
  misc_RNA (1)...(19): siRNA sense strand
uaaugaacauccugcuuuu

SEQ ID NO: 1271995 - RNA, 19 nt, Homo sapiens
  misc_RNA (1)...(19): siRNA sense strand
gagagcugauaucuguguu

SEQ ID NO: 1271996 - RNA, 19 nt, Homo sapiens
  misc_RNA (1)...(19): siRNA sense strand
ugaauaauguacgggacuu

SEQ ID NO: 1271997 - RNA, 19 nt, Homo sapiens
  misc_RNA (1)...(19): siRNA sense strand
augagaugcugaauaaugu

SEQ ID NO: 1271998 - RNA, 19 nt, Homo sapiens
  misc_RNA (1)...(19): siRNA sense strand
ucucucuacuuuaccauga

SEQ ID NO: 1271999 - RNA, 19 nt, Homo sapiens
  misc_RNA (1)...(19): siRNA sense strand
aaacagaggugguccauaa

SEQ ID NO: 1272000 - RNA, 19 nt, Homo sapiens
  misc_RNA (1)...(19): siRNA sense strand
cuaggaaacuggaccauua

SEQ ID NO: 1272001 - RNA, 19 nt, Homo sapiens
  misc_RNA (1)...(19): siRNA sense strand
acaaauagccgaaguguuu

SEQ ID NO: 1272002 - RNA, 19 nt, Homo sapiens
  misc_RNA (1)...(19): siRNA sense strand
caugagagcugauaucugu

SEQ ID NO: 1272003 - RNA, 19 nt, Homo sapiens
  misc_RNA (1)...(19): siRNA sense strand
ggaauugacugacaagaag

SEQ ID NO: 1272004 - RNA, 19 nt, Homo sapiens
  misc_RNA (1)...(19): siRNA sense strand
cauaggauuuggaaacaua

SEQ ID NO: 1272005 - RNA, 19 nt, Homo sapiens
  misc_RNA (1)...(19): siRNA sense strand
ggacgaaauuugcccgauu

SEQ ID NO: 1272006 - RNA, 19 nt, Homo sapiens
  misc_RNA (1)...(19): siRNA sense strand
ccauaaacauucaagacua

SEQ ID NO: 1272007 - RNA, 19 nt, Homo sapiens
  misc_RNA (1)...(19): siRNA sense strand
guggagaggucauuucuga

SEQ ID NO: 1272008 - RNA, 19 nt, Homo sapiens
  misc_RNA (1)...(19): siRNA sense strand
ucaaggauauuacguuguu

SEQ ID NO: 1272009 - RNA, 19 nt, Homo sapiens
  misc_RNA (1)...(19): siRNA sense strand
gaaacuggaccauuaccua

SEQ ID NO: 1272010 - RNA, 19 nt, Homo sapiens
  misc_RNA (1)...(19): siRNA sense strand
gauauuacguuguucaaac

SEQ ID NO: 1272011 - RNA, 19 nt, Homo sapiens
  misc_RNA (1)...(19): siRNA sense strand
gaaauuugcccgauugaca

SEQ ID NO: 1272012 - RNA, 19 nt, Homo sapiens
  misc_RNA (1)...(19): siRNA sense strand
accaugagaugcugaauaa

SEQ ID NO: 1272013 - RNA, 19 nt, Homo sapiens
  misc_RNA (1)...(19): siRNA sense strand
caagaagaccauugagaaa

SEQ ID NO: 1272014 - RNA, 19 nt, Homo sapiens
  misc_RNA (1)...(19): siRNA sense strand
aaacaaagcagaacaacau

SEQ ID NO: 1272015 - RNA, 19 nt, Homo sapiens
  misc_RNA (1)...(19): siRNA sense strand
cagauauccuuccucagua

SEQ ID NO: 1272016 - RNA, 19 nt, Homo sapiens
  misc_RNA (1)...(19): siRNA sense strand
gacgaaauuugcccgauug

SEQ ID NO: 1272017 - RNA, 19 nt, Homo sapiens
  misc_RNA (1)...(19): siRNA sense strand
cagcaaggauucauuguac

SEQ ID NO: 1272018 - RNA, 19 nt, Homo sapiens
  misc_RNA (1)...(19): siRNA sense strand
gcugauaucuguguucauc

SEQ ID NO: 1272019 - RNA, 19 nt, Homo sapiens
  misc_RNA (1)...(19): siRNA sense strand
gugagcgagucauggauua

SEQ ID NO: 1272020 - RNA, 19 nt, Homo sapiens
  misc_RNA (1)...(19): siRNA sense strand
ggaaucagcagucucuuca

SEQ ID NO: 1272021 - RNA, 19 nt, Homo sapiens
  misc_RNA (1)...(19): siRNA sense strand
ugacaagccuuacaaccau

SEQ ID NO: 1272022 - RNA, 19 nt, Homo sapiens
  misc_RNA (1)...(19): siRNA sense strand
gacaagccuuacaaccaua

SEQ ID NO: 1272023 - RNA, 19 nt, Homo sapiens
  misc_RNA (1)...(19): siRNA sense strand
gaucugcugucuuguuuac

SEQ ID NO: 1272024 - RNA, 19 nt, Homo sapiens
  misc_RNA (1)...(19): siRNA sense strand
gagcugauaucuguguuca

SEQ ID NO: 1272025 - RNA, 19 nt, Homo sapiens
  misc_RNA (1)...(19): siRNA sense strand
cauaaacauucaagacuag

SEQ ID NO: 1272026 - RNA, 19 nt, Homo sapiens
  misc_RNA (1)...(19): siRNA sense strand
ugauaucuguguucaucua

SEQ ID NO: 1272027 - RNA, 19 nt, Homo sapiens
  misc_RNA (1)...(19): siRNA sense strand
gguuggcucucuucuuuau

SEQ ID NO: 1272028 - RNA, 19 nt, Homo sapiens
  misc_RNA (1)...(19): siRNA sense strand
acaagaagaccauugagaa

SEQ ID NO: 1272029 - RNA, 19 nt, Homo sapiens
  misc_RNA (1)...(19): siRNA sense strand
ugaucgaucugcugucuug

SEQ ID NO: 1272030 - RNA, 19 nt, Homo sapiens
  misc_RNA (1)...(19): siRNA sense strand
caaaaggcauugauacaga

SEQ ID NO: 1272031 - RNA, 19 nt, Homo sapiens
  misc_RNA (1)...(19): siRNA sense strand
gagcgagucauggauuaua

SEQ ID NO: 1272032 - RNA, 19 nt, Homo sapiens
  misc_RNA (1)...(19): siRNA sense strand
caugagaugcugaauaaug

SEQ ID NO: 1272033 - RNA, 19 nt, Homo sapiens
  misc_RNA (1)...(19): siRNA sense strand
gggaauugacugacaagaa

SEQ ID NO: 1272034 - RNA, 19 nt, Homo sapiens
  misc_RNA (1)...(19): siRNA sense strand
gaugaugguuggcucucuu

SEQ ID NO: 1272035 - RNA, 19 nt, Homo sapiens
  misc_RNA (1)...(19): siRNA sense strand
uuaaugaacauccugcuuu

SEQ ID NO: 1272036 - RNA, 19 nt, Homo sapiens
  misc_RNA (1)...(19): siRNA sense strand
ugaacuaucugaaaacuug

SEQ ID NO: 1272037 - RNA, 19 nt, Homo sapiens
  misc_RNA (1)...(19): siRNA sense strand
cagcagcucacgccaauga

SEQ ID NO: 1272038 - RNA, 19 nt, Homo sapiens
  misc_RNA (1)...(19): siRNA sense strand
gacaagaagaccauugaga

SEQ ID NO: 1272039 - RNA, 19 nt, Homo sapiens
  misc_RNA (1)...(19): siRNA sense strand
caaccgauaccaugagaug

SEQ ID NO: 1272040 - RNA, 19 nt, Homo sapiens
  misc_RNA (1)...(19): siRNA sense strand
agaagaccauugagaaagu

SEQ ID NO: 1272041 - RNA, 19 nt, Homo sapiens
  misc_RNA (1)...(19): siRNA sense strand
ggaccauuaccuagaauau

SEQ ID NO: 1272042 - RNA, 19 nt, Homo sapiens
  misc_RNA (1)...(19): siRNA sense strand
ucgaucugcugucuuguuu

SEQ ID NO: 1272043 - RNA, 19 nt, Homo sapiens
  misc_RNA (1)...(19): siRNA sense strand
gccaauagaggaugauuca

SEQ ID NO: 1272044 - RNA, 19 nt, Homo sapiens
  misc_RNA (1)...(19): siRNA sense strand
cguguccucucucuacuuu

SEQ ID NO: 1272045 - RNA, 19 nt, Homo sapiens
  misc_RNA (1)...(19): siRNA sense strand
ccauaucgcuacaauacca

SEQ ID NO: 1272046 - RNA, 19 nt, Homo sapiens
  misc_RNA (1)...(19): siRNA sense strand
ucagauauccuuccucagu

SEQ ID NO: 1272047 - RNA, 19 nt, Homo sapiens
  misc_RNA (1)...(19): siRNA sense strand
gaggugguccauaaacauu

SEQ ID NO: 1272048 - RNA, 19 nt, Homo sapiens
  misc_RNA (1)...(19): siRNA sense strand
cagcucacgccaaugaaua

SEQ ID NO: 1272049 - RNA, 19 nt, Homo sapiens
  misc_RNA (1)...(19): siRNA sense strand
aauagaggaugauucaaca

SEQ ID NO: 1272050 - RNA, 19 nt, Homo sapiens
  misc_RNA (1)...(19): siRNA sense strand
ggacaugagagcugauauc

SEQ ID NO: 1272051 - RNA, 19 nt, Homo sapiens
  misc_RNA (1)...(19): siRNA sense strand
gguauagcaucggagacua

SEQ ID NO: 1272052 - RNA, 19 nt, Homo sapiens
  misc_RNA (1)...(19): siRNA sense strand
aaacaagaagcgccaaaga

SEQ ID NO: 1272053 - RNA, 19 nt, Homo sapiens
  misc_RNA (1)...(19): siRNA sense strand
uauauugucucaacauggu

SEQ ID NO: 1272054 - RNA, 19 nt, Homo sapiens
  misc_RNA (1)...(19): siRNA sense strand
augguuggcucucuucuuu

SEQ ID NO: 1272055 - RNA, 19 nt, Homo sapiens
  misc_RNA (1)...(19): siRNA sense strand
ccagcaaggauucauugua

SEQ ID NO: 1272056 - RNA, 19 nt, Homo sapiens
  misc_RNA (1)...(19): siRNA sense strand
ucacuaacaccauccaaau

SEQ ID NO: 1272057 - RNA, 19 nt, Homo sapiens
  misc_RNA (1)...(19): siRNA sense strand
ucagcagucucuucaguuc

SEQ ID NO: 1272058 - RNA, 19 nt, Homo sapiens
  misc_RNA (1)...(19): siRNA sense strand
gaagaccauugagaaaguc

SEQ ID NO: 1272059 - RNA, 19 nt, Homo sapiens
  misc_RNA (1)...(19): siRNA sense strand
cagaggugguccauaaaca

SEQ ID NO: 1272060 - RNA, 19 nt, Homo sapiens
  misc_RNA (1)...(19): siRNA sense strand
cagcuggcuuugagcauug

SEQ ID NO: 1272061 - RNA, 19 nt, Homo sapiens
  misc_RNA (1)...(19): siRNA sense strand
ccagcuggcuuugagcauu

SEQ ID NO: 1272062 - RNA, 19 nt, Homo sapiens
  misc_RNA (1)...(19): siRNA sense strand
cuaacaccauccaaauaga

SEQ ID NO: 1272063 - RNA, 19 nt, Homo sapiens
  misc_RNA (1)...(19): siRNA sense strand
cuacgaaucaaacugcuuu

SEQ ID NO: 1272064 - RNA, 19 nt, Homo sapiens
  misc_RNA (1)...(19): siRNA sense strand
gaaaugaacaugaaaaggu

SEQ ID NO: 1272065 - RNA, 19 nt, Homo sapiens
  misc_RNA (1)...(19): siRNA sense strand
ccaaagacgccaccacaca

SEQ ID NO: 1272066 - RNA, 19 nt, Homo sapiens
  misc_RNA (1)...(19): siRNA sense strand
gagacuacgaggucauuga

SEQ ID NO: 1272067 - RNA, 19 nt, Homo sapiens
  misc_RNA (1)...(19): siRNA sense strand
ggaggacccagcaaggauu

SEQ ID NO: 1272068 - RNA, 19 nt, Homo sapiens
  misc_RNA (1)...(19): siRNA sense strand
gauauccuuccucaguaua

SEQ ID NO: 1272069 - RNA, 19 nt, Homo sapiens
  misc_RNA (1)...(19): siRNA sense strand
gaugaggugguggcuauuu

SEQ ID NO: 1272070 - RNA, 19 nt, Homo sapiens
  misc_RNA (1)...(19): siRNA sense strand
guacguguccucucucuac

SEQ ID NO: 1272071 - RNA, 19 nt, Homo sapiens
  misc_RNA (1)...(19): siRNA sense strand
gauagugugguggacguua

SEQ ID NO: 1272072 - RNA, 19 nt, Homo sapiens
  misc_RNA (1)...(19): siRNA sense strand
acccuaagcucauaaggau

SEQ ID NO: 1272073 - RNA, 19 nt, Homo sapiens
  misc_RNA (1)...(19): siRNA sense strand
uagaggaugauucaacaaa

SEQ ID NO: 1272074 - RNA, 19 nt, Homo sapiens
  misc_RNA (1)...(19): siRNA sense strand
gaaaagguccucuccaucu

SEQ ID NO: 1272075 - RNA, 19 nt, Homo sapiens
  misc_RNA (1)...(19): siRNA sense strand
agucauggauuauauuguc

SEQ ID NO: 1272076 - RNA, 19 nt, Homo sapiens
  misc_RNA (1)...(19): siRNA sense strand
ggaaacauagcuccuacca

SEQ ID NO: 1272077 - RNA, 19 nt, Homo sapiens
  misc_RNA (1)...(19): siRNA sense strand
cacuaacaccauccaaaua

SEQ ID NO: 1272078 - RNA, 19 nt, Homo sapiens
  misc_RNA (1)...(19): siRNA sense strand
ggugguccauaaacauuca

SEQ ID NO: 1272079 - RNA, 19 nt, Homo sapiens
  misc_RNA (1)...(19): siRNA sense strand
ggauauuacguuguucaaa

SEQ ID NO: 1272080 - RNA, 19 nt, Homo sapiens
  misc_RNA (1)...(19): siRNA sense strand
uuaccaugcuggagaaagu

SEQ ID NO: 1272081 - RNA, 19 nt, Homo sapiens
  misc_RNA (1)...(19): siRNA sense strand
gauaucuguguucaucuaa

SEQ ID NO: 1272082 - RNA, 19 nt, Homo sapiens
  misc_RNA (1)...(19): siRNA sense strand
cagcaaauguaugccaaca

SEQ ID NO: 1272083 - RNA, 19 nt, Homo sapiens
  misc_RNA (1)...(19): siRNA sense strand
ugucuuguuuaccuuauga

SEQ ID NO: 1272084 - RNA, 19 nt, Homo sapiens
  misc_RNA (1)...(19): siRNA sense strand
caaagacgccaccacacau

SEQ ID NO: 1272085 - RNA, 19 nt, Homo sapiens
  misc_RNA (1)...(19): siRNA sense strand
caauagaggaugauucaac

SEQ ID NO: 1272086 - RNA, 19 nt, Homo sapiens
  misc_RNA (1)...(19): siRNA sense strand
uaaugaacauccugcuuuu

SEQ ID NO: 1272087 - RNA, 19 nt, Homo sapiens
  misc_RNA (1)...(19): siRNA sense strand
gagagcugauaucuguguu

SEQ ID NO: 1272088 - RNA, 19 nt, Homo sapiens
  misc_RNA (1)...(19): siRNA sense strand
ugaauaauguacgggacuu

SEQ ID NO: 1272089 - RNA, 19 nt, Homo sapiens
  misc_RNA (1)...(19): siRNA sense strand
augagaugcugaauaaugu

SEQ ID NO: 1272090 - RNA, 19 nt, Homo sapiens
  misc_RNA (1)...(19): siRNA sense strand
ucucucuacuuuaccauga

SEQ ID NO: 1272091 - RNA, 19 nt, Homo sapiens
  misc_RNA (1)...(19): siRNA sense strand
gcagucucuucaguucuuu

SEQ ID NO: 1272092 - RNA, 19 nt, Homo sapiens
  misc_RNA (1)...(19): siRNA sense strand
aaucagcagucucuucagu

SEQ ID NO: 1272093 - RNA, 19 nt, Homo sapiens
  misc_RNA (1)...(19): siRNA sense strand
agauauccuuccucaguau

SEQ ID NO: 1272094 - RNA, 19 nt, Homo sapiens
  misc_RNA (1)...(19): siRNA sense strand
guagaguuccaaaccauuc

SEQ ID NO: 1272095 - RNA, 19 nt, Homo sapiens
  misc_RNA (1)...(19): siRNA sense strand
ggauuauauugucucaaca

SEQ ID NO: 1272096 - RNA, 19 nt, Homo sapiens
  misc_RNA (1)...(19): siRNA sense strand
uggauuauauugucucaac

SEQ ID NO: 1272097 - RNA, 19 nt, Homo sapiens
  misc_RNA (1)...(19): siRNA sense strand
gacccuaagcucauaagga

SEQ ID NO: 1272098 - RNA, 19 nt, Homo sapiens
  misc_RNA (1)...(19): siRNA sense strand
gggauugggugauuuuaau

SEQ ID NO: 1272099 - RNA, 19 nt, Homo sapiens
  misc_RNA (1)...(19): siRNA sense strand
gaauauacccuccacaguu

SEQ ID NO: 1272100 - RNA, 19 nt, Homo sapiens
  misc_RNA (1)...(19): siRNA sense strand
acacacagcuuugcacuuu

SEQ ID NO: 1272101 - RNA, 19 nt, Homo sapiens
  misc_RNA (1)...(19): siRNA sense strand
gcaaauagauguggacacu

SEQ ID NO: 1272102 - RNA, 19 nt, Homo sapiens
  misc_RNA (1)...(19): siRNA sense strand
cuacaaagccgaagucaau

SEQ ID NO: 1272103 - RNA, 19 nt, Homo sapiens
  misc_RNA (1)...(19): siRNA sense strand
ccaaguuaguuaagagaaa

SEQ ID NO: 1272104 - RNA, 19 nt, Homo sapiens
  misc_RNA (1)...(19): siRNA sense strand
gcuaccagcuccuguugaa

SEQ ID NO: 1272105 - RNA, 19 nt, Homo sapiens
  misc_RNA (1)...(19): siRNA sense strand
uaagagaaauuuccuugag

SEQ ID NO: 1272106 - RNA, 19 nt, Homo sapiens
  misc_RNA (1)...(19): siRNA sense strand
gaagaugagaauaugguuu

SEQ ID NO: 1272107 - RNA, 19 nt, Homo sapiens
  misc_RNA (1)...(19): siRNA sense strand
ccaucucucugucuuguuu

SEQ ID NO: 1272108 - RNA, 19 nt, Homo sapiens
  misc_RNA (1)...(19): siRNA sense strand
aaauagauguggacacugu

SEQ ID NO: 1272109 - RNA, 19 nt, Homo sapiens
  misc_RNA (1)...(19): siRNA sense strand
guguuaagauccucuguga

SEQ ID NO: 1272110 - RNA, 19 nt, Homo sapiens
  misc_RNA (1)...(19): siRNA sense strand
ggaccacaaugcuacaauc

SEQ ID NO: 1272111 - RNA, 19 nt, Homo sapiens
  misc_RNA (1)...(19): siRNA sense strand
aagccaaucucauggauau

SEQ ID NO: 1272112 - RNA, 19 nt, Homo sapiens
  misc_RNA (1)...(19): siRNA sense strand
gcucaauugcuacuccuua

SEQ ID NO: 1272113 - RNA, 19 nt, Homo sapiens
  misc_RNA (1)...(19): siRNA sense strand
gcaugcugcuugacuacaa

SEQ ID NO: 1272114 - RNA, 19 nt, Homo sapiens
  misc_RNA (1)...(19): siRNA sense strand
ggagcugccaaguuaguua

SEQ ID NO: 1272115 - RNA, 19 nt, Homo sapiens
  misc_RNA (1)...(19): siRNA sense strand
ccacaaugcuacaaucaac

SEQ ID NO: 1272116 - RNA, 19 nt, Homo sapiens
  misc_RNA (1)...(19): siRNA sense strand
gagaugacgacuuuaaauc

SEQ ID NO: 1272117 - RNA, 19 nt, Homo sapiens
  misc_RNA (1)...(19): siRNA sense strand
gaugacgacuuuaaaucuc

SEQ ID NO: 1272118 - RNA, 19 nt, Homo sapiens
  misc_RNA (1)...(19): siRNA sense strand
aauauacccuccacaguuc

SEQ ID NO: 1272119 - RNA, 19 nt, Homo sapiens
  misc_RNA (1)...(19): siRNA sense strand
gaagccaaucucauggaua

SEQ ID NO: 1272120 - RNA, 19 nt, Homo sapiens
  misc_RNA (1)...(19): siRNA sense strand
uugccuagcuauaaauuga

SEQ ID NO: 1272121 - RNA, 19 nt, Homo sapiens
  misc_RNA (1)...(19): siRNA sense strand
cuacugggcccuccgcuuu

SEQ ID NO: 1272122 - RNA, 19 nt, Homo sapiens
  misc_RNA (1)...(19): siRNA sense strand
gagcugccaaguuaguuaa

SEQ ID NO: 1272123 - RNA, 19 nt, Homo sapiens
  misc_RNA (1)...(19): siRNA sense strand
cgaagucaaugcccgagau

SEQ ID NO: 1272124 - RNA, 19 nt, Homo sapiens
  misc_RNA (1)...(19): siRNA sense strand
uaaguggacacacagcuuu

SEQ ID NO: 1272125 - RNA, 19 nt, Homo sapiens
  misc_RNA (1)...(19): siRNA sense strand
ugaaauggccaauguggau

SEQ ID NO: 1272126 - RNA, 19 nt, Homo sapiens
  misc_RNA (1)...(19): siRNA sense strand
gaaauggccaauguggauu

SEQ ID NO: 1272127 - RNA, 19 nt, Homo sapiens
  misc_RNA (1)...(19): siRNA sense strand
ggaaugucuucuggugcua

SEQ ID NO: 1272128 - RNA, 19 nt, Homo sapiens
  misc_RNA (1)...(19): siRNA sense strand
ugcccgagaugacgacuuu

SEQ ID NO: 1272129 - RNA, 19 nt, Homo sapiens
  misc_RNA (1)...(19): siRNA sense strand
cagcgugaaugcccacaug

SEQ ID NO: 1272130 - RNA, 19 nt, Homo sapiens
  misc_RNA (1)...(19): siRNA sense strand
aucuggagcugccaaguua

SEQ ID NO: 1272131 - RNA, 19 nt, Homo sapiens
  misc_RNA (1)...(19): siRNA sense strand
gaagaccaacaaccaagau

SEQ ID NO: 1272132 - RNA, 19 nt, Homo sapiens
  misc_RNA (1)...(19): siRNA sense strand
cgagaugacgacuuuaaau

SEQ ID NO: 1272133 - RNA, 19 nt, Homo sapiens
  misc_RNA (1)...(19): siRNA sense strand
gcuuuaaggagcaggagua

SEQ ID NO: 1272134 - RNA, 19 nt, Homo sapiens
  misc_RNA (1)...(19): siRNA sense strand
gauccaaaggcaaauagau

SEQ ID NO: 1272135 - RNA, 19 nt, Homo sapiens
  misc_RNA (1)...(19): siRNA sense strand
cgaagccaaucucauggau

SEQ ID NO: 1272136 - RNA, 19 nt, Homo sapiens
  misc_RNA (1)...(19): siRNA sense strand
gaacaugaagaccaacaac

SEQ ID NO: 1272137 - RNA, 19 nt, Homo sapiens
  misc_RNA (1)...(19): siRNA sense strand
cucaauugcuacuccuuaa

SEQ ID NO: 1272138 - RNA, 19 nt, Homo sapiens
  misc_RNA (1)...(19): siRNA sense strand
guuacugguugccuagcua

SEQ ID NO: 1272139 - RNA, 19 nt, Homo sapiens
  misc_RNA (1)...(19): siRNA sense strand
agucgaagaugagaauaug

SEQ ID NO: 1272140 - RNA, 19 nt, Homo sapiens
  misc_RNA (1)...(19): siRNA sense strand
cuugugaaauggccaaugu

SEQ ID NO: 1272141 - RNA, 19 nt, Homo sapiens
  misc_RNA (1)...(19): siRNA sense strand
gaagucgaagaugagaaua

SEQ ID NO: 1272142 - RNA, 19 nt, Homo sapiens
  misc_RNA (1)...(19): siRNA sense strand
ccaaucucauggauaucaa

SEQ ID NO: 1272143 - RNA, 19 nt, Homo sapiens
  misc_RNA (1)...(19): siRNA sense strand
ugaagucgaagaugagaau

SEQ ID NO: 1272144 - RNA, 19 nt, Homo sapiens
  misc_RNA (1)...(19): siRNA sense strand
gaagucaaugcccgagaug

SEQ ID NO: 1272145 - RNA, 19 nt, Homo sapiens
  misc_RNA (1)...(19): siRNA sense strand
cuacuggaccacaaugcua

SEQ ID NO: 1272146 - RNA, 19 nt, Homo sapiens
  misc_RNA (1)...(19): siRNA sense strand
gcugugcugccauccagua

SEQ ID NO: 1272147 - RNA, 19 nt, Homo sapiens
  misc_RNA (1)...(19): siRNA sense strand
ccaaugacuucggaaaauu

SEQ ID NO: 1272148 - RNA, 19 nt, Homo sapiens
  misc_RNA (1)...(19): siRNA sense strand
gccgcaugcugcuugacua

SEQ ID NO: 1272149 - RNA, 19 nt, Homo sapiens
  misc_RNA (1)...(19): siRNA sense strand
gcugccaaguuaguuaaga

SEQ ID NO: 1272150 - RNA, 19 nt, Homo sapiens
  misc_RNA (1)...(19): siRNA sense strand
gaccacaaugcuacaauca

SEQ ID NO: 1272151 - RNA, 19 nt, Homo sapiens
  misc_RNA (1)...(19): siRNA sense strand
cugguugccuagcuauaaa

SEQ ID NO: 1272152 - RNA, 19 nt, Homo sapiens
  misc_RNA (1)...(19): siRNA sense strand
caugcugcuugacuacaaa

SEQ ID NO: 1272153 - RNA, 19 nt, Homo sapiens
  misc_RNA (1)...(19): siRNA sense strand
caauugcuacuccuuaagu

SEQ ID NO: 1272154 - RNA, 19 nt, Homo sapiens
  misc_RNA (1)...(19): siRNA sense strand
gccaaucucauggauauca

SEQ ID NO: 1272155 - RNA, 19 nt, Homo sapiens
  misc_RNA (1)...(19): siRNA sense strand
aaucaacuguagacccaau

SEQ ID NO: 1272156 - RNA, 19 nt, Homo sapiens
  misc_RNA (1)...(19): siRNA sense strand
ccacugccccugucacuaa

SEQ ID NO: 1272157 - RNA, 19 nt, Homo sapiens
  misc_RNA (1)...(19): siRNA sense strand
cgaauauacccuccacagu

SEQ ID NO: 1272158 - RNA, 19 nt, Homo sapiens
  misc_RNA (1)...(19): siRNA sense strand
agaccaacaaccaagauga

SEQ ID NO: 1272159 - RNA, 19 nt, Homo sapiens
  misc_RNA (1)...(19): siRNA sense strand
caugaagaccaacaaccaa

SEQ ID NO: 1272160 - RNA, 19 nt, Homo sapiens
  misc_RNA (1)...(19): siRNA sense strand
ccgagaugacgacuuuaaa

SEQ ID NO: 1272161 - RNA, 19 nt, Homo sapiens
  misc_RNA (1)...(19): siRNA sense strand
ugaagaccaacaaccaaga

SEQ ID NO: 1272162 - RNA, 19 nt, Homo sapiens
  misc_RNA (1)...(19): siRNA sense strand
uugaggcgcuaaaguccaa

SEQ ID NO: 1272163 - RNA, 19 nt, Homo sapiens
  misc_RNA (1)...(19): siRNA sense strand
gaccaacaaccaagaugag

SEQ ID NO: 1272164 - RNA, 19 nt, Homo sapiens
  misc_RNA (1)...(19): siRNA sense strand
cgccgaagccaaucucaug

SEQ ID NO: 1272165 - RNA, 19 nt, Homo sapiens
  misc_RNA (1)...(19): siRNA sense strand
cccgagaugacgacuuuaa

SEQ ID NO: 1272166 - RNA, 19 nt, Homo sapiens
  misc_RNA (1)...(19): siRNA sense strand
uuaaggagcaggaguacag

SEQ ID NO: 1272167 - RNA, 19 nt, Homo sapiens
  misc_RNA (1)...(19): siRNA sense strand
auaaacaagguuacugguu

SEQ ID NO: 1272168 - RNA, 19 nt, Homo sapiens
  misc_RNA (1)...(19): siRNA sense strand
cgaagaugagaauaugguu

SEQ ID NO: 1272169 - RNA, 19 nt, Homo sapiens
  misc_RNA (1)...(19): siRNA sense strand
ccaaaggcaaauagaugug

SEQ ID NO: 1272170 - RNA, 19 nt, Homo sapiens
  misc_RNA (1)...(19): siRNA sense strand
cauaguggacagcgugaau

SEQ ID NO: 1272171 - RNA, 19 nt, Homo sapiens
  misc_RNA (1)...(19): siRNA sense strand
gcuuugcacuuuuguacaa

SEQ ID NO: 1272172 - RNA, 19 nt, Homo sapiens
  misc_RNA (1)...(19): siRNA sense strand
acacagcuuugcacuuuug

SEQ ID NO: 1272173 - RNA, 19 nt, Homo sapiens
  misc_RNA (1)...(19): siRNA sense strand
acugggcccuccgcuuuaa

SEQ ID NO: 1272174 - RNA, 19 nt, Homo sapiens
  misc_RNA (1)...(19): siRNA sense strand
aaucuggagcugccaaguu

SEQ ID NO: 1272175 - RNA, 19 nt, Homo sapiens
  misc_RNA (1)...(19): siRNA sense strand
gcugcccacuucggccuuu

SEQ ID NO: 1272176 - RNA, 19 nt, Homo sapiens
  misc_RNA (1)...(19): siRNA sense strand
gaauauacccuccacaguu

SEQ ID NO: 1272177 - RNA, 19 nt, Homo sapiens
  misc_RNA (1)...(19): siRNA sense strand
acacacagcuuugcacuuu

SEQ ID NO: 1272178 - RNA, 19 nt, Homo sapiens
  misc_RNA (1)...(19): siRNA sense strand
gcaaauagauguggacacu

SEQ ID NO: 1272179 - RNA, 19 nt, Homo sapiens
  misc_RNA (1)...(19): siRNA sense strand
cuacaaagccgaagucaau

SEQ ID NO: 1272180 - RNA, 19 nt, Homo sapiens
  misc_RNA (1)...(19): siRNA sense strand
ccaaguuaguuaagagaaa

SEQ ID NO: 1272181 - RNA, 19 nt, Homo sapiens
  misc_RNA (1)...(19): siRNA sense strand
gcuaccagcuccuguugaa

SEQ ID NO: 1272182 - RNA, 19 nt, Homo sapiens
  misc_RNA (1)...(19): siRNA sense strand
uaagagaaauuuccuugag

SEQ ID NO: 1272183 - RNA, 19 nt, Homo sapiens
  misc_RNA (1)...(19): siRNA sense strand
gaagaugagaauaugguuu

SEQ ID NO: 1272184 - RNA, 19 nt, Homo sapiens
  misc_RNA (1)...(19): siRNA sense strand
ccaucucucugucuuguuu

SEQ ID NO: 1272185 - RNA, 19 nt, Homo sapiens
  misc_RNA (1)...(19): siRNA sense strand
aaauagauguggacacugu

SEQ ID NO: 1272186 - RNA, 19 nt, Homo sapiens
  misc_RNA (1)...(19): siRNA sense strand
guguuaagauccucuguga

SEQ ID NO: 1272187 - RNA, 19 nt, Homo sapiens
  misc_RNA (1)...(19): siRNA sense strand
ggaccacaaugcuacaauc

SEQ ID NO: 1272188 - RNA, 19 nt, Homo sapiens
  misc_RNA (1)...(19): siRNA sense strand
aagccaaucucauggauau

SEQ ID NO: 1272189 - RNA, 19 nt, Homo sapiens
  misc_RNA (1)...(19): siRNA sense strand
gcucaauugcuacuccuua

SEQ ID NO: 1272190 - RNA, 19 nt, Homo sapiens
  misc_RNA (1)...(19): siRNA sense strand
gcaugcugcuugacuacaa

SEQ ID NO: 1272191 - RNA, 19 nt, Homo sapiens
  misc_RNA (1)...(19): siRNA sense strand
ggagcugccaaguuaguua

SEQ ID NO: 1272192 - RNA, 19 nt, Homo sapiens
  misc_RNA (1)...(19): siRNA sense strand
ccacaaugcuacaaucaac

SEQ ID NO: 1272193 - RNA, 19 nt, Homo sapiens
  misc_RNA (1)...(19): siRNA sense strand
gagaugacgacuuuaaauc

SEQ ID NO: 1272194 - RNA, 19 nt, Homo sapiens
  misc_RNA (1)...(19): siRNA sense strand
gaugacgacuuuaaaucuc

SEQ ID NO: 1272195 - RNA, 19 nt, Homo sapiens
  misc_RNA (1)...(19): siRNA sense strand
aauauacccuccacaguuc

SEQ ID NO: 1272196 - RNA, 19 nt, Homo sapiens
  misc_RNA (1)...(19): siRNA sense strand
gaagccaaucucauggaua

SEQ ID NO: 1272197 - RNA, 19 nt, Homo sapiens
  misc_RNA (1)...(19): siRNA sense strand
uugccuagcuauaaauuga

SEQ ID NO: 1272198 - RNA, 19 nt, Homo sapiens
  misc_RNA (1)...(19): siRNA sense strand
cuacugggcccuccgcuuu

SEQ ID NO: 1272199 - RNA, 19 nt, Homo sapiens
  misc_RNA (1)...(19): siRNA sense strand
gagcugccaaguuaguuaa

SEQ ID NO: 1272200 - RNA, 19 nt, Homo sapiens
  misc_RNA (1)...(19): siRNA sense strand
cgaagucaaugcccgagau

SEQ ID NO: 1272201 - RNA, 19 nt, Homo sapiens
  misc_RNA (1)...(19): siRNA sense strand
uaaguggacacacagcuuu

SEQ ID NO: 1272202 - RNA, 19 nt, Homo sapiens
  misc_RNA (1)...(19): siRNA sense strand
ugaaauggccaauguggau

SEQ ID NO: 1272203 - RNA, 19 nt, Homo sapiens
  misc_RNA (1)...(19): siRNA sense strand
gaaauggccaauguggauu

SEQ ID NO: 1272204 - RNA, 19 nt, Homo sapiens
  misc_RNA (1)...(19): siRNA sense strand
ggaaugucuucuggugcua

SEQ ID NO: 1272205 - RNA, 19 nt, Homo sapiens
  misc_RNA (1)...(19): siRNA sense strand
ugcccgagaugacgacuuu

SEQ ID NO: 1272206 - RNA, 19 nt, Homo sapiens
  misc_RNA (1)...(19): siRNA sense strand
cagcgugaaugcccacaug

SEQ ID NO: 1272207 - RNA, 19 nt, Homo sapiens
  misc_RNA (1)...(19): siRNA sense strand
aucuggagcugccaaguua

SEQ ID NO: 1272208 - RNA, 19 nt, Homo sapiens
  misc_RNA (1)...(19): siRNA sense strand
gaagaccaacaaccaagau

SEQ ID NO: 1272209 - RNA, 19 nt, Homo sapiens
  misc_RNA (1)...(19): siRNA sense strand
cgagaugacgacuuuaaau

SEQ ID NO: 1272210 - RNA, 19 nt, Homo sapiens
  misc_RNA (1)...(19): siRNA sense strand
gcuuuaaggagcaggagua

SEQ ID NO: 1272211 - RNA, 19 nt, Homo sapiens
  misc_RNA (1)...(19): siRNA sense strand
gauccaaaggcaaauagau

SEQ ID NO: 1272212 - RNA, 19 nt, Homo sapiens
  misc_RNA (1)...(19): siRNA sense strand
cgaagccaaucucauggau

SEQ ID NO: 1272213 - RNA, 19 nt, Homo sapiens
  misc_RNA (1)...(19): siRNA sense strand
gaacaugaagaccaacaac

SEQ ID NO: 1272214 - RNA, 19 nt, Homo sapiens
  misc_RNA (1)...(19): siRNA sense strand
cucaauugcuacuccuuaa

SEQ ID NO: 1272215 - RNA, 19 nt, Homo sapiens
  misc_RNA (1)...(19): siRNA sense strand
guuacugguugccuagcua

SEQ ID NO: 1272216 - RNA, 19 nt, Homo sapiens
  misc_RNA (1)...(19): siRNA sense strand
agucgaagaugagaauaug

SEQ ID NO: 1272217 - RNA, 19 nt, Homo sapiens
  misc_RNA (1)...(19): siRNA sense strand
cuugugaaauggccaaugu

SEQ ID NO: 1272218 - RNA, 19 nt, Homo sapiens
  misc_RNA (1)...(19): siRNA sense strand
gaagucgaagaugagaaua

SEQ ID NO: 1272219 - RNA, 19 nt, Homo sapiens
  misc_RNA (1)...(19): siRNA sense strand
ccaaucucauggauaucaa

SEQ ID NO: 1272220 - RNA, 19 nt, Homo sapiens
  misc_RNA (1)...(19): siRNA sense strand
ugaagucgaagaugagaau

SEQ ID NO: 1272221 - RNA, 19 nt, Homo sapiens
  misc_RNA (1)...(19): siRNA sense strand
gaagucaaugcccgagaug

SEQ ID NO: 1272222 - RNA, 19 nt, Homo sapiens
  misc_RNA (1)...(19): siRNA sense strand
cuacuggaccacaaugcua

SEQ ID NO: 1272223 - RNA, 19 nt, Homo sapiens
  misc_RNA (1)...(19): siRNA sense strand
gcugugcugccauccagua

SEQ ID NO: 1272224 - RNA, 19 nt, Homo sapiens
  misc_RNA (1)...(19): siRNA sense strand
ccaaugacuucggaaaauu

SEQ ID NO: 1272225 - RNA, 19 nt, Homo sapiens
  misc_RNA (1)...(19): siRNA sense strand
gccgcaugcugcuugacua

SEQ ID NO: 1272226 - RNA, 19 nt, Homo sapiens
  misc_RNA (1)...(19): siRNA sense strand
gcugccaaguuaguuaaga

SEQ ID NO: 1272227 - RNA, 19 nt, Homo sapiens
  misc_RNA (1)...(19): siRNA sense strand
gaccacaaugcuacaauca

SEQ ID NO: 1272228 - RNA, 19 nt, Homo sapiens
  misc_RNA (1)...(19): siRNA sense strand
cugguugccuagcuauaaa

SEQ ID NO: 1272229 - RNA, 19 nt, Homo sapiens
  misc_RNA (1)...(19): siRNA sense strand
caugcugcuugacuacaaa

SEQ ID NO: 1272230 - RNA, 19 nt, Homo sapiens
  misc_RNA (1)...(19): siRNA sense strand
caauugcuacuccuuaagu

SEQ ID NO: 1272231 - RNA, 19 nt, Homo sapiens
  misc_RNA (1)...(19): siRNA sense strand
gccaaucucauggauauca

SEQ ID NO: 1272232 - RNA, 19 nt, Homo sapiens
  misc_RNA (1)...(19): siRNA sense strand
aaucaacuguagacccaau

SEQ ID NO: 1272233 - RNA, 19 nt, Homo sapiens
  misc_RNA (1)...(19): siRNA sense strand
ccacugccccugucacuaa

SEQ ID NO: 1272234 - RNA, 19 nt, Homo sapiens
  misc_RNA (1)...(19): siRNA sense strand
cgaauauacccuccacagu

SEQ ID NO: 1272235 - RNA, 19 nt, Homo sapiens
  misc_RNA (1)...(19): siRNA sense strand
agaccaacaaccaagauga

SEQ ID NO: 1272236 - RNA, 19 nt, Homo sapiens
  misc_RNA (1)...(19): siRNA sense strand
caugaagaccaacaaccaa

SEQ ID NO: 1272237 - RNA, 19 nt, Homo sapiens
  misc_RNA (1)...(19): siRNA sense strand
ccgagaugacgacuuuaaa

SEQ ID NO: 1272238 - RNA, 19 nt, Homo sapiens
  misc_RNA (1)...(19): siRNA sense strand
ugaagaccaacaaccaaga

SEQ ID NO: 1272239 - RNA, 19 nt, Homo sapiens
  misc_RNA (1)...(19): siRNA sense strand
uugaggcgcuaaaguccaa

SEQ ID NO: 1272240 - RNA, 19 nt, Homo sapiens
  misc_RNA (1)...(19): siRNA sense strand
gaccaacaaccaagaugag

SEQ ID NO: 1272241 - RNA, 19 nt, Homo sapiens
  misc_RNA (1)...(19): siRNA sense strand
cgccgaagccaaucucaug

SEQ ID NO: 1272242 - RNA, 19 nt, Homo sapiens
  misc_RNA (1)...(19): siRNA sense strand
cccgagaugacgacuuuaa

SEQ ID NO: 1272243 - RNA, 19 nt, Homo sapiens
  misc_RNA (1)...(19): siRNA sense strand
uuaaggagcaggaguacag

SEQ ID NO: 1272244 - RNA, 19 nt, Homo sapiens
  misc_RNA (1)...(19): siRNA sense strand
auaaacaagguuacugguu

SEQ ID NO: 1272245 - RNA, 19 nt, Homo sapiens
  misc_RNA (1)...(19): siRNA sense strand
cgaagaugagaauaugguu

SEQ ID NO: 1272246 - RNA, 19 nt, Homo sapiens
  misc_RNA (1)...(19): siRNA sense strand
ccaaaggcaaauagaugug

SEQ ID NO: 1272247 - RNA, 19 nt, Homo sapiens
  misc_RNA (1)...(19): siRNA sense strand
cauaguggacagcgugaau

SEQ ID NO: 1272248 - RNA, 19 nt, Homo sapiens
  misc_RNA (1)...(19): siRNA sense strand
gcuuugcacuuuuguacaa

SEQ ID NO: 1272249 - RNA, 19 nt, Homo sapiens
  misc_RNA (1)...(19): siRNA sense strand
acacagcuuugcacuuuug

SEQ ID NO: 1272250 - RNA, 19 nt, Homo sapiens
  misc_RNA (1)...(19): siRNA sense strand
acugggcccuccgcuuuaa

SEQ ID NO: 1272251 - RNA, 19 nt, Homo sapiens
  misc_RNA (1)...(19): siRNA sense strand
aaucuggagcugccaaguu

SEQ ID NO: 1272252 - RNA, 19 nt, Homo sapiens
  misc_RNA (1)...(19): siRNA sense strand
gcugcccacuucggccuuu

SEQ ID NO: 1272253 - RNA, 19 nt, Homo sapiens
  misc_RNA (1)...(19): siRNA sense strand
gcacagaaauuguaaacuu

SEQ ID NO: 1272254 - RNA, 19 nt, Homo sapiens
  misc_RNA (1)...(19): siRNA sense strand
caacguuacugaagaauuu

SEQ ID NO: 1272255 - RNA, 19 nt, Homo sapiens
  misc_RNA (1)...(19): siRNA sense strand
aaaccaagauugcaccuua

SEQ ID NO: 1272256 - RNA, 19 nt, Homo sapiens
  misc_RNA (1)...(19): siRNA sense strand
ggauauugcuucaacauga

SEQ ID NO: 1272257 - RNA, 19 nt, Homo sapiens
  misc_RNA (1)...(19): siRNA sense strand
gaaaggauauugcuucaac

SEQ ID NO: 1272258 - RNA, 19 nt, Homo sapiens
  misc_RNA (1)...(19): siRNA sense strand
gccguuugcucaacaauua

SEQ ID NO: 1272259 - RNA, 19 nt, Homo sapiens
  misc_RNA (1)...(19): siRNA sense strand
gcauagauguugaccaaga

SEQ ID NO: 1272260 - RNA, 19 nt, Homo sapiens
  misc_RNA (1)...(19): siRNA sense strand
gggcauagauguugaccaa

SEQ ID NO: 1272261 - RNA, 19 nt, Homo sapiens
  misc_RNA (1)...(19): siRNA sense strand
ucacaggguuauaauguaa

SEQ ID NO: 1272262 - RNA, 19 nt, Homo sapiens
  misc_RNA (1)...(19): siRNA sense strand
gcucaacaauuauccaaug

SEQ ID NO: 1272263 - RNA, 19 nt, Homo sapiens
  misc_RNA (1)...(19): siRNA sense strand
gcacgaagccugccuugga

SEQ ID NO: 1272264 - RNA, 19 nt, Homo sapiens
  misc_RNA (1)...(19): siRNA sense strand
gcagaucgaucaccacuac

SEQ ID NO: 1272265 - RNA, 19 nt, Homo sapiens
  misc_RNA (1)...(19): siRNA sense strand
caaggaagcggcaaggaua

SEQ ID NO: 1272266 - RNA, 19 nt, Homo sapiens
  misc_RNA (1)...(19): siRNA sense strand
uaaaugcaaucacgauaga

SEQ ID NO: 1272267 - RNA, 19 nt, Homo sapiens
  misc_RNA (1)...(19): siRNA sense strand
guacagaaaggcaaauauu

SEQ ID NO: 1272268 - RNA, 19 nt, Homo sapiens
  misc_RNA (1)...(19): siRNA sense strand
gauagcagcugaauuuuau

SEQ ID NO: 1272269 - RNA, 19 nt, Homo sapiens
  misc_RNA (1)...(19): siRNA sense strand
cuauguagcuuguauguca

SEQ ID NO: 1272270 - RNA, 19 nt, Homo sapiens
  misc_RNA (1)...(19): siRNA sense strand
ggaagcaggagcuaaugua

SEQ ID NO: 1272271 - RNA, 19 nt, Homo sapiens
  misc_RNA (1)...(19): siRNA sense strand
aaggauagcagcugaauuu

SEQ ID NO: 1272272 - RNA, 19 nt, Homo sapiens
  misc_RNA (1)...(19): siRNA sense strand
gggaacuccucucuaugua

SEQ ID NO: 1272273 - RNA, 19 nt, Homo sapiens
  misc_RNA (1)...(19): siRNA sense strand
gagcuaauguaaaugcaau

SEQ ID NO: 1272274 - RNA, 19 nt, Homo sapiens
  misc_RNA (1)...(19): siRNA sense strand
gaagcaggagcuaauguaa

SEQ ID NO: 1272275 - RNA, 19 nt, Homo sapiens
  misc_RNA (1)...(19): siRNA sense strand
gaaaggcaaccgcaaggaa

SEQ ID NO: 1272276 - RNA, 19 nt, Homo sapiens
  misc_RNA (1)...(19): siRNA sense strand
caguaaaggucaccaugaa

SEQ ID NO: 1272277 - RNA, 19 nt, Homo sapiens
  misc_RNA (1)...(19): siRNA sense strand
ccucagucauuucuacaua

SEQ ID NO: 1272278 - RNA, 19 nt, Homo sapiens
  misc_RNA (1)...(19): siRNA sense strand
caacuuugccgacucugua

SEQ ID NO: 1272279 - RNA, 19 nt, Homo sapiens
  misc_RNA (1)...(19): siRNA sense strand
caacaauuauccaaugucu

SEQ ID NO: 1272280 - RNA, 19 nt, Homo sapiens
  misc_RNA (1)...(19): siRNA sense strand
uaaaugcaguaaccuuaga

SEQ ID NO: 1272281 - RNA, 19 nt, Homo sapiens
  misc_RNA (1)...(19): siRNA sense strand
gcucugagaacauuauuau

SEQ ID NO: 1272282 - RNA, 19 nt, Homo sapiens
  misc_RNA (1)...(19): siRNA sense strand
guaaaggucaccaugaaug

SEQ ID NO: 1272283 - RNA, 19 nt, Homo sapiens
  misc_RNA (1)...(19): siRNA sense strand
aaaggcaaauauugggaua

SEQ ID NO: 1272284 - RNA, 19 nt, Homo sapiens
  misc_RNA (1)...(19): siRNA sense strand
caacaauccagcacagaaa

SEQ ID NO: 1272285 - RNA, 19 nt, Homo sapiens
  misc_RNA (1)...(19): siRNA sense strand
uacuuucgcuguucuguuu

SEQ ID NO: 1272286 - RNA, 19 nt, Homo sapiens
  misc_RNA (1)...(19): siRNA sense strand
gcaguaugguggaaaggau

SEQ ID NO: 1272287 - RNA, 19 nt, Homo sapiens
  misc_RNA (1)...(19): siRNA sense strand
cauagauguugaccaagaa

SEQ ID NO: 1272288 - RNA, 19 nt, Homo sapiens
  misc_RNA (1)...(19): siRNA sense strand
gcuagaauuuggagcagau

SEQ ID NO: 1272289 - RNA, 19 nt, Homo sapiens
  misc_RNA (1)...(19): siRNA sense strand
uuacaauacuuucgcuguu

SEQ ID NO: 1272290 - RNA, 19 nt, Homo sapiens
  misc_RNA (1)...(19): siRNA sense strand
gcaaggaagcggcaaggau

SEQ ID NO: 1272291 - RNA, 19 nt, Homo sapiens
  misc_RNA (1)...(19): siRNA sense strand
auauugggauacuccauua

SEQ ID NO: 1272292 - RNA, 19 nt, Homo sapiens
  misc_RNA (1)...(19): siRNA sense strand
ucuggaagcuucuuuaugc

SEQ ID NO: 1272293 - RNA, 19 nt, Homo sapiens
  misc_RNA (1)...(19): siRNA sense strand
uguaaaugcaguaaccuua

SEQ ID NO: 1272294 - RNA, 19 nt, Homo sapiens
  misc_RNA (1)...(19): siRNA sense strand
gcaucuggaagcuucuuua

SEQ ID NO: 1272295 - RNA, 19 nt, Homo sapiens
  misc_RNA (1)...(19): siRNA sense strand
agcaggagcuaauguaaau

SEQ ID NO: 1272296 - RNA, 19 nt, Homo sapiens
  misc_RNA (1)...(19): siRNA sense strand
gaccaagaaauuccucauu

SEQ ID NO: 1272297 - RNA, 19 nt, Homo sapiens
  misc_RNA (1)...(19): siRNA sense strand
cagcuggagucaugucuuc

SEQ ID NO: 1272298 - RNA, 19 nt, Homo sapiens
  misc_RNA (1)...(19): siRNA sense strand
guaaaugcaaucacgauag

SEQ ID NO: 1272299 - RNA, 19 nt, Homo sapiens
  misc_RNA (1)...(19): siRNA sense strand
gagcuucugcgaccuauag

SEQ ID NO: 1272300 - RNA, 19 nt, Homo sapiens
  misc_RNA (1)...(19): siRNA sense strand
ggauagcagcugaauuuua

SEQ ID NO: 1272301 - RNA, 19 nt, Homo sapiens
  misc_RNA (1)...(19): siRNA sense strand
caagcucucuuuaccaacu

SEQ ID NO: 1272302 - RNA, 19 nt, Homo sapiens
  misc_RNA (1)...(19): siRNA sense strand
cccaagcucucuuuaccaa

SEQ ID NO: 1272303 - RNA, 19 nt, Homo sapiens
  misc_RNA (1)...(19): siRNA sense strand
uaucacaggguuauaaugu

SEQ ID NO: 1272304 - RNA, 19 nt, Homo sapiens
  misc_RNA (1)...(19): siRNA sense strand
gaauuuggagcagauauca

SEQ ID NO: 1272305 - RNA, 19 nt, Homo sapiens
  misc_RNA (1)...(19): siRNA sense strand
agucauuucuacauaguga

SEQ ID NO: 1272306 - RNA, 19 nt, Homo sapiens
  misc_RNA (1)...(19): siRNA sense strand
uuugggaacuccucucuau

SEQ ID NO: 1272307 - RNA, 19 nt, Homo sapiens
  misc_RNA (1)...(19): siRNA sense strand
ccaguaaaggucaccauga

SEQ ID NO: 1272308 - RNA, 19 nt, Homo sapiens
  misc_RNA (1)...(19): siRNA sense strand
uccaaugucuacuuuacaa

SEQ ID NO: 1272309 - RNA, 19 nt, Homo sapiens
  misc_RNA (1)...(19): siRNA sense strand
gcuuguaugucacagcaau

SEQ ID NO: 1272310 - RNA, 19 nt, Homo sapiens
  misc_RNA (1)...(19): siRNA sense strand
guaaaugcaguaaccuuag

SEQ ID NO: 1272311 - RNA, 19 nt, Homo sapiens
  misc_RNA (1)...(19): siRNA sense strand
ucugcgaccuauagaugua

SEQ ID NO: 1272312 - RNA, 19 nt, Homo sapiens
  misc_RNA (1)...(19): siRNA sense strand
aagcccagcuggagucaug

SEQ ID NO: 1272313 - RNA, 19 nt, Homo sapiens
  misc_RNA (1)...(19): siRNA sense strand
uauccaaugucuacuuuac

SEQ ID NO: 1272314 - RNA, 19 nt, Homo sapiens
  misc_RNA (1)...(19): siRNA sense strand
gcaaggauagcagcugaau

SEQ ID NO: 1272315 - RNA, 19 nt, Homo sapiens
  misc_RNA (1)...(19): siRNA sense strand
uggaaaggauauugcuuca

SEQ ID NO: 1272316 - RNA, 19 nt, Homo sapiens
  misc_RNA (1)...(19): siRNA sense strand
uaaaggucaccaugaaugu

SEQ ID NO: 1272317 - RNA, 19 nt, Homo sapiens
  misc_RNA (1)...(19): siRNA sense strand
ucaacaauccagcacagaa

SEQ ID NO: 1272318 - RNA, 19 nt, Homo sapiens
  misc_RNA (1)...(19): siRNA sense strand
uacagaaaggcaaauauug

SEQ ID NO: 1272319 - RNA, 19 nt, Homo sapiens
  misc_RNA (1)...(19): siRNA sense strand
acaauuauccaaugucuac

SEQ ID NO: 1272320 - RNA, 19 nt, Homo sapiens
  misc_RNA (1)...(19): siRNA sense strand
gcuggaagcaggagcuaau

SEQ ID NO: 1272321 - RNA, 19 nt, Homo sapiens
  misc_RNA (1)...(19): siRNA sense strand
gauguugaccaagaaauuc

SEQ ID NO: 1272322 - RNA, 19 nt, Homo sapiens
  misc_RNA (1)...(19): siRNA sense strand
uaauguaaaugcaguaacc

SEQ ID NO: 1272323 - RNA, 19 nt, Homo sapiens
  misc_RNA (1)...(19): siRNA sense strand
uggcgugacuccguuauuc

SEQ ID NO: 1272324 - RNA, 19 nt, Homo sapiens
  misc_RNA (1)...(19): siRNA sense strand
gaagaaaaucggccguuug

SEQ ID NO: 1272325 - RNA, 19 nt, Homo sapiens
  misc_RNA (1)...(19): siRNA sense strand
gaucgaucaccacuacaug

SEQ ID NO: 1272326 - RNA, 19 nt, Homo sapiens
  misc_RNA (1)...(19): siRNA sense strand
uacaauacuuucgcuguuc

SEQ ID NO: 1272327 - RNA, 19 nt, Homo sapiens
  misc_RNA (1)...(19): siRNA sense strand
ggaacuccucucuauguag

SEQ ID NO: 1272328 - RNA, 19 nt, Homo sapiens
  misc_RNA (1)...(19): siRNA sense strand
ucagucauuucuacauagu

SEQ ID NO: 1272329 - RNA, 19 nt, Homo sapiens
  misc_RNA (1)...(19): siRNA sense strand
uguaaaugcaaucacgaua

SEQ ID NO: 1272330 - RNA, 19 nt, Homo sapiens
  misc_RNA (1)...(19): siRNA sense strand
ugccaacguuacugaagaa

SEQ ID NO: 1272331 - RNA, 19 nt, Homo sapiens
  misc_RNA (1)...(19): siRNA sense strand
acagaaaggcaaauauugg

SEQ ID NO: 1272332 - RNA, 19 nt, Homo sapiens
  misc_RNA (1)...(19): siRNA sense strand
gugcugacguacagaaagg

SEQ ID NO: 1272333 - RNA, 19 nt, Homo sapiens
  misc_RNA (1)...(19): siRNA sense strand
cauccucagucauuucuac

SEQ ID NO: 1272334 - RNA, 19 nt, Homo sapiens
  misc_RNA (1)...(19): siRNA sense strand
ggaguaacccaaggacaag

SEQ ID NO: 1272335 - RNA, 19 nt, Homo sapiens
  misc_RNA (1)...(19): siRNA sense strand
cugccaacguuacugaaga

SEQ ID NO: 1272336 - RNA, 19 nt, Homo sapiens
  misc_RNA (1)...(19): siRNA sense strand
auccgaagcuacauaggaa

SEQ ID NO: 1272337 - RNA, 19 nt, Homo sapiens
  misc_RNA (1)...(19): siRNA sense strand
aagcaggagcuaauguaaa

SEQ ID NO: 1272338 - RNA, 19 nt, Homo sapiens
  misc_RNA (1)...(19): siRNA sense strand
ggagaucacguggcaugug

SEQ ID NO: 1272339 - RNA, 19 nt, Homo sapiens
  misc_RNA (1)...(19): siRNA sense strand
caagguuccugggcagauc

SEQ ID NO: 1272340 - RNA, 19 nt, Homo sapiens
  misc_RNA (1)...(19): siRNA sense strand
ggagcuaauguaaaugcaa

SEQ ID NO: 1272341 - RNA, 19 nt, Homo sapiens
  misc_RNA (1)...(19): siRNA sense strand
ccaacguuacugaagaauu

SEQ ID NO: 1272342 - RNA, 19 nt, Homo sapiens
  misc_RNA (1)...(19): siRNA sense strand
uggaguaacccaaggacaa

SEQ ID NO: 1272343 - RNA, 19 nt, Homo sapiens
  misc_RNA (1)...(19): siRNA sense strand
ggaaaggauauugcuucaa

SEQ ID NO: 1272344 - RNA, 19 nt, Homo sapiens
  misc_RNA (1)...(19): siRNA sense strand
caucuggaagcuucuuuau

SEQ ID NO: 1272345 - RNA, 19 nt, Homo sapiens
  misc_RNA (1)...(19): siRNA sense strand
ugggaacuccucucuaugu

SEQ ID NO: 1272346 - RNA, 19 nt, Homo sapiens
  misc_RNA (1)...(19): siRNA sense strand
ugacguacagaaaggcaaa

SEQ ID NO: 1272347 - RNA, 19 nt, Homo sapiens
  misc_RNA (1)...(19): siRNA sense strand
caaggauagcagcugaauu

SEQ ID NO: 1272348 - RNA, 19 nt, Homo sapiens
  misc_RNA (1)...(19): siRNA sense strand
aaccaagauugcaccuuau

SEQ ID NO: 1272349 - RNA, 19 nt, Homo sapiens
  misc_RNA (1)...(19): siRNA sense strand
uauccgaagcuacauagga

SEQ ID NO: 1272350 - RNA, 19 nt, Homo sapiens
  misc_RNA (1)...(19): siRNA sense strand
agauguugaccaagaaauu

SEQ ID NO: 1272351 - RNA, 19 nt, Homo sapiens
  misc_RNA (1)...(19): siRNA sense strand
ucuggaguauggugccaaa

SEQ ID NO: 1272352 - RNA, 19 nt, Homo sapiens
  misc_RNA (1)...(19): siRNA sense strand
cagcugccaacguuacuga

SEQ ID NO: 1272353 - RNA, 19 nt, Homo sapiens
  misc_RNA (1)...(19): siRNA sense strand
ccucgaggcugcucaguga

SEQ ID NO: 1272354 - RNA, 19 nt, Homo sapiens
  misc_RNA (1)...(19): siRNA sense strand
agaccuaccuggaggaaga

SEQ ID NO: 1272355 - RNA, 19 nt, Homo sapiens
  misc_RNA (1)...(19): siRNA sense strand
gaaucugcuuugucuucua

SEQ ID NO: 1272356 - RNA, 19 nt, Homo sapiens
  misc_RNA (1)...(19): siRNA sense strand
ggcaggacguggcugaaga

SEQ ID NO: 1272357 - RNA, 19 nt, Homo sapiens
  misc_RNA (1)...(19): siRNA sense strand
gcaaguaccaggacagcau

SEQ ID NO: 1272358 - RNA, 19 nt, Homo sapiens
  misc_RNA (1)...(19): siRNA sense strand
cacgcuaccuccugagauu

SEQ ID NO: 1272359 - RNA, 19 nt, Homo sapiens
  misc_RNA (1)...(19): siRNA sense strand
ccagaaaugcccagacugu

SEQ ID NO: 1272360 - RNA, 19 nt, Homo sapiens
  misc_RNA (1)...(19): siRNA sense strand
ccucagauuuggacagcuu

SEQ ID NO: 1272361 - RNA, 19 nt, Homo sapiens
  misc_RNA (1)...(19): siRNA sense strand
acucgcaccugaagaaugu

SEQ ID NO: 1272362 - RNA, 19 nt, Homo sapiens
  misc_RNA (1)...(19): siRNA sense strand
gcaaccuccuggccucugu

SEQ ID NO: 1272363 - RNA, 19 nt, Homo sapiens
  misc_RNA (1)...(19): siRNA sense strand
gccucgaucucucucagaa

SEQ ID NO: 1272364 - RNA, 19 nt, Homo sapiens
  misc_RNA (1)...(19): siRNA sense strand
agaaaugcccagacuguuc

SEQ ID NO: 1272365 - RNA, 19 nt, Homo sapiens
  misc_RNA (1)...(19): siRNA sense strand
ccaucaagcugccgagacu

SEQ ID NO: 1272366 - RNA, 19 nt, Homo sapiens
  misc_RNA (1)...(19): siRNA sense strand
gcagccaccugggaugaca

SEQ ID NO: 1272367 - RNA, 19 nt, Homo sapiens
  misc_RNA (1)...(19): siRNA sense strand
ggggugaccuggagaccua

SEQ ID NO: 1272368 - RNA, 19 nt, Homo sapiens
  misc_RNA (1)...(19): siRNA sense strand
gcagcccucauuccagaaa

SEQ ID NO: 1272369 - RNA, 19 nt, Homo sapiens
  misc_RNA (1)...(19): siRNA sense strand
gaaccagaggcugcaguga

SEQ ID NO: 1272370 - RNA, 19 nt, Homo sapiens
  misc_RNA (1)...(19): siRNA sense strand
ggcacgaguuccgggauga

SEQ ID NO: 1272371 - RNA, 19 nt, Homo sapiens
  misc_RNA (1)...(19): siRNA sense strand
guuccgggaugaucuggau

SEQ ID NO: 1272372 - RNA, 19 nt, Homo sapiens
  misc_RNA (1)...(19): siRNA sense strand
ggagcucacccaccuguac

SEQ ID NO: 1272373 - RNA, 19 nt, Homo sapiens
  misc_RNA (1)...(19): siRNA sense strand
gaagaggugcgcgcagucu

SEQ ID NO: 1272374 - RNA, 19 nt, Homo sapiens
  misc_RNA (1)...(19): siRNA sense strand
ccacuucuccugguuccuu

SEQ ID NO: 1272375 - RNA, 19 nt, Homo sapiens
  misc_RNA (1)...(19): siRNA sense strand
ggagaccuaccuggaggaa

SEQ ID NO: 1272376 - RNA, 19 nt, Homo sapiens
  misc_RNA (1)...(19): siRNA sense strand
guacaccaccaagaacugu

SEQ ID NO: 1272377 - RNA, 19 nt, Homo sapiens
  misc_RNA (1)...(19): siRNA sense strand
gccugcaccuguuguacug

SEQ ID NO: 1272378 - RNA, 19 nt, Homo sapiens
  misc_RNA (1)...(19): siRNA sense strand
cagaaaugcccagacuguu

SEQ ID NO: 1272379 - RNA, 19 nt, Homo sapiens
  misc_RNA (1)...(19): siRNA sense strand
gaugagcagauccgucaca

SEQ ID NO: 1272380 - RNA, 19 nt, Homo sapiens
  misc_RNA (1)...(19): siRNA sense strand
cugacacgguggagauguu

SEQ ID NO: 1272381 - RNA, 19 nt, Homo sapiens
  misc_RNA (1)...(19): siRNA sense strand
cucgaucucucucagaauc

SEQ ID NO: 1272382 - RNA, 19 nt, Homo sapiens
  misc_RNA (1)...(19): siRNA sense strand
aaucugcuuugucuucuac

SEQ ID NO: 1272383 - RNA, 19 nt, Homo sapiens
  misc_RNA (1)...(19): siRNA sense strand
ucuacucgcaccugaagaa

SEQ ID NO: 1272384 - RNA, 19 nt, Homo sapiens
  misc_RNA (1)...(19): siRNA sense strand
ccucgaggcugcucaguga

SEQ ID NO: 1272385 - RNA, 19 nt, Homo sapiens
  misc_RNA (1)...(19): siRNA sense strand
agaccuaccuggaggaaga

SEQ ID NO: 1272386 - RNA, 19 nt, Homo sapiens
  misc_RNA (1)...(19): siRNA sense strand
gaaucugcuuugucuucua

SEQ ID NO: 1272387 - RNA, 19 nt, Homo sapiens
  misc_RNA (1)...(19): siRNA sense strand
guggaauucuugcgucuga

SEQ ID NO: 1272388 - RNA, 19 nt, Homo sapiens
  misc_RNA (1)...(19): siRNA sense strand
ggagaugcuucagaggauu

SEQ ID NO: 1272389 - RNA, 19 nt, Homo sapiens
  misc_RNA (1)...(19): siRNA sense strand
ggcaggacguggcugaaga

SEQ ID NO: 1272390 - RNA, 19 nt, Homo sapiens
  misc_RNA (1)...(19): siRNA sense strand
gcaaguaccaggacagcau

SEQ ID NO: 1272391 - RNA, 19 nt, Homo sapiens
  misc_RNA (1)...(19): siRNA sense strand
gcaaccggcugagcuugga

SEQ ID NO: 1272392 - RNA, 19 nt, Homo sapiens
  misc_RNA (1)...(19): siRNA sense strand
cacgcuaccuccugagauu

SEQ ID NO: 1272393 - RNA, 19 nt, Homo sapiens
  misc_RNA (1)...(19): siRNA sense strand
ccagaaaugcccagacugu

SEQ ID NO: 1272394 - RNA, 19 nt, Homo sapiens
  misc_RNA (1)...(19): siRNA sense strand
ccucagauuuggacagcuu

SEQ ID NO: 1272395 - RNA, 19 nt, Homo sapiens
  misc_RNA (1)...(19): siRNA sense strand
acucgcaccugaagaaugu

SEQ ID NO: 1272396 - RNA, 19 nt, Homo sapiens
  misc_RNA (1)...(19): siRNA sense strand
gcaaccuccuggccucugu

SEQ ID NO: 1272397 - RNA, 19 nt, Homo sapiens
  misc_RNA (1)...(19): siRNA sense strand
gccucgaucucucucagaa

SEQ ID NO: 1272398 - RNA, 19 nt, Homo sapiens
  misc_RNA (1)...(19): siRNA sense strand
agaaaugcccagacuguuc

SEQ ID NO: 1272399 - RNA, 19 nt, Homo sapiens
  misc_RNA (1)...(19): siRNA sense strand
ccaucaagcugccgagacu

SEQ ID NO: 1272400 - RNA, 19 nt, Homo sapiens
  misc_RNA (1)...(19): siRNA sense strand
gcagccaccugggaugaca

SEQ ID NO: 1272401 - RNA, 19 nt, Homo sapiens
  misc_RNA (1)...(19): siRNA sense strand
ggggugaccuggagaccua

SEQ ID NO: 1272402 - RNA, 19 nt, Homo sapiens
  misc_RNA (1)...(19): siRNA sense strand
gcagcccucauuccagaaa

SEQ ID NO: 1272403 - RNA, 19 nt, Homo sapiens
  misc_RNA (1)...(19): siRNA sense strand
gaaccagaggcugcaguga

SEQ ID NO: 1272404 - RNA, 19 nt, Homo sapiens
  misc_RNA (1)...(19): siRNA sense strand
ucaacagccuggagacacu

SEQ ID NO: 1272405 - RNA, 19 nt, Homo sapiens
  misc_RNA (1)...(19): siRNA sense strand
guuccgggaugaucuggau

SEQ ID NO: 1272406 - RNA, 19 nt, Homo sapiens
  misc_RNA (1)...(19): siRNA sense strand
ggcacgaguuccgggauga

SEQ ID NO: 1272407 - RNA, 19 nt, Homo sapiens
  misc_RNA (1)...(19): siRNA sense strand
ggagcucacccaccuguac

SEQ ID NO: 1272408 - RNA, 19 nt, Homo sapiens
  misc_RNA (1)...(19): siRNA sense strand
gaagaggugcgcgcagucu

SEQ ID NO: 1272409 - RNA, 19 nt, Homo sapiens
  misc_RNA (1)...(19): siRNA sense strand
ccacuucuccugguuccuu

SEQ ID NO: 1272410 - RNA, 19 nt, Homo sapiens
  misc_RNA (1)...(19): siRNA sense strand
aggagaugcuucagaggau

SEQ ID NO: 1272411 - RNA, 19 nt, Homo sapiens
  misc_RNA (1)...(19): siRNA sense strand
gagaugcuucagaggauuc

SEQ ID NO: 1272412 - RNA, 19 nt, Homo sapiens
  misc_RNA (1)...(19): siRNA sense strand
guacaccaccaagaacugu

SEQ ID NO: 1272413 - RNA, 19 nt, Homo sapiens
  misc_RNA (1)...(19): siRNA sense strand
gccugcaccuguuguacug

SEQ ID NO: 1272414 - RNA, 19 nt, Homo sapiens
  misc_RNA (1)...(19): siRNA sense strand
ggagaccuaccuggaggaa

SEQ ID NO: 1272415 - RNA, 19 nt, Homo sapiens
  misc_RNA (1)...(19): siRNA sense strand
cagaaaugcccagacuguu

SEQ ID NO: 1272416 - RNA, 19 nt, Homo sapiens
  misc_RNA (1)...(19): siRNA sense strand
gaugagcagauccgucaca

SEQ ID NO: 1272417 - RNA, 19 nt, Homo sapiens
  misc_RNA (1)...(19): siRNA sense strand
cugacacgguggagauguu

SEQ ID NO: 1272418 - RNA, 19 nt, Homo sapiens
  misc_RNA (1)...(19): siRNA sense strand
cucgaucucucucagaauc

SEQ ID NO: 1272419 - RNA, 19 nt, Homo sapiens
  misc_RNA (1)...(19): siRNA sense strand
aaucugcuuugucuucuac

SEQ ID NO: 1272420 - RNA, 19 nt, Homo sapiens
  misc_RNA (1)...(19): siRNA sense strand
ucuacucgcaccugaagaa

SEQ ID NO: 1272421 - RNA, 19 nt, Homo sapiens
  misc_RNA (1)...(19): siRNA sense strand
ccucgaggcugcucaguga

SEQ ID NO: 1272422 - RNA, 19 nt, Homo sapiens
  misc_RNA (1)...(19): siRNA sense strand
agaccuaccuggaggaaga

SEQ ID NO: 1272423 - RNA, 19 nt, Homo sapiens
  misc_RNA (1)...(19): siRNA sense strand
gaaucugcuuugucuucua

SEQ ID NO: 1272424 - RNA, 19 nt, Homo sapiens
  misc_RNA (1)...(19): siRNA sense strand
guggaauucuugcgucuga

SEQ ID NO: 1272425 - RNA, 19 nt, Homo sapiens
  misc_RNA (1)...(19): siRNA sense strand
ggagaugcuucagaggauu

SEQ ID NO: 1272426 - RNA, 19 nt, Homo sapiens
  misc_RNA (1)...(19): siRNA sense strand
ggcaggacguggcugaaga

SEQ ID NO: 1272427 - RNA, 19 nt, Homo sapiens
  misc_RNA (1)...(19): siRNA sense strand
gcaaguaccaggacagcau

SEQ ID NO: 1272428 - RNA, 19 nt, Homo sapiens
  misc_RNA (1)...(19): siRNA sense strand
gcaaccggcugagcuugga

SEQ ID NO: 1272429 - RNA, 19 nt, Homo sapiens
  misc_RNA (1)...(19): siRNA sense strand
cacgcuaccuccugagauu

SEQ ID NO: 1272430 - RNA, 19 nt, Homo sapiens
  misc_RNA (1)...(19): siRNA sense strand
ccagaaaugcccagacugu

SEQ ID NO: 1272431 - RNA, 19 nt, Homo sapiens
  misc_RNA (1)...(19): siRNA sense strand
ccucagauuuggacagcuu

SEQ ID NO: 1272432 - RNA, 19 nt, Homo sapiens
  misc_RNA (1)...(19): siRNA sense strand
acucgcaccugaagaaugu

SEQ ID NO: 1272433 - RNA, 19 nt, Homo sapiens
  misc_RNA (1)...(19): siRNA sense strand
gcaaccuccuggccucugu

SEQ ID NO: 1272434 - RNA, 19 nt, Homo sapiens
  misc_RNA (1)...(19): siRNA sense strand
gccucgaucucucucagaa

SEQ ID NO: 1272435 - RNA, 19 nt, Homo sapiens
  misc_RNA (1)...(19): siRNA sense strand
agaaaugcccagacuguuc

SEQ ID NO: 1272436 - RNA, 19 nt, Homo sapiens
  misc_RNA (1)...(19): siRNA sense strand
ccaucaagcugccgagacu

SEQ ID NO: 1272437 - RNA, 19 nt, Homo sapiens
  misc_RNA (1)...(19): siRNA sense strand
gcagccaccugggaugaca

SEQ ID NO: 1272438 - RNA, 19 nt, Homo sapiens
  misc_RNA (1)...(19): siRNA sense strand
ggggugaccuggagaccua

SEQ ID NO: 1272439 - RNA, 19 nt, Homo sapiens
  misc_RNA (1)...(19): siRNA sense strand
gcagcccucauuccagaaa

SEQ ID NO: 1272440 - RNA, 19 nt, Homo sapiens
  misc_RNA (1)...(19): siRNA sense strand
gaaccagaggcugcaguga

SEQ ID NO: 1272441 - RNA, 19 nt, Homo sapiens
  misc_RNA (1)...(19): siRNA sense strand
ucaacagccuggagacacu

SEQ ID NO: 1272442 - RNA, 19 nt, Homo sapiens
  misc_RNA (1)...(19): siRNA sense strand
guuccgggaugaucuggau

SEQ ID NO: 1272443 - RNA, 19 nt, Homo sapiens
  misc_RNA (1)...(19): siRNA sense strand
ggcacgaguuccgggauga

SEQ ID NO: 1272444 - RNA, 19 nt, Homo sapiens
  misc_RNA (1)...(19): siRNA sense strand
ggagcucacccaccuguac

SEQ ID NO: 1272445 - RNA, 19 nt, Homo sapiens
  misc_RNA (1)...(19): siRNA sense strand
gaagaggugcgcgcagucu

SEQ ID NO: 1272446 - RNA, 19 nt, Homo sapiens
  misc_RNA (1)...(19): siRNA sense strand
ccacuucuccugguuccuu

SEQ ID NO: 1272447 - RNA, 19 nt, Homo sapiens
  misc_RNA (1)...(19): siRNA sense strand
aggagaugcuucagaggau

SEQ ID NO: 1272448 - RNA, 19 nt, Homo sapiens
  misc_RNA (1)...(19): siRNA sense strand
gagaugcuucagaggauuc

SEQ ID NO: 1272449 - RNA, 19 nt, Homo sapiens
  misc_RNA (1)...(19): siRNA sense strand
guacaccaccaagaacugu

SEQ ID NO: 1272450 - RNA, 19 nt, Homo sapiens
  misc_RNA (1)...(19): siRNA sense strand
gccugcaccuguuguacug

SEQ ID NO: 1272451 - RNA, 19 nt, Homo sapiens
  misc_RNA (1)...(19): siRNA sense strand
ggagaccuaccuggaggaa

SEQ ID NO: 1272452 - RNA, 19 nt, Homo sapiens
  misc_RNA (1)...(19): siRNA sense strand
cagaaaugcccagacuguu

SEQ ID NO: 1272453 - RNA, 19 nt, Homo sapiens
  misc_RNA (1)...(19): siRNA sense strand
gaugagcagauccgucaca

SEQ ID NO: 1272454 - RNA, 19 nt, Homo sapiens
  misc_RNA (1)...(19): siRNA sense strand
cugacacgguggagauguu

SEQ ID NO: 1272455 - RNA, 19 nt, Homo sapiens
  misc_RNA (1)...(19): siRNA sense strand
cucgaucucucucagaauc

SEQ ID NO: 1272456 - RNA, 19 nt, Homo sapiens
  misc_RNA (1)...(19): siRNA sense strand
aaucugcuuugucuucuac

SEQ ID NO: 1272457 - RNA, 19 nt, Homo sapiens
  misc_RNA (1)...(19): siRNA sense strand
ucuacucgcaccugaagaa

SEQ ID NO: 1272458 - RNA, 19 nt, Homo sapiens
  misc_RNA (1)...(19): siRNA sense strand
caucaagaccgccaagauu

SEQ ID NO: 1272459 - RNA, 19 nt, Homo sapiens
  misc_RNA (1)...(19): siRNA sense strand
agggugaacaggacaauua

SEQ ID NO: 1272460 - RNA, 19 nt, Homo sapiens
  misc_RNA (1)...(19): siRNA sense strand
ucaccgagaucaucaagac

SEQ ID NO: 1272461 - RNA, 19 nt, Homo sapiens
  misc_RNA (1)...(19): siRNA sense strand
gcgagucccugaugaagcu

SEQ ID NO: 1272462 - RNA, 19 nt, Homo sapiens
  misc_RNA (1)...(19): siRNA sense strand
uguccgaccucaagcaguu

SEQ ID NO: 1272463 - RNA, 19 nt, Homo sapiens
  misc_RNA (1)...(19): siRNA sense strand
acaggacaauuacgagaug

SEQ ID NO: 1272464 - RNA, 19 nt, Homo sapiens
  misc_RNA (1)...(19): siRNA sense strand
caacuucaccgagaucauc

SEQ ID NO: 1272465 - RNA, 19 nt, Homo sapiens
  misc_RNA (1)...(19): siRNA sense strand
acaacaagcggcugaagga

SEQ ID NO: 1272466 - RNA, 19 nt, Homo sapiens
  misc_RNA (1)...(19): siRNA sense strand
gcugaaggacgacauuaag

SEQ ID NO: 1272467 - RNA, 19 nt, Homo sapiens
  misc_RNA (1)...(19): siRNA sense strand
gaucuccauugaccucuac

SEQ ID NO: 1272468 - RNA, 19 nt, Homo sapiens
  misc_RNA (1)...(19): siRNA sense strand
ggacaacuucaccgagauc

SEQ ID NO: 1272469 - RNA, 19 nt, Homo sapiens
  misc_RNA (1)...(19): siRNA sense strand
ggacgagacgcagguguca

SEQ ID NO: 1272470 - RNA, 19 nt, Homo sapiens
  misc_RNA (1)...(19): siRNA sense strand
ggcugaaggacgacauuaa

SEQ ID NO: 1272471 - RNA, 19 nt, Homo sapiens
  misc_RNA (1)...(19): siRNA sense strand
cgacauuaaguccaucaug

SEQ ID NO: 1272472 - RNA, 19 nt, Homo sapiens
  misc_RNA (1)...(19): siRNA sense strand
acaauuacgagaugcaugu

SEQ ID NO: 1272473 - RNA, 19 nt, Homo sapiens
  misc_RNA (1)...(19): siRNA sense strand
gugaacaggacaauuacga

SEQ ID NO: 1272474 - RNA, 19 nt, Homo sapiens
  misc_RNA (1)...(19): siRNA sense strand
ugaaggacgacauuaaguc

SEQ ID NO: 1272475 - RNA, 19 nt, Homo sapiens
  misc_RNA (1)...(19): siRNA sense strand
ggacaauuacgagaugcau

SEQ ID NO: 1272476 - RNA, 19 nt, Homo sapiens
  misc_RNA (1)...(19): siRNA sense strand
caucaagaccgccaagauu

SEQ ID NO: 1272477 - RNA, 19 nt, Homo sapiens
  misc_RNA (1)...(19): siRNA sense strand
agggugaacaggacaauua

SEQ ID NO: 1272478 - RNA, 19 nt, Homo sapiens
  misc_RNA (1)...(19): siRNA sense strand
ucaccgagaucaucaagac

SEQ ID NO: 1272479 - RNA, 19 nt, Homo sapiens
  misc_RNA (1)...(19): siRNA sense strand
gcgagucccugaugaagcu

SEQ ID NO: 1272480 - RNA, 19 nt, Homo sapiens
  misc_RNA (1)...(19): siRNA sense strand
uguccgaccucaagcaguu

SEQ ID NO: 1272481 - RNA, 19 nt, Homo sapiens
  misc_RNA (1)...(19): siRNA sense strand
acaggacaauuacgagaug

SEQ ID NO: 1272482 - RNA, 19 nt, Homo sapiens
  misc_RNA (1)...(19): siRNA sense strand
caacuucaccgagaucauc

SEQ ID NO: 1272483 - RNA, 19 nt, Homo sapiens
  misc_RNA (1)...(19): siRNA sense strand
acaacaagcggcugaagga

SEQ ID NO: 1272484 - RNA, 19 nt, Homo sapiens
  misc_RNA (1)...(19): siRNA sense strand
gcugaaggacgacauuaag

SEQ ID NO: 1272485 - RNA, 19 nt, Homo sapiens
  misc_RNA (1)...(19): siRNA sense strand
gaucuccauugaccucuac

SEQ ID NO: 1272486 - RNA, 19 nt, Homo sapiens
  misc_RNA (1)...(19): siRNA sense strand
ggacaacuucaccgagauc

SEQ ID NO: 1272487 - RNA, 19 nt, Homo sapiens
  misc_RNA (1)...(19): siRNA sense strand
ggacgagacgcagguguca

SEQ ID NO: 1272488 - RNA, 19 nt, Homo sapiens
  misc_RNA (1)...(19): siRNA sense strand
ggcugaaggacgacauuaa

SEQ ID NO: 1272489 - RNA, 19 nt, Homo sapiens
  misc_RNA (1)...(19): siRNA sense strand
cgacauuaaguccaucaug

SEQ ID NO: 1272490 - RNA, 19 nt, Homo sapiens
  misc_RNA (1)...(19): siRNA sense strand
acaauuacgagaugcaugu

SEQ ID NO: 1272491 - RNA, 19 nt, Homo sapiens
  misc_RNA (1)...(19): siRNA sense strand
gugaacaggacaauuacga

SEQ ID NO: 1272492 - RNA, 19 nt, Homo sapiens
  misc_RNA (1)...(19): siRNA sense strand
ugaaggacgacauuaaguc

SEQ ID NO: 1272493 - RNA, 19 nt, Homo sapiens
  misc_RNA (1)...(19): siRNA sense strand
ggacaauuacgagaugcau

SEQ ID NO: 1272494 - RNA, 19 nt, Homo sapiens
  misc_RNA (1)...(19): siRNA sense strand
caucaagaccgccaagauu

SEQ ID NO: 1272495 - RNA, 19 nt, Homo sapiens
  misc_RNA (1)...(19): siRNA sense strand
agggugaacaggacaauua

SEQ ID NO: 1272496 - RNA, 19 nt, Homo sapiens
  misc_RNA (1)...(19): siRNA sense strand
ucaccgagaucaucaagac

SEQ ID NO: 1272497 - RNA, 19 nt, Homo sapiens
  misc_RNA (1)...(19): siRNA sense strand
gcgagucccugaugaagcu

SEQ ID NO: 1272498 - RNA, 19 nt, Homo sapiens
  misc_RNA (1)...(19): siRNA sense strand
uguccgaccucaagcaguu

SEQ ID NO: 1272499 - RNA, 19 nt, Homo sapiens
  misc_RNA (1)...(19): siRNA sense strand
acaggacaauuacgagaug

SEQ ID NO: 1272500 - RNA, 19 nt, Homo sapiens
  misc_RNA (1)...(19): siRNA sense strand
caacuucaccgagaucauc

SEQ ID NO: 1272501 - RNA, 19 nt, Homo sapiens
  misc_RNA (1)...(19): siRNA sense strand
acaacaagcggcugaagga

SEQ ID NO: 1272502 - RNA, 19 nt, Homo sapiens
  misc_RNA (1)...(19): siRNA sense strand
gcugaaggacgacauuaag

SEQ ID NO: 1272503 - RNA, 19 nt, Homo sapiens
  misc_RNA (1)...(19): siRNA sense strand
gaucuccauugaccucuac

SEQ ID NO: 1272504 - RNA, 19 nt, Homo sapiens
  misc_RNA (1)...(19): siRNA sense strand
ggacaacuucaccgagauc

SEQ ID NO: 1272505 - RNA, 19 nt, Homo sapiens
  misc_RNA (1)...(19): siRNA sense strand
ggacgagacgcagguguca

SEQ ID NO: 1272506 - RNA, 19 nt, Homo sapiens
  misc_RNA (1)...(19): siRNA sense strand
ggcugaaggacgacauuaa

SEQ ID NO: 1272507 - RNA, 19 nt, Homo sapiens
  misc_RNA (1)...(19): siRNA sense strand
cgacauuaaguccaucaug

SEQ ID NO: 1272508 - RNA, 19 nt, Homo sapiens
  misc_RNA (1)...(19): siRNA sense strand
acaauuacgagaugcaugu

SEQ ID NO: 1272509 - RNA, 19 nt, Homo sapiens
  misc_RNA (1)...(19): siRNA sense strand
gugaacaggacaauuacga

SEQ ID NO: 1272510 - RNA, 19 nt, Homo sapiens
  misc_RNA (1)...(19): siRNA sense strand
ugaaggacgacauuaaguc

SEQ ID NO: 1272511 - RNA, 19 nt, Homo sapiens
  misc_RNA (1)...(19): siRNA sense strand
ggacaauuacgagaugcau

SEQ ID NO: 1272512 - RNA, 19 nt, Homo sapiens
  misc_RNA (1)...(19): siRNA sense strand
ccagugggcugaaagauau

SEQ ID NO: 1272513 - RNA, 19 nt, Homo sapiens
  misc_RNA (1)...(19): siRNA sense strand
gcugaaagauaugcugaaa

SEQ ID NO: 1272514 - RNA, 19 nt, Homo sapiens
  misc_RNA (1)...(19): siRNA sense strand
ccaaaaggcugguggauga

SEQ ID NO: 1272515 - RNA, 19 nt, Homo sapiens
  misc_RNA (1)...(19): siRNA sense strand
gagaagcaccucccaagga

SEQ ID NO: 1272516 - RNA, 19 nt, Homo sapiens
  misc_RNA (1)...(19): siRNA sense strand
ccaaggaggaucuaucuga

SEQ ID NO: 1272517 - RNA, 19 nt, Homo sapiens
  misc_RNA (1)...(19): siRNA sense strand
ugacugccuuggcucacua

SEQ ID NO: 1272518 - RNA, 19 nt, Homo sapiens
  misc_RNA (1)...(19): siRNA sense strand
gacccagggcuaucucuuu

SEQ ID NO: 1272519 - RNA, 19 nt, Homo sapiens
  misc_RNA (1)...(19): siRNA sense strand
cagcagccguuaccuggau

SEQ ID NO: 1272520 - RNA, 19 nt, Homo sapiens
  misc_RNA (1)...(19): siRNA sense strand
gaccggauccagagcaaug

SEQ ID NO: 1272521 - RNA, 19 nt, Homo sapiens
  misc_RNA (1)...(19): siRNA sense strand
caauguagaaggccuauac

SEQ ID NO: 1272522 - RNA, 19 nt, Homo sapiens
  misc_RNA (1)...(19): siRNA sense strand
ugaaagauaugcugaaaac

SEQ ID NO: 1272523 - RNA, 19 nt, Homo sapiens
  misc_RNA (1)...(19): siRNA sense strand
ggccugcgguaccugcaaa

SEQ ID NO: 1272524 - RNA, 19 nt, Homo sapiens
  misc_RNA (1)...(19): siRNA sense strand
gauccagagcaauguagaa

SEQ ID NO: 1272525 - RNA, 19 nt, Homo sapiens
  misc_RNA (1)...(19): siRNA sense strand
gcugguggaugagcugcaa

SEQ ID NO: 1272526 - RNA, 19 nt, Homo sapiens
  misc_RNA (1)...(19): siRNA sense strand
guggaugagcugcaacuga

SEQ ID NO: 1272527 - RNA, 19 nt, Homo sapiens
  misc_RNA (1)...(19): siRNA sense strand
ggagagacccagggcuauc

SEQ ID NO: 1272528 - RNA, 19 nt, Homo sapiens
  misc_RNA (1)...(19): siRNA sense strand
ggcgucauccuccucugua

SEQ ID NO: 1272529 - RNA, 19 nt, Homo sapiens
  misc_RNA (1)...(19): siRNA sense strand
acccagggcuaucucuuuc

SEQ ID NO: 1272530 - RNA, 19 nt, Homo sapiens
  misc_RNA (1)...(19): siRNA sense strand
gcaauguagaaggccuaua

SEQ ID NO: 1272531 - RNA, 19 nt, Homo sapiens
  misc_RNA (1)...(19): siRNA sense strand
ggccuauaccugacugaug

SEQ ID NO: 1272532 - RNA, 19 nt, Homo sapiens
  misc_RNA (1)...(19): siRNA sense strand
ccucgaggcugcucaguga

SEQ ID NO: 1272533 - RNA, 19 nt, Homo sapiens
  misc_RNA (1)...(19): siRNA sense strand
agaccuaccuggaggaaga

SEQ ID NO: 1272534 - RNA, 19 nt, Homo sapiens
  misc_RNA (1)...(19): siRNA sense strand
gaaucugcuuugucuucua

SEQ ID NO: 1272535 - RNA, 19 nt, Homo sapiens
  misc_RNA (1)...(19): siRNA sense strand
ggcaggacguggcugaaga

SEQ ID NO: 1272536 - RNA, 19 nt, Homo sapiens
  misc_RNA (1)...(19): siRNA sense strand
gcaaguaccaggacagcau

SEQ ID NO: 1272537 - RNA, 19 nt, Homo sapiens
  misc_RNA (1)...(19): siRNA sense strand
cacgcuaccuccugagauu

SEQ ID NO: 1272538 - RNA, 19 nt, Homo sapiens
  misc_RNA (1)...(19): siRNA sense strand
ccagaaaugcccagacugu

SEQ ID NO: 1272539 - RNA, 19 nt, Homo sapiens
  misc_RNA (1)...(19): siRNA sense strand
ccucagauuuggacagcuu

SEQ ID NO: 1272540 - RNA, 19 nt, Homo sapiens
  misc_RNA (1)...(19): siRNA sense strand
acucgcaccugaagaaugu

SEQ ID NO: 1272541 - RNA, 19 nt, Homo sapiens
  misc_RNA (1)...(19): siRNA sense strand
gcaaccuccuggccucugu

SEQ ID NO: 1272542 - RNA, 19 nt, Homo sapiens
  misc_RNA (1)...(19): siRNA sense strand
gccucgaucucucucagaa

SEQ ID NO: 1272543 - RNA, 19 nt, Homo sapiens
  misc_RNA (1)...(19): siRNA sense strand
agaaaugcccagacuguuc

SEQ ID NO: 1272544 - RNA, 19 nt, Homo sapiens
  misc_RNA (1)...(19): siRNA sense strand
ccaucaagcugccgagacu

SEQ ID NO: 1272545 - RNA, 19 nt, Homo sapiens
  misc_RNA (1)...(19): siRNA sense strand
gcagccaccugggaugaca

SEQ ID NO: 1272546 - RNA, 19 nt, Homo sapiens
  misc_RNA (1)...(19): siRNA sense strand
ggggugaccuggagaccua

SEQ ID NO: 1272547 - RNA, 19 nt, Homo sapiens
  misc_RNA (1)...(19): siRNA sense strand
gcagcccucauuccagaaa

SEQ ID NO: 1272548 - RNA, 19 nt, Homo sapiens
  misc_RNA (1)...(19): siRNA sense strand
gaaccagaggcugcaguga

SEQ ID NO: 1272549 - RNA, 19 nt, Homo sapiens
  misc_RNA (1)...(19): siRNA sense strand
ggcacgaguuccgggauga

SEQ ID NO: 1272550 - RNA, 19 nt, Homo sapiens
  misc_RNA (1)...(19): siRNA sense strand
guuccgggaugaucuggau

SEQ ID NO: 1272551 - RNA, 19 nt, Homo sapiens
  misc_RNA (1)...(19): siRNA sense strand
ggagcucacccaccuguac

SEQ ID NO: 1272552 - RNA, 19 nt, Homo sapiens
  misc_RNA (1)...(19): siRNA sense strand
gaagaggugcgcgcagucu

SEQ ID NO: 1272553 - RNA, 19 nt, Homo sapiens
  misc_RNA (1)...(19): siRNA sense strand
ccacuucuccugguuccuu

SEQ ID NO: 1272554 - RNA, 19 nt, Homo sapiens
  misc_RNA (1)...(19): siRNA sense strand
ggagaccuaccuggaggaa

SEQ ID NO: 1272555 - RNA, 19 nt, Homo sapiens
  misc_RNA (1)...(19): siRNA sense strand
guacaccaccaagaacugu

SEQ ID NO: 1272556 - RNA, 19 nt, Homo sapiens
  misc_RNA (1)...(19): siRNA sense strand
gccugcaccuguuguacug

SEQ ID NO: 1272557 - RNA, 19 nt, Homo sapiens
  misc_RNA (1)...(19): siRNA sense strand
cagaaaugcccagacuguu

SEQ ID NO: 1272558 - RNA, 19 nt, Homo sapiens
  misc_RNA (1)...(19): siRNA sense strand
gaugagcagauccgucaca

SEQ ID NO: 1272559 - RNA, 19 nt, Homo sapiens
  misc_RNA (1)...(19): siRNA sense strand
cugacacgguggagauguu

SEQ ID NO: 1272560 - RNA, 19 nt, Homo sapiens
  misc_RNA (1)...(19): siRNA sense strand
cucgaucucucucagaauc

SEQ ID NO: 1272561 - RNA, 19 nt, Homo sapiens
  misc_RNA (1)...(19): siRNA sense strand
aaucugcuuugucuucuac

SEQ ID NO: 1272562 - RNA, 19 nt, Homo sapiens
  misc_RNA (1)...(19): siRNA sense strand
ucuacucgcaccugaagaa

SEQ ID NO: 1272563 - RNA, 19 nt, Homo sapiens
  misc_RNA (1)...(19): siRNA sense strand
ccucgaggcugcucaguga

SEQ ID NO: 1272564 - RNA, 19 nt, Homo sapiens
  misc_RNA (1)...(19): siRNA sense strand
agaccuaccuggaggaaga

SEQ ID NO: 1272565 - RNA, 19 nt, Homo sapiens
  misc_RNA (1)...(19): siRNA sense strand
gaaucugcuuugucuucua

SEQ ID NO: 1272566 - RNA, 19 nt, Homo sapiens
  misc_RNA (1)...(19): siRNA sense strand
guggaauucuugcgucuga

SEQ ID NO: 1272567 - RNA, 19 nt, Homo sapiens
  misc_RNA (1)...(19): siRNA sense strand
ggagaugcuucagaggauu

SEQ ID NO: 1272568 - RNA, 19 nt, Homo sapiens
  misc_RNA (1)...(19): siRNA sense strand
ggcaggacguggcugaaga

SEQ ID NO: 1272569 - RNA, 19 nt, Homo sapiens
  misc_RNA (1)...(19): siRNA sense strand
gcaaguaccaggacagcau

SEQ ID NO: 1272570 - RNA, 19 nt, Homo sapiens
  misc_RNA (1)...(19): siRNA sense strand
gcaaccggcugagcuugga

SEQ ID NO: 1272571 - RNA, 19 nt, Homo sapiens
  misc_RNA (1)...(19): siRNA sense strand
cacgcuaccuccugagauu

SEQ ID NO: 1272572 - RNA, 19 nt, Homo sapiens
  misc_RNA (1)...(19): siRNA sense strand
ccagaaaugcccagacugu

SEQ ID NO: 1272573 - RNA, 19 nt, Homo sapiens
  misc_RNA (1)...(19): siRNA sense strand
ccucagauuuggacagcuu

SEQ ID NO: 1272574 - RNA, 19 nt, Homo sapiens
  misc_RNA (1)...(19): siRNA sense strand
acucgcaccugaagaaugu

SEQ ID NO: 1272575 - RNA, 19 nt, Homo sapiens
  misc_RNA (1)...(19): siRNA sense strand
gcaaccuccuggccucugu

SEQ ID NO: 1272576 - RNA, 19 nt, Homo sapiens
  misc_RNA (1)...(19): siRNA sense strand
gccucgaucucucucagaa

SEQ ID NO: 1272577 - RNA, 19 nt, Homo sapiens
  misc_RNA (1)...(19): siRNA sense strand
agaaaugcccagacuguuc

SEQ ID NO: 1272578 - RNA, 19 nt, Homo sapiens
  misc_RNA (1)...(19): siRNA sense strand
ccaucaagcugccgagacu

SEQ ID NO: 1272579 - RNA, 19 nt, Homo sapiens
  misc_RNA (1)...(19): siRNA sense strand
gcagccaccugggaugaca

SEQ ID NO: 1272580 - RNA, 19 nt, Homo sapiens
  misc_RNA (1)...(19): siRNA sense strand
ggggugaccuggagaccua

SEQ ID NO: 1272581 - RNA, 19 nt, Homo sapiens
  misc_RNA (1)...(19): siRNA sense strand
gcagcccucauuccagaaa

SEQ ID NO: 1272582 - RNA, 19 nt, Homo sapiens
  misc_RNA (1)...(19): siRNA sense strand
gaaccagaggcugcaguga

SEQ ID NO: 1272583 - RNA, 19 nt, Homo sapiens
  misc_RNA (1)...(19): siRNA sense strand
ucaacagccuggagacacu

SEQ ID NO: 1272584 - RNA, 19 nt, Homo sapiens
  misc_RNA (1)...(19): siRNA sense strand
guuccgggaugaucuggau

SEQ ID NO: 1272585 - RNA, 19 nt, Homo sapiens
  misc_RNA (1)...(19): siRNA sense strand
ggcacgaguuccgggauga

SEQ ID NO: 1272586 - RNA, 19 nt, Homo sapiens
  misc_RNA (1)...(19): siRNA sense strand
ggagcucacccaccuguac

SEQ ID NO: 1272587 - RNA, 19 nt, Homo sapiens
  misc_RNA (1)...(19): siRNA sense strand
gaagaggugcgcgcagucu

SEQ ID NO: 1272588 - RNA, 19 nt, Homo sapiens
  misc_RNA (1)...(19): siRNA sense strand
ccacuucuccugguuccuu

SEQ ID NO: 1272589 - RNA, 19 nt, Homo sapiens
  misc_RNA (1)...(19): siRNA sense strand
aggagaugcuucagaggau

SEQ ID NO: 1272590 - RNA, 19 nt, Homo sapiens
  misc_RNA (1)...(19): siRNA sense strand
gagaugcuucagaggauuc

SEQ ID NO: 1272591 - RNA, 19 nt, Homo sapiens
  misc_RNA (1)...(19): siRNA sense strand
guacaccaccaagaacugu

SEQ ID NO: 1272592 - RNA, 19 nt, Homo sapiens
  misc_RNA (1)...(19): siRNA sense strand
gccugcaccuguuguacug

SEQ ID NO: 1272593 - RNA, 19 nt, Homo sapiens
  misc_RNA (1)...(19): siRNA sense strand
ggagaccuaccuggaggaa

SEQ ID NO: 1272594 - RNA, 19 nt, Homo sapiens
  misc_RNA (1)...(19): siRNA sense strand
cagaaaugcccagacuguu

SEQ ID NO: 1272595 - RNA, 19 nt, Homo sapiens
  misc_RNA (1)...(19): siRNA sense strand
gaugagcagauccgucaca

SEQ ID NO: 1272596 - RNA, 19 nt, Homo sapiens
  misc_RNA (1)...(19): siRNA sense strand
cugacacgguggagauguu

SEQ ID NO: 1272597 - RNA, 19 nt, Homo sapiens
  misc_RNA (1)...(19): siRNA sense strand
cucgaucucucucagaauc

SEQ ID NO: 1272598 - RNA, 19 nt, Homo sapiens
  misc_RNA (1)...(19): siRNA sense strand
aaucugcuuugucuucuac

SEQ ID NO: 1272599 - RNA, 19 nt, Homo sapiens
  misc_RNA (1)...(19): siRNA sense strand
ucuacucgcaccugaagaa

SEQ ID NO: 1272600 - RNA, 19 nt, Homo sapiens
  misc_RNA (1)...(19): siRNA sense strand
ccucgaggcugcucaguga

SEQ ID NO: 1272601 - RNA, 19 nt, Homo sapiens
  misc_RNA (1)...(19): siRNA sense strand
agaccuaccuggaggaaga

SEQ ID NO: 1272602 - RNA, 19 nt, Homo sapiens
  misc_RNA (1)...(19): siRNA sense strand
gaaucugcuuugucuucua

SEQ ID NO: 1272603 - RNA, 19 nt, Homo sapiens
  misc_RNA (1)...(19): siRNA sense strand
guggaauucuugcgucuga

SEQ ID NO: 1272604 - RNA, 19 nt, Homo sapiens
  misc_RNA (1)...(19): siRNA sense strand
ggagaugcuucagaggauu

SEQ ID NO: 1272605 - RNA, 19 nt, Homo sapiens
  misc_RNA (1)...(19): siRNA sense strand
ggcaggacguggcugaaga

SEQ ID NO: 1272606 - RNA, 19 nt, Homo sapiens
  misc_RNA (1)...(19): siRNA sense strand
gcaaguaccaggacagcau

SEQ ID NO: 1272607 - RNA, 19 nt, Homo sapiens
  misc_RNA (1)...(19): siRNA sense strand
gcaaccggcugagcuugga

SEQ ID NO: 1272608 - RNA, 19 nt, Homo sapiens
  misc_RNA (1)...(19): siRNA sense strand
cacgcuaccuccugagauu

SEQ ID NO: 1272609 - RNA, 19 nt, Homo sapiens
  misc_RNA (1)...(19): siRNA sense strand
ccagaaaugcccagacugu

SEQ ID NO: 1272610 - RNA, 19 nt, Homo sapiens
  misc_RNA (1)...(19): siRNA sense strand
ccucagauuuggacagcuu

SEQ ID NO: 1272611 - RNA, 19 nt, Homo sapiens
  misc_RNA (1)...(19): siRNA sense strand
acucgcaccugaagaaugu

SEQ ID NO: 1272612 - RNA, 19 nt, Homo sapiens
  misc_RNA (1)...(19): siRNA sense strand
gcaaccuccuggccucugu

SEQ ID NO: 1272613 - RNA, 19 nt, Homo sapiens
  misc_RNA (1)...(19): siRNA sense strand
gccucgaucucucucagaa

SEQ ID NO: 1272614 - RNA, 19 nt, Homo sapiens
  misc_RNA (1)...(19): siRNA sense strand
agaaaugcccagacuguuc

SEQ ID NO: 1272615 - RNA, 19 nt, Homo sapiens
  misc_RNA (1)...(19): siRNA sense strand
ccaucaagcugccgagacu

SEQ ID NO: 1272616 - RNA, 19 nt, Homo sapiens
  misc_RNA (1)...(19): siRNA sense strand
gcagccaccugggaugaca

SEQ ID NO: 1272617 - RNA, 19 nt, Homo sapiens
  misc_RNA (1)...(19): siRNA sense strand
ggggugaccuggagaccua

SEQ ID NO: 1272618 - RNA, 19 nt, Homo sapiens
  misc_RNA (1)...(19): siRNA sense strand
gcagcccucauuccagaaa

SEQ ID NO: 1272619 - RNA, 19 nt, Homo sapiens
  misc_RNA (1)...(19): siRNA sense strand
gaaccagaggcugcaguga

SEQ ID NO: 1272620 - RNA, 19 nt, Homo sapiens
  misc_RNA (1)...(19): siRNA sense strand
ucaacagccuggagacacu

SEQ ID NO: 1272621 - RNA, 19 nt, Homo sapiens
  misc_RNA (1)...(19): siRNA sense strand
guuccgggaugaucuggau

SEQ ID NO: 1272622 - RNA, 19 nt, Homo sapiens
  misc_RNA (1)...(19): siRNA sense strand
ggcacgaguuccgggauga

SEQ ID NO: 1272623 - RNA, 19 nt, Homo sapiens
  misc_RNA (1)...(19): siRNA sense strand
ggagcucacccaccuguac

SEQ ID NO: 1272624 - RNA, 19 nt, Homo sapiens
  misc_RNA (1)...(19): siRNA sense strand
gaagaggugcgcgcagucu

SEQ ID NO: 1272625 - RNA, 19 nt, Homo sapiens
  misc_RNA (1)...(19): siRNA sense strand
ccacuucuccugguuccuu

SEQ ID NO: 1272626 - RNA, 19 nt, Homo sapiens
  misc_RNA (1)...(19): siRNA sense strand
aggagaugcuucagaggau

SEQ ID NO: 1272627 - RNA, 19 nt, Homo sapiens
  misc_RNA (1)...(19): siRNA sense strand
gagaugcuucagaggauuc

SEQ ID NO: 1272628 - RNA, 19 nt, Homo sapiens
  misc_RNA (1)...(19): siRNA sense strand
guacaccaccaagaacugu

SEQ ID NO: 1272629 - RNA, 19 nt, Homo sapiens
  misc_RNA (1)...(19): siRNA sense strand
gccugcaccuguuguacug

SEQ ID NO: 1272630 - RNA, 19 nt, Homo sapiens
  misc_RNA (1)...(19): siRNA sense strand
ggagaccuaccuggaggaa

SEQ ID NO: 1272631 - RNA, 19 nt, Homo sapiens
  misc_RNA (1)...(19): siRNA sense strand
cagaaaugcccagacuguu

SEQ ID NO: 1272632 - RNA, 19 nt, Homo sapiens
  misc_RNA (1)...(19): siRNA sense strand
gaugagcagauccgucaca

SEQ ID NO: 1272633 - RNA, 19 nt, Homo sapiens
  misc_RNA (1)...(19): siRNA sense strand
cugacacgguggagauguu

SEQ ID NO: 1272634 - RNA, 19 nt, Homo sapiens
  misc_RNA (1)...(19): siRNA sense strand
cucgaucucucucagaauc

SEQ ID NO: 1272635 - RNA, 19 nt, Homo sapiens
  misc_RNA (1)...(19): siRNA sense strand
aaucugcuuugucuucuac

SEQ ID NO: 1272636 - RNA, 19 nt, Homo sapiens
  misc_RNA (1)...(19): siRNA sense strand
ucuacucgcaccugaagaa

SEQ ID NO: 1272637 - RNA, 19 nt, Homo sapiens
  misc_RNA (1)...(19): siRNA sense strand
gcaaauacauguccuggau

SEQ ID NO: 1272638 - RNA, 19 nt, Homo sapiens
  misc_RNA (1)...(19): siRNA sense strand
acacccagaucugcaaaua

SEQ ID NO: 1272639 - RNA, 19 nt, Homo sapiens
  misc_RNA (1)...(19): siRNA sense strand
uacauguccuggaucaaua

SEQ ID NO: 1272640 - RNA, 19 nt, Homo sapiens
  misc_RNA (1)...(19): siRNA sense strand
gaacggaugagcacgaucu

SEQ ID NO: 1272641 - RNA, 19 nt, Homo sapiens
  misc_RNA (1)...(19): siRNA sense strand
aaauacauguccuggauca

SEQ ID NO: 1272642 - RNA, 19 nt, Homo sapiens
  misc_RNA (1)...(19): siRNA sense strand
cuggaucaauaaagucaua

SEQ ID NO: 1272643 - RNA, 19 nt, Homo sapiens
  misc_RNA (1)...(19): siRNA sense strand
ucacuauccugagcccuaa

SEQ ID NO: 1272644 - RNA, 19 nt, Homo sapiens
  misc_RNA (1)...(19): siRNA sense strand
ggucaccaacaacaugaua

SEQ ID NO: 1272645 - RNA, 19 nt, Homo sapiens
  misc_RNA (1)...(19): siRNA sense strand
ccaggacccuugccagagu

SEQ ID NO: 1272646 - RNA, 19 nt, Homo sapiens
  misc_RNA (1)...(19): siRNA sense strand
acccagaucugcaaauaca

SEQ ID NO: 1272647 - RNA, 19 nt, Homo sapiens
  misc_RNA (1)...(19): siRNA sense strand
uggcaggucucgcucuuca

SEQ ID NO: 1272648 - RNA, 19 nt, Homo sapiens
  misc_RNA (1)...(19): siRNA sense strand
ccugagcccuaaagagugu

SEQ ID NO: 1272649 - RNA, 19 nt, Homo sapiens
  misc_RNA (1)...(19): siRNA sense strand
uguccuggaucaauaaagu

SEQ ID NO: 1272650 - RNA, 19 nt, Homo sapiens
  misc_RNA (1)...(19): siRNA sense strand
agucauacgcuccaacuga

SEQ ID NO: 1272651 - RNA, 19 nt, Homo sapiens
  misc_RNA (1)...(19): siRNA sense strand
gcgaacggaugagcacgau

SEQ ID NO: 1272652 - RNA, 19 nt, Homo sapiens
  misc_RNA (1)...(19): siRNA sense strand
ccagaucugcaaauacaug

SEQ ID NO: 1272653 - RNA, 19 nt, Homo sapiens
  misc_RNA (1)...(19): siRNA sense strand
ggaccacucgcucuguugu

SEQ ID NO: 1272654 - RNA, 19 nt, Homo sapiens
  misc_RNA (1)...(19): siRNA sense strand
ucaccaacaacaugauaug

SEQ ID NO: 1272655 - RNA, 19 nt, Homo sapiens
  misc_RNA (1)...(19): siRNA sense strand
gcaggucucgcucuucaac

SEQ ID NO: 1272656 - RNA, 19 nt, Homo sapiens
  misc_RNA (1)...(19): siRNA sense strand
ccggaccacucgcucuguu

SEQ ID NO: 1272657 - RNA, 19 nt, Homo sapiens
  misc_RNA (1)...(19): siRNA sense strand
auacauguccuggaucaau

SEQ ID NO: 1272658 - RNA, 19 nt, Homo sapiens
  misc_RNA (1)...(19): siRNA sense strand
gcaaauacauguccuggau

SEQ ID NO: 1272659 - RNA, 19 nt, Homo sapiens
  misc_RNA (1)...(19): siRNA sense strand
acacccagaucugcaaaua

SEQ ID NO: 1272660 - RNA, 19 nt, Homo sapiens
  misc_RNA (1)...(19): siRNA sense strand
uacauguccuggaucaaua

SEQ ID NO: 1272661 - RNA, 19 nt, Homo sapiens
  misc_RNA (1)...(19): siRNA sense strand
gaacggaugagcacgaucu

SEQ ID NO: 1272662 - RNA, 19 nt, Homo sapiens
  misc_RNA (1)...(19): siRNA sense strand
aaauacauguccuggauca

SEQ ID NO: 1272663 - RNA, 19 nt, Homo sapiens
  misc_RNA (1)...(19): siRNA sense strand
cuggaucaauaaagucaua

SEQ ID NO: 1272664 - RNA, 19 nt, Homo sapiens
  misc_RNA (1)...(19): siRNA sense strand
ucacuauccugagcccuaa

SEQ ID NO: 1272665 - RNA, 19 nt, Homo sapiens
  misc_RNA (1)...(19): siRNA sense strand
ggucaccaacaacaugaua

SEQ ID NO: 1272666 - RNA, 19 nt, Homo sapiens
  misc_RNA (1)...(19): siRNA sense strand
ccaggacccuugccagagu

SEQ ID NO: 1272667 - RNA, 19 nt, Homo sapiens
  misc_RNA (1)...(19): siRNA sense strand
acccagaucugcaaauaca

SEQ ID NO: 1272668 - RNA, 19 nt, Homo sapiens
  misc_RNA (1)...(19): siRNA sense strand
uggcaggucucgcucuuca

SEQ ID NO: 1272669 - RNA, 19 nt, Homo sapiens
  misc_RNA (1)...(19): siRNA sense strand
ccugagcccuaaagagugu

SEQ ID NO: 1272670 - RNA, 19 nt, Homo sapiens
  misc_RNA (1)...(19): siRNA sense strand
uguccuggaucaauaaagu

SEQ ID NO: 1272671 - RNA, 19 nt, Homo sapiens
  misc_RNA (1)...(19): siRNA sense strand
agucauacgcuccaacuga

SEQ ID NO: 1272672 - RNA, 19 nt, Homo sapiens
  misc_RNA (1)...(19): siRNA sense strand
gcgaacggaugagcacgau

SEQ ID NO: 1272673 - RNA, 19 nt, Homo sapiens
  misc_RNA (1)...(19): siRNA sense strand
ccagaucugcaaauacaug

SEQ ID NO: 1272674 - RNA, 19 nt, Homo sapiens
  misc_RNA (1)...(19): siRNA sense strand
ggaccacucgcucuguugu

SEQ ID NO: 1272675 - RNA, 19 nt, Homo sapiens
  misc_RNA (1)...(19): siRNA sense strand
ucaccaacaacaugauaug

SEQ ID NO: 1272676 - RNA, 19 nt, Homo sapiens
  misc_RNA (1)...(19): siRNA sense strand
gcaggucucgcucuucaac

SEQ ID NO: 1272677 - RNA, 19 nt, Homo sapiens
  misc_RNA (1)...(19): siRNA sense strand
ccggaccacucgcucuguu

SEQ ID NO: 1272678 - RNA, 19 nt, Homo sapiens
  misc_RNA (1)...(19): siRNA sense strand
auacauguccuggaucaau

SEQ ID NO: 1272679 - RNA, 19 nt, Homo sapiens
  misc_RNA (1)...(19): siRNA sense strand
acaaauggcuggaaauuga

SEQ ID NO: 1272680 - RNA, 19 nt, Homo sapiens
  misc_RNA (1)...(19): siRNA sense strand
gaaauugaauccaguugug

SEQ ID NO: 1272681 - RNA, 19 nt, Homo sapiens
  misc_RNA (1)...(19): siRNA sense strand
gcacguguaaugacaaaua

SEQ ID NO: 1272682 - RNA, 19 nt, Homo sapiens
  misc_RNA (1)...(19): siRNA sense strand
ggagggaucuuccauguac

SEQ ID NO: 1272683 - RNA, 19 nt, Homo sapiens
  misc_RNA (1)...(19): siRNA sense strand
aaagggauuugguuucgua

SEQ ID NO: 1272684 - RNA, 19 nt, Homo sapiens
  misc_RNA (1)...(19): siRNA sense strand
ccaguucacuuguauauac

SEQ ID NO: 1272685 - RNA, 19 nt, Homo sapiens
  misc_RNA (1)...(19): siRNA sense strand
cgucaacccuuauacaaau

SEQ ID NO: 1272686 - RNA, 19 nt, Homo sapiens
  misc_RNA (1)...(19): siRNA sense strand
gauuugguuucguaacuuu

SEQ ID NO: 1272687 - RNA, 19 nt, Homo sapiens
  misc_RNA (1)...(19): siRNA sense strand
ggaccucagacaaauguuu

SEQ ID NO: 1272688 - RNA, 19 nt, Homo sapiens
  misc_RNA (1)...(19): siRNA sense strand
caggagggaucuuccaugu

SEQ ID NO: 1272689 - RNA, 19 nt, Homo sapiens
  misc_RNA (1)...(19): siRNA sense strand
gauccggaccucagacaaa

SEQ ID NO: 1272690 - RNA, 19 nt, Homo sapiens
  misc_RNA (1)...(19): siRNA sense strand
ggacagggcgagggagaaa

SEQ ID NO: 1272691 - RNA, 19 nt, Homo sapiens
  misc_RNA (1)...(19): siRNA sense strand
cacguguaaugacaaauaa

SEQ ID NO: 1272692 - RNA, 19 nt, Homo sapiens
  misc_RNA (1)...(19): siRNA sense strand
ggauuugguuucguaacuu

SEQ ID NO: 1272693 - RNA, 19 nt, Homo sapiens
  misc_RNA (1)...(19): siRNA sense strand
ggaaauugaauccaguugu

SEQ ID NO: 1272694 - RNA, 19 nt, Homo sapiens
  misc_RNA (1)...(19): siRNA sense strand
cagcacguguaaugacaaa

SEQ ID NO: 1272695 - RNA, 19 nt, Homo sapiens
  misc_RNA (1)...(19): siRNA sense strand
aaaagaccgucaacccuua

SEQ ID NO: 1272696 - RNA, 19 nt, Homo sapiens
  misc_RNA (1)...(19): siRNA sense strand
gggauuugguuucguaacu

SEQ ID NO: 1272697 - RNA, 19 nt, Homo sapiens
  misc_RNA (1)...(19): siRNA sense strand
cuacagucccgaauucuau

SEQ ID NO: 1272698 - RNA, 19 nt, Homo sapiens
  misc_RNA (1)...(19): siRNA sense strand
uguauauacuucugcaaug

SEQ ID NO: 1272699 - RNA, 19 nt, Homo sapiens
  misc_RNA (1)...(19): siRNA sense strand
uuauacaaauggcuggaaa

SEQ ID NO: 1272700 - RNA, 19 nt, Homo sapiens
  misc_RNA (1)...(19): siRNA sense strand
ggcugcaugucuccaauau

SEQ ID NO: 1272701 - RNA, 19 nt, Homo sapiens
  misc_RNA (1)...(19): siRNA sense strand
ucacuuguauauacuucug

SEQ ID NO: 1272702 - RNA, 19 nt, Homo sapiens
  misc_RNA (1)...(19): siRNA sense strand
caaauggcuggaaauugaa

SEQ ID NO: 1272703 - RNA, 19 nt, Homo sapiens
  misc_RNA (1)...(19): siRNA sense strand
guauauacuucugcaaugc

SEQ ID NO: 1272704 - RNA, 19 nt, Homo sapiens
  misc_RNA (1)...(19): siRNA sense strand
aaaucgagguaaauaaugc

SEQ ID NO: 1272705 - RNA, 19 nt, Homo sapiens
  misc_RNA (1)...(19): siRNA sense strand
agucuacagucccgaauuc

SEQ ID NO: 1272706 - RNA, 19 nt, Homo sapiens
  misc_RNA (1)...(19): siRNA sense strand
auacaaauggcuggaaauu

SEQ ID NO: 1272707 - RNA, 19 nt, Homo sapiens
  misc_RNA (1)...(19): siRNA sense strand
cacagcacguguaaugaca

SEQ ID NO: 1272708 - RNA, 19 nt, Homo sapiens
  misc_RNA (1)...(19): siRNA sense strand
cugcaugucuccaauaucc

SEQ ID NO: 1272709 - RNA, 19 nt, Homo sapiens
  misc_RNA (1)...(19): siRNA sense strand
guucacuuguauauacuuc

SEQ ID NO: 1272710 - RNA, 19 nt, Homo sapiens
  misc_RNA (1)...(19): siRNA sense strand
acagggcgagggagaaauu

SEQ ID NO: 1272711 - RNA, 19 nt, Homo sapiens
  misc_RNA (1)...(19): siRNA sense strand
agacacaaccuucugaaaa

SEQ ID NO: 1272712 - RNA, 19 nt, Homo sapiens
  misc_RNA (1)...(19): siRNA sense strand
gcacacauuaaaccuguac

SEQ ID NO: 1272713 - RNA, 19 nt, Homo sapiens
  misc_RNA (1)...(19): siRNA sense strand
ugccacagcacguguaaug

SEQ ID NO: 1272714 - RNA, 19 nt, Homo sapiens
  misc_RNA (1)...(19): siRNA sense strand
gacacaaccuucugaaaac

SEQ ID NO: 1272715 - RNA, 19 nt, Homo sapiens
  misc_RNA (1)...(19): siRNA sense strand
gcaccgccacacagacaga

SEQ ID NO: 1272716 - RNA, 19 nt, Homo sapiens
  misc_RNA (1)...(19): siRNA sense strand
gaccgucaacccuuauaca

SEQ ID NO: 1272717 - RNA, 19 nt, Homo sapiens
  misc_RNA (1)...(19): siRNA sense strand
ggucgcaccguguacaaca

SEQ ID NO: 1272718 - RNA, 19 nt, Homo sapiens
  misc_RNA (1)...(19): siRNA sense strand
gucaacccuuauacaaaug

SEQ ID NO: 1272719 - RNA, 19 nt, Homo sapiens
  misc_RNA (1)...(19): siRNA sense strand
gcgaggcucaaagggauuu

SEQ ID NO: 1272720 - RNA, 19 nt, Homo sapiens
  misc_RNA (1)...(19): siRNA sense strand
ccgucaacccuuauacaaa

SEQ ID NO: 1272721 - RNA, 19 nt, Homo sapiens
  misc_RNA (1)...(19): siRNA sense strand
gggcgagggagaaauuaca

SEQ ID NO: 1272722 - RNA, 19 nt, Homo sapiens
  misc_RNA (1)...(19): siRNA sense strand
ccacagcacguguaaugac

SEQ ID NO: 1272723 - RNA, 19 nt, Homo sapiens
  misc_RNA (1)...(19): siRNA sense strand
uacaaauggcuggaaauug

SEQ ID NO: 1272724 - RNA, 19 nt, Homo sapiens
  misc_RNA (1)...(19): siRNA sense strand
acaaauggcuggaaauuga

SEQ ID NO: 1272725 - RNA, 19 nt, Homo sapiens
  misc_RNA (1)...(19): siRNA sense strand
gaaauugaauccaguugug

SEQ ID NO: 1272726 - RNA, 19 nt, Homo sapiens
  misc_RNA (1)...(19): siRNA sense strand
gcacguguaaugacaaaua

SEQ ID NO: 1272727 - RNA, 19 nt, Homo sapiens
  misc_RNA (1)...(19): siRNA sense strand
ggagggaucuuccauguac

SEQ ID NO: 1272728 - RNA, 19 nt, Homo sapiens
  misc_RNA (1)...(19): siRNA sense strand
aaagggauuugguuucgua

SEQ ID NO: 1272729 - RNA, 19 nt, Homo sapiens
  misc_RNA (1)...(19): siRNA sense strand
ccaguucacuuguauauac

SEQ ID NO: 1272730 - RNA, 19 nt, Homo sapiens
  misc_RNA (1)...(19): siRNA sense strand
cgucaacccuuauacaaau

SEQ ID NO: 1272731 - RNA, 19 nt, Homo sapiens
  misc_RNA (1)...(19): siRNA sense strand
gauuugguuucguaacuuu

SEQ ID NO: 1272732 - RNA, 19 nt, Homo sapiens
  misc_RNA (1)...(19): siRNA sense strand
ggaccucagacaaauguuu

SEQ ID NO: 1272733 - RNA, 19 nt, Homo sapiens
  misc_RNA (1)...(19): siRNA sense strand
caggagggaucuuccaugu

SEQ ID NO: 1272734 - RNA, 19 nt, Homo sapiens
  misc_RNA (1)...(19): siRNA sense strand
gauccggaccucagacaaa

SEQ ID NO: 1272735 - RNA, 19 nt, Homo sapiens
  misc_RNA (1)...(19): siRNA sense strand
ggacagggcgagggagaaa

SEQ ID NO: 1272736 - RNA, 19 nt, Homo sapiens
  misc_RNA (1)...(19): siRNA sense strand
cacguguaaugacaaauaa

SEQ ID NO: 1272737 - RNA, 19 nt, Homo sapiens
  misc_RNA (1)...(19): siRNA sense strand
ggauuugguuucguaacuu

SEQ ID NO: 1272738 - RNA, 19 nt, Homo sapiens
  misc_RNA (1)...(19): siRNA sense strand
ggaaauugaauccaguugu

SEQ ID NO: 1272739 - RNA, 19 nt, Homo sapiens
  misc_RNA (1)...(19): siRNA sense strand
cagcacguguaaugacaaa

SEQ ID NO: 1272740 - RNA, 19 nt, Homo sapiens
  misc_RNA (1)...(19): siRNA sense strand
aaaagaccgucaacccuua

SEQ ID NO: 1272741 - RNA, 19 nt, Homo sapiens
  misc_RNA (1)...(19): siRNA sense strand
gggauuugguuucguaacu

SEQ ID NO: 1272742 - RNA, 19 nt, Homo sapiens
  misc_RNA (1)...(19): siRNA sense strand
cuacagucccgaauucuau

SEQ ID NO: 1272743 - RNA, 19 nt, Homo sapiens
  misc_RNA (1)...(19): siRNA sense strand
uguauauacuucugcaaug

SEQ ID NO: 1272744 - RNA, 19 nt, Homo sapiens
  misc_RNA (1)...(19): siRNA sense strand
uuauacaaauggcuggaaa

SEQ ID NO: 1272745 - RNA, 19 nt, Homo sapiens
  misc_RNA (1)...(19): siRNA sense strand
ggcugcaugucuccaauau

SEQ ID NO: 1272746 - RNA, 19 nt, Homo sapiens
  misc_RNA (1)...(19): siRNA sense strand
ucacuuguauauacuucug

SEQ ID NO: 1272747 - RNA, 19 nt, Homo sapiens
  misc_RNA (1)...(19): siRNA sense strand
caaauggcuggaaauugaa

SEQ ID NO: 1272748 - RNA, 19 nt, Homo sapiens
  misc_RNA (1)...(19): siRNA sense strand
guauauacuucugcaaugc

SEQ ID NO: 1272749 - RNA, 19 nt, Homo sapiens
  misc_RNA (1)...(19): siRNA sense strand
aaaucgagguaaauaaugc

SEQ ID NO: 1272750 - RNA, 19 nt, Homo sapiens
  misc_RNA (1)...(19): siRNA sense strand
agucuacagucccgaauuc

SEQ ID NO: 1272751 - RNA, 19 nt, Homo sapiens
  misc_RNA (1)...(19): siRNA sense strand
auacaaauggcuggaaauu

SEQ ID NO: 1272752 - RNA, 19 nt, Homo sapiens
  misc_RNA (1)...(19): siRNA sense strand
cacagcacguguaaugaca

SEQ ID NO: 1272753 - RNA, 19 nt, Homo sapiens
  misc_RNA (1)...(19): siRNA sense strand
cugcaugucuccaauaucc

SEQ ID NO: 1272754 - RNA, 19 nt, Homo sapiens
  misc_RNA (1)...(19): siRNA sense strand
guucacuuguauauacuuc

SEQ ID NO: 1272755 - RNA, 19 nt, Homo sapiens
  misc_RNA (1)...(19): siRNA sense strand
acagggcgagggagaaauu

SEQ ID NO: 1272756 - RNA, 19 nt, Homo sapiens
  misc_RNA (1)...(19): siRNA sense strand
agacacaaccuucugaaaa

SEQ ID NO: 1272757 - RNA, 19 nt, Homo sapiens
  misc_RNA (1)...(19): siRNA sense strand
gcacacauuaaaccuguac

SEQ ID NO: 1272758 - RNA, 19 nt, Homo sapiens
  misc_RNA (1)...(19): siRNA sense strand
ugccacagcacguguaaug

SEQ ID NO: 1272759 - RNA, 19 nt, Homo sapiens
  misc_RNA (1)...(19): siRNA sense strand
gacacaaccuucugaaaac

SEQ ID NO: 1272760 - RNA, 19 nt, Homo sapiens
  misc_RNA (1)...(19): siRNA sense strand
gcaccgccacacagacaga

SEQ ID NO: 1272761 - RNA, 19 nt, Homo sapiens
  misc_RNA (1)...(19): siRNA sense strand
gaccgucaacccuuauaca

SEQ ID NO: 1272762 - RNA, 19 nt, Homo sapiens
  misc_RNA (1)...(19): siRNA sense strand
ggucgcaccguguacaaca

SEQ ID NO: 1272763 - RNA, 19 nt, Homo sapiens
  misc_RNA (1)...(19): siRNA sense strand
gucaacccuuauacaaaug

SEQ ID NO: 1272764 - RNA, 19 nt, Homo sapiens
  misc_RNA (1)...(19): siRNA sense strand
gcgaggcucaaagggauuu

SEQ ID NO: 1272765 - RNA, 19 nt, Homo sapiens
  misc_RNA (1)...(19): siRNA sense strand
ccgucaacccuuauacaaa

SEQ ID NO: 1272766 - RNA, 19 nt, Homo sapiens
  misc_RNA (1)...(19): siRNA sense strand
gggcgagggagaaauuaca

SEQ ID NO: 1272767 - RNA, 19 nt, Homo sapiens
  misc_RNA (1)...(19): siRNA sense strand
ccacagcacguguaaugac

SEQ ID NO: 1272768 - RNA, 19 nt, Homo sapiens
  misc_RNA (1)...(19): siRNA sense strand
uacaaauggcuggaaauug

SEQ ID NO: 1272769 - RNA, 19 nt, Homo sapiens
  misc_RNA (1)...(19): siRNA sense strand
acaaauggcuggaaauuga

SEQ ID NO: 1272770 - RNA, 19 nt, Homo sapiens
  misc_RNA (1)...(19): siRNA sense strand
gaaauugaauccaguugug

SEQ ID NO: 1272771 - RNA, 19 nt, Homo sapiens
  misc_RNA (1)...(19): siRNA sense strand
gcacguguaaugacaaaua

SEQ ID NO: 1272772 - RNA, 19 nt, Homo sapiens
  misc_RNA (1)...(19): siRNA sense strand
ggagggaucuuccauguac

SEQ ID NO: 1272773 - RNA, 19 nt, Homo sapiens
  misc_RNA (1)...(19): siRNA sense strand
aaagggauuugguuucgua

SEQ ID NO: 1272774 - RNA, 19 nt, Homo sapiens
  misc_RNA (1)...(19): siRNA sense strand
ccaguucacuuguauauac

SEQ ID NO: 1272775 - RNA, 19 nt, Homo sapiens
  misc_RNA (1)...(19): siRNA sense strand
cgucaacccuuauacaaau

SEQ ID NO: 1272776 - RNA, 19 nt, Homo sapiens
  misc_RNA (1)...(19): siRNA sense strand
gauuugguuucguaacuuu

SEQ ID NO: 1272777 - RNA, 19 nt, Homo sapiens
  misc_RNA (1)...(19): siRNA sense strand
ggaccucagacaaauguuu

SEQ ID NO: 1272778 - RNA, 19 nt, Homo sapiens
  misc_RNA (1)...(19): siRNA sense strand
caggagggaucuuccaugu

SEQ ID NO: 1272779 - RNA, 19 nt, Homo sapiens
  misc_RNA (1)...(19): siRNA sense strand
gauccggaccucagacaaa

SEQ ID NO: 1272780 - RNA, 19 nt, Homo sapiens
  misc_RNA (1)...(19): siRNA sense strand
ggacagggcgagggagaaa

SEQ ID NO: 1272781 - RNA, 19 nt, Homo sapiens
  misc_RNA (1)...(19): siRNA sense strand
cacguguaaugacaaauaa

SEQ ID NO: 1272782 - RNA, 19 nt, Homo sapiens
  misc_RNA (1)...(19): siRNA sense strand
ggauuugguuucguaacuu

SEQ ID NO: 1272783 - RNA, 19 nt, Homo sapiens
  misc_RNA (1)...(19): siRNA sense strand
ggaaauugaauccaguugu

SEQ ID NO: 1272784 - RNA, 19 nt, Homo sapiens
  misc_RNA (1)...(19): siRNA sense strand
cagcacguguaaugacaaa

SEQ ID NO: 1272785 - RNA, 19 nt, Homo sapiens
  misc_RNA (1)...(19): siRNA sense strand
aaaagaccgucaacccuua

SEQ ID NO: 1272786 - RNA, 19 nt, Homo sapiens
  misc_RNA (1)...(19): siRNA sense strand
gggauuugguuucguaacu

SEQ ID NO: 1272787 - RNA, 19 nt, Homo sapiens
  misc_RNA (1)...(19): siRNA sense strand
cuacagucccgaauucuau

SEQ ID NO: 1272788 - RNA, 19 nt, Homo sapiens
  misc_RNA (1)...(19): siRNA sense strand
uguauauacuucugcaaug

SEQ ID NO: 1272789 - RNA, 19 nt, Homo sapiens
  misc_RNA (1)...(19): siRNA sense strand
uuauacaaauggcuggaaa

SEQ ID NO: 1272790 - RNA, 19 nt, Homo sapiens
  misc_RNA (1)...(19): siRNA sense strand
ggcugcaugucuccaauau

SEQ ID NO: 1272791 - RNA, 19 nt, Homo sapiens
  misc_RNA (1)...(19): siRNA sense strand
ucacuuguauauacuucug

SEQ ID NO: 1272792 - RNA, 19 nt, Homo sapiens
  misc_RNA (1)...(19): siRNA sense strand
caaauggcuggaaauugaa

SEQ ID NO: 1272793 - RNA, 19 nt, Homo sapiens
  misc_RNA (1)...(19): siRNA sense strand
guauauacuucugcaaugc

SEQ ID NO: 1272794 - RNA, 19 nt, Homo sapiens
  misc_RNA (1)...(19): siRNA sense strand
aaaucgagguaaauaaugc

SEQ ID NO: 1272795 - RNA, 19 nt, Homo sapiens
  misc_RNA (1)...(19): siRNA sense strand
agucuacagucccgaauuc

SEQ ID NO: 1272796 - RNA, 19 nt, Homo sapiens
  misc_RNA (1)...(19): siRNA sense strand
auacaaauggcuggaaauu

SEQ ID NO: 1272797 - RNA, 19 nt, Homo sapiens
  misc_RNA (1)...(19): siRNA sense strand
cacagcacguguaaugaca

SEQ ID NO: 1272798 - RNA, 19 nt, Homo sapiens
  misc_RNA (1)...(19): siRNA sense strand
cugcaugucuccaauaucc

SEQ ID NO: 1272799 - RNA, 19 nt, Homo sapiens
  misc_RNA (1)...(19): siRNA sense strand
guucacuuguauauacuuc

SEQ ID NO: 1272800 - RNA, 19 nt, Homo sapiens
  misc_RNA (1)...(19): siRNA sense strand
acagggcgagggagaaauu

SEQ ID NO: 1272801 - RNA, 19 nt, Homo sapiens
  misc_RNA (1)...(19): siRNA sense strand
agacacaaccuucugaaaa

SEQ ID NO: 1272802 - RNA, 19 nt, Homo sapiens
  misc_RNA (1)...(19): siRNA sense strand
gcacacauuaaaccuguac

SEQ ID NO: 1272803 - RNA, 19 nt, Homo sapiens
  misc_RNA (1)...(19): siRNA sense strand
ugccacagcacguguaaug

SEQ ID NO: 1272804 - RNA, 19 nt, Homo sapiens
  misc_RNA (1)...(19): siRNA sense strand
gacacaaccuucugaaaac

SEQ ID NO: 1272805 - RNA, 19 nt, Homo sapiens
  misc_RNA (1)...(19): siRNA sense strand
gcaccgccacacagacaga

SEQ ID NO: 1272806 - RNA, 19 nt, Homo sapiens
  misc_RNA (1)...(19): siRNA sense strand
gaccgucaacccuuauaca

SEQ ID NO: 1272807 - RNA, 19 nt, Homo sapiens
  misc_RNA (1)...(19): siRNA sense strand
ggucgcaccguguacaaca

SEQ ID NO: 1272808 - RNA, 19 nt, Homo sapiens
  misc_RNA (1)...(19): siRNA sense strand
gucaacccuuauacaaaug

SEQ ID NO: 1272809 - RNA, 19 nt, Homo sapiens
  misc_RNA (1)...(19): siRNA sense strand
gcgaggcucaaagggauuu

SEQ ID NO: 1272810 - RNA, 19 nt, Homo sapiens
  misc_RNA (1)...(19): siRNA sense strand
ccgucaacccuuauacaaa

SEQ ID NO: 1272811 - RNA, 19 nt, Homo sapiens
  misc_RNA (1)...(19): siRNA sense strand
gggcgagggagaaauuaca

SEQ ID NO: 1272812 - RNA, 19 nt, Homo sapiens
  misc_RNA (1)...(19): siRNA sense strand
ccacagcacguguaaugac

SEQ ID NO: 1272813 - RNA, 19 nt, Homo sapiens
  misc_RNA (1)...(19): siRNA sense strand
uacaaauggcuggaaauug

SEQ ID NO: 1272814 - RNA, 19 nt, Homo sapiens
  misc_RNA (1)...(19): siRNA sense strand
acaaauggcuggaaauuga

SEQ ID NO: 1272815 - RNA, 19 nt, Homo sapiens
  misc_RNA (1)...(19): siRNA sense strand
gaaauugaauccaguugug

SEQ ID NO: 1272816 - RNA, 19 nt, Homo sapiens
  misc_RNA (1)...(19): siRNA sense strand
gcacguguaaugacaaaua

SEQ ID NO: 1272817 - RNA, 19 nt, Homo sapiens
  misc_RNA (1)...(19): siRNA sense strand
ggagggaucuuccauguac

SEQ ID NO: 1272818 - RNA, 19 nt, Homo sapiens
  misc_RNA (1)...(19): siRNA sense strand
aaagggauuugguuucgua

SEQ ID NO: 1272819 - RNA, 19 nt, Homo sapiens
  misc_RNA (1)...(19): siRNA sense strand
ccaguucacuuguauauac

SEQ ID NO: 1272820 - RNA, 19 nt, Homo sapiens
  misc_RNA (1)...(19): siRNA sense strand
cgucaacccuuauacaaau

SEQ ID NO: 1272821 - RNA, 19 nt, Homo sapiens
  misc_RNA (1)...(19): siRNA sense strand
gauuugguuucguaacuuu

SEQ ID NO: 1272822 - RNA, 19 nt, Homo sapiens
  misc_RNA (1)...(19): siRNA sense strand
ggaccucagacaaauguuu

SEQ ID NO: 1272823 - RNA, 19 nt, Homo sapiens
  misc_RNA (1)...(19): siRNA sense strand
caggagggaucuuccaugu

SEQ ID NO: 1272824 - RNA, 19 nt, Homo sapiens
  misc_RNA (1)...(19): siRNA sense strand
gauccggaccucagacaaa

SEQ ID NO: 1272825 - RNA, 19 nt, Homo sapiens
  misc_RNA (1)...(19): siRNA sense strand
ggacagggcgagggagaaa

SEQ ID NO: 1272826 - RNA, 19 nt, Homo sapiens
  misc_RNA (1)...(19): siRNA sense strand
cacguguaaugacaaauaa

SEQ ID NO: 1272827 - RNA, 19 nt, Homo sapiens
  misc_RNA (1)...(19): siRNA sense strand
ggauuugguuucguaacuu

SEQ ID NO: 1272828 - RNA, 19 nt, Homo sapiens
  misc_RNA (1)...(19): siRNA sense strand
ggaaauugaauccaguugu

SEQ ID NO: 1272829 - RNA, 19 nt, Homo sapiens
  misc_RNA (1)...(19): siRNA sense strand
cagcacguguaaugacaaa

SEQ ID NO: 1272830 - RNA, 19 nt, Homo sapiens
  misc_RNA (1)...(19): siRNA sense strand
aaaagaccgucaacccuua

SEQ ID NO: 1272831 - RNA, 19 nt, Homo sapiens
  misc_RNA (1)...(19): siRNA sense strand
gggauuugguuucguaacu

SEQ ID NO: 1272832 - RNA, 19 nt, Homo sapiens
  misc_RNA (1)...(19): siRNA sense strand
cuacagucccgaauucuau

SEQ ID NO: 1272833 - RNA, 19 nt, Homo sapiens
  misc_RNA (1)...(19): siRNA sense strand
uguauauacuucugcaaug

SEQ ID NO: 1272834 - RNA, 19 nt, Homo sapiens
  misc_RNA (1)...(19): siRNA sense strand
uuauacaaauggcuggaaa

SEQ ID NO: 1272835 - RNA, 19 nt, Homo sapiens
  misc_RNA (1)...(19): siRNA sense strand
ggcugcaugucuccaauau

SEQ ID NO: 1272836 - RNA, 19 nt, Homo sapiens
  misc_RNA (1)...(19): siRNA sense strand
ucacuuguauauacuucug

SEQ ID NO: 1272837 - RNA, 19 nt, Homo sapiens
  misc_RNA (1)...(19): siRNA sense strand
caaauggcuggaaauugaa

SEQ ID NO: 1272838 - RNA, 19 nt, Homo sapiens
  misc_RNA (1)...(19): siRNA sense strand
guauauacuucugcaaugc

SEQ ID NO: 1272839 - RNA, 19 nt, Homo sapiens
  misc_RNA (1)...(19): siRNA sense strand
aaaucgagguaaauaaugc

SEQ ID NO: 1272840 - RNA, 19 nt, Homo sapiens
  misc_RNA (1)...(19): siRNA sense strand
agucuacagucccgaauuc

SEQ ID NO: 1272841 - RNA, 19 nt, Homo sapiens
  misc_RNA (1)...(19): siRNA sense strand
auacaaauggcuggaaauu

SEQ ID NO: 1272842 - RNA, 19 nt, Homo sapiens
  misc_RNA (1)...(19): siRNA sense strand
cacagcacguguaaugaca

SEQ ID NO: 1272843 - RNA, 19 nt, Homo sapiens
  misc_RNA (1)...(19): siRNA sense strand
cugcaugucuccaauaucc

SEQ ID NO: 1272844 - RNA, 19 nt, Homo sapiens
  misc_RNA (1)...(19): siRNA sense strand
guucacuuguauauacuuc

SEQ ID NO: 1272845 - RNA, 19 nt, Homo sapiens
  misc_RNA (1)...(19): siRNA sense strand
acagggcgagggagaaauu

SEQ ID NO: 1272846 - RNA, 19 nt, Homo sapiens
  misc_RNA (1)...(19): siRNA sense strand
agacacaaccuucugaaaa

SEQ ID NO: 1272847 - RNA, 19 nt, Homo sapiens
  misc_RNA (1)...(19): siRNA sense strand
gcacacauuaaaccuguac

SEQ ID NO: 1272848 - RNA, 19 nt, Homo sapiens
  misc_RNA (1)...(19): siRNA sense strand
ugccacagcacguguaaug

SEQ ID NO: 1272849 - RNA, 19 nt, Homo sapiens
  misc_RNA (1)...(19): siRNA sense strand
gacacaaccuucugaaaac

SEQ ID NO: 1272850 - RNA, 19 nt, Homo sapiens
  misc_RNA (1)...(19): siRNA sense strand
gcaccgccacacagacaga

SEQ ID NO: 1272851 - RNA, 19 nt, Homo sapiens
  misc_RNA (1)...(19): siRNA sense strand
gaccgucaacccuuauaca

SEQ ID NO: 1272852 - RNA, 19 nt, Homo sapiens
  misc_RNA (1)...(19): siRNA sense strand
ggucgcaccguguacaaca

SEQ ID NO: 1272853 - RNA, 19 nt, Homo sapiens
  misc_RNA (1)...(19): siRNA sense strand
gucaacccuuauacaaaug

SEQ ID NO: 1272854 - RNA, 19 nt, Homo sapiens
  misc_RNA (1)...(19): siRNA sense strand
gcgaggcucaaagggauuu

SEQ ID NO: 1272855 - RNA, 19 nt, Homo sapiens
  misc_RNA (1)...(19): siRNA sense strand
ccgucaacccuuauacaaa

SEQ ID NO: 1272856 - RNA, 19 nt, Homo sapiens
  misc_RNA (1)...(19): siRNA sense strand
gggcgagggagaaauuaca

SEQ ID NO: 1272857 - RNA, 19 nt, Homo sapiens
  misc_RNA (1)...(19): siRNA sense strand
ccacagcacguguaaugac

SEQ ID NO: 1272858 - RNA, 19 nt, Homo sapiens
  misc_RNA (1)...(19): siRNA sense strand
uacaaauggcuggaaauug

SEQ ID NO: 1272859 - RNA, 19 nt, Homo sapiens
  misc_RNA (1)...(19): siRNA sense strand
acaaauggcuggaaauuga

SEQ ID NO: 1272860 - RNA, 19 nt, Homo sapiens
  misc_RNA (1)...(19): siRNA sense strand
gaaauugaauccaguugug

SEQ ID NO: 1272861 - RNA, 19 nt, Homo sapiens
  misc_RNA (1)...(19): siRNA sense strand
gcacguguaaugacaaaua

SEQ ID NO: 1272862 - RNA, 19 nt, Homo sapiens
  misc_RNA (1)...(19): siRNA sense strand
ggagggaucuuccauguac

SEQ ID NO: 1272863 - RNA, 19 nt, Homo sapiens
  misc_RNA (1)...(19): siRNA sense strand
aaagggauuugguuucgua

SEQ ID NO: 1272864 - RNA, 19 nt, Homo sapiens
  misc_RNA (1)...(19): siRNA sense strand
ccaguucacuuguauauac

SEQ ID NO: 1272865 - RNA, 19 nt, Homo sapiens
  misc_RNA (1)...(19): siRNA sense strand
cgucaacccuuauacaaau

SEQ ID NO: 1272866 - RNA, 19 nt, Homo sapiens
  misc_RNA (1)...(19): siRNA sense strand
gauuugguuucguaacuuu

SEQ ID NO: 1272867 - RNA, 19 nt, Homo sapiens
  misc_RNA (1)...(19): siRNA sense strand
ggaccucagacaaauguuu

SEQ ID NO: 1272868 - RNA, 19 nt, Homo sapiens
  misc_RNA (1)...(19): siRNA sense strand
caggagggaucuuccaugu

SEQ ID NO: 1272869 - RNA, 19 nt, Homo sapiens
  misc_RNA (1)...(19): siRNA sense strand
gauccggaccucagacaaa

SEQ ID NO: 1272870 - RNA, 19 nt, Homo sapiens
  misc_RNA (1)...(19): siRNA sense strand
ggacagggcgagggagaaa

SEQ ID NO: 1272871 - RNA, 19 nt, Homo sapiens
  misc_RNA (1)...(19): siRNA sense strand
cacguguaaugacaaauaa

SEQ ID NO: 1272872 - RNA, 19 nt, Homo sapiens
  misc_RNA (1)...(19): siRNA sense strand
ggauuugguuucguaacuu

SEQ ID NO: 1272873 - RNA, 19 nt, Homo sapiens
  misc_RNA (1)...(19): siRNA sense strand
ggaaauugaauccaguugu

SEQ ID NO: 1272874 - RNA, 19 nt, Homo sapiens
  misc_RNA (1)...(19): siRNA sense strand
cagcacguguaaugacaaa

SEQ ID NO: 1272875 - RNA, 19 nt, Homo sapiens
  misc_RNA (1)...(19): siRNA sense strand
aaaagaccgucaacccuua

SEQ ID NO: 1272876 - RNA, 19 nt, Homo sapiens
  misc_RNA (1)...(19): siRNA sense strand
gggauuugguuucguaacu

SEQ ID NO: 1272877 - RNA, 19 nt, Homo sapiens
  misc_RNA (1)...(19): siRNA sense strand
cuacagucccgaauucuau

SEQ ID NO: 1272878 - RNA, 19 nt, Homo sapiens
  misc_RNA (1)...(19): siRNA sense strand
uguauauacuucugcaaug

SEQ ID NO: 1272879 - RNA, 19 nt, Homo sapiens
  misc_RNA (1)...(19): siRNA sense strand
uuauacaaauggcuggaaa

SEQ ID NO: 1272880 - RNA, 19 nt, Homo sapiens
  misc_RNA (1)...(19): siRNA sense strand
ggcugcaugucuccaauau

SEQ ID NO: 1272881 - RNA, 19 nt, Homo sapiens
  misc_RNA (1)...(19): siRNA sense strand
ucacuuguauauacuucug

SEQ ID NO: 1272882 - RNA, 19 nt, Homo sapiens
  misc_RNA (1)...(19): siRNA sense strand
caaauggcuggaaauugaa

SEQ ID NO: 1272883 - RNA, 19 nt, Homo sapiens
  misc_RNA (1)...(19): siRNA sense strand
guauauacuucugcaaugc

SEQ ID NO: 1272884 - RNA, 19 nt, Homo sapiens
  misc_RNA (1)...(19): siRNA sense strand
aaaucgagguaaauaaugc

SEQ ID NO: 1272885 - RNA, 19 nt, Homo sapiens
  misc_RNA (1)...(19): siRNA sense strand
agucuacagucccgaauuc

SEQ ID NO: 1272886 - RNA, 19 nt, Homo sapiens
  misc_RNA (1)...(19): siRNA sense strand
auacaaauggcuggaaauu

SEQ ID NO: 1272887 - RNA, 19 nt, Homo sapiens
  misc_RNA (1)...(19): siRNA sense strand
cacagcacguguaaugaca

SEQ ID NO: 1272888 - RNA, 19 nt, Homo sapiens
  misc_RNA (1)...(19): siRNA sense strand
cugcaugucuccaauaucc

SEQ ID NO: 1272889 - RNA, 19 nt, Homo sapiens
  misc_RNA (1)...(19): siRNA sense strand
guucacuuguauauacuuc

SEQ ID NO: 1272890 - RNA, 19 nt, Homo sapiens
  misc_RNA (1)...(19): siRNA sense strand
acagggcgagggagaaauu

SEQ ID NO: 1272891 - RNA, 19 nt, Homo sapiens
  misc_RNA (1)...(19): siRNA sense strand
agacacaaccuucugaaaa

SEQ ID NO: 1272892 - RNA, 19 nt, Homo sapiens
  misc_RNA (1)...(19): siRNA sense strand
gcacacauuaaaccuguac

SEQ ID NO: 1272893 - RNA, 19 nt, Homo sapiens
  misc_RNA (1)...(19): siRNA sense strand
ugccacagcacguguaaug

SEQ ID NO: 1272894 - RNA, 19 nt, Homo sapiens
  misc_RNA (1)...(19): siRNA sense strand
gacacaaccuucugaaaac

SEQ ID NO: 1272895 - RNA, 19 nt, Homo sapiens
  misc_RNA (1)...(19): siRNA sense strand
gcaccgccacacagacaga

SEQ ID NO: 1272896 - RNA, 19 nt, Homo sapiens
  misc_RNA (1)...(19): siRNA sense strand
gaccgucaacccuuauaca

SEQ ID NO: 1272897 - RNA, 19 nt, Homo sapiens
  misc_RNA (1)...(19): siRNA sense strand
ggucgcaccguguacaaca

SEQ ID NO: 1272898 - RNA, 19 nt, Homo sapiens
  misc_RNA (1)...(19): siRNA sense strand
gucaacccuuauacaaaug

SEQ ID NO: 1272899 - RNA, 19 nt, Homo sapiens
  misc_RNA (1)...(19): siRNA sense strand
gcgaggcucaaagggauuu

SEQ ID NO: 1272900 - RNA, 19 nt, Homo sapiens
  misc_RNA (1)...(19): siRNA sense strand
ccgucaacccuuauacaaa

SEQ ID NO: 1272901 - RNA, 19 nt, Homo sapiens
  misc_RNA (1)...(19): siRNA sense strand
gggcgagggagaaauuaca

SEQ ID NO: 1272902 - RNA, 19 nt, Homo sapiens
  misc_RNA (1)...(19): siRNA sense strand
ccacagcacguguaaugac

SEQ ID NO: 1272903 - RNA, 19 nt, Homo sapiens
  misc_RNA (1)...(19): siRNA sense strand
uacaaauggcuggaaauug

SEQ ID NO: 1272904 - RNA, 19 nt, Homo sapiens
  misc_RNA (1)...(19): siRNA sense strand
acaaauggcuggaaauuga

SEQ ID NO: 1272905 - RNA, 19 nt, Homo sapiens
  misc_RNA (1)...(19): siRNA sense strand
gaaauugaauccaguugug

SEQ ID NO: 1272906 - RNA, 19 nt, Homo sapiens
  misc_RNA (1)...(19): siRNA sense strand
gcacguguaaugacaaaua

SEQ ID NO: 1272907 - RNA, 19 nt, Homo sapiens
  misc_RNA (1)...(19): siRNA sense strand
ggagggaucuuccauguac

SEQ ID NO: 1272908 - RNA, 19 nt, Homo sapiens
  misc_RNA (1)...(19): siRNA sense strand
aaagggauuugguuucgua

SEQ ID NO: 1272909 - RNA, 19 nt, Homo sapiens
  misc_RNA (1)...(19): siRNA sense strand
ccaguucacuuguauauac

SEQ ID NO: 1272910 - RNA, 19 nt, Homo sapiens
  misc_RNA (1)...(19): siRNA sense strand
cgucaacccuuauacaaau

SEQ ID NO: 1272911 - RNA, 19 nt, Homo sapiens
  misc_RNA (1)...(19): siRNA sense strand
gauuugguuucguaacuuu

SEQ ID NO: 1272912 - RNA, 19 nt, Homo sapiens
  misc_RNA (1)...(19): siRNA sense strand
ggaccucagacaaauguuu

SEQ ID NO: 1272913 - RNA, 19 nt, Homo sapiens
  misc_RNA (1)...(19): siRNA sense strand
caggagggaucuuccaugu

SEQ ID NO: 1272914 - RNA, 19 nt, Homo sapiens
  misc_RNA (1)...(19): siRNA sense strand
gauccggaccucagacaaa

SEQ ID NO: 1272915 - RNA, 19 nt, Homo sapiens
  misc_RNA (1)...(19): siRNA sense strand
ggacagggcgagggagaaa

SEQ ID NO: 1272916 - RNA, 19 nt, Homo sapiens
  misc_RNA (1)...(19): siRNA sense strand
cacguguaaugacaaauaa

SEQ ID NO: 1272917 - RNA, 19 nt, Homo sapiens
  misc_RNA (1)...(19): siRNA sense strand
ggauuugguuucguaacuu

SEQ ID NO: 1272918 - RNA, 19 nt, Homo sapiens
  misc_RNA (1)...(19): siRNA sense strand
ggaaauugaauccaguugu

SEQ ID NO: 1272919 - RNA, 19 nt, Homo sapiens
  misc_RNA (1)...(19): siRNA sense strand
cagcacguguaaugacaaa

SEQ ID NO: 1272920 - RNA, 19 nt, Homo sapiens
  misc_RNA (1)...(19): siRNA sense strand
aaaagaccgucaacccuua

SEQ ID NO: 1272921 - RNA, 19 nt, Homo sapiens
  misc_RNA (1)...(19): siRNA sense strand
gggauuugguuucguaacu

SEQ ID NO: 1272922 - RNA, 19 nt, Homo sapiens
  misc_RNA (1)...(19): siRNA sense strand
cuacagucccgaauucuau

SEQ ID NO: 1272923 - RNA, 19 nt, Homo sapiens
  misc_RNA (1)...(19): siRNA sense strand
uguauauacuucugcaaug

SEQ ID NO: 1272924 - RNA, 19 nt, Homo sapiens
  misc_RNA (1)...(19): siRNA sense strand
uuauacaaauggcuggaaa

SEQ ID NO: 1272925 - RNA, 19 nt, Homo sapiens
  misc_RNA (1)...(19): siRNA sense strand
ggcugcaugucuccaauau

SEQ ID NO: 1272926 - RNA, 19 nt, Homo sapiens
  misc_RNA (1)...(19): siRNA sense strand
ucacuuguauauacuucug

SEQ ID NO: 1272927 - RNA, 19 nt, Homo sapiens
  misc_RNA (1)...(19): siRNA sense strand
caaauggcuggaaauugaa

SEQ ID NO: 1272928 - RNA, 19 nt, Homo sapiens
  misc_RNA (1)...(19): siRNA sense strand
guauauacuucugcaaugc

SEQ ID NO: 1272929 - RNA, 19 nt, Homo sapiens
  misc_RNA (1)...(19): siRNA sense strand
aaaucgagguaaauaaugc

SEQ ID NO: 1272930 - RNA, 19 nt, Homo sapiens
  misc_RNA (1)...(19): siRNA sense strand
agucuacagucccgaauuc

SEQ ID NO: 1272931 - RNA, 19 nt, Homo sapiens
  misc_RNA (1)...(19): siRNA sense strand
auacaaauggcuggaaauu

SEQ ID NO: 1272932 - RNA, 19 nt, Homo sapiens
  misc_RNA (1)...(19): siRNA sense strand
cacagcacguguaaugaca

SEQ ID NO: 1272933 - RNA, 19 nt, Homo sapiens
  misc_RNA (1)...(19): siRNA sense strand
cugcaugucuccaauaucc

SEQ ID NO: 1272934 - RNA, 19 nt, Homo sapiens
  misc_RNA (1)...(19): siRNA sense strand
guucacuuguauauacuuc

SEQ ID NO: 1272935 - RNA, 19 nt, Homo sapiens
  misc_RNA (1)...(19): siRNA sense strand
acagggcgagggagaaauu

SEQ ID NO: 1272936 - RNA, 19 nt, Homo sapiens
  misc_RNA (1)...(19): siRNA sense strand
agacacaaccuucugaaaa

SEQ ID NO: 1272937 - RNA, 19 nt, Homo sapiens
  misc_RNA (1)...(19): siRNA sense strand
gcacacauuaaaccuguac

SEQ ID NO: 1272938 - RNA, 19 nt, Homo sapiens
  misc_RNA (1)...(19): siRNA sense strand
ugccacagcacguguaaug

SEQ ID NO: 1272939 - RNA, 19 nt, Homo sapiens
  misc_RNA (1)...(19): siRNA sense strand
gacacaaccuucugaaaac

SEQ ID NO: 1272940 - RNA, 19 nt, Homo sapiens
  misc_RNA (1)...(19): siRNA sense strand
gcaccgccacacagacaga

SEQ ID NO: 1272941 - RNA, 19 nt, Homo sapiens
  misc_RNA (1)...(19): siRNA sense strand
gaccgucaacccuuauaca

SEQ ID NO: 1272942 - RNA, 19 nt, Homo sapiens
  misc_RNA (1)...(19): siRNA sense strand
ggucgcaccguguacaaca

SEQ ID NO: 1272943 - RNA, 19 nt, Homo sapiens
  misc_RNA (1)...(19): siRNA sense strand
gucaacccuuauacaaaug

SEQ ID NO: 1272944 - RNA, 19 nt, Homo sapiens
  misc_RNA (1)...(19): siRNA sense strand
gcgaggcucaaagggauuu

SEQ ID NO: 1272945 - RNA, 19 nt, Homo sapiens
  misc_RNA (1)...(19): siRNA sense strand
ccgucaacccuuauacaaa

SEQ ID NO: 1272946 - RNA, 19 nt, Homo sapiens
  misc_RNA (1)...(19): siRNA sense strand
gggcgagggagaaauuaca

SEQ ID NO: 1272947 - RNA, 19 nt, Homo sapiens
  misc_RNA (1)...(19): siRNA sense strand
ccacagcacguguaaugac

SEQ ID NO: 1272948 - RNA, 19 nt, Homo sapiens
  misc_RNA (1)...(19): siRNA sense strand
uacaaauggcuggaaauug

SEQ ID NO: 1272949 - RNA, 19 nt, Homo sapiens
  misc_RNA (1)...(19): siRNA sense strand
acaaauggcuggaaauuga

SEQ ID NO: 1272950 - RNA, 19 nt, Homo sapiens
  misc_RNA (1)...(19): siRNA sense strand
gaaauugaauccaguugug

SEQ ID NO: 1272951 - RNA, 19 nt, Homo sapiens
  misc_RNA (1)...(19): siRNA sense strand
gcacguguaaugacaaaua

SEQ ID NO: 1272952 - RNA, 19 nt, Homo sapiens
  misc_RNA (1)...(19): siRNA sense strand
ggagggaucuuccauguac

SEQ ID NO: 1272953 - RNA, 19 nt, Homo sapiens
  misc_RNA (1)...(19): siRNA sense strand
aaagggauuugguuucgua

SEQ ID NO: 1272954 - RNA, 19 nt, Homo sapiens
  misc_RNA (1)...(19): siRNA sense strand
ccaguucacuuguauauac

SEQ ID NO: 1272955 - RNA, 19 nt, Homo sapiens
  misc_RNA (1)...(19): siRNA sense strand
cgucaacccuuauacaaau

SEQ ID NO: 1272956 - RNA, 19 nt, Homo sapiens
  misc_RNA (1)...(19): siRNA sense strand
gauuugguuucguaacuuu

SEQ ID NO: 1272957 - RNA, 19 nt, Homo sapiens
  misc_RNA (1)...(19): siRNA sense strand
ggaccucagacaaauguuu

SEQ ID NO: 1272958 - RNA, 19 nt, Homo sapiens
  misc_RNA (1)...(19): siRNA sense strand
caggagggaucuuccaugu

SEQ ID NO: 1272959 - RNA, 19 nt, Homo sapiens
  misc_RNA (1)...(19): siRNA sense strand
gauccggaccucagacaaa

SEQ ID NO: 1272960 - RNA, 19 nt, Homo sapiens
  misc_RNA (1)...(19): siRNA sense strand
ggacagggcgagggagaaa

SEQ ID NO: 1272961 - RNA, 19 nt, Homo sapiens
  misc_RNA (1)...(19): siRNA sense strand
cacguguaaugacaaauaa

SEQ ID NO: 1272962 - RNA, 19 nt, Homo sapiens
  misc_RNA (1)...(19): siRNA sense strand
ggauuugguuucguaacuu

SEQ ID NO: 1272963 - RNA, 19 nt, Homo sapiens
  misc_RNA (1)...(19): siRNA sense strand
ggaaauugaauccaguugu

SEQ ID NO: 1272964 - RNA, 19 nt, Homo sapiens
  misc_RNA (1)...(19): siRNA sense strand
cagcacguguaaugacaaa

SEQ ID NO: 1272965 - RNA, 19 nt, Homo sapiens
  misc_RNA (1)...(19): siRNA sense strand
aaaagaccgucaacccuua

SEQ ID NO: 1272966 - RNA, 19 nt, Homo sapiens
  misc_RNA (1)...(19): siRNA sense strand
gggauuugguuucguaacu

SEQ ID NO: 1272967 - RNA, 19 nt, Homo sapiens
  misc_RNA (1)...(19): siRNA sense strand
cuacagucccgaauucuau

SEQ ID NO: 1272968 - RNA, 19 nt, Homo sapiens
  misc_RNA (1)...(19): siRNA sense strand
uguauauacuucugcaaug

SEQ ID NO: 1272969 - RNA, 19 nt, Homo sapiens
  misc_RNA (1)...(19): siRNA sense strand
uuauacaaauggcuggaaa

SEQ ID NO: 1272970 - RNA, 19 nt, Homo sapiens
  misc_RNA (1)...(19): siRNA sense strand
ggcugcaugucuccaauau

SEQ ID NO: 1272971 - RNA, 19 nt, Homo sapiens
  misc_RNA (1)...(19): siRNA sense strand
ucacuuguauauacuucug

SEQ ID NO: 1272972 - RNA, 19 nt, Homo sapiens
  misc_RNA (1)...(19): siRNA sense strand
caaauggcuggaaauugaa

SEQ ID NO: 1272973 - RNA, 19 nt, Homo sapiens
  misc_RNA (1)...(19): siRNA sense strand
guauauacuucugcaaugc

SEQ ID NO: 1272974 - RNA, 19 nt, Homo sapiens
  misc_RNA (1)...(19): siRNA sense strand
aaaucgagguaaauaaugc

SEQ ID NO: 1272975 - RNA, 19 nt, Homo sapiens
  misc_RNA (1)...(19): siRNA sense strand
agucuacagucccgaauuc

SEQ ID NO: 1272976 - RNA, 19 nt, Homo sapiens
  misc_RNA (1)...(19): siRNA sense strand
auacaaauggcuggaaauu

SEQ ID NO: 1272977 - RNA, 19 nt, Homo sapiens
  misc_RNA (1)...(19): siRNA sense strand
cacagcacguguaaugaca

SEQ ID NO: 1272978 - RNA, 19 nt, Homo sapiens
  misc_RNA (1)...(19): siRNA sense strand
cugcaugucuccaauaucc

SEQ ID NO: 1272979 - RNA, 19 nt, Homo sapiens
  misc_RNA (1)...(19): siRNA sense strand
guucacuuguauauacuuc

SEQ ID NO: 1272980 - RNA, 19 nt, Homo sapiens
  misc_RNA (1)...(19): siRNA sense strand
acagggcgagggagaaauu

SEQ ID NO: 1272981 - RNA, 19 nt, Homo sapiens
  misc_RNA (1)...(19): siRNA sense strand
agacacaaccuucugaaaa

SEQ ID NO: 1272982 - RNA, 19 nt, Homo sapiens
  misc_RNA (1)...(19): siRNA sense strand
gcacacauuaaaccuguac

SEQ ID NO: 1272983 - RNA, 19 nt, Homo sapiens
  misc_RNA (1)...(19): siRNA sense strand
ugccacagcacguguaaug

SEQ ID NO: 1272984 - RNA, 19 nt, Homo sapiens
  misc_RNA (1)...(19): siRNA sense strand
gacacaaccuucugaaaac

SEQ ID NO: 1272985 - RNA, 19 nt, Homo sapiens
  misc_RNA (1)...(19): siRNA sense strand
gcaccgccacacagacaga

SEQ ID NO: 1272986 - RNA, 19 nt, Homo sapiens
  misc_RNA (1)...(19): siRNA sense strand
gaccgucaacccuuauaca

SEQ ID NO: 1272987 - RNA, 19 nt, Homo sapiens
  misc_RNA (1)...(19): siRNA sense strand
ggucgcaccguguacaaca

SEQ ID NO: 1272988 - RNA, 19 nt, Homo sapiens
  misc_RNA (1)...(19): siRNA sense strand
gucaacccuuauacaaaug

SEQ ID NO: 1272989 - RNA, 19 nt, Homo sapiens
  misc_RNA (1)...(19): siRNA sense strand
gcgaggcucaaagggauuu

SEQ ID NO: 1272990 - RNA, 19 nt, Homo sapiens
  misc_RNA (1)...(19): siRNA sense strand
ccgucaacccuuauacaaa

SEQ ID NO: 1272991 - RNA, 19 nt, Homo sapiens
  misc_RNA (1)...(19): siRNA sense strand
gggcgagggagaaauuaca

SEQ ID NO: 1272992 - RNA, 19 nt, Homo sapiens
  misc_RNA (1)...(19): siRNA sense strand
ccacagcacguguaaugac

SEQ ID NO: 1272993 - RNA, 19 nt, Homo sapiens
  misc_RNA (1)...(19): siRNA sense strand
uacaaauggcuggaaauug

SEQ ID NO: 1272994 - RNA, 19 nt, Homo sapiens
  misc_RNA (1)...(19): siRNA sense strand
acaaauggcuggaaauuga

SEQ ID NO: 1272995 - RNA, 19 nt, Homo sapiens
  misc_RNA (1)...(19): siRNA sense strand
gaaauugaauccaguugug

SEQ ID NO: 1272996 - RNA, 19 nt, Homo sapiens
  misc_RNA (1)...(19): siRNA sense strand
gcacguguaaugacaaaua

SEQ ID NO: 1272997 - RNA, 19 nt, Homo sapiens
  misc_RNA (1)...(19): siRNA sense strand
ggagggaucuuccauguac

SEQ ID NO: 1272998 - RNA, 19 nt, Homo sapiens
  misc_RNA (1)...(19): siRNA sense strand
aaagggauuugguuucgua

SEQ ID NO: 1272999 - RNA, 19 nt, Homo sapiens
  misc_RNA (1)...(19): siRNA sense strand
ccaguucacuuguauauac

SEQ ID NO: 1273000 - RNA, 19 nt, Homo sapiens
  misc_RNA (1)...(19): siRNA sense strand
cgucaacccuuauacaaau

SEQ ID NO: 1273001 - RNA, 19 nt, Homo sapiens
  misc_RNA (1)...(19): siRNA sense strand
gauuugguuucguaacuuu

SEQ ID NO: 1273002 - RNA, 19 nt, Homo sapiens
  misc_RNA (1)...(19): siRNA sense strand
ggaccucagacaaauguuu

SEQ ID NO: 1273003 - RNA, 19 nt, Homo sapiens
  misc_RNA (1)...(19): siRNA sense strand
caggagggaucuuccaugu

SEQ ID NO: 1273004 - RNA, 19 nt, Homo sapiens
  misc_RNA (1)...(19): siRNA sense strand
gauccggaccucagacaaa

SEQ ID NO: 1273005 - RNA, 19 nt, Homo sapiens
  misc_RNA (1)...(19): siRNA sense strand
ggacagggcgagggagaaa

SEQ ID NO: 1273006 - RNA, 19 nt, Homo sapiens
  misc_RNA (1)...(19): siRNA sense strand
cacguguaaugacaaauaa

SEQ ID NO: 1273007 - RNA, 19 nt, Homo sapiens
  misc_RNA (1)...(19): siRNA sense strand
ggauuugguuucguaacuu

SEQ ID NO: 1273008 - RNA, 19 nt, Homo sapiens
  misc_RNA (1)...(19): siRNA sense strand
ggaaauugaauccaguugu

SEQ ID NO: 1273009 - RNA, 19 nt, Homo sapiens
  misc_RNA (1)...(19): siRNA sense strand
cagcacguguaaugacaaa

SEQ ID NO: 1273010 - RNA, 19 nt, Homo sapiens
  misc_RNA (1)...(19): siRNA sense strand
aaaagaccgucaacccuua

SEQ ID NO: 1273011 - RNA, 19 nt, Homo sapiens
  misc_RNA (1)...(19): siRNA sense strand
gggauuugguuucguaacu

SEQ ID NO: 1273012 - RNA, 19 nt, Homo sapiens
  misc_RNA (1)...(19): siRNA sense strand
cuacagucccgaauucuau

SEQ ID NO: 1273013 - RNA, 19 nt, Homo sapiens
  misc_RNA (1)...(19): siRNA sense strand
uguauauacuucugcaaug

SEQ ID NO: 1273014 - RNA, 19 nt, Homo sapiens
  misc_RNA (1)...(19): siRNA sense strand
uuauacaaauggcuggaaa

SEQ ID NO: 1273015 - RNA, 19 nt, Homo sapiens
  misc_RNA (1)...(19): siRNA sense strand
ggcugcaugucuccaauau

SEQ ID NO: 1273016 - RNA, 19 nt, Homo sapiens
  misc_RNA (1)...(19): siRNA sense strand
ucacuuguauauacuucug

SEQ ID NO: 1273017 - RNA, 19 nt, Homo sapiens
  misc_RNA (1)...(19): siRNA sense strand
caaauggcuggaaauugaa

SEQ ID NO: 1273018 - RNA, 19 nt, Homo sapiens
  misc_RNA (1)...(19): siRNA sense strand
guauauacuucugcaaugc

SEQ ID NO: 1273019 - RNA, 19 nt, Homo sapiens
  misc_RNA (1)...(19): siRNA sense strand
aaaucgagguaaauaaugc

SEQ ID NO: 1273020 - RNA, 19 nt, Homo sapiens
  misc_RNA (1)...(19): siRNA sense strand
agucuacagucccgaauuc

SEQ ID NO: 1273021 - RNA, 19 nt, Homo sapiens
  misc_RNA (1)...(19): siRNA sense strand
auacaaauggcuggaaauu

SEQ ID NO: 1273022 - RNA, 19 nt, Homo sapiens
  misc_RNA (1)...(19): siRNA sense strand
cacagcacguguaaugaca

SEQ ID NO: 1273023 - RNA, 19 nt, Homo sapiens
  misc_RNA (1)...(19): siRNA sense strand
cugcaugucuccaauaucc

SEQ ID NO: 1273024 - RNA, 19 nt, Homo sapiens
  misc_RNA (1)...(19): siRNA sense strand
guucacuuguauauacuuc

SEQ ID NO: 1273025 - RNA, 19 nt, Homo sapiens
  misc_RNA (1)...(19): siRNA sense strand
acagggcgagggagaaauu

SEQ ID NO: 1273026 - RNA, 19 nt, Homo sapiens
  misc_RNA (1)...(19): siRNA sense strand
agacacaaccuucugaaaa

SEQ ID NO: 1273027 - RNA, 19 nt, Homo sapiens
  misc_RNA (1)...(19): siRNA sense strand
gcacacauuaaaccuguac

SEQ ID NO: 1273028 - RNA, 19 nt, Homo sapiens
  misc_RNA (1)...(19): siRNA sense strand
ugccacagcacguguaaug

SEQ ID NO: 1273029 - RNA, 19 nt, Homo sapiens
  misc_RNA (1)...(19): siRNA sense strand
gacacaaccuucugaaaac

SEQ ID NO: 1273030 - RNA, 19 nt, Homo sapiens
  misc_RNA (1)...(19): siRNA sense strand
gcaccgccacacagacaga

SEQ ID NO: 1273031 - RNA, 19 nt, Homo sapiens
  misc_RNA (1)...(19): siRNA sense strand
gaccgucaacccuuauaca

SEQ ID NO: 1273032 - RNA, 19 nt, Homo sapiens
  misc_RNA (1)...(19): siRNA sense strand
ggucgcaccguguacaaca

SEQ ID NO: 1273033 - RNA, 19 nt, Homo sapiens
  misc_RNA (1)...(19): siRNA sense strand
gucaacccuuauacaaaug

SEQ ID NO: 1273034 - RNA, 19 nt, Homo sapiens
  misc_RNA (1)...(19): siRNA sense strand
gcgaggcucaaagggauuu

SEQ ID NO: 1273035 - RNA, 19 nt, Homo sapiens
  misc_RNA (1)...(19): siRNA sense strand
ccgucaacccuuauacaaa

SEQ ID NO: 1273036 - RNA, 19 nt, Homo sapiens
  misc_RNA (1)...(19): siRNA sense strand
gggcgagggagaaauuaca

SEQ ID NO: 1273037 - RNA, 19 nt, Homo sapiens
  misc_RNA (1)...(19): siRNA sense strand
ccacagcacguguaaugac

SEQ ID NO: 1273038 - RNA, 19 nt, Homo sapiens
  misc_RNA (1)...(19): siRNA sense strand
uacaaauggcuggaaauug

SEQ ID NO: 1273039 - RNA, 19 nt, Homo sapiens
  misc_RNA (1)...(19): siRNA sense strand
acaaauggcuggaaauuga

SEQ ID NO: 1273040 - RNA, 19 nt, Homo sapiens
  misc_RNA (1)...(19): siRNA sense strand
gaaauugaauccaguugug

SEQ ID NO: 1273041 - RNA, 19 nt, Homo sapiens
  misc_RNA (1)...(19): siRNA sense strand
gcacguguaaugacaaaua

SEQ ID NO: 1273042 - RNA, 19 nt, Homo sapiens
  misc_RNA (1)...(19): siRNA sense strand
ggagggaucuuccauguac

SEQ ID NO: 1273043 - RNA, 19 nt, Homo sapiens
  misc_RNA (1)...(19): siRNA sense strand
aaagggauuugguuucgua

SEQ ID NO: 1273044 - RNA, 19 nt, Homo sapiens
  misc_RNA (1)...(19): siRNA sense strand
ccaguucacuuguauauac

SEQ ID NO: 1273045 - RNA, 19 nt, Homo sapiens
  misc_RNA (1)...(19): siRNA sense strand
cgucaacccuuauacaaau

SEQ ID NO: 1273046 - RNA, 19 nt, Homo sapiens
  misc_RNA (1)...(19): siRNA sense strand
gauuugguuucguaacuuu

SEQ ID NO: 1273047 - RNA, 19 nt, Homo sapiens
  misc_RNA (1)...(19): siRNA sense strand
ggaccucagacaaauguuu

SEQ ID NO: 1273048 - RNA, 19 nt, Homo sapiens
  misc_RNA (1)...(19): siRNA sense strand
caggagggaucuuccaugu

SEQ ID NO: 1273049 - RNA, 19 nt, Homo sapiens
  misc_RNA (1)...(19): siRNA sense strand
gauccggaccucagacaaa

SEQ ID NO: 1273050 - RNA, 19 nt, Homo sapiens
  misc_RNA (1)...(19): siRNA sense strand
ggacagggcgagggagaaa

SEQ ID NO: 1273051 - RNA, 19 nt, Homo sapiens
  misc_RNA (1)...(19): siRNA sense strand
cacguguaaugacaaauaa

SEQ ID NO: 1273052 - RNA, 19 nt, Homo sapiens
  misc_RNA (1)...(19): siRNA sense strand
ggauuugguuucguaacuu

SEQ ID NO: 1273053 - RNA, 19 nt, Homo sapiens
  misc_RNA (1)...(19): siRNA sense strand
ggaaauugaauccaguugu

SEQ ID NO: 1273054 - RNA, 19 nt, Homo sapiens
  misc_RNA (1)...(19): siRNA sense strand
cagcacguguaaugacaaa

SEQ ID NO: 1273055 - RNA, 19 nt, Homo sapiens
  misc_RNA (1)...(19): siRNA sense strand
aaaagaccgucaacccuua

SEQ ID NO: 1273056 - RNA, 19 nt, Homo sapiens
  misc_RNA (1)...(19): siRNA sense strand
gggauuugguuucguaacu

SEQ ID NO: 1273057 - RNA, 19 nt, Homo sapiens
  misc_RNA (1)...(19): siRNA sense strand
cuacagucccgaauucuau

SEQ ID NO: 1273058 - RNA, 19 nt, Homo sapiens
  misc_RNA (1)...(19): siRNA sense strand
uguauauacuucugcaaug

SEQ ID NO: 1273059 - RNA, 19 nt, Homo sapiens
  misc_RNA (1)...(19): siRNA sense strand
uuauacaaauggcuggaaa

SEQ ID NO: 1273060 - RNA, 19 nt, Homo sapiens
  misc_RNA (1)...(19): siRNA sense strand
ggcugcaugucuccaauau

SEQ ID NO: 1273061 - RNA, 19 nt, Homo sapiens
  misc_RNA (1)...(19): siRNA sense strand
ucacuuguauauacuucug

SEQ ID NO: 1273062 - RNA, 19 nt, Homo sapiens
  misc_RNA (1)...(19): siRNA sense strand
caaauggcuggaaauugaa

SEQ ID NO: 1273063 - RNA, 19 nt, Homo sapiens
  misc_RNA (1)...(19): siRNA sense strand
guauauacuucugcaaugc

SEQ ID NO: 1273064 - RNA, 19 nt, Homo sapiens
  misc_RNA (1)...(19): siRNA sense strand
aaaucgagguaaauaaugc

SEQ ID NO: 1273065 - RNA, 19 nt, Homo sapiens
  misc_RNA (1)...(19): siRNA sense strand
agucuacagucccgaauuc

SEQ ID NO: 1273066 - RNA, 19 nt, Homo sapiens
  misc_RNA (1)...(19): siRNA sense strand
auacaaauggcuggaaauu

SEQ ID NO: 1273067 - RNA, 19 nt, Homo sapiens
  misc_RNA (1)...(19): siRNA sense strand
cacagcacguguaaugaca

SEQ ID NO: 1273068 - RNA, 19 nt, Homo sapiens
  misc_RNA (1)...(19): siRNA sense strand
cugcaugucuccaauaucc

SEQ ID NO: 1273069 - RNA, 19 nt, Homo sapiens
  misc_RNA (1)...(19): siRNA sense strand
guucacuuguauauacuuc

SEQ ID NO: 1273070 - RNA, 19 nt, Homo sapiens
  misc_RNA (1)...(19): siRNA sense strand
acagggcgagggagaaauu

SEQ ID NO: 1273071 - RNA, 19 nt, Homo sapiens
  misc_RNA (1)...(19): siRNA sense strand
agacacaaccuucugaaaa

SEQ ID NO: 1273072 - RNA, 19 nt, Homo sapiens
  misc_RNA (1)...(19): siRNA sense strand
gcacacauuaaaccuguac

SEQ ID NO: 1273073 - RNA, 19 nt, Homo sapiens
  misc_RNA (1)...(19): siRNA sense strand
ugccacagcacguguaaug

SEQ ID NO: 1273074 - RNA, 19 nt, Homo sapiens
  misc_RNA (1)...(19): siRNA sense strand
gacacaaccuucugaaaac

SEQ ID NO: 1273075 - RNA, 19 nt, Homo sapiens
  misc_RNA (1)...(19): siRNA sense strand
gcaccgccacacagacaga

SEQ ID NO: 1273076 - RNA, 19 nt, Homo sapiens
  misc_RNA (1)...(19): siRNA sense strand
gaccgucaacccuuauaca

SEQ ID NO: 1273077 - RNA, 19 nt, Homo sapiens
  misc_RNA (1)...(19): siRNA sense strand
ggucgcaccguguacaaca

SEQ ID NO: 1273078 - RNA, 19 nt, Homo sapiens
  misc_RNA (1)...(19): siRNA sense strand
gucaacccuuauacaaaug

SEQ ID NO: 1273079 - RNA, 19 nt, Homo sapiens
  misc_RNA (1)...(19): siRNA sense strand
gcgaggcucaaagggauuu

SEQ ID NO: 1273080 - RNA, 19 nt, Homo sapiens
  misc_RNA (1)...(19): siRNA sense strand
ccgucaacccuuauacaaa

SEQ ID NO: 1273081 - RNA, 19 nt, Homo sapiens
  misc_RNA (1)...(19): siRNA sense strand
gggcgagggagaaauuaca

SEQ ID NO: 1273082 - RNA, 19 nt, Homo sapiens
  misc_RNA (1)...(19): siRNA sense strand
ccacagcacguguaaugac

SEQ ID NO: 1273083 - RNA, 19 nt, Homo sapiens
  misc_RNA (1)...(19): siRNA sense strand
uacaaauggcuggaaauug

SEQ ID NO: 1273084 - RNA, 19 nt, Homo sapiens
  misc_RNA (1)...(19): siRNA sense strand
acaaauggcuggaaauuga

SEQ ID NO: 1273085 - RNA, 19 nt, Homo sapiens
  misc_RNA (1)...(19): siRNA sense strand
gaaauugaauccaguugug

SEQ ID NO: 1273086 - RNA, 19 nt, Homo sapiens
  misc_RNA (1)...(19): siRNA sense strand
gcacguguaaugacaaaua

SEQ ID NO: 1273087 - RNA, 19 nt, Homo sapiens
  misc_RNA (1)...(19): siRNA sense strand
ggagggaucuuccauguac

SEQ ID NO: 1273088 - RNA, 19 nt, Homo sapiens
  misc_RNA (1)...(19): siRNA sense strand
aaagggauuugguuucgua

SEQ ID NO: 1273089 - RNA, 19 nt, Homo sapiens
  misc_RNA (1)...(19): siRNA sense strand
ccaguucacuuguauauac

SEQ ID NO: 1273090 - RNA, 19 nt, Homo sapiens
  misc_RNA (1)...(19): siRNA sense strand
cgucaacccuuauacaaau

SEQ ID NO: 1273091 - RNA, 19 nt, Homo sapiens
  misc_RNA (1)...(19): siRNA sense strand
gauuugguuucguaacuuu

SEQ ID NO: 1273092 - RNA, 19 nt, Homo sapiens
  misc_RNA (1)...(19): siRNA sense strand
ggaccucagacaaauguuu

SEQ ID NO: 1273093 - RNA, 19 nt, Homo sapiens
  misc_RNA (1)...(19): siRNA sense strand
caggagggaucuuccaugu

SEQ ID NO: 1273094 - RNA, 19 nt, Homo sapiens
  misc_RNA (1)...(19): siRNA sense strand
gauccggaccucagacaaa

SEQ ID NO: 1273095 - RNA, 19 nt, Homo sapiens
  misc_RNA (1)...(19): siRNA sense strand
ggacagggcgagggagaaa

SEQ ID NO: 1273096 - RNA, 19 nt, Homo sapiens
  misc_RNA (1)...(19): siRNA sense strand
cacguguaaugacaaauaa

SEQ ID NO: 1273097 - RNA, 19 nt, Homo sapiens
  misc_RNA (1)...(19): siRNA sense strand
ggauuugguuucguaacuu

SEQ ID NO: 1273098 - RNA, 19 nt, Homo sapiens
  misc_RNA (1)...(19): siRNA sense strand
ggaaauugaauccaguugu

SEQ ID NO: 1273099 - RNA, 19 nt, Homo sapiens
  misc_RNA (1)...(19): siRNA sense strand
cagcacguguaaugacaaa

SEQ ID NO: 1273100 - RNA, 19 nt, Homo sapiens
  misc_RNA (1)...(19): siRNA sense strand
aaaagaccgucaacccuua

SEQ ID NO: 1273101 - RNA, 19 nt, Homo sapiens
  misc_RNA (1)...(19): siRNA sense strand
gggauuugguuucguaacu

SEQ ID NO: 1273102 - RNA, 19 nt, Homo sapiens
  misc_RNA (1)...(19): siRNA sense strand
cuacagucccgaauucuau

SEQ ID NO: 1273103 - RNA, 19 nt, Homo sapiens
  misc_RNA (1)...(19): siRNA sense strand
uguauauacuucugcaaug

SEQ ID NO: 1273104 - RNA, 19 nt, Homo sapiens
  misc_RNA (1)...(19): siRNA sense strand
uuauacaaauggcuggaaa

SEQ ID NO: 1273105 - RNA, 19 nt, Homo sapiens
  misc_RNA (1)...(19): siRNA sense strand
ggcugcaugucuccaauau

SEQ ID NO: 1273106 - RNA, 19 nt, Homo sapiens
  misc_RNA (1)...(19): siRNA sense strand
ucacuuguauauacuucug

SEQ ID NO: 1273107 - RNA, 19 nt, Homo sapiens
  misc_RNA (1)...(19): siRNA sense strand
caaauggcuggaaauugaa

SEQ ID NO: 1273108 - RNA, 19 nt, Homo sapiens
  misc_RNA (1)...(19): siRNA sense strand
guauauacuucugcaaugc

SEQ ID NO: 1273109 - RNA, 19 nt, Homo sapiens
  misc_RNA (1)...(19): siRNA sense strand
aaaucgagguaaauaaugc

SEQ ID NO: 1273110 - RNA, 19 nt, Homo sapiens
  misc_RNA (1)...(19): siRNA sense strand
agucuacagucccgaauuc

SEQ ID NO: 1273111 - RNA, 19 nt, Homo sapiens
  misc_RNA (1)...(19): siRNA sense strand
auacaaauggcuggaaauu

SEQ ID NO: 1273112 - RNA, 19 nt, Homo sapiens
  misc_RNA (1)...(19): siRNA sense strand
cacagcacguguaaugaca

SEQ ID NO: 1273113 - RNA, 19 nt, Homo sapiens
  misc_RNA (1)...(19): siRNA sense strand
cugcaugucuccaauaucc

SEQ ID NO: 1273114 - RNA, 19 nt, Homo sapiens
  misc_RNA (1)...(19): siRNA sense strand
guucacuuguauauacuuc

SEQ ID NO: 1273115 - RNA, 19 nt, Homo sapiens
  misc_RNA (1)...(19): siRNA sense strand
acagggcgagggagaaauu

SEQ ID NO: 1273116 - RNA, 19 nt, Homo sapiens
  misc_RNA (1)...(19): siRNA sense strand
agacacaaccuucugaaaa

SEQ ID NO: 1273117 - RNA, 19 nt, Homo sapiens
  misc_RNA (1)...(19): siRNA sense strand
gcacacauuaaaccuguac

SEQ ID NO: 1273118 - RNA, 19 nt, Homo sapiens
  misc_RNA (1)...(19): siRNA sense strand
ugccacagcacguguaaug

SEQ ID NO: 1273119 - RNA, 19 nt, Homo sapiens
  misc_RNA (1)...(19): siRNA sense strand
gacacaaccuucugaaaac

SEQ ID NO: 1273120 - RNA, 19 nt, Homo sapiens
  misc_RNA (1)...(19): siRNA sense strand
gcaccgccacacagacaga

SEQ ID NO: 1273121 - RNA, 19 nt, Homo sapiens
  misc_RNA (1)...(19): siRNA sense strand
gaccgucaacccuuauaca

SEQ ID NO: 1273122 - RNA, 19 nt, Homo sapiens
  misc_RNA (1)...(19): siRNA sense strand
ggucgcaccguguacaaca

SEQ ID NO: 1273123 - RNA, 19 nt, Homo sapiens
  misc_RNA (1)...(19): siRNA sense strand
gucaacccuuauacaaaug

SEQ ID NO: 1273124 - RNA, 19 nt, Homo sapiens
  misc_RNA (1)...(19): siRNA sense strand
gcgaggcucaaagggauuu

SEQ ID NO: 1273125 - RNA, 19 nt, Homo sapiens
  misc_RNA (1)...(19): siRNA sense strand
ccgucaacccuuauacaaa

SEQ ID NO: 1273126 - RNA, 19 nt, Homo sapiens
  misc_RNA (1)...(19): siRNA sense strand
gggcgagggagaaauuaca

SEQ ID NO: 1273127 - RNA, 19 nt, Homo sapiens
  misc_RNA (1)...(19): siRNA sense strand
ccacagcacguguaaugac

SEQ ID NO: 1273128 - RNA, 19 nt, Homo sapiens
  misc_RNA (1)...(19): siRNA sense strand
uacaaauggcuggaaauug

SEQ ID NO: 1273129 - RNA, 19 nt, Homo sapiens
  misc_RNA (1)...(19): siRNA sense strand
acaaauggcuggaaauuga

SEQ ID NO: 1273130 - RNA, 19 nt, Homo sapiens
  misc_RNA (1)...(19): siRNA sense strand
gaaauugaauccaguugug

SEQ ID NO: 1273131 - RNA, 19 nt, Homo sapiens
  misc_RNA (1)...(19): siRNA sense strand
gcacguguaaugacaaaua

SEQ ID NO: 1273132 - RNA, 19 nt, Homo sapiens
  misc_RNA (1)...(19): siRNA sense strand
ggagggaucuuccauguac

SEQ ID NO: 1273133 - RNA, 19 nt, Homo sapiens
  misc_RNA (1)...(19): siRNA sense strand
aaagggauuugguuucgua

SEQ ID NO: 1273134 - RNA, 19 nt, Homo sapiens
  misc_RNA (1)...(19): siRNA sense strand
ccaguucacuuguauauac

SEQ ID NO: 1273135 - RNA, 19 nt, Homo sapiens
  misc_RNA (1)...(19): siRNA sense strand
cgucaacccuuauacaaau

SEQ ID NO: 1273136 - RNA, 19 nt, Homo sapiens
  misc_RNA (1)...(19): siRNA sense strand
gauuugguuucguaacuuu

SEQ ID NO: 1273137 - RNA, 19 nt, Homo sapiens
  misc_RNA (1)...(19): siRNA sense strand
ggaccucagacaaauguuu

SEQ ID NO: 1273138 - RNA, 19 nt, Homo sapiens
  misc_RNA (1)...(19): siRNA sense strand
caggagggaucuuccaugu

SEQ ID NO: 1273139 - RNA, 19 nt, Homo sapiens
  misc_RNA (1)...(19): siRNA sense strand
gauccggaccucagacaaa

SEQ ID NO: 1273140 - RNA, 19 nt, Homo sapiens
  misc_RNA (1)...(19): siRNA sense strand
ggacagggcgagggagaaa

SEQ ID NO: 1273141 - RNA, 19 nt, Homo sapiens
  misc_RNA (1)...(19): siRNA sense strand
cacguguaaugacaaauaa

SEQ ID NO: 1273142 - RNA, 19 nt, Homo sapiens
  misc_RNA (1)...(19): siRNA sense strand
ggauuugguuucguaacuu

SEQ ID NO: 1273143 - RNA, 19 nt, Homo sapiens
  misc_RNA (1)...(19): siRNA sense strand
ggaaauugaauccaguugu

SEQ ID NO: 1273144 - RNA, 19 nt, Homo sapiens
  misc_RNA (1)...(19): siRNA sense strand
cagcacguguaaugacaaa

SEQ ID NO: 1273145 - RNA, 19 nt, Homo sapiens
  misc_RNA (1)...(19): siRNA sense strand
aaaagaccgucaacccuua

SEQ ID NO: 1273146 - RNA, 19 nt, Homo sapiens
  misc_RNA (1)...(19): siRNA sense strand
gggauuugguuucguaacu

SEQ ID NO: 1273147 - RNA, 19 nt, Homo sapiens
  misc_RNA (1)...(19): siRNA sense strand
cuacagucccgaauucuau

SEQ ID NO: 1273148 - RNA, 19 nt, Homo sapiens
  misc_RNA (1)...(19): siRNA sense strand
uguauauacuucugcaaug

SEQ ID NO: 1273149 - RNA, 19 nt, Homo sapiens
  misc_RNA (1)...(19): siRNA sense strand
uuauacaaauggcuggaaa

SEQ ID NO: 1273150 - RNA, 19 nt, Homo sapiens
  misc_RNA (1)...(19): siRNA sense strand
ggcugcaugucuccaauau

SEQ ID NO: 1273151 - RNA, 19 nt, Homo sapiens
  misc_RNA (1)...(19): siRNA sense strand
ucacuuguauauacuucug

SEQ ID NO: 1273152 - RNA, 19 nt, Homo sapiens
  misc_RNA (1)...(19): siRNA sense strand
caaauggcuggaaauugaa

SEQ ID NO: 1273153 - RNA, 19 nt, Homo sapiens
  misc_RNA (1)...(19): siRNA sense strand
guauauacuucugcaaugc

SEQ ID NO: 1273154 - RNA, 19 nt, Homo sapiens
  misc_RNA (1)...(19): siRNA sense strand
aaaucgagguaaauaaugc

SEQ ID NO: 1273155 - RNA, 19 nt, Homo sapiens
  misc_RNA (1)...(19): siRNA sense strand
agucuacagucccgaauuc

SEQ ID NO: 1273156 - RNA, 19 nt, Homo sapiens
  misc_RNA (1)...(19): siRNA sense strand
auacaaauggcuggaaauu

SEQ ID NO: 1273157 - RNA, 19 nt, Homo sapiens
  misc_RNA (1)...(19): siRNA sense strand
cacagcacguguaaugaca

SEQ ID NO: 1273158 - RNA, 19 nt, Homo sapiens
  misc_RNA (1)...(19): siRNA sense strand
cugcaugucuccaauaucc

SEQ ID NO: 1273159 - RNA, 19 nt, Homo sapiens
  misc_RNA (1)...(19): siRNA sense strand
guucacuuguauauacuuc

SEQ ID NO: 1273160 - RNA, 19 nt, Homo sapiens
  misc_RNA (1)...(19): siRNA sense strand
acagggcgagggagaaauu

SEQ ID NO: 1273161 - RNA, 19 nt, Homo sapiens
  misc_RNA (1)...(19): siRNA sense strand
agacacaaccuucugaaaa

SEQ ID NO: 1273162 - RNA, 19 nt, Homo sapiens
  misc_RNA (1)...(19): siRNA sense strand
gcacacauuaaaccuguac

SEQ ID NO: 1273163 - RNA, 19 nt, Homo sapiens
  misc_RNA (1)...(19): siRNA sense strand
ugccacagcacguguaaug

SEQ ID NO: 1273164 - RNA, 19 nt, Homo sapiens
  misc_RNA (1)...(19): siRNA sense strand
gacacaaccuucugaaaac

SEQ ID NO: 1273165 - RNA, 19 nt, Homo sapiens
  misc_RNA (1)...(19): siRNA sense strand
gcaccgccacacagacaga

SEQ ID NO: 1273166 - RNA, 19 nt, Homo sapiens
  misc_RNA (1)...(19): siRNA sense strand
gaccgucaacccuuauaca

SEQ ID NO: 1273167 - RNA, 19 nt, Homo sapiens
  misc_RNA (1)...(19): siRNA sense strand
ggucgcaccguguacaaca

SEQ ID NO: 1273168 - RNA, 19 nt, Homo sapiens
  misc_RNA (1)...(19): siRNA sense strand
gucaacccuuauacaaaug

SEQ ID NO: 1273169 - RNA, 19 nt, Homo sapiens
  misc_RNA (1)...(19): siRNA sense strand
gcgaggcucaaagggauuu

SEQ ID NO: 1273170 - RNA, 19 nt, Homo sapiens
  misc_RNA (1)...(19): siRNA sense strand
ccgucaacccuuauacaaa

SEQ ID NO: 1273171 - RNA, 19 nt, Homo sapiens
  misc_RNA (1)...(19): siRNA sense strand
gggcgagggagaaauuaca

SEQ ID NO: 1273172 - RNA, 19 nt, Homo sapiens
  misc_RNA (1)...(19): siRNA sense strand
ccacagcacguguaaugac

SEQ ID NO: 1273173 - RNA, 19 nt, Homo sapiens
  misc_RNA (1)...(19): siRNA sense strand
uacaaauggcuggaaauug

SEQ ID NO: 1273174 - RNA, 19 nt, Homo sapiens
  misc_RNA (1)...(19): siRNA sense strand
acaaauggcuggaaauuga

SEQ ID NO: 1273175 - RNA, 19 nt, Homo sapiens
  misc_RNA (1)...(19): siRNA sense strand
gaaauugaauccaguugug

SEQ ID NO: 1273176 - RNA, 19 nt, Homo sapiens
  misc_RNA (1)...(19): siRNA sense strand
gcacguguaaugacaaaua

SEQ ID NO: 1273177 - RNA, 19 nt, Homo sapiens
  misc_RNA (1)...(19): siRNA sense strand
ggagggaucuuccauguac

SEQ ID NO: 1273178 - RNA, 19 nt, Homo sapiens
  misc_RNA (1)...(19): siRNA sense strand
aaagggauuugguuucgua

SEQ ID NO: 1273179 - RNA, 19 nt, Homo sapiens
  misc_RNA (1)...(19): siRNA sense strand
ccaguucacuuguauauac

SEQ ID NO: 1273180 - RNA, 19 nt, Homo sapiens
  misc_RNA (1)...(19): siRNA sense strand
cgucaacccuuauacaaau

SEQ ID NO: 1273181 - RNA, 19 nt, Homo sapiens
  misc_RNA (1)...(19): siRNA sense strand
gauuugguuucguaacuuu

SEQ ID NO: 1273182 - RNA, 19 nt, Homo sapiens
  misc_RNA (1)...(19): siRNA sense strand
ggaccucagacaaauguuu

SEQ ID NO: 1273183 - RNA, 19 nt, Homo sapiens
  misc_RNA (1)...(19): siRNA sense strand
caggagggaucuuccaugu

SEQ ID NO: 1273184 - RNA, 19 nt, Homo sapiens
  misc_RNA (1)...(19): siRNA sense strand
gauccggaccucagacaaa

SEQ ID NO: 1273185 - RNA, 19 nt, Homo sapiens
  misc_RNA (1)...(19): siRNA sense strand
ggacagggcgagggagaaa

SEQ ID NO: 1273186 - RNA, 19 nt, Homo sapiens
  misc_RNA (1)...(19): siRNA sense strand
cacguguaaugacaaauaa

SEQ ID NO: 1273187 - RNA, 19 nt, Homo sapiens
  misc_RNA (1)...(19): siRNA sense strand
ggauuugguuucguaacuu

SEQ ID NO: 1273188 - RNA, 19 nt, Homo sapiens
  misc_RNA (1)...(19): siRNA sense strand
ggaaauugaauccaguugu

SEQ ID NO: 1273189 - RNA, 19 nt, Homo sapiens
  misc_RNA (1)...(19): siRNA sense strand
cagcacguguaaugacaaa

SEQ ID NO: 1273190 - RNA, 19 nt, Homo sapiens
  misc_RNA (1)...(19): siRNA sense strand
aaaagaccgucaacccuua

SEQ ID NO: 1273191 - RNA, 19 nt, Homo sapiens
  misc_RNA (1)...(19): siRNA sense strand
gggauuugguuucguaacu

SEQ ID NO: 1273192 - RNA, 19 nt, Homo sapiens
  misc_RNA (1)...(19): siRNA sense strand
cuacagucccgaauucuau

SEQ ID NO: 1273193 - RNA, 19 nt, Homo sapiens
  misc_RNA (1)...(19): siRNA sense strand
uguauauacuucugcaaug

SEQ ID NO: 1273194 - RNA, 19 nt, Homo sapiens
  misc_RNA (1)...(19): siRNA sense strand
uuauacaaauggcuggaaa

SEQ ID NO: 1273195 - RNA, 19 nt, Homo sapiens
  misc_RNA (1)...(19): siRNA sense strand
ggcugcaugucuccaauau

SEQ ID NO: 1273196 - RNA, 19 nt, Homo sapiens
  misc_RNA (1)...(19): siRNA sense strand
ucacuuguauauacuucug

SEQ ID NO: 1273197 - RNA, 19 nt, Homo sapiens
  misc_RNA (1)...(19): siRNA sense strand
caaauggcuggaaauugaa

SEQ ID NO: 1273198 - RNA, 19 nt, Homo sapiens
  misc_RNA (1)...(19): siRNA sense strand
guauauacuucugcaaugc

SEQ ID NO: 1273199 - RNA, 19 nt, Homo sapiens
  misc_RNA (1)...(19): siRNA sense strand
aaaucgagguaaauaaugc

SEQ ID NO: 1273200 - RNA, 19 nt, Homo sapiens
  misc_RNA (1)...(19): siRNA sense strand
agucuacagucccgaauuc

SEQ ID NO: 1273201 - RNA, 19 nt, Homo sapiens
  misc_RNA (1)...(19): siRNA sense strand
auacaaauggcuggaaauu

SEQ ID NO: 1273202 - RNA, 19 nt, Homo sapiens
  misc_RNA (1)...(19): siRNA sense strand
cacagcacguguaaugaca

SEQ ID NO: 1273203 - RNA, 19 nt, Homo sapiens
  misc_RNA (1)...(19): siRNA sense strand
cugcaugucuccaauaucc

SEQ ID NO: 1273204 - RNA, 19 nt, Homo sapiens
  misc_RNA (1)...(19): siRNA sense strand
guucacuuguauauacuuc

SEQ ID NO: 1273205 - RNA, 19 nt, Homo sapiens
  misc_RNA (1)...(19): siRNA sense strand
acagggcgagggagaaauu

SEQ ID NO: 1273206 - RNA, 19 nt, Homo sapiens
  misc_RNA (1)...(19): siRNA sense strand
agacacaaccuucugaaaa

SEQ ID NO: 1273207 - RNA, 19 nt, Homo sapiens
  misc_RNA (1)...(19): siRNA sense strand
gcacacauuaaaccuguac

SEQ ID NO: 1273208 - RNA, 19 nt, Homo sapiens
  misc_RNA (1)...(19): siRNA sense strand
ugccacagcacguguaaug

SEQ ID NO: 1273209 - RNA, 19 nt, Homo sapiens
  misc_RNA (1)...(19): siRNA sense strand
gacacaaccuucugaaaac

SEQ ID NO: 1273210 - RNA, 19 nt, Homo sapiens
  misc_RNA (1)...(19): siRNA sense strand
gcaccgccacacagacaga

SEQ ID NO: 1273211 - RNA, 19 nt, Homo sapiens
  misc_RNA (1)...(19): siRNA sense strand
gaccgucaacccuuauaca

SEQ ID NO: 1273212 - RNA, 19 nt, Homo sapiens
  misc_RNA (1)...(19): siRNA sense strand
ggucgcaccguguacaaca

SEQ ID NO: 1273213 - RNA, 19 nt, Homo sapiens
  misc_RNA (1)...(19): siRNA sense strand
gucaacccuuauacaaaug

SEQ ID NO: 1273214 - RNA, 19 nt, Homo sapiens
  misc_RNA (1)...(19): siRNA sense strand
gcgaggcucaaagggauuu

SEQ ID NO: 1273215 - RNA, 19 nt, Homo sapiens
  misc_RNA (1)...(19): siRNA sense strand
ccgucaacccuuauacaaa

SEQ ID NO: 1273216 - RNA, 19 nt, Homo sapiens
  misc_RNA (1)...(19): siRNA sense strand
gggcgagggagaaauuaca

SEQ ID NO: 1273217 - RNA, 19 nt, Homo sapiens
  misc_RNA (1)...(19): siRNA sense strand
ccacagcacguguaaugac

SEQ ID NO: 1273218 - RNA, 19 nt, Homo sapiens
  misc_RNA (1)...(19): siRNA sense strand
uacaaauggcuggaaauug

SEQ ID NO: 1273219 - RNA, 19 nt, Homo sapiens
  misc_RNA (1)...(19): siRNA sense strand
gaacuucuuggaacuuuaa

SEQ ID NO: 1273220 - RNA, 19 nt, Homo sapiens
  misc_RNA (1)...(19): siRNA sense strand
ggaacuucuuggaacuuua

SEQ ID NO: 1273221 - RNA, 19 nt, Homo sapiens
  misc_RNA (1)...(19): siRNA sense strand
gggaacuucuuggaacuuu

SEQ ID NO: 1273222 - RNA, 19 nt, Homo sapiens
  misc_RNA (1)...(19): siRNA sense strand
ggagucuacaccuauauuu

SEQ ID NO: 1273223 - RNA, 19 nt, Homo sapiens
  misc_RNA (1)...(19): siRNA sense strand
gcagccacaccgaagauuu

SEQ ID NO: 1273224 - RNA, 19 nt, Homo sapiens
  misc_RNA (1)...(19): siRNA sense strand
gagaaucacgagcaacaug

SEQ ID NO: 1273225 - RNA, 19 nt, Homo sapiens
  misc_RNA (1)...(19): siRNA sense strand
ccuggagucuacaccuaua

SEQ ID NO: 1273226 - RNA, 19 nt, Homo sapiens
  misc_RNA (1)...(19): siRNA sense strand
gagucuacaccuauauuug

SEQ ID NO: 1273227 - RNA, 19 nt, Homo sapiens
  misc_RNA (1)...(19): siRNA sense strand
gggagaaucacgagcaaca

SEQ ID NO: 1273228 - RNA, 19 nt, Homo sapiens
  misc_RNA (1)...(19): siRNA sense strand
uggcaucccuggagucuac

SEQ ID NO: 1273229 - RNA, 19 nt, Homo sapiens
  misc_RNA (1)...(19): siRNA sense strand
caccgaagauuuucaaugg

SEQ ID NO: 1273230 - RNA, 19 nt, Homo sapiens
  misc_RNA (1)...(19): siRNA sense strand
ucccuggagucuacaccua

SEQ ID NO: 1273231 - RNA, 19 nt, Homo sapiens
  misc_RNA (1)...(19): siRNA sense strand
ggagucuacaccuauauuu

SEQ ID NO: 1273232 - RNA, 19 nt, Homo sapiens
  misc_RNA (1)...(19): siRNA sense strand
gcagccacaccgaagauuu

SEQ ID NO: 1273233 - RNA, 19 nt, Homo sapiens
  misc_RNA (1)...(19): siRNA sense strand
gagaaucacgagcaacaug

SEQ ID NO: 1273234 - RNA, 19 nt, Homo sapiens
  misc_RNA (1)...(19): siRNA sense strand
ccuggagucuacaccuaua

SEQ ID NO: 1273235 - RNA, 19 nt, Homo sapiens
  misc_RNA (1)...(19): siRNA sense strand
gagucuacaccuauauuug

SEQ ID NO: 1273236 - RNA, 19 nt, Homo sapiens
  misc_RNA (1)...(19): siRNA sense strand
gggagaaucacgagcaaca

SEQ ID NO: 1273237 - RNA, 19 nt, Homo sapiens
  misc_RNA (1)...(19): siRNA sense strand
uggcaucccuggagucuac

SEQ ID NO: 1273238 - RNA, 19 nt, Homo sapiens
  misc_RNA (1)...(19): siRNA sense strand
caccgaagauuuucaaugg

SEQ ID NO: 1273239 - RNA, 19 nt, Homo sapiens
  misc_RNA (1)...(19): siRNA sense strand
ucccuggagucuacaccua

SEQ ID NO: 1273240 - RNA, 19 nt, Homo sapiens
  misc_RNA (1)...(19): siRNA sense strand
gcagccacaccgaagauuu

SEQ ID NO: 1273241 - RNA, 19 nt, Homo sapiens
  misc_RNA (1)...(19): siRNA sense strand
gagaaucacgagcaacaug

SEQ ID NO: 1273242 - RNA, 19 nt, Homo sapiens
  misc_RNA (1)...(19): siRNA sense strand
gggagaaucacgagcaaca

SEQ ID NO: 1273243 - RNA, 19 nt, Homo sapiens
  misc_RNA (1)...(19): siRNA sense strand
caccgaagauuuucaaugg

SEQ ID NO: 1273244 - RNA, 19 nt, Homo sapiens
  misc_RNA (1)...(19): siRNA sense strand
gaacuucuuggaacuuuaa

SEQ ID NO: 1273245 - RNA, 19 nt, Homo sapiens
  misc_RNA (1)...(19): siRNA sense strand
ggaacuucuuggaacuuua

SEQ ID NO: 1273246 - RNA, 19 nt, Homo sapiens
  misc_RNA (1)...(19): siRNA sense strand
gggaacuucuuggaacuuu

SEQ ID NO: 1273247 - RNA, 19 nt, Homo sapiens
  misc_RNA (1)...(19): siRNA sense strand
ggagucuacaccuauauuu

SEQ ID NO: 1273248 - RNA, 19 nt, Homo sapiens
  misc_RNA (1)...(19): siRNA sense strand
gcagccacaccgaagauuu

SEQ ID NO: 1273249 - RNA, 19 nt, Homo sapiens
  misc_RNA (1)...(19): siRNA sense strand
gagaaucacgagcaacaug

SEQ ID NO: 1273250 - RNA, 19 nt, Homo sapiens
  misc_RNA (1)...(19): siRNA sense strand
ccuggagucuacaccuaua

SEQ ID NO: 1273251 - RNA, 19 nt, Homo sapiens
  misc_RNA (1)...(19): siRNA sense strand
gagucuacaccuauauuug

SEQ ID NO: 1273252 - RNA, 19 nt, Homo sapiens
  misc_RNA (1)...(19): siRNA sense strand
gggagaaucacgagcaaca

SEQ ID NO: 1273253 - RNA, 19 nt, Homo sapiens
  misc_RNA (1)...(19): siRNA sense strand
uggcaucccuggagucuac

SEQ ID NO: 1273254 - RNA, 19 nt, Homo sapiens
  misc_RNA (1)...(19): siRNA sense strand
caccgaagauuuucaaugg

SEQ ID NO: 1273255 - RNA, 19 nt, Homo sapiens
  misc_RNA (1)...(19): siRNA sense strand
ucccuggagucuacaccua

SEQ ID NO: 1273256 - RNA, 19 nt, Homo sapiens
  misc_RNA (1)...(19): siRNA sense strand
ggagucuacaccuauauuu

SEQ ID NO: 1273257 - RNA, 19 nt, Homo sapiens
  misc_RNA (1)...(19): siRNA sense strand
gcagccacaccgaagauuu

SEQ ID NO: 1273258 - RNA, 19 nt, Homo sapiens
  misc_RNA (1)...(19): siRNA sense strand
gagaaucacgagcaacaug

SEQ ID NO: 1273259 - RNA, 19 nt, Homo sapiens
  misc_RNA (1)...(19): siRNA sense strand
ccuggagucuacaccuaua

SEQ ID NO: 1273260 - RNA, 19 nt, Homo sapiens
  misc_RNA (1)...(19): siRNA sense strand
gagucuacaccuauauuug

SEQ ID NO: 1273261 - RNA, 19 nt, Homo sapiens
  misc_RNA (1)...(19): siRNA sense strand
gggagaaucacgagcaaca

SEQ ID NO: 1273262 - RNA, 19 nt, Homo sapiens
  misc_RNA (1)...(19): siRNA sense strand
uggcaucccuggagucuac

SEQ ID NO: 1273263 - RNA, 19 nt, Homo sapiens
  misc_RNA (1)...(19): siRNA sense strand
caccgaagauuuucaaugg

SEQ ID NO: 1273264 - RNA, 19 nt, Homo sapiens
  misc_RNA (1)...(19): siRNA sense strand
ucccuggagucuacaccua

SEQ ID NO: 1273265 - RNA, 19 nt, Homo sapiens
  misc_RNA (1)...(19): siRNA sense strand
gcagccacaccgaagauuu

SEQ ID NO: 1273266 - RNA, 19 nt, Homo sapiens
  misc_RNA (1)...(19): siRNA sense strand
gagaaucacgagcaacaug

SEQ ID NO: 1273267 - RNA, 19 nt, Homo sapiens
  misc_RNA (1)...(19): siRNA sense strand
gggagaaucacgagcaaca

SEQ ID NO: 1273268 - RNA, 19 nt, Homo sapiens
  misc_RNA (1)...(19): siRNA sense strand
caccgaagauuuucaaugg

SEQ ID NO: 1273269 - RNA, 19 nt, Homo sapiens
  misc_RNA (1)...(19): siRNA sense strand
ggacaaagccaauuuacga

SEQ ID NO: 1273270 - RNA, 19 nt, Homo sapiens
  misc_RNA (1)...(19): siRNA sense strand
gauugaagcuacuaagaau

SEQ ID NO: 1273271 - RNA, 19 nt, Homo sapiens
  misc_RNA (1)...(19): siRNA sense strand
uaacgagggugucaagaau

SEQ ID NO: 1273272 - RNA, 19 nt, Homo sapiens
  misc_RNA (1)...(19): siRNA sense strand
ccagagacauucagaaagu

SEQ ID NO: 1273273 - RNA, 19 nt, Homo sapiens
  misc_RNA (1)...(19): siRNA sense strand
gaaagugcuuagccuuguu

SEQ ID NO: 1273274 - RNA, 19 nt, Homo sapiens
  misc_RNA (1)...(19): siRNA sense strand
gaccaggccugcuauaucu

SEQ ID NO: 1273275 - RNA, 19 nt, Homo sapiens
  misc_RNA (1)...(19): siRNA sense strand
cagaccagcuccucuauca

SEQ ID NO: 1273276 - RNA, 19 nt, Homo sapiens
  misc_RNA (1)...(19): siRNA sense strand
gcagaccacugaggaaauc

SEQ ID NO: 1273277 - RNA, 19 nt, Homo sapiens
  misc_RNA (1)...(19): siRNA sense strand
caaggaaccacauagagaa

SEQ ID NO: 1273278 - RNA, 19 nt, Homo sapiens
  misc_RNA (1)...(19): siRNA sense strand
ggacgugucuuccauuucc

SEQ ID NO: 1273279 - RNA, 19 nt, Homo sapiens
  misc_RNA (1)...(19): siRNA sense strand
caucguggacaaccuaaua

SEQ ID NO: 1273280 - RNA, 19 nt, Homo sapiens
  misc_RNA (1)...(19): siRNA sense strand
gggccaagaugauccuguu

SEQ ID NO: 1273281 - RNA, 19 nt, Homo sapiens
  misc_RNA (1)...(19): siRNA sense strand
ccaaggaaccacauagaga

SEQ ID NO: 1273282 - RNA, 19 nt, Homo sapiens
  misc_RNA (1)...(19): siRNA sense strand
guaacgagggugucaagaa

SEQ ID NO: 1273283 - RNA, 19 nt, Homo sapiens
  misc_RNA (1)...(19): siRNA sense strand
ggaaugaugccaaggucuu

SEQ ID NO: 1273284 - RNA, 19 nt, Homo sapiens
  misc_RNA (1)...(19): siRNA sense strand
gagauugaagcuacuaaga

SEQ ID NO: 1273285 - RNA, 19 nt, Homo sapiens
  misc_RNA (1)...(19): siRNA sense strand
acgagggugucaagaauuu

SEQ ID NO: 1273286 - RNA, 19 nt, Homo sapiens
  misc_RNA (1)...(19): siRNA sense strand
gagcccgacugagcacuaa

SEQ ID NO: 1273287 - RNA, 19 nt, Homo sapiens
  misc_RNA (1)...(19): siRNA sense strand
acaaagaccaggccugcua

SEQ ID NO: 1273288 - RNA, 19 nt, Homo sapiens
  misc_RNA (1)...(19): siRNA sense strand
caagacgagugcguucuga

SEQ ID NO: 1273289 - RNA, 19 nt, Homo sapiens
  misc_RNA (1)...(19): siRNA sense strand
caagaccaaguuaauagaa

SEQ ID NO: 1273290 - RNA, 19 nt, Homo sapiens
  misc_RNA (1)...(19): siRNA sense strand
caccaagaccaaguuaaua

SEQ ID NO: 1273291 - RNA, 19 nt, Homo sapiens
  misc_RNA (1)...(19): siRNA sense strand
gaucuucaugaaugcaaua

SEQ ID NO: 1273292 - RNA, 19 nt, Homo sapiens
  misc_RNA (1)...(19): siRNA sense strand
ucaccaagaccaaguuaau

SEQ ID NO: 1273293 - RNA, 19 nt, Homo sapiens
  misc_RNA (1)...(19): siRNA sense strand
gugcuuagccuuguugaug

SEQ ID NO: 1273294 - RNA, 19 nt, Homo sapiens
  misc_RNA (1)...(19): siRNA sense strand
gcucaccaagaccaaguua

SEQ ID NO: 1273295 - RNA, 19 nt, Homo sapiens
  misc_RNA (1)...(19): siRNA sense strand
aaagagagugguuguggaa

SEQ ID NO: 1273296 - RNA, 19 nt, Homo sapiens
  misc_RNA (1)...(19): siRNA sense strand
agaaagugcuuagccuugu

SEQ ID NO: 1273297 - RNA, 19 nt, Homo sapiens
  misc_RNA (1)...(19): siRNA sense strand
agaugauccuguuugcuuu

SEQ ID NO: 1273298 - RNA, 19 nt, Homo sapiens
  misc_RNA (1)...(19): siRNA sense strand
gagcauccgcuguacaaag

SEQ ID NO: 1273299 - RNA, 19 nt, Homo sapiens
  misc_RNA (1)...(19): siRNA sense strand
cagcuccucuaucagcauu

SEQ ID NO: 1273300 - RNA, 19 nt, Homo sapiens
  misc_RNA (1)...(19): siRNA sense strand
ggaaccacauagagaacca

SEQ ID NO: 1273301 - RNA, 19 nt, Homo sapiens
  misc_RNA (1)...(19): siRNA sense strand
ccaagaugauccuguuugc

SEQ ID NO: 1273302 - RNA, 19 nt, Homo sapiens
  misc_RNA (1)...(19): siRNA sense strand
ggucaucguggacaaccua

SEQ ID NO: 1273303 - RNA, 19 nt, Homo sapiens
  misc_RNA (1)...(19): siRNA sense strand
cagagacauucagaaaguu

SEQ ID NO: 1273304 - RNA, 19 nt, Homo sapiens
  misc_RNA (1)...(19): siRNA sense strand
ccaagaccaaguuaauaga

SEQ ID NO: 1273305 - RNA, 19 nt, Homo sapiens
  misc_RNA (1)...(19): siRNA sense strand
ugucuuccauuuccuagug

SEQ ID NO: 1273306 - RNA, 19 nt, Homo sapiens
  misc_RNA (1)...(19): siRNA sense strand
aagaugauccuguuugcuu

SEQ ID NO: 1273307 - RNA, 19 nt, Homo sapiens
  misc_RNA (1)...(19): siRNA sense strand
aggaggaucuguguccaaa

SEQ ID NO: 1273308 - RNA, 19 nt, Homo sapiens
  misc_RNA (1)...(19): siRNA sense strand
gccaagaugauccuguuug

SEQ ID NO: 1273309 - RNA, 19 nt, Homo sapiens
  misc_RNA (1)...(19): siRNA sense strand
agcauccgcuguacaaaga

SEQ ID NO: 1273310 - RNA, 19 nt, Homo sapiens
  misc_RNA (1)...(19): siRNA sense strand
ccaggccugcuauaucuuu

SEQ ID NO: 1273311 - RNA, 19 nt, Homo sapiens
  misc_RNA (1)...(19): siRNA sense strand
agauugaagcuacuaagaa

SEQ ID NO: 1273312 - RNA, 19 nt, Homo sapiens
  misc_RNA (1)...(19): siRNA sense strand
gcuacaaggacccaagguu

SEQ ID NO: 1273313 - RNA, 19 nt, Homo sapiens
  misc_RNA (1)...(19): siRNA sense strand
caaagaccaggccugcuau

SEQ ID NO: 1273314 - RNA, 19 nt, Homo sapiens
  misc_RNA (1)...(19): siRNA sense strand
gacuggagcccaucaccuu

SEQ ID NO: 1273315 - RNA, 19 nt, Homo sapiens
  misc_RNA (1)...(19): siRNA sense strand
gaagcuacuaagaaucaug

SEQ ID NO: 1273316 - RNA, 19 nt, Homo sapiens
  misc_RNA (1)...(19): siRNA sense strand
uggauaggguguacgagau

SEQ ID NO: 1273317 - RNA, 19 nt, Homo sapiens
  misc_RNA (1)...(19): siRNA sense strand
gauccaaggaaccacauag

SEQ ID NO: 1273318 - RNA, 19 nt, Homo sapiens
  misc_RNA (1)...(19): siRNA sense strand
gacgagugcguucugaaug

SEQ ID NO: 1273319 - RNA, 19 nt, Homo sapiens
  misc_RNA (1)...(19): siRNA sense strand
ccacauagagaaccaagac

SEQ ID NO: 1273320 - RNA, 19 nt, Homo sapiens
  misc_RNA (1)...(19): siRNA sense strand
acgagugcguucugaaugu

SEQ ID NO: 1273321 - RNA, 19 nt, Homo sapiens
  misc_RNA (1)...(19): siRNA sense strand
uaucacccaucaucgaucu

SEQ ID NO: 1273322 - RNA, 19 nt, Homo sapiens
  misc_RNA (1)...(19): siRNA sense strand
ggagcccgacugagcacua

SEQ ID NO: 1273323 - RNA, 19 nt, Homo sapiens
  misc_RNA (1)...(19): siRNA sense strand
agagacauucagaaaguuu

SEQ ID NO: 1273324 - RNA, 19 nt, Homo sapiens
  misc_RNA (1)...(19): siRNA sense strand
gcuuagccuuguugaugau

SEQ ID NO: 1273325 - RNA, 19 nt, Homo sapiens
  misc_RNA (1)...(19): siRNA sense strand
ggagauugaagcuacuaag

SEQ ID NO: 1273326 - RNA, 19 nt, Homo sapiens
  misc_RNA (1)...(19): siRNA sense strand
ugcuuagccuuguugauga

SEQ ID NO: 1273327 - RNA, 19 nt, Homo sapiens
  misc_RNA (1)...(19): siRNA sense strand
ccauaucacccaucaucga

SEQ ID NO: 1273328 - RNA, 19 nt, Homo sapiens
  misc_RNA (1)...(19): siRNA sense strand
acaaggacccaagguucua

SEQ ID NO: 1273329 - RNA, 19 nt, Homo sapiens
  misc_RNA (1)...(19): siRNA sense strand
guuucaagccagagacauu

SEQ ID NO: 1273330 - RNA, 19 nt, Homo sapiens
  misc_RNA (1)...(19): siRNA sense strand
ggauaggguguacgagauc

SEQ ID NO: 1273331 - RNA, 19 nt, Homo sapiens
  misc_RNA (1)...(19): siRNA sense strand
uuccuaguguuucaacuga

SEQ ID NO: 1273332 - RNA, 19 nt, Homo sapiens
  misc_RNA (1)...(19): siRNA sense strand
aaagaccaggccugcuaua

SEQ ID NO: 1273333 - RNA, 19 nt, Homo sapiens
  misc_RNA (1)...(19): siRNA sense strand
gaggagauugaagcuacua

SEQ ID NO: 1273334 - RNA, 19 nt, Homo sapiens
  misc_RNA (1)...(19): siRNA sense strand
cgagugcguucugaaugug

SEQ ID NO: 1273335 - RNA, 19 nt, Homo sapiens
  misc_RNA (1)...(19): siRNA sense strand
agaccaggccugcuauauc

SEQ ID NO: 1273336 - RNA, 19 nt, Homo sapiens
  misc_RNA (1)...(19): siRNA sense strand
agccagagacauucagaaa

SEQ ID NO: 1273337 - RNA, 19 nt, Homo sapiens
  misc_RNA (1)...(19): siRNA sense strand
uugaagcuacuaagaauca

SEQ ID NO: 1273338 - RNA, 19 nt, Homo sapiens
  misc_RNA (1)...(19): siRNA sense strand
uggccuggguggacucaga

SEQ ID NO: 1273339 - RNA, 19 nt, Homo sapiens
  misc_RNA (1)...(19): siRNA sense strand
aagaccaaguuaauagaag

SEQ ID NO: 1273340 - RNA, 19 nt, Homo sapiens
  misc_RNA (1)...(19): siRNA sense strand
gcuacuaagaaucauguuc

SEQ ID NO: 1273341 - RNA, 19 nt, Homo sapiens
  misc_RNA (1)...(19): siRNA sense strand
cauaucacccaucaucgau

SEQ ID NO: 1273342 - RNA, 19 nt, Homo sapiens
  misc_RNA (1)...(19): siRNA sense strand
agacgagugcguucugaau

SEQ ID NO: 1273343 - RNA, 19 nt, Homo sapiens
  misc_RNA (1)...(19): siRNA sense strand
acucagaccagcuccucua

SEQ ID NO: 1273344 - RNA, 19 nt, Homo sapiens
  misc_RNA (1)...(19): siRNA sense strand
gaggaucuguguccaaaac

SEQ ID NO: 1273345 - RNA, 19 nt, Homo sapiens
  misc_RNA (1)...(19): siRNA sense strand
gaaacaggccgucauggaa

SEQ ID NO: 1273346 - RNA, 19 nt, Homo sapiens
  misc_RNA (1)...(19): siRNA sense strand
gaaaugaugagucagaaga

SEQ ID NO: 1273347 - RNA, 19 nt, Homo sapiens
  misc_RNA (1)...(19): siRNA sense strand
gaagcugcaugauguggaa

SEQ ID NO: 1273348 - RNA, 19 nt, Homo sapiens
  misc_RNA (1)...(19): siRNA sense strand
ggaacuggguacuauguag

SEQ ID NO: 1273349 - RNA, 19 nt, Homo sapiens
  misc_RNA (1)...(19): siRNA sense strand
ggagaagcacgccaugaaa

SEQ ID NO: 1273350 - RNA, 19 nt, Homo sapiens
  misc_RNA (1)...(19): siRNA sense strand
uaaccaagcagauggagaa

SEQ ID NO: 1273351 - RNA, 19 nt, Homo sapiens
  misc_RNA (1)...(19): siRNA sense strand
ucaagaggaagauagauuu

SEQ ID NO: 1273352 - RNA, 19 nt, Homo sapiens
  misc_RNA (1)...(19): siRNA sense strand
gaacuggguacuauguaga

SEQ ID NO: 1273353 - RNA, 19 nt, Homo sapiens
  misc_RNA (1)...(19): siRNA sense strand
uagaaaugcucaagaacca

SEQ ID NO: 1273354 - RNA, 19 nt, Homo sapiens
  misc_RNA (1)...(19): siRNA sense strand
aaacaggccgucauggaaa

SEQ ID NO: 1273355 - RNA, 19 nt, Homo sapiens
  misc_RNA (1)...(19): siRNA sense strand
cugggaagcugcaugaugu

SEQ ID NO: 1273356 - RNA, 19 nt, Homo sapiens
  misc_RNA (1)...(19): siRNA sense strand
aaccagcucuucaggagaa

SEQ ID NO: 1273357 - RNA, 19 nt, Homo sapiens
  misc_RNA (1)...(19): siRNA sense strand
cagcucaggcuacugcuaa

SEQ ID NO: 1273358 - RNA, 19 nt, Homo sapiens
  misc_RNA (1)...(19): siRNA sense strand
ccaagcagauggagaaaau

SEQ ID NO: 1273359 - RNA, 19 nt, Homo sapiens
  misc_RNA (1)...(19): siRNA sense strand
ugaaacaggccgucaugga

SEQ ID NO: 1273360 - RNA, 19 nt, Homo sapiens
  misc_RNA (1)...(19): siRNA sense strand
gcucaucgaugugggaacu

SEQ ID NO: 1273361 - RNA, 19 nt, Homo sapiens
  misc_RNA (1)...(19): siRNA sense strand
aaugaugagucagaagauu

SEQ ID NO: 1273362 - RNA, 19 nt, Homo sapiens
  misc_RNA (1)...(19): siRNA sense strand
uaacaucacggagcugaau

SEQ ID NO: 1273363 - RNA, 19 nt, Homo sapiens
  misc_RNA (1)...(19): siRNA sense strand
ugugggaacuggguacuau

SEQ ID NO: 1273364 - RNA, 19 nt, Homo sapiens
  misc_RNA (1)...(19): siRNA sense strand
gagaagcacgccaugaaac

SEQ ID NO: 1273365 - RNA, 19 nt, Homo sapiens
  misc_RNA (1)...(19): siRNA sense strand
cagcugaggaugccaagga

SEQ ID NO: 1273366 - RNA, 19 nt, Homo sapiens
  misc_RNA (1)...(19): siRNA sense strand
gggaacuggguacuaugua

SEQ ID NO: 1273367 - RNA, 19 nt, Homo sapiens
  misc_RNA (1)...(19): siRNA sense strand
gguacuauguagagaagac

SEQ ID NO: 1273368 - RNA, 19 nt, Homo sapiens
  misc_RNA (1)...(19): siRNA sense strand
uggaaaugaugagucagaa

SEQ ID NO: 1273369 - RNA, 19 nt, Homo sapiens
  misc_RNA (1)...(19): siRNA sense strand
agcuagaaaugcucaagaa

SEQ ID NO: 1273370 - RNA, 19 nt, Homo sapiens
  misc_RNA (1)...(19): siRNA sense strand
ggaaaugaugagucagaag

SEQ ID NO: 1273371 - RNA, 19 nt, Homo sapiens
  misc_RNA (1)...(19): siRNA sense strand
aggagaagcacgccaugaa

SEQ ID NO: 1273372 - RNA, 19 nt, Homo sapiens
  misc_RNA (1)...(19): siRNA sense strand
uggaacacgugcucaucga

SEQ ID NO: 1273373 - RNA, 19 nt, Homo sapiens
  misc_RNA (1)...(19): siRNA sense strand
cagcuagaaaugcucaaga

SEQ ID NO: 1273374 - RNA, 19 nt, Homo sapiens
  misc_RNA (1)...(19): siRNA sense strand
agaagcacgccaugaaaca

SEQ ID NO: 1273375 - RNA, 19 nt, Homo sapiens
  misc_RNA (1)...(19): siRNA sense strand
ggaacacgugcucaucgau

SEQ ID NO: 1273376 - RNA, 19 nt, Homo sapiens
  misc_RNA (1)...(19): siRNA sense strand
uagaaaugcucaagaacca

SEQ ID NO: 1273377 - RNA, 19 nt, Homo sapiens
  misc_RNA (1)...(19): siRNA sense strand
uaacaucacggagcugaau

SEQ ID NO: 1273378 - RNA, 19 nt, Homo sapiens
  misc_RNA (1)...(19): siRNA sense strand
agcuagaaaugcucaagaa

SEQ ID NO: 1273379 - RNA, 19 nt, Homo sapiens
  misc_RNA (1)...(19): siRNA sense strand
cagcuagaaaugcucaaga

SEQ ID NO: 1273380 - RNA, 19 nt, Homo sapiens
  misc_RNA (1)...(19): siRNA sense strand
gaaacaggccgucauggaa

SEQ ID NO: 1273381 - RNA, 19 nt, Homo sapiens
  misc_RNA (1)...(19): siRNA sense strand
gaaaugaugagucagaaga

SEQ ID NO: 1273382 - RNA, 19 nt, Homo sapiens
  misc_RNA (1)...(19): siRNA sense strand
gaagcugcaugauguggaa

SEQ ID NO: 1273383 - RNA, 19 nt, Homo sapiens
  misc_RNA (1)...(19): siRNA sense strand
ggaacuggguacuauguag

SEQ ID NO: 1273384 - RNA, 19 nt, Homo sapiens
  misc_RNA (1)...(19): siRNA sense strand
ggagaagcacgccaugaaa

SEQ ID NO: 1273385 - RNA, 19 nt, Homo sapiens
  misc_RNA (1)...(19): siRNA sense strand
uaaccaagcagauggagaa

SEQ ID NO: 1273386 - RNA, 19 nt, Homo sapiens
  misc_RNA (1)...(19): siRNA sense strand
ucaagaggaagauagauuu

SEQ ID NO: 1273387 - RNA, 19 nt, Homo sapiens
  misc_RNA (1)...(19): siRNA sense strand
gaacuggguacuauguaga

SEQ ID NO: 1273388 - RNA, 19 nt, Homo sapiens
  misc_RNA (1)...(19): siRNA sense strand
uagaaaugcucaagaacca

SEQ ID NO: 1273389 - RNA, 19 nt, Homo sapiens
  misc_RNA (1)...(19): siRNA sense strand
aaacaggccgucauggaaa

SEQ ID NO: 1273390 - RNA, 19 nt, Homo sapiens
  misc_RNA (1)...(19): siRNA sense strand
cugggaagcugcaugaugu

SEQ ID NO: 1273391 - RNA, 19 nt, Homo sapiens
  misc_RNA (1)...(19): siRNA sense strand
aaccagcucuucaggagaa

SEQ ID NO: 1273392 - RNA, 19 nt, Homo sapiens
  misc_RNA (1)...(19): siRNA sense strand
cagcucaggcuacugcuaa

SEQ ID NO: 1273393 - RNA, 19 nt, Homo sapiens
  misc_RNA (1)...(19): siRNA sense strand
ccaagcagauggagaaaau

SEQ ID NO: 1273394 - RNA, 19 nt, Homo sapiens
  misc_RNA (1)...(19): siRNA sense strand
ugaaacaggccgucaugga

SEQ ID NO: 1273395 - RNA, 19 nt, Homo sapiens
  misc_RNA (1)...(19): siRNA sense strand
gcucaucgaugugggaacu

SEQ ID NO: 1273396 - RNA, 19 nt, Homo sapiens
  misc_RNA (1)...(19): siRNA sense strand
aaugaugagucagaagauu

SEQ ID NO: 1273397 - RNA, 19 nt, Homo sapiens
  misc_RNA (1)...(19): siRNA sense strand
uaacaucacggagcugaau

SEQ ID NO: 1273398 - RNA, 19 nt, Homo sapiens
  misc_RNA (1)...(19): siRNA sense strand
ugugggaacuggguacuau

SEQ ID NO: 1273399 - RNA, 19 nt, Homo sapiens
  misc_RNA (1)...(19): siRNA sense strand
gagaagcacgccaugaaac

SEQ ID NO: 1273400 - RNA, 19 nt, Homo sapiens
  misc_RNA (1)...(19): siRNA sense strand
cagcugaggaugccaagga

SEQ ID NO: 1273401 - RNA, 19 nt, Homo sapiens
  misc_RNA (1)...(19): siRNA sense strand
gggaacuggguacuaugua

SEQ ID NO: 1273402 - RNA, 19 nt, Homo sapiens
  misc_RNA (1)...(19): siRNA sense strand
gguacuauguagagaagac

SEQ ID NO: 1273403 - RNA, 19 nt, Homo sapiens
  misc_RNA (1)...(19): siRNA sense strand
uggaaaugaugagucagaa

SEQ ID NO: 1273404 - RNA, 19 nt, Homo sapiens
  misc_RNA (1)...(19): siRNA sense strand
agcuagaaaugcucaagaa

SEQ ID NO: 1273405 - RNA, 19 nt, Homo sapiens
  misc_RNA (1)...(19): siRNA sense strand
ggaaaugaugagucagaag

SEQ ID NO: 1273406 - RNA, 19 nt, Homo sapiens
  misc_RNA (1)...(19): siRNA sense strand
aggagaagcacgccaugaa

SEQ ID NO: 1273407 - RNA, 19 nt, Homo sapiens
  misc_RNA (1)...(19): siRNA sense strand
uggaacacgugcucaucga

SEQ ID NO: 1273408 - RNA, 19 nt, Homo sapiens
  misc_RNA (1)...(19): siRNA sense strand
cagcuagaaaugcucaaga

SEQ ID NO: 1273409 - RNA, 19 nt, Homo sapiens
  misc_RNA (1)...(19): siRNA sense strand
agaagcacgccaugaaaca

SEQ ID NO: 1273410 - RNA, 19 nt, Homo sapiens
  misc_RNA (1)...(19): siRNA sense strand
ggaacacgugcucaucgau

SEQ ID NO: 1273411 - RNA, 19 nt, Homo sapiens
  misc_RNA (1)...(19): siRNA sense strand
gaaacaggccgucauggaa

SEQ ID NO: 1273412 - RNA, 19 nt, Homo sapiens
  misc_RNA (1)...(19): siRNA sense strand
gaaaugaugagucagaaga

SEQ ID NO: 1273413 - RNA, 19 nt, Homo sapiens
  misc_RNA (1)...(19): siRNA sense strand
gaagcugcaugauguggaa

SEQ ID NO: 1273414 - RNA, 19 nt, Homo sapiens
  misc_RNA (1)...(19): siRNA sense strand
ggaacuggguacuauguag

SEQ ID NO: 1273415 - RNA, 19 nt, Homo sapiens
  misc_RNA (1)...(19): siRNA sense strand
ggagaagcacgccaugaaa

SEQ ID NO: 1273416 - RNA, 19 nt, Homo sapiens
  misc_RNA (1)...(19): siRNA sense strand
uaaccaagcagauggagaa

SEQ ID NO: 1273417 - RNA, 19 nt, Homo sapiens
  misc_RNA (1)...(19): siRNA sense strand
ucaagaggaagauagauuu

SEQ ID NO: 1273418 - RNA, 19 nt, Homo sapiens
  misc_RNA (1)...(19): siRNA sense strand
gaacuggguacuauguaga

SEQ ID NO: 1273419 - RNA, 19 nt, Homo sapiens
  misc_RNA (1)...(19): siRNA sense strand
uagaaaugcucaagaacca

SEQ ID NO: 1273420 - RNA, 19 nt, Homo sapiens
  misc_RNA (1)...(19): siRNA sense strand
aaacaggccgucauggaaa

SEQ ID NO: 1273421 - RNA, 19 nt, Homo sapiens
  misc_RNA (1)...(19): siRNA sense strand
cugggaagcugcaugaugu

SEQ ID NO: 1273422 - RNA, 19 nt, Homo sapiens
  misc_RNA (1)...(19): siRNA sense strand
aaccagcucuucaggagaa

SEQ ID NO: 1273423 - RNA, 19 nt, Homo sapiens
  misc_RNA (1)...(19): siRNA sense strand
cagcucaggcuacugcuaa

SEQ ID NO: 1273424 - RNA, 19 nt, Homo sapiens
  misc_RNA (1)...(19): siRNA sense strand
ccaagcagauggagaaaau

SEQ ID NO: 1273425 - RNA, 19 nt, Homo sapiens
  misc_RNA (1)...(19): siRNA sense strand
ugaaacaggccgucaugga

SEQ ID NO: 1273426 - RNA, 19 nt, Homo sapiens
  misc_RNA (1)...(19): siRNA sense strand
gcucaucgaugugggaacu

SEQ ID NO: 1273427 - RNA, 19 nt, Homo sapiens
  misc_RNA (1)...(19): siRNA sense strand
aaugaugagucagaagauu

SEQ ID NO: 1273428 - RNA, 19 nt, Homo sapiens
  misc_RNA (1)...(19): siRNA sense strand
uaacaucacggagcugaau

SEQ ID NO: 1273429 - RNA, 19 nt, Homo sapiens
  misc_RNA (1)...(19): siRNA sense strand
ugugggaacuggguacuau

SEQ ID NO: 1273430 - RNA, 19 nt, Homo sapiens
  misc_RNA (1)...(19): siRNA sense strand
gagaagcacgccaugaaac

SEQ ID NO: 1273431 - RNA, 19 nt, Homo sapiens
  misc_RNA (1)...(19): siRNA sense strand
cagcugaggaugccaagga

SEQ ID NO: 1273432 - RNA, 19 nt, Homo sapiens
  misc_RNA (1)...(19): siRNA sense strand
gggaacuggguacuaugua

SEQ ID NO: 1273433 - RNA, 19 nt, Homo sapiens
  misc_RNA (1)...(19): siRNA sense strand
gguacuauguagagaagac

SEQ ID NO: 1273434 - RNA, 19 nt, Homo sapiens
  misc_RNA (1)...(19): siRNA sense strand
uggaaaugaugagucagaa

SEQ ID NO: 1273435 - RNA, 19 nt, Homo sapiens
  misc_RNA (1)...(19): siRNA sense strand
agcuagaaaugcucaagaa

SEQ ID NO: 1273436 - RNA, 19 nt, Homo sapiens
  misc_RNA (1)...(19): siRNA sense strand
ggaaaugaugagucagaag

SEQ ID NO: 1273437 - RNA, 19 nt, Homo sapiens
  misc_RNA (1)...(19): siRNA sense strand
aggagaagcacgccaugaa

SEQ ID NO: 1273438 - RNA, 19 nt, Homo sapiens
  misc_RNA (1)...(19): siRNA sense strand
uggaacacgugcucaucga

SEQ ID NO: 1273439 - RNA, 19 nt, Homo sapiens
  misc_RNA (1)...(19): siRNA sense strand
cagcuagaaaugcucaaga

SEQ ID NO: 1273440 - RNA, 19 nt, Homo sapiens
  misc_RNA (1)...(19): siRNA sense strand
agaagcacgccaugaaaca

SEQ ID NO: 1273441 - RNA, 19 nt, Homo sapiens
  misc_RNA (1)...(19): siRNA sense strand
ggaacacgugcucaucgau

SEQ ID NO: 1273442 - RNA, 19 nt, Homo sapiens
  misc_RNA (1)...(19): siRNA sense strand
uagaaaugcucaagaacca

SEQ ID NO: 1273443 - RNA, 19 nt, Homo sapiens
  misc_RNA (1)...(19): siRNA sense strand
uaacaucacggagcugaau

SEQ ID NO: 1273444 - RNA, 19 nt, Homo sapiens
  misc_RNA (1)...(19): siRNA sense strand
agcuagaaaugcucaagaa

SEQ ID NO: 1273445 - RNA, 19 nt, Homo sapiens
  misc_RNA (1)...(19): siRNA sense strand
cagcuagaaaugcucaaga

SEQ ID NO: 1273446 - RNA, 19 nt, Homo sapiens
  misc_RNA (1)...(19): siRNA sense strand
gaaacaggccgucauggaa

SEQ ID NO: 1273447 - RNA, 19 nt, Homo sapiens
  misc_RNA (1)...(19): siRNA sense strand
gaaaugaugagucagaaga

SEQ ID NO: 1273448 - RNA, 19 nt, Homo sapiens
  misc_RNA (1)...(19): siRNA sense strand
gaagcugcaugauguggaa

SEQ ID NO: 1273449 - RNA, 19 nt, Homo sapiens
  misc_RNA (1)...(19): siRNA sense strand
ggaacuggguacuauguag

SEQ ID NO: 1273450 - RNA, 19 nt, Homo sapiens
  misc_RNA (1)...(19): siRNA sense strand
ggagaagcacgccaugaaa

SEQ ID NO: 1273451 - RNA, 19 nt, Homo sapiens
  misc_RNA (1)...(19): siRNA sense strand
uaaccaagcagauggagaa

SEQ ID NO: 1273452 - RNA, 19 nt, Homo sapiens
  misc_RNA (1)...(19): siRNA sense strand
ucaagaggaagauagauuu

SEQ ID NO: 1273453 - RNA, 19 nt, Homo sapiens
  misc_RNA (1)...(19): siRNA sense strand
gaacuggguacuauguaga

SEQ ID NO: 1273454 - RNA, 19 nt, Homo sapiens
  misc_RNA (1)...(19): siRNA sense strand
uagaaaugcucaagaacca

SEQ ID NO: 1273455 - RNA, 19 nt, Homo sapiens
  misc_RNA (1)...(19): siRNA sense strand
aaacaggccgucauggaaa

SEQ ID NO: 1273456 - RNA, 19 nt, Homo sapiens
  misc_RNA (1)...(19): siRNA sense strand
cugggaagcugcaugaugu

SEQ ID NO: 1273457 - RNA, 19 nt, Homo sapiens
  misc_RNA (1)...(19): siRNA sense strand
aaccagcucuucaggagaa

SEQ ID NO: 1273458 - RNA, 19 nt, Homo sapiens
  misc_RNA (1)...(19): siRNA sense strand
cagcucaggcuacugcuaa

SEQ ID NO: 1273459 - RNA, 19 nt, Homo sapiens
  misc_RNA (1)...(19): siRNA sense strand
ccaagcagauggagaaaau

SEQ ID NO: 1273460 - RNA, 19 nt, Homo sapiens
  misc_RNA (1)...(19): siRNA sense strand
ugaaacaggccgucaugga

SEQ ID NO: 1273461 - RNA, 19 nt, Homo sapiens
  misc_RNA (1)...(19): siRNA sense strand
gcucaucgaugugggaacu

SEQ ID NO: 1273462 - RNA, 19 nt, Homo sapiens
  misc_RNA (1)...(19): siRNA sense strand
aaugaugagucagaagauu

SEQ ID NO: 1273463 - RNA, 19 nt, Homo sapiens
  misc_RNA (1)...(19): siRNA sense strand
uaacaucacggagcugaau

SEQ ID NO: 1273464 - RNA, 19 nt, Homo sapiens
  misc_RNA (1)...(19): siRNA sense strand
ugugggaacuggguacuau

SEQ ID NO: 1273465 - RNA, 19 nt, Homo sapiens
  misc_RNA (1)...(19): siRNA sense strand
gagaagcacgccaugaaac

SEQ ID NO: 1273466 - RNA, 19 nt, Homo sapiens
  misc_RNA (1)...(19): siRNA sense strand
cagcugaggaugccaagga

SEQ ID NO: 1273467 - RNA, 19 nt, Homo sapiens
  misc_RNA (1)...(19): siRNA sense strand
gggaacuggguacuaugua

SEQ ID NO: 1273468 - RNA, 19 nt, Homo sapiens
  misc_RNA (1)...(19): siRNA sense strand
gguacuauguagagaagac

SEQ ID NO: 1273469 - RNA, 19 nt, Homo sapiens
  misc_RNA (1)...(19): siRNA sense strand
uggaaaugaugagucagaa

SEQ ID NO: 1273470 - RNA, 19 nt, Homo sapiens
  misc_RNA (1)...(19): siRNA sense strand
agcuagaaaugcucaagaa

SEQ ID NO: 1273471 - RNA, 19 nt, Homo sapiens
  misc_RNA (1)...(19): siRNA sense strand
ggaaaugaugagucagaag

SEQ ID NO: 1273472 - RNA, 19 nt, Homo sapiens
  misc_RNA (1)...(19): siRNA sense strand
aggagaagcacgccaugaa

SEQ ID NO: 1273473 - RNA, 19 nt, Homo sapiens
  misc_RNA (1)...(19): siRNA sense strand
uggaacacgugcucaucga

SEQ ID NO: 1273474 - RNA, 19 nt, Homo sapiens
  misc_RNA (1)...(19): siRNA sense strand
cagcuagaaaugcucaaga

SEQ ID NO: 1273475 - RNA, 19 nt, Homo sapiens
  misc_RNA (1)...(19): siRNA sense strand
agaagcacgccaugaaaca

SEQ ID NO: 1273476 - RNA, 19 nt, Homo sapiens
  misc_RNA (1)...(19): siRNA sense strand
ggaacacgugcucaucgau

SEQ ID NO: 1273477 - RNA, 19 nt, Homo sapiens
  misc_RNA (1)...(19): siRNA sense strand
gauaagcaaguucagguuu

SEQ ID NO: 1273478 - RNA, 19 nt, Homo sapiens
  misc_RNA (1)...(19): siRNA sense strand
gcagagacagaguucauga

SEQ ID NO: 1273479 - RNA, 19 nt, Homo sapiens
  misc_RNA (1)...(19): siRNA sense strand
gagacagaguucaugaugu

SEQ ID NO: 1273480 - RNA, 19 nt, Homo sapiens
  misc_RNA (1)...(19): siRNA sense strand
cagaguucaugaugucaaa

SEQ ID NO: 1273481 - RNA, 19 nt, Homo sapiens
  misc_RNA (1)...(19): siRNA sense strand
gagaguuacuuugaaacga

SEQ ID NO: 1273482 - RNA, 19 nt, Homo sapiens
  misc_RNA (1)...(19): siRNA sense strand
agaguuacuuugaaacgaa

SEQ ID NO: 1273483 - RNA, 19 nt, Homo sapiens
  misc_RNA (1)...(19): siRNA sense strand
cuggagaguuacuuugaaa

SEQ ID NO: 1273484 - RNA, 19 nt, Homo sapiens
  misc_RNA (1)...(19): siRNA sense strand
caagccgggugucaucuuc

SEQ ID NO: 1273485 - RNA, 19 nt, Homo sapiens
  misc_RNA (1)...(19): siRNA sense strand
auaagcaaguucagguuug

SEQ ID NO: 1273486 - RNA, 19 nt, Homo sapiens
  misc_RNA (1)...(19): siRNA sense strand
ucaagaccaggaagaauug

SEQ ID NO: 1273487 - RNA, 19 nt, Homo sapiens
  misc_RNA (1)...(19): siRNA sense strand
gaugucaaagcuuccauug

SEQ ID NO: 1273488 - RNA, 19 nt, Homo sapiens
  misc_RNA (1)...(19): siRNA sense strand
gaucaagaccaggaagaau

SEQ ID NO: 1273489 - RNA, 19 nt, Homo sapiens
  misc_RNA (1)...(19): siRNA sense strand
ggaucaagaccaggaagaa

SEQ ID NO: 1273490 - RNA, 19 nt, Homo sapiens
  misc_RNA (1)...(19): siRNA sense strand
ccuggagaguuacuuugaa

SEQ ID NO: 1273491 - RNA, 19 nt, Homo sapiens
  misc_RNA (1)...(19): siRNA sense strand
cacaaaagaugcagagaca

SEQ ID NO: 1273492 - RNA, 19 nt, Homo sapiens
  misc_RNA (1)...(19): siRNA sense strand
guucagguuugcgugagaa

SEQ ID NO: 1273493 - RNA, 19 nt, Homo sapiens
  misc_RNA (1)...(19): siRNA sense strand
agagacagaguucaugaug

SEQ ID NO: 1273494 - RNA, 19 nt, Homo sapiens
  misc_RNA (1)...(19): siRNA sense strand
caaaagaugcagagacaga

SEQ ID NO: 1273495 - RNA, 19 nt, Homo sapiens
  misc_RNA (1)...(19): siRNA sense strand
ccagugauaagcaaguuca

SEQ ID NO: 1273496 - RNA, 19 nt, Homo sapiens
  misc_RNA (1)...(19): siRNA sense strand
gcuuguuacugcccuugga

SEQ ID NO: 1273497 - RNA, 19 nt, Homo sapiens
  misc_RNA (1)...(19): siRNA sense strand
ggagaguuacuuugaaacg

SEQ ID NO: 1273498 - RNA, 19 nt, Homo sapiens
  misc_RNA (1)...(19): siRNA sense strand
gauaagcaaguucagguuu

SEQ ID NO: 1273499 - RNA, 19 nt, Homo sapiens
  misc_RNA (1)...(19): siRNA sense strand
gcagagacagaguucauga

SEQ ID NO: 1273500 - RNA, 19 nt, Homo sapiens
  misc_RNA (1)...(19): siRNA sense strand
gagacagaguucaugaugu

SEQ ID NO: 1273501 - RNA, 19 nt, Homo sapiens
  misc_RNA (1)...(19): siRNA sense strand
cagaguucaugaugucaaa

SEQ ID NO: 1273502 - RNA, 19 nt, Homo sapiens
  misc_RNA (1)...(19): siRNA sense strand
gagaguuacuuugaaacga

SEQ ID NO: 1273503 - RNA, 19 nt, Homo sapiens
  misc_RNA (1)...(19): siRNA sense strand
agaguuacuuugaaacgaa

SEQ ID NO: 1273504 - RNA, 19 nt, Homo sapiens
  misc_RNA (1)...(19): siRNA sense strand
cuggagaguuacuuugaaa

SEQ ID NO: 1273505 - RNA, 19 nt, Homo sapiens
  misc_RNA (1)...(19): siRNA sense strand
caagccgggugucaucuuc

SEQ ID NO: 1273506 - RNA, 19 nt, Homo sapiens
  misc_RNA (1)...(19): siRNA sense strand
auaagcaaguucagguuug

SEQ ID NO: 1273507 - RNA, 19 nt, Homo sapiens
  misc_RNA (1)...(19): siRNA sense strand
ucaagaccaggaagaauug

SEQ ID NO: 1273508 - RNA, 19 nt, Homo sapiens
  misc_RNA (1)...(19): siRNA sense strand
gaugucaaagcuuccauug

SEQ ID NO: 1273509 - RNA, 19 nt, Homo sapiens
  misc_RNA (1)...(19): siRNA sense strand
gaucaagaccaggaagaau

SEQ ID NO: 1273510 - RNA, 19 nt, Homo sapiens
  misc_RNA (1)...(19): siRNA sense strand
ggaucaagaccaggaagaa

SEQ ID NO: 1273511 - RNA, 19 nt, Homo sapiens
  misc_RNA (1)...(19): siRNA sense strand
ccuggagaguuacuuugaa

SEQ ID NO: 1273512 - RNA, 19 nt, Homo sapiens
  misc_RNA (1)...(19): siRNA sense strand
cacaaaagaugcagagaca

SEQ ID NO: 1273513 - RNA, 19 nt, Homo sapiens
  misc_RNA (1)...(19): siRNA sense strand
guucagguuugcgugagaa

SEQ ID NO: 1273514 - RNA, 19 nt, Homo sapiens
  misc_RNA (1)...(19): siRNA sense strand
agagacagaguucaugaug

SEQ ID NO: 1273515 - RNA, 19 nt, Homo sapiens
  misc_RNA (1)...(19): siRNA sense strand
caaaagaugcagagacaga

SEQ ID NO: 1273516 - RNA, 19 nt, Homo sapiens
  misc_RNA (1)...(19): siRNA sense strand
ccagugauaagcaaguuca

SEQ ID NO: 1273517 - RNA, 19 nt, Homo sapiens
  misc_RNA (1)...(19): siRNA sense strand
gcuuguuacugcccuugga

SEQ ID NO: 1273518 - RNA, 19 nt, Homo sapiens
  misc_RNA (1)...(19): siRNA sense strand
ggagaguuacuuugaaacg

SEQ ID NO: 1273519 - RNA, 19 nt, Homo sapiens
  misc_RNA (1)...(19): siRNA sense strand
gauaagcaaguucagguuu

SEQ ID NO: 1273520 - RNA, 19 nt, Homo sapiens
  misc_RNA (1)...(19): siRNA sense strand
gcagagacagaguucauga

SEQ ID NO: 1273521 - RNA, 19 nt, Homo sapiens
  misc_RNA (1)...(19): siRNA sense strand
gagacagaguucaugaugu

SEQ ID NO: 1273522 - RNA, 19 nt, Homo sapiens
  misc_RNA (1)...(19): siRNA sense strand
cagaguucaugaugucaaa

SEQ ID NO: 1273523 - RNA, 19 nt, Homo sapiens
  misc_RNA (1)...(19): siRNA sense strand
gagaguuacuuugaaacga

SEQ ID NO: 1273524 - RNA, 19 nt, Homo sapiens
  misc_RNA (1)...(19): siRNA sense strand
agaguuacuuugaaacgaa

SEQ ID NO: 1273525 - RNA, 19 nt, Homo sapiens
  misc_RNA (1)...(19): siRNA sense strand
cuggagaguuacuuugaaa

SEQ ID NO: 1273526 - RNA, 19 nt, Homo sapiens
  misc_RNA (1)...(19): siRNA sense strand
caagccgggugucaucuuc

SEQ ID NO: 1273527 - RNA, 19 nt, Homo sapiens
  misc_RNA (1)...(19): siRNA sense strand
auaagcaaguucagguuug

SEQ ID NO: 1273528 - RNA, 19 nt, Homo sapiens
  misc_RNA (1)...(19): siRNA sense strand
ucaagaccaggaagaauug

SEQ ID NO: 1273529 - RNA, 19 nt, Homo sapiens
  misc_RNA (1)...(19): siRNA sense strand
gaugucaaagcuuccauug

SEQ ID NO: 1273530 - RNA, 19 nt, Homo sapiens
  misc_RNA (1)...(19): siRNA sense strand
gaucaagaccaggaagaau

SEQ ID NO: 1273531 - RNA, 19 nt, Homo sapiens
  misc_RNA (1)...(19): siRNA sense strand
ggaucaagaccaggaagaa

SEQ ID NO: 1273532 - RNA, 19 nt, Homo sapiens
  misc_RNA (1)...(19): siRNA sense strand
ccuggagaguuacuuugaa

SEQ ID NO: 1273533 - RNA, 19 nt, Homo sapiens
  misc_RNA (1)...(19): siRNA sense strand
cacaaaagaugcagagaca

SEQ ID NO: 1273534 - RNA, 19 nt, Homo sapiens
  misc_RNA (1)...(19): siRNA sense strand
guucagguuugcgugagaa

SEQ ID NO: 1273535 - RNA, 19 nt, Homo sapiens
  misc_RNA (1)...(19): siRNA sense strand
agagacagaguucaugaug

SEQ ID NO: 1273536 - RNA, 19 nt, Homo sapiens
  misc_RNA (1)...(19): siRNA sense strand
caaaagaugcagagacaga

SEQ ID NO: 1273537 - RNA, 19 nt, Homo sapiens
  misc_RNA (1)...(19): siRNA sense strand
ccagugauaagcaaguuca

SEQ ID NO: 1273538 - RNA, 19 nt, Homo sapiens
  misc_RNA (1)...(19): siRNA sense strand
gcuuguuacugcccuugga

SEQ ID NO: 1273539 - RNA, 19 nt, Homo sapiens
  misc_RNA (1)...(19): siRNA sense strand
ggagaguuacuuugaaacg

SEQ ID NO: 1273540 - RNA, 19 nt, Homo sapiens
  misc_RNA (1)...(19): siRNA sense strand
gauaagcaaguucagguuu

SEQ ID NO: 1273541 - RNA, 19 nt, Homo sapiens
  misc_RNA (1)...(19): siRNA sense strand
gcagagacagaguucauga

SEQ ID NO: 1273542 - RNA, 19 nt, Homo sapiens
  misc_RNA (1)...(19): siRNA sense strand
gagacagaguucaugaugu

SEQ ID NO: 1273543 - RNA, 19 nt, Homo sapiens
  misc_RNA (1)...(19): siRNA sense strand
cagaguucaugaugucaaa

SEQ ID NO: 1273544 - RNA, 19 nt, Homo sapiens
  misc_RNA (1)...(19): siRNA sense strand
gagaguuacuuugaaacga

SEQ ID NO: 1273545 - RNA, 19 nt, Homo sapiens
  misc_RNA (1)...(19): siRNA sense strand
agaguuacuuugaaacgaa

SEQ ID NO: 1273546 - RNA, 19 nt, Homo sapiens
  misc_RNA (1)...(19): siRNA sense strand
cuggagaguuacuuugaaa

SEQ ID NO: 1273547 - RNA, 19 nt, Homo sapiens
  misc_RNA (1)...(19): siRNA sense strand
caagccgggugucaucuuc

SEQ ID NO: 1273548 - RNA, 19 nt, Homo sapiens
  misc_RNA (1)...(19): siRNA sense strand
auaagcaaguucagguuug

SEQ ID NO: 1273549 - RNA, 19 nt, Homo sapiens
  misc_RNA (1)...(19): siRNA sense strand
ucaagaccaggaagaauug

SEQ ID NO: 1273550 - RNA, 19 nt, Homo sapiens
  misc_RNA (1)...(19): siRNA sense strand
gaugucaaagcuuccauug

SEQ ID NO: 1273551 - RNA, 19 nt, Homo sapiens
  misc_RNA (1)...(19): siRNA sense strand
gaucaagaccaggaagaau

SEQ ID NO: 1273552 - RNA, 19 nt, Homo sapiens
  misc_RNA (1)...(19): siRNA sense strand
ggaucaagaccaggaagaa

SEQ ID NO: 1273553 - RNA, 19 nt, Homo sapiens
  misc_RNA (1)...(19): siRNA sense strand
ccuggagaguuacuuugaa

SEQ ID NO: 1273554 - RNA, 19 nt, Homo sapiens
  misc_RNA (1)...(19): siRNA sense strand
cacaaaagaugcagagaca

SEQ ID NO: 1273555 - RNA, 19 nt, Homo sapiens
  misc_RNA (1)...(19): siRNA sense strand
guucagguuugcgugagaa

SEQ ID NO: 1273556 - RNA, 19 nt, Homo sapiens
  misc_RNA (1)...(19): siRNA sense strand
agagacagaguucaugaug

SEQ ID NO: 1273557 - RNA, 19 nt, Homo sapiens
  misc_RNA (1)...(19): siRNA sense strand
caaaagaugcagagacaga

SEQ ID NO: 1273558 - RNA, 19 nt, Homo sapiens
  misc_RNA (1)...(19): siRNA sense strand
ccagugauaagcaaguuca

SEQ ID NO: 1273559 - RNA, 19 nt, Homo sapiens
  misc_RNA (1)...(19): siRNA sense strand
gcuuguuacugcccuugga

SEQ ID NO: 1273560 - RNA, 19 nt, Homo sapiens
  misc_RNA (1)...(19): siRNA sense strand
ggagaguuacuuugaaacg

SEQ ID NO: 1273561 - RNA, 19 nt, Homo sapiens
  misc_RNA (1)...(19): siRNA sense strand
ggaacaagaugccaagcuu

SEQ ID NO: 1273562 - RNA, 19 nt, Homo sapiens
  misc_RNA (1)...(19): siRNA sense strand
gaguagaguuugaagagaa

SEQ ID NO: 1273563 - RNA, 19 nt, Homo sapiens
  misc_RNA (1)...(19): siRNA sense strand
gcaaauacaaccucuaugg

SEQ ID NO: 1273564 - RNA, 19 nt, Homo sapiens
  misc_RNA (1)...(19): siRNA sense strand
uagaagguauagcagauuu

SEQ ID NO: 1273565 - RNA, 19 nt, Homo sapiens
  misc_RNA (1)...(19): siRNA sense strand
cuacuucccugccuuugaa

SEQ ID NO: 1273566 - RNA, 19 nt, Homo sapiens
  misc_RNA (1)...(19): siRNA sense strand
caaggaagccucccaugga

SEQ ID NO: 1273567 - RNA, 19 nt, Homo sapiens
  misc_RNA (1)...(19): siRNA sense strand
ggaguagaguuugaagaga

SEQ ID NO: 1273568 - RNA, 19 nt, Homo sapiens
  misc_RNA (1)...(19): siRNA sense strand
caaggaagauuuucagguu

SEQ ID NO: 1273569 - RNA, 19 nt, Homo sapiens
  misc_RNA (1)...(19): siRNA sense strand
uuagaagaaucaaggaaga

SEQ ID NO: 1273570 - RNA, 19 nt, Homo sapiens
  misc_RNA (1)...(19): siRNA sense strand
ugguggaacuucucuacua

SEQ ID NO: 1273571 - RNA, 19 nt, Homo sapiens
  misc_RNA (1)...(19): siRNA sense strand
cagcaaauacaaccucuau

SEQ ID NO: 1273572 - RNA, 19 nt, Homo sapiens
  misc_RNA (1)...(19): siRNA sense strand
cagcuggaguagaguuuga

SEQ ID NO: 1273573 - RNA, 19 nt, Homo sapiens
  misc_RNA (1)...(19): siRNA sense strand
ggugaaaugauccuucuuc

SEQ ID NO: 1273574 - RNA, 19 nt, Homo sapiens
  misc_RNA (1)...(19): siRNA sense strand
ggaagauuuucagguuuua

SEQ ID NO: 1273575 - RNA, 19 nt, Homo sapiens
  misc_RNA (1)...(19): siRNA sense strand
ugauggauauuugauguuc

SEQ ID NO: 1273576 - RNA, 19 nt, Homo sapiens
  misc_RNA (1)...(19): siRNA sense strand
gguggaacuucucuacuac

SEQ ID NO: 1273577 - RNA, 19 nt, Homo sapiens
  misc_RNA (1)...(19): siRNA sense strand
uuggacaaguuaagaaaug

SEQ ID NO: 1273578 - RNA, 19 nt, Homo sapiens
  misc_RNA (1)...(19): siRNA sense strand
uauagcagauuugggugaa

SEQ ID NO: 1273579 - RNA, 19 nt, Homo sapiens
  misc_RNA (1)...(19): siRNA sense strand
gugaaaugauccuucuucu

SEQ ID NO: 1273580 - RNA, 19 nt, Homo sapiens
  misc_RNA (1)...(19): siRNA sense strand
gaagguauagcagauuugg

SEQ ID NO: 1273581 - RNA, 19 nt, Homo sapiens
  misc_RNA (1)...(19): siRNA sense strand
gauuuggacaaguuaagaa

SEQ ID NO: 1273582 - RNA, 19 nt, Homo sapiens
  misc_RNA (1)...(19): siRNA sense strand
aguagaguuugaagagaaa

SEQ ID NO: 1273583 - RNA, 19 nt, Homo sapiens
  misc_RNA (1)...(19): siRNA sense strand
caaguuaagaaaugaugga

SEQ ID NO: 1273584 - RNA, 19 nt, Homo sapiens
  misc_RNA (1)...(19): siRNA sense strand
aaggaagccucccauggau

SEQ ID NO: 1273585 - RNA, 19 nt, Homo sapiens
  misc_RNA (1)...(19): siRNA sense strand
uggacaaguuaagaaauga

SEQ ID NO: 1273586 - RNA, 19 nt, Homo sapiens
  misc_RNA (1)...(19): siRNA sense strand
ggacaaguuaagaaaugau

SEQ ID NO: 1273587 - RNA, 19 nt, Homo sapiens
  misc_RNA (1)...(19): siRNA sense strand
gacaaguuaagaaaugaug

SEQ ID NO: 1273588 - RNA, 19 nt, Homo sapiens
  misc_RNA (1)...(19): siRNA sense strand
gcuacuucccugccuuuga

SEQ ID NO: 1273589 - RNA, 19 nt, Homo sapiens
  misc_RNA (1)...(19): siRNA sense strand
ggcugcagcuggaguagag

SEQ ID NO: 1273590 - RNA, 19 nt, Homo sapiens
  misc_RNA (1)...(19): siRNA sense strand
caaccucuaugggaaagac

SEQ ID NO: 1273591 - RNA, 19 nt, Homo sapiens
  misc_RNA (1)...(19): siRNA sense strand
gcccugauugauauguaua

SEQ ID NO: 1273592 - RNA, 19 nt, Homo sapiens
  misc_RNA (1)...(19): siRNA sense strand
ugaaaugauccuucuucug

SEQ ID NO: 1273593 - RNA, 19 nt, Homo sapiens
  misc_RNA (1)...(19): siRNA sense strand
gaagugccaacaccuaaga

SEQ ID NO: 1273594 - RNA, 19 nt, Homo sapiens
  misc_RNA (1)...(19): siRNA sense strand
gcgaagugccaacaccuaa

SEQ ID NO: 1273595 - RNA, 19 nt, Homo sapiens
  misc_RNA (1)...(19): siRNA sense strand
gaaggagcccagcgaagug

SEQ ID NO: 1273596 - RNA, 19 nt, Homo sapiens
  misc_RNA (1)...(19): siRNA sense strand
gaaaaggacggcacugaga

SEQ ID NO: 1273597 - RNA, 19 nt, Homo sapiens
  misc_RNA (1)...(19): siRNA sense strand
ccacaacuccaggaaggaa

SEQ ID NO: 1273598 - RNA, 19 nt, Homo sapiens
  misc_RNA (1)...(19): siRNA sense strand
gaagugccaacaccuaaga

SEQ ID NO: 1273599 - RNA, 19 nt, Homo sapiens
  misc_RNA (1)...(19): siRNA sense strand
gcgaagugccaacaccuaa

SEQ ID NO: 1273600 - RNA, 19 nt, Homo sapiens
  misc_RNA (1)...(19): siRNA sense strand
gaaggagcccagcgaagug

SEQ ID NO: 1273601 - RNA, 19 nt, Homo sapiens
  misc_RNA (1)...(19): siRNA sense strand
gaaaaggacggcacugaga

SEQ ID NO: 1273602 - RNA, 19 nt, Homo sapiens
  misc_RNA (1)...(19): siRNA sense strand
ccacaacuccaggaaggaa

SEQ ID NO: 1273603 - RNA, 19 nt, Homo sapiens
  misc_RNA (1)...(19): siRNA sense strand
gaagugccaacaccuaaga

SEQ ID NO: 1273604 - RNA, 19 nt, Homo sapiens
  misc_RNA (1)...(19): siRNA sense strand
gcgaagugccaacaccuaa

SEQ ID NO: 1273605 - RNA, 19 nt, Homo sapiens
  misc_RNA (1)...(19): siRNA sense strand
gaaggagcccagcgaagug

SEQ ID NO: 1273606 - RNA, 19 nt, Homo sapiens
  misc_RNA (1)...(19): siRNA sense strand
gaaaaggacggcacugaga

SEQ ID NO: 1273607 - RNA, 19 nt, Homo sapiens
  misc_RNA (1)...(19): siRNA sense strand
ccacaacuccaggaaggaa

SEQ ID NO: 1273608 - RNA, 19 nt, Homo sapiens
  misc_RNA (1)...(19): siRNA sense strand
gaagugccaacaccuaaga

SEQ ID NO: 1273609 - RNA, 19 nt, Homo sapiens
  misc_RNA (1)...(19): siRNA sense strand
gcgaagugccaacaccuaa

SEQ ID NO: 1273610 - RNA, 19 nt, Homo sapiens
  misc_RNA (1)...(19): siRNA sense strand
gaaggagcccagcgaagug

SEQ ID NO: 1273611 - RNA, 19 nt, Homo sapiens
  misc_RNA (1)...(19): siRNA sense strand
gaaaaggacggcacugaga

SEQ ID NO: 1273612 - RNA, 19 nt, Homo sapiens
  misc_RNA (1)...(19): siRNA sense strand
ccacaacuccaggaaggaa

SEQ ID NO: 1273613 - RNA, 19 nt, Homo sapiens
  misc_RNA (1)...(19): siRNA sense strand
gaagugccaacaccuaaga

SEQ ID NO: 1273614 - RNA, 19 nt, Homo sapiens
  misc_RNA (1)...(19): siRNA sense strand
gcgaagugccaacaccuaa

SEQ ID NO: 1273615 - RNA, 19 nt, Homo sapiens
  misc_RNA (1)...(19): siRNA sense strand
gaaggagcccagcgaagug

SEQ ID NO: 1273616 - RNA, 19 nt, Homo sapiens
  misc_RNA (1)...(19): siRNA sense strand
gaaaaggacggcacugaga

SEQ ID NO: 1273617 - RNA, 19 nt, Homo sapiens
  misc_RNA (1)...(19): siRNA sense strand
ccacaacuccaggaaggaa

SEQ ID NO: 1273618 - RNA, 19 nt, Homo sapiens
  misc_RNA (1)...(19): siRNA sense strand
gaagugccaacaccuaaga

SEQ ID NO: 1273619 - RNA, 19 nt, Homo sapiens
  misc_RNA (1)...(19): siRNA sense strand
gcgaagugccaacaccuaa

SEQ ID NO: 1273620 - RNA, 19 nt, Homo sapiens
  misc_RNA (1)...(19): siRNA sense strand
gaaggagcccagcgaagug

SEQ ID NO: 1273621 - RNA, 19 nt, Homo sapiens
  misc_RNA (1)...(19): siRNA sense strand
gaaaaggacggcacugaga

SEQ ID NO: 1273622 - RNA, 19 nt, Homo sapiens
  misc_RNA (1)...(19): siRNA sense strand
ccacaacuccaggaaggaa

SEQ ID NO: 1273623 - RNA, 19 nt, Homo sapiens
  misc_RNA (1)...(19): siRNA sense strand
gaagugccaacaccuaaga

SEQ ID NO: 1273624 - RNA, 19 nt, Homo sapiens
  misc_RNA (1)...(19): siRNA sense strand
gcgaagugccaacaccuaa

SEQ ID NO: 1273625 - RNA, 19 nt, Homo sapiens
  misc_RNA (1)...(19): siRNA sense strand
gaaggagcccagcgaagug

SEQ ID NO: 1273626 - RNA, 19 nt, Homo sapiens
  misc_RNA (1)...(19): siRNA sense strand
gaaaaggacggcacugaga

SEQ ID NO: 1273627 - RNA, 19 nt, Homo sapiens
  misc_RNA (1)...(19): siRNA sense strand
ccacaacuccaggaaggaa

SEQ ID NO: 1273628 - RNA, 19 nt, Homo sapiens
  misc_RNA (1)...(19): siRNA sense strand
gaagggcuguugaauugua

SEQ ID NO: 1273629 - RNA, 19 nt, Homo sapiens
  misc_RNA (1)...(19): siRNA sense strand
gaaccuggcuacuucagaa

SEQ ID NO: 1273630 - RNA, 19 nt, Homo sapiens
  misc_RNA (1)...(19): siRNA sense strand
ccaauuaccuuaugugagu

SEQ ID NO: 1273631 - RNA, 19 nt, Homo sapiens
  misc_RNA (1)...(19): siRNA sense strand
gaacgggaaugacaaacau

SEQ ID NO: 1273632 - RNA, 19 nt, Homo sapiens
  misc_RNA (1)...(19): siRNA sense strand
ggcgugagauucaacauuu

SEQ ID NO: 1273633 - RNA, 19 nt, Homo sapiens
  misc_RNA (1)...(19): siRNA sense strand
gaagcaaaguuggaaagaa

SEQ ID NO: 1273634 - RNA, 19 nt, Homo sapiens
  misc_RNA (1)...(19): siRNA sense strand
cuacaucacuggcagacua

SEQ ID NO: 1273635 - RNA, 19 nt, Homo sapiens
  misc_RNA (1)...(19): siRNA sense strand
aggaagggcuguugaauug

SEQ ID NO: 1273636 - RNA, 19 nt, Homo sapiens
  misc_RNA (1)...(19): siRNA sense strand
uggcugggaugcuaaauuu

SEQ ID NO: 1273637 - RNA, 19 nt, Homo sapiens
  misc_RNA (1)...(19): siRNA sense strand
ugaauaugcucaaagugaa

SEQ ID NO: 1273638 - RNA, 19 nt, Homo sapiens
  misc_RNA (1)...(19): siRNA sense strand
acugaggacucuaugaaua

SEQ ID NO: 1273639 - RNA, 19 nt, Homo sapiens
  misc_RNA (1)...(19): siRNA sense strand
gagcaucgcugcagcuacu

SEQ ID NO: 1273640 - RNA, 19 nt, Homo sapiens
  misc_RNA (1)...(19): siRNA sense strand
gaaccucauuggugugauc

SEQ ID NO: 1273641 - RNA, 19 nt, Homo sapiens
  misc_RNA (1)...(19): siRNA sense strand
aaacaugacacaguccuua

SEQ ID NO: 1273642 - RNA, 19 nt, Homo sapiens
  misc_RNA (1)...(19): siRNA sense strand
uugaugcccuuuacaauau

SEQ ID NO: 1273643 - RNA, 19 nt, Homo sapiens
  misc_RNA (1)...(19): siRNA sense strand
cuucaucccucuaucuuau

SEQ ID NO: 1273644 - RNA, 19 nt, Homo sapiens
  misc_RNA (1)...(19): siRNA sense strand
aagcaaaguuggaaagaag

SEQ ID NO: 1273645 - RNA, 19 nt, Homo sapiens
  misc_RNA (1)...(19): siRNA sense strand
gaaugaagcaaaguuggaa

SEQ ID NO: 1273646 - RNA, 19 nt, Homo sapiens
  misc_RNA (1)...(19): siRNA sense strand
gaaggaagggcuguugaau

SEQ ID NO: 1273647 - RNA, 19 nt, Homo sapiens
  misc_RNA (1)...(19): siRNA sense strand
uuacaccaauuaccuuaug

SEQ ID NO: 1273648 - RNA, 19 nt, Homo sapiens
  misc_RNA (1)...(19): siRNA sense strand
gcucaaagugaaccucauu

SEQ ID NO: 1273649 - RNA, 19 nt, Homo sapiens
  misc_RNA (1)...(19): siRNA sense strand
ccuauggacagcaguauuu

SEQ ID NO: 1273650 - RNA, 19 nt, Homo sapiens
  misc_RNA (1)...(19): siRNA sense strand
guggaagccuuuucagaua

SEQ ID NO: 1273651 - RNA, 19 nt, Homo sapiens
  misc_RNA (1)...(19): siRNA sense strand
ggcauucuuacaccaauua

SEQ ID NO: 1273652 - RNA, 19 nt, Homo sapiens
  misc_RNA (1)...(19): siRNA sense strand
ggacagcaguauuuugaug

SEQ ID NO: 1273653 - RNA, 19 nt, Homo sapiens
  misc_RNA (1)...(19): siRNA sense strand
ggaaccugcuggccagaca

SEQ ID NO: 1273654 - RNA, 19 nt, Homo sapiens
  misc_RNA (1)...(19): siRNA sense strand
gagcgaaugaagcaaaguu

SEQ ID NO: 1273655 - RNA, 19 nt, Homo sapiens
  misc_RNA (1)...(19): siRNA sense strand
cuaugaauaugcucaaagu

SEQ ID NO: 1273656 - RNA, 19 nt, Homo sapiens
  misc_RNA (1)...(19): siRNA sense strand
gaacacugaggacucuaug

SEQ ID NO: 1273657 - RNA, 19 nt, Homo sapiens
  misc_RNA (1)...(19): siRNA sense strand
ucaucccucuaucuuauuu

SEQ ID NO: 1273658 - RNA, 19 nt, Homo sapiens
  misc_RNA (1)...(19): siRNA sense strand
uuugaugcccuuuacaaua

SEQ ID NO: 1273659 - RNA, 19 nt, Homo sapiens
  misc_RNA (1)...(19): siRNA sense strand
acacugaggacucuaugaa

SEQ ID NO: 1273660 - RNA, 19 nt, Homo sapiens
  misc_RNA (1)...(19): siRNA sense strand
gaaaaucagcauaguugaa

SEQ ID NO: 1273661 - RNA, 19 nt, Homo sapiens
  misc_RNA (1)...(19): siRNA sense strand
gcugaacacugaggacucu

SEQ ID NO: 1273662 - RNA, 19 nt, Homo sapiens
  misc_RNA (1)...(19): siRNA sense strand
gauauucugaggcgugaga

SEQ ID NO: 1273663 - RNA, 19 nt, Homo sapiens
  misc_RNA (1)...(19): siRNA sense strand
cgaaugaagcaaaguugga

SEQ ID NO: 1273664 - RNA, 19 nt, Homo sapiens
  misc_RNA (1)...(19): siRNA sense strand
uuaccaagauggagagcau

SEQ ID NO: 1273665 - RNA, 19 nt, Homo sapiens
  misc_RNA (1)...(19): siRNA sense strand
ugagccaccuccaagacaa

SEQ ID NO: 1273666 - RNA, 19 nt, Homo sapiens
  misc_RNA (1)...(19): siRNA sense strand
ggaagccuuuucagauauu

SEQ ID NO: 1273667 - RNA, 19 nt, Homo sapiens
  misc_RNA (1)...(19): siRNA sense strand
ugaggacucuaugaauaug

SEQ ID NO: 1273668 - RNA, 19 nt, Homo sapiens
  misc_RNA (1)...(19): siRNA sense strand
cugcgugucugacggagaa

SEQ ID NO: 1273669 - RNA, 19 nt, Homo sapiens
  misc_RNA (1)...(19): siRNA sense strand
guauggaguggaagccuuu

SEQ ID NO: 1273670 - RNA, 19 nt, Homo sapiens
  misc_RNA (1)...(19): siRNA sense strand
aaggaagggcuguugaauu

SEQ ID NO: 1273671 - RNA, 19 nt, Homo sapiens
  misc_RNA (1)...(19): siRNA sense strand
ugaaggaagggcuguugaa

SEQ ID NO: 1273672 - RNA, 19 nt, Homo sapiens
  misc_RNA (1)...(19): siRNA sense strand
caaagugaaccucauuggu

SEQ ID NO: 1273673 - RNA, 19 nt, Homo sapiens
  misc_RNA (1)...(19): siRNA sense strand
acaaguaugucuuuaucac

SEQ ID NO: 1273674 - RNA, 19 nt, Homo sapiens
  misc_RNA (1)...(19): siRNA sense strand
gaaugacaaacaugacaca

SEQ ID NO: 1273675 - RNA, 19 nt, Homo sapiens
  misc_RNA (1)...(19): siRNA sense strand
ucagaacgggaaugacaaa

SEQ ID NO: 1273676 - RNA, 19 nt, Homo sapiens
  misc_RNA (1)...(19): siRNA sense strand
augaauaugcucaaaguga

SEQ ID NO: 1273677 - RNA, 19 nt, Homo sapiens
  misc_RNA (1)...(19): siRNA sense strand
gcaggcauucuuacaccaa

SEQ ID NO: 1273678 - RNA, 19 nt, Homo sapiens
  misc_RNA (1)...(19): siRNA sense strand
gagagcaucgcugcagcua

SEQ ID NO: 1273679 - RNA, 19 nt, Homo sapiens
  misc_RNA (1)...(19): siRNA sense strand
gggaaugacaaacaugaca

SEQ ID NO: 1273680 - RNA, 19 nt, Homo sapiens
  misc_RNA (1)...(19): siRNA sense strand
agaguugcuuucuuuguag

SEQ ID NO: 1273681 - RNA, 19 nt, Homo sapiens
  misc_RNA (1)...(19): siRNA sense strand
aguugaaccuggcuacuuc

SEQ ID NO: 1273682 - RNA, 19 nt, Homo sapiens
  misc_RNA (1)...(19): siRNA sense strand
ucacuggcagacuacauuu

SEQ ID NO: 1273683 - RNA, 19 nt, Homo sapiens
  misc_RNA (1)...(19): siRNA sense strand
caccaauuaccuuauguga

SEQ ID NO: 1273684 - RNA, 19 nt, Homo sapiens
  misc_RNA (1)...(19): siRNA sense strand
ccuugagcaugcuuccuuu

SEQ ID NO: 1273685 - RNA, 19 nt, Homo sapiens
  misc_RNA (1)...(19): siRNA sense strand
acggugacccuggauguua

SEQ ID NO: 1273686 - RNA, 19 nt, Homo sapiens
  misc_RNA (1)...(19): siRNA sense strand
uuagagcgaaugaagcaaa

SEQ ID NO: 1273687 - RNA, 19 nt, Homo sapiens
  misc_RNA (1)...(19): siRNA sense strand
gugaaaaucagcauaguug

SEQ ID NO: 1273688 - RNA, 19 nt, Homo sapiens
  misc_RNA (1)...(19): siRNA sense strand
gaugcccuuuacaauauca

SEQ ID NO: 1273689 - RNA, 19 nt, Homo sapiens
  misc_RNA (1)...(19): siRNA sense strand
cugaggacucuaugaauau

SEQ ID NO: 1273690 - RNA, 19 nt, Homo sapiens
  misc_RNA (1)...(19): siRNA sense strand
accugaaccuggucacuga

SEQ ID NO: 1273691 - RNA, 19 nt, Homo sapiens
  misc_RNA (1)...(19): siRNA sense strand
ugagcaugcuuccuuuggu

SEQ ID NO: 1273692 - RNA, 19 nt, Homo sapiens
  misc_RNA (1)...(19): siRNA sense strand
uccgcgaacucgauauuca

SEQ ID NO: 1273693 - RNA, 19 nt, Homo sapiens
  misc_RNA (1)...(19): siRNA sense strand
cauccgcgaacucgauauu

SEQ ID NO: 1273694 - RNA, 19 nt, Homo sapiens
  misc_RNA (1)...(19): siRNA sense strand
uagagcgaaugaagcaaag

SEQ ID NO: 1273695 - RNA, 19 nt, Homo sapiens
  misc_RNA (1)...(19): siRNA sense strand
ucuuacaccaauuaccuua

SEQ ID NO: 1273696 - RNA, 19 nt, Homo sapiens
  misc_RNA (1)...(19): siRNA sense strand
ugaagcaaaguuggaaaga

SEQ ID NO: 1273697 - RNA, 19 nt, Homo sapiens
  misc_RNA (1)...(19): siRNA sense strand
cuucagaacgggaaugaca

SEQ ID NO: 1273698 - RNA, 19 nt, Homo sapiens
  misc_RNA (1)...(19): siRNA sense strand
ccaccuccaagacaaguau

SEQ ID NO: 1273699 - RNA, 19 nt, Homo sapiens
  misc_RNA (1)...(19): siRNA sense strand
gaauaugcucaaagugaac

SEQ ID NO: 1273700 - RNA, 19 nt, Homo sapiens
  misc_RNA (1)...(19): siRNA sense strand
ccucuaucuuauuuaccua

SEQ ID NO: 1273701 - RNA, 19 nt, Homo sapiens
  misc_RNA (1)...(19): siRNA sense strand
caggcauucuuacaccaau

SEQ ID NO: 1273702 - RNA, 19 nt, Homo sapiens
  misc_RNA (1)...(19): siRNA sense strand
ggaugcacgaggcuugaga

SEQ ID NO: 1273703 - RNA, 19 nt, Homo sapiens
  misc_RNA (1)...(19): siRNA sense strand
gcacaaagaugaaccaugu

SEQ ID NO: 1273704 - RNA, 19 nt, Homo sapiens
  misc_RNA (1)...(19): siRNA sense strand
caaauuaccucaagaauac

SEQ ID NO: 1273705 - RNA, 19 nt, Homo sapiens
  misc_RNA (1)...(19): siRNA sense strand
gacaauggcuugaaucuug

SEQ ID NO: 1273706 - RNA, 19 nt, Homo sapiens
  misc_RNA (1)...(19): siRNA sense strand
caaacaagguggaugauga

SEQ ID NO: 1273707 - RNA, 19 nt, Homo sapiens
  misc_RNA (1)...(19): siRNA sense strand
ggcaaacagucuauuaaua

SEQ ID NO: 1273708 - RNA, 19 nt, Homo sapiens
  misc_RNA (1)...(19): siRNA sense strand
ggaaugcagucccguguaa

SEQ ID NO: 1273709 - RNA, 19 nt, Homo sapiens
  misc_RNA (1)...(19): siRNA sense strand
gaagaucucugccaaaggu

SEQ ID NO: 1273710 - RNA, 19 nt, Homo sapiens
  misc_RNA (1)...(19): siRNA sense strand
gccaggagauucauucuaa

SEQ ID NO: 1273711 - RNA, 19 nt, Homo sapiens
  misc_RNA (1)...(19): siRNA sense strand
gaacaaugccagauccuuu

SEQ ID NO: 1273712 - RNA, 19 nt, Homo sapiens
  misc_RNA (1)...(19): siRNA sense strand
gcaagaagaaucaaaguug

SEQ ID NO: 1273713 - RNA, 19 nt, Homo sapiens
  misc_RNA (1)...(19): siRNA sense strand
caaggaagauuuggaaaga

SEQ ID NO: 1273714 - RNA, 19 nt, Homo sapiens
  misc_RNA (1)...(19): siRNA sense strand
gagcaaccaugucaaacaa

SEQ ID NO: 1273715 - RNA, 19 nt, Homo sapiens
  misc_RNA (1)...(19): siRNA sense strand
gaauuauggucuucacuau

SEQ ID NO: 1273716 - RNA, 19 nt, Homo sapiens
  misc_RNA (1)...(19): siRNA sense strand
ugaaaugggucacaacaug

SEQ ID NO: 1273717 - RNA, 19 nt, Homo sapiens
  misc_RNA (1)...(19): siRNA sense strand
gguagaaggugagaaagaa

SEQ ID NO: 1273718 - RNA, 19 nt, Homo sapiens
  misc_RNA (1)...(19): siRNA sense strand
cgaaugggaucguuucaga

SEQ ID NO: 1273719 - RNA, 19 nt, Homo sapiens
  misc_RNA (1)...(19): siRNA sense strand
caagguggaugaugacaga

SEQ ID NO: 1273720 - RNA, 19 nt, Homo sapiens
  misc_RNA (1)...(19): siRNA sense strand
gcaaugguuuccuaucaug

SEQ ID NO: 1273721 - RNA, 19 nt, Homo sapiens
  misc_RNA (1)...(19): siRNA sense strand
gaagaucauugugguguau

SEQ ID NO: 1273722 - RNA, 19 nt, Homo sapiens
  misc_RNA (1)...(19): siRNA sense strand
gacauacacugcugaugaa

SEQ ID NO: 1273723 - RNA, 19 nt, Homo sapiens
  misc_RNA (1)...(19): siRNA sense strand
uggcugugaugguuuauua

SEQ ID NO: 1273724 - RNA, 19 nt, Homo sapiens
  misc_RNA (1)...(19): siRNA sense strand
caagaagaaucaaaguugu

SEQ ID NO: 1273725 - RNA, 19 nt, Homo sapiens
  misc_RNA (1)...(19): siRNA sense strand
gcaaugagcaaccauguca

SEQ ID NO: 1273726 - RNA, 19 nt, Homo sapiens
  misc_RNA (1)...(19): siRNA sense strand
ggagaucaguggccagugu

SEQ ID NO: 1273727 - RNA, 19 nt, Homo sapiens
  misc_RNA (1)...(19): siRNA sense strand
aaacaaauccgcagagugu

SEQ ID NO: 1273728 - RNA, 19 nt, Homo sapiens
  misc_RNA (1)...(19): siRNA sense strand
gaaaggaagacaacagugu

SEQ ID NO: 1273729 - RNA, 19 nt, Homo sapiens
  misc_RNA (1)...(19): siRNA sense strand
gagggaaacgauauucaua

SEQ ID NO: 1273730 - RNA, 19 nt, Homo sapiens
  misc_RNA (1)...(19): siRNA sense strand
uuagauaucugugcaaaug

SEQ ID NO: 1273731 - RNA, 19 nt, Homo sapiens
  misc_RNA (1)...(19): siRNA sense strand
uacaauugcucaugaaaug

SEQ ID NO: 1273732 - RNA, 19 nt, Homo sapiens
  misc_RNA (1)...(19): siRNA sense strand
ccaugaaacuccaccagaa

SEQ ID NO: 1273733 - RNA, 19 nt, Homo sapiens
  misc_RNA (1)...(19): siRNA sense strand
ggucaaucuucgugugaua

SEQ ID NO: 1273734 - RNA, 19 nt, Homo sapiens
  misc_RNA (1)...(19): siRNA sense strand
cauagagacuguagugguu

SEQ ID NO: 1273735 - RNA, 19 nt, Homo sapiens
  misc_RNA (1)...(19): siRNA sense strand
cagcaaugguuuccuauca

SEQ ID NO: 1273736 - RNA, 19 nt, Homo sapiens
  misc_RNA (1)...(19): siRNA sense strand
gaacagccuauucuucuau

SEQ ID NO: 1273737 - RNA, 19 nt, Homo sapiens
  misc_RNA (1)...(19): siRNA sense strand
ugacauacacugcugauga

SEQ ID NO: 1273738 - RNA, 19 nt, Homo sapiens
  misc_RNA (1)...(19): siRNA sense strand
guggcaacaugaagaauuu

SEQ ID NO: 1273739 - RNA, 19 nt, Homo sapiens
  misc_RNA (1)...(19): siRNA sense strand
gagguggccugaugggauu

SEQ ID NO: 1273740 - RNA, 19 nt, Homo sapiens
  misc_RNA (1)...(19): siRNA sense strand
cagaggagcagguuaugua

SEQ ID NO: 1273741 - RNA, 19 nt, Homo sapiens
  misc_RNA (1)...(19): siRNA sense strand
uaucaugucuggugaaugg

SEQ ID NO: 1273742 - RNA, 19 nt, Homo sapiens
  misc_RNA (1)...(19): siRNA sense strand
aaagaugaaccaugugaua

SEQ ID NO: 1273743 - RNA, 19 nt, Homo sapiens
  misc_RNA (1)...(19): siRNA sense strand
gggaaacgauauucauaca

SEQ ID NO: 1273744 - RNA, 19 nt, Homo sapiens
  misc_RNA (1)...(19): siRNA sense strand
aauagugacuggaagauug

SEQ ID NO: 1273745 - RNA, 19 nt, Homo sapiens
  misc_RNA (1)...(19): siRNA sense strand
gauuagauaucugugcaaa

SEQ ID NO: 1273746 - RNA, 19 nt, Homo sapiens
  misc_RNA (1)...(19): siRNA sense strand
gagaaagaaugcagaacca

SEQ ID NO: 1273747 - RNA, 19 nt, Homo sapiens
  misc_RNA (1)...(19): siRNA sense strand
caagguagaaggugagaaa

SEQ ID NO: 1273748 - RNA, 19 nt, Homo sapiens
  misc_RNA (1)...(19): siRNA sense strand
caacauagagacuguagug

SEQ ID NO: 1273749 - RNA, 19 nt, Homo sapiens
  misc_RNA (1)...(19): siRNA sense strand
agacaugacuucaguggau

SEQ ID NO: 1273750 - RNA, 19 nt, Homo sapiens
  misc_RNA (1)...(19): siRNA sense strand
gcagacaaguggccuguac

SEQ ID NO: 1273751 - RNA, 19 nt, Homo sapiens
  misc_RNA (1)...(19): siRNA sense strand
ugaauacacuaucccauca

SEQ ID NO: 1273752 - RNA, 19 nt, Homo sapiens
  misc_RNA (1)...(19): siRNA sense strand
guguaaggcuggagaaugu

SEQ ID NO: 1273753 - RNA, 19 nt, Homo sapiens
  misc_RNA (1)...(19): siRNA sense strand
ggucacaacaugggcauua

SEQ ID NO: 1273754 - RNA, 19 nt, Homo sapiens
  misc_RNA (1)...(19): siRNA sense strand
ggagugggaagucguguuu

SEQ ID NO: 1273755 - RNA, 19 nt, Homo sapiens
  misc_RNA (1)...(19): siRNA sense strand
ggcaagcuguccuggauga

SEQ ID NO: 1273756 - RNA, 19 nt, Homo sapiens
  misc_RNA (1)...(19): siRNA sense strand
aaagauuucucaggucaaa

SEQ ID NO: 1273757 - RNA, 19 nt, Homo sapiens
  misc_RNA (1)...(19): siRNA sense strand
gaucagaauuauggucuuc

SEQ ID NO: 1273758 - RNA, 19 nt, Homo sapiens
  misc_RNA (1)...(19): siRNA sense strand
aaaguuggcugugaugguu

SEQ ID NO: 1273759 - RNA, 19 nt, Homo sapiens
  misc_RNA (1)...(19): siRNA sense strand
gaagcaagggauuguaaug

SEQ ID NO: 1273760 - RNA, 19 nt, Homo sapiens
  misc_RNA (1)...(19): siRNA sense strand
caccagaacuauauauugg

SEQ ID NO: 1273761 - RNA, 19 nt, Homo sapiens
  misc_RNA (1)...(19): siRNA sense strand
ugaagacaauggcuugaau

SEQ ID NO: 1273762 - RNA, 19 nt, Homo sapiens
  misc_RNA (1)...(19): siRNA sense strand
ggaagagggaaacgauauu

SEQ ID NO: 1273763 - RNA, 19 nt, Homo sapiens
  misc_RNA (1)...(19): siRNA sense strand
gcugaagacugugaggauu

SEQ ID NO: 1273764 - RNA, 19 nt, Homo sapiens
  misc_RNA (1)...(19): siRNA sense strand
ugucaggcuuauaguguua

SEQ ID NO: 1273765 - RNA, 19 nt, Homo sapiens
  misc_RNA (1)...(19): siRNA sense strand
gaaucuuggugacguuuca

SEQ ID NO: 1273766 - RNA, 19 nt, Homo sapiens
  misc_RNA (1)...(19): siRNA sense strand
aggaagacauggaaaugaa

SEQ ID NO: 1273767 - RNA, 19 nt, Homo sapiens
  misc_RNA (1)...(19): siRNA sense strand
ucaauuaccuguggcaaag

SEQ ID NO: 1273768 - RNA, 19 nt, Homo sapiens
  misc_RNA (1)...(19): siRNA sense strand
uggucuaagugcucaauua

SEQ ID NO: 1273769 - RNA, 19 nt, Homo sapiens
  misc_RNA (1)...(19): siRNA sense strand
cagggaggcugaagacugu

SEQ ID NO: 1273770 - RNA, 19 nt, Homo sapiens
  misc_RNA (1)...(19): siRNA sense strand
gcuggcaaacagucuauua

SEQ ID NO: 1273771 - RNA, 19 nt, Homo sapiens
  misc_RNA (1)...(19): siRNA sense strand
ccagaaaguuggcugugau

SEQ ID NO: 1273772 - RNA, 19 nt, Homo sapiens
  misc_RNA (1)...(19): siRNA sense strand
aggaagauuuggaaagauu

SEQ ID NO: 1273773 - RNA, 19 nt, Homo sapiens
  misc_RNA (1)...(19): siRNA sense strand
ggagauucauucuaaccau

SEQ ID NO: 1273774 - RNA, 19 nt, Homo sapiens
  misc_RNA (1)...(19): siRNA sense strand
gaagacauggaaaugaaug

SEQ ID NO: 1273775 - RNA, 19 nt, Homo sapiens
  misc_RNA (1)...(19): siRNA sense strand
caacaacugagcaauggaa

SEQ ID NO: 1273776 - RNA, 19 nt, Homo sapiens
  misc_RNA (1)...(19): siRNA sense strand
cacacaagcugggaagauu

SEQ ID NO: 1273777 - RNA, 19 nt, Homo sapiens
  misc_RNA (1)...(19): siRNA sense strand
auuauggucuucacuauga

SEQ ID NO: 1273778 - RNA, 19 nt, Homo sapiens
  misc_RNA (1)...(19): siRNA sense strand
gccggcacauagcuauuua

SEQ ID NO: 1273779 - RNA, 19 nt, Homo sapiens
  misc_RNA (1)...(19): siRNA sense strand
gcaaauguccugggcuaga

SEQ ID NO: 1273780 - RNA, 19 nt, Homo sapiens
  misc_RNA (1)...(19): siRNA sense strand
ugguauagcuuacuugagu

SEQ ID NO: 1273781 - RNA, 19 nt, Homo sapiens
  misc_RNA (1)...(19): siRNA sense strand
cuucaacccugcaaugaga

SEQ ID NO: 1273782 - RNA, 19 nt, Homo sapiens
  misc_RNA (1)...(19): siRNA sense strand
guccugggcuagauucuga

SEQ ID NO: 1273783 - RNA, 19 nt, Homo sapiens
  misc_RNA (1)...(19): siRNA sense strand
ucauuacugugguaucauu

SEQ ID NO: 1273784 - RNA, 19 nt, Homo sapiens
  misc_RNA (1)...(19): siRNA sense strand
ggacaaugagaaaugcaaa

SEQ ID NO: 1273785 - RNA, 19 nt, Homo sapiens
  misc_RNA (1)...(19): siRNA sense strand
gagugucaauucugugaug

SEQ ID NO: 1273786 - RNA, 19 nt, Homo sapiens
  misc_RNA (1)...(19): siRNA sense strand
gcaaggaagauuuggaaag

SEQ ID NO: 1273787 - RNA, 19 nt, Homo sapiens
  misc_RNA (1)...(19): siRNA sense strand
guaaguggcaacaugaaga

SEQ ID NO: 1273788 - RNA, 19 nt, Homo sapiens
  misc_RNA (1)...(19): siRNA sense strand
ccaccagaacuauauauug

SEQ ID NO: 1273789 - RNA, 19 nt, Homo sapiens
  misc_RNA (1)...(19): siRNA sense strand
gaagagggaaacgauauuc

SEQ ID NO: 1273790 - RNA, 19 nt, Homo sapiens
  misc_RNA (1)...(19): siRNA sense strand
caauacagaauaugugaga

SEQ ID NO: 1273791 - RNA, 19 nt, Homo sapiens
  misc_RNA (1)...(19): siRNA sense strand
caaauguccugggcuagau

SEQ ID NO: 1273792 - RNA, 19 nt, Homo sapiens
  misc_RNA (1)...(19): siRNA sense strand
ggaagauuuggaaagauuu

SEQ ID NO: 1273793 - RNA, 19 nt, Homo sapiens
  misc_RNA (1)...(19): siRNA sense strand
ggauggcgacgaaguguug

SEQ ID NO: 1273794 - RNA, 19 nt, Homo sapiens
  misc_RNA (1)...(19): siRNA sense strand
gaggacuucauauuuauug

SEQ ID NO: 1273795 - RNA, 19 nt, Homo sapiens
  misc_RNA (1)...(19): siRNA sense strand
gcagucccguguaauccaa

SEQ ID NO: 1273796 - RNA, 19 nt, Homo sapiens
  misc_RNA (1)...(19): siRNA sense strand
aaucaaaguuguggaggaa

SEQ ID NO: 1273797 - RNA, 19 nt, Homo sapiens
  misc_RNA (1)...(19): siRNA sense strand
aggagcagguuauguagaa

SEQ ID NO: 1273798 - RNA, 19 nt, Homo sapiens
  misc_RNA (1)...(19): siRNA sense strand
auacacugcugaugaacaa

SEQ ID NO: 1273799 - RNA, 19 nt, Homo sapiens
  misc_RNA (1)...(19): siRNA sense strand
aguaacugcuugcuacaaa

SEQ ID NO: 1273800 - RNA, 19 nt, Homo sapiens
  misc_RNA (1)...(19): siRNA sense strand
gauguagcaaggaagauuu

SEQ ID NO: 1273801 - RNA, 19 nt, Homo sapiens
  misc_RNA (1)...(19): siRNA sense strand
uuagagaugucaacaaacu

SEQ ID NO: 1273802 - RNA, 19 nt, Homo sapiens
  misc_RNA (1)...(19): siRNA sense strand
ugaagacugugaggauuau

SEQ ID NO: 1273803 - RNA, 19 nt, Homo sapiens
  misc_RNA (1)...(19): siRNA sense strand
gaagugccaacaccuaaga

SEQ ID NO: 1273804 - RNA, 19 nt, Homo sapiens
  misc_RNA (1)...(19): siRNA sense strand
gcgaagugccaacaccuaa

SEQ ID NO: 1273805 - RNA, 19 nt, Homo sapiens
  misc_RNA (1)...(19): siRNA sense strand
gaaggagcccagcgaagug

SEQ ID NO: 1273806 - RNA, 19 nt, Homo sapiens
  misc_RNA (1)...(19): siRNA sense strand
gaaaaggacggcacugaga

SEQ ID NO: 1273807 - RNA, 19 nt, Homo sapiens
  misc_RNA (1)...(19): siRNA sense strand
ccacaacuccaggaaggaa

SEQ ID NO: 1273808 - RNA, 19 nt, Homo sapiens
  misc_RNA (1)...(19): siRNA sense strand
gaagugccaacaccuaaga

SEQ ID NO: 1273809 - RNA, 19 nt, Homo sapiens
  misc_RNA (1)...(19): siRNA sense strand
gcgaagugccaacaccuaa

SEQ ID NO: 1273810 - RNA, 19 nt, Homo sapiens
  misc_RNA (1)...(19): siRNA sense strand
gaaggagcccagcgaagug

SEQ ID NO: 1273811 - RNA, 19 nt, Homo sapiens
  misc_RNA (1)...(19): siRNA sense strand
gaaaaggacggcacugaga

SEQ ID NO: 1273812 - RNA, 19 nt, Homo sapiens
  misc_RNA (1)...(19): siRNA sense strand
ccacaacuccaggaaggaa

SEQ ID NO: 1273813 - RNA, 19 nt, Homo sapiens
  misc_RNA (1)...(19): siRNA sense strand
gaagugccaacaccuaaga

SEQ ID NO: 1273814 - RNA, 19 nt, Homo sapiens
  misc_RNA (1)...(19): siRNA sense strand
gcgaagugccaacaccuaa

SEQ ID NO: 1273815 - RNA, 19 nt, Homo sapiens
  misc_RNA (1)...(19): siRNA sense strand
gaaggagcccagcgaagug

SEQ ID NO: 1273816 - RNA, 19 nt, Homo sapiens
  misc_RNA (1)...(19): siRNA sense strand
gaaaaggacggcacugaga

SEQ ID NO: 1273817 - RNA, 19 nt, Homo sapiens
  misc_RNA (1)...(19): siRNA sense strand
ccacaacuccaggaaggaa

SEQ ID NO: 1273818 - RNA, 19 nt, Homo sapiens
  misc_RNA (1)...(19): siRNA sense strand
gaagugccaacaccuaaga

SEQ ID NO: 1273819 - RNA, 19 nt, Homo sapiens
  misc_RNA (1)...(19): siRNA sense strand
gcgaagugccaacaccuaa

SEQ ID NO: 1273820 - RNA, 19 nt, Homo sapiens
  misc_RNA (1)...(19): siRNA sense strand
gaaggagcccagcgaagug

SEQ ID NO: 1273821 - RNA, 19 nt, Homo sapiens
  misc_RNA (1)...(19): siRNA sense strand
gaaaaggacggcacugaga

SEQ ID NO: 1273822 - RNA, 19 nt, Homo sapiens
  misc_RNA (1)...(19): siRNA sense strand
ccacaacuccaggaaggaa

SEQ ID NO: 1273823 - RNA, 19 nt, Homo sapiens
  misc_RNA (1)...(19): siRNA sense strand
gaagugccaacaccuaaga

SEQ ID NO: 1273824 - RNA, 19 nt, Homo sapiens
  misc_RNA (1)...(19): siRNA sense strand
gcgaagugccaacaccuaa

SEQ ID NO: 1273825 - RNA, 19 nt, Homo sapiens
  misc_RNA (1)...(19): siRNA sense strand
gaaggagcccagcgaagug

SEQ ID NO: 1273826 - RNA, 19 nt, Homo sapiens
  misc_RNA (1)...(19): siRNA sense strand
gaaaaggacggcacugaga

SEQ ID NO: 1273827 - RNA, 19 nt, Homo sapiens
  misc_RNA (1)...(19): siRNA sense strand
ccacaacuccaggaaggaa

SEQ ID NO: 1273828 - RNA, 19 nt, Homo sapiens
  misc_RNA (1)...(19): siRNA sense strand
gaagugccaacaccuaaga

SEQ ID NO: 1273829 - RNA, 19 nt, Homo sapiens
  misc_RNA (1)...(19): siRNA sense strand
gcgaagugccaacaccuaa

SEQ ID NO: 1273830 - RNA, 19 nt, Homo sapiens
  misc_RNA (1)...(19): siRNA sense strand
gaaggagcccagcgaagug

SEQ ID NO: 1273831 - RNA, 19 nt, Homo sapiens
  misc_RNA (1)...(19): siRNA sense strand
gaaaaggacggcacugaga

SEQ ID NO: 1273832 - RNA, 19 nt, Homo sapiens
  misc_RNA (1)...(19): siRNA sense strand
ccacaacuccaggaaggaa

SEQ ID NO: 1273833 - RNA, 19 nt, Homo sapiens
  misc_RNA (1)...(19): siRNA sense strand
gaagugccaacaccuaaga

SEQ ID NO: 1273834 - RNA, 19 nt, Homo sapiens
  misc_RNA (1)...(19): siRNA sense strand
gcgaagugccaacaccuaa

SEQ ID NO: 1273835 - RNA, 19 nt, Homo sapiens
  misc_RNA (1)...(19): siRNA sense strand
gaaggagcccagcgaagug

SEQ ID NO: 1273836 - RNA, 19 nt, Homo sapiens
  misc_RNA (1)...(19): siRNA sense strand
gaaaaggacggcacugaga

SEQ ID NO: 1273837 - RNA, 19 nt, Homo sapiens
  misc_RNA (1)...(19): siRNA sense strand
ccacaacuccaggaaggaa

SEQ ID NO: 1273838 - RNA, 19 nt, Homo sapiens
  misc_RNA (1)...(19): siRNA sense strand
gaagugccaacaccuaaga

SEQ ID NO: 1273839 - RNA, 19 nt, Homo sapiens
  misc_RNA (1)...(19): siRNA sense strand
gcgaagugccaacaccuaa

SEQ ID NO: 1273840 - RNA, 19 nt, Homo sapiens
  misc_RNA (1)...(19): siRNA sense strand
gaaggagcccagcgaagug

SEQ ID NO: 1273841 - RNA, 19 nt, Homo sapiens
  misc_RNA (1)...(19): siRNA sense strand
gaaaaggacggcacugaga

SEQ ID NO: 1273842 - RNA, 19 nt, Homo sapiens
  misc_RNA (1)...(19): siRNA sense strand
ccacaacuccaggaaggaa

SEQ ID NO: 1273843 - RNA, 19 nt, Homo sapiens
  misc_RNA (1)...(19): siRNA sense strand
gaagugccaacaccuaaga

SEQ ID NO: 1273844 - RNA, 19 nt, Homo sapiens
  misc_RNA (1)...(19): siRNA sense strand
gcgaagugccaacaccuaa

SEQ ID NO: 1273845 - RNA, 19 nt, Homo sapiens
  misc_RNA (1)...(19): siRNA sense strand
gaaggagcccagcgaagug

SEQ ID NO: 1273846 - RNA, 19 nt, Homo sapiens
  misc_RNA (1)...(19): siRNA sense strand
gaaaaggacggcacugaga

SEQ ID NO: 1273847 - RNA, 19 nt, Homo sapiens
  misc_RNA (1)...(19): siRNA sense strand
ccacaacuccaggaaggaa

SEQ ID NO: 1273848 - RNA, 19 nt, Homo sapiens
  misc_RNA (1)...(19): siRNA sense strand
gaagugccaacaccuaaga

SEQ ID NO: 1273849 - RNA, 19 nt, Homo sapiens
  misc_RNA (1)...(19): siRNA sense strand
gcgaagugccaacaccuaa

SEQ ID NO: 1273850 - RNA, 19 nt, Homo sapiens
  misc_RNA (1)...(19): siRNA sense strand
gaaggagcccagcgaagug

SEQ ID NO: 1273851 - RNA, 19 nt, Homo sapiens
  misc_RNA (1)...(19): siRNA sense strand
gaaaaggacggcacugaga

SEQ ID NO: 1273852 - RNA, 19 nt, Homo sapiens
  misc_RNA (1)...(19): siRNA sense strand
ccacaacuccaggaaggaa

SEQ ID NO: 1273853 - RNA, 19 nt, Homo sapiens
  misc_RNA (1)...(19): siRNA sense strand
gaagugccaacaccuaaga

SEQ ID NO: 1273854 - RNA, 19 nt, Homo sapiens
  misc_RNA (1)...(19): siRNA sense strand
gcgaagugccaacaccuaa

SEQ ID NO: 1273855 - RNA, 19 nt, Homo sapiens
  misc_RNA (1)...(19): siRNA sense strand
gaaggagcccagcgaagug

SEQ ID NO: 1273856 - RNA, 19 nt, Homo sapiens
  misc_RNA (1)...(19): siRNA sense strand
gaaaaggacggcacugaga

SEQ ID NO: 1273857 - RNA, 19 nt, Homo sapiens
  misc_RNA (1)...(19): siRNA sense strand
ccacaacuccaggaaggaa

SEQ ID NO: 1273858 - RNA, 19 nt, Homo sapiens
  misc_RNA (1)...(19): siRNA sense strand
gaagugccaacaccuaaga

SEQ ID NO: 1273859 - RNA, 19 nt, Homo sapiens
  misc_RNA (1)...(19): siRNA sense strand
gcgaagugccaacaccuaa

SEQ ID NO: 1273860 - RNA, 19 nt, Homo sapiens
  misc_RNA (1)...(19): siRNA sense strand
gaaggagcccagcgaagug

SEQ ID NO: 1273861 - RNA, 19 nt, Homo sapiens
  misc_RNA (1)...(19): siRNA sense strand
gaaaaggacggcacugaga

SEQ ID NO: 1273862 - RNA, 19 nt, Homo sapiens
  misc_RNA (1)...(19): siRNA sense strand
ccacaacuccaggaaggaa

SEQ ID NO: 1273863 - RNA, 19 nt, Homo sapiens
  misc_RNA (1)...(19): siRNA sense strand
gaagugccaacaccuaaga

SEQ ID NO: 1273864 - RNA, 19 nt, Homo sapiens
  misc_RNA (1)...(19): siRNA sense strand
gcgaagugccaacaccuaa

SEQ ID NO: 1273865 - RNA, 19 nt, Homo sapiens
  misc_RNA (1)...(19): siRNA sense strand
gaaggagcccagcgaagug

SEQ ID NO: 1273866 - RNA, 19 nt, Homo sapiens
  misc_RNA (1)...(19): siRNA sense strand
gaaaaggacggcacugaga

SEQ ID NO: 1273867 - RNA, 19 nt, Homo sapiens
  misc_RNA (1)...(19): siRNA sense strand
ccacaacuccaggaaggaa

SEQ ID NO: 1273868 - RNA, 19 nt, Homo sapiens
  misc_RNA (1)...(19): siRNA sense strand
gaagugccaacaccuaaga

SEQ ID NO: 1273869 - RNA, 19 nt, Homo sapiens
  misc_RNA (1)...(19): siRNA sense strand
gcgaagugccaacaccuaa

SEQ ID NO: 1273870 - RNA, 19 nt, Homo sapiens
  misc_RNA (1)...(19): siRNA sense strand
gaaggagcccagcgaagug

SEQ ID NO: 1273871 - RNA, 19 nt, Homo sapiens
  misc_RNA (1)...(19): siRNA sense strand
gaaaaggacggcacugaga

SEQ ID NO: 1273872 - RNA, 19 nt, Homo sapiens
  misc_RNA (1)...(19): siRNA sense strand
ccacaacuccaggaaggaa

SEQ ID NO: 1273873 - RNA, 19 nt, Homo sapiens
  misc_RNA (1)...(19): siRNA sense strand
gagaagaucuuucagaauc

SEQ ID NO: 1273874 - RNA, 19 nt, Homo sapiens
  misc_RNA (1)...(19): siRNA sense strand
gagcaugucuuuacagauc

SEQ ID NO: 1273875 - RNA, 19 nt, Homo sapiens
  misc_RNA (1)...(19): siRNA sense strand
ccaggaaacuagaaaugua

SEQ ID NO: 1273876 - RNA, 19 nt, Homo sapiens
  misc_RNA (1)...(19): siRNA sense strand
acaaagaucucaguggaua

SEQ ID NO: 1273877 - RNA, 19 nt, Homo sapiens
  misc_RNA (1)...(19): siRNA sense strand
ugacucagaugcauauaaa

SEQ ID NO: 1273878 - RNA, 19 nt, Homo sapiens
  misc_RNA (1)...(19): siRNA sense strand
gcaaacacauugaaguaca

SEQ ID NO: 1273879 - RNA, 19 nt, Homo sapiens
  misc_RNA (1)...(19): siRNA sense strand
gucaaacuaucaccucuua

SEQ ID NO: 1273880 - RNA, 19 nt, Homo sapiens
  misc_RNA (1)...(19): siRNA sense strand
gaagaauuauccagucuag

SEQ ID NO: 1273881 - RNA, 19 nt, Homo sapiens
  misc_RNA (1)...(19): siRNA sense strand
gaugagcuuucugauguua

SEQ ID NO: 1273882 - RNA, 19 nt, Homo sapiens
  misc_RNA (1)...(19): siRNA sense strand
gcaacaauuccuacugaua

SEQ ID NO: 1273883 - RNA, 19 nt, Homo sapiens
  misc_RNA (1)...(19): siRNA sense strand
uaucaguacugccaaauga

SEQ ID NO: 1273884 - RNA, 19 nt, Homo sapiens
  misc_RNA (1)...(19): siRNA sense strand
gcaacauccuagacaguuu

SEQ ID NO: 1273885 - RNA, 19 nt, Homo sapiens
  misc_RNA (1)...(19): siRNA sense strand
gagauaagcaaacacauug

SEQ ID NO: 1273886 - RNA, 19 nt, Homo sapiens
  misc_RNA (1)...(19): siRNA sense strand
gcauagagaacaaagcuuu

SEQ ID NO: 1273887 - RNA, 19 nt, Homo sapiens
  misc_RNA (1)...(19): siRNA sense strand
agaacgcccuauaucauua

SEQ ID NO: 1273888 - RNA, 19 nt, Homo sapiens
  misc_RNA (1)...(19): siRNA sense strand
uuacagaugcgccaaauaa

SEQ ID NO: 1273889 - RNA, 19 nt, Homo sapiens
  misc_RNA (1)...(19): siRNA sense strand
ggauaaaccaccagaaaug

SEQ ID NO: 1273890 - RNA, 19 nt, Homo sapiens
  misc_RNA (1)...(19): siRNA sense strand
acaaggauguugcugguuu

SEQ ID NO: 1273891 - RNA, 19 nt, Homo sapiens
  misc_RNA (1)...(19): siRNA sense strand
caaggcggaucuaaagcua

SEQ ID NO: 1273892 - RNA, 19 nt, Homo sapiens
  misc_RNA (1)...(19): siRNA sense strand
gaagggaaucguguuagua

SEQ ID NO: 1273893 - RNA, 19 nt, Homo sapiens
  misc_RNA (1)...(19): siRNA sense strand
gagagaagaagcccagaaa

SEQ ID NO: 1273894 - RNA, 19 nt, Homo sapiens
  misc_RNA (1)...(19): siRNA sense strand
ugaagaaacugaagcuagu

SEQ ID NO: 1273895 - RNA, 19 nt, Homo sapiens
  misc_RNA (1)...(19): siRNA sense strand
uacagaaucucucuuugaa

SEQ ID NO: 1273896 - RNA, 19 nt, Homo sapiens
  misc_RNA (1)...(19): siRNA sense strand
gaucugagcaauggaaauu

SEQ ID NO: 1273897 - RNA, 19 nt, Homo sapiens
  misc_RNA (1)...(19): siRNA sense strand
gcaaugacucagaugcaua

SEQ ID NO: 1273898 - RNA, 19 nt, Homo sapiens
  misc_RNA (1)...(19): siRNA sense strand
caauacagaaucucucuuu

SEQ ID NO: 1273899 - RNA, 19 nt, Homo sapiens
  misc_RNA (1)...(19): siRNA sense strand
ccaaaggcauagagaacaa

SEQ ID NO: 1273900 - RNA, 19 nt, Homo sapiens
  misc_RNA (1)...(19): siRNA sense strand
ggagauggauugcuuacac

SEQ ID NO: 1273901 - RNA, 19 nt, Homo sapiens
  misc_RNA (1)...(19): siRNA sense strand
caauggaaauuucaggaau

SEQ ID NO: 1273902 - RNA, 19 nt, Homo sapiens
  misc_RNA (1)...(19): siRNA sense strand
aggaugagcuuucugaugu

SEQ ID NO: 1273903 - RNA, 19 nt, Homo sapiens
  misc_RNA (1)...(19): siRNA sense strand
gaauuauccagucuaguuu

SEQ ID NO: 1273904 - RNA, 19 nt, Homo sapiens
  misc_RNA (1)...(19): siRNA sense strand
aagauucgauucucaguau

SEQ ID NO: 1273905 - RNA, 19 nt, Homo sapiens
  misc_RNA (1)...(19): siRNA sense strand
gaguucagaucccagaaga

SEQ ID NO: 1273906 - RNA, 19 nt, Homo sapiens
  misc_RNA (1)...(19): siRNA sense strand
caaacuaucaccucuuaga

SEQ ID NO: 1273907 - RNA, 19 nt, Homo sapiens
  misc_RNA (1)...(19): siRNA sense strand
agacuacccugcaggagaa

SEQ ID NO: 1273908 - RNA, 19 nt, Homo sapiens
  misc_RNA (1)...(19): siRNA sense strand
guauguccauucaucugua

SEQ ID NO: 1273909 - RNA, 19 nt, Homo sapiens
  misc_RNA (1)...(19): siRNA sense strand
aaacuggcgucuacacaga

SEQ ID NO: 1273910 - RNA, 19 nt, Homo sapiens
  misc_RNA (1)...(19): siRNA sense strand
ggaagaaaacgaaggauuu

SEQ ID NO: 1273911 - RNA, 19 nt, Homo sapiens
  misc_RNA (1)...(19): siRNA sense strand
cuacacagagcaugucuuu

SEQ ID NO: 1273912 - RNA, 19 nt, Homo sapiens
  misc_RNA (1)...(19): siRNA sense strand
aggagaagaucuuucagaa

SEQ ID NO: 1273913 - RNA, 19 nt, Homo sapiens
  misc_RNA (1)...(19): siRNA sense strand
ggauguugcugguuuggau

SEQ ID NO: 1273914 - RNA, 19 nt, Homo sapiens
  misc_RNA (1)...(19): siRNA sense strand
gaagaaaagucagaaguuc

SEQ ID NO: 1273915 - RNA, 19 nt, Homo sapiens
  misc_RNA (1)...(19): siRNA sense strand
uggcaacaauuccuacuga

SEQ ID NO: 1273916 - RNA, 19 nt, Homo sapiens
  misc_RNA (1)...(19): siRNA sense strand
cagagcaugucuuuacaga

SEQ ID NO: 1273917 - RNA, 19 nt, Homo sapiens
  misc_RNA (1)...(19): siRNA sense strand
gcacucauucggcuacaaa

SEQ ID NO: 1273918 - RNA, 19 nt, Homo sapiens
  misc_RNA (1)...(19): siRNA sense strand
agaauuauccagucuaguu

SEQ ID NO: 1273919 - RNA, 19 nt, Homo sapiens
  misc_RNA (1)...(19): siRNA sense strand
acaaacagguaaccaaugg

SEQ ID NO: 1273920 - RNA, 19 nt, Homo sapiens
  misc_RNA (1)...(19): siRNA sense strand
gauaagcaaacacauugaa

SEQ ID NO: 1273921 - RNA, 19 nt, Homo sapiens
  misc_RNA (1)...(19): siRNA sense strand
gcaauggaaauuucaggaa

SEQ ID NO: 1273922 - RNA, 19 nt, Homo sapiens
  misc_RNA (1)...(19): siRNA sense strand
caacaauuccuacugauac

SEQ ID NO: 1273923 - RNA, 19 nt, Homo sapiens
  misc_RNA (1)...(19): siRNA sense strand
gaagaagcccagaaaauga

SEQ ID NO: 1273924 - RNA, 19 nt, Homo sapiens
  misc_RNA (1)...(19): siRNA sense strand
ggaaguaugacaagcaaca

SEQ ID NO: 1273925 - RNA, 19 nt, Homo sapiens
  misc_RNA (1)...(19): siRNA sense strand
gaauuaagucaaccacguu

SEQ ID NO: 1273926 - RNA, 19 nt, Homo sapiens
  misc_RNA (1)...(19): siRNA sense strand
aagcaaacacauugaagua

SEQ ID NO: 1273927 - RNA, 19 nt, Homo sapiens
  misc_RNA (1)...(19): siRNA sense strand
cuacugauacucccuuaaa

SEQ ID NO: 1273928 - RNA, 19 nt, Homo sapiens
  misc_RNA (1)...(19): siRNA sense strand
caacagcuaauucagaugu

SEQ ID NO: 1273929 - RNA, 19 nt, Homo sapiens
  misc_RNA (1)...(19): siRNA sense strand
cagaguaguuuagauaagu

SEQ ID NO: 1273930 - RNA, 19 nt, Homo sapiens
  misc_RNA (1)...(19): siRNA sense strand
ucucagaguaguuuagaua

SEQ ID NO: 1273931 - RNA, 19 nt, Homo sapiens
  misc_RNA (1)...(19): siRNA sense strand
guacaaacagguaaccaau

SEQ ID NO: 1273932 - RNA, 19 nt, Homo sapiens
  misc_RNA (1)...(19): siRNA sense strand
gaaggauuugugaagguua

SEQ ID NO: 1273933 - RNA, 19 nt, Homo sapiens
  misc_RNA (1)...(19): siRNA sense strand
ggaugagcuuucugauguu

SEQ ID NO: 1273934 - RNA, 19 nt, Homo sapiens
  misc_RNA (1)...(19): siRNA sense strand
gaaaagaacgcccuauauc

SEQ ID NO: 1273935 - RNA, 19 nt, Homo sapiens
  misc_RNA (1)...(19): siRNA sense strand
gauggugguucuguuguug

SEQ ID NO: 1273936 - RNA, 19 nt, Homo sapiens
  misc_RNA (1)...(19): siRNA sense strand
cgaaggauuugugaagguu

SEQ ID NO: 1273937 - RNA, 19 nt, Homo sapiens
  misc_RNA (1)...(19): siRNA sense strand
aaagaucucaguggauaua

SEQ ID NO: 1273938 - RNA, 19 nt, Homo sapiens
  misc_RNA (1)...(19): siRNA sense strand
acacagagcaugucuuuac

SEQ ID NO: 1273939 - RNA, 19 nt, Homo sapiens
  misc_RNA (1)...(19): siRNA sense strand
ggagaagaucuuucagaau

SEQ ID NO: 1273940 - RNA, 19 nt, Homo sapiens
  misc_RNA (1)...(19): siRNA sense strand
gaacagcagaaggaguuaa

SEQ ID NO: 1273941 - RNA, 19 nt, Homo sapiens
  misc_RNA (1)...(19): siRNA sense strand
ggauacagaaggcaguaaa

SEQ ID NO: 1273942 - RNA, 19 nt, Homo sapiens
  misc_RNA (1)...(19): siRNA sense strand
aagcacauguucagaagga

SEQ ID NO: 1273943 - RNA, 19 nt, Homo sapiens
  misc_RNA (1)...(19): siRNA sense strand
caaggauguugcugguuug

SEQ ID NO: 1273944 - RNA, 19 nt, Homo sapiens
  misc_RNA (1)...(19): siRNA sense strand
gaagaagcaacugaagcua

SEQ ID NO: 1273945 - RNA, 19 nt, Homo sapiens
  misc_RNA (1)...(19): siRNA sense strand
caacagcucagcagagaca

SEQ ID NO: 1273946 - RNA, 19 nt, Homo sapiens
  misc_RNA (1)...(19): siRNA sense strand
aaucagagauaagcaaaca

SEQ ID NO: 1273947 - RNA, 19 nt, Homo sapiens
  misc_RNA (1)...(19): siRNA sense strand
guggacaucucccaaacug

SEQ ID NO: 1273948 - RNA, 19 nt, Homo sapiens
  misc_RNA (1)...(19): siRNA sense strand
caucaacagcuaauucaga

SEQ ID NO: 1273949 - RNA, 19 nt, Homo sapiens
  misc_RNA (1)...(19): siRNA sense strand
agaagcaacugaagcuaca

SEQ ID NO: 1273950 - RNA, 19 nt, Homo sapiens
  misc_RNA (1)...(19): siRNA sense strand
ugaaggaugagcuuucuga

SEQ ID NO: 1273951 - RNA, 19 nt, Homo sapiens
  misc_RNA (1)...(19): siRNA sense strand
ggauauaaagguucaagca

SEQ ID NO: 1273952 - RNA, 19 nt, Homo sapiens
  misc_RNA (1)...(19): siRNA sense strand
auaccagccugaaggauga

SEQ ID NO: 1273953 - RNA, 19 nt, Homo sapiens
  misc_RNA (1)...(19): siRNA sense strand
ugaagggaaucguguuagu

SEQ ID NO: 1273954 - RNA, 19 nt, Homo sapiens
  misc_RNA (1)...(19): siRNA sense strand
aaauaucaguacugccaaa

SEQ ID NO: 1273955 - RNA, 19 nt, Homo sapiens
  misc_RNA (1)...(19): siRNA sense strand
ucagaugcauauaaagauc

SEQ ID NO: 1273956 - RNA, 19 nt, Homo sapiens
  misc_RNA (1)...(19): siRNA sense strand
gaagaccucuccccagugu

SEQ ID NO: 1273957 - RNA, 19 nt, Homo sapiens
  misc_RNA (1)...(19): siRNA sense strand
aaagaacgcccuauaucau

SEQ ID NO: 1273958 - RNA, 19 nt, Homo sapiens
  misc_RNA (1)...(19): siRNA sense strand
gaaauggaagcagaaaaua

SEQ ID NO: 1273959 - RNA, 19 nt, Homo sapiens
  misc_RNA (1)...(19): siRNA sense strand
ucacagugguugguuguuc

SEQ ID NO: 1273960 - RNA, 19 nt, Homo sapiens
  misc_RNA (1)...(19): siRNA sense strand
gcaucuuuauguggaagua

SEQ ID NO: 1273961 - RNA, 19 nt, Homo sapiens
  misc_RNA (1)...(19): siRNA sense strand
caaccacguucucauacca

SEQ ID NO: 1273962 - RNA, 19 nt, Homo sapiens
  misc_RNA (1)...(19): siRNA sense strand
guggaaguaugacaagcaa

SEQ ID NO: 1273963 - RNA, 19 nt, Homo sapiens
  misc_RNA (1)...(19): siRNA sense strand
agucagaaguucaagcaau

SEQ ID NO: 1273964 - RNA, 19 nt, Homo sapiens
  misc_RNA (1)...(19): siRNA sense strand
guacagguagcccaggaaa

SEQ ID NO: 1273965 - RNA, 19 nt, Homo sapiens
  misc_RNA (1)...(19): siRNA sense strand
agagauaagcaaacacauu

SEQ ID NO: 1273966 - RNA, 19 nt, Homo sapiens
  misc_RNA (1)...(19): siRNA sense strand
cagaugcgccaaauaaauc

SEQ ID NO: 1273967 - RNA, 19 nt, Homo sapiens
  misc_RNA (1)...(19): siRNA sense strand
aaacgaaggauuugugaag

SEQ ID NO: 1273968 - RNA, 19 nt, Homo sapiens
  misc_RNA (1)...(19): siRNA sense strand
caaugacucagaugcauau

SEQ ID NO: 1273969 - RNA, 19 nt, Homo sapiens
  misc_RNA (1)...(19): siRNA sense strand
guuugcaacucucauguuc

SEQ ID NO: 1273970 - RNA, 19 nt, Homo sapiens
  misc_RNA (1)...(19): siRNA sense strand
auacagaaucucucuuuga

SEQ ID NO: 1273971 - RNA, 19 nt, Homo sapiens
  misc_RNA (1)...(19): siRNA sense strand
cuccugagcuggauaugga

SEQ ID NO: 1273972 - RNA, 19 nt, Homo sapiens
  misc_RNA (1)...(19): siRNA sense strand
gucagaaguucaagcaauc

SEQ ID NO: 1273973 - RNA, 19 nt, Homo sapiens
  misc_RNA (1)...(19): siRNA sense strand
gagaagaucuuucagaauc

SEQ ID NO: 1273974 - RNA, 19 nt, Homo sapiens
  misc_RNA (1)...(19): siRNA sense strand
gagcaugucuuuacagauc

SEQ ID NO: 1273975 - RNA, 19 nt, Homo sapiens
  misc_RNA (1)...(19): siRNA sense strand
ccaggaaacuagaaaugua

SEQ ID NO: 1273976 - RNA, 19 nt, Homo sapiens
  misc_RNA (1)...(19): siRNA sense strand
acaaagaucucaguggaua

SEQ ID NO: 1273977 - RNA, 19 nt, Homo sapiens
  misc_RNA (1)...(19): siRNA sense strand
ugacucagaugcauauaaa

SEQ ID NO: 1273978 - RNA, 19 nt, Homo sapiens
  misc_RNA (1)...(19): siRNA sense strand
gcaaacacauugaaguaca

SEQ ID NO: 1273979 - RNA, 19 nt, Homo sapiens
  misc_RNA (1)...(19): siRNA sense strand
gucaaacuaucaccucuua

SEQ ID NO: 1273980 - RNA, 19 nt, Homo sapiens
  misc_RNA (1)...(19): siRNA sense strand
gaagaauuauccagucuag

SEQ ID NO: 1273981 - RNA, 19 nt, Homo sapiens
  misc_RNA (1)...(19): siRNA sense strand
gaugagcuuucugauguua

SEQ ID NO: 1273982 - RNA, 19 nt, Homo sapiens
  misc_RNA (1)...(19): siRNA sense strand
gcaacaauuccuacugaua

SEQ ID NO: 1273983 - RNA, 19 nt, Homo sapiens
  misc_RNA (1)...(19): siRNA sense strand
uaucaguacugccaaauga

SEQ ID NO: 1273984 - RNA, 19 nt, Homo sapiens
  misc_RNA (1)...(19): siRNA sense strand
gcaacauccuagacaguuu

SEQ ID NO: 1273985 - RNA, 19 nt, Homo sapiens
  misc_RNA (1)...(19): siRNA sense strand
gagauaagcaaacacauug

SEQ ID NO: 1273986 - RNA, 19 nt, Homo sapiens
  misc_RNA (1)...(19): siRNA sense strand
gcauagagaacaaagcuuu

SEQ ID NO: 1273987 - RNA, 19 nt, Homo sapiens
  misc_RNA (1)...(19): siRNA sense strand
agaacgcccuauaucauua

SEQ ID NO: 1273988 - RNA, 19 nt, Homo sapiens
  misc_RNA (1)...(19): siRNA sense strand
uuacagaugcgccaaauaa

SEQ ID NO: 1273989 - RNA, 19 nt, Homo sapiens
  misc_RNA (1)...(19): siRNA sense strand
ggauaaaccaccagaaaug

SEQ ID NO: 1273990 - RNA, 19 nt, Homo sapiens
  misc_RNA (1)...(19): siRNA sense strand
acaaggauguugcugguuu

SEQ ID NO: 1273991 - RNA, 19 nt, Homo sapiens
  misc_RNA (1)...(19): siRNA sense strand
caaggcggaucuaaagcua

SEQ ID NO: 1273992 - RNA, 19 nt, Homo sapiens
  misc_RNA (1)...(19): siRNA sense strand
gaagggaaucguguuagua

SEQ ID NO: 1273993 - RNA, 19 nt, Homo sapiens
  misc_RNA (1)...(19): siRNA sense strand
gagagaagaagcccagaaa

SEQ ID NO: 1273994 - RNA, 19 nt, Homo sapiens
  misc_RNA (1)...(19): siRNA sense strand
ugaagaaacugaagcuagu

SEQ ID NO: 1273995 - RNA, 19 nt, Homo sapiens
  misc_RNA (1)...(19): siRNA sense strand
uacagaaucucucuuugaa

SEQ ID NO: 1273996 - RNA, 19 nt, Homo sapiens
  misc_RNA (1)...(19): siRNA sense strand
gaucugagcaauggaaauu

SEQ ID NO: 1273997 - RNA, 19 nt, Homo sapiens
  misc_RNA (1)...(19): siRNA sense strand
gcaaugacucagaugcaua

SEQ ID NO: 1273998 - RNA, 19 nt, Homo sapiens
  misc_RNA (1)...(19): siRNA sense strand
caauacagaaucucucuuu

SEQ ID NO: 1273999 - RNA, 19 nt, Homo sapiens
  misc_RNA (1)...(19): siRNA sense strand
ccaaaggcauagagaacaa

SEQ ID NO: 1274000 - RNA, 19 nt, Homo sapiens
  misc_RNA (1)...(19): siRNA sense strand
ggagauggauugcuuacac

SEQ ID NO: 1274001 - RNA, 19 nt, Homo sapiens
  misc_RNA (1)...(19): siRNA sense strand
caauggaaauuucaggaau

SEQ ID NO: 1274002 - RNA, 19 nt, Homo sapiens
  misc_RNA (1)...(19): siRNA sense strand
aggaugagcuuucugaugu

SEQ ID NO: 1274003 - RNA, 19 nt, Homo sapiens
  misc_RNA (1)...(19): siRNA sense strand
gaauuauccagucuaguuu

SEQ ID NO: 1274004 - RNA, 19 nt, Homo sapiens
  misc_RNA (1)...(19): siRNA sense strand
aagauucgauucucaguau

SEQ ID NO: 1274005 - RNA, 19 nt, Homo sapiens
  misc_RNA (1)...(19): siRNA sense strand
gaguucagaucccagaaga

SEQ ID NO: 1274006 - RNA, 19 nt, Homo sapiens
  misc_RNA (1)...(19): siRNA sense strand
caaacuaucaccucuuaga

SEQ ID NO: 1274007 - RNA, 19 nt, Homo sapiens
  misc_RNA (1)...(19): siRNA sense strand
agacuacccugcaggagaa

SEQ ID NO: 1274008 - RNA, 19 nt, Homo sapiens
  misc_RNA (1)...(19): siRNA sense strand
guauguccauucaucugua

SEQ ID NO: 1274009 - RNA, 19 nt, Homo sapiens
  misc_RNA (1)...(19): siRNA sense strand
aaacuggcgucuacacaga

SEQ ID NO: 1274010 - RNA, 19 nt, Homo sapiens
  misc_RNA (1)...(19): siRNA sense strand
ggaagaaaacgaaggauuu

SEQ ID NO: 1274011 - RNA, 19 nt, Homo sapiens
  misc_RNA (1)...(19): siRNA sense strand
cuacacagagcaugucuuu

SEQ ID NO: 1274012 - RNA, 19 nt, Homo sapiens
  misc_RNA (1)...(19): siRNA sense strand
aggagaagaucuuucagaa

SEQ ID NO: 1274013 - RNA, 19 nt, Homo sapiens
  misc_RNA (1)...(19): siRNA sense strand
ggauguugcugguuuggau

SEQ ID NO: 1274014 - RNA, 19 nt, Homo sapiens
  misc_RNA (1)...(19): siRNA sense strand
gaagaaaagucagaaguuc

SEQ ID NO: 1274015 - RNA, 19 nt, Homo sapiens
  misc_RNA (1)...(19): siRNA sense strand
uggcaacaauuccuacuga

SEQ ID NO: 1274016 - RNA, 19 nt, Homo sapiens
  misc_RNA (1)...(19): siRNA sense strand
cagagcaugucuuuacaga

SEQ ID NO: 1274017 - RNA, 19 nt, Homo sapiens
  misc_RNA (1)...(19): siRNA sense strand
gcacucauucggcuacaaa

SEQ ID NO: 1274018 - RNA, 19 nt, Homo sapiens
  misc_RNA (1)...(19): siRNA sense strand
agaauuauccagucuaguu

SEQ ID NO: 1274019 - RNA, 19 nt, Homo sapiens
  misc_RNA (1)...(19): siRNA sense strand
acaaacagguaaccaaugg

SEQ ID NO: 1274020 - RNA, 19 nt, Homo sapiens
  misc_RNA (1)...(19): siRNA sense strand
gauaagcaaacacauugaa

SEQ ID NO: 1274021 - RNA, 19 nt, Homo sapiens
  misc_RNA (1)...(19): siRNA sense strand
gcaauggaaauuucaggaa

SEQ ID NO: 1274022 - RNA, 19 nt, Homo sapiens
  misc_RNA (1)...(19): siRNA sense strand
caacaauuccuacugauac

SEQ ID NO: 1274023 - RNA, 19 nt, Homo sapiens
  misc_RNA (1)...(19): siRNA sense strand
gaagaagcccagaaaauga

SEQ ID NO: 1274024 - RNA, 19 nt, Homo sapiens
  misc_RNA (1)...(19): siRNA sense strand
ggaaguaugacaagcaaca

SEQ ID NO: 1274025 - RNA, 19 nt, Homo sapiens
  misc_RNA (1)...(19): siRNA sense strand
gaauuaagucaaccacguu

SEQ ID NO: 1274026 - RNA, 19 nt, Homo sapiens
  misc_RNA (1)...(19): siRNA sense strand
aagcaaacacauugaagua

SEQ ID NO: 1274027 - RNA, 19 nt, Homo sapiens
  misc_RNA (1)...(19): siRNA sense strand
cuacugauacucccuuaaa

SEQ ID NO: 1274028 - RNA, 19 nt, Homo sapiens
  misc_RNA (1)...(19): siRNA sense strand
caacagcuaauucagaugu

SEQ ID NO: 1274029 - RNA, 19 nt, Homo sapiens
  misc_RNA (1)...(19): siRNA sense strand
cagaguaguuuagauaagu

SEQ ID NO: 1274030 - RNA, 19 nt, Homo sapiens
  misc_RNA (1)...(19): siRNA sense strand
ucucagaguaguuuagaua

SEQ ID NO: 1274031 - RNA, 19 nt, Homo sapiens
  misc_RNA (1)...(19): siRNA sense strand
guacaaacagguaaccaau

SEQ ID NO: 1274032 - RNA, 19 nt, Homo sapiens
  misc_RNA (1)...(19): siRNA sense strand
gaaggauuugugaagguua

SEQ ID NO: 1274033 - RNA, 19 nt, Homo sapiens
  misc_RNA (1)...(19): siRNA sense strand
ggaugagcuuucugauguu

SEQ ID NO: 1274034 - RNA, 19 nt, Homo sapiens
  misc_RNA (1)...(19): siRNA sense strand
gaaaagaacgcccuauauc

SEQ ID NO: 1274035 - RNA, 19 nt, Homo sapiens
  misc_RNA (1)...(19): siRNA sense strand
gauggugguucuguuguug

SEQ ID NO: 1274036 - RNA, 19 nt, Homo sapiens
  misc_RNA (1)...(19): siRNA sense strand
cgaaggauuugugaagguu

SEQ ID NO: 1274037 - RNA, 19 nt, Homo sapiens
  misc_RNA (1)...(19): siRNA sense strand
aaagaucucaguggauaua

SEQ ID NO: 1274038 - RNA, 19 nt, Homo sapiens
  misc_RNA (1)...(19): siRNA sense strand
acacagagcaugucuuuac

SEQ ID NO: 1274039 - RNA, 19 nt, Homo sapiens
  misc_RNA (1)...(19): siRNA sense strand
ggagaagaucuuucagaau

SEQ ID NO: 1274040 - RNA, 19 nt, Homo sapiens
  misc_RNA (1)...(19): siRNA sense strand
gaacagcagaaggaguuaa

SEQ ID NO: 1274041 - RNA, 19 nt, Homo sapiens
  misc_RNA (1)...(19): siRNA sense strand
ggauacagaaggcaguaaa

SEQ ID NO: 1274042 - RNA, 19 nt, Homo sapiens
  misc_RNA (1)...(19): siRNA sense strand
aagcacauguucagaagga

SEQ ID NO: 1274043 - RNA, 19 nt, Homo sapiens
  misc_RNA (1)...(19): siRNA sense strand
caaggauguugcugguuug

SEQ ID NO: 1274044 - RNA, 19 nt, Homo sapiens
  misc_RNA (1)...(19): siRNA sense strand
gaagaagcaacugaagcua

SEQ ID NO: 1274045 - RNA, 19 nt, Homo sapiens
  misc_RNA (1)...(19): siRNA sense strand
caacagcucagcagagaca

SEQ ID NO: 1274046 - RNA, 19 nt, Homo sapiens
  misc_RNA (1)...(19): siRNA sense strand
aaucagagauaagcaaaca

SEQ ID NO: 1274047 - RNA, 19 nt, Homo sapiens
  misc_RNA (1)...(19): siRNA sense strand
guggacaucucccaaacug

SEQ ID NO: 1274048 - RNA, 19 nt, Homo sapiens
  misc_RNA (1)...(19): siRNA sense strand
caucaacagcuaauucaga

SEQ ID NO: 1274049 - RNA, 19 nt, Homo sapiens
  misc_RNA (1)...(19): siRNA sense strand
agaagcaacugaagcuaca

SEQ ID NO: 1274050 - RNA, 19 nt, Homo sapiens
  misc_RNA (1)...(19): siRNA sense strand
ugaaggaugagcuuucuga

SEQ ID NO: 1274051 - RNA, 19 nt, Homo sapiens
  misc_RNA (1)...(19): siRNA sense strand
ggauauaaagguucaagca

SEQ ID NO: 1274052 - RNA, 19 nt, Homo sapiens
  misc_RNA (1)...(19): siRNA sense strand
auaccagccugaaggauga

SEQ ID NO: 1274053 - RNA, 19 nt, Homo sapiens
  misc_RNA (1)...(19): siRNA sense strand
ugaagggaaucguguuagu

SEQ ID NO: 1274054 - RNA, 19 nt, Homo sapiens
  misc_RNA (1)...(19): siRNA sense strand
aaauaucaguacugccaaa

SEQ ID NO: 1274055 - RNA, 19 nt, Homo sapiens
  misc_RNA (1)...(19): siRNA sense strand
ucagaugcauauaaagauc

SEQ ID NO: 1274056 - RNA, 19 nt, Homo sapiens
  misc_RNA (1)...(19): siRNA sense strand
gaagaccucuccccagugu

SEQ ID NO: 1274057 - RNA, 19 nt, Homo sapiens
  misc_RNA (1)...(19): siRNA sense strand
aaagaacgcccuauaucau

SEQ ID NO: 1274058 - RNA, 19 nt, Homo sapiens
  misc_RNA (1)...(19): siRNA sense strand
gaaauggaagcagaaaaua

SEQ ID NO: 1274059 - RNA, 19 nt, Homo sapiens
  misc_RNA (1)...(19): siRNA sense strand
ucacagugguugguuguuc

SEQ ID NO: 1274060 - RNA, 19 nt, Homo sapiens
  misc_RNA (1)...(19): siRNA sense strand
gcaucuuuauguggaagua

SEQ ID NO: 1274061 - RNA, 19 nt, Homo sapiens
  misc_RNA (1)...(19): siRNA sense strand
caaccacguucucauacca

SEQ ID NO: 1274062 - RNA, 19 nt, Homo sapiens
  misc_RNA (1)...(19): siRNA sense strand
guggaaguaugacaagcaa

SEQ ID NO: 1274063 - RNA, 19 nt, Homo sapiens
  misc_RNA (1)...(19): siRNA sense strand
agucagaaguucaagcaau

SEQ ID NO: 1274064 - RNA, 19 nt, Homo sapiens
  misc_RNA (1)...(19): siRNA sense strand
guacagguagcccaggaaa

SEQ ID NO: 1274065 - RNA, 19 nt, Homo sapiens
  misc_RNA (1)...(19): siRNA sense strand
agagauaagcaaacacauu

SEQ ID NO: 1274066 - RNA, 19 nt, Homo sapiens
  misc_RNA (1)...(19): siRNA sense strand
cagaugcgccaaauaaauc

SEQ ID NO: 1274067 - RNA, 19 nt, Homo sapiens
  misc_RNA (1)...(19): siRNA sense strand
aaacgaaggauuugugaag

SEQ ID NO: 1274068 - RNA, 19 nt, Homo sapiens
  misc_RNA (1)...(19): siRNA sense strand
caaugacucagaugcauau

SEQ ID NO: 1274069 - RNA, 19 nt, Homo sapiens
  misc_RNA (1)...(19): siRNA sense strand
guuugcaacucucauguuc

SEQ ID NO: 1274070 - RNA, 19 nt, Homo sapiens
  misc_RNA (1)...(19): siRNA sense strand
auacagaaucucucuuuga

SEQ ID NO: 1274071 - RNA, 19 nt, Homo sapiens
  misc_RNA (1)...(19): siRNA sense strand
cuccugagcuggauaugga

SEQ ID NO: 1274072 - RNA, 19 nt, Homo sapiens
  misc_RNA (1)...(19): siRNA sense strand
gucagaaguucaagcaauc

SEQ ID NO: 1274073 - RNA, 19 nt, Homo sapiens
  misc_RNA (1)...(19): siRNA sense strand
gcaaugggcuacuucaaau

SEQ ID NO: 1274074 - RNA, 19 nt, Homo sapiens
  misc_RNA (1)...(19): siRNA sense strand
ucacagaccuuucacaaau

SEQ ID NO: 1274075 - RNA, 19 nt, Homo sapiens
  misc_RNA (1)...(19): siRNA sense strand
ggauggauauggugaguuu

SEQ ID NO: 1274076 - RNA, 19 nt, Homo sapiens
  misc_RNA (1)...(19): siRNA sense strand
gacgucagcuucuucauuu

SEQ ID NO: 1274077 - RNA, 19 nt, Homo sapiens
  misc_RNA (1)...(19): siRNA sense strand
caaacuggauuauaacuug

SEQ ID NO: 1274078 - RNA, 19 nt, Homo sapiens
  misc_RNA (1)...(19): siRNA sense strand
gaggaaaucagaaagauaa

SEQ ID NO: 1274079 - RNA, 19 nt, Homo sapiens
  misc_RNA (1)...(19): siRNA sense strand
gaagauuucucagcucauu

SEQ ID NO: 1274080 - RNA, 19 nt, Homo sapiens
  misc_RNA (1)...(19): siRNA sense strand
caugagaaauguccaguuu

SEQ ID NO: 1274081 - RNA, 19 nt, Homo sapiens
  misc_RNA (1)...(19): siRNA sense strand
gaaaggaacaagugucauu

SEQ ID NO: 1274082 - RNA, 19 nt, Homo sapiens
  misc_RNA (1)...(19): siRNA sense strand
aaagaucgauugggaauuu

SEQ ID NO: 1274083 - RNA, 19 nt, Homo sapiens
  misc_RNA (1)...(19): siRNA sense strand
uaaaggaaguggaacaaga

SEQ ID NO: 1274084 - RNA, 19 nt, Homo sapiens
  misc_RNA (1)...(19): siRNA sense strand
ggauauaacaguccacuuu

SEQ ID NO: 1274085 - RNA, 19 nt, Homo sapiens
  misc_RNA (1)...(19): siRNA sense strand
ucagaaagccucaaugaaa

SEQ ID NO: 1274086 - RNA, 19 nt, Homo sapiens
  misc_RNA (1)...(19): siRNA sense strand
aaagauaacuggcgucugu

SEQ ID NO: 1274087 - RNA, 19 nt, Homo sapiens
  misc_RNA (1)...(19): siRNA sense strand
gaaauuaacagcaggaauc

SEQ ID NO: 1274088 - RNA, 19 nt, Homo sapiens
  misc_RNA (1)...(19): siRNA sense strand
gagaugagcgccauuauuc

SEQ ID NO: 1274089 - RNA, 19 nt, Homo sapiens
  misc_RNA (1)...(19): siRNA sense strand
gaacaaguggagaugauaa

SEQ ID NO: 1274090 - RNA, 19 nt, Homo sapiens
  misc_RNA (1)...(19): siRNA sense strand
gaacaaauaacauccuuca

SEQ ID NO: 1274091 - RNA, 19 nt, Homo sapiens
  misc_RNA (1)...(19): siRNA sense strand
agagagagcuuauuggaau

SEQ ID NO: 1274092 - RNA, 19 nt, Homo sapiens
  misc_RNA (1)...(19): siRNA sense strand
gaucaucaauaacacagaa

SEQ ID NO: 1274093 - RNA, 19 nt, Homo sapiens
  misc_RNA (1)...(19): siRNA sense strand
ucagaaauguuaagaagga

SEQ ID NO: 1274094 - RNA, 19 nt, Homo sapiens
  misc_RNA (1)...(19): siRNA sense strand
gaagacauuaccuuucaua

SEQ ID NO: 1274095 - RNA, 19 nt, Homo sapiens
  misc_RNA (1)...(19): siRNA sense strand
gacauuaccuuucauaacu

SEQ ID NO: 1274096 - RNA, 19 nt, Homo sapiens
  misc_RNA (1)...(19): siRNA sense strand
gcuauuggcauuauacuuu

SEQ ID NO: 1274097 - RNA, 19 nt, Homo sapiens
  misc_RNA (1)...(19): siRNA sense strand
gcagugaagcauaacuuua

SEQ ID NO: 1274098 - RNA, 19 nt, Homo sapiens
  misc_RNA (1)...(19): siRNA sense strand
uagaagcagugaagcauaa

SEQ ID NO: 1274099 - RNA, 19 nt, Homo sapiens
  misc_RNA (1)...(19): siRNA sense strand
gaugagaaaccuguuauaa

SEQ ID NO: 1274100 - RNA, 19 nt, Homo sapiens
  misc_RNA (1)...(19): siRNA sense strand
cagaagaacccauagauga

SEQ ID NO: 1274101 - RNA, 19 nt, Homo sapiens
  misc_RNA (1)...(19): siRNA sense strand
cagaaagccucaaugaaau

SEQ ID NO: 1274102 - RNA, 19 nt, Homo sapiens
  misc_RNA (1)...(19): siRNA sense strand
ugaaauauguaacccagaa

SEQ ID NO: 1274103 - RNA, 19 nt, Homo sapiens
  misc_RNA (1)...(19): siRNA sense strand
gaucaguuaccaucuauaa

SEQ ID NO: 1274104 - RNA, 19 nt, Homo sapiens
  misc_RNA (1)...(19): siRNA sense strand
uggcaaaucuucacugcua

SEQ ID NO: 1274105 - RNA, 19 nt, Homo sapiens
  misc_RNA (1)...(19): siRNA sense strand
ggaaggguagauaaauuua

SEQ ID NO: 1274106 - RNA, 19 nt, Homo sapiens
  misc_RNA (1)...(19): siRNA sense strand
uaagaugcauggaacuaaa

SEQ ID NO: 1274107 - RNA, 19 nt, Homo sapiens
  misc_RNA (1)...(19): siRNA sense strand
ucaagcccauuuccucuua

SEQ ID NO: 1274108 - RNA, 19 nt, Homo sapiens
  misc_RNA (1)...(19): siRNA sense strand
ucagugaucuggauaagug

SEQ ID NO: 1274109 - RNA, 19 nt, Homo sapiens
  misc_RNA (1)...(19): siRNA sense strand
ggaaacuccucccucauuc

SEQ ID NO: 1274110 - RNA, 19 nt, Homo sapiens
  misc_RNA (1)...(19): siRNA sense strand
gaaggaaacgucucaagug

SEQ ID NO: 1274111 - RNA, 19 nt, Homo sapiens
  misc_RNA (1)...(19): siRNA sense strand
uaugcuggcuucaucuuua

SEQ ID NO: 1274112 - RNA, 19 nt, Homo sapiens
  misc_RNA (1)...(19): siRNA sense strand
gaacaggaaguaggaaauu

SEQ ID NO: 1274113 - RNA, 19 nt, Homo sapiens
  misc_RNA (1)...(19): siRNA sense strand
gaaaauagcagcaagaaau

SEQ ID NO: 1274114 - RNA, 19 nt, Homo sapiens
  misc_RNA (1)...(19): siRNA sense strand
uaacauccuucauuacuca

SEQ ID NO: 1274115 - RNA, 19 nt, Homo sapiens
  misc_RNA (1)...(19): siRNA sense strand
gaacaagagguacaacgaa

SEQ ID NO: 1274116 - RNA, 19 nt, Homo sapiens
  misc_RNA (1)...(19): siRNA sense strand
ggacuaaugcuaagguuau

SEQ ID NO: 1274117 - RNA, 19 nt, Homo sapiens
  misc_RNA (1)...(19): siRNA sense strand
ggaaguggaacaagaggua

SEQ ID NO: 1274118 - RNA, 19 nt, Homo sapiens
  misc_RNA (1)...(19): siRNA sense strand
gaauacagccuuucucagu

SEQ ID NO: 1274119 - RNA, 19 nt, Homo sapiens
  misc_RNA (1)...(19): siRNA sense strand
acagaccuuucacaaauua

SEQ ID NO: 1274120 - RNA, 19 nt, Homo sapiens
  misc_RNA (1)...(19): siRNA sense strand
ccaagagauugcacuguuu

SEQ ID NO: 1274121 - RNA, 19 nt, Homo sapiens
  misc_RNA (1)...(19): siRNA sense strand
ggucuuggauaucaccuaa

SEQ ID NO: 1274122 - RNA, 19 nt, Homo sapiens
  misc_RNA (1)...(19): siRNA sense strand
ugagugugcuguuaaagaa

SEQ ID NO: 1274123 - RNA, 19 nt, Homo sapiens
  misc_RNA (1)...(19): siRNA sense strand
ucugaccacuucaaucuua

SEQ ID NO: 1274124 - RNA, 19 nt, Homo sapiens
  misc_RNA (1)...(19): siRNA sense strand
gguauugguuccuucauau

SEQ ID NO: 1274125 - RNA, 19 nt, Homo sapiens
  misc_RNA (1)...(19): siRNA sense strand
aaacacacauggacgaaau

SEQ ID NO: 1274126 - RNA, 19 nt, Homo sapiens
  misc_RNA (1)...(19): siRNA sense strand
ggaaacgucucaagugacu

SEQ ID NO: 1274127 - RNA, 19 nt, Homo sapiens
  misc_RNA (1)...(19): siRNA sense strand
cagcaggaaucacgagaaa

SEQ ID NO: 1274128 - RNA, 19 nt, Homo sapiens
  misc_RNA (1)...(19): siRNA sense strand
ccacugcucugaccacuuc

SEQ ID NO: 1274129 - RNA, 19 nt, Homo sapiens
  misc_RNA (1)...(19): siRNA sense strand
gaacuaaaauguggaaaga

SEQ ID NO: 1274130 - RNA, 19 nt, Homo sapiens
  misc_RNA (1)...(19): siRNA sense strand
aaacagaaaugguacugau

SEQ ID NO: 1274131 - RNA, 19 nt, Homo sapiens
  misc_RNA (1)...(19): siRNA sense strand
aagauaaccuugcuaaaca

SEQ ID NO: 1274132 - RNA, 19 nt, Homo sapiens
  misc_RNA (1)...(19): siRNA sense strand
cauguacauugaccaaaua

SEQ ID NO: 1274133 - RNA, 19 nt, Homo sapiens
  misc_RNA (1)...(19): siRNA sense strand
gaacaagauuucgaacaag

SEQ ID NO: 1274134 - RNA, 19 nt, Homo sapiens
  misc_RNA (1)...(19): siRNA sense strand
guacugauggccucucaua

SEQ ID NO: 1274135 - RNA, 19 nt, Homo sapiens
  misc_RNA (1)...(19): siRNA sense strand
cuuaagaaauggaggauga

SEQ ID NO: 1274136 - RNA, 19 nt, Homo sapiens
  misc_RNA (1)...(19): siRNA sense strand
gaaggacagucaacuaucg

SEQ ID NO: 1274137 - RNA, 19 nt, Homo sapiens
  misc_RNA (1)...(19): siRNA sense strand
gggaaggguagauaaauuu

SEQ ID NO: 1274138 - RNA, 19 nt, Homo sapiens
  misc_RNA (1)...(19): siRNA sense strand
ggacgucagcuucuucauu

SEQ ID NO: 1274139 - RNA, 19 nt, Homo sapiens
  misc_RNA (1)...(19): siRNA sense strand
uauguagcauuucuccuua

SEQ ID NO: 1274140 - RNA, 19 nt, Homo sapiens
  misc_RNA (1)...(19): siRNA sense strand
caugucaacucuaaaugaa

SEQ ID NO: 1274141 - RNA, 19 nt, Homo sapiens
  misc_RNA (1)...(19): siRNA sense strand
ggaggaaaucagaaagaua

SEQ ID NO: 1274142 - RNA, 19 nt, Homo sapiens
  misc_RNA (1)...(19): siRNA sense strand
ucaggagacucauauacaa

SEQ ID NO: 1274143 - RNA, 19 nt, Homo sapiens
  misc_RNA (1)...(19): siRNA sense strand
gaaaagagagagcuuauug

SEQ ID NO: 1274144 - RNA, 19 nt, Homo sapiens
  misc_RNA (1)...(19): siRNA sense strand
gcuaugggaaucaucuuua

SEQ ID NO: 1274145 - RNA, 19 nt, Homo sapiens
  misc_RNA (1)...(19): siRNA sense strand
uggcaaggauuacauucua

SEQ ID NO: 1274146 - RNA, 19 nt, Homo sapiens
  misc_RNA (1)...(19): siRNA sense strand
ggagaugagcgccauuauu

SEQ ID NO: 1274147 - RNA, 19 nt, Homo sapiens
  misc_RNA (1)...(19): siRNA sense strand
agagguacaacgaauauua

SEQ ID NO: 1274148 - RNA, 19 nt, Homo sapiens
  misc_RNA (1)...(19): siRNA sense strand
gaauguuccugugcagaaa

SEQ ID NO: 1274149 - RNA, 19 nt, Homo sapiens
  misc_RNA (1)...(19): siRNA sense strand
ucauauaccuugcuuggau

SEQ ID NO: 1274150 - RNA, 19 nt, Homo sapiens
  misc_RNA (1)...(19): siRNA sense strand
guuauugacccuauuauug

SEQ ID NO: 1274151 - RNA, 19 nt, Homo sapiens
  misc_RNA (1)...(19): siRNA sense strand
uggaauggcuccucagaau

SEQ ID NO: 1274152 - RNA, 19 nt, Homo sapiens
  misc_RNA (1)...(19): siRNA sense strand
gagaaaccuguuauaauug

SEQ ID NO: 1274153 - RNA, 19 nt, Homo sapiens
  misc_RNA (1)...(19): siRNA sense strand
guagagaugcuaagccaaa

SEQ ID NO: 1274154 - RNA, 19 nt, Homo sapiens
  misc_RNA (1)...(19): siRNA sense strand
gauaagagacucagaaagc

SEQ ID NO: 1274155 - RNA, 19 nt, Homo sapiens
  misc_RNA (1)...(19): siRNA sense strand
aagcuguccucaccaauuu

SEQ ID NO: 1274156 - RNA, 19 nt, Homo sapiens
  misc_RNA (1)...(19): siRNA sense strand
acuuuaaccuggaagaaua

SEQ ID NO: 1274157 - RNA, 19 nt, Homo sapiens
  misc_RNA (1)...(19): siRNA sense strand
ugacuuugguccacacuga

SEQ ID NO: 1274158 - RNA, 19 nt, Homo sapiens
  misc_RNA (1)...(19): siRNA sense strand
aaggaaacgucucaaguga

SEQ ID NO: 1274159 - RNA, 19 nt, Homo sapiens
  misc_RNA (1)...(19): siRNA sense strand
ggauuacauucuagagcua

SEQ ID NO: 1274160 - RNA, 19 nt, Homo sapiens
  misc_RNA (1)...(19): siRNA sense strand
ucucuugucuucuucauau

SEQ ID NO: 1274161 - RNA, 19 nt, Homo sapiens
  misc_RNA (1)...(19): siRNA sense strand
gauggccucucauacaaug

SEQ ID NO: 1274162 - RNA, 19 nt, Homo sapiens
  misc_RNA (1)...(19): siRNA sense strand
uaaaaucacugaagcauca

SEQ ID NO: 1274163 - RNA, 19 nt, Homo sapiens
  misc_RNA (1)...(19): siRNA sense strand
ccacuggaaaggacaaaua

SEQ ID NO: 1274164 - RNA, 19 nt, Homo sapiens
  misc_RNA (1)...(19): siRNA sense strand
gaaaagugaucauguccaa

SEQ ID NO: 1274165 - RNA, 19 nt, Homo sapiens
  misc_RNA (1)...(19): siRNA sense strand
ggucucaucuacuugcuau

SEQ ID NO: 1274166 - RNA, 19 nt, Homo sapiens
  misc_RNA (1)...(19): siRNA sense strand
uaauuuaacccagcagaua

SEQ ID NO: 1274167 - RNA, 19 nt, Homo sapiens
  misc_RNA (1)...(19): siRNA sense strand
ucaagaaggugaaauuuug

SEQ ID NO: 1274168 - RNA, 19 nt, Homo sapiens
  misc_RNA (1)...(19): siRNA sense strand
caacauauucgaauugagu

SEQ ID NO: 1274169 - RNA, 19 nt, Homo sapiens
  misc_RNA (1)...(19): siRNA sense strand
cccagcagauaaugaauaa

SEQ ID NO: 1274170 - RNA, 19 nt, Homo sapiens
  misc_RNA (1)...(19): siRNA sense strand
gcaggaaucacgagaaagu

SEQ ID NO: 1274171 - RNA, 19 nt, Homo sapiens
  misc_RNA (1)...(19): siRNA sense strand
gaagguauucuuagagcuu

SEQ ID NO: 1274172 - RNA, 19 nt, Homo sapiens
  misc_RNA (1)...(19): siRNA sense strand
cagugaagcauaacuuuaa

SEQ ID NO: 1274173 - RNA, 19 nt, Homo sapiens
  misc_RNA (1)...(19): siRNA sense strand
ggauggauauggugaguuu

SEQ ID NO: 1274174 - RNA, 19 nt, Homo sapiens
  misc_RNA (1)...(19): siRNA sense strand
caaacuggauuauaacuug

SEQ ID NO: 1274175 - RNA, 19 nt, Homo sapiens
  misc_RNA (1)...(19): siRNA sense strand
gaggaaaucagaaagauaa

SEQ ID NO: 1274176 - RNA, 19 nt, Homo sapiens
  misc_RNA (1)...(19): siRNA sense strand
gaagauuucucagcucauu

SEQ ID NO: 1274177 - RNA, 19 nt, Homo sapiens
  misc_RNA (1)...(19): siRNA sense strand
caugagaaauguccaguuu

SEQ ID NO: 1274178 - RNA, 19 nt, Homo sapiens
  misc_RNA (1)...(19): siRNA sense strand
gaaaggaacaagugucauu

SEQ ID NO: 1274179 - RNA, 19 nt, Homo sapiens
  misc_RNA (1)...(19): siRNA sense strand
uaaaggaaguggaacaaga

SEQ ID NO: 1274180 - RNA, 19 nt, Homo sapiens
  misc_RNA (1)...(19): siRNA sense strand
ggauauaacaguccacuuu

SEQ ID NO: 1274181 - RNA, 19 nt, Homo sapiens
  misc_RNA (1)...(19): siRNA sense strand
aaagauaacuggcgucugu

SEQ ID NO: 1274182 - RNA, 19 nt, Homo sapiens
  misc_RNA (1)...(19): siRNA sense strand
gagaugagcgccauuauuc

SEQ ID NO: 1274183 - RNA, 19 nt, Homo sapiens
  misc_RNA (1)...(19): siRNA sense strand
agagagagcuuauuggaau

SEQ ID NO: 1274184 - RNA, 19 nt, Homo sapiens
  misc_RNA (1)...(19): siRNA sense strand
ucagaaauguuaagaagga

SEQ ID NO: 1274185 - RNA, 19 nt, Homo sapiens
  misc_RNA (1)...(19): siRNA sense strand
gaagacauuaccuuucaua

SEQ ID NO: 1274186 - RNA, 19 nt, Homo sapiens
  misc_RNA (1)...(19): siRNA sense strand
gacauuaccuuucauaacu

SEQ ID NO: 1274187 - RNA, 19 nt, Homo sapiens
  misc_RNA (1)...(19): siRNA sense strand
gcuauuggcauuauacuuu

SEQ ID NO: 1274188 - RNA, 19 nt, Homo sapiens
  misc_RNA (1)...(19): siRNA sense strand
gaucaguuaccaucuauaa

SEQ ID NO: 1274189 - RNA, 19 nt, Homo sapiens
  misc_RNA (1)...(19): siRNA sense strand
uggcaaaucuucacugcua

SEQ ID NO: 1274190 - RNA, 19 nt, Homo sapiens
  misc_RNA (1)...(19): siRNA sense strand
ggaaggguagauaaauuua

SEQ ID NO: 1274191 - RNA, 19 nt, Homo sapiens
  misc_RNA (1)...(19): siRNA sense strand
uaugcuggcuucaucuuua

SEQ ID NO: 1274192 - RNA, 19 nt, Homo sapiens
  misc_RNA (1)...(19): siRNA sense strand
gaacaagagguacaacgaa

SEQ ID NO: 1274193 - RNA, 19 nt, Homo sapiens
  misc_RNA (1)...(19): siRNA sense strand
ggacuaaugcuaagguuau

SEQ ID NO: 1274194 - RNA, 19 nt, Homo sapiens
  misc_RNA (1)...(19): siRNA sense strand
ggaaguggaacaagaggua

SEQ ID NO: 1274195 - RNA, 19 nt, Homo sapiens
  misc_RNA (1)...(19): siRNA sense strand
ugagugugcuguuaaagaa

SEQ ID NO: 1274196 - RNA, 19 nt, Homo sapiens
  misc_RNA (1)...(19): siRNA sense strand
aaacacacauggacgaaau

SEQ ID NO: 1274197 - RNA, 19 nt, Homo sapiens
  misc_RNA (1)...(19): siRNA sense strand
aagauaaccuugcuaaaca

SEQ ID NO: 1274198 - RNA, 19 nt, Homo sapiens
  misc_RNA (1)...(19): siRNA sense strand
cauguacauugaccaaaua

SEQ ID NO: 1274199 - RNA, 19 nt, Homo sapiens
  misc_RNA (1)...(19): siRNA sense strand
cuuaagaaauggaggauga

SEQ ID NO: 1274200 - RNA, 19 nt, Homo sapiens
  misc_RNA (1)...(19): siRNA sense strand
gaaaagagagagcuuauug

SEQ ID NO: 1274201 - RNA, 19 nt, Homo sapiens
  misc_RNA (1)...(19): siRNA sense strand
ggaggaaaucagaaagaua

SEQ ID NO: 1274202 - RNA, 19 nt, Homo sapiens
  misc_RNA (1)...(19): siRNA sense strand
ucaggagacucauauacaa

SEQ ID NO: 1274203 - RNA, 19 nt, Homo sapiens
  misc_RNA (1)...(19): siRNA sense strand
gggaaggguagauaaauuu

SEQ ID NO: 1274204 - RNA, 19 nt, Homo sapiens
  misc_RNA (1)...(19): siRNA sense strand
gcuaugggaaucaucuuua

SEQ ID NO: 1274205 - RNA, 19 nt, Homo sapiens
  misc_RNA (1)...(19): siRNA sense strand
ggagaugagcgccauuauu

SEQ ID NO: 1274206 - RNA, 19 nt, Homo sapiens
  misc_RNA (1)...(19): siRNA sense strand
agagguacaacgaauauua

SEQ ID NO: 1274207 - RNA, 19 nt, Homo sapiens
  misc_RNA (1)...(19): siRNA sense strand
uggaauggcuccucagaau

SEQ ID NO: 1274208 - RNA, 19 nt, Homo sapiens
  misc_RNA (1)...(19): siRNA sense strand
aagcuguccucaccaauuu

SEQ ID NO: 1274209 - RNA, 19 nt, Homo sapiens
  misc_RNA (1)...(19): siRNA sense strand
ggucucaucuacuugcuau

SEQ ID NO: 1274210 - RNA, 19 nt, Homo sapiens
  misc_RNA (1)...(19): siRNA sense strand
uaauuuaacccagcagaua

SEQ ID NO: 1274211 - RNA, 19 nt, Homo sapiens
  misc_RNA (1)...(19): siRNA sense strand
cccagcagauaaugaauaa

SEQ ID NO: 1274212 - RNA, 19 nt, Homo sapiens
  misc_RNA (1)...(19): siRNA sense strand
gaaaucagaaagauaacug

SEQ ID NO: 1274213 - RNA, 19 nt, Homo sapiens
  misc_RNA (1)...(19): siRNA sense strand
gcgccauuauucuccuuua

SEQ ID NO: 1274214 - RNA, 19 nt, Homo sapiens
  misc_RNA (1)...(19): siRNA sense strand
accaguagcuccugaauuc

SEQ ID NO: 1274215 - RNA, 19 nt, Homo sapiens
  misc_RNA (1)...(19): siRNA sense strand
ccaaaggacuaaugcuaag

SEQ ID NO: 1274216 - RNA, 19 nt, Homo sapiens
  misc_RNA (1)...(19): siRNA sense strand
gauauaacaguccacuuug

SEQ ID NO: 1274217 - RNA, 19 nt, Homo sapiens
  misc_RNA (1)...(19): siRNA sense strand
caagagguacaacgaauau

SEQ ID NO: 1274218 - RNA, 19 nt, Homo sapiens
  misc_RNA (1)...(19): siRNA sense strand
ggauucaucuaaaggaagu

SEQ ID NO: 1274219 - RNA, 19 nt, Homo sapiens
  misc_RNA (1)...(19): siRNA sense strand
cuuaauggauugucuguuc

SEQ ID NO: 1274220 - RNA, 19 nt, Homo sapiens
  misc_RNA (1)...(19): siRNA sense strand
gaaaagaagccaucagaau

SEQ ID NO: 1274221 - RNA, 19 nt, Homo sapiens
  misc_RNA (1)...(19): siRNA sense strand
gacgaaauacuucuggaaa

SEQ ID NO: 1274222 - RNA, 19 nt, Homo sapiens
  misc_RNA (1)...(19): siRNA sense strand
caguggagcuggcaaaucu

SEQ ID NO: 1274223 - RNA, 19 nt, Homo sapiens
  misc_RNA (1)...(19): siRNA sense strand
cuaagguuauugagaaaga

SEQ ID NO: 1274224 - RNA, 19 nt, Homo sapiens
  misc_RNA (1)...(19): siRNA sense strand
uagaggauuuguggcuuua

SEQ ID NO: 1274225 - RNA, 19 nt, Homo sapiens
  misc_RNA (1)...(19): siRNA sense strand
cuaugggaaucaucuuuaa

SEQ ID NO: 1274226 - RNA, 19 nt, Homo sapiens
  misc_RNA (1)...(19): siRNA sense strand
ugggaaggguagauaaauu

SEQ ID NO: 1274227 - RNA, 19 nt, Homo sapiens
  misc_RNA (1)...(19): siRNA sense strand
gaagccaucagaaucagaa

SEQ ID NO: 1274228 - RNA, 19 nt, Homo sapiens
  misc_RNA (1)...(19): siRNA sense strand
ccugaugagugugcuguua

SEQ ID NO: 1274229 - RNA, 19 nt, Homo sapiens
  misc_RNA (1)...(19): siRNA sense strand
gaggaguugaugucaguua

SEQ ID NO: 1274230 - RNA, 19 nt, Homo sapiens
  misc_RNA (1)...(19): siRNA sense strand
ggacgaaauacuucuggaa

SEQ ID NO: 1274231 - RNA, 19 nt, Homo sapiens
  misc_RNA (1)...(19): siRNA sense strand
gaauggcuccucagaaucu

SEQ ID NO: 1274232 - RNA, 19 nt, Homo sapiens
  misc_RNA (1)...(19): siRNA sense strand
ggaacaagagguacaacga

SEQ ID NO: 1274233 - RNA, 19 nt, Homo sapiens
  misc_RNA (1)...(19): siRNA sense strand
gcaaaucuucacugcuaaa

SEQ ID NO: 1274234 - RNA, 19 nt, Homo sapiens
  misc_RNA (1)...(19): siRNA sense strand
gcuuaucuuugguagcuuu

SEQ ID NO: 1274235 - RNA, 19 nt, Homo sapiens
  misc_RNA (1)...(19): siRNA sense strand
uuauauggcuuaucuuugg

SEQ ID NO: 1274236 - RNA, 19 nt, Homo sapiens
  misc_RNA (1)...(19): siRNA sense strand
acacauggacgaaauacuu

SEQ ID NO: 1274237 - RNA, 19 nt, Homo sapiens
  misc_RNA (1)...(19): siRNA sense strand
ccaacagaaggaucaguua

SEQ ID NO: 1274238 - RNA, 19 nt, Homo sapiens
  misc_RNA (1)...(19): siRNA sense strand
gaauucaucaucuuguuuc

SEQ ID NO: 1274239 - RNA, 19 nt, Homo sapiens
  misc_RNA (1)...(19): siRNA sense strand
ugucugggauucacuguau

SEQ ID NO: 1274240 - RNA, 19 nt, Homo sapiens
  misc_RNA (1)...(19): siRNA sense strand
ucauguacauugaccaaau

SEQ ID NO: 1274241 - RNA, 19 nt, Homo sapiens
  misc_RNA (1)...(19): siRNA sense strand
uaacccagcagauaaugaa

SEQ ID NO: 1274242 - RNA, 19 nt, Homo sapiens
  misc_RNA (1)...(19): siRNA sense strand
gcugacauccuggcugaua

SEQ ID NO: 1274243 - RNA, 19 nt, Homo sapiens
  misc_RNA (1)...(19): siRNA sense strand
gagguacaacgaauauuau

SEQ ID NO: 1274244 - RNA, 19 nt, Homo sapiens
  misc_RNA (1)...(19): siRNA sense strand
ggaauggggccucucaaua

SEQ ID NO: 1274245 - RNA, 19 nt, Homo sapiens
  misc_RNA (1)...(19): siRNA sense strand
gagagagcuuauuggaaug

SEQ ID NO: 1274246 - RNA, 19 nt, Homo sapiens
  misc_RNA (1)...(19): siRNA sense strand
aaagaagccaucagaauca

SEQ ID NO: 1274247 - RNA, 19 nt, Homo sapiens
  misc_RNA (1)...(19): siRNA sense strand
gggauucacuguauuuuau

SEQ ID NO: 1274248 - RNA, 19 nt, Homo sapiens
  misc_RNA (1)...(19): siRNA sense strand
agaaagcuguccucaccaa

SEQ ID NO: 1274249 - RNA, 19 nt, Homo sapiens
  misc_RNA (1)...(19): siRNA sense strand
guacauugaccaaauacug

SEQ ID NO: 1274250 - RNA, 19 nt, Homo sapiens
  misc_RNA (1)...(19): siRNA sense strand
auacuggaauagaggauuu

SEQ ID NO: 1274251 - RNA, 19 nt, Homo sapiens
  misc_RNA (1)...(19): siRNA sense strand
gaggauuuguggcuuuaca

SEQ ID NO: 1274252 - RNA, 19 nt, Homo sapiens
  misc_RNA (1)...(19): siRNA sense strand
augcuaagguuauugagaa

SEQ ID NO: 1274253 - RNA, 19 nt, Homo sapiens
  misc_RNA (1)...(19): siRNA sense strand
caacaccaaaggacuaaug

SEQ ID NO: 1274254 - RNA, 19 nt, Homo sapiens
  misc_RNA (1)...(19): siRNA sense strand
aaagagagagcuuauugga

SEQ ID NO: 1274255 - RNA, 19 nt, Homo sapiens
  misc_RNA (1)...(19): siRNA sense strand
ugaugagugugcuguuaaa

SEQ ID NO: 1274256 - RNA, 19 nt, Homo sapiens
  misc_RNA (1)...(19): siRNA sense strand
gcuuugguguuccugauga

SEQ ID NO: 1274257 - RNA, 19 nt, Homo sapiens
  misc_RNA (1)...(19): siRNA sense strand
ucuccaagauucagcauuc

SEQ ID NO: 1274258 - RNA, 19 nt, Homo sapiens
  misc_RNA (1)...(19): siRNA sense strand
gcucauugcugggauggau

SEQ ID NO: 1274259 - RNA, 19 nt, Homo sapiens
  misc_RNA (1)...(19): siRNA sense strand
aaggaucaguuaccaucua

SEQ ID NO: 1274260 - RNA, 19 nt, Homo sapiens
  misc_RNA (1)...(19): siRNA sense strand
caccaaaggacuaaugcua

SEQ ID NO: 1274261 - RNA, 19 nt, Homo sapiens
  misc_RNA (1)...(19): siRNA sense strand
gcuggcuucaucuuuauua

SEQ ID NO: 1274262 - RNA, 19 nt, Homo sapiens
  misc_RNA (1)...(19): siRNA sense strand
ugaugggucuccaagauuc

SEQ ID NO: 1274263 - RNA, 19 nt, Homo sapiens
  misc_RNA (1)...(19): siRNA sense strand
gaccaaauacuggaauaga

SEQ ID NO: 1274264 - RNA, 19 nt, Homo sapiens
  misc_RNA (1)...(19): siRNA sense strand
aaugaugggucuccaagau

SEQ ID NO: 1274265 - RNA, 19 nt, Homo sapiens
  misc_RNA (1)...(19): siRNA sense strand
ggcaaaucuucacugcuaa

SEQ ID NO: 1274266 - RNA, 19 nt, Homo sapiens
  misc_RNA (1)...(19): siRNA sense strand
gaacaacuuccuucaucuc

SEQ ID NO: 1274267 - RNA, 19 nt, Homo sapiens
  misc_RNA (1)...(19): siRNA sense strand
ccaguuccaugagaaaugu

SEQ ID NO: 1274268 - RNA, 19 nt, Homo sapiens
  misc_RNA (1)...(19): siRNA sense strand
ucucugaaaugcaagacuu

SEQ ID NO: 1274269 - RNA, 19 nt, Homo sapiens
  misc_RNA (1)...(19): siRNA sense strand
gccauuauucuccuuuauu

SEQ ID NO: 1274270 - RNA, 19 nt, Homo sapiens
  misc_RNA (1)...(19): siRNA sense strand
gacuaaugcuaagguuauu

SEQ ID NO: 1274271 - RNA, 19 nt, Homo sapiens
  misc_RNA (1)...(19): siRNA sense strand
acaagagguacaacgaaua

SEQ ID NO: 1274272 - RNA, 19 nt, Homo sapiens
  misc_RNA (1)...(19): siRNA sense strand
gauaaccuugcuaaacauu

SEQ ID NO: 1274273 - RNA, 19 nt, Homo sapiens
  misc_RNA (1)...(19): siRNA sense strand
caguggaccugaagaagga

SEQ ID NO: 1274274 - RNA, 19 nt, Homo sapiens
  misc_RNA (1)...(19): siRNA sense strand
gcacagggaggacguacug

SEQ ID NO: 1274275 - RNA, 19 nt, Homo sapiens
  misc_RNA (1)...(19): siRNA sense strand
aggaggagcuggccuacug

SEQ ID NO: 1274276 - RNA, 19 nt, Homo sapiens
  misc_RNA (1)...(19): siRNA sense strand
ugcggaagcugcugaggaa

SEQ ID NO: 1274277 - RNA, 19 nt, Homo sapiens
  misc_RNA (1)...(19): siRNA sense strand
gccaggaguucuucuucga

SEQ ID NO: 1274278 - RNA, 19 nt, Homo sapiens
  misc_RNA (1)...(19): siRNA sense strand
ggacagccaggaguucuuc

SEQ ID NO: 1274279 - RNA, 19 nt, Homo sapiens
  misc_RNA (1)...(19): siRNA sense strand
ccagacaccaccacuaugg

SEQ ID NO: 1274280 - RNA, 19 nt, Homo sapiens
  misc_RNA (1)...(19): siRNA sense strand
gccgucagccuguguguca

SEQ ID NO: 1274281 - RNA, 19 nt, Homo sapiens
  misc_RNA (1)...(19): siRNA sense strand
ucccagacaccaccacuau

SEQ ID NO: 1274282 - RNA, 19 nt, Homo sapiens
  misc_RNA (1)...(19): siRNA sense strand
caguggaccugaagaagga

SEQ ID NO: 1274283 - RNA, 19 nt, Homo sapiens
  misc_RNA (1)...(19): siRNA sense strand
gcacagggaggacguacug

SEQ ID NO: 1274284 - RNA, 19 nt, Homo sapiens
  misc_RNA (1)...(19): siRNA sense strand
aggaggagcuggccuacug

SEQ ID NO: 1274285 - RNA, 19 nt, Homo sapiens
  misc_RNA (1)...(19): siRNA sense strand
ugcggaagcugcugaggaa

SEQ ID NO: 1274286 - RNA, 19 nt, Homo sapiens
  misc_RNA (1)...(19): siRNA sense strand
gccaggaguucuucuucga

SEQ ID NO: 1274287 - RNA, 19 nt, Homo sapiens
  misc_RNA (1)...(19): siRNA sense strand
ggacagccaggaguucuuc

SEQ ID NO: 1274288 - RNA, 19 nt, Homo sapiens
  misc_RNA (1)...(19): siRNA sense strand
ccagacaccaccacuaugg

SEQ ID NO: 1274289 - RNA, 19 nt, Homo sapiens
  misc_RNA (1)...(19): siRNA sense strand
gccgucagccuguguguca

SEQ ID NO: 1274290 - RNA, 19 nt, Homo sapiens
  misc_RNA (1)...(19): siRNA sense strand
ucccagacaccaccacuau

SEQ ID NO: 1274291 - RNA, 19 nt, Homo sapiens
  misc_RNA (1)...(19): siRNA sense strand
gaacacaacugagaaggaa

SEQ ID NO: 1274292 - RNA, 19 nt, Homo sapiens
  misc_RNA (1)...(19): siRNA sense strand
caagugcgauaucaccuua

SEQ ID NO: 1274293 - RNA, 19 nt, Homo sapiens
  misc_RNA (1)...(19): siRNA sense strand
uaaagacgaucaugagaga

SEQ ID NO: 1274294 - RNA, 19 nt, Homo sapiens
  misc_RNA (1)...(19): siRNA sense strand
ggacacaagugcgauauca

SEQ ID NO: 1274295 - RNA, 19 nt, Homo sapiens
  misc_RNA (1)...(19): siRNA sense strand
ugaaacggcucgacaggaa

SEQ ID NO: 1274296 - RNA, 19 nt, Homo sapiens
  misc_RNA (1)...(19): siRNA sense strand
acaagcagcugauccgauu

SEQ ID NO: 1274297 - RNA, 19 nt, Homo sapiens
  misc_RNA (1)...(19): siRNA sense strand
gaaggaagccaaccagagu

SEQ ID NO: 1274298 - RNA, 19 nt, Homo sapiens
  misc_RNA (1)...(19): siRNA sense strand
gaucaugagagagaaauau

SEQ ID NO: 1274299 - RNA, 19 nt, Homo sapiens
  misc_RNA (1)...(19): siRNA sense strand
gaaaggcuaaagacgauca

SEQ ID NO: 1274300 - RNA, 19 nt, Homo sapiens
  misc_RNA (1)...(19): siRNA sense strand
gagagaaauauucaaagug

SEQ ID NO: 1274301 - RNA, 19 nt, Homo sapiens
  misc_RNA (1)...(19): siRNA sense strand
uggaaaggcuaaagacgau

SEQ ID NO: 1274302 - RNA, 19 nt, Homo sapiens
  misc_RNA (1)...(19): siRNA sense strand
gaauuccuguccugugaag

SEQ ID NO: 1274303 - RNA, 19 nt, Homo sapiens
  misc_RNA (1)...(19): siRNA sense strand
gcuaaagacgaucaugaga

SEQ ID NO: 1274304 - RNA, 19 nt, Homo sapiens
  misc_RNA (1)...(19): siRNA sense strand
uugaauuccuguccuguga

SEQ ID NO: 1274305 - RNA, 19 nt, Homo sapiens
  misc_RNA (1)...(19): siRNA sense strand
caugagagagaaauauuca

SEQ ID NO: 1274306 - RNA, 19 nt, Homo sapiens
  misc_RNA (1)...(19): siRNA sense strand
gcugauccgauuccugaaa

SEQ ID NO: 1274307 - RNA, 19 nt, Homo sapiens
  misc_RNA (1)...(19): siRNA sense strand
gagagagaaauauucaaag

SEQ ID NO: 1274308 - RNA, 19 nt, Homo sapiens
  misc_RNA (1)...(19): siRNA sense strand
gcaugugccggcaacuuug

SEQ ID NO: 1274309 - RNA, 19 nt, Homo sapiens
  misc_RNA (1)...(19): siRNA sense strand
gaagccaaccagaguacgu

SEQ ID NO: 1274310 - RNA, 19 nt, Homo sapiens
  misc_RNA (1)...(19): siRNA sense strand
cuacagccaccaugagaag

SEQ ID NO: 1274311 - RNA, 19 nt, Homo sapiens
  misc_RNA (1)...(19): siRNA sense strand
agacgaucaugagagagaa

SEQ ID NO: 1274312 - RNA, 19 nt, Homo sapiens
  misc_RNA (1)...(19): siRNA sense strand
uuggaaaacuucuuggaaa

SEQ ID NO: 1274313 - RNA, 19 nt, Homo sapiens
  misc_RNA (1)...(19): siRNA sense strand
aagacgaucaugagagaga

SEQ ID NO: 1274314 - RNA, 19 nt, Homo sapiens
  misc_RNA (1)...(19): siRNA sense strand
gaacacaacugagaaggaa

SEQ ID NO: 1274315 - RNA, 19 nt, Homo sapiens
  misc_RNA (1)...(19): siRNA sense strand
caagugcgauaucaccuua

SEQ ID NO: 1274316 - RNA, 19 nt, Homo sapiens
  misc_RNA (1)...(19): siRNA sense strand
uaaagacgaucaugagaga

SEQ ID NO: 1274317 - RNA, 19 nt, Homo sapiens
  misc_RNA (1)...(19): siRNA sense strand
ggacacaagugcgauauca

SEQ ID NO: 1274318 - RNA, 19 nt, Homo sapiens
  misc_RNA (1)...(19): siRNA sense strand
ugaaacggcucgacaggaa

SEQ ID NO: 1274319 - RNA, 19 nt, Homo sapiens
  misc_RNA (1)...(19): siRNA sense strand
acaagcagcugauccgauu

SEQ ID NO: 1274320 - RNA, 19 nt, Homo sapiens
  misc_RNA (1)...(19): siRNA sense strand
gaaggaagccaaccagagu

SEQ ID NO: 1274321 - RNA, 19 nt, Homo sapiens
  misc_RNA (1)...(19): siRNA sense strand
gaucaugagagagaaauau

SEQ ID NO: 1274322 - RNA, 19 nt, Homo sapiens
  misc_RNA (1)...(19): siRNA sense strand
gaaaggcuaaagacgauca

SEQ ID NO: 1274323 - RNA, 19 nt, Homo sapiens
  misc_RNA (1)...(19): siRNA sense strand
gagagaaauauucaaagug

SEQ ID NO: 1274324 - RNA, 19 nt, Homo sapiens
  misc_RNA (1)...(19): siRNA sense strand
uggaaaggcuaaagacgau

SEQ ID NO: 1274325 - RNA, 19 nt, Homo sapiens
  misc_RNA (1)...(19): siRNA sense strand
gaauuccuguccugugaag

SEQ ID NO: 1274326 - RNA, 19 nt, Homo sapiens
  misc_RNA (1)...(19): siRNA sense strand
gcuaaagacgaucaugaga

SEQ ID NO: 1274327 - RNA, 19 nt, Homo sapiens
  misc_RNA (1)...(19): siRNA sense strand
uugaauuccuguccuguga

SEQ ID NO: 1274328 - RNA, 19 nt, Homo sapiens
  misc_RNA (1)...(19): siRNA sense strand
caugagagagaaauauuca

SEQ ID NO: 1274329 - RNA, 19 nt, Homo sapiens
  misc_RNA (1)...(19): siRNA sense strand
gcugauccgauuccugaaa

SEQ ID NO: 1274330 - RNA, 19 nt, Homo sapiens
  misc_RNA (1)...(19): siRNA sense strand
gagagagaaauauucaaag

SEQ ID NO: 1274331 - RNA, 19 nt, Homo sapiens
  misc_RNA (1)...(19): siRNA sense strand
gcaugugccggcaacuuug

SEQ ID NO: 1274332 - RNA, 19 nt, Homo sapiens
  misc_RNA (1)...(19): siRNA sense strand
gaagccaaccagaguacgu

SEQ ID NO: 1274333 - RNA, 19 nt, Homo sapiens
  misc_RNA (1)...(19): siRNA sense strand
cuacagccaccaugagaag

SEQ ID NO: 1274334 - RNA, 19 nt, Homo sapiens
  misc_RNA (1)...(19): siRNA sense strand
agacgaucaugagagagaa

SEQ ID NO: 1274335 - RNA, 19 nt, Homo sapiens
  misc_RNA (1)...(19): siRNA sense strand
uuggaaaacuucuuggaaa

SEQ ID NO: 1274336 - RNA, 19 nt, Homo sapiens
  misc_RNA (1)...(19): siRNA sense strand
aagacgaucaugagagaga

SEQ ID NO: 1274337 - RNA, 19 nt, Homo sapiens
  misc_RNA (1)...(19): siRNA sense strand
gaacacaacugagaaggaa

SEQ ID NO: 1274338 - RNA, 19 nt, Homo sapiens
  misc_RNA (1)...(19): siRNA sense strand
caagugcgauaucaccuua

SEQ ID NO: 1274339 - RNA, 19 nt, Homo sapiens
  misc_RNA (1)...(19): siRNA sense strand
uaaagacgaucaugagaga

SEQ ID NO: 1274340 - RNA, 19 nt, Homo sapiens
  misc_RNA (1)...(19): siRNA sense strand
ggacacaagugcgauauca

SEQ ID NO: 1274341 - RNA, 19 nt, Homo sapiens
  misc_RNA (1)...(19): siRNA sense strand
ugaaacggcucgacaggaa

SEQ ID NO: 1274342 - RNA, 19 nt, Homo sapiens
  misc_RNA (1)...(19): siRNA sense strand
acaagcagcugauccgauu

SEQ ID NO: 1274343 - RNA, 19 nt, Homo sapiens
  misc_RNA (1)...(19): siRNA sense strand
gaaggaagccaaccagagu

SEQ ID NO: 1274344 - RNA, 19 nt, Homo sapiens
  misc_RNA (1)...(19): siRNA sense strand
gaucaugagagagaaauau

SEQ ID NO: 1274345 - RNA, 19 nt, Homo sapiens
  misc_RNA (1)...(19): siRNA sense strand
gaaaggcuaaagacgauca

SEQ ID NO: 1274346 - RNA, 19 nt, Homo sapiens
  misc_RNA (1)...(19): siRNA sense strand
gagagaaauauucaaagug

SEQ ID NO: 1274347 - RNA, 19 nt, Homo sapiens
  misc_RNA (1)...(19): siRNA sense strand
uggaaaggcuaaagacgau

SEQ ID NO: 1274348 - RNA, 19 nt, Homo sapiens
  misc_RNA (1)...(19): siRNA sense strand
gaauuccuguccugugaag

SEQ ID NO: 1274349 - RNA, 19 nt, Homo sapiens
  misc_RNA (1)...(19): siRNA sense strand
gcuaaagacgaucaugaga

SEQ ID NO: 1274350 - RNA, 19 nt, Homo sapiens
  misc_RNA (1)...(19): siRNA sense strand
uugaauuccuguccuguga

SEQ ID NO: 1274351 - RNA, 19 nt, Homo sapiens
  misc_RNA (1)...(19): siRNA sense strand
caugagagagaaauauuca

SEQ ID NO: 1274352 - RNA, 19 nt, Homo sapiens
  misc_RNA (1)...(19): siRNA sense strand
gcugauccgauuccugaaa

SEQ ID NO: 1274353 - RNA, 19 nt, Homo sapiens
  misc_RNA (1)...(19): siRNA sense strand
gagagagaaauauucaaag

SEQ ID NO: 1274354 - RNA, 19 nt, Homo sapiens
  misc_RNA (1)...(19): siRNA sense strand
gcaugugccggcaacuuug

SEQ ID NO: 1274355 - RNA, 19 nt, Homo sapiens
  misc_RNA (1)...(19): siRNA sense strand
gaagccaaccagaguacgu

SEQ ID NO: 1274356 - RNA, 19 nt, Homo sapiens
  misc_RNA (1)...(19): siRNA sense strand
cuacagccaccaugagaag

SEQ ID NO: 1274357 - RNA, 19 nt, Homo sapiens
  misc_RNA (1)...(19): siRNA sense strand
agacgaucaugagagagaa

SEQ ID NO: 1274358 - RNA, 19 nt, Homo sapiens
  misc_RNA (1)...(19): siRNA sense strand
uuggaaaacuucuuggaaa

SEQ ID NO: 1274359 - RNA, 19 nt, Homo sapiens
  misc_RNA (1)...(19): siRNA sense strand
aagacgaucaugagagaga

SEQ ID NO: 1274360 - RNA, 19 nt, Homo sapiens
  misc_RNA (1)...(19): siRNA sense strand
gaacacaacugagaaggaa

SEQ ID NO: 1274361 - RNA, 19 nt, Homo sapiens
  misc_RNA (1)...(19): siRNA sense strand
caagugcgauaucaccuua

SEQ ID NO: 1274362 - RNA, 19 nt, Homo sapiens
  misc_RNA (1)...(19): siRNA sense strand
uaaagacgaucaugagaga

SEQ ID NO: 1274363 - RNA, 19 nt, Homo sapiens
  misc_RNA (1)...(19): siRNA sense strand
ggacacaagugcgauauca

SEQ ID NO: 1274364 - RNA, 19 nt, Homo sapiens
  misc_RNA (1)...(19): siRNA sense strand
ugaaacggcucgacaggaa

SEQ ID NO: 1274365 - RNA, 19 nt, Homo sapiens
  misc_RNA (1)...(19): siRNA sense strand
acaagcagcugauccgauu

SEQ ID NO: 1274366 - RNA, 19 nt, Homo sapiens
  misc_RNA (1)...(19): siRNA sense strand
gaaggaagccaaccagagu

SEQ ID NO: 1274367 - RNA, 19 nt, Homo sapiens
  misc_RNA (1)...(19): siRNA sense strand
gaucaugagagagaaauau

SEQ ID NO: 1274368 - RNA, 19 nt, Homo sapiens
  misc_RNA (1)...(19): siRNA sense strand
gaaaggcuaaagacgauca

SEQ ID NO: 1274369 - RNA, 19 nt, Homo sapiens
  misc_RNA (1)...(19): siRNA sense strand
gagagaaauauucaaagug

SEQ ID NO: 1274370 - RNA, 19 nt, Homo sapiens
  misc_RNA (1)...(19): siRNA sense strand
uggaaaggcuaaagacgau

SEQ ID NO: 1274371 - RNA, 19 nt, Homo sapiens
  misc_RNA (1)...(19): siRNA sense strand
gaauuccuguccugugaag

SEQ ID NO: 1274372 - RNA, 19 nt, Homo sapiens
  misc_RNA (1)...(19): siRNA sense strand
gcuaaagacgaucaugaga

SEQ ID NO: 1274373 - RNA, 19 nt, Homo sapiens
  misc_RNA (1)...(19): siRNA sense strand
uugaauuccuguccuguga

SEQ ID NO: 1274374 - RNA, 19 nt, Homo sapiens
  misc_RNA (1)...(19): siRNA sense strand
caugagagagaaauauuca

SEQ ID NO: 1274375 - RNA, 19 nt, Homo sapiens
  misc_RNA (1)...(19): siRNA sense strand
gcugauccgauuccugaaa

SEQ ID NO: 1274376 - RNA, 19 nt, Homo sapiens
  misc_RNA (1)...(19): siRNA sense strand
gagagagaaauauucaaag

SEQ ID NO: 1274377 - RNA, 19 nt, Homo sapiens
  misc_RNA (1)...(19): siRNA sense strand
gcaugugccggcaacuuug

SEQ ID NO: 1274378 - RNA, 19 nt, Homo sapiens
  misc_RNA (1)...(19): siRNA sense strand
gaagccaaccagaguacgu

SEQ ID NO: 1274379 - RNA, 19 nt, Homo sapiens
  misc_RNA (1)...(19): siRNA sense strand
cuacagccaccaugagaag

SEQ ID NO: 1274380 - RNA, 19 nt, Homo sapiens
  misc_RNA (1)...(19): siRNA sense strand
agacgaucaugagagagaa

SEQ ID NO: 1274381 - RNA, 19 nt, Homo sapiens
  misc_RNA (1)...(19): siRNA sense strand
uuggaaaacuucuuggaaa

SEQ ID NO: 1274382 - RNA, 19 nt, Homo sapiens
  misc_RNA (1)...(19): siRNA sense strand
aagacgaucaugagagaga

SEQ ID NO: 1274383 - RNA, 19 nt, Homo sapiens
  misc_RNA (1)...(19): siRNA sense strand
gaucuucacugcagacuua

SEQ ID NO: 1274384 - RNA, 19 nt, Homo sapiens
  misc_RNA (1)...(19): siRNA sense strand
gaacuuaccuucaacuaca

SEQ ID NO: 1274385 - RNA, 19 nt, Homo sapiens
  misc_RNA (1)...(19): siRNA sense strand
gaaaguaaacgucaaagaa

SEQ ID NO: 1274386 - RNA, 19 nt, Homo sapiens
  misc_RNA (1)...(19): siRNA sense strand
gauauuugcuccuaagaaa

SEQ ID NO: 1274387 - RNA, 19 nt, Homo sapiens
  misc_RNA (1)...(19): siRNA sense strand
ggacgagaauucuuugauu

SEQ ID NO: 1274388 - RNA, 19 nt, Homo sapiens
  misc_RNA (1)...(19): siRNA sense strand
gaacugcaguggcuucuug

SEQ ID NO: 1274389 - RNA, 19 nt, Homo sapiens
  misc_RNA (1)...(19): siRNA sense strand
gcaaguggcuuuuggaaua

SEQ ID NO: 1274390 - RNA, 19 nt, Homo sapiens
  misc_RNA (1)...(19): siRNA sense strand
gaacuacccagaagaaauu

SEQ ID NO: 1274391 - RNA, 19 nt, Homo sapiens
  misc_RNA (1)...(19): siRNA sense strand
gaaggaaacugguauugca

SEQ ID NO: 1274392 - RNA, 19 nt, Homo sapiens
  misc_RNA (1)...(19): siRNA sense strand
aaacagaagccucucauua

SEQ ID NO: 1274393 - RNA, 19 nt, Homo sapiens
  misc_RNA (1)...(19): siRNA sense strand
uaagacagcugcaggaaga

SEQ ID NO: 1274394 - RNA, 19 nt, Homo sapiens
  misc_RNA (1)...(19): siRNA sense strand
gcuuauagaugaagaagaa

SEQ ID NO: 1274395 - RNA, 19 nt, Homo sapiens
  misc_RNA (1)...(19): siRNA sense strand
gugaagcucugcuauauug

SEQ ID NO: 1274396 - RNA, 19 nt, Homo sapiens
  misc_RNA (1)...(19): siRNA sense strand
gccgagagcuguugagaaa

SEQ ID NO: 1274397 - RNA, 19 nt, Homo sapiens
  misc_RNA (1)...(19): siRNA sense strand
gaaagacuguuugcaaaug

SEQ ID NO: 1274398 - RNA, 19 nt, Homo sapiens
  misc_RNA (1)...(19): siRNA sense strand
gaucaaagccuucauccaa

SEQ ID NO: 1274399 - RNA, 19 nt, Homo sapiens
  misc_RNA (1)...(19): siRNA sense strand
gaaaguggauggucuaaaa

SEQ ID NO: 1274400 - RNA, 19 nt, Homo sapiens
  misc_RNA (1)...(19): siRNA sense strand
agugagaacucguuaauaa

SEQ ID NO: 1274401 - RNA, 19 nt, Homo sapiens
  misc_RNA (1)...(19): siRNA sense strand
gacaaacccucuccaguga

SEQ ID NO: 1274402 - RNA, 19 nt, Homo sapiens
  misc_RNA (1)...(19): siRNA sense strand
gaucagauauuugcuccua

SEQ ID NO: 1274403 - RNA, 19 nt, Homo sapiens
  misc_RNA (1)...(19): siRNA sense strand
gaaggcaucuacucuuguu

SEQ ID NO: 1274404 - RNA, 19 nt, Homo sapiens
  misc_RNA (1)...(19): siRNA sense strand
gaauggagauacccgugua

SEQ ID NO: 1274405 - RNA, 19 nt, Homo sapiens
  misc_RNA (1)...(19): siRNA sense strand
gaacauugauaucccugaa

SEQ ID NO: 1274406 - RNA, 19 nt, Homo sapiens
  misc_RNA (1)...(19): siRNA sense strand
gacgagaauucuuugauuu

SEQ ID NO: 1274407 - RNA, 19 nt, Homo sapiens
  misc_RNA (1)...(19): siRNA sense strand
gaaccagacuacaaauuca

SEQ ID NO: 1274408 - RNA, 19 nt, Homo sapiens
  misc_RNA (1)...(19): siRNA sense strand
ugaaagauaugcaugauag

SEQ ID NO: 1274409 - RNA, 19 nt, Homo sapiens
  misc_RNA (1)...(19): siRNA sense strand
guaggagucucuaagguuu

SEQ ID NO: 1274410 - RNA, 19 nt, Homo sapiens
  misc_RNA (1)...(19): siRNA sense strand
agaaagagcucugauaauc

SEQ ID NO: 1274411 - RNA, 19 nt, Homo sapiens
  misc_RNA (1)...(19): siRNA sense strand
gcagagcaaucaacaggaa

SEQ ID NO: 1274412 - RNA, 19 nt, Homo sapiens
  misc_RNA (1)...(19): siRNA sense strand
gagcuggacucuguaauga

SEQ ID NO: 1274413 - RNA, 19 nt, Homo sapiens
  misc_RNA (1)...(19): siRNA sense strand
gaacaucaaagccaucaaa

SEQ ID NO: 1274414 - RNA, 19 nt, Homo sapiens
  misc_RNA (1)...(19): siRNA sense strand
gcauaagguuccucagaaa

SEQ ID NO: 1274415 - RNA, 19 nt, Homo sapiens
  misc_RNA (1)...(19): siRNA sense strand
uaaaucaaguggugccuaa

SEQ ID NO: 1274416 - RNA, 19 nt, Homo sapiens
  misc_RNA (1)...(19): siRNA sense strand
cgaagugauuccauuagua

SEQ ID NO: 1274417 - RNA, 19 nt, Homo sapiens
  misc_RNA (1)...(19): siRNA sense strand
ccagacagacugcucauua

SEQ ID NO: 1274418 - RNA, 19 nt, Homo sapiens
  misc_RNA (1)...(19): siRNA sense strand
gagcugcacucaaggagaa

SEQ ID NO: 1274419 - RNA, 19 nt, Homo sapiens
  misc_RNA (1)...(19): siRNA sense strand
ugaaucagcuuccaagugu

SEQ ID NO: 1274420 - RNA, 19 nt, Homo sapiens
  misc_RNA (1)...(19): siRNA sense strand
cagccaagaugcaguguaa

SEQ ID NO: 1274421 - RNA, 19 nt, Homo sapiens
  misc_RNA (1)...(19): siRNA sense strand
cagagaacauguuaucuau

SEQ ID NO: 1274422 - RNA, 19 nt, Homo sapiens
  misc_RNA (1)...(19): siRNA sense strand
caaggagacuguugaggaa

SEQ ID NO: 1274423 - RNA, 19 nt, Homo sapiens
  misc_RNA (1)...(19): siRNA sense strand
aagaagauaugccauuuga

SEQ ID NO: 1274424 - RNA, 19 nt, Homo sapiens
  misc_RNA (1)...(19): siRNA sense strand
caaauucaguacauugcua

SEQ ID NO: 1274425 - RNA, 19 nt, Homo sapiens
  misc_RNA (1)...(19): siRNA sense strand
ugaagaagauaugccauuu

SEQ ID NO: 1274426 - RNA, 19 nt, Homo sapiens
  misc_RNA (1)...(19): siRNA sense strand
gaucagaccugugaacuac

SEQ ID NO: 1274427 - RNA, 19 nt, Homo sapiens
  misc_RNA (1)...(19): siRNA sense strand
ggauucaagugacauagaa

SEQ ID NO: 1274428 - RNA, 19 nt, Homo sapiens
  misc_RNA (1)...(19): siRNA sense strand
gaagauaugccauuugaag

SEQ ID NO: 1274429 - RNA, 19 nt, Homo sapiens
  misc_RNA (1)...(19): siRNA sense strand
gaagugauuccauuaguau

SEQ ID NO: 1274430 - RNA, 19 nt, Homo sapiens
  misc_RNA (1)...(19): siRNA sense strand
caaaggagcgagaagauga

SEQ ID NO: 1274431 - RNA, 19 nt, Homo sapiens
  misc_RNA (1)...(19): siRNA sense strand
gggccacgguuaaauguuu

SEQ ID NO: 1274432 - RNA, 19 nt, Homo sapiens
  misc_RNA (1)...(19): siRNA sense strand
ggcagaagauccuaguaaa

SEQ ID NO: 1274433 - RNA, 19 nt, Homo sapiens
  misc_RNA (1)...(19): siRNA sense strand
gagaacauguuaucuaugc

SEQ ID NO: 1274434 - RNA, 19 nt, Homo sapiens
  misc_RNA (1)...(19): siRNA sense strand
uaggaaacaugcuagaauu

SEQ ID NO: 1274435 - RNA, 19 nt, Homo sapiens
  misc_RNA (1)...(19): siRNA sense strand
gaagaugaguguuuuaguu

SEQ ID NO: 1274436 - RNA, 19 nt, Homo sapiens
  misc_RNA (1)...(19): siRNA sense strand
ugggugagcuuauagauga

SEQ ID NO: 1274437 - RNA, 19 nt, Homo sapiens
  misc_RNA (1)...(19): siRNA sense strand
agaagccucucauuaguaa

SEQ ID NO: 1274438 - RNA, 19 nt, Homo sapiens
  misc_RNA (1)...(19): siRNA sense strand
gaagagcuaccuguccuua

SEQ ID NO: 1274439 - RNA, 19 nt, Homo sapiens
  misc_RNA (1)...(19): siRNA sense strand
guucugauccguugauuaa

SEQ ID NO: 1274440 - RNA, 19 nt, Homo sapiens
  misc_RNA (1)...(19): siRNA sense strand
agacaaagaccgaaucauu

SEQ ID NO: 1274441 - RNA, 19 nt, Homo sapiens
  misc_RNA (1)...(19): siRNA sense strand
cagcaagguuugaggaauu

SEQ ID NO: 1274442 - RNA, 19 nt, Homo sapiens
  misc_RNA (1)...(19): siRNA sense strand
caucugcccuaaucacuuu

SEQ ID NO: 1274443 - RNA, 19 nt, Homo sapiens
  misc_RNA (1)...(19): siRNA sense strand
gagaauggcauaacugaau

SEQ ID NO: 1274444 - RNA, 19 nt, Homo sapiens
  misc_RNA (1)...(19): siRNA sense strand
gaaccuuggccuaaacuuu

SEQ ID NO: 1274445 - RNA, 19 nt, Homo sapiens
  misc_RNA (1)...(19): siRNA sense strand
ggcauaagguuccucagaa

SEQ ID NO: 1274446 - RNA, 19 nt, Homo sapiens
  misc_RNA (1)...(19): siRNA sense strand
gaaaagcaaucgucauguu

SEQ ID NO: 1274447 - RNA, 19 nt, Homo sapiens
  misc_RNA (1)...(19): siRNA sense strand
gaaguggucugugaaugga

SEQ ID NO: 1274448 - RNA, 19 nt, Homo sapiens
  misc_RNA (1)...(19): siRNA sense strand
agaauuaccuggaacuuca

SEQ ID NO: 1274449 - RNA, 19 nt, Homo sapiens
  misc_RNA (1)...(19): siRNA sense strand
acaagaagccaccaccuua

SEQ ID NO: 1274450 - RNA, 19 nt, Homo sapiens
  misc_RNA (1)...(19): siRNA sense strand
cuaaugaacuuuccaggau

SEQ ID NO: 1274451 - RNA, 19 nt, Homo sapiens
  misc_RNA (1)...(19): siRNA sense strand
gagaagagggaaacagaaa

SEQ ID NO: 1274452 - RNA, 19 nt, Homo sapiens
  misc_RNA (1)...(19): siRNA sense strand
gacaaagaccgaaucauug

SEQ ID NO: 1274453 - RNA, 19 nt, Homo sapiens
  misc_RNA (1)...(19): siRNA sense strand
ucugaggaauugcuaguua

SEQ ID NO: 1274454 - RNA, 19 nt, Homo sapiens
  misc_RNA (1)...(19): siRNA sense strand
gagaagaaacgccuuagga

SEQ ID NO: 1274455 - RNA, 19 nt, Homo sapiens
  misc_RNA (1)...(19): siRNA sense strand
gcaaucugauccugguaaa

SEQ ID NO: 1274456 - RNA, 19 nt, Homo sapiens
  misc_RNA (1)...(19): siRNA sense strand
guuaaucucucugaucuga

SEQ ID NO: 1274457 - RNA, 19 nt, Homo sapiens
  misc_RNA (1)...(19): siRNA sense strand
cuacgccacugaaguauga

SEQ ID NO: 1274458 - RNA, 19 nt, Homo sapiens
  misc_RNA (1)...(19): siRNA sense strand
gauaaugggccacuuaaca

SEQ ID NO: 1274459 - RNA, 19 nt, Homo sapiens
  misc_RNA (1)...(19): siRNA sense strand
aaacagcaguggugaaaca

SEQ ID NO: 1274460 - RNA, 19 nt, Homo sapiens
  misc_RNA (1)...(19): siRNA sense strand
uaaugaacuuuccaggaua

SEQ ID NO: 1274461 - RNA, 19 nt, Homo sapiens
  misc_RNA (1)...(19): siRNA sense strand
cuuaauggcuguuugaaau

SEQ ID NO: 1274462 - RNA, 19 nt, Homo sapiens
  misc_RNA (1)...(19): siRNA sense strand
gaagagggaaacagaaaga

SEQ ID NO: 1274463 - RNA, 19 nt, Homo sapiens
  misc_RNA (1)...(19): siRNA sense strand
ugaacaauaugcaugagaa

SEQ ID NO: 1274464 - RNA, 19 nt, Homo sapiens
  misc_RNA (1)...(19): siRNA sense strand
agacaggccuacugacaaa

SEQ ID NO: 1274465 - RNA, 19 nt, Homo sapiens
  misc_RNA (1)...(19): siRNA sense strand
gcaggaagaccgaaagaau

SEQ ID NO: 1274466 - RNA, 19 nt, Homo sapiens
  misc_RNA (1)...(19): siRNA sense strand
ggaaacugguauugcaaug

SEQ ID NO: 1274467 - RNA, 19 nt, Homo sapiens
  misc_RNA (1)...(19): siRNA sense strand
guaagcgcaugaacagauu

SEQ ID NO: 1274468 - RNA, 19 nt, Homo sapiens
  misc_RNA (1)...(19): siRNA sense strand
ucacauaccuauugaacca

SEQ ID NO: 1274469 - RNA, 19 nt, Homo sapiens
  misc_RNA (1)...(19): siRNA sense strand
ggaacuucaucaucaucua

SEQ ID NO: 1274470 - RNA, 19 nt, Homo sapiens
  misc_RNA (1)...(19): siRNA sense strand
gugaauuugugaaugagua

SEQ ID NO: 1274471 - RNA, 19 nt, Homo sapiens
  misc_RNA (1)...(19): siRNA sense strand
aauguuagcuggugcuuug

SEQ ID NO: 1274472 - RNA, 19 nt, Homo sapiens
  misc_RNA (1)...(19): siRNA sense strand
caaucaaguuggacaguga

SEQ ID NO: 1274473 - RNA, 19 nt, Homo sapiens
  misc_RNA (1)...(19): siRNA sense strand
uggaaagacuguuugcaaa

SEQ ID NO: 1274474 - RNA, 19 nt, Homo sapiens
  misc_RNA (1)...(19): siRNA sense strand
gauaagaugagacaugaug

SEQ ID NO: 1274475 - RNA, 19 nt, Homo sapiens
  misc_RNA (1)...(19): siRNA sense strand
gggcagaagauccuaguaa

SEQ ID NO: 1274476 - RNA, 19 nt, Homo sapiens
  misc_RNA (1)...(19): siRNA sense strand
gaaggaacucucuuacaga

SEQ ID NO: 1274477 - RNA, 19 nt, Homo sapiens
  misc_RNA (1)...(19): siRNA sense strand
cagaaucacauaccuauug

SEQ ID NO: 1274478 - RNA, 19 nt, Homo sapiens
  misc_RNA (1)...(19): siRNA sense strand
guaugugggugagcuuaua

SEQ ID NO: 1274479 - RNA, 19 nt, Homo sapiens
  misc_RNA (1)...(19): siRNA sense strand
guaaagcuacugaugagaa

SEQ ID NO: 1274480 - RNA, 19 nt, Homo sapiens
  misc_RNA (1)...(19): siRNA sense strand
gcacuaccaagauauuuga

SEQ ID NO: 1274481 - RNA, 19 nt, Homo sapiens
  misc_RNA (1)...(19): siRNA sense strand
uggcauaacugaaucuugu

SEQ ID NO: 1274482 - RNA, 19 nt, Homo sapiens
  misc_RNA (1)...(19): siRNA sense strand
caaagaagagccuccaguu

SEQ ID NO: 1274483 - RNA, 19 nt, Homo sapiens
  misc_RNA (1)...(19): siRNA sense strand
gaucuucacugcagacuua

SEQ ID NO: 1274484 - RNA, 19 nt, Homo sapiens
  misc_RNA (1)...(19): siRNA sense strand
gaacuuaccuucaacuaca

SEQ ID NO: 1274485 - RNA, 19 nt, Homo sapiens
  misc_RNA (1)...(19): siRNA sense strand
gaaaguaaacgucaaagaa

SEQ ID NO: 1274486 - RNA, 19 nt, Homo sapiens
  misc_RNA (1)...(19): siRNA sense strand
gauauuugcuccuaagaaa

SEQ ID NO: 1274487 - RNA, 19 nt, Homo sapiens
  misc_RNA (1)...(19): siRNA sense strand
ggacgagaauucuuugauu

SEQ ID NO: 1274488 - RNA, 19 nt, Homo sapiens
  misc_RNA (1)...(19): siRNA sense strand
gaacugcaguggcuucuug

SEQ ID NO: 1274489 - RNA, 19 nt, Homo sapiens
  misc_RNA (1)...(19): siRNA sense strand
gcaaguggcuuuuggaaua

SEQ ID NO: 1274490 - RNA, 19 nt, Homo sapiens
  misc_RNA (1)...(19): siRNA sense strand
aaacagaagccucucauua

SEQ ID NO: 1274491 - RNA, 19 nt, Homo sapiens
  misc_RNA (1)...(19): siRNA sense strand
gaaggaaacugguauugca

SEQ ID NO: 1274492 - RNA, 19 nt, Homo sapiens
  misc_RNA (1)...(19): siRNA sense strand
uaagacagcugcaggaaga

SEQ ID NO: 1274493 - RNA, 19 nt, Homo sapiens
  misc_RNA (1)...(19): siRNA sense strand
gcuuauagaugaagaagaa

SEQ ID NO: 1274494 - RNA, 19 nt, Homo sapiens
  misc_RNA (1)...(19): siRNA sense strand
gugaagcucugcuauauug

SEQ ID NO: 1274495 - RNA, 19 nt, Homo sapiens
  misc_RNA (1)...(19): siRNA sense strand
gccgagagcuguugagaaa

SEQ ID NO: 1274496 - RNA, 19 nt, Homo sapiens
  misc_RNA (1)...(19): siRNA sense strand
gaaagacuguuugcaaaug

SEQ ID NO: 1274497 - RNA, 19 nt, Homo sapiens
  misc_RNA (1)...(19): siRNA sense strand
gaucaaagccuucauccaa

SEQ ID NO: 1274498 - RNA, 19 nt, Homo sapiens
  misc_RNA (1)...(19): siRNA sense strand
gaaaguggauggucuaaaa

SEQ ID NO: 1274499 - RNA, 19 nt, Homo sapiens
  misc_RNA (1)...(19): siRNA sense strand
agugagaacucguuaauaa

SEQ ID NO: 1274500 - RNA, 19 nt, Homo sapiens
  misc_RNA (1)...(19): siRNA sense strand
gacaaacccucuccaguga

SEQ ID NO: 1274501 - RNA, 19 nt, Homo sapiens
  misc_RNA (1)...(19): siRNA sense strand
gaucagauauuugcuccua

SEQ ID NO: 1274502 - RNA, 19 nt, Homo sapiens
  misc_RNA (1)...(19): siRNA sense strand
gaaggcaucuacucuuguu

SEQ ID NO: 1274503 - RNA, 19 nt, Homo sapiens
  misc_RNA (1)...(19): siRNA sense strand
gaauggagauacccgugua

SEQ ID NO: 1274504 - RNA, 19 nt, Homo sapiens
  misc_RNA (1)...(19): siRNA sense strand
gaacauugauaucccugaa

SEQ ID NO: 1274505 - RNA, 19 nt, Homo sapiens
  misc_RNA (1)...(19): siRNA sense strand
gacgagaauucuuugauuu

SEQ ID NO: 1274506 - RNA, 19 nt, Homo sapiens
  misc_RNA (1)...(19): siRNA sense strand
gaaccagacuacaaauuca

SEQ ID NO: 1274507 - RNA, 19 nt, Homo sapiens
  misc_RNA (1)...(19): siRNA sense strand
ugaaagauaugcaugauag

SEQ ID NO: 1274508 - RNA, 19 nt, Homo sapiens
  misc_RNA (1)...(19): siRNA sense strand
guaggagucucuaagguuu

SEQ ID NO: 1274509 - RNA, 19 nt, Homo sapiens
  misc_RNA (1)...(19): siRNA sense strand
agaaagagcucugauaauc

SEQ ID NO: 1274510 - RNA, 19 nt, Homo sapiens
  misc_RNA (1)...(19): siRNA sense strand
gcagagcaaucaacaggaa

SEQ ID NO: 1274511 - RNA, 19 nt, Homo sapiens
  misc_RNA (1)...(19): siRNA sense strand
gagcuggacucuguaauga

SEQ ID NO: 1274512 - RNA, 19 nt, Homo sapiens
  misc_RNA (1)...(19): siRNA sense strand
gaacaucaaagccaucaaa

SEQ ID NO: 1274513 - RNA, 19 nt, Homo sapiens
  misc_RNA (1)...(19): siRNA sense strand
gcauaagguuccucagaaa

SEQ ID NO: 1274514 - RNA, 19 nt, Homo sapiens
  misc_RNA (1)...(19): siRNA sense strand
uaaaucaaguggugccuaa

SEQ ID NO: 1274515 - RNA, 19 nt, Homo sapiens
  misc_RNA (1)...(19): siRNA sense strand
cgaagugauuccauuagua

SEQ ID NO: 1274516 - RNA, 19 nt, Homo sapiens
  misc_RNA (1)...(19): siRNA sense strand
ccagacagacugcucauua

SEQ ID NO: 1274517 - RNA, 19 nt, Homo sapiens
  misc_RNA (1)...(19): siRNA sense strand
gagcugcacucaaggagaa

SEQ ID NO: 1274518 - RNA, 19 nt, Homo sapiens
  misc_RNA (1)...(19): siRNA sense strand
ugaaucagcuuccaagugu

SEQ ID NO: 1274519 - RNA, 19 nt, Homo sapiens
  misc_RNA (1)...(19): siRNA sense strand
cagccaagaugcaguguaa

SEQ ID NO: 1274520 - RNA, 19 nt, Homo sapiens
  misc_RNA (1)...(19): siRNA sense strand
cagagaacauguuaucuau

SEQ ID NO: 1274521 - RNA, 19 nt, Homo sapiens
  misc_RNA (1)...(19): siRNA sense strand
caaggagacuguugaggaa

SEQ ID NO: 1274522 - RNA, 19 nt, Homo sapiens
  misc_RNA (1)...(19): siRNA sense strand
aagaagauaugccauuuga

SEQ ID NO: 1274523 - RNA, 19 nt, Homo sapiens
  misc_RNA (1)...(19): siRNA sense strand
caaauucaguacauugcua

SEQ ID NO: 1274524 - RNA, 19 nt, Homo sapiens
  misc_RNA (1)...(19): siRNA sense strand
ugaagaagauaugccauuu

SEQ ID NO: 1274525 - RNA, 19 nt, Homo sapiens
  misc_RNA (1)...(19): siRNA sense strand
ggauucaagugacauagaa

SEQ ID NO: 1274526 - RNA, 19 nt, Homo sapiens
  misc_RNA (1)...(19): siRNA sense strand
gaagauaugccauuugaag

SEQ ID NO: 1274527 - RNA, 19 nt, Homo sapiens
  misc_RNA (1)...(19): siRNA sense strand
gaagugauuccauuaguau

SEQ ID NO: 1274528 - RNA, 19 nt, Homo sapiens
  misc_RNA (1)...(19): siRNA sense strand
caaaggagcgagaagauga

SEQ ID NO: 1274529 - RNA, 19 nt, Homo sapiens
  misc_RNA (1)...(19): siRNA sense strand
gggccacgguuaaauguuu

SEQ ID NO: 1274530 - RNA, 19 nt, Homo sapiens
  misc_RNA (1)...(19): siRNA sense strand
ggcagaagauccuaguaaa

SEQ ID NO: 1274531 - RNA, 19 nt, Homo sapiens
  misc_RNA (1)...(19): siRNA sense strand
gagaacauguuaucuaugc

SEQ ID NO: 1274532 - RNA, 19 nt, Homo sapiens
  misc_RNA (1)...(19): siRNA sense strand
gaagagcuaccuguccuua

SEQ ID NO: 1274533 - RNA, 19 nt, Homo sapiens
  misc_RNA (1)...(19): siRNA sense strand
gaagaugaguguuuuaguu

SEQ ID NO: 1274534 - RNA, 19 nt, Homo sapiens
  misc_RNA (1)...(19): siRNA sense strand
ugggugagcuuauagauga

SEQ ID NO: 1274535 - RNA, 19 nt, Homo sapiens
  misc_RNA (1)...(19): siRNA sense strand
uaggaaacaugcuagaauu

SEQ ID NO: 1274536 - RNA, 19 nt, Homo sapiens
  misc_RNA (1)...(19): siRNA sense strand
agaagccucucauuaguaa

SEQ ID NO: 1274537 - RNA, 19 nt, Homo sapiens
  misc_RNA (1)...(19): siRNA sense strand
guucugauccguugauuaa

SEQ ID NO: 1274538 - RNA, 19 nt, Homo sapiens
  misc_RNA (1)...(19): siRNA sense strand
agacaaagaccgaaucauu

SEQ ID NO: 1274539 - RNA, 19 nt, Homo sapiens
  misc_RNA (1)...(19): siRNA sense strand
cagcaagguuugaggaauu

SEQ ID NO: 1274540 - RNA, 19 nt, Homo sapiens
  misc_RNA (1)...(19): siRNA sense strand
caucugcccuaaucacuuu

SEQ ID NO: 1274541 - RNA, 19 nt, Homo sapiens
  misc_RNA (1)...(19): siRNA sense strand
gagaauggcauaacugaau

SEQ ID NO: 1274542 - RNA, 19 nt, Homo sapiens
  misc_RNA (1)...(19): siRNA sense strand
gaaccuuggccuaaacuuu

SEQ ID NO: 1274543 - RNA, 19 nt, Homo sapiens
  misc_RNA (1)...(19): siRNA sense strand
ggcauaagguuccucagaa

SEQ ID NO: 1274544 - RNA, 19 nt, Homo sapiens
  misc_RNA (1)...(19): siRNA sense strand
gaaaagcaaucgucauguu

SEQ ID NO: 1274545 - RNA, 19 nt, Homo sapiens
  misc_RNA (1)...(19): siRNA sense strand
gaaguggucugugaaugga

SEQ ID NO: 1274546 - RNA, 19 nt, Homo sapiens
  misc_RNA (1)...(19): siRNA sense strand
acaagaagccaccaccuua

SEQ ID NO: 1274547 - RNA, 19 nt, Homo sapiens
  misc_RNA (1)...(19): siRNA sense strand
agaauuaccuggaacuuca

SEQ ID NO: 1274548 - RNA, 19 nt, Homo sapiens
  misc_RNA (1)...(19): siRNA sense strand
cuaaugaacuuuccaggau

SEQ ID NO: 1274549 - RNA, 19 nt, Homo sapiens
  misc_RNA (1)...(19): siRNA sense strand
gagaagagggaaacagaaa

SEQ ID NO: 1274550 - RNA, 19 nt, Homo sapiens
  misc_RNA (1)...(19): siRNA sense strand
gacaaagaccgaaucauug

SEQ ID NO: 1274551 - RNA, 19 nt, Homo sapiens
  misc_RNA (1)...(19): siRNA sense strand
ucugaggaauugcuaguua

SEQ ID NO: 1274552 - RNA, 19 nt, Homo sapiens
  misc_RNA (1)...(19): siRNA sense strand
gagaagaaacgccuuagga

SEQ ID NO: 1274553 - RNA, 19 nt, Homo sapiens
  misc_RNA (1)...(19): siRNA sense strand
gcaaucugauccugguaaa

SEQ ID NO: 1274554 - RNA, 19 nt, Homo sapiens
  misc_RNA (1)...(19): siRNA sense strand
guuaaucucucugaucuga

SEQ ID NO: 1274555 - RNA, 19 nt, Homo sapiens
  misc_RNA (1)...(19): siRNA sense strand
gaagagggaaacagaaaga

SEQ ID NO: 1274556 - RNA, 19 nt, Homo sapiens
  misc_RNA (1)...(19): siRNA sense strand
cuacgccacugaaguauga

SEQ ID NO: 1274557 - RNA, 19 nt, Homo sapiens
  misc_RNA (1)...(19): siRNA sense strand
gauaaugggccacuuaaca

SEQ ID NO: 1274558 - RNA, 19 nt, Homo sapiens
  misc_RNA (1)...(19): siRNA sense strand
aaacagcaguggugaaaca

SEQ ID NO: 1274559 - RNA, 19 nt, Homo sapiens
  misc_RNA (1)...(19): siRNA sense strand
uaaugaacuuuccaggaua

SEQ ID NO: 1274560 - RNA, 19 nt, Homo sapiens
  misc_RNA (1)...(19): siRNA sense strand
cuuaauggcuguuugaaau

SEQ ID NO: 1274561 - RNA, 19 nt, Homo sapiens
  misc_RNA (1)...(19): siRNA sense strand
ugaacaauaugcaugagaa

SEQ ID NO: 1274562 - RNA, 19 nt, Homo sapiens
  misc_RNA (1)...(19): siRNA sense strand
agacaggccuacugacaaa

SEQ ID NO: 1274563 - RNA, 19 nt, Homo sapiens
  misc_RNA (1)...(19): siRNA sense strand
gcaggaagaccgaaagaau

SEQ ID NO: 1274564 - RNA, 19 nt, Homo sapiens
  misc_RNA (1)...(19): siRNA sense strand
ggaaacugguauugcaaug

SEQ ID NO: 1274565 - RNA, 19 nt, Homo sapiens
  misc_RNA (1)...(19): siRNA sense strand
guaagcgcaugaacagauu

SEQ ID NO: 1274566 - RNA, 19 nt, Homo sapiens
  misc_RNA (1)...(19): siRNA sense strand
ucacauaccuauugaacca

SEQ ID NO: 1274567 - RNA, 19 nt, Homo sapiens
  misc_RNA (1)...(19): siRNA sense strand
aauguuagcuggugcuuug

SEQ ID NO: 1274568 - RNA, 19 nt, Homo sapiens
  misc_RNA (1)...(19): siRNA sense strand
ggaacuucaucaucaucua

SEQ ID NO: 1274569 - RNA, 19 nt, Homo sapiens
  misc_RNA (1)...(19): siRNA sense strand
gugaauuugugaaugagua

SEQ ID NO: 1274570 - RNA, 19 nt, Homo sapiens
  misc_RNA (1)...(19): siRNA sense strand
caaucaaguuggacaguga

SEQ ID NO: 1274571 - RNA, 19 nt, Homo sapiens
  misc_RNA (1)...(19): siRNA sense strand
uggaaagacuguuugcaaa

SEQ ID NO: 1274572 - RNA, 19 nt, Homo sapiens
  misc_RNA (1)...(19): siRNA sense strand
gauaagaugagacaugaug

SEQ ID NO: 1274573 - RNA, 19 nt, Homo sapiens
  misc_RNA (1)...(19): siRNA sense strand
gggcagaagauccuaguaa

SEQ ID NO: 1274574 - RNA, 19 nt, Homo sapiens
  misc_RNA (1)...(19): siRNA sense strand
gaaggaacucucuuacaga

SEQ ID NO: 1274575 - RNA, 19 nt, Homo sapiens
  misc_RNA (1)...(19): siRNA sense strand
ugaaggaacucucuuacag

SEQ ID NO: 1274576 - RNA, 19 nt, Homo sapiens
  misc_RNA (1)...(19): siRNA sense strand
guaugugggugagcuuaua

SEQ ID NO: 1274577 - RNA, 19 nt, Homo sapiens
  misc_RNA (1)...(19): siRNA sense strand
guaaagcuacugaugagaa

SEQ ID NO: 1274578 - RNA, 19 nt, Homo sapiens
  misc_RNA (1)...(19): siRNA sense strand
gcacuaccaagauauuuga

SEQ ID NO: 1274579 - RNA, 19 nt, Homo sapiens
  misc_RNA (1)...(19): siRNA sense strand
uggcauaacugaaucuugu

SEQ ID NO: 1274580 - RNA, 19 nt, Homo sapiens
  misc_RNA (1)...(19): siRNA sense strand
caaagaagagccuccaguu

SEQ ID NO: 1274581 - RNA, 19 nt, Homo sapiens
  misc_RNA (1)...(19): siRNA sense strand
cagaaucacauaccuauug

SEQ ID NO: 1274582 - RNA, 19 nt, Homo sapiens
  misc_RNA (1)...(19): siRNA sense strand
cauaguggcuggacagaca

SEQ ID NO: 1274583 - RNA, 19 nt, Homo sapiens
  misc_RNA (1)...(19): siRNA sense strand
ggagagagcacgauuuauu

SEQ ID NO: 1274584 - RNA, 19 nt, Homo sapiens
  misc_RNA (1)...(19): siRNA sense strand
agagaaacauguccauaua

SEQ ID NO: 1274585 - RNA, 19 nt, Homo sapiens
  misc_RNA (1)...(19): siRNA sense strand
cagaugcacuuuauuugua

SEQ ID NO: 1274586 - RNA, 19 nt, Homo sapiens
  misc_RNA (1)...(19): siRNA sense strand
ggacuuacgaguuugguua

SEQ ID NO: 1274587 - RNA, 19 nt, Homo sapiens
  misc_RNA (1)...(19): siRNA sense strand
aaacagauaucaggauuug

SEQ ID NO: 1274588 - RNA, 19 nt, Homo sapiens
  misc_RNA (1)...(19): siRNA sense strand
cuauggagcucauugguaa

SEQ ID NO: 1274589 - RNA, 19 nt, Homo sapiens
  misc_RNA (1)...(19): siRNA sense strand
aaacacaccuuuagugaag

SEQ ID NO: 1274590 - RNA, 19 nt, Homo sapiens
  misc_RNA (1)...(19): siRNA sense strand
gaacuuaaaggaucaguag

SEQ ID NO: 1274591 - RNA, 19 nt, Homo sapiens
  misc_RNA (1)...(19): siRNA sense strand
gaaaacagauaucaggauu

SEQ ID NO: 1274592 - RNA, 19 nt, Homo sapiens
  misc_RNA (1)...(19): siRNA sense strand
uaaaggaucaguagcaauu

SEQ ID NO: 1274593 - RNA, 19 nt, Homo sapiens
  misc_RNA (1)...(19): siRNA sense strand
aaaugggacuuacgaguuu

SEQ ID NO: 1274594 - RNA, 19 nt, Homo sapiens
  misc_RNA (1)...(19): siRNA sense strand
guuaucagaugcacuuuau

SEQ ID NO: 1274595 - RNA, 19 nt, Homo sapiens
  misc_RNA (1)...(19): siRNA sense strand
ugagauuggugaacgagua

SEQ ID NO: 1274596 - RNA, 19 nt, Homo sapiens
  misc_RNA (1)...(19): siRNA sense strand
gugaacgaguagauuauaa

SEQ ID NO: 1274597 - RNA, 19 nt, Homo sapiens
  misc_RNA (1)...(19): siRNA sense strand
gagagagcacgauuuauug

SEQ ID NO: 1274598 - RNA, 19 nt, Homo sapiens
  misc_RNA (1)...(19): siRNA sense strand
caaaugggacuuacgaguu

SEQ ID NO: 1274599 - RNA, 19 nt, Homo sapiens
  misc_RNA (1)...(19): siRNA sense strand
ggucauugcugugauuguu

SEQ ID NO: 1274600 - RNA, 19 nt, Homo sapiens
  misc_RNA (1)...(19): siRNA sense strand
ccagauccauuuucacuua

SEQ ID NO: 1274601 - RNA, 19 nt, Homo sapiens
  misc_RNA (1)...(19): siRNA sense strand
gaaggaauacuugacaguu

SEQ ID NO: 1274602 - RNA, 19 nt, Homo sapiens
  misc_RNA (1)...(19): siRNA sense strand
aaggaauacuugacaguuu

SEQ ID NO: 1274603 - RNA, 19 nt, Homo sapiens
  misc_RNA (1)...(19): siRNA sense strand
ucagaugacgccuguuaua

SEQ ID NO: 1274604 - RNA, 19 nt, Homo sapiens
  misc_RNA (1)...(19): siRNA sense strand
gaaaacacaccuuuaguga

SEQ ID NO: 1274605 - RNA, 19 nt, Homo sapiens
  misc_RNA (1)...(19): siRNA sense strand
gaugacgccuguuauagag

SEQ ID NO: 1274606 - RNA, 19 nt, Homo sapiens
  misc_RNA (1)...(19): siRNA sense strand
gagaaacauguccauauau

SEQ ID NO: 1274607 - RNA, 19 nt, Homo sapiens
  misc_RNA (1)...(19): siRNA sense strand
acgaguagauuauaagugu

SEQ ID NO: 1274608 - RNA, 19 nt, Homo sapiens
  misc_RNA (1)...(19): siRNA sense strand
cuacaaagcaacaguuaug

SEQ ID NO: 1274609 - RNA, 19 nt, Homo sapiens
  misc_RNA (1)...(19): siRNA sense strand
ccaccaacauuugaagcua

SEQ ID NO: 1274610 - RNA, 19 nt, Homo sapiens
  misc_RNA (1)...(19): siRNA sense strand
uauacgggauccuuuaaau

SEQ ID NO: 1274611 - RNA, 19 nt, Homo sapiens
  misc_RNA (1)...(19): siRNA sense strand
cgaguuugguuaucagaug

SEQ ID NO: 1274612 - RNA, 19 nt, Homo sapiens
  misc_RNA (1)...(19): siRNA sense strand
gaacgaguagauuauaagu

SEQ ID NO: 1274613 - RNA, 19 nt, Homo sapiens
  misc_RNA (1)...(19): siRNA sense strand
gugaggagccaccaacauu

SEQ ID NO: 1274614 - RNA, 19 nt, Homo sapiens
  misc_RNA (1)...(19): siRNA sense strand
gauggcagcgacacaauug

SEQ ID NO: 1274615 - RNA, 19 nt, Homo sapiens
  misc_RNA (1)...(19): siRNA sense strand
gcuauggagcucauuggua

SEQ ID NO: 1274616 - RNA, 19 nt, Homo sapiens
  misc_RNA (1)...(19): siRNA sense strand
gaggagccaccaacauuug

SEQ ID NO: 1274617 - RNA, 19 nt, Homo sapiens
  misc_RNA (1)...(19): siRNA sense strand
acacaccuuuagugaagua

SEQ ID NO: 1274618 - RNA, 19 nt, Homo sapiens
  misc_RNA (1)...(19): siRNA sense strand
ucucagaugacgccuguua

SEQ ID NO: 1274619 - RNA, 19 nt, Homo sapiens
  misc_RNA (1)...(19): siRNA sense strand
uagagaaacauguccauau

SEQ ID NO: 1274620 - RNA, 19 nt, Homo sapiens
  misc_RNA (1)...(19): siRNA sense strand
guuccaaagugucuuaaag

SEQ ID NO: 1274621 - RNA, 19 nt, Homo sapiens
  misc_RNA (1)...(19): siRNA sense strand
ggugaacgaguagauuaua

SEQ ID NO: 1274622 - RNA, 19 nt, Homo sapiens
  misc_RNA (1)...(19): siRNA sense strand
gaaguagaaguauuugagu

SEQ ID NO: 1274623 - RNA, 19 nt, Homo sapiens
  misc_RNA (1)...(19): siRNA sense strand
gaaacauguccauauauac

SEQ ID NO: 1274624 - RNA, 19 nt, Homo sapiens
  misc_RNA (1)...(19): siRNA sense strand
ugacgccuguuauagagaa

SEQ ID NO: 1274625 - RNA, 19 nt, Homo sapiens
  misc_RNA (1)...(19): siRNA sense strand
cgaguagauuauaagugua

SEQ ID NO: 1274626 - RNA, 19 nt, Homo sapiens
  misc_RNA (1)...(19): siRNA sense strand
gcacuuuauuuguaaugag

SEQ ID NO: 1274627 - RNA, 19 nt, Homo sapiens
  misc_RNA (1)...(19): siRNA sense strand
guagaaguauuugaguauc

SEQ ID NO: 1274628 - RNA, 19 nt, Homo sapiens
  misc_RNA (1)...(19): siRNA sense strand
guauuugaguaucuugaug

SEQ ID NO: 1274629 - RNA, 19 nt, Homo sapiens
  misc_RNA (1)...(19): siRNA sense strand
aggaauacuugacaguuug

SEQ ID NO: 1274630 - RNA, 19 nt, Homo sapiens
  misc_RNA (1)...(19): siRNA sense strand
ccaaaacccuacuaugaga

SEQ ID NO: 1274631 - RNA, 19 nt, Homo sapiens
  misc_RNA (1)...(19): siRNA sense strand
aguguaaaguggucaaaug

SEQ ID NO: 1274632 - RNA, 19 nt, Homo sapiens
  misc_RNA (1)...(19): siRNA sense strand
ccacccauacuauuuguga

SEQ ID NO: 1274633 - RNA, 19 nt, Homo sapiens
  misc_RNA (1)...(19): siRNA sense strand
caccaacauuugaagcuau

SEQ ID NO: 1274634 - RNA, 19 nt, Homo sapiens
  misc_RNA (1)...(19): siRNA sense strand
uuggagagagcacgauuua

SEQ ID NO: 1274635 - RNA, 19 nt, Homo sapiens
  misc_RNA (1)...(19): siRNA sense strand
gguuaucagaugcacuuua

SEQ ID NO: 1274636 - RNA, 19 nt, Homo sapiens
  misc_RNA (1)...(19): siRNA sense strand
ugaggagccaccaacauuu

SEQ ID NO: 1274637 - RNA, 19 nt, Homo sapiens
  misc_RNA (1)...(19): siRNA sense strand
ggaaggaauacuugacagu

SEQ ID NO: 1274638 - RNA, 19 nt, Homo sapiens
  misc_RNA (1)...(19): siRNA sense strand
gaggaaggaauacuugaca

SEQ ID NO: 1274639 - RNA, 19 nt, Homo sapiens
  misc_RNA (1)...(19): siRNA sense strand
ccaguuccaaagugucuua

SEQ ID NO: 1274640 - RNA, 19 nt, Homo sapiens
  misc_RNA (1)...(19): siRNA sense strand
ugaguaucuugaugcagua

SEQ ID NO: 1274641 - RNA, 19 nt, Homo sapiens
  misc_RNA (1)...(19): siRNA sense strand
caccuuuagugaaguagaa

SEQ ID NO: 1274642 - RNA, 19 nt, Homo sapiens
  misc_RNA (1)...(19): siRNA sense strand
acagauaucaggauuugga

SEQ ID NO: 1274643 - RNA, 19 nt, Homo sapiens
  misc_RNA (1)...(19): siRNA sense strand
ucauugcugugauuguuau

SEQ ID NO: 1274644 - RNA, 19 nt, Homo sapiens
  misc_RNA (1)...(19): siRNA sense strand
ucagaugcacuuuauuugu

SEQ ID NO: 1274645 - RNA, 19 nt, Homo sapiens
  misc_RNA (1)...(19): siRNA sense strand
gugcugcuccagaguguaa

SEQ ID NO: 1274646 - RNA, 19 nt, Homo sapiens
  misc_RNA (1)...(19): siRNA sense strand
ggaaaacacaccuuuagug

SEQ ID NO: 1274647 - RNA, 19 nt, Homo sapiens
  misc_RNA (1)...(19): siRNA sense strand
aaggaucaguagcaauuug

SEQ ID NO: 1274648 - RNA, 19 nt, Homo sapiens
  misc_RNA (1)...(19): siRNA sense strand
uauauacgggauccuuuaa

SEQ ID NO: 1274649 - RNA, 19 nt, Homo sapiens
  misc_RNA (1)...(19): siRNA sense strand
ugaaguagaaguauuugag

SEQ ID NO: 1274650 - RNA, 19 nt, Homo sapiens
  misc_RNA (1)...(19): siRNA sense strand
cuugacaguuuggauguuu

SEQ ID NO: 1274651 - RNA, 19 nt, Homo sapiens
  misc_RNA (1)...(19): siRNA sense strand
cauauauacgggauccuuu

SEQ ID NO: 1274652 - RNA, 19 nt, Homo sapiens
  misc_RNA (1)...(19): siRNA sense strand
auauauacgggauccuuua

SEQ ID NO: 1274653 - RNA, 19 nt, Homo sapiens
  misc_RNA (1)...(19): siRNA sense strand
cuuaaaggaucaguagcaa

SEQ ID NO: 1274654 - RNA, 19 nt, Homo sapiens
  misc_RNA (1)...(19): siRNA sense strand
uaaaccugaggaaggaaua

SEQ ID NO: 1274655 - RNA, 19 nt, Homo sapiens
  misc_RNA (1)...(19): siRNA sense strand
agaugacgccuguuauaga

SEQ ID NO: 1274656 - RNA, 19 nt, Homo sapiens
  misc_RNA (1)...(19): siRNA sense strand
ugugauuguuauugccaua

SEQ ID NO: 1274657 - RNA, 19 nt, Homo sapiens
  misc_RNA (1)...(19): siRNA sense strand
gagagcacgauuuauugug

SEQ ID NO: 1274658 - RNA, 19 nt, Homo sapiens
  misc_RNA (1)...(19): siRNA sense strand
gaaguauuugaguaucuug

SEQ ID NO: 1274659 - RNA, 19 nt, Homo sapiens
  misc_RNA (1)...(19): siRNA sense strand
ggcuaccugucucagauga

SEQ ID NO: 1274660 - RNA, 19 nt, Homo sapiens
  misc_RNA (1)...(19): siRNA sense strand
gauaucaggauuuggaaaa

SEQ ID NO: 1274661 - RNA, 19 nt, Homo sapiens
  misc_RNA (1)...(19): siRNA sense strand
ccucuugccacccauacua

SEQ ID NO: 1274662 - RNA, 19 nt, Homo sapiens
  misc_RNA (1)...(19): siRNA sense strand
ccaugguguugcugcugua

SEQ ID NO: 1274663 - RNA, 19 nt, Homo sapiens
  misc_RNA (1)...(19): siRNA sense strand
cagaugacgccuguuauag

SEQ ID NO: 1274664 - RNA, 19 nt, Homo sapiens
  misc_RNA (1)...(19): siRNA sense strand
uuggugaacgaguagauua

SEQ ID NO: 1274665 - RNA, 19 nt, Homo sapiens
  misc_RNA (1)...(19): siRNA sense strand
gucauugcugugauuguua

SEQ ID NO: 1274666 - RNA, 19 nt, Homo sapiens
  misc_RNA (1)...(19): siRNA sense strand
ggagccaccaacauuugaa

SEQ ID NO: 1274667 - RNA, 19 nt, Homo sapiens
  misc_RNA (1)...(19): siRNA sense strand
gcgcuuuccuggguugcuu

SEQ ID NO: 1274668 - RNA, 19 nt, Homo sapiens
  misc_RNA (1)...(19): siRNA sense strand
uacuacaaagcaacaguua

SEQ ID NO: 1274669 - RNA, 19 nt, Homo sapiens
  misc_RNA (1)...(19): siRNA sense strand
cuugaugcaguaacuuaua

SEQ ID NO: 1274670 - RNA, 19 nt, Homo sapiens
  misc_RNA (1)...(19): siRNA sense strand
aaacauguccauauauacg

SEQ ID NO: 1274671 - RNA, 19 nt, Homo sapiens
  misc_RNA (1)...(19): siRNA sense strand
guguaaaguggucaaaugu

SEQ ID NO: 1274672 - RNA, 19 nt, Homo sapiens
  misc_RNA (1)...(19): siRNA sense strand
cuuacgaguuugguuauca

SEQ ID NO: 1274673 - RNA, 19 nt, Homo sapiens
  misc_RNA (1)...(19): siRNA sense strand
uacgggauccuuuaaaugg

SEQ ID NO: 1274674 - RNA, 19 nt, Homo sapiens
  misc_RNA (1)...(19): siRNA sense strand
aaccaaaacccuacuauga

SEQ ID NO: 1274675 - RNA, 19 nt, Homo sapiens
  misc_RNA (1)...(19): siRNA sense strand
cccaauaugugaaaagguu

SEQ ID NO: 1274676 - RNA, 19 nt, Homo sapiens
  misc_RNA (1)...(19): siRNA sense strand
cgauggcagcgacacaauu

SEQ ID NO: 1274677 - RNA, 19 nt, Homo sapiens
  misc_RNA (1)...(19): siRNA sense strand
gauccauuuucacuuauug

SEQ ID NO: 1274678 - RNA, 19 nt, Homo sapiens
  misc_RNA (1)...(19): siRNA sense strand
uugaugcaguaacuuauag

SEQ ID NO: 1274679 - RNA, 19 nt, Homo sapiens
  misc_RNA (1)...(19): siRNA sense strand
guaucuugaugcaguaacu

SEQ ID NO: 1274680 - RNA, 19 nt, Homo sapiens
  misc_RNA (1)...(19): siRNA sense strand
caacauuugaagcuaugga

SEQ ID NO: 1274681 - RNA, 19 nt, Homo sapiens
  misc_RNA (1)...(19): siRNA sense strand
gagauuggugaacgaguag

SEQ ID NO: 1274682 - RNA, 19 nt, Homo sapiens
  misc_RNA (1)...(19): siRNA sense strand
ggagagagcacgauuuauu

SEQ ID NO: 1274683 - RNA, 19 nt, Homo sapiens
  misc_RNA (1)...(19): siRNA sense strand
agagaaacauguccauaua

SEQ ID NO: 1274684 - RNA, 19 nt, Homo sapiens
  misc_RNA (1)...(19): siRNA sense strand
cagaugcacuuuauuugua

SEQ ID NO: 1274685 - RNA, 19 nt, Homo sapiens
  misc_RNA (1)...(19): siRNA sense strand
ggacuuacgaguuugguua

SEQ ID NO: 1274686 - RNA, 19 nt, Homo sapiens
  misc_RNA (1)...(19): siRNA sense strand
aaacagauaucaggauuug

SEQ ID NO: 1274687 - RNA, 19 nt, Homo sapiens
  misc_RNA (1)...(19): siRNA sense strand
cuauggagcucauugguaa

SEQ ID NO: 1274688 - RNA, 19 nt, Homo sapiens
  misc_RNA (1)...(19): siRNA sense strand
aaacacaccuuuagugaag

SEQ ID NO: 1274689 - RNA, 19 nt, Homo sapiens
  misc_RNA (1)...(19): siRNA sense strand
gaacuuaaaggaucaguag

SEQ ID NO: 1274690 - RNA, 19 nt, Homo sapiens
  misc_RNA (1)...(19): siRNA sense strand
gaaaacagauaucaggauu

SEQ ID NO: 1274691 - RNA, 19 nt, Homo sapiens
  misc_RNA (1)...(19): siRNA sense strand
uaaaggaucaguagcaauu

SEQ ID NO: 1274692 - RNA, 19 nt, Homo sapiens
  misc_RNA (1)...(19): siRNA sense strand
aaaugggacuuacgaguuu

SEQ ID NO: 1274693 - RNA, 19 nt, Homo sapiens
  misc_RNA (1)...(19): siRNA sense strand
guuaucagaugcacuuuau

SEQ ID NO: 1274694 - RNA, 19 nt, Homo sapiens
  misc_RNA (1)...(19): siRNA sense strand
gagcugaauaugccacuua

SEQ ID NO: 1274695 - RNA, 19 nt, Homo sapiens
  misc_RNA (1)...(19): siRNA sense strand
ugagauuggugaacgagua

SEQ ID NO: 1274696 - RNA, 19 nt, Homo sapiens
  misc_RNA (1)...(19): siRNA sense strand
gugaacgaguagauuauaa

SEQ ID NO: 1274697 - RNA, 19 nt, Homo sapiens
  misc_RNA (1)...(19): siRNA sense strand
gagagagcacgauuuauug

SEQ ID NO: 1274698 - RNA, 19 nt, Homo sapiens
  misc_RNA (1)...(19): siRNA sense strand
caaaugggacuuacgaguu

SEQ ID NO: 1274699 - RNA, 19 nt, Homo sapiens
  misc_RNA (1)...(19): siRNA sense strand
ggucauugcugugauuguu

SEQ ID NO: 1274700 - RNA, 19 nt, Homo sapiens
  misc_RNA (1)...(19): siRNA sense strand
ccagauccauuuucacuua

SEQ ID NO: 1274701 - RNA, 19 nt, Homo sapiens
  misc_RNA (1)...(19): siRNA sense strand
gaaggaauacuugacaguu

SEQ ID NO: 1274702 - RNA, 19 nt, Homo sapiens
  misc_RNA (1)...(19): siRNA sense strand
aaggaauacuugacaguuu

SEQ ID NO: 1274703 - RNA, 19 nt, Homo sapiens
  misc_RNA (1)...(19): siRNA sense strand
ucagaugacgccuguuaua

SEQ ID NO: 1274704 - RNA, 19 nt, Homo sapiens
  misc_RNA (1)...(19): siRNA sense strand
gaaaacacaccuuuaguga

SEQ ID NO: 1274705 - RNA, 19 nt, Homo sapiens
  misc_RNA (1)...(19): siRNA sense strand
gaugacgccuguuauagag

SEQ ID NO: 1274706 - RNA, 19 nt, Homo sapiens
  misc_RNA (1)...(19): siRNA sense strand
gagaaacauguccauauau

SEQ ID NO: 1274707 - RNA, 19 nt, Homo sapiens
  misc_RNA (1)...(19): siRNA sense strand
ccacuuaccagacuaaauc

SEQ ID NO: 1274708 - RNA, 19 nt, Homo sapiens
  misc_RNA (1)...(19): siRNA sense strand
acgaguagauuauaagugu

SEQ ID NO: 1274709 - RNA, 19 nt, Homo sapiens
  misc_RNA (1)...(19): siRNA sense strand
cuacaaagcaacaguuaug

SEQ ID NO: 1274710 - RNA, 19 nt, Homo sapiens
  misc_RNA (1)...(19): siRNA sense strand
ccaccaacauuugaagcua

SEQ ID NO: 1274711 - RNA, 19 nt, Homo sapiens
  misc_RNA (1)...(19): siRNA sense strand
uauacgggauccuuuaaau

SEQ ID NO: 1274712 - RNA, 19 nt, Homo sapiens
  misc_RNA (1)...(19): siRNA sense strand
cgaguuugguuaucagaug

SEQ ID NO: 1274713 - RNA, 19 nt, Homo sapiens
  misc_RNA (1)...(19): siRNA sense strand
gaacgaguagauuauaagu

SEQ ID NO: 1274714 - RNA, 19 nt, Homo sapiens
  misc_RNA (1)...(19): siRNA sense strand
gugaggagccaccaacauu

SEQ ID NO: 1274715 - RNA, 19 nt, Homo sapiens
  misc_RNA (1)...(19): siRNA sense strand
gauggcagcgacacaauug

SEQ ID NO: 1274716 - RNA, 19 nt, Homo sapiens
  misc_RNA (1)...(19): siRNA sense strand
ucucagaugacgccuguua

SEQ ID NO: 1274717 - RNA, 19 nt, Homo sapiens
  misc_RNA (1)...(19): siRNA sense strand
gaggagccaccaacauuug

SEQ ID NO: 1274718 - RNA, 19 nt, Homo sapiens
  misc_RNA (1)...(19): siRNA sense strand
gcuauggagcucauuggua

SEQ ID NO: 1274719 - RNA, 19 nt, Homo sapiens
  misc_RNA (1)...(19): siRNA sense strand
acacaccuuuagugaagua

SEQ ID NO: 1274720 - RNA, 19 nt, Homo sapiens
  misc_RNA (1)...(19): siRNA sense strand
uagagaaacauguccauau

SEQ ID NO: 1274721 - RNA, 19 nt, Homo sapiens
  misc_RNA (1)...(19): siRNA sense strand
ggugaacgaguagauuaua

SEQ ID NO: 1274722 - RNA, 19 nt, Homo sapiens
  misc_RNA (1)...(19): siRNA sense strand
gaaguagaaguauuugagu

SEQ ID NO: 1274723 - RNA, 19 nt, Homo sapiens
  misc_RNA (1)...(19): siRNA sense strand
gaaacauguccauauauac

SEQ ID NO: 1274724 - RNA, 19 nt, Homo sapiens
  misc_RNA (1)...(19): siRNA sense strand
ugacgccuguuauagagaa

SEQ ID NO: 1274725 - RNA, 19 nt, Homo sapiens
  misc_RNA (1)...(19): siRNA sense strand
cgaguagauuauaagugua

SEQ ID NO: 1274726 - RNA, 19 nt, Homo sapiens
  misc_RNA (1)...(19): siRNA sense strand
gcacuuuauuuguaaugag

SEQ ID NO: 1274727 - RNA, 19 nt, Homo sapiens
  misc_RNA (1)...(19): siRNA sense strand
guagaaguauuugaguauc

SEQ ID NO: 1274728 - RNA, 19 nt, Homo sapiens
  misc_RNA (1)...(19): siRNA sense strand
guauuugaguaucuugaug

SEQ ID NO: 1274729 - RNA, 19 nt, Homo sapiens
  misc_RNA (1)...(19): siRNA sense strand
aggaauacuugacaguuug

SEQ ID NO: 1274730 - RNA, 19 nt, Homo sapiens
  misc_RNA (1)...(19): siRNA sense strand
ccaaaacccuacuaugaga

SEQ ID NO: 1274731 - RNA, 19 nt, Homo sapiens
  misc_RNA (1)...(19): siRNA sense strand
aguguaaaguggucaaaug

SEQ ID NO: 1274732 - RNA, 19 nt, Homo sapiens
  misc_RNA (1)...(19): siRNA sense strand
ccacccauacuauuuguga

SEQ ID NO: 1274733 - RNA, 19 nt, Homo sapiens
  misc_RNA (1)...(19): siRNA sense strand
uuggagagagcacgauuua

SEQ ID NO: 1274734 - RNA, 19 nt, Homo sapiens
  misc_RNA (1)...(19): siRNA sense strand
gguuaucagaugcacuuua

SEQ ID NO: 1274735 - RNA, 19 nt, Homo sapiens
  misc_RNA (1)...(19): siRNA sense strand
caccaacauuugaagcuau

SEQ ID NO: 1274736 - RNA, 19 nt, Homo sapiens
  misc_RNA (1)...(19): siRNA sense strand
ugaggagccaccaacauuu

SEQ ID NO: 1274737 - RNA, 19 nt, Homo sapiens
  misc_RNA (1)...(19): siRNA sense strand
ggaaggaauacuugacagu

SEQ ID NO: 1274738 - RNA, 19 nt, Homo sapiens
  misc_RNA (1)...(19): siRNA sense strand
gaggaaggaauacuugaca

SEQ ID NO: 1274739 - RNA, 19 nt, Homo sapiens
  misc_RNA (1)...(19): siRNA sense strand
ugaguaucuugaugcagua

SEQ ID NO: 1274740 - RNA, 19 nt, Homo sapiens
  misc_RNA (1)...(19): siRNA sense strand
caccuuuagugaaguagaa

SEQ ID NO: 1274741 - RNA, 19 nt, Homo sapiens
  misc_RNA (1)...(19): siRNA sense strand
acagauaucaggauuugga

SEQ ID NO: 1274742 - RNA, 19 nt, Homo sapiens
  misc_RNA (1)...(19): siRNA sense strand
ucauugcugugauuguuau

SEQ ID NO: 1274743 - RNA, 19 nt, Homo sapiens
  misc_RNA (1)...(19): siRNA sense strand
ucagaugcacuuuauuugu

SEQ ID NO: 1274744 - RNA, 19 nt, Homo sapiens
  misc_RNA (1)...(19): siRNA sense strand
gugcugcuccagaguguaa

SEQ ID NO: 1274745 - RNA, 19 nt, Homo sapiens
  misc_RNA (1)...(19): siRNA sense strand
ggaaaacacaccuuuagug

SEQ ID NO: 1274746 - RNA, 19 nt, Homo sapiens
  misc_RNA (1)...(19): siRNA sense strand
aaggaucaguagcaauuug

SEQ ID NO: 1274747 - RNA, 19 nt, Homo sapiens
  misc_RNA (1)...(19): siRNA sense strand
uauauacgggauccuuuaa

SEQ ID NO: 1274748 - RNA, 19 nt, Homo sapiens
  misc_RNA (1)...(19): siRNA sense strand
ugaaguagaaguauuugag

SEQ ID NO: 1274749 - RNA, 19 nt, Homo sapiens
  misc_RNA (1)...(19): siRNA sense strand
cuugacaguuuggauguuu

SEQ ID NO: 1274750 - RNA, 19 nt, Homo sapiens
  misc_RNA (1)...(19): siRNA sense strand
cauauauacgggauccuuu

SEQ ID NO: 1274751 - RNA, 19 nt, Homo sapiens
  misc_RNA (1)...(19): siRNA sense strand
auauauacgggauccuuua

SEQ ID NO: 1274752 - RNA, 19 nt, Homo sapiens
  misc_RNA (1)...(19): siRNA sense strand
cuuaaaggaucaguagcaa

SEQ ID NO: 1274753 - RNA, 19 nt, Homo sapiens
  misc_RNA (1)...(19): siRNA sense strand
uaaaccugaggaaggaaua

SEQ ID NO: 1274754 - RNA, 19 nt, Homo sapiens
  misc_RNA (1)...(19): siRNA sense strand
agaugacgccuguuauaga

SEQ ID NO: 1274755 - RNA, 19 nt, Homo sapiens
  misc_RNA (1)...(19): siRNA sense strand
ugugauuguuauugccaua

SEQ ID NO: 1274756 - RNA, 19 nt, Homo sapiens
  misc_RNA (1)...(19): siRNA sense strand
gagagcacgauuuauugug

SEQ ID NO: 1274757 - RNA, 19 nt, Homo sapiens
  misc_RNA (1)...(19): siRNA sense strand
gaaguauuugaguaucuug

SEQ ID NO: 1274758 - RNA, 19 nt, Homo sapiens
  misc_RNA (1)...(19): siRNA sense strand
ggcuaccugucucagauga

SEQ ID NO: 1274759 - RNA, 19 nt, Homo sapiens
  misc_RNA (1)...(19): siRNA sense strand
gauaucaggauuuggaaaa

SEQ ID NO: 1274760 - RNA, 19 nt, Homo sapiens
  misc_RNA (1)...(19): siRNA sense strand
ccucuugccacccauacua

SEQ ID NO: 1274761 - RNA, 19 nt, Homo sapiens
  misc_RNA (1)...(19): siRNA sense strand
ccaugguguugcugcugua

SEQ ID NO: 1274762 - RNA, 19 nt, Homo sapiens
  misc_RNA (1)...(19): siRNA sense strand
cagaugacgccuguuauag

SEQ ID NO: 1274763 - RNA, 19 nt, Homo sapiens
  misc_RNA (1)...(19): siRNA sense strand
cagaugguggagcugaaua

SEQ ID NO: 1274764 - RNA, 19 nt, Homo sapiens
  misc_RNA (1)...(19): siRNA sense strand
uuggugaacgaguagauua

SEQ ID NO: 1274765 - RNA, 19 nt, Homo sapiens
  misc_RNA (1)...(19): siRNA sense strand
gucauugcugugauuguua

SEQ ID NO: 1274766 - RNA, 19 nt, Homo sapiens
  misc_RNA (1)...(19): siRNA sense strand
ggagccaccaacauuugaa

SEQ ID NO: 1274767 - RNA, 19 nt, Homo sapiens
  misc_RNA (1)...(19): siRNA sense strand
gcgcuuuccuggguugcuu

SEQ ID NO: 1274768 - RNA, 19 nt, Homo sapiens
  misc_RNA (1)...(19): siRNA sense strand
uacuacaaagcaacaguua

SEQ ID NO: 1274769 - RNA, 19 nt, Homo sapiens
  misc_RNA (1)...(19): siRNA sense strand
cuugaugcaguaacuuaua

SEQ ID NO: 1274770 - RNA, 19 nt, Homo sapiens
  misc_RNA (1)...(19): siRNA sense strand
aaacauguccauauauacg

SEQ ID NO: 1274771 - RNA, 19 nt, Homo sapiens
  misc_RNA (1)...(19): siRNA sense strand
guguaaaguggucaaaugu

SEQ ID NO: 1274772 - RNA, 19 nt, Homo sapiens
  misc_RNA (1)...(19): siRNA sense strand
cuuacgaguuugguuauca

SEQ ID NO: 1274773 - RNA, 19 nt, Homo sapiens
  misc_RNA (1)...(19): siRNA sense strand
uacgggauccuuuaaaugg

SEQ ID NO: 1274774 - RNA, 19 nt, Homo sapiens
  misc_RNA (1)...(19): siRNA sense strand
gcagaugguggagcugaau

SEQ ID NO: 1274775 - RNA, 19 nt, Homo sapiens
  misc_RNA (1)...(19): siRNA sense strand
aaccaaaacccuacuauga

SEQ ID NO: 1274776 - RNA, 19 nt, Homo sapiens
  misc_RNA (1)...(19): siRNA sense strand
cccaauaugugaaaagguu

SEQ ID NO: 1274777 - RNA, 19 nt, Homo sapiens
  misc_RNA (1)...(19): siRNA sense strand
ggagcugaauaugccacuu

SEQ ID NO: 1274778 - RNA, 19 nt, Homo sapiens
  misc_RNA (1)...(19): siRNA sense strand
cgauggcagcgacacaauu

SEQ ID NO: 1274779 - RNA, 19 nt, Homo sapiens
  misc_RNA (1)...(19): siRNA sense strand
gauccauuuucacuuauug

SEQ ID NO: 1274780 - RNA, 19 nt, Homo sapiens
  misc_RNA (1)...(19): siRNA sense strand
uugaugcaguaacuuauag

SEQ ID NO: 1274781 - RNA, 19 nt, Homo sapiens
  misc_RNA (1)...(19): siRNA sense strand
guaucuugaugcaguaacu

SEQ ID NO: 1274782 - RNA, 19 nt, Homo sapiens
  misc_RNA (1)...(19): siRNA sense strand
ggagagagcacgauuuauu

SEQ ID NO: 1274783 - RNA, 19 nt, Homo sapiens
  misc_RNA (1)...(19): siRNA sense strand
agagaaacauguccauaua

SEQ ID NO: 1274784 - RNA, 19 nt, Homo sapiens
  misc_RNA (1)...(19): siRNA sense strand
cagaugcacuuuauuugua

SEQ ID NO: 1274785 - RNA, 19 nt, Homo sapiens
  misc_RNA (1)...(19): siRNA sense strand
ggacuuacgaguuugguua

SEQ ID NO: 1274786 - RNA, 19 nt, Homo sapiens
  misc_RNA (1)...(19): siRNA sense strand
aaacagauaucaggauuug

SEQ ID NO: 1274787 - RNA, 19 nt, Homo sapiens
  misc_RNA (1)...(19): siRNA sense strand
cuauggagcucauugguaa

SEQ ID NO: 1274788 - RNA, 19 nt, Homo sapiens
  misc_RNA (1)...(19): siRNA sense strand
aaacacaccuuuagugaag

SEQ ID NO: 1274789 - RNA, 19 nt, Homo sapiens
  misc_RNA (1)...(19): siRNA sense strand
gaacuuaaaggaucaguag

SEQ ID NO: 1274790 - RNA, 19 nt, Homo sapiens
  misc_RNA (1)...(19): siRNA sense strand
gaaaacagauaucaggauu

SEQ ID NO: 1274791 - RNA, 19 nt, Homo sapiens
  misc_RNA (1)...(19): siRNA sense strand
uaaaggaucaguagcaauu

SEQ ID NO: 1274792 - RNA, 19 nt, Homo sapiens
  misc_RNA (1)...(19): siRNA sense strand
aaaugggacuuacgaguuu

SEQ ID NO: 1274793 - RNA, 19 nt, Homo sapiens
  misc_RNA (1)...(19): siRNA sense strand
guuaucagaugcacuuuau

SEQ ID NO: 1274794 - RNA, 19 nt, Homo sapiens
  misc_RNA (1)...(19): siRNA sense strand
gagcugaauaugccacuua

SEQ ID NO: 1274795 - RNA, 19 nt, Homo sapiens
  misc_RNA (1)...(19): siRNA sense strand
gagcagagaggcugaauag

SEQ ID NO: 1274796 - RNA, 19 nt, Homo sapiens
  misc_RNA (1)...(19): siRNA sense strand
ugagauuggugaacgagua

SEQ ID NO: 1274797 - RNA, 19 nt, Homo sapiens
  misc_RNA (1)...(19): siRNA sense strand
gugaacgaguagauuauaa

SEQ ID NO: 1274798 - RNA, 19 nt, Homo sapiens
  misc_RNA (1)...(19): siRNA sense strand
gagagagcacgauuuauug

SEQ ID NO: 1274799 - RNA, 19 nt, Homo sapiens
  misc_RNA (1)...(19): siRNA sense strand
caaaugggacuuacgaguu

SEQ ID NO: 1274800 - RNA, 19 nt, Homo sapiens
  misc_RNA (1)...(19): siRNA sense strand
ggucauugcugugauuguu

SEQ ID NO: 1274801 - RNA, 19 nt, Homo sapiens
  misc_RNA (1)...(19): siRNA sense strand
ccagauccauuuucacuua

SEQ ID NO: 1274802 - RNA, 19 nt, Homo sapiens
  misc_RNA (1)...(19): siRNA sense strand
gaaggaauacuugacaguu

SEQ ID NO: 1274803 - RNA, 19 nt, Homo sapiens
  misc_RNA (1)...(19): siRNA sense strand
aaggaauacuugacaguuu

SEQ ID NO: 1274804 - RNA, 19 nt, Homo sapiens
  misc_RNA (1)...(19): siRNA sense strand
ucagaugacgccuguuaua

SEQ ID NO: 1274805 - RNA, 19 nt, Homo sapiens
  misc_RNA (1)...(19): siRNA sense strand
gaaaacacaccuuuaguga

SEQ ID NO: 1274806 - RNA, 19 nt, Homo sapiens
  misc_RNA (1)...(19): siRNA sense strand
gaugacgccuguuauagag

SEQ ID NO: 1274807 - RNA, 19 nt, Homo sapiens
  misc_RNA (1)...(19): siRNA sense strand
gagaaacauguccauauau

SEQ ID NO: 1274808 - RNA, 19 nt, Homo sapiens
  misc_RNA (1)...(19): siRNA sense strand
ccacuuaccagacuaaauc

SEQ ID NO: 1274809 - RNA, 19 nt, Homo sapiens
  misc_RNA (1)...(19): siRNA sense strand
acgaguagauuauaagugu

SEQ ID NO: 1274810 - RNA, 19 nt, Homo sapiens
  misc_RNA (1)...(19): siRNA sense strand
cuacaaagcaacaguuaug

SEQ ID NO: 1274811 - RNA, 19 nt, Homo sapiens
  misc_RNA (1)...(19): siRNA sense strand
ccaccaacauuugaagcua

SEQ ID NO: 1274812 - RNA, 19 nt, Homo sapiens
  misc_RNA (1)...(19): siRNA sense strand
uauacgggauccuuuaaau

SEQ ID NO: 1274813 - RNA, 19 nt, Homo sapiens
  misc_RNA (1)...(19): siRNA sense strand
cgaguuugguuaucagaug

SEQ ID NO: 1274814 - RNA, 19 nt, Homo sapiens
  misc_RNA (1)...(19): siRNA sense strand
gaacgaguagauuauaagu

SEQ ID NO: 1274815 - RNA, 19 nt, Homo sapiens
  misc_RNA (1)...(19): siRNA sense strand
gugaggagccaccaacauu

SEQ ID NO: 1274816 - RNA, 19 nt, Homo sapiens
  misc_RNA (1)...(19): siRNA sense strand
gauggcagcgacacaauug

SEQ ID NO: 1274817 - RNA, 19 nt, Homo sapiens
  misc_RNA (1)...(19): siRNA sense strand
ucucagaugacgccuguua

SEQ ID NO: 1274818 - RNA, 19 nt, Homo sapiens
  misc_RNA (1)...(19): siRNA sense strand
acacaccuuuagugaagua

SEQ ID NO: 1274819 - RNA, 19 nt, Homo sapiens
  misc_RNA (1)...(19): siRNA sense strand
gcuauggagcucauuggua

SEQ ID NO: 1274820 - RNA, 19 nt, Homo sapiens
  misc_RNA (1)...(19): siRNA sense strand
gaggagccaccaacauuug

SEQ ID NO: 1274821 - RNA, 19 nt, Homo sapiens
  misc_RNA (1)...(19): siRNA sense strand
uagagaaacauguccauau

SEQ ID NO: 1274822 - RNA, 19 nt, Homo sapiens
  misc_RNA (1)...(19): siRNA sense strand
guuccaaagugucuuaaag

SEQ ID NO: 1274823 - RNA, 19 nt, Homo sapiens
  misc_RNA (1)...(19): siRNA sense strand
ggugaacgaguagauuaua

SEQ ID NO: 1274824 - RNA, 19 nt, Homo sapiens
  misc_RNA (1)...(19): siRNA sense strand
gaaguagaaguauuugagu

SEQ ID NO: 1274825 - RNA, 19 nt, Homo sapiens
  misc_RNA (1)...(19): siRNA sense strand
gaaacauguccauauauac

SEQ ID NO: 1274826 - RNA, 19 nt, Homo sapiens
  misc_RNA (1)...(19): siRNA sense strand
ugacgccuguuauagagaa

SEQ ID NO: 1274827 - RNA, 19 nt, Homo sapiens
  misc_RNA (1)...(19): siRNA sense strand
cgaguagauuauaagugua

SEQ ID NO: 1274828 - RNA, 19 nt, Homo sapiens
  misc_RNA (1)...(19): siRNA sense strand
gcacuuuauuuguaaugag

SEQ ID NO: 1274829 - RNA, 19 nt, Homo sapiens
  misc_RNA (1)...(19): siRNA sense strand
guagaaguauuugaguauc

SEQ ID NO: 1274830 - RNA, 19 nt, Homo sapiens
  misc_RNA (1)...(19): siRNA sense strand
guauuugaguaucuugaug

SEQ ID NO: 1274831 - RNA, 19 nt, Homo sapiens
  misc_RNA (1)...(19): siRNA sense strand
aggaauacuugacaguuug

SEQ ID NO: 1274832 - RNA, 19 nt, Homo sapiens
  misc_RNA (1)...(19): siRNA sense strand
ccaaaacccuacuaugaga

SEQ ID NO: 1274833 - RNA, 19 nt, Homo sapiens
  misc_RNA (1)...(19): siRNA sense strand
aguguaaaguggucaaaug

SEQ ID NO: 1274834 - RNA, 19 nt, Homo sapiens
  misc_RNA (1)...(19): siRNA sense strand
ccacccauacuauuuguga

SEQ ID NO: 1274835 - RNA, 19 nt, Homo sapiens
  misc_RNA (1)...(19): siRNA sense strand
uuggagagagcacgauuua

SEQ ID NO: 1274836 - RNA, 19 nt, Homo sapiens
  misc_RNA (1)...(19): siRNA sense strand
gguuaucagaugcacuuua

SEQ ID NO: 1274837 - RNA, 19 nt, Homo sapiens
  misc_RNA (1)...(19): siRNA sense strand
caccaacauuugaagcuau

SEQ ID NO: 1274838 - RNA, 19 nt, Homo sapiens
  misc_RNA (1)...(19): siRNA sense strand
ugaggagccaccaacauuu

SEQ ID NO: 1274839 - RNA, 19 nt, Homo sapiens
  misc_RNA (1)...(19): siRNA sense strand
ggaaggaauacuugacagu

SEQ ID NO: 1274840 - RNA, 19 nt, Homo sapiens
  misc_RNA (1)...(19): siRNA sense strand
gaggaaggaauacuugaca

SEQ ID NO: 1274841 - RNA, 19 nt, Homo sapiens
  misc_RNA (1)...(19): siRNA sense strand
ccaguuccaaagugucuua

SEQ ID NO: 1274842 - RNA, 19 nt, Homo sapiens
  misc_RNA (1)...(19): siRNA sense strand
ugaguaucuugaugcagua

SEQ ID NO: 1274843 - RNA, 19 nt, Homo sapiens
  misc_RNA (1)...(19): siRNA sense strand
caccuuuagugaaguagaa

SEQ ID NO: 1274844 - RNA, 19 nt, Homo sapiens
  misc_RNA (1)...(19): siRNA sense strand
acagauaucaggauuugga

SEQ ID NO: 1274845 - RNA, 19 nt, Homo sapiens
  misc_RNA (1)...(19): siRNA sense strand
ucauugcugugauuguuau

SEQ ID NO: 1274846 - RNA, 19 nt, Homo sapiens
  misc_RNA (1)...(19): siRNA sense strand
ucagaugcacuuuauuugu

SEQ ID NO: 1274847 - RNA, 19 nt, Homo sapiens
  misc_RNA (1)...(19): siRNA sense strand
gugcugcuccagaguguaa

SEQ ID NO: 1274848 - RNA, 19 nt, Homo sapiens
  misc_RNA (1)...(19): siRNA sense strand
ggaaaacacaccuuuagug

SEQ ID NO: 1274849 - RNA, 19 nt, Homo sapiens
  misc_RNA (1)...(19): siRNA sense strand
aaggaucaguagcaauuug

SEQ ID NO: 1274850 - RNA, 19 nt, Homo sapiens
  misc_RNA (1)...(19): siRNA sense strand
uauauacgggauccuuuaa

SEQ ID NO: 1274851 - RNA, 19 nt, Homo sapiens
  misc_RNA (1)...(19): siRNA sense strand
ugaaguagaaguauuugag

SEQ ID NO: 1274852 - RNA, 19 nt, Homo sapiens
  misc_RNA (1)...(19): siRNA sense strand
cuugacaguuuggauguuu

SEQ ID NO: 1274853 - RNA, 19 nt, Homo sapiens
  misc_RNA (1)...(19): siRNA sense strand
cauauauacgggauccuuu

SEQ ID NO: 1274854 - RNA, 19 nt, Homo sapiens
  misc_RNA (1)...(19): siRNA sense strand
auauauacgggauccuuua

SEQ ID NO: 1274855 - RNA, 19 nt, Homo sapiens
  misc_RNA (1)...(19): siRNA sense strand
cuuaaaggaucaguagcaa

SEQ ID NO: 1274856 - RNA, 19 nt, Homo sapiens
  misc_RNA (1)...(19): siRNA sense strand
uaaaccugaggaaggaaua

SEQ ID NO: 1274857 - RNA, 19 nt, Homo sapiens
  misc_RNA (1)...(19): siRNA sense strand
agaugacgccuguuauaga

SEQ ID NO: 1274858 - RNA, 19 nt, Homo sapiens
  misc_RNA (1)...(19): siRNA sense strand
ugugauuguuauugccaua

SEQ ID NO: 1274859 - RNA, 19 nt, Homo sapiens
  misc_RNA (1)...(19): siRNA sense strand
gagagcacgauuuauugug

SEQ ID NO: 1274860 - RNA, 19 nt, Homo sapiens
  misc_RNA (1)...(19): siRNA sense strand
gaaguauuugaguaucuug

SEQ ID NO: 1274861 - RNA, 19 nt, Homo sapiens
  misc_RNA (1)...(19): siRNA sense strand
ggcuaccugucucagauga

SEQ ID NO: 1274862 - RNA, 19 nt, Homo sapiens
  misc_RNA (1)...(19): siRNA sense strand
ccucuugccacccauacua

SEQ ID NO: 1274863 - RNA, 19 nt, Homo sapiens
  misc_RNA (1)...(19): siRNA sense strand
gauaucaggauuuggaaaa

SEQ ID NO: 1274864 - RNA, 19 nt, Homo sapiens
  misc_RNA (1)...(19): siRNA sense strand
ccaugguguugcugcugua

SEQ ID NO: 1274865 - RNA, 19 nt, Homo sapiens
  misc_RNA (1)...(19): siRNA sense strand
cagaugacgccuguuauag

SEQ ID NO: 1274866 - RNA, 19 nt, Homo sapiens
  misc_RNA (1)...(19): siRNA sense strand
cagaugguggagcugaaua

SEQ ID NO: 1274867 - RNA, 19 nt, Homo sapiens
  misc_RNA (1)...(19): siRNA sense strand
gucauugcugugauuguua

SEQ ID NO: 1274868 - RNA, 19 nt, Homo sapiens
  misc_RNA (1)...(19): siRNA sense strand
uuggugaacgaguagauua

SEQ ID NO: 1274869 - RNA, 19 nt, Homo sapiens
  misc_RNA (1)...(19): siRNA sense strand
ggagccaccaacauuugaa

SEQ ID NO: 1274870 - RNA, 19 nt, Homo sapiens
  misc_RNA (1)...(19): siRNA sense strand
gcgcuuuccuggguugcuu

SEQ ID NO: 1274871 - RNA, 19 nt, Homo sapiens
  misc_RNA (1)...(19): siRNA sense strand
uacuacaaagcaacaguua

SEQ ID NO: 1274872 - RNA, 19 nt, Homo sapiens
  misc_RNA (1)...(19): siRNA sense strand
cuugaugcaguaacuuaua

SEQ ID NO: 1274873 - RNA, 19 nt, Homo sapiens
  misc_RNA (1)...(19): siRNA sense strand
aaacauguccauauauacg

SEQ ID NO: 1274874 - RNA, 19 nt, Homo sapiens
  misc_RNA (1)...(19): siRNA sense strand
guguaaaguggucaaaugu

SEQ ID NO: 1274875 - RNA, 19 nt, Homo sapiens
  misc_RNA (1)...(19): siRNA sense strand
cuuacgaguuugguuauca

SEQ ID NO: 1274876 - RNA, 19 nt, Homo sapiens
  misc_RNA (1)...(19): siRNA sense strand
aaccaaaacccuacuauga

SEQ ID NO: 1274877 - RNA, 19 nt, Homo sapiens
  misc_RNA (1)...(19): siRNA sense strand
gcagaugguggagcugaau

SEQ ID NO: 1274878 - RNA, 19 nt, Homo sapiens
  misc_RNA (1)...(19): siRNA sense strand
uacgggauccuuuaaaugg

SEQ ID NO: 1274879 - RNA, 19 nt, Homo sapiens
  misc_RNA (1)...(19): siRNA sense strand
cgauggcagcgacacaauu

SEQ ID NO: 1274880 - RNA, 19 nt, Homo sapiens
  misc_RNA (1)...(19): siRNA sense strand
ggagcugaauaugccacuu

SEQ ID NO: 1274881 - RNA, 19 nt, Homo sapiens
  misc_RNA (1)...(19): siRNA sense strand
caacauuugaagcuaugga

SEQ ID NO: 1274882 - RNA, 19 nt, Homo sapiens
  misc_RNA (1)...(19): siRNA sense strand
ggagagagcacgauuuauu

SEQ ID NO: 1274883 - RNA, 19 nt, Homo sapiens
  misc_RNA (1)...(19): siRNA sense strand
agagaaacauguccauaua

SEQ ID NO: 1274884 - RNA, 19 nt, Homo sapiens
  misc_RNA (1)...(19): siRNA sense strand
cagaugcacuuuauuugua

SEQ ID NO: 1274885 - RNA, 19 nt, Homo sapiens
  misc_RNA (1)...(19): siRNA sense strand
ggacuuacgaguuugguua

SEQ ID NO: 1274886 - RNA, 19 nt, Homo sapiens
  misc_RNA (1)...(19): siRNA sense strand
aaacagauaucaggauuug

SEQ ID NO: 1274887 - RNA, 19 nt, Homo sapiens
  misc_RNA (1)...(19): siRNA sense strand
cuauggagcucauugguaa

SEQ ID NO: 1274888 - RNA, 19 nt, Homo sapiens
  misc_RNA (1)...(19): siRNA sense strand
aaacacaccuuuagugaag

SEQ ID NO: 1274889 - RNA, 19 nt, Homo sapiens
  misc_RNA (1)...(19): siRNA sense strand
gaacuuaaaggaucaguag

SEQ ID NO: 1274890 - RNA, 19 nt, Homo sapiens
  misc_RNA (1)...(19): siRNA sense strand
gaaaacagauaucaggauu

SEQ ID NO: 1274891 - RNA, 19 nt, Homo sapiens
  misc_RNA (1)...(19): siRNA sense strand
uaaaggaucaguagcaauu

SEQ ID NO: 1274892 - RNA, 19 nt, Homo sapiens
  misc_RNA (1)...(19): siRNA sense strand
aaaugggacuuacgaguuu

SEQ ID NO: 1274893 - RNA, 19 nt, Homo sapiens
  misc_RNA (1)...(19): siRNA sense strand
guuaucagaugcacuuuau

SEQ ID NO: 1274894 - RNA, 19 nt, Homo sapiens
  misc_RNA (1)...(19): siRNA sense strand
ugagauuggugaacgagua

SEQ ID NO: 1274895 - RNA, 19 nt, Homo sapiens
  misc_RNA (1)...(19): siRNA sense strand
gugaacgaguagauuauaa

SEQ ID NO: 1274896 - RNA, 19 nt, Homo sapiens
  misc_RNA (1)...(19): siRNA sense strand
gagagagcacgauuuauug

SEQ ID NO: 1274897 - RNA, 19 nt, Homo sapiens
  misc_RNA (1)...(19): siRNA sense strand
caaaugggacuuacgaguu

SEQ ID NO: 1274898 - RNA, 19 nt, Homo sapiens
  misc_RNA (1)...(19): siRNA sense strand
ggucauugcugugauuguu

SEQ ID NO: 1274899 - RNA, 19 nt, Homo sapiens
  misc_RNA (1)...(19): siRNA sense strand
ccagauccauuuucacuua

SEQ ID NO: 1274900 - RNA, 19 nt, Homo sapiens
  misc_RNA (1)...(19): siRNA sense strand
gaaggaauacuugacaguu

SEQ ID NO: 1274901 - RNA, 19 nt, Homo sapiens
  misc_RNA (1)...(19): siRNA sense strand
aaggaauacuugacaguuu

SEQ ID NO: 1274902 - RNA, 19 nt, Homo sapiens
  misc_RNA (1)...(19): siRNA sense strand
ucagaugacgccuguuaua

SEQ ID NO: 1274903 - RNA, 19 nt, Homo sapiens
  misc_RNA (1)...(19): siRNA sense strand
gaaaacacaccuuuaguga

SEQ ID NO: 1274904 - RNA, 19 nt, Homo sapiens
  misc_RNA (1)...(19): siRNA sense strand
gaugacgccuguuauagag

SEQ ID NO: 1274905 - RNA, 19 nt, Homo sapiens
  misc_RNA (1)...(19): siRNA sense strand
gagaaacauguccauauau

SEQ ID NO: 1274906 - RNA, 19 nt, Homo sapiens
  misc_RNA (1)...(19): siRNA sense strand
acgaguagauuauaagugu

SEQ ID NO: 1274907 - RNA, 19 nt, Homo sapiens
  misc_RNA (1)...(19): siRNA sense strand
cuacaaagcaacaguuaug

SEQ ID NO: 1274908 - RNA, 19 nt, Homo sapiens
  misc_RNA (1)...(19): siRNA sense strand
ccaccaacauuugaagcua

SEQ ID NO: 1274909 - RNA, 19 nt, Homo sapiens
  misc_RNA (1)...(19): siRNA sense strand
uauacgggauccuuuaaau

SEQ ID NO: 1274910 - RNA, 19 nt, Homo sapiens
  misc_RNA (1)...(19): siRNA sense strand
cgaguuugguuaucagaug

SEQ ID NO: 1274911 - RNA, 19 nt, Homo sapiens
  misc_RNA (1)...(19): siRNA sense strand
gaacgaguagauuauaagu

SEQ ID NO: 1274912 - RNA, 19 nt, Homo sapiens
  misc_RNA (1)...(19): siRNA sense strand
gugaggagccaccaacauu

SEQ ID NO: 1274913 - RNA, 19 nt, Homo sapiens
  misc_RNA (1)...(19): siRNA sense strand
gauggcagcgacacaauug

SEQ ID NO: 1274914 - RNA, 19 nt, Homo sapiens
  misc_RNA (1)...(19): siRNA sense strand
gcuauggagcucauuggua

SEQ ID NO: 1274915 - RNA, 19 nt, Homo sapiens
  misc_RNA (1)...(19): siRNA sense strand
gaggagccaccaacauuug

SEQ ID NO: 1274916 - RNA, 19 nt, Homo sapiens
  misc_RNA (1)...(19): siRNA sense strand
acacaccuuuagugaagua

SEQ ID NO: 1274917 - RNA, 19 nt, Homo sapiens
  misc_RNA (1)...(19): siRNA sense strand
ucucagaugacgccuguua

SEQ ID NO: 1274918 - RNA, 19 nt, Homo sapiens
  misc_RNA (1)...(19): siRNA sense strand
uagagaaacauguccauau

SEQ ID NO: 1274919 - RNA, 19 nt, Homo sapiens
  misc_RNA (1)...(19): siRNA sense strand
ggugaacgaguagauuaua

SEQ ID NO: 1274920 - RNA, 19 nt, Homo sapiens
  misc_RNA (1)...(19): siRNA sense strand
gaaguagaaguauuugagu

SEQ ID NO: 1274921 - RNA, 19 nt, Homo sapiens
  misc_RNA (1)...(19): siRNA sense strand
gaaacauguccauauauac

SEQ ID NO: 1274922 - RNA, 19 nt, Homo sapiens
  misc_RNA (1)...(19): siRNA sense strand
ugacgccuguuauagagaa

SEQ ID NO: 1274923 - RNA, 19 nt, Homo sapiens
  misc_RNA (1)...(19): siRNA sense strand
cgaguagauuauaagugua

SEQ ID NO: 1274924 - RNA, 19 nt, Homo sapiens
  misc_RNA (1)...(19): siRNA sense strand
gcacuuuauuuguaaugag

SEQ ID NO: 1274925 - RNA, 19 nt, Homo sapiens
  misc_RNA (1)...(19): siRNA sense strand
guagaaguauuugaguauc

SEQ ID NO: 1274926 - RNA, 19 nt, Homo sapiens
  misc_RNA (1)...(19): siRNA sense strand
guauuugaguaucuugaug

SEQ ID NO: 1274927 - RNA, 19 nt, Homo sapiens
  misc_RNA (1)...(19): siRNA sense strand
aggaauacuugacaguuug

SEQ ID NO: 1274928 - RNA, 19 nt, Homo sapiens
  misc_RNA (1)...(19): siRNA sense strand
aguguaaaguggucaaaug

SEQ ID NO: 1274929 - RNA, 19 nt, Homo sapiens
  misc_RNA (1)...(19): siRNA sense strand
ccaaaacccuacuaugaga

SEQ ID NO: 1274930 - RNA, 19 nt, Homo sapiens
  misc_RNA (1)...(19): siRNA sense strand
ccacccauacuauuuguga

SEQ ID NO: 1274931 - RNA, 19 nt, Homo sapiens
  misc_RNA (1)...(19): siRNA sense strand
caccaacauuugaagcuau

SEQ ID NO: 1274932 - RNA, 19 nt, Homo sapiens
  misc_RNA (1)...(19): siRNA sense strand
uuggagagagcacgauuua

SEQ ID NO: 1274933 - RNA, 19 nt, Homo sapiens
  misc_RNA (1)...(19): siRNA sense strand
gguuaucagaugcacuuua

SEQ ID NO: 1274934 - RNA, 19 nt, Homo sapiens
  misc_RNA (1)...(19): siRNA sense strand
ugaggagccaccaacauuu

SEQ ID NO: 1274935 - RNA, 19 nt, Homo sapiens
  misc_RNA (1)...(19): siRNA sense strand
ggaaggaauacuugacagu

SEQ ID NO: 1274936 - RNA, 19 nt, Homo sapiens
  misc_RNA (1)...(19): siRNA sense strand
gaggaaggaauacuugaca

SEQ ID NO: 1274937 - RNA, 19 nt, Homo sapiens
  misc_RNA (1)...(19): siRNA sense strand
ugaguaucuugaugcagua

SEQ ID NO: 1274938 - RNA, 19 nt, Homo sapiens
  misc_RNA (1)...(19): siRNA sense strand
caccuuuagugaaguagaa

SEQ ID NO: 1274939 - RNA, 19 nt, Homo sapiens
  misc_RNA (1)...(19): siRNA sense strand
acagauaucaggauuugga

SEQ ID NO: 1274940 - RNA, 19 nt, Homo sapiens
  misc_RNA (1)...(19): siRNA sense strand
ucauugcugugauuguuau

SEQ ID NO: 1274941 - RNA, 19 nt, Homo sapiens
  misc_RNA (1)...(19): siRNA sense strand
ucagaugcacuuuauuugu

SEQ ID NO: 1274942 - RNA, 19 nt, Homo sapiens
  misc_RNA (1)...(19): siRNA sense strand
gugcugcuccagaguguaa

SEQ ID NO: 1274943 - RNA, 19 nt, Homo sapiens
  misc_RNA (1)...(19): siRNA sense strand
ggaaaacacaccuuuagug

SEQ ID NO: 1274944 - RNA, 19 nt, Homo sapiens
  misc_RNA (1)...(19): siRNA sense strand
aaggaucaguagcaauuug

SEQ ID NO: 1274945 - RNA, 19 nt, Homo sapiens
  misc_RNA (1)...(19): siRNA sense strand
uauauacgggauccuuuaa

SEQ ID NO: 1274946 - RNA, 19 nt, Homo sapiens
  misc_RNA (1)...(19): siRNA sense strand
ugaaguagaaguauuugag

SEQ ID NO: 1274947 - RNA, 19 nt, Homo sapiens
  misc_RNA (1)...(19): siRNA sense strand
cuugacaguuuggauguuu

SEQ ID NO: 1274948 - RNA, 19 nt, Homo sapiens
  misc_RNA (1)...(19): siRNA sense strand
cauauauacgggauccuuu

SEQ ID NO: 1274949 - RNA, 19 nt, Homo sapiens
  misc_RNA (1)...(19): siRNA sense strand
auauauacgggauccuuua

SEQ ID NO: 1274950 - RNA, 19 nt, Homo sapiens
  misc_RNA (1)...(19): siRNA sense strand
cuuaaaggaucaguagcaa

SEQ ID NO: 1274951 - RNA, 19 nt, Homo sapiens
  misc_RNA (1)...(19): siRNA sense strand
uaaaccugaggaaggaaua

SEQ ID NO: 1274952 - RNA, 19 nt, Homo sapiens
  misc_RNA (1)...(19): siRNA sense strand
agaugacgccuguuauaga

SEQ ID NO: 1274953 - RNA, 19 nt, Homo sapiens
  misc_RNA (1)...(19): siRNA sense strand
ugugauuguuauugccaua

SEQ ID NO: 1274954 - RNA, 19 nt, Homo sapiens
  misc_RNA (1)...(19): siRNA sense strand
gagagcacgauuuauugug

SEQ ID NO: 1274955 - RNA, 19 nt, Homo sapiens
  misc_RNA (1)...(19): siRNA sense strand
gaaguauuugaguaucuug

SEQ ID NO: 1274956 - RNA, 19 nt, Homo sapiens
  misc_RNA (1)...(19): siRNA sense strand
ccucuugccacccauacua

SEQ ID NO: 1274957 - RNA, 19 nt, Homo sapiens
  misc_RNA (1)...(19): siRNA sense strand
gauaucaggauuuggaaaa

SEQ ID NO: 1274958 - RNA, 19 nt, Homo sapiens
  misc_RNA (1)...(19): siRNA sense strand
ggcuaccugucucagauga

SEQ ID NO: 1274959 - RNA, 19 nt, Homo sapiens
  misc_RNA (1)...(19): siRNA sense strand
ccaugguguugcugcugua

SEQ ID NO: 1274960 - RNA, 19 nt, Homo sapiens
  misc_RNA (1)...(19): siRNA sense strand
cagaugacgccuguuauag

SEQ ID NO: 1274961 - RNA, 19 nt, Homo sapiens
  misc_RNA (1)...(19): siRNA sense strand
gucauugcugugauuguua

SEQ ID NO: 1274962 - RNA, 19 nt, Homo sapiens
  misc_RNA (1)...(19): siRNA sense strand
uuggugaacgaguagauua

SEQ ID NO: 1274963 - RNA, 19 nt, Homo sapiens
  misc_RNA (1)...(19): siRNA sense strand
ggagccaccaacauuugaa

SEQ ID NO: 1274964 - RNA, 19 nt, Homo sapiens
  misc_RNA (1)...(19): siRNA sense strand
gcgcuuuccuggguugcuu

SEQ ID NO: 1274965 - RNA, 19 nt, Homo sapiens
  misc_RNA (1)...(19): siRNA sense strand
uacuacaaagcaacaguua

SEQ ID NO: 1274966 - RNA, 19 nt, Homo sapiens
  misc_RNA (1)...(19): siRNA sense strand
cuugaugcaguaacuuaua

SEQ ID NO: 1274967 - RNA, 19 nt, Homo sapiens
  misc_RNA (1)...(19): siRNA sense strand
aaacauguccauauauacg

SEQ ID NO: 1274968 - RNA, 19 nt, Homo sapiens
  misc_RNA (1)...(19): siRNA sense strand
guguaaaguggucaaaugu

SEQ ID NO: 1274969 - RNA, 19 nt, Homo sapiens
  misc_RNA (1)...(19): siRNA sense strand
cuuacgaguuugguuauca

SEQ ID NO: 1274970 - RNA, 19 nt, Homo sapiens
  misc_RNA (1)...(19): siRNA sense strand
uacgggauccuuuaaaugg

SEQ ID NO: 1274971 - RNA, 19 nt, Homo sapiens
  misc_RNA (1)...(19): siRNA sense strand
aaccaaaacccuacuauga

SEQ ID NO: 1274972 - RNA, 19 nt, Homo sapiens
  misc_RNA (1)...(19): siRNA sense strand
cccaauaugugaaaagguu

SEQ ID NO: 1274973 - RNA, 19 nt, Homo sapiens
  misc_RNA (1)...(19): siRNA sense strand
cgauggcagcgacacaauu

SEQ ID NO: 1274974 - RNA, 19 nt, Homo sapiens
  misc_RNA (1)...(19): siRNA sense strand
gauccauuuucacuuauug

SEQ ID NO: 1274975 - RNA, 19 nt, Homo sapiens
  misc_RNA (1)...(19): siRNA sense strand
uugaugcaguaacuuauag

SEQ ID NO: 1274976 - RNA, 19 nt, Homo sapiens
  misc_RNA (1)...(19): siRNA sense strand
guaucuugaugcaguaacu

SEQ ID NO: 1274977 - RNA, 19 nt, Homo sapiens
  misc_RNA (1)...(19): siRNA sense strand
caacauuugaagcuaugga

SEQ ID NO: 1274978 - RNA, 19 nt, Homo sapiens
  misc_RNA (1)...(19): siRNA sense strand
gagauuggugaacgaguag

SEQ ID NO: 1274979 - RNA, 19 nt, Homo sapiens
  misc_RNA (1)...(19): siRNA sense strand
ggagagagcacgauuuauu

SEQ ID NO: 1274980 - RNA, 19 nt, Homo sapiens
  misc_RNA (1)...(19): siRNA sense strand
agagaaacauguccauaua

SEQ ID NO: 1274981 - RNA, 19 nt, Homo sapiens
  misc_RNA (1)...(19): siRNA sense strand
cagaugcacuuuauuugua

SEQ ID NO: 1274982 - RNA, 19 nt, Homo sapiens
  misc_RNA (1)...(19): siRNA sense strand
ggacuuacgaguuugguua

SEQ ID NO: 1274983 - RNA, 19 nt, Homo sapiens
  misc_RNA (1)...(19): siRNA sense strand
aaacagauaucaggauuug

SEQ ID NO: 1274984 - RNA, 19 nt, Homo sapiens
  misc_RNA (1)...(19): siRNA sense strand
cuauggagcucauugguaa

SEQ ID NO: 1274985 - RNA, 19 nt, Homo sapiens
  misc_RNA (1)...(19): siRNA sense strand
aaacacaccuuuagugaag

SEQ ID NO: 1274986 - RNA, 19 nt, Homo sapiens
  misc_RNA (1)...(19): siRNA sense strand
gaacuuaaaggaucaguag

SEQ ID NO: 1274987 - RNA, 19 nt, Homo sapiens
  misc_RNA (1)...(19): siRNA sense strand
gaaaacagauaucaggauu

SEQ ID NO: 1274988 - RNA, 19 nt, Homo sapiens
  misc_RNA (1)...(19): siRNA sense strand
uaaaggaucaguagcaauu

SEQ ID NO: 1274989 - RNA, 19 nt, Homo sapiens
  misc_RNA (1)...(19): siRNA sense strand
aaaugggacuuacgaguuu

SEQ ID NO: 1274990 - RNA, 19 nt, Homo sapiens
  misc_RNA (1)...(19): siRNA sense strand
guuaucagaugcacuuuau

SEQ ID NO: 1274991 - RNA, 19 nt, Homo sapiens
  misc_RNA (1)...(19): siRNA sense strand
ugagauuggugaacgagua

SEQ ID NO: 1274992 - RNA, 19 nt, Homo sapiens
  misc_RNA (1)...(19): siRNA sense strand
gugaacgaguagauuauaa

SEQ ID NO: 1274993 - RNA, 19 nt, Homo sapiens
  misc_RNA (1)...(19): siRNA sense strand
gagagagcacgauuuauug

SEQ ID NO: 1274994 - RNA, 19 nt, Homo sapiens
  misc_RNA (1)...(19): siRNA sense strand
caaaugggacuuacgaguu

SEQ ID NO: 1274995 - RNA, 19 nt, Homo sapiens
  misc_RNA (1)...(19): siRNA sense strand
ggucauugcugugauuguu

SEQ ID NO: 1274996 - RNA, 19 nt, Homo sapiens
  misc_RNA (1)...(19): siRNA sense strand
ccagauccauuuucacuua

SEQ ID NO: 1274997 - RNA, 19 nt, Homo sapiens
  misc_RNA (1)...(19): siRNA sense strand
gaaggaauacuugacaguu

SEQ ID NO: 1274998 - RNA, 19 nt, Homo sapiens
  misc_RNA (1)...(19): siRNA sense strand
aaggaauacuugacaguuu

SEQ ID NO: 1274999 - RNA, 19 nt, Homo sapiens
  misc_RNA (1)...(19): siRNA sense strand
ucagaugacgccuguuaua

SEQ ID NO: 1275000 - RNA, 19 nt, Homo sapiens
  misc_RNA (1)...(19): siRNA sense strand
gaaaacacaccuuuaguga

SEQ ID NO: 1275001 - RNA, 19 nt, Homo sapiens
  misc_RNA (1)...(19): siRNA sense strand
gaugacgccuguuauagag

SEQ ID NO: 1275002 - RNA, 19 nt, Homo sapiens
  misc_RNA (1)...(19): siRNA sense strand
gagaaacauguccauauau

SEQ ID NO: 1275003 - RNA, 19 nt, Homo sapiens
  misc_RNA (1)...(19): siRNA sense strand
acgaguagauuauaagugu

SEQ ID NO: 1275004 - RNA, 19 nt, Homo sapiens
  misc_RNA (1)...(19): siRNA sense strand
cuacaaagcaacaguuaug

SEQ ID NO: 1275005 - RNA, 19 nt, Homo sapiens
  misc_RNA (1)...(19): siRNA sense strand
ccaccaacauuugaagcua

SEQ ID NO: 1275006 - RNA, 19 nt, Homo sapiens
  misc_RNA (1)...(19): siRNA sense strand
uauacgggauccuuuaaau

SEQ ID NO: 1275007 - RNA, 19 nt, Homo sapiens
  misc_RNA (1)...(19): siRNA sense strand
cgaguuugguuaucagaug

SEQ ID NO: 1275008 - RNA, 19 nt, Homo sapiens
  misc_RNA (1)...(19): siRNA sense strand
gaacgaguagauuauaagu

SEQ ID NO: 1275009 - RNA, 19 nt, Homo sapiens
  misc_RNA (1)...(19): siRNA sense strand
gugaggagccaccaacauu

SEQ ID NO: 1275010 - RNA, 19 nt, Homo sapiens
  misc_RNA (1)...(19): siRNA sense strand
gauggcagcgacacaauug

SEQ ID NO: 1275011 - RNA, 19 nt, Homo sapiens
  misc_RNA (1)...(19): siRNA sense strand
gcuauggagcucauuggua

SEQ ID NO: 1275012 - RNA, 19 nt, Homo sapiens
  misc_RNA (1)...(19): siRNA sense strand
gaggagccaccaacauuug

SEQ ID NO: 1275013 - RNA, 19 nt, Homo sapiens
  misc_RNA (1)...(19): siRNA sense strand
acacaccuuuagugaagua

SEQ ID NO: 1275014 - RNA, 19 nt, Homo sapiens
  misc_RNA (1)...(19): siRNA sense strand
ucucagaugacgccuguua

SEQ ID NO: 1275015 - RNA, 19 nt, Homo sapiens
  misc_RNA (1)...(19): siRNA sense strand
uagagaaacauguccauau

SEQ ID NO: 1275016 - RNA, 19 nt, Homo sapiens
  misc_RNA (1)...(19): siRNA sense strand
guuccaaagugucuuaaag

SEQ ID NO: 1275017 - RNA, 19 nt, Homo sapiens
  misc_RNA (1)...(19): siRNA sense strand
ggugaacgaguagauuaua

SEQ ID NO: 1275018 - RNA, 19 nt, Homo sapiens
  misc_RNA (1)...(19): siRNA sense strand
gaaguagaaguauuugagu

SEQ ID NO: 1275019 - RNA, 19 nt, Homo sapiens
  misc_RNA (1)...(19): siRNA sense strand
gaaacauguccauauauac

SEQ ID NO: 1275020 - RNA, 19 nt, Homo sapiens
  misc_RNA (1)...(19): siRNA sense strand
ugacgccuguuauagagaa

SEQ ID NO: 1275021 - RNA, 19 nt, Homo sapiens
  misc_RNA (1)...(19): siRNA sense strand
cgaguagauuauaagugua

SEQ ID NO: 1275022 - RNA, 19 nt, Homo sapiens
  misc_RNA (1)...(19): siRNA sense strand
gcacuuuauuuguaaugag

SEQ ID NO: 1275023 - RNA, 19 nt, Homo sapiens
  misc_RNA (1)...(19): siRNA sense strand
guagaaguauuugaguauc

SEQ ID NO: 1275024 - RNA, 19 nt, Homo sapiens
  misc_RNA (1)...(19): siRNA sense strand
guauuugaguaucuugaug

SEQ ID NO: 1275025 - RNA, 19 nt, Homo sapiens
  misc_RNA (1)...(19): siRNA sense strand
aggaauacuugacaguuug

SEQ ID NO: 1275026 - RNA, 19 nt, Homo sapiens
  misc_RNA (1)...(19): siRNA sense strand
ccaaaacccuacuaugaga

SEQ ID NO: 1275027 - RNA, 19 nt, Homo sapiens
  misc_RNA (1)...(19): siRNA sense strand
aguguaaaguggucaaaug

SEQ ID NO: 1275028 - RNA, 19 nt, Homo sapiens
  misc_RNA (1)...(19): siRNA sense strand
ccacccauacuauuuguga

SEQ ID NO: 1275029 - RNA, 19 nt, Homo sapiens
  misc_RNA (1)...(19): siRNA sense strand
caccaacauuugaagcuau

SEQ ID NO: 1275030 - RNA, 19 nt, Homo sapiens
  misc_RNA (1)...(19): siRNA sense strand
uuggagagagcacgauuua

SEQ ID NO: 1275031 - RNA, 19 nt, Homo sapiens
  misc_RNA (1)...(19): siRNA sense strand
gguuaucagaugcacuuua

SEQ ID NO: 1275032 - RNA, 19 nt, Homo sapiens
  misc_RNA (1)...(19): siRNA sense strand
ugaggagccaccaacauuu

SEQ ID NO: 1275033 - RNA, 19 nt, Homo sapiens
  misc_RNA (1)...(19): siRNA sense strand
ggaaggaauacuugacagu

SEQ ID NO: 1275034 - RNA, 19 nt, Homo sapiens
  misc_RNA (1)...(19): siRNA sense strand
gaggaaggaauacuugaca

SEQ ID NO: 1275035 - RNA, 19 nt, Homo sapiens
  misc_RNA (1)...(19): siRNA sense strand
ccaguuccaaagugucuua

SEQ ID NO: 1275036 - RNA, 19 nt, Homo sapiens
  misc_RNA (1)...(19): siRNA sense strand
ugaguaucuugaugcagua

SEQ ID NO: 1275037 - RNA, 19 nt, Homo sapiens
  misc_RNA (1)...(19): siRNA sense strand
caccuuuagugaaguagaa

SEQ ID NO: 1275038 - RNA, 19 nt, Homo sapiens
  misc_RNA (1)...(19): siRNA sense strand
acagauaucaggauuugga

SEQ ID NO: 1275039 - RNA, 19 nt, Homo sapiens
  misc_RNA (1)...(19): siRNA sense strand
ucauugcugugauuguuau

SEQ ID NO: 1275040 - RNA, 19 nt, Homo sapiens
  misc_RNA (1)...(19): siRNA sense strand
ucagaugcacuuuauuugu

SEQ ID NO: 1275041 - RNA, 19 nt, Homo sapiens
  misc_RNA (1)...(19): siRNA sense strand
gugcugcuccagaguguaa

SEQ ID NO: 1275042 - RNA, 19 nt, Homo sapiens
  misc_RNA (1)...(19): siRNA sense strand
ggaaaacacaccuuuagug

SEQ ID NO: 1275043 - RNA, 19 nt, Homo sapiens
  misc_RNA (1)...(19): siRNA sense strand
aaggaucaguagcaauuug

SEQ ID NO: 1275044 - RNA, 19 nt, Homo sapiens
  misc_RNA (1)...(19): siRNA sense strand
uauauacgggauccuuuaa

SEQ ID NO: 1275045 - RNA, 19 nt, Homo sapiens
  misc_RNA (1)...(19): siRNA sense strand
ugaaguagaaguauuugag

SEQ ID NO: 1275046 - RNA, 19 nt, Homo sapiens
  misc_RNA (1)...(19): siRNA sense strand
cuugacaguuuggauguuu

SEQ ID NO: 1275047 - RNA, 19 nt, Homo sapiens
  misc_RNA (1)...(19): siRNA sense strand
cauauauacgggauccuuu

SEQ ID NO: 1275048 - RNA, 19 nt, Homo sapiens
  misc_RNA (1)...(19): siRNA sense strand
auauauacgggauccuuua

SEQ ID NO: 1275049 - RNA, 19 nt, Homo sapiens
  misc_RNA (1)...(19): siRNA sense strand
cuuaaaggaucaguagcaa

SEQ ID NO: 1275050 - RNA, 19 nt, Homo sapiens
  misc_RNA (1)...(19): siRNA sense strand
uaaaccugaggaaggaaua

SEQ ID NO: 1275051 - RNA, 19 nt, Homo sapiens
  misc_RNA (1)...(19): siRNA sense strand
agaugacgccuguuauaga

SEQ ID NO: 1275052 - RNA, 19 nt, Homo sapiens
  misc_RNA (1)...(19): siRNA sense strand
ugugauuguuauugccaua

SEQ ID NO: 1275053 - RNA, 19 nt, Homo sapiens
  misc_RNA (1)...(19): siRNA sense strand
gagagcacgauuuauugug

SEQ ID NO: 1275054 - RNA, 19 nt, Homo sapiens
  misc_RNA (1)...(19): siRNA sense strand
gaaguauuugaguaucuug

SEQ ID NO: 1275055 - RNA, 19 nt, Homo sapiens
  misc_RNA (1)...(19): siRNA sense strand
ggcuaccugucucagauga

SEQ ID NO: 1275056 - RNA, 19 nt, Homo sapiens
  misc_RNA (1)...(19): siRNA sense strand
gauaucaggauuuggaaaa

SEQ ID NO: 1275057 - RNA, 19 nt, Homo sapiens
  misc_RNA (1)...(19): siRNA sense strand
ccucuugccacccauacua

SEQ ID NO: 1275058 - RNA, 19 nt, Homo sapiens
  misc_RNA (1)...(19): siRNA sense strand
ccaugguguugcugcugua

SEQ ID NO: 1275059 - RNA, 19 nt, Homo sapiens
  misc_RNA (1)...(19): siRNA sense strand
cagaugacgccuguuauag

SEQ ID NO: 1275060 - RNA, 19 nt, Homo sapiens
  misc_RNA (1)...(19): siRNA sense strand
uuggugaacgaguagauua

SEQ ID NO: 1275061 - RNA, 19 nt, Homo sapiens
  misc_RNA (1)...(19): siRNA sense strand
gucauugcugugauuguua

SEQ ID NO: 1275062 - RNA, 19 nt, Homo sapiens
  misc_RNA (1)...(19): siRNA sense strand
ggagccaccaacauuugaa

SEQ ID NO: 1275063 - RNA, 19 nt, Homo sapiens
  misc_RNA (1)...(19): siRNA sense strand
gcgcuuuccuggguugcuu

SEQ ID NO: 1275064 - RNA, 19 nt, Homo sapiens
  misc_RNA (1)...(19): siRNA sense strand
uacuacaaagcaacaguua

SEQ ID NO: 1275065 - RNA, 19 nt, Homo sapiens
  misc_RNA (1)...(19): siRNA sense strand
cuugaugcaguaacuuaua

SEQ ID NO: 1275066 - RNA, 19 nt, Homo sapiens
  misc_RNA (1)...(19): siRNA sense strand
aaacauguccauauauacg

SEQ ID NO: 1275067 - RNA, 19 nt, Homo sapiens
  misc_RNA (1)...(19): siRNA sense strand
guguaaaguggucaaaugu

SEQ ID NO: 1275068 - RNA, 19 nt, Homo sapiens
  misc_RNA (1)...(19): siRNA sense strand
cuuacgaguuugguuauca

SEQ ID NO: 1275069 - RNA, 19 nt, Homo sapiens
  misc_RNA (1)...(19): siRNA sense strand
uacgggauccuuuaaaugg

SEQ ID NO: 1275070 - RNA, 19 nt, Homo sapiens
  misc_RNA (1)...(19): siRNA sense strand
aaccaaaacccuacuauga

SEQ ID NO: 1275071 - RNA, 19 nt, Homo sapiens
  misc_RNA (1)...(19): siRNA sense strand
cccaauaugugaaaagguu

SEQ ID NO: 1275072 - RNA, 19 nt, Homo sapiens
  misc_RNA (1)...(19): siRNA sense strand
cgauggcagcgacacaauu

SEQ ID NO: 1275073 - RNA, 19 nt, Homo sapiens
  misc_RNA (1)...(19): siRNA sense strand
gauccauuuucacuuauug

SEQ ID NO: 1275074 - RNA, 19 nt, Homo sapiens
  misc_RNA (1)...(19): siRNA sense strand
uugaugcaguaacuuauag

SEQ ID NO: 1275075 - RNA, 19 nt, Homo sapiens
  misc_RNA (1)...(19): siRNA sense strand
guaucuugaugcaguaacu

SEQ ID NO: 1275076 - RNA, 19 nt, Homo sapiens
  misc_RNA (1)...(19): siRNA sense strand
caacauuugaagcuaugga

SEQ ID NO: 1275077 - RNA, 19 nt, Homo sapiens
  misc_RNA (1)...(19): siRNA sense strand
gagauuggugaacgaguag

SEQ ID NO: 1275078 - RNA, 19 nt, Homo sapiens
  misc_RNA (1)...(19): siRNA sense strand
ggagagagcacgauuuauu

SEQ ID NO: 1275079 - RNA, 19 nt, Homo sapiens
  misc_RNA (1)...(19): siRNA sense strand
agagaaacauguccauaua

SEQ ID NO: 1275080 - RNA, 19 nt, Homo sapiens
  misc_RNA (1)...(19): siRNA sense strand
cagaugcacuuuauuugua

SEQ ID NO: 1275081 - RNA, 19 nt, Homo sapiens
  misc_RNA (1)...(19): siRNA sense strand
ggacuuacgaguuugguua

SEQ ID NO: 1275082 - RNA, 19 nt, Homo sapiens
  misc_RNA (1)...(19): siRNA sense strand
aaacagauaucaggauuug

SEQ ID NO: 1275083 - RNA, 19 nt, Homo sapiens
  misc_RNA (1)...(19): siRNA sense strand
cuauggagcucauugguaa

SEQ ID NO: 1275084 - RNA, 19 nt, Homo sapiens
  misc_RNA (1)...(19): siRNA sense strand
aaacacaccuuuagugaag

SEQ ID NO: 1275085 - RNA, 19 nt, Homo sapiens
  misc_RNA (1)...(19): siRNA sense strand
gaacuuaaaggaucaguag

SEQ ID NO: 1275086 - RNA, 19 nt, Homo sapiens
  misc_RNA (1)...(19): siRNA sense strand
gaaaacagauaucaggauu

SEQ ID NO: 1275087 - RNA, 19 nt, Homo sapiens
  misc_RNA (1)...(19): siRNA sense strand
uaaaggaucaguagcaauu

SEQ ID NO: 1275088 - RNA, 19 nt, Homo sapiens
  misc_RNA (1)...(19): siRNA sense strand
aaaugggacuuacgaguuu

SEQ ID NO: 1275089 - RNA, 19 nt, Homo sapiens
  misc_RNA (1)...(19): siRNA sense strand
guuaucagaugcacuuuau

SEQ ID NO: 1275090 - RNA, 19 nt, Homo sapiens
  misc_RNA (1)...(19): siRNA sense strand
gagcugaauaugccacuua

SEQ ID NO: 1275091 - RNA, 19 nt, Homo sapiens
  misc_RNA (1)...(19): siRNA sense strand
ugagauuggugaacgagua

SEQ ID NO: 1275092 - RNA, 19 nt, Homo sapiens
  misc_RNA (1)...(19): siRNA sense strand
gugaacgaguagauuauaa

SEQ ID NO: 1275093 - RNA, 19 nt, Homo sapiens
  misc_RNA (1)...(19): siRNA sense strand
gagagagcacgauuuauug

SEQ ID NO: 1275094 - RNA, 19 nt, Homo sapiens
  misc_RNA (1)...(19): siRNA sense strand
caaaugggacuuacgaguu

SEQ ID NO: 1275095 - RNA, 19 nt, Homo sapiens
  misc_RNA (1)...(19): siRNA sense strand
ggucauugcugugauuguu

SEQ ID NO: 1275096 - RNA, 19 nt, Homo sapiens
  misc_RNA (1)...(19): siRNA sense strand
ccagauccauuuucacuua

SEQ ID NO: 1275097 - RNA, 19 nt, Homo sapiens
  misc_RNA (1)...(19): siRNA sense strand
gaaggaauacuugacaguu

SEQ ID NO: 1275098 - RNA, 19 nt, Homo sapiens
  misc_RNA (1)...(19): siRNA sense strand
aaggaauacuugacaguuu

SEQ ID NO: 1275099 - RNA, 19 nt, Homo sapiens
  misc_RNA (1)...(19): siRNA sense strand
ucagaugacgccuguuaua

SEQ ID NO: 1275100 - RNA, 19 nt, Homo sapiens
  misc_RNA (1)...(19): siRNA sense strand
gaaaacacaccuuuaguga

SEQ ID NO: 1275101 - RNA, 19 nt, Homo sapiens
  misc_RNA (1)...(19): siRNA sense strand
gaugacgccuguuauagag

SEQ ID NO: 1275102 - RNA, 19 nt, Homo sapiens
  misc_RNA (1)...(19): siRNA sense strand
gagaaacauguccauauau

SEQ ID NO: 1275103 - RNA, 19 nt, Homo sapiens
  misc_RNA (1)...(19): siRNA sense strand
ccacuuaccagacuaaauc

SEQ ID NO: 1275104 - RNA, 19 nt, Homo sapiens
  misc_RNA (1)...(19): siRNA sense strand
acgaguagauuauaagugu

SEQ ID NO: 1275105 - RNA, 19 nt, Homo sapiens
  misc_RNA (1)...(19): siRNA sense strand
cuacaaagcaacaguuaug

SEQ ID NO: 1275106 - RNA, 19 nt, Homo sapiens
  misc_RNA (1)...(19): siRNA sense strand
ccaccaacauuugaagcua

SEQ ID NO: 1275107 - RNA, 19 nt, Homo sapiens
  misc_RNA (1)...(19): siRNA sense strand
uauacgggauccuuuaaau

SEQ ID NO: 1275108 - RNA, 19 nt, Homo sapiens
  misc_RNA (1)...(19): siRNA sense strand
cgaguuugguuaucagaug

SEQ ID NO: 1275109 - RNA, 19 nt, Homo sapiens
  misc_RNA (1)...(19): siRNA sense strand
gaacgaguagauuauaagu

SEQ ID NO: 1275110 - RNA, 19 nt, Homo sapiens
  misc_RNA (1)...(19): siRNA sense strand
gugaggagccaccaacauu

SEQ ID NO: 1275111 - RNA, 19 nt, Homo sapiens
  misc_RNA (1)...(19): siRNA sense strand
gauggcagcgacacaauug

SEQ ID NO: 1275112 - RNA, 19 nt, Homo sapiens
  misc_RNA (1)...(19): siRNA sense strand
ucucagaugacgccuguua

SEQ ID NO: 1275113 - RNA, 19 nt, Homo sapiens
  misc_RNA (1)...(19): siRNA sense strand
gaggagccaccaacauuug

SEQ ID NO: 1275114 - RNA, 19 nt, Homo sapiens
  misc_RNA (1)...(19): siRNA sense strand
gcuauggagcucauuggua

SEQ ID NO: 1275115 - RNA, 19 nt, Homo sapiens
  misc_RNA (1)...(19): siRNA sense strand
acacaccuuuagugaagua

SEQ ID NO: 1275116 - RNA, 19 nt, Homo sapiens
  misc_RNA (1)...(19): siRNA sense strand
uagagaaacauguccauau

SEQ ID NO: 1275117 - RNA, 19 nt, Homo sapiens
  misc_RNA (1)...(19): siRNA sense strand
guuccaaagugucuuaaag

SEQ ID NO: 1275118 - RNA, 19 nt, Homo sapiens
  misc_RNA (1)...(19): siRNA sense strand
ggugaacgaguagauuaua

SEQ ID NO: 1275119 - RNA, 19 nt, Homo sapiens
  misc_RNA (1)...(19): siRNA sense strand
gaaguagaaguauuugagu

SEQ ID NO: 1275120 - RNA, 19 nt, Homo sapiens
  misc_RNA (1)...(19): siRNA sense strand
gaaacauguccauauauac

SEQ ID NO: 1275121 - RNA, 19 nt, Homo sapiens
  misc_RNA (1)...(19): siRNA sense strand
ugacgccuguuauagagaa

SEQ ID NO: 1275122 - RNA, 19 nt, Homo sapiens
  misc_RNA (1)...(19): siRNA sense strand
cgaguagauuauaagugua

SEQ ID NO: 1275123 - RNA, 19 nt, Homo sapiens
  misc_RNA (1)...(19): siRNA sense strand
gcacuuuauuuguaaugag

SEQ ID NO: 1275124 - RNA, 19 nt, Homo sapiens
  misc_RNA (1)...(19): siRNA sense strand
guagaaguauuugaguauc

SEQ ID NO: 1275125 - RNA, 19 nt, Homo sapiens
  misc_RNA (1)...(19): siRNA sense strand
guauuugaguaucuugaug

SEQ ID NO: 1275126 - RNA, 19 nt, Homo sapiens
  misc_RNA (1)...(19): siRNA sense strand
aggaauacuugacaguuug

SEQ ID NO: 1275127 - RNA, 19 nt, Homo sapiens
  misc_RNA (1)...(19): siRNA sense strand
ccaaaacccuacuaugaga

SEQ ID NO: 1275128 - RNA, 19 nt, Homo sapiens
  misc_RNA (1)...(19): siRNA sense strand
aguguaaaguggucaaaug

SEQ ID NO: 1275129 - RNA, 19 nt, Homo sapiens
  misc_RNA (1)...(19): siRNA sense strand
ccacccauacuauuuguga

SEQ ID NO: 1275130 - RNA, 19 nt, Homo sapiens
  misc_RNA (1)...(19): siRNA sense strand
uuggagagagcacgauuua

SEQ ID NO: 1275131 - RNA, 19 nt, Homo sapiens
  misc_RNA (1)...(19): siRNA sense strand
gguuaucagaugcacuuua

SEQ ID NO: 1275132 - RNA, 19 nt, Homo sapiens
  misc_RNA (1)...(19): siRNA sense strand
caccaacauuugaagcuau

SEQ ID NO: 1275133 - RNA, 19 nt, Homo sapiens
  misc_RNA (1)...(19): siRNA sense strand
ugaggagccaccaacauuu

SEQ ID NO: 1275134 - RNA, 19 nt, Homo sapiens
  misc_RNA (1)...(19): siRNA sense strand
ggaaggaauacuugacagu

SEQ ID NO: 1275135 - RNA, 19 nt, Homo sapiens
  misc_RNA (1)...(19): siRNA sense strand
gaggaaggaauacuugaca

SEQ ID NO: 1275136 - RNA, 19 nt, Homo sapiens
  misc_RNA (1)...(19): siRNA sense strand
ccaguuccaaagugucuua

SEQ ID NO: 1275137 - RNA, 19 nt, Homo sapiens
  misc_RNA (1)...(19): siRNA sense strand
ugaguaucuugaugcagua

SEQ ID NO: 1275138 - RNA, 19 nt, Homo sapiens
  misc_RNA (1)...(19): siRNA sense strand
caccuuuagugaaguagaa

SEQ ID NO: 1275139 - RNA, 19 nt, Homo sapiens
  misc_RNA (1)...(19): siRNA sense strand
acagauaucaggauuugga

SEQ ID NO: 1275140 - RNA, 19 nt, Homo sapiens
  misc_RNA (1)...(19): siRNA sense strand
ucauugcugugauuguuau

SEQ ID NO: 1275141 - RNA, 19 nt, Homo sapiens
  misc_RNA (1)...(19): siRNA sense strand
ucagaugcacuuuauuugu

SEQ ID NO: 1275142 - RNA, 19 nt, Homo sapiens
  misc_RNA (1)...(19): siRNA sense strand
gugcugcuccagaguguaa

SEQ ID NO: 1275143 - RNA, 19 nt, Homo sapiens
  misc_RNA (1)...(19): siRNA sense strand
ggaaaacacaccuuuagug

SEQ ID NO: 1275144 - RNA, 19 nt, Homo sapiens
  misc_RNA (1)...(19): siRNA sense strand
aaggaucaguagcaauuug

SEQ ID NO: 1275145 - RNA, 19 nt, Homo sapiens
  misc_RNA (1)...(19): siRNA sense strand
uauauacgggauccuuuaa

SEQ ID NO: 1275146 - RNA, 19 nt, Homo sapiens
  misc_RNA (1)...(19): siRNA sense strand
ugaaguagaaguauuugag

SEQ ID NO: 1275147 - RNA, 19 nt, Homo sapiens
  misc_RNA (1)...(19): siRNA sense strand
cuugacaguuuggauguuu

SEQ ID NO: 1275148 - RNA, 19 nt, Homo sapiens
  misc_RNA (1)...(19): siRNA sense strand
cauauauacgggauccuuu

SEQ ID NO: 1275149 - RNA, 19 nt, Homo sapiens
  misc_RNA (1)...(19): siRNA sense strand
auauauacgggauccuuua

SEQ ID NO: 1275150 - RNA, 19 nt, Homo sapiens
  misc_RNA (1)...(19): siRNA sense strand
cuuaaaggaucaguagcaa

SEQ ID NO: 1275151 - RNA, 19 nt, Homo sapiens
  misc_RNA (1)...(19): siRNA sense strand
uaaaccugaggaaggaaua

SEQ ID NO: 1275152 - RNA, 19 nt, Homo sapiens
  misc_RNA (1)...(19): siRNA sense strand
agaugacgccuguuauaga

SEQ ID NO: 1275153 - RNA, 19 nt, Homo sapiens
  misc_RNA (1)...(19): siRNA sense strand
ugugauuguuauugccaua

SEQ ID NO: 1275154 - RNA, 19 nt, Homo sapiens
  misc_RNA (1)...(19): siRNA sense strand
gagagcacgauuuauugug

SEQ ID NO: 1275155 - RNA, 19 nt, Homo sapiens
  misc_RNA (1)...(19): siRNA sense strand
gaaguauuugaguaucuug

SEQ ID NO: 1275156 - RNA, 19 nt, Homo sapiens
  misc_RNA (1)...(19): siRNA sense strand
ggcuaccugucucagauga

SEQ ID NO: 1275157 - RNA, 19 nt, Homo sapiens
  misc_RNA (1)...(19): siRNA sense strand
gauaucaggauuuggaaaa

SEQ ID NO: 1275158 - RNA, 19 nt, Homo sapiens
  misc_RNA (1)...(19): siRNA sense strand
ccucuugccacccauacua

SEQ ID NO: 1275159 - RNA, 19 nt, Homo sapiens
  misc_RNA (1)...(19): siRNA sense strand
ccaugguguugcugcugua

SEQ ID NO: 1275160 - RNA, 19 nt, Homo sapiens
  misc_RNA (1)...(19): siRNA sense strand
cagaugacgccuguuauag

SEQ ID NO: 1275161 - RNA, 19 nt, Homo sapiens
  misc_RNA (1)...(19): siRNA sense strand
cagaugguggagcugaaua

SEQ ID NO: 1275162 - RNA, 19 nt, Homo sapiens
  misc_RNA (1)...(19): siRNA sense strand
gucauugcugugauuguua

SEQ ID NO: 1275163 - RNA, 19 nt, Homo sapiens
  misc_RNA (1)...(19): siRNA sense strand
ggagccaccaacauuugaa

SEQ ID NO: 1275164 - RNA, 19 nt, Homo sapiens
  misc_RNA (1)...(19): siRNA sense strand
uuggugaacgaguagauua

SEQ ID NO: 1275165 - RNA, 19 nt, Homo sapiens
  misc_RNA (1)...(19): siRNA sense strand
gcgcuuuccuggguugcuu

SEQ ID NO: 1275166 - RNA, 19 nt, Homo sapiens
  misc_RNA (1)...(19): siRNA sense strand
uacuacaaagcaacaguua

SEQ ID NO: 1275167 - RNA, 19 nt, Homo sapiens
  misc_RNA (1)...(19): siRNA sense strand
cuugaugcaguaacuuaua

SEQ ID NO: 1275168 - RNA, 19 nt, Homo sapiens
  misc_RNA (1)...(19): siRNA sense strand
aaacauguccauauauacg

SEQ ID NO: 1275169 - RNA, 19 nt, Homo sapiens
  misc_RNA (1)...(19): siRNA sense strand
guguaaaguggucaaaugu

SEQ ID NO: 1275170 - RNA, 19 nt, Homo sapiens
  misc_RNA (1)...(19): siRNA sense strand
cuuacgaguuugguuauca

SEQ ID NO: 1275171 - RNA, 19 nt, Homo sapiens
  misc_RNA (1)...(19): siRNA sense strand
uacgggauccuuuaaaugg

SEQ ID NO: 1275172 - RNA, 19 nt, Homo sapiens
  misc_RNA (1)...(19): siRNA sense strand
gcagaugguggagcugaau

SEQ ID NO: 1275173 - RNA, 19 nt, Homo sapiens
  misc_RNA (1)...(19): siRNA sense strand
aaccaaaacccuacuauga

SEQ ID NO: 1275174 - RNA, 19 nt, Homo sapiens
  misc_RNA (1)...(19): siRNA sense strand
uugaugcaguaacuuauag

SEQ ID NO: 1275175 - RNA, 19 nt, Homo sapiens
  misc_RNA (1)...(19): siRNA sense strand
ggagcugaauaugccacuu

SEQ ID NO: 1275176 - RNA, 19 nt, Homo sapiens
  misc_RNA (1)...(19): siRNA sense strand
cgauggcagcgacacaauu

SEQ ID NO: 1275177 - RNA, 19 nt, Homo sapiens
  misc_RNA (1)...(19): siRNA sense strand
gauccauuuucacuuauug

SEQ ID NO: 1275178 - RNA, 19 nt, Homo sapiens
  misc_RNA (1)...(19): siRNA sense strand
ggagagagcacgauuuauu

SEQ ID NO: 1275179 - RNA, 19 nt, Homo sapiens
  misc_RNA (1)...(19): siRNA sense strand
agagaaacauguccauaua

SEQ ID NO: 1275180 - RNA, 19 nt, Homo sapiens
  misc_RNA (1)...(19): siRNA sense strand
cagaugcacuuuauuugua

SEQ ID NO: 1275181 - RNA, 19 nt, Homo sapiens
  misc_RNA (1)...(19): siRNA sense strand
ggacuuacgaguuugguua

SEQ ID NO: 1275182 - RNA, 19 nt, Homo sapiens
  misc_RNA (1)...(19): siRNA sense strand
aaacagauaucaggauuug

SEQ ID NO: 1275183 - RNA, 19 nt, Homo sapiens
  misc_RNA (1)...(19): siRNA sense strand
cuauggagcucauugguaa

SEQ ID NO: 1275184 - RNA, 19 nt, Homo sapiens
  misc_RNA (1)...(19): siRNA sense strand
aaacacaccuuuagugaag

SEQ ID NO: 1275185 - RNA, 19 nt, Homo sapiens
  misc_RNA (1)...(19): siRNA sense strand
gaacuuaaaggaucaguag

SEQ ID NO: 1275186 - RNA, 19 nt, Homo sapiens
  misc_RNA (1)...(19): siRNA sense strand
gaaaacagauaucaggauu

SEQ ID NO: 1275187 - RNA, 19 nt, Homo sapiens
  misc_RNA (1)...(19): siRNA sense strand
uaaaggaucaguagcaauu

SEQ ID NO: 1275188 - RNA, 19 nt, Homo sapiens
  misc_RNA (1)...(19): siRNA sense strand
aaaugggacuuacgaguuu

SEQ ID NO: 1275189 - RNA, 19 nt, Homo sapiens
  misc_RNA (1)...(19): siRNA sense strand
guuaucagaugcacuuuau

SEQ ID NO: 1275190 - RNA, 19 nt, Homo sapiens
  misc_RNA (1)...(19): siRNA sense strand
ugagauuggugaacgagua

SEQ ID NO: 1275191 - RNA, 19 nt, Homo sapiens
  misc_RNA (1)...(19): siRNA sense strand
gugaacgaguagauuauaa

SEQ ID NO: 1275192 - RNA, 19 nt, Homo sapiens
  misc_RNA (1)...(19): siRNA sense strand
gagagagcacgauuuauug

SEQ ID NO: 1275193 - RNA, 19 nt, Homo sapiens
  misc_RNA (1)...(19): siRNA sense strand
caaaugggacuuacgaguu

SEQ ID NO: 1275194 - RNA, 19 nt, Homo sapiens
  misc_RNA (1)...(19): siRNA sense strand
ggucauugcugugauuguu

SEQ ID NO: 1275195 - RNA, 19 nt, Homo sapiens
  misc_RNA (1)...(19): siRNA sense strand
ccagauccauuuucacuua

SEQ ID NO: 1275196 - RNA, 19 nt, Homo sapiens
  misc_RNA (1)...(19): siRNA sense strand
gaaggaauacuugacaguu

SEQ ID NO: 1275197 - RNA, 19 nt, Homo sapiens
  misc_RNA (1)...(19): siRNA sense strand
aaggaauacuugacaguuu

SEQ ID NO: 1275198 - RNA, 19 nt, Homo sapiens
  misc_RNA (1)...(19): siRNA sense strand
ucagaugacgccuguuaua

SEQ ID NO: 1275199 - RNA, 19 nt, Homo sapiens
  misc_RNA (1)...(19): siRNA sense strand
gaaaacacaccuuuaguga

SEQ ID NO: 1275200 - RNA, 19 nt, Homo sapiens
  misc_RNA (1)...(19): siRNA sense strand
gaugacgccuguuauagag

SEQ ID NO: 1275201 - RNA, 19 nt, Homo sapiens
  misc_RNA (1)...(19): siRNA sense strand
gagaaacauguccauauau

SEQ ID NO: 1275202 - RNA, 19 nt, Homo sapiens
  misc_RNA (1)...(19): siRNA sense strand
acgaguagauuauaagugu

SEQ ID NO: 1275203 - RNA, 19 nt, Homo sapiens
  misc_RNA (1)...(19): siRNA sense strand
cuacaaagcaacaguuaug

SEQ ID NO: 1275204 - RNA, 19 nt, Homo sapiens
  misc_RNA (1)...(19): siRNA sense strand
ccaccaacauuugaagcua

SEQ ID NO: 1275205 - RNA, 19 nt, Homo sapiens
  misc_RNA (1)...(19): siRNA sense strand
uauacgggauccuuuaaau

SEQ ID NO: 1275206 - RNA, 19 nt, Homo sapiens
  misc_RNA (1)...(19): siRNA sense strand
cgaguuugguuaucagaug

SEQ ID NO: 1275207 - RNA, 19 nt, Homo sapiens
  misc_RNA (1)...(19): siRNA sense strand
gaacgaguagauuauaagu

SEQ ID NO: 1275208 - RNA, 19 nt, Homo sapiens
  misc_RNA (1)...(19): siRNA sense strand
gugaggagccaccaacauu

SEQ ID NO: 1275209 - RNA, 19 nt, Homo sapiens
  misc_RNA (1)...(19): siRNA sense strand
gauggcagcgacacaauug

SEQ ID NO: 1275210 - RNA, 19 nt, Homo sapiens
  misc_RNA (1)...(19): siRNA sense strand
gcuauggagcucauuggua

SEQ ID NO: 1275211 - RNA, 19 nt, Homo sapiens
  misc_RNA (1)...(19): siRNA sense strand
gaggagccaccaacauuug

SEQ ID NO: 1275212 - RNA, 19 nt, Homo sapiens
  misc_RNA (1)...(19): siRNA sense strand
acacaccuuuagugaagua

SEQ ID NO: 1275213 - RNA, 19 nt, Homo sapiens
  misc_RNA (1)...(19): siRNA sense strand
ucucagaugacgccuguua

SEQ ID NO: 1275214 - RNA, 19 nt, Homo sapiens
  misc_RNA (1)...(19): siRNA sense strand
uagagaaacauguccauau

SEQ ID NO: 1275215 - RNA, 19 nt, Homo sapiens
  misc_RNA (1)...(19): siRNA sense strand
guuccaaagugucuuaaag

SEQ ID NO: 1275216 - RNA, 19 nt, Homo sapiens
  misc_RNA (1)...(19): siRNA sense strand
ggugaacgaguagauuaua

SEQ ID NO: 1275217 - RNA, 19 nt, Homo sapiens
  misc_RNA (1)...(19): siRNA sense strand
gaaguagaaguauuugagu

SEQ ID NO: 1275218 - RNA, 19 nt, Homo sapiens
  misc_RNA (1)...(19): siRNA sense strand
gaaacauguccauauauac

SEQ ID NO: 1275219 - RNA, 19 nt, Homo sapiens
  misc_RNA (1)...(19): siRNA sense strand
ugacgccuguuauagagaa

SEQ ID NO: 1275220 - RNA, 19 nt, Homo sapiens
  misc_RNA (1)...(19): siRNA sense strand
cgaguagauuauaagugua

SEQ ID NO: 1275221 - RNA, 19 nt, Homo sapiens
  misc_RNA (1)...(19): siRNA sense strand
gcacuuuauuuguaaugag

SEQ ID NO: 1275222 - RNA, 19 nt, Homo sapiens
  misc_RNA (1)...(19): siRNA sense strand
guagaaguauuugaguauc

SEQ ID NO: 1275223 - RNA, 19 nt, Homo sapiens
  misc_RNA (1)...(19): siRNA sense strand
guauuugaguaucuugaug

SEQ ID NO: 1275224 - RNA, 19 nt, Homo sapiens
  misc_RNA (1)...(19): siRNA sense strand
aggaauacuugacaguuug

SEQ ID NO: 1275225 - RNA, 19 nt, Homo sapiens
  misc_RNA (1)...(19): siRNA sense strand
ccaaaacccuacuaugaga

SEQ ID NO: 1275226 - RNA, 19 nt, Homo sapiens
  misc_RNA (1)...(19): siRNA sense strand
aguguaaaguggucaaaug

SEQ ID NO: 1275227 - RNA, 19 nt, Homo sapiens
  misc_RNA (1)...(19): siRNA sense strand
ccacccauacuauuuguga

SEQ ID NO: 1275228 - RNA, 19 nt, Homo sapiens
  misc_RNA (1)...(19): siRNA sense strand
caccaacauuugaagcuau

SEQ ID NO: 1275229 - RNA, 19 nt, Homo sapiens
  misc_RNA (1)...(19): siRNA sense strand
uuggagagagcacgauuua

SEQ ID NO: 1275230 - RNA, 19 nt, Homo sapiens
  misc_RNA (1)...(19): siRNA sense strand
gguuaucagaugcacuuua

SEQ ID NO: 1275231 - RNA, 19 nt, Homo sapiens
  misc_RNA (1)...(19): siRNA sense strand
ugaggagccaccaacauuu

SEQ ID NO: 1275232 - RNA, 19 nt, Homo sapiens
  misc_RNA (1)...(19): siRNA sense strand
ggaaggaauacuugacagu

SEQ ID NO: 1275233 - RNA, 19 nt, Homo sapiens
  misc_RNA (1)...(19): siRNA sense strand
gaggaaggaauacuugaca

SEQ ID NO: 1275234 - RNA, 19 nt, Homo sapiens
  misc_RNA (1)...(19): siRNA sense strand
ccaguuccaaagugucuua

SEQ ID NO: 1275235 - RNA, 19 nt, Homo sapiens
  misc_RNA (1)...(19): siRNA sense strand
ugaguaucuugaugcagua

SEQ ID NO: 1275236 - RNA, 19 nt, Homo sapiens
  misc_RNA (1)...(19): siRNA sense strand
caccuuuagugaaguagaa

SEQ ID NO: 1275237 - RNA, 19 nt, Homo sapiens
  misc_RNA (1)...(19): siRNA sense strand
acagauaucaggauuugga

SEQ ID NO: 1275238 - RNA, 19 nt, Homo sapiens
  misc_RNA (1)...(19): siRNA sense strand
ucauugcugugauuguuau

SEQ ID NO: 1275239 - RNA, 19 nt, Homo sapiens
  misc_RNA (1)...(19): siRNA sense strand
ucagaugcacuuuauuugu

SEQ ID NO: 1275240 - RNA, 19 nt, Homo sapiens
  misc_RNA (1)...(19): siRNA sense strand
gugcugcuccagaguguaa

SEQ ID NO: 1275241 - RNA, 19 nt, Homo sapiens
  misc_RNA (1)...(19): siRNA sense strand
ggaaaacacaccuuuagug

SEQ ID NO: 1275242 - RNA, 19 nt, Homo sapiens
  misc_RNA (1)...(19): siRNA sense strand
aaggaucaguagcaauuug

SEQ ID NO: 1275243 - RNA, 19 nt, Homo sapiens
  misc_RNA (1)...(19): siRNA sense strand
uauauacgggauccuuuaa

SEQ ID NO: 1275244 - RNA, 19 nt, Homo sapiens
  misc_RNA (1)...(19): siRNA sense strand
ugaaguagaaguauuugag

SEQ ID NO: 1275245 - RNA, 19 nt, Homo sapiens
  misc_RNA (1)...(19): siRNA sense strand
cuugacaguuuggauguuu

SEQ ID NO: 1275246 - RNA, 19 nt, Homo sapiens
  misc_RNA (1)...(19): siRNA sense strand
cauauauacgggauccuuu

SEQ ID NO: 1275247 - RNA, 19 nt, Homo sapiens
  misc_RNA (1)...(19): siRNA sense strand
auauauacgggauccuuua

SEQ ID NO: 1275248 - RNA, 19 nt, Homo sapiens
  misc_RNA (1)...(19): siRNA sense strand
cuuaaaggaucaguagcaa

SEQ ID NO: 1275249 - RNA, 19 nt, Homo sapiens
  misc_RNA (1)...(19): siRNA sense strand
uaaaccugaggaaggaaua

SEQ ID NO: 1275250 - RNA, 19 nt, Homo sapiens
  misc_RNA (1)...(19): siRNA sense strand
agaugacgccuguuauaga

SEQ ID NO: 1275251 - RNA, 19 nt, Homo sapiens
  misc_RNA (1)...(19): siRNA sense strand
ugugauuguuauugccaua

SEQ ID NO: 1275252 - RNA, 19 nt, Homo sapiens
  misc_RNA (1)...(19): siRNA sense strand
gagagcacgauuuauugug

SEQ ID NO: 1275253 - RNA, 19 nt, Homo sapiens
  misc_RNA (1)...(19): siRNA sense strand
gaaguauuugaguaucuug

SEQ ID NO: 1275254 - RNA, 19 nt, Homo sapiens
  misc_RNA (1)...(19): siRNA sense strand
ggcuaccugucucagauga

SEQ ID NO: 1275255 - RNA, 19 nt, Homo sapiens
  misc_RNA (1)...(19): siRNA sense strand
gauaucaggauuuggaaaa

SEQ ID NO: 1275256 - RNA, 19 nt, Homo sapiens
  misc_RNA (1)...(19): siRNA sense strand
ccucuugccacccauacua

SEQ ID NO: 1275257 - RNA, 19 nt, Homo sapiens
  misc_RNA (1)...(19): siRNA sense strand
ccaugguguugcugcugua

SEQ ID NO: 1275258 - RNA, 19 nt, Homo sapiens
  misc_RNA (1)...(19): siRNA sense strand
cagaugacgccuguuauag

SEQ ID NO: 1275259 - RNA, 19 nt, Homo sapiens
  misc_RNA (1)...(19): siRNA sense strand
uuggugaacgaguagauua

SEQ ID NO: 1275260 - RNA, 19 nt, Homo sapiens
  misc_RNA (1)...(19): siRNA sense strand
gucauugcugugauuguua

SEQ ID NO: 1275261 - RNA, 19 nt, Homo sapiens
  misc_RNA (1)...(19): siRNA sense strand
ggagccaccaacauuugaa

SEQ ID NO: 1275262 - RNA, 19 nt, Homo sapiens
  misc_RNA (1)...(19): siRNA sense strand
gcgcuuuccuggguugcuu

SEQ ID NO: 1275263 - RNA, 19 nt, Homo sapiens
  misc_RNA (1)...(19): siRNA sense strand
uacuacaaagcaacaguua

SEQ ID NO: 1275264 - RNA, 19 nt, Homo sapiens
  misc_RNA (1)...(19): siRNA sense strand
cuugaugcaguaacuuaua

SEQ ID NO: 1275265 - RNA, 19 nt, Homo sapiens
  misc_RNA (1)...(19): siRNA sense strand
aaacauguccauauauacg

SEQ ID NO: 1275266 - RNA, 19 nt, Homo sapiens
  misc_RNA (1)...(19): siRNA sense strand
guguaaaguggucaaaugu

SEQ ID NO: 1275267 - RNA, 19 nt, Homo sapiens
  misc_RNA (1)...(19): siRNA sense strand
cuuacgaguuugguuauca

SEQ ID NO: 1275268 - RNA, 19 nt, Homo sapiens
  misc_RNA (1)...(19): siRNA sense strand
uacgggauccuuuaaaugg

SEQ ID NO: 1275269 - RNA, 19 nt, Homo sapiens
  misc_RNA (1)...(19): siRNA sense strand
aaccaaaacccuacuauga

SEQ ID NO: 1275270 - RNA, 19 nt, Homo sapiens
  misc_RNA (1)...(19): siRNA sense strand
cccaauaugugaaaagguu

SEQ ID NO: 1275271 - RNA, 19 nt, Homo sapiens
  misc_RNA (1)...(19): siRNA sense strand
cgauggcagcgacacaauu

SEQ ID NO: 1275272 - RNA, 19 nt, Homo sapiens
  misc_RNA (1)...(19): siRNA sense strand
gauccauuuucacuuauug

SEQ ID NO: 1275273 - RNA, 19 nt, Homo sapiens
  misc_RNA (1)...(19): siRNA sense strand
uugaugcaguaacuuauag

SEQ ID NO: 1275274 - RNA, 19 nt, Homo sapiens
  misc_RNA (1)...(19): siRNA sense strand
guaucuugaugcaguaacu

SEQ ID NO: 1275275 - RNA, 19 nt, Homo sapiens
  misc_RNA (1)...(19): siRNA sense strand
caacauuugaagcuaugga

SEQ ID NO: 1275276 - RNA, 19 nt, Homo sapiens
  misc_RNA (1)...(19): siRNA sense strand
gagauuggugaacgaguag

SEQ ID NO: 1275277 - RNA, 19 nt, Homo sapiens
  misc_RNA (1)...(19): siRNA sense strand
ggagagagcacgauuuauu

SEQ ID NO: 1275278 - RNA, 19 nt, Homo sapiens
  misc_RNA (1)...(19): siRNA sense strand
agagaaacauguccauaua

SEQ ID NO: 1275279 - RNA, 19 nt, Homo sapiens
  misc_RNA (1)...(19): siRNA sense strand
cagaugcacuuuauuugua

SEQ ID NO: 1275280 - RNA, 19 nt, Homo sapiens
  misc_RNA (1)...(19): siRNA sense strand
ggacuuacgaguuugguua

SEQ ID NO: 1275281 - RNA, 19 nt, Homo sapiens
  misc_RNA (1)...(19): siRNA sense strand
aaacagauaucaggauuug

SEQ ID NO: 1275282 - RNA, 19 nt, Homo sapiens
  misc_RNA (1)...(19): siRNA sense strand
cuauggagcucauugguaa

SEQ ID NO: 1275283 - RNA, 19 nt, Homo sapiens
  misc_RNA (1)...(19): siRNA sense strand
aaacacaccuuuagugaag

SEQ ID NO: 1275284 - RNA, 19 nt, Homo sapiens
  misc_RNA (1)...(19): siRNA sense strand
gaacuuaaaggaucaguag

SEQ ID NO: 1275285 - RNA, 19 nt, Homo sapiens
  misc_RNA (1)...(19): siRNA sense strand
gaaaacagauaucaggauu

SEQ ID NO: 1275286 - RNA, 19 nt, Homo sapiens
  misc_RNA (1)...(19): siRNA sense strand
uaaaggaucaguagcaauu

SEQ ID NO: 1275287 - RNA, 19 nt, Homo sapiens
  misc_RNA (1)...(19): siRNA sense strand
aaaugggacuuacgaguuu

SEQ ID NO: 1275288 - RNA, 19 nt, Homo sapiens
  misc_RNA (1)...(19): siRNA sense strand
guuaucagaugcacuuuau

SEQ ID NO: 1275289 - RNA, 19 nt, Homo sapiens
  misc_RNA (1)...(19): siRNA sense strand
ugagauuggugaacgagua

SEQ ID NO: 1275290 - RNA, 19 nt, Homo sapiens
  misc_RNA (1)...(19): siRNA sense strand
gugaacgaguagauuauaa

SEQ ID NO: 1275291 - RNA, 19 nt, Homo sapiens
  misc_RNA (1)...(19): siRNA sense strand
gagagagcacgauuuauug

SEQ ID NO: 1275292 - RNA, 19 nt, Homo sapiens
  misc_RNA (1)...(19): siRNA sense strand
caaaugggacuuacgaguu

SEQ ID NO: 1275293 - RNA, 19 nt, Homo sapiens
  misc_RNA (1)...(19): siRNA sense strand
ggucauugcugugauuguu

SEQ ID NO: 1275294 - RNA, 19 nt, Homo sapiens
  misc_RNA (1)...(19): siRNA sense strand
ccagauccauuuucacuua

SEQ ID NO: 1275295 - RNA, 19 nt, Homo sapiens
  misc_RNA (1)...(19): siRNA sense strand
gaaggaauacuugacaguu

SEQ ID NO: 1275296 - RNA, 19 nt, Homo sapiens
  misc_RNA (1)...(19): siRNA sense strand
aaggaauacuugacaguuu

SEQ ID NO: 1275297 - RNA, 19 nt, Homo sapiens
  misc_RNA (1)...(19): siRNA sense strand
ucagaugacgccuguuaua

SEQ ID NO: 1275298 - RNA, 19 nt, Homo sapiens
  misc_RNA (1)...(19): siRNA sense strand
gaaaacacaccuuuaguga

SEQ ID NO: 1275299 - RNA, 19 nt, Homo sapiens
  misc_RNA (1)...(19): siRNA sense strand
gaugacgccuguuauagag

SEQ ID NO: 1275300 - RNA, 19 nt, Homo sapiens
  misc_RNA (1)...(19): siRNA sense strand
gagaaacauguccauauau

SEQ ID NO: 1275301 - RNA, 19 nt, Homo sapiens
  misc_RNA (1)...(19): siRNA sense strand
acgaguagauuauaagugu

SEQ ID NO: 1275302 - RNA, 19 nt, Homo sapiens
  misc_RNA (1)...(19): siRNA sense strand
cuacaaagcaacaguuaug

SEQ ID NO: 1275303 - RNA, 19 nt, Homo sapiens
  misc_RNA (1)...(19): siRNA sense strand
ccaccaacauuugaagcua

SEQ ID NO: 1275304 - RNA, 19 nt, Homo sapiens
  misc_RNA (1)...(19): siRNA sense strand
uauacgggauccuuuaaau

SEQ ID NO: 1275305 - RNA, 19 nt, Homo sapiens
  misc_RNA (1)...(19): siRNA sense strand
cgaguuugguuaucagaug

SEQ ID NO: 1275306 - RNA, 19 nt, Homo sapiens
  misc_RNA (1)...(19): siRNA sense strand
gaacgaguagauuauaagu

SEQ ID NO: 1275307 - RNA, 19 nt, Homo sapiens
  misc_RNA (1)...(19): siRNA sense strand
gugaggagccaccaacauu

SEQ ID NO: 1275308 - RNA, 19 nt, Homo sapiens
  misc_RNA (1)...(19): siRNA sense strand
gauggcagcgacacaauug

SEQ ID NO: 1275309 - RNA, 19 nt, Homo sapiens
  misc_RNA (1)...(19): siRNA sense strand
gcuauggagcucauuggua

SEQ ID NO: 1275310 - RNA, 19 nt, Homo sapiens
  misc_RNA (1)...(19): siRNA sense strand
gaggagccaccaacauuug

SEQ ID NO: 1275311 - RNA, 19 nt, Homo sapiens
  misc_RNA (1)...(19): siRNA sense strand
acacaccuuuagugaagua

SEQ ID NO: 1275312 - RNA, 19 nt, Homo sapiens
  misc_RNA (1)...(19): siRNA sense strand
ucucagaugacgccuguua

SEQ ID NO: 1275313 - RNA, 19 nt, Homo sapiens
  misc_RNA (1)...(19): siRNA sense strand
uagagaaacauguccauau

SEQ ID NO: 1275314 - RNA, 19 nt, Homo sapiens
  misc_RNA (1)...(19): siRNA sense strand
ggugaacgaguagauuaua

SEQ ID NO: 1275315 - RNA, 19 nt, Homo sapiens
  misc_RNA (1)...(19): siRNA sense strand
gaaguagaaguauuugagu

SEQ ID NO: 1275316 - RNA, 19 nt, Homo sapiens
  misc_RNA (1)...(19): siRNA sense strand
gaaacauguccauauauac

SEQ ID NO: 1275317 - RNA, 19 nt, Homo sapiens
  misc_RNA (1)...(19): siRNA sense strand
ugacgccuguuauagagaa

SEQ ID NO: 1275318 - RNA, 19 nt, Homo sapiens
  misc_RNA (1)...(19): siRNA sense strand
cgaguagauuauaagugua

SEQ ID NO: 1275319 - RNA, 19 nt, Homo sapiens
  misc_RNA (1)...(19): siRNA sense strand
gcacuuuauuuguaaugag

SEQ ID NO: 1275320 - RNA, 19 nt, Homo sapiens
  misc_RNA (1)...(19): siRNA sense strand
guagaaguauuugaguauc

SEQ ID NO: 1275321 - RNA, 19 nt, Homo sapiens
  misc_RNA (1)...(19): siRNA sense strand
guauuugaguaucuugaug

SEQ ID NO: 1275322 - RNA, 19 nt, Homo sapiens
  misc_RNA (1)...(19): siRNA sense strand
aggaauacuugacaguuug

SEQ ID NO: 1275323 - RNA, 19 nt, Homo sapiens
  misc_RNA (1)...(19): siRNA sense strand
aguguaaaguggucaaaug

SEQ ID NO: 1275324 - RNA, 19 nt, Homo sapiens
  misc_RNA (1)...(19): siRNA sense strand
ccaaaacccuacuaugaga

SEQ ID NO: 1275325 - RNA, 19 nt, Homo sapiens
  misc_RNA (1)...(19): siRNA sense strand
ccacccauacuauuuguga

SEQ ID NO: 1275326 - RNA, 19 nt, Homo sapiens
  misc_RNA (1)...(19): siRNA sense strand
caccaacauuugaagcuau

SEQ ID NO: 1275327 - RNA, 19 nt, Homo sapiens
  misc_RNA (1)...(19): siRNA sense strand
uuggagagagcacgauuua

SEQ ID NO: 1275328 - RNA, 19 nt, Homo sapiens
  misc_RNA (1)...(19): siRNA sense strand
gguuaucagaugcacuuua

SEQ ID NO: 1275329 - RNA, 19 nt, Homo sapiens
  misc_RNA (1)...(19): siRNA sense strand
ugaggagccaccaacauuu

SEQ ID NO: 1275330 - RNA, 19 nt, Homo sapiens
  misc_RNA (1)...(19): siRNA sense strand
ggaaggaauacuugacagu

SEQ ID NO: 1275331 - RNA, 19 nt, Homo sapiens
  misc_RNA (1)...(19): siRNA sense strand
gaggaaggaauacuugaca

SEQ ID NO: 1275332 - RNA, 19 nt, Homo sapiens
  misc_RNA (1)...(19): siRNA sense strand
ugaguaucuugaugcagua

SEQ ID NO: 1275333 - RNA, 19 nt, Homo sapiens
  misc_RNA (1)...(19): siRNA sense strand
caccuuuagugaaguagaa

SEQ ID NO: 1275334 - RNA, 19 nt, Homo sapiens
  misc_RNA (1)...(19): siRNA sense strand
acagauaucaggauuugga

SEQ ID NO: 1275335 - RNA, 19 nt, Homo sapiens
  misc_RNA (1)...(19): siRNA sense strand
ucauugcugugauuguuau

SEQ ID NO: 1275336 - RNA, 19 nt, Homo sapiens
  misc_RNA (1)...(19): siRNA sense strand
ucagaugcacuuuauuugu

SEQ ID NO: 1275337 - RNA, 19 nt, Homo sapiens
  misc_RNA (1)...(19): siRNA sense strand
gugcugcuccagaguguaa

SEQ ID NO: 1275338 - RNA, 19 nt, Homo sapiens
  misc_RNA (1)...(19): siRNA sense strand
ggaaaacacaccuuuagug

SEQ ID NO: 1275339 - RNA, 19 nt, Homo sapiens
  misc_RNA (1)...(19): siRNA sense strand
aaggaucaguagcaauuug

SEQ ID NO: 1275340 - RNA, 19 nt, Homo sapiens
  misc_RNA (1)...(19): siRNA sense strand
uauauacgggauccuuuaa

SEQ ID NO: 1275341 - RNA, 19 nt, Homo sapiens
  misc_RNA (1)...(19): siRNA sense strand
ugaaguagaaguauuugag

SEQ ID NO: 1275342 - RNA, 19 nt, Homo sapiens
  misc_RNA (1)...(19): siRNA sense strand
cuugacaguuuggauguuu

SEQ ID NO: 1275343 - RNA, 19 nt, Homo sapiens
  misc_RNA (1)...(19): siRNA sense strand
cauauauacgggauccuuu

SEQ ID NO: 1275344 - RNA, 19 nt, Homo sapiens
  misc_RNA (1)...(19): siRNA sense strand
auauauacgggauccuuua

SEQ ID NO: 1275345 - RNA, 19 nt, Homo sapiens
  misc_RNA (1)...(19): siRNA sense strand
cuuaaaggaucaguagcaa

SEQ ID NO: 1275346 - RNA, 19 nt, Homo sapiens
  misc_RNA (1)...(19): siRNA sense strand
uaaaccugaggaaggaaua

SEQ ID NO: 1275347 - RNA, 19 nt, Homo sapiens
  misc_RNA (1)...(19): siRNA sense strand
agaugacgccuguuauaga

SEQ ID NO: 1275348 - RNA, 19 nt, Homo sapiens
  misc_RNA (1)...(19): siRNA sense strand
ugugauuguuauugccaua

SEQ ID NO: 1275349 - RNA, 19 nt, Homo sapiens
  misc_RNA (1)...(19): siRNA sense strand
gagagcacgauuuauugug

SEQ ID NO: 1275350 - RNA, 19 nt, Homo sapiens
  misc_RNA (1)...(19): siRNA sense strand
gaaguauuugaguaucuug

SEQ ID NO: 1275351 - RNA, 19 nt, Homo sapiens
  misc_RNA (1)...(19): siRNA sense strand
ccucuugccacccauacua

SEQ ID NO: 1275352 - RNA, 19 nt, Homo sapiens
  misc_RNA (1)...(19): siRNA sense strand
gauaucaggauuuggaaaa

SEQ ID NO: 1275353 - RNA, 19 nt, Homo sapiens
  misc_RNA (1)...(19): siRNA sense strand
ggcuaccugucucagauga

SEQ ID NO: 1275354 - RNA, 19 nt, Homo sapiens
  misc_RNA (1)...(19): siRNA sense strand
ccaugguguugcugcugua

SEQ ID NO: 1275355 - RNA, 19 nt, Homo sapiens
  misc_RNA (1)...(19): siRNA sense strand
cagaugacgccuguuauag

SEQ ID NO: 1275356 - RNA, 19 nt, Homo sapiens
  misc_RNA (1)...(19): siRNA sense strand
gucauugcugugauuguua

SEQ ID NO: 1275357 - RNA, 19 nt, Homo sapiens
  misc_RNA (1)...(19): siRNA sense strand
uuggugaacgaguagauua

SEQ ID NO: 1275358 - RNA, 19 nt, Homo sapiens
  misc_RNA (1)...(19): siRNA sense strand
ggagccaccaacauuugaa

SEQ ID NO: 1275359 - RNA, 19 nt, Homo sapiens
  misc_RNA (1)...(19): siRNA sense strand
gcgcuuuccuggguugcuu

SEQ ID NO: 1275360 - RNA, 19 nt, Homo sapiens
  misc_RNA (1)...(19): siRNA sense strand
uacuacaaagcaacaguua

SEQ ID NO: 1275361 - RNA, 19 nt, Homo sapiens
  misc_RNA (1)...(19): siRNA sense strand
cuugaugcaguaacuuaua

SEQ ID NO: 1275362 - RNA, 19 nt, Homo sapiens
  misc_RNA (1)...(19): siRNA sense strand
aaacauguccauauauacg

SEQ ID NO: 1275363 - RNA, 19 nt, Homo sapiens
  misc_RNA (1)...(19): siRNA sense strand
guguaaaguggucaaaugu

SEQ ID NO: 1275364 - RNA, 19 nt, Homo sapiens
  misc_RNA (1)...(19): siRNA sense strand
cuuacgaguuugguuauca

SEQ ID NO: 1275365 - RNA, 19 nt, Homo sapiens
  misc_RNA (1)...(19): siRNA sense strand
uacgggauccuuuaaaugg

SEQ ID NO: 1275366 - RNA, 19 nt, Homo sapiens
  misc_RNA (1)...(19): siRNA sense strand
aaccaaaacccuacuauga

SEQ ID NO: 1275367 - RNA, 19 nt, Homo sapiens
  misc_RNA (1)...(19): siRNA sense strand
cccaauaugugaaaagguu

SEQ ID NO: 1275368 - RNA, 19 nt, Homo sapiens
  misc_RNA (1)...(19): siRNA sense strand
cgauggcagcgacacaauu

SEQ ID NO: 1275369 - RNA, 19 nt, Homo sapiens
  misc_RNA (1)...(19): siRNA sense strand
gauccauuuucacuuauug

SEQ ID NO: 1275370 - RNA, 19 nt, Homo sapiens
  misc_RNA (1)...(19): siRNA sense strand
uugaugcaguaacuuauag

SEQ ID NO: 1275371 - RNA, 19 nt, Homo sapiens
  misc_RNA (1)...(19): siRNA sense strand
guaucuugaugcaguaacu

SEQ ID NO: 1275372 - RNA, 19 nt, Homo sapiens
  misc_RNA (1)...(19): siRNA sense strand
caacauuugaagcuaugga

SEQ ID NO: 1275373 - RNA, 19 nt, Homo sapiens
  misc_RNA (1)...(19): siRNA sense strand
gagauuggugaacgaguag

SEQ ID NO: 1275374 - RNA, 19 nt, Homo sapiens
  misc_RNA (1)...(19): siRNA sense strand
ggagagagcacgauuuauu

SEQ ID NO: 1275375 - RNA, 19 nt, Homo sapiens
  misc_RNA (1)...(19): siRNA sense strand
agagaaacauguccauaua

SEQ ID NO: 1275376 - RNA, 19 nt, Homo sapiens
  misc_RNA (1)...(19): siRNA sense strand
cagaugcacuuuauuugua

SEQ ID NO: 1275377 - RNA, 19 nt, Homo sapiens
  misc_RNA (1)...(19): siRNA sense strand
ggacuuacgaguuugguua

SEQ ID NO: 1275378 - RNA, 19 nt, Homo sapiens
  misc_RNA (1)...(19): siRNA sense strand
aaacagauaucaggauuug

SEQ ID NO: 1275379 - RNA, 19 nt, Homo sapiens
  misc_RNA (1)...(19): siRNA sense strand
cuauggagcucauugguaa

SEQ ID NO: 1275380 - RNA, 19 nt, Homo sapiens
  misc_RNA (1)...(19): siRNA sense strand
aaacacaccuuuagugaag

SEQ ID NO: 1275381 - RNA, 19 nt, Homo sapiens
  misc_RNA (1)...(19): siRNA sense strand
gaacuuaaaggaucaguag

SEQ ID NO: 1275382 - RNA, 19 nt, Homo sapiens
  misc_RNA (1)...(19): siRNA sense strand
gaaaacagauaucaggauu

SEQ ID NO: 1275383 - RNA, 19 nt, Homo sapiens
  misc_RNA (1)...(19): siRNA sense strand
uaaaggaucaguagcaauu

SEQ ID NO: 1275384 - RNA, 19 nt, Homo sapiens
  misc_RNA (1)...(19): siRNA sense strand
aaaugggacuuacgaguuu

SEQ ID NO: 1275385 - RNA, 19 nt, Homo sapiens
  misc_RNA (1)...(19): siRNA sense strand
guuaucagaugcacuuuau

SEQ ID NO: 1275386 - RNA, 19 nt, Homo sapiens
  misc_RNA (1)...(19): siRNA sense strand
gagcugaauaugccacuua

SEQ ID NO: 1275387 - RNA, 19 nt, Homo sapiens
  misc_RNA (1)...(19): siRNA sense strand
ugagauuggugaacgagua

SEQ ID NO: 1275388 - RNA, 19 nt, Homo sapiens
  misc_RNA (1)...(19): siRNA sense strand
gugaacgaguagauuauaa

SEQ ID NO: 1275389 - RNA, 19 nt, Homo sapiens
  misc_RNA (1)...(19): siRNA sense strand
gagagagcacgauuuauug

SEQ ID NO: 1275390 - RNA, 19 nt, Homo sapiens
  misc_RNA (1)...(19): siRNA sense strand
caaaugggacuuacgaguu

SEQ ID NO: 1275391 - RNA, 19 nt, Homo sapiens
  misc_RNA (1)...(19): siRNA sense strand
ggucauugcugugauuguu

SEQ ID NO: 1275392 - RNA, 19 nt, Homo sapiens
  misc_RNA (1)...(19): siRNA sense strand
ccagauccauuuucacuua

SEQ ID NO: 1275393 - RNA, 19 nt, Homo sapiens
  misc_RNA (1)...(19): siRNA sense strand
gaaggaauacuugacaguu

SEQ ID NO: 1275394 - RNA, 19 nt, Homo sapiens
  misc_RNA (1)...(19): siRNA sense strand
aaggaauacuugacaguuu

SEQ ID NO: 1275395 - RNA, 19 nt, Homo sapiens
  misc_RNA (1)...(19): siRNA sense strand
ucagaugacgccuguuaua

SEQ ID NO: 1275396 - RNA, 19 nt, Homo sapiens
  misc_RNA (1)...(19): siRNA sense strand
gaaaacacaccuuuaguga

SEQ ID NO: 1275397 - RNA, 19 nt, Homo sapiens
  misc_RNA (1)...(19): siRNA sense strand
gaugacgccuguuauagag

SEQ ID NO: 1275398 - RNA, 19 nt, Homo sapiens
  misc_RNA (1)...(19): siRNA sense strand
gagaaacauguccauauau

SEQ ID NO: 1275399 - RNA, 19 nt, Homo sapiens
  misc_RNA (1)...(19): siRNA sense strand
ccacuuaccagacuaaauc

SEQ ID NO: 1275400 - RNA, 19 nt, Homo sapiens
  misc_RNA (1)...(19): siRNA sense strand
acgaguagauuauaagugu

SEQ ID NO: 1275401 - RNA, 19 nt, Homo sapiens
  misc_RNA (1)...(19): siRNA sense strand
cuacaaagcaacaguuaug

SEQ ID NO: 1275402 - RNA, 19 nt, Homo sapiens
  misc_RNA (1)...(19): siRNA sense strand
ccaccaacauuugaagcua

SEQ ID NO: 1275403 - RNA, 19 nt, Homo sapiens
  misc_RNA (1)...(19): siRNA sense strand
uauacgggauccuuuaaau

SEQ ID NO: 1275404 - RNA, 19 nt, Homo sapiens
  misc_RNA (1)...(19): siRNA sense strand
cgaguuugguuaucagaug

SEQ ID NO: 1275405 - RNA, 19 nt, Homo sapiens
  misc_RNA (1)...(19): siRNA sense strand
gaacgaguagauuauaagu

SEQ ID NO: 1275406 - RNA, 19 nt, Homo sapiens
  misc_RNA (1)...(19): siRNA sense strand
gugaggagccaccaacauu

SEQ ID NO: 1275407 - RNA, 19 nt, Homo sapiens
  misc_RNA (1)...(19): siRNA sense strand
gauggcagcgacacaauug

SEQ ID NO: 1275408 - RNA, 19 nt, Homo sapiens
  misc_RNA (1)...(19): siRNA sense strand
ucucagaugacgccuguua

SEQ ID NO: 1275409 - RNA, 19 nt, Homo sapiens
  misc_RNA (1)...(19): siRNA sense strand
gaggagccaccaacauuug

SEQ ID NO: 1275410 - RNA, 19 nt, Homo sapiens
  misc_RNA (1)...(19): siRNA sense strand
gcuauggagcucauuggua

SEQ ID NO: 1275411 - RNA, 19 nt, Homo sapiens
  misc_RNA (1)...(19): siRNA sense strand
acacaccuuuagugaagua

SEQ ID NO: 1275412 - RNA, 19 nt, Homo sapiens
  misc_RNA (1)...(19): siRNA sense strand
uagagaaacauguccauau

SEQ ID NO: 1275413 - RNA, 19 nt, Homo sapiens
  misc_RNA (1)...(19): siRNA sense strand
ggugaacgaguagauuaua

SEQ ID NO: 1275414 - RNA, 19 nt, Homo sapiens
  misc_RNA (1)...(19): siRNA sense strand
gaaguagaaguauuugagu

SEQ ID NO: 1275415 - RNA, 19 nt, Homo sapiens
  misc_RNA (1)...(19): siRNA sense strand
gaaacauguccauauauac

SEQ ID NO: 1275416 - RNA, 19 nt, Homo sapiens
  misc_RNA (1)...(19): siRNA sense strand
ugacgccuguuauagagaa

SEQ ID NO: 1275417 - RNA, 19 nt, Homo sapiens
  misc_RNA (1)...(19): siRNA sense strand
cgaguagauuauaagugua

SEQ ID NO: 1275418 - RNA, 19 nt, Homo sapiens
  misc_RNA (1)...(19): siRNA sense strand
gcacuuuauuuguaaugag

SEQ ID NO: 1275419 - RNA, 19 nt, Homo sapiens
  misc_RNA (1)...(19): siRNA sense strand
guagaaguauuugaguauc

SEQ ID NO: 1275420 - RNA, 19 nt, Homo sapiens
  misc_RNA (1)...(19): siRNA sense strand
guauuugaguaucuugaug

SEQ ID NO: 1275421 - RNA, 19 nt, Homo sapiens
  misc_RNA (1)...(19): siRNA sense strand
aggaauacuugacaguuug

SEQ ID NO: 1275422 - RNA, 19 nt, Homo sapiens
  misc_RNA (1)...(19): siRNA sense strand
ccaaaacccuacuaugaga

SEQ ID NO: 1275423 - RNA, 19 nt, Homo sapiens
  misc_RNA (1)...(19): siRNA sense strand
aguguaaaguggucaaaug

SEQ ID NO: 1275424 - RNA, 19 nt, Homo sapiens
  misc_RNA (1)...(19): siRNA sense strand
ccacccauacuauuuguga

SEQ ID NO: 1275425 - RNA, 19 nt, Homo sapiens
  misc_RNA (1)...(19): siRNA sense strand
uuggagagagcacgauuua

SEQ ID NO: 1275426 - RNA, 19 nt, Homo sapiens
  misc_RNA (1)...(19): siRNA sense strand
gguuaucagaugcacuuua

SEQ ID NO: 1275427 - RNA, 19 nt, Homo sapiens
  misc_RNA (1)...(19): siRNA sense strand
caccaacauuugaagcuau

SEQ ID NO: 1275428 - RNA, 19 nt, Homo sapiens
  misc_RNA (1)...(19): siRNA sense strand
ugaggagccaccaacauuu

SEQ ID NO: 1275429 - RNA, 19 nt, Homo sapiens
  misc_RNA (1)...(19): siRNA sense strand
ggaaggaauacuugacagu

SEQ ID NO: 1275430 - RNA, 19 nt, Homo sapiens
  misc_RNA (1)...(19): siRNA sense strand
gaggaaggaauacuugaca

SEQ ID NO: 1275431 - RNA, 19 nt, Homo sapiens
  misc_RNA (1)...(19): siRNA sense strand
ugaguaucuugaugcagua

SEQ ID NO: 1275432 - RNA, 19 nt, Homo sapiens
  misc_RNA (1)...(19): siRNA sense strand
caccuuuagugaaguagaa

SEQ ID NO: 1275433 - RNA, 19 nt, Homo sapiens
  misc_RNA (1)...(19): siRNA sense strand
acagauaucaggauuugga

SEQ ID NO: 1275434 - RNA, 19 nt, Homo sapiens
  misc_RNA (1)...(19): siRNA sense strand
ucauugcugugauuguuau

SEQ ID NO: 1275435 - RNA, 19 nt, Homo sapiens
  misc_RNA (1)...(19): siRNA sense strand
ucagaugcacuuuauuugu

SEQ ID NO: 1275436 - RNA, 19 nt, Homo sapiens
  misc_RNA (1)...(19): siRNA sense strand
gugcugcuccagaguguaa

SEQ ID NO: 1275437 - RNA, 19 nt, Homo sapiens
  misc_RNA (1)...(19): siRNA sense strand
ggaaaacacaccuuuagug

SEQ ID NO: 1275438 - RNA, 19 nt, Homo sapiens
  misc_RNA (1)...(19): siRNA sense strand
aaggaucaguagcaauuug

SEQ ID NO: 1275439 - RNA, 19 nt, Homo sapiens
  misc_RNA (1)...(19): siRNA sense strand
uauauacgggauccuuuaa

SEQ ID NO: 1275440 - RNA, 19 nt, Homo sapiens
  misc_RNA (1)...(19): siRNA sense strand
ugaaguagaaguauuugag

SEQ ID NO: 1275441 - RNA, 19 nt, Homo sapiens
  misc_RNA (1)...(19): siRNA sense strand
cuugacaguuuggauguuu

SEQ ID NO: 1275442 - RNA, 19 nt, Homo sapiens
  misc_RNA (1)...(19): siRNA sense strand
cauauauacgggauccuuu

SEQ ID NO: 1275443 - RNA, 19 nt, Homo sapiens
  misc_RNA (1)...(19): siRNA sense strand
auauauacgggauccuuua

SEQ ID NO: 1275444 - RNA, 19 nt, Homo sapiens
  misc_RNA (1)...(19): siRNA sense strand
cuuaaaggaucaguagcaa

SEQ ID NO: 1275445 - RNA, 19 nt, Homo sapiens
  misc_RNA (1)...(19): siRNA sense strand
uaaaccugaggaaggaaua

SEQ ID NO: 1275446 - RNA, 19 nt, Homo sapiens
  misc_RNA (1)...(19): siRNA sense strand
agaugacgccuguuauaga

SEQ ID NO: 1275447 - RNA, 19 nt, Homo sapiens
  misc_RNA (1)...(19): siRNA sense strand
ugugauuguuauugccaua

SEQ ID NO: 1275448 - RNA, 19 nt, Homo sapiens
  misc_RNA (1)...(19): siRNA sense strand
gagagcacgauuuauugug

SEQ ID NO: 1275449 - RNA, 19 nt, Homo sapiens
  misc_RNA (1)...(19): siRNA sense strand
gaaguauuugaguaucuug

SEQ ID NO: 1275450 - RNA, 19 nt, Homo sapiens
  misc_RNA (1)...(19): siRNA sense strand
ggcuaccugucucagauga

SEQ ID NO: 1275451 - RNA, 19 nt, Homo sapiens
  misc_RNA (1)...(19): siRNA sense strand
gauaucaggauuuggaaaa

SEQ ID NO: 1275452 - RNA, 19 nt, Homo sapiens
  misc_RNA (1)...(19): siRNA sense strand
ccucuugccacccauacua

SEQ ID NO: 1275453 - RNA, 19 nt, Homo sapiens
  misc_RNA (1)...(19): siRNA sense strand
ccaugguguugcugcugua

SEQ ID NO: 1275454 - RNA, 19 nt, Homo sapiens
  misc_RNA (1)...(19): siRNA sense strand
cagaugacgccuguuauag

SEQ ID NO: 1275455 - RNA, 19 nt, Homo sapiens
  misc_RNA (1)...(19): siRNA sense strand
cagaugguggagcugaaua

SEQ ID NO: 1275456 - RNA, 19 nt, Homo sapiens
  misc_RNA (1)...(19): siRNA sense strand
uuggugaacgaguagauua

SEQ ID NO: 1275457 - RNA, 19 nt, Homo sapiens
  misc_RNA (1)...(19): siRNA sense strand
gucauugcugugauuguua

SEQ ID NO: 1275458 - RNA, 19 nt, Homo sapiens
  misc_RNA (1)...(19): siRNA sense strand
ggagccaccaacauuugaa

SEQ ID NO: 1275459 - RNA, 19 nt, Homo sapiens
  misc_RNA (1)...(19): siRNA sense strand
gcgcuuuccuggguugcuu

SEQ ID NO: 1275460 - RNA, 19 nt, Homo sapiens
  misc_RNA (1)...(19): siRNA sense strand
uacuacaaagcaacaguua

SEQ ID NO: 1275461 - RNA, 19 nt, Homo sapiens
  misc_RNA (1)...(19): siRNA sense strand
cuugaugcaguaacuuaua

SEQ ID NO: 1275462 - RNA, 19 nt, Homo sapiens
  misc_RNA (1)...(19): siRNA sense strand
aaacauguccauauauacg

SEQ ID NO: 1275463 - RNA, 19 nt, Homo sapiens
  misc_RNA (1)...(19): siRNA sense strand
guguaaaguggucaaaugu

SEQ ID NO: 1275464 - RNA, 19 nt, Homo sapiens
  misc_RNA (1)...(19): siRNA sense strand
cuuacgaguuugguuauca

SEQ ID NO: 1275465 - RNA, 19 nt, Homo sapiens
  misc_RNA (1)...(19): siRNA sense strand
uacgggauccuuuaaaugg

SEQ ID NO: 1275466 - RNA, 19 nt, Homo sapiens
  misc_RNA (1)...(19): siRNA sense strand
gcagaugguggagcugaau

SEQ ID NO: 1275467 - RNA, 19 nt, Homo sapiens
  misc_RNA (1)...(19): siRNA sense strand
aaccaaaacccuacuauga

SEQ ID NO: 1275468 - RNA, 19 nt, Homo sapiens
  misc_RNA (1)...(19): siRNA sense strand
cccaauaugugaaaagguu

SEQ ID NO: 1275469 - RNA, 19 nt, Homo sapiens
  misc_RNA (1)...(19): siRNA sense strand
ggagcugaauaugccacuu

SEQ ID NO: 1275470 - RNA, 19 nt, Homo sapiens
  misc_RNA (1)...(19): siRNA sense strand
cgauggcagcgacacaauu

SEQ ID NO: 1275471 - RNA, 19 nt, Homo sapiens
  misc_RNA (1)...(19): siRNA sense strand
gauccauuuucacuuauug

SEQ ID NO: 1275472 - RNA, 19 nt, Homo sapiens
  misc_RNA (1)...(19): siRNA sense strand
uugaugcaguaacuuauag

SEQ ID NO: 1275473 - RNA, 19 nt, Homo sapiens
  misc_RNA (1)...(19): siRNA sense strand
guaucuugaugcaguaacu

SEQ ID NO: 1275474 - RNA, 19 nt, Homo sapiens
  misc_RNA (1)...(19): siRNA sense strand
ggagagagcacgauuuauu

SEQ ID NO: 1275475 - RNA, 19 nt, Homo sapiens
  misc_RNA (1)...(19): siRNA sense strand
agagaaacauguccauaua

SEQ ID NO: 1275476 - RNA, 19 nt, Homo sapiens
  misc_RNA (1)...(19): siRNA sense strand
cagaugcacuuuauuugua

SEQ ID NO: 1275477 - RNA, 19 nt, Homo sapiens
  misc_RNA (1)...(19): siRNA sense strand
ggacuuacgaguuugguua

SEQ ID NO: 1275478 - RNA, 19 nt, Homo sapiens
  misc_RNA (1)...(19): siRNA sense strand
aaacagauaucaggauuug

SEQ ID NO: 1275479 - RNA, 19 nt, Homo sapiens
  misc_RNA (1)...(19): siRNA sense strand
cuauggagcucauugguaa

SEQ ID NO: 1275480 - RNA, 19 nt, Homo sapiens
  misc_RNA (1)...(19): siRNA sense strand
aaacacaccuuuagugaag

SEQ ID NO: 1275481 - RNA, 19 nt, Homo sapiens
  misc_RNA (1)...(19): siRNA sense strand
gaacuuaaaggaucaguag

SEQ ID NO: 1275482 - RNA, 19 nt, Homo sapiens
  misc_RNA (1)...(19): siRNA sense strand
gaaaacagauaucaggauu

SEQ ID NO: 1275483 - RNA, 19 nt, Homo sapiens
  misc_RNA (1)...(19): siRNA sense strand
uaaaggaucaguagcaauu

SEQ ID NO: 1275484 - RNA, 19 nt, Homo sapiens
  misc_RNA (1)...(19): siRNA sense strand
aaaugggacuuacgaguuu

SEQ ID NO: 1275485 - RNA, 19 nt, Homo sapiens
  misc_RNA (1)...(19): siRNA sense strand
guuaucagaugcacuuuau

SEQ ID NO: 1275486 - RNA, 19 nt, Homo sapiens
  misc_RNA (1)...(19): siRNA sense strand
ugagauuggugaacgagua

SEQ ID NO: 1275487 - RNA, 19 nt, Homo sapiens
  misc_RNA (1)...(19): siRNA sense strand
gugaacgaguagauuauaa

SEQ ID NO: 1275488 - RNA, 19 nt, Homo sapiens
  misc_RNA (1)...(19): siRNA sense strand
gagagagcacgauuuauug

SEQ ID NO: 1275489 - RNA, 19 nt, Homo sapiens
  misc_RNA (1)...(19): siRNA sense strand
caaaugggacuuacgaguu

SEQ ID NO: 1275490 - RNA, 19 nt, Homo sapiens
  misc_RNA (1)...(19): siRNA sense strand
ggucauugcugugauuguu

SEQ ID NO: 1275491 - RNA, 19 nt, Homo sapiens
  misc_RNA (1)...(19): siRNA sense strand
ccagauccauuuucacuua

SEQ ID NO: 1275492 - RNA, 19 nt, Homo sapiens
  misc_RNA (1)...(19): siRNA sense strand
gaaggaauacuugacaguu

SEQ ID NO: 1275493 - RNA, 19 nt, Homo sapiens
  misc_RNA (1)...(19): siRNA sense strand
aaggaauacuugacaguuu

SEQ ID NO: 1275494 - RNA, 19 nt, Homo sapiens
  misc_RNA (1)...(19): siRNA sense strand
ucagaugacgccuguuaua

SEQ ID NO: 1275495 - RNA, 19 nt, Homo sapiens
  misc_RNA (1)...(19): siRNA sense strand
gaaaacacaccuuuaguga

SEQ ID NO: 1275496 - RNA, 19 nt, Homo sapiens
  misc_RNA (1)...(19): siRNA sense strand
gaugacgccuguuauagag

SEQ ID NO: 1275497 - RNA, 19 nt, Homo sapiens
  misc_RNA (1)...(19): siRNA sense strand
gagaaacauguccauauau

SEQ ID NO: 1275498 - RNA, 19 nt, Homo sapiens
  misc_RNA (1)...(19): siRNA sense strand
acgaguagauuauaagugu

SEQ ID NO: 1275499 - RNA, 19 nt, Homo sapiens
  misc_RNA (1)...(19): siRNA sense strand
cuacaaagcaacaguuaug

SEQ ID NO: 1275500 - RNA, 19 nt, Homo sapiens
  misc_RNA (1)...(19): siRNA sense strand
ccaccaacauuugaagcua

SEQ ID NO: 1275501 - RNA, 19 nt, Homo sapiens
  misc_RNA (1)...(19): siRNA sense strand
uauacgggauccuuuaaau

SEQ ID NO: 1275502 - RNA, 19 nt, Homo sapiens
  misc_RNA (1)...(19): siRNA sense strand
cgaguuugguuaucagaug

SEQ ID NO: 1275503 - RNA, 19 nt, Homo sapiens
  misc_RNA (1)...(19): siRNA sense strand
gaacgaguagauuauaagu

SEQ ID NO: 1275504 - RNA, 19 nt, Homo sapiens
  misc_RNA (1)...(19): siRNA sense strand
gugaggagccaccaacauu

SEQ ID NO: 1275505 - RNA, 19 nt, Homo sapiens
  misc_RNA (1)...(19): siRNA sense strand
gauggcagcgacacaauug

SEQ ID NO: 1275506 - RNA, 19 nt, Homo sapiens
  misc_RNA (1)...(19): siRNA sense strand
gcuauggagcucauuggua

SEQ ID NO: 1275507 - RNA, 19 nt, Homo sapiens
  misc_RNA (1)...(19): siRNA sense strand
gaggagccaccaacauuug

SEQ ID NO: 1275508 - RNA, 19 nt, Homo sapiens
  misc_RNA (1)...(19): siRNA sense strand
acacaccuuuagugaagua

SEQ ID NO: 1275509 - RNA, 19 nt, Homo sapiens
  misc_RNA (1)...(19): siRNA sense strand
ucucagaugacgccuguua

SEQ ID NO: 1275510 - RNA, 19 nt, Homo sapiens
  misc_RNA (1)...(19): siRNA sense strand
uagagaaacauguccauau

SEQ ID NO: 1275511 - RNA, 19 nt, Homo sapiens
  misc_RNA (1)...(19): siRNA sense strand
guuccaaagugucuuaaag

SEQ ID NO: 1275512 - RNA, 19 nt, Homo sapiens
  misc_RNA (1)...(19): siRNA sense strand
ggugaacgaguagauuaua

SEQ ID NO: 1275513 - RNA, 19 nt, Homo sapiens
  misc_RNA (1)...(19): siRNA sense strand
gaaguagaaguauuugagu

SEQ ID NO: 1275514 - RNA, 19 nt, Homo sapiens
  misc_RNA (1)...(19): siRNA sense strand
gaaacauguccauauauac

SEQ ID NO: 1275515 - RNA, 19 nt, Homo sapiens
  misc_RNA (1)...(19): siRNA sense strand
ugacgccuguuauagagaa

SEQ ID NO: 1275516 - RNA, 19 nt, Homo sapiens
  misc_RNA (1)...(19): siRNA sense strand
cgaguagauuauaagugua

SEQ ID NO: 1275517 - RNA, 19 nt, Homo sapiens
  misc_RNA (1)...(19): siRNA sense strand
gcacuuuauuuguaaugag

SEQ ID NO: 1275518 - RNA, 19 nt, Homo sapiens
  misc_RNA (1)...(19): siRNA sense strand
guagaaguauuugaguauc

SEQ ID NO: 1275519 - RNA, 19 nt, Homo sapiens
  misc_RNA (1)...(19): siRNA sense strand
guauuugaguaucuugaug

SEQ ID NO: 1275520 - RNA, 19 nt, Homo sapiens
  misc_RNA (1)...(19): siRNA sense strand
aggaauacuugacaguuug

SEQ ID NO: 1275521 - RNA, 19 nt, Homo sapiens
  misc_RNA (1)...(19): siRNA sense strand
ccaaaacccuacuaugaga

SEQ ID NO: 1275522 - RNA, 19 nt, Homo sapiens
  misc_RNA (1)...(19): siRNA sense strand
aguguaaaguggucaaaug

SEQ ID NO: 1275523 - RNA, 19 nt, Homo sapiens
  misc_RNA (1)...(19): siRNA sense strand
ccacccauacuauuuguga

SEQ ID NO: 1275524 - RNA, 19 nt, Homo sapiens
  misc_RNA (1)...(19): siRNA sense strand
caccaacauuugaagcuau

SEQ ID NO: 1275525 - RNA, 19 nt, Homo sapiens
  misc_RNA (1)...(19): siRNA sense strand
uuggagagagcacgauuua

SEQ ID NO: 1275526 - RNA, 19 nt, Homo sapiens
  misc_RNA (1)...(19): siRNA sense strand
gguuaucagaugcacuuua

SEQ ID NO: 1275527 - RNA, 19 nt, Homo sapiens
  misc_RNA (1)...(19): siRNA sense strand
ugaggagccaccaacauuu

SEQ ID NO: 1275528 - RNA, 19 nt, Homo sapiens
  misc_RNA (1)...(19): siRNA sense strand
ggaaggaauacuugacagu

SEQ ID NO: 1275529 - RNA, 19 nt, Homo sapiens
  misc_RNA (1)...(19): siRNA sense strand
gaggaaggaauacuugaca

SEQ ID NO: 1275530 - RNA, 19 nt, Homo sapiens
  misc_RNA (1)...(19): siRNA sense strand
ccaguuccaaagugucuua

SEQ ID NO: 1275531 - RNA, 19 nt, Homo sapiens
  misc_RNA (1)...(19): siRNA sense strand
ugaguaucuugaugcagua

SEQ ID NO: 1275532 - RNA, 19 nt, Homo sapiens
  misc_RNA (1)...(19): siRNA sense strand
caccuuuagugaaguagaa

SEQ ID NO: 1275533 - RNA, 19 nt, Homo sapiens
  misc_RNA (1)...(19): siRNA sense strand
acagauaucaggauuugga

SEQ ID NO: 1275534 - RNA, 19 nt, Homo sapiens
  misc_RNA (1)...(19): siRNA sense strand
ucauugcugugauuguuau

SEQ ID NO: 1275535 - RNA, 19 nt, Homo sapiens
  misc_RNA (1)...(19): siRNA sense strand
ucagaugcacuuuauuugu

SEQ ID NO: 1275536 - RNA, 19 nt, Homo sapiens
  misc_RNA (1)...(19): siRNA sense strand
gugcugcuccagaguguaa

SEQ ID NO: 1275537 - RNA, 19 nt, Homo sapiens
  misc_RNA (1)...(19): siRNA sense strand
ggaaaacacaccuuuagug

SEQ ID NO: 1275538 - RNA, 19 nt, Homo sapiens
  misc_RNA (1)...(19): siRNA sense strand
aaggaucaguagcaauuug

SEQ ID NO: 1275539 - RNA, 19 nt, Homo sapiens
  misc_RNA (1)...(19): siRNA sense strand
uauauacgggauccuuuaa

SEQ ID NO: 1275540 - RNA, 19 nt, Homo sapiens
  misc_RNA (1)...(19): siRNA sense strand
ugaaguagaaguauuugag

SEQ ID NO: 1275541 - RNA, 19 nt, Homo sapiens
  misc_RNA (1)...(19): siRNA sense strand
cuugacaguuuggauguuu

SEQ ID NO: 1275542 - RNA, 19 nt, Homo sapiens
  misc_RNA (1)...(19): siRNA sense strand
cauauauacgggauccuuu

SEQ ID NO: 1275543 - RNA, 19 nt, Homo sapiens
  misc_RNA (1)...(19): siRNA sense strand
auauauacgggauccuuua

SEQ ID NO: 1275544 - RNA, 19 nt, Homo sapiens
  misc_RNA (1)...(19): siRNA sense strand
cuuaaaggaucaguagcaa

SEQ ID NO: 1275545 - RNA, 19 nt, Homo sapiens
  misc_RNA (1)...(19): siRNA sense strand
uaaaccugaggaaggaaua

SEQ ID NO: 1275546 - RNA, 19 nt, Homo sapiens
  misc_RNA (1)...(19): siRNA sense strand
agaugacgccuguuauaga

SEQ ID NO: 1275547 - RNA, 19 nt, Homo sapiens
  misc_RNA (1)...(19): siRNA sense strand
ugugauuguuauugccaua

SEQ ID NO: 1275548 - RNA, 19 nt, Homo sapiens
  misc_RNA (1)...(19): siRNA sense strand
gagagcacgauuuauugug

SEQ ID NO: 1275549 - RNA, 19 nt, Homo sapiens
  misc_RNA (1)...(19): siRNA sense strand
gaaguauuugaguaucuug

SEQ ID NO: 1275550 - RNA, 19 nt, Homo sapiens
  misc_RNA (1)...(19): siRNA sense strand
ggcuaccugucucagauga

SEQ ID NO: 1275551 - RNA, 19 nt, Homo sapiens
  misc_RNA (1)...(19): siRNA sense strand
gauaucaggauuuggaaaa

SEQ ID NO: 1275552 - RNA, 19 nt, Homo sapiens
  misc_RNA (1)...(19): siRNA sense strand
ccucuugccacccauacua

SEQ ID NO: 1275553 - RNA, 19 nt, Homo sapiens
  misc_RNA (1)...(19): siRNA sense strand
ccaugguguugcugcugua

SEQ ID NO: 1275554 - RNA, 19 nt, Homo sapiens
  misc_RNA (1)...(19): siRNA sense strand
cagaugacgccuguuauag

SEQ ID NO: 1275555 - RNA, 19 nt, Homo sapiens
  misc_RNA (1)...(19): siRNA sense strand
uuggugaacgaguagauua

SEQ ID NO: 1275556 - RNA, 19 nt, Homo sapiens
  misc_RNA (1)...(19): siRNA sense strand
gucauugcugugauuguua

SEQ ID NO: 1275557 - RNA, 19 nt, Homo sapiens
  misc_RNA (1)...(19): siRNA sense strand
ggagccaccaacauuugaa

SEQ ID NO: 1275558 - RNA, 19 nt, Homo sapiens
  misc_RNA (1)...(19): siRNA sense strand
gcgcuuuccuggguugcuu

SEQ ID NO: 1275559 - RNA, 19 nt, Homo sapiens
  misc_RNA (1)...(19): siRNA sense strand
uacuacaaagcaacaguua

SEQ ID NO: 1275560 - RNA, 19 nt, Homo sapiens
  misc_RNA (1)...(19): siRNA sense strand
cuugaugcaguaacuuaua

SEQ ID NO: 1275561 - RNA, 19 nt, Homo sapiens
  misc_RNA (1)...(19): siRNA sense strand
aaacauguccauauauacg

SEQ ID NO: 1275562 - RNA, 19 nt, Homo sapiens
  misc_RNA (1)...(19): siRNA sense strand
guguaaaguggucaaaugu

SEQ ID NO: 1275563 - RNA, 19 nt, Homo sapiens
  misc_RNA (1)...(19): siRNA sense strand
cuuacgaguuugguuauca

SEQ ID NO: 1275564 - RNA, 19 nt, Homo sapiens
  misc_RNA (1)...(19): siRNA sense strand
uacgggauccuuuaaaugg

SEQ ID NO: 1275565 - RNA, 19 nt, Homo sapiens
  misc_RNA (1)...(19): siRNA sense strand
aaccaaaacccuacuauga

SEQ ID NO: 1275566 - RNA, 19 nt, Homo sapiens
  misc_RNA (1)...(19): siRNA sense strand
cccaauaugugaaaagguu

SEQ ID NO: 1275567 - RNA, 19 nt, Homo sapiens
  misc_RNA (1)...(19): siRNA sense strand
cgauggcagcgacacaauu

SEQ ID NO: 1275568 - RNA, 19 nt, Homo sapiens
  misc_RNA (1)...(19): siRNA sense strand
gauccauuuucacuuauug

SEQ ID NO: 1275569 - RNA, 19 nt, Homo sapiens
  misc_RNA (1)...(19): siRNA sense strand
uugaugcaguaacuuauag

SEQ ID NO: 1275570 - RNA, 19 nt, Homo sapiens
  misc_RNA (1)...(19): siRNA sense strand
guaucuugaugcaguaacu

SEQ ID NO: 1275571 - RNA, 19 nt, Homo sapiens
  misc_RNA (1)...(19): siRNA sense strand
caacauuugaagcuaugga

SEQ ID NO: 1275572 - RNA, 19 nt, Homo sapiens
  misc_RNA (1)...(19): siRNA sense strand
gagauuggugaacgaguag

SEQ ID NO: 1275573 - RNA, 19 nt, Homo sapiens
  misc_RNA (1)...(19): siRNA sense strand
ggagagagcacgauuuauu

SEQ ID NO: 1275574 - RNA, 19 nt, Homo sapiens
  misc_RNA (1)...(19): siRNA sense strand
agagaaacauguccauaua

SEQ ID NO: 1275575 - RNA, 19 nt, Homo sapiens
  misc_RNA (1)...(19): siRNA sense strand
cagaugcacuuuauuugua

SEQ ID NO: 1275576 - RNA, 19 nt, Homo sapiens
  misc_RNA (1)...(19): siRNA sense strand
ggacuuacgaguuugguua

SEQ ID NO: 1275577 - RNA, 19 nt, Homo sapiens
  misc_RNA (1)...(19): siRNA sense strand
aaacagauaucaggauuug

SEQ ID NO: 1275578 - RNA, 19 nt, Homo sapiens
  misc_RNA (1)...(19): siRNA sense strand
cuauggagcucauugguaa

SEQ ID NO: 1275579 - RNA, 19 nt, Homo sapiens
  misc_RNA (1)...(19): siRNA sense strand
aaacacaccuuuagugaag

SEQ ID NO: 1275580 - RNA, 19 nt, Homo sapiens
  misc_RNA (1)...(19): siRNA sense strand
gaacuuaaaggaucaguag

SEQ ID NO: 1275581 - RNA, 19 nt, Homo sapiens
  misc_RNA (1)...(19): siRNA sense strand
gaaaacagauaucaggauu

SEQ ID NO: 1275582 - RNA, 19 nt, Homo sapiens
  misc_RNA (1)...(19): siRNA sense strand
uaaaggaucaguagcaauu

SEQ ID NO: 1275583 - RNA, 19 nt, Homo sapiens
  misc_RNA (1)...(19): siRNA sense strand
aaaugggacuuacgaguuu

SEQ ID NO: 1275584 - RNA, 19 nt, Homo sapiens
  misc_RNA (1)...(19): siRNA sense strand
guuaucagaugcacuuuau

SEQ ID NO: 1275585 - RNA, 19 nt, Homo sapiens
  misc_RNA (1)...(19): siRNA sense strand
gagcugaauaugccacuua

SEQ ID NO: 1275586 - RNA, 19 nt, Homo sapiens
  misc_RNA (1)...(19): siRNA sense strand
gagcagagaggcugaauag

SEQ ID NO: 1275587 - RNA, 19 nt, Homo sapiens
  misc_RNA (1)...(19): siRNA sense strand
ugagauuggugaacgagua

SEQ ID NO: 1275588 - RNA, 19 nt, Homo sapiens
  misc_RNA (1)...(19): siRNA sense strand
gugaacgaguagauuauaa

SEQ ID NO: 1275589 - RNA, 19 nt, Homo sapiens
  misc_RNA (1)...(19): siRNA sense strand
gagagagcacgauuuauug

SEQ ID NO: 1275590 - RNA, 19 nt, Homo sapiens
  misc_RNA (1)...(19): siRNA sense strand
caaaugggacuuacgaguu

SEQ ID NO: 1275591 - RNA, 19 nt, Homo sapiens
  misc_RNA (1)...(19): siRNA sense strand
ggucauugcugugauuguu

SEQ ID NO: 1275592 - RNA, 19 nt, Homo sapiens
  misc_RNA (1)...(19): siRNA sense strand
ccagauccauuuucacuua

SEQ ID NO: 1275593 - RNA, 19 nt, Homo sapiens
  misc_RNA (1)...(19): siRNA sense strand
gaaggaauacuugacaguu

SEQ ID NO: 1275594 - RNA, 19 nt, Homo sapiens
  misc_RNA (1)...(19): siRNA sense strand
aaggaauacuugacaguuu

SEQ ID NO: 1275595 - RNA, 19 nt, Homo sapiens
  misc_RNA (1)...(19): siRNA sense strand
ucagaugacgccuguuaua

SEQ ID NO: 1275596 - RNA, 19 nt, Homo sapiens
  misc_RNA (1)...(19): siRNA sense strand
gaaaacacaccuuuaguga

SEQ ID NO: 1275597 - RNA, 19 nt, Homo sapiens
  misc_RNA (1)...(19): siRNA sense strand
gaugacgccuguuauagag

SEQ ID NO: 1275598 - RNA, 19 nt, Homo sapiens
  misc_RNA (1)...(19): siRNA sense strand
gagaaacauguccauauau

SEQ ID NO: 1275599 - RNA, 19 nt, Homo sapiens
  misc_RNA (1)...(19): siRNA sense strand
ccacuuaccagacuaaauc

SEQ ID NO: 1275600 - RNA, 19 nt, Homo sapiens
  misc_RNA (1)...(19): siRNA sense strand
acgaguagauuauaagugu

SEQ ID NO: 1275601 - RNA, 19 nt, Homo sapiens
  misc_RNA (1)...(19): siRNA sense strand
cuacaaagcaacaguuaug

SEQ ID NO: 1275602 - RNA, 19 nt, Homo sapiens
  misc_RNA (1)...(19): siRNA sense strand
ccaccaacauuugaagcua

SEQ ID NO: 1275603 - RNA, 19 nt, Homo sapiens
  misc_RNA (1)...(19): siRNA sense strand
uauacgggauccuuuaaau

SEQ ID NO: 1275604 - RNA, 19 nt, Homo sapiens
  misc_RNA (1)...(19): siRNA sense strand
cgaguuugguuaucagaug

SEQ ID NO: 1275605 - RNA, 19 nt, Homo sapiens
  misc_RNA (1)...(19): siRNA sense strand
gaacgaguagauuauaagu

SEQ ID NO: 1275606 - RNA, 19 nt, Homo sapiens
  misc_RNA (1)...(19): siRNA sense strand
gugaggagccaccaacauu

SEQ ID NO: 1275607 - RNA, 19 nt, Homo sapiens
  misc_RNA (1)...(19): siRNA sense strand
gauggcagcgacacaauug

SEQ ID NO: 1275608 - RNA, 19 nt, Homo sapiens
  misc_RNA (1)...(19): siRNA sense strand
ucucagaugacgccuguua

SEQ ID NO: 1275609 - RNA, 19 nt, Homo sapiens
  misc_RNA (1)...(19): siRNA sense strand
acacaccuuuagugaagua

SEQ ID NO: 1275610 - RNA, 19 nt, Homo sapiens
  misc_RNA (1)...(19): siRNA sense strand
gcuauggagcucauuggua

SEQ ID NO: 1275611 - RNA, 19 nt, Homo sapiens
  misc_RNA (1)...(19): siRNA sense strand
gaggagccaccaacauuug

SEQ ID NO: 1275612 - RNA, 19 nt, Homo sapiens
  misc_RNA (1)...(19): siRNA sense strand
uagagaaacauguccauau

SEQ ID NO: 1275613 - RNA, 19 nt, Homo sapiens
  misc_RNA (1)...(19): siRNA sense strand
ggugaacgaguagauuaua

SEQ ID NO: 1275614 - RNA, 19 nt, Homo sapiens
  misc_RNA (1)...(19): siRNA sense strand
gaaguagaaguauuugagu

SEQ ID NO: 1275615 - RNA, 19 nt, Homo sapiens
  misc_RNA (1)...(19): siRNA sense strand
gaaacauguccauauauac

SEQ ID NO: 1275616 - RNA, 19 nt, Homo sapiens
  misc_RNA (1)...(19): siRNA sense strand
ugacgccuguuauagagaa

SEQ ID NO: 1275617 - RNA, 19 nt, Homo sapiens
  misc_RNA (1)...(19): siRNA sense strand
cgaguagauuauaagugua

SEQ ID NO: 1275618 - RNA, 19 nt, Homo sapiens
  misc_RNA (1)...(19): siRNA sense strand
gcacuuuauuuguaaugag

SEQ ID NO: 1275619 - RNA, 19 nt, Homo sapiens
  misc_RNA (1)...(19): siRNA sense strand
guagaaguauuugaguauc

SEQ ID NO: 1275620 - RNA, 19 nt, Homo sapiens
  misc_RNA (1)...(19): siRNA sense strand
guauuugaguaucuugaug

SEQ ID NO: 1275621 - RNA, 19 nt, Homo sapiens
  misc_RNA (1)...(19): siRNA sense strand
aggaauacuugacaguuug

SEQ ID NO: 1275622 - RNA, 19 nt, Homo sapiens
  misc_RNA (1)...(19): siRNA sense strand
ccaaaacccuacuaugaga

SEQ ID NO: 1275623 - RNA, 19 nt, Homo sapiens
  misc_RNA (1)...(19): siRNA sense strand
aguguaaaguggucaaaug

SEQ ID NO: 1275624 - RNA, 19 nt, Homo sapiens
  misc_RNA (1)...(19): siRNA sense strand
ccacccauacuauuuguga

SEQ ID NO: 1275625 - RNA, 19 nt, Homo sapiens
  misc_RNA (1)...(19): siRNA sense strand
uuggagagagcacgauuua

SEQ ID NO: 1275626 - RNA, 19 nt, Homo sapiens
  misc_RNA (1)...(19): siRNA sense strand
gguuaucagaugcacuuua

SEQ ID NO: 1275627 - RNA, 19 nt, Homo sapiens
  misc_RNA (1)...(19): siRNA sense strand
caccaacauuugaagcuau

SEQ ID NO: 1275628 - RNA, 19 nt, Homo sapiens
  misc_RNA (1)...(19): siRNA sense strand
ugaggagccaccaacauuu

SEQ ID NO: 1275629 - RNA, 19 nt, Homo sapiens
  misc_RNA (1)...(19): siRNA sense strand
ggaaggaauacuugacagu

SEQ ID NO: 1275630 - RNA, 19 nt, Homo sapiens
  misc_RNA (1)...(19): siRNA sense strand
gaggaaggaauacuugaca

SEQ ID NO: 1275631 - RNA, 19 nt, Homo sapiens
  misc_RNA (1)...(19): siRNA sense strand
ugaguaucuugaugcagua

SEQ ID NO: 1275632 - RNA, 19 nt, Homo sapiens
  misc_RNA (1)...(19): siRNA sense strand
caccuuuagugaaguagaa

SEQ ID NO: 1275633 - RNA, 19 nt, Homo sapiens
  misc_RNA (1)...(19): siRNA sense strand
acagauaucaggauuugga

SEQ ID NO: 1275634 - RNA, 19 nt, Homo sapiens
  misc_RNA (1)...(19): siRNA sense strand
ucauugcugugauuguuau

SEQ ID NO: 1275635 - RNA, 19 nt, Homo sapiens
  misc_RNA (1)...(19): siRNA sense strand
ucagaugcacuuuauuugu

SEQ ID NO: 1275636 - RNA, 19 nt, Homo sapiens
  misc_RNA (1)...(19): siRNA sense strand
gugcugcuccagaguguaa

SEQ ID NO: 1275637 - RNA, 19 nt, Homo sapiens
  misc_RNA (1)...(19): siRNA sense strand
ggaaaacacaccuuuagug

SEQ ID NO: 1275638 - RNA, 19 nt, Homo sapiens
  misc_RNA (1)...(19): siRNA sense strand
aaggaucaguagcaauuug

SEQ ID NO: 1275639 - RNA, 19 nt, Homo sapiens
  misc_RNA (1)...(19): siRNA sense strand
uauauacgggauccuuuaa

SEQ ID NO: 1275640 - RNA, 19 nt, Homo sapiens
  misc_RNA (1)...(19): siRNA sense strand
ugaaguagaaguauuugag

SEQ ID NO: 1275641 - RNA, 19 nt, Homo sapiens
  misc_RNA (1)...(19): siRNA sense strand
cuugacaguuuggauguuu

SEQ ID NO: 1275642 - RNA, 19 nt, Homo sapiens
  misc_RNA (1)...(19): siRNA sense strand
cauauauacgggauccuuu

SEQ ID NO: 1275643 - RNA, 19 nt, Homo sapiens
  misc_RNA (1)...(19): siRNA sense strand
auauauacgggauccuuua

SEQ ID NO: 1275644 - RNA, 19 nt, Homo sapiens
  misc_RNA (1)...(19): siRNA sense strand
cuuaaaggaucaguagcaa

SEQ ID NO: 1275645 - RNA, 19 nt, Homo sapiens
  misc_RNA (1)...(19): siRNA sense strand
uaaaccugaggaaggaaua

SEQ ID NO: 1275646 - RNA, 19 nt, Homo sapiens
  misc_RNA (1)...(19): siRNA sense strand
agaugacgccuguuauaga

SEQ ID NO: 1275647 - RNA, 19 nt, Homo sapiens
  misc_RNA (1)...(19): siRNA sense strand
ugugauuguuauugccaua

SEQ ID NO: 1275648 - RNA, 19 nt, Homo sapiens
  misc_RNA (1)...(19): siRNA sense strand
gagagcacgauuuauugug

SEQ ID NO: 1275649 - RNA, 19 nt, Homo sapiens
  misc_RNA (1)...(19): siRNA sense strand
gaaguauuugaguaucuug

SEQ ID NO: 1275650 - RNA, 19 nt, Homo sapiens
  misc_RNA (1)...(19): siRNA sense strand
ggcuaccugucucagauga

SEQ ID NO: 1275651 - RNA, 19 nt, Homo sapiens
  misc_RNA (1)...(19): siRNA sense strand
gauaucaggauuuggaaaa

SEQ ID NO: 1275652 - RNA, 19 nt, Homo sapiens
  misc_RNA (1)...(19): siRNA sense strand
ccucuugccacccauacua

SEQ ID NO: 1275653 - RNA, 19 nt, Homo sapiens
  misc_RNA (1)...(19): siRNA sense strand
ccaugguguugcugcugua

SEQ ID NO: 1275654 - RNA, 19 nt, Homo sapiens
  misc_RNA (1)...(19): siRNA sense strand
cagaugacgccuguuauag

SEQ ID NO: 1275655 - RNA, 19 nt, Homo sapiens
  misc_RNA (1)...(19): siRNA sense strand
cagaugguggagcugaaua

SEQ ID NO: 1275656 - RNA, 19 nt, Homo sapiens
  misc_RNA (1)...(19): siRNA sense strand
gucauugcugugauuguua

SEQ ID NO: 1275657 - RNA, 19 nt, Homo sapiens
  misc_RNA (1)...(19): siRNA sense strand
ggagccaccaacauuugaa

SEQ ID NO: 1275658 - RNA, 19 nt, Homo sapiens
  misc_RNA (1)...(19): siRNA sense strand
uuggugaacgaguagauua

SEQ ID NO: 1275659 - RNA, 19 nt, Homo sapiens
  misc_RNA (1)...(19): siRNA sense strand
gcgcuuuccuggguugcuu

SEQ ID NO: 1275660 - RNA, 19 nt, Homo sapiens
  misc_RNA (1)...(19): siRNA sense strand
uacuacaaagcaacaguua

SEQ ID NO: 1275661 - RNA, 19 nt, Homo sapiens
  misc_RNA (1)...(19): siRNA sense strand
cuugaugcaguaacuuaua

SEQ ID NO: 1275662 - RNA, 19 nt, Homo sapiens
  misc_RNA (1)...(19): siRNA sense strand
aaacauguccauauauacg

SEQ ID NO: 1275663 - RNA, 19 nt, Homo sapiens
  misc_RNA (1)...(19): siRNA sense strand
guguaaaguggucaaaugu

SEQ ID NO: 1275664 - RNA, 19 nt, Homo sapiens
  misc_RNA (1)...(19): siRNA sense strand
cuuacgaguuugguuauca

SEQ ID NO: 1275665 - RNA, 19 nt, Homo sapiens
  misc_RNA (1)...(19): siRNA sense strand
uacgggauccuuuaaaugg

SEQ ID NO: 1275666 - RNA, 19 nt, Homo sapiens
  misc_RNA (1)...(19): siRNA sense strand
gcagaugguggagcugaau

SEQ ID NO: 1275667 - RNA, 19 nt, Homo sapiens
  misc_RNA (1)...(19): siRNA sense strand
aaccaaaacccuacuauga

SEQ ID NO: 1275668 - RNA, 19 nt, Homo sapiens
  misc_RNA (1)...(19): siRNA sense strand
uugaugcaguaacuuauag

SEQ ID NO: 1275669 - RNA, 19 nt, Homo sapiens
  misc_RNA (1)...(19): siRNA sense strand
ggagcugaauaugccacuu

SEQ ID NO: 1275670 - RNA, 19 nt, Homo sapiens
  misc_RNA (1)...(19): siRNA sense strand
caacauuugaagcuaugga

SEQ ID NO: 1275671 - RNA, 19 nt, Homo sapiens
  misc_RNA (1)...(19): siRNA sense strand
cgauggcagcgacacaauu

SEQ ID NO: 1275672 - RNA, 19 nt, Homo sapiens
  misc_RNA (1)...(19): siRNA sense strand
gauccauuuucacuuauug

SEQ ID NO: 1275673 - RNA, 19 nt, Homo sapiens
  misc_RNA (1)...(19): siRNA sense strand
ggagagagcacgauuuauu

SEQ ID NO: 1275674 - RNA, 19 nt, Homo sapiens
  misc_RNA (1)...(19): siRNA sense strand
agagaaacauguccauaua

SEQ ID NO: 1275675 - RNA, 19 nt, Homo sapiens
  misc_RNA (1)...(19): siRNA sense strand
cagaugcacuuuauuugua

SEQ ID NO: 1275676 - RNA, 19 nt, Homo sapiens
  misc_RNA (1)...(19): siRNA sense strand
ggacuuacgaguuugguua

SEQ ID NO: 1275677 - RNA, 19 nt, Homo sapiens
  misc_RNA (1)...(19): siRNA sense strand
aaacagauaucaggauuug

SEQ ID NO: 1275678 - RNA, 19 nt, Homo sapiens
  misc_RNA (1)...(19): siRNA sense strand
cuauggagcucauugguaa

SEQ ID NO: 1275679 - RNA, 19 nt, Homo sapiens
  misc_RNA (1)...(19): siRNA sense strand
aaacacaccuuuagugaag

SEQ ID NO: 1275680 - RNA, 19 nt, Homo sapiens
  misc_RNA (1)...(19): siRNA sense strand
gaacuuaaaggaucaguag

SEQ ID NO: 1275681 - RNA, 19 nt, Homo sapiens
  misc_RNA (1)...(19): siRNA sense strand
gaaaacagauaucaggauu

SEQ ID NO: 1275682 - RNA, 19 nt, Homo sapiens
  misc_RNA (1)...(19): siRNA sense strand
uaaaggaucaguagcaauu

SEQ ID NO: 1275683 - RNA, 19 nt, Homo sapiens
  misc_RNA (1)...(19): siRNA sense strand
aaaugggacuuacgaguuu

SEQ ID NO: 1275684 - RNA, 19 nt, Homo sapiens
  misc_RNA (1)...(19): siRNA sense strand
guuaucagaugcacuuuau

SEQ ID NO: 1275685 - RNA, 19 nt, Homo sapiens
  misc_RNA (1)...(19): siRNA sense strand
gagcugaauaugccacuua

SEQ ID NO: 1275686 - RNA, 19 nt, Homo sapiens
  misc_RNA (1)...(19): siRNA sense strand
ugagauuggugaacgagua

SEQ ID NO: 1275687 - RNA, 19 nt, Homo sapiens
  misc_RNA (1)...(19): siRNA sense strand
gugaacgaguagauuauaa

SEQ ID NO: 1275688 - RNA, 19 nt, Homo sapiens
  misc_RNA (1)...(19): siRNA sense strand
gagagagcacgauuuauug

SEQ ID NO: 1275689 - RNA, 19 nt, Homo sapiens
  misc_RNA (1)...(19): siRNA sense strand
caaaugggacuuacgaguu

SEQ ID NO: 1275690 - RNA, 19 nt, Homo sapiens
  misc_RNA (1)...(19): siRNA sense strand
ggucauugcugugauuguu

SEQ ID NO: 1275691 - RNA, 19 nt, Homo sapiens
  misc_RNA (1)...(19): siRNA sense strand
ccagauccauuuucacuua

SEQ ID NO: 1275692 - RNA, 19 nt, Homo sapiens
  misc_RNA (1)...(19): siRNA sense strand
gaaggaauacuugacaguu

SEQ ID NO: 1275693 - RNA, 19 nt, Homo sapiens
  misc_RNA (1)...(19): siRNA sense strand
aaggaauacuugacaguuu

SEQ ID NO: 1275694 - RNA, 19 nt, Homo sapiens
  misc_RNA (1)...(19): siRNA sense strand
ucagaugacgccuguuaua

SEQ ID NO: 1275695 - RNA, 19 nt, Homo sapiens
  misc_RNA (1)...(19): siRNA sense strand
gaaaacacaccuuuaguga

SEQ ID NO: 1275696 - RNA, 19 nt, Homo sapiens
  misc_RNA (1)...(19): siRNA sense strand
gaugacgccuguuauagag

SEQ ID NO: 1275697 - RNA, 19 nt, Homo sapiens
  misc_RNA (1)...(19): siRNA sense strand
gagaaacauguccauauau

SEQ ID NO: 1275698 - RNA, 19 nt, Homo sapiens
  misc_RNA (1)...(19): siRNA sense strand
ccacuuaccagacuaaauc

SEQ ID NO: 1275699 - RNA, 19 nt, Homo sapiens
  misc_RNA (1)...(19): siRNA sense strand
acgaguagauuauaagugu

SEQ ID NO: 1275700 - RNA, 19 nt, Homo sapiens
  misc_RNA (1)...(19): siRNA sense strand
cuacaaagcaacaguuaug

SEQ ID NO: 1275701 - RNA, 19 nt, Homo sapiens
  misc_RNA (1)...(19): siRNA sense strand
ccaccaacauuugaagcua

SEQ ID NO: 1275702 - RNA, 19 nt, Homo sapiens
  misc_RNA (1)...(19): siRNA sense strand
uauacgggauccuuuaaau

SEQ ID NO: 1275703 - RNA, 19 nt, Homo sapiens
  misc_RNA (1)...(19): siRNA sense strand
cgaguuugguuaucagaug

SEQ ID NO: 1275704 - RNA, 19 nt, Homo sapiens
  misc_RNA (1)...(19): siRNA sense strand
gaacgaguagauuauaagu

SEQ ID NO: 1275705 - RNA, 19 nt, Homo sapiens
  misc_RNA (1)...(19): siRNA sense strand
gugaggagccaccaacauu

SEQ ID NO: 1275706 - RNA, 19 nt, Homo sapiens
  misc_RNA (1)...(19): siRNA sense strand
gauggcagcgacacaauug

SEQ ID NO: 1275707 - RNA, 19 nt, Homo sapiens
  misc_RNA (1)...(19): siRNA sense strand
ucucagaugacgccuguua

SEQ ID NO: 1275708 - RNA, 19 nt, Homo sapiens
  misc_RNA (1)...(19): siRNA sense strand
gaggagccaccaacauuug

SEQ ID NO: 1275709 - RNA, 19 nt, Homo sapiens
  misc_RNA (1)...(19): siRNA sense strand
gcuauggagcucauuggua

SEQ ID NO: 1275710 - RNA, 19 nt, Homo sapiens
  misc_RNA (1)...(19): siRNA sense strand
acacaccuuuagugaagua

SEQ ID NO: 1275711 - RNA, 19 nt, Homo sapiens
  misc_RNA (1)...(19): siRNA sense strand
uagagaaacauguccauau

SEQ ID NO: 1275712 - RNA, 19 nt, Homo sapiens
  misc_RNA (1)...(19): siRNA sense strand
guuccaaagugucuuaaag

SEQ ID NO: 1275713 - RNA, 19 nt, Homo sapiens
  misc_RNA (1)...(19): siRNA sense strand
ggugaacgaguagauuaua

SEQ ID NO: 1275714 - RNA, 19 nt, Homo sapiens
  misc_RNA (1)...(19): siRNA sense strand
gaaguagaaguauuugagu

SEQ ID NO: 1275715 - RNA, 19 nt, Homo sapiens
  misc_RNA (1)...(19): siRNA sense strand
gaaacauguccauauauac

SEQ ID NO: 1275716 - RNA, 19 nt, Homo sapiens
  misc_RNA (1)...(19): siRNA sense strand
ugacgccuguuauagagaa

SEQ ID NO: 1275717 - RNA, 19 nt, Homo sapiens
  misc_RNA (1)...(19): siRNA sense strand
cgaguagauuauaagugua

SEQ ID NO: 1275718 - RNA, 19 nt, Homo sapiens
  misc_RNA (1)...(19): siRNA sense strand
gcacuuuauuuguaaugag

SEQ ID NO: 1275719 - RNA, 19 nt, Homo sapiens
  misc_RNA (1)...(19): siRNA sense strand
guagaaguauuugaguauc

SEQ ID NO: 1275720 - RNA, 19 nt, Homo sapiens
  misc_RNA (1)...(19): siRNA sense strand
guauuugaguaucuugaug

SEQ ID NO: 1275721 - RNA, 19 nt, Homo sapiens
  misc_RNA (1)...(19): siRNA sense strand
aggaauacuugacaguuug

SEQ ID NO: 1275722 - RNA, 19 nt, Homo sapiens
  misc_RNA (1)...(19): siRNA sense strand
ccaaaacccuacuaugaga

SEQ ID NO: 1275723 - RNA, 19 nt, Homo sapiens
  misc_RNA (1)...(19): siRNA sense strand
aguguaaaguggucaaaug

SEQ ID NO: 1275724 - RNA, 19 nt, Homo sapiens
  misc_RNA (1)...(19): siRNA sense strand
ccacccauacuauuuguga

SEQ ID NO: 1275725 - RNA, 19 nt, Homo sapiens
  misc_RNA (1)...(19): siRNA sense strand
uuggagagagcacgauuua

SEQ ID NO: 1275726 - RNA, 19 nt, Homo sapiens
  misc_RNA (1)...(19): siRNA sense strand
gguuaucagaugcacuuua

SEQ ID NO: 1275727 - RNA, 19 nt, Homo sapiens
  misc_RNA (1)...(19): siRNA sense strand
caccaacauuugaagcuau

SEQ ID NO: 1275728 - RNA, 19 nt, Homo sapiens
  misc_RNA (1)...(19): siRNA sense strand
ugaggagccaccaacauuu

SEQ ID NO: 1275729 - RNA, 19 nt, Homo sapiens
  misc_RNA (1)...(19): siRNA sense strand
ggaaggaauacuugacagu

SEQ ID NO: 1275730 - RNA, 19 nt, Homo sapiens
  misc_RNA (1)...(19): siRNA sense strand
gaggaaggaauacuugaca

SEQ ID NO: 1275731 - RNA, 19 nt, Homo sapiens
  misc_RNA (1)...(19): siRNA sense strand
ccaguuccaaagugucuua

SEQ ID NO: 1275732 - RNA, 19 nt, Homo sapiens
  misc_RNA (1)...(19): siRNA sense strand
ugaguaucuugaugcagua

SEQ ID NO: 1275733 - RNA, 19 nt, Homo sapiens
  misc_RNA (1)...(19): siRNA sense strand
caccuuuagugaaguagaa

SEQ ID NO: 1275734 - RNA, 19 nt, Homo sapiens
  misc_RNA (1)...(19): siRNA sense strand
acagauaucaggauuugga

SEQ ID NO: 1275735 - RNA, 19 nt, Homo sapiens
  misc_RNA (1)...(19): siRNA sense strand
ucauugcugugauuguuau

SEQ ID NO: 1275736 - RNA, 19 nt, Homo sapiens
  misc_RNA (1)...(19): siRNA sense strand
ucagaugcacuuuauuugu

SEQ ID NO: 1275737 - RNA, 19 nt, Homo sapiens
  misc_RNA (1)...(19): siRNA sense strand
gugcugcuccagaguguaa

SEQ ID NO: 1275738 - RNA, 19 nt, Homo sapiens
  misc_RNA (1)...(19): siRNA sense strand
ggaaaacacaccuuuagug

SEQ ID NO: 1275739 - RNA, 19 nt, Homo sapiens
  misc_RNA (1)...(19): siRNA sense strand
aaggaucaguagcaauuug

SEQ ID NO: 1275740 - RNA, 19 nt, Homo sapiens
  misc_RNA (1)...(19): siRNA sense strand
uauauacgggauccuuuaa

SEQ ID NO: 1275741 - RNA, 19 nt, Homo sapiens
  misc_RNA (1)...(19): siRNA sense strand
ugaaguagaaguauuugag

SEQ ID NO: 1275742 - RNA, 19 nt, Homo sapiens
  misc_RNA (1)...(19): siRNA sense strand
cuugacaguuuggauguuu

SEQ ID NO: 1275743 - RNA, 19 nt, Homo sapiens
  misc_RNA (1)...(19): siRNA sense strand
cauauauacgggauccuuu

SEQ ID NO: 1275744 - RNA, 19 nt, Homo sapiens
  misc_RNA (1)...(19): siRNA sense strand
auauauacgggauccuuua

SEQ ID NO: 1275745 - RNA, 19 nt, Homo sapiens
  misc_RNA (1)...(19): siRNA sense strand
cuuaaaggaucaguagcaa

SEQ ID NO: 1275746 - RNA, 19 nt, Homo sapiens
  misc_RNA (1)...(19): siRNA sense strand
uaaaccugaggaaggaaua

SEQ ID NO: 1275747 - RNA, 19 nt, Homo sapiens
  misc_RNA (1)...(19): siRNA sense strand
agaugacgccuguuauaga

SEQ ID NO: 1275748 - RNA, 19 nt, Homo sapiens
  misc_RNA (1)...(19): siRNA sense strand
ugugauuguuauugccaua

SEQ ID NO: 1275749 - RNA, 19 nt, Homo sapiens
  misc_RNA (1)...(19): siRNA sense strand
gagagcacgauuuauugug

SEQ ID NO: 1275750 - RNA, 19 nt, Homo sapiens
  misc_RNA (1)...(19): siRNA sense strand
gaaguauuugaguaucuug

SEQ ID NO: 1275751 - RNA, 19 nt, Homo sapiens
  misc_RNA (1)...(19): siRNA sense strand
ggcuaccugucucagauga

SEQ ID NO: 1275752 - RNA, 19 nt, Homo sapiens
  misc_RNA (1)...(19): siRNA sense strand
gauaucaggauuuggaaaa

SEQ ID NO: 1275753 - RNA, 19 nt, Homo sapiens
  misc_RNA (1)...(19): siRNA sense strand
ccucuugccacccauacua

SEQ ID NO: 1275754 - RNA, 19 nt, Homo sapiens
  misc_RNA (1)...(19): siRNA sense strand
ccaugguguugcugcugua

SEQ ID NO: 1275755 - RNA, 19 nt, Homo sapiens
  misc_RNA (1)...(19): siRNA sense strand
cagaugacgccuguuauag

SEQ ID NO: 1275756 - RNA, 19 nt, Homo sapiens
  misc_RNA (1)...(19): siRNA sense strand
cagaugguggagcugaaua

SEQ ID NO: 1275757 - RNA, 19 nt, Homo sapiens
  misc_RNA (1)...(19): siRNA sense strand
gucauugcugugauuguua

SEQ ID NO: 1275758 - RNA, 19 nt, Homo sapiens
  misc_RNA (1)...(19): siRNA sense strand
ggagccaccaacauuugaa

SEQ ID NO: 1275759 - RNA, 19 nt, Homo sapiens
  misc_RNA (1)...(19): siRNA sense strand
uuggugaacgaguagauua

SEQ ID NO: 1275760 - RNA, 19 nt, Homo sapiens
  misc_RNA (1)...(19): siRNA sense strand
gcgcuuuccuggguugcuu

SEQ ID NO: 1275761 - RNA, 19 nt, Homo sapiens
  misc_RNA (1)...(19): siRNA sense strand
uacuacaaagcaacaguua

SEQ ID NO: 1275762 - RNA, 19 nt, Homo sapiens
  misc_RNA (1)...(19): siRNA sense strand
cuugaugcaguaacuuaua

SEQ ID NO: 1275763 - RNA, 19 nt, Homo sapiens
  misc_RNA (1)...(19): siRNA sense strand
aaacauguccauauauacg

SEQ ID NO: 1275764 - RNA, 19 nt, Homo sapiens
  misc_RNA (1)...(19): siRNA sense strand
guguaaaguggucaaaugu

SEQ ID NO: 1275765 - RNA, 19 nt, Homo sapiens
  misc_RNA (1)...(19): siRNA sense strand
cuuacgaguuugguuauca

SEQ ID NO: 1275766 - RNA, 19 nt, Homo sapiens
  misc_RNA (1)...(19): siRNA sense strand
uacgggauccuuuaaaugg

SEQ ID NO: 1275767 - RNA, 19 nt, Homo sapiens
  misc_RNA (1)...(19): siRNA sense strand
gcagaugguggagcugaau

SEQ ID NO: 1275768 - RNA, 19 nt, Homo sapiens
  misc_RNA (1)...(19): siRNA sense strand
aaccaaaacccuacuauga

SEQ ID NO: 1275769 - RNA, 19 nt, Homo sapiens
  misc_RNA (1)...(19): siRNA sense strand
uugaugcaguaacuuauag

SEQ ID NO: 1275770 - RNA, 19 nt, Homo sapiens
  misc_RNA (1)...(19): siRNA sense strand
ggagcugaauaugccacuu

SEQ ID NO: 1275771 - RNA, 19 nt, Homo sapiens
  misc_RNA (1)...(19): siRNA sense strand
cgauggcagcgacacaauu

SEQ ID NO: 1275772 - RNA, 19 nt, Homo sapiens
  misc_RNA (1)...(19): siRNA sense strand
gauccauuuucacuuauug

SEQ ID NO: 1275773 - RNA, 19 nt, Homo sapiens
  misc_RNA (1)...(19): siRNA sense strand
ggagagagcacgauuuauu

SEQ ID NO: 1275774 - RNA, 19 nt, Homo sapiens
  misc_RNA (1)...(19): siRNA sense strand
agagaaacauguccauaua

SEQ ID NO: 1275775 - RNA, 19 nt, Homo sapiens
  misc_RNA (1)...(19): siRNA sense strand
cagaugcacuuuauuugua

SEQ ID NO: 1275776 - RNA, 19 nt, Homo sapiens
  misc_RNA (1)...(19): siRNA sense strand
ggacuuacgaguuugguua

SEQ ID NO: 1275777 - RNA, 19 nt, Homo sapiens
  misc_RNA (1)...(19): siRNA sense strand
aaacagauaucaggauuug

SEQ ID NO: 1275778 - RNA, 19 nt, Homo sapiens
  misc_RNA (1)...(19): siRNA sense strand
cuauggagcucauugguaa

SEQ ID NO: 1275779 - RNA, 19 nt, Homo sapiens
  misc_RNA (1)...(19): siRNA sense strand
aaacacaccuuuagugaag

SEQ ID NO: 1275780 - RNA, 19 nt, Homo sapiens
  misc_RNA (1)...(19): siRNA sense strand
gaacuuaaaggaucaguag

SEQ ID NO: 1275781 - RNA, 19 nt, Homo sapiens
  misc_RNA (1)...(19): siRNA sense strand
gaaaacagauaucaggauu

SEQ ID NO: 1275782 - RNA, 19 nt, Homo sapiens
  misc_RNA (1)...(19): siRNA sense strand
uaaaggaucaguagcaauu

SEQ ID NO: 1275783 - RNA, 19 nt, Homo sapiens
  misc_RNA (1)...(19): siRNA sense strand
aaaugggacuuacgaguuu

SEQ ID NO: 1275784 - RNA, 19 nt, Homo sapiens
  misc_RNA (1)...(19): siRNA sense strand
guuaucagaugcacuuuau

SEQ ID NO: 1275785 - RNA, 19 nt, Homo sapiens
  misc_RNA (1)...(19): siRNA sense strand
gagcugaauaugccacuua

SEQ ID NO: 1275786 - RNA, 19 nt, Homo sapiens
  misc_RNA (1)...(19): siRNA sense strand
ugagauuggugaacgagua

SEQ ID NO: 1275787 - RNA, 19 nt, Homo sapiens
  misc_RNA (1)...(19): siRNA sense strand
gugaacgaguagauuauaa

SEQ ID NO: 1275788 - RNA, 19 nt, Homo sapiens
  misc_RNA (1)...(19): siRNA sense strand
gagagagcacgauuuauug

SEQ ID NO: 1275789 - RNA, 19 nt, Homo sapiens
  misc_RNA (1)...(19): siRNA sense strand
caaaugggacuuacgaguu

SEQ ID NO: 1275790 - RNA, 19 nt, Homo sapiens
  misc_RNA (1)...(19): siRNA sense strand
ggucauugcugugauuguu

SEQ ID NO: 1275791 - RNA, 19 nt, Homo sapiens
  misc_RNA (1)...(19): siRNA sense strand
ccagauccauuuucacuua

SEQ ID NO: 1275792 - RNA, 19 nt, Homo sapiens
  misc_RNA (1)...(19): siRNA sense strand
gaaggaauacuugacaguu

SEQ ID NO: 1275793 - RNA, 19 nt, Homo sapiens
  misc_RNA (1)...(19): siRNA sense strand
aaggaauacuugacaguuu

SEQ ID NO: 1275794 - RNA, 19 nt, Homo sapiens
  misc_RNA (1)...(19): siRNA sense strand
ucagaugacgccuguuaua

SEQ ID NO: 1275795 - RNA, 19 nt, Homo sapiens
  misc_RNA (1)...(19): siRNA sense strand
gaaaacacaccuuuaguga

SEQ ID NO: 1275796 - RNA, 19 nt, Homo sapiens
  misc_RNA (1)...(19): siRNA sense strand
gaugacgccuguuauagag

SEQ ID NO: 1275797 - RNA, 19 nt, Homo sapiens
  misc_RNA (1)...(19): siRNA sense strand
gagaaacauguccauauau

SEQ ID NO: 1275798 - RNA, 19 nt, Homo sapiens
  misc_RNA (1)...(19): siRNA sense strand
ccacuuaccagacuaaauc

SEQ ID NO: 1275799 - RNA, 19 nt, Homo sapiens
  misc_RNA (1)...(19): siRNA sense strand
acgaguagauuauaagugu

SEQ ID NO: 1275800 - RNA, 19 nt, Homo sapiens
  misc_RNA (1)...(19): siRNA sense strand
cuacaaagcaacaguuaug

SEQ ID NO: 1275801 - RNA, 19 nt, Homo sapiens
  misc_RNA (1)...(19): siRNA sense strand
ccaccaacauuugaagcua

SEQ ID NO: 1275802 - RNA, 19 nt, Homo sapiens
  misc_RNA (1)...(19): siRNA sense strand
uauacgggauccuuuaaau

SEQ ID NO: 1275803 - RNA, 19 nt, Homo sapiens
  misc_RNA (1)...(19): siRNA sense strand
cgaguuugguuaucagaug

SEQ ID NO: 1275804 - RNA, 19 nt, Homo sapiens
  misc_RNA (1)...(19): siRNA sense strand
gaacgaguagauuauaagu

SEQ ID NO: 1275805 - RNA, 19 nt, Homo sapiens
  misc_RNA (1)...(19): siRNA sense strand
gugaggagccaccaacauu

SEQ ID NO: 1275806 - RNA, 19 nt, Homo sapiens
  misc_RNA (1)...(19): siRNA sense strand
gauggcagcgacacaauug

SEQ ID NO: 1275807 - RNA, 19 nt, Homo sapiens
  misc_RNA (1)...(19): siRNA sense strand
ucucagaugacgccuguua

SEQ ID NO: 1275808 - RNA, 19 nt, Homo sapiens
  misc_RNA (1)...(19): siRNA sense strand
gaggagccaccaacauuug

SEQ ID NO: 1275809 - RNA, 19 nt, Homo sapiens
  misc_RNA (1)...(19): siRNA sense strand
gcuauggagcucauuggua

SEQ ID NO: 1275810 - RNA, 19 nt, Homo sapiens
  misc_RNA (1)...(19): siRNA sense strand
acacaccuuuagugaagua

SEQ ID NO: 1275811 - RNA, 19 nt, Homo sapiens
  misc_RNA (1)...(19): siRNA sense strand
uagagaaacauguccauau

SEQ ID NO: 1275812 - RNA, 19 nt, Homo sapiens
  misc_RNA (1)...(19): siRNA sense strand
guuccaaagugucuuaaag

SEQ ID NO: 1275813 - RNA, 19 nt, Homo sapiens
  misc_RNA (1)...(19): siRNA sense strand
ggugaacgaguagauuaua

SEQ ID NO: 1275814 - RNA, 19 nt, Homo sapiens
  misc_RNA (1)...(19): siRNA sense strand
gaaguagaaguauuugagu

SEQ ID NO: 1275815 - RNA, 19 nt, Homo sapiens
  misc_RNA (1)...(19): siRNA sense strand
gaaacauguccauauauac

SEQ ID NO: 1275816 - RNA, 19 nt, Homo sapiens
  misc_RNA (1)...(19): siRNA sense strand
ugacgccuguuauagagaa

SEQ ID NO: 1275817 - RNA, 19 nt, Homo sapiens
  misc_RNA (1)...(19): siRNA sense strand
cgaguagauuauaagugua

SEQ ID NO: 1275818 - RNA, 19 nt, Homo sapiens
  misc_RNA (1)...(19): siRNA sense strand
gcacuuuauuuguaaugag

SEQ ID NO: 1275819 - RNA, 19 nt, Homo sapiens
  misc_RNA (1)...(19): siRNA sense strand
guagaaguauuugaguauc

SEQ ID NO: 1275820 - RNA, 19 nt, Homo sapiens
  misc_RNA (1)...(19): siRNA sense strand
guauuugaguaucuugaug

SEQ ID NO: 1275821 - RNA, 19 nt, Homo sapiens
  misc_RNA (1)...(19): siRNA sense strand
aggaauacuugacaguuug

SEQ ID NO: 1275822 - RNA, 19 nt, Homo sapiens
  misc_RNA (1)...(19): siRNA sense strand
ccaaaacccuacuaugaga

SEQ ID NO: 1275823 - RNA, 19 nt, Homo sapiens
  misc_RNA (1)...(19): siRNA sense strand
aguguaaaguggucaaaug

SEQ ID NO: 1275824 - RNA, 19 nt, Homo sapiens
  misc_RNA (1)...(19): siRNA sense strand
ccacccauacuauuuguga

SEQ ID NO: 1275825 - RNA, 19 nt, Homo sapiens
  misc_RNA (1)...(19): siRNA sense strand
uuggagagagcacgauuua

SEQ ID NO: 1275826 - RNA, 19 nt, Homo sapiens
  misc_RNA (1)...(19): siRNA sense strand
gguuaucagaugcacuuua

SEQ ID NO: 1275827 - RNA, 19 nt, Homo sapiens
  misc_RNA (1)...(19): siRNA sense strand
caccaacauuugaagcuau

SEQ ID NO: 1275828 - RNA, 19 nt, Homo sapiens
  misc_RNA (1)...(19): siRNA sense strand
ugaggagccaccaacauuu

SEQ ID NO: 1275829 - RNA, 19 nt, Homo sapiens
  misc_RNA (1)...(19): siRNA sense strand
ggaaggaauacuugacagu

SEQ ID NO: 1275830 - RNA, 19 nt, Homo sapiens
  misc_RNA (1)...(19): siRNA sense strand
gaggaaggaauacuugaca

SEQ ID NO: 1275831 - RNA, 19 nt, Homo sapiens
  misc_RNA (1)...(19): siRNA sense strand
ccaguuccaaagugucuua

SEQ ID NO: 1275832 - RNA, 19 nt, Homo sapiens
  misc_RNA (1)...(19): siRNA sense strand
ugaguaucuugaugcagua

SEQ ID NO: 1275833 - RNA, 19 nt, Homo sapiens
  misc_RNA (1)...(19): siRNA sense strand
caccuuuagugaaguagaa

SEQ ID NO: 1275834 - RNA, 19 nt, Homo sapiens
  misc_RNA (1)...(19): siRNA sense strand
acagauaucaggauuugga

SEQ ID NO: 1275835 - RNA, 19 nt, Homo sapiens
  misc_RNA (1)...(19): siRNA sense strand
ucauugcugugauuguuau

SEQ ID NO: 1275836 - RNA, 19 nt, Homo sapiens
  misc_RNA (1)...(19): siRNA sense strand
ucagaugcacuuuauuugu

SEQ ID NO: 1275837 - RNA, 19 nt, Homo sapiens
  misc_RNA (1)...(19): siRNA sense strand
gugcugcuccagaguguaa

SEQ ID NO: 1275838 - RNA, 19 nt, Homo sapiens
  misc_RNA (1)...(19): siRNA sense strand
ggaaaacacaccuuuagug

SEQ ID NO: 1275839 - RNA, 19 nt, Homo sapiens
  misc_RNA (1)...(19): siRNA sense strand
aaggaucaguagcaauuug

SEQ ID NO: 1275840 - RNA, 19 nt, Homo sapiens
  misc_RNA (1)...(19): siRNA sense strand
uauauacgggauccuuuaa

SEQ ID NO: 1275841 - RNA, 19 nt, Homo sapiens
  misc_RNA (1)...(19): siRNA sense strand
ugaaguagaaguauuugag

SEQ ID NO: 1275842 - RNA, 19 nt, Homo sapiens
  misc_RNA (1)...(19): siRNA sense strand
cuugacaguuuggauguuu

SEQ ID NO: 1275843 - RNA, 19 nt, Homo sapiens
  misc_RNA (1)...(19): siRNA sense strand
cauauauacgggauccuuu

SEQ ID NO: 1275844 - RNA, 19 nt, Homo sapiens
  misc_RNA (1)...(19): siRNA sense strand
auauauacgggauccuuua

SEQ ID NO: 1275845 - RNA, 19 nt, Homo sapiens
  misc_RNA (1)...(19): siRNA sense strand
cuuaaaggaucaguagcaa

SEQ ID NO: 1275846 - RNA, 19 nt, Homo sapiens
  misc_RNA (1)...(19): siRNA sense strand
uaaaccugaggaaggaaua

SEQ ID NO: 1275847 - RNA, 19 nt, Homo sapiens
  misc_RNA (1)...(19): siRNA sense strand
agaugacgccuguuauaga

SEQ ID NO: 1275848 - RNA, 19 nt, Homo sapiens
  misc_RNA (1)...(19): siRNA sense strand
ugugauuguuauugccaua

SEQ ID NO: 1275849 - RNA, 19 nt, Homo sapiens
  misc_RNA (1)...(19): siRNA sense strand
gagagcacgauuuauugug

SEQ ID NO: 1275850 - RNA, 19 nt, Homo sapiens
  misc_RNA (1)...(19): siRNA sense strand
gaaguauuugaguaucuug

SEQ ID NO: 1275851 - RNA, 19 nt, Homo sapiens
  misc_RNA (1)...(19): siRNA sense strand
ggcuaccugucucagauga

SEQ ID NO: 1275852 - RNA, 19 nt, Homo sapiens
  misc_RNA (1)...(19): siRNA sense strand
gauaucaggauuuggaaaa

SEQ ID NO: 1275853 - RNA, 19 nt, Homo sapiens
  misc_RNA (1)...(19): siRNA sense strand
ccucuugccacccauacua

SEQ ID NO: 1275854 - RNA, 19 nt, Homo sapiens
  misc_RNA (1)...(19): siRNA sense strand
ccaugguguugcugcugua

SEQ ID NO: 1275855 - RNA, 19 nt, Homo sapiens
  misc_RNA (1)...(19): siRNA sense strand
cagaugacgccuguuauag

SEQ ID NO: 1275856 - RNA, 19 nt, Homo sapiens
  misc_RNA (1)...(19): siRNA sense strand
cagaugguggagcugaaua

SEQ ID NO: 1275857 - RNA, 19 nt, Homo sapiens
  misc_RNA (1)...(19): siRNA sense strand
gucauugcugugauuguua

SEQ ID NO: 1275858 - RNA, 19 nt, Homo sapiens
  misc_RNA (1)...(19): siRNA sense strand
ggagccaccaacauuugaa

SEQ ID NO: 1275859 - RNA, 19 nt, Homo sapiens
  misc_RNA (1)...(19): siRNA sense strand
uuggugaacgaguagauua

SEQ ID NO: 1275860 - RNA, 19 nt, Homo sapiens
  misc_RNA (1)...(19): siRNA sense strand
gcgcuuuccuggguugcuu

SEQ ID NO: 1275861 - RNA, 19 nt, Homo sapiens
  misc_RNA (1)...(19): siRNA sense strand
uacuacaaagcaacaguua

SEQ ID NO: 1275862 - RNA, 19 nt, Homo sapiens
  misc_RNA (1)...(19): siRNA sense strand
cuugaugcaguaacuuaua

SEQ ID NO: 1275863 - RNA, 19 nt, Homo sapiens
  misc_RNA (1)...(19): siRNA sense strand
aaacauguccauauauacg

SEQ ID NO: 1275864 - RNA, 19 nt, Homo sapiens
  misc_RNA (1)...(19): siRNA sense strand
guguaaaguggucaaaugu

SEQ ID NO: 1275865 - RNA, 19 nt, Homo sapiens
  misc_RNA (1)...(19): siRNA sense strand
cuuacgaguuugguuauca

SEQ ID NO: 1275866 - RNA, 19 nt, Homo sapiens
  misc_RNA (1)...(19): siRNA sense strand
uacgggauccuuuaaaugg

SEQ ID NO: 1275867 - RNA, 19 nt, Homo sapiens
  misc_RNA (1)...(19): siRNA sense strand
gcagaugguggagcugaau

SEQ ID NO: 1275868 - RNA, 19 nt, Homo sapiens
  misc_RNA (1)...(19): siRNA sense strand
aaccaaaacccuacuauga

SEQ ID NO: 1275869 - RNA, 19 nt, Homo sapiens
  misc_RNA (1)...(19): siRNA sense strand
uugaugcaguaacuuauag

SEQ ID NO: 1275870 - RNA, 19 nt, Homo sapiens
  misc_RNA (1)...(19): siRNA sense strand
ggagcugaauaugccacuu

SEQ ID NO: 1275871 - RNA, 19 nt, Homo sapiens
  misc_RNA (1)...(19): siRNA sense strand
cgauggcagcgacacaauu

SEQ ID NO: 1275872 - RNA, 19 nt, Homo sapiens
  misc_RNA (1)...(19): siRNA sense strand
gauccauuuucacuuauug

SEQ ID NO: 1275873 - RNA, 19 nt, Homo sapiens
  misc_RNA (1)...(19): siRNA sense strand
ggagagagcacgauuuauu

SEQ ID NO: 1275874 - RNA, 19 nt, Homo sapiens
  misc_RNA (1)...(19): siRNA sense strand
agagaaacauguccauaua

SEQ ID NO: 1275875 - RNA, 19 nt, Homo sapiens
  misc_RNA (1)...(19): siRNA sense strand
cagaugcacuuuauuugua

SEQ ID NO: 1275876 - RNA, 19 nt, Homo sapiens
  misc_RNA (1)...(19): siRNA sense strand
ggacuuacgaguuugguua

SEQ ID NO: 1275877 - RNA, 19 nt, Homo sapiens
  misc_RNA (1)...(19): siRNA sense strand
aaacagauaucaggauuug

SEQ ID NO: 1275878 - RNA, 19 nt, Homo sapiens
  misc_RNA (1)...(19): siRNA sense strand
cuauggagcucauugguaa

SEQ ID NO: 1275879 - RNA, 19 nt, Homo sapiens
  misc_RNA (1)...(19): siRNA sense strand
aaacacaccuuuagugaag

SEQ ID NO: 1275880 - RNA, 19 nt, Homo sapiens
  misc_RNA (1)...(19): siRNA sense strand
gaacuuaaaggaucaguag

SEQ ID NO: 1275881 - RNA, 19 nt, Homo sapiens
  misc_RNA (1)...(19): siRNA sense strand
gaaaacagauaucaggauu

SEQ ID NO: 1275882 - RNA, 19 nt, Homo sapiens
  misc_RNA (1)...(19): siRNA sense strand
uaaaggaucaguagcaauu

SEQ ID NO: 1275883 - RNA, 19 nt, Homo sapiens
  misc_RNA (1)...(19): siRNA sense strand
aaaugggacuuacgaguuu

SEQ ID NO: 1275884 - RNA, 19 nt, Homo sapiens
  misc_RNA (1)...(19): siRNA sense strand
guuaucagaugcacuuuau

SEQ ID NO: 1275885 - RNA, 19 nt, Homo sapiens
  misc_RNA (1)...(19): siRNA sense strand
gagcugaauaugccacuua

SEQ ID NO: 1275886 - RNA, 19 nt, Homo sapiens
  misc_RNA (1)...(19): siRNA sense strand
ugagauuggugaacgagua

SEQ ID NO: 1275887 - RNA, 19 nt, Homo sapiens
  misc_RNA (1)...(19): siRNA sense strand
gugaacgaguagauuauaa

SEQ ID NO: 1275888 - RNA, 19 nt, Homo sapiens
  misc_RNA (1)...(19): siRNA sense strand
gagagagcacgauuuauug

SEQ ID NO: 1275889 - RNA, 19 nt, Homo sapiens
  misc_RNA (1)...(19): siRNA sense strand
caaaugggacuuacgaguu

SEQ ID NO: 1275890 - RNA, 19 nt, Homo sapiens
  misc_RNA (1)...(19): siRNA sense strand
ggucauugcugugauuguu

SEQ ID NO: 1275891 - RNA, 19 nt, Homo sapiens
  misc_RNA (1)...(19): siRNA sense strand
ccagauccauuuucacuua

SEQ ID NO: 1275892 - RNA, 19 nt, Homo sapiens
  misc_RNA (1)...(19): siRNA sense strand
gaaggaauacuugacaguu

SEQ ID NO: 1275893 - RNA, 19 nt, Homo sapiens
  misc_RNA (1)...(19): siRNA sense strand
aaggaauacuugacaguuu

SEQ ID NO: 1275894 - RNA, 19 nt, Homo sapiens
  misc_RNA (1)...(19): siRNA sense strand
ucagaugacgccuguuaua

SEQ ID NO: 1275895 - RNA, 19 nt, Homo sapiens
  misc_RNA (1)...(19): siRNA sense strand
gaaaacacaccuuuaguga

SEQ ID NO: 1275896 - RNA, 19 nt, Homo sapiens
  misc_RNA (1)...(19): siRNA sense strand
gaugacgccuguuauagag

SEQ ID NO: 1275897 - RNA, 19 nt, Homo sapiens
  misc_RNA (1)...(19): siRNA sense strand
gagaaacauguccauauau

SEQ ID NO: 1275898 - RNA, 19 nt, Homo sapiens
  misc_RNA (1)...(19): siRNA sense strand
ccacuuaccagacuaaauc

SEQ ID NO: 1275899 - RNA, 19 nt, Homo sapiens
  misc_RNA (1)...(19): siRNA sense strand
acgaguagauuauaagugu

SEQ ID NO: 1275900 - RNA, 19 nt, Homo sapiens
  misc_RNA (1)...(19): siRNA sense strand
cuacaaagcaacaguuaug

SEQ ID NO: 1275901 - RNA, 19 nt, Homo sapiens
  misc_RNA (1)...(19): siRNA sense strand
ccaccaacauuugaagcua

SEQ ID NO: 1275902 - RNA, 19 nt, Homo sapiens
  misc_RNA (1)...(19): siRNA sense strand
uauacgggauccuuuaaau

SEQ ID NO: 1275903 - RNA, 19 nt, Homo sapiens
  misc_RNA (1)...(19): siRNA sense strand
cgaguuugguuaucagaug

SEQ ID NO: 1275904 - RNA, 19 nt, Homo sapiens
  misc_RNA (1)...(19): siRNA sense strand
gaacgaguagauuauaagu

SEQ ID NO: 1275905 - RNA, 19 nt, Homo sapiens
  misc_RNA (1)...(19): siRNA sense strand
gugaggagccaccaacauu

SEQ ID NO: 1275906 - RNA, 19 nt, Homo sapiens
  misc_RNA (1)...(19): siRNA sense strand
gauggcagcgacacaauug

SEQ ID NO: 1275907 - RNA, 19 nt, Homo sapiens
  misc_RNA (1)...(19): siRNA sense strand
ucucagaugacgccuguua

SEQ ID NO: 1275908 - RNA, 19 nt, Homo sapiens
  misc_RNA (1)...(19): siRNA sense strand
gaggagccaccaacauuug

SEQ ID NO: 1275909 - RNA, 19 nt, Homo sapiens
  misc_RNA (1)...(19): siRNA sense strand
gcuauggagcucauuggua

SEQ ID NO: 1275910 - RNA, 19 nt, Homo sapiens
  misc_RNA (1)...(19): siRNA sense strand
acacaccuuuagugaagua

SEQ ID NO: 1275911 - RNA, 19 nt, Homo sapiens
  misc_RNA (1)...(19): siRNA sense strand
uagagaaacauguccauau

SEQ ID NO: 1275912 - RNA, 19 nt, Homo sapiens
  misc_RNA (1)...(19): siRNA sense strand
guuccaaagugucuuaaag

SEQ ID NO: 1275913 - RNA, 19 nt, Homo sapiens
  misc_RNA (1)...(19): siRNA sense strand
ggugaacgaguagauuaua

SEQ ID NO: 1275914 - RNA, 19 nt, Homo sapiens
  misc_RNA (1)...(19): siRNA sense strand
gaaguagaaguauuugagu

SEQ ID NO: 1275915 - RNA, 19 nt, Homo sapiens
  misc_RNA (1)...(19): siRNA sense strand
gaaacauguccauauauac

SEQ ID NO: 1275916 - RNA, 19 nt, Homo sapiens
  misc_RNA (1)...(19): siRNA sense strand
ugacgccuguuauagagaa

SEQ ID NO: 1275917 - RNA, 19 nt, Homo sapiens
  misc_RNA (1)...(19): siRNA sense strand
cgaguagauuauaagugua

SEQ ID NO: 1275918 - RNA, 19 nt, Homo sapiens
  misc_RNA (1)...(19): siRNA sense strand
gcacuuuauuuguaaugag

SEQ ID NO: 1275919 - RNA, 19 nt, Homo sapiens
  misc_RNA (1)...(19): siRNA sense strand
guagaaguauuugaguauc

SEQ ID NO: 1275920 - RNA, 19 nt, Homo sapiens
  misc_RNA (1)...(19): siRNA sense strand
guauuugaguaucuugaug

SEQ ID NO: 1275921 - RNA, 19 nt, Homo sapiens
  misc_RNA (1)...(19): siRNA sense strand
aggaauacuugacaguuug

SEQ ID NO: 1275922 - RNA, 19 nt, Homo sapiens
  misc_RNA (1)...(19): siRNA sense strand
ccaaaacccuacuaugaga

SEQ ID NO: 1275923 - RNA, 19 nt, Homo sapiens
  misc_RNA (1)...(19): siRNA sense strand
aguguaaaguggucaaaug

SEQ ID NO: 1275924 - RNA, 19 nt, Homo sapiens
  misc_RNA (1)...(19): siRNA sense strand
ccacccauacuauuuguga

SEQ ID NO: 1275925 - RNA, 19 nt, Homo sapiens
  misc_RNA (1)...(19): siRNA sense strand
uuggagagagcacgauuua

SEQ ID NO: 1275926 - RNA, 19 nt, Homo sapiens
  misc_RNA (1)...(19): siRNA sense strand
gguuaucagaugcacuuua

SEQ ID NO: 1275927 - RNA, 19 nt, Homo sapiens
  misc_RNA (1)...(19): siRNA sense strand
caccaacauuugaagcuau

SEQ ID NO: 1275928 - RNA, 19 nt, Homo sapiens
  misc_RNA (1)...(19): siRNA sense strand
ugaggagccaccaacauuu

SEQ ID NO: 1275929 - RNA, 19 nt, Homo sapiens
  misc_RNA (1)...(19): siRNA sense strand
ggaaggaauacuugacagu

SEQ ID NO: 1275930 - RNA, 19 nt, Homo sapiens
  misc_RNA (1)...(19): siRNA sense strand
gaggaaggaauacuugaca

SEQ ID NO: 1275931 - RNA, 19 nt, Homo sapiens
  misc_RNA (1)...(19): siRNA sense strand
ccaguuccaaagugucuua

SEQ ID NO: 1275932 - RNA, 19 nt, Homo sapiens
  misc_RNA (1)...(19): siRNA sense strand
ugaguaucuugaugcagua

SEQ ID NO: 1275933 - RNA, 19 nt, Homo sapiens
  misc_RNA (1)...(19): siRNA sense strand
caccuuuagugaaguagaa

SEQ ID NO: 1275934 - RNA, 19 nt, Homo sapiens
  misc_RNA (1)...(19): siRNA sense strand
acagauaucaggauuugga

SEQ ID NO: 1275935 - RNA, 19 nt, Homo sapiens
  misc_RNA (1)...(19): siRNA sense strand
ucauugcugugauuguuau

SEQ ID NO: 1275936 - RNA, 19 nt, Homo sapiens
  misc_RNA (1)...(19): siRNA sense strand
ucagaugcacuuuauuugu

SEQ ID NO: 1275937 - RNA, 19 nt, Homo sapiens
  misc_RNA (1)...(19): siRNA sense strand
gugcugcuccagaguguaa

SEQ ID NO: 1275938 - RNA, 19 nt, Homo sapiens
  misc_RNA (1)...(19): siRNA sense strand
ggaaaacacaccuuuagug

SEQ ID NO: 1275939 - RNA, 19 nt, Homo sapiens
  misc_RNA (1)...(19): siRNA sense strand
aaggaucaguagcaauuug

SEQ ID NO: 1275940 - RNA, 19 nt, Homo sapiens
  misc_RNA (1)...(19): siRNA sense strand
uauauacgggauccuuuaa

SEQ ID NO: 1275941 - RNA, 19 nt, Homo sapiens
  misc_RNA (1)...(19): siRNA sense strand
ugaaguagaaguauuugag

SEQ ID NO: 1275942 - RNA, 19 nt, Homo sapiens
  misc_RNA (1)...(19): siRNA sense strand
cuugacaguuuggauguuu

SEQ ID NO: 1275943 - RNA, 19 nt, Homo sapiens
  misc_RNA (1)...(19): siRNA sense strand
cauauauacgggauccuuu

SEQ ID NO: 1275944 - RNA, 19 nt, Homo sapiens
  misc_RNA (1)...(19): siRNA sense strand
auauauacgggauccuuua

SEQ ID NO: 1275945 - RNA, 19 nt, Homo sapiens
  misc_RNA (1)...(19): siRNA sense strand
cuuaaaggaucaguagcaa

SEQ ID NO: 1275946 - RNA, 19 nt, Homo sapiens
  misc_RNA (1)...(19): siRNA sense strand
uaaaccugaggaaggaaua

SEQ ID NO: 1275947 - RNA, 19 nt, Homo sapiens
  misc_RNA (1)...(19): siRNA sense strand
agaugacgccuguuauaga

SEQ ID NO: 1275948 - RNA, 19 nt, Homo sapiens
  misc_RNA (1)...(19): siRNA sense strand
ugugauuguuauugccaua

SEQ ID NO: 1275949 - RNA, 19 nt, Homo sapiens
  misc_RNA (1)...(19): siRNA sense strand
gagagcacgauuuauugug

SEQ ID NO: 1275950 - RNA, 19 nt, Homo sapiens
  misc_RNA (1)...(19): siRNA sense strand
gaaguauuugaguaucuug

SEQ ID NO: 1275951 - RNA, 19 nt, Homo sapiens
  misc_RNA (1)...(19): siRNA sense strand
ggcuaccugucucagauga

SEQ ID NO: 1275952 - RNA, 19 nt, Homo sapiens
  misc_RNA (1)...(19): siRNA sense strand
gauaucaggauuuggaaaa

SEQ ID NO: 1275953 - RNA, 19 nt, Homo sapiens
  misc_RNA (1)...(19): siRNA sense strand
ccucuugccacccauacua

SEQ ID NO: 1275954 - RNA, 19 nt, Homo sapiens
  misc_RNA (1)...(19): siRNA sense strand
ccaugguguugcugcugua

SEQ ID NO: 1275955 - RNA, 19 nt, Homo sapiens
  misc_RNA (1)...(19): siRNA sense strand
cagaugacgccuguuauag

SEQ ID NO: 1275956 - RNA, 19 nt, Homo sapiens
  misc_RNA (1)...(19): siRNA sense strand
cagaugguggagcugaaua

SEQ ID NO: 1275957 - RNA, 19 nt, Homo sapiens
  misc_RNA (1)...(19): siRNA sense strand
gucauugcugugauuguua

SEQ ID NO: 1275958 - RNA, 19 nt, Homo sapiens
  misc_RNA (1)...(19): siRNA sense strand
ggagccaccaacauuugaa

SEQ ID NO: 1275959 - RNA, 19 nt, Homo sapiens
  misc_RNA (1)...(19): siRNA sense strand
uuggugaacgaguagauua

SEQ ID NO: 1275960 - RNA, 19 nt, Homo sapiens
  misc_RNA (1)...(19): siRNA sense strand
gcgcuuuccuggguugcuu

SEQ ID NO: 1275961 - RNA, 19 nt, Homo sapiens
  misc_RNA (1)...(19): siRNA sense strand
uacuacaaagcaacaguua

SEQ ID NO: 1275962 - RNA, 19 nt, Homo sapiens
  misc_RNA (1)...(19): siRNA sense strand
cuugaugcaguaacuuaua

SEQ ID NO: 1275963 - RNA, 19 nt, Homo sapiens
  misc_RNA (1)...(19): siRNA sense strand
aaacauguccauauauacg

SEQ ID NO: 1275964 - RNA, 19 nt, Homo sapiens
  misc_RNA (1)...(19): siRNA sense strand
guguaaaguggucaaaugu

SEQ ID NO: 1275965 - RNA, 19 nt, Homo sapiens
  misc_RNA (1)...(19): siRNA sense strand
cuuacgaguuugguuauca

SEQ ID NO: 1275966 - RNA, 19 nt, Homo sapiens
  misc_RNA (1)...(19): siRNA sense strand
uacgggauccuuuaaaugg

SEQ ID NO: 1275967 - RNA, 19 nt, Homo sapiens
  misc_RNA (1)...(19): siRNA sense strand
gcagaugguggagcugaau

SEQ ID NO: 1275968 - RNA, 19 nt, Homo sapiens
  misc_RNA (1)...(19): siRNA sense strand
aaccaaaacccuacuauga

SEQ ID NO: 1275969 - RNA, 19 nt, Homo sapiens
  misc_RNA (1)...(19): siRNA sense strand
uugaugcaguaacuuauag

SEQ ID NO: 1275970 - RNA, 19 nt, Homo sapiens
  misc_RNA (1)...(19): siRNA sense strand
ggagcugaauaugccacuu

SEQ ID NO: 1275971 - RNA, 19 nt, Homo sapiens
  misc_RNA (1)...(19): siRNA sense strand
cgauggcagcgacacaauu

SEQ ID NO: 1275972 - RNA, 19 nt, Homo sapiens
  misc_RNA (1)...(19): siRNA sense strand
gauccauuuucacuuauug

SEQ ID NO: 1275973 - RNA, 19 nt, Homo sapiens
  misc_RNA (1)...(19): siRNA sense strand
ggagagagcacgauuuauu

SEQ ID NO: 1275974 - RNA, 19 nt, Homo sapiens
  misc_RNA (1)...(19): siRNA sense strand
agagaaacauguccauaua

SEQ ID NO: 1275975 - RNA, 19 nt, Homo sapiens
  misc_RNA (1)...(19): siRNA sense strand
cagaugcacuuuauuugua

SEQ ID NO: 1275976 - RNA, 19 nt, Homo sapiens
  misc_RNA (1)...(19): siRNA sense strand
ggacuuacgaguuugguua

SEQ ID NO: 1275977 - RNA, 19 nt, Homo sapiens
  misc_RNA (1)...(19): siRNA sense strand
aaacagauaucaggauuug

SEQ ID NO: 1275978 - RNA, 19 nt, Homo sapiens
  misc_RNA (1)...(19): siRNA sense strand
cuauggagcucauugguaa

SEQ ID NO: 1275979 - RNA, 19 nt, Homo sapiens
  misc_RNA (1)...(19): siRNA sense strand
aaacacaccuuuagugaag

SEQ ID NO: 1275980 - RNA, 19 nt, Homo sapiens
  misc_RNA (1)...(19): siRNA sense strand
gaacuuaaaggaucaguag

SEQ ID NO: 1275981 - RNA, 19 nt, Homo sapiens
  misc_RNA (1)...(19): siRNA sense strand
gaaaacagauaucaggauu

SEQ ID NO: 1275982 - RNA, 19 nt, Homo sapiens
  misc_RNA (1)...(19): siRNA sense strand
uaaaggaucaguagcaauu

SEQ ID NO: 1275983 - RNA, 19 nt, Homo sapiens
  misc_RNA (1)...(19): siRNA sense strand
aaaugggacuuacgaguuu

SEQ ID NO: 1275984 - RNA, 19 nt, Homo sapiens
  misc_RNA (1)...(19): siRNA sense strand
guuaucagaugcacuuuau

SEQ ID NO: 1275985 - RNA, 19 nt, Homo sapiens
  misc_RNA (1)...(19): siRNA sense strand
ugagauuggugaacgagua

SEQ ID NO: 1275986 - RNA, 19 nt, Homo sapiens
  misc_RNA (1)...(19): siRNA sense strand
gugaacgaguagauuauaa

SEQ ID NO: 1275987 - RNA, 19 nt, Homo sapiens
  misc_RNA (1)...(19): siRNA sense strand
gagagagcacgauuuauug

SEQ ID NO: 1275988 - RNA, 19 nt, Homo sapiens
  misc_RNA (1)...(19): siRNA sense strand
caaaugggacuuacgaguu

SEQ ID NO: 1275989 - RNA, 19 nt, Homo sapiens
  misc_RNA (1)...(19): siRNA sense strand
ggucauugcugugauuguu

SEQ ID NO: 1275990 - RNA, 19 nt, Homo sapiens
  misc_RNA (1)...(19): siRNA sense strand
ccagauccauuuucacuua

SEQ ID NO: 1275991 - RNA, 19 nt, Homo sapiens
  misc_RNA (1)...(19): siRNA sense strand
gaaggaauacuugacaguu

SEQ ID NO: 1275992 - RNA, 19 nt, Homo sapiens
  misc_RNA (1)...(19): siRNA sense strand
aaggaauacuugacaguuu

SEQ ID NO: 1275993 - RNA, 19 nt, Homo sapiens
  misc_RNA (1)...(19): siRNA sense strand
ucagaugacgccuguuaua

SEQ ID NO: 1275994 - RNA, 19 nt, Homo sapiens
  misc_RNA (1)...(19): siRNA sense strand
gaaaacacaccuuuaguga

SEQ ID NO: 1275995 - RNA, 19 nt, Homo sapiens
  misc_RNA (1)...(19): siRNA sense strand
gaugacgccuguuauagag

SEQ ID NO: 1275996 - RNA, 19 nt, Homo sapiens
  misc_RNA (1)...(19): siRNA sense strand
gagaaacauguccauauau

SEQ ID NO: 1275997 - RNA, 19 nt, Homo sapiens
  misc_RNA (1)...(19): siRNA sense strand
acgaguagauuauaagugu

SEQ ID NO: 1275998 - RNA, 19 nt, Homo sapiens
  misc_RNA (1)...(19): siRNA sense strand
cuacaaagcaacaguuaug

SEQ ID NO: 1275999 - RNA, 19 nt, Homo sapiens
  misc_RNA (1)...(19): siRNA sense strand
ccaccaacauuugaagcua

SEQ ID NO: 1276000 - RNA, 19 nt, Homo sapiens
  misc_RNA (1)...(19): siRNA sense strand
uauacgggauccuuuaaau

SEQ ID NO: 1276001 - RNA, 19 nt, Homo sapiens
  misc_RNA (1)...(19): siRNA sense strand
cgaguuugguuaucagaug

SEQ ID NO: 1276002 - RNA, 19 nt, Homo sapiens
  misc_RNA (1)...(19): siRNA sense strand
gaacgaguagauuauaagu

SEQ ID NO: 1276003 - RNA, 19 nt, Homo sapiens
  misc_RNA (1)...(19): siRNA sense strand
gugaggagccaccaacauu

SEQ ID NO: 1276004 - RNA, 19 nt, Homo sapiens
  misc_RNA (1)...(19): siRNA sense strand
gauggcagcgacacaauug

SEQ ID NO: 1276005 - RNA, 19 nt, Homo sapiens
  misc_RNA (1)...(19): siRNA sense strand
gcuauggagcucauuggua

SEQ ID NO: 1276006 - RNA, 19 nt, Homo sapiens
  misc_RNA (1)...(19): siRNA sense strand
gaggagccaccaacauuug

SEQ ID NO: 1276007 - RNA, 19 nt, Homo sapiens
  misc_RNA (1)...(19): siRNA sense strand
acacaccuuuagugaagua

SEQ ID NO: 1276008 - RNA, 19 nt, Homo sapiens
  misc_RNA (1)...(19): siRNA sense strand
ucucagaugacgccuguua

SEQ ID NO: 1276009 - RNA, 19 nt, Homo sapiens
  misc_RNA (1)...(19): siRNA sense strand
uagagaaacauguccauau

SEQ ID NO: 1276010 - RNA, 19 nt, Homo sapiens
  misc_RNA (1)...(19): siRNA sense strand
guuccaaagugucuuaaag

SEQ ID NO: 1276011 - RNA, 19 nt, Homo sapiens
  misc_RNA (1)...(19): siRNA sense strand
ggugaacgaguagauuaua

SEQ ID NO: 1276012 - RNA, 19 nt, Homo sapiens
  misc_RNA (1)...(19): siRNA sense strand
gaaguagaaguauuugagu

SEQ ID NO: 1276013 - RNA, 19 nt, Homo sapiens
  misc_RNA (1)...(19): siRNA sense strand
gaaacauguccauauauac

SEQ ID NO: 1276014 - RNA, 19 nt, Homo sapiens
  misc_RNA (1)...(19): siRNA sense strand
ugacgccuguuauagagaa

SEQ ID NO: 1276015 - RNA, 19 nt, Homo sapiens
  misc_RNA (1)...(19): siRNA sense strand
cgaguagauuauaagugua

SEQ ID NO: 1276016 - RNA, 19 nt, Homo sapiens
  misc_RNA (1)...(19): siRNA sense strand
gcacuuuauuuguaaugag

SEQ ID NO: 1276017 - RNA, 19 nt, Homo sapiens
  misc_RNA (1)...(19): siRNA sense strand
guagaaguauuugaguauc

SEQ ID NO: 1276018 - RNA, 19 nt, Homo sapiens
  misc_RNA (1)...(19): siRNA sense strand
guauuugaguaucuugaug

SEQ ID NO: 1276019 - RNA, 19 nt, Homo sapiens
  misc_RNA (1)...(19): siRNA sense strand
aggaauacuugacaguuug

SEQ ID NO: 1276020 - RNA, 19 nt, Homo sapiens
  misc_RNA (1)...(19): siRNA sense strand
ccaaaacccuacuaugaga

SEQ ID NO: 1276021 - RNA, 19 nt, Homo sapiens
  misc_RNA (1)...(19): siRNA sense strand
aguguaaaguggucaaaug

SEQ ID NO: 1276022 - RNA, 19 nt, Homo sapiens
  misc_RNA (1)...(19): siRNA sense strand
ccacccauacuauuuguga

SEQ ID NO: 1276023 - RNA, 19 nt, Homo sapiens
  misc_RNA (1)...(19): siRNA sense strand
caccaacauuugaagcuau

SEQ ID NO: 1276024 - RNA, 19 nt, Homo sapiens
  misc_RNA (1)...(19): siRNA sense strand
uuggagagagcacgauuua

SEQ ID NO: 1276025 - RNA, 19 nt, Homo sapiens
  misc_RNA (1)...(19): siRNA sense strand
gguuaucagaugcacuuua

SEQ ID NO: 1276026 - RNA, 19 nt, Homo sapiens
  misc_RNA (1)...(19): siRNA sense strand
ugaggagccaccaacauuu

SEQ ID NO: 1276027 - RNA, 19 nt, Homo sapiens
  misc_RNA (1)...(19): siRNA sense strand
ggaaggaauacuugacagu

SEQ ID NO: 1276028 - RNA, 19 nt, Homo sapiens
  misc_RNA (1)...(19): siRNA sense strand
gaggaaggaauacuugaca

SEQ ID NO: 1276029 - RNA, 19 nt, Homo sapiens
  misc_RNA (1)...(19): siRNA sense strand
ccaguuccaaagugucuua

SEQ ID NO: 1276030 - RNA, 19 nt, Homo sapiens
  misc_RNA (1)...(19): siRNA sense strand
ugaguaucuugaugcagua

SEQ ID NO: 1276031 - RNA, 19 nt, Homo sapiens
  misc_RNA (1)...(19): siRNA sense strand
caccuuuagugaaguagaa

SEQ ID NO: 1276032 - RNA, 19 nt, Homo sapiens
  misc_RNA (1)...(19): siRNA sense strand
acagauaucaggauuugga

SEQ ID NO: 1276033 - RNA, 19 nt, Homo sapiens
  misc_RNA (1)...(19): siRNA sense strand
ucauugcugugauuguuau

SEQ ID NO: 1276034 - RNA, 19 nt, Homo sapiens
  misc_RNA (1)...(19): siRNA sense strand
ucagaugcacuuuauuugu

SEQ ID NO: 1276035 - RNA, 19 nt, Homo sapiens
  misc_RNA (1)...(19): siRNA sense strand
gugcugcuccagaguguaa

SEQ ID NO: 1276036 - RNA, 19 nt, Homo sapiens
  misc_RNA (1)...(19): siRNA sense strand
ggaaaacacaccuuuagug

SEQ ID NO: 1276037 - RNA, 19 nt, Homo sapiens
  misc_RNA (1)...(19): siRNA sense strand
aaggaucaguagcaauuug

SEQ ID NO: 1276038 - RNA, 19 nt, Homo sapiens
  misc_RNA (1)...(19): siRNA sense strand
uauauacgggauccuuuaa

SEQ ID NO: 1276039 - RNA, 19 nt, Homo sapiens
  misc_RNA (1)...(19): siRNA sense strand
ugaaguagaaguauuugag

SEQ ID NO: 1276040 - RNA, 19 nt, Homo sapiens
  misc_RNA (1)...(19): siRNA sense strand
cuugacaguuuggauguuu

SEQ ID NO: 1276041 - RNA, 19 nt, Homo sapiens
  misc_RNA (1)...(19): siRNA sense strand
cauauauacgggauccuuu

SEQ ID NO: 1276042 - RNA, 19 nt, Homo sapiens
  misc_RNA (1)...(19): siRNA sense strand
auauauacgggauccuuua

SEQ ID NO: 1276043 - RNA, 19 nt, Homo sapiens
  misc_RNA (1)...(19): siRNA sense strand
cuuaaaggaucaguagcaa

SEQ ID NO: 1276044 - RNA, 19 nt, Homo sapiens
  misc_RNA (1)...(19): siRNA sense strand
uaaaccugaggaaggaaua

SEQ ID NO: 1276045 - RNA, 19 nt, Homo sapiens
  misc_RNA (1)...(19): siRNA sense strand
agaugacgccuguuauaga

SEQ ID NO: 1276046 - RNA, 19 nt, Homo sapiens
  misc_RNA (1)...(19): siRNA sense strand
ugugauuguuauugccaua

SEQ ID NO: 1276047 - RNA, 19 nt, Homo sapiens
  misc_RNA (1)...(19): siRNA sense strand
gagagcacgauuuauugug

SEQ ID NO: 1276048 - RNA, 19 nt, Homo sapiens
  misc_RNA (1)...(19): siRNA sense strand
gaaguauuugaguaucuug

SEQ ID NO: 1276049 - RNA, 19 nt, Homo sapiens
  misc_RNA (1)...(19): siRNA sense strand
ggcuaccugucucagauga

SEQ ID NO: 1276050 - RNA, 19 nt, Homo sapiens
  misc_RNA (1)...(19): siRNA sense strand
gauaucaggauuuggaaaa

SEQ ID NO: 1276051 - RNA, 19 nt, Homo sapiens
  misc_RNA (1)...(19): siRNA sense strand
ccucuugccacccauacua

SEQ ID NO: 1276052 - RNA, 19 nt, Homo sapiens
  misc_RNA (1)...(19): siRNA sense strand
ccaugguguugcugcugua

SEQ ID NO: 1276053 - RNA, 19 nt, Homo sapiens
  misc_RNA (1)...(19): siRNA sense strand
cagaugacgccuguuauag

SEQ ID NO: 1276054 - RNA, 19 nt, Homo sapiens
  misc_RNA (1)...(19): siRNA sense strand
uuggugaacgaguagauua

SEQ ID NO: 1276055 - RNA, 19 nt, Homo sapiens
  misc_RNA (1)...(19): siRNA sense strand
gucauugcugugauuguua

SEQ ID NO: 1276056 - RNA, 19 nt, Homo sapiens
  misc_RNA (1)...(19): siRNA sense strand
ggagccaccaacauuugaa

SEQ ID NO: 1276057 - RNA, 19 nt, Homo sapiens
  misc_RNA (1)...(19): siRNA sense strand
gcgcuuuccuggguugcuu

SEQ ID NO: 1276058 - RNA, 19 nt, Homo sapiens
  misc_RNA (1)...(19): siRNA sense strand
uacuacaaagcaacaguua

SEQ ID NO: 1276059 - RNA, 19 nt, Homo sapiens
  misc_RNA (1)...(19): siRNA sense strand
cuugaugcaguaacuuaua

SEQ ID NO: 1276060 - RNA, 19 nt, Homo sapiens
  misc_RNA (1)...(19): siRNA sense strand
aaacauguccauauauacg

SEQ ID NO: 1276061 - RNA, 19 nt, Homo sapiens
  misc_RNA (1)...(19): siRNA sense strand
guguaaaguggucaaaugu

SEQ ID NO: 1276062 - RNA, 19 nt, Homo sapiens
  misc_RNA (1)...(19): siRNA sense strand
cuuacgaguuugguuauca

SEQ ID NO: 1276063 - RNA, 19 nt, Homo sapiens
  misc_RNA (1)...(19): siRNA sense strand
uacgggauccuuuaaaugg

SEQ ID NO: 1276064 - RNA, 19 nt, Homo sapiens
  misc_RNA (1)...(19): siRNA sense strand
aaccaaaacccuacuauga

SEQ ID NO: 1276065 - RNA, 19 nt, Homo sapiens
  misc_RNA (1)...(19): siRNA sense strand
cccaauaugugaaaagguu

SEQ ID NO: 1276066 - RNA, 19 nt, Homo sapiens
  misc_RNA (1)...(19): siRNA sense strand
cgauggcagcgacacaauu

SEQ ID NO: 1276067 - RNA, 19 nt, Homo sapiens
  misc_RNA (1)...(19): siRNA sense strand
gauccauuuucacuuauug

SEQ ID NO: 1276068 - RNA, 19 nt, Homo sapiens
  misc_RNA (1)...(19): siRNA sense strand
uugaugcaguaacuuauag

SEQ ID NO: 1276069 - RNA, 19 nt, Homo sapiens
  misc_RNA (1)...(19): siRNA sense strand
guaucuugaugcaguaacu

SEQ ID NO: 1276070 - RNA, 19 nt, Homo sapiens
  misc_RNA (1)...(19): siRNA sense strand
caacauuugaagcuaugga

SEQ ID NO: 1276071 - RNA, 19 nt, Homo sapiens
  misc_RNA (1)...(19): siRNA sense strand
gagauuggugaacgaguag

SEQ ID NO: 1276072 - RNA, 19 nt, Homo sapiens
  misc_RNA (1)...(19): siRNA sense strand
ggagagagcacgauuuauu

SEQ ID NO: 1276073 - RNA, 19 nt, Homo sapiens
  misc_RNA (1)...(19): siRNA sense strand
agagaaacauguccauaua

SEQ ID NO: 1276074 - RNA, 19 nt, Homo sapiens
  misc_RNA (1)...(19): siRNA sense strand
cagaugcacuuuauuugua

SEQ ID NO: 1276075 - RNA, 19 nt, Homo sapiens
  misc_RNA (1)...(19): siRNA sense strand
ggacuuacgaguuugguua

SEQ ID NO: 1276076 - RNA, 19 nt, Homo sapiens
  misc_RNA (1)...(19): siRNA sense strand
aaacagauaucaggauuug

SEQ ID NO: 1276077 - RNA, 19 nt, Homo sapiens
  misc_RNA (1)...(19): siRNA sense strand
cuauggagcucauugguaa

SEQ ID NO: 1276078 - RNA, 19 nt, Homo sapiens
  misc_RNA (1)...(19): siRNA sense strand
aaacacaccuuuagugaag

SEQ ID NO: 1276079 - RNA, 19 nt, Homo sapiens
  misc_RNA (1)...(19): siRNA sense strand
gaacuuaaaggaucaguag

SEQ ID NO: 1276080 - RNA, 19 nt, Homo sapiens
  misc_RNA (1)...(19): siRNA sense strand
gaaaacagauaucaggauu

SEQ ID NO: 1276081 - RNA, 19 nt, Homo sapiens
  misc_RNA (1)...(19): siRNA sense strand
uaaaggaucaguagcaauu

SEQ ID NO: 1276082 - RNA, 19 nt, Homo sapiens
  misc_RNA (1)...(19): siRNA sense strand
aaaugggacuuacgaguuu

SEQ ID NO: 1276083 - RNA, 19 nt, Homo sapiens
  misc_RNA (1)...(19): siRNA sense strand
guuaucagaugcacuuuau

SEQ ID NO: 1276084 - RNA, 19 nt, Homo sapiens
  misc_RNA (1)...(19): siRNA sense strand
gagcugaauaugccacuua

SEQ ID NO: 1276085 - RNA, 19 nt, Homo sapiens
  misc_RNA (1)...(19): siRNA sense strand
ugagauuggugaacgagua

SEQ ID NO: 1276086 - RNA, 19 nt, Homo sapiens
  misc_RNA (1)...(19): siRNA sense strand
gugaacgaguagauuauaa

SEQ ID NO: 1276087 - RNA, 19 nt, Homo sapiens
  misc_RNA (1)...(19): siRNA sense strand
gagagagcacgauuuauug

SEQ ID NO: 1276088 - RNA, 19 nt, Homo sapiens
  misc_RNA (1)...(19): siRNA sense strand
caaaugggacuuacgaguu

SEQ ID NO: 1276089 - RNA, 19 nt, Homo sapiens
  misc_RNA (1)...(19): siRNA sense strand
ggucauugcugugauuguu

SEQ ID NO: 1276090 - RNA, 19 nt, Homo sapiens
  misc_RNA (1)...(19): siRNA sense strand
ccagauccauuuucacuua

SEQ ID NO: 1276091 - RNA, 19 nt, Homo sapiens
  misc_RNA (1)...(19): siRNA sense strand
gaaggaauacuugacaguu

SEQ ID NO: 1276092 - RNA, 19 nt, Homo sapiens
  misc_RNA (1)...(19): siRNA sense strand
aaggaauacuugacaguuu

SEQ ID NO: 1276093 - RNA, 19 nt, Homo sapiens
  misc_RNA (1)...(19): siRNA sense strand
ucagaugacgccuguuaua

SEQ ID NO: 1276094 - RNA, 19 nt, Homo sapiens
  misc_RNA (1)...(19): siRNA sense strand
gaaaacacaccuuuaguga

SEQ ID NO: 1276095 - RNA, 19 nt, Homo sapiens
  misc_RNA (1)...(19): siRNA sense strand
gaugacgccuguuauagag

SEQ ID NO: 1276096 - RNA, 19 nt, Homo sapiens
  misc_RNA (1)...(19): siRNA sense strand
gagaaacauguccauauau

SEQ ID NO: 1276097 - RNA, 19 nt, Homo sapiens
  misc_RNA (1)...(19): siRNA sense strand
ccacuuaccagacuaaauc

SEQ ID NO: 1276098 - RNA, 19 nt, Homo sapiens
  misc_RNA (1)...(19): siRNA sense strand
acgaguagauuauaagugu

SEQ ID NO: 1276099 - RNA, 19 nt, Homo sapiens
  misc_RNA (1)...(19): siRNA sense strand
cuacaaagcaacaguuaug

SEQ ID NO: 1276100 - RNA, 19 nt, Homo sapiens
  misc_RNA (1)...(19): siRNA sense strand
ccaccaacauuugaagcua

SEQ ID NO: 1276101 - RNA, 19 nt, Homo sapiens
  misc_RNA (1)...(19): siRNA sense strand
uauacgggauccuuuaaau

SEQ ID NO: 1276102 - RNA, 19 nt, Homo sapiens
  misc_RNA (1)...(19): siRNA sense strand
cgaguuugguuaucagaug

SEQ ID NO: 1276103 - RNA, 19 nt, Homo sapiens
  misc_RNA (1)...(19): siRNA sense strand
gaacgaguagauuauaagu

SEQ ID NO: 1276104 - RNA, 19 nt, Homo sapiens
  misc_RNA (1)...(19): siRNA sense strand
gugaggagccaccaacauu

SEQ ID NO: 1276105 - RNA, 19 nt, Homo sapiens
  misc_RNA (1)...(19): siRNA sense strand
gauggcagcgacacaauug

SEQ ID NO: 1276106 - RNA, 19 nt, Homo sapiens
  misc_RNA (1)...(19): siRNA sense strand
ucucagaugacgccuguua

SEQ ID NO: 1276107 - RNA, 19 nt, Homo sapiens
  misc_RNA (1)...(19): siRNA sense strand
gaggagccaccaacauuug

SEQ ID NO: 1276108 - RNA, 19 nt, Homo sapiens
  misc_RNA (1)...(19): siRNA sense strand
gcuauggagcucauuggua

SEQ ID NO: 1276109 - RNA, 19 nt, Homo sapiens
  misc_RNA (1)...(19): siRNA sense strand
acacaccuuuagugaagua

SEQ ID NO: 1276110 - RNA, 19 nt, Homo sapiens
  misc_RNA (1)...(19): siRNA sense strand
uagagaaacauguccauau

SEQ ID NO: 1276111 - RNA, 19 nt, Homo sapiens
  misc_RNA (1)...(19): siRNA sense strand
ggugaacgaguagauuaua

SEQ ID NO: 1276112 - RNA, 19 nt, Homo sapiens
  misc_RNA (1)...(19): siRNA sense strand
gaaguagaaguauuugagu

SEQ ID NO: 1276113 - RNA, 19 nt, Homo sapiens
  misc_RNA (1)...(19): siRNA sense strand
gaaacauguccauauauac

SEQ ID NO: 1276114 - RNA, 19 nt, Homo sapiens
  misc_RNA (1)...(19): siRNA sense strand
ugacgccuguuauagagaa

SEQ ID NO: 1276115 - RNA, 19 nt, Homo sapiens
  misc_RNA (1)...(19): siRNA sense strand
cgaguagauuauaagugua

SEQ ID NO: 1276116 - RNA, 19 nt, Homo sapiens
  misc_RNA (1)...(19): siRNA sense strand
gcacuuuauuuguaaugag

SEQ ID NO: 1276117 - RNA, 19 nt, Homo sapiens
  misc_RNA (1)...(19): siRNA sense strand
guagaaguauuugaguauc

SEQ ID NO: 1276118 - RNA, 19 nt, Homo sapiens
  misc_RNA (1)...(19): siRNA sense strand
guauuugaguaucuugaug

SEQ ID NO: 1276119 - RNA, 19 nt, Homo sapiens
  misc_RNA (1)...(19): siRNA sense strand
aggaauacuugacaguuug

SEQ ID NO: 1276120 - RNA, 19 nt, Homo sapiens
  misc_RNA (1)...(19): siRNA sense strand
ccaaaacccuacuaugaga

SEQ ID NO: 1276121 - RNA, 19 nt, Homo sapiens
  misc_RNA (1)...(19): siRNA sense strand
aguguaaaguggucaaaug

SEQ ID NO: 1276122 - RNA, 19 nt, Homo sapiens
  misc_RNA (1)...(19): siRNA sense strand
ccacccauacuauuuguga

SEQ ID NO: 1276123 - RNA, 19 nt, Homo sapiens
  misc_RNA (1)...(19): siRNA sense strand
uuggagagagcacgauuua

SEQ ID NO: 1276124 - RNA, 19 nt, Homo sapiens
  misc_RNA (1)...(19): siRNA sense strand
gguuaucagaugcacuuua

SEQ ID NO: 1276125 - RNA, 19 nt, Homo sapiens
  misc_RNA (1)...(19): siRNA sense strand
caccaacauuugaagcuau

SEQ ID NO: 1276126 - RNA, 19 nt, Homo sapiens
  misc_RNA (1)...(19): siRNA sense strand
ugaggagccaccaacauuu

SEQ ID NO: 1276127 - RNA, 19 nt, Homo sapiens
  misc_RNA (1)...(19): siRNA sense strand
ggaaggaauacuugacagu

SEQ ID NO: 1276128 - RNA, 19 nt, Homo sapiens
  misc_RNA (1)...(19): siRNA sense strand
gaggaaggaauacuugaca

SEQ ID NO: 1276129 - RNA, 19 nt, Homo sapiens
  misc_RNA (1)...(19): siRNA sense strand
ugaguaucuugaugcagua

SEQ ID NO: 1276130 - RNA, 19 nt, Homo sapiens
  misc_RNA (1)...(19): siRNA sense strand
caccuuuagugaaguagaa

SEQ ID NO: 1276131 - RNA, 19 nt, Homo sapiens
  misc_RNA (1)...(19): siRNA sense strand
acagauaucaggauuugga

SEQ ID NO: 1276132 - RNA, 19 nt, Homo sapiens
  misc_RNA (1)...(19): siRNA sense strand
ucauugcugugauuguuau

SEQ ID NO: 1276133 - RNA, 19 nt, Homo sapiens
  misc_RNA (1)...(19): siRNA sense strand
ucagaugcacuuuauuugu

SEQ ID NO: 1276134 - RNA, 19 nt, Homo sapiens
  misc_RNA (1)...(19): siRNA sense strand
gugcugcuccagaguguaa

SEQ ID NO: 1276135 - RNA, 19 nt, Homo sapiens
  misc_RNA (1)...(19): siRNA sense strand
ggaaaacacaccuuuagug

SEQ ID NO: 1276136 - RNA, 19 nt, Homo sapiens
  misc_RNA (1)...(19): siRNA sense strand
aaggaucaguagcaauuug

SEQ ID NO: 1276137 - RNA, 19 nt, Homo sapiens
  misc_RNA (1)...(19): siRNA sense strand
uauauacgggauccuuuaa

SEQ ID NO: 1276138 - RNA, 19 nt, Homo sapiens
  misc_RNA (1)...(19): siRNA sense strand
ugaaguagaaguauuugag

SEQ ID NO: 1276139 - RNA, 19 nt, Homo sapiens
  misc_RNA (1)...(19): siRNA sense strand
cuugacaguuuggauguuu

SEQ ID NO: 1276140 - RNA, 19 nt, Homo sapiens
  misc_RNA (1)...(19): siRNA sense strand
cauauauacgggauccuuu

SEQ ID NO: 1276141 - RNA, 19 nt, Homo sapiens
  misc_RNA (1)...(19): siRNA sense strand
auauauacgggauccuuua

SEQ ID NO: 1276142 - RNA, 19 nt, Homo sapiens
  misc_RNA (1)...(19): siRNA sense strand
cuuaaaggaucaguagcaa

SEQ ID NO: 1276143 - RNA, 19 nt, Homo sapiens
  misc_RNA (1)...(19): siRNA sense strand
uaaaccugaggaaggaaua

SEQ ID NO: 1276144 - RNA, 19 nt, Homo sapiens
  misc_RNA (1)...(19): siRNA sense strand
agaugacgccuguuauaga

SEQ ID NO: 1276145 - RNA, 19 nt, Homo sapiens
  misc_RNA (1)...(19): siRNA sense strand
ugugauuguuauugccaua

SEQ ID NO: 1276146 - RNA, 19 nt, Homo sapiens
  misc_RNA (1)...(19): siRNA sense strand
gagagcacgauuuauugug

SEQ ID NO: 1276147 - RNA, 19 nt, Homo sapiens
  misc_RNA (1)...(19): siRNA sense strand
gaaguauuugaguaucuug

SEQ ID NO: 1276148 - RNA, 19 nt, Homo sapiens
  misc_RNA (1)...(19): siRNA sense strand
ggcuaccugucucagauga

SEQ ID NO: 1276149 - RNA, 19 nt, Homo sapiens
  misc_RNA (1)...(19): siRNA sense strand
gauaucaggauuuggaaaa

SEQ ID NO: 1276150 - RNA, 19 nt, Homo sapiens
  misc_RNA (1)...(19): siRNA sense strand
ccucuugccacccauacua

SEQ ID NO: 1276151 - RNA, 19 nt, Homo sapiens
  misc_RNA (1)...(19): siRNA sense strand
ccaugguguugcugcugua

SEQ ID NO: 1276152 - RNA, 19 nt, Homo sapiens
  misc_RNA (1)...(19): siRNA sense strand
cagaugacgccuguuauag

SEQ ID NO: 1276153 - RNA, 19 nt, Homo sapiens
  misc_RNA (1)...(19): siRNA sense strand
cagaugguggagcugaaua

SEQ ID NO: 1276154 - RNA, 19 nt, Homo sapiens
  misc_RNA (1)...(19): siRNA sense strand
uuggugaacgaguagauua

SEQ ID NO: 1276155 - RNA, 19 nt, Homo sapiens
  misc_RNA (1)...(19): siRNA sense strand
gucauugcugugauuguua

SEQ ID NO: 1276156 - RNA, 19 nt, Homo sapiens
  misc_RNA (1)...(19): siRNA sense strand
ggagccaccaacauuugaa

SEQ ID NO: 1276157 - RNA, 19 nt, Homo sapiens
  misc_RNA (1)...(19): siRNA sense strand
gcgcuuuccuggguugcuu

SEQ ID NO: 1276158 - RNA, 19 nt, Homo sapiens
  misc_RNA (1)...(19): siRNA sense strand
uacuacaaagcaacaguua

SEQ ID NO: 1276159 - RNA, 19 nt, Homo sapiens
  misc_RNA (1)...(19): siRNA sense strand
cuugaugcaguaacuuaua

SEQ ID NO: 1276160 - RNA, 19 nt, Homo sapiens
  misc_RNA (1)...(19): siRNA sense strand
aaacauguccauauauacg

SEQ ID NO: 1276161 - RNA, 19 nt, Homo sapiens
  misc_RNA (1)...(19): siRNA sense strand
guguaaaguggucaaaugu

SEQ ID NO: 1276162 - RNA, 19 nt, Homo sapiens
  misc_RNA (1)...(19): siRNA sense strand
cuuacgaguuugguuauca

SEQ ID NO: 1276163 - RNA, 19 nt, Homo sapiens
  misc_RNA (1)...(19): siRNA sense strand
uacgggauccuuuaaaugg

SEQ ID NO: 1276164 - RNA, 19 nt, Homo sapiens
  misc_RNA (1)...(19): siRNA sense strand
gcagaugguggagcugaau

SEQ ID NO: 1276165 - RNA, 19 nt, Homo sapiens
  misc_RNA (1)...(19): siRNA sense strand
aaccaaaacccuacuauga

SEQ ID NO: 1276166 - RNA, 19 nt, Homo sapiens
  misc_RNA (1)...(19): siRNA sense strand
cccaauaugugaaaagguu

SEQ ID NO: 1276167 - RNA, 19 nt, Homo sapiens
  misc_RNA (1)...(19): siRNA sense strand
ggagcugaauaugccacuu

SEQ ID NO: 1276168 - RNA, 19 nt, Homo sapiens
  misc_RNA (1)...(19): siRNA sense strand
cgauggcagcgacacaauu

SEQ ID NO: 1276169 - RNA, 19 nt, Homo sapiens
  misc_RNA (1)...(19): siRNA sense strand
gauccauuuucacuuauug

SEQ ID NO: 1276170 - RNA, 19 nt, Homo sapiens
  misc_RNA (1)...(19): siRNA sense strand
uugaugcaguaacuuauag

SEQ ID NO: 1276171 - RNA, 19 nt, Homo sapiens
  misc_RNA (1)...(19): siRNA sense strand
guaucuugaugcaguaacu

SEQ ID NO: 1276172 - RNA, 19 nt, Homo sapiens
  misc_RNA (1)...(19): siRNA sense strand
ggagagagcacgauuuauu

SEQ ID NO: 1276173 - RNA, 19 nt, Homo sapiens
  misc_RNA (1)...(19): siRNA sense strand
agagaaacauguccauaua

SEQ ID NO: 1276174 - RNA, 19 nt, Homo sapiens
  misc_RNA (1)...(19): siRNA sense strand
cagaugcacuuuauuugua

SEQ ID NO: 1276175 - RNA, 19 nt, Homo sapiens
  misc_RNA (1)...(19): siRNA sense strand
ggacuuacgaguuugguua

SEQ ID NO: 1276176 - RNA, 19 nt, Homo sapiens
  misc_RNA (1)...(19): siRNA sense strand
aaacagauaucaggauuug

SEQ ID NO: 1276177 - RNA, 19 nt, Homo sapiens
  misc_RNA (1)...(19): siRNA sense strand
cuauggagcucauugguaa

SEQ ID NO: 1276178 - RNA, 19 nt, Homo sapiens
  misc_RNA (1)...(19): siRNA sense strand
aaacacaccuuuagugaag

SEQ ID NO: 1276179 - RNA, 19 nt, Homo sapiens
  misc_RNA (1)...(19): siRNA sense strand
gaacuuaaaggaucaguag

SEQ ID NO: 1276180 - RNA, 19 nt, Homo sapiens
  misc_RNA (1)...(19): siRNA sense strand
gaaaacagauaucaggauu

SEQ ID NO: 1276181 - RNA, 19 nt, Homo sapiens
  misc_RNA (1)...(19): siRNA sense strand
uaaaggaucaguagcaauu

SEQ ID NO: 1276182 - RNA, 19 nt, Homo sapiens
  misc_RNA (1)...(19): siRNA sense strand
aaaugggacuuacgaguuu

SEQ ID NO: 1276183 - RNA, 19 nt, Homo sapiens
  misc_RNA (1)...(19): siRNA sense strand
guuaucagaugcacuuuau

SEQ ID NO: 1276184 - RNA, 19 nt, Homo sapiens
  misc_RNA (1)...(19): siRNA sense strand
gagcugaauaugccacuua

SEQ ID NO: 1276185 - RNA, 19 nt, Homo sapiens
  misc_RNA (1)...(19): siRNA sense strand
gagcagagaggcugaauag

SEQ ID NO: 1276186 - RNA, 19 nt, Homo sapiens
  misc_RNA (1)...(19): siRNA sense strand
ugagauuggugaacgagua

SEQ ID NO: 1276187 - RNA, 19 nt, Homo sapiens
  misc_RNA (1)...(19): siRNA sense strand
gugaacgaguagauuauaa

SEQ ID NO: 1276188 - RNA, 19 nt, Homo sapiens
  misc_RNA (1)...(19): siRNA sense strand
gagagagcacgauuuauug

SEQ ID NO: 1276189 - RNA, 19 nt, Homo sapiens
  misc_RNA (1)...(19): siRNA sense strand
caaaugggacuuacgaguu

SEQ ID NO: 1276190 - RNA, 19 nt, Homo sapiens
  misc_RNA (1)...(19): siRNA sense strand
ggucauugcugugauuguu

SEQ ID NO: 1276191 - RNA, 19 nt, Homo sapiens
  misc_RNA (1)...(19): siRNA sense strand
ccagauccauuuucacuua

SEQ ID NO: 1276192 - RNA, 19 nt, Homo sapiens
  misc_RNA (1)...(19): siRNA sense strand
gaaggaauacuugacaguu

SEQ ID NO: 1276193 - RNA, 19 nt, Homo sapiens
  misc_RNA (1)...(19): siRNA sense strand
aaggaauacuugacaguuu

SEQ ID NO: 1276194 - RNA, 19 nt, Homo sapiens
  misc_RNA (1)...(19): siRNA sense strand
ucagaugacgccuguuaua

SEQ ID NO: 1276195 - RNA, 19 nt, Homo sapiens
  misc_RNA (1)...(19): siRNA sense strand
gaaaacacaccuuuaguga

SEQ ID NO: 1276196 - RNA, 19 nt, Homo sapiens
  misc_RNA (1)...(19): siRNA sense strand
gaugacgccuguuauagag

SEQ ID NO: 1276197 - RNA, 19 nt, Homo sapiens
  misc_RNA (1)...(19): siRNA sense strand
gagaaacauguccauauau

SEQ ID NO: 1276198 - RNA, 19 nt, Homo sapiens
  misc_RNA (1)...(19): siRNA sense strand
ccacuuaccagacuaaauc

SEQ ID NO: 1276199 - RNA, 19 nt, Homo sapiens
  misc_RNA (1)...(19): siRNA sense strand
acgaguagauuauaagugu

SEQ ID NO: 1276200 - RNA, 19 nt, Homo sapiens
  misc_RNA (1)...(19): siRNA sense strand
cuacaaagcaacaguuaug

SEQ ID NO: 1276201 - RNA, 19 nt, Homo sapiens
  misc_RNA (1)...(19): siRNA sense strand
ccaccaacauuugaagcua

SEQ ID NO: 1276202 - RNA, 19 nt, Homo sapiens
  misc_RNA (1)...(19): siRNA sense strand
uauacgggauccuuuaaau

SEQ ID NO: 1276203 - RNA, 19 nt, Homo sapiens
  misc_RNA (1)...(19): siRNA sense strand
cgaguuugguuaucagaug

SEQ ID NO: 1276204 - RNA, 19 nt, Homo sapiens
  misc_RNA (1)...(19): siRNA sense strand
gaacgaguagauuauaagu

SEQ ID NO: 1276205 - RNA, 19 nt, Homo sapiens
  misc_RNA (1)...(19): siRNA sense strand
gugaggagccaccaacauu

SEQ ID NO: 1276206 - RNA, 19 nt, Homo sapiens
  misc_RNA (1)...(19): siRNA sense strand
gauggcagcgacacaauug

SEQ ID NO: 1276207 - RNA, 19 nt, Homo sapiens
  misc_RNA (1)...(19): siRNA sense strand
ucucagaugacgccuguua

SEQ ID NO: 1276208 - RNA, 19 nt, Homo sapiens
  misc_RNA (1)...(19): siRNA sense strand
acacaccuuuagugaagua

SEQ ID NO: 1276209 - RNA, 19 nt, Homo sapiens
  misc_RNA (1)...(19): siRNA sense strand
gcuauggagcucauuggua

SEQ ID NO: 1276210 - RNA, 19 nt, Homo sapiens
  misc_RNA (1)...(19): siRNA sense strand
gaggagccaccaacauuug

SEQ ID NO: 1276211 - RNA, 19 nt, Homo sapiens
  misc_RNA (1)...(19): siRNA sense strand
uagagaaacauguccauau

SEQ ID NO: 1276212 - RNA, 19 nt, Homo sapiens
  misc_RNA (1)...(19): siRNA sense strand
guuccaaagugucuuaaag

SEQ ID NO: 1276213 - RNA, 19 nt, Homo sapiens
  misc_RNA (1)...(19): siRNA sense strand
ggugaacgaguagauuaua

SEQ ID NO: 1276214 - RNA, 19 nt, Homo sapiens
  misc_RNA (1)...(19): siRNA sense strand
gaaguagaaguauuugagu

SEQ ID NO: 1276215 - RNA, 19 nt, Homo sapiens
  misc_RNA (1)...(19): siRNA sense strand
gaaacauguccauauauac

SEQ ID NO: 1276216 - RNA, 19 nt, Homo sapiens
  misc_RNA (1)...(19): siRNA sense strand
ugacgccuguuauagagaa

SEQ ID NO: 1276217 - RNA, 19 nt, Homo sapiens
  misc_RNA (1)...(19): siRNA sense strand
cgaguagauuauaagugua

SEQ ID NO: 1276218 - RNA, 19 nt, Homo sapiens
  misc_RNA (1)...(19): siRNA sense strand
gcacuuuauuuguaaugag

SEQ ID NO: 1276219 - RNA, 19 nt, Homo sapiens
  misc_RNA (1)...(19): siRNA sense strand
guagaaguauuugaguauc

SEQ ID NO: 1276220 - RNA, 19 nt, Homo sapiens
  misc_RNA (1)...(19): siRNA sense strand
guauuugaguaucuugaug

SEQ ID NO: 1276221 - RNA, 19 nt, Homo sapiens
  misc_RNA (1)...(19): siRNA sense strand
aggaauacuugacaguuug

SEQ ID NO: 1276222 - RNA, 19 nt, Homo sapiens
  misc_RNA (1)...(19): siRNA sense strand
ccaaaacccuacuaugaga

SEQ ID NO: 1276223 - RNA, 19 nt, Homo sapiens
  misc_RNA (1)...(19): siRNA sense strand
aguguaaaguggucaaaug

SEQ ID NO: 1276224 - RNA, 19 nt, Homo sapiens
  misc_RNA (1)...(19): siRNA sense strand
ccacccauacuauuuguga

SEQ ID NO: 1276225 - RNA, 19 nt, Homo sapiens
  misc_RNA (1)...(19): siRNA sense strand
uuggagagagcacgauuua

SEQ ID NO: 1276226 - RNA, 19 nt, Homo sapiens
  misc_RNA (1)...(19): siRNA sense strand
gguuaucagaugcacuuua

SEQ ID NO: 1276227 - RNA, 19 nt, Homo sapiens
  misc_RNA (1)...(19): siRNA sense strand
caccaacauuugaagcuau

SEQ ID NO: 1276228 - RNA, 19 nt, Homo sapiens
  misc_RNA (1)...(19): siRNA sense strand
ugaggagccaccaacauuu

SEQ ID NO: 1276229 - RNA, 19 nt, Homo sapiens
  misc_RNA (1)...(19): siRNA sense strand
ggaaggaauacuugacagu

SEQ ID NO: 1276230 - RNA, 19 nt, Homo sapiens
  misc_RNA (1)...(19): siRNA sense strand
gaggaaggaauacuugaca

SEQ ID NO: 1276231 - RNA, 19 nt, Homo sapiens
  misc_RNA (1)...(19): siRNA sense strand
ccaguuccaaagugucuua

SEQ ID NO: 1276232 - RNA, 19 nt, Homo sapiens
  misc_RNA (1)...(19): siRNA sense strand
ugaguaucuugaugcagua

SEQ ID NO: 1276233 - RNA, 19 nt, Homo sapiens
  misc_RNA (1)...(19): siRNA sense strand
caccuuuagugaaguagaa

SEQ ID NO: 1276234 - RNA, 19 nt, Homo sapiens
  misc_RNA (1)...(19): siRNA sense strand
acagauaucaggauuugga

SEQ ID NO: 1276235 - RNA, 19 nt, Homo sapiens
  misc_RNA (1)...(19): siRNA sense strand
ucauugcugugauuguuau

SEQ ID NO: 1276236 - RNA, 19 nt, Homo sapiens
  misc_RNA (1)...(19): siRNA sense strand
ucagaugcacuuuauuugu

SEQ ID NO: 1276237 - RNA, 19 nt, Homo sapiens
  misc_RNA (1)...(19): siRNA sense strand
gugcugcuccagaguguaa

SEQ ID NO: 1276238 - RNA, 19 nt, Homo sapiens
  misc_RNA (1)...(19): siRNA sense strand
ggaaaacacaccuuuagug

SEQ ID NO: 1276239 - RNA, 19 nt, Homo sapiens
  misc_RNA (1)...(19): siRNA sense strand
aaggaucaguagcaauuug

SEQ ID NO: 1276240 - RNA, 19 nt, Homo sapiens
  misc_RNA (1)...(19): siRNA sense strand
uauauacgggauccuuuaa

SEQ ID NO: 1276241 - RNA, 19 nt, Homo sapiens
  misc_RNA (1)...(19): siRNA sense strand
ugaaguagaaguauuugag

SEQ ID NO: 1276242 - RNA, 19 nt, Homo sapiens
  misc_RNA (1)...(19): siRNA sense strand
cuugacaguuuggauguuu

SEQ ID NO: 1276243 - RNA, 19 nt, Homo sapiens
  misc_RNA (1)...(19): siRNA sense strand
cauauauacgggauccuuu

SEQ ID NO: 1276244 - RNA, 19 nt, Homo sapiens
  misc_RNA (1)...(19): siRNA sense strand
auauauacgggauccuuua

SEQ ID NO: 1276245 - RNA, 19 nt, Homo sapiens
  misc_RNA (1)...(19): siRNA sense strand
cuuaaaggaucaguagcaa

SEQ ID NO: 1276246 - RNA, 19 nt, Homo sapiens
  misc_RNA (1)...(19): siRNA sense strand
uaaaccugaggaaggaaua

SEQ ID NO: 1276247 - RNA, 19 nt, Homo sapiens
  misc_RNA (1)...(19): siRNA sense strand
agaugacgccuguuauaga

SEQ ID NO: 1276248 - RNA, 19 nt, Homo sapiens
  misc_RNA (1)...(19): siRNA sense strand
ugugauuguuauugccaua

SEQ ID NO: 1276249 - RNA, 19 nt, Homo sapiens
  misc_RNA (1)...(19): siRNA sense strand
gagagcacgauuuauugug

SEQ ID NO: 1276250 - RNA, 19 nt, Homo sapiens
  misc_RNA (1)...(19): siRNA sense strand
gaaguauuugaguaucuug

SEQ ID NO: 1276251 - RNA, 19 nt, Homo sapiens
  misc_RNA (1)...(19): siRNA sense strand
ggcuaccugucucagauga

SEQ ID NO: 1276252 - RNA, 19 nt, Homo sapiens
  misc_RNA (1)...(19): siRNA sense strand
ccucuugccacccauacua

SEQ ID NO: 1276253 - RNA, 19 nt, Homo sapiens
  misc_RNA (1)...(19): siRNA sense strand
gauaucaggauuuggaaaa

SEQ ID NO: 1276254 - RNA, 19 nt, Homo sapiens
  misc_RNA (1)...(19): siRNA sense strand
ccaugguguugcugcugua

SEQ ID NO: 1276255 - RNA, 19 nt, Homo sapiens
  misc_RNA (1)...(19): siRNA sense strand
cagaugacgccuguuauag

SEQ ID NO: 1276256 - RNA, 19 nt, Homo sapiens
  misc_RNA (1)...(19): siRNA sense strand
cagaugguggagcugaaua

SEQ ID NO: 1276257 - RNA, 19 nt, Homo sapiens
  misc_RNA (1)...(19): siRNA sense strand
gucauugcugugauuguua

SEQ ID NO: 1276258 - RNA, 19 nt, Homo sapiens
  misc_RNA (1)...(19): siRNA sense strand
uuggugaacgaguagauua

SEQ ID NO: 1276259 - RNA, 19 nt, Homo sapiens
  misc_RNA (1)...(19): siRNA sense strand
ggagccaccaacauuugaa

SEQ ID NO: 1276260 - RNA, 19 nt, Homo sapiens
  misc_RNA (1)...(19): siRNA sense strand
gcgcuuuccuggguugcuu

SEQ ID NO: 1276261 - RNA, 19 nt, Homo sapiens
  misc_RNA (1)...(19): siRNA sense strand
uacuacaaagcaacaguua

SEQ ID NO: 1276262 - RNA, 19 nt, Homo sapiens
  misc_RNA (1)...(19): siRNA sense strand
cuugaugcaguaacuuaua

SEQ ID NO: 1276263 - RNA, 19 nt, Homo sapiens
  misc_RNA (1)...(19): siRNA sense strand
aaacauguccauauauacg

SEQ ID NO: 1276264 - RNA, 19 nt, Homo sapiens
  misc_RNA (1)...(19): siRNA sense strand
guguaaaguggucaaaugu

SEQ ID NO: 1276265 - RNA, 19 nt, Homo sapiens
  misc_RNA (1)...(19): siRNA sense strand
cuuacgaguuugguuauca

SEQ ID NO: 1276266 - RNA, 19 nt, Homo sapiens
  misc_RNA (1)...(19): siRNA sense strand
aaccaaaacccuacuauga

SEQ ID NO: 1276267 - RNA, 19 nt, Homo sapiens
  misc_RNA (1)...(19): siRNA sense strand
gcagaugguggagcugaau

SEQ ID NO: 1276268 - RNA, 19 nt, Homo sapiens
  misc_RNA (1)...(19): siRNA sense strand
uacgggauccuuuaaaugg

SEQ ID NO: 1276269 - RNA, 19 nt, Homo sapiens
  misc_RNA (1)...(19): siRNA sense strand
cgauggcagcgacacaauu

SEQ ID NO: 1276270 - RNA, 19 nt, Homo sapiens
  misc_RNA (1)...(19): siRNA sense strand
ggagcugaauaugccacuu

SEQ ID NO: 1276271 - RNA, 19 nt, Homo sapiens
  misc_RNA (1)...(19): siRNA sense strand
caacauuugaagcuaugga

SEQ ID NO: 1276272 - RNA, 19 nt, Homo sapiens
  misc_RNA (1)...(19): siRNA sense strand
ggagagagcacgauuuauu

SEQ ID NO: 1276273 - RNA, 19 nt, Homo sapiens
  misc_RNA (1)...(19): siRNA sense strand
agagaaacauguccauaua

SEQ ID NO: 1276274 - RNA, 19 nt, Homo sapiens
  misc_RNA (1)...(19): siRNA sense strand
cagaugcacuuuauuugua

SEQ ID NO: 1276275 - RNA, 19 nt, Homo sapiens
  misc_RNA (1)...(19): siRNA sense strand
ggacuuacgaguuugguua

SEQ ID NO: 1276276 - RNA, 19 nt, Homo sapiens
  misc_RNA (1)...(19): siRNA sense strand
aaacagauaucaggauuug

SEQ ID NO: 1276277 - RNA, 19 nt, Homo sapiens
  misc_RNA (1)...(19): siRNA sense strand
cuauggagcucauugguaa

SEQ ID NO: 1276278 - RNA, 19 nt, Homo sapiens
  misc_RNA (1)...(19): siRNA sense strand
aaacacaccuuuagugaag

SEQ ID NO: 1276279 - RNA, 19 nt, Homo sapiens
  misc_RNA (1)...(19): siRNA sense strand
gaacuuaaaggaucaguag

SEQ ID NO: 1276280 - RNA, 19 nt, Homo sapiens
  misc_RNA (1)...(19): siRNA sense strand
gaaaacagauaucaggauu

SEQ ID NO: 1276281 - RNA, 19 nt, Homo sapiens
  misc_RNA (1)...(19): siRNA sense strand
uaaaggaucaguagcaauu

SEQ ID NO: 1276282 - RNA, 19 nt, Homo sapiens
  misc_RNA (1)...(19): siRNA sense strand
aaaugggacuuacgaguuu

SEQ ID NO: 1276283 - RNA, 19 nt, Homo sapiens
  misc_RNA (1)...(19): siRNA sense strand
guuaucagaugcacuuuau

SEQ ID NO: 1276284 - RNA, 19 nt, Homo sapiens
  misc_RNA (1)...(19): siRNA sense strand
ugagauuggugaacgagua

SEQ ID NO: 1276285 - RNA, 19 nt, Homo sapiens
  misc_RNA (1)...(19): siRNA sense strand
gugaacgaguagauuauaa

SEQ ID NO: 1276286 - RNA, 19 nt, Homo sapiens
  misc_RNA (1)...(19): siRNA sense strand
gagagagcacgauuuauug

SEQ ID NO: 1276287 - RNA, 19 nt, Homo sapiens
  misc_RNA (1)...(19): siRNA sense strand
caaaugggacuuacgaguu

SEQ ID NO: 1276288 - RNA, 19 nt, Homo sapiens
  misc_RNA (1)...(19): siRNA sense strand
ggucauugcugugauuguu

SEQ ID NO: 1276289 - RNA, 19 nt, Homo sapiens
  misc_RNA (1)...(19): siRNA sense strand
ccagauccauuuucacuua

SEQ ID NO: 1276290 - RNA, 19 nt, Homo sapiens
  misc_RNA (1)...(19): siRNA sense strand
gaaggaauacuugacaguu

SEQ ID NO: 1276291 - RNA, 19 nt, Homo sapiens
  misc_RNA (1)...(19): siRNA sense strand
aaggaauacuugacaguuu

SEQ ID NO: 1276292 - RNA, 19 nt, Homo sapiens
  misc_RNA (1)...(19): siRNA sense strand
ucagaugacgccuguuaua

SEQ ID NO: 1276293 - RNA, 19 nt, Homo sapiens
  misc_RNA (1)...(19): siRNA sense strand
gaaaacacaccuuuaguga

SEQ ID NO: 1276294 - RNA, 19 nt, Homo sapiens
  misc_RNA (1)...(19): siRNA sense strand
gaugacgccuguuauagag

SEQ ID NO: 1276295 - RNA, 19 nt, Homo sapiens
  misc_RNA (1)...(19): siRNA sense strand
gagaaacauguccauauau

SEQ ID NO: 1276296 - RNA, 19 nt, Homo sapiens
  misc_RNA (1)...(19): siRNA sense strand
acgaguagauuauaagugu

SEQ ID NO: 1276297 - RNA, 19 nt, Homo sapiens
  misc_RNA (1)...(19): siRNA sense strand
cuacaaagcaacaguuaug

SEQ ID NO: 1276298 - RNA, 19 nt, Homo sapiens
  misc_RNA (1)...(19): siRNA sense strand
ccaccaacauuugaagcua

SEQ ID NO: 1276299 - RNA, 19 nt, Homo sapiens
  misc_RNA (1)...(19): siRNA sense strand
uauacgggauccuuuaaau

SEQ ID NO: 1276300 - RNA, 19 nt, Homo sapiens
  misc_RNA (1)...(19): siRNA sense strand
cgaguuugguuaucagaug

SEQ ID NO: 1276301 - RNA, 19 nt, Homo sapiens
  misc_RNA (1)...(19): siRNA sense strand
gaacgaguagauuauaagu

SEQ ID NO: 1276302 - RNA, 19 nt, Homo sapiens
  misc_RNA (1)...(19): siRNA sense strand
gugaggagccaccaacauu

SEQ ID NO: 1276303 - RNA, 19 nt, Homo sapiens
  misc_RNA (1)...(19): siRNA sense strand
gauggcagcgacacaauug

SEQ ID NO: 1276304 - RNA, 19 nt, Homo sapiens
  misc_RNA (1)...(19): siRNA sense strand
gcuauggagcucauuggua

SEQ ID NO: 1276305 - RNA, 19 nt, Homo sapiens
  misc_RNA (1)...(19): siRNA sense strand
gaggagccaccaacauuug

SEQ ID NO: 1276306 - RNA, 19 nt, Homo sapiens
  misc_RNA (1)...(19): siRNA sense strand
acacaccuuuagugaagua

SEQ ID NO: 1276307 - RNA, 19 nt, Homo sapiens
  misc_RNA (1)...(19): siRNA sense strand
ucucagaugacgccuguua

SEQ ID NO: 1276308 - RNA, 19 nt, Homo sapiens
  misc_RNA (1)...(19): siRNA sense strand
uagagaaacauguccauau

SEQ ID NO: 1276309 - RNA, 19 nt, Homo sapiens
  misc_RNA (1)...(19): siRNA sense strand
ggugaacgaguagauuaua

SEQ ID NO: 1276310 - RNA, 19 nt, Homo sapiens
  misc_RNA (1)...(19): siRNA sense strand
gaaguagaaguauuugagu

SEQ ID NO: 1276311 - RNA, 19 nt, Homo sapiens
  misc_RNA (1)...(19): siRNA sense strand
gaaacauguccauauauac

SEQ ID NO: 1276312 - RNA, 19 nt, Homo sapiens
  misc_RNA (1)...(19): siRNA sense strand
ugacgccuguuauagagaa

SEQ ID NO: 1276313 - RNA, 19 nt, Homo sapiens
  misc_RNA (1)...(19): siRNA sense strand
cgaguagauuauaagugua

SEQ ID NO: 1276314 - RNA, 19 nt, Homo sapiens
  misc_RNA (1)...(19): siRNA sense strand
gcacuuuauuuguaaugag

SEQ ID NO: 1276315 - RNA, 19 nt, Homo sapiens
  misc_RNA (1)...(19): siRNA sense strand
guagaaguauuugaguauc

SEQ ID NO: 1276316 - RNA, 19 nt, Homo sapiens
  misc_RNA (1)...(19): siRNA sense strand
guauuugaguaucuugaug

SEQ ID NO: 1276317 - RNA, 19 nt, Homo sapiens
  misc_RNA (1)...(19): siRNA sense strand
aggaauacuugacaguuug

SEQ ID NO: 1276318 - RNA, 19 nt, Homo sapiens
  misc_RNA (1)...(19): siRNA sense strand
aguguaaaguggucaaaug

SEQ ID NO: 1276319 - RNA, 19 nt, Homo sapiens
  misc_RNA (1)...(19): siRNA sense strand
ccaaaacccuacuaugaga

SEQ ID NO: 1276320 - RNA, 19 nt, Homo sapiens
  misc_RNA (1)...(19): siRNA sense strand
ccacccauacuauuuguga

SEQ ID NO: 1276321 - RNA, 19 nt, Homo sapiens
  misc_RNA (1)...(19): siRNA sense strand
caccaacauuugaagcuau

SEQ ID NO: 1276322 - RNA, 19 nt, Homo sapiens
  misc_RNA (1)...(19): siRNA sense strand
uuggagagagcacgauuua

SEQ ID NO: 1276323 - RNA, 19 nt, Homo sapiens
  misc_RNA (1)...(19): siRNA sense strand
gguuaucagaugcacuuua

SEQ ID NO: 1276324 - RNA, 19 nt, Homo sapiens
  misc_RNA (1)...(19): siRNA sense strand
ugaggagccaccaacauuu

SEQ ID NO: 1276325 - RNA, 19 nt, Homo sapiens
  misc_RNA (1)...(19): siRNA sense strand
ggaaggaauacuugacagu

SEQ ID NO: 1276326 - RNA, 19 nt, Homo sapiens
  misc_RNA (1)...(19): siRNA sense strand
gaggaaggaauacuugaca

SEQ ID NO: 1276327 - RNA, 19 nt, Homo sapiens
  misc_RNA (1)...(19): siRNA sense strand
ugaguaucuugaugcagua

SEQ ID NO: 1276328 - RNA, 19 nt, Homo sapiens
  misc_RNA (1)...(19): siRNA sense strand
caccuuuagugaaguagaa

SEQ ID NO: 1276329 - RNA, 19 nt, Homo sapiens
  misc_RNA (1)...(19): siRNA sense strand
acagauaucaggauuugga

SEQ ID NO: 1276330 - RNA, 19 nt, Homo sapiens
  misc_RNA (1)...(19): siRNA sense strand
ucauugcugugauuguuau

SEQ ID NO: 1276331 - RNA, 19 nt, Homo sapiens
  misc_RNA (1)...(19): siRNA sense strand
ucagaugcacuuuauuugu

SEQ ID NO: 1276332 - RNA, 19 nt, Homo sapiens
  misc_RNA (1)...(19): siRNA sense strand
gugcugcuccagaguguaa

SEQ ID NO: 1276333 - RNA, 19 nt, Homo sapiens
  misc_RNA (1)...(19): siRNA sense strand
ggaaaacacaccuuuagug

SEQ ID NO: 1276334 - RNA, 19 nt, Homo sapiens
  misc_RNA (1)...(19): siRNA sense strand
aaggaucaguagcaauuug

SEQ ID NO: 1276335 - RNA, 19 nt, Homo sapiens
  misc_RNA (1)...(19): siRNA sense strand
uauauacgggauccuuuaa

SEQ ID NO: 1276336 - RNA, 19 nt, Homo sapiens
  misc_RNA (1)...(19): siRNA sense strand
ugaaguagaaguauuugag

SEQ ID NO: 1276337 - RNA, 19 nt, Homo sapiens
  misc_RNA (1)...(19): siRNA sense strand
cuugacaguuuggauguuu

SEQ ID NO: 1276338 - RNA, 19 nt, Homo sapiens
  misc_RNA (1)...(19): siRNA sense strand
cauauauacgggauccuuu

SEQ ID NO: 1276339 - RNA, 19 nt, Homo sapiens
  misc_RNA (1)...(19): siRNA sense strand
auauauacgggauccuuua

SEQ ID NO: 1276340 - RNA, 19 nt, Homo sapiens
  misc_RNA (1)...(19): siRNA sense strand
cuuaaaggaucaguagcaa

SEQ ID NO: 1276341 - RNA, 19 nt, Homo sapiens
  misc_RNA (1)...(19): siRNA sense strand
uaaaccugaggaaggaaua

SEQ ID NO: 1276342 - RNA, 19 nt, Homo sapiens
  misc_RNA (1)...(19): siRNA sense strand
agaugacgccuguuauaga

SEQ ID NO: 1276343 - RNA, 19 nt, Homo sapiens
  misc_RNA (1)...(19): siRNA sense strand
ugugauuguuauugccaua

SEQ ID NO: 1276344 - RNA, 19 nt, Homo sapiens
  misc_RNA (1)...(19): siRNA sense strand
gagagcacgauuuauugug

SEQ ID NO: 1276345 - RNA, 19 nt, Homo sapiens
  misc_RNA (1)...(19): siRNA sense strand
gaaguauuugaguaucuug

SEQ ID NO: 1276346 - RNA, 19 nt, Homo sapiens
  misc_RNA (1)...(19): siRNA sense strand
ccucuugccacccauacua

SEQ ID NO: 1276347 - RNA, 19 nt, Homo sapiens
  misc_RNA (1)...(19): siRNA sense strand
gauaucaggauuuggaaaa

SEQ ID NO: 1276348 - RNA, 19 nt, Homo sapiens
  misc_RNA (1)...(19): siRNA sense strand
ggcuaccugucucagauga

SEQ ID NO: 1276349 - RNA, 19 nt, Homo sapiens
  misc_RNA (1)...(19): siRNA sense strand
ccaugguguugcugcugua

SEQ ID NO: 1276350 - RNA, 19 nt, Homo sapiens
  misc_RNA (1)...(19): siRNA sense strand
cagaugacgccuguuauag

SEQ ID NO: 1276351 - RNA, 19 nt, Homo sapiens
  misc_RNA (1)...(19): siRNA sense strand
gucauugcugugauuguua

SEQ ID NO: 1276352 - RNA, 19 nt, Homo sapiens
  misc_RNA (1)...(19): siRNA sense strand
uuggugaacgaguagauua

SEQ ID NO: 1276353 - RNA, 19 nt, Homo sapiens
  misc_RNA (1)...(19): siRNA sense strand
ggagccaccaacauuugaa

SEQ ID NO: 1276354 - RNA, 19 nt, Homo sapiens
  misc_RNA (1)...(19): siRNA sense strand
gcgcuuuccuggguugcuu

SEQ ID NO: 1276355 - RNA, 19 nt, Homo sapiens
  misc_RNA (1)...(19): siRNA sense strand
uacuacaaagcaacaguua

SEQ ID NO: 1276356 - RNA, 19 nt, Homo sapiens
  misc_RNA (1)...(19): siRNA sense strand
cuugaugcaguaacuuaua

SEQ ID NO: 1276357 - RNA, 19 nt, Homo sapiens
  misc_RNA (1)...(19): siRNA sense strand
aaacauguccauauauacg

SEQ ID NO: 1276358 - RNA, 19 nt, Homo sapiens
  misc_RNA (1)...(19): siRNA sense strand
guguaaaguggucaaaugu

SEQ ID NO: 1276359 - RNA, 19 nt, Homo sapiens
  misc_RNA (1)...(19): siRNA sense strand
cuuacgaguuugguuauca

SEQ ID NO: 1276360 - RNA, 19 nt, Homo sapiens
  misc_RNA (1)...(19): siRNA sense strand
uacgggauccuuuaaaugg

SEQ ID NO: 1276361 - RNA, 19 nt, Homo sapiens
  misc_RNA (1)...(19): siRNA sense strand
aaccaaaacccuacuauga

SEQ ID NO: 1276362 - RNA, 19 nt, Homo sapiens
  misc_RNA (1)...(19): siRNA sense strand
cccaauaugugaaaagguu

SEQ ID NO: 1276363 - RNA, 19 nt, Homo sapiens
  misc_RNA (1)...(19): siRNA sense strand
cgauggcagcgacacaauu

SEQ ID NO: 1276364 - RNA, 19 nt, Homo sapiens
  misc_RNA (1)...(19): siRNA sense strand
gauccauuuucacuuauug

SEQ ID NO: 1276365 - RNA, 19 nt, Homo sapiens
  misc_RNA (1)...(19): siRNA sense strand
uugaugcaguaacuuauag

SEQ ID NO: 1276366 - RNA, 19 nt, Homo sapiens
  misc_RNA (1)...(19): siRNA sense strand
guaucuugaugcaguaacu

SEQ ID NO: 1276367 - RNA, 19 nt, Homo sapiens
  misc_RNA (1)...(19): siRNA sense strand
caacauuugaagcuaugga

SEQ ID NO: 1276368 - RNA, 19 nt, Homo sapiens
  misc_RNA (1)...(19): siRNA sense strand
gagauuggugaacgaguag

SEQ ID NO: 1276369 - RNA, 19 nt, Homo sapiens
  misc_RNA (1)...(19): siRNA sense strand
ggagagagcacgauuuauu

SEQ ID NO: 1276370 - RNA, 19 nt, Homo sapiens
  misc_RNA (1)...(19): siRNA sense strand
agagaaacauguccauaua

SEQ ID NO: 1276371 - RNA, 19 nt, Homo sapiens
  misc_RNA (1)...(19): siRNA sense strand
cagaugcacuuuauuugua

SEQ ID NO: 1276372 - RNA, 19 nt, Homo sapiens
  misc_RNA (1)...(19): siRNA sense strand
ggacuuacgaguuugguua

SEQ ID NO: 1276373 - RNA, 19 nt, Homo sapiens
  misc_RNA (1)...(19): siRNA sense strand
aaacagauaucaggauuug

SEQ ID NO: 1276374 - RNA, 19 nt, Homo sapiens
  misc_RNA (1)...(19): siRNA sense strand
cuauggagcucauugguaa

SEQ ID NO: 1276375 - RNA, 19 nt, Homo sapiens
  misc_RNA (1)...(19): siRNA sense strand
aaacacaccuuuagugaag

SEQ ID NO: 1276376 - RNA, 19 nt, Homo sapiens
  misc_RNA (1)...(19): siRNA sense strand
gaacuuaaaggaucaguag

SEQ ID NO: 1276377 - RNA, 19 nt, Homo sapiens
  misc_RNA (1)...(19): siRNA sense strand
gaaaacagauaucaggauu

SEQ ID NO: 1276378 - RNA, 19 nt, Homo sapiens
  misc_RNA (1)...(19): siRNA sense strand
uaaaggaucaguagcaauu

SEQ ID NO: 1276379 - RNA, 19 nt, Homo sapiens
  misc_RNA (1)...(19): siRNA sense strand
aaaugggacuuacgaguuu

SEQ ID NO: 1276380 - RNA, 19 nt, Homo sapiens
  misc_RNA (1)...(19): siRNA sense strand
guuaucagaugcacuuuau

SEQ ID NO: 1276381 - RNA, 19 nt, Homo sapiens
  misc_RNA (1)...(19): siRNA sense strand
ugagauuggugaacgagua

SEQ ID NO: 1276382 - RNA, 19 nt, Homo sapiens
  misc_RNA (1)...(19): siRNA sense strand
gugaacgaguagauuauaa

SEQ ID NO: 1276383 - RNA, 19 nt, Homo sapiens
  misc_RNA (1)...(19): siRNA sense strand
gagagagcacgauuuauug

SEQ ID NO: 1276384 - RNA, 19 nt, Homo sapiens
  misc_RNA (1)...(19): siRNA sense strand
caaaugggacuuacgaguu

SEQ ID NO: 1276385 - RNA, 19 nt, Homo sapiens
  misc_RNA (1)...(19): siRNA sense strand
ggucauugcugugauuguu

SEQ ID NO: 1276386 - RNA, 19 nt, Homo sapiens
  misc_RNA (1)...(19): siRNA sense strand
ccagauccauuuucacuua

SEQ ID NO: 1276387 - RNA, 19 nt, Homo sapiens
  misc_RNA (1)...(19): siRNA sense strand
gaaggaauacuugacaguu

SEQ ID NO: 1276388 - RNA, 19 nt, Homo sapiens
  misc_RNA (1)...(19): siRNA sense strand
aaggaauacuugacaguuu

SEQ ID NO: 1276389 - RNA, 19 nt, Homo sapiens
  misc_RNA (1)...(19): siRNA sense strand
ucagaugacgccuguuaua

SEQ ID NO: 1276390 - RNA, 19 nt, Homo sapiens
  misc_RNA (1)...(19): siRNA sense strand
gaaaacacaccuuuaguga

SEQ ID NO: 1276391 - RNA, 19 nt, Homo sapiens
  misc_RNA (1)...(19): siRNA sense strand
gaugacgccuguuauagag

SEQ ID NO: 1276392 - RNA, 19 nt, Homo sapiens
  misc_RNA (1)...(19): siRNA sense strand
gagaaacauguccauauau

SEQ ID NO: 1276393 - RNA, 19 nt, Homo sapiens
  misc_RNA (1)...(19): siRNA sense strand
acgaguagauuauaagugu

SEQ ID NO: 1276394 - RNA, 19 nt, Homo sapiens
  misc_RNA (1)...(19): siRNA sense strand
cuacaaagcaacaguuaug

SEQ ID NO: 1276395 - RNA, 19 nt, Homo sapiens
  misc_RNA (1)...(19): siRNA sense strand
ccaccaacauuugaagcua

SEQ ID NO: 1276396 - RNA, 19 nt, Homo sapiens
  misc_RNA (1)...(19): siRNA sense strand
uauacgggauccuuuaaau

SEQ ID NO: 1276397 - RNA, 19 nt, Homo sapiens
  misc_RNA (1)...(19): siRNA sense strand
cgaguuugguuaucagaug

SEQ ID NO: 1276398 - RNA, 19 nt, Homo sapiens
  misc_RNA (1)...(19): siRNA sense strand
gaacgaguagauuauaagu

SEQ ID NO: 1276399 - RNA, 19 nt, Homo sapiens
  misc_RNA (1)...(19): siRNA sense strand
gugaggagccaccaacauu

SEQ ID NO: 1276400 - RNA, 19 nt, Homo sapiens
  misc_RNA (1)...(19): siRNA sense strand
gauggcagcgacacaauug

SEQ ID NO: 1276401 - RNA, 19 nt, Homo sapiens
  misc_RNA (1)...(19): siRNA sense strand
gcuauggagcucauuggua

SEQ ID NO: 1276402 - RNA, 19 nt, Homo sapiens
  misc_RNA (1)...(19): siRNA sense strand
gaggagccaccaacauuug

SEQ ID NO: 1276403 - RNA, 19 nt, Homo sapiens
  misc_RNA (1)...(19): siRNA sense strand
acacaccuuuagugaagua

SEQ ID NO: 1276404 - RNA, 19 nt, Homo sapiens
  misc_RNA (1)...(19): siRNA sense strand
ucucagaugacgccuguua

SEQ ID NO: 1276405 - RNA, 19 nt, Homo sapiens
  misc_RNA (1)...(19): siRNA sense strand
uagagaaacauguccauau

SEQ ID NO: 1276406 - RNA, 19 nt, Homo sapiens
  misc_RNA (1)...(19): siRNA sense strand
guuccaaagugucuuaaag

SEQ ID NO: 1276407 - RNA, 19 nt, Homo sapiens
  misc_RNA (1)...(19): siRNA sense strand
ggugaacgaguagauuaua

SEQ ID NO: 1276408 - RNA, 19 nt, Homo sapiens
  misc_RNA (1)...(19): siRNA sense strand
gaaguagaaguauuugagu

SEQ ID NO: 1276409 - RNA, 19 nt, Homo sapiens
  misc_RNA (1)...(19): siRNA sense strand
gaaacauguccauauauac

SEQ ID NO: 1276410 - RNA, 19 nt, Homo sapiens
  misc_RNA (1)...(19): siRNA sense strand
ugacgccuguuauagagaa

SEQ ID NO: 1276411 - RNA, 19 nt, Homo sapiens
  misc_RNA (1)...(19): siRNA sense strand
cgaguagauuauaagugua

SEQ ID NO: 1276412 - RNA, 19 nt, Homo sapiens
  misc_RNA (1)...(19): siRNA sense strand
gcacuuuauuuguaaugag

SEQ ID NO: 1276413 - RNA, 19 nt, Homo sapiens
  misc_RNA (1)...(19): siRNA sense strand
guagaaguauuugaguauc

SEQ ID NO: 1276414 - RNA, 19 nt, Homo sapiens
  misc_RNA (1)...(19): siRNA sense strand
guauuugaguaucuugaug

SEQ ID NO: 1276415 - RNA, 19 nt, Homo sapiens
  misc_RNA (1)...(19): siRNA sense strand
aggaauacuugacaguuug

SEQ ID NO: 1276416 - RNA, 19 nt, Homo sapiens
  misc_RNA (1)...(19): siRNA sense strand
ccaaaacccuacuaugaga

SEQ ID NO: 1276417 - RNA, 19 nt, Homo sapiens
  misc_RNA (1)...(19): siRNA sense strand
aguguaaaguggucaaaug

SEQ ID NO: 1276418 - RNA, 19 nt, Homo sapiens
  misc_RNA (1)...(19): siRNA sense strand
ccacccauacuauuuguga

SEQ ID NO: 1276419 - RNA, 19 nt, Homo sapiens
  misc_RNA (1)...(19): siRNA sense strand
caccaacauuugaagcuau

SEQ ID NO: 1276420 - RNA, 19 nt, Homo sapiens
  misc_RNA (1)...(19): siRNA sense strand
uuggagagagcacgauuua

SEQ ID NO: 1276421 - RNA, 19 nt, Homo sapiens
  misc_RNA (1)...(19): siRNA sense strand
gguuaucagaugcacuuua

SEQ ID NO: 1276422 - RNA, 19 nt, Homo sapiens
  misc_RNA (1)...(19): siRNA sense strand
ugaggagccaccaacauuu

SEQ ID NO: 1276423 - RNA, 19 nt, Homo sapiens
  misc_RNA (1)...(19): siRNA sense strand
ggaaggaauacuugacagu

SEQ ID NO: 1276424 - RNA, 19 nt, Homo sapiens
  misc_RNA (1)...(19): siRNA sense strand
gaggaaggaauacuugaca

SEQ ID NO: 1276425 - RNA, 19 nt, Homo sapiens
  misc_RNA (1)...(19): siRNA sense strand
ccaguuccaaagugucuua

SEQ ID NO: 1276426 - RNA, 19 nt, Homo sapiens
  misc_RNA (1)...(19): siRNA sense strand
ugaguaucuugaugcagua

SEQ ID NO: 1276427 - RNA, 19 nt, Homo sapiens
  misc_RNA (1)...(19): siRNA sense strand
caccuuuagugaaguagaa

SEQ ID NO: 1276428 - RNA, 19 nt, Homo sapiens
  misc_RNA (1)...(19): siRNA sense strand
acagauaucaggauuugga

SEQ ID NO: 1276429 - RNA, 19 nt, Homo sapiens
  misc_RNA (1)...(19): siRNA sense strand
ucauugcugugauuguuau

SEQ ID NO: 1276430 - RNA, 19 nt, Homo sapiens
  misc_RNA (1)...(19): siRNA sense strand
ucagaugcacuuuauuugu

SEQ ID NO: 1276431 - RNA, 19 nt, Homo sapiens
  misc_RNA (1)...(19): siRNA sense strand
gugcugcuccagaguguaa

SEQ ID NO: 1276432 - RNA, 19 nt, Homo sapiens
  misc_RNA (1)...(19): siRNA sense strand
ggaaaacacaccuuuagug

SEQ ID NO: 1276433 - RNA, 19 nt, Homo sapiens
  misc_RNA (1)...(19): siRNA sense strand
aaggaucaguagcaauuug

SEQ ID NO: 1276434 - RNA, 19 nt, Homo sapiens
  misc_RNA (1)...(19): siRNA sense strand
uauauacgggauccuuuaa

SEQ ID NO: 1276435 - RNA, 19 nt, Homo sapiens
  misc_RNA (1)...(19): siRNA sense strand
ugaaguagaaguauuugag

SEQ ID NO: 1276436 - RNA, 19 nt, Homo sapiens
  misc_RNA (1)...(19): siRNA sense strand
cuugacaguuuggauguuu

SEQ ID NO: 1276437 - RNA, 19 nt, Homo sapiens
  misc_RNA (1)...(19): siRNA sense strand
cauauauacgggauccuuu

SEQ ID NO: 1276438 - RNA, 19 nt, Homo sapiens
  misc_RNA (1)...(19): siRNA sense strand
auauauacgggauccuuua

SEQ ID NO: 1276439 - RNA, 19 nt, Homo sapiens
  misc_RNA (1)...(19): siRNA sense strand
cuuaaaggaucaguagcaa

SEQ ID NO: 1276440 - RNA, 19 nt, Homo sapiens
  misc_RNA (1)...(19): siRNA sense strand
uaaaccugaggaaggaaua

SEQ ID NO: 1276441 - RNA, 19 nt, Homo sapiens
  misc_RNA (1)...(19): siRNA sense strand
agaugacgccuguuauaga

SEQ ID NO: 1276442 - RNA, 19 nt, Homo sapiens
  misc_RNA (1)...(19): siRNA sense strand
ugugauuguuauugccaua

SEQ ID NO: 1276443 - RNA, 19 nt, Homo sapiens
  misc_RNA (1)...(19): siRNA sense strand
gagagcacgauuuauugug

SEQ ID NO: 1276444 - RNA, 19 nt, Homo sapiens
  misc_RNA (1)...(19): siRNA sense strand
gaaguauuugaguaucuug

SEQ ID NO: 1276445 - RNA, 19 nt, Homo sapiens
  misc_RNA (1)...(19): siRNA sense strand
ggcuaccugucucagauga

SEQ ID NO: 1276446 - RNA, 19 nt, Homo sapiens
  misc_RNA (1)...(19): siRNA sense strand
gauaucaggauuuggaaaa

SEQ ID NO: 1276447 - RNA, 19 nt, Homo sapiens
  misc_RNA (1)...(19): siRNA sense strand
ccucuugccacccauacua

SEQ ID NO: 1276448 - RNA, 19 nt, Homo sapiens
  misc_RNA (1)...(19): siRNA sense strand
ccaugguguugcugcugua

SEQ ID NO: 1276449 - RNA, 19 nt, Homo sapiens
  misc_RNA (1)...(19): siRNA sense strand
cagaugacgccuguuauag

SEQ ID NO: 1276450 - RNA, 19 nt, Homo sapiens
  misc_RNA (1)...(19): siRNA sense strand
uuggugaacgaguagauua

SEQ ID NO: 1276451 - RNA, 19 nt, Homo sapiens
  misc_RNA (1)...(19): siRNA sense strand
gucauugcugugauuguua

SEQ ID NO: 1276452 - RNA, 19 nt, Homo sapiens
  misc_RNA (1)...(19): siRNA sense strand
ggagccaccaacauuugaa

SEQ ID NO: 1276453 - RNA, 19 nt, Homo sapiens
  misc_RNA (1)...(19): siRNA sense strand
gcgcuuuccuggguugcuu

SEQ ID NO: 1276454 - RNA, 19 nt, Homo sapiens
  misc_RNA (1)...(19): siRNA sense strand
uacuacaaagcaacaguua

SEQ ID NO: 1276455 - RNA, 19 nt, Homo sapiens
  misc_RNA (1)...(19): siRNA sense strand
cuugaugcaguaacuuaua

SEQ ID NO: 1276456 - RNA, 19 nt, Homo sapiens
  misc_RNA (1)...(19): siRNA sense strand
aaacauguccauauauacg

SEQ ID NO: 1276457 - RNA, 19 nt, Homo sapiens
  misc_RNA (1)...(19): siRNA sense strand
guguaaaguggucaaaugu

SEQ ID NO: 1276458 - RNA, 19 nt, Homo sapiens
  misc_RNA (1)...(19): siRNA sense strand
cuuacgaguuugguuauca

SEQ ID NO: 1276459 - RNA, 19 nt, Homo sapiens
  misc_RNA (1)...(19): siRNA sense strand
uacgggauccuuuaaaugg

SEQ ID NO: 1276460 - RNA, 19 nt, Homo sapiens
  misc_RNA (1)...(19): siRNA sense strand
aaccaaaacccuacuauga

SEQ ID NO: 1276461 - RNA, 19 nt, Homo sapiens
  misc_RNA (1)...(19): siRNA sense strand
cccaauaugugaaaagguu

SEQ ID NO: 1276462 - RNA, 19 nt, Homo sapiens
  misc_RNA (1)...(19): siRNA sense strand
cgauggcagcgacacaauu

SEQ ID NO: 1276463 - RNA, 19 nt, Homo sapiens
  misc_RNA (1)...(19): siRNA sense strand
gauccauuuucacuuauug

SEQ ID NO: 1276464 - RNA, 19 nt, Homo sapiens
  misc_RNA (1)...(19): siRNA sense strand
uugaugcaguaacuuauag

SEQ ID NO: 1276465 - RNA, 19 nt, Homo sapiens
  misc_RNA (1)...(19): siRNA sense strand
guaucuugaugcaguaacu

SEQ ID NO: 1276466 - RNA, 19 nt, Homo sapiens
  misc_RNA (1)...(19): siRNA sense strand
caacauuugaagcuaugga

SEQ ID NO: 1276467 - RNA, 19 nt, Homo sapiens
  misc_RNA (1)...(19): siRNA sense strand
gagauuggugaacgaguag

SEQ ID NO: 1276468 - RNA, 19 nt, Homo sapiens
  misc_RNA (1)...(19): siRNA sense strand
ggagagagcacgauuuauu

SEQ ID NO: 1276469 - RNA, 19 nt, Homo sapiens
  misc_RNA (1)...(19): siRNA sense strand
agagaaacauguccauaua

SEQ ID NO: 1276470 - RNA, 19 nt, Homo sapiens
  misc_RNA (1)...(19): siRNA sense strand
cagaugcacuuuauuugua

SEQ ID NO: 1276471 - RNA, 19 nt, Homo sapiens
  misc_RNA (1)...(19): siRNA sense strand
ggacuuacgaguuugguua

SEQ ID NO: 1276472 - RNA, 19 nt, Homo sapiens
  misc_RNA (1)...(19): siRNA sense strand
aaacagauaucaggauuug

SEQ ID NO: 1276473 - RNA, 19 nt, Homo sapiens
  misc_RNA (1)...(19): siRNA sense strand
cuauggagcucauugguaa

SEQ ID NO: 1276474 - RNA, 19 nt, Homo sapiens
  misc_RNA (1)...(19): siRNA sense strand
aaacacaccuuuagugaag

SEQ ID NO: 1276475 - RNA, 19 nt, Homo sapiens
  misc_RNA (1)...(19): siRNA sense strand
gaacuuaaaggaucaguag

SEQ ID NO: 1276476 - RNA, 19 nt, Homo sapiens
  misc_RNA (1)...(19): siRNA sense strand
gaaaacagauaucaggauu

SEQ ID NO: 1276477 - RNA, 19 nt, Homo sapiens
  misc_RNA (1)...(19): siRNA sense strand
uaaaggaucaguagcaauu

SEQ ID NO: 1276478 - RNA, 19 nt, Homo sapiens
  misc_RNA (1)...(19): siRNA sense strand
aaaugggacuuacgaguuu

SEQ ID NO: 1276479 - RNA, 19 nt, Homo sapiens
  misc_RNA (1)...(19): siRNA sense strand
guuaucagaugcacuuuau

SEQ ID NO: 1276480 - RNA, 19 nt, Homo sapiens
  misc_RNA (1)...(19): siRNA sense strand
gagcugaauaugccacuua

SEQ ID NO: 1276481 - RNA, 19 nt, Homo sapiens
  misc_RNA (1)...(19): siRNA sense strand
ugagauuggugaacgagua

SEQ ID NO: 1276482 - RNA, 19 nt, Homo sapiens
  misc_RNA (1)...(19): siRNA sense strand
gugaacgaguagauuauaa

SEQ ID NO: 1276483 - RNA, 19 nt, Homo sapiens
  misc_RNA (1)...(19): siRNA sense strand
gagagagcacgauuuauug

SEQ ID NO: 1276484 - RNA, 19 nt, Homo sapiens
  misc_RNA (1)...(19): siRNA sense strand
caaaugggacuuacgaguu

SEQ ID NO: 1276485 - RNA, 19 nt, Homo sapiens
  misc_RNA (1)...(19): siRNA sense strand
ggucauugcugugauuguu

SEQ ID NO: 1276486 - RNA, 19 nt, Homo sapiens
  misc_RNA (1)...(19): siRNA sense strand
ccagauccauuuucacuua

SEQ ID NO: 1276487 - RNA, 19 nt, Homo sapiens
  misc_RNA (1)...(19): siRNA sense strand
gaaggaauacuugacaguu

SEQ ID NO: 1276488 - RNA, 19 nt, Homo sapiens
  misc_RNA (1)...(19): siRNA sense strand
aaggaauacuugacaguuu

SEQ ID NO: 1276489 - RNA, 19 nt, Homo sapiens
  misc_RNA (1)...(19): siRNA sense strand
ucagaugacgccuguuaua

SEQ ID NO: 1276490 - RNA, 19 nt, Homo sapiens
  misc_RNA (1)...(19): siRNA sense strand
gaaaacacaccuuuaguga

SEQ ID NO: 1276491 - RNA, 19 nt, Homo sapiens
  misc_RNA (1)...(19): siRNA sense strand
gaugacgccuguuauagag

SEQ ID NO: 1276492 - RNA, 19 nt, Homo sapiens
  misc_RNA (1)...(19): siRNA sense strand
gagaaacauguccauauau

SEQ ID NO: 1276493 - RNA, 19 nt, Homo sapiens
  misc_RNA (1)...(19): siRNA sense strand
ccacuuaccagacuaaauc

SEQ ID NO: 1276494 - RNA, 19 nt, Homo sapiens
  misc_RNA (1)...(19): siRNA sense strand
acgaguagauuauaagugu

SEQ ID NO: 1276495 - RNA, 19 nt, Homo sapiens
  misc_RNA (1)...(19): siRNA sense strand
cuacaaagcaacaguuaug

SEQ ID NO: 1276496 - RNA, 19 nt, Homo sapiens
  misc_RNA (1)...(19): siRNA sense strand
ccaccaacauuugaagcua

SEQ ID NO: 1276497 - RNA, 19 nt, Homo sapiens
  misc_RNA (1)...(19): siRNA sense strand
uauacgggauccuuuaaau

SEQ ID NO: 1276498 - RNA, 19 nt, Homo sapiens
  misc_RNA (1)...(19): siRNA sense strand
cgaguuugguuaucagaug

SEQ ID NO: 1276499 - RNA, 19 nt, Homo sapiens
  misc_RNA (1)...(19): siRNA sense strand
gaacgaguagauuauaagu

SEQ ID NO: 1276500 - RNA, 19 nt, Homo sapiens
  misc_RNA (1)...(19): siRNA sense strand
gugaggagccaccaacauu

SEQ ID NO: 1276501 - RNA, 19 nt, Homo sapiens
  misc_RNA (1)...(19): siRNA sense strand
gauggcagcgacacaauug

SEQ ID NO: 1276502 - RNA, 19 nt, Homo sapiens
  misc_RNA (1)...(19): siRNA sense strand
ucucagaugacgccuguua

SEQ ID NO: 1276503 - RNA, 19 nt, Homo sapiens
  misc_RNA (1)...(19): siRNA sense strand
gaggagccaccaacauuug

SEQ ID NO: 1276504 - RNA, 19 nt, Homo sapiens
  misc_RNA (1)...(19): siRNA sense strand
gcuauggagcucauuggua

SEQ ID NO: 1276505 - RNA, 19 nt, Homo sapiens
  misc_RNA (1)...(19): siRNA sense strand
acacaccuuuagugaagua

SEQ ID NO: 1276506 - RNA, 19 nt, Homo sapiens
  misc_RNA (1)...(19): siRNA sense strand
uagagaaacauguccauau

SEQ ID NO: 1276507 - RNA, 19 nt, Homo sapiens
  misc_RNA (1)...(19): siRNA sense strand
guuccaaagugucuuaaag

SEQ ID NO: 1276508 - RNA, 19 nt, Homo sapiens
  misc_RNA (1)...(19): siRNA sense strand
ggugaacgaguagauuaua

SEQ ID NO: 1276509 - RNA, 19 nt, Homo sapiens
  misc_RNA (1)...(19): siRNA sense strand
gaaguagaaguauuugagu

SEQ ID NO: 1276510 - RNA, 19 nt, Homo sapiens
  misc_RNA (1)...(19): siRNA sense strand
gaaacauguccauauauac

SEQ ID NO: 1276511 - RNA, 19 nt, Homo sapiens
  misc_RNA (1)...(19): siRNA sense strand
ugacgccuguuauagagaa

SEQ ID NO: 1276512 - RNA, 19 nt, Homo sapiens
  misc_RNA (1)...(19): siRNA sense strand
cgaguagauuauaagugua

SEQ ID NO: 1276513 - RNA, 19 nt, Homo sapiens
  misc_RNA (1)...(19): siRNA sense strand
gcacuuuauuuguaaugag

SEQ ID NO: 1276514 - RNA, 19 nt, Homo sapiens
  misc_RNA (1)...(19): siRNA sense strand
guagaaguauuugaguauc

SEQ ID NO: 1276515 - RNA, 19 nt, Homo sapiens
  misc_RNA (1)...(19): siRNA sense strand
guauuugaguaucuugaug

SEQ ID NO: 1276516 - RNA, 19 nt, Homo sapiens
  misc_RNA (1)...(19): siRNA sense strand
aggaauacuugacaguuug

SEQ ID NO: 1276517 - RNA, 19 nt, Homo sapiens
  misc_RNA (1)...(19): siRNA sense strand
ccaaaacccuacuaugaga

SEQ ID NO: 1276518 - RNA, 19 nt, Homo sapiens
  misc_RNA (1)...(19): siRNA sense strand
aguguaaaguggucaaaug

SEQ ID NO: 1276519 - RNA, 19 nt, Homo sapiens
  misc_RNA (1)...(19): siRNA sense strand
ccacccauacuauuuguga

SEQ ID NO: 1276520 - RNA, 19 nt, Homo sapiens
  misc_RNA (1)...(19): siRNA sense strand
uuggagagagcacgauuua

SEQ ID NO: 1276521 - RNA, 19 nt, Homo sapiens
  misc_RNA (1)...(19): siRNA sense strand
gguuaucagaugcacuuua

SEQ ID NO: 1276522 - RNA, 19 nt, Homo sapiens
  misc_RNA (1)...(19): siRNA sense strand
caccaacauuugaagcuau

SEQ ID NO: 1276523 - RNA, 19 nt, Homo sapiens
  misc_RNA (1)...(19): siRNA sense strand
ugaggagccaccaacauuu

SEQ ID NO: 1276524 - RNA, 19 nt, Homo sapiens
  misc_RNA (1)...(19): siRNA sense strand
ggaaggaauacuugacagu

SEQ ID NO: 1276525 - RNA, 19 nt, Homo sapiens
  misc_RNA (1)...(19): siRNA sense strand
gaggaaggaauacuugaca

SEQ ID NO: 1276526 - RNA, 19 nt, Homo sapiens
  misc_RNA (1)...(19): siRNA sense strand
ccaguuccaaagugucuua

SEQ ID NO: 1276527 - RNA, 19 nt, Homo sapiens
  misc_RNA (1)...(19): siRNA sense strand
ugaguaucuugaugcagua

SEQ ID NO: 1276528 - RNA, 19 nt, Homo sapiens
  misc_RNA (1)...(19): siRNA sense strand
caccuuuagugaaguagaa

SEQ ID NO: 1276529 - RNA, 19 nt, Homo sapiens
  misc_RNA (1)...(19): siRNA sense strand
acagauaucaggauuugga

SEQ ID NO: 1276530 - RNA, 19 nt, Homo sapiens
  misc_RNA (1)...(19): siRNA sense strand
ucauugcugugauuguuau

SEQ ID NO: 1276531 - RNA, 19 nt, Homo sapiens
  misc_RNA (1)...(19): siRNA sense strand
ucagaugcacuuuauuugu

SEQ ID NO: 1276532 - RNA, 19 nt, Homo sapiens
  misc_RNA (1)...(19): siRNA sense strand
gugcugcuccagaguguaa

SEQ ID NO: 1276533 - RNA, 19 nt, Homo sapiens
  misc_RNA (1)...(19): siRNA sense strand
ggaaaacacaccuuuagug

SEQ ID NO: 1276534 - RNA, 19 nt, Homo sapiens
  misc_RNA (1)...(19): siRNA sense strand
aaggaucaguagcaauuug

SEQ ID NO: 1276535 - RNA, 19 nt, Homo sapiens
  misc_RNA (1)...(19): siRNA sense strand
uauauacgggauccuuuaa

SEQ ID NO: 1276536 - RNA, 19 nt, Homo sapiens
  misc_RNA (1)...(19): siRNA sense strand
ugaaguagaaguauuugag

SEQ ID NO: 1276537 - RNA, 19 nt, Homo sapiens
  misc_RNA (1)...(19): siRNA sense strand
cuugacaguuuggauguuu

SEQ ID NO: 1276538 - RNA, 19 nt, Homo sapiens
  misc_RNA (1)...(19): siRNA sense strand
cauauauacgggauccuuu

SEQ ID NO: 1276539 - RNA, 19 nt, Homo sapiens
  misc_RNA (1)...(19): siRNA sense strand
auauauacgggauccuuua

SEQ ID NO: 1276540 - RNA, 19 nt, Homo sapiens
  misc_RNA (1)...(19): siRNA sense strand
cuuaaaggaucaguagcaa

SEQ ID NO: 1276541 - RNA, 19 nt, Homo sapiens
  misc_RNA (1)...(19): siRNA sense strand
uaaaccugaggaaggaaua

SEQ ID NO: 1276542 - RNA, 19 nt, Homo sapiens
  misc_RNA (1)...(19): siRNA sense strand
agaugacgccuguuauaga

SEQ ID NO: 1276543 - RNA, 19 nt, Homo sapiens
  misc_RNA (1)...(19): siRNA sense strand
ugugauuguuauugccaua

SEQ ID NO: 1276544 - RNA, 19 nt, Homo sapiens
  misc_RNA (1)...(19): siRNA sense strand
gagagcacgauuuauugug

SEQ ID NO: 1276545 - RNA, 19 nt, Homo sapiens
  misc_RNA (1)...(19): siRNA sense strand
gaaguauuugaguaucuug

SEQ ID NO: 1276546 - RNA, 19 nt, Homo sapiens
  misc_RNA (1)...(19): siRNA sense strand
ggcuaccugucucagauga

SEQ ID NO: 1276547 - RNA, 19 nt, Homo sapiens
  misc_RNA (1)...(19): siRNA sense strand
gauaucaggauuuggaaaa

SEQ ID NO: 1276548 - RNA, 19 nt, Homo sapiens
  misc_RNA (1)...(19): siRNA sense strand
ccucuugccacccauacua

SEQ ID NO: 1276549 - RNA, 19 nt, Homo sapiens
  misc_RNA (1)...(19): siRNA sense strand
ccaugguguugcugcugua

SEQ ID NO: 1276550 - RNA, 19 nt, Homo sapiens
  misc_RNA (1)...(19): siRNA sense strand
cagaugacgccuguuauag

SEQ ID NO: 1276551 - RNA, 19 nt, Homo sapiens
  misc_RNA (1)...(19): siRNA sense strand
cagaugguggagcugaaua

SEQ ID NO: 1276552 - RNA, 19 nt, Homo sapiens
  misc_RNA (1)...(19): siRNA sense strand
gucauugcugugauuguua

SEQ ID NO: 1276553 - RNA, 19 nt, Homo sapiens
  misc_RNA (1)...(19): siRNA sense strand
ggagccaccaacauuugaa

SEQ ID NO: 1276554 - RNA, 19 nt, Homo sapiens
  misc_RNA (1)...(19): siRNA sense strand
uuggugaacgaguagauua

SEQ ID NO: 1276555 - RNA, 19 nt, Homo sapiens
  misc_RNA (1)...(19): siRNA sense strand
gcgcuuuccuggguugcuu

SEQ ID NO: 1276556 - RNA, 19 nt, Homo sapiens
  misc_RNA (1)...(19): siRNA sense strand
uacuacaaagcaacaguua

SEQ ID NO: 1276557 - RNA, 19 nt, Homo sapiens
  misc_RNA (1)...(19): siRNA sense strand
cuugaugcaguaacuuaua

SEQ ID NO: 1276558 - RNA, 19 nt, Homo sapiens
  misc_RNA (1)...(19): siRNA sense strand
aaacauguccauauauacg

SEQ ID NO: 1276559 - RNA, 19 nt, Homo sapiens
  misc_RNA (1)...(19): siRNA sense strand
guguaaaguggucaaaugu

SEQ ID NO: 1276560 - RNA, 19 nt, Homo sapiens
  misc_RNA (1)...(19): siRNA sense strand
cuuacgaguuugguuauca

SEQ ID NO: 1276561 - RNA, 19 nt, Homo sapiens
  misc_RNA (1)...(19): siRNA sense strand
uacgggauccuuuaaaugg

SEQ ID NO: 1276562 - RNA, 19 nt, Homo sapiens
  misc_RNA (1)...(19): siRNA sense strand
gcagaugguggagcugaau

SEQ ID NO: 1276563 - RNA, 19 nt, Homo sapiens
  misc_RNA (1)...(19): siRNA sense strand
aaccaaaacccuacuauga

SEQ ID NO: 1276564 - RNA, 19 nt, Homo sapiens
  misc_RNA (1)...(19): siRNA sense strand
uugaugcaguaacuuauag

SEQ ID NO: 1276565 - RNA, 19 nt, Homo sapiens
  misc_RNA (1)...(19): siRNA sense strand
ggagcugaauaugccacuu

SEQ ID NO: 1276566 - RNA, 19 nt, Homo sapiens
  misc_RNA (1)...(19): siRNA sense strand
cgauggcagcgacacaauu

SEQ ID NO: 1276567 - RNA, 19 nt, Homo sapiens
  misc_RNA (1)...(19): siRNA sense strand
gauccauuuucacuuauug

SEQ ID NO: 1276568 - RNA, 19 nt, Homo sapiens
  misc_RNA (1)...(19): siRNA sense strand
ggagagagcacgauuuauu

SEQ ID NO: 1276569 - RNA, 19 nt, Homo sapiens
  misc_RNA (1)...(19): siRNA sense strand
agagaaacauguccauaua

SEQ ID NO: 1276570 - RNA, 19 nt, Homo sapiens
  misc_RNA (1)...(19): siRNA sense strand
cagaugcacuuuauuugua

SEQ ID NO: 1276571 - RNA, 19 nt, Homo sapiens
  misc_RNA (1)...(19): siRNA sense strand
ggacuuacgaguuugguua

SEQ ID NO: 1276572 - RNA, 19 nt, Homo sapiens
  misc_RNA (1)...(19): siRNA sense strand
aaacagauaucaggauuug

SEQ ID NO: 1276573 - RNA, 19 nt, Homo sapiens
  misc_RNA (1)...(19): siRNA sense strand
cuauggagcucauugguaa

SEQ ID NO: 1276574 - RNA, 19 nt, Homo sapiens
  misc_RNA (1)...(19): siRNA sense strand
aaacacaccuuuagugaag

SEQ ID NO: 1276575 - RNA, 19 nt, Homo sapiens
  misc_RNA (1)...(19): siRNA sense strand
gaacuuaaaggaucaguag

SEQ ID NO: 1276576 - RNA, 19 nt, Homo sapiens
  misc_RNA (1)...(19): siRNA sense strand
gaaaacagauaucaggauu

SEQ ID NO: 1276577 - RNA, 19 nt, Homo sapiens
  misc_RNA (1)...(19): siRNA sense strand
uaaaggaucaguagcaauu

SEQ ID NO: 1276578 - RNA, 19 nt, Homo sapiens
  misc_RNA (1)...(19): siRNA sense strand
aaaugggacuuacgaguuu

SEQ ID NO: 1276579 - RNA, 19 nt, Homo sapiens
  misc_RNA (1)...(19): siRNA sense strand
guuaucagaugcacuuuau

SEQ ID NO: 1276580 - RNA, 19 nt, Homo sapiens
  misc_RNA (1)...(19): siRNA sense strand
ugagauuggugaacgagua

SEQ ID NO: 1276581 - RNA, 19 nt, Homo sapiens
  misc_RNA (1)...(19): siRNA sense strand
gugaacgaguagauuauaa

SEQ ID NO: 1276582 - RNA, 19 nt, Homo sapiens
  misc_RNA (1)...(19): siRNA sense strand
gagagagcacgauuuauug

SEQ ID NO: 1276583 - RNA, 19 nt, Homo sapiens
  misc_RNA (1)...(19): siRNA sense strand
caaaugggacuuacgaguu

SEQ ID NO: 1276584 - RNA, 19 nt, Homo sapiens
  misc_RNA (1)...(19): siRNA sense strand
ggucauugcugugauuguu

SEQ ID NO: 1276585 - RNA, 19 nt, Homo sapiens
  misc_RNA (1)...(19): siRNA sense strand
ccagauccauuuucacuua

SEQ ID NO: 1276586 - RNA, 19 nt, Homo sapiens
  misc_RNA (1)...(19): siRNA sense strand
gaaggaauacuugacaguu

SEQ ID NO: 1276587 - RNA, 19 nt, Homo sapiens
  misc_RNA (1)...(19): siRNA sense strand
aaggaauacuugacaguuu

SEQ ID NO: 1276588 - RNA, 19 nt, Homo sapiens
  misc_RNA (1)...(19): siRNA sense strand
ucagaugacgccuguuaua

SEQ ID NO: 1276589 - RNA, 19 nt, Homo sapiens
  misc_RNA (1)...(19): siRNA sense strand
gaaaacacaccuuuaguga

SEQ ID NO: 1276590 - RNA, 19 nt, Homo sapiens
  misc_RNA (1)...(19): siRNA sense strand
gaugacgccuguuauagag

SEQ ID NO: 1276591 - RNA, 19 nt, Homo sapiens
  misc_RNA (1)...(19): siRNA sense strand
gagaaacauguccauauau

SEQ ID NO: 1276592 - RNA, 19 nt, Homo sapiens
  misc_RNA (1)...(19): siRNA sense strand
acgaguagauuauaagugu

SEQ ID NO: 1276593 - RNA, 19 nt, Homo sapiens
  misc_RNA (1)...(19): siRNA sense strand
cuacaaagcaacaguuaug

SEQ ID NO: 1276594 - RNA, 19 nt, Homo sapiens
  misc_RNA (1)...(19): siRNA sense strand
ccaccaacauuugaagcua

SEQ ID NO: 1276595 - RNA, 19 nt, Homo sapiens
  misc_RNA (1)...(19): siRNA sense strand
uauacgggauccuuuaaau

SEQ ID NO: 1276596 - RNA, 19 nt, Homo sapiens
  misc_RNA (1)...(19): siRNA sense strand
cgaguuugguuaucagaug

SEQ ID NO: 1276597 - RNA, 19 nt, Homo sapiens
  misc_RNA (1)...(19): siRNA sense strand
gaacgaguagauuauaagu

SEQ ID NO: 1276598 - RNA, 19 nt, Homo sapiens
  misc_RNA (1)...(19): siRNA sense strand
gugaggagccaccaacauu

SEQ ID NO: 1276599 - RNA, 19 nt, Homo sapiens
  misc_RNA (1)...(19): siRNA sense strand
gauggcagcgacacaauug

SEQ ID NO: 1276600 - RNA, 19 nt, Homo sapiens
  misc_RNA (1)...(19): siRNA sense strand
gcuauggagcucauuggua

SEQ ID NO: 1276601 - RNA, 19 nt, Homo sapiens
  misc_RNA (1)...(19): siRNA sense strand
gaggagccaccaacauuug

SEQ ID NO: 1276602 - RNA, 19 nt, Homo sapiens
  misc_RNA (1)...(19): siRNA sense strand
acacaccuuuagugaagua

SEQ ID NO: 1276603 - RNA, 19 nt, Homo sapiens
  misc_RNA (1)...(19): siRNA sense strand
ucucagaugacgccuguua

SEQ ID NO: 1276604 - RNA, 19 nt, Homo sapiens
  misc_RNA (1)...(19): siRNA sense strand
uagagaaacauguccauau

SEQ ID NO: 1276605 - RNA, 19 nt, Homo sapiens
  misc_RNA (1)...(19): siRNA sense strand
guuccaaagugucuuaaag

SEQ ID NO: 1276606 - RNA, 19 nt, Homo sapiens
  misc_RNA (1)...(19): siRNA sense strand
ggugaacgaguagauuaua

SEQ ID NO: 1276607 - RNA, 19 nt, Homo sapiens
  misc_RNA (1)...(19): siRNA sense strand
gaaguagaaguauuugagu

SEQ ID NO: 1276608 - RNA, 19 nt, Homo sapiens
  misc_RNA (1)...(19): siRNA sense strand
gaaacauguccauauauac

SEQ ID NO: 1276609 - RNA, 19 nt, Homo sapiens
  misc_RNA (1)...(19): siRNA sense strand
ugacgccuguuauagagaa

SEQ ID NO: 1276610 - RNA, 19 nt, Homo sapiens
  misc_RNA (1)...(19): siRNA sense strand
cgaguagauuauaagugua

SEQ ID NO: 1276611 - RNA, 19 nt, Homo sapiens
  misc_RNA (1)...(19): siRNA sense strand
gcacuuuauuuguaaugag

SEQ ID NO: 1276612 - RNA, 19 nt, Homo sapiens
  misc_RNA (1)...(19): siRNA sense strand
guagaaguauuugaguauc

SEQ ID NO: 1276613 - RNA, 19 nt, Homo sapiens
  misc_RNA (1)...(19): siRNA sense strand
guauuugaguaucuugaug

SEQ ID NO: 1276614 - RNA, 19 nt, Homo sapiens
  misc_RNA (1)...(19): siRNA sense strand
aggaauacuugacaguuug

SEQ ID NO: 1276615 - RNA, 19 nt, Homo sapiens
  misc_RNA (1)...(19): siRNA sense strand
ccaaaacccuacuaugaga

SEQ ID NO: 1276616 - RNA, 19 nt, Homo sapiens
  misc_RNA (1)...(19): siRNA sense strand
aguguaaaguggucaaaug

SEQ ID NO: 1276617 - RNA, 19 nt, Homo sapiens
  misc_RNA (1)...(19): siRNA sense strand
ccacccauacuauuuguga

SEQ ID NO: 1276618 - RNA, 19 nt, Homo sapiens
  misc_RNA (1)...(19): siRNA sense strand
caccaacauuugaagcuau

SEQ ID NO: 1276619 - RNA, 19 nt, Homo sapiens
  misc_RNA (1)...(19): siRNA sense strand
uuggagagagcacgauuua

SEQ ID NO: 1276620 - RNA, 19 nt, Homo sapiens
  misc_RNA (1)...(19): siRNA sense strand
gguuaucagaugcacuuua

SEQ ID NO: 1276621 - RNA, 19 nt, Homo sapiens
  misc_RNA (1)...(19): siRNA sense strand
ugaggagccaccaacauuu

SEQ ID NO: 1276622 - RNA, 19 nt, Homo sapiens
  misc_RNA (1)...(19): siRNA sense strand
ggaaggaauacuugacagu

SEQ ID NO: 1276623 - RNA, 19 nt, Homo sapiens
  misc_RNA (1)...(19): siRNA sense strand
gaggaaggaauacuugaca

SEQ ID NO: 1276624 - RNA, 19 nt, Homo sapiens
  misc_RNA (1)...(19): siRNA sense strand
ccaguuccaaagugucuua

SEQ ID NO: 1276625 - RNA, 19 nt, Homo sapiens
  misc_RNA (1)...(19): siRNA sense strand
ugaguaucuugaugcagua

SEQ ID NO: 1276626 - RNA, 19 nt, Homo sapiens
  misc_RNA (1)...(19): siRNA sense strand
caccuuuagugaaguagaa

SEQ ID NO: 1276627 - RNA, 19 nt, Homo sapiens
  misc_RNA (1)...(19): siRNA sense strand
acagauaucaggauuugga

SEQ ID NO: 1276628 - RNA, 19 nt, Homo sapiens
  misc_RNA (1)...(19): siRNA sense strand
ucauugcugugauuguuau

SEQ ID NO: 1276629 - RNA, 19 nt, Homo sapiens
  misc_RNA (1)...(19): siRNA sense strand
ucagaugcacuuuauuugu

SEQ ID NO: 1276630 - RNA, 19 nt, Homo sapiens
  misc_RNA (1)...(19): siRNA sense strand
gugcugcuccagaguguaa

SEQ ID NO: 1276631 - RNA, 19 nt, Homo sapiens
  misc_RNA (1)...(19): siRNA sense strand
ggaaaacacaccuuuagug

SEQ ID NO: 1276632 - RNA, 19 nt, Homo sapiens
  misc_RNA (1)...(19): siRNA sense strand
aaggaucaguagcaauuug

SEQ ID NO: 1276633 - RNA, 19 nt, Homo sapiens
  misc_RNA (1)...(19): siRNA sense strand
uauauacgggauccuuuaa

SEQ ID NO: 1276634 - RNA, 19 nt, Homo sapiens
  misc_RNA (1)...(19): siRNA sense strand
ugaaguagaaguauuugag

SEQ ID NO: 1276635 - RNA, 19 nt, Homo sapiens
  misc_RNA (1)...(19): siRNA sense strand
cuugacaguuuggauguuu

SEQ ID NO: 1276636 - RNA, 19 nt, Homo sapiens
  misc_RNA (1)...(19): siRNA sense strand
cauauauacgggauccuuu

SEQ ID NO: 1276637 - RNA, 19 nt, Homo sapiens
  misc_RNA (1)...(19): siRNA sense strand
auauauacgggauccuuua

SEQ ID NO: 1276638 - RNA, 19 nt, Homo sapiens
  misc_RNA (1)...(19): siRNA sense strand
cuuaaaggaucaguagcaa

SEQ ID NO: 1276639 - RNA, 19 nt, Homo sapiens
  misc_RNA (1)...(19): siRNA sense strand
uaaaccugaggaaggaaua

SEQ ID NO: 1276640 - RNA, 19 nt, Homo sapiens
  misc_RNA (1)...(19): siRNA sense strand
agaugacgccuguuauaga

SEQ ID NO: 1276641 - RNA, 19 nt, Homo sapiens
  misc_RNA (1)...(19): siRNA sense strand
ugugauuguuauugccaua

SEQ ID NO: 1276642 - RNA, 19 nt, Homo sapiens
  misc_RNA (1)...(19): siRNA sense strand
gagagcacgauuuauugug

SEQ ID NO: 1276643 - RNA, 19 nt, Homo sapiens
  misc_RNA (1)...(19): siRNA sense strand
gaaguauuugaguaucuug

SEQ ID NO: 1276644 - RNA, 19 nt, Homo sapiens
  misc_RNA (1)...(19): siRNA sense strand
ggcuaccugucucagauga

SEQ ID NO: 1276645 - RNA, 19 nt, Homo sapiens
  misc_RNA (1)...(19): siRNA sense strand
gauaucaggauuuggaaaa

SEQ ID NO: 1276646 - RNA, 19 nt, Homo sapiens
  misc_RNA (1)...(19): siRNA sense strand
ccucuugccacccauacua

SEQ ID NO: 1276647 - RNA, 19 nt, Homo sapiens
  misc_RNA (1)...(19): siRNA sense strand
ccaugguguugcugcugua

SEQ ID NO: 1276648 - RNA, 19 nt, Homo sapiens
  misc_RNA (1)...(19): siRNA sense strand
cagaugacgccuguuauag

SEQ ID NO: 1276649 - RNA, 19 nt, Homo sapiens
  misc_RNA (1)...(19): siRNA sense strand
uuggugaacgaguagauua

SEQ ID NO: 1276650 - RNA, 19 nt, Homo sapiens
  misc_RNA (1)...(19): siRNA sense strand
gucauugcugugauuguua

SEQ ID NO: 1276651 - RNA, 19 nt, Homo sapiens
  misc_RNA (1)...(19): siRNA sense strand
ggagccaccaacauuugaa

SEQ ID NO: 1276652 - RNA, 19 nt, Homo sapiens
  misc_RNA (1)...(19): siRNA sense strand
gcgcuuuccuggguugcuu

SEQ ID NO: 1276653 - RNA, 19 nt, Homo sapiens
  misc_RNA (1)...(19): siRNA sense strand
uacuacaaagcaacaguua

SEQ ID NO: 1276654 - RNA, 19 nt, Homo sapiens
  misc_RNA (1)...(19): siRNA sense strand
cuugaugcaguaacuuaua

SEQ ID NO: 1276655 - RNA, 19 nt, Homo sapiens
  misc_RNA (1)...(19): siRNA sense strand
aaacauguccauauauacg

SEQ ID NO: 1276656 - RNA, 19 nt, Homo sapiens
  misc_RNA (1)...(19): siRNA sense strand
guguaaaguggucaaaugu

SEQ ID NO: 1276657 - RNA, 19 nt, Homo sapiens
  misc_RNA (1)...(19): siRNA sense strand
cuuacgaguuugguuauca

SEQ ID NO: 1276658 - RNA, 19 nt, Homo sapiens
  misc_RNA (1)...(19): siRNA sense strand
uacgggauccuuuaaaugg

SEQ ID NO: 1276659 - RNA, 19 nt, Homo sapiens
  misc_RNA (1)...(19): siRNA sense strand
aaccaaaacccuacuauga

SEQ ID NO: 1276660 - RNA, 19 nt, Homo sapiens
  misc_RNA (1)...(19): siRNA sense strand
cccaauaugugaaaagguu

SEQ ID NO: 1276661 - RNA, 19 nt, Homo sapiens
  misc_RNA (1)...(19): siRNA sense strand
cgauggcagcgacacaauu

SEQ ID NO: 1276662 - RNA, 19 nt, Homo sapiens
  misc_RNA (1)...(19): siRNA sense strand
gauccauuuucacuuauug

SEQ ID NO: 1276663 - RNA, 19 nt, Homo sapiens
  misc_RNA (1)...(19): siRNA sense strand
uugaugcaguaacuuauag

SEQ ID NO: 1276664 - RNA, 19 nt, Homo sapiens
  misc_RNA (1)...(19): siRNA sense strand
guaucuugaugcaguaacu

SEQ ID NO: 1276665 - RNA, 19 nt, Homo sapiens
  misc_RNA (1)...(19): siRNA sense strand
caacauuugaagcuaugga

SEQ ID NO: 1276666 - RNA, 19 nt, Homo sapiens
  misc_RNA (1)...(19): siRNA sense strand
gagauuggugaacgaguag

SEQ ID NO: 1276667 - RNA, 19 nt, Homo sapiens
  misc_RNA (1)...(19): siRNA sense strand
ggagagagcacgauuuauu

SEQ ID NO: 1276668 - RNA, 19 nt, Homo sapiens
  misc_RNA (1)...(19): siRNA sense strand
agagaaacauguccauaua

SEQ ID NO: 1276669 - RNA, 19 nt, Homo sapiens
  misc_RNA (1)...(19): siRNA sense strand
cagaugcacuuuauuugua

SEQ ID NO: 1276670 - RNA, 19 nt, Homo sapiens
  misc_RNA (1)...(19): siRNA sense strand
ggacuuacgaguuugguua

SEQ ID NO: 1276671 - RNA, 19 nt, Homo sapiens
  misc_RNA (1)...(19): siRNA sense strand
aaacagauaucaggauuug

SEQ ID NO: 1276672 - RNA, 19 nt, Homo sapiens
  misc_RNA (1)...(19): siRNA sense strand
cuauggagcucauugguaa

SEQ ID NO: 1276673 - RNA, 19 nt, Homo sapiens
  misc_RNA (1)...(19): siRNA sense strand
aaacacaccuuuagugaag

SEQ ID NO: 1276674 - RNA, 19 nt, Homo sapiens
  misc_RNA (1)...(19): siRNA sense strand
gaacuuaaaggaucaguag

SEQ ID NO: 1276675 - RNA, 19 nt, Homo sapiens
  misc_RNA (1)...(19): siRNA sense strand
gaaaacagauaucaggauu

SEQ ID NO: 1276676 - RNA, 19 nt, Homo sapiens
  misc_RNA (1)...(19): siRNA sense strand
uaaaggaucaguagcaauu

SEQ ID NO: 1276677 - RNA, 19 nt, Homo sapiens
  misc_RNA (1)...(19): siRNA sense strand
aaaugggacuuacgaguuu

SEQ ID NO: 1276678 - RNA, 19 nt, Homo sapiens
  misc_RNA (1)...(19): siRNA sense strand
guuaucagaugcacuuuau

SEQ ID NO: 1276679 - RNA, 19 nt, Homo sapiens
  misc_RNA (1)...(19): siRNA sense strand
ugagauuggugaacgagua

SEQ ID NO: 1276680 - RNA, 19 nt, Homo sapiens
  misc_RNA (1)...(19): siRNA sense strand
gugaacgaguagauuauaa

SEQ ID NO: 1276681 - RNA, 19 nt, Homo sapiens
  misc_RNA (1)...(19): siRNA sense strand
gagagagcacgauuuauug

SEQ ID NO: 1276682 - RNA, 19 nt, Homo sapiens
  misc_RNA (1)...(19): siRNA sense strand
caaaugggacuuacgaguu

SEQ ID NO: 1276683 - RNA, 19 nt, Homo sapiens
  misc_RNA (1)...(19): siRNA sense strand
ggucauugcugugauuguu

SEQ ID NO: 1276684 - RNA, 19 nt, Homo sapiens
  misc_RNA (1)...(19): siRNA sense strand
ccagauccauuuucacuua

SEQ ID NO: 1276685 - RNA, 19 nt, Homo sapiens
  misc_RNA (1)...(19): siRNA sense strand
gaaggaauacuugacaguu

SEQ ID NO: 1276686 - RNA, 19 nt, Homo sapiens
  misc_RNA (1)...(19): siRNA sense strand
aaggaauacuugacaguuu

SEQ ID NO: 1276687 - RNA, 19 nt, Homo sapiens
  misc_RNA (1)...(19): siRNA sense strand
ucagaugacgccuguuaua

SEQ ID NO: 1276688 - RNA, 19 nt, Homo sapiens
  misc_RNA (1)...(19): siRNA sense strand
gaaaacacaccuuuaguga

SEQ ID NO: 1276689 - RNA, 19 nt, Homo sapiens
  misc_RNA (1)...(19): siRNA sense strand
gaugacgccuguuauagag

SEQ ID NO: 1276690 - RNA, 19 nt, Homo sapiens
  misc_RNA (1)...(19): siRNA sense strand
gagaaacauguccauauau

SEQ ID NO: 1276691 - RNA, 19 nt, Homo sapiens
  misc_RNA (1)...(19): siRNA sense strand
acgaguagauuauaagugu

SEQ ID NO: 1276692 - RNA, 19 nt, Homo sapiens
  misc_RNA (1)...(19): siRNA sense strand
cuacaaagcaacaguuaug

SEQ ID NO: 1276693 - RNA, 19 nt, Homo sapiens
  misc_RNA (1)...(19): siRNA sense strand
ccaccaacauuugaagcua

SEQ ID NO: 1276694 - RNA, 19 nt, Homo sapiens
  misc_RNA (1)...(19): siRNA sense strand
uauacgggauccuuuaaau

SEQ ID NO: 1276695 - RNA, 19 nt, Homo sapiens
  misc_RNA (1)...(19): siRNA sense strand
cgaguuugguuaucagaug

SEQ ID NO: 1276696 - RNA, 19 nt, Homo sapiens
  misc_RNA (1)...(19): siRNA sense strand
gaacgaguagauuauaagu

SEQ ID NO: 1276697 - RNA, 19 nt, Homo sapiens
  misc_RNA (1)...(19): siRNA sense strand
gugaggagccaccaacauu

SEQ ID NO: 1276698 - RNA, 19 nt, Homo sapiens
  misc_RNA (1)...(19): siRNA sense strand
gauggcagcgacacaauug

SEQ ID NO: 1276699 - RNA, 19 nt, Homo sapiens
  misc_RNA (1)...(19): siRNA sense strand
gcuauggagcucauuggua

SEQ ID NO: 1276700 - RNA, 19 nt, Homo sapiens
  misc_RNA (1)...(19): siRNA sense strand
gaggagccaccaacauuug

SEQ ID NO: 1276701 - RNA, 19 nt, Homo sapiens
  misc_RNA (1)...(19): siRNA sense strand
acacaccuuuagugaagua

SEQ ID NO: 1276702 - RNA, 19 nt, Homo sapiens
  misc_RNA (1)...(19): siRNA sense strand
ucucagaugacgccuguua

SEQ ID NO: 1276703 - RNA, 19 nt, Homo sapiens
  misc_RNA (1)...(19): siRNA sense strand
uagagaaacauguccauau

SEQ ID NO: 1276704 - RNA, 19 nt, Homo sapiens
  misc_RNA (1)...(19): siRNA sense strand
ggugaacgaguagauuaua

SEQ ID NO: 1276705 - RNA, 19 nt, Homo sapiens
  misc_RNA (1)...(19): siRNA sense strand
gaaguagaaguauuugagu

SEQ ID NO: 1276706 - RNA, 19 nt, Homo sapiens
  misc_RNA (1)...(19): siRNA sense strand
gaaacauguccauauauac

SEQ ID NO: 1276707 - RNA, 19 nt, Homo sapiens
  misc_RNA (1)...(19): siRNA sense strand
ugacgccuguuauagagaa

SEQ ID NO: 1276708 - RNA, 19 nt, Homo sapiens
  misc_RNA (1)...(19): siRNA sense strand
cgaguagauuauaagugua

SEQ ID NO: 1276709 - RNA, 19 nt, Homo sapiens
  misc_RNA (1)...(19): siRNA sense strand
gcacuuuauuuguaaugag

SEQ ID NO: 1276710 - RNA, 19 nt, Homo sapiens
  misc_RNA (1)...(19): siRNA sense strand
guagaaguauuugaguauc

SEQ ID NO: 1276711 - RNA, 19 nt, Homo sapiens
  misc_RNA (1)...(19): siRNA sense strand
guauuugaguaucuugaug

SEQ ID NO: 1276712 - RNA, 19 nt, Homo sapiens
  misc_RNA (1)...(19): siRNA sense strand
aggaauacuugacaguuug

SEQ ID NO: 1276713 - RNA, 19 nt, Homo sapiens
  misc_RNA (1)...(19): siRNA sense strand
aguguaaaguggucaaaug

SEQ ID NO: 1276714 - RNA, 19 nt, Homo sapiens
  misc_RNA (1)...(19): siRNA sense strand
ccaaaacccuacuaugaga

SEQ ID NO: 1276715 - RNA, 19 nt, Homo sapiens
  misc_RNA (1)...(19): siRNA sense strand
ccacccauacuauuuguga

SEQ ID NO: 1276716 - RNA, 19 nt, Homo sapiens
  misc_RNA (1)...(19): siRNA sense strand
caccaacauuugaagcuau

SEQ ID NO: 1276717 - RNA, 19 nt, Homo sapiens
  misc_RNA (1)...(19): siRNA sense strand
uuggagagagcacgauuua

SEQ ID NO: 1276718 - RNA, 19 nt, Homo sapiens
  misc_RNA (1)...(19): siRNA sense strand
gguuaucagaugcacuuua

SEQ ID NO: 1276719 - RNA, 19 nt, Homo sapiens
  misc_RNA (1)...(19): siRNA sense strand
ugaggagccaccaacauuu

SEQ ID NO: 1276720 - RNA, 19 nt, Homo sapiens
  misc_RNA (1)...(19): siRNA sense strand
ggaaggaauacuugacagu

SEQ ID NO: 1276721 - RNA, 19 nt, Homo sapiens
  misc_RNA (1)...(19): siRNA sense strand
gaggaaggaauacuugaca

SEQ ID NO: 1276722 - RNA, 19 nt, Homo sapiens
  misc_RNA (1)...(19): siRNA sense strand
ugaguaucuugaugcagua

SEQ ID NO: 1276723 - RNA, 19 nt, Homo sapiens
  misc_RNA (1)...(19): siRNA sense strand
caccuuuagugaaguagaa

SEQ ID NO: 1276724 - RNA, 19 nt, Homo sapiens
  misc_RNA (1)...(19): siRNA sense strand
acagauaucaggauuugga

SEQ ID NO: 1276725 - RNA, 19 nt, Homo sapiens
  misc_RNA (1)...(19): siRNA sense strand
ucauugcugugauuguuau

SEQ ID NO: 1276726 - RNA, 19 nt, Homo sapiens
  misc_RNA (1)...(19): siRNA sense strand
ucagaugcacuuuauuugu

SEQ ID NO: 1276727 - RNA, 19 nt, Homo sapiens
  misc_RNA (1)...(19): siRNA sense strand
gugcugcuccagaguguaa

SEQ ID NO: 1276728 - RNA, 19 nt, Homo sapiens
  misc_RNA (1)...(19): siRNA sense strand
ggaaaacacaccuuuagug

SEQ ID NO: 1276729 - RNA, 19 nt, Homo sapiens
  misc_RNA (1)...(19): siRNA sense strand
aaggaucaguagcaauuug

SEQ ID NO: 1276730 - RNA, 19 nt, Homo sapiens
  misc_RNA (1)...(19): siRNA sense strand
uauauacgggauccuuuaa

SEQ ID NO: 1276731 - RNA, 19 nt, Homo sapiens
  misc_RNA (1)...(19): siRNA sense strand
ugaaguagaaguauuugag

SEQ ID NO: 1276732 - RNA, 19 nt, Homo sapiens
  misc_RNA (1)...(19): siRNA sense strand
cuugacaguuuggauguuu

SEQ ID NO: 1276733 - RNA, 19 nt, Homo sapiens
  misc_RNA (1)...(19): siRNA sense strand
cauauauacgggauccuuu

SEQ ID NO: 1276734 - RNA, 19 nt, Homo sapiens
  misc_RNA (1)...(19): siRNA sense strand
auauauacgggauccuuua

SEQ ID NO: 1276735 - RNA, 19 nt, Homo sapiens
  misc_RNA (1)...(19): siRNA sense strand
cuuaaaggaucaguagcaa

SEQ ID NO: 1276736 - RNA, 19 nt, Homo sapiens
  misc_RNA (1)...(19): siRNA sense strand
uaaaccugaggaaggaaua

SEQ ID NO: 1276737 - RNA, 19 nt, Homo sapiens
  misc_RNA (1)...(19): siRNA sense strand
agaugacgccuguuauaga

SEQ ID NO: 1276738 - RNA, 19 nt, Homo sapiens
  misc_RNA (1)...(19): siRNA sense strand
ugugauuguuauugccaua

SEQ ID NO: 1276739 - RNA, 19 nt, Homo sapiens
  misc_RNA (1)...(19): siRNA sense strand
gagagcacgauuuauugug

SEQ ID NO: 1276740 - RNA, 19 nt, Homo sapiens
  misc_RNA (1)...(19): siRNA sense strand
gaaguauuugaguaucuug

SEQ ID NO: 1276741 - RNA, 19 nt, Homo sapiens
  misc_RNA (1)...(19): siRNA sense strand
ccucuugccacccauacua

SEQ ID NO: 1276742 - RNA, 19 nt, Homo sapiens
  misc_RNA (1)...(19): siRNA sense strand
gauaucaggauuuggaaaa

SEQ ID NO: 1276743 - RNA, 19 nt, Homo sapiens
  misc_RNA (1)...(19): siRNA sense strand
ggcuaccugucucagauga

SEQ ID NO: 1276744 - RNA, 19 nt, Homo sapiens
  misc_RNA (1)...(19): siRNA sense strand
ccaugguguugcugcugua

SEQ ID NO: 1276745 - RNA, 19 nt, Homo sapiens
  misc_RNA (1)...(19): siRNA sense strand
cagaugacgccuguuauag

SEQ ID NO: 1276746 - RNA, 19 nt, Homo sapiens
  misc_RNA (1)...(19): siRNA sense strand
gucauugcugugauuguua

SEQ ID NO: 1276747 - RNA, 19 nt, Homo sapiens
  misc_RNA (1)...(19): siRNA sense strand
uuggugaacgaguagauua

SEQ ID NO: 1276748 - RNA, 19 nt, Homo sapiens
  misc_RNA (1)...(19): siRNA sense strand
ggagccaccaacauuugaa

SEQ ID NO: 1276749 - RNA, 19 nt, Homo sapiens
  misc_RNA (1)...(19): siRNA sense strand
gcgcuuuccuggguugcuu

SEQ ID NO: 1276750 - RNA, 19 nt, Homo sapiens
  misc_RNA (1)...(19): siRNA sense strand
uacuacaaagcaacaguua

SEQ ID NO: 1276751 - RNA, 19 nt, Homo sapiens
  misc_RNA (1)...(19): siRNA sense strand
cuugaugcaguaacuuaua

SEQ ID NO: 1276752 - RNA, 19 nt, Homo sapiens
  misc_RNA (1)...(19): siRNA sense strand
aaacauguccauauauacg

SEQ ID NO: 1276753 - RNA, 19 nt, Homo sapiens
  misc_RNA (1)...(19): siRNA sense strand
guguaaaguggucaaaugu

SEQ ID NO: 1276754 - RNA, 19 nt, Homo sapiens
  misc_RNA (1)...(19): siRNA sense strand
cuuacgaguuugguuauca

SEQ ID NO: 1276755 - RNA, 19 nt, Homo sapiens
  misc_RNA (1)...(19): siRNA sense strand
uacgggauccuuuaaaugg

SEQ ID NO: 1276756 - RNA, 19 nt, Homo sapiens
  misc_RNA (1)...(19): siRNA sense strand
aaccaaaacccuacuauga

SEQ ID NO: 1276757 - RNA, 19 nt, Homo sapiens
  misc_RNA (1)...(19): siRNA sense strand
cccaauaugugaaaagguu

SEQ ID NO: 1276758 - RNA, 19 nt, Homo sapiens
  misc_RNA (1)...(19): siRNA sense strand
cgauggcagcgacacaauu

SEQ ID NO: 1276759 - RNA, 19 nt, Homo sapiens
  misc_RNA (1)...(19): siRNA sense strand
gauccauuuucacuuauug

SEQ ID NO: 1276760 - RNA, 19 nt, Homo sapiens
  misc_RNA (1)...(19): siRNA sense strand
uugaugcaguaacuuauag

SEQ ID NO: 1276761 - RNA, 19 nt, Homo sapiens
  misc_RNA (1)...(19): siRNA sense strand
guaucuugaugcaguaacu

SEQ ID NO: 1276762 - RNA, 19 nt, Homo sapiens
  misc_RNA (1)...(19): siRNA sense strand
caacauuugaagcuaugga

SEQ ID NO: 1276763 - RNA, 19 nt, Homo sapiens
  misc_RNA (1)...(19): siRNA sense strand
gagauuggugaacgaguag

SEQ ID NO: 1276764 - RNA, 19 nt, Homo sapiens
  misc_RNA (1)...(19): siRNA sense strand
ggagagagcacgauuuauu

SEQ ID NO: 1276765 - RNA, 19 nt, Homo sapiens
  misc_RNA (1)...(19): siRNA sense strand
agagaaacauguccauaua

SEQ ID NO: 1276766 - RNA, 19 nt, Homo sapiens
  misc_RNA (1)...(19): siRNA sense strand
cagaugcacuuuauuugua

SEQ ID NO: 1276767 - RNA, 19 nt, Homo sapiens
  misc_RNA (1)...(19): siRNA sense strand
ggacuuacgaguuugguua

SEQ ID NO: 1276768 - RNA, 19 nt, Homo sapiens
  misc_RNA (1)...(19): siRNA sense strand
aaacagauaucaggauuug

SEQ ID NO: 1276769 - RNA, 19 nt, Homo sapiens
  misc_RNA (1)...(19): siRNA sense strand
cuauggagcucauugguaa

SEQ ID NO: 1276770 - RNA, 19 nt, Homo sapiens
  misc_RNA (1)...(19): siRNA sense strand
aaacacaccuuuagugaag

SEQ ID NO: 1276771 - RNA, 19 nt, Homo sapiens
  misc_RNA (1)...(19): siRNA sense strand
gaacuuaaaggaucaguag

SEQ ID NO: 1276772 - RNA, 19 nt, Homo sapiens
  misc_RNA (1)...(19): siRNA sense strand
gaaaacagauaucaggauu

SEQ ID NO: 1276773 - RNA, 19 nt, Homo sapiens
  misc_RNA (1)...(19): siRNA sense strand
uaaaggaucaguagcaauu

SEQ ID NO: 1276774 - RNA, 19 nt, Homo sapiens
  misc_RNA (1)...(19): siRNA sense strand
aaaugggacuuacgaguuu

SEQ ID NO: 1276775 - RNA, 19 nt, Homo sapiens
  misc_RNA (1)...(19): siRNA sense strand
guuaucagaugcacuuuau

SEQ ID NO: 1276776 - RNA, 19 nt, Homo sapiens
  misc_RNA (1)...(19): siRNA sense strand
gagcugaauaugccacuua

SEQ ID NO: 1276777 - RNA, 19 nt, Homo sapiens
  misc_RNA (1)...(19): siRNA sense strand
ugagauuggugaacgagua

SEQ ID NO: 1276778 - RNA, 19 nt, Homo sapiens
  misc_RNA (1)...(19): siRNA sense strand
gugaacgaguagauuauaa

SEQ ID NO: 1276779 - RNA, 19 nt, Homo sapiens
  misc_RNA (1)...(19): siRNA sense strand
gagagagcacgauuuauug

SEQ ID NO: 1276780 - RNA, 19 nt, Homo sapiens
  misc_RNA (1)...(19): siRNA sense strand
caaaugggacuuacgaguu

SEQ ID NO: 1276781 - RNA, 19 nt, Homo sapiens
  misc_RNA (1)...(19): siRNA sense strand
ggucauugcugugauuguu

SEQ ID NO: 1276782 - RNA, 19 nt, Homo sapiens
  misc_RNA (1)...(19): siRNA sense strand
ccagauccauuuucacuua

SEQ ID NO: 1276783 - RNA, 19 nt, Homo sapiens
  misc_RNA (1)...(19): siRNA sense strand
gaaggaauacuugacaguu

SEQ ID NO: 1276784 - RNA, 19 nt, Homo sapiens
  misc_RNA (1)...(19): siRNA sense strand
aaggaauacuugacaguuu

SEQ ID NO: 1276785 - RNA, 19 nt, Homo sapiens
  misc_RNA (1)...(19): siRNA sense strand
ucagaugacgccuguuaua

SEQ ID NO: 1276786 - RNA, 19 nt, Homo sapiens
  misc_RNA (1)...(19): siRNA sense strand
gaaaacacaccuuuaguga

SEQ ID NO: 1276787 - RNA, 19 nt, Homo sapiens
  misc_RNA (1)...(19): siRNA sense strand
gaugacgccuguuauagag

SEQ ID NO: 1276788 - RNA, 19 nt, Homo sapiens
  misc_RNA (1)...(19): siRNA sense strand
gagaaacauguccauauau

SEQ ID NO: 1276789 - RNA, 19 nt, Homo sapiens
  misc_RNA (1)...(19): siRNA sense strand
ccacuuaccagacuaaauc

SEQ ID NO: 1276790 - RNA, 19 nt, Homo sapiens
  misc_RNA (1)...(19): siRNA sense strand
acgaguagauuauaagugu

SEQ ID NO: 1276791 - RNA, 19 nt, Homo sapiens
  misc_RNA (1)...(19): siRNA sense strand
cuacaaagcaacaguuaug

SEQ ID NO: 1276792 - RNA, 19 nt, Homo sapiens
  misc_RNA (1)...(19): siRNA sense strand
ccaccaacauuugaagcua

SEQ ID NO: 1276793 - RNA, 19 nt, Homo sapiens
  misc_RNA (1)...(19): siRNA sense strand
uauacgggauccuuuaaau

SEQ ID NO: 1276794 - RNA, 19 nt, Homo sapiens
  misc_RNA (1)...(19): siRNA sense strand
cgaguuugguuaucagaug

SEQ ID NO: 1276795 - RNA, 19 nt, Homo sapiens
  misc_RNA (1)...(19): siRNA sense strand
gaacgaguagauuauaagu

SEQ ID NO: 1276796 - RNA, 19 nt, Homo sapiens
  misc_RNA (1)...(19): siRNA sense strand
gugaggagccaccaacauu

SEQ ID NO: 1276797 - RNA, 19 nt, Homo sapiens
  misc_RNA (1)...(19): siRNA sense strand
gauggcagcgacacaauug

SEQ ID NO: 1276798 - RNA, 19 nt, Homo sapiens
  misc_RNA (1)...(19): siRNA sense strand
ucucagaugacgccuguua

SEQ ID NO: 1276799 - RNA, 19 nt, Homo sapiens
  misc_RNA (1)...(19): siRNA sense strand
gaggagccaccaacauuug

SEQ ID NO: 1276800 - RNA, 19 nt, Homo sapiens
  misc_RNA (1)...(19): siRNA sense strand
gcuauggagcucauuggua

SEQ ID NO: 1276801 - RNA, 19 nt, Homo sapiens
  misc_RNA (1)...(19): siRNA sense strand
acacaccuuuagugaagua

SEQ ID NO: 1276802 - RNA, 19 nt, Homo sapiens
  misc_RNA (1)...(19): siRNA sense strand
uagagaaacauguccauau

SEQ ID NO: 1276803 - RNA, 19 nt, Homo sapiens
  misc_RNA (1)...(19): siRNA sense strand
ggugaacgaguagauuaua

SEQ ID NO: 1276804 - RNA, 19 nt, Homo sapiens
  misc_RNA (1)...(19): siRNA sense strand
gaaguagaaguauuugagu

SEQ ID NO: 1276805 - RNA, 19 nt, Homo sapiens
  misc_RNA (1)...(19): siRNA sense strand
gaaacauguccauauauac

SEQ ID NO: 1276806 - RNA, 19 nt, Homo sapiens
  misc_RNA (1)...(19): siRNA sense strand
ugacgccuguuauagagaa

SEQ ID NO: 1276807 - RNA, 19 nt, Homo sapiens
  misc_RNA (1)...(19): siRNA sense strand
cgaguagauuauaagugua

SEQ ID NO: 1276808 - RNA, 19 nt, Homo sapiens
  misc_RNA (1)...(19): siRNA sense strand
gcacuuuauuuguaaugag

SEQ ID NO: 1276809 - RNA, 19 nt, Homo sapiens
  misc_RNA (1)...(19): siRNA sense strand
guagaaguauuugaguauc

SEQ ID NO: 1276810 - RNA, 19 nt, Homo sapiens
  misc_RNA (1)...(19): siRNA sense strand
guauuugaguaucuugaug

SEQ ID NO: 1276811 - RNA, 19 nt, Homo sapiens
  misc_RNA (1)...(19): siRNA sense strand
aggaauacuugacaguuug

SEQ ID NO: 1276812 - RNA, 19 nt, Homo sapiens
  misc_RNA (1)...(19): siRNA sense strand
ccaaaacccuacuaugaga

SEQ ID NO: 1276813 - RNA, 19 nt, Homo sapiens
  misc_RNA (1)...(19): siRNA sense strand
aguguaaaguggucaaaug

SEQ ID NO: 1276814 - RNA, 19 nt, Homo sapiens
  misc_RNA (1)...(19): siRNA sense strand
ccacccauacuauuuguga

SEQ ID NO: 1276815 - RNA, 19 nt, Homo sapiens
  misc_RNA (1)...(19): siRNA sense strand
uuggagagagcacgauuua

SEQ ID NO: 1276816 - RNA, 19 nt, Homo sapiens
  misc_RNA (1)...(19): siRNA sense strand
gguuaucagaugcacuuua

SEQ ID NO: 1276817 - RNA, 19 nt, Homo sapiens
  misc_RNA (1)...(19): siRNA sense strand
caccaacauuugaagcuau

SEQ ID NO: 1276818 - RNA, 19 nt, Homo sapiens
  misc_RNA (1)...(19): siRNA sense strand
ugaggagccaccaacauuu

SEQ ID NO: 1276819 - RNA, 19 nt, Homo sapiens
  misc_RNA (1)...(19): siRNA sense strand
ggaaggaauacuugacagu

SEQ ID NO: 1276820 - RNA, 19 nt, Homo sapiens
  misc_RNA (1)...(19): siRNA sense strand
gaggaaggaauacuugaca

SEQ ID NO: 1276821 - RNA, 19 nt, Homo sapiens
  misc_RNA (1)...(19): siRNA sense strand
ugaguaucuugaugcagua

SEQ ID NO: 1276822 - RNA, 19 nt, Homo sapiens
  misc_RNA (1)...(19): siRNA sense strand
caccuuuagugaaguagaa

SEQ ID NO: 1276823 - RNA, 19 nt, Homo sapiens
  misc_RNA (1)...(19): siRNA sense strand
acagauaucaggauuugga

SEQ ID NO: 1276824 - RNA, 19 nt, Homo sapiens
  misc_RNA (1)...(19): siRNA sense strand
ucauugcugugauuguuau

SEQ ID NO: 1276825 - RNA, 19 nt, Homo sapiens
  misc_RNA (1)...(19): siRNA sense strand
ucagaugcacuuuauuugu

SEQ ID NO: 1276826 - RNA, 19 nt, Homo sapiens
  misc_RNA (1)...(19): siRNA sense strand
gugcugcuccagaguguaa

SEQ ID NO: 1276827 - RNA, 19 nt, Homo sapiens
  misc_RNA (1)...(19): siRNA sense strand
ggaaaacacaccuuuagug

SEQ ID NO: 1276828 - RNA, 19 nt, Homo sapiens
  misc_RNA (1)...(19): siRNA sense strand
aaggaucaguagcaauuug

SEQ ID NO: 1276829 - RNA, 19 nt, Homo sapiens
  misc_RNA (1)...(19): siRNA sense strand
uauauacgggauccuuuaa

SEQ ID NO: 1276830 - RNA, 19 nt, Homo sapiens
  misc_RNA (1)...(19): siRNA sense strand
ugaaguagaaguauuugag

SEQ ID NO: 1276831 - RNA, 19 nt, Homo sapiens
  misc_RNA (1)...(19): siRNA sense strand
cuugacaguuuggauguuu

SEQ ID NO: 1276832 - RNA, 19 nt, Homo sapiens
  misc_RNA (1)...(19): siRNA sense strand
cauauauacgggauccuuu

SEQ ID NO: 1276833 - RNA, 19 nt, Homo sapiens
  misc_RNA (1)...(19): siRNA sense strand
auauauacgggauccuuua

SEQ ID NO: 1276834 - RNA, 19 nt, Homo sapiens
  misc_RNA (1)...(19): siRNA sense strand
cuuaaaggaucaguagcaa

SEQ ID NO: 1276835 - RNA, 19 nt, Homo sapiens
  misc_RNA (1)...(19): siRNA sense strand
uaaaccugaggaaggaaua

SEQ ID NO: 1276836 - RNA, 19 nt, Homo sapiens
  misc_RNA (1)...(19): siRNA sense strand
agaugacgccuguuauaga

SEQ ID NO: 1276837 - RNA, 19 nt, Homo sapiens
  misc_RNA (1)...(19): siRNA sense strand
ugugauuguuauugccaua

SEQ ID NO: 1276838 - RNA, 19 nt, Homo sapiens
  misc_RNA (1)...(19): siRNA sense strand
gagagcacgauuuauugug

SEQ ID NO: 1276839 - RNA, 19 nt, Homo sapiens
  misc_RNA (1)...(19): siRNA sense strand
gaaguauuugaguaucuug

SEQ ID NO: 1276840 - RNA, 19 nt, Homo sapiens
  misc_RNA (1)...(19): siRNA sense strand
ggcuaccugucucagauga

SEQ ID NO: 1276841 - RNA, 19 nt, Homo sapiens
  misc_RNA (1)...(19): siRNA sense strand
gauaucaggauuuggaaaa

SEQ ID NO: 1276842 - RNA, 19 nt, Homo sapiens
  misc_RNA (1)...(19): siRNA sense strand
ccucuugccacccauacua

SEQ ID NO: 1276843 - RNA, 19 nt, Homo sapiens
  misc_RNA (1)...(19): siRNA sense strand
ccaugguguugcugcugua

SEQ ID NO: 1276844 - RNA, 19 nt, Homo sapiens
  misc_RNA (1)...(19): siRNA sense strand
cagaugacgccuguuauag

SEQ ID NO: 1276845 - RNA, 19 nt, Homo sapiens
  misc_RNA (1)...(19): siRNA sense strand
cagaugguggagcugaaua

SEQ ID NO: 1276846 - RNA, 19 nt, Homo sapiens
  misc_RNA (1)...(19): siRNA sense strand
uuggugaacgaguagauua

SEQ ID NO: 1276847 - RNA, 19 nt, Homo sapiens
  misc_RNA (1)...(19): siRNA sense strand
gucauugcugugauuguua

SEQ ID NO: 1276848 - RNA, 19 nt, Homo sapiens
  misc_RNA (1)...(19): siRNA sense strand
ggagccaccaacauuugaa

SEQ ID NO: 1276849 - RNA, 19 nt, Homo sapiens
  misc_RNA (1)...(19): siRNA sense strand
gcgcuuuccuggguugcuu

SEQ ID NO: 1276850 - RNA, 19 nt, Homo sapiens
  misc_RNA (1)...(19): siRNA sense strand
uacuacaaagcaacaguua

SEQ ID NO: 1276851 - RNA, 19 nt, Homo sapiens
  misc_RNA (1)...(19): siRNA sense strand
cuugaugcaguaacuuaua

SEQ ID NO: 1276852 - RNA, 19 nt, Homo sapiens
  misc_RNA (1)...(19): siRNA sense strand
aaacauguccauauauacg

SEQ ID NO: 1276853 - RNA, 19 nt, Homo sapiens
  misc_RNA (1)...(19): siRNA sense strand
guguaaaguggucaaaugu

SEQ ID NO: 1276854 - RNA, 19 nt, Homo sapiens
  misc_RNA (1)...(19): siRNA sense strand
cuuacgaguuugguuauca

SEQ ID NO: 1276855 - RNA, 19 nt, Homo sapiens
  misc_RNA (1)...(19): siRNA sense strand
uacgggauccuuuaaaugg

SEQ ID NO: 1276856 - RNA, 19 nt, Homo sapiens
  misc_RNA (1)...(19): siRNA sense strand
gcagaugguggagcugaau

SEQ ID NO: 1276857 - RNA, 19 nt, Homo sapiens
  misc_RNA (1)...(19): siRNA sense strand
aaccaaaacccuacuauga

SEQ ID NO: 1276858 - RNA, 19 nt, Homo sapiens
  misc_RNA (1)...(19): siRNA sense strand
cccaauaugugaaaagguu

SEQ ID NO: 1276859 - RNA, 19 nt, Homo sapiens
  misc_RNA (1)...(19): siRNA sense strand
ggagcugaauaugccacuu

SEQ ID NO: 1276860 - RNA, 19 nt, Homo sapiens
  misc_RNA (1)...(19): siRNA sense strand
cgauggcagcgacacaauu

SEQ ID NO: 1276861 - RNA, 19 nt, Homo sapiens
  misc_RNA (1)...(19): siRNA sense strand
gauccauuuucacuuauug

SEQ ID NO: 1276862 - RNA, 19 nt, Homo sapiens
  misc_RNA (1)...(19): siRNA sense strand
uugaugcaguaacuuauag

SEQ ID NO: 1276863 - RNA, 19 nt, Homo sapiens
  misc_RNA (1)...(19): siRNA sense strand
guaucuugaugcaguaacu

SEQ ID NO: 1276864 - RNA, 19 nt, Homo sapiens
  misc_RNA (1)...(19): siRNA sense strand
ggagagagcacgauuuauu

SEQ ID NO: 1276865 - RNA, 19 nt, Homo sapiens
  misc_RNA (1)...(19): siRNA sense strand
agagaaacauguccauaua

SEQ ID NO: 1276866 - RNA, 19 nt, Homo sapiens
  misc_RNA (1)...(19): siRNA sense strand
cagaugcacuuuauuugua

SEQ ID NO: 1276867 - RNA, 19 nt, Homo sapiens
  misc_RNA (1)...(19): siRNA sense strand
ggacuuacgaguuugguua

SEQ ID NO: 1276868 - RNA, 19 nt, Homo sapiens
  misc_RNA (1)...(19): siRNA sense strand
aaacagauaucaggauuug

SEQ ID NO: 1276869 - RNA, 19 nt, Homo sapiens
  misc_RNA (1)...(19): siRNA sense strand
cuauggagcucauugguaa

SEQ ID NO: 1276870 - RNA, 19 nt, Homo sapiens
  misc_RNA (1)...(19): siRNA sense strand
aaacacaccuuuagugaag

SEQ ID NO: 1276871 - RNA, 19 nt, Homo sapiens
  misc_RNA (1)...(19): siRNA sense strand
gaacuuaaaggaucaguag

SEQ ID NO: 1276872 - RNA, 19 nt, Homo sapiens
  misc_RNA (1)...(19): siRNA sense strand
gaaaacagauaucaggauu

SEQ ID NO: 1276873 - RNA, 19 nt, Homo sapiens
  misc_RNA (1)...(19): siRNA sense strand
uaaaggaucaguagcaauu

SEQ ID NO: 1276874 - RNA, 19 nt, Homo sapiens
  misc_RNA (1)...(19): siRNA sense strand
aaaugggacuuacgaguuu

SEQ ID NO: 1276875 - RNA, 19 nt, Homo sapiens
  misc_RNA (1)...(19): siRNA sense strand
guuaucagaugcacuuuau

SEQ ID NO: 1276876 - RNA, 19 nt, Homo sapiens
  misc_RNA (1)...(19): siRNA sense strand
ugagauuggugaacgagua

SEQ ID NO: 1276877 - RNA, 19 nt, Homo sapiens
  misc_RNA (1)...(19): siRNA sense strand
gugaacgaguagauuauaa

SEQ ID NO: 1276878 - RNA, 19 nt, Homo sapiens
  misc_RNA (1)...(19): siRNA sense strand
gagagagcacgauuuauug

SEQ ID NO: 1276879 - RNA, 19 nt, Homo sapiens
  misc_RNA (1)...(19): siRNA sense strand
caaaugggacuuacgaguu

SEQ ID NO: 1276880 - RNA, 19 nt, Homo sapiens
  misc_RNA (1)...(19): siRNA sense strand
ggucauugcugugauuguu

SEQ ID NO: 1276881 - RNA, 19 nt, Homo sapiens
  misc_RNA (1)...(19): siRNA sense strand
ccagauccauuuucacuua

SEQ ID NO: 1276882 - RNA, 19 nt, Homo sapiens
  misc_RNA (1)...(19): siRNA sense strand
gaaggaauacuugacaguu

SEQ ID NO: 1276883 - RNA, 19 nt, Homo sapiens
  misc_RNA (1)...(19): siRNA sense strand
aaggaauacuugacaguuu

SEQ ID NO: 1276884 - RNA, 19 nt, Homo sapiens
  misc_RNA (1)...(19): siRNA sense strand
ucagaugacgccuguuaua

SEQ ID NO: 1276885 - RNA, 19 nt, Homo sapiens
  misc_RNA (1)...(19): siRNA sense strand
gaaaacacaccuuuaguga

SEQ ID NO: 1276886 - RNA, 19 nt, Homo sapiens
  misc_RNA (1)...(19): siRNA sense strand
gaugacgccuguuauagag

SEQ ID NO: 1276887 - RNA, 19 nt, Homo sapiens
  misc_RNA (1)...(19): siRNA sense strand
gagaaacauguccauauau

SEQ ID NO: 1276888 - RNA, 19 nt, Homo sapiens
  misc_RNA (1)...(19): siRNA sense strand
acgaguagauuauaagugu

SEQ ID NO: 1276889 - RNA, 19 nt, Homo sapiens
  misc_RNA (1)...(19): siRNA sense strand
cuacaaagcaacaguuaug

SEQ ID NO: 1276890 - RNA, 19 nt, Homo sapiens
  misc_RNA (1)...(19): siRNA sense strand
ccaccaacauuugaagcua

SEQ ID NO: 1276891 - RNA, 19 nt, Homo sapiens
  misc_RNA (1)...(19): siRNA sense strand
uauacgggauccuuuaaau

SEQ ID NO: 1276892 - RNA, 19 nt, Homo sapiens
  misc_RNA (1)...(19): siRNA sense strand
cgaguuugguuaucagaug

SEQ ID NO: 1276893 - RNA, 19 nt, Homo sapiens
  misc_RNA (1)...(19): siRNA sense strand
gaacgaguagauuauaagu

SEQ ID NO: 1276894 - RNA, 19 nt, Homo sapiens
  misc_RNA (1)...(19): siRNA sense strand
gugaggagccaccaacauu

SEQ ID NO: 1276895 - RNA, 19 nt, Homo sapiens
  misc_RNA (1)...(19): siRNA sense strand
gauggcagcgacacaauug

SEQ ID NO: 1276896 - RNA, 19 nt, Homo sapiens
  misc_RNA (1)...(19): siRNA sense strand
gcuauggagcucauuggua

SEQ ID NO: 1276897 - RNA, 19 nt, Homo sapiens
  misc_RNA (1)...(19): siRNA sense strand
gaggagccaccaacauuug

SEQ ID NO: 1276898 - RNA, 19 nt, Homo sapiens
  misc_RNA (1)...(19): siRNA sense strand
acacaccuuuagugaagua

SEQ ID NO: 1276899 - RNA, 19 nt, Homo sapiens
  misc_RNA (1)...(19): siRNA sense strand
ucucagaugacgccuguua

SEQ ID NO: 1276900 - RNA, 19 nt, Homo sapiens
  misc_RNA (1)...(19): siRNA sense strand
uagagaaacauguccauau

SEQ ID NO: 1276901 - RNA, 19 nt, Homo sapiens
  misc_RNA (1)...(19): siRNA sense strand
guuccaaagugucuuaaag

SEQ ID NO: 1276902 - RNA, 19 nt, Homo sapiens
  misc_RNA (1)...(19): siRNA sense strand
ggugaacgaguagauuaua

SEQ ID NO: 1276903 - RNA, 19 nt, Homo sapiens
  misc_RNA (1)...(19): siRNA sense strand
gaaguagaaguauuugagu

SEQ ID NO: 1276904 - RNA, 19 nt, Homo sapiens
  misc_RNA (1)...(19): siRNA sense strand
gaaacauguccauauauac

SEQ ID NO: 1276905 - RNA, 19 nt, Homo sapiens
  misc_RNA (1)...(19): siRNA sense strand
ugacgccuguuauagagaa

SEQ ID NO: 1276906 - RNA, 19 nt, Homo sapiens
  misc_RNA (1)...(19): siRNA sense strand
cgaguagauuauaagugua

SEQ ID NO: 1276907 - RNA, 19 nt, Homo sapiens
  misc_RNA (1)...(19): siRNA sense strand
gcacuuuauuuguaaugag

SEQ ID NO: 1276908 - RNA, 19 nt, Homo sapiens
  misc_RNA (1)...(19): siRNA sense strand
guagaaguauuugaguauc

SEQ ID NO: 1276909 - RNA, 19 nt, Homo sapiens
  misc_RNA (1)...(19): siRNA sense strand
guauuugaguaucuugaug

SEQ ID NO: 1276910 - RNA, 19 nt, Homo sapiens
  misc_RNA (1)...(19): siRNA sense strand
aggaauacuugacaguuug

SEQ ID NO: 1276911 - RNA, 19 nt, Homo sapiens
  misc_RNA (1)...(19): siRNA sense strand
ccaaaacccuacuaugaga

SEQ ID NO: 1276912 - RNA, 19 nt, Homo sapiens
  misc_RNA (1)...(19): siRNA sense strand
aguguaaaguggucaaaug

SEQ ID NO: 1276913 - RNA, 19 nt, Homo sapiens
  misc_RNA (1)...(19): siRNA sense strand
ccacccauacuauuuguga

SEQ ID NO: 1276914 - RNA, 19 nt, Homo sapiens
  misc_RNA (1)...(19): siRNA sense strand
caccaacauuugaagcuau

SEQ ID NO: 1276915 - RNA, 19 nt, Homo sapiens
  misc_RNA (1)...(19): siRNA sense strand
uuggagagagcacgauuua

SEQ ID NO: 1276916 - RNA, 19 nt, Homo sapiens
  misc_RNA (1)...(19): siRNA sense strand
gguuaucagaugcacuuua

SEQ ID NO: 1276917 - RNA, 19 nt, Homo sapiens
  misc_RNA (1)...(19): siRNA sense strand
ugaggagccaccaacauuu

SEQ ID NO: 1276918 - RNA, 19 nt, Homo sapiens
  misc_RNA (1)...(19): siRNA sense strand
ggaaggaauacuugacagu

SEQ ID NO: 1276919 - RNA, 19 nt, Homo sapiens
  misc_RNA (1)...(19): siRNA sense strand
gaggaaggaauacuugaca

SEQ ID NO: 1276920 - RNA, 19 nt, Homo sapiens
  misc_RNA (1)...(19): siRNA sense strand
ccaguuccaaagugucuua

SEQ ID NO: 1276921 - RNA, 19 nt, Homo sapiens
  misc_RNA (1)...(19): siRNA sense strand
ugaguaucuugaugcagua

SEQ ID NO: 1276922 - RNA, 19 nt, Homo sapiens
  misc_RNA (1)...(19): siRNA sense strand
caccuuuagugaaguagaa

SEQ ID NO: 1276923 - RNA, 19 nt, Homo sapiens
  misc_RNA (1)...(19): siRNA sense strand
acagauaucaggauuugga

SEQ ID NO: 1276924 - RNA, 19 nt, Homo sapiens
  misc_RNA (1)...(19): siRNA sense strand
ucauugcugugauuguuau

SEQ ID NO: 1276925 - RNA, 19 nt, Homo sapiens
  misc_RNA (1)...(19): siRNA sense strand
ucagaugcacuuuauuugu

SEQ ID NO: 1276926 - RNA, 19 nt, Homo sapiens
  misc_RNA (1)...(19): siRNA sense strand
gugcugcuccagaguguaa

SEQ ID NO: 1276927 - RNA, 19 nt, Homo sapiens
  misc_RNA (1)...(19): siRNA sense strand
ggaaaacacaccuuuagug

SEQ ID NO: 1276928 - RNA, 19 nt, Homo sapiens
  misc_RNA (1)...(19): siRNA sense strand
aaggaucaguagcaauuug

SEQ ID NO: 1276929 - RNA, 19 nt, Homo sapiens
  misc_RNA (1)...(19): siRNA sense strand
uauauacgggauccuuuaa

SEQ ID NO: 1276930 - RNA, 19 nt, Homo sapiens
  misc_RNA (1)...(19): siRNA sense strand
ugaaguagaaguauuugag

SEQ ID NO: 1276931 - RNA, 19 nt, Homo sapiens
  misc_RNA (1)...(19): siRNA sense strand
cuugacaguuuggauguuu

SEQ ID NO: 1276932 - RNA, 19 nt, Homo sapiens
  misc_RNA (1)...(19): siRNA sense strand
cauauauacgggauccuuu

SEQ ID NO: 1276933 - RNA, 19 nt, Homo sapiens
  misc_RNA (1)...(19): siRNA sense strand
auauauacgggauccuuua

SEQ ID NO: 1276934 - RNA, 19 nt, Homo sapiens
  misc_RNA (1)...(19): siRNA sense strand
cuuaaaggaucaguagcaa

SEQ ID NO: 1276935 - RNA, 19 nt, Homo sapiens
  misc_RNA (1)...(19): siRNA sense strand
uaaaccugaggaaggaaua

SEQ ID NO: 1276936 - RNA, 19 nt, Homo sapiens
  misc_RNA (1)...(19): siRNA sense strand
agaugacgccuguuauaga

SEQ ID NO: 1276937 - RNA, 19 nt, Homo sapiens
  misc_RNA (1)...(19): siRNA sense strand
ugugauuguuauugccaua

SEQ ID NO: 1276938 - RNA, 19 nt, Homo sapiens
  misc_RNA (1)...(19): siRNA sense strand
gagagcacgauuuauugug

SEQ ID NO: 1276939 - RNA, 19 nt, Homo sapiens
  misc_RNA (1)...(19): siRNA sense strand
gaaguauuugaguaucuug

SEQ ID NO: 1276940 - RNA, 19 nt, Homo sapiens
  misc_RNA (1)...(19): siRNA sense strand
ggcuaccugucucagauga

SEQ ID NO: 1276941 - RNA, 19 nt, Homo sapiens
  misc_RNA (1)...(19): siRNA sense strand
gauaucaggauuuggaaaa

SEQ ID NO: 1276942 - RNA, 19 nt, Homo sapiens
  misc_RNA (1)...(19): siRNA sense strand
ccucuugccacccauacua

SEQ ID NO: 1276943 - RNA, 19 nt, Homo sapiens
  misc_RNA (1)...(19): siRNA sense strand
ccaugguguugcugcugua

SEQ ID NO: 1276944 - RNA, 19 nt, Homo sapiens
  misc_RNA (1)...(19): siRNA sense strand
cagaugacgccuguuauag

SEQ ID NO: 1276945 - RNA, 19 nt, Homo sapiens
  misc_RNA (1)...(19): siRNA sense strand
uuggugaacgaguagauua

SEQ ID NO: 1276946 - RNA, 19 nt, Homo sapiens
  misc_RNA (1)...(19): siRNA sense strand
gucauugcugugauuguua

SEQ ID NO: 1276947 - RNA, 19 nt, Homo sapiens
  misc_RNA (1)...(19): siRNA sense strand
ggagccaccaacauuugaa

SEQ ID NO: 1276948 - RNA, 19 nt, Homo sapiens
  misc_RNA (1)...(19): siRNA sense strand
gcgcuuuccuggguugcuu

SEQ ID NO: 1276949 - RNA, 19 nt, Homo sapiens
  misc_RNA (1)...(19): siRNA sense strand
uacuacaaagcaacaguua

SEQ ID NO: 1276950 - RNA, 19 nt, Homo sapiens
  misc_RNA (1)...(19): siRNA sense strand
cuugaugcaguaacuuaua

SEQ ID NO: 1276951 - RNA, 19 nt, Homo sapiens
  misc_RNA (1)...(19): siRNA sense strand
aaacauguccauauauacg

SEQ ID NO: 1276952 - RNA, 19 nt, Homo sapiens
  misc_RNA (1)...(19): siRNA sense strand
guguaaaguggucaaaugu

SEQ ID NO: 1276953 - RNA, 19 nt, Homo sapiens
  misc_RNA (1)...(19): siRNA sense strand
cuuacgaguuugguuauca

SEQ ID NO: 1276954 - RNA, 19 nt, Homo sapiens
  misc_RNA (1)...(19): siRNA sense strand
uacgggauccuuuaaaugg

SEQ ID NO: 1276955 - RNA, 19 nt, Homo sapiens
  misc_RNA (1)...(19): siRNA sense strand
aaccaaaacccuacuauga

SEQ ID NO: 1276956 - RNA, 19 nt, Homo sapiens
  misc_RNA (1)...(19): siRNA sense strand
cccaauaugugaaaagguu

SEQ ID NO: 1276957 - RNA, 19 nt, Homo sapiens
  misc_RNA (1)...(19): siRNA sense strand
cgauggcagcgacacaauu

SEQ ID NO: 1276958 - RNA, 19 nt, Homo sapiens
  misc_RNA (1)...(19): siRNA sense strand
gauccauuuucacuuauug

SEQ ID NO: 1276959 - RNA, 19 nt, Homo sapiens
  misc_RNA (1)...(19): siRNA sense strand
uugaugcaguaacuuauag

SEQ ID NO: 1276960 - RNA, 19 nt, Homo sapiens
  misc_RNA (1)...(19): siRNA sense strand
guaucuugaugcaguaacu

SEQ ID NO: 1276961 - RNA, 19 nt, Homo sapiens
  misc_RNA (1)...(19): siRNA sense strand
caacauuugaagcuaugga

SEQ ID NO: 1276962 - RNA, 19 nt, Homo sapiens
  misc_RNA (1)...(19): siRNA sense strand
gagauuggugaacgaguag

SEQ ID NO: 1276963 - RNA, 19 nt, Homo sapiens
  misc_RNA (1)...(19): siRNA sense strand
ggagagagcacgauuuauu

SEQ ID NO: 1276964 - RNA, 19 nt, Homo sapiens
  misc_RNA (1)...(19): siRNA sense strand
agagaaacauguccauaua

SEQ ID NO: 1276965 - RNA, 19 nt, Homo sapiens
  misc_RNA (1)...(19): siRNA sense strand
cagaugcacuuuauuugua

SEQ ID NO: 1276966 - RNA, 19 nt, Homo sapiens
  misc_RNA (1)...(19): siRNA sense strand
ggacuuacgaguuugguua

SEQ ID NO: 1276967 - RNA, 19 nt, Homo sapiens
  misc_RNA (1)...(19): siRNA sense strand
aaacagauaucaggauuug

SEQ ID NO: 1276968 - RNA, 19 nt, Homo sapiens
  misc_RNA (1)...(19): siRNA sense strand
cuauggagcucauugguaa

SEQ ID NO: 1276969 - RNA, 19 nt, Homo sapiens
  misc_RNA (1)...(19): siRNA sense strand
aaacacaccuuuagugaag

SEQ ID NO: 1276970 - RNA, 19 nt, Homo sapiens
  misc_RNA (1)...(19): siRNA sense strand
gaacuuaaaggaucaguag

SEQ ID NO: 1276971 - RNA, 19 nt, Homo sapiens
  misc_RNA (1)...(19): siRNA sense strand
gaaaacagauaucaggauu

SEQ ID NO: 1276972 - RNA, 19 nt, Homo sapiens
  misc_RNA (1)...(19): siRNA sense strand
uaaaggaucaguagcaauu

SEQ ID NO: 1276973 - RNA, 19 nt, Homo sapiens
  misc_RNA (1)...(19): siRNA sense strand
aaaugggacuuacgaguuu

SEQ ID NO: 1276974 - RNA, 19 nt, Homo sapiens
  misc_RNA (1)...(19): siRNA sense strand
guuaucagaugcacuuuau

SEQ ID NO: 1276975 - RNA, 19 nt, Homo sapiens
  misc_RNA (1)...(19): siRNA sense strand
gagcugaauaugccacuua

SEQ ID NO: 1276976 - RNA, 19 nt, Homo sapiens
  misc_RNA (1)...(19): siRNA sense strand
gagcagagaggcugaauag

SEQ ID NO: 1276977 - RNA, 19 nt, Homo sapiens
  misc_RNA (1)...(19): siRNA sense strand
ugagauuggugaacgagua

SEQ ID NO: 1276978 - RNA, 19 nt, Homo sapiens
  misc_RNA (1)...(19): siRNA sense strand
gugaacgaguagauuauaa

SEQ ID NO: 1276979 - RNA, 19 nt, Homo sapiens
  misc_RNA (1)...(19): siRNA sense strand
gagagagcacgauuuauug

SEQ ID NO: 1276980 - RNA, 19 nt, Homo sapiens
  misc_RNA (1)...(19): siRNA sense strand
caaaugggacuuacgaguu

SEQ ID NO: 1276981 - RNA, 19 nt, Homo sapiens
  misc_RNA (1)...(19): siRNA sense strand
ggucauugcugugauuguu

SEQ ID NO: 1276982 - RNA, 19 nt, Homo sapiens
  misc_RNA (1)...(19): siRNA sense strand
ccagauccauuuucacuua

SEQ ID NO: 1276983 - RNA, 19 nt, Homo sapiens
  misc_RNA (1)...(19): siRNA sense strand
gaaggaauacuugacaguu

SEQ ID NO: 1276984 - RNA, 19 nt, Homo sapiens
  misc_RNA (1)...(19): siRNA sense strand
aaggaauacuugacaguuu

SEQ ID NO: 1276985 - RNA, 19 nt, Homo sapiens
  misc_RNA (1)...(19): siRNA sense strand
ucagaugacgccuguuaua

SEQ ID NO: 1276986 - RNA, 19 nt, Homo sapiens
  misc_RNA (1)...(19): siRNA sense strand
gaaaacacaccuuuaguga

SEQ ID NO: 1276987 - RNA, 19 nt, Homo sapiens
  misc_RNA (1)...(19): siRNA sense strand
gaugacgccuguuauagag

SEQ ID NO: 1276988 - RNA, 19 nt, Homo sapiens
  misc_RNA (1)...(19): siRNA sense strand
gagaaacauguccauauau

SEQ ID NO: 1276989 - RNA, 19 nt, Homo sapiens
  misc_RNA (1)...(19): siRNA sense strand
ccacuuaccagacuaaauc

SEQ ID NO: 1276990 - RNA, 19 nt, Homo sapiens
  misc_RNA (1)...(19): siRNA sense strand
acgaguagauuauaagugu

SEQ ID NO: 1276991 - RNA, 19 nt, Homo sapiens
  misc_RNA (1)...(19): siRNA sense strand
cuacaaagcaacaguuaug

SEQ ID NO: 1276992 - RNA, 19 nt, Homo sapiens
  misc_RNA (1)...(19): siRNA sense strand
ccaccaacauuugaagcua

SEQ ID NO: 1276993 - RNA, 19 nt, Homo sapiens
  misc_RNA (1)...(19): siRNA sense strand
uauacgggauccuuuaaau

SEQ ID NO: 1276994 - RNA, 19 nt, Homo sapiens
  misc_RNA (1)...(19): siRNA sense strand
cgaguuugguuaucagaug

SEQ ID NO: 1276995 - RNA, 19 nt, Homo sapiens
  misc_RNA (1)...(19): siRNA sense strand
gaacgaguagauuauaagu

SEQ ID NO: 1276996 - RNA, 19 nt, Homo sapiens
  misc_RNA (1)...(19): siRNA sense strand
gugaggagccaccaacauu

SEQ ID NO: 1276997 - RNA, 19 nt, Homo sapiens
  misc_RNA (1)...(19): siRNA sense strand
gauggcagcgacacaauug

SEQ ID NO: 1276998 - RNA, 19 nt, Homo sapiens
  misc_RNA (1)...(19): siRNA sense strand
ucucagaugacgccuguua

SEQ ID NO: 1276999 - RNA, 19 nt, Homo sapiens
  misc_RNA (1)...(19): siRNA sense strand
acacaccuuuagugaagua

SEQ ID NO: 1277000 - RNA, 19 nt, Homo sapiens
  misc_RNA (1)...(19): siRNA sense strand
gcuauggagcucauuggua

SEQ ID NO: 1277001 - RNA, 19 nt, Homo sapiens
  misc_RNA (1)...(19): siRNA sense strand
gaggagccaccaacauuug

SEQ ID NO: 1277002 - RNA, 19 nt, Homo sapiens
  misc_RNA (1)...(19): siRNA sense strand
uagagaaacauguccauau

SEQ ID NO: 1277003 - RNA, 19 nt, Homo sapiens
  misc_RNA (1)...(19): siRNA sense strand
ggugaacgaguagauuaua

SEQ ID NO: 1277004 - RNA, 19 nt, Homo sapiens
  misc_RNA (1)...(19): siRNA sense strand
gaaguagaaguauuugagu

SEQ ID NO: 1277005 - RNA, 19 nt, Homo sapiens
  misc_RNA (1)...(19): siRNA sense strand
gaaacauguccauauauac

SEQ ID NO: 1277006 - RNA, 19 nt, Homo sapiens
  misc_RNA (1)...(19): siRNA sense strand
ugacgccuguuauagagaa

SEQ ID NO: 1277007 - RNA, 19 nt, Homo sapiens
  misc_RNA (1)...(19): siRNA sense strand
cgaguagauuauaagugua

SEQ ID NO: 1277008 - RNA, 19 nt, Homo sapiens
  misc_RNA (1)...(19): siRNA sense strand
gcacuuuauuuguaaugag

SEQ ID NO: 1277009 - RNA, 19 nt, Homo sapiens
  misc_RNA (1)...(19): siRNA sense strand
guagaaguauuugaguauc

SEQ ID NO: 1277010 - RNA, 19 nt, Homo sapiens
  misc_RNA (1)...(19): siRNA sense strand
guauuugaguaucuugaug

SEQ ID NO: 1277011 - RNA, 19 nt, Homo sapiens
  misc_RNA (1)...(19): siRNA sense strand
aggaauacuugacaguuug

SEQ ID NO: 1277012 - RNA, 19 nt, Homo sapiens
  misc_RNA (1)...(19): siRNA sense strand
ccaaaacccuacuaugaga

SEQ ID NO: 1277013 - RNA, 19 nt, Homo sapiens
  misc_RNA (1)...(19): siRNA sense strand
aguguaaaguggucaaaug

SEQ ID NO: 1277014 - RNA, 19 nt, Homo sapiens
  misc_RNA (1)...(19): siRNA sense strand
ccacccauacuauuuguga

SEQ ID NO: 1277015 - RNA, 19 nt, Homo sapiens
  misc_RNA (1)...(19): siRNA sense strand
uuggagagagcacgauuua

SEQ ID NO: 1277016 - RNA, 19 nt, Homo sapiens
  misc_RNA (1)...(19): siRNA sense strand
gguuaucagaugcacuuua

SEQ ID NO: 1277017 - RNA, 19 nt, Homo sapiens
  misc_RNA (1)...(19): siRNA sense strand
caccaacauuugaagcuau

SEQ ID NO: 1277018 - RNA, 19 nt, Homo sapiens
  misc_RNA (1)...(19): siRNA sense strand
ugaggagccaccaacauuu

SEQ ID NO: 1277019 - RNA, 19 nt, Homo sapiens
  misc_RNA (1)...(19): siRNA sense strand
ggaaggaauacuugacagu

SEQ ID NO: 1277020 - RNA, 19 nt, Homo sapiens
  misc_RNA (1)...(19): siRNA sense strand
gaggaaggaauacuugaca

SEQ ID NO: 1277021 - RNA, 19 nt, Homo sapiens
  misc_RNA (1)...(19): siRNA sense strand
ugaguaucuugaugcagua

SEQ ID NO: 1277022 - RNA, 19 nt, Homo sapiens
  misc_RNA (1)...(19): siRNA sense strand
caccuuuagugaaguagaa

SEQ ID NO: 1277023 - RNA, 19 nt, Homo sapiens
  misc_RNA (1)...(19): siRNA sense strand
acagauaucaggauuugga

SEQ ID NO: 1277024 - RNA, 19 nt, Homo sapiens
  misc_RNA (1)...(19): siRNA sense strand
ucauugcugugauuguuau

SEQ ID NO: 1277025 - RNA, 19 nt, Homo sapiens
  misc_RNA (1)...(19): siRNA sense strand
ucagaugcacuuuauuugu

SEQ ID NO: 1277026 - RNA, 19 nt, Homo sapiens
  misc_RNA (1)...(19): siRNA sense strand
gugcugcuccagaguguaa

SEQ ID NO: 1277027 - RNA, 19 nt, Homo sapiens
  misc_RNA (1)...(19): siRNA sense strand
ggaaaacacaccuuuagug

SEQ ID NO: 1277028 - RNA, 19 nt, Homo sapiens
  misc_RNA (1)...(19): siRNA sense strand
aaggaucaguagcaauuug

SEQ ID NO: 1277029 - RNA, 19 nt, Homo sapiens
  misc_RNA (1)...(19): siRNA sense strand
uauauacgggauccuuuaa

SEQ ID NO: 1277030 - RNA, 19 nt, Homo sapiens
  misc_RNA (1)...(19): siRNA sense strand
ugaaguagaaguauuugag

SEQ ID NO: 1277031 - RNA, 19 nt, Homo sapiens
  misc_RNA (1)...(19): siRNA sense strand
cuugacaguuuggauguuu

SEQ ID NO: 1277032 - RNA, 19 nt, Homo sapiens
  misc_RNA (1)...(19): siRNA sense strand
cauauauacgggauccuuu

SEQ ID NO: 1277033 - RNA, 19 nt, Homo sapiens
  misc_RNA (1)...(19): siRNA sense strand
auauauacgggauccuuua

SEQ ID NO: 1277034 - RNA, 19 nt, Homo sapiens
  misc_RNA (1)...(19): siRNA sense strand
cuuaaaggaucaguagcaa

SEQ ID NO: 1277035 - RNA, 19 nt, Homo sapiens
  misc_RNA (1)...(19): siRNA sense strand
uaaaccugaggaaggaaua

SEQ ID NO: 1277036 - RNA, 19 nt, Homo sapiens
  misc_RNA (1)...(19): siRNA sense strand
agaugacgccuguuauaga

SEQ ID NO: 1277037 - RNA, 19 nt, Homo sapiens
  misc_RNA (1)...(19): siRNA sense strand
ugugauuguuauugccaua

SEQ ID NO: 1277038 - RNA, 19 nt, Homo sapiens
  misc_RNA (1)...(19): siRNA sense strand
gagagcacgauuuauugug

SEQ ID NO: 1277039 - RNA, 19 nt, Homo sapiens
  misc_RNA (1)...(19): siRNA sense strand
gaaguauuugaguaucuug

SEQ ID NO: 1277040 - RNA, 19 nt, Homo sapiens
  misc_RNA (1)...(19): siRNA sense strand
ggcuaccugucucagauga

SEQ ID NO: 1277041 - RNA, 19 nt, Homo sapiens
  misc_RNA (1)...(19): siRNA sense strand
gauaucaggauuuggaaaa

SEQ ID NO: 1277042 - RNA, 19 nt, Homo sapiens
  misc_RNA (1)...(19): siRNA sense strand
ccucuugccacccauacua

SEQ ID NO: 1277043 - RNA, 19 nt, Homo sapiens
  misc_RNA (1)...(19): siRNA sense strand
ccaugguguugcugcugua

SEQ ID NO: 1277044 - RNA, 19 nt, Homo sapiens
  misc_RNA (1)...(19): siRNA sense strand
cagaugacgccuguuauag

SEQ ID NO: 1277045 - RNA, 19 nt, Homo sapiens
  misc_RNA (1)...(19): siRNA sense strand
cagaugguggagcugaaua

SEQ ID NO: 1277046 - RNA, 19 nt, Homo sapiens
  misc_RNA (1)...(19): siRNA sense strand
gucauugcugugauuguua

SEQ ID NO: 1277047 - RNA, 19 nt, Homo sapiens
  misc_RNA (1)...(19): siRNA sense strand
ggagccaccaacauuugaa

SEQ ID NO: 1277048 - RNA, 19 nt, Homo sapiens
  misc_RNA (1)...(19): siRNA sense strand
uuggugaacgaguagauua

SEQ ID NO: 1277049 - RNA, 19 nt, Homo sapiens
  misc_RNA (1)...(19): siRNA sense strand
gcgcuuuccuggguugcuu

SEQ ID NO: 1277050 - RNA, 19 nt, Homo sapiens
  misc_RNA (1)...(19): siRNA sense strand
uacuacaaagcaacaguua

SEQ ID NO: 1277051 - RNA, 19 nt, Homo sapiens
  misc_RNA (1)...(19): siRNA sense strand
cuugaugcaguaacuuaua

SEQ ID NO: 1277052 - RNA, 19 nt, Homo sapiens
  misc_RNA (1)...(19): siRNA sense strand
aaacauguccauauauacg

SEQ ID NO: 1277053 - RNA, 19 nt, Homo sapiens
  misc_RNA (1)...(19): siRNA sense strand
guguaaaguggucaaaugu

SEQ ID NO: 1277054 - RNA, 19 nt, Homo sapiens
  misc_RNA (1)...(19): siRNA sense strand
cuuacgaguuugguuauca

SEQ ID NO: 1277055 - RNA, 19 nt, Homo sapiens
  misc_RNA (1)...(19): siRNA sense strand
uacgggauccuuuaaaugg

SEQ ID NO: 1277056 - RNA, 19 nt, Homo sapiens
  misc_RNA (1)...(19): siRNA sense strand
gcagaugguggagcugaau

SEQ ID NO: 1277057 - RNA, 19 nt, Homo sapiens
  misc_RNA (1)...(19): siRNA sense strand
aaccaaaacccuacuauga

SEQ ID NO: 1277058 - RNA, 19 nt, Homo sapiens
  misc_RNA (1)...(19): siRNA sense strand
uugaugcaguaacuuauag

SEQ ID NO: 1277059 - RNA, 19 nt, Homo sapiens
  misc_RNA (1)...(19): siRNA sense strand
ggagcugaauaugccacuu

SEQ ID NO: 1277060 - RNA, 19 nt, Homo sapiens
  misc_RNA (1)...(19): siRNA sense strand
caacauuugaagcuaugga

SEQ ID NO: 1277061 - RNA, 19 nt, Homo sapiens
  misc_RNA (1)...(19): siRNA sense strand
cgauggcagcgacacaauu

SEQ ID NO: 1277062 - RNA, 19 nt, Homo sapiens
  misc_RNA (1)...(19): siRNA sense strand
gauccauuuucacuuauug

SEQ ID NO: 1277063 - RNA, 19 nt, Homo sapiens
  misc_RNA (1)...(19): siRNA sense strand
ggagagagcacgauuuauu

SEQ ID NO: 1277064 - RNA, 19 nt, Homo sapiens
  misc_RNA (1)...(19): siRNA sense strand
agagaaacauguccauaua

SEQ ID NO: 1277065 - RNA, 19 nt, Homo sapiens
  misc_RNA (1)...(19): siRNA sense strand
cagaugcacuuuauuugua

SEQ ID NO: 1277066 - RNA, 19 nt, Homo sapiens
  misc_RNA (1)...(19): siRNA sense strand
ggacuuacgaguuugguua

SEQ ID NO: 1277067 - RNA, 19 nt, Homo sapiens
  misc_RNA (1)...(19): siRNA sense strand
aaacagauaucaggauuug

SEQ ID NO: 1277068 - RNA, 19 nt, Homo sapiens
  misc_RNA (1)...(19): siRNA sense strand
cuauggagcucauugguaa

SEQ ID NO: 1277069 - RNA, 19 nt, Homo sapiens
  misc_RNA (1)...(19): siRNA sense strand
aaacacaccuuuagugaag

SEQ ID NO: 1277070 - RNA, 19 nt, Homo sapiens
  misc_RNA (1)...(19): siRNA sense strand
gaacuuaaaggaucaguag

SEQ ID NO: 1277071 - RNA, 19 nt, Homo sapiens
  misc_RNA (1)...(19): siRNA sense strand
gaaaacagauaucaggauu

SEQ ID NO: 1277072 - RNA, 19 nt, Homo sapiens
  misc_RNA (1)...(19): siRNA sense strand
uaaaggaucaguagcaauu

SEQ ID NO: 1277073 - RNA, 19 nt, Homo sapiens
  misc_RNA (1)...(19): siRNA sense strand
aaaugggacuuacgaguuu

SEQ ID NO: 1277074 - RNA, 19 nt, Homo sapiens
  misc_RNA (1)...(19): siRNA sense strand
guuaucagaugcacuuuau

SEQ ID NO: 1277075 - RNA, 19 nt, Homo sapiens
  misc_RNA (1)...(19): siRNA sense strand
gagcugaauaugccacuua

SEQ ID NO: 1277076 - RNA, 19 nt, Homo sapiens
  misc_RNA (1)...(19): siRNA sense strand
ugagauuggugaacgagua

SEQ ID NO: 1277077 - RNA, 19 nt, Homo sapiens
  misc_RNA (1)...(19): siRNA sense strand
gugaacgaguagauuauaa

SEQ ID NO: 1277078 - RNA, 19 nt, Homo sapiens
  misc_RNA (1)...(19): siRNA sense strand
gagagagcacgauuuauug

SEQ ID NO: 1277079 - RNA, 19 nt, Homo sapiens
  misc_RNA (1)...(19): siRNA sense strand
caaaugggacuuacgaguu

SEQ ID NO: 1277080 - RNA, 19 nt, Homo sapiens
  misc_RNA (1)...(19): siRNA sense strand
ggucauugcugugauuguu

SEQ ID NO: 1277081 - RNA, 19 nt, Homo sapiens
  misc_RNA (1)...(19): siRNA sense strand
ccagauccauuuucacuua

SEQ ID NO: 1277082 - RNA, 19 nt, Homo sapiens
  misc_RNA (1)...(19): siRNA sense strand
gaaggaauacuugacaguu

SEQ ID NO: 1277083 - RNA, 19 nt, Homo sapiens
  misc_RNA (1)...(19): siRNA sense strand
aaggaauacuugacaguuu

SEQ ID NO: 1277084 - RNA, 19 nt, Homo sapiens
  misc_RNA (1)...(19): siRNA sense strand
ucagaugacgccuguuaua

SEQ ID NO: 1277085 - RNA, 19 nt, Homo sapiens
  misc_RNA (1)...(19): siRNA sense strand
gaaaacacaccuuuaguga

SEQ ID NO: 1277086 - RNA, 19 nt, Homo sapiens
  misc_RNA (1)...(19): siRNA sense strand
gaugacgccuguuauagag

SEQ ID NO: 1277087 - RNA, 19 nt, Homo sapiens
  misc_RNA (1)...(19): siRNA sense strand
gagaaacauguccauauau

SEQ ID NO: 1277088 - RNA, 19 nt, Homo sapiens
  misc_RNA (1)...(19): siRNA sense strand
ccacuuaccagacuaaauc

SEQ ID NO: 1277089 - RNA, 19 nt, Homo sapiens
  misc_RNA (1)...(19): siRNA sense strand
acgaguagauuauaagugu

SEQ ID NO: 1277090 - RNA, 19 nt, Homo sapiens
  misc_RNA (1)...(19): siRNA sense strand
cuacaaagcaacaguuaug

SEQ ID NO: 1277091 - RNA, 19 nt, Homo sapiens
  misc_RNA (1)...(19): siRNA sense strand
ccaccaacauuugaagcua

SEQ ID NO: 1277092 - RNA, 19 nt, Homo sapiens
  misc_RNA (1)...(19): siRNA sense strand
uauacgggauccuuuaaau

SEQ ID NO: 1277093 - RNA, 19 nt, Homo sapiens
  misc_RNA (1)...(19): siRNA sense strand
cgaguuugguuaucagaug

SEQ ID NO: 1277094 - RNA, 19 nt, Homo sapiens
  misc_RNA (1)...(19): siRNA sense strand
gaacgaguagauuauaagu

SEQ ID NO: 1277095 - RNA, 19 nt, Homo sapiens
  misc_RNA (1)...(19): siRNA sense strand
gugaggagccaccaacauu

SEQ ID NO: 1277096 - RNA, 19 nt, Homo sapiens
  misc_RNA (1)...(19): siRNA sense strand
gauggcagcgacacaauug

SEQ ID NO: 1277097 - RNA, 19 nt, Homo sapiens
  misc_RNA (1)...(19): siRNA sense strand
ucucagaugacgccuguua

SEQ ID NO: 1277098 - RNA, 19 nt, Homo sapiens
  misc_RNA (1)...(19): siRNA sense strand
gaggagccaccaacauuug

SEQ ID NO: 1277099 - RNA, 19 nt, Homo sapiens
  misc_RNA (1)...(19): siRNA sense strand
gcuauggagcucauuggua

SEQ ID NO: 1277100 - RNA, 19 nt, Homo sapiens
  misc_RNA (1)...(19): siRNA sense strand
acacaccuuuagugaagua

SEQ ID NO: 1277101 - RNA, 19 nt, Homo sapiens
  misc_RNA (1)...(19): siRNA sense strand
uagagaaacauguccauau

SEQ ID NO: 1277102 - RNA, 19 nt, Homo sapiens
  misc_RNA (1)...(19): siRNA sense strand
guuccaaagugucuuaaag

SEQ ID NO: 1277103 - RNA, 19 nt, Homo sapiens
  misc_RNA (1)...(19): siRNA sense strand
ggugaacgaguagauuaua

SEQ ID NO: 1277104 - RNA, 19 nt, Homo sapiens
  misc_RNA (1)...(19): siRNA sense strand
gaaguagaaguauuugagu

SEQ ID NO: 1277105 - RNA, 19 nt, Homo sapiens
  misc_RNA (1)...(19): siRNA sense strand
gaaacauguccauauauac

SEQ ID NO: 1277106 - RNA, 19 nt, Homo sapiens
  misc_RNA (1)...(19): siRNA sense strand
ugacgccuguuauagagaa

SEQ ID NO: 1277107 - RNA, 19 nt, Homo sapiens
  misc_RNA (1)...(19): siRNA sense strand
cgaguagauuauaagugua

SEQ ID NO: 1277108 - RNA, 19 nt, Homo sapiens
  misc_RNA (1)...(19): siRNA sense strand
gcacuuuauuuguaaugag

SEQ ID NO: 1277109 - RNA, 19 nt, Homo sapiens
  misc_RNA (1)...(19): siRNA sense strand
guagaaguauuugaguauc

SEQ ID NO: 1277110 - RNA, 19 nt, Homo sapiens
  misc_RNA (1)...(19): siRNA sense strand
guauuugaguaucuugaug

SEQ ID NO: 1277111 - RNA, 19 nt, Homo sapiens
  misc_RNA (1)...(19): siRNA sense strand
aggaauacuugacaguuug

SEQ ID NO: 1277112 - RNA, 19 nt, Homo sapiens
  misc_RNA (1)...(19): siRNA sense strand
ccaaaacccuacuaugaga

SEQ ID NO: 1277113 - RNA, 19 nt, Homo sapiens
  misc_RNA (1)...(19): siRNA sense strand
aguguaaaguggucaaaug

SEQ ID NO: 1277114 - RNA, 19 nt, Homo sapiens
  misc_RNA (1)...(19): siRNA sense strand
ccacccauacuauuuguga

SEQ ID NO: 1277115 - RNA, 19 nt, Homo sapiens
  misc_RNA (1)...(19): siRNA sense strand
uuggagagagcacgauuua

SEQ ID NO: 1277116 - RNA, 19 nt, Homo sapiens
  misc_RNA (1)...(19): siRNA sense strand
gguuaucagaugcacuuua

SEQ ID NO: 1277117 - RNA, 19 nt, Homo sapiens
  misc_RNA (1)...(19): siRNA sense strand
caccaacauuugaagcuau

SEQ ID NO: 1277118 - RNA, 19 nt, Homo sapiens
  misc_RNA (1)...(19): siRNA sense strand
ugaggagccaccaacauuu

SEQ ID NO: 1277119 - RNA, 19 nt, Homo sapiens
  misc_RNA (1)...(19): siRNA sense strand
ggaaggaauacuugacagu

SEQ ID NO: 1277120 - RNA, 19 nt, Homo sapiens
  misc_RNA (1)...(19): siRNA sense strand
gaggaaggaauacuugaca

SEQ ID NO: 1277121 - RNA, 19 nt, Homo sapiens
  misc_RNA (1)...(19): siRNA sense strand
ccaguuccaaagugucuua

SEQ ID NO: 1277122 - RNA, 19 nt, Homo sapiens
  misc_RNA (1)...(19): siRNA sense strand
ugaguaucuugaugcagua

SEQ ID NO: 1277123 - RNA, 19 nt, Homo sapiens
  misc_RNA (1)...(19): siRNA sense strand
caccuuuagugaaguagaa

SEQ ID NO: 1277124 - RNA, 19 nt, Homo sapiens
  misc_RNA (1)...(19): siRNA sense strand
acagauaucaggauuugga

SEQ ID NO: 1277125 - RNA, 19 nt, Homo sapiens
  misc_RNA (1)...(19): siRNA sense strand
ucauugcugugauuguuau

SEQ ID NO: 1277126 - RNA, 19 nt, Homo sapiens
  misc_RNA (1)...(19): siRNA sense strand
ucagaugcacuuuauuugu

SEQ ID NO: 1277127 - RNA, 19 nt, Homo sapiens
  misc_RNA (1)...(19): siRNA sense strand
gugcugcuccagaguguaa

SEQ ID NO: 1277128 - RNA, 19 nt, Homo sapiens
  misc_RNA (1)...(19): siRNA sense strand
ggaaaacacaccuuuagug

SEQ ID NO: 1277129 - RNA, 19 nt, Homo sapiens
  misc_RNA (1)...(19): siRNA sense strand
aaggaucaguagcaauuug

SEQ ID NO: 1277130 - RNA, 19 nt, Homo sapiens
  misc_RNA (1)...(19): siRNA sense strand
uauauacgggauccuuuaa

SEQ ID NO: 1277131 - RNA, 19 nt, Homo sapiens
  misc_RNA (1)...(19): siRNA sense strand
ugaaguagaaguauuugag

SEQ ID NO: 1277132 - RNA, 19 nt, Homo sapiens
  misc_RNA (1)...(19): siRNA sense strand
cuugacaguuuggauguuu

SEQ ID NO: 1277133 - RNA, 19 nt, Homo sapiens
  misc_RNA (1)...(19): siRNA sense strand
cauauauacgggauccuuu

SEQ ID NO: 1277134 - RNA, 19 nt, Homo sapiens
  misc_RNA (1)...(19): siRNA sense strand
auauauacgggauccuuua

SEQ ID NO: 1277135 - RNA, 19 nt, Homo sapiens
  misc_RNA (1)...(19): siRNA sense strand
cuuaaaggaucaguagcaa

SEQ ID NO: 1277136 - RNA, 19 nt, Homo sapiens
  misc_RNA (1)...(19): siRNA sense strand
uaaaccugaggaaggaaua

SEQ ID NO: 1277137 - RNA, 19 nt, Homo sapiens
  misc_RNA (1)...(19): siRNA sense strand
agaugacgccuguuauaga

SEQ ID NO: 1277138 - RNA, 19 nt, Homo sapiens
  misc_RNA (1)...(19): siRNA sense strand
ugugauuguuauugccaua

SEQ ID NO: 1277139 - RNA, 19 nt, Homo sapiens
  misc_RNA (1)...(19): siRNA sense strand
gagagcacgauuuauugug

SEQ ID NO: 1277140 - RNA, 19 nt, Homo sapiens
  misc_RNA (1)...(19): siRNA sense strand
gaaguauuugaguaucuug

SEQ ID NO: 1277141 - RNA, 19 nt, Homo sapiens
  misc_RNA (1)...(19): siRNA sense strand
ggcuaccugucucagauga

SEQ ID NO: 1277142 - RNA, 19 nt, Homo sapiens
  misc_RNA (1)...(19): siRNA sense strand
gauaucaggauuuggaaaa

SEQ ID NO: 1277143 - RNA, 19 nt, Homo sapiens
  misc_RNA (1)...(19): siRNA sense strand
ccucuugccacccauacua

SEQ ID NO: 1277144 - RNA, 19 nt, Homo sapiens
  misc_RNA (1)...(19): siRNA sense strand
ccaugguguugcugcugua

SEQ ID NO: 1277145 - RNA, 19 nt, Homo sapiens
  misc_RNA (1)...(19): siRNA sense strand
cagaugacgccuguuauag

SEQ ID NO: 1277146 - RNA, 19 nt, Homo sapiens
  misc_RNA (1)...(19): siRNA sense strand
cagaugguggagcugaaua

SEQ ID NO: 1277147 - RNA, 19 nt, Homo sapiens
  misc_RNA (1)...(19): siRNA sense strand
gucauugcugugauuguua

SEQ ID NO: 1277148 - RNA, 19 nt, Homo sapiens
  misc_RNA (1)...(19): siRNA sense strand
ggagccaccaacauuugaa

SEQ ID NO: 1277149 - RNA, 19 nt, Homo sapiens
  misc_RNA (1)...(19): siRNA sense strand
uuggugaacgaguagauua

SEQ ID NO: 1277150 - RNA, 19 nt, Homo sapiens
  misc_RNA (1)...(19): siRNA sense strand
gcgcuuuccuggguugcuu

SEQ ID NO: 1277151 - RNA, 19 nt, Homo sapiens
  misc_RNA (1)...(19): siRNA sense strand
uacuacaaagcaacaguua

SEQ ID NO: 1277152 - RNA, 19 nt, Homo sapiens
  misc_RNA (1)...(19): siRNA sense strand
cuugaugcaguaacuuaua

SEQ ID NO: 1277153 - RNA, 19 nt, Homo sapiens
  misc_RNA (1)...(19): siRNA sense strand
aaacauguccauauauacg

SEQ ID NO: 1277154 - RNA, 19 nt, Homo sapiens
  misc_RNA (1)...(19): siRNA sense strand
guguaaaguggucaaaugu

SEQ ID NO: 1277155 - RNA, 19 nt, Homo sapiens
  misc_RNA (1)...(19): siRNA sense strand
cuuacgaguuugguuauca

SEQ ID NO: 1277156 - RNA, 19 nt, Homo sapiens
  misc_RNA (1)...(19): siRNA sense strand
uacgggauccuuuaaaugg

SEQ ID NO: 1277157 - RNA, 19 nt, Homo sapiens
  misc_RNA (1)...(19): siRNA sense strand
gcagaugguggagcugaau

SEQ ID NO: 1277158 - RNA, 19 nt, Homo sapiens
  misc_RNA (1)...(19): siRNA sense strand
aaccaaaacccuacuauga

SEQ ID NO: 1277159 - RNA, 19 nt, Homo sapiens
  misc_RNA (1)...(19): siRNA sense strand
uugaugcaguaacuuauag

SEQ ID NO: 1277160 - RNA, 19 nt, Homo sapiens
  misc_RNA (1)...(19): siRNA sense strand
ggagcugaauaugccacuu

SEQ ID NO: 1277161 - RNA, 19 nt, Homo sapiens
  misc_RNA (1)...(19): siRNA sense strand
cgauggcagcgacacaauu

SEQ ID NO: 1277162 - RNA, 19 nt, Homo sapiens
  misc_RNA (1)...(19): siRNA sense strand
gauccauuuucacuuauug

SEQ ID NO: 1277163 - RNA, 19 nt, Homo sapiens
  misc_RNA (1)...(19): siRNA sense strand
ggagagagcacgauuuauu

SEQ ID NO: 1277164 - RNA, 19 nt, Homo sapiens
  misc_RNA (1)...(19): siRNA sense strand
agagaaacauguccauaua

SEQ ID NO: 1277165 - RNA, 19 nt, Homo sapiens
  misc_RNA (1)...(19): siRNA sense strand
cagaugcacuuuauuugua

SEQ ID NO: 1277166 - RNA, 19 nt, Homo sapiens
  misc_RNA (1)...(19): siRNA sense strand
ggacuuacgaguuugguua

SEQ ID NO: 1277167 - RNA, 19 nt, Homo sapiens
  misc_RNA (1)...(19): siRNA sense strand
aaacagauaucaggauuug

SEQ ID NO: 1277168 - RNA, 19 nt, Homo sapiens
  misc_RNA (1)...(19): siRNA sense strand
cuauggagcucauugguaa

SEQ ID NO: 1277169 - RNA, 19 nt, Homo sapiens
  misc_RNA (1)...(19): siRNA sense strand
aaacacaccuuuagugaag

SEQ ID NO: 1277170 - RNA, 19 nt, Homo sapiens
  misc_RNA (1)...(19): siRNA sense strand
gaacuuaaaggaucaguag

SEQ ID NO: 1277171 - RNA, 19 nt, Homo sapiens
  misc_RNA (1)...(19): siRNA sense strand
gaaaacagauaucaggauu

SEQ ID NO: 1277172 - RNA, 19 nt, Homo sapiens
  misc_RNA (1)...(19): siRNA sense strand
uaaaggaucaguagcaauu

SEQ ID NO: 1277173 - RNA, 19 nt, Homo sapiens
  misc_RNA (1)...(19): siRNA sense strand
aaaugggacuuacgaguuu

SEQ ID NO: 1277174 - RNA, 19 nt, Homo sapiens
  misc_RNA (1)...(19): siRNA sense strand
guuaucagaugcacuuuau

SEQ ID NO: 1277175 - RNA, 19 nt, Homo sapiens
  misc_RNA (1)...(19): siRNA sense strand
gagcugaauaugccacuua

SEQ ID NO: 1277176 - RNA, 19 nt, Homo sapiens
  misc_RNA (1)...(19): siRNA sense strand
ugagauuggugaacgagua

SEQ ID NO: 1277177 - RNA, 19 nt, Homo sapiens
  misc_RNA (1)...(19): siRNA sense strand
gugaacgaguagauuauaa

SEQ ID NO: 1277178 - RNA, 19 nt, Homo sapiens
  misc_RNA (1)...(19): siRNA sense strand
gagagagcacgauuuauug

SEQ ID NO: 1277179 - RNA, 19 nt, Homo sapiens
  misc_RNA (1)...(19): siRNA sense strand
caaaugggacuuacgaguu

SEQ ID NO: 1277180 - RNA, 19 nt, Homo sapiens
  misc_RNA (1)...(19): siRNA sense strand
ggucauugcugugauuguu

SEQ ID NO: 1277181 - RNA, 19 nt, Homo sapiens
  misc_RNA (1)...(19): siRNA sense strand
ccagauccauuuucacuua

SEQ ID NO: 1277182 - RNA, 19 nt, Homo sapiens
  misc_RNA (1)...(19): siRNA sense strand
gaaggaauacuugacaguu

SEQ ID NO: 1277183 - RNA, 19 nt, Homo sapiens
  misc_RNA (1)...(19): siRNA sense strand
aaggaauacuugacaguuu

SEQ ID NO: 1277184 - RNA, 19 nt, Homo sapiens
  misc_RNA (1)...(19): siRNA sense strand
ucagaugacgccuguuaua

SEQ ID NO: 1277185 - RNA, 19 nt, Homo sapiens
  misc_RNA (1)...(19): siRNA sense strand
gaaaacacaccuuuaguga

SEQ ID NO: 1277186 - RNA, 19 nt, Homo sapiens
  misc_RNA (1)...(19): siRNA sense strand
gaugacgccuguuauagag

SEQ ID NO: 1277187 - RNA, 19 nt, Homo sapiens
  misc_RNA (1)...(19): siRNA sense strand
gagaaacauguccauauau

SEQ ID NO: 1277188 - RNA, 19 nt, Homo sapiens
  misc_RNA (1)...(19): siRNA sense strand
ccacuuaccagacuaaauc

SEQ ID NO: 1277189 - RNA, 19 nt, Homo sapiens
  misc_RNA (1)...(19): siRNA sense strand
acgaguagauuauaagugu

SEQ ID NO: 1277190 - RNA, 19 nt, Homo sapiens
  misc_RNA (1)...(19): siRNA sense strand
cuacaaagcaacaguuaug

SEQ ID NO: 1277191 - RNA, 19 nt, Homo sapiens
  misc_RNA (1)...(19): siRNA sense strand
ccaccaacauuugaagcua

SEQ ID NO: 1277192 - RNA, 19 nt, Homo sapiens
  misc_RNA (1)...(19): siRNA sense strand
uauacgggauccuuuaaau

SEQ ID NO: 1277193 - RNA, 19 nt, Homo sapiens
  misc_RNA (1)...(19): siRNA sense strand
cgaguuugguuaucagaug

SEQ ID NO: 1277194 - RNA, 19 nt, Homo sapiens
  misc_RNA (1)...(19): siRNA sense strand
gaacgaguagauuauaagu

SEQ ID NO: 1277195 - RNA, 19 nt, Homo sapiens
  misc_RNA (1)...(19): siRNA sense strand
gugaggagccaccaacauu

SEQ ID NO: 1277196 - RNA, 19 nt, Homo sapiens
  misc_RNA (1)...(19): siRNA sense strand
gauggcagcgacacaauug

SEQ ID NO: 1277197 - RNA, 19 nt, Homo sapiens
  misc_RNA (1)...(19): siRNA sense strand
ucucagaugacgccuguua

SEQ ID NO: 1277198 - RNA, 19 nt, Homo sapiens
  misc_RNA (1)...(19): siRNA sense strand
gaggagccaccaacauuug

SEQ ID NO: 1277199 - RNA, 19 nt, Homo sapiens
  misc_RNA (1)...(19): siRNA sense strand
gcuauggagcucauuggua

SEQ ID NO: 1277200 - RNA, 19 nt, Homo sapiens
  misc_RNA (1)...(19): siRNA sense strand
acacaccuuuagugaagua

SEQ ID NO: 1277201 - RNA, 19 nt, Homo sapiens
  misc_RNA (1)...(19): siRNA sense strand
uagagaaacauguccauau

SEQ ID NO: 1277202 - RNA, 19 nt, Homo sapiens
  misc_RNA (1)...(19): siRNA sense strand
guuccaaagugucuuaaag

SEQ ID NO: 1277203 - RNA, 19 nt, Homo sapiens
  misc_RNA (1)...(19): siRNA sense strand
ggugaacgaguagauuaua

SEQ ID NO: 1277204 - RNA, 19 nt, Homo sapiens
  misc_RNA (1)...(19): siRNA sense strand
gaaguagaaguauuugagu

SEQ ID NO: 1277205 - RNA, 19 nt, Homo sapiens
  misc_RNA (1)...(19): siRNA sense strand
gaaacauguccauauauac

SEQ ID NO: 1277206 - RNA, 19 nt, Homo sapiens
  misc_RNA (1)...(19): siRNA sense strand
ugacgccuguuauagagaa

SEQ ID NO: 1277207 - RNA, 19 nt, Homo sapiens
  misc_RNA (1)...(19): siRNA sense strand
cgaguagauuauaagugua

SEQ ID NO: 1277208 - RNA, 19 nt, Homo sapiens
  misc_RNA (1)...(19): siRNA sense strand
gcacuuuauuuguaaugag

SEQ ID NO: 1277209 - RNA, 19 nt, Homo sapiens
  misc_RNA (1)...(19): siRNA sense strand
guagaaguauuugaguauc

SEQ ID NO: 1277210 - RNA, 19 nt, Homo sapiens
  misc_RNA (1)...(19): siRNA sense strand
guauuugaguaucuugaug

SEQ ID NO: 1277211 - RNA, 19 nt, Homo sapiens
  misc_RNA (1)...(19): siRNA sense strand
aggaauacuugacaguuug

SEQ ID NO: 1277212 - RNA, 19 nt, Homo sapiens
  misc_RNA (1)...(19): siRNA sense strand
ccaaaacccuacuaugaga

SEQ ID NO: 1277213 - RNA, 19 nt, Homo sapiens
  misc_RNA (1)...(19): siRNA sense strand
aguguaaaguggucaaaug

SEQ ID NO: 1277214 - RNA, 19 nt, Homo sapiens
  misc_RNA (1)...(19): siRNA sense strand
ccacccauacuauuuguga

SEQ ID NO: 1277215 - RNA, 19 nt, Homo sapiens
  misc_RNA (1)...(19): siRNA sense strand
uuggagagagcacgauuua

SEQ ID NO: 1277216 - RNA, 19 nt, Homo sapiens
  misc_RNA (1)...(19): siRNA sense strand
gguuaucagaugcacuuua

SEQ ID NO: 1277217 - RNA, 19 nt, Homo sapiens
  misc_RNA (1)...(19): siRNA sense strand
caccaacauuugaagcuau

SEQ ID NO: 1277218 - RNA, 19 nt, Homo sapiens
  misc_RNA (1)...(19): siRNA sense strand
ugaggagccaccaacauuu

SEQ ID NO: 1277219 - RNA, 19 nt, Homo sapiens
  misc_RNA (1)...(19): siRNA sense strand
ggaaggaauacuugacagu

SEQ ID NO: 1277220 - RNA, 19 nt, Homo sapiens
  misc_RNA (1)...(19): siRNA sense strand
gaggaaggaauacuugaca

SEQ ID NO: 1277221 - RNA, 19 nt, Homo sapiens
  misc_RNA (1)...(19): siRNA sense strand
ccaguuccaaagugucuua

SEQ ID NO: 1277222 - RNA, 19 nt, Homo sapiens
  misc_RNA (1)...(19): siRNA sense strand
ugaguaucuugaugcagua

SEQ ID NO: 1277223 - RNA, 19 nt, Homo sapiens
  misc_RNA (1)...(19): siRNA sense strand
caccuuuagugaaguagaa

SEQ ID NO: 1277224 - RNA, 19 nt, Homo sapiens
  misc_RNA (1)...(19): siRNA sense strand
acagauaucaggauuugga

SEQ ID NO: 1277225 - RNA, 19 nt, Homo sapiens
  misc_RNA (1)...(19): siRNA sense strand
ucauugcugugauuguuau

SEQ ID NO: 1277226 - RNA, 19 nt, Homo sapiens
  misc_RNA (1)...(19): siRNA sense strand
ucagaugcacuuuauuugu

SEQ ID NO: 1277227 - RNA, 19 nt, Homo sapiens
  misc_RNA (1)...(19): siRNA sense strand
gugcugcuccagaguguaa

SEQ ID NO: 1277228 - RNA, 19 nt, Homo sapiens
  misc_RNA (1)...(19): siRNA sense strand
ggaaaacacaccuuuagug

SEQ ID NO: 1277229 - RNA, 19 nt, Homo sapiens
  misc_RNA (1)...(19): siRNA sense strand
aaggaucaguagcaauuug

SEQ ID NO: 1277230 - RNA, 19 nt, Homo sapiens
  misc_RNA (1)...(19): siRNA sense strand
uauauacgggauccuuuaa

SEQ ID NO: 1277231 - RNA, 19 nt, Homo sapiens
  misc_RNA (1)...(19): siRNA sense strand
ugaaguagaaguauuugag

SEQ ID NO: 1277232 - RNA, 19 nt, Homo sapiens
  misc_RNA (1)...(19): siRNA sense strand
cuugacaguuuggauguuu

SEQ ID NO: 1277233 - RNA, 19 nt, Homo sapiens
  misc_RNA (1)...(19): siRNA sense strand
cauauauacgggauccuuu

SEQ ID NO: 1277234 - RNA, 19 nt, Homo sapiens
  misc_RNA (1)...(19): siRNA sense strand
auauauacgggauccuuua

SEQ ID NO: 1277235 - RNA, 19 nt, Homo sapiens
  misc_RNA (1)...(19): siRNA sense strand
cuuaaaggaucaguagcaa

SEQ ID NO: 1277236 - RNA, 19 nt, Homo sapiens
  misc_RNA (1)...(19): siRNA sense strand
uaaaccugaggaaggaaua

SEQ ID NO: 1277237 - RNA, 19 nt, Homo sapiens
  misc_RNA (1)...(19): siRNA sense strand
agaugacgccuguuauaga

SEQ ID NO: 1277238 - RNA, 19 nt, Homo sapiens
  misc_RNA (1)...(19): siRNA sense strand
ugugauuguuauugccaua

SEQ ID NO: 1277239 - RNA, 19 nt, Homo sapiens
  misc_RNA (1)...(19): siRNA sense strand
gagagcacgauuuauugug

SEQ ID NO: 1277240 - RNA, 19 nt, Homo sapiens
  misc_RNA (1)...(19): siRNA sense strand
gaaguauuugaguaucuug

SEQ ID NO: 1277241 - RNA, 19 nt, Homo sapiens
  misc_RNA (1)...(19): siRNA sense strand
ggcuaccugucucagauga

SEQ ID NO: 1277242 - RNA, 19 nt, Homo sapiens
  misc_RNA (1)...(19): siRNA sense strand
gauaucaggauuuggaaaa

SEQ ID NO: 1277243 - RNA, 19 nt, Homo sapiens
  misc_RNA (1)...(19): siRNA sense strand
ccucuugccacccauacua

SEQ ID NO: 1277244 - RNA, 19 nt, Homo sapiens
  misc_RNA (1)...(19): siRNA sense strand
ccaugguguugcugcugua

SEQ ID NO: 1277245 - RNA, 19 nt, Homo sapiens
  misc_RNA (1)...(19): siRNA sense strand
cagaugacgccuguuauag

SEQ ID NO: 1277246 - RNA, 19 nt, Homo sapiens
  misc_RNA (1)...(19): siRNA sense strand
cagaugguggagcugaaua

SEQ ID NO: 1277247 - RNA, 19 nt, Homo sapiens
  misc_RNA (1)...(19): siRNA sense strand
gucauugcugugauuguua

SEQ ID NO: 1277248 - RNA, 19 nt, Homo sapiens
  misc_RNA (1)...(19): siRNA sense strand
ggagccaccaacauuugaa

SEQ ID NO: 1277249 - RNA, 19 nt, Homo sapiens
  misc_RNA (1)...(19): siRNA sense strand
uuggugaacgaguagauua

SEQ ID NO: 1277250 - RNA, 19 nt, Homo sapiens
  misc_RNA (1)...(19): siRNA sense strand
gcgcuuuccuggguugcuu

SEQ ID NO: 1277251 - RNA, 19 nt, Homo sapiens
  misc_RNA (1)...(19): siRNA sense strand
uacuacaaagcaacaguua

SEQ ID NO: 1277252 - RNA, 19 nt, Homo sapiens
  misc_RNA (1)...(19): siRNA sense strand
cuugaugcaguaacuuaua

SEQ ID NO: 1277253 - RNA, 19 nt, Homo sapiens
  misc_RNA (1)...(19): siRNA sense strand
aaacauguccauauauacg

SEQ ID NO: 1277254 - RNA, 19 nt, Homo sapiens
  misc_RNA (1)...(19): siRNA sense strand
guguaaaguggucaaaugu

SEQ ID NO: 1277255 - RNA, 19 nt, Homo sapiens
  misc_RNA (1)...(19): siRNA sense strand
cuuacgaguuugguuauca

SEQ ID NO: 1277256 - RNA, 19 nt, Homo sapiens
  misc_RNA (1)...(19): siRNA sense strand
uacgggauccuuuaaaugg

SEQ ID NO: 1277257 - RNA, 19 nt, Homo sapiens
  misc_RNA (1)...(19): siRNA sense strand
gcagaugguggagcugaau

SEQ ID NO: 1277258 - RNA, 19 nt, Homo sapiens
  misc_RNA (1)...(19): siRNA sense strand
aaccaaaacccuacuauga

SEQ ID NO: 1277259 - RNA, 19 nt, Homo sapiens
  misc_RNA (1)...(19): siRNA sense strand
uugaugcaguaacuuauag

SEQ ID NO: 1277260 - RNA, 19 nt, Homo sapiens
  misc_RNA (1)...(19): siRNA sense strand
ggagcugaauaugccacuu

SEQ ID NO: 1277261 - RNA, 19 nt, Homo sapiens
  misc_RNA (1)...(19): siRNA sense strand
cgauggcagcgacacaauu

SEQ ID NO: 1277262 - RNA, 19 nt, Homo sapiens
  misc_RNA (1)...(19): siRNA sense strand
gauccauuuucacuuauug

SEQ ID NO: 1277263 - RNA, 19 nt, Homo sapiens
  misc_RNA (1)...(19): siRNA sense strand
ggagagagcacgauuuauu

SEQ ID NO: 1277264 - RNA, 19 nt, Homo sapiens
  misc_RNA (1)...(19): siRNA sense strand
agagaaacauguccauaua

SEQ ID NO: 1277265 - RNA, 19 nt, Homo sapiens
  misc_RNA (1)...(19): siRNA sense strand
cagaugcacuuuauuugua

SEQ ID NO: 1277266 - RNA, 19 nt, Homo sapiens
  misc_RNA (1)...(19): siRNA sense strand
ggacuuacgaguuugguua

SEQ ID NO: 1277267 - RNA, 19 nt, Homo sapiens
  misc_RNA (1)...(19): siRNA sense strand
aaacagauaucaggauuug

SEQ ID NO: 1277268 - RNA, 19 nt, Homo sapiens
  misc_RNA (1)...(19): siRNA sense strand
cuauggagcucauugguaa

SEQ ID NO: 1277269 - RNA, 19 nt, Homo sapiens
  misc_RNA (1)...(19): siRNA sense strand
aaacacaccuuuagugaag

SEQ ID NO: 1277270 - RNA, 19 nt, Homo sapiens
  misc_RNA (1)...(19): siRNA sense strand
gaacuuaaaggaucaguag

SEQ ID NO: 1277271 - RNA, 19 nt, Homo sapiens
  misc_RNA (1)...(19): siRNA sense strand
gaaaacagauaucaggauu

SEQ ID NO: 1277272 - RNA, 19 nt, Homo sapiens
  misc_RNA (1)...(19): siRNA sense strand
uaaaggaucaguagcaauu

SEQ ID NO: 1277273 - RNA, 19 nt, Homo sapiens
  misc_RNA (1)...(19): siRNA sense strand
aaaugggacuuacgaguuu

SEQ ID NO: 1277274 - RNA, 19 nt, Homo sapiens
  misc_RNA (1)...(19): siRNA sense strand
guuaucagaugcacuuuau

SEQ ID NO: 1277275 - RNA, 19 nt, Homo sapiens
  misc_RNA (1)...(19): siRNA sense strand
gagcugaauaugccacuua

SEQ ID NO: 1277276 - RNA, 19 nt, Homo sapiens
  misc_RNA (1)...(19): siRNA sense strand
ugagauuggugaacgagua

SEQ ID NO: 1277277 - RNA, 19 nt, Homo sapiens
  misc_RNA (1)...(19): siRNA sense strand
gugaacgaguagauuauaa

SEQ ID NO: 1277278 - RNA, 19 nt, Homo sapiens
  misc_RNA (1)...(19): siRNA sense strand
gagagagcacgauuuauug

SEQ ID NO: 1277279 - RNA, 19 nt, Homo sapiens
  misc_RNA (1)...(19): siRNA sense strand
caaaugggacuuacgaguu

SEQ ID NO: 1277280 - RNA, 19 nt, Homo sapiens
  misc_RNA (1)...(19): siRNA sense strand
ggucauugcugugauuguu

SEQ ID NO: 1277281 - RNA, 19 nt, Homo sapiens
  misc_RNA (1)...(19): siRNA sense strand
ccagauccauuuucacuua

SEQ ID NO: 1277282 - RNA, 19 nt, Homo sapiens
  misc_RNA (1)...(19): siRNA sense strand
gaaggaauacuugacaguu

SEQ ID NO: 1277283 - RNA, 19 nt, Homo sapiens
  misc_RNA (1)...(19): siRNA sense strand
aaggaauacuugacaguuu

SEQ ID NO: 1277284 - RNA, 19 nt, Homo sapiens
  misc_RNA (1)...(19): siRNA sense strand
ucagaugacgccuguuaua

SEQ ID NO: 1277285 - RNA, 19 nt, Homo sapiens
  misc_RNA (1)...(19): siRNA sense strand
gaaaacacaccuuuaguga

SEQ ID NO: 1277286 - RNA, 19 nt, Homo sapiens
  misc_RNA (1)...(19): siRNA sense strand
gaugacgccuguuauagag

SEQ ID NO: 1277287 - RNA, 19 nt, Homo sapiens
  misc_RNA (1)...(19): siRNA sense strand
gagaaacauguccauauau

SEQ ID NO: 1277288 - RNA, 19 nt, Homo sapiens
  misc_RNA (1)...(19): siRNA sense strand
ccacuuaccagacuaaauc

SEQ ID NO: 1277289 - RNA, 19 nt, Homo sapiens
  misc_RNA (1)...(19): siRNA sense strand
acgaguagauuauaagugu

SEQ ID NO: 1277290 - RNA, 19 nt, Homo sapiens
  misc_RNA (1)...(19): siRNA sense strand
cuacaaagcaacaguuaug

SEQ ID NO: 1277291 - RNA, 19 nt, Homo sapiens
  misc_RNA (1)...(19): siRNA sense strand
ccaccaacauuugaagcua

SEQ ID NO: 1277292 - RNA, 19 nt, Homo sapiens
  misc_RNA (1)...(19): siRNA sense strand
uauacgggauccuuuaaau

SEQ ID NO: 1277293 - RNA, 19 nt, Homo sapiens
  misc_RNA (1)...(19): siRNA sense strand
cgaguuugguuaucagaug

SEQ ID NO: 1277294 - RNA, 19 nt, Homo sapiens
  misc_RNA (1)...(19): siRNA sense strand
gaacgaguagauuauaagu

SEQ ID NO: 1277295 - RNA, 19 nt, Homo sapiens
  misc_RNA (1)...(19): siRNA sense strand
gugaggagccaccaacauu

SEQ ID NO: 1277296 - RNA, 19 nt, Homo sapiens
  misc_RNA (1)...(19): siRNA sense strand
gauggcagcgacacaauug

SEQ ID NO: 1277297 - RNA, 19 nt, Homo sapiens
  misc_RNA (1)...(19): siRNA sense strand
ucucagaugacgccuguua

SEQ ID NO: 1277298 - RNA, 19 nt, Homo sapiens
  misc_RNA (1)...(19): siRNA sense strand
gaggagccaccaacauuug

SEQ ID NO: 1277299 - RNA, 19 nt, Homo sapiens
  misc_RNA (1)...(19): siRNA sense strand
gcuauggagcucauuggua

SEQ ID NO: 1277300 - RNA, 19 nt, Homo sapiens
  misc_RNA (1)...(19): siRNA sense strand
acacaccuuuagugaagua

SEQ ID NO: 1277301 - RNA, 19 nt, Homo sapiens
  misc_RNA (1)...(19): siRNA sense strand
uagagaaacauguccauau

SEQ ID NO: 1277302 - RNA, 19 nt, Homo sapiens
  misc_RNA (1)...(19): siRNA sense strand
guuccaaagugucuuaaag

SEQ ID NO: 1277303 - RNA, 19 nt, Homo sapiens
  misc_RNA (1)...(19): siRNA sense strand
ggugaacgaguagauuaua

SEQ ID NO: 1277304 - RNA, 19 nt, Homo sapiens
  misc_RNA (1)...(19): siRNA sense strand
gaaguagaaguauuugagu

SEQ ID NO: 1277305 - RNA, 19 nt, Homo sapiens
  misc_RNA (1)...(19): siRNA sense strand
gaaacauguccauauauac

SEQ ID NO: 1277306 - RNA, 19 nt, Homo sapiens
  misc_RNA (1)...(19): siRNA sense strand
ugacgccuguuauagagaa

SEQ ID NO: 1277307 - RNA, 19 nt, Homo sapiens
  misc_RNA (1)...(19): siRNA sense strand
cgaguagauuauaagugua

SEQ ID NO: 1277308 - RNA, 19 nt, Homo sapiens
  misc_RNA (1)...(19): siRNA sense strand
gcacuuuauuuguaaugag

SEQ ID NO: 1277309 - RNA, 19 nt, Homo sapiens
  misc_RNA (1)...(19): siRNA sense strand
guagaaguauuugaguauc

SEQ ID NO: 1277310 - RNA, 19 nt, Homo sapiens
  misc_RNA (1)...(19): siRNA sense strand
guauuugaguaucuugaug

SEQ ID NO: 1277311 - RNA, 19 nt, Homo sapiens
  misc_RNA (1)...(19): siRNA sense strand
aggaauacuugacaguuug

SEQ ID NO: 1277312 - RNA, 19 nt, Homo sapiens
  misc_RNA (1)...(19): siRNA sense strand
ccaaaacccuacuaugaga

SEQ ID NO: 1277313 - RNA, 19 nt, Homo sapiens
  misc_RNA (1)...(19): siRNA sense strand
aguguaaaguggucaaaug

SEQ ID NO: 1277314 - RNA, 19 nt, Homo sapiens
  misc_RNA (1)...(19): siRNA sense strand
ccacccauacuauuuguga

SEQ ID NO: 1277315 - RNA, 19 nt, Homo sapiens
  misc_RNA (1)...(19): siRNA sense strand
uuggagagagcacgauuua

SEQ ID NO: 1277316 - RNA, 19 nt, Homo sapiens
  misc_RNA (1)...(19): siRNA sense strand
gguuaucagaugcacuuua

SEQ ID NO: 1277317 - RNA, 19 nt, Homo sapiens
  misc_RNA (1)...(19): siRNA sense strand
caccaacauuugaagcuau

SEQ ID NO: 1277318 - RNA, 19 nt, Homo sapiens
  misc_RNA (1)...(19): siRNA sense strand
ugaggagccaccaacauuu

SEQ ID NO: 1277319 - RNA, 19 nt, Homo sapiens
  misc_RNA (1)...(19): siRNA sense strand
ggaaggaauacuugacagu

SEQ ID NO: 1277320 - RNA, 19 nt, Homo sapiens
  misc_RNA (1)...(19): siRNA sense strand
gaggaaggaauacuugaca

SEQ ID NO: 1277321 - RNA, 19 nt, Homo sapiens
  misc_RNA (1)...(19): siRNA sense strand
ccaguuccaaagugucuua

SEQ ID NO: 1277322 - RNA, 19 nt, Homo sapiens
  misc_RNA (1)...(19): siRNA sense strand
ugaguaucuugaugcagua

SEQ ID NO: 1277323 - RNA, 19 nt, Homo sapiens
  misc_RNA (1)...(19): siRNA sense strand
caccuuuagugaaguagaa

SEQ ID NO: 1277324 - RNA, 19 nt, Homo sapiens
  misc_RNA (1)...(19): siRNA sense strand
acagauaucaggauuugga

SEQ ID NO: 1277325 - RNA, 19 nt, Homo sapiens
  misc_RNA (1)...(19): siRNA sense strand
ucauugcugugauuguuau

SEQ ID NO: 1277326 - RNA, 19 nt, Homo sapiens
  misc_RNA (1)...(19): siRNA sense strand
ucagaugcacuuuauuugu

SEQ ID NO: 1277327 - RNA, 19 nt, Homo sapiens
  misc_RNA (1)...(19): siRNA sense strand
gugcugcuccagaguguaa

SEQ ID NO: 1277328 - RNA, 19 nt, Homo sapiens
  misc_RNA (1)...(19): siRNA sense strand
ggaaaacacaccuuuagug

SEQ ID NO: 1277329 - RNA, 19 nt, Homo sapiens
  misc_RNA (1)...(19): siRNA sense strand
aaggaucaguagcaauuug

SEQ ID NO: 1277330 - RNA, 19 nt, Homo sapiens
  misc_RNA (1)...(19): siRNA sense strand
uauauacgggauccuuuaa

SEQ ID NO: 1277331 - RNA, 19 nt, Homo sapiens
  misc_RNA (1)...(19): siRNA sense strand
ugaaguagaaguauuugag

SEQ ID NO: 1277332 - RNA, 19 nt, Homo sapiens
  misc_RNA (1)...(19): siRNA sense strand
cuugacaguuuggauguuu

SEQ ID NO: 1277333 - RNA, 19 nt, Homo sapiens
  misc_RNA (1)...(19): siRNA sense strand
cauauauacgggauccuuu

SEQ ID NO: 1277334 - RNA, 19 nt, Homo sapiens
  misc_RNA (1)...(19): siRNA sense strand
auauauacgggauccuuua

SEQ ID NO: 1277335 - RNA, 19 nt, Homo sapiens
  misc_RNA (1)...(19): siRNA sense strand
cuuaaaggaucaguagcaa

SEQ ID NO: 1277336 - RNA, 19 nt, Homo sapiens
  misc_RNA (1)...(19): siRNA sense strand
uaaaccugaggaaggaaua

SEQ ID NO: 1277337 - RNA, 19 nt, Homo sapiens
  misc_RNA (1)...(19): siRNA sense strand
agaugacgccuguuauaga

SEQ ID NO: 1277338 - RNA, 19 nt, Homo sapiens
  misc_RNA (1)...(19): siRNA sense strand
ugugauuguuauugccaua

SEQ ID NO: 1277339 - RNA, 19 nt, Homo sapiens
  misc_RNA (1)...(19): siRNA sense strand
gagagcacgauuuauugug

SEQ ID NO: 1277340 - RNA, 19 nt, Homo sapiens
  misc_RNA (1)...(19): siRNA sense strand
gaaguauuugaguaucuug

SEQ ID NO: 1277341 - RNA, 19 nt, Homo sapiens
  misc_RNA (1)...(19): siRNA sense strand
ggcuaccugucucagauga

SEQ ID NO: 1277342 - RNA, 19 nt, Homo sapiens
  misc_RNA (1)...(19): siRNA sense strand
gauaucaggauuuggaaaa

SEQ ID NO: 1277343 - RNA, 19 nt, Homo sapiens
  misc_RNA (1)...(19): siRNA sense strand
ccucuugccacccauacua

SEQ ID NO: 1277344 - RNA, 19 nt, Homo sapiens
  misc_RNA (1)...(19): siRNA sense strand
ccaugguguugcugcugua

SEQ ID NO: 1277345 - RNA, 19 nt, Homo sapiens
  misc_RNA (1)...(19): siRNA sense strand
cagaugacgccuguuauag

SEQ ID NO: 1277346 - RNA, 19 nt, Homo sapiens
  misc_RNA (1)...(19): siRNA sense strand
cagaugguggagcugaaua

SEQ ID NO: 1277347 - RNA, 19 nt, Homo sapiens
  misc_RNA (1)...(19): siRNA sense strand
gucauugcugugauuguua

SEQ ID NO: 1277348 - RNA, 19 nt, Homo sapiens
  misc_RNA (1)...(19): siRNA sense strand
ggagccaccaacauuugaa

SEQ ID NO: 1277349 - RNA, 19 nt, Homo sapiens
  misc_RNA (1)...(19): siRNA sense strand
uuggugaacgaguagauua

SEQ ID NO: 1277350 - RNA, 19 nt, Homo sapiens
  misc_RNA (1)...(19): siRNA sense strand
gcgcuuuccuggguugcuu

SEQ ID NO: 1277351 - RNA, 19 nt, Homo sapiens
  misc_RNA (1)...(19): siRNA sense strand
uacuacaaagcaacaguua

SEQ ID NO: 1277352 - RNA, 19 nt, Homo sapiens
  misc_RNA (1)...(19): siRNA sense strand
cuugaugcaguaacuuaua

SEQ ID NO: 1277353 - RNA, 19 nt, Homo sapiens
  misc_RNA (1)...(19): siRNA sense strand
aaacauguccauauauacg

SEQ ID NO: 1277354 - RNA, 19 nt, Homo sapiens
  misc_RNA (1)...(19): siRNA sense strand
guguaaaguggucaaaugu

SEQ ID NO: 1277355 - RNA, 19 nt, Homo sapiens
  misc_RNA (1)...(19): siRNA sense strand
cuuacgaguuugguuauca

SEQ ID NO: 1277356 - RNA, 19 nt, Homo sapiens
  misc_RNA (1)...(19): siRNA sense strand
uacgggauccuuuaaaugg

SEQ ID NO: 1277357 - RNA, 19 nt, Homo sapiens
  misc_RNA (1)...(19): siRNA sense strand
gcagaugguggagcugaau

SEQ ID NO: 1277358 - RNA, 19 nt, Homo sapiens
  misc_RNA (1)...(19): siRNA sense strand
aaccaaaacccuacuauga

SEQ ID NO: 1277359 - RNA, 19 nt, Homo sapiens
  misc_RNA (1)...(19): siRNA sense strand
uugaugcaguaacuuauag

SEQ ID NO: 1277360 - RNA, 19 nt, Homo sapiens
  misc_RNA (1)...(19): siRNA sense strand
ggagcugaauaugccacuu

SEQ ID NO: 1277361 - RNA, 19 nt, Homo sapiens
  misc_RNA (1)...(19): siRNA sense strand
cgauggcagcgacacaauu

SEQ ID NO: 1277362 - RNA, 19 nt, Homo sapiens
  misc_RNA (1)...(19): siRNA sense strand
gauccauuuucacuuauug

SEQ ID NO: 1277363 - RNA, 19 nt, Homo sapiens
  misc_RNA (1)...(19): siRNA sense strand
ggagagagcacgauuuauu

SEQ ID NO: 1277364 - RNA, 19 nt, Homo sapiens
  misc_RNA (1)...(19): siRNA sense strand
agagaaacauguccauaua

SEQ ID NO: 1277365 - RNA, 19 nt, Homo sapiens
  misc_RNA (1)...(19): siRNA sense strand
cagaugcacuuuauuugua

SEQ ID NO: 1277366 - RNA, 19 nt, Homo sapiens
  misc_RNA (1)...(19): siRNA sense strand
ggacuuacgaguuugguua

SEQ ID NO: 1277367 - RNA, 19 nt, Homo sapiens
  misc_RNA (1)...(19): siRNA sense strand
aaacagauaucaggauuug

SEQ ID NO: 1277368 - RNA, 19 nt, Homo sapiens
  misc_RNA (1)...(19): siRNA sense strand
cuauggagcucauugguaa

SEQ ID NO: 1277369 - RNA, 19 nt, Homo sapiens
  misc_RNA (1)...(19): siRNA sense strand
aaacacaccuuuagugaag

SEQ ID NO: 1277370 - RNA, 19 nt, Homo sapiens
  misc_RNA (1)...(19): siRNA sense strand
gaacuuaaaggaucaguag

SEQ ID NO: 1277371 - RNA, 19 nt, Homo sapiens
  misc_RNA (1)...(19): siRNA sense strand
gaaaacagauaucaggauu

SEQ ID NO: 1277372 - RNA, 19 nt, Homo sapiens
  misc_RNA (1)...(19): siRNA sense strand
uaaaggaucaguagcaauu

SEQ ID NO: 1277373 - RNA, 19 nt, Homo sapiens
  misc_RNA (1)...(19): siRNA sense strand
aaaugggacuuacgaguuu

SEQ ID NO: 1277374 - RNA, 19 nt, Homo sapiens
  misc_RNA (1)...(19): siRNA sense strand
guuaucagaugcacuuuau

SEQ ID NO: 1277375 - RNA, 19 nt, Homo sapiens
  misc_RNA (1)...(19): siRNA sense strand
ugagauuggugaacgagua

SEQ ID NO: 1277376 - RNA, 19 nt, Homo sapiens
  misc_RNA (1)...(19): siRNA sense strand
gugaacgaguagauuauaa

SEQ ID NO: 1277377 - RNA, 19 nt, Homo sapiens
  misc_RNA (1)...(19): siRNA sense strand
gagagagcacgauuuauug

SEQ ID NO: 1277378 - RNA, 19 nt, Homo sapiens
  misc_RNA (1)...(19): siRNA sense strand
caaaugggacuuacgaguu

SEQ ID NO: 1277379 - RNA, 19 nt, Homo sapiens
  misc_RNA (1)...(19): siRNA sense strand
ggucauugcugugauuguu

SEQ ID NO: 1277380 - RNA, 19 nt, Homo sapiens
  misc_RNA (1)...(19): siRNA sense strand
ccagauccauuuucacuua

SEQ ID NO: 1277381 - RNA, 19 nt, Homo sapiens
  misc_RNA (1)...(19): siRNA sense strand
gaaggaauacuugacaguu

SEQ ID NO: 1277382 - RNA, 19 nt, Homo sapiens
  misc_RNA (1)...(19): siRNA sense strand
aaggaauacuugacaguuu

SEQ ID NO: 1277383 - RNA, 19 nt, Homo sapiens
  misc_RNA (1)...(19): siRNA sense strand
ucagaugacgccuguuaua

SEQ ID NO: 1277384 - RNA, 19 nt, Homo sapiens
  misc_RNA (1)...(19): siRNA sense strand
gaaaacacaccuuuaguga

SEQ ID NO: 1277385 - RNA, 19 nt, Homo sapiens
  misc_RNA (1)...(19): siRNA sense strand
gaugacgccuguuauagag

SEQ ID NO: 1277386 - RNA, 19 nt, Homo sapiens
  misc_RNA (1)...(19): siRNA sense strand
gagaaacauguccauauau

SEQ ID NO: 1277387 - RNA, 19 nt, Homo sapiens
  misc_RNA (1)...(19): siRNA sense strand
acgaguagauuauaagugu

SEQ ID NO: 1277388 - RNA, 19 nt, Homo sapiens
  misc_RNA (1)...(19): siRNA sense strand
cuacaaagcaacaguuaug

SEQ ID NO: 1277389 - RNA, 19 nt, Homo sapiens
  misc_RNA (1)...(19): siRNA sense strand
ccaccaacauuugaagcua

SEQ ID NO: 1277390 - RNA, 19 nt, Homo sapiens
  misc_RNA (1)...(19): siRNA sense strand
uauacgggauccuuuaaau

SEQ ID NO: 1277391 - RNA, 19 nt, Homo sapiens
  misc_RNA (1)...(19): siRNA sense strand
cgaguuugguuaucagaug

SEQ ID NO: 1277392 - RNA, 19 nt, Homo sapiens
  misc_RNA (1)...(19): siRNA sense strand
gaacgaguagauuauaagu

SEQ ID NO: 1277393 - RNA, 19 nt, Homo sapiens
  misc_RNA (1)...(19): siRNA sense strand
gugaggagccaccaacauu

SEQ ID NO: 1277394 - RNA, 19 nt, Homo sapiens
  misc_RNA (1)...(19): siRNA sense strand
gauggcagcgacacaauug

SEQ ID NO: 1277395 - RNA, 19 nt, Homo sapiens
  misc_RNA (1)...(19): siRNA sense strand
gcuauggagcucauuggua

SEQ ID NO: 1277396 - RNA, 19 nt, Homo sapiens
  misc_RNA (1)...(19): siRNA sense strand
gaggagccaccaacauuug

SEQ ID NO: 1277397 - RNA, 19 nt, Homo sapiens
  misc_RNA (1)...(19): siRNA sense strand
acacaccuuuagugaagua

SEQ ID NO: 1277398 - RNA, 19 nt, Homo sapiens
  misc_RNA (1)...(19): siRNA sense strand
ucucagaugacgccuguua

SEQ ID NO: 1277399 - RNA, 19 nt, Homo sapiens
  misc_RNA (1)...(19): siRNA sense strand
uagagaaacauguccauau

SEQ ID NO: 1277400 - RNA, 19 nt, Homo sapiens
  misc_RNA (1)...(19): siRNA sense strand
guuccaaagugucuuaaag

SEQ ID NO: 1277401 - RNA, 19 nt, Homo sapiens
  misc_RNA (1)...(19): siRNA sense strand
ggugaacgaguagauuaua

SEQ ID NO: 1277402 - RNA, 19 nt, Homo sapiens
  misc_RNA (1)...(19): siRNA sense strand
gaaguagaaguauuugagu

SEQ ID NO: 1277403 - RNA, 19 nt, Homo sapiens
  misc_RNA (1)...(19): siRNA sense strand
gaaacauguccauauauac

SEQ ID NO: 1277404 - RNA, 19 nt, Homo sapiens
  misc_RNA (1)...(19): siRNA sense strand
ugacgccuguuauagagaa

SEQ ID NO: 1277405 - RNA, 19 nt, Homo sapiens
  misc_RNA (1)...(19): siRNA sense strand
cgaguagauuauaagugua

SEQ ID NO: 1277406 - RNA, 19 nt, Homo sapiens
  misc_RNA (1)...(19): siRNA sense strand
gcacuuuauuuguaaugag

SEQ ID NO: 1277407 - RNA, 19 nt, Homo sapiens
  misc_RNA (1)...(19): siRNA sense strand
guagaaguauuugaguauc

SEQ ID NO: 1277408 - RNA, 19 nt, Homo sapiens
  misc_RNA (1)...(19): siRNA sense strand
guauuugaguaucuugaug

SEQ ID NO: 1277409 - RNA, 19 nt, Homo sapiens
  misc_RNA (1)...(19): siRNA sense strand
aggaauacuugacaguuug

SEQ ID NO: 1277410 - RNA, 19 nt, Homo sapiens
  misc_RNA (1)...(19): siRNA sense strand
ccaaaacccuacuaugaga

SEQ ID NO: 1277411 - RNA, 19 nt, Homo sapiens
  misc_RNA (1)...(19): siRNA sense strand
aguguaaaguggucaaaug

SEQ ID NO: 1277412 - RNA, 19 nt, Homo sapiens
  misc_RNA (1)...(19): siRNA sense strand
ccacccauacuauuuguga

SEQ ID NO: 1277413 - RNA, 19 nt, Homo sapiens
  misc_RNA (1)...(19): siRNA sense strand
caccaacauuugaagcuau

SEQ ID NO: 1277414 - RNA, 19 nt, Homo sapiens
  misc_RNA (1)...(19): siRNA sense strand
uuggagagagcacgauuua

SEQ ID NO: 1277415 - RNA, 19 nt, Homo sapiens
  misc_RNA (1)...(19): siRNA sense strand
gguuaucagaugcacuuua

SEQ ID NO: 1277416 - RNA, 19 nt, Homo sapiens
  misc_RNA (1)...(19): siRNA sense strand
ugaggagccaccaacauuu

SEQ ID NO: 1277417 - RNA, 19 nt, Homo sapiens
  misc_RNA (1)...(19): siRNA sense strand
ggaaggaauacuugacagu

SEQ ID NO: 1277418 - RNA, 19 nt, Homo sapiens
  misc_RNA (1)...(19): siRNA sense strand
gaggaaggaauacuugaca

SEQ ID NO: 1277419 - RNA, 19 nt, Homo sapiens
  misc_RNA (1)...(19): siRNA sense strand
ccaguuccaaagugucuua

SEQ ID NO: 1277420 - RNA, 19 nt, Homo sapiens
  misc_RNA (1)...(19): siRNA sense strand
ugaguaucuugaugcagua

SEQ ID NO: 1277421 - RNA, 19 nt, Homo sapiens
  misc_RNA (1)...(19): siRNA sense strand
caccuuuagugaaguagaa

SEQ ID NO: 1277422 - RNA, 19 nt, Homo sapiens
  misc_RNA (1)...(19): siRNA sense strand
acagauaucaggauuugga

SEQ ID NO: 1277423 - RNA, 19 nt, Homo sapiens
  misc_RNA (1)...(19): siRNA sense strand
ucauugcugugauuguuau

SEQ ID NO: 1277424 - RNA, 19 nt, Homo sapiens
  misc_RNA (1)...(19): siRNA sense strand
ucagaugcacuuuauuugu

SEQ ID NO: 1277425 - RNA, 19 nt, Homo sapiens
  misc_RNA (1)...(19): siRNA sense strand
gugcugcuccagaguguaa

SEQ ID NO: 1277426 - RNA, 19 nt, Homo sapiens
  misc_RNA (1)...(19): siRNA sense strand
ggaaaacacaccuuuagug

SEQ ID NO: 1277427 - RNA, 19 nt, Homo sapiens
  misc_RNA (1)...(19): siRNA sense strand
aaggaucaguagcaauuug

SEQ ID NO: 1277428 - RNA, 19 nt, Homo sapiens
  misc_RNA (1)...(19): siRNA sense strand
uauauacgggauccuuuaa

SEQ ID NO: 1277429 - RNA, 19 nt, Homo sapiens
  misc_RNA (1)...(19): siRNA sense strand
ugaaguagaaguauuugag

SEQ ID NO: 1277430 - RNA, 19 nt, Homo sapiens
  misc_RNA (1)...(19): siRNA sense strand
cuugacaguuuggauguuu

SEQ ID NO: 1277431 - RNA, 19 nt, Homo sapiens
  misc_RNA (1)...(19): siRNA sense strand
cauauauacgggauccuuu

SEQ ID NO: 1277432 - RNA, 19 nt, Homo sapiens
  misc_RNA (1)...(19): siRNA sense strand
auauauacgggauccuuua

SEQ ID NO: 1277433 - RNA, 19 nt, Homo sapiens
  misc_RNA (1)...(19): siRNA sense strand
cuuaaaggaucaguagcaa

SEQ ID NO: 1277434 - RNA, 19 nt, Homo sapiens
  misc_RNA (1)...(19): siRNA sense strand
uaaaccugaggaaggaaua

SEQ ID NO: 1277435 - RNA, 19 nt, Homo sapiens
  misc_RNA (1)...(19): siRNA sense strand
agaugacgccuguuauaga

SEQ ID NO: 1277436 - RNA, 19 nt, Homo sapiens
  misc_RNA (1)...(19): siRNA sense strand
ugugauuguuauugccaua

SEQ ID NO: 1277437 - RNA, 19 nt, Homo sapiens
  misc_RNA (1)...(19): siRNA sense strand
gagagcacgauuuauugug

SEQ ID NO: 1277438 - RNA, 19 nt, Homo sapiens
  misc_RNA (1)...(19): siRNA sense strand
gaaguauuugaguaucuug

SEQ ID NO: 1277439 - RNA, 19 nt, Homo sapiens
  misc_RNA (1)...(19): siRNA sense strand
ggcuaccugucucagauga

SEQ ID NO: 1277440 - RNA, 19 nt, Homo sapiens
  misc_RNA (1)...(19): siRNA sense strand
gauaucaggauuuggaaaa

SEQ ID NO: 1277441 - RNA, 19 nt, Homo sapiens
  misc_RNA (1)...(19): siRNA sense strand
ccucuugccacccauacua

SEQ ID NO: 1277442 - RNA, 19 nt, Homo sapiens
  misc_RNA (1)...(19): siRNA sense strand
ccaugguguugcugcugua

SEQ ID NO: 1277443 - RNA, 19 nt, Homo sapiens
  misc_RNA (1)...(19): siRNA sense strand
cagaugacgccuguuauag

SEQ ID NO: 1277444 - RNA, 19 nt, Homo sapiens
  misc_RNA (1)...(19): siRNA sense strand
uuggugaacgaguagauua

SEQ ID NO: 1277445 - RNA, 19 nt, Homo sapiens
  misc_RNA (1)...(19): siRNA sense strand
gucauugcugugauuguua

SEQ ID NO: 1277446 - RNA, 19 nt, Homo sapiens
  misc_RNA (1)...(19): siRNA sense strand
ggagccaccaacauuugaa

SEQ ID NO: 1277447 - RNA, 19 nt, Homo sapiens
  misc_RNA (1)...(19): siRNA sense strand
gcgcuuuccuggguugcuu

SEQ ID NO: 1277448 - RNA, 19 nt, Homo sapiens
  misc_RNA (1)...(19): siRNA sense strand
uacuacaaagcaacaguua

SEQ ID NO: 1277449 - RNA, 19 nt, Homo sapiens
  misc_RNA (1)...(19): siRNA sense strand
cuugaugcaguaacuuaua

SEQ ID NO: 1277450 - RNA, 19 nt, Homo sapiens
  misc_RNA (1)...(19): siRNA sense strand
aaacauguccauauauacg

SEQ ID NO: 1277451 - RNA, 19 nt, Homo sapiens
  misc_RNA (1)...(19): siRNA sense strand
guguaaaguggucaaaugu

SEQ ID NO: 1277452 - RNA, 19 nt, Homo sapiens
  misc_RNA (1)...(19): siRNA sense strand
cuuacgaguuugguuauca

SEQ ID NO: 1277453 - RNA, 19 nt, Homo sapiens
  misc_RNA (1)...(19): siRNA sense strand
uacgggauccuuuaaaugg

SEQ ID NO: 1277454 - RNA, 19 nt, Homo sapiens
  misc_RNA (1)...(19): siRNA sense strand
aaccaaaacccuacuauga

SEQ ID NO: 1277455 - RNA, 19 nt, Homo sapiens
  misc_RNA (1)...(19): siRNA sense strand
cccaauaugugaaaagguu

SEQ ID NO: 1277456 - RNA, 19 nt, Homo sapiens
  misc_RNA (1)...(19): siRNA sense strand
cgauggcagcgacacaauu

SEQ ID NO: 1277457 - RNA, 19 nt, Homo sapiens
  misc_RNA (1)...(19): siRNA sense strand
gauccauuuucacuuauug

SEQ ID NO: 1277458 - RNA, 19 nt, Homo sapiens
  misc_RNA (1)...(19): siRNA sense strand
uugaugcaguaacuuauag

SEQ ID NO: 1277459 - RNA, 19 nt, Homo sapiens
  misc_RNA (1)...(19): siRNA sense strand
guaucuugaugcaguaacu

SEQ ID NO: 1277460 - RNA, 19 nt, Homo sapiens
  misc_RNA (1)...(19): siRNA sense strand
caacauuugaagcuaugga

SEQ ID NO: 1277461 - RNA, 19 nt, Homo sapiens
  misc_RNA (1)...(19): siRNA sense strand
gagauuggugaacgaguag

SEQ ID NO: 1277462 - RNA, 19 nt, Homo sapiens
  misc_RNA (1)...(19): siRNA sense strand
ggagagagcacgauuuauu

SEQ ID NO: 1277463 - RNA, 19 nt, Homo sapiens
  misc_RNA (1)...(19): siRNA sense strand
agagaaacauguccauaua

SEQ ID NO: 1277464 - RNA, 19 nt, Homo sapiens
  misc_RNA (1)...(19): siRNA sense strand
cagaugcacuuuauuugua

SEQ ID NO: 1277465 - RNA, 19 nt, Homo sapiens
  misc_RNA (1)...(19): siRNA sense strand
ggacuuacgaguuugguua

SEQ ID NO: 1277466 - RNA, 19 nt, Homo sapiens
  misc_RNA (1)...(19): siRNA sense strand
aaacagauaucaggauuug

SEQ ID NO: 1277467 - RNA, 19 nt, Homo sapiens
  misc_RNA (1)...(19): siRNA sense strand
cuauggagcucauugguaa

SEQ ID NO: 1277468 - RNA, 19 nt, Homo sapiens
  misc_RNA (1)...(19): siRNA sense strand
aaacacaccuuuagugaag

SEQ ID NO: 1277469 - RNA, 19 nt, Homo sapiens
  misc_RNA (1)...(19): siRNA sense strand
gaacuuaaaggaucaguag

SEQ ID NO: 1277470 - RNA, 19 nt, Homo sapiens
  misc_RNA (1)...(19): siRNA sense strand
gaaaacagauaucaggauu

SEQ ID NO: 1277471 - RNA, 19 nt, Homo sapiens
  misc_RNA (1)...(19): siRNA sense strand
uaaaggaucaguagcaauu

SEQ ID NO: 1277472 - RNA, 19 nt, Homo sapiens
  misc_RNA (1)...(19): siRNA sense strand
aaaugggacuuacgaguuu

SEQ ID NO: 1277473 - RNA, 19 nt, Homo sapiens
  misc_RNA (1)...(19): siRNA sense strand
guuaucagaugcacuuuau

SEQ ID NO: 1277474 - RNA, 19 nt, Homo sapiens
  misc_RNA (1)...(19): siRNA sense strand
gagcugaauaugccacuua

SEQ ID NO: 1277475 - RNA, 19 nt, Homo sapiens
  misc_RNA (1)...(19): siRNA sense strand
ugagauuggugaacgagua

SEQ ID NO: 1277476 - RNA, 19 nt, Homo sapiens
  misc_RNA (1)...(19): siRNA sense strand
gugaacgaguagauuauaa

SEQ ID NO: 1277477 - RNA, 19 nt, Homo sapiens
  misc_RNA (1)...(19): siRNA sense strand
gagagagcacgauuuauug

SEQ ID NO: 1277478 - RNA, 19 nt, Homo sapiens
  misc_RNA (1)...(19): siRNA sense strand
caaaugggacuuacgaguu

SEQ ID NO: 1277479 - RNA, 19 nt, Homo sapiens
  misc_RNA (1)...(19): siRNA sense strand
ggucauugcugugauuguu

SEQ ID NO: 1277480 - RNA, 19 nt, Homo sapiens
  misc_RNA (1)...(19): siRNA sense strand
ccagauccauuuucacuua

SEQ ID NO: 1277481 - RNA, 19 nt, Homo sapiens
  misc_RNA (1)...(19): siRNA sense strand
gaaggaauacuugacaguu

SEQ ID NO: 1277482 - RNA, 19 nt, Homo sapiens
  misc_RNA (1)...(19): siRNA sense strand
aaggaauacuugacaguuu

SEQ ID NO: 1277483 - RNA, 19 nt, Homo sapiens
  misc_RNA (1)...(19): siRNA sense strand
ucagaugacgccuguuaua

SEQ ID NO: 1277484 - RNA, 19 nt, Homo sapiens
  misc_RNA (1)...(19): siRNA sense strand
gaaaacacaccuuuaguga

SEQ ID NO: 1277485 - RNA, 19 nt, Homo sapiens
  misc_RNA (1)...(19): siRNA sense strand
gaugacgccuguuauagag

SEQ ID NO: 1277486 - RNA, 19 nt, Homo sapiens
  misc_RNA (1)...(19): siRNA sense strand
gagaaacauguccauauau

SEQ ID NO: 1277487 - RNA, 19 nt, Homo sapiens
  misc_RNA (1)...(19): siRNA sense strand
ccacuuaccagacuaaauc

SEQ ID NO: 1277488 - RNA, 19 nt, Homo sapiens
  misc_RNA (1)...(19): siRNA sense strand
acgaguagauuauaagugu

SEQ ID NO: 1277489 - RNA, 19 nt, Homo sapiens
  misc_RNA (1)...(19): siRNA sense strand
cuacaaagcaacaguuaug

SEQ ID NO: 1277490 - RNA, 19 nt, Homo sapiens
  misc_RNA (1)...(19): siRNA sense strand
ccaccaacauuugaagcua

SEQ ID NO: 1277491 - RNA, 19 nt, Homo sapiens
  misc_RNA (1)...(19): siRNA sense strand
uauacgggauccuuuaaau

SEQ ID NO: 1277492 - RNA, 19 nt, Homo sapiens
  misc_RNA (1)...(19): siRNA sense strand
cgaguuugguuaucagaug

SEQ ID NO: 1277493 - RNA, 19 nt, Homo sapiens
  misc_RNA (1)...(19): siRNA sense strand
gaacgaguagauuauaagu

SEQ ID NO: 1277494 - RNA, 19 nt, Homo sapiens
  misc_RNA (1)...(19): siRNA sense strand
gugaggagccaccaacauu

SEQ ID NO: 1277495 - RNA, 19 nt, Homo sapiens
  misc_RNA (1)...(19): siRNA sense strand
gauggcagcgacacaauug

SEQ ID NO: 1277496 - RNA, 19 nt, Homo sapiens
  misc_RNA (1)...(19): siRNA sense strand
ucucagaugacgccuguua

SEQ ID NO: 1277497 - RNA, 19 nt, Homo sapiens
  misc_RNA (1)...(19): siRNA sense strand
gaggagccaccaacauuug

SEQ ID NO: 1277498 - RNA, 19 nt, Homo sapiens
  misc_RNA (1)...(19): siRNA sense strand
gcuauggagcucauuggua

SEQ ID NO: 1277499 - RNA, 19 nt, Homo sapiens
  misc_RNA (1)...(19): siRNA sense strand
acacaccuuuagugaagua

SEQ ID NO: 1277500 - RNA, 19 nt, Homo sapiens
  misc_RNA (1)...(19): siRNA sense strand
uagagaaacauguccauau

SEQ ID NO: 1277501 - RNA, 19 nt, Homo sapiens
  misc_RNA (1)...(19): siRNA sense strand
ggugaacgaguagauuaua

SEQ ID NO: 1277502 - RNA, 19 nt, Homo sapiens
  misc_RNA (1)...(19): siRNA sense strand
gaaguagaaguauuugagu

SEQ ID NO: 1277503 - RNA, 19 nt, Homo sapiens
  misc_RNA (1)...(19): siRNA sense strand
gaaacauguccauauauac

SEQ ID NO: 1277504 - RNA, 19 nt, Homo sapiens
  misc_RNA (1)...(19): siRNA sense strand
ugacgccuguuauagagaa

SEQ ID NO: 1277505 - RNA, 19 nt, Homo sapiens
  misc_RNA (1)...(19): siRNA sense strand
cgaguagauuauaagugua

SEQ ID NO: 1277506 - RNA, 19 nt, Homo sapiens
  misc_RNA (1)...(19): siRNA sense strand
gcacuuuauuuguaaugag

SEQ ID NO: 1277507 - RNA, 19 nt, Homo sapiens
  misc_RNA (1)...(19): siRNA sense strand
guagaaguauuugaguauc

SEQ ID NO: 1277508 - RNA, 19 nt, Homo sapiens
  misc_RNA (1)...(19): siRNA sense strand
guauuugaguaucuugaug

SEQ ID NO: 1277509 - RNA, 19 nt, Homo sapiens
  misc_RNA (1)...(19): siRNA sense strand
aggaauacuugacaguuug

SEQ ID NO: 1277510 - RNA, 19 nt, Homo sapiens
  misc_RNA (1)...(19): siRNA sense strand
ccaaaacccuacuaugaga

SEQ ID NO: 1277511 - RNA, 19 nt, Homo sapiens
  misc_RNA (1)...(19): siRNA sense strand
aguguaaaguggucaaaug

SEQ ID NO: 1277512 - RNA, 19 nt, Homo sapiens
  misc_RNA (1)...(19): siRNA sense strand
ccacccauacuauuuguga

SEQ ID NO: 1277513 - RNA, 19 nt, Homo sapiens
  misc_RNA (1)...(19): siRNA sense strand
uuggagagagcacgauuua

SEQ ID NO: 1277514 - RNA, 19 nt, Homo sapiens
  misc_RNA (1)...(19): siRNA sense strand
gguuaucagaugcacuuua

SEQ ID NO: 1277515 - RNA, 19 nt, Homo sapiens
  misc_RNA (1)...(19): siRNA sense strand
caccaacauuugaagcuau

SEQ ID NO: 1277516 - RNA, 19 nt, Homo sapiens
  misc_RNA (1)...(19): siRNA sense strand
ugaggagccaccaacauuu

SEQ ID NO: 1277517 - RNA, 19 nt, Homo sapiens
  misc_RNA (1)...(19): siRNA sense strand
ggaaggaauacuugacagu

SEQ ID NO: 1277518 - RNA, 19 nt, Homo sapiens
  misc_RNA (1)...(19): siRNA sense strand
gaggaaggaauacuugaca

SEQ ID NO: 1277519 - RNA, 19 nt, Homo sapiens
  misc_RNA (1)...(19): siRNA sense strand
ugaguaucuugaugcagua

SEQ ID NO: 1277520 - RNA, 19 nt, Homo sapiens
  misc_RNA (1)...(19): siRNA sense strand
caccuuuagugaaguagaa

SEQ ID NO: 1277521 - RNA, 19 nt, Homo sapiens
  misc_RNA (1)...(19): siRNA sense strand
acagauaucaggauuugga

SEQ ID NO: 1277522 - RNA, 19 nt, Homo sapiens
  misc_RNA (1)...(19): siRNA sense strand
ucauugcugugauuguuau

SEQ ID NO: 1277523 - RNA, 19 nt, Homo sapiens
  misc_RNA (1)...(19): siRNA sense strand
ucagaugcacuuuauuugu

SEQ ID NO: 1277524 - RNA, 19 nt, Homo sapiens
  misc_RNA (1)...(19): siRNA sense strand
gugcugcuccagaguguaa

SEQ ID NO: 1277525 - RNA, 19 nt, Homo sapiens
  misc_RNA (1)...(19): siRNA sense strand
ggaaaacacaccuuuagug

SEQ ID NO: 1277526 - RNA, 19 nt, Homo sapiens
  misc_RNA (1)...(19): siRNA sense strand
aaggaucaguagcaauuug

SEQ ID NO: 1277527 - RNA, 19 nt, Homo sapiens
  misc_RNA (1)...(19): siRNA sense strand
uauauacgggauccuuuaa

SEQ ID NO: 1277528 - RNA, 19 nt, Homo sapiens
  misc_RNA (1)...(19): siRNA sense strand
ugaaguagaaguauuugag

SEQ ID NO: 1277529 - RNA, 19 nt, Homo sapiens
  misc_RNA (1)...(19): siRNA sense strand
cuugacaguuuggauguuu

SEQ ID NO: 1277530 - RNA, 19 nt, Homo sapiens
  misc_RNA (1)...(19): siRNA sense strand
cauauauacgggauccuuu

SEQ ID NO: 1277531 - RNA, 19 nt, Homo sapiens
  misc_RNA (1)...(19): siRNA sense strand
auauauacgggauccuuua

SEQ ID NO: 1277532 - RNA, 19 nt, Homo sapiens
  misc_RNA (1)...(19): siRNA sense strand
cuuaaaggaucaguagcaa

SEQ ID NO: 1277533 - RNA, 19 nt, Homo sapiens
  misc_RNA (1)...(19): siRNA sense strand
uaaaccugaggaaggaaua

SEQ ID NO: 1277534 - RNA, 19 nt, Homo sapiens
  misc_RNA (1)...(19): siRNA sense strand
agaugacgccuguuauaga

SEQ ID NO: 1277535 - RNA, 19 nt, Homo sapiens
  misc_RNA (1)...(19): siRNA sense strand
ugugauuguuauugccaua

SEQ ID NO: 1277536 - RNA, 19 nt, Homo sapiens
  misc_RNA (1)...(19): siRNA sense strand
gagagcacgauuuauugug

SEQ ID NO: 1277537 - RNA, 19 nt, Homo sapiens
  misc_RNA (1)...(19): siRNA sense strand
gaaguauuugaguaucuug

SEQ ID NO: 1277538 - RNA, 19 nt, Homo sapiens
  misc_RNA (1)...(19): siRNA sense strand
ggcuaccugucucagauga

SEQ ID NO: 1277539 - RNA, 19 nt, Homo sapiens
  misc_RNA (1)...(19): siRNA sense strand
gauaucaggauuuggaaaa

SEQ ID NO: 1277540 - RNA, 19 nt, Homo sapiens
  misc_RNA (1)...(19): siRNA sense strand
ccucuugccacccauacua

SEQ ID NO: 1277541 - RNA, 19 nt, Homo sapiens
  misc_RNA (1)...(19): siRNA sense strand
ccaugguguugcugcugua

SEQ ID NO: 1277542 - RNA, 19 nt, Homo sapiens
  misc_RNA (1)...(19): siRNA sense strand
cagaugacgccuguuauag

SEQ ID NO: 1277543 - RNA, 19 nt, Homo sapiens
  misc_RNA (1)...(19): siRNA sense strand
cagaugguggagcugaaua

SEQ ID NO: 1277544 - RNA, 19 nt, Homo sapiens
  misc_RNA (1)...(19): siRNA sense strand
uuggugaacgaguagauua

SEQ ID NO: 1277545 - RNA, 19 nt, Homo sapiens
  misc_RNA (1)...(19): siRNA sense strand
gucauugcugugauuguua

SEQ ID NO: 1277546 - RNA, 19 nt, Homo sapiens
  misc_RNA (1)...(19): siRNA sense strand
ggagccaccaacauuugaa

SEQ ID NO: 1277547 - RNA, 19 nt, Homo sapiens
  misc_RNA (1)...(19): siRNA sense strand
gcgcuuuccuggguugcuu

SEQ ID NO: 1277548 - RNA, 19 nt, Homo sapiens
  misc_RNA (1)...(19): siRNA sense strand
uacuacaaagcaacaguua

SEQ ID NO: 1277549 - RNA, 19 nt, Homo sapiens
  misc_RNA (1)...(19): siRNA sense strand
cuugaugcaguaacuuaua

SEQ ID NO: 1277550 - RNA, 19 nt, Homo sapiens
  misc_RNA (1)...(19): siRNA sense strand
aaacauguccauauauacg

SEQ ID NO: 1277551 - RNA, 19 nt, Homo sapiens
  misc_RNA (1)...(19): siRNA sense strand
guguaaaguggucaaaugu

SEQ ID NO: 1277552 - RNA, 19 nt, Homo sapiens
  misc_RNA (1)...(19): siRNA sense strand
cuuacgaguuugguuauca

SEQ ID NO: 1277553 - RNA, 19 nt, Homo sapiens
  misc_RNA (1)...(19): siRNA sense strand
uacgggauccuuuaaaugg

SEQ ID NO: 1277554 - RNA, 19 nt, Homo sapiens
  misc_RNA (1)...(19): siRNA sense strand
gcagaugguggagcugaau

SEQ ID NO: 1277555 - RNA, 19 nt, Homo sapiens
  misc_RNA (1)...(19): siRNA sense strand
aaccaaaacccuacuauga

SEQ ID NO: 1277556 - RNA, 19 nt, Homo sapiens
  misc_RNA (1)...(19): siRNA sense strand
cccaauaugugaaaagguu

SEQ ID NO: 1277557 - RNA, 19 nt, Homo sapiens
  misc_RNA (1)...(19): siRNA sense strand
ggagcugaauaugccacuu

SEQ ID NO: 1277558 - RNA, 19 nt, Homo sapiens
  misc_RNA (1)...(19): siRNA sense strand
cgauggcagcgacacaauu

SEQ ID NO: 1277559 - RNA, 19 nt, Homo sapiens
  misc_RNA (1)...(19): siRNA sense strand
gauccauuuucacuuauug

SEQ ID NO: 1277560 - RNA, 19 nt, Homo sapiens
  misc_RNA (1)...(19): siRNA sense strand
uugaugcaguaacuuauag

SEQ ID NO: 1277561 - RNA, 19 nt, Homo sapiens
  misc_RNA (1)...(19): siRNA sense strand
guaucuugaugcaguaacu

SEQ ID NO: 1277562 - RNA, 19 nt, Homo sapiens
  misc_RNA (1)...(19): siRNA sense strand
ggagagagcacgauuuauu

SEQ ID NO: 1277563 - RNA, 19 nt, Homo sapiens
  misc_RNA (1)...(19): siRNA sense strand
agagaaacauguccauaua

SEQ ID NO: 1277564 - RNA, 19 nt, Homo sapiens
  misc_RNA (1)...(19): siRNA sense strand
cagaugcacuuuauuugua

SEQ ID NO: 1277565 - RNA, 19 nt, Homo sapiens
  misc_RNA (1)...(19): siRNA sense strand
ggacuuacgaguuugguua

SEQ ID NO: 1277566 - RNA, 19 nt, Homo sapiens
  misc_RNA (1)...(19): siRNA sense strand
aaacagauaucaggauuug

SEQ ID NO: 1277567 - RNA, 19 nt, Homo sapiens
  misc_RNA (1)...(19): siRNA sense strand
cuauggagcucauugguaa

SEQ ID NO: 1277568 - RNA, 19 nt, Homo sapiens
  misc_RNA (1)...(19): siRNA sense strand
aaacacaccuuuagugaag

SEQ ID NO: 1277569 - RNA, 19 nt, Homo sapiens
  misc_RNA (1)...(19): siRNA sense strand
gaacuuaaaggaucaguag

SEQ ID NO: 1277570 - RNA, 19 nt, Homo sapiens
  misc_RNA (1)...(19): siRNA sense strand
gaaaacagauaucaggauu

SEQ ID NO: 1277571 - RNA, 19 nt, Homo sapiens
  misc_RNA (1)...(19): siRNA sense strand
uaaaggaucaguagcaauu

SEQ ID NO: 1277572 - RNA, 19 nt, Homo sapiens
  misc_RNA (1)...(19): siRNA sense strand
aaaugggacuuacgaguuu

SEQ ID NO: 1277573 - RNA, 19 nt, Homo sapiens
  misc_RNA (1)...(19): siRNA sense strand
guuaucagaugcacuuuau

SEQ ID NO: 1277574 - RNA, 19 nt, Homo sapiens
  misc_RNA (1)...(19): siRNA sense strand
gagcugaauaugccacuua

SEQ ID NO: 1277575 - RNA, 19 nt, Homo sapiens
  misc_RNA (1)...(19): siRNA sense strand
gagcagagaggcugaauag

SEQ ID NO: 1277576 - RNA, 19 nt, Homo sapiens
  misc_RNA (1)...(19): siRNA sense strand
ugagauuggugaacgagua

SEQ ID NO: 1277577 - RNA, 19 nt, Homo sapiens
  misc_RNA (1)...(19): siRNA sense strand
gugaacgaguagauuauaa

SEQ ID NO: 1277578 - RNA, 19 nt, Homo sapiens
  misc_RNA (1)...(19): siRNA sense strand
gagagagcacgauuuauug

SEQ ID NO: 1277579 - RNA, 19 nt, Homo sapiens
  misc_RNA (1)...(19): siRNA sense strand
caaaugggacuuacgaguu

SEQ ID NO: 1277580 - RNA, 19 nt, Homo sapiens
  misc_RNA (1)...(19): siRNA sense strand
ggucauugcugugauuguu

SEQ ID NO: 1277581 - RNA, 19 nt, Homo sapiens
  misc_RNA (1)...(19): siRNA sense strand
ccagauccauuuucacuua

SEQ ID NO: 1277582 - RNA, 19 nt, Homo sapiens
  misc_RNA (1)...(19): siRNA sense strand
gaaggaauacuugacaguu

SEQ ID NO: 1277583 - RNA, 19 nt, Homo sapiens
  misc_RNA (1)...(19): siRNA sense strand
aaggaauacuugacaguuu

SEQ ID NO: 1277584 - RNA, 19 nt, Homo sapiens
  misc_RNA (1)...(19): siRNA sense strand
ucagaugacgccuguuaua

SEQ ID NO: 1277585 - RNA, 19 nt, Homo sapiens
  misc_RNA (1)...(19): siRNA sense strand
gaaaacacaccuuuaguga

SEQ ID NO: 1277586 - RNA, 19 nt, Homo sapiens
  misc_RNA (1)...(19): siRNA sense strand
gaugacgccuguuauagag

SEQ ID NO: 1277587 - RNA, 19 nt, Homo sapiens
  misc_RNA (1)...(19): siRNA sense strand
gagaaacauguccauauau

SEQ ID NO: 1277588 - RNA, 19 nt, Homo sapiens
  misc_RNA (1)...(19): siRNA sense strand
ccacuuaccagacuaaauc

SEQ ID NO: 1277589 - RNA, 19 nt, Homo sapiens
  misc_RNA (1)...(19): siRNA sense strand
acgaguagauuauaagugu

SEQ ID NO: 1277590 - RNA, 19 nt, Homo sapiens
  misc_RNA (1)...(19): siRNA sense strand
cuacaaagcaacaguuaug

SEQ ID NO: 1277591 - RNA, 19 nt, Homo sapiens
  misc_RNA (1)...(19): siRNA sense strand
ccaccaacauuugaagcua

SEQ ID NO: 1277592 - RNA, 19 nt, Homo sapiens
  misc_RNA (1)...(19): siRNA sense strand
uauacgggauccuuuaaau

SEQ ID NO: 1277593 - RNA, 19 nt, Homo sapiens
  misc_RNA (1)...(19): siRNA sense strand
cgaguuugguuaucagaug

SEQ ID NO: 1277594 - RNA, 19 nt, Homo sapiens
  misc_RNA (1)...(19): siRNA sense strand
gaacgaguagauuauaagu

SEQ ID NO: 1277595 - RNA, 19 nt, Homo sapiens
  misc_RNA (1)...(19): siRNA sense strand
gugaggagccaccaacauu

SEQ ID NO: 1277596 - RNA, 19 nt, Homo sapiens
  misc_RNA (1)...(19): siRNA sense strand
gauggcagcgacacaauug

SEQ ID NO: 1277597 - RNA, 19 nt, Homo sapiens
  misc_RNA (1)...(19): siRNA sense strand
ucucagaugacgccuguua

SEQ ID NO: 1277598 - RNA, 19 nt, Homo sapiens
  misc_RNA (1)...(19): siRNA sense strand
acacaccuuuagugaagua

SEQ ID NO: 1277599 - RNA, 19 nt, Homo sapiens
  misc_RNA (1)...(19): siRNA sense strand
gcuauggagcucauuggua

SEQ ID NO: 1277600 - RNA, 19 nt, Homo sapiens
  misc_RNA (1)...(19): siRNA sense strand
gaggagccaccaacauuug

SEQ ID NO: 1277601 - RNA, 19 nt, Homo sapiens
  misc_RNA (1)...(19): siRNA sense strand
uagagaaacauguccauau

SEQ ID NO: 1277602 - RNA, 19 nt, Homo sapiens
  misc_RNA (1)...(19): siRNA sense strand
guuccaaagugucuuaaag

SEQ ID NO: 1277603 - RNA, 19 nt, Homo sapiens
  misc_RNA (1)...(19): siRNA sense strand
ggugaacgaguagauuaua

SEQ ID NO: 1277604 - RNA, 19 nt, Homo sapiens
  misc_RNA (1)...(19): siRNA sense strand
gaaguagaaguauuugagu

SEQ ID NO: 1277605 - RNA, 19 nt, Homo sapiens
  misc_RNA (1)...(19): siRNA sense strand
gaaacauguccauauauac

SEQ ID NO: 1277606 - RNA, 19 nt, Homo sapiens
  misc_RNA (1)...(19): siRNA sense strand
ugacgccuguuauagagaa

SEQ ID NO: 1277607 - RNA, 19 nt, Homo sapiens
  misc_RNA (1)...(19): siRNA sense strand
cgaguagauuauaagugua

SEQ ID NO: 1277608 - RNA, 19 nt, Homo sapiens
  misc_RNA (1)...(19): siRNA sense strand
gcacuuuauuuguaaugag

SEQ ID NO: 1277609 - RNA, 19 nt, Homo sapiens
  misc_RNA (1)...(19): siRNA sense strand
guagaaguauuugaguauc

SEQ ID NO: 1277610 - RNA, 19 nt, Homo sapiens
  misc_RNA (1)...(19): siRNA sense strand
guauuugaguaucuugaug

SEQ ID NO: 1277611 - RNA, 19 nt, Homo sapiens
  misc_RNA (1)...(19): siRNA sense strand
aggaauacuugacaguuug

SEQ ID NO: 1277612 - RNA, 19 nt, Homo sapiens
  misc_RNA (1)...(19): siRNA sense strand
ccaaaacccuacuaugaga

SEQ ID NO: 1277613 - RNA, 19 nt, Homo sapiens
  misc_RNA (1)...(19): siRNA sense strand
aguguaaaguggucaaaug

SEQ ID NO: 1277614 - RNA, 19 nt, Homo sapiens
  misc_RNA (1)...(19): siRNA sense strand
ccacccauacuauuuguga

SEQ ID NO: 1277615 - RNA, 19 nt, Homo sapiens
  misc_RNA (1)...(19): siRNA sense strand
uuggagagagcacgauuua

SEQ ID NO: 1277616 - RNA, 19 nt, Homo sapiens
  misc_RNA (1)...(19): siRNA sense strand
gguuaucagaugcacuuua

SEQ ID NO: 1277617 - RNA, 19 nt, Homo sapiens
  misc_RNA (1)...(19): siRNA sense strand
caccaacauuugaagcuau

SEQ ID NO: 1277618 - RNA, 19 nt, Homo sapiens
  misc_RNA (1)...(19): siRNA sense strand
ugaggagccaccaacauuu

SEQ ID NO: 1277619 - RNA, 19 nt, Homo sapiens
  misc_RNA (1)...(19): siRNA sense strand
ggaaggaauacuugacagu

SEQ ID NO: 1277620 - RNA, 19 nt, Homo sapiens
  misc_RNA (1)...(19): siRNA sense strand
gaggaaggaauacuugaca

SEQ ID NO: 1277621 - RNA, 19 nt, Homo sapiens
  misc_RNA (1)...(19): siRNA sense strand
ccaguuccaaagugucuua

SEQ ID NO: 1277622 - RNA, 19 nt, Homo sapiens
  misc_RNA (1)...(19): siRNA sense strand
ugaguaucuugaugcagua

SEQ ID NO: 1277623 - RNA, 19 nt, Homo sapiens
  misc_RNA (1)...(19): siRNA sense strand
caccuuuagugaaguagaa

SEQ ID NO: 1277624 - RNA, 19 nt, Homo sapiens
  misc_RNA (1)...(19): siRNA sense strand
acagauaucaggauuugga

SEQ ID NO: 1277625 - RNA, 19 nt, Homo sapiens
  misc_RNA (1)...(19): siRNA sense strand
ucauugcugugauuguuau

SEQ ID NO: 1277626 - RNA, 19 nt, Homo sapiens
  misc_RNA (1)...(19): siRNA sense strand
ucagaugcacuuuauuugu

SEQ ID NO: 1277627 - RNA, 19 nt, Homo sapiens
  misc_RNA (1)...(19): siRNA sense strand
gugcugcuccagaguguaa

SEQ ID NO: 1277628 - RNA, 19 nt, Homo sapiens
  misc_RNA (1)...(19): siRNA sense strand
ggaaaacacaccuuuagug

SEQ ID NO: 1277629 - RNA, 19 nt, Homo sapiens
  misc_RNA (1)...(19): siRNA sense strand
aaggaucaguagcaauuug

SEQ ID NO: 1277630 - RNA, 19 nt, Homo sapiens
  misc_RNA (1)...(19): siRNA sense strand
uauauacgggauccuuuaa

SEQ ID NO: 1277631 - RNA, 19 nt, Homo sapiens
  misc_RNA (1)...(19): siRNA sense strand
ugaaguagaaguauuugag

SEQ ID NO: 1277632 - RNA, 19 nt, Homo sapiens
  misc_RNA (1)...(19): siRNA sense strand
cuugacaguuuggauguuu

SEQ ID NO: 1277633 - RNA, 19 nt, Homo sapiens
  misc_RNA (1)...(19): siRNA sense strand
cauauauacgggauccuuu

SEQ ID NO: 1277634 - RNA, 19 nt, Homo sapiens
  misc_RNA (1)...(19): siRNA sense strand
auauauacgggauccuuua

SEQ ID NO: 1277635 - RNA, 19 nt, Homo sapiens
  misc_RNA (1)...(19): siRNA sense strand
cuuaaaggaucaguagcaa

SEQ ID NO: 1277636 - RNA, 19 nt, Homo sapiens
  misc_RNA (1)...(19): siRNA sense strand
uaaaccugaggaaggaaua

SEQ ID NO: 1277637 - RNA, 19 nt, Homo sapiens
  misc_RNA (1)...(19): siRNA sense strand
agaugacgccuguuauaga

SEQ ID NO: 1277638 - RNA, 19 nt, Homo sapiens
  misc_RNA (1)...(19): siRNA sense strand
ugugauuguuauugccaua

SEQ ID NO: 1277639 - RNA, 19 nt, Homo sapiens
  misc_RNA (1)...(19): siRNA sense strand
gagagcacgauuuauugug

SEQ ID NO: 1277640 - RNA, 19 nt, Homo sapiens
  misc_RNA (1)...(19): siRNA sense strand
gaaguauuugaguaucuug

SEQ ID NO: 1277641 - RNA, 19 nt, Homo sapiens
  misc_RNA (1)...(19): siRNA sense strand
ggcuaccugucucagauga

SEQ ID NO: 1277642 - RNA, 19 nt, Homo sapiens
  misc_RNA (1)...(19): siRNA sense strand
ccucuugccacccauacua

SEQ ID NO: 1277643 - RNA, 19 nt, Homo sapiens
  misc_RNA (1)...(19): siRNA sense strand
gauaucaggauuuggaaaa

SEQ ID NO: 1277644 - RNA, 19 nt, Homo sapiens
  misc_RNA (1)...(19): siRNA sense strand
ccaugguguugcugcugua

SEQ ID NO: 1277645 - RNA, 19 nt, Homo sapiens
  misc_RNA (1)...(19): siRNA sense strand
cagaugacgccuguuauag

SEQ ID NO: 1277646 - RNA, 19 nt, Homo sapiens
  misc_RNA (1)...(19): siRNA sense strand
cagaugguggagcugaaua

SEQ ID NO: 1277647 - RNA, 19 nt, Homo sapiens
  misc_RNA (1)...(19): siRNA sense strand
gucauugcugugauuguua

SEQ ID NO: 1277648 - RNA, 19 nt, Homo sapiens
  misc_RNA (1)...(19): siRNA sense strand
uuggugaacgaguagauua

SEQ ID NO: 1277649 - RNA, 19 nt, Homo sapiens
  misc_RNA (1)...(19): siRNA sense strand
ggagccaccaacauuugaa

SEQ ID NO: 1277650 - RNA, 19 nt, Homo sapiens
  misc_RNA (1)...(19): siRNA sense strand
gcgcuuuccuggguugcuu

SEQ ID NO: 1277651 - RNA, 19 nt, Homo sapiens
  misc_RNA (1)...(19): siRNA sense strand
uacuacaaagcaacaguua

SEQ ID NO: 1277652 - RNA, 19 nt, Homo sapiens
  misc_RNA (1)...(19): siRNA sense strand
cuugaugcaguaacuuaua

SEQ ID NO: 1277653 - RNA, 19 nt, Homo sapiens
  misc_RNA (1)...(19): siRNA sense strand
aaacauguccauauauacg

SEQ ID NO: 1277654 - RNA, 19 nt, Homo sapiens
  misc_RNA (1)...(19): siRNA sense strand
guguaaaguggucaaaugu

SEQ ID NO: 1277655 - RNA, 19 nt, Homo sapiens
  misc_RNA (1)...(19): siRNA sense strand
cuuacgaguuugguuauca

SEQ ID NO: 1277656 - RNA, 19 nt, Homo sapiens
  misc_RNA (1)...(19): siRNA sense strand
aaccaaaacccuacuauga

SEQ ID NO: 1277657 - RNA, 19 nt, Homo sapiens
  misc_RNA (1)...(19): siRNA sense strand
gcagaugguggagcugaau

SEQ ID NO: 1277658 - RNA, 19 nt, Homo sapiens
  misc_RNA (1)...(19): siRNA sense strand
uacgggauccuuuaaaugg

SEQ ID NO: 1277659 - RNA, 19 nt, Homo sapiens
  misc_RNA (1)...(19): siRNA sense strand
cgauggcagcgacacaauu

SEQ ID NO: 1277660 - RNA, 19 nt, Homo sapiens
  misc_RNA (1)...(19): siRNA sense strand
ggagcugaauaugccacuu

SEQ ID NO: 1277661 - RNA, 19 nt, Homo sapiens
  misc_RNA (1)...(19): siRNA sense strand
caacauuugaagcuaugga

SEQ ID NO: 1277662 - RNA, 19 nt, Homo sapiens
  misc_RNA (1)...(19): siRNA sense strand
ggagagagcacgauuuauu

SEQ ID NO: 1277663 - RNA, 19 nt, Homo sapiens
  misc_RNA (1)...(19): siRNA sense strand
agagaaacauguccauaua

SEQ ID NO: 1277664 - RNA, 19 nt, Homo sapiens
  misc_RNA (1)...(19): siRNA sense strand
cagaugcacuuuauuugua

SEQ ID NO: 1277665 - RNA, 19 nt, Homo sapiens
  misc_RNA (1)...(19): siRNA sense strand
ggacuuacgaguuugguua

SEQ ID NO: 1277666 - RNA, 19 nt, Homo sapiens
  misc_RNA (1)...(19): siRNA sense strand
aaacagauaucaggauuug

SEQ ID NO: 1277667 - RNA, 19 nt, Homo sapiens
  misc_RNA (1)...(19): siRNA sense strand
cuauggagcucauugguaa

SEQ ID NO: 1277668 - RNA, 19 nt, Homo sapiens
  misc_RNA (1)...(19): siRNA sense strand
aaacacaccuuuagugaag

SEQ ID NO: 1277669 - RNA, 19 nt, Homo sapiens
  misc_RNA (1)...(19): siRNA sense strand
gaacuuaaaggaucaguag

SEQ ID NO: 1277670 - RNA, 19 nt, Homo sapiens
  misc_RNA (1)...(19): siRNA sense strand
gaaaacagauaucaggauu

SEQ ID NO: 1277671 - RNA, 19 nt, Homo sapiens
  misc_RNA (1)...(19): siRNA sense strand
uaaaggaucaguagcaauu

SEQ ID NO: 1277672 - RNA, 19 nt, Homo sapiens
  misc_RNA (1)...(19): siRNA sense strand
aaaugggacuuacgaguuu

SEQ ID NO: 1277673 - RNA, 19 nt, Homo sapiens
  misc_RNA (1)...(19): siRNA sense strand
guuaucagaugcacuuuau

SEQ ID NO: 1277674 - RNA, 19 nt, Homo sapiens
  misc_RNA (1)...(19): siRNA sense strand
ugagauuggugaacgagua

SEQ ID NO: 1277675 - RNA, 19 nt, Homo sapiens
  misc_RNA (1)...(19): siRNA sense strand
gugaacgaguagauuauaa

SEQ ID NO: 1277676 - RNA, 19 nt, Homo sapiens
  misc_RNA (1)...(19): siRNA sense strand
gagagagcacgauuuauug

SEQ ID NO: 1277677 - RNA, 19 nt, Homo sapiens
  misc_RNA (1)...(19): siRNA sense strand
caaaugggacuuacgaguu

SEQ ID NO: 1277678 - RNA, 19 nt, Homo sapiens
  misc_RNA (1)...(19): siRNA sense strand
ggucauugcugugauuguu

SEQ ID NO: 1277679 - RNA, 19 nt, Homo sapiens
  misc_RNA (1)...(19): siRNA sense strand
ccagauccauuuucacuua

SEQ ID NO: 1277680 - RNA, 19 nt, Homo sapiens
  misc_RNA (1)...(19): siRNA sense strand
gaaggaauacuugacaguu

SEQ ID NO: 1277681 - RNA, 19 nt, Homo sapiens
  misc_RNA (1)...(19): siRNA sense strand
aaggaauacuugacaguuu

SEQ ID NO: 1277682 - RNA, 19 nt, Homo sapiens
  misc_RNA (1)...(19): siRNA sense strand
ucagaugacgccuguuaua

SEQ ID NO: 1277683 - RNA, 19 nt, Homo sapiens
  misc_RNA (1)...(19): siRNA sense strand
gaaaacacaccuuuaguga

SEQ ID NO: 1277684 - RNA, 19 nt, Homo sapiens
  misc_RNA (1)...(19): siRNA sense strand
gaugacgccuguuauagag

SEQ ID NO: 1277685 - RNA, 19 nt, Homo sapiens
  misc_RNA (1)...(19): siRNA sense strand
gagaaacauguccauauau

SEQ ID NO: 1277686 - RNA, 19 nt, Homo sapiens
  misc_RNA (1)...(19): siRNA sense strand
acgaguagauuauaagugu

SEQ ID NO: 1277687 - RNA, 19 nt, Homo sapiens
  misc_RNA (1)...(19): siRNA sense strand
cuacaaagcaacaguuaug

SEQ ID NO: 1277688 - RNA, 19 nt, Homo sapiens
  misc_RNA (1)...(19): siRNA sense strand
ccaccaacauuugaagcua

SEQ ID NO: 1277689 - RNA, 19 nt, Homo sapiens
  misc_RNA (1)...(19): siRNA sense strand
uauacgggauccuuuaaau

SEQ ID NO: 1277690 - RNA, 19 nt, Homo sapiens
  misc_RNA (1)...(19): siRNA sense strand
cgaguuugguuaucagaug

SEQ ID NO: 1277691 - RNA, 19 nt, Homo sapiens
  misc_RNA (1)...(19): siRNA sense strand
gaacgaguagauuauaagu

SEQ ID NO: 1277692 - RNA, 19 nt, Homo sapiens
  misc_RNA (1)...(19): siRNA sense strand
gugaggagccaccaacauu

SEQ ID NO: 1277693 - RNA, 19 nt, Homo sapiens
  misc_RNA (1)...(19): siRNA sense strand
gauggcagcgacacaauug

SEQ ID NO: 1277694 - RNA, 19 nt, Homo sapiens
  misc_RNA (1)...(19): siRNA sense strand
gcuauggagcucauuggua

SEQ ID NO: 1277695 - RNA, 19 nt, Homo sapiens
  misc_RNA (1)...(19): siRNA sense strand
gaggagccaccaacauuug

SEQ ID NO: 1277696 - RNA, 19 nt, Homo sapiens
  misc_RNA (1)...(19): siRNA sense strand
acacaccuuuagugaagua

SEQ ID NO: 1277697 - RNA, 19 nt, Homo sapiens
  misc_RNA (1)...(19): siRNA sense strand
ucucagaugacgccuguua

SEQ ID NO: 1277698 - RNA, 19 nt, Homo sapiens
  misc_RNA (1)...(19): siRNA sense strand
uagagaaacauguccauau

SEQ ID NO: 1277699 - RNA, 19 nt, Homo sapiens
  misc_RNA (1)...(19): siRNA sense strand
ggugaacgaguagauuaua

SEQ ID NO: 1277700 - RNA, 19 nt, Homo sapiens
  misc_RNA (1)...(19): siRNA sense strand
gaaguagaaguauuugagu

SEQ ID NO: 1277701 - RNA, 19 nt, Homo sapiens
  misc_RNA (1)...(19): siRNA sense strand
gaaacauguccauauauac

SEQ ID NO: 1277702 - RNA, 19 nt, Homo sapiens
  misc_RNA (1)...(19): siRNA sense strand
ugacgccuguuauagagaa

SEQ ID NO: 1277703 - RNA, 19 nt, Homo sapiens
  misc_RNA (1)...(19): siRNA sense strand
cgaguagauuauaagugua

SEQ ID NO: 1277704 - RNA, 19 nt, Homo sapiens
  misc_RNA (1)...(19): siRNA sense strand
gcacuuuauuuguaaugag

SEQ ID NO: 1277705 - RNA, 19 nt, Homo sapiens
  misc_RNA (1)...(19): siRNA sense strand
guagaaguauuugaguauc

SEQ ID NO: 1277706 - RNA, 19 nt, Homo sapiens
  misc_RNA (1)...(19): siRNA sense strand
guauuugaguaucuugaug

SEQ ID NO: 1277707 - RNA, 19 nt, Homo sapiens
  misc_RNA (1)...(19): siRNA sense strand
aggaauacuugacaguuug

SEQ ID NO: 1277708 - RNA, 19 nt, Homo sapiens
  misc_RNA (1)...(19): siRNA sense strand
aguguaaaguggucaaaug

SEQ ID NO: 1277709 - RNA, 19 nt, Homo sapiens
  misc_RNA (1)...(19): siRNA sense strand
ccaaaacccuacuaugaga

SEQ ID NO: 1277710 - RNA, 19 nt, Homo sapiens
  misc_RNA (1)...(19): siRNA sense strand
ccacccauacuauuuguga

SEQ ID NO: 1277711 - RNA, 19 nt, Homo sapiens
  misc_RNA (1)...(19): siRNA sense strand
caccaacauuugaagcuau

SEQ ID NO: 1277712 - RNA, 19 nt, Homo sapiens
  misc_RNA (1)...(19): siRNA sense strand
uuggagagagcacgauuua

SEQ ID NO: 1277713 - RNA, 19 nt, Homo sapiens
  misc_RNA (1)...(19): siRNA sense strand
gguuaucagaugcacuuua

SEQ ID NO: 1277714 - RNA, 19 nt, Homo sapiens
  misc_RNA (1)...(19): siRNA sense strand
ugaggagccaccaacauuu

SEQ ID NO: 1277715 - RNA, 19 nt, Homo sapiens
  misc_RNA (1)...(19): siRNA sense strand
ggaaggaauacuugacagu

SEQ ID NO: 1277716 - RNA, 19 nt, Homo sapiens
  misc_RNA (1)...(19): siRNA sense strand
gaggaaggaauacuugaca

SEQ ID NO: 1277717 - RNA, 19 nt, Homo sapiens
  misc_RNA (1)...(19): siRNA sense strand
ugaguaucuugaugcagua

SEQ ID NO: 1277718 - RNA, 19 nt, Homo sapiens
  misc_RNA (1)...(19): siRNA sense strand
caccuuuagugaaguagaa

SEQ ID NO: 1277719 - RNA, 19 nt, Homo sapiens
  misc_RNA (1)...(19): siRNA sense strand
acagauaucaggauuugga

SEQ ID NO: 1277720 - RNA, 19 nt, Homo sapiens
  misc_RNA (1)...(19): siRNA sense strand
ucauugcugugauuguuau

SEQ ID NO: 1277721 - RNA, 19 nt, Homo sapiens
  misc_RNA (1)...(19): siRNA sense strand
ucagaugcacuuuauuugu

SEQ ID NO: 1277722 - RNA, 19 nt, Homo sapiens
  misc_RNA (1)...(19): siRNA sense strand
gugcugcuccagaguguaa

SEQ ID NO: 1277723 - RNA, 19 nt, Homo sapiens
  misc_RNA (1)...(19): siRNA sense strand
ggaaaacacaccuuuagug

SEQ ID NO: 1277724 - RNA, 19 nt, Homo sapiens
  misc_RNA (1)...(19): siRNA sense strand
aaggaucaguagcaauuug

SEQ ID NO: 1277725 - RNA, 19 nt, Homo sapiens
  misc_RNA (1)...(19): siRNA sense strand
uauauacgggauccuuuaa

SEQ ID NO: 1277726 - RNA, 19 nt, Homo sapiens
  misc_RNA (1)...(19): siRNA sense strand
ugaaguagaaguauuugag

SEQ ID NO: 1277727 - RNA, 19 nt, Homo sapiens
  misc_RNA (1)...(19): siRNA sense strand
cuugacaguuuggauguuu

SEQ ID NO: 1277728 - RNA, 19 nt, Homo sapiens
  misc_RNA (1)...(19): siRNA sense strand
cauauauacgggauccuuu

SEQ ID NO: 1277729 - RNA, 19 nt, Homo sapiens
  misc_RNA (1)...(19): siRNA sense strand
auauauacgggauccuuua

SEQ ID NO: 1277730 - RNA, 19 nt, Homo sapiens
  misc_RNA (1)...(19): siRNA sense strand
cuuaaaggaucaguagcaa

SEQ ID NO: 1277731 - RNA, 19 nt, Homo sapiens
  misc_RNA (1)...(19): siRNA sense strand
uaaaccugaggaaggaaua

SEQ ID NO: 1277732 - RNA, 19 nt, Homo sapiens
  misc_RNA (1)...(19): siRNA sense strand
agaugacgccuguuauaga

SEQ ID NO: 1277733 - RNA, 19 nt, Homo sapiens
  misc_RNA (1)...(19): siRNA sense strand
ugugauuguuauugccaua

SEQ ID NO: 1277734 - RNA, 19 nt, Homo sapiens
  misc_RNA (1)...(19): siRNA sense strand
gagagcacgauuuauugug

SEQ ID NO: 1277735 - RNA, 19 nt, Homo sapiens
  misc_RNA (1)...(19): siRNA sense strand
gaaguauuugaguaucuug

SEQ ID NO: 1277736 - RNA, 19 nt, Homo sapiens
  misc_RNA (1)...(19): siRNA sense strand
ccucuugccacccauacua

SEQ ID NO: 1277737 - RNA, 19 nt, Homo sapiens
  misc_RNA (1)...(19): siRNA sense strand
gauaucaggauuuggaaaa

SEQ ID NO: 1277738 - RNA, 19 nt, Homo sapiens
  misc_RNA (1)...(19): siRNA sense strand
ggcuaccugucucagauga

SEQ ID NO: 1277739 - RNA, 19 nt, Homo sapiens
  misc_RNA (1)...(19): siRNA sense strand
ccaugguguugcugcugua

SEQ ID NO: 1277740 - RNA, 19 nt, Homo sapiens
  misc_RNA (1)...(19): siRNA sense strand
cagaugacgccuguuauag

SEQ ID NO: 1277741 - RNA, 19 nt, Homo sapiens
  misc_RNA (1)...(19): siRNA sense strand
gucauugcugugauuguua

SEQ ID NO: 1277742 - RNA, 19 nt, Homo sapiens
  misc_RNA (1)...(19): siRNA sense strand
uuggugaacgaguagauua

SEQ ID NO: 1277743 - RNA, 19 nt, Homo sapiens
  misc_RNA (1)...(19): siRNA sense strand
ggagccaccaacauuugaa

SEQ ID NO: 1277744 - RNA, 19 nt, Homo sapiens
  misc_RNA (1)...(19): siRNA sense strand
gcgcuuuccuggguugcuu

SEQ ID NO: 1277745 - RNA, 19 nt, Homo sapiens
  misc_RNA (1)...(19): siRNA sense strand
uacuacaaagcaacaguua

SEQ ID NO: 1277746 - RNA, 19 nt, Homo sapiens
  misc_RNA (1)...(19): siRNA sense strand
cuugaugcaguaacuuaua

SEQ ID NO: 1277747 - RNA, 19 nt, Homo sapiens
  misc_RNA (1)...(19): siRNA sense strand
aaacauguccauauauacg

SEQ ID NO: 1277748 - RNA, 19 nt, Homo sapiens
  misc_RNA (1)...(19): siRNA sense strand
guguaaaguggucaaaugu

SEQ ID NO: 1277749 - RNA, 19 nt, Homo sapiens
  misc_RNA (1)...(19): siRNA sense strand
cuuacgaguuugguuauca

SEQ ID NO: 1277750 - RNA, 19 nt, Homo sapiens
  misc_RNA (1)...(19): siRNA sense strand
uacgggauccuuuaaaugg

SEQ ID NO: 1277751 - RNA, 19 nt, Homo sapiens
  misc_RNA (1)...(19): siRNA sense strand
aaccaaaacccuacuauga

SEQ ID NO: 1277752 - RNA, 19 nt, Homo sapiens
  misc_RNA (1)...(19): siRNA sense strand
cccaauaugugaaaagguu

SEQ ID NO: 1277753 - RNA, 19 nt, Homo sapiens
  misc_RNA (1)...(19): siRNA sense strand
cgauggcagcgacacaauu

SEQ ID NO: 1277754 - RNA, 19 nt, Homo sapiens
  misc_RNA (1)...(19): siRNA sense strand
gauccauuuucacuuauug

SEQ ID NO: 1277755 - RNA, 19 nt, Homo sapiens
  misc_RNA (1)...(19): siRNA sense strand
uugaugcaguaacuuauag

SEQ ID NO: 1277756 - RNA, 19 nt, Homo sapiens
  misc_RNA (1)...(19): siRNA sense strand
guaucuugaugcaguaacu

SEQ ID NO: 1277757 - RNA, 19 nt, Homo sapiens
  misc_RNA (1)...(19): siRNA sense strand
caacauuugaagcuaugga

SEQ ID NO: 1277758 - RNA, 19 nt, Homo sapiens
  misc_RNA (1)...(19): siRNA sense strand
gagauuggugaacgaguag

SEQ ID NO: 1277759 - RNA, 19 nt, Homo sapiens
  misc_RNA (1)...(19): siRNA sense strand
ggagagagcacgauuuauu

SEQ ID NO: 1277760 - RNA, 19 nt, Homo sapiens
  misc_RNA (1)...(19): siRNA sense strand
agagaaacauguccauaua

SEQ ID NO: 1277761 - RNA, 19 nt, Homo sapiens
  misc_RNA (1)...(19): siRNA sense strand
cagaugcacuuuauuugua

SEQ ID NO: 1277762 - RNA, 19 nt, Homo sapiens
  misc_RNA (1)...(19): siRNA sense strand
ggacuuacgaguuugguua

SEQ ID NO: 1277763 - RNA, 19 nt, Homo sapiens
  misc_RNA (1)...(19): siRNA sense strand
aaacagauaucaggauuug

SEQ ID NO: 1277764 - RNA, 19 nt, Homo sapiens
  misc_RNA (1)...(19): siRNA sense strand
cuauggagcucauugguaa

SEQ ID NO: 1277765 - RNA, 19 nt, Homo sapiens
  misc_RNA (1)...(19): siRNA sense strand
aaacacaccuuuagugaag

SEQ ID NO: 1277766 - RNA, 19 nt, Homo sapiens
  misc_RNA (1)...(19): siRNA sense strand
gaacuuaaaggaucaguag

SEQ ID NO: 1277767 - RNA, 19 nt, Homo sapiens
  misc_RNA (1)...(19): siRNA sense strand
gaaaacagauaucaggauu

SEQ ID NO: 1277768 - RNA, 19 nt, Homo sapiens
  misc_RNA (1)...(19): siRNA sense strand
uaaaggaucaguagcaauu

SEQ ID NO: 1277769 - RNA, 19 nt, Homo sapiens
  misc_RNA (1)...(19): siRNA sense strand
aaaugggacuuacgaguuu

SEQ ID NO: 1277770 - RNA, 19 nt, Homo sapiens
  misc_RNA (1)...(19): siRNA sense strand
guuaucagaugcacuuuau

SEQ ID NO: 1277771 - RNA, 19 nt, Homo sapiens
  misc_RNA (1)...(19): siRNA sense strand
ugagauuggugaacgagua

SEQ ID NO: 1277772 - RNA, 19 nt, Homo sapiens
  misc_RNA (1)...(19): siRNA sense strand
gugaacgaguagauuauaa

SEQ ID NO: 1277773 - RNA, 19 nt, Homo sapiens
  misc_RNA (1)...(19): siRNA sense strand
gagagagcacgauuuauug

SEQ ID NO: 1277774 - RNA, 19 nt, Homo sapiens
  misc_RNA (1)...(19): siRNA sense strand
caaaugggacuuacgaguu

SEQ ID NO: 1277775 - RNA, 19 nt, Homo sapiens
  misc_RNA (1)...(19): siRNA sense strand
ggucauugcugugauuguu

SEQ ID NO: 1277776 - RNA, 19 nt, Homo sapiens
  misc_RNA (1)...(19): siRNA sense strand
ccagauccauuuucacuua

SEQ ID NO: 1277777 - RNA, 19 nt, Homo sapiens
  misc_RNA (1)...(19): siRNA sense strand
gaaggaauacuugacaguu

SEQ ID NO: 1277778 - RNA, 19 nt, Homo sapiens
  misc_RNA (1)...(19): siRNA sense strand
aaggaauacuugacaguuu

SEQ ID NO: 1277779 - RNA, 19 nt, Homo sapiens
  misc_RNA (1)...(19): siRNA sense strand
ucagaugacgccuguuaua

SEQ ID NO: 1277780 - RNA, 19 nt, Homo sapiens
  misc_RNA (1)...(19): siRNA sense strand
gaaaacacaccuuuaguga

SEQ ID NO: 1277781 - RNA, 19 nt, Homo sapiens
  misc_RNA (1)...(19): siRNA sense strand
gaugacgccuguuauagag

SEQ ID NO: 1277782 - RNA, 19 nt, Homo sapiens
  misc_RNA (1)...(19): siRNA sense strand
gagaaacauguccauauau

SEQ ID NO: 1277783 - RNA, 19 nt, Homo sapiens
  misc_RNA (1)...(19): siRNA sense strand
acgaguagauuauaagugu

SEQ ID NO: 1277784 - RNA, 19 nt, Homo sapiens
  misc_RNA (1)...(19): siRNA sense strand
cuacaaagcaacaguuaug

SEQ ID NO: 1277785 - RNA, 19 nt, Homo sapiens
  misc_RNA (1)...(19): siRNA sense strand
ccaccaacauuugaagcua

SEQ ID NO: 1277786 - RNA, 19 nt, Homo sapiens
  misc_RNA (1)...(19): siRNA sense strand
uauacgggauccuuuaaau

SEQ ID NO: 1277787 - RNA, 19 nt, Homo sapiens
  misc_RNA (1)...(19): siRNA sense strand
cgaguuugguuaucagaug

SEQ ID NO: 1277788 - RNA, 19 nt, Homo sapiens
  misc_RNA (1)...(19): siRNA sense strand
gaacgaguagauuauaagu

SEQ ID NO: 1277789 - RNA, 19 nt, Homo sapiens
  misc_RNA (1)...(19): siRNA sense strand
gugaggagccaccaacauu

SEQ ID NO: 1277790 - RNA, 19 nt, Homo sapiens
  misc_RNA (1)...(19): siRNA sense strand
gauggcagcgacacaauug

SEQ ID NO: 1277791 - RNA, 19 nt, Homo sapiens
  misc_RNA (1)...(19): siRNA sense strand
gcuauggagcucauuggua

SEQ ID NO: 1277792 - RNA, 19 nt, Homo sapiens
  misc_RNA (1)...(19): siRNA sense strand
gaggagccaccaacauuug

SEQ ID NO: 1277793 - RNA, 19 nt, Homo sapiens
  misc_RNA (1)...(19): siRNA sense strand
acacaccuuuagugaagua

SEQ ID NO: 1277794 - RNA, 19 nt, Homo sapiens
  misc_RNA (1)...(19): siRNA sense strand
ucucagaugacgccuguua

SEQ ID NO: 1277795 - RNA, 19 nt, Homo sapiens
  misc_RNA (1)...(19): siRNA sense strand
uagagaaacauguccauau

SEQ ID NO: 1277796 - RNA, 19 nt, Homo sapiens
  misc_RNA (1)...(19): siRNA sense strand
guuccaaagugucuuaaag

SEQ ID NO: 1277797 - RNA, 19 nt, Homo sapiens
  misc_RNA (1)...(19): siRNA sense strand
ggugaacgaguagauuaua

SEQ ID NO: 1277798 - RNA, 19 nt, Homo sapiens
  misc_RNA (1)...(19): siRNA sense strand
gaaguagaaguauuugagu

SEQ ID NO: 1277799 - RNA, 19 nt, Homo sapiens
  misc_RNA (1)...(19): siRNA sense strand
gaaacauguccauauauac

SEQ ID NO: 1277800 - RNA, 19 nt, Homo sapiens
  misc_RNA (1)...(19): siRNA sense strand
ugacgccuguuauagagaa

SEQ ID NO: 1277801 - RNA, 19 nt, Homo sapiens
  misc_RNA (1)...(19): siRNA sense strand
cgaguagauuauaagugua

SEQ ID NO: 1277802 - RNA, 19 nt, Homo sapiens
  misc_RNA (1)...(19): siRNA sense strand
gcacuuuauuuguaaugag

SEQ ID NO: 1277803 - RNA, 19 nt, Homo sapiens
  misc_RNA (1)...(19): siRNA sense strand
guagaaguauuugaguauc

SEQ ID NO: 1277804 - RNA, 19 nt, Homo sapiens
  misc_RNA (1)...(19): siRNA sense strand
guauuugaguaucuugaug

SEQ ID NO: 1277805 - RNA, 19 nt, Homo sapiens
  misc_RNA (1)...(19): siRNA sense strand
aggaauacuugacaguuug

SEQ ID NO: 1277806 - RNA, 19 nt, Homo sapiens
  misc_RNA (1)...(19): siRNA sense strand
ccaaaacccuacuaugaga

SEQ ID NO: 1277807 - RNA, 19 nt, Homo sapiens
  misc_RNA (1)...(19): siRNA sense strand
aguguaaaguggucaaaug

SEQ ID NO: 1277808 - RNA, 19 nt, Homo sapiens
  misc_RNA (1)...(19): siRNA sense strand
ccacccauacuauuuguga

SEQ ID NO: 1277809 - RNA, 19 nt, Homo sapiens
  misc_RNA (1)...(19): siRNA sense strand
caccaacauuugaagcuau

SEQ ID NO: 1277810 - RNA, 19 nt, Homo sapiens
  misc_RNA (1)...(19): siRNA sense strand
uuggagagagcacgauuua

SEQ ID NO: 1277811 - RNA, 19 nt, Homo sapiens
  misc_RNA (1)...(19): siRNA sense strand
gguuaucagaugcacuuua

SEQ ID NO: 1277812 - RNA, 19 nt, Homo sapiens
  misc_RNA (1)...(19): siRNA sense strand
ugaggagccaccaacauuu

SEQ ID NO: 1277813 - RNA, 19 nt, Homo sapiens
  misc_RNA (1)...(19): siRNA sense strand
ggaaggaauacuugacagu

SEQ ID NO: 1277814 - RNA, 19 nt, Homo sapiens
  misc_RNA (1)...(19): siRNA sense strand
gaggaaggaauacuugaca

SEQ ID NO: 1277815 - RNA, 19 nt, Homo sapiens
  misc_RNA (1)...(19): siRNA sense strand
ccaguuccaaagugucuua

SEQ ID NO: 1277816 - RNA, 19 nt, Homo sapiens
  misc_RNA (1)...(19): siRNA sense strand
ugaguaucuugaugcagua

SEQ ID NO: 1277817 - RNA, 19 nt, Homo sapiens
  misc_RNA (1)...(19): siRNA sense strand
caccuuuagugaaguagaa

SEQ ID NO: 1277818 - RNA, 19 nt, Homo sapiens
  misc_RNA (1)...(19): siRNA sense strand
acagauaucaggauuugga

SEQ ID NO: 1277819 - RNA, 19 nt, Homo sapiens
  misc_RNA (1)...(19): siRNA sense strand
ucauugcugugauuguuau

SEQ ID NO: 1277820 - RNA, 19 nt, Homo sapiens
  misc_RNA (1)...(19): siRNA sense strand
ucagaugcacuuuauuugu

SEQ ID NO: 1277821 - RNA, 19 nt, Homo sapiens
  misc_RNA (1)...(19): siRNA sense strand
gugcugcuccagaguguaa

SEQ ID NO: 1277822 - RNA, 19 nt, Homo sapiens
  misc_RNA (1)...(19): siRNA sense strand
ggaaaacacaccuuuagug

SEQ ID NO: 1277823 - RNA, 19 nt, Homo sapiens
  misc_RNA (1)...(19): siRNA sense strand
aaggaucaguagcaauuug

SEQ ID NO: 1277824 - RNA, 19 nt, Homo sapiens
  misc_RNA (1)...(19): siRNA sense strand
uauauacgggauccuuuaa

SEQ ID NO: 1277825 - RNA, 19 nt, Homo sapiens
  misc_RNA (1)...(19): siRNA sense strand
ugaaguagaaguauuugag

SEQ ID NO: 1277826 - RNA, 19 nt, Homo sapiens
  misc_RNA (1)...(19): siRNA sense strand
cuugacaguuuggauguuu

SEQ ID NO: 1277827 - RNA, 19 nt, Homo sapiens
  misc_RNA (1)...(19): siRNA sense strand
cauauauacgggauccuuu

SEQ ID NO: 1277828 - RNA, 19 nt, Homo sapiens
  misc_RNA (1)...(19): siRNA sense strand
auauauacgggauccuuua

SEQ ID NO: 1277829 - RNA, 19 nt, Homo sapiens
  misc_RNA (1)...(19): siRNA sense strand
cuuaaaggaucaguagcaa

SEQ ID NO: 1277830 - RNA, 19 nt, Homo sapiens
  misc_RNA (1)...(19): siRNA sense strand
uaaaccugaggaaggaaua

SEQ ID NO: 1277831 - RNA, 19 nt, Homo sapiens
  misc_RNA (1)...(19): siRNA sense strand
agaugacgccuguuauaga

SEQ ID NO: 1277832 - RNA, 19 nt, Homo sapiens
  misc_RNA (1)...(19): siRNA sense strand
ugugauuguuauugccaua

SEQ ID NO: 1277833 - RNA, 19 nt, Homo sapiens
  misc_RNA (1)...(19): siRNA sense strand
gagagcacgauuuauugug

SEQ ID NO: 1277834 - RNA, 19 nt, Homo sapiens
  misc_RNA (1)...(19): siRNA sense strand
gaaguauuugaguaucuug

SEQ ID NO: 1277835 - RNA, 19 nt, Homo sapiens
  misc_RNA (1)...(19): siRNA sense strand
ggcuaccugucucagauga

SEQ ID NO: 1277836 - RNA, 19 nt, Homo sapiens
  misc_RNA (1)...(19): siRNA sense strand
gauaucaggauuuggaaaa

SEQ ID NO: 1277837 - RNA, 19 nt, Homo sapiens
  misc_RNA (1)...(19): siRNA sense strand
ccucuugccacccauacua

SEQ ID NO: 1277838 - RNA, 19 nt, Homo sapiens
  misc_RNA (1)...(19): siRNA sense strand
ccaugguguugcugcugua

SEQ ID NO: 1277839 - RNA, 19 nt, Homo sapiens
  misc_RNA (1)...(19): siRNA sense strand
cagaugacgccuguuauag

SEQ ID NO: 1277840 - RNA, 19 nt, Homo sapiens
  misc_RNA (1)...(19): siRNA sense strand
uuggugaacgaguagauua

SEQ ID NO: 1277841 - RNA, 19 nt, Homo sapiens
  misc_RNA (1)...(19): siRNA sense strand
gucauugcugugauuguua

SEQ ID NO: 1277842 - RNA, 19 nt, Homo sapiens
  misc_RNA (1)...(19): siRNA sense strand
ggagccaccaacauuugaa

SEQ ID NO: 1277843 - RNA, 19 nt, Homo sapiens
  misc_RNA (1)...(19): siRNA sense strand
gcgcuuuccuggguugcuu

SEQ ID NO: 1277844 - RNA, 19 nt, Homo sapiens
  misc_RNA (1)...(19): siRNA sense strand
uacuacaaagcaacaguua

SEQ ID NO: 1277845 - RNA, 19 nt, Homo sapiens
  misc_RNA (1)...(19): siRNA sense strand
cuugaugcaguaacuuaua

SEQ ID NO: 1277846 - RNA, 19 nt, Homo sapiens
  misc_RNA (1)...(19): siRNA sense strand
aaacauguccauauauacg

SEQ ID NO: 1277847 - RNA, 19 nt, Homo sapiens
  misc_RNA (1)...(19): siRNA sense strand
guguaaaguggucaaaugu

SEQ ID NO: 1277848 - RNA, 19 nt, Homo sapiens
  misc_RNA (1)...(19): siRNA sense strand
cuuacgaguuugguuauca

SEQ ID NO: 1277849 - RNA, 19 nt, Homo sapiens
  misc_RNA (1)...(19): siRNA sense strand
uacgggauccuuuaaaugg

SEQ ID NO: 1277850 - RNA, 19 nt, Homo sapiens
  misc_RNA (1)...(19): siRNA sense strand
aaccaaaacccuacuauga

SEQ ID NO: 1277851 - RNA, 19 nt, Homo sapiens
  misc_RNA (1)...(19): siRNA sense strand
cccaauaugugaaaagguu

SEQ ID NO: 1277852 - RNA, 19 nt, Homo sapiens
  misc_RNA (1)...(19): siRNA sense strand
cgauggcagcgacacaauu

SEQ ID NO: 1277853 - RNA, 19 nt, Homo sapiens
  misc_RNA (1)...(19): siRNA sense strand
gauccauuuucacuuauug

SEQ ID NO: 1277854 - RNA, 19 nt, Homo sapiens
  misc_RNA (1)...(19): siRNA sense strand
uugaugcaguaacuuauag

SEQ ID NO: 1277855 - RNA, 19 nt, Homo sapiens
  misc_RNA (1)...(19): siRNA sense strand
guaucuugaugcaguaacu

SEQ ID NO: 1277856 - RNA, 19 nt, Homo sapiens
  misc_RNA (1)...(19): siRNA sense strand
caacauuugaagcuaugga

SEQ ID NO: 1277857 - RNA, 19 nt, Homo sapiens
  misc_RNA (1)...(19): siRNA sense strand
gagauuggugaacgaguag

SEQ ID NO: 1277858 - RNA, 19 nt, Homo sapiens
  misc_RNA (1)...(19): siRNA sense strand
ggagagagcacgauuuauu

SEQ ID NO: 1277859 - RNA, 19 nt, Homo sapiens
  misc_RNA (1)...(19): siRNA sense strand
agagaaacauguccauaua

SEQ ID NO: 1277860 - RNA, 19 nt, Homo sapiens
  misc_RNA (1)...(19): siRNA sense strand
cagaugcacuuuauuugua

SEQ ID NO: 1277861 - RNA, 19 nt, Homo sapiens
  misc_RNA (1)...(19): siRNA sense strand
ggacuuacgaguuugguua

SEQ ID NO: 1277862 - RNA, 19 nt, Homo sapiens
  misc_RNA (1)...(19): siRNA sense strand
aaacagauaucaggauuug

SEQ ID NO: 1277863 - RNA, 19 nt, Homo sapiens
  misc_RNA (1)...(19): siRNA sense strand
cuauggagcucauugguaa

SEQ ID NO: 1277864 - RNA, 19 nt, Homo sapiens
  misc_RNA (1)...(19): siRNA sense strand
aaacacaccuuuagugaag

SEQ ID NO: 1277865 - RNA, 19 nt, Homo sapiens
  misc_RNA (1)...(19): siRNA sense strand
gaacuuaaaggaucaguag

SEQ ID NO: 1277866 - RNA, 19 nt, Homo sapiens
  misc_RNA (1)...(19): siRNA sense strand
gaaaacagauaucaggauu

SEQ ID NO: 1277867 - RNA, 19 nt, Homo sapiens
  misc_RNA (1)...(19): siRNA sense strand
uaaaggaucaguagcaauu

SEQ ID NO: 1277868 - RNA, 19 nt, Homo sapiens
  misc_RNA (1)...(19): siRNA sense strand
aaaugggacuuacgaguuu

SEQ ID NO: 1277869 - RNA, 19 nt, Homo sapiens
  misc_RNA (1)...(19): siRNA sense strand
guuaucagaugcacuuuau

SEQ ID NO: 1277870 - RNA, 19 nt, Homo sapiens
  misc_RNA (1)...(19): siRNA sense strand
gagcugaauaugccacuua

SEQ ID NO: 1277871 - RNA, 19 nt, Homo sapiens
  misc_RNA (1)...(19): siRNA sense strand
ugagauuggugaacgagua

SEQ ID NO: 1277872 - RNA, 19 nt, Homo sapiens
  misc_RNA (1)...(19): siRNA sense strand
gugaacgaguagauuauaa

SEQ ID NO: 1277873 - RNA, 19 nt, Homo sapiens
  misc_RNA (1)...(19): siRNA sense strand
gagagagcacgauuuauug

SEQ ID NO: 1277874 - RNA, 19 nt, Homo sapiens
  misc_RNA (1)...(19): siRNA sense strand
caaaugggacuuacgaguu

SEQ ID NO: 1277875 - RNA, 19 nt, Homo sapiens
  misc_RNA (1)...(19): siRNA sense strand
ggucauugcugugauuguu

SEQ ID NO: 1277876 - RNA, 19 nt, Homo sapiens
  misc_RNA (1)...(19): siRNA sense strand
ccagauccauuuucacuua

SEQ ID NO: 1277877 - RNA, 19 nt, Homo sapiens
  misc_RNA (1)...(19): siRNA sense strand
gaaggaauacuugacaguu

SEQ ID NO: 1277878 - RNA, 19 nt, Homo sapiens
  misc_RNA (1)...(19): siRNA sense strand
aaggaauacuugacaguuu

SEQ ID NO: 1277879 - RNA, 19 nt, Homo sapiens
  misc_RNA (1)...(19): siRNA sense strand
ucagaugacgccuguuaua

SEQ ID NO: 1277880 - RNA, 19 nt, Homo sapiens
  misc_RNA (1)...(19): siRNA sense strand
gaaaacacaccuuuaguga

SEQ ID NO: 1277881 - RNA, 19 nt, Homo sapiens
  misc_RNA (1)...(19): siRNA sense strand
gaugacgccuguuauagag

SEQ ID NO: 1277882 - RNA, 19 nt, Homo sapiens
  misc_RNA (1)...(19): siRNA sense strand
gagaaacauguccauauau

SEQ ID NO: 1277883 - RNA, 19 nt, Homo sapiens
  misc_RNA (1)...(19): siRNA sense strand
ccacuuaccagacuaaauc

SEQ ID NO: 1277884 - RNA, 19 nt, Homo sapiens
  misc_RNA (1)...(19): siRNA sense strand
acgaguagauuauaagugu

SEQ ID NO: 1277885 - RNA, 19 nt, Homo sapiens
  misc_RNA (1)...(19): siRNA sense strand
cuacaaagcaacaguuaug

SEQ ID NO: 1277886 - RNA, 19 nt, Homo sapiens
  misc_RNA (1)...(19): siRNA sense strand
ccaccaacauuugaagcua

SEQ ID NO: 1277887 - RNA, 19 nt, Homo sapiens
  misc_RNA (1)...(19): siRNA sense strand
uauacgggauccuuuaaau

SEQ ID NO: 1277888 - RNA, 19 nt, Homo sapiens
  misc_RNA (1)...(19): siRNA sense strand
cgaguuugguuaucagaug

SEQ ID NO: 1277889 - RNA, 19 nt, Homo sapiens
  misc_RNA (1)...(19): siRNA sense strand
gaacgaguagauuauaagu

SEQ ID NO: 1277890 - RNA, 19 nt, Homo sapiens
  misc_RNA (1)...(19): siRNA sense strand
gugaggagccaccaacauu

SEQ ID NO: 1277891 - RNA, 19 nt, Homo sapiens
  misc_RNA (1)...(19): siRNA sense strand
gauggcagcgacacaauug

SEQ ID NO: 1277892 - RNA, 19 nt, Homo sapiens
  misc_RNA (1)...(19): siRNA sense strand
ucucagaugacgccuguua

SEQ ID NO: 1277893 - RNA, 19 nt, Homo sapiens
  misc_RNA (1)...(19): siRNA sense strand
gaggagccaccaacauuug

SEQ ID NO: 1277894 - RNA, 19 nt, Homo sapiens
  misc_RNA (1)...(19): siRNA sense strand
gcuauggagcucauuggua

SEQ ID NO: 1277895 - RNA, 19 nt, Homo sapiens
  misc_RNA (1)...(19): siRNA sense strand
acacaccuuuagugaagua

SEQ ID NO: 1277896 - RNA, 19 nt, Homo sapiens
  misc_RNA (1)...(19): siRNA sense strand
uagagaaacauguccauau

SEQ ID NO: 1277897 - RNA, 19 nt, Homo sapiens
  misc_RNA (1)...(19): siRNA sense strand
guuccaaagugucuuaaag

SEQ ID NO: 1277898 - RNA, 19 nt, Homo sapiens
  misc_RNA (1)...(19): siRNA sense strand
ggugaacgaguagauuaua

SEQ ID NO: 1277899 - RNA, 19 nt, Homo sapiens
  misc_RNA (1)...(19): siRNA sense strand
gaaguagaaguauuugagu

SEQ ID NO: 1277900 - RNA, 19 nt, Homo sapiens
  misc_RNA (1)...(19): siRNA sense strand
gaaacauguccauauauac

SEQ ID NO: 1277901 - RNA, 19 nt, Homo sapiens
  misc_RNA (1)...(19): siRNA sense strand
ugacgccuguuauagagaa

SEQ ID NO: 1277902 - RNA, 19 nt, Homo sapiens
  misc_RNA (1)...(19): siRNA sense strand
cgaguagauuauaagugua

SEQ ID NO: 1277903 - RNA, 19 nt, Homo sapiens
  misc_RNA (1)...(19): siRNA sense strand
gcacuuuauuuguaaugag

SEQ ID NO: 1277904 - RNA, 19 nt, Homo sapiens
  misc_RNA (1)...(19): siRNA sense strand
guagaaguauuugaguauc

SEQ ID NO: 1277905 - RNA, 19 nt, Homo sapiens
  misc_RNA (1)...(19): siRNA sense strand
guauuugaguaucuugaug

SEQ ID NO: 1277906 - RNA, 19 nt, Homo sapiens
  misc_RNA (1)...(19): siRNA sense strand
aggaauacuugacaguuug

SEQ ID NO: 1277907 - RNA, 19 nt, Homo sapiens
  misc_RNA (1)...(19): siRNA sense strand
ccaaaacccuacuaugaga

SEQ ID NO: 1277908 - RNA, 19 nt, Homo sapiens
  misc_RNA (1)...(19): siRNA sense strand
aguguaaaguggucaaaug

SEQ ID NO: 1277909 - RNA, 19 nt, Homo sapiens
  misc_RNA (1)...(19): siRNA sense strand
ccacccauacuauuuguga

SEQ ID NO: 1277910 - RNA, 19 nt, Homo sapiens
  misc_RNA (1)...(19): siRNA sense strand
uuggagagagcacgauuua

SEQ ID NO: 1277911 - RNA, 19 nt, Homo sapiens
  misc_RNA (1)...(19): siRNA sense strand
gguuaucagaugcacuuua

SEQ ID NO: 1277912 - RNA, 19 nt, Homo sapiens
  misc_RNA (1)...(19): siRNA sense strand
caccaacauuugaagcuau

SEQ ID NO: 1277913 - RNA, 19 nt, Homo sapiens
  misc_RNA (1)...(19): siRNA sense strand
ugaggagccaccaacauuu

SEQ ID NO: 1277914 - RNA, 19 nt, Homo sapiens
  misc_RNA (1)...(19): siRNA sense strand
ggaaggaauacuugacagu

SEQ ID NO: 1277915 - RNA, 19 nt, Homo sapiens
  misc_RNA (1)...(19): siRNA sense strand
gaggaaggaauacuugaca

SEQ ID NO: 1277916 - RNA, 19 nt, Homo sapiens
  misc_RNA (1)...(19): siRNA sense strand
ccaguuccaaagugucuua

SEQ ID NO: 1277917 - RNA, 19 nt, Homo sapiens
  misc_RNA (1)...(19): siRNA sense strand
ugaguaucuugaugcagua

SEQ ID NO: 1277918 - RNA, 19 nt, Homo sapiens
  misc_RNA (1)...(19): siRNA sense strand
caccuuuagugaaguagaa

SEQ ID NO: 1277919 - RNA, 19 nt, Homo sapiens
  misc_RNA (1)...(19): siRNA sense strand
acagauaucaggauuugga

SEQ ID NO: 1277920 - RNA, 19 nt, Homo sapiens
  misc_RNA (1)...(19): siRNA sense strand
ucauugcugugauuguuau

SEQ ID NO: 1277921 - RNA, 19 nt, Homo sapiens
  misc_RNA (1)...(19): siRNA sense strand
ucagaugcacuuuauuugu

SEQ ID NO: 1277922 - RNA, 19 nt, Homo sapiens
  misc_RNA (1)...(19): siRNA sense strand
gugcugcuccagaguguaa

SEQ ID NO: 1277923 - RNA, 19 nt, Homo sapiens
  misc_RNA (1)...(19): siRNA sense strand
ggaaaacacaccuuuagug

SEQ ID NO: 1277924 - RNA, 19 nt, Homo sapiens
  misc_RNA (1)...(19): siRNA sense strand
aaggaucaguagcaauuug

SEQ ID NO: 1277925 - RNA, 19 nt, Homo sapiens
  misc_RNA (1)...(19): siRNA sense strand
uauauacgggauccuuuaa

SEQ ID NO: 1277926 - RNA, 19 nt, Homo sapiens
  misc_RNA (1)...(19): siRNA sense strand
ugaaguagaaguauuugag

SEQ ID NO: 1277927 - RNA, 19 nt, Homo sapiens
  misc_RNA (1)...(19): siRNA sense strand
cuugacaguuuggauguuu

SEQ ID NO: 1277928 - RNA, 19 nt, Homo sapiens
  misc_RNA (1)...(19): siRNA sense strand
cauauauacgggauccuuu

SEQ ID NO: 1277929 - RNA, 19 nt, Homo sapiens
  misc_RNA (1)...(19): siRNA sense strand
auauauacgggauccuuua

SEQ ID NO: 1277930 - RNA, 19 nt, Homo sapiens
  misc_RNA (1)...(19): siRNA sense strand
cuuaaaggaucaguagcaa

SEQ ID NO: 1277931 - RNA, 19 nt, Homo sapiens
  misc_RNA (1)...(19): siRNA sense strand
uaaaccugaggaaggaaua

SEQ ID NO: 1277932 - RNA, 19 nt, Homo sapiens
  misc_RNA (1)...(19): siRNA sense strand
agaugacgccuguuauaga

SEQ ID NO: 1277933 - RNA, 19 nt, Homo sapiens
  misc_RNA (1)...(19): siRNA sense strand
ugugauuguuauugccaua

SEQ ID NO: 1277934 - RNA, 19 nt, Homo sapiens
  misc_RNA (1)...(19): siRNA sense strand
gagagcacgauuuauugug

SEQ ID NO: 1277935 - RNA, 19 nt, Homo sapiens
  misc_RNA (1)...(19): siRNA sense strand
gaaguauuugaguaucuug

SEQ ID NO: 1277936 - RNA, 19 nt, Homo sapiens
  misc_RNA (1)...(19): siRNA sense strand
ggcuaccugucucagauga

SEQ ID NO: 1277937 - RNA, 19 nt, Homo sapiens
  misc_RNA (1)...(19): siRNA sense strand
gauaucaggauuuggaaaa

SEQ ID NO: 1277938 - RNA, 19 nt, Homo sapiens
  misc_RNA (1)...(19): siRNA sense strand
ccucuugccacccauacua

SEQ ID NO: 1277939 - RNA, 19 nt, Homo sapiens
  misc_RNA (1)...(19): siRNA sense strand
ccaugguguugcugcugua

SEQ ID NO: 1277940 - RNA, 19 nt, Homo sapiens
  misc_RNA (1)...(19): siRNA sense strand
cagaugacgccuguuauag

SEQ ID NO: 1277941 - RNA, 19 nt, Homo sapiens
  misc_RNA (1)...(19): siRNA sense strand
cagaugguggagcugaaua

SEQ ID NO: 1277942 - RNA, 19 nt, Homo sapiens
  misc_RNA (1)...(19): siRNA sense strand
gucauugcugugauuguua

SEQ ID NO: 1277943 - RNA, 19 nt, Homo sapiens
  misc_RNA (1)...(19): siRNA sense strand
ggagccaccaacauuugaa

SEQ ID NO: 1277944 - RNA, 19 nt, Homo sapiens
  misc_RNA (1)...(19): siRNA sense strand
uuggugaacgaguagauua

SEQ ID NO: 1277945 - RNA, 19 nt, Homo sapiens
  misc_RNA (1)...(19): siRNA sense strand
gcgcuuuccuggguugcuu

SEQ ID NO: 1277946 - RNA, 19 nt, Homo sapiens
  misc_RNA (1)...(19): siRNA sense strand
uacuacaaagcaacaguua

SEQ ID NO: 1277947 - RNA, 19 nt, Homo sapiens
  misc_RNA (1)...(19): siRNA sense strand
cuugaugcaguaacuuaua

SEQ ID NO: 1277948 - RNA, 19 nt, Homo sapiens
  misc_RNA (1)...(19): siRNA sense strand
aaacauguccauauauacg

SEQ ID NO: 1277949 - RNA, 19 nt, Homo sapiens
  misc_RNA (1)...(19): siRNA sense strand
guguaaaguggucaaaugu

SEQ ID NO: 1277950 - RNA, 19 nt, Homo sapiens
  misc_RNA (1)...(19): siRNA sense strand
cuuacgaguuugguuauca

SEQ ID NO: 1277951 - RNA, 19 nt, Homo sapiens
  misc_RNA (1)...(19): siRNA sense strand
uacgggauccuuuaaaugg

SEQ ID NO: 1277952 - RNA, 19 nt, Homo sapiens
  misc_RNA (1)...(19): siRNA sense strand
gcagaugguggagcugaau

SEQ ID NO: 1277953 - RNA, 19 nt, Homo sapiens
  misc_RNA (1)...(19): siRNA sense strand
aaccaaaacccuacuauga

SEQ ID NO: 1277954 - RNA, 19 nt, Homo sapiens
  misc_RNA (1)...(19): siRNA sense strand
uugaugcaguaacuuauag

SEQ ID NO: 1277955 - RNA, 19 nt, Homo sapiens
  misc_RNA (1)...(19): siRNA sense strand
ggagcugaauaugccacuu

SEQ ID NO: 1277956 - RNA, 19 nt, Homo sapiens
  misc_RNA (1)...(19): siRNA sense strand
cgauggcagcgacacaauu

SEQ ID NO: 1277957 - RNA, 19 nt, Homo sapiens
  misc_RNA (1)...(19): siRNA sense strand
gauccauuuucacuuauug

SEQ ID NO: 1277958 - RNA, 19 nt, Homo sapiens
  misc_RNA (1)...(19): siRNA sense strand
ggagagagcacgauuuauu

SEQ ID NO: 1277959 - RNA, 19 nt, Homo sapiens
  misc_RNA (1)...(19): siRNA sense strand
agagaaacauguccauaua

SEQ ID NO: 1277960 - RNA, 19 nt, Homo sapiens
  misc_RNA (1)...(19): siRNA sense strand
cagaugcacuuuauuugua

SEQ ID NO: 1277961 - RNA, 19 nt, Homo sapiens
  misc_RNA (1)...(19): siRNA sense strand
ggacuuacgaguuugguua

SEQ ID NO: 1277962 - RNA, 19 nt, Homo sapiens
  misc_RNA (1)...(19): siRNA sense strand
aaacagauaucaggauuug

SEQ ID NO: 1277963 - RNA, 19 nt, Homo sapiens
  misc_RNA (1)...(19): siRNA sense strand
cuauggagcucauugguaa

SEQ ID NO: 1277964 - RNA, 19 nt, Homo sapiens
  misc_RNA (1)...(19): siRNA sense strand
aaacacaccuuuagugaag

SEQ ID NO: 1277965 - RNA, 19 nt, Homo sapiens
  misc_RNA (1)...(19): siRNA sense strand
gaacuuaaaggaucaguag

SEQ ID NO: 1277966 - RNA, 19 nt, Homo sapiens
  misc_RNA (1)...(19): siRNA sense strand
gaaaacagauaucaggauu

SEQ ID NO: 1277967 - RNA, 19 nt, Homo sapiens
  misc_RNA (1)...(19): siRNA sense strand
uaaaggaucaguagcaauu

SEQ ID NO: 1277968 - RNA, 19 nt, Homo sapiens
  misc_RNA (1)...(19): siRNA sense strand
aaaugggacuuacgaguuu

SEQ ID NO: 1277969 - RNA, 19 nt, Homo sapiens
  misc_RNA (1)...(19): siRNA sense strand
guuaucagaugcacuuuau

SEQ ID NO: 1277970 - RNA, 19 nt, Homo sapiens
  misc_RNA (1)...(19): siRNA sense strand
ugagauuggugaacgagua

SEQ ID NO: 1277971 - RNA, 19 nt, Homo sapiens
  misc_RNA (1)...(19): siRNA sense strand
gugaacgaguagauuauaa

SEQ ID NO: 1277972 - RNA, 19 nt, Homo sapiens
  misc_RNA (1)...(19): siRNA sense strand
gagagagcacgauuuauug

SEQ ID NO: 1277973 - RNA, 19 nt, Homo sapiens
  misc_RNA (1)...(19): siRNA sense strand
caaaugggacuuacgaguu

SEQ ID NO: 1277974 - RNA, 19 nt, Homo sapiens
  misc_RNA (1)...(19): siRNA sense strand
ggucauugcugugauuguu

SEQ ID NO: 1277975 - RNA, 19 nt, Homo sapiens
  misc_RNA (1)...(19): siRNA sense strand
ccagauccauuuucacuua

SEQ ID NO: 1277976 - RNA, 19 nt, Homo sapiens
  misc_RNA (1)...(19): siRNA sense strand
gaaggaauacuugacaguu

SEQ ID NO: 1277977 - RNA, 19 nt, Homo sapiens
  misc_RNA (1)...(19): siRNA sense strand
aaggaauacuugacaguuu

SEQ ID NO: 1277978 - RNA, 19 nt, Homo sapiens
  misc_RNA (1)...(19): siRNA sense strand
ucagaugacgccuguuaua

SEQ ID NO: 1277979 - RNA, 19 nt, Homo sapiens
  misc_RNA (1)...(19): siRNA sense strand
gaaaacacaccuuuaguga

SEQ ID NO: 1277980 - RNA, 19 nt, Homo sapiens
  misc_RNA (1)...(19): siRNA sense strand
gaugacgccuguuauagag

SEQ ID NO: 1277981 - RNA, 19 nt, Homo sapiens
  misc_RNA (1)...(19): siRNA sense strand
gagaaacauguccauauau

SEQ ID NO: 1277982 - RNA, 19 nt, Homo sapiens
  misc_RNA (1)...(19): siRNA sense strand
acgaguagauuauaagugu

SEQ ID NO: 1277983 - RNA, 19 nt, Homo sapiens
  misc_RNA (1)...(19): siRNA sense strand
cuacaaagcaacaguuaug

SEQ ID NO: 1277984 - RNA, 19 nt, Homo sapiens
  misc_RNA (1)...(19): siRNA sense strand
ccaccaacauuugaagcua

SEQ ID NO: 1277985 - RNA, 19 nt, Homo sapiens
  misc_RNA (1)...(19): siRNA sense strand
uauacgggauccuuuaaau

SEQ ID NO: 1277986 - RNA, 19 nt, Homo sapiens
  misc_RNA (1)...(19): siRNA sense strand
cgaguuugguuaucagaug

SEQ ID NO: 1277987 - RNA, 19 nt, Homo sapiens
  misc_RNA (1)...(19): siRNA sense strand
gaacgaguagauuauaagu

SEQ ID NO: 1277988 - RNA, 19 nt, Homo sapiens
  misc_RNA (1)...(19): siRNA sense strand
gugaggagccaccaacauu

SEQ ID NO: 1277989 - RNA, 19 nt, Homo sapiens
  misc_RNA (1)...(19): siRNA sense strand
gauggcagcgacacaauug

SEQ ID NO: 1277990 - RNA, 19 nt, Homo sapiens
  misc_RNA (1)...(19): siRNA sense strand
gcuauggagcucauuggua

SEQ ID NO: 1277991 - RNA, 19 nt, Homo sapiens
  misc_RNA (1)...(19): siRNA sense strand
gaggagccaccaacauuug

SEQ ID NO: 1277992 - RNA, 19 nt, Homo sapiens
  misc_RNA (1)...(19): siRNA sense strand
acacaccuuuagugaagua

SEQ ID NO: 1277993 - RNA, 19 nt, Homo sapiens
  misc_RNA (1)...(19): siRNA sense strand
ucucagaugacgccuguua

SEQ ID NO: 1277994 - RNA, 19 nt, Homo sapiens
  misc_RNA (1)...(19): siRNA sense strand
uagagaaacauguccauau

SEQ ID NO: 1277995 - RNA, 19 nt, Homo sapiens
  misc_RNA (1)...(19): siRNA sense strand
guuccaaagugucuuaaag

SEQ ID NO: 1277996 - RNA, 19 nt, Homo sapiens
  misc_RNA (1)...(19): siRNA sense strand
ggugaacgaguagauuaua

SEQ ID NO: 1277997 - RNA, 19 nt, Homo sapiens
  misc_RNA (1)...(19): siRNA sense strand
gaaguagaaguauuugagu

SEQ ID NO: 1277998 - RNA, 19 nt, Homo sapiens
  misc_RNA (1)...(19): siRNA sense strand
gaaacauguccauauauac

SEQ ID NO: 1277999 - RNA, 19 nt, Homo sapiens
  misc_RNA (1)...(19): siRNA sense strand
ugacgccuguuauagagaa

SEQ ID NO: 1278000 - RNA, 19 nt, Homo sapiens
  misc_RNA (1)...(19): siRNA sense strand
cgaguagauuauaagugua

SEQ ID NO: 1278001 - RNA, 19 nt, Homo sapiens
  misc_RNA (1)...(19): siRNA sense strand
gcacuuuauuuguaaugag

SEQ ID NO: 1278002 - RNA, 19 nt, Homo sapiens
  misc_RNA (1)...(19): siRNA sense strand
guagaaguauuugaguauc

SEQ ID NO: 1278003 - RNA, 19 nt, Homo sapiens
  misc_RNA (1)...(19): siRNA sense strand
guauuugaguaucuugaug

SEQ ID NO: 1278004 - RNA, 19 nt, Homo sapiens
  misc_RNA (1)...(19): siRNA sense strand
aggaauacuugacaguuug

SEQ ID NO: 1278005 - RNA, 19 nt, Homo sapiens
  misc_RNA (1)...(19): siRNA sense strand
ccaaaacccuacuaugaga

SEQ ID NO: 1278006 - RNA, 19 nt, Homo sapiens
  misc_RNA (1)...(19): siRNA sense strand
aguguaaaguggucaaaug

SEQ ID NO: 1278007 - RNA, 19 nt, Homo sapiens
  misc_RNA (1)...(19): siRNA sense strand
ccacccauacuauuuguga

SEQ ID NO: 1278008 - RNA, 19 nt, Homo sapiens
  misc_RNA (1)...(19): siRNA sense strand
caccaacauuugaagcuau

SEQ ID NO: 1278009 - RNA, 19 nt, Homo sapiens
  misc_RNA (1)...(19): siRNA sense strand
uuggagagagcacgauuua

SEQ ID NO: 1278010 - RNA, 19 nt, Homo sapiens
  misc_RNA (1)...(19): siRNA sense strand
gguuaucagaugcacuuua

SEQ ID NO: 1278011 - RNA, 19 nt, Homo sapiens
  misc_RNA (1)...(19): siRNA sense strand
ugaggagccaccaacauuu

SEQ ID NO: 1278012 - RNA, 19 nt, Homo sapiens
  misc_RNA (1)...(19): siRNA sense strand
ggaaggaauacuugacagu

SEQ ID NO: 1278013 - RNA, 19 nt, Homo sapiens
  misc_RNA (1)...(19): siRNA sense strand
gaggaaggaauacuugaca

SEQ ID NO: 1278014 - RNA, 19 nt, Homo sapiens
  misc_RNA (1)...(19): siRNA sense strand
ccaguuccaaagugucuua

SEQ ID NO: 1278015 - RNA, 19 nt, Homo sapiens
  misc_RNA (1)...(19): siRNA sense strand
ugaguaucuugaugcagua

SEQ ID NO: 1278016 - RNA, 19 nt, Homo sapiens
  misc_RNA (1)...(19): siRNA sense strand
caccuuuagugaaguagaa

SEQ ID NO: 1278017 - RNA, 19 nt, Homo sapiens
  misc_RNA (1)...(19): siRNA sense strand
acagauaucaggauuugga

SEQ ID NO: 1278018 - RNA, 19 nt, Homo sapiens
  misc_RNA (1)...(19): siRNA sense strand
ucauugcugugauuguuau

SEQ ID NO: 1278019 - RNA, 19 nt, Homo sapiens
  misc_RNA (1)...(19): siRNA sense strand
ucagaugcacuuuauuugu

SEQ ID NO: 1278020 - RNA, 19 nt, Homo sapiens
  misc_RNA (1)...(19): siRNA sense strand
gugcugcuccagaguguaa

SEQ ID NO: 1278021 - RNA, 19 nt, Homo sapiens
  misc_RNA (1)...(19): siRNA sense strand
ggaaaacacaccuuuagug

SEQ ID NO: 1278022 - RNA, 19 nt, Homo sapiens
  misc_RNA (1)...(19): siRNA sense strand
aaggaucaguagcaauuug

SEQ ID NO: 1278023 - RNA, 19 nt, Homo sapiens
  misc_RNA (1)...(19): siRNA sense strand
uauauacgggauccuuuaa

SEQ ID NO: 1278024 - RNA, 19 nt, Homo sapiens
  misc_RNA (1)...(19): siRNA sense strand
ugaaguagaaguauuugag

SEQ ID NO: 1278025 - RNA, 19 nt, Homo sapiens
  misc_RNA (1)...(19): siRNA sense strand
cuugacaguuuggauguuu

SEQ ID NO: 1278026 - RNA, 19 nt, Homo sapiens
  misc_RNA (1)...(19): siRNA sense strand
cauauauacgggauccuuu

SEQ ID NO: 1278027 - RNA, 19 nt, Homo sapiens
  misc_RNA (1)...(19): siRNA sense strand
auauauacgggauccuuua

SEQ ID NO: 1278028 - RNA, 19 nt, Homo sapiens
  misc_RNA (1)...(19): siRNA sense strand
cuuaaaggaucaguagcaa

SEQ ID NO: 1278029 - RNA, 19 nt, Homo sapiens
  misc_RNA (1)...(19): siRNA sense strand
uaaaccugaggaaggaaua

SEQ ID NO: 1278030 - RNA, 19 nt, Homo sapiens
  misc_RNA (1)...(19): siRNA sense strand
agaugacgccuguuauaga

SEQ ID NO: 1278031 - RNA, 19 nt, Homo sapiens
  misc_RNA (1)...(19): siRNA sense strand
ugugauuguuauugccaua

SEQ ID NO: 1278032 - RNA, 19 nt, Homo sapiens
  misc_RNA (1)...(19): siRNA sense strand
gagagcacgauuuauugug

SEQ ID NO: 1278033 - RNA, 19 nt, Homo sapiens
  misc_RNA (1)...(19): siRNA sense strand
gaaguauuugaguaucuug

SEQ ID NO: 1278034 - RNA, 19 nt, Homo sapiens
  misc_RNA (1)...(19): siRNA sense strand
ggcuaccugucucagauga

SEQ ID NO: 1278035 - RNA, 19 nt, Homo sapiens
  misc_RNA (1)...(19): siRNA sense strand
gauaucaggauuuggaaaa

SEQ ID NO: 1278036 - RNA, 19 nt, Homo sapiens
  misc_RNA (1)...(19): siRNA sense strand
ccucuugccacccauacua

SEQ ID NO: 1278037 - RNA, 19 nt, Homo sapiens
  misc_RNA (1)...(19): siRNA sense strand
ccaugguguugcugcugua

SEQ ID NO: 1278038 - RNA, 19 nt, Homo sapiens
  misc_RNA (1)...(19): siRNA sense strand
cagaugacgccuguuauag

SEQ ID NO: 1278039 - RNA, 19 nt, Homo sapiens
  misc_RNA (1)...(19): siRNA sense strand
uuggugaacgaguagauua

SEQ ID NO: 1278040 - RNA, 19 nt, Homo sapiens
  misc_RNA (1)...(19): siRNA sense strand
gucauugcugugauuguua

SEQ ID NO: 1278041 - RNA, 19 nt, Homo sapiens
  misc_RNA (1)...(19): siRNA sense strand
ggagccaccaacauuugaa

SEQ ID NO: 1278042 - RNA, 19 nt, Homo sapiens
  misc_RNA (1)...(19): siRNA sense strand
gcgcuuuccuggguugcuu

SEQ ID NO: 1278043 - RNA, 19 nt, Homo sapiens
  misc_RNA (1)...(19): siRNA sense strand
uacuacaaagcaacaguua

SEQ ID NO: 1278044 - RNA, 19 nt, Homo sapiens
  misc_RNA (1)...(19): siRNA sense strand
cuugaugcaguaacuuaua

SEQ ID NO: 1278045 - RNA, 19 nt, Homo sapiens
  misc_RNA (1)...(19): siRNA sense strand
aaacauguccauauauacg

SEQ ID NO: 1278046 - RNA, 19 nt, Homo sapiens
  misc_RNA (1)...(19): siRNA sense strand
guguaaaguggucaaaugu

SEQ ID NO: 1278047 - RNA, 19 nt, Homo sapiens
  misc_RNA (1)...(19): siRNA sense strand
cuuacgaguuugguuauca

SEQ ID NO: 1278048 - RNA, 19 nt, Homo sapiens
  misc_RNA (1)...(19): siRNA sense strand
uacgggauccuuuaaaugg

SEQ ID NO: 1278049 - RNA, 19 nt, Homo sapiens
  misc_RNA (1)...(19): siRNA sense strand
aaccaaaacccuacuauga

SEQ ID NO: 1278050 - RNA, 19 nt, Homo sapiens
  misc_RNA (1)...(19): siRNA sense strand
cccaauaugugaaaagguu

SEQ ID NO: 1278051 - RNA, 19 nt, Homo sapiens
  misc_RNA (1)...(19): siRNA sense strand
cgauggcagcgacacaauu

SEQ ID NO: 1278052 - RNA, 19 nt, Homo sapiens
  misc_RNA (1)...(19): siRNA sense strand
gauccauuuucacuuauug

SEQ ID NO: 1278053 - RNA, 19 nt, Homo sapiens
  misc_RNA (1)...(19): siRNA sense strand
uugaugcaguaacuuauag

SEQ ID NO: 1278054 - RNA, 19 nt, Homo sapiens
  misc_RNA (1)...(19): siRNA sense strand
guaucuugaugcaguaacu

SEQ ID NO: 1278055 - RNA, 19 nt, Homo sapiens
  misc_RNA (1)...(19): siRNA sense strand
caacauuugaagcuaugga

SEQ ID NO: 1278056 - RNA, 19 nt, Homo sapiens
  misc_RNA (1)...(19): siRNA sense strand
gagauuggugaacgaguag

SEQ ID NO: 1278057 - RNA, 19 nt, Homo sapiens
  misc_RNA (1)...(19): siRNA sense strand
ggagagagcacgauuuauu

SEQ ID NO: 1278058 - RNA, 19 nt, Homo sapiens
  misc_RNA (1)...(19): siRNA sense strand
agagaaacauguccauaua

SEQ ID NO: 1278059 - RNA, 19 nt, Homo sapiens
  misc_RNA (1)...(19): siRNA sense strand
cagaugcacuuuauuugua

SEQ ID NO: 1278060 - RNA, 19 nt, Homo sapiens
  misc_RNA (1)...(19): siRNA sense strand
ggacuuacgaguuugguua

SEQ ID NO: 1278061 - RNA, 19 nt, Homo sapiens
  misc_RNA (1)...(19): siRNA sense strand
aaacagauaucaggauuug

SEQ ID NO: 1278062 - RNA, 19 nt, Homo sapiens
  misc_RNA (1)...(19): siRNA sense strand
cuauggagcucauugguaa

SEQ ID NO: 1278063 - RNA, 19 nt, Homo sapiens
  misc_RNA (1)...(19): siRNA sense strand
aaacacaccuuuagugaag

SEQ ID NO: 1278064 - RNA, 19 nt, Homo sapiens
  misc_RNA (1)...(19): siRNA sense strand
gaacuuaaaggaucaguag

SEQ ID NO: 1278065 - RNA, 19 nt, Homo sapiens
  misc_RNA (1)...(19): siRNA sense strand
gaaaacagauaucaggauu

SEQ ID NO: 1278066 - RNA, 19 nt, Homo sapiens
  misc_RNA (1)...(19): siRNA sense strand
uaaaggaucaguagcaauu

SEQ ID NO: 1278067 - RNA, 19 nt, Homo sapiens
  misc_RNA (1)...(19): siRNA sense strand
aaaugggacuuacgaguuu

SEQ ID NO: 1278068 - RNA, 19 nt, Homo sapiens
  misc_RNA (1)...(19): siRNA sense strand
guuaucagaugcacuuuau

SEQ ID NO: 1278069 - RNA, 19 nt, Homo sapiens
  misc_RNA (1)...(19): siRNA sense strand
ugagauuggugaacgagua

SEQ ID NO: 1278070 - RNA, 19 nt, Homo sapiens
  misc_RNA (1)...(19): siRNA sense strand
gugaacgaguagauuauaa

SEQ ID NO: 1278071 - RNA, 19 nt, Homo sapiens
  misc_RNA (1)...(19): siRNA sense strand
gagagagcacgauuuauug

SEQ ID NO: 1278072 - RNA, 19 nt, Homo sapiens
  misc_RNA (1)...(19): siRNA sense strand
caaaugggacuuacgaguu

SEQ ID NO: 1278073 - RNA, 19 nt, Homo sapiens
  misc_RNA (1)...(19): siRNA sense strand
ggucauugcugugauuguu

SEQ ID NO: 1278074 - RNA, 19 nt, Homo sapiens
  misc_RNA (1)...(19): siRNA sense strand
ccagauccauuuucacuua

SEQ ID NO: 1278075 - RNA, 19 nt, Homo sapiens
  misc_RNA (1)...(19): siRNA sense strand
gaaggaauacuugacaguu

SEQ ID NO: 1278076 - RNA, 19 nt, Homo sapiens
  misc_RNA (1)...(19): siRNA sense strand
aaggaauacuugacaguuu

SEQ ID NO: 1278077 - RNA, 19 nt, Homo sapiens
  misc_RNA (1)...(19): siRNA sense strand
ucagaugacgccuguuaua

SEQ ID NO: 1278078 - RNA, 19 nt, Homo sapiens
  misc_RNA (1)...(19): siRNA sense strand
gaaaacacaccuuuaguga

SEQ ID NO: 1278079 - RNA, 19 nt, Homo sapiens
  misc_RNA (1)...(19): siRNA sense strand
gaugacgccuguuauagag

SEQ ID NO: 1278080 - RNA, 19 nt, Homo sapiens
  misc_RNA (1)...(19): siRNA sense strand
gagaaacauguccauauau

SEQ ID NO: 1278081 - RNA, 19 nt, Homo sapiens
  misc_RNA (1)...(19): siRNA sense strand
acgaguagauuauaagugu

SEQ ID NO: 1278082 - RNA, 19 nt, Homo sapiens
  misc_RNA (1)...(19): siRNA sense strand
cuacaaagcaacaguuaug

SEQ ID NO: 1278083 - RNA, 19 nt, Homo sapiens
  misc_RNA (1)...(19): siRNA sense strand
ccaccaacauuugaagcua

SEQ ID NO: 1278084 - RNA, 19 nt, Homo sapiens
  misc_RNA (1)...(19): siRNA sense strand
uauacgggauccuuuaaau

SEQ ID NO: 1278085 - RNA, 19 nt, Homo sapiens
  misc_RNA (1)...(19): siRNA sense strand
cgaguuugguuaucagaug

SEQ ID NO: 1278086 - RNA, 19 nt, Homo sapiens
  misc_RNA (1)...(19): siRNA sense strand
gaacgaguagauuauaagu

SEQ ID NO: 1278087 - RNA, 19 nt, Homo sapiens
  misc_RNA (1)...(19): siRNA sense strand
gugaggagccaccaacauu

SEQ ID NO: 1278088 - RNA, 19 nt, Homo sapiens
  misc_RNA (1)...(19): siRNA sense strand
gauggcagcgacacaauug

SEQ ID NO: 1278089 - RNA, 19 nt, Homo sapiens
  misc_RNA (1)...(19): siRNA sense strand
gcuauggagcucauuggua

SEQ ID NO: 1278090 - RNA, 19 nt, Homo sapiens
  misc_RNA (1)...(19): siRNA sense strand
gaggagccaccaacauuug

SEQ ID NO: 1278091 - RNA, 19 nt, Homo sapiens
  misc_RNA (1)...(19): siRNA sense strand
acacaccuuuagugaagua

SEQ ID NO: 1278092 - RNA, 19 nt, Homo sapiens
  misc_RNA (1)...(19): siRNA sense strand
ucucagaugacgccuguua

SEQ ID NO: 1278093 - RNA, 19 nt, Homo sapiens
  misc_RNA (1)...(19): siRNA sense strand
uagagaaacauguccauau

SEQ ID NO: 1278094 - RNA, 19 nt, Homo sapiens
  misc_RNA (1)...(19): siRNA sense strand
ggugaacgaguagauuaua

SEQ ID NO: 1278095 - RNA, 19 nt, Homo sapiens
  misc_RNA (1)...(19): siRNA sense strand
gaaguagaaguauuugagu

SEQ ID NO: 1278096 - RNA, 19 nt, Homo sapiens
  misc_RNA (1)...(19): siRNA sense strand
gaaacauguccauauauac

SEQ ID NO: 1278097 - RNA, 19 nt, Homo sapiens
  misc_RNA (1)...(19): siRNA sense strand
ugacgccuguuauagagaa

SEQ ID NO: 1278098 - RNA, 19 nt, Homo sapiens
  misc_RNA (1)...(19): siRNA sense strand
cgaguagauuauaagugua

SEQ ID NO: 1278099 - RNA, 19 nt, Homo sapiens
  misc_RNA (1)...(19): siRNA sense strand
gcacuuuauuuguaaugag

SEQ ID NO: 1278100 - RNA, 19 nt, Homo sapiens
  misc_RNA (1)...(19): siRNA sense strand
guagaaguauuugaguauc

SEQ ID NO: 1278101 - RNA, 19 nt, Homo sapiens
  misc_RNA (1)...(19): siRNA sense strand
guauuugaguaucuugaug

SEQ ID NO: 1278102 - RNA, 19 nt, Homo sapiens
  misc_RNA (1)...(19): siRNA sense strand
aggaauacuugacaguuug

SEQ ID NO: 1278103 - RNA, 19 nt, Homo sapiens
  misc_RNA (1)...(19): siRNA sense strand
aguguaaaguggucaaaug

SEQ ID NO: 1278104 - RNA, 19 nt, Homo sapiens
  misc_RNA (1)...(19): siRNA sense strand
ccaaaacccuacuaugaga

SEQ ID NO: 1278105 - RNA, 19 nt, Homo sapiens
  misc_RNA (1)...(19): siRNA sense strand
ccacccauacuauuuguga

SEQ ID NO: 1278106 - RNA, 19 nt, Homo sapiens
  misc_RNA (1)...(19): siRNA sense strand
caccaacauuugaagcuau

SEQ ID NO: 1278107 - RNA, 19 nt, Homo sapiens
  misc_RNA (1)...(19): siRNA sense strand
uuggagagagcacgauuua

SEQ ID NO: 1278108 - RNA, 19 nt, Homo sapiens
  misc_RNA (1)...(19): siRNA sense strand
gguuaucagaugcacuuua

SEQ ID NO: 1278109 - RNA, 19 nt, Homo sapiens
  misc_RNA (1)...(19): siRNA sense strand
ugaggagccaccaacauuu

SEQ ID NO: 1278110 - RNA, 19 nt, Homo sapiens
  misc_RNA (1)...(19): siRNA sense strand
ggaaggaauacuugacagu

SEQ ID NO: 1278111 - RNA, 19 nt, Homo sapiens
  misc_RNA (1)...(19): siRNA sense strand
gaggaaggaauacuugaca

SEQ ID NO: 1278112 - RNA, 19 nt, Homo sapiens
  misc_RNA (1)...(19): siRNA sense strand
ugaguaucuugaugcagua

SEQ ID NO: 1278113 - RNA, 19 nt, Homo sapiens
  misc_RNA (1)...(19): siRNA sense strand
caccuuuagugaaguagaa

SEQ ID NO: 1278114 - RNA, 19 nt, Homo sapiens
  misc_RNA (1)...(19): siRNA sense strand
acagauaucaggauuugga

SEQ ID NO: 1278115 - RNA, 19 nt, Homo sapiens
  misc_RNA (1)...(19): siRNA sense strand
ucauugcugugauuguuau

SEQ ID NO: 1278116 - RNA, 19 nt, Homo sapiens
  misc_RNA (1)...(19): siRNA sense strand
ucagaugcacuuuauuugu

SEQ ID NO: 1278117 - RNA, 19 nt, Homo sapiens
  misc_RNA (1)...(19): siRNA sense strand
gugcugcuccagaguguaa

SEQ ID NO: 1278118 - RNA, 19 nt, Homo sapiens
  misc_RNA (1)...(19): siRNA sense strand
ggaaaacacaccuuuagug

SEQ ID NO: 1278119 - RNA, 19 nt, Homo sapiens
  misc_RNA (1)...(19): siRNA sense strand
aaggaucaguagcaauuug

SEQ ID NO: 1278120 - RNA, 19 nt, Homo sapiens
  misc_RNA (1)...(19): siRNA sense strand
uauauacgggauccuuuaa

SEQ ID NO: 1278121 - RNA, 19 nt, Homo sapiens
  misc_RNA (1)...(19): siRNA sense strand
ugaaguagaaguauuugag

SEQ ID NO: 1278122 - RNA, 19 nt, Homo sapiens
  misc_RNA (1)...(19): siRNA sense strand
cuugacaguuuggauguuu

SEQ ID NO: 1278123 - RNA, 19 nt, Homo sapiens
  misc_RNA (1)...(19): siRNA sense strand
cauauauacgggauccuuu

SEQ ID NO: 1278124 - RNA, 19 nt, Homo sapiens
  misc_RNA (1)...(19): siRNA sense strand
auauauacgggauccuuua

SEQ ID NO: 1278125 - RNA, 19 nt, Homo sapiens
  misc_RNA (1)...(19): siRNA sense strand
cuuaaaggaucaguagcaa

SEQ ID NO: 1278126 - RNA, 19 nt, Homo sapiens
  misc_RNA (1)...(19): siRNA sense strand
uaaaccugaggaaggaaua

SEQ ID NO: 1278127 - RNA, 19 nt, Homo sapiens
  misc_RNA (1)...(19): siRNA sense strand
agaugacgccuguuauaga

SEQ ID NO: 1278128 - RNA, 19 nt, Homo sapiens
  misc_RNA (1)...(19): siRNA sense strand
ugugauuguuauugccaua

SEQ ID NO: 1278129 - RNA, 19 nt, Homo sapiens
  misc_RNA (1)...(19): siRNA sense strand
gagagcacgauuuauugug

SEQ ID NO: 1278130 - RNA, 19 nt, Homo sapiens
  misc_RNA (1)...(19): siRNA sense strand
gaaguauuugaguaucuug

SEQ ID NO: 1278131 - RNA, 19 nt, Homo sapiens
  misc_RNA (1)...(19): siRNA sense strand
ccucuugccacccauacua

SEQ ID NO: 1278132 - RNA, 19 nt, Homo sapiens
  misc_RNA (1)...(19): siRNA sense strand
gauaucaggauuuggaaaa

SEQ ID NO: 1278133 - RNA, 19 nt, Homo sapiens
  misc_RNA (1)...(19): siRNA sense strand
ggcuaccugucucagauga

SEQ ID NO: 1278134 - RNA, 19 nt, Homo sapiens
  misc_RNA (1)...(19): siRNA sense strand
ccaugguguugcugcugua

SEQ ID NO: 1278135 - RNA, 19 nt, Homo sapiens
  misc_RNA (1)...(19): siRNA sense strand
cagaugacgccuguuauag

SEQ ID NO: 1278136 - RNA, 19 nt, Homo sapiens
  misc_RNA (1)...(19): siRNA sense strand
gucauugcugugauuguua

SEQ ID NO: 1278137 - RNA, 19 nt, Homo sapiens
  misc_RNA (1)...(19): siRNA sense strand
uuggugaacgaguagauua

SEQ ID NO: 1278138 - RNA, 19 nt, Homo sapiens
  misc_RNA (1)...(19): siRNA sense strand
ggagccaccaacauuugaa

SEQ ID NO: 1278139 - RNA, 19 nt, Homo sapiens
  misc_RNA (1)...(19): siRNA sense strand
gcgcuuuccuggguugcuu

SEQ ID NO: 1278140 - RNA, 19 nt, Homo sapiens
  misc_RNA (1)...(19): siRNA sense strand
uacuacaaagcaacaguua

SEQ ID NO: 1278141 - RNA, 19 nt, Homo sapiens
  misc_RNA (1)...(19): siRNA sense strand
cuugaugcaguaacuuaua

SEQ ID NO: 1278142 - RNA, 19 nt, Homo sapiens
  misc_RNA (1)...(19): siRNA sense strand
aaacauguccauauauacg

SEQ ID NO: 1278143 - RNA, 19 nt, Homo sapiens
  misc_RNA (1)...(19): siRNA sense strand
guguaaaguggucaaaugu

SEQ ID NO: 1278144 - RNA, 19 nt, Homo sapiens
  misc_RNA (1)...(19): siRNA sense strand
cuuacgaguuugguuauca

SEQ ID NO: 1278145 - RNA, 19 nt, Homo sapiens
  misc_RNA (1)...(19): siRNA sense strand
uacgggauccuuuaaaugg

SEQ ID NO: 1278146 - RNA, 19 nt, Homo sapiens
  misc_RNA (1)...(19): siRNA sense strand
aaccaaaacccuacuauga

SEQ ID NO: 1278147 - RNA, 19 nt, Homo sapiens
  misc_RNA (1)...(19): siRNA sense strand
cccaauaugugaaaagguu

SEQ ID NO: 1278148 - RNA, 19 nt, Homo sapiens
  misc_RNA (1)...(19): siRNA sense strand
cgauggcagcgacacaauu

SEQ ID NO: 1278149 - RNA, 19 nt, Homo sapiens
  misc_RNA (1)...(19): siRNA sense strand
gauccauuuucacuuauug

SEQ ID NO: 1278150 - RNA, 19 nt, Homo sapiens
  misc_RNA (1)...(19): siRNA sense strand
uugaugcaguaacuuauag

SEQ ID NO: 1278151 - RNA, 19 nt, Homo sapiens
  misc_RNA (1)...(19): siRNA sense strand
guaucuugaugcaguaacu

SEQ ID NO: 1278152 - RNA, 19 nt, Homo sapiens
  misc_RNA (1)...(19): siRNA sense strand
caacauuugaagcuaugga

SEQ ID NO: 1278153 - RNA, 19 nt, Homo sapiens
  misc_RNA (1)...(19): siRNA sense strand
gagauuggugaacgaguag

SEQ ID NO: 1278154 - RNA, 19 nt, Homo sapiens
  misc_RNA (1)...(19): siRNA sense strand
ggagagagcacgauuuauu

SEQ ID NO: 1278155 - RNA, 19 nt, Homo sapiens
  misc_RNA (1)...(19): siRNA sense strand
agagaaacauguccauaua

SEQ ID NO: 1278156 - RNA, 19 nt, Homo sapiens
  misc_RNA (1)...(19): siRNA sense strand
cagaugcacuuuauuugua

SEQ ID NO: 1278157 - RNA, 19 nt, Homo sapiens
  misc_RNA (1)...(19): siRNA sense strand
ggacuuacgaguuugguua

SEQ ID NO: 1278158 - RNA, 19 nt, Homo sapiens
  misc_RNA (1)...(19): siRNA sense strand
aaacagauaucaggauuug

SEQ ID NO: 1278159 - RNA, 19 nt, Homo sapiens
  misc_RNA (1)...(19): siRNA sense strand
cuauggagcucauugguaa

SEQ ID NO: 1278160 - RNA, 19 nt, Homo sapiens
  misc_RNA (1)...(19): siRNA sense strand
aaacacaccuuuagugaag

SEQ ID NO: 1278161 - RNA, 19 nt, Homo sapiens
  misc_RNA (1)...(19): siRNA sense strand
gaacuuaaaggaucaguag

SEQ ID NO: 1278162 - RNA, 19 nt, Homo sapiens
  misc_RNA (1)...(19): siRNA sense strand
gaaaacagauaucaggauu

SEQ ID NO: 1278163 - RNA, 19 nt, Homo sapiens
  misc_RNA (1)...(19): siRNA sense strand
uaaaggaucaguagcaauu

SEQ ID NO: 1278164 - RNA, 19 nt, Homo sapiens
  misc_RNA (1)...(19): siRNA sense strand
aaaugggacuuacgaguuu

SEQ ID NO: 1278165 - RNA, 19 nt, Homo sapiens
  misc_RNA (1)...(19): siRNA sense strand
guuaucagaugcacuuuau

SEQ ID NO: 1278166 - RNA, 19 nt, Homo sapiens
  misc_RNA (1)...(19): siRNA sense strand
gagcugaauaugccacuua

SEQ ID NO: 1278167 - RNA, 19 nt, Homo sapiens
  misc_RNA (1)...(19): siRNA sense strand
ugagauuggugaacgagua

SEQ ID NO: 1278168 - RNA, 19 nt, Homo sapiens
  misc_RNA (1)...(19): siRNA sense strand
gugaacgaguagauuauaa

SEQ ID NO: 1278169 - RNA, 19 nt, Homo sapiens
  misc_RNA (1)...(19): siRNA sense strand
gagagagcacgauuuauug

SEQ ID NO: 1278170 - RNA, 19 nt, Homo sapiens
  misc_RNA (1)...(19): siRNA sense strand
caaaugggacuuacgaguu

SEQ ID NO: 1278171 - RNA, 19 nt, Homo sapiens
  misc_RNA (1)...(19): siRNA sense strand
ggucauugcugugauuguu

SEQ ID NO: 1278172 - RNA, 19 nt, Homo sapiens
  misc_RNA (1)...(19): siRNA sense strand
ccagauccauuuucacuua

SEQ ID NO: 1278173 - RNA, 19 nt, Homo sapiens
  misc_RNA (1)...(19): siRNA sense strand
gaaggaauacuugacaguu

SEQ ID NO: 1278174 - RNA, 19 nt, Homo sapiens
  misc_RNA (1)...(19): siRNA sense strand
aaggaauacuugacaguuu

SEQ ID NO: 1278175 - RNA, 19 nt, Homo sapiens
  misc_RNA (1)...(19): siRNA sense strand
ucagaugacgccuguuaua

SEQ ID NO: 1278176 - RNA, 19 nt, Homo sapiens
  misc_RNA (1)...(19): siRNA sense strand
gaaaacacaccuuuaguga

SEQ ID NO: 1278177 - RNA, 19 nt, Homo sapiens
  misc_RNA (1)...(19): siRNA sense strand
gaugacgccuguuauagag

SEQ ID NO: 1278178 - RNA, 19 nt, Homo sapiens
  misc_RNA (1)...(19): siRNA sense strand
gagaaacauguccauauau

SEQ ID NO: 1278179 - RNA, 19 nt, Homo sapiens
  misc_RNA (1)...(19): siRNA sense strand
ccacuuaccagacuaaauc

SEQ ID NO: 1278180 - RNA, 19 nt, Homo sapiens
  misc_RNA (1)...(19): siRNA sense strand
acgaguagauuauaagugu

SEQ ID NO: 1278181 - RNA, 19 nt, Homo sapiens
  misc_RNA (1)...(19): siRNA sense strand
cuacaaagcaacaguuaug

SEQ ID NO: 1278182 - RNA, 19 nt, Homo sapiens
  misc_RNA (1)...(19): siRNA sense strand
ccaccaacauuugaagcua

SEQ ID NO: 1278183 - RNA, 19 nt, Homo sapiens
  misc_RNA (1)...(19): siRNA sense strand
uauacgggauccuuuaaau

SEQ ID NO: 1278184 - RNA, 19 nt, Homo sapiens
  misc_RNA (1)...(19): siRNA sense strand
cgaguuugguuaucagaug

SEQ ID NO: 1278185 - RNA, 19 nt, Homo sapiens
  misc_RNA (1)...(19): siRNA sense strand
gaacgaguagauuauaagu

SEQ ID NO: 1278186 - RNA, 19 nt, Homo sapiens
  misc_RNA (1)...(19): siRNA sense strand
gugaggagccaccaacauu

SEQ ID NO: 1278187 - RNA, 19 nt, Homo sapiens
  misc_RNA (1)...(19): siRNA sense strand
gauggcagcgacacaauug

SEQ ID NO: 1278188 - RNA, 19 nt, Homo sapiens
  misc_RNA (1)...(19): siRNA sense strand
ucucagaugacgccuguua

SEQ ID NO: 1278189 - RNA, 19 nt, Homo sapiens
  misc_RNA (1)...(19): siRNA sense strand
gaggagccaccaacauuug

SEQ ID NO: 1278190 - RNA, 19 nt, Homo sapiens
  misc_RNA (1)...(19): siRNA sense strand
gcuauggagcucauuggua

SEQ ID NO: 1278191 - RNA, 19 nt, Homo sapiens
  misc_RNA (1)...(19): siRNA sense strand
acacaccuuuagugaagua

SEQ ID NO: 1278192 - RNA, 19 nt, Homo sapiens
  misc_RNA (1)...(19): siRNA sense strand
uagagaaacauguccauau

SEQ ID NO: 1278193 - RNA, 19 nt, Homo sapiens
  misc_RNA (1)...(19): siRNA sense strand
ggugaacgaguagauuaua

SEQ ID NO: 1278194 - RNA, 19 nt, Homo sapiens
  misc_RNA (1)...(19): siRNA sense strand
gaaguagaaguauuugagu

SEQ ID NO: 1278195 - RNA, 19 nt, Homo sapiens
  misc_RNA (1)...(19): siRNA sense strand
gaaacauguccauauauac

SEQ ID NO: 1278196 - RNA, 19 nt, Homo sapiens
  misc_RNA (1)...(19): siRNA sense strand
ugacgccuguuauagagaa

SEQ ID NO: 1278197 - RNA, 19 nt, Homo sapiens
  misc_RNA (1)...(19): siRNA sense strand
cgaguagauuauaagugua

SEQ ID NO: 1278198 - RNA, 19 nt, Homo sapiens
  misc_RNA (1)...(19): siRNA sense strand
gcacuuuauuuguaaugag

SEQ ID NO: 1278199 - RNA, 19 nt, Homo sapiens
  misc_RNA (1)...(19): siRNA sense strand
guagaaguauuugaguauc

SEQ ID NO: 1278200 - RNA, 19 nt, Homo sapiens
  misc_RNA (1)...(19): siRNA sense strand
guauuugaguaucuugaug

SEQ ID NO: 1278201 - RNA, 19 nt, Homo sapiens
  misc_RNA (1)...(19): siRNA sense strand
aggaauacuugacaguuug

SEQ ID NO: 1278202 - RNA, 19 nt, Homo sapiens
  misc_RNA (1)...(19): siRNA sense strand
ccaaaacccuacuaugaga

SEQ ID NO: 1278203 - RNA, 19 nt, Homo sapiens
  misc_RNA (1)...(19): siRNA sense strand
aguguaaaguggucaaaug

SEQ ID NO: 1278204 - RNA, 19 nt, Homo sapiens
  misc_RNA (1)...(19): siRNA sense strand
ccacccauacuauuuguga

SEQ ID NO: 1278205 - RNA, 19 nt, Homo sapiens
  misc_RNA (1)...(19): siRNA sense strand
uuggagagagcacgauuua

SEQ ID NO: 1278206 - RNA, 19 nt, Homo sapiens
  misc_RNA (1)...(19): siRNA sense strand
gguuaucagaugcacuuua

SEQ ID NO: 1278207 - RNA, 19 nt, Homo sapiens
  misc_RNA (1)...(19): siRNA sense strand
caccaacauuugaagcuau

SEQ ID NO: 1278208 - RNA, 19 nt, Homo sapiens
  misc_RNA (1)...(19): siRNA sense strand
ugaggagccaccaacauuu

SEQ ID NO: 1278209 - RNA, 19 nt, Homo sapiens
  misc_RNA (1)...(19): siRNA sense strand
ggaaggaauacuugacagu

SEQ ID NO: 1278210 - RNA, 19 nt, Homo sapiens
  misc_RNA (1)...(19): siRNA sense strand
gaggaaggaauacuugaca

SEQ ID NO: 1278211 - RNA, 19 nt, Homo sapiens
  misc_RNA (1)...(19): siRNA sense strand
ugaguaucuugaugcagua

SEQ ID NO: 1278212 - RNA, 19 nt, Homo sapiens
  misc_RNA (1)...(19): siRNA sense strand
caccuuuagugaaguagaa

SEQ ID NO: 1278213 - RNA, 19 nt, Homo sapiens
  misc_RNA (1)...(19): siRNA sense strand
acagauaucaggauuugga

SEQ ID NO: 1278214 - RNA, 19 nt, Homo sapiens
  misc_RNA (1)...(19): siRNA sense strand
ucauugcugugauuguuau

SEQ ID NO: 1278215 - RNA, 19 nt, Homo sapiens
  misc_RNA (1)...(19): siRNA sense strand
ucagaugcacuuuauuugu

SEQ ID NO: 1278216 - RNA, 19 nt, Homo sapiens
  misc_RNA (1)...(19): siRNA sense strand
gugcugcuccagaguguaa

SEQ ID NO: 1278217 - RNA, 19 nt, Homo sapiens
  misc_RNA (1)...(19): siRNA sense strand
ggaaaacacaccuuuagug

SEQ ID NO: 1278218 - RNA, 19 nt, Homo sapiens
  misc_RNA (1)...(19): siRNA sense strand
aaggaucaguagcaauuug

SEQ ID NO: 1278219 - RNA, 19 nt, Homo sapiens
  misc_RNA (1)...(19): siRNA sense strand
uauauacgggauccuuuaa

SEQ ID NO: 1278220 - RNA, 19 nt, Homo sapiens
  misc_RNA (1)...(19): siRNA sense strand
ugaaguagaaguauuugag

SEQ ID NO: 1278221 - RNA, 19 nt, Homo sapiens
  misc_RNA (1)...(19): siRNA sense strand
cuugacaguuuggauguuu

SEQ ID NO: 1278222 - RNA, 19 nt, Homo sapiens
  misc_RNA (1)...(19): siRNA sense strand
cauauauacgggauccuuu

SEQ ID NO: 1278223 - RNA, 19 nt, Homo sapiens
  misc_RNA (1)...(19): siRNA sense strand
auauauacgggauccuuua

SEQ ID NO: 1278224 - RNA, 19 nt, Homo sapiens
  misc_RNA (1)...(19): siRNA sense strand
cuuaaaggaucaguagcaa

SEQ ID NO: 1278225 - RNA, 19 nt, Homo sapiens
  misc_RNA (1)...(19): siRNA sense strand
uaaaccugaggaaggaaua

SEQ ID NO: 1278226 - RNA, 19 nt, Homo sapiens
  misc_RNA (1)...(19): siRNA sense strand
agaugacgccuguuauaga

SEQ ID NO: 1278227 - RNA, 19 nt, Homo sapiens
  misc_RNA (1)...(19): siRNA sense strand
ugugauuguuauugccaua

SEQ ID NO: 1278228 - RNA, 19 nt, Homo sapiens
  misc_RNA (1)...(19): siRNA sense strand
gagagcacgauuuauugug

SEQ ID NO: 1278229 - RNA, 19 nt, Homo sapiens
  misc_RNA (1)...(19): siRNA sense strand
gaaguauuugaguaucuug

SEQ ID NO: 1278230 - RNA, 19 nt, Homo sapiens
  misc_RNA (1)...(19): siRNA sense strand
ggcuaccugucucagauga

SEQ ID NO: 1278231 - RNA, 19 nt, Homo sapiens
  misc_RNA (1)...(19): siRNA sense strand
gauaucaggauuuggaaaa

SEQ ID NO: 1278232 - RNA, 19 nt, Homo sapiens
  misc_RNA (1)...(19): siRNA sense strand
ccucuugccacccauacua

SEQ ID NO: 1278233 - RNA, 19 nt, Homo sapiens
  misc_RNA (1)...(19): siRNA sense strand
ccaugguguugcugcugua

SEQ ID NO: 1278234 - RNA, 19 nt, Homo sapiens
  misc_RNA (1)...(19): siRNA sense strand
cagaugacgccuguuauag

SEQ ID NO: 1278235 - RNA, 19 nt, Homo sapiens
  misc_RNA (1)...(19): siRNA sense strand
cagaugguggagcugaaua

SEQ ID NO: 1278236 - RNA, 19 nt, Homo sapiens
  misc_RNA (1)...(19): siRNA sense strand
uuggugaacgaguagauua

SEQ ID NO: 1278237 - RNA, 19 nt, Homo sapiens
  misc_RNA (1)...(19): siRNA sense strand
gucauugcugugauuguua

SEQ ID NO: 1278238 - RNA, 19 nt, Homo sapiens
  misc_RNA (1)...(19): siRNA sense strand
ggagccaccaacauuugaa

SEQ ID NO: 1278239 - RNA, 19 nt, Homo sapiens
  misc_RNA (1)...(19): siRNA sense strand
gcgcuuuccuggguugcuu

SEQ ID NO: 1278240 - RNA, 19 nt, Homo sapiens
  misc_RNA (1)...(19): siRNA sense strand
uacuacaaagcaacaguua

SEQ ID NO: 1278241 - RNA, 19 nt, Homo sapiens
  misc_RNA (1)...(19): siRNA sense strand
cuugaugcaguaacuuaua

SEQ ID NO: 1278242 - RNA, 19 nt, Homo sapiens
  misc_RNA (1)...(19): siRNA sense strand
aaacauguccauauauacg

SEQ ID NO: 1278243 - RNA, 19 nt, Homo sapiens
  misc_RNA (1)...(19): siRNA sense strand
guguaaaguggucaaaugu

SEQ ID NO: 1278244 - RNA, 19 nt, Homo sapiens
  misc_RNA (1)...(19): siRNA sense strand
cuuacgaguuugguuauca

SEQ ID NO: 1278245 - RNA, 19 nt, Homo sapiens
  misc_RNA (1)...(19): siRNA sense strand
uacgggauccuuuaaaugg

SEQ ID NO: 1278246 - RNA, 19 nt, Homo sapiens
  misc_RNA (1)...(19): siRNA sense strand
gcagaugguggagcugaau

SEQ ID NO: 1278247 - RNA, 19 nt, Homo sapiens
  misc_RNA (1)...(19): siRNA sense strand
aaccaaaacccuacuauga

SEQ ID NO: 1278248 - RNA, 19 nt, Homo sapiens
  misc_RNA (1)...(19): siRNA sense strand
cccaauaugugaaaagguu

SEQ ID NO: 1278249 - RNA, 19 nt, Homo sapiens
  misc_RNA (1)...(19): siRNA sense strand
ggagcugaauaugccacuu

SEQ ID NO: 1278250 - RNA, 19 nt, Homo sapiens
  misc_RNA (1)...(19): siRNA sense strand
cgauggcagcgacacaauu

SEQ ID NO: 1278251 - RNA, 19 nt, Homo sapiens
  misc_RNA (1)...(19): siRNA sense strand
gauccauuuucacuuauug

SEQ ID NO: 1278252 - RNA, 19 nt, Homo sapiens
  misc_RNA (1)...(19): siRNA sense strand
uugaugcaguaacuuauag

SEQ ID NO: 1278253 - RNA, 19 nt, Homo sapiens
  misc_RNA (1)...(19): siRNA sense strand
guaucuugaugcaguaacu

SEQ ID NO: 1278254 - RNA, 19 nt, Homo sapiens
  misc_RNA (1)...(19): siRNA sense strand
ggagagagcacgauuuauu

SEQ ID NO: 1278255 - RNA, 19 nt, Homo sapiens
  misc_RNA (1)...(19): siRNA sense strand
agagaaacauguccauaua

SEQ ID NO: 1278256 - RNA, 19 nt, Homo sapiens
  misc_RNA (1)...(19): siRNA sense strand
cagaugcacuuuauuugua

SEQ ID NO: 1278257 - RNA, 19 nt, Homo sapiens
  misc_RNA (1)...(19): siRNA sense strand
ggacuuacgaguuugguua

SEQ ID NO: 1278258 - RNA, 19 nt, Homo sapiens
  misc_RNA (1)...(19): siRNA sense strand
aaacagauaucaggauuug

SEQ ID NO: 1278259 - RNA, 19 nt, Homo sapiens
  misc_RNA (1)...(19): siRNA sense strand
cuauggagcucauugguaa

SEQ ID NO: 1278260 - RNA, 19 nt, Homo sapiens
  misc_RNA (1)...(19): siRNA sense strand
aaacacaccuuuagugaag

SEQ ID NO: 1278261 - RNA, 19 nt, Homo sapiens
  misc_RNA (1)...(19): siRNA sense strand
gaacuuaaaggaucaguag

SEQ ID NO: 1278262 - RNA, 19 nt, Homo sapiens
  misc_RNA (1)...(19): siRNA sense strand
gaaaacagauaucaggauu

SEQ ID NO: 1278263 - RNA, 19 nt, Homo sapiens
  misc_RNA (1)...(19): siRNA sense strand
uaaaggaucaguagcaauu

SEQ ID NO: 1278264 - RNA, 19 nt, Homo sapiens
  misc_RNA (1)...(19): siRNA sense strand
aaaugggacuuacgaguuu

SEQ ID NO: 1278265 - RNA, 19 nt, Homo sapiens
  misc_RNA (1)...(19): siRNA sense strand
guuaucagaugcacuuuau

SEQ ID NO: 1278266 - RNA, 19 nt, Homo sapiens
  misc_RNA (1)...(19): siRNA sense strand
ugagauuggugaacgagua

SEQ ID NO: 1278267 - RNA, 19 nt, Homo sapiens
  misc_RNA (1)...(19): siRNA sense strand
gugaacgaguagauuauaa

SEQ ID NO: 1278268 - RNA, 19 nt, Homo sapiens
  misc_RNA (1)...(19): siRNA sense strand
gagagagcacgauuuauug

SEQ ID NO: 1278269 - RNA, 19 nt, Homo sapiens
  misc_RNA (1)...(19): siRNA sense strand
caaaugggacuuacgaguu

SEQ ID NO: 1278270 - RNA, 19 nt, Homo sapiens
  misc_RNA (1)...(19): siRNA sense strand
ggucauugcugugauuguu

SEQ ID NO: 1278271 - RNA, 19 nt, Homo sapiens
  misc_RNA (1)...(19): siRNA sense strand
ccagauccauuuucacuua

SEQ ID NO: 1278272 - RNA, 19 nt, Homo sapiens
  misc_RNA (1)...(19): siRNA sense strand
gaaggaauacuugacaguu

SEQ ID NO: 1278273 - RNA, 19 nt, Homo sapiens
  misc_RNA (1)...(19): siRNA sense strand
aaggaauacuugacaguuu

SEQ ID NO: 1278274 - RNA, 19 nt, Homo sapiens
  misc_RNA (1)...(19): siRNA sense strand
ucagaugacgccuguuaua

SEQ ID NO: 1278275 - RNA, 19 nt, Homo sapiens
  misc_RNA (1)...(19): siRNA sense strand
gaaaacacaccuuuaguga

SEQ ID NO: 1278276 - RNA, 19 nt, Homo sapiens
  misc_RNA (1)...(19): siRNA sense strand
gaugacgccuguuauagag

SEQ ID NO: 1278277 - RNA, 19 nt, Homo sapiens
  misc_RNA (1)...(19): siRNA sense strand
gagaaacauguccauauau

SEQ ID NO: 1278278 - RNA, 19 nt, Homo sapiens
  misc_RNA (1)...(19): siRNA sense strand
acgaguagauuauaagugu

SEQ ID NO: 1278279 - RNA, 19 nt, Homo sapiens
  misc_RNA (1)...(19): siRNA sense strand
cuacaaagcaacaguuaug

SEQ ID NO: 1278280 - RNA, 19 nt, Homo sapiens
  misc_RNA (1)...(19): siRNA sense strand
ccaccaacauuugaagcua

SEQ ID NO: 1278281 - RNA, 19 nt, Homo sapiens
  misc_RNA (1)...(19): siRNA sense strand
uauacgggauccuuuaaau

SEQ ID NO: 1278282 - RNA, 19 nt, Homo sapiens
  misc_RNA (1)...(19): siRNA sense strand
cgaguuugguuaucagaug

SEQ ID NO: 1278283 - RNA, 19 nt, Homo sapiens
  misc_RNA (1)...(19): siRNA sense strand
gaacgaguagauuauaagu

SEQ ID NO: 1278284 - RNA, 19 nt, Homo sapiens
  misc_RNA (1)...(19): siRNA sense strand
gugaggagccaccaacauu

SEQ ID NO: 1278285 - RNA, 19 nt, Homo sapiens
  misc_RNA (1)...(19): siRNA sense strand
gauggcagcgacacaauug

SEQ ID NO: 1278286 - RNA, 19 nt, Homo sapiens
  misc_RNA (1)...(19): siRNA sense strand
gcuauggagcucauuggua

SEQ ID NO: 1278287 - RNA, 19 nt, Homo sapiens
  misc_RNA (1)...(19): siRNA sense strand
gaggagccaccaacauuug

SEQ ID NO: 1278288 - RNA, 19 nt, Homo sapiens
  misc_RNA (1)...(19): siRNA sense strand
acacaccuuuagugaagua

SEQ ID NO: 1278289 - RNA, 19 nt, Homo sapiens
  misc_RNA (1)...(19): siRNA sense strand
ucucagaugacgccuguua

SEQ ID NO: 1278290 - RNA, 19 nt, Homo sapiens
  misc_RNA (1)...(19): siRNA sense strand
uagagaaacauguccauau

SEQ ID NO: 1278291 - RNA, 19 nt, Homo sapiens
  misc_RNA (1)...(19): siRNA sense strand
guuccaaagugucuuaaag

SEQ ID NO: 1278292 - RNA, 19 nt, Homo sapiens
  misc_RNA (1)...(19): siRNA sense strand
ggugaacgaguagauuaua

SEQ ID NO: 1278293 - RNA, 19 nt, Homo sapiens
  misc_RNA (1)...(19): siRNA sense strand
gaaguagaaguauuugagu

SEQ ID NO: 1278294 - RNA, 19 nt, Homo sapiens
  misc_RNA (1)...(19): siRNA sense strand
gaaacauguccauauauac

SEQ ID NO: 1278295 - RNA, 19 nt, Homo sapiens
  misc_RNA (1)...(19): siRNA sense strand
ugacgccuguuauagagaa

SEQ ID NO: 1278296 - RNA, 19 nt, Homo sapiens
  misc_RNA (1)...(19): siRNA sense strand
cgaguagauuauaagugua

SEQ ID NO: 1278297 - RNA, 19 nt, Homo sapiens
  misc_RNA (1)...(19): siRNA sense strand
gcacuuuauuuguaaugag

SEQ ID NO: 1278298 - RNA, 19 nt, Homo sapiens
  misc_RNA (1)...(19): siRNA sense strand
guagaaguauuugaguauc

SEQ ID NO: 1278299 - RNA, 19 nt, Homo sapiens
  misc_RNA (1)...(19): siRNA sense strand
guauuugaguaucuugaug

SEQ ID NO: 1278300 - RNA, 19 nt, Homo sapiens
  misc_RNA (1)...(19): siRNA sense strand
aggaauacuugacaguuug

SEQ ID NO: 1278301 - RNA, 19 nt, Homo sapiens
  misc_RNA (1)...(19): siRNA sense strand
ccaaaacccuacuaugaga

SEQ ID NO: 1278302 - RNA, 19 nt, Homo sapiens
  misc_RNA (1)...(19): siRNA sense strand
aguguaaaguggucaaaug

SEQ ID NO: 1278303 - RNA, 19 nt, Homo sapiens
  misc_RNA (1)...(19): siRNA sense strand
ccacccauacuauuuguga

SEQ ID NO: 1278304 - RNA, 19 nt, Homo sapiens
  misc_RNA (1)...(19): siRNA sense strand
caccaacauuugaagcuau

SEQ ID NO: 1278305 - RNA, 19 nt, Homo sapiens
  misc_RNA (1)...(19): siRNA sense strand
uuggagagagcacgauuua

SEQ ID NO: 1278306 - RNA, 19 nt, Homo sapiens
  misc_RNA (1)...(19): siRNA sense strand
gguuaucagaugcacuuua

SEQ ID NO: 1278307 - RNA, 19 nt, Homo sapiens
  misc_RNA (1)...(19): siRNA sense strand
ugaggagccaccaacauuu

SEQ ID NO: 1278308 - RNA, 19 nt, Homo sapiens
  misc_RNA (1)...(19): siRNA sense strand
ggaaggaauacuugacagu

SEQ ID NO: 1278309 - RNA, 19 nt, Homo sapiens
  misc_RNA (1)...(19): siRNA sense strand
gaggaaggaauacuugaca

SEQ ID NO: 1278310 - RNA, 19 nt, Homo sapiens
  misc_RNA (1)...(19): siRNA sense strand
ccaguuccaaagugucuua

SEQ ID NO: 1278311 - RNA, 19 nt, Homo sapiens
  misc_RNA (1)...(19): siRNA sense strand
ugaguaucuugaugcagua

SEQ ID NO: 1278312 - RNA, 19 nt, Homo sapiens
  misc_RNA (1)...(19): siRNA sense strand
caccuuuagugaaguagaa

SEQ ID NO: 1278313 - RNA, 19 nt, Homo sapiens
  misc_RNA (1)...(19): siRNA sense strand
acagauaucaggauuugga

SEQ ID NO: 1278314 - RNA, 19 nt, Homo sapiens
  misc_RNA (1)...(19): siRNA sense strand
ucauugcugugauuguuau

SEQ ID NO: 1278315 - RNA, 19 nt, Homo sapiens
  misc_RNA (1)...(19): siRNA sense strand
ucagaugcacuuuauuugu

SEQ ID NO: 1278316 - RNA, 19 nt, Homo sapiens
  misc_RNA (1)...(19): siRNA sense strand
gugcugcuccagaguguaa

SEQ ID NO: 1278317 - RNA, 19 nt, Homo sapiens
  misc_RNA (1)...(19): siRNA sense strand
ggaaaacacaccuuuagug

SEQ ID NO: 1278318 - RNA, 19 nt, Homo sapiens
  misc_RNA (1)...(19): siRNA sense strand
aaggaucaguagcaauuug

SEQ ID NO: 1278319 - RNA, 19 nt, Homo sapiens
  misc_RNA (1)...(19): siRNA sense strand
uauauacgggauccuuuaa

SEQ ID NO: 1278320 - RNA, 19 nt, Homo sapiens
  misc_RNA (1)...(19): siRNA sense strand
ugaaguagaaguauuugag

SEQ ID NO: 1278321 - RNA, 19 nt, Homo sapiens
  misc_RNA (1)...(19): siRNA sense strand
cuugacaguuuggauguuu

SEQ ID NO: 1278322 - RNA, 19 nt, Homo sapiens
  misc_RNA (1)...(19): siRNA sense strand
cauauauacgggauccuuu

SEQ ID NO: 1278323 - RNA, 19 nt, Homo sapiens
  misc_RNA (1)...(19): siRNA sense strand
auauauacgggauccuuua

SEQ ID NO: 1278324 - RNA, 19 nt, Homo sapiens
  misc_RNA (1)...(19): siRNA sense strand
cuuaaaggaucaguagcaa

SEQ ID NO: 1278325 - RNA, 19 nt, Homo sapiens
  misc_RNA (1)...(19): siRNA sense strand
uaaaccugaggaaggaaua

SEQ ID NO: 1278326 - RNA, 19 nt, Homo sapiens
  misc_RNA (1)...(19): siRNA sense strand
agaugacgccuguuauaga

SEQ ID NO: 1278327 - RNA, 19 nt, Homo sapiens
  misc_RNA (1)...(19): siRNA sense strand
ugugauuguuauugccaua

SEQ ID NO: 1278328 - RNA, 19 nt, Homo sapiens
  misc_RNA (1)...(19): siRNA sense strand
gagagcacgauuuauugug

SEQ ID NO: 1278329 - RNA, 19 nt, Homo sapiens
  misc_RNA (1)...(19): siRNA sense strand
gaaguauuugaguaucuug

SEQ ID NO: 1278330 - RNA, 19 nt, Homo sapiens
  misc_RNA (1)...(19): siRNA sense strand
ggcuaccugucucagauga

SEQ ID NO: 1278331 - RNA, 19 nt, Homo sapiens
  misc_RNA (1)...(19): siRNA sense strand
gauaucaggauuuggaaaa

SEQ ID NO: 1278332 - RNA, 19 nt, Homo sapiens
  misc_RNA (1)...(19): siRNA sense strand
ccucuugccacccauacua

SEQ ID NO: 1278333 - RNA, 19 nt, Homo sapiens
  misc_RNA (1)...(19): siRNA sense strand
ccaugguguugcugcugua

SEQ ID NO: 1278334 - RNA, 19 nt, Homo sapiens
  misc_RNA (1)...(19): siRNA sense strand
cagaugacgccuguuauag

SEQ ID NO: 1278335 - RNA, 19 nt, Homo sapiens
  misc_RNA (1)...(19): siRNA sense strand
uuggugaacgaguagauua

SEQ ID NO: 1278336 - RNA, 19 nt, Homo sapiens
  misc_RNA (1)...(19): siRNA sense strand
gucauugcugugauuguua

SEQ ID NO: 1278337 - RNA, 19 nt, Homo sapiens
  misc_RNA (1)...(19): siRNA sense strand
ggagccaccaacauuugaa

SEQ ID NO: 1278338 - RNA, 19 nt, Homo sapiens
  misc_RNA (1)...(19): siRNA sense strand
gcgcuuuccuggguugcuu

SEQ ID NO: 1278339 - RNA, 19 nt, Homo sapiens
  misc_RNA (1)...(19): siRNA sense strand
uacuacaaagcaacaguua

SEQ ID NO: 1278340 - RNA, 19 nt, Homo sapiens
  misc_RNA (1)...(19): siRNA sense strand
cuugaugcaguaacuuaua

SEQ ID NO: 1278341 - RNA, 19 nt, Homo sapiens
  misc_RNA (1)...(19): siRNA sense strand
aaacauguccauauauacg

SEQ ID NO: 1278342 - RNA, 19 nt, Homo sapiens
  misc_RNA (1)...(19): siRNA sense strand
guguaaaguggucaaaugu

SEQ ID NO: 1278343 - RNA, 19 nt, Homo sapiens
  misc_RNA (1)...(19): siRNA sense strand
cuuacgaguuugguuauca

SEQ ID NO: 1278344 - RNA, 19 nt, Homo sapiens
  misc_RNA (1)...(19): siRNA sense strand
uacgggauccuuuaaaugg

SEQ ID NO: 1278345 - RNA, 19 nt, Homo sapiens
  misc_RNA (1)...(19): siRNA sense strand
aaccaaaacccuacuauga

SEQ ID NO: 1278346 - RNA, 19 nt, Homo sapiens
  misc_RNA (1)...(19): siRNA sense strand
cccaauaugugaaaagguu

SEQ ID NO: 1278347 - RNA, 19 nt, Homo sapiens
  misc_RNA (1)...(19): siRNA sense strand
cgauggcagcgacacaauu

SEQ ID NO: 1278348 - RNA, 19 nt, Homo sapiens
  misc_RNA (1)...(19): siRNA sense strand
gauccauuuucacuuauug

SEQ ID NO: 1278349 - RNA, 19 nt, Homo sapiens
  misc_RNA (1)...(19): siRNA sense strand
uugaugcaguaacuuauag

SEQ ID NO: 1278350 - RNA, 19 nt, Homo sapiens
  misc_RNA (1)...(19): siRNA sense strand
guaucuugaugcaguaacu

SEQ ID NO: 1278351 - RNA, 19 nt, Homo sapiens
  misc_RNA (1)...(19): siRNA sense strand
caacauuugaagcuaugga

SEQ ID NO: 1278352 - RNA, 19 nt, Homo sapiens
  misc_RNA (1)...(19): siRNA sense strand
gagauuggugaacgaguag

SEQ ID NO: 1278353 - RNA, 19 nt, Homo sapiens
  misc_RNA (1)...(19): siRNA sense strand
ggagagagcacgauuuauu

SEQ ID NO: 1278354 - RNA, 19 nt, Homo sapiens
  misc_RNA (1)...(19): siRNA sense strand
agagaaacauguccauaua

SEQ ID NO: 1278355 - RNA, 19 nt, Homo sapiens
  misc_RNA (1)...(19): siRNA sense strand
cagaugcacuuuauuugua

SEQ ID NO: 1278356 - RNA, 19 nt, Homo sapiens
  misc_RNA (1)...(19): siRNA sense strand
ggacuuacgaguuugguua

SEQ ID NO: 1278357 - RNA, 19 nt, Homo sapiens
  misc_RNA (1)...(19): siRNA sense strand
aaacagauaucaggauuug

SEQ ID NO: 1278358 - RNA, 19 nt, Homo sapiens
  misc_RNA (1)...(19): siRNA sense strand
cuauggagcucauugguaa

SEQ ID NO: 1278359 - RNA, 19 nt, Homo sapiens
  misc_RNA (1)...(19): siRNA sense strand
aaacacaccuuuagugaag

SEQ ID NO: 1278360 - RNA, 19 nt, Homo sapiens
  misc_RNA (1)...(19): siRNA sense strand
gaacuuaaaggaucaguag

SEQ ID NO: 1278361 - RNA, 19 nt, Homo sapiens
  misc_RNA (1)...(19): siRNA sense strand
gaaaacagauaucaggauu

SEQ ID NO: 1278362 - RNA, 19 nt, Homo sapiens
  misc_RNA (1)...(19): siRNA sense strand
uaaaggaucaguagcaauu

SEQ ID NO: 1278363 - RNA, 19 nt, Homo sapiens
  misc_RNA (1)...(19): siRNA sense strand
aaaugggacuuacgaguuu

SEQ ID NO: 1278364 - RNA, 19 nt, Homo sapiens
  misc_RNA (1)...(19): siRNA sense strand
guuaucagaugcacuuuau

SEQ ID NO: 1278365 - RNA, 19 nt, Homo sapiens
  misc_RNA (1)...(19): siRNA sense strand
gagcugaauaugccacuua

SEQ ID NO: 1278366 - RNA, 19 nt, Homo sapiens
  misc_RNA (1)...(19): siRNA sense strand
gagcagagaggcugaauag

SEQ ID NO: 1278367 - RNA, 19 nt, Homo sapiens
  misc_RNA (1)...(19): siRNA sense strand
ugagauuggugaacgagua

SEQ ID NO: 1278368 - RNA, 19 nt, Homo sapiens
  misc_RNA (1)...(19): siRNA sense strand
gugaacgaguagauuauaa

SEQ ID NO: 1278369 - RNA, 19 nt, Homo sapiens
  misc_RNA (1)...(19): siRNA sense strand
gagagagcacgauuuauug

SEQ ID NO: 1278370 - RNA, 19 nt, Homo sapiens
  misc_RNA (1)...(19): siRNA sense strand
caaaugggacuuacgaguu

SEQ ID NO: 1278371 - RNA, 19 nt, Homo sapiens
  misc_RNA (1)...(19): siRNA sense strand
ggucauugcugugauuguu

SEQ ID NO: 1278372 - RNA, 19 nt, Homo sapiens
  misc_RNA (1)...(19): siRNA sense strand
ccagauccauuuucacuua

SEQ ID NO: 1278373 - RNA, 19 nt, Homo sapiens
  misc_RNA (1)...(19): siRNA sense strand
gaaggaauacuugacaguu

SEQ ID NO: 1278374 - RNA, 19 nt, Homo sapiens
  misc_RNA (1)...(19): siRNA sense strand
aaggaauacuugacaguuu

SEQ ID NO: 1278375 - RNA, 19 nt, Homo sapiens
  misc_RNA (1)...(19): siRNA sense strand
ucagaugacgccuguuaua

SEQ ID NO: 1278376 - RNA, 19 nt, Homo sapiens
  misc_RNA (1)...(19): siRNA sense strand
gaaaacacaccuuuaguga

SEQ ID NO: 1278377 - RNA, 19 nt, Homo sapiens
  misc_RNA (1)...(19): siRNA sense strand
gaugacgccuguuauagag

SEQ ID NO: 1278378 - RNA, 19 nt, Homo sapiens
  misc_RNA (1)...(19): siRNA sense strand
gagaaacauguccauauau

SEQ ID NO: 1278379 - RNA, 19 nt, Homo sapiens
  misc_RNA (1)...(19): siRNA sense strand
ccacuuaccagacuaaauc

SEQ ID NO: 1278380 - RNA, 19 nt, Homo sapiens
  misc_RNA (1)...(19): siRNA sense strand
acgaguagauuauaagugu

SEQ ID NO: 1278381 - RNA, 19 nt, Homo sapiens
  misc_RNA (1)...(19): siRNA sense strand
cuacaaagcaacaguuaug

SEQ ID NO: 1278382 - RNA, 19 nt, Homo sapiens
  misc_RNA (1)...(19): siRNA sense strand
ccaccaacauuugaagcua

SEQ ID NO: 1278383 - RNA, 19 nt, Homo sapiens
  misc_RNA (1)...(19): siRNA sense strand
uauacgggauccuuuaaau

SEQ ID NO: 1278384 - RNA, 19 nt, Homo sapiens
  misc_RNA (1)...(19): siRNA sense strand
cgaguuugguuaucagaug

SEQ ID NO: 1278385 - RNA, 19 nt, Homo sapiens
  misc_RNA (1)...(19): siRNA sense strand
gaacgaguagauuauaagu

SEQ ID NO: 1278386 - RNA, 19 nt, Homo sapiens
  misc_RNA (1)...(19): siRNA sense strand
gugaggagccaccaacauu

SEQ ID NO: 1278387 - RNA, 19 nt, Homo sapiens
  misc_RNA (1)...(19): siRNA sense strand
gauggcagcgacacaauug

SEQ ID NO: 1278388 - RNA, 19 nt, Homo sapiens
  misc_RNA (1)...(19): siRNA sense strand
ucucagaugacgccuguua

SEQ ID NO: 1278389 - RNA, 19 nt, Homo sapiens
  misc_RNA (1)...(19): siRNA sense strand
acacaccuuuagugaagua

SEQ ID NO: 1278390 - RNA, 19 nt, Homo sapiens
  misc_RNA (1)...(19): siRNA sense strand
gcuauggagcucauuggua

SEQ ID NO: 1278391 - RNA, 19 nt, Homo sapiens
  misc_RNA (1)...(19): siRNA sense strand
gaggagccaccaacauuug

SEQ ID NO: 1278392 - RNA, 19 nt, Homo sapiens
  misc_RNA (1)...(19): siRNA sense strand
uagagaaacauguccauau

SEQ ID NO: 1278393 - RNA, 19 nt, Homo sapiens
  misc_RNA (1)...(19): siRNA sense strand
ggugaacgaguagauuaua

SEQ ID NO: 1278394 - RNA, 19 nt, Homo sapiens
  misc_RNA (1)...(19): siRNA sense strand
gaaguagaaguauuugagu

SEQ ID NO: 1278395 - RNA, 19 nt, Homo sapiens
  misc_RNA (1)...(19): siRNA sense strand
gaaacauguccauauauac

SEQ ID NO: 1278396 - RNA, 19 nt, Homo sapiens
  misc_RNA (1)...(19): siRNA sense strand
ugacgccuguuauagagaa

SEQ ID NO: 1278397 - RNA, 19 nt, Homo sapiens
  misc_RNA (1)...(19): siRNA sense strand
cgaguagauuauaagugua

SEQ ID NO: 1278398 - RNA, 19 nt, Homo sapiens
  misc_RNA (1)...(19): siRNA sense strand
gcacuuuauuuguaaugag

SEQ ID NO: 1278399 - RNA, 19 nt, Homo sapiens
  misc_RNA (1)...(19): siRNA sense strand
guagaaguauuugaguauc

SEQ ID NO: 1278400 - RNA, 19 nt, Homo sapiens
  misc_RNA (1)...(19): siRNA sense strand
guauuugaguaucuugaug

SEQ ID NO: 1278401 - RNA, 19 nt, Homo sapiens
  misc_RNA (1)...(19): siRNA sense strand
aggaauacuugacaguuug

SEQ ID NO: 1278402 - RNA, 19 nt, Homo sapiens
  misc_RNA (1)...(19): siRNA sense strand
ccaaaacccuacuaugaga

SEQ ID NO: 1278403 - RNA, 19 nt, Homo sapiens
  misc_RNA (1)...(19): siRNA sense strand
aguguaaaguggucaaaug

SEQ ID NO: 1278404 - RNA, 19 nt, Homo sapiens
  misc_RNA (1)...(19): siRNA sense strand
ccacccauacuauuuguga

SEQ ID NO: 1278405 - RNA, 19 nt, Homo sapiens
  misc_RNA (1)...(19): siRNA sense strand
uuggagagagcacgauuua

SEQ ID NO: 1278406 - RNA, 19 nt, Homo sapiens
  misc_RNA (1)...(19): siRNA sense strand
gguuaucagaugcacuuua

SEQ ID NO: 1278407 - RNA, 19 nt, Homo sapiens
  misc_RNA (1)...(19): siRNA sense strand
caccaacauuugaagcuau

SEQ ID NO: 1278408 - RNA, 19 nt, Homo sapiens
  misc_RNA (1)...(19): siRNA sense strand
ugaggagccaccaacauuu

SEQ ID NO: 1278409 - RNA, 19 nt, Homo sapiens
  misc_RNA (1)...(19): siRNA sense strand
ggaaggaauacuugacagu

SEQ ID NO: 1278410 - RNA, 19 nt, Homo sapiens
  misc_RNA (1)...(19): siRNA sense strand
gaggaaggaauacuugaca

SEQ ID NO: 1278411 - RNA, 19 nt, Homo sapiens
  misc_RNA (1)...(19): siRNA sense strand
ugaguaucuugaugcagua

SEQ ID NO: 1278412 - RNA, 19 nt, Homo sapiens
  misc_RNA (1)...(19): siRNA sense strand
caccuuuagugaaguagaa

SEQ ID NO: 1278413 - RNA, 19 nt, Homo sapiens
  misc_RNA (1)...(19): siRNA sense strand
acagauaucaggauuugga

SEQ ID NO: 1278414 - RNA, 19 nt, Homo sapiens
  misc_RNA (1)...(19): siRNA sense strand
ucauugcugugauuguuau

SEQ ID NO: 1278415 - RNA, 19 nt, Homo sapiens
  misc_RNA (1)...(19): siRNA sense strand
ucagaugcacuuuauuugu

SEQ ID NO: 1278416 - RNA, 19 nt, Homo sapiens
  misc_RNA (1)...(19): siRNA sense strand
gugcugcuccagaguguaa

SEQ ID NO: 1278417 - RNA, 19 nt, Homo sapiens
  misc_RNA (1)...(19): siRNA sense strand
ggaaaacacaccuuuagug

SEQ ID NO: 1278418 - RNA, 19 nt, Homo sapiens
  misc_RNA (1)...(19): siRNA sense strand
aaggaucaguagcaauuug

SEQ ID NO: 1278419 - RNA, 19 nt, Homo sapiens
  misc_RNA (1)...(19): siRNA sense strand
uauauacgggauccuuuaa

SEQ ID NO: 1278420 - RNA, 19 nt, Homo sapiens
  misc_RNA (1)...(19): siRNA sense strand
ugaaguagaaguauuugag

SEQ ID NO: 1278421 - RNA, 19 nt, Homo sapiens
  misc_RNA (1)...(19): siRNA sense strand
cuugacaguuuggauguuu

SEQ ID NO: 1278422 - RNA, 19 nt, Homo sapiens
  misc_RNA (1)...(19): siRNA sense strand
cauauauacgggauccuuu

SEQ ID NO: 1278423 - RNA, 19 nt, Homo sapiens
  misc_RNA (1)...(19): siRNA sense strand
auauauacgggauccuuua

SEQ ID NO: 1278424 - RNA, 19 nt, Homo sapiens
  misc_RNA (1)...(19): siRNA sense strand
cuuaaaggaucaguagcaa

SEQ ID NO: 1278425 - RNA, 19 nt, Homo sapiens
  misc_RNA (1)...(19): siRNA sense strand
uaaaccugaggaaggaaua

SEQ ID NO: 1278426 - RNA, 19 nt, Homo sapiens
  misc_RNA (1)...(19): siRNA sense strand
agaugacgccuguuauaga

SEQ ID NO: 1278427 - RNA, 19 nt, Homo sapiens
  misc_RNA (1)...(19): siRNA sense strand
ugugauuguuauugccaua

SEQ ID NO: 1278428 - RNA, 19 nt, Homo sapiens
  misc_RNA (1)...(19): siRNA sense strand
gagagcacgauuuauugug

SEQ ID NO: 1278429 - RNA, 19 nt, Homo sapiens
  misc_RNA (1)...(19): siRNA sense strand
gaaguauuugaguaucuug

SEQ ID NO: 1278430 - RNA, 19 nt, Homo sapiens
  misc_RNA (1)...(19): siRNA sense strand
ggcuaccugucucagauga

SEQ ID NO: 1278431 - RNA, 19 nt, Homo sapiens
  misc_RNA (1)...(19): siRNA sense strand
gauaucaggauuuggaaaa

SEQ ID NO: 1278432 - RNA, 19 nt, Homo sapiens
  misc_RNA (1)...(19): siRNA sense strand
ccucuugccacccauacua

SEQ ID NO: 1278433 - RNA, 19 nt, Homo sapiens
  misc_RNA (1)...(19): siRNA sense strand
ccaugguguugcugcugua

SEQ ID NO: 1278434 - RNA, 19 nt, Homo sapiens
  misc_RNA (1)...(19): siRNA sense strand
cagaugacgccuguuauag

SEQ ID NO: 1278435 - RNA, 19 nt, Homo sapiens
  misc_RNA (1)...(19): siRNA sense strand
cagaugguggagcugaaua

SEQ ID NO: 1278436 - RNA, 19 nt, Homo sapiens
  misc_RNA (1)...(19): siRNA sense strand
gucauugcugugauuguua

SEQ ID NO: 1278437 - RNA, 19 nt, Homo sapiens
  misc_RNA (1)...(19): siRNA sense strand
ggagccaccaacauuugaa

SEQ ID NO: 1278438 - RNA, 19 nt, Homo sapiens
  misc_RNA (1)...(19): siRNA sense strand
uuggugaacgaguagauua

SEQ ID NO: 1278439 - RNA, 19 nt, Homo sapiens
  misc_RNA (1)...(19): siRNA sense strand
gcgcuuuccuggguugcuu

SEQ ID NO: 1278440 - RNA, 19 nt, Homo sapiens
  misc_RNA (1)...(19): siRNA sense strand
uacuacaaagcaacaguua

SEQ ID NO: 1278441 - RNA, 19 nt, Homo sapiens
  misc_RNA (1)...(19): siRNA sense strand
cuugaugcaguaacuuaua

SEQ ID NO: 1278442 - RNA, 19 nt, Homo sapiens
  misc_RNA (1)...(19): siRNA sense strand
aaacauguccauauauacg

SEQ ID NO: 1278443 - RNA, 19 nt, Homo sapiens
  misc_RNA (1)...(19): siRNA sense strand
guguaaaguggucaaaugu

SEQ ID NO: 1278444 - RNA, 19 nt, Homo sapiens
  misc_RNA (1)...(19): siRNA sense strand
cuuacgaguuugguuauca

SEQ ID NO: 1278445 - RNA, 19 nt, Homo sapiens
  misc_RNA (1)...(19): siRNA sense strand
uacgggauccuuuaaaugg

SEQ ID NO: 1278446 - RNA, 19 nt, Homo sapiens
  misc_RNA (1)...(19): siRNA sense strand
gcagaugguggagcugaau

SEQ ID NO: 1278447 - RNA, 19 nt, Homo sapiens
  misc_RNA (1)...(19): siRNA sense strand
aaccaaaacccuacuauga

SEQ ID NO: 1278448 - RNA, 19 nt, Homo sapiens
  misc_RNA (1)...(19): siRNA sense strand
uugaugcaguaacuuauag

SEQ ID NO: 1278449 - RNA, 19 nt, Homo sapiens
  misc_RNA (1)...(19): siRNA sense strand
ggagcugaauaugccacuu

SEQ ID NO: 1278450 - RNA, 19 nt, Homo sapiens
  misc_RNA (1)...(19): siRNA sense strand
caacauuugaagcuaugga

SEQ ID NO: 1278451 - RNA, 19 nt, Homo sapiens
  misc_RNA (1)...(19): siRNA sense strand
cgauggcagcgacacaauu

SEQ ID NO: 1278452 - RNA, 19 nt, Homo sapiens
  misc_RNA (1)...(19): siRNA sense strand
gauccauuuucacuuauug

SEQ ID NO: 1278453 - RNA, 19 nt, Homo sapiens
  misc_RNA (1)...(19): siRNA sense strand
ggagagagcacgauuuauu

SEQ ID NO: 1278454 - RNA, 19 nt, Homo sapiens
  misc_RNA (1)...(19): siRNA sense strand
agagaaacauguccauaua

SEQ ID NO: 1278455 - RNA, 19 nt, Homo sapiens
  misc_RNA (1)...(19): siRNA sense strand
cagaugcacuuuauuugua

SEQ ID NO: 1278456 - RNA, 19 nt, Homo sapiens
  misc_RNA (1)...(19): siRNA sense strand
ggacuuacgaguuugguua

SEQ ID NO: 1278457 - RNA, 19 nt, Homo sapiens
  misc_RNA (1)...(19): siRNA sense strand
aaacagauaucaggauuug

SEQ ID NO: 1278458 - RNA, 19 nt, Homo sapiens
  misc_RNA (1)...(19): siRNA sense strand
cuauggagcucauugguaa

SEQ ID NO: 1278459 - RNA, 19 nt, Homo sapiens
  misc_RNA (1)...(19): siRNA sense strand
aaacacaccuuuagugaag

SEQ ID NO: 1278460 - RNA, 19 nt, Homo sapiens
  misc_RNA (1)...(19): siRNA sense strand
gaacuuaaaggaucaguag

SEQ ID NO: 1278461 - RNA, 19 nt, Homo sapiens
  misc_RNA (1)...(19): siRNA sense strand
gaaaacagauaucaggauu

SEQ ID NO: 1278462 - RNA, 19 nt, Homo sapiens
  misc_RNA (1)...(19): siRNA sense strand
uaaaggaucaguagcaauu

SEQ ID NO: 1278463 - RNA, 19 nt, Homo sapiens
  misc_RNA (1)...(19): siRNA sense strand
aaaugggacuuacgaguuu

SEQ ID NO: 1278464 - RNA, 19 nt, Homo sapiens
  misc_RNA (1)...(19): siRNA sense strand
guuaucagaugcacuuuau

SEQ ID NO: 1278465 - RNA, 19 nt, Homo sapiens
  misc_RNA (1)...(19): siRNA sense strand
gagcugaauaugccacuua

SEQ ID NO: 1278466 - RNA, 19 nt, Homo sapiens
  misc_RNA (1)...(19): siRNA sense strand
ugagauuggugaacgagua

SEQ ID NO: 1278467 - RNA, 19 nt, Homo sapiens
  misc_RNA (1)...(19): siRNA sense strand
gugaacgaguagauuauaa

SEQ ID NO: 1278468 - RNA, 19 nt, Homo sapiens
  misc_RNA (1)...(19): siRNA sense strand
gagagagcacgauuuauug

SEQ ID NO: 1278469 - RNA, 19 nt, Homo sapiens
  misc_RNA (1)...(19): siRNA sense strand
caaaugggacuuacgaguu

SEQ ID NO: 1278470 - RNA, 19 nt, Homo sapiens
  misc_RNA (1)...(19): siRNA sense strand
ggucauugcugugauuguu

SEQ ID NO: 1278471 - RNA, 19 nt, Homo sapiens
  misc_RNA (1)...(19): siRNA sense strand
ccagauccauuuucacuua

SEQ ID NO: 1278472 - RNA, 19 nt, Homo sapiens
  misc_RNA (1)...(19): siRNA sense strand
gaaggaauacuugacaguu

SEQ ID NO: 1278473 - RNA, 19 nt, Homo sapiens
  misc_RNA (1)...(19): siRNA sense strand
aaggaauacuugacaguuu

SEQ ID NO: 1278474 - RNA, 19 nt, Homo sapiens
  misc_RNA (1)...(19): siRNA sense strand
ucagaugacgccuguuaua

SEQ ID NO: 1278475 - RNA, 19 nt, Homo sapiens
  misc_RNA (1)...(19): siRNA sense strand
gaaaacacaccuuuaguga

SEQ ID NO: 1278476 - RNA, 19 nt, Homo sapiens
  misc_RNA (1)...(19): siRNA sense strand
gaugacgccuguuauagag

SEQ ID NO: 1278477 - RNA, 19 nt, Homo sapiens
  misc_RNA (1)...(19): siRNA sense strand
gagaaacauguccauauau

SEQ ID NO: 1278478 - RNA, 19 nt, Homo sapiens
  misc_RNA (1)...(19): siRNA sense strand
ccacuuaccagacuaaauc

SEQ ID NO: 1278479 - RNA, 19 nt, Homo sapiens
  misc_RNA (1)...(19): siRNA sense strand
acgaguagauuauaagugu

SEQ ID NO: 1278480 - RNA, 19 nt, Homo sapiens
  misc_RNA (1)...(19): siRNA sense strand
cuacaaagcaacaguuaug

SEQ ID NO: 1278481 - RNA, 19 nt, Homo sapiens
  misc_RNA (1)...(19): siRNA sense strand
ccaccaacauuugaagcua

SEQ ID NO: 1278482 - RNA, 19 nt, Homo sapiens
  misc_RNA (1)...(19): siRNA sense strand
uauacgggauccuuuaaau

SEQ ID NO: 1278483 - RNA, 19 nt, Homo sapiens
  misc_RNA (1)...(19): siRNA sense strand
cgaguuugguuaucagaug

SEQ ID NO: 1278484 - RNA, 19 nt, Homo sapiens
  misc_RNA (1)...(19): siRNA sense strand
gaacgaguagauuauaagu

SEQ ID NO: 1278485 - RNA, 19 nt, Homo sapiens
  misc_RNA (1)...(19): siRNA sense strand
gugaggagccaccaacauu

SEQ ID NO: 1278486 - RNA, 19 nt, Homo sapiens
  misc_RNA (1)...(19): siRNA sense strand
gauggcagcgacacaauug

SEQ ID NO: 1278487 - RNA, 19 nt, Homo sapiens
  misc_RNA (1)...(19): siRNA sense strand
ucucagaugacgccuguua

SEQ ID NO: 1278488 - RNA, 19 nt, Homo sapiens
  misc_RNA (1)...(19): siRNA sense strand
gaggagccaccaacauuug

SEQ ID NO: 1278489 - RNA, 19 nt, Homo sapiens
  misc_RNA (1)...(19): siRNA sense strand
gcuauggagcucauuggua

SEQ ID NO: 1278490 - RNA, 19 nt, Homo sapiens
  misc_RNA (1)...(19): siRNA sense strand
acacaccuuuagugaagua

SEQ ID NO: 1278491 - RNA, 19 nt, Homo sapiens
  misc_RNA (1)...(19): siRNA sense strand
uagagaaacauguccauau

SEQ ID NO: 1278492 - RNA, 19 nt, Homo sapiens
  misc_RNA (1)...(19): siRNA sense strand
guuccaaagugucuuaaag

SEQ ID NO: 1278493 - RNA, 19 nt, Homo sapiens
  misc_RNA (1)...(19): siRNA sense strand
ggugaacgaguagauuaua

SEQ ID NO: 1278494 - RNA, 19 nt, Homo sapiens
  misc_RNA (1)...(19): siRNA sense strand
gaaguagaaguauuugagu

SEQ ID NO: 1278495 - RNA, 19 nt, Homo sapiens
  misc_RNA (1)...(19): siRNA sense strand
gaaacauguccauauauac

SEQ ID NO: 1278496 - RNA, 19 nt, Homo sapiens
  misc_RNA (1)...(19): siRNA sense strand
ugacgccuguuauagagaa

SEQ ID NO: 1278497 - RNA, 19 nt, Homo sapiens
  misc_RNA (1)...(19): siRNA sense strand
cgaguagauuauaagugua

SEQ ID NO: 1278498 - RNA, 19 nt, Homo sapiens
  misc_RNA (1)...(19): siRNA sense strand
gcacuuuauuuguaaugag

SEQ ID NO: 1278499 - RNA, 19 nt, Homo sapiens
  misc_RNA (1)...(19): siRNA sense strand
guagaaguauuugaguauc

SEQ ID NO: 1278500 - RNA, 19 nt, Homo sapiens
  misc_RNA (1)...(19): siRNA sense strand
guauuugaguaucuugaug

SEQ ID NO: 1278501 - RNA, 19 nt, Homo sapiens
  misc_RNA (1)...(19): siRNA sense strand
aggaauacuugacaguuug

SEQ ID NO: 1278502 - RNA, 19 nt, Homo sapiens
  misc_RNA (1)...(19): siRNA sense strand
ccaaaacccuacuaugaga

SEQ ID NO: 1278503 - RNA, 19 nt, Homo sapiens
  misc_RNA (1)...(19): siRNA sense strand
aguguaaaguggucaaaug

SEQ ID NO: 1278504 - RNA, 19 nt, Homo sapiens
  misc_RNA (1)...(19): siRNA sense strand
ccacccauacuauuuguga

SEQ ID NO: 1278505 - RNA, 19 nt, Homo sapiens
  misc_RNA (1)...(19): siRNA sense strand
uuggagagagcacgauuua

SEQ ID NO: 1278506 - RNA, 19 nt, Homo sapiens
  misc_RNA (1)...(19): siRNA sense strand
gguuaucagaugcacuuua

SEQ ID NO: 1278507 - RNA, 19 nt, Homo sapiens
  misc_RNA (1)...(19): siRNA sense strand
caccaacauuugaagcuau

SEQ ID NO: 1278508 - RNA, 19 nt, Homo sapiens
  misc_RNA (1)...(19): siRNA sense strand
ugaggagccaccaacauuu

SEQ ID NO: 1278509 - RNA, 19 nt, Homo sapiens
  misc_RNA (1)...(19): siRNA sense strand
ggaaggaauacuugacagu

SEQ ID NO: 1278510 - RNA, 19 nt, Homo sapiens
  misc_RNA (1)...(19): siRNA sense strand
gaggaaggaauacuugaca

SEQ ID NO: 1278511 - RNA, 19 nt, Homo sapiens
  misc_RNA (1)...(19): siRNA sense strand
ccaguuccaaagugucuua

SEQ ID NO: 1278512 - RNA, 19 nt, Homo sapiens
  misc_RNA (1)...(19): siRNA sense strand
ugaguaucuugaugcagua

SEQ ID NO: 1278513 - RNA, 19 nt, Homo sapiens
  misc_RNA (1)...(19): siRNA sense strand
caccuuuagugaaguagaa

SEQ ID NO: 1278514 - RNA, 19 nt, Homo sapiens
  misc_RNA (1)...(19): siRNA sense strand
acagauaucaggauuugga

SEQ ID NO: 1278515 - RNA, 19 nt, Homo sapiens
  misc_RNA (1)...(19): siRNA sense strand
ucauugcugugauuguuau

SEQ ID NO: 1278516 - RNA, 19 nt, Homo sapiens
  misc_RNA (1)...(19): siRNA sense strand
ucagaugcacuuuauuugu

SEQ ID NO: 1278517 - RNA, 19 nt, Homo sapiens
  misc_RNA (1)...(19): siRNA sense strand
gugcugcuccagaguguaa

SEQ ID NO: 1278518 - RNA, 19 nt, Homo sapiens
  misc_RNA (1)...(19): siRNA sense strand
ggaaaacacaccuuuagug

SEQ ID NO: 1278519 - RNA, 19 nt, Homo sapiens
  misc_RNA (1)...(19): siRNA sense strand
aaggaucaguagcaauuug

SEQ ID NO: 1278520 - RNA, 19 nt, Homo sapiens
  misc_RNA (1)...(19): siRNA sense strand
uauauacgggauccuuuaa

SEQ ID NO: 1278521 - RNA, 19 nt, Homo sapiens
  misc_RNA (1)...(19): siRNA sense strand
ugaaguagaaguauuugag

SEQ ID NO: 1278522 - RNA, 19 nt, Homo sapiens
  misc_RNA (1)...(19): siRNA sense strand
cuugacaguuuggauguuu

SEQ ID NO: 1278523 - RNA, 19 nt, Homo sapiens
  misc_RNA (1)...(19): siRNA sense strand
cauauauacgggauccuuu

SEQ ID NO: 1278524 - RNA, 19 nt, Homo sapiens
  misc_RNA (1)...(19): siRNA sense strand
auauauacgggauccuuua

SEQ ID NO: 1278525 - RNA, 19 nt, Homo sapiens
  misc_RNA (1)...(19): siRNA sense strand
cuuaaaggaucaguagcaa

SEQ ID NO: 1278526 - RNA, 19 nt, Homo sapiens
  misc_RNA (1)...(19): siRNA sense strand
uaaaccugaggaaggaaua

SEQ ID NO: 1278527 - RNA, 19 nt, Homo sapiens
  misc_RNA (1)...(19): siRNA sense strand
agaugacgccuguuauaga

SEQ ID NO: 1278528 - RNA, 19 nt, Homo sapiens
  misc_RNA (1)...(19): siRNA sense strand
ugugauuguuauugccaua

SEQ ID NO: 1278529 - RNA, 19 nt, Homo sapiens
  misc_RNA (1)...(19): siRNA sense strand
gagagcacgauuuauugug

SEQ ID NO: 1278530 - RNA, 19 nt, Homo sapiens
  misc_RNA (1)...(19): siRNA sense strand
gaaguauuugaguaucuug

SEQ ID NO: 1278531 - RNA, 19 nt, Homo sapiens
  misc_RNA (1)...(19): siRNA sense strand
ggcuaccugucucagauga

SEQ ID NO: 1278532 - RNA, 19 nt, Homo sapiens
  misc_RNA (1)...(19): siRNA sense strand
gauaucaggauuuggaaaa

SEQ ID NO: 1278533 - RNA, 19 nt, Homo sapiens
  misc_RNA (1)...(19): siRNA sense strand
ccucuugccacccauacua

SEQ ID NO: 1278534 - RNA, 19 nt, Homo sapiens
  misc_RNA (1)...(19): siRNA sense strand
ccaugguguugcugcugua

SEQ ID NO: 1278535 - RNA, 19 nt, Homo sapiens
  misc_RNA (1)...(19): siRNA sense strand
cagaugacgccuguuauag

SEQ ID NO: 1278536 - RNA, 19 nt, Homo sapiens
  misc_RNA (1)...(19): siRNA sense strand
cagaugguggagcugaaua

SEQ ID NO: 1278537 - RNA, 19 nt, Homo sapiens
  misc_RNA (1)...(19): siRNA sense strand
gucauugcugugauuguua

SEQ ID NO: 1278538 - RNA, 19 nt, Homo sapiens
  misc_RNA (1)...(19): siRNA sense strand
ggagccaccaacauuugaa

SEQ ID NO: 1278539 - RNA, 19 nt, Homo sapiens
  misc_RNA (1)...(19): siRNA sense strand
uuggugaacgaguagauua

SEQ ID NO: 1278540 - RNA, 19 nt, Homo sapiens
  misc_RNA (1)...(19): siRNA sense strand
gcgcuuuccuggguugcuu

SEQ ID NO: 1278541 - RNA, 19 nt, Homo sapiens
  misc_RNA (1)...(19): siRNA sense strand
uacuacaaagcaacaguua

SEQ ID NO: 1278542 - RNA, 19 nt, Homo sapiens
  misc_RNA (1)...(19): siRNA sense strand
cuugaugcaguaacuuaua

SEQ ID NO: 1278543 - RNA, 19 nt, Homo sapiens
  misc_RNA (1)...(19): siRNA sense strand
aaacauguccauauauacg

SEQ ID NO: 1278544 - RNA, 19 nt, Homo sapiens
  misc_RNA (1)...(19): siRNA sense strand
guguaaaguggucaaaugu

SEQ ID NO: 1278545 - RNA, 19 nt, Homo sapiens
  misc_RNA (1)...(19): siRNA sense strand
cuuacgaguuugguuauca

SEQ ID NO: 1278546 - RNA, 19 nt, Homo sapiens
  misc_RNA (1)...(19): siRNA sense strand
uacgggauccuuuaaaugg

SEQ ID NO: 1278547 - RNA, 19 nt, Homo sapiens
  misc_RNA (1)...(19): siRNA sense strand
gcagaugguggagcugaau

SEQ ID NO: 1278548 - RNA, 19 nt, Homo sapiens
  misc_RNA (1)...(19): siRNA sense strand
aaccaaaacccuacuauga

SEQ ID NO: 1278549 - RNA, 19 nt, Homo sapiens
  misc_RNA (1)...(19): siRNA sense strand
uugaugcaguaacuuauag

SEQ ID NO: 1278550 - RNA, 19 nt, Homo sapiens
  misc_RNA (1)...(19): siRNA sense strand
ggagcugaauaugccacuu

SEQ ID NO: 1278551 - RNA, 19 nt, Homo sapiens
  misc_RNA (1)...(19): siRNA sense strand
cgauggcagcgacacaauu

SEQ ID NO: 1278552 - RNA, 19 nt, Homo sapiens
  misc_RNA (1)...(19): siRNA sense strand
gauccauuuucacuuauug

SEQ ID NO: 1278553 - RNA, 19 nt, Homo sapiens
  misc_RNA (1)...(19): siRNA sense strand
ggagagagcacgauuuauu

SEQ ID NO: 1278554 - RNA, 19 nt, Homo sapiens
  misc_RNA (1)...(19): siRNA sense strand
agagaaacauguccauaua

SEQ ID NO: 1278555 - RNA, 19 nt, Homo sapiens
  misc_RNA (1)...(19): siRNA sense strand
cagaugcacuuuauuugua

SEQ ID NO: 1278556 - RNA, 19 nt, Homo sapiens
  misc_RNA (1)...(19): siRNA sense strand
ggacuuacgaguuugguua

SEQ ID NO: 1278557 - RNA, 19 nt, Homo sapiens
  misc_RNA (1)...(19): siRNA sense strand
aaacagauaucaggauuug

SEQ ID NO: 1278558 - RNA, 19 nt, Homo sapiens
  misc_RNA (1)...(19): siRNA sense strand
cuauggagcucauugguaa

SEQ ID NO: 1278559 - RNA, 19 nt, Homo sapiens
  misc_RNA (1)...(19): siRNA sense strand
aaacacaccuuuagugaag

SEQ ID NO: 1278560 - RNA, 19 nt, Homo sapiens
  misc_RNA (1)...(19): siRNA sense strand
gaacuuaaaggaucaguag

SEQ ID NO: 1278561 - RNA, 19 nt, Homo sapiens
  misc_RNA (1)...(19): siRNA sense strand
gaaaacagauaucaggauu

SEQ ID NO: 1278562 - RNA, 19 nt, Homo sapiens
  misc_RNA (1)...(19): siRNA sense strand
uaaaggaucaguagcaauu

SEQ ID NO: 1278563 - RNA, 19 nt, Homo sapiens
  misc_RNA (1)...(19): siRNA sense strand
aaaugggacuuacgaguuu

SEQ ID NO: 1278564 - RNA, 19 nt, Homo sapiens
  misc_RNA (1)...(19): siRNA sense strand
guuaucagaugcacuuuau

SEQ ID NO: 1278565 - RNA, 19 nt, Homo sapiens
  misc_RNA (1)...(19): siRNA sense strand
gagcugaauaugccacuua

SEQ ID NO: 1278566 - RNA, 19 nt, Homo sapiens
  misc_RNA (1)...(19): siRNA sense strand
ugagauuggugaacgagua

SEQ ID NO: 1278567 - RNA, 19 nt, Homo sapiens
  misc_RNA (1)...(19): siRNA sense strand
gugaacgaguagauuauaa

SEQ ID NO: 1278568 - RNA, 19 nt, Homo sapiens
  misc_RNA (1)...(19): siRNA sense strand
gagagagcacgauuuauug

SEQ ID NO: 1278569 - RNA, 19 nt, Homo sapiens
  misc_RNA (1)...(19): siRNA sense strand
caaaugggacuuacgaguu

SEQ ID NO: 1278570 - RNA, 19 nt, Homo sapiens
  misc_RNA (1)...(19): siRNA sense strand
ggucauugcugugauuguu

SEQ ID NO: 1278571 - RNA, 19 nt, Homo sapiens
  misc_RNA (1)...(19): siRNA sense strand
ccagauccauuuucacuua

SEQ ID NO: 1278572 - RNA, 19 nt, Homo sapiens
  misc_RNA (1)...(19): siRNA sense strand
gaaggaauacuugacaguu

SEQ ID NO: 1278573 - RNA, 19 nt, Homo sapiens
  misc_RNA (1)...(19): siRNA sense strand
aaggaauacuugacaguuu

SEQ ID NO: 1278574 - RNA, 19 nt, Homo sapiens
  misc_RNA (1)...(19): siRNA sense strand
ucagaugacgccuguuaua

SEQ ID NO: 1278575 - RNA, 19 nt, Homo sapiens
  misc_RNA (1)...(19): siRNA sense strand
gaaaacacaccuuuaguga

SEQ ID NO: 1278576 - RNA, 19 nt, Homo sapiens
  misc_RNA (1)...(19): siRNA sense strand
gaugacgccuguuauagag

SEQ ID NO: 1278577 - RNA, 19 nt, Homo sapiens
  misc_RNA (1)...(19): siRNA sense strand
gagaaacauguccauauau

SEQ ID NO: 1278578 - RNA, 19 nt, Homo sapiens
  misc_RNA (1)...(19): siRNA sense strand
ccacuuaccagacuaaauc

SEQ ID NO: 1278579 - RNA, 19 nt, Homo sapiens
  misc_RNA (1)...(19): siRNA sense strand
acgaguagauuauaagugu

SEQ ID NO: 1278580 - RNA, 19 nt, Homo sapiens
  misc_RNA (1)...(19): siRNA sense strand
cuacaaagcaacaguuaug

SEQ ID NO: 1278581 - RNA, 19 nt, Homo sapiens
  misc_RNA (1)...(19): siRNA sense strand
ccaccaacauuugaagcua

SEQ ID NO: 1278582 - RNA, 19 nt, Homo sapiens
  misc_RNA (1)...(19): siRNA sense strand
uauacgggauccuuuaaau

SEQ ID NO: 1278583 - RNA, 19 nt, Homo sapiens
  misc_RNA (1)...(19): siRNA sense strand
cgaguuugguuaucagaug

SEQ ID NO: 1278584 - RNA, 19 nt, Homo sapiens
  misc_RNA (1)...(19): siRNA sense strand
gaacgaguagauuauaagu

SEQ ID NO: 1278585 - RNA, 19 nt, Homo sapiens
  misc_RNA (1)...(19): siRNA sense strand
gugaggagccaccaacauu

SEQ ID NO: 1278586 - RNA, 19 nt, Homo sapiens
  misc_RNA (1)...(19): siRNA sense strand
gauggcagcgacacaauug

SEQ ID NO: 1278587 - RNA, 19 nt, Homo sapiens
  misc_RNA (1)...(19): siRNA sense strand
ucucagaugacgccuguua

SEQ ID NO: 1278588 - RNA, 19 nt, Homo sapiens
  misc_RNA (1)...(19): siRNA sense strand
gaggagccaccaacauuug

SEQ ID NO: 1278589 - RNA, 19 nt, Homo sapiens
  misc_RNA (1)...(19): siRNA sense strand
gcuauggagcucauuggua

SEQ ID NO: 1278590 - RNA, 19 nt, Homo sapiens
  misc_RNA (1)...(19): siRNA sense strand
acacaccuuuagugaagua

SEQ ID NO: 1278591 - RNA, 19 nt, Homo sapiens
  misc_RNA (1)...(19): siRNA sense strand
uagagaaacauguccauau

SEQ ID NO: 1278592 - RNA, 19 nt, Homo sapiens
  misc_RNA (1)...(19): siRNA sense strand
guuccaaagugucuuaaag

SEQ ID NO: 1278593 - RNA, 19 nt, Homo sapiens
  misc_RNA (1)...(19): siRNA sense strand
ggugaacgaguagauuaua

SEQ ID NO: 1278594 - RNA, 19 nt, Homo sapiens
  misc_RNA (1)...(19): siRNA sense strand
gaaguagaaguauuugagu

SEQ ID NO: 1278595 - RNA, 19 nt, Homo sapiens
  misc_RNA (1)...(19): siRNA sense strand
gaaacauguccauauauac

SEQ ID NO: 1278596 - RNA, 19 nt, Homo sapiens
  misc_RNA (1)...(19): siRNA sense strand
ugacgccuguuauagagaa

SEQ ID NO: 1278597 - RNA, 19 nt, Homo sapiens
  misc_RNA (1)...(19): siRNA sense strand
cgaguagauuauaagugua

SEQ ID NO: 1278598 - RNA, 19 nt, Homo sapiens
  misc_RNA (1)...(19): siRNA sense strand
gcacuuuauuuguaaugag

SEQ ID NO: 1278599 - RNA, 19 nt, Homo sapiens
  misc_RNA (1)...(19): siRNA sense strand
guagaaguauuugaguauc

SEQ ID NO: 1278600 - RNA, 19 nt, Homo sapiens
  misc_RNA (1)...(19): siRNA sense strand
guauuugaguaucuugaug

SEQ ID NO: 1278601 - RNA, 19 nt, Homo sapiens
  misc_RNA (1)...(19): siRNA sense strand
aggaauacuugacaguuug

SEQ ID NO: 1278602 - RNA, 19 nt, Homo sapiens
  misc_RNA (1)...(19): siRNA sense strand
ccaaaacccuacuaugaga

SEQ ID NO: 1278603 - RNA, 19 nt, Homo sapiens
  misc_RNA (1)...(19): siRNA sense strand
aguguaaaguggucaaaug

SEQ ID NO: 1278604 - RNA, 19 nt, Homo sapiens
  misc_RNA (1)...(19): siRNA sense strand
ccacccauacuauuuguga

SEQ ID NO: 1278605 - RNA, 19 nt, Homo sapiens
  misc_RNA (1)...(19): siRNA sense strand
uuggagagagcacgauuua

SEQ ID NO: 1278606 - RNA, 19 nt, Homo sapiens
  misc_RNA (1)...(19): siRNA sense strand
gguuaucagaugcacuuua

SEQ ID NO: 1278607 - RNA, 19 nt, Homo sapiens
  misc_RNA (1)...(19): siRNA sense strand
caccaacauuugaagcuau

SEQ ID NO: 1278608 - RNA, 19 nt, Homo sapiens
  misc_RNA (1)...(19): siRNA sense strand
ugaggagccaccaacauuu

SEQ ID NO: 1278609 - RNA, 19 nt, Homo sapiens
  misc_RNA (1)...(19): siRNA sense strand
ggaaggaauacuugacagu

SEQ ID NO: 1278610 - RNA, 19 nt, Homo sapiens
  misc_RNA (1)...(19): siRNA sense strand
gaggaaggaauacuugaca

SEQ ID NO: 1278611 - RNA, 19 nt, Homo sapiens
  misc_RNA (1)...(19): siRNA sense strand
ccaguuccaaagugucuua

SEQ ID NO: 1278612 - RNA, 19 nt, Homo sapiens
  misc_RNA (1)...(19): siRNA sense strand
ugaguaucuugaugcagua

SEQ ID NO: 1278613 - RNA, 19 nt, Homo sapiens
  misc_RNA (1)...(19): siRNA sense strand
caccuuuagugaaguagaa

SEQ ID NO: 1278614 - RNA, 19 nt, Homo sapiens
  misc_RNA (1)...(19): siRNA sense strand
acagauaucaggauuugga

SEQ ID NO: 1278615 - RNA, 19 nt, Homo sapiens
  misc_RNA (1)...(19): siRNA sense strand
ucauugcugugauuguuau

SEQ ID NO: 1278616 - RNA, 19 nt, Homo sapiens
  misc_RNA (1)...(19): siRNA sense strand
ucagaugcacuuuauuugu

SEQ ID NO: 1278617 - RNA, 19 nt, Homo sapiens
  misc_RNA (1)...(19): siRNA sense strand
gugcugcuccagaguguaa

SEQ ID NO: 1278618 - RNA, 19 nt, Homo sapiens
  misc_RNA (1)...(19): siRNA sense strand
ggaaaacacaccuuuagug

SEQ ID NO: 1278619 - RNA, 19 nt, Homo sapiens
  misc_RNA (1)...(19): siRNA sense strand
aaggaucaguagcaauuug

SEQ ID NO: 1278620 - RNA, 19 nt, Homo sapiens
  misc_RNA (1)...(19): siRNA sense strand
uauauacgggauccuuuaa

SEQ ID NO: 1278621 - RNA, 19 nt, Homo sapiens
  misc_RNA (1)...(19): siRNA sense strand
ugaaguagaaguauuugag

SEQ ID NO: 1278622 - RNA, 19 nt, Homo sapiens
  misc_RNA (1)...(19): siRNA sense strand
cuugacaguuuggauguuu

SEQ ID NO: 1278623 - RNA, 19 nt, Homo sapiens
  misc_RNA (1)...(19): siRNA sense strand
cauauauacgggauccuuu

SEQ ID NO: 1278624 - RNA, 19 nt, Homo sapiens
  misc_RNA (1)...(19): siRNA sense strand
auauauacgggauccuuua

SEQ ID NO: 1278625 - RNA, 19 nt, Homo sapiens
  misc_RNA (1)...(19): siRNA sense strand
cuuaaaggaucaguagcaa

SEQ ID NO: 1278626 - RNA, 19 nt, Homo sapiens
  misc_RNA (1)...(19): siRNA sense strand
uaaaccugaggaaggaaua

SEQ ID NO: 1278627 - RNA, 19 nt, Homo sapiens
  misc_RNA (1)...(19): siRNA sense strand
agaugacgccuguuauaga

SEQ ID NO: 1278628 - RNA, 19 nt, Homo sapiens
  misc_RNA (1)...(19): siRNA sense strand
ugugauuguuauugccaua

SEQ ID NO: 1278629 - RNA, 19 nt, Homo sapiens
  misc_RNA (1)...(19): siRNA sense strand
gagagcacgauuuauugug

SEQ ID NO: 1278630 - RNA, 19 nt, Homo sapiens
  misc_RNA (1)...(19): siRNA sense strand
gaaguauuugaguaucuug

SEQ ID NO: 1278631 - RNA, 19 nt, Homo sapiens
  misc_RNA (1)...(19): siRNA sense strand
ggcuaccugucucagauga

SEQ ID NO: 1278632 - RNA, 19 nt, Homo sapiens
  misc_RNA (1)...(19): siRNA sense strand
gauaucaggauuuggaaaa

SEQ ID NO: 1278633 - RNA, 19 nt, Homo sapiens
  misc_RNA (1)...(19): siRNA sense strand
ccucuugccacccauacua

SEQ ID NO: 1278634 - RNA, 19 nt, Homo sapiens
  misc_RNA (1)...(19): siRNA sense strand
ccaugguguugcugcugua

SEQ ID NO: 1278635 - RNA, 19 nt, Homo sapiens
  misc_RNA (1)...(19): siRNA sense strand
cagaugacgccuguuauag

SEQ ID NO: 1278636 - RNA, 19 nt, Homo sapiens
  misc_RNA (1)...(19): siRNA sense strand
cagaugguggagcugaaua

SEQ ID NO: 1278637 - RNA, 19 nt, Homo sapiens
  misc_RNA (1)...(19): siRNA sense strand
gucauugcugugauuguua

SEQ ID NO: 1278638 - RNA, 19 nt, Homo sapiens
  misc_RNA (1)...(19): siRNA sense strand
ggagccaccaacauuugaa

SEQ ID NO: 1278639 - RNA, 19 nt, Homo sapiens
  misc_RNA (1)...(19): siRNA sense strand
uuggugaacgaguagauua

SEQ ID NO: 1278640 - RNA, 19 nt, Homo sapiens
  misc_RNA (1)...(19): siRNA sense strand
gcgcuuuccuggguugcuu

SEQ ID NO: 1278641 - RNA, 19 nt, Homo sapiens
  misc_RNA (1)...(19): siRNA sense strand
uacuacaaagcaacaguua

SEQ ID NO: 1278642 - RNA, 19 nt, Homo sapiens
  misc_RNA (1)...(19): siRNA sense strand
cuugaugcaguaacuuaua

SEQ ID NO: 1278643 - RNA, 19 nt, Homo sapiens
  misc_RNA (1)...(19): siRNA sense strand
aaacauguccauauauacg

SEQ ID NO: 1278644 - RNA, 19 nt, Homo sapiens
  misc_RNA (1)...(19): siRNA sense strand
guguaaaguggucaaaugu

SEQ ID NO: 1278645 - RNA, 19 nt, Homo sapiens
  misc_RNA (1)...(19): siRNA sense strand
cuuacgaguuugguuauca

SEQ ID NO: 1278646 - RNA, 19 nt, Homo sapiens
  misc_RNA (1)...(19): siRNA sense strand
uacgggauccuuuaaaugg

SEQ ID NO: 1278647 - RNA, 19 nt, Homo sapiens
  misc_RNA (1)...(19): siRNA sense strand
gcagaugguggagcugaau

SEQ ID NO: 1278648 - RNA, 19 nt, Homo sapiens
  misc_RNA (1)...(19): siRNA sense strand
aaccaaaacccuacuauga

SEQ ID NO: 1278649 - RNA, 19 nt, Homo sapiens
  misc_RNA (1)...(19): siRNA sense strand
uugaugcaguaacuuauag

SEQ ID NO: 1278650 - RNA, 19 nt, Homo sapiens
  misc_RNA (1)...(19): siRNA sense strand
ggagcugaauaugccacuu

SEQ ID NO: 1278651 - RNA, 19 nt, Homo sapiens
  misc_RNA (1)...(19): siRNA sense strand
cgauggcagcgacacaauu

SEQ ID NO: 1278652 - RNA, 19 nt, Homo sapiens
  misc_RNA (1)...(19): siRNA sense strand
gauccauuuucacuuauug

SEQ ID NO: 1278653 - RNA, 19 nt, Homo sapiens
  misc_RNA (1)...(19): siRNA sense strand
ggagagagcacgauuuauu

SEQ ID NO: 1278654 - RNA, 19 nt, Homo sapiens
  misc_RNA (1)...(19): siRNA sense strand
agagaaacauguccauaua

SEQ ID NO: 1278655 - RNA, 19 nt, Homo sapiens
  misc_RNA (1)...(19): siRNA sense strand
cagaugcacuuuauuugua

SEQ ID NO: 1278656 - RNA, 19 nt, Homo sapiens
  misc_RNA (1)...(19): siRNA sense strand
ggacuuacgaguuugguua

SEQ ID NO: 1278657 - RNA, 19 nt, Homo sapiens
  misc_RNA (1)...(19): siRNA sense strand
aaacagauaucaggauuug

SEQ ID NO: 1278658 - RNA, 19 nt, Homo sapiens
  misc_RNA (1)...(19): siRNA sense strand
cuauggagcucauugguaa

SEQ ID NO: 1278659 - RNA, 19 nt, Homo sapiens
  misc_RNA (1)...(19): siRNA sense strand
aaacacaccuuuagugaag

SEQ ID NO: 1278660 - RNA, 19 nt, Homo sapiens
  misc_RNA (1)...(19): siRNA sense strand
gaacuuaaaggaucaguag

SEQ ID NO: 1278661 - RNA, 19 nt, Homo sapiens
  misc_RNA (1)...(19): siRNA sense strand
gaaaacagauaucaggauu

SEQ ID NO: 1278662 - RNA, 19 nt, Homo sapiens
  misc_RNA (1)...(19): siRNA sense strand
uaaaggaucaguagcaauu

SEQ ID NO: 1278663 - RNA, 19 nt, Homo sapiens
  misc_RNA (1)...(19): siRNA sense strand
aaaugggacuuacgaguuu

SEQ ID NO: 1278664 - RNA, 19 nt, Homo sapiens
  misc_RNA (1)...(19): siRNA sense strand
guuaucagaugcacuuuau

SEQ ID NO: 1278665 - RNA, 19 nt, Homo sapiens
  misc_RNA (1)...(19): siRNA sense strand
gagcugaauaugccacuua

SEQ ID NO: 1278666 - RNA, 19 nt, Homo sapiens
  misc_RNA (1)...(19): siRNA sense strand
ugagauuggugaacgagua

SEQ ID NO: 1278667 - RNA, 19 nt, Homo sapiens
  misc_RNA (1)...(19): siRNA sense strand
gugaacgaguagauuauaa

SEQ ID NO: 1278668 - RNA, 19 nt, Homo sapiens
  misc_RNA (1)...(19): siRNA sense strand
gagagagcacgauuuauug

SEQ ID NO: 1278669 - RNA, 19 nt, Homo sapiens
  misc_RNA (1)...(19): siRNA sense strand
caaaugggacuuacgaguu

SEQ ID NO: 1278670 - RNA, 19 nt, Homo sapiens
  misc_RNA (1)...(19): siRNA sense strand
ggucauugcugugauuguu

SEQ ID NO: 1278671 - RNA, 19 nt, Homo sapiens
  misc_RNA (1)...(19): siRNA sense strand
ccagauccauuuucacuua

SEQ ID NO: 1278672 - RNA, 19 nt, Homo sapiens
  misc_RNA (1)...(19): siRNA sense strand
gaaggaauacuugacaguu

SEQ ID NO: 1278673 - RNA, 19 nt, Homo sapiens
  misc_RNA (1)...(19): siRNA sense strand
aaggaauacuugacaguuu

SEQ ID NO: 1278674 - RNA, 19 nt, Homo sapiens
  misc_RNA (1)...(19): siRNA sense strand
ucagaugacgccuguuaua

SEQ ID NO: 1278675 - RNA, 19 nt, Homo sapiens
  misc_RNA (1)...(19): siRNA sense strand
gaaaacacaccuuuaguga

SEQ ID NO: 1278676 - RNA, 19 nt, Homo sapiens
  misc_RNA (1)...(19): siRNA sense strand
gaugacgccuguuauagag

SEQ ID NO: 1278677 - RNA, 19 nt, Homo sapiens
  misc_RNA (1)...(19): siRNA sense strand
gagaaacauguccauauau

SEQ ID NO: 1278678 - RNA, 19 nt, Homo sapiens
  misc_RNA (1)...(19): siRNA sense strand
ccacuuaccagacuaaauc

SEQ ID NO: 1278679 - RNA, 19 nt, Homo sapiens
  misc_RNA (1)...(19): siRNA sense strand
acgaguagauuauaagugu

SEQ ID NO: 1278680 - RNA, 19 nt, Homo sapiens
  misc_RNA (1)...(19): siRNA sense strand
cuacaaagcaacaguuaug

SEQ ID NO: 1278681 - RNA, 19 nt, Homo sapiens
  misc_RNA (1)...(19): siRNA sense strand
ccaccaacauuugaagcua

SEQ ID NO: 1278682 - RNA, 19 nt, Homo sapiens
  misc_RNA (1)...(19): siRNA sense strand
uauacgggauccuuuaaau

SEQ ID NO: 1278683 - RNA, 19 nt, Homo sapiens
  misc_RNA (1)...(19): siRNA sense strand
cgaguuugguuaucagaug

SEQ ID NO: 1278684 - RNA, 19 nt, Homo sapiens
  misc_RNA (1)...(19): siRNA sense strand
gaacgaguagauuauaagu

SEQ ID NO: 1278685 - RNA, 19 nt, Homo sapiens
  misc_RNA (1)...(19): siRNA sense strand
gugaggagccaccaacauu

SEQ ID NO: 1278686 - RNA, 19 nt, Homo sapiens
  misc_RNA (1)...(19): siRNA sense strand
gauggcagcgacacaauug

SEQ ID NO: 1278687 - RNA, 19 nt, Homo sapiens
  misc_RNA (1)...(19): siRNA sense strand
ucucagaugacgccuguua

SEQ ID NO: 1278688 - RNA, 19 nt, Homo sapiens
  misc_RNA (1)...(19): siRNA sense strand
gaggagccaccaacauuug

SEQ ID NO: 1278689 - RNA, 19 nt, Homo sapiens
  misc_RNA (1)...(19): siRNA sense strand
gcuauggagcucauuggua

SEQ ID NO: 1278690 - RNA, 19 nt, Homo sapiens
  misc_RNA (1)...(19): siRNA sense strand
acacaccuuuagugaagua

SEQ ID NO: 1278691 - RNA, 19 nt, Homo sapiens
  misc_RNA (1)...(19): siRNA sense strand
uagagaaacauguccauau

SEQ ID NO: 1278692 - RNA, 19 nt, Homo sapiens
  misc_RNA (1)...(19): siRNA sense strand
guuccaaagugucuuaaag

SEQ ID NO: 1278693 - RNA, 19 nt, Homo sapiens
  misc_RNA (1)...(19): siRNA sense strand
ggugaacgaguagauuaua

SEQ ID NO: 1278694 - RNA, 19 nt, Homo sapiens
  misc_RNA (1)...(19): siRNA sense strand
gaaguagaaguauuugagu

SEQ ID NO: 1278695 - RNA, 19 nt, Homo sapiens
  misc_RNA (1)...(19): siRNA sense strand
gaaacauguccauauauac

SEQ ID NO: 1278696 - RNA, 19 nt, Homo sapiens
  misc_RNA (1)...(19): siRNA sense strand
ugacgccuguuauagagaa

SEQ ID NO: 1278697 - RNA, 19 nt, Homo sapiens
  misc_RNA (1)...(19): siRNA sense strand
cgaguagauuauaagugua

SEQ ID NO: 1278698 - RNA, 19 nt, Homo sapiens
  misc_RNA (1)...(19): siRNA sense strand
gcacuuuauuuguaaugag

SEQ ID NO: 1278699 - RNA, 19 nt, Homo sapiens
  misc_RNA (1)...(19): siRNA sense strand
guagaaguauuugaguauc

SEQ ID NO: 1278700 - RNA, 19 nt, Homo sapiens
  misc_RNA (1)...(19): siRNA sense strand
guauuugaguaucuugaug

SEQ ID NO: 1278701 - RNA, 19 nt, Homo sapiens
  misc_RNA (1)...(19): siRNA sense strand
aggaauacuugacaguuug

SEQ ID NO: 1278702 - RNA, 19 nt, Homo sapiens
  misc_RNA (1)...(19): siRNA sense strand
ccaaaacccuacuaugaga

SEQ ID NO: 1278703 - RNA, 19 nt, Homo sapiens
  misc_RNA (1)...(19): siRNA sense strand
aguguaaaguggucaaaug

SEQ ID NO: 1278704 - RNA, 19 nt, Homo sapiens
  misc_RNA (1)...(19): siRNA sense strand
ccacccauacuauuuguga

SEQ ID NO: 1278705 - RNA, 19 nt, Homo sapiens
  misc_RNA (1)...(19): siRNA sense strand
uuggagagagcacgauuua

SEQ ID NO: 1278706 - RNA, 19 nt, Homo sapiens
  misc_RNA (1)...(19): siRNA sense strand
gguuaucagaugcacuuua

SEQ ID NO: 1278707 - RNA, 19 nt, Homo sapiens
  misc_RNA (1)...(19): siRNA sense strand
caccaacauuugaagcuau

SEQ ID NO: 1278708 - RNA, 19 nt, Homo sapiens
  misc_RNA (1)...(19): siRNA sense strand
ugaggagccaccaacauuu

SEQ ID NO: 1278709 - RNA, 19 nt, Homo sapiens
  misc_RNA (1)...(19): siRNA sense strand
ggaaggaauacuugacagu

SEQ ID NO: 1278710 - RNA, 19 nt, Homo sapiens
  misc_RNA (1)...(19): siRNA sense strand
gaggaaggaauacuugaca

SEQ ID NO: 1278711 - RNA, 19 nt, Homo sapiens
  misc_RNA (1)...(19): siRNA sense strand
ccaguuccaaagugucuua

SEQ ID NO: 1278712 - RNA, 19 nt, Homo sapiens
  misc_RNA (1)...(19): siRNA sense strand
ugaguaucuugaugcagua

SEQ ID NO: 1278713 - RNA, 19 nt, Homo sapiens
  misc_RNA (1)...(19): siRNA sense strand
caccuuuagugaaguagaa

SEQ ID NO: 1278714 - RNA, 19 nt, Homo sapiens
  misc_RNA (1)...(19): siRNA sense strand
acagauaucaggauuugga

SEQ ID NO: 1278715 - RNA, 19 nt, Homo sapiens
  misc_RNA (1)...(19): siRNA sense strand
ucauugcugugauuguuau

SEQ ID NO: 1278716 - RNA, 19 nt, Homo sapiens
  misc_RNA (1)...(19): siRNA sense strand
ucagaugcacuuuauuugu

SEQ ID NO: 1278717 - RNA, 19 nt, Homo sapiens
  misc_RNA (1)...(19): siRNA sense strand
gugcugcuccagaguguaa

SEQ ID NO: 1278718 - RNA, 19 nt, Homo sapiens
  misc_RNA (1)...(19): siRNA sense strand
ggaaaacacaccuuuagug

SEQ ID NO: 1278719 - RNA, 19 nt, Homo sapiens
  misc_RNA (1)...(19): siRNA sense strand
aaggaucaguagcaauuug

SEQ ID NO: 1278720 - RNA, 19 nt, Homo sapiens
  misc_RNA (1)...(19): siRNA sense strand
uauauacgggauccuuuaa

SEQ ID NO: 1278721 - RNA, 19 nt, Homo sapiens
  misc_RNA (1)...(19): siRNA sense strand
ugaaguagaaguauuugag

SEQ ID NO: 1278722 - RNA, 19 nt, Homo sapiens
  misc_RNA (1)...(19): siRNA sense strand
cuugacaguuuggauguuu

SEQ ID NO: 1278723 - RNA, 19 nt, Homo sapiens
  misc_RNA (1)...(19): siRNA sense strand
cauauauacgggauccuuu

SEQ ID NO: 1278724 - RNA, 19 nt, Homo sapiens
  misc_RNA (1)...(19): siRNA sense strand
auauauacgggauccuuua

SEQ ID NO: 1278725 - RNA, 19 nt, Homo sapiens
  misc_RNA (1)...(19): siRNA sense strand
cuuaaaggaucaguagcaa

SEQ ID NO: 1278726 - RNA, 19 nt, Homo sapiens
  misc_RNA (1)...(19): siRNA sense strand
uaaaccugaggaaggaaua

SEQ ID NO: 1278727 - RNA, 19 nt, Homo sapiens
  misc_RNA (1)...(19): siRNA sense strand
agaugacgccuguuauaga

SEQ ID NO: 1278728 - RNA, 19 nt, Homo sapiens
  misc_RNA (1)...(19): siRNA sense strand
ugugauuguuauugccaua

SEQ ID NO: 1278729 - RNA, 19 nt, Homo sapiens
  misc_RNA (1)...(19): siRNA sense strand
gagagcacgauuuauugug

SEQ ID NO: 1278730 - RNA, 19 nt, Homo sapiens
  misc_RNA (1)...(19): siRNA sense strand
gaaguauuugaguaucuug

SEQ ID NO: 1278731 - RNA, 19 nt, Homo sapiens
  misc_RNA (1)...(19): siRNA sense strand
ggcuaccugucucagauga

SEQ ID NO: 1278732 - RNA, 19 nt, Homo sapiens
  misc_RNA (1)...(19): siRNA sense strand
gauaucaggauuuggaaaa

SEQ ID NO: 1278733 - RNA, 19 nt, Homo sapiens
  misc_RNA (1)...(19): siRNA sense strand
ccucuugccacccauacua

SEQ ID NO: 1278734 - RNA, 19 nt, Homo sapiens
  misc_RNA (1)...(19): siRNA sense strand
ccaugguguugcugcugua

SEQ ID NO: 1278735 - RNA, 19 nt, Homo sapiens
  misc_RNA (1)...(19): siRNA sense strand
cagaugacgccuguuauag

SEQ ID NO: 1278736 - RNA, 19 nt, Homo sapiens
  misc_RNA (1)...(19): siRNA sense strand
cagaugguggagcugaaua

SEQ ID NO: 1278737 - RNA, 19 nt, Homo sapiens
  misc_RNA (1)...(19): siRNA sense strand
gucauugcugugauuguua

SEQ ID NO: 1278738 - RNA, 19 nt, Homo sapiens
  misc_RNA (1)...(19): siRNA sense strand
ggagccaccaacauuugaa

SEQ ID NO: 1278739 - RNA, 19 nt, Homo sapiens
  misc_RNA (1)...(19): siRNA sense strand
uuggugaacgaguagauua

SEQ ID NO: 1278740 - RNA, 19 nt, Homo sapiens
  misc_RNA (1)...(19): siRNA sense strand
gcgcuuuccuggguugcuu

SEQ ID NO: 1278741 - RNA, 19 nt, Homo sapiens
  misc_RNA (1)...(19): siRNA sense strand
uacuacaaagcaacaguua

SEQ ID NO: 1278742 - RNA, 19 nt, Homo sapiens
  misc_RNA (1)...(19): siRNA sense strand
cuugaugcaguaacuuaua

SEQ ID NO: 1278743 - RNA, 19 nt, Homo sapiens
  misc_RNA (1)...(19): siRNA sense strand
aaacauguccauauauacg

SEQ ID NO: 1278744 - RNA, 19 nt, Homo sapiens
  misc_RNA (1)...(19): siRNA sense strand
guguaaaguggucaaaugu

SEQ ID NO: 1278745 - RNA, 19 nt, Homo sapiens
  misc_RNA (1)...(19): siRNA sense strand
cuuacgaguuugguuauca

SEQ ID NO: 1278746 - RNA, 19 nt, Homo sapiens
  misc_RNA (1)...(19): siRNA sense strand
uacgggauccuuuaaaugg

SEQ ID NO: 1278747 - RNA, 19 nt, Homo sapiens
  misc_RNA (1)...(19): siRNA sense strand
gcagaugguggagcugaau

SEQ ID NO: 1278748 - RNA, 19 nt, Homo sapiens
  misc_RNA (1)...(19): siRNA sense strand
aaccaaaacccuacuauga

SEQ ID NO: 1278749 - RNA, 19 nt, Homo sapiens
  misc_RNA (1)...(19): siRNA sense strand
uugaugcaguaacuuauag

SEQ ID NO: 1278750 - RNA, 19 nt, Homo sapiens
  misc_RNA (1)...(19): siRNA sense strand
ggagcugaauaugccacuu

SEQ ID NO: 1278751 - RNA, 19 nt, Homo sapiens
  misc_RNA (1)...(19): siRNA sense strand
cgauggcagcgacacaauu

SEQ ID NO: 1278752 - RNA, 19 nt, Homo sapiens
  misc_RNA (1)...(19): siRNA sense strand
gauccauuuucacuuauug

SEQ ID NO: 1278753 - RNA, 19 nt, Homo sapiens
  misc_RNA (1)...(19): siRNA sense strand
aaaggucagugaaguuuaa

SEQ ID NO: 1278754 - RNA, 19 nt, Homo sapiens
  misc_RNA (1)...(19): siRNA sense strand
gguaucaccuggaugagau

SEQ ID NO: 1278755 - RNA, 19 nt, Homo sapiens
  misc_RNA (1)...(19): siRNA sense strand
gaaaaggucagugaaguuu

SEQ ID NO: 1278756 - RNA, 19 nt, Homo sapiens
  misc_RNA (1)...(19): siRNA sense strand
gggcagaucgguaauagag

SEQ ID NO: 1278757 - RNA, 19 nt, Homo sapiens
  misc_RNA (1)...(19): siRNA sense strand
aagccaagcugcagaagca

SEQ ID NO: 1278758 - RNA, 19 nt, Homo sapiens
  misc_RNA (1)...(19): siRNA sense strand
ggauggguaucaccuggau

SEQ ID NO: 1278759 - RNA, 19 nt, Homo sapiens
  misc_RNA (1)...(19): siRNA sense strand
gaaccgcccagacucuuca

SEQ ID NO: 1278760 - RNA, 19 nt, Homo sapiens
  misc_RNA (1)...(19): siRNA sense strand
gcccauggccucuucaaca

SEQ ID NO: 1278761 - RNA, 19 nt, Homo sapiens
  misc_RNA (1)...(19): siRNA sense strand
cccagacucuucagggaaa

SEQ ID NO: 1278762 - RNA, 19 nt, Homo sapiens
  misc_RNA (1)...(19): siRNA sense strand
ggucagugaaguuuaacaa

SEQ ID NO: 1278763 - RNA, 19 nt, Homo sapiens
  misc_RNA (1)...(19): siRNA sense strand
caagggcuauacugcucuu

SEQ ID NO: 1278764 - RNA, 19 nt, Homo sapiens
  misc_RNA (1)...(19): siRNA sense strand
gcgcgcacccuccauucaa

SEQ ID NO: 1278765 - RNA, 19 nt, Homo sapiens
  misc_RNA (1)...(19): siRNA sense strand
cuaagcccauggccucuuc

SEQ ID NO: 1278766 - RNA, 19 nt, Homo sapiens
  misc_RNA (1)...(19): siRNA sense strand
ccucgacucugacagugau

SEQ ID NO: 1278767 - RNA, 19 nt, Homo sapiens
  misc_RNA (1)...(19): siRNA sense strand
uagccagaguccagaugaa

SEQ ID NO: 1278768 - RNA, 19 nt, Homo sapiens
  misc_RNA (1)...(19): siRNA sense strand
ggaaaaggucagugaaguu

SEQ ID NO: 1278769 - RNA, 19 nt, Homo sapiens
  misc_RNA (1)...(19): siRNA sense strand
gggaaaaggucagugaagu

SEQ ID NO: 1278770 - RNA, 19 nt, Homo sapiens
  misc_RNA (1)...(19): siRNA sense strand
uggugucccucgacucuga

SEQ ID NO: 1278771 - RNA, 19 nt, Homo sapiens
  misc_RNA (1)...(19): siRNA sense strand
cccauggccucuucaacau

SEQ ID NO: 1278772 - RNA, 19 nt, Homo sapiens
  misc_RNA (1)...(19): siRNA sense strand
ccgggcagaucgguaauag

SEQ ID NO: 1278773 - RNA, 19 nt, Homo sapiens
  misc_RNA (1)...(19): siRNA sense strand
caggugaaccaggauguga

SEQ ID NO: 1278774 - RNA, 19 nt, Homo sapiens
  misc_RNA (1)...(19): siRNA sense strand
ggaugagauuccagaugac

SEQ ID NO: 1278775 - RNA, 19 nt, Homo sapiens
  misc_RNA (1)...(19): siRNA sense strand
aaaggucagugaaguuuaa

SEQ ID NO: 1278776 - RNA, 19 nt, Homo sapiens
  misc_RNA (1)...(19): siRNA sense strand
gguaucaccuggaugagau

SEQ ID NO: 1278777 - RNA, 19 nt, Homo sapiens
  misc_RNA (1)...(19): siRNA sense strand
gaaaaggucagugaaguuu

SEQ ID NO: 1278778 - RNA, 19 nt, Homo sapiens
  misc_RNA (1)...(19): siRNA sense strand
gggcagaucgguaauagag

SEQ ID NO: 1278779 - RNA, 19 nt, Homo sapiens
  misc_RNA (1)...(19): siRNA sense strand
aagccaagcugcagaagca

SEQ ID NO: 1278780 - RNA, 19 nt, Homo sapiens
  misc_RNA (1)...(19): siRNA sense strand
ggauggguaucaccuggau

SEQ ID NO: 1278781 - RNA, 19 nt, Homo sapiens
  misc_RNA (1)...(19): siRNA sense strand
gaaccgcccagacucuuca

SEQ ID NO: 1278782 - RNA, 19 nt, Homo sapiens
  misc_RNA (1)...(19): siRNA sense strand
gcccauggccucuucaaca

SEQ ID NO: 1278783 - RNA, 19 nt, Homo sapiens
  misc_RNA (1)...(19): siRNA sense strand
cccagacucuucagggaaa

SEQ ID NO: 1278784 - RNA, 19 nt, Homo sapiens
  misc_RNA (1)...(19): siRNA sense strand
ggucagugaaguuuaacaa

SEQ ID NO: 1278785 - RNA, 19 nt, Homo sapiens
  misc_RNA (1)...(19): siRNA sense strand
caagggcuauacugcucuu

SEQ ID NO: 1278786 - RNA, 19 nt, Homo sapiens
  misc_RNA (1)...(19): siRNA sense strand
gcgcgcacccuccauucaa

SEQ ID NO: 1278787 - RNA, 19 nt, Homo sapiens
  misc_RNA (1)...(19): siRNA sense strand
cuaagcccauggccucuuc

SEQ ID NO: 1278788 - RNA, 19 nt, Homo sapiens
  misc_RNA (1)...(19): siRNA sense strand
ccucgacucugacagugau

SEQ ID NO: 1278789 - RNA, 19 nt, Homo sapiens
  misc_RNA (1)...(19): siRNA sense strand
uagccagaguccagaugaa

SEQ ID NO: 1278790 - RNA, 19 nt, Homo sapiens
  misc_RNA (1)...(19): siRNA sense strand
ggaaaaggucagugaaguu

SEQ ID NO: 1278791 - RNA, 19 nt, Homo sapiens
  misc_RNA (1)...(19): siRNA sense strand
gggaaaaggucagugaagu

SEQ ID NO: 1278792 - RNA, 19 nt, Homo sapiens
  misc_RNA (1)...(19): siRNA sense strand
uggugucccucgacucuga

SEQ ID NO: 1278793 - RNA, 19 nt, Homo sapiens
  misc_RNA (1)...(19): siRNA sense strand
cccauggccucuucaacau

SEQ ID NO: 1278794 - RNA, 19 nt, Homo sapiens
  misc_RNA (1)...(19): siRNA sense strand
ccgggcagaucgguaauag

SEQ ID NO: 1278795 - RNA, 19 nt, Homo sapiens
  misc_RNA (1)...(19): siRNA sense strand
caggugaaccaggauguga

SEQ ID NO: 1278796 - RNA, 19 nt, Homo sapiens
  misc_RNA (1)...(19): siRNA sense strand
ggaugagauuccagaugac

SEQ ID NO: 1278797 - RNA, 19 nt, Homo sapiens
  misc_RNA (1)...(19): siRNA sense strand
gagcaaagauggcuuccua

SEQ ID NO: 1278798 - RNA, 19 nt, Homo sapiens
  misc_RNA (1)...(19): siRNA sense strand
caacuucccuggcucaauu

SEQ ID NO: 1278799 - RNA, 19 nt, Homo sapiens
  misc_RNA (1)...(19): siRNA sense strand
ucaagaaggucuccuacuu

SEQ ID NO: 1278800 - RNA, 19 nt, Homo sapiens
  misc_RNA (1)...(19): siRNA sense strand
gcaaggaggucaucaucca

SEQ ID NO: 1278801 - RNA, 19 nt, Homo sapiens
  misc_RNA (1)...(19): siRNA sense strand
ccagugagcugagcauguu

SEQ ID NO: 1278802 - RNA, 19 nt, Homo sapiens
  misc_RNA (1)...(19): siRNA sense strand
ugaaggagcuggaggaacu

SEQ ID NO: 1278803 - RNA, 19 nt, Homo sapiens
  misc_RNA (1)...(19): siRNA sense strand
ggugagcccugguggauca

SEQ ID NO: 1278804 - RNA, 19 nt, Homo sapiens
  misc_RNA (1)...(19): siRNA sense strand
gaccaguccugcugagguu

SEQ ID NO: 1278805 - RNA, 19 nt, Homo sapiens
  misc_RNA (1)...(19): siRNA sense strand
uggaggaacugcagaacaa

SEQ ID NO: 1278806 - RNA, 19 nt, Homo sapiens
  misc_RNA (1)...(19): siRNA sense strand
ucaaacccauugcugagaa

SEQ ID NO: 1278807 - RNA, 19 nt, Homo sapiens
  misc_RNA (1)...(19): siRNA sense strand
ucacaucaaugccaacuac

SEQ ID NO: 1278808 - RNA, 19 nt, Homo sapiens
  misc_RNA (1)...(19): siRNA sense strand
ggcaggaacuggcgcugaa

SEQ ID NO: 1278809 - RNA, 19 nt, Homo sapiens
  misc_RNA (1)...(19): siRNA sense strand
gccugcaccuggagaagua

SEQ ID NO: 1278810 - RNA, 19 nt, Homo sapiens
  misc_RNA (1)...(19): siRNA sense strand
cuacuacacugugauguuc

SEQ ID NO: 1278811 - RNA, 19 nt, Homo sapiens
  misc_RNA (1)...(19): siRNA sense strand
gaacucgucccaccagaag

SEQ ID NO: 1278812 - RNA, 19 nt, Homo sapiens
  misc_RNA (1)...(19): siRNA sense strand
gccuggagguggccaugua

SEQ ID NO: 1278813 - RNA, 19 nt, Homo sapiens
  misc_RNA (1)...(19): siRNA sense strand
gaggagacgcucaccauag

SEQ ID NO: 1278814 - RNA, 19 nt, Homo sapiens
  misc_RNA (1)...(19): siRNA sense strand
aggagacgcucaccauaga

SEQ ID NO: 1278815 - RNA, 19 nt, Homo sapiens
  misc_RNA (1)...(19): siRNA sense strand
agacuguccuggaaaguuc

SEQ ID NO: 1278816 - RNA, 19 nt, Homo sapiens
  misc_RNA (1)...(19): siRNA sense strand
aaccacaggucucugaaug

SEQ ID NO: 1278817 - RNA, 19 nt, Homo sapiens
  misc_RNA (1)...(19): siRNA sense strand
ccgaggaaaucgagagcaa

SEQ ID NO: 1278818 - RNA, 19 nt, Homo sapiens
  misc_RNA (1)...(19): siRNA sense strand
gaggaaaucgagagcaauc

SEQ ID NO: 1278819 - RNA, 19 nt, Homo sapiens
  misc_RNA (1)...(19): siRNA sense strand
cgaggagacgcucaccaua

SEQ ID NO: 1278820 - RNA, 19 nt, Homo sapiens
  misc_RNA (1)...(19): siRNA sense strand
gggagacuguccuggaaag

SEQ ID NO: 1278821 - RNA, 19 nt, Homo sapiens
  misc_RNA (1)...(19): siRNA sense strand
ccacaucauccucuccaaa

SEQ ID NO: 1278822 - RNA, 19 nt, Homo sapiens
  misc_RNA (1)...(19): siRNA sense strand
caucaaugccaacuacuuc

SEQ ID NO: 1278823 - RNA, 19 nt, Homo sapiens
  misc_RNA (1)...(19): siRNA sense strand
cagcuucucauccaccuuu

SEQ ID NO: 1278824 - RNA, 19 nt, Homo sapiens
  misc_RNA (1)...(19): siRNA sense strand
gagacuguccuggaaaguu

SEQ ID NO: 1278825 - RNA, 19 nt, Homo sapiens
  misc_RNA (1)...(19): siRNA sense strand
gcaccgugguccaucacau

SEQ ID NO: 1278826 - RNA, 19 nt, Homo sapiens
  misc_RNA (1)...(19): siRNA sense strand
caucagcgacuucuacuac

SEQ ID NO: 1278827 - RNA, 19 nt, Homo sapiens
  misc_RNA (1)...(19): siRNA sense strand
ggacauggaguggcuuuac

SEQ ID NO: 1278828 - RNA, 19 nt, Homo sapiens
  misc_RNA (1)...(19): siRNA sense strand
ccuggucccuggugaagga

SEQ ID NO: 1278829 - RNA, 19 nt, Homo sapiens
  misc_RNA (1)...(19): siRNA sense strand
ccgggagacuguccuggaa

SEQ ID NO: 1278830 - RNA, 19 nt, Homo sapiens
  misc_RNA (1)...(19): siRNA sense strand
gaacaagcuggugcacuca

SEQ ID NO: 1278831 - RNA, 19 nt, Homo sapiens
  misc_RNA (1)...(19): siRNA sense strand
caccauagaagcccgauuc

SEQ ID NO: 1278832 - RNA, 19 nt, Homo sapiens
  misc_RNA (1)...(19): siRNA sense strand
gguggacaucggcuacaua

SEQ ID NO: 1278833 - RNA, 19 nt, Homo sapiens
  misc_RNA (1)...(19): siRNA sense strand
gaagcuaacagggucuugu

SEQ ID NO: 1278834 - RNA, 19 nt, Homo sapiens
  misc_RNA (1)...(19): siRNA sense strand
ggaggaacugcagaacaaa

SEQ ID NO: 1278835 - RNA, 19 nt, Homo sapiens
  misc_RNA (1)...(19): siRNA sense strand
gaugaggauggcagcauga

SEQ ID NO: 1278836 - RNA, 19 nt, Homo sapiens
  misc_RNA (1)...(19): siRNA sense strand
caacauggagguggacauc

SEQ ID NO: 1278837 - RNA, 19 nt, Homo sapiens
  misc_RNA (1)...(19): siRNA sense strand
ccucggcccuuugugaaga

SEQ ID NO: 1278838 - RNA, 19 nt, Homo sapiens
  misc_RNA (1)...(19): siRNA sense strand
gggcaaggaggucaucauc

SEQ ID NO: 1278839 - RNA, 19 nt, Homo sapiens
  misc_RNA (1)...(19): siRNA sense strand
ccggauccaugccgaguuc

SEQ ID NO: 1278840 - RNA, 19 nt, Homo sapiens
  misc_RNA (1)...(19): siRNA sense strand
gaggaguucaaacccauug

SEQ ID NO: 1278841 - RNA, 19 nt, Homo sapiens
  misc_RNA (1)...(19): siRNA sense strand
gcuacgaggaggaggaguu

SEQ ID NO: 1278842 - RNA, 19 nt, Homo sapiens
  misc_RNA (1)...(19): siRNA sense strand
gaccaugaccaagagcaaa

SEQ ID NO: 1278843 - RNA, 19 nt, Homo sapiens
  misc_RNA (1)...(19): siRNA sense strand
gcgaggagacgcucaccau

SEQ ID NO: 1278844 - RNA, 19 nt, Homo sapiens
  misc_RNA (1)...(19): siRNA sense strand
caaugccaacuacuucuug

SEQ ID NO: 1278845 - RNA, 19 nt, Homo sapiens
  misc_RNA (1)...(19): siRNA sense strand
guuccacccucggcccuuu

SEQ ID NO: 1278846 - RNA, 19 nt, Homo sapiens
  misc_RNA (1)...(19): siRNA sense strand
ucacugcagccucaacuuc

SEQ ID NO: 1278847 - RNA, 19 nt, Homo sapiens
  misc_RNA (1)...(19): siRNA sense strand
cuggcuaccuguccaacaa

SEQ ID NO: 1278848 - RNA, 19 nt, Homo sapiens
  misc_RNA (1)...(19): siRNA sense strand
ggagacgcucaccauagaa

SEQ ID NO: 1278849 - RNA, 19 nt, Homo sapiens
  misc_RNA (1)...(19): siRNA sense strand
ccggagaccaugaccaaga

SEQ ID NO: 1278850 - RNA, 19 nt, Homo sapiens
  misc_RNA (1)...(19): siRNA sense strand
cgugguccaucacaucaau

SEQ ID NO: 1278851 - RNA, 19 nt, Homo sapiens
  misc_RNA (1)...(19): siRNA sense strand
acaagcuggugcacucaau

SEQ ID NO: 1278852 - RNA, 19 nt, Homo sapiens
  misc_RNA (1)...(19): siRNA sense strand
ugacugccaucagcgacuu

SEQ ID NO: 1278853 - RNA, 19 nt, Homo sapiens
  misc_RNA (1)...(19): siRNA sense strand
caaacccauugcugagaag

SEQ ID NO: 1278854 - RNA, 19 nt, Homo sapiens
  misc_RNA (1)...(19): siRNA sense strand
guccaacaaccgcuucuau

SEQ ID NO: 1278855 - RNA, 19 nt, Homo sapiens
  misc_RNA (1)...(19): siRNA sense strand
ucucauccaccuuugaaga

SEQ ID NO: 1278856 - RNA, 19 nt, Homo sapiens
  misc_RNA (1)...(19): siRNA sense strand
acaucauccucuccaaaga

SEQ ID NO: 1278857 - RNA, 19 nt, Homo sapiens
  misc_RNA (1)...(19): siRNA sense strand
gacuucuacuacacuguga

SEQ ID NO: 1278858 - RNA, 19 nt, Homo sapiens
  misc_RNA (1)...(19): siRNA sense strand
ugaucugccugcccaaugg

SEQ ID NO: 1278859 - RNA, 19 nt, Homo sapiens
  misc_RNA (1)...(19): siRNA sense strand
caaccacaggucucugaau

SEQ ID NO: 1278860 - RNA, 19 nt, Homo sapiens
  misc_RNA (1)...(19): siRNA sense strand
cggagaccaugaccaagag

SEQ ID NO: 1278861 - RNA, 19 nt, Homo sapiens
  misc_RNA (1)...(19): siRNA sense strand
ccuacuugccguucacuga

SEQ ID NO: 1278862 - RNA, 19 nt, Homo sapiens
  misc_RNA (1)...(19): siRNA sense strand
gacauggaguggcuuuacg

SEQ ID NO: 1278863 - RNA, 19 nt, Homo sapiens
  misc_RNA (1)...(19): siRNA sense strand
acccauugcugagaagcua

SEQ ID NO: 1278864 - RNA, 19 nt, Homo sapiens
  misc_RNA (1)...(19): siRNA sense strand
ccgugaagcccgaggaaau

SEQ ID NO: 1278865 - RNA, 19 nt, Homo sapiens
  misc_RNA (1)...(19): siRNA sense strand
gagacgcucaccauagaag

SEQ ID NO: 1278866 - RNA, 19 nt, Homo sapiens
  misc_RNA (1)...(19): siRNA sense strand
cucaccaagugcaguguuu

SEQ ID NO: 1278867 - RNA, 19 nt, Homo sapiens
  misc_RNA (1)...(19): siRNA sense strand
ccaccuacaugcaguuccu

SEQ ID NO: 1278868 - RNA, 19 nt, Homo sapiens
  misc_RNA (1)...(19): siRNA sense strand
ucaguucaccggccacauc

SEQ ID NO: 1278869 - RNA, 19 nt, Homo sapiens
  misc_RNA (1)...(19): siRNA sense strand
cagauucacuuuauaggaa

SEQ ID NO: 1278870 - RNA, 19 nt, Homo sapiens
  misc_RNA (1)...(19): siRNA sense strand
gcagauucacuuuauagga

SEQ ID NO: 1278871 - RNA, 19 nt, Homo sapiens
  misc_RNA (1)...(19): siRNA sense strand
aaacugaauucuccaacag

SEQ ID NO: 1278872 - RNA, 19 nt, Homo sapiens
  misc_RNA (1)...(19): siRNA sense strand
cacugucacuccucagaaa

SEQ ID NO: 1278873 - RNA, 19 nt, Homo sapiens
  misc_RNA (1)...(19): siRNA sense strand
ucacuccucagaaagcuaa

SEQ ID NO: 1278874 - RNA, 19 nt, Homo sapiens
  misc_RNA (1)...(19): siRNA sense strand
gugcagauucacuuuauag

SEQ ID NO: 1278875 - RNA, 19 nt, Homo sapiens
  misc_RNA (1)...(19): siRNA sense strand
ggacgcgcugugcgaguuu

SEQ ID NO: 1278876 - RNA, 19 nt, Homo sapiens
  misc_RNA (1)...(19): siRNA sense strand
cauugcugaucuugacaaa

SEQ ID NO: 1278877 - RNA, 19 nt, Homo sapiens
  misc_RNA (1)...(19): siRNA sense strand
gcaccuggagcgcaugaag

SEQ ID NO: 1278878 - RNA, 19 nt, Homo sapiens
  misc_RNA (1)...(19): siRNA sense strand
ccacugucacuccucagaa

SEQ ID NO: 1278879 - RNA, 19 nt, Homo sapiens
  misc_RNA (1)...(19): siRNA sense strand
cuucauugcugaucuugac

SEQ ID NO: 1278880 - RNA, 19 nt, Homo sapiens
  misc_RNA (1)...(19): siRNA sense strand
gagcaccuggagcgcauga

SEQ ID NO: 1278881 - RNA, 19 nt, Homo sapiens
  misc_RNA (1)...(19): siRNA sense strand
ggagagagcacgauuuauu

SEQ ID NO: 1278882 - RNA, 19 nt, Homo sapiens
  misc_RNA (1)...(19): siRNA sense strand
agagaaacauguccauaua

SEQ ID NO: 1278883 - RNA, 19 nt, Homo sapiens
  misc_RNA (1)...(19): siRNA sense strand
cagaugcacuuuauuugua

SEQ ID NO: 1278884 - RNA, 19 nt, Homo sapiens
  misc_RNA (1)...(19): siRNA sense strand
ggacuuacgaguuugguua

SEQ ID NO: 1278885 - RNA, 19 nt, Homo sapiens
  misc_RNA (1)...(19): siRNA sense strand
aaacagauaucaggauuug

SEQ ID NO: 1278886 - RNA, 19 nt, Homo sapiens
  misc_RNA (1)...(19): siRNA sense strand
cuauggagcucauugguaa

SEQ ID NO: 1278887 - RNA, 19 nt, Homo sapiens
  misc_RNA (1)...(19): siRNA sense strand
aaacacaccuuuagugaag

SEQ ID NO: 1278888 - RNA, 19 nt, Homo sapiens
  misc_RNA (1)...(19): siRNA sense strand
gaacuuaaaggaucaguag

SEQ ID NO: 1278889 - RNA, 19 nt, Homo sapiens
  misc_RNA (1)...(19): siRNA sense strand
gaaaacagauaucaggauu

SEQ ID NO: 1278890 - RNA, 19 nt, Homo sapiens
  misc_RNA (1)...(19): siRNA sense strand
uaaaggaucaguagcaauu

SEQ ID NO: 1278891 - RNA, 19 nt, Homo sapiens
  misc_RNA (1)...(19): siRNA sense strand
aaaugggacuuacgaguuu

SEQ ID NO: 1278892 - RNA, 19 nt, Homo sapiens
  misc_RNA (1)...(19): siRNA sense strand
guuaucagaugcacuuuau

SEQ ID NO: 1278893 - RNA, 19 nt, Homo sapiens
  misc_RNA (1)...(19): siRNA sense strand
ugagauuggugaacgagua

SEQ ID NO: 1278894 - RNA, 19 nt, Homo sapiens
  misc_RNA (1)...(19): siRNA sense strand
gugaacgaguagauuauaa

SEQ ID NO: 1278895 - RNA, 19 nt, Homo sapiens
  misc_RNA (1)...(19): siRNA sense strand
gagagagcacgauuuauug

SEQ ID NO: 1278896 - RNA, 19 nt, Homo sapiens
  misc_RNA (1)...(19): siRNA sense strand
caaaugggacuuacgaguu

SEQ ID NO: 1278897 - RNA, 19 nt, Homo sapiens
  misc_RNA (1)...(19): siRNA sense strand
ggucauugcugugauuguu

SEQ ID NO: 1278898 - RNA, 19 nt, Homo sapiens
  misc_RNA (1)...(19): siRNA sense strand
ccagauccauuuucacuua

SEQ ID NO: 1278899 - RNA, 19 nt, Homo sapiens
  misc_RNA (1)...(19): siRNA sense strand
gaaggaauacuugacaguu

SEQ ID NO: 1278900 - RNA, 19 nt, Homo sapiens
  misc_RNA (1)...(19): siRNA sense strand
aaggaauacuugacaguuu

SEQ ID NO: 1278901 - RNA, 19 nt, Homo sapiens
  misc_RNA (1)...(19): siRNA sense strand
ucagaugacgccuguuaua

SEQ ID NO: 1278902 - RNA, 19 nt, Homo sapiens
  misc_RNA (1)...(19): siRNA sense strand
gaaaacacaccuuuaguga

SEQ ID NO: 1278903 - RNA, 19 nt, Homo sapiens
  misc_RNA (1)...(19): siRNA sense strand
gaugacgccuguuauagag

SEQ ID NO: 1278904 - RNA, 19 nt, Homo sapiens
  misc_RNA (1)...(19): siRNA sense strand
gagaaacauguccauauau

SEQ ID NO: 1278905 - RNA, 19 nt, Homo sapiens
  misc_RNA (1)...(19): siRNA sense strand
acgaguagauuauaagugu

SEQ ID NO: 1278906 - RNA, 19 nt, Homo sapiens
  misc_RNA (1)...(19): siRNA sense strand
cuacaaagcaacaguuaug

SEQ ID NO: 1278907 - RNA, 19 nt, Homo sapiens
  misc_RNA (1)...(19): siRNA sense strand
ccaccaacauuugaagcua

SEQ ID NO: 1278908 - RNA, 19 nt, Homo sapiens
  misc_RNA (1)...(19): siRNA sense strand
uauacgggauccuuuaaau

SEQ ID NO: 1278909 - RNA, 19 nt, Homo sapiens
  misc_RNA (1)...(19): siRNA sense strand
cgaguuugguuaucagaug

SEQ ID NO: 1278910 - RNA, 19 nt, Homo sapiens
  misc_RNA (1)...(19): siRNA sense strand
gaacgaguagauuauaagu

SEQ ID NO: 1278911 - RNA, 19 nt, Homo sapiens
  misc_RNA (1)...(19): siRNA sense strand
gugaggagccaccaacauu

SEQ ID NO: 1278912 - RNA, 19 nt, Homo sapiens
  misc_RNA (1)...(19): siRNA sense strand
gauggcagcgacacaauug

SEQ ID NO: 1278913 - RNA, 19 nt, Homo sapiens
  misc_RNA (1)...(19): siRNA sense strand
gcuauggagcucauuggua

SEQ ID NO: 1278914 - RNA, 19 nt, Homo sapiens
  misc_RNA (1)...(19): siRNA sense strand
gaggagccaccaacauuug

SEQ ID NO: 1278915 - RNA, 19 nt, Homo sapiens
  misc_RNA (1)...(19): siRNA sense strand
acacaccuuuagugaagua

SEQ ID NO: 1278916 - RNA, 19 nt, Homo sapiens
  misc_RNA (1)...(19): siRNA sense strand
ucucagaugacgccuguua

SEQ ID NO: 1278917 - RNA, 19 nt, Homo sapiens
  misc_RNA (1)...(19): siRNA sense strand
uagagaaacauguccauau

SEQ ID NO: 1278918 - RNA, 19 nt, Homo sapiens
  misc_RNA (1)...(19): siRNA sense strand
guuccaaagugucuuaaag

SEQ ID NO: 1278919 - RNA, 19 nt, Homo sapiens
  misc_RNA (1)...(19): siRNA sense strand
ggugaacgaguagauuaua

SEQ ID NO: 1278920 - RNA, 19 nt, Homo sapiens
  misc_RNA (1)...(19): siRNA sense strand
gaaguagaaguauuugagu

SEQ ID NO: 1278921 - RNA, 19 nt, Homo sapiens
  misc_RNA (1)...(19): siRNA sense strand
gaaacauguccauauauac

SEQ ID NO: 1278922 - RNA, 19 nt, Homo sapiens
  misc_RNA (1)...(19): siRNA sense strand
ugacgccuguuauagagaa

SEQ ID NO: 1278923 - RNA, 19 nt, Homo sapiens
  misc_RNA (1)...(19): siRNA sense strand
cgaguagauuauaagugua

SEQ ID NO: 1278924 - RNA, 19 nt, Homo sapiens
  misc_RNA (1)...(19): siRNA sense strand
gcacuuuauuuguaaugag

SEQ ID NO: 1278925 - RNA, 19 nt, Homo sapiens
  misc_RNA (1)...(19): siRNA sense strand
guagaaguauuugaguauc

SEQ ID NO: 1278926 - RNA, 19 nt, Homo sapiens
  misc_RNA (1)...(19): siRNA sense strand
guauuugaguaucuugaug

SEQ ID NO: 1278927 - RNA, 19 nt, Homo sapiens
  misc_RNA (1)...(19): siRNA sense strand
aggaauacuugacaguuug

SEQ ID NO: 1278928 - RNA, 19 nt, Homo sapiens
  misc_RNA (1)...(19): siRNA sense strand
ccaaaacccuacuaugaga

SEQ ID NO: 1278929 - RNA, 19 nt, Homo sapiens
  misc_RNA (1)...(19): siRNA sense strand
aguguaaaguggucaaaug

SEQ ID NO: 1278930 - RNA, 19 nt, Homo sapiens
  misc_RNA (1)...(19): siRNA sense strand
ccacccauacuauuuguga

SEQ ID NO: 1278931 - RNA, 19 nt, Homo sapiens
  misc_RNA (1)...(19): siRNA sense strand
caccaacauuugaagcuau

SEQ ID NO: 1278932 - RNA, 19 nt, Homo sapiens
  misc_RNA (1)...(19): siRNA sense strand
uuggagagagcacgauuua

SEQ ID NO: 1278933 - RNA, 19 nt, Homo sapiens
  misc_RNA (1)...(19): siRNA sense strand
gguuaucagaugcacuuua

SEQ ID NO: 1278934 - RNA, 19 nt, Homo sapiens
  misc_RNA (1)...(19): siRNA sense strand
ugaggagccaccaacauuu

SEQ ID NO: 1278935 - RNA, 19 nt, Homo sapiens
  misc_RNA (1)...(19): siRNA sense strand
ggaaggaauacuugacagu

SEQ ID NO: 1278936 - RNA, 19 nt, Homo sapiens
  misc_RNA (1)...(19): siRNA sense strand
gaggaaggaauacuugaca

SEQ ID NO: 1278937 - RNA, 19 nt, Homo sapiens
  misc_RNA (1)...(19): siRNA sense strand
ccaguuccaaagugucuua

SEQ ID NO: 1278938 - RNA, 19 nt, Homo sapiens
  misc_RNA (1)...(19): siRNA sense strand
ugaguaucuugaugcagua

SEQ ID NO: 1278939 - RNA, 19 nt, Homo sapiens
  misc_RNA (1)...(19): siRNA sense strand
caccuuuagugaaguagaa

SEQ ID NO: 1278940 - RNA, 19 nt, Homo sapiens
  misc_RNA (1)...(19): siRNA sense strand
acagauaucaggauuugga

SEQ ID NO: 1278941 - RNA, 19 nt, Homo sapiens
  misc_RNA (1)...(19): siRNA sense strand
ucauugcugugauuguuau

SEQ ID NO: 1278942 - RNA, 19 nt, Homo sapiens
  misc_RNA (1)...(19): siRNA sense strand
ucagaugcacuuuauuugu

SEQ ID NO: 1278943 - RNA, 19 nt, Homo sapiens
  misc_RNA (1)...(19): siRNA sense strand
gugcugcuccagaguguaa

SEQ ID NO: 1278944 - RNA, 19 nt, Homo sapiens
  misc_RNA (1)...(19): siRNA sense strand
ggaaaacacaccuuuagug

SEQ ID NO: 1278945 - RNA, 19 nt, Homo sapiens
  misc_RNA (1)...(19): siRNA sense strand
aaggaucaguagcaauuug

SEQ ID NO: 1278946 - RNA, 19 nt, Homo sapiens
  misc_RNA (1)...(19): siRNA sense strand
uauauacgggauccuuuaa

SEQ ID NO: 1278947 - RNA, 19 nt, Homo sapiens
  misc_RNA (1)...(19): siRNA sense strand
ugaaguagaaguauuugag

SEQ ID NO: 1278948 - RNA, 19 nt, Homo sapiens
  misc_RNA (1)...(19): siRNA sense strand
cuugacaguuuggauguuu

SEQ ID NO: 1278949 - RNA, 19 nt, Homo sapiens
  misc_RNA (1)...(19): siRNA sense strand
cauauauacgggauccuuu

SEQ ID NO: 1278950 - RNA, 19 nt, Homo sapiens
  misc_RNA (1)...(19): siRNA sense strand
auauauacgggauccuuua

SEQ ID NO: 1278951 - RNA, 19 nt, Homo sapiens
  misc_RNA (1)...(19): siRNA sense strand
cuuaaaggaucaguagcaa

SEQ ID NO: 1278952 - RNA, 19 nt, Homo sapiens
  misc_RNA (1)...(19): siRNA sense strand
uaaaccugaggaaggaaua

SEQ ID NO: 1278953 - RNA, 19 nt, Homo sapiens
  misc_RNA (1)...(19): siRNA sense strand
agaugacgccuguuauaga

SEQ ID NO: 1278954 - RNA, 19 nt, Homo sapiens
  misc_RNA (1)...(19): siRNA sense strand
ugugauuguuauugccaua

SEQ ID NO: 1278955 - RNA, 19 nt, Homo sapiens
  misc_RNA (1)...(19): siRNA sense strand
gagagcacgauuuauugug

SEQ ID NO: 1278956 - RNA, 19 nt, Homo sapiens
  misc_RNA (1)...(19): siRNA sense strand
gaaguauuugaguaucuug

SEQ ID NO: 1278957 - RNA, 19 nt, Homo sapiens
  misc_RNA (1)...(19): siRNA sense strand
ggcuaccugucucagauga

SEQ ID NO: 1278958 - RNA, 19 nt, Homo sapiens
  misc_RNA (1)...(19): siRNA sense strand
gauaucaggauuuggaaaa

SEQ ID NO: 1278959 - RNA, 19 nt, Homo sapiens
  misc_RNA (1)...(19): siRNA sense strand
ccucuugccacccauacua

SEQ ID NO: 1278960 - RNA, 19 nt, Homo sapiens
  misc_RNA (1)...(19): siRNA sense strand
ccaugguguugcugcugua

SEQ ID NO: 1278961 - RNA, 19 nt, Homo sapiens
  misc_RNA (1)...(19): siRNA sense strand
cagaugacgccuguuauag

SEQ ID NO: 1278962 - RNA, 19 nt, Homo sapiens
  misc_RNA (1)...(19): siRNA sense strand
uuggugaacgaguagauua

SEQ ID NO: 1278963 - RNA, 19 nt, Homo sapiens
  misc_RNA (1)...(19): siRNA sense strand
gucauugcugugauuguua

SEQ ID NO: 1278964 - RNA, 19 nt, Homo sapiens
  misc_RNA (1)...(19): siRNA sense strand
ggagccaccaacauuugaa

SEQ ID NO: 1278965 - RNA, 19 nt, Homo sapiens
  misc_RNA (1)...(19): siRNA sense strand
gcgcuuuccuggguugcuu

SEQ ID NO: 1278966 - RNA, 19 nt, Homo sapiens
  misc_RNA (1)...(19): siRNA sense strand
uacuacaaagcaacaguua

SEQ ID NO: 1278967 - RNA, 19 nt, Homo sapiens
  misc_RNA (1)...(19): siRNA sense strand
cuugaugcaguaacuuaua

SEQ ID NO: 1278968 - RNA, 19 nt, Homo sapiens
  misc_RNA (1)...(19): siRNA sense strand
aaacauguccauauauacg

SEQ ID NO: 1278969 - RNA, 19 nt, Homo sapiens
  misc_RNA (1)...(19): siRNA sense strand
guguaaaguggucaaaugu

SEQ ID NO: 1278970 - RNA, 19 nt, Homo sapiens
  misc_RNA (1)...(19): siRNA sense strand
cuuacgaguuugguuauca

SEQ ID NO: 1278971 - RNA, 19 nt, Homo sapiens
  misc_RNA (1)...(19): siRNA sense strand
uacgggauccuuuaaaugg

SEQ ID NO: 1278972 - RNA, 19 nt, Homo sapiens
  misc_RNA (1)...(19): siRNA sense strand
aaccaaaacccuacuauga

SEQ ID NO: 1278973 - RNA, 19 nt, Homo sapiens
  misc_RNA (1)...(19): siRNA sense strand
cccaauaugugaaaagguu

SEQ ID NO: 1278974 - RNA, 19 nt, Homo sapiens
  misc_RNA (1)...(19): siRNA sense strand
cgauggcagcgacacaauu

SEQ ID NO: 1278975 - RNA, 19 nt, Homo sapiens
  misc_RNA (1)...(19): siRNA sense strand
gauccauuuucacuuauug

SEQ ID NO: 1278976 - RNA, 19 nt, Homo sapiens
  misc_RNA (1)...(19): siRNA sense strand
uugaugcaguaacuuauag

SEQ ID NO: 1278977 - RNA, 19 nt, Homo sapiens
  misc_RNA (1)...(19): siRNA sense strand
guaucuugaugcaguaacu

SEQ ID NO: 1278978 - RNA, 19 nt, Homo sapiens
  misc_RNA (1)...(19): siRNA sense strand
caacauuugaagcuaugga

SEQ ID NO: 1278979 - RNA, 19 nt, Homo sapiens
  misc_RNA (1)...(19): siRNA sense strand
gagauuggugaacgaguag

SEQ ID NO: 1278980 - RNA, 19 nt, Homo sapiens
  misc_RNA (1)...(19): siRNA sense strand
ggagagagcacgauuuauu

SEQ ID NO: 1278981 - RNA, 19 nt, Homo sapiens
  misc_RNA (1)...(19): siRNA sense strand
agagaaacauguccauaua

SEQ ID NO: 1278982 - RNA, 19 nt, Homo sapiens
  misc_RNA (1)...(19): siRNA sense strand
cagaugcacuuuauuugua

SEQ ID NO: 1278983 - RNA, 19 nt, Homo sapiens
  misc_RNA (1)...(19): siRNA sense strand
ggacuuacgaguuugguua

SEQ ID NO: 1278984 - RNA, 19 nt, Homo sapiens
  misc_RNA (1)...(19): siRNA sense strand
aaacagauaucaggauuug

SEQ ID NO: 1278985 - RNA, 19 nt, Homo sapiens
  misc_RNA (1)...(19): siRNA sense strand
cuauggagcucauugguaa

SEQ ID NO: 1278986 - RNA, 19 nt, Homo sapiens
  misc_RNA (1)...(19): siRNA sense strand
aaacacaccuuuagugaag

SEQ ID NO: 1278987 - RNA, 19 nt, Homo sapiens
  misc_RNA (1)...(19): siRNA sense strand
gaacuuaaaggaucaguag

SEQ ID NO: 1278988 - RNA, 19 nt, Homo sapiens
  misc_RNA (1)...(19): siRNA sense strand
gaaaacagauaucaggauu

SEQ ID NO: 1278989 - RNA, 19 nt, Homo sapiens
  misc_RNA (1)...(19): siRNA sense strand
uaaaggaucaguagcaauu

SEQ ID NO: 1278990 - RNA, 19 nt, Homo sapiens
  misc_RNA (1)...(19): siRNA sense strand
aaaugggacuuacgaguuu

SEQ ID NO: 1278991 - RNA, 19 nt, Homo sapiens
  misc_RNA (1)...(19): siRNA sense strand
guuaucagaugcacuuuau

SEQ ID NO: 1278992 - RNA, 19 nt, Homo sapiens
  misc_RNA (1)...(19): siRNA sense strand
gagcugaauaugccacuua

SEQ ID NO: 1278993 - RNA, 19 nt, Homo sapiens
  misc_RNA (1)...(19): siRNA sense strand
ugagauuggugaacgagua

SEQ ID NO: 1278994 - RNA, 19 nt, Homo sapiens
  misc_RNA (1)...(19): siRNA sense strand
gugaacgaguagauuauaa

SEQ ID NO: 1278995 - RNA, 19 nt, Homo sapiens
  misc_RNA (1)...(19): siRNA sense strand
gagagagcacgauuuauug

SEQ ID NO: 1278996 - RNA, 19 nt, Homo sapiens
  misc_RNA (1)...(19): siRNA sense strand
caaaugggacuuacgaguu

SEQ ID NO: 1278997 - RNA, 19 nt, Homo sapiens
  misc_RNA (1)...(19): siRNA sense strand
ggucauugcugugauuguu

SEQ ID NO: 1278998 - RNA, 19 nt, Homo sapiens
  misc_RNA (1)...(19): siRNA sense strand
ccagauccauuuucacuua

SEQ ID NO: 1278999 - RNA, 19 nt, Homo sapiens
  misc_RNA (1)...(19): siRNA sense strand
gaaggaauacuugacaguu

SEQ ID NO: 1279000 - RNA, 19 nt, Homo sapiens
  misc_RNA (1)...(19): siRNA sense strand
aaggaauacuugacaguuu

SEQ ID NO: 1279001 - RNA, 19 nt, Homo sapiens
  misc_RNA (1)...(19): siRNA sense strand
ucagaugacgccuguuaua

SEQ ID NO: 1279002 - RNA, 19 nt, Homo sapiens
  misc_RNA (1)...(19): siRNA sense strand
gaaaacacaccuuuaguga

SEQ ID NO: 1279003 - RNA, 19 nt, Homo sapiens
  misc_RNA (1)...(19): siRNA sense strand
gaugacgccuguuauagag

SEQ ID NO: 1279004 - RNA, 19 nt, Homo sapiens
  misc_RNA (1)...(19): siRNA sense strand
gagaaacauguccauauau

SEQ ID NO: 1279005 - RNA, 19 nt, Homo sapiens
  misc_RNA (1)...(19): siRNA sense strand
ccacuuaccagacuaaauc

SEQ ID NO: 1279006 - RNA, 19 nt, Homo sapiens
  misc_RNA (1)...(19): siRNA sense strand
acgaguagauuauaagugu

SEQ ID NO: 1279007 - RNA, 19 nt, Homo sapiens
  misc_RNA (1)...(19): siRNA sense strand
cuacaaagcaacaguuaug

SEQ ID NO: 1279008 - RNA, 19 nt, Homo sapiens
  misc_RNA (1)...(19): siRNA sense strand
ccaccaacauuugaagcua

SEQ ID NO: 1279009 - RNA, 19 nt, Homo sapiens
  misc_RNA (1)...(19): siRNA sense strand
uauacgggauccuuuaaau

SEQ ID NO: 1279010 - RNA, 19 nt, Homo sapiens
  misc_RNA (1)...(19): siRNA sense strand
cgaguuugguuaucagaug

SEQ ID NO: 1279011 - RNA, 19 nt, Homo sapiens
  misc_RNA (1)...(19): siRNA sense strand
gaacgaguagauuauaagu

SEQ ID NO: 1279012 - RNA, 19 nt, Homo sapiens
  misc_RNA (1)...(19): siRNA sense strand
gugaggagccaccaacauu

SEQ ID NO: 1279013 - RNA, 19 nt, Homo sapiens
  misc_RNA (1)...(19): siRNA sense strand
gauggcagcgacacaauug

SEQ ID NO: 1279014 - RNA, 19 nt, Homo sapiens
  misc_RNA (1)...(19): siRNA sense strand
ucucagaugacgccuguua

SEQ ID NO: 1279015 - RNA, 19 nt, Homo sapiens
  misc_RNA (1)...(19): siRNA sense strand
gaggagccaccaacauuug

SEQ ID NO: 1279016 - RNA, 19 nt, Homo sapiens
  misc_RNA (1)...(19): siRNA sense strand
gcuauggagcucauuggua

SEQ ID NO: 1279017 - RNA, 19 nt, Homo sapiens
  misc_RNA (1)...(19): siRNA sense strand
acacaccuuuagugaagua

SEQ ID NO: 1279018 - RNA, 19 nt, Homo sapiens
  misc_RNA (1)...(19): siRNA sense strand
uagagaaacauguccauau

SEQ ID NO: 1279019 - RNA, 19 nt, Homo sapiens
  misc_RNA (1)...(19): siRNA sense strand
ggugaacgaguagauuaua

SEQ ID NO: 1279020 - RNA, 19 nt, Homo sapiens
  misc_RNA (1)...(19): siRNA sense strand
gaaguagaaguauuugagu

SEQ ID NO: 1279021 - RNA, 19 nt, Homo sapiens
  misc_RNA (1)...(19): siRNA sense strand
gaaacauguccauauauac

SEQ ID NO: 1279022 - RNA, 19 nt, Homo sapiens
  misc_RNA (1)...(19): siRNA sense strand
ugacgccuguuauagagaa

SEQ ID NO: 1279023 - RNA, 19 nt, Homo sapiens
  misc_RNA (1)...(19): siRNA sense strand
cgaguagauuauaagugua

SEQ ID NO: 1279024 - RNA, 19 nt, Homo sapiens
  misc_RNA (1)...(19): siRNA sense strand
gcacuuuauuuguaaugag

SEQ ID NO: 1279025 - RNA, 19 nt, Homo sapiens
  misc_RNA (1)...(19): siRNA sense strand
guagaaguauuugaguauc

SEQ ID NO: 1279026 - RNA, 19 nt, Homo sapiens
  misc_RNA (1)...(19): siRNA sense strand
guauuugaguaucuugaug

SEQ ID NO: 1279027 - RNA, 19 nt, Homo sapiens
  misc_RNA (1)...(19): siRNA sense strand
aggaauacuugacaguuug

SEQ ID NO: 1279028 - RNA, 19 nt, Homo sapiens
  misc_RNA (1)...(19): siRNA sense strand
ccaaaacccuacuaugaga

SEQ ID NO: 1279029 - RNA, 19 nt, Homo sapiens
  misc_RNA (1)...(19): siRNA sense strand
aguguaaaguggucaaaug

SEQ ID NO: 1279030 - RNA, 19 nt, Homo sapiens
  misc_RNA (1)...(19): siRNA sense strand
ccacccauacuauuuguga

SEQ ID NO: 1279031 - RNA, 19 nt, Homo sapiens
  misc_RNA (1)...(19): siRNA sense strand
uuggagagagcacgauuua

SEQ ID NO: 1279032 - RNA, 19 nt, Homo sapiens
  misc_RNA (1)...(19): siRNA sense strand
gguuaucagaugcacuuua

SEQ ID NO: 1279033 - RNA, 19 nt, Homo sapiens
  misc_RNA (1)...(19): siRNA sense strand
caccaacauuugaagcuau

SEQ ID NO: 1279034 - RNA, 19 nt, Homo sapiens
  misc_RNA (1)...(19): siRNA sense strand
ugaggagccaccaacauuu

SEQ ID NO: 1279035 - RNA, 19 nt, Homo sapiens
  misc_RNA (1)...(19): siRNA sense strand
ggaaggaauacuugacagu

SEQ ID NO: 1279036 - RNA, 19 nt, Homo sapiens
  misc_RNA (1)...(19): siRNA sense strand
gaggaaggaauacuugaca

SEQ ID NO: 1279037 - RNA, 19 nt, Homo sapiens
  misc_RNA (1)...(19): siRNA sense strand
ugaguaucuugaugcagua

SEQ ID NO: 1279038 - RNA, 19 nt, Homo sapiens
  misc_RNA (1)...(19): siRNA sense strand
caccuuuagugaaguagaa

SEQ ID NO: 1279039 - RNA, 19 nt, Homo sapiens
  misc_RNA (1)...(19): siRNA sense strand
acagauaucaggauuugga

SEQ ID NO: 1279040 - RNA, 19 nt, Homo sapiens
  misc_RNA (1)...(19): siRNA sense strand
ucauugcugugauuguuau

SEQ ID NO: 1279041 - RNA, 19 nt, Homo sapiens
  misc_RNA (1)...(19): siRNA sense strand
ucagaugcacuuuauuugu

SEQ ID NO: 1279042 - RNA, 19 nt, Homo sapiens
  misc_RNA (1)...(19): siRNA sense strand
gugcugcuccagaguguaa

SEQ ID NO: 1279043 - RNA, 19 nt, Homo sapiens
  misc_RNA (1)...(19): siRNA sense strand
ggaaaacacaccuuuagug

SEQ ID NO: 1279044 - RNA, 19 nt, Homo sapiens
  misc_RNA (1)...(19): siRNA sense strand
aaggaucaguagcaauuug

SEQ ID NO: 1279045 - RNA, 19 nt, Homo sapiens
  misc_RNA (1)...(19): siRNA sense strand
uauauacgggauccuuuaa

SEQ ID NO: 1279046 - RNA, 19 nt, Homo sapiens
  misc_RNA (1)...(19): siRNA sense strand
ugaaguagaaguauuugag

SEQ ID NO: 1279047 - RNA, 19 nt, Homo sapiens
  misc_RNA (1)...(19): siRNA sense strand
cuugacaguuuggauguuu

SEQ ID NO: 1279048 - RNA, 19 nt, Homo sapiens
  misc_RNA (1)...(19): siRNA sense strand
cauauauacgggauccuuu

SEQ ID NO: 1279049 - RNA, 19 nt, Homo sapiens
  misc_RNA (1)...(19): siRNA sense strand
auauauacgggauccuuua

SEQ ID NO: 1279050 - RNA, 19 nt, Homo sapiens
  misc_RNA (1)...(19): siRNA sense strand
cuuaaaggaucaguagcaa

SEQ ID NO: 1279051 - RNA, 19 nt, Homo sapiens
  misc_RNA (1)...(19): siRNA sense strand
uaaaccugaggaaggaaua

SEQ ID NO: 1279052 - RNA, 19 nt, Homo sapiens
  misc_RNA (1)...(19): siRNA sense strand
agaugacgccuguuauaga

SEQ ID NO: 1279053 - RNA, 19 nt, Homo sapiens
  misc_RNA (1)...(19): siRNA sense strand
ugugauuguuauugccaua

SEQ ID NO: 1279054 - RNA, 19 nt, Homo sapiens
  misc_RNA (1)...(19): siRNA sense strand
gagagcacgauuuauugug

SEQ ID NO: 1279055 - RNA, 19 nt, Homo sapiens
  misc_RNA (1)...(19): siRNA sense strand
gaaguauuugaguaucuug

SEQ ID NO: 1279056 - RNA, 19 nt, Homo sapiens
  misc_RNA (1)...(19): siRNA sense strand
ggcuaccugucucagauga

SEQ ID NO: 1279057 - RNA, 19 nt, Homo sapiens
  misc_RNA (1)...(19): siRNA sense strand
gauaucaggauuuggaaaa

SEQ ID NO: 1279058 - RNA, 19 nt, Homo sapiens
  misc_RNA (1)...(19): siRNA sense strand
ccucuugccacccauacua

SEQ ID NO: 1279059 - RNA, 19 nt, Homo sapiens
  misc_RNA (1)...(19): siRNA sense strand
ccaugguguugcugcugua

SEQ ID NO: 1279060 - RNA, 19 nt, Homo sapiens
  misc_RNA (1)...(19): siRNA sense strand
cagaugacgccuguuauag

SEQ ID NO: 1279061 - RNA, 19 nt, Homo sapiens
  misc_RNA (1)...(19): siRNA sense strand
cagaugguggagcugaaua

SEQ ID NO: 1279062 - RNA, 19 nt, Homo sapiens
  misc_RNA (1)...(19): siRNA sense strand
uuggugaacgaguagauua

SEQ ID NO: 1279063 - RNA, 19 nt, Homo sapiens
  misc_RNA (1)...(19): siRNA sense strand
gucauugcugugauuguua

SEQ ID NO: 1279064 - RNA, 19 nt, Homo sapiens
  misc_RNA (1)...(19): siRNA sense strand
ggagccaccaacauuugaa

SEQ ID NO: 1279065 - RNA, 19 nt, Homo sapiens
  misc_RNA (1)...(19): siRNA sense strand
gcgcuuuccuggguugcuu

SEQ ID NO: 1279066 - RNA, 19 nt, Homo sapiens
  misc_RNA (1)...(19): siRNA sense strand
uacuacaaagcaacaguua

SEQ ID NO: 1279067 - RNA, 19 nt, Homo sapiens
  misc_RNA (1)...(19): siRNA sense strand
cuugaugcaguaacuuaua

SEQ ID NO: 1279068 - RNA, 19 nt, Homo sapiens
  misc_RNA (1)...(19): siRNA sense strand
aaacauguccauauauacg

SEQ ID NO: 1279069 - RNA, 19 nt, Homo sapiens
  misc_RNA (1)...(19): siRNA sense strand
guguaaaguggucaaaugu

SEQ ID NO: 1279070 - RNA, 19 nt, Homo sapiens
  misc_RNA (1)...(19): siRNA sense strand
cuuacgaguuugguuauca

SEQ ID NO: 1279071 - RNA, 19 nt, Homo sapiens
  misc_RNA (1)...(19): siRNA sense strand
uacgggauccuuuaaaugg

SEQ ID NO: 1279072 - RNA, 19 nt, Homo sapiens
  misc_RNA (1)...(19): siRNA sense strand
gcagaugguggagcugaau

SEQ ID NO: 1279073 - RNA, 19 nt, Homo sapiens
  misc_RNA (1)...(19): siRNA sense strand
aaccaaaacccuacuauga

SEQ ID NO: 1279074 - RNA, 19 nt, Homo sapiens
  misc_RNA (1)...(19): siRNA sense strand
cccaauaugugaaaagguu

SEQ ID NO: 1279075 - RNA, 19 nt, Homo sapiens
  misc_RNA (1)...(19): siRNA sense strand
ggagcugaauaugccacuu

SEQ ID NO: 1279076 - RNA, 19 nt, Homo sapiens
  misc_RNA (1)...(19): siRNA sense strand
cgauggcagcgacacaauu

SEQ ID NO: 1279077 - RNA, 19 nt, Homo sapiens
  misc_RNA (1)...(19): siRNA sense strand
gauccauuuucacuuauug

SEQ ID NO: 1279078 - RNA, 19 nt, Homo sapiens
  misc_RNA (1)...(19): siRNA sense strand
uugaugcaguaacuuauag

SEQ ID NO: 1279079 - RNA, 19 nt, Homo sapiens
  misc_RNA (1)...(19): siRNA sense strand
guaucuugaugcaguaacu

SEQ ID NO: 1279080 - RNA, 19 nt, Homo sapiens
  misc_RNA (1)...(19): siRNA sense strand
ggagagagcacgauuuauu

SEQ ID NO: 1279081 - RNA, 19 nt, Homo sapiens
  misc_RNA (1)...(19): siRNA sense strand
agagaaacauguccauaua

SEQ ID NO: 1279082 - RNA, 19 nt, Homo sapiens
  misc_RNA (1)...(19): siRNA sense strand
cagaugcacuuuauuugua

SEQ ID NO: 1279083 - RNA, 19 nt, Homo sapiens
  misc_RNA (1)...(19): siRNA sense strand
ggacuuacgaguuugguua

SEQ ID NO: 1279084 - RNA, 19 nt, Homo sapiens
  misc_RNA (1)...(19): siRNA sense strand
aaacagauaucaggauuug

SEQ ID NO: 1279085 - RNA, 19 nt, Homo sapiens
  misc_RNA (1)...(19): siRNA sense strand
cuauggagcucauugguaa

SEQ ID NO: 1279086 - RNA, 19 nt, Homo sapiens
  misc_RNA (1)...(19): siRNA sense strand
aaacacaccuuuagugaag

SEQ ID NO: 1279087 - RNA, 19 nt, Homo sapiens
  misc_RNA (1)...(19): siRNA sense strand
gaacuuaaaggaucaguag

SEQ ID NO: 1279088 - RNA, 19 nt, Homo sapiens
  misc_RNA (1)...(19): siRNA sense strand
gaaaacagauaucaggauu

SEQ ID NO: 1279089 - RNA, 19 nt, Homo sapiens
  misc_RNA (1)...(19): siRNA sense strand
uaaaggaucaguagcaauu

SEQ ID NO: 1279090 - RNA, 19 nt, Homo sapiens
  misc_RNA (1)...(19): siRNA sense strand
aaaugggacuuacgaguuu

SEQ ID NO: 1279091 - RNA, 19 nt, Homo sapiens
  misc_RNA (1)...(19): siRNA sense strand
guuaucagaugcacuuuau

SEQ ID NO: 1279092 - RNA, 19 nt, Homo sapiens
  misc_RNA (1)...(19): siRNA sense strand
gagcugaauaugccacuua

SEQ ID NO: 1279093 - RNA, 19 nt, Homo sapiens
  misc_RNA (1)...(19): siRNA sense strand
gagcagagaggcugaauag

SEQ ID NO: 1279094 - RNA, 19 nt, Homo sapiens
  misc_RNA (1)...(19): siRNA sense strand
ugagauuggugaacgagua

SEQ ID NO: 1279095 - RNA, 19 nt, Homo sapiens
  misc_RNA (1)...(19): siRNA sense strand
gugaacgaguagauuauaa

SEQ ID NO: 1279096 - RNA, 19 nt, Homo sapiens
  misc_RNA (1)...(19): siRNA sense strand
gagagagcacgauuuauug

SEQ ID NO: 1279097 - RNA, 19 nt, Homo sapiens
  misc_RNA (1)...(19): siRNA sense strand
caaaugggacuuacgaguu

SEQ ID NO: 1279098 - RNA, 19 nt, Homo sapiens
  misc_RNA (1)...(19): siRNA sense strand
ggucauugcugugauuguu

SEQ ID NO: 1279099 - RNA, 19 nt, Homo sapiens
  misc_RNA (1)...(19): siRNA sense strand
ccagauccauuuucacuua

SEQ ID NO: 1279100 - RNA, 19 nt, Homo sapiens
  misc_RNA (1)...(19): siRNA sense strand
gaaggaauacuugacaguu

SEQ ID NO: 1279101 - RNA, 19 nt, Homo sapiens
  misc_RNA (1)...(19): siRNA sense strand
aaggaauacuugacaguuu

SEQ ID NO: 1279102 - RNA, 19 nt, Homo sapiens
  misc_RNA (1)...(19): siRNA sense strand
ucagaugacgccuguuaua

SEQ ID NO: 1279103 - RNA, 19 nt, Homo sapiens
  misc_RNA (1)...(19): siRNA sense strand
gaaaacacaccuuuaguga

SEQ ID NO: 1279104 - RNA, 19 nt, Homo sapiens
  misc_RNA (1)...(19): siRNA sense strand
gaugacgccuguuauagag

SEQ ID NO: 1279105 - RNA, 19 nt, Homo sapiens
  misc_RNA (1)...(19): siRNA sense strand
gagaaacauguccauauau

SEQ ID NO: 1279106 - RNA, 19 nt, Homo sapiens
  misc_RNA (1)...(19): siRNA sense strand
ccacuuaccagacuaaauc

SEQ ID NO: 1279107 - RNA, 19 nt, Homo sapiens
  misc_RNA (1)...(19): siRNA sense strand
acgaguagauuauaagugu

SEQ ID NO: 1279108 - RNA, 19 nt, Homo sapiens
  misc_RNA (1)...(19): siRNA sense strand
cuacaaagcaacaguuaug

SEQ ID NO: 1279109 - RNA, 19 nt, Homo sapiens
  misc_RNA (1)...(19): siRNA sense strand
ccaccaacauuugaagcua

SEQ ID NO: 1279110 - RNA, 19 nt, Homo sapiens
  misc_RNA (1)...(19): siRNA sense strand
uauacgggauccuuuaaau

SEQ ID NO: 1279111 - RNA, 19 nt, Homo sapiens
  misc_RNA (1)...(19): siRNA sense strand
cgaguuugguuaucagaug

SEQ ID NO: 1279112 - RNA, 19 nt, Homo sapiens
  misc_RNA (1)...(19): siRNA sense strand
gaacgaguagauuauaagu

SEQ ID NO: 1279113 - RNA, 19 nt, Homo sapiens
  misc_RNA (1)...(19): siRNA sense strand
gugaggagccaccaacauu

SEQ ID NO: 1279114 - RNA, 19 nt, Homo sapiens
  misc_RNA (1)...(19): siRNA sense strand
gauggcagcgacacaauug

SEQ ID NO: 1279115 - RNA, 19 nt, Homo sapiens
  misc_RNA (1)...(19): siRNA sense strand
ucucagaugacgccuguua

SEQ ID NO: 1279116 - RNA, 19 nt, Homo sapiens
  misc_RNA (1)...(19): siRNA sense strand
acacaccuuuagugaagua

SEQ ID NO: 1279117 - RNA, 19 nt, Homo sapiens
  misc_RNA (1)...(19): siRNA sense strand
gcuauggagcucauuggua

SEQ ID NO: 1279118 - RNA, 19 nt, Homo sapiens
  misc_RNA (1)...(19): siRNA sense strand
gaggagccaccaacauuug

SEQ ID NO: 1279119 - RNA, 19 nt, Homo sapiens
  misc_RNA (1)...(19): siRNA sense strand
uagagaaacauguccauau

SEQ ID NO: 1279120 - RNA, 19 nt, Homo sapiens
  misc_RNA (1)...(19): siRNA sense strand
guuccaaagugucuuaaag

SEQ ID NO: 1279121 - RNA, 19 nt, Homo sapiens
  misc_RNA (1)...(19): siRNA sense strand
ggugaacgaguagauuaua

SEQ ID NO: 1279122 - RNA, 19 nt, Homo sapiens
  misc_RNA (1)...(19): siRNA sense strand
gaaguagaaguauuugagu

SEQ ID NO: 1279123 - RNA, 19 nt, Homo sapiens
  misc_RNA (1)...(19): siRNA sense strand
gaaacauguccauauauac

SEQ ID NO: 1279124 - RNA, 19 nt, Homo sapiens
  misc_RNA (1)...(19): siRNA sense strand
ugacgccuguuauagagaa

SEQ ID NO: 1279125 - RNA, 19 nt, Homo sapiens
  misc_RNA (1)...(19): siRNA sense strand
cgaguagauuauaagugua

SEQ ID NO: 1279126 - RNA, 19 nt, Homo sapiens
  misc_RNA (1)...(19): siRNA sense strand
gcacuuuauuuguaaugag

SEQ ID NO: 1279127 - RNA, 19 nt, Homo sapiens
  misc_RNA (1)...(19): siRNA sense strand
guagaaguauuugaguauc

SEQ ID NO: 1279128 - RNA, 19 nt, Homo sapiens
  misc_RNA (1)...(19): siRNA sense strand
guauuugaguaucuugaug

SEQ ID NO: 1279129 - RNA, 19 nt, Homo sapiens
  misc_RNA (1)...(19): siRNA sense strand
aggaauacuugacaguuug

SEQ ID NO: 1279130 - RNA, 19 nt, Homo sapiens
  misc_RNA (1)...(19): siRNA sense strand
ccaaaacccuacuaugaga

SEQ ID NO: 1279131 - RNA, 19 nt, Homo sapiens
  misc_RNA (1)...(19): siRNA sense strand
aguguaaaguggucaaaug

SEQ ID NO: 1279132 - RNA, 19 nt, Homo sapiens
  misc_RNA (1)...(19): siRNA sense strand
ccacccauacuauuuguga

SEQ ID NO: 1279133 - RNA, 19 nt, Homo sapiens
  misc_RNA (1)...(19): siRNA sense strand
uuggagagagcacgauuua

SEQ ID NO: 1279134 - RNA, 19 nt, Homo sapiens
  misc_RNA (1)...(19): siRNA sense strand
gguuaucagaugcacuuua

SEQ ID NO: 1279135 - RNA, 19 nt, Homo sapiens
  misc_RNA (1)...(19): siRNA sense strand
caccaacauuugaagcuau

SEQ ID NO: 1279136 - RNA, 19 nt, Homo sapiens
  misc_RNA (1)...(19): siRNA sense strand
ugaggagccaccaacauuu

SEQ ID NO: 1279137 - RNA, 19 nt, Homo sapiens
  misc_RNA (1)...(19): siRNA sense strand
ggaaggaauacuugacagu

SEQ ID NO: 1279138 - RNA, 19 nt, Homo sapiens
  misc_RNA (1)...(19): siRNA sense strand
gaggaaggaauacuugaca

SEQ ID NO: 1279139 - RNA, 19 nt, Homo sapiens
  misc_RNA (1)...(19): siRNA sense strand
ccaguuccaaagugucuua

SEQ ID NO: 1279140 - RNA, 19 nt, Homo sapiens
  misc_RNA (1)...(19): siRNA sense strand
ugaguaucuugaugcagua

SEQ ID NO: 1279141 - RNA, 19 nt, Homo sapiens
  misc_RNA (1)...(19): siRNA sense strand
caccuuuagugaaguagaa

SEQ ID NO: 1279142 - RNA, 19 nt, Homo sapiens
  misc_RNA (1)...(19): siRNA sense strand
acagauaucaggauuugga

SEQ ID NO: 1279143 - RNA, 19 nt, Homo sapiens
  misc_RNA (1)...(19): siRNA sense strand
ucauugcugugauuguuau

SEQ ID NO: 1279144 - RNA, 19 nt, Homo sapiens
  misc_RNA (1)...(19): siRNA sense strand
ucagaugcacuuuauuugu

SEQ ID NO: 1279145 - RNA, 19 nt, Homo sapiens
  misc_RNA (1)...(19): siRNA sense strand
gugcugcuccagaguguaa

SEQ ID NO: 1279146 - RNA, 19 nt, Homo sapiens
  misc_RNA (1)...(19): siRNA sense strand
ggaaaacacaccuuuagug

SEQ ID NO: 1279147 - RNA, 19 nt, Homo sapiens
  misc_RNA (1)...(19): siRNA sense strand
aaggaucaguagcaauuug

SEQ ID NO: 1279148 - RNA, 19 nt, Homo sapiens
  misc_RNA (1)...(19): siRNA sense strand
uauauacgggauccuuuaa

SEQ ID NO: 1279149 - RNA, 19 nt, Homo sapiens
  misc_RNA (1)...(19): siRNA sense strand
ugaaguagaaguauuugag

SEQ ID NO: 1279150 - RNA, 19 nt, Homo sapiens
  misc_RNA (1)...(19): siRNA sense strand
cuugacaguuuggauguuu

SEQ ID NO: 1279151 - RNA, 19 nt, Homo sapiens
  misc_RNA (1)...(19): siRNA sense strand
cauauauacgggauccuuu

SEQ ID NO: 1279152 - RNA, 19 nt, Homo sapiens
  misc_RNA (1)...(19): siRNA sense strand
auauauacgggauccuuua

SEQ ID NO: 1279153 - RNA, 19 nt, Homo sapiens
  misc_RNA (1)...(19): siRNA sense strand
cuuaaaggaucaguagcaa

SEQ ID NO: 1279154 - RNA, 19 nt, Homo sapiens
  misc_RNA (1)...(19): siRNA sense strand
uaaaccugaggaaggaaua

SEQ ID NO: 1279155 - RNA, 19 nt, Homo sapiens
  misc_RNA (1)...(19): siRNA sense strand
agaugacgccuguuauaga

SEQ ID NO: 1279156 - RNA, 19 nt, Homo sapiens
  misc_RNA (1)...(19): siRNA sense strand
ugugauuguuauugccaua

SEQ ID NO: 1279157 - RNA, 19 nt, Homo sapiens
  misc_RNA (1)...(19): siRNA sense strand
gagagcacgauuuauugug

SEQ ID NO: 1279158 - RNA, 19 nt, Homo sapiens
  misc_RNA (1)...(19): siRNA sense strand
gaaguauuugaguaucuug

SEQ ID NO: 1279159 - RNA, 19 nt, Homo sapiens
  misc_RNA (1)...(19): siRNA sense strand
ggcuaccugucucagauga

SEQ ID NO: 1279160 - RNA, 19 nt, Homo sapiens
  misc_RNA (1)...(19): siRNA sense strand
ccucuugccacccauacua

SEQ ID NO: 1279161 - RNA, 19 nt, Homo sapiens
  misc_RNA (1)...(19): siRNA sense strand
gauaucaggauuuggaaaa

SEQ ID NO: 1279162 - RNA, 19 nt, Homo sapiens
  misc_RNA (1)...(19): siRNA sense strand
ccaugguguugcugcugua

SEQ ID NO: 1279163 - RNA, 19 nt, Homo sapiens
  misc_RNA (1)...(19): siRNA sense strand
cagaugacgccuguuauag

SEQ ID NO: 1279164 - RNA, 19 nt, Homo sapiens
  misc_RNA (1)...(19): siRNA sense strand
cagaugguggagcugaaua

SEQ ID NO: 1279165 - RNA, 19 nt, Homo sapiens
  misc_RNA (1)...(19): siRNA sense strand
gucauugcugugauuguua

SEQ ID NO: 1279166 - RNA, 19 nt, Homo sapiens
  misc_RNA (1)...(19): siRNA sense strand
uuggugaacgaguagauua

SEQ ID NO: 1279167 - RNA, 19 nt, Homo sapiens
  misc_RNA (1)...(19): siRNA sense strand
ggagccaccaacauuugaa

SEQ ID NO: 1279168 - RNA, 19 nt, Homo sapiens
  misc_RNA (1)...(19): siRNA sense strand
gcgcuuuccuggguugcuu

SEQ ID NO: 1279169 - RNA, 19 nt, Homo sapiens
  misc_RNA (1)...(19): siRNA sense strand
uacuacaaagcaacaguua

SEQ ID NO: 1279170 - RNA, 19 nt, Homo sapiens
  misc_RNA (1)...(19): siRNA sense strand
cuugaugcaguaacuuaua

SEQ ID NO: 1279171 - RNA, 19 nt, Homo sapiens
  misc_RNA (1)...(19): siRNA sense strand
aaacauguccauauauacg

SEQ ID NO: 1279172 - RNA, 19 nt, Homo sapiens
  misc_RNA (1)...(19): siRNA sense strand
guguaaaguggucaaaugu

SEQ ID NO: 1279173 - RNA, 19 nt, Homo sapiens
  misc_RNA (1)...(19): siRNA sense strand
cuuacgaguuugguuauca

SEQ ID NO: 1279174 - RNA, 19 nt, Homo sapiens
  misc_RNA (1)...(19): siRNA sense strand
aaccaaaacccuacuauga

SEQ ID NO: 1279175 - RNA, 19 nt, Homo sapiens
  misc_RNA (1)...(19): siRNA sense strand
gcagaugguggagcugaau

SEQ ID NO: 1279176 - RNA, 19 nt, Homo sapiens
  misc_RNA (1)...(19): siRNA sense strand
uacgggauccuuuaaaugg

SEQ ID NO: 1279177 - RNA, 19 nt, Homo sapiens
  misc_RNA (1)...(19): siRNA sense strand
cgauggcagcgacacaauu

SEQ ID NO: 1279178 - RNA, 19 nt, Homo sapiens
  misc_RNA (1)...(19): siRNA sense strand
ggagcugaauaugccacuu

SEQ ID NO: 1279179 - RNA, 19 nt, Homo sapiens
  misc_RNA (1)...(19): siRNA sense strand
caacauuugaagcuaugga

SEQ ID NO: 1279180 - RNA, 19 nt, Homo sapiens
  misc_RNA (1)...(19): siRNA sense strand
ggagagagcacgauuuauu

SEQ ID NO: 1279181 - RNA, 19 nt, Homo sapiens
  misc_RNA (1)...(19): siRNA sense strand
agagaaacauguccauaua

SEQ ID NO: 1279182 - RNA, 19 nt, Homo sapiens
  misc_RNA (1)...(19): siRNA sense strand
cagaugcacuuuauuugua

SEQ ID NO: 1279183 - RNA, 19 nt, Homo sapiens
  misc_RNA (1)...(19): siRNA sense strand
ggacuuacgaguuugguua

SEQ ID NO: 1279184 - RNA, 19 nt, Homo sapiens
  misc_RNA (1)...(19): siRNA sense strand
aaacagauaucaggauuug

SEQ ID NO: 1279185 - RNA, 19 nt, Homo sapiens
  misc_RNA (1)...(19): siRNA sense strand
cuauggagcucauugguaa

SEQ ID NO: 1279186 - RNA, 19 nt, Homo sapiens
  misc_RNA (1)...(19): siRNA sense strand
aaacacaccuuuagugaag

SEQ ID NO: 1279187 - RNA, 19 nt, Homo sapiens
  misc_RNA (1)...(19): siRNA sense strand
gaacuuaaaggaucaguag

SEQ ID NO: 1279188 - RNA, 19 nt, Homo sapiens
  misc_RNA (1)...(19): siRNA sense strand
gaaaacagauaucaggauu

SEQ ID NO: 1279189 - RNA, 19 nt, Homo sapiens
  misc_RNA (1)...(19): siRNA sense strand
uaaaggaucaguagcaauu

SEQ ID NO: 1279190 - RNA, 19 nt, Homo sapiens
  misc_RNA (1)...(19): siRNA sense strand
aaaugggacuuacgaguuu

SEQ ID NO: 1279191 - RNA, 19 nt, Homo sapiens
  misc_RNA (1)...(19): siRNA sense strand
guuaucagaugcacuuuau

SEQ ID NO: 1279192 - RNA, 19 nt, Homo sapiens
  misc_RNA (1)...(19): siRNA sense strand
ugagauuggugaacgagua

SEQ ID NO: 1279193 - RNA, 19 nt, Homo sapiens
  misc_RNA (1)...(19): siRNA sense strand
gugaacgaguagauuauaa

SEQ ID NO: 1279194 - RNA, 19 nt, Homo sapiens
  misc_RNA (1)...(19): siRNA sense strand
gagagagcacgauuuauug

SEQ ID NO: 1279195 - RNA, 19 nt, Homo sapiens
  misc_RNA (1)...(19): siRNA sense strand
caaaugggacuuacgaguu

SEQ ID NO: 1279196 - RNA, 19 nt, Homo sapiens
  misc_RNA (1)...(19): siRNA sense strand
ggucauugcugugauuguu

SEQ ID NO: 1279197 - RNA, 19 nt, Homo sapiens
  misc_RNA (1)...(19): siRNA sense strand
ccagauccauuuucacuua

SEQ ID NO: 1279198 - RNA, 19 nt, Homo sapiens
  misc_RNA (1)...(19): siRNA sense strand
gaaggaauacuugacaguu

SEQ ID NO: 1279199 - RNA, 19 nt, Homo sapiens
  misc_RNA (1)...(19): siRNA sense strand
aaggaauacuugacaguuu

SEQ ID NO: 1279200 - RNA, 19 nt, Homo sapiens
  misc_RNA (1)...(19): siRNA sense strand
ucagaugacgccuguuaua

SEQ ID NO: 1279201 - RNA, 19 nt, Homo sapiens
  misc_RNA (1)...(19): siRNA sense strand
gaaaacacaccuuuaguga

SEQ ID NO: 1279202 - RNA, 19 nt, Homo sapiens
  misc_RNA (1)...(19): siRNA sense strand
gaugacgccuguuauagag

SEQ ID NO: 1279203 - RNA, 19 nt, Homo sapiens
  misc_RNA (1)...(19): siRNA sense strand
gagaaacauguccauauau

SEQ ID NO: 1279204 - RNA, 19 nt, Homo sapiens
  misc_RNA (1)...(19): siRNA sense strand
acgaguagauuauaagugu

SEQ ID NO: 1279205 - RNA, 19 nt, Homo sapiens
  misc_RNA (1)...(19): siRNA sense strand
cuacaaagcaacaguuaug

SEQ ID NO: 1279206 - RNA, 19 nt, Homo sapiens
  misc_RNA (1)...(19): siRNA sense strand
ccaccaacauuugaagcua

SEQ ID NO: 1279207 - RNA, 19 nt, Homo sapiens
  misc_RNA (1)...(19): siRNA sense strand
uauacgggauccuuuaaau

SEQ ID NO: 1279208 - RNA, 19 nt, Homo sapiens
  misc_RNA (1)...(19): siRNA sense strand
cgaguuugguuaucagaug

SEQ ID NO: 1279209 - RNA, 19 nt, Homo sapiens
  misc_RNA (1)...(19): siRNA sense strand
gaacgaguagauuauaagu

SEQ ID NO: 1279210 - RNA, 19 nt, Homo sapiens
  misc_RNA (1)...(19): siRNA sense strand
gugaggagccaccaacauu

SEQ ID NO: 1279211 - RNA, 19 nt, Homo sapiens
  misc_RNA (1)...(19): siRNA sense strand
gauggcagcgacacaauug

SEQ ID NO: 1279212 - RNA, 19 nt, Homo sapiens
  misc_RNA (1)...(19): siRNA sense strand
gcuauggagcucauuggua

SEQ ID NO: 1279213 - RNA, 19 nt, Homo sapiens
  misc_RNA (1)...(19): siRNA sense strand
gaggagccaccaacauuug

SEQ ID NO: 1279214 - RNA, 19 nt, Homo sapiens
  misc_RNA (1)...(19): siRNA sense strand
acacaccuuuagugaagua

SEQ ID NO: 1279215 - RNA, 19 nt, Homo sapiens
  misc_RNA (1)...(19): siRNA sense strand
ucucagaugacgccuguua

SEQ ID NO: 1279216 - RNA, 19 nt, Homo sapiens
  misc_RNA (1)...(19): siRNA sense strand
uagagaaacauguccauau

SEQ ID NO: 1279217 - RNA, 19 nt, Homo sapiens
  misc_RNA (1)...(19): siRNA sense strand
ggugaacgaguagauuaua

SEQ ID NO: 1279218 - RNA, 19 nt, Homo sapiens
  misc_RNA (1)...(19): siRNA sense strand
gaaguagaaguauuugagu

SEQ ID NO: 1279219 - RNA, 19 nt, Homo sapiens
  misc_RNA (1)...(19): siRNA sense strand
gaaacauguccauauauac

SEQ ID NO: 1279220 - RNA, 19 nt, Homo sapiens
  misc_RNA (1)...(19): siRNA sense strand
ugacgccuguuauagagaa

SEQ ID NO: 1279221 - RNA, 19 nt, Homo sapiens
  misc_RNA (1)...(19): siRNA sense strand
cgaguagauuauaagugua

SEQ ID NO: 1279222 - RNA, 19 nt, Homo sapiens
  misc_RNA (1)...(19): siRNA sense strand
gcacuuuauuuguaaugag

SEQ ID NO: 1279223 - RNA, 19 nt, Homo sapiens
  misc_RNA (1)...(19): siRNA sense strand
guagaaguauuugaguauc

SEQ ID NO: 1279224 - RNA, 19 nt, Homo sapiens
  misc_RNA (1)...(19): siRNA sense strand
guauuugaguaucuugaug

SEQ ID NO: 1279225 - RNA, 19 nt, Homo sapiens
  misc_RNA (1)...(19): siRNA sense strand
aggaauacuugacaguuug

SEQ ID NO: 1279226 - RNA, 19 nt, Homo sapiens
  misc_RNA (1)...(19): siRNA sense strand
aguguaaaguggucaaaug

SEQ ID NO: 1279227 - RNA, 19 nt, Homo sapiens
  misc_RNA (1)...(19): siRNA sense strand
ccaaaacccuacuaugaga

SEQ ID NO: 1279228 - RNA, 19 nt, Homo sapiens
  misc_RNA (1)...(19): siRNA sense strand
ccacccauacuauuuguga

SEQ ID NO: 1279229 - RNA, 19 nt, Homo sapiens
  misc_RNA (1)...(19): siRNA sense strand
caccaacauuugaagcuau

SEQ ID NO: 1279230 - RNA, 19 nt, Homo sapiens
  misc_RNA (1)...(19): siRNA sense strand
uuggagagagcacgauuua

SEQ ID NO: 1279231 - RNA, 19 nt, Homo sapiens
  misc_RNA (1)...(19): siRNA sense strand
gguuaucagaugcacuuua

SEQ ID NO: 1279232 - RNA, 19 nt, Homo sapiens
  misc_RNA (1)...(19): siRNA sense strand
ugaggagccaccaacauuu

SEQ ID NO: 1279233 - RNA, 19 nt, Homo sapiens
  misc_RNA (1)...(19): siRNA sense strand
ggaaggaauacuugacagu

SEQ ID NO: 1279234 - RNA, 19 nt, Homo sapiens
  misc_RNA (1)...(19): siRNA sense strand
gaggaaggaauacuugaca

SEQ ID NO: 1279235 - RNA, 19 nt, Homo sapiens
  misc_RNA (1)...(19): siRNA sense strand
ugaguaucuugaugcagua

SEQ ID NO: 1279236 - RNA, 19 nt, Homo sapiens
  misc_RNA (1)...(19): siRNA sense strand
caccuuuagugaaguagaa

SEQ ID NO: 1279237 - RNA, 19 nt, Homo sapiens
  misc_RNA (1)...(19): siRNA sense strand
acagauaucaggauuugga

SEQ ID NO: 1279238 - RNA, 19 nt, Homo sapiens
  misc_RNA (1)...(19): siRNA sense strand
ucauugcugugauuguuau

SEQ ID NO: 1279239 - RNA, 19 nt, Homo sapiens
  misc_RNA (1)...(19): siRNA sense strand
ucagaugcacuuuauuugu

SEQ ID NO: 1279240 - RNA, 19 nt, Homo sapiens
  misc_RNA (1)...(19): siRNA sense strand
gugcugcuccagaguguaa

SEQ ID NO: 1279241 - RNA, 19 nt, Homo sapiens
  misc_RNA (1)...(19): siRNA sense strand
ggaaaacacaccuuuagug

SEQ ID NO: 1279242 - RNA, 19 nt, Homo sapiens
  misc_RNA (1)...(19): siRNA sense strand
aaggaucaguagcaauuug

SEQ ID NO: 1279243 - RNA, 19 nt, Homo sapiens
  misc_RNA (1)...(19): siRNA sense strand
uauauacgggauccuuuaa

SEQ ID NO: 1279244 - RNA, 19 nt, Homo sapiens
  misc_RNA (1)...(19): siRNA sense strand
ugaaguagaaguauuugag

SEQ ID NO: 1279245 - RNA, 19 nt, Homo sapiens
  misc_RNA (1)...(19): siRNA sense strand
cuugacaguuuggauguuu

SEQ ID NO: 1279246 - RNA, 19 nt, Homo sapiens
  misc_RNA (1)...(19): siRNA sense strand
cauauauacgggauccuuu

SEQ ID NO: 1279247 - RNA, 19 nt, Homo sapiens
  misc_RNA (1)...(19): siRNA sense strand
auauauacgggauccuuua

SEQ ID NO: 1279248 - RNA, 19 nt, Homo sapiens
  misc_RNA (1)...(19): siRNA sense strand
cuuaaaggaucaguagcaa

SEQ ID NO: 1279249 - RNA, 19 nt, Homo sapiens
  misc_RNA (1)...(19): siRNA sense strand
uaaaccugaggaaggaaua

SEQ ID NO: 1279250 - RNA, 19 nt, Homo sapiens
  misc_RNA (1)...(19): siRNA sense strand
agaugacgccuguuauaga

SEQ ID NO: 1279251 - RNA, 19 nt, Homo sapiens
  misc_RNA (1)...(19): siRNA sense strand
ugugauuguuauugccaua

SEQ ID NO: 1279252 - RNA, 19 nt, Homo sapiens
  misc_RNA (1)...(19): siRNA sense strand
gagagcacgauuuauugug

SEQ ID NO: 1279253 - RNA, 19 nt, Homo sapiens
  misc_RNA (1)...(19): siRNA sense strand
gaaguauuugaguaucuug

SEQ ID NO: 1279254 - RNA, 19 nt, Homo sapiens
  misc_RNA (1)...(19): siRNA sense strand
ccucuugccacccauacua

SEQ ID NO: 1279255 - RNA, 19 nt, Homo sapiens
  misc_RNA (1)...(19): siRNA sense strand
gauaucaggauuuggaaaa

SEQ ID NO: 1279256 - RNA, 19 nt, Homo sapiens
  misc_RNA (1)...(19): siRNA sense strand
ggcuaccugucucagauga

SEQ ID NO: 1279257 - RNA, 19 nt, Homo sapiens
  misc_RNA (1)...(19): siRNA sense strand
ccaugguguugcugcugua

SEQ ID NO: 1279258 - RNA, 19 nt, Homo sapiens
  misc_RNA (1)...(19): siRNA sense strand
cagaugacgccuguuauag

SEQ ID NO: 1279259 - RNA, 19 nt, Homo sapiens
  misc_RNA (1)...(19): siRNA sense strand
gucauugcugugauuguua

SEQ ID NO: 1279260 - RNA, 19 nt, Homo sapiens
  misc_RNA (1)...(19): siRNA sense strand
uuggugaacgaguagauua

SEQ ID NO: 1279261 - RNA, 19 nt, Homo sapiens
  misc_RNA (1)...(19): siRNA sense strand
ggagccaccaacauuugaa

SEQ ID NO: 1279262 - RNA, 19 nt, Homo sapiens
  misc_RNA (1)...(19): siRNA sense strand
gcgcuuuccuggguugcuu

SEQ ID NO: 1279263 - RNA, 19 nt, Homo sapiens
  misc_RNA (1)...(19): siRNA sense strand
uacuacaaagcaacaguua

SEQ ID NO: 1279264 - RNA, 19 nt, Homo sapiens
  misc_RNA (1)...(19): siRNA sense strand
cuugaugcaguaacuuaua

SEQ ID NO: 1279265 - RNA, 19 nt, Homo sapiens
  misc_RNA (1)...(19): siRNA sense strand
aaacauguccauauauacg

SEQ ID NO: 1279266 - RNA, 19 nt, Homo sapiens
  misc_RNA (1)...(19): siRNA sense strand
guguaaaguggucaaaugu

SEQ ID NO: 1279267 - RNA, 19 nt, Homo sapiens
  misc_RNA (1)...(19): siRNA sense strand
cuuacgaguuugguuauca

SEQ ID NO: 1279268 - RNA, 19 nt, Homo sapiens
  misc_RNA (1)...(19): siRNA sense strand
uacgggauccuuuaaaugg

SEQ ID NO: 1279269 - RNA, 19 nt, Homo sapiens
  misc_RNA (1)...(19): siRNA sense strand
aaccaaaacccuacuauga

SEQ ID NO: 1279270 - RNA, 19 nt, Homo sapiens
  misc_RNA (1)...(19): siRNA sense strand
cccaauaugugaaaagguu

SEQ ID NO: 1279271 - RNA, 19 nt, Homo sapiens
  misc_RNA (1)...(19): siRNA sense strand
cgauggcagcgacacaauu

SEQ ID NO: 1279272 - RNA, 19 nt, Homo sapiens
  misc_RNA (1)...(19): siRNA sense strand
gauccauuuucacuuauug

SEQ ID NO: 1279273 - RNA, 19 nt, Homo sapiens
  misc_RNA (1)...(19): siRNA sense strand
uugaugcaguaacuuauag

SEQ ID NO: 1279274 - RNA, 19 nt, Homo sapiens
  misc_RNA (1)...(19): siRNA sense strand
guaucuugaugcaguaacu

SEQ ID NO: 1279275 - RNA, 19 nt, Homo sapiens
  misc_RNA (1)...(19): siRNA sense strand
caacauuugaagcuaugga

SEQ ID NO: 1279276 - RNA, 19 nt, Homo sapiens
  misc_RNA (1)...(19): siRNA sense strand
gagauuggugaacgaguag

SEQ ID NO: 1279277 - RNA, 19 nt, Homo sapiens
  misc_RNA (1)...(19): siRNA sense strand
ggagagagcacgauuuauu

SEQ ID NO: 1279278 - RNA, 19 nt, Homo sapiens
  misc_RNA (1)...(19): siRNA sense strand
agagaaacauguccauaua

SEQ ID NO: 1279279 - RNA, 19 nt, Homo sapiens
  misc_RNA (1)...(19): siRNA sense strand
cagaugcacuuuauuugua

SEQ ID NO: 1279280 - RNA, 19 nt, Homo sapiens
  misc_RNA (1)...(19): siRNA sense strand
ggacuuacgaguuugguua

SEQ ID NO: 1279281 - RNA, 19 nt, Homo sapiens
  misc_RNA (1)...(19): siRNA sense strand
aaacagauaucaggauuug

SEQ ID NO: 1279282 - RNA, 19 nt, Homo sapiens
  misc_RNA (1)...(19): siRNA sense strand
cuauggagcucauugguaa

SEQ ID NO: 1279283 - RNA, 19 nt, Homo sapiens
  misc_RNA (1)...(19): siRNA sense strand
aaacacaccuuuagugaag

SEQ ID NO: 1279284 - RNA, 19 nt, Homo sapiens
  misc_RNA (1)...(19): siRNA sense strand
gaacuuaaaggaucaguag

SEQ ID NO: 1279285 - RNA, 19 nt, Homo sapiens
  misc_RNA (1)...(19): siRNA sense strand
gaaaacagauaucaggauu

SEQ ID NO: 1279286 - RNA, 19 nt, Homo sapiens
  misc_RNA (1)...(19): siRNA sense strand
uaaaggaucaguagcaauu

SEQ ID NO: 1279287 - RNA, 19 nt, Homo sapiens
  misc_RNA (1)...(19): siRNA sense strand
aaaugggacuuacgaguuu

SEQ ID NO: 1279288 - RNA, 19 nt, Homo sapiens
  misc_RNA (1)...(19): siRNA sense strand
guuaucagaugcacuuuau

SEQ ID NO: 1279289 - RNA, 19 nt, Homo sapiens
  misc_RNA (1)...(19): siRNA sense strand
ugagauuggugaacgagua

SEQ ID NO: 1279290 - RNA, 19 nt, Homo sapiens
  misc_RNA (1)...(19): siRNA sense strand
gugaacgaguagauuauaa

SEQ ID NO: 1279291 - RNA, 19 nt, Homo sapiens
  misc_RNA (1)...(19): siRNA sense strand
gagagagcacgauuuauug

SEQ ID NO: 1279292 - RNA, 19 nt, Homo sapiens
  misc_RNA (1)...(19): siRNA sense strand
caaaugggacuuacgaguu

SEQ ID NO: 1279293 - RNA, 19 nt, Homo sapiens
  misc_RNA (1)...(19): siRNA sense strand
ggucauugcugugauuguu

SEQ ID NO: 1279294 - RNA, 19 nt, Homo sapiens
  misc_RNA (1)...(19): siRNA sense strand
ccagauccauuuucacuua

SEQ ID NO: 1279295 - RNA, 19 nt, Homo sapiens
  misc_RNA (1)...(19): siRNA sense strand
gaaggaauacuugacaguu

SEQ ID NO: 1279296 - RNA, 19 nt, Homo sapiens
  misc_RNA (1)...(19): siRNA sense strand
aaggaauacuugacaguuu

SEQ ID NO: 1279297 - RNA, 19 nt, Homo sapiens
  misc_RNA (1)...(19): siRNA sense strand
ucagaugacgccuguuaua

SEQ ID NO: 1279298 - RNA, 19 nt, Homo sapiens
  misc_RNA (1)...(19): siRNA sense strand
gaaaacacaccuuuaguga

SEQ ID NO: 1279299 - RNA, 19 nt, Homo sapiens
  misc_RNA (1)...(19): siRNA sense strand
gaugacgccuguuauagag

SEQ ID NO: 1279300 - RNA, 19 nt, Homo sapiens
  misc_RNA (1)...(19): siRNA sense strand
gagaaacauguccauauau

SEQ ID NO: 1279301 - RNA, 19 nt, Homo sapiens
  misc_RNA (1)...(19): siRNA sense strand
acgaguagauuauaagugu

SEQ ID NO: 1279302 - RNA, 19 nt, Homo sapiens
  misc_RNA (1)...(19): siRNA sense strand
cuacaaagcaacaguuaug

SEQ ID NO: 1279303 - RNA, 19 nt, Homo sapiens
  misc_RNA (1)...(19): siRNA sense strand
ccaccaacauuugaagcua

SEQ ID NO: 1279304 - RNA, 19 nt, Homo sapiens
  misc_RNA (1)...(19): siRNA sense strand
uauacgggauccuuuaaau

SEQ ID NO: 1279305 - RNA, 19 nt, Homo sapiens
  misc_RNA (1)...(19): siRNA sense strand
cgaguuugguuaucagaug

SEQ ID NO: 1279306 - RNA, 19 nt, Homo sapiens
  misc_RNA (1)...(19): siRNA sense strand
gaacgaguagauuauaagu

SEQ ID NO: 1279307 - RNA, 19 nt, Homo sapiens
  misc_RNA (1)...(19): siRNA sense strand
gugaggagccaccaacauu

SEQ ID NO: 1279308 - RNA, 19 nt, Homo sapiens
  misc_RNA (1)...(19): siRNA sense strand
gauggcagcgacacaauug

SEQ ID NO: 1279309 - RNA, 19 nt, Homo sapiens
  misc_RNA (1)...(19): siRNA sense strand
gcuauggagcucauuggua

SEQ ID NO: 1279310 - RNA, 19 nt, Homo sapiens
  misc_RNA (1)...(19): siRNA sense strand
gaggagccaccaacauuug

SEQ ID NO: 1279311 - RNA, 19 nt, Homo sapiens
  misc_RNA (1)...(19): siRNA sense strand
acacaccuuuagugaagua

SEQ ID NO: 1279312 - RNA, 19 nt, Homo sapiens
  misc_RNA (1)...(19): siRNA sense strand
ucucagaugacgccuguua

SEQ ID NO: 1279313 - RNA, 19 nt, Homo sapiens
  misc_RNA (1)...(19): siRNA sense strand
uagagaaacauguccauau

SEQ ID NO: 1279314 - RNA, 19 nt, Homo sapiens
  misc_RNA (1)...(19): siRNA sense strand
guuccaaagugucuuaaag

SEQ ID NO: 1279315 - RNA, 19 nt, Homo sapiens
  misc_RNA (1)...(19): siRNA sense strand
ggugaacgaguagauuaua

SEQ ID NO: 1279316 - RNA, 19 nt, Homo sapiens
  misc_RNA (1)...(19): siRNA sense strand
gaaguagaaguauuugagu

SEQ ID NO: 1279317 - RNA, 19 nt, Homo sapiens
  misc_RNA (1)...(19): siRNA sense strand
gaaacauguccauauauac

SEQ ID NO: 1279318 - RNA, 19 nt, Homo sapiens
  misc_RNA (1)...(19): siRNA sense strand
ugacgccuguuauagagaa

SEQ ID NO: 1279319 - RNA, 19 nt, Homo sapiens
  misc_RNA (1)...(19): siRNA sense strand
cgaguagauuauaagugua

SEQ ID NO: 1279320 - RNA, 19 nt, Homo sapiens
  misc_RNA (1)...(19): siRNA sense strand
gcacuuuauuuguaaugag

SEQ ID NO: 1279321 - RNA, 19 nt, Homo sapiens
  misc_RNA (1)...(19): siRNA sense strand
guagaaguauuugaguauc

SEQ ID NO: 1279322 - RNA, 19 nt, Homo sapiens
  misc_RNA (1)...(19): siRNA sense strand
guauuugaguaucuugaug

SEQ ID NO: 1279323 - RNA, 19 nt, Homo sapiens
  misc_RNA (1)...(19): siRNA sense strand
aggaauacuugacaguuug

SEQ ID NO: 1279324 - RNA, 19 nt, Homo sapiens
  misc_RNA (1)...(19): siRNA sense strand
ccaaaacccuacuaugaga

SEQ ID NO: 1279325 - RNA, 19 nt, Homo sapiens
  misc_RNA (1)...(19): siRNA sense strand
aguguaaaguggucaaaug

SEQ ID NO: 1279326 - RNA, 19 nt, Homo sapiens
  misc_RNA (1)...(19): siRNA sense strand
ccacccauacuauuuguga

SEQ ID NO: 1279327 - RNA, 19 nt, Homo sapiens
  misc_RNA (1)...(19): siRNA sense strand
caccaacauuugaagcuau

SEQ ID NO: 1279328 - RNA, 19 nt, Homo sapiens
  misc_RNA (1)...(19): siRNA sense strand
uuggagagagcacgauuua

SEQ ID NO: 1279329 - RNA, 19 nt, Homo sapiens
  misc_RNA (1)...(19): siRNA sense strand
gguuaucagaugcacuuua

SEQ ID NO: 1279330 - RNA, 19 nt, Homo sapiens
  misc_RNA (1)...(19): siRNA sense strand
ugaggagccaccaacauuu

SEQ ID NO: 1279331 - RNA, 19 nt, Homo sapiens
  misc_RNA (1)...(19): siRNA sense strand
ggaaggaauacuugacagu

SEQ ID NO: 1279332 - RNA, 19 nt, Homo sapiens
  misc_RNA (1)...(19): siRNA sense strand
gaggaaggaauacuugaca

SEQ ID NO: 1279333 - RNA, 19 nt, Homo sapiens
  misc_RNA (1)...(19): siRNA sense strand
ccaguuccaaagugucuua

SEQ ID NO: 1279334 - RNA, 19 nt, Homo sapiens
  misc_RNA (1)...(19): siRNA sense strand
ugaguaucuugaugcagua

SEQ ID NO: 1279335 - RNA, 19 nt, Homo sapiens
  misc_RNA (1)...(19): siRNA sense strand
caccuuuagugaaguagaa

SEQ ID NO: 1279336 - RNA, 19 nt, Homo sapiens
  misc_RNA (1)...(19): siRNA sense strand
acagauaucaggauuugga

SEQ ID NO: 1279337 - RNA, 19 nt, Homo sapiens
  misc_RNA (1)...(19): siRNA sense strand
ucauugcugugauuguuau

SEQ ID NO: 1279338 - RNA, 19 nt, Homo sapiens
  misc_RNA (1)...(19): siRNA sense strand
ucagaugcacuuuauuugu

SEQ ID NO: 1279339 - RNA, 19 nt, Homo sapiens
  misc_RNA (1)...(19): siRNA sense strand
gugcugcuccagaguguaa

SEQ ID NO: 1279340 - RNA, 19 nt, Homo sapiens
  misc_RNA (1)...(19): siRNA sense strand
ggaaaacacaccuuuagug

SEQ ID NO: 1279341 - RNA, 19 nt, Homo sapiens
  misc_RNA (1)...(19): siRNA sense strand
aaggaucaguagcaauuug

SEQ ID NO: 1279342 - RNA, 19 nt, Homo sapiens
  misc_RNA (1)...(19): siRNA sense strand
uauauacgggauccuuuaa

SEQ ID NO: 1279343 - RNA, 19 nt, Homo sapiens
  misc_RNA (1)...(19): siRNA sense strand
ugaaguagaaguauuugag

SEQ ID NO: 1279344 - RNA, 19 nt, Homo sapiens
  misc_RNA (1)...(19): siRNA sense strand
cuugacaguuuggauguuu

SEQ ID NO: 1279345 - RNA, 19 nt, Homo sapiens
  misc_RNA (1)...(19): siRNA sense strand
cauauauacgggauccuuu

SEQ ID NO: 1279346 - RNA, 19 nt, Homo sapiens
  misc_RNA (1)...(19): siRNA sense strand
auauauacgggauccuuua

SEQ ID NO: 1279347 - RNA, 19 nt, Homo sapiens
  misc_RNA (1)...(19): siRNA sense strand
cuuaaaggaucaguagcaa

SEQ ID NO: 1279348 - RNA, 19 nt, Homo sapiens
  misc_RNA (1)...(19): siRNA sense strand
uaaaccugaggaaggaaua

SEQ ID NO: 1279349 - RNA, 19 nt, Homo sapiens
  misc_RNA (1)...(19): siRNA sense strand
agaugacgccuguuauaga

SEQ ID NO: 1279350 - RNA, 19 nt, Homo sapiens
  misc_RNA (1)...(19): siRNA sense strand
ugugauuguuauugccaua

SEQ ID NO: 1279351 - RNA, 19 nt, Homo sapiens
  misc_RNA (1)...(19): siRNA sense strand
gagagcacgauuuauugug

SEQ ID NO: 1279352 - RNA, 19 nt, Homo sapiens
  misc_RNA (1)...(19): siRNA sense strand
gaaguauuugaguaucuug

SEQ ID NO: 1279353 - RNA, 19 nt, Homo sapiens
  misc_RNA (1)...(19): siRNA sense strand
ggcuaccugucucagauga

SEQ ID NO: 1279354 - RNA, 19 nt, Homo sapiens
  misc_RNA (1)...(19): siRNA sense strand
gauaucaggauuuggaaaa

SEQ ID NO: 1279355 - RNA, 19 nt, Homo sapiens
  misc_RNA (1)...(19): siRNA sense strand
ccucuugccacccauacua

SEQ ID NO: 1279356 - RNA, 19 nt, Homo sapiens
  misc_RNA (1)...(19): siRNA sense strand
ccaugguguugcugcugua

SEQ ID NO: 1279357 - RNA, 19 nt, Homo sapiens
  misc_RNA (1)...(19): siRNA sense strand
cagaugacgccuguuauag

SEQ ID NO: 1279358 - RNA, 19 nt, Homo sapiens
  misc_RNA (1)...(19): siRNA sense strand
uuggugaacgaguagauua

SEQ ID NO: 1279359 - RNA, 19 nt, Homo sapiens
  misc_RNA (1)...(19): siRNA sense strand
gucauugcugugauuguua

SEQ ID NO: 1279360 - RNA, 19 nt, Homo sapiens
  misc_RNA (1)...(19): siRNA sense strand
ggagccaccaacauuugaa

SEQ ID NO: 1279361 - RNA, 19 nt, Homo sapiens
  misc_RNA (1)...(19): siRNA sense strand
gcgcuuuccuggguugcuu

SEQ ID NO: 1279362 - RNA, 19 nt, Homo sapiens
  misc_RNA (1)...(19): siRNA sense strand
uacuacaaagcaacaguua

SEQ ID NO: 1279363 - RNA, 19 nt, Homo sapiens
  misc_RNA (1)...(19): siRNA sense strand
cuugaugcaguaacuuaua

SEQ ID NO: 1279364 - RNA, 19 nt, Homo sapiens
  misc_RNA (1)...(19): siRNA sense strand
aaacauguccauauauacg

SEQ ID NO: 1279365 - RNA, 19 nt, Homo sapiens
  misc_RNA (1)...(19): siRNA sense strand
guguaaaguggucaaaugu

SEQ ID NO: 1279366 - RNA, 19 nt, Homo sapiens
  misc_RNA (1)...(19): siRNA sense strand
cuuacgaguuugguuauca

SEQ ID NO: 1279367 - RNA, 19 nt, Homo sapiens
  misc_RNA (1)...(19): siRNA sense strand
uacgggauccuuuaaaugg

SEQ ID NO: 1279368 - RNA, 19 nt, Homo sapiens
  misc_RNA (1)...(19): siRNA sense strand
aaccaaaacccuacuauga

SEQ ID NO: 1279369 - RNA, 19 nt, Homo sapiens
  misc_RNA (1)...(19): siRNA sense strand
cccaauaugugaaaagguu

SEQ ID NO: 1279370 - RNA, 19 nt, Homo sapiens
  misc_RNA (1)...(19): siRNA sense strand
cgauggcagcgacacaauu

SEQ ID NO: 1279371 - RNA, 19 nt, Homo sapiens
  misc_RNA (1)...(19): siRNA sense strand
gauccauuuucacuuauug

SEQ ID NO: 1279372 - RNA, 19 nt, Homo sapiens
  misc_RNA (1)...(19): siRNA sense strand
uugaugcaguaacuuauag

SEQ ID NO: 1279373 - RNA, 19 nt, Homo sapiens
  misc_RNA (1)...(19): siRNA sense strand
guaucuugaugcaguaacu

SEQ ID NO: 1279374 - RNA, 19 nt, Homo sapiens
  misc_RNA (1)...(19): siRNA sense strand
caacauuugaagcuaugga

SEQ ID NO: 1279375 - RNA, 19 nt, Homo sapiens
  misc_RNA (1)...(19): siRNA sense strand
gagauuggugaacgaguag

SEQ ID NO: 1279376 - RNA, 19 nt, Homo sapiens
  misc_RNA (1)...(19): siRNA sense strand
ggagagagcacgauuuauu

SEQ ID NO: 1279377 - RNA, 19 nt, Homo sapiens
  misc_RNA (1)...(19): siRNA sense strand
agagaaacauguccauaua

SEQ ID NO: 1279378 - RNA, 19 nt, Homo sapiens
  misc_RNA (1)...(19): siRNA sense strand
cagaugcacuuuauuugua

SEQ ID NO: 1279379 - RNA, 19 nt, Homo sapiens
  misc_RNA (1)...(19): siRNA sense strand
ggacuuacgaguuugguua

SEQ ID NO: 1279380 - RNA, 19 nt, Homo sapiens
  misc_RNA (1)...(19): siRNA sense strand
aaacagauaucaggauuug

SEQ ID NO: 1279381 - RNA, 19 nt, Homo sapiens
  misc_RNA (1)...(19): siRNA sense strand
cuauggagcucauugguaa

SEQ ID NO: 1279382 - RNA, 19 nt, Homo sapiens
  misc_RNA (1)...(19): siRNA sense strand
aaacacaccuuuagugaag

SEQ ID NO: 1279383 - RNA, 19 nt, Homo sapiens
  misc_RNA (1)...(19): siRNA sense strand
gaacuuaaaggaucaguag

SEQ ID NO: 1279384 - RNA, 19 nt, Homo sapiens
  misc_RNA (1)...(19): siRNA sense strand
gaaaacagauaucaggauu

SEQ ID NO: 1279385 - RNA, 19 nt, Homo sapiens
  misc_RNA (1)...(19): siRNA sense strand
uaaaggaucaguagcaauu

SEQ ID NO: 1279386 - RNA, 19 nt, Homo sapiens
  misc_RNA (1)...(19): siRNA sense strand
aaaugggacuuacgaguuu

SEQ ID NO: 1279387 - RNA, 19 nt, Homo sapiens
  misc_RNA (1)...(19): siRNA sense strand
guuaucagaugcacuuuau

SEQ ID NO: 1279388 - RNA, 19 nt, Homo sapiens
  misc_RNA (1)...(19): siRNA sense strand
gagcugaauaugccacuua

SEQ ID NO: 1279389 - RNA, 19 nt, Homo sapiens
  misc_RNA (1)...(19): siRNA sense strand
ugagauuggugaacgagua

SEQ ID NO: 1279390 - RNA, 19 nt, Homo sapiens
  misc_RNA (1)...(19): siRNA sense strand
gugaacgaguagauuauaa

SEQ ID NO: 1279391 - RNA, 19 nt, Homo sapiens
  misc_RNA (1)...(19): siRNA sense strand
gagagagcacgauuuauug

SEQ ID NO: 1279392 - RNA, 19 nt, Homo sapiens
  misc_RNA (1)...(19): siRNA sense strand
caaaugggacuuacgaguu

SEQ ID NO: 1279393 - RNA, 19 nt, Homo sapiens
  misc_RNA (1)...(19): siRNA sense strand
ggucauugcugugauuguu

SEQ ID NO: 1279394 - RNA, 19 nt, Homo sapiens
  misc_RNA (1)...(19): siRNA sense strand
ccagauccauuuucacuua

SEQ ID NO: 1279395 - RNA, 19 nt, Homo sapiens
  misc_RNA (1)...(19): siRNA sense strand
gaaggaauacuugacaguu

SEQ ID NO: 1279396 - RNA, 19 nt, Homo sapiens
  misc_RNA (1)...(19): siRNA sense strand
aaggaauacuugacaguuu

SEQ ID NO: 1279397 - RNA, 19 nt, Homo sapiens
  misc_RNA (1)...(19): siRNA sense strand
ucagaugacgccuguuaua

SEQ ID NO: 1279398 - RNA, 19 nt, Homo sapiens
  misc_RNA (1)...(19): siRNA sense strand
gaaaacacaccuuuaguga

SEQ ID NO: 1279399 - RNA, 19 nt, Homo sapiens
  misc_RNA (1)...(19): siRNA sense strand
gaugacgccuguuauagag

SEQ ID NO: 1279400 - RNA, 19 nt, Homo sapiens
  misc_RNA (1)...(19): siRNA sense strand
gagaaacauguccauauau

SEQ ID NO: 1279401 - RNA, 19 nt, Homo sapiens
  misc_RNA (1)...(19): siRNA sense strand
ccacuuaccagacuaaauc

SEQ ID NO: 1279402 - RNA, 19 nt, Homo sapiens
  misc_RNA (1)...(19): siRNA sense strand
acgaguagauuauaagugu

SEQ ID NO: 1279403 - RNA, 19 nt, Homo sapiens
  misc_RNA (1)...(19): siRNA sense strand
cuacaaagcaacaguuaug

SEQ ID NO: 1279404 - RNA, 19 nt, Homo sapiens
  misc_RNA (1)...(19): siRNA sense strand
ccaccaacauuugaagcua

SEQ ID NO: 1279405 - RNA, 19 nt, Homo sapiens
  misc_RNA (1)...(19): siRNA sense strand
uauacgggauccuuuaaau

SEQ ID NO: 1279406 - RNA, 19 nt, Homo sapiens
  misc_RNA (1)...(19): siRNA sense strand
cgaguuugguuaucagaug

SEQ ID NO: 1279407 - RNA, 19 nt, Homo sapiens
  misc_RNA (1)...(19): siRNA sense strand
gaacgaguagauuauaagu

SEQ ID NO: 1279408 - RNA, 19 nt, Homo sapiens
  misc_RNA (1)...(19): siRNA sense strand
gugaggagccaccaacauu

SEQ ID NO: 1279409 - RNA, 19 nt, Homo sapiens
  misc_RNA (1)...(19): siRNA sense strand
gauggcagcgacacaauug

SEQ ID NO: 1279410 - RNA, 19 nt, Homo sapiens
  misc_RNA (1)...(19): siRNA sense strand
ucucagaugacgccuguua

SEQ ID NO: 1279411 - RNA, 19 nt, Homo sapiens
  misc_RNA (1)...(19): siRNA sense strand
gaggagccaccaacauuug

SEQ ID NO: 1279412 - RNA, 19 nt, Homo sapiens
  misc_RNA (1)...(19): siRNA sense strand
gcuauggagcucauuggua

SEQ ID NO: 1279413 - RNA, 19 nt, Homo sapiens
  misc_RNA (1)...(19): siRNA sense strand
acacaccuuuagugaagua

SEQ ID NO: 1279414 - RNA, 19 nt, Homo sapiens
  misc_RNA (1)...(19): siRNA sense strand
uagagaaacauguccauau

SEQ ID NO: 1279415 - RNA, 19 nt, Homo sapiens
  misc_RNA (1)...(19): siRNA sense strand
guuccaaagugucuuaaag

SEQ ID NO: 1279416 - RNA, 19 nt, Homo sapiens
  misc_RNA (1)...(19): siRNA sense strand
ggugaacgaguagauuaua

SEQ ID NO: 1279417 - RNA, 19 nt, Homo sapiens
  misc_RNA (1)...(19): siRNA sense strand
gaaguagaaguauuugagu

SEQ ID NO: 1279418 - RNA, 19 nt, Homo sapiens
  misc_RNA (1)...(19): siRNA sense strand
gaaacauguccauauauac

SEQ ID NO: 1279419 - RNA, 19 nt, Homo sapiens
  misc_RNA (1)...(19): siRNA sense strand
ugacgccuguuauagagaa

SEQ ID NO: 1279420 - RNA, 19 nt, Homo sapiens
  misc_RNA (1)...(19): siRNA sense strand
cgaguagauuauaagugua

SEQ ID NO: 1279421 - RNA, 19 nt, Homo sapiens
  misc_RNA (1)...(19): siRNA sense strand
gcacuuuauuuguaaugag

SEQ ID NO: 1279422 - RNA, 19 nt, Homo sapiens
  misc_RNA (1)...(19): siRNA sense strand
guagaaguauuugaguauc

SEQ ID NO: 1279423 - RNA, 19 nt, Homo sapiens
  misc_RNA (1)...(19): siRNA sense strand
guauuugaguaucuugaug

SEQ ID NO: 1279424 - RNA, 19 nt, Homo sapiens
  misc_RNA (1)...(19): siRNA sense strand
aggaauacuugacaguuug

SEQ ID NO: 1279425 - RNA, 19 nt, Homo sapiens
  misc_RNA (1)...(19): siRNA sense strand
ccaaaacccuacuaugaga

SEQ ID NO: 1279426 - RNA, 19 nt, Homo sapiens
  misc_RNA (1)...(19): siRNA sense strand
aguguaaaguggucaaaug

SEQ ID NO: 1279427 - RNA, 19 nt, Homo sapiens
  misc_RNA (1)...(19): siRNA sense strand
ccacccauacuauuuguga

SEQ ID NO: 1279428 - RNA, 19 nt, Homo sapiens
  misc_RNA (1)...(19): siRNA sense strand
uuggagagagcacgauuua

SEQ ID NO: 1279429 - RNA, 19 nt, Homo sapiens
  misc_RNA (1)...(19): siRNA sense strand
gguuaucagaugcacuuua

SEQ ID NO: 1279430 - RNA, 19 nt, Homo sapiens
  misc_RNA (1)...(19): siRNA sense strand
caccaacauuugaagcuau

SEQ ID NO: 1279431 - RNA, 19 nt, Homo sapiens
  misc_RNA (1)...(19): siRNA sense strand
ugaggagccaccaacauuu

SEQ ID NO: 1279432 - RNA, 19 nt, Homo sapiens
  misc_RNA (1)...(19): siRNA sense strand
ggaaggaauacuugacagu

SEQ ID NO: 1279433 - RNA, 19 nt, Homo sapiens
  misc_RNA (1)...(19): siRNA sense strand
gaggaaggaauacuugaca

SEQ ID NO: 1279434 - RNA, 19 nt, Homo sapiens
  misc_RNA (1)...(19): siRNA sense strand
ccaguuccaaagugucuua

SEQ ID NO: 1279435 - RNA, 19 nt, Homo sapiens
  misc_RNA (1)...(19): siRNA sense strand
ugaguaucuugaugcagua

SEQ ID NO: 1279436 - RNA, 19 nt, Homo sapiens
  misc_RNA (1)...(19): siRNA sense strand
caccuuuagugaaguagaa

SEQ ID NO: 1279437 - RNA, 19 nt, Homo sapiens
  misc_RNA (1)...(19): siRNA sense strand
acagauaucaggauuugga

SEQ ID NO: 1279438 - RNA, 19 nt, Homo sapiens
  misc_RNA (1)...(19): siRNA sense strand
ucauugcugugauuguuau

SEQ ID NO: 1279439 - RNA, 19 nt, Homo sapiens
  misc_RNA (1)...(19): siRNA sense strand
ucagaugcacuuuauuugu

SEQ ID NO: 1279440 - RNA, 19 nt, Homo sapiens
  misc_RNA (1)...(19): siRNA sense strand
gugcugcuccagaguguaa

SEQ ID NO: 1279441 - RNA, 19 nt, Homo sapiens
  misc_RNA (1)...(19): siRNA sense strand
ggaaaacacaccuuuagug

SEQ ID NO: 1279442 - RNA, 19 nt, Homo sapiens
  misc_RNA (1)...(19): siRNA sense strand
aaggaucaguagcaauuug

SEQ ID NO: 1279443 - RNA, 19 nt, Homo sapiens
  misc_RNA (1)...(19): siRNA sense strand
uauauacgggauccuuuaa

SEQ ID NO: 1279444 - RNA, 19 nt, Homo sapiens
  misc_RNA (1)...(19): siRNA sense strand
ugaaguagaaguauuugag

SEQ ID NO: 1279445 - RNA, 19 nt, Homo sapiens
  misc_RNA (1)...(19): siRNA sense strand
cuugacaguuuggauguuu

SEQ ID NO: 1279446 - RNA, 19 nt, Homo sapiens
  misc_RNA (1)...(19): siRNA sense strand
cauauauacgggauccuuu

SEQ ID NO: 1279447 - RNA, 19 nt, Homo sapiens
  misc_RNA (1)...(19): siRNA sense strand
auauauacgggauccuuua

SEQ ID NO: 1279448 - RNA, 19 nt, Homo sapiens
  misc_RNA (1)...(19): siRNA sense strand
cuuaaaggaucaguagcaa

SEQ ID NO: 1279449 - RNA, 19 nt, Homo sapiens
  misc_RNA (1)...(19): siRNA sense strand
uaaaccugaggaaggaaua

SEQ ID NO: 1279450 - RNA, 19 nt, Homo sapiens
  misc_RNA (1)...(19): siRNA sense strand
agaugacgccuguuauaga

SEQ ID NO: 1279451 - RNA, 19 nt, Homo sapiens
  misc_RNA (1)...(19): siRNA sense strand
ugugauuguuauugccaua

SEQ ID NO: 1279452 - RNA, 19 nt, Homo sapiens
  misc_RNA (1)...(19): siRNA sense strand
gagagcacgauuuauugug

SEQ ID NO: 1279453 - RNA, 19 nt, Homo sapiens
  misc_RNA (1)...(19): siRNA sense strand
gaaguauuugaguaucuug

SEQ ID NO: 1279454 - RNA, 19 nt, Homo sapiens
  misc_RNA (1)...(19): siRNA sense strand
ggcuaccugucucagauga

SEQ ID NO: 1279455 - RNA, 19 nt, Homo sapiens
  misc_RNA (1)...(19): siRNA sense strand
gauaucaggauuuggaaaa

SEQ ID NO: 1279456 - RNA, 19 nt, Homo sapiens
  misc_RNA (1)...(19): siRNA sense strand
ccucuugccacccauacua

SEQ ID NO: 1279457 - RNA, 19 nt, Homo sapiens
  misc_RNA (1)...(19): siRNA sense strand
ccaugguguugcugcugua

SEQ ID NO: 1279458 - RNA, 19 nt, Homo sapiens
  misc_RNA (1)...(19): siRNA sense strand
cagaugacgccuguuauag

SEQ ID NO: 1279459 - RNA, 19 nt, Homo sapiens
  misc_RNA (1)...(19): siRNA sense strand
cagaugguggagcugaaua

SEQ ID NO: 1279460 - RNA, 19 nt, Homo sapiens
  misc_RNA (1)...(19): siRNA sense strand
gucauugcugugauuguua

SEQ ID NO: 1279461 - RNA, 19 nt, Homo sapiens
  misc_RNA (1)...(19): siRNA sense strand
ggagccaccaacauuugaa

SEQ ID NO: 1279462 - RNA, 19 nt, Homo sapiens
  misc_RNA (1)...(19): siRNA sense strand
uuggugaacgaguagauua

SEQ ID NO: 1279463 - RNA, 19 nt, Homo sapiens
  misc_RNA (1)...(19): siRNA sense strand
gcgcuuuccuggguugcuu

SEQ ID NO: 1279464 - RNA, 19 nt, Homo sapiens
  misc_RNA (1)...(19): siRNA sense strand
uacuacaaagcaacaguua

SEQ ID NO: 1279465 - RNA, 19 nt, Homo sapiens
  misc_RNA (1)...(19): siRNA sense strand
cuugaugcaguaacuuaua

SEQ ID NO: 1279466 - RNA, 19 nt, Homo sapiens
  misc_RNA (1)...(19): siRNA sense strand
aaacauguccauauauacg

SEQ ID NO: 1279467 - RNA, 19 nt, Homo sapiens
  misc_RNA (1)...(19): siRNA sense strand
guguaaaguggucaaaugu

SEQ ID NO: 1279468 - RNA, 19 nt, Homo sapiens
  misc_RNA (1)...(19): siRNA sense strand
cuuacgaguuugguuauca

SEQ ID NO: 1279469 - RNA, 19 nt, Homo sapiens
  misc_RNA (1)...(19): siRNA sense strand
uacgggauccuuuaaaugg

SEQ ID NO: 1279470 - RNA, 19 nt, Homo sapiens
  misc_RNA (1)...(19): siRNA sense strand
gcagaugguggagcugaau

SEQ ID NO: 1279471 - RNA, 19 nt, Homo sapiens
  misc_RNA (1)...(19): siRNA sense strand
aaccaaaacccuacuauga

SEQ ID NO: 1279472 - RNA, 19 nt, Homo sapiens
  misc_RNA (1)...(19): siRNA sense strand
uugaugcaguaacuuauag

SEQ ID NO: 1279473 - RNA, 19 nt, Homo sapiens
  misc_RNA (1)...(19): siRNA sense strand
ggagcugaauaugccacuu

SEQ ID NO: 1279474 - RNA, 19 nt, Homo sapiens
  misc_RNA (1)...(19): siRNA sense strand
cgauggcagcgacacaauu

SEQ ID NO: 1279475 - RNA, 19 nt, Homo sapiens
  misc_RNA (1)...(19): siRNA sense strand
gauccauuuucacuuauug

SEQ ID NO: 1279476 - RNA, 19 nt, Homo sapiens
  misc_RNA (1)...(19): siRNA sense strand
ggagagagcacgauuuauu

SEQ ID NO: 1279477 - RNA, 19 nt, Homo sapiens
  misc_RNA (1)...(19): siRNA sense strand
agagaaacauguccauaua

SEQ ID NO: 1279478 - RNA, 19 nt, Homo sapiens
  misc_RNA (1)...(19): siRNA sense strand
cagaugcacuuuauuugua

SEQ ID NO: 1279479 - RNA, 19 nt, Homo sapiens
  misc_RNA (1)...(19): siRNA sense strand
ggacuuacgaguuugguua

SEQ ID NO: 1279480 - RNA, 19 nt, Homo sapiens
  misc_RNA (1)...(19): siRNA sense strand
aaacagauaucaggauuug

SEQ ID NO: 1279481 - RNA, 19 nt, Homo sapiens
  misc_RNA (1)...(19): siRNA sense strand
cuauggagcucauugguaa

SEQ ID NO: 1279482 - RNA, 19 nt, Homo sapiens
  misc_RNA (1)...(19): siRNA sense strand
aaacacaccuuuagugaag

SEQ ID NO: 1279483 - RNA, 19 nt, Homo sapiens
  misc_RNA (1)...(19): siRNA sense strand
gaacuuaaaggaucaguag

SEQ ID NO: 1279484 - RNA, 19 nt, Homo sapiens
  misc_RNA (1)...(19): siRNA sense strand
gaaaacagauaucaggauu

SEQ ID NO: 1279485 - RNA, 19 nt, Homo sapiens
  misc_RNA (1)...(19): siRNA sense strand
uaaaggaucaguagcaauu

SEQ ID NO: 1279486 - RNA, 19 nt, Homo sapiens
  misc_RNA (1)...(19): siRNA sense strand
aaaugggacuuacgaguuu

SEQ ID NO: 1279487 - RNA, 19 nt, Homo sapiens
  misc_RNA (1)...(19): siRNA sense strand
guuaucagaugcacuuuau

SEQ ID NO: 1279488 - RNA, 19 nt, Homo sapiens
  misc_RNA (1)...(19): siRNA sense strand
ugagauuggugaacgagua

SEQ ID NO: 1279489 - RNA, 19 nt, Homo sapiens
  misc_RNA (1)...(19): siRNA sense strand
gugaacgaguagauuauaa

SEQ ID NO: 1279490 - RNA, 19 nt, Homo sapiens
  misc_RNA (1)...(19): siRNA sense strand
gagagagcacgauuuauug

SEQ ID NO: 1279491 - RNA, 19 nt, Homo sapiens
  misc_RNA (1)...(19): siRNA sense strand
caaaugggacuuacgaguu

SEQ ID NO: 1279492 - RNA, 19 nt, Homo sapiens
  misc_RNA (1)...(19): siRNA sense strand
ggucauugcugugauuguu

SEQ ID NO: 1279493 - RNA, 19 nt, Homo sapiens
  misc_RNA (1)...(19): siRNA sense strand
ccagauccauuuucacuua

SEQ ID NO: 1279494 - RNA, 19 nt, Homo sapiens
  misc_RNA (1)...(19): siRNA sense strand
gaaggaauacuugacaguu

SEQ ID NO: 1279495 - RNA, 19 nt, Homo sapiens
  misc_RNA (1)...(19): siRNA sense strand
aaggaauacuugacaguuu

SEQ ID NO: 1279496 - RNA, 19 nt, Homo sapiens
  misc_RNA (1)...(19): siRNA sense strand
ucagaugacgccuguuaua

SEQ ID NO: 1279497 - RNA, 19 nt, Homo sapiens
  misc_RNA (1)...(19): siRNA sense strand
gaaaacacaccuuuaguga

SEQ ID NO: 1279498 - RNA, 19 nt, Homo sapiens
  misc_RNA (1)...(19): siRNA sense strand
gaugacgccuguuauagag

SEQ ID NO: 1279499 - RNA, 19 nt, Homo sapiens
  misc_RNA (1)...(19): siRNA sense strand
gagaaacauguccauauau

SEQ ID NO: 1279500 - RNA, 19 nt, Homo sapiens
  misc_RNA (1)...(19): siRNA sense strand
acgaguagauuauaagugu

SEQ ID NO: 1279501 - RNA, 19 nt, Homo sapiens
  misc_RNA (1)...(19): siRNA sense strand
cuacaaagcaacaguuaug

SEQ ID NO: 1279502 - RNA, 19 nt, Homo sapiens
  misc_RNA (1)...(19): siRNA sense strand
ccaccaacauuugaagcua

SEQ ID NO: 1279503 - RNA, 19 nt, Homo sapiens
  misc_RNA (1)...(19): siRNA sense strand
uauacgggauccuuuaaau

SEQ ID NO: 1279504 - RNA, 19 nt, Homo sapiens
  misc_RNA (1)...(19): siRNA sense strand
cgaguuugguuaucagaug

SEQ ID NO: 1279505 - RNA, 19 nt, Homo sapiens
  misc_RNA (1)...(19): siRNA sense strand
gaacgaguagauuauaagu

SEQ ID NO: 1279506 - RNA, 19 nt, Homo sapiens
  misc_RNA (1)...(19): siRNA sense strand
gugaggagccaccaacauu

SEQ ID NO: 1279507 - RNA, 19 nt, Homo sapiens
  misc_RNA (1)...(19): siRNA sense strand
gauggcagcgacacaauug

SEQ ID NO: 1279508 - RNA, 19 nt, Homo sapiens
  misc_RNA (1)...(19): siRNA sense strand
gcuauggagcucauuggua

SEQ ID NO: 1279509 - RNA, 19 nt, Homo sapiens
  misc_RNA (1)...(19): siRNA sense strand
gaggagccaccaacauuug

SEQ ID NO: 1279510 - RNA, 19 nt, Homo sapiens
  misc_RNA (1)...(19): siRNA sense strand
acacaccuuuagugaagua

SEQ ID NO: 1279511 - RNA, 19 nt, Homo sapiens
  misc_RNA (1)...(19): siRNA sense strand
ucucagaugacgccuguua

SEQ ID NO: 1279512 - RNA, 19 nt, Homo sapiens
  misc_RNA (1)...(19): siRNA sense strand
uagagaaacauguccauau

SEQ ID NO: 1279513 - RNA, 19 nt, Homo sapiens
  misc_RNA (1)...(19): siRNA sense strand
guuccaaagugucuuaaag

SEQ ID NO: 1279514 - RNA, 19 nt, Homo sapiens
  misc_RNA (1)...(19): siRNA sense strand
ggugaacgaguagauuaua

SEQ ID NO: 1279515 - RNA, 19 nt, Homo sapiens
  misc_RNA (1)...(19): siRNA sense strand
gaaguagaaguauuugagu

SEQ ID NO: 1279516 - RNA, 19 nt, Homo sapiens
  misc_RNA (1)...(19): siRNA sense strand
gaaacauguccauauauac

SEQ ID NO: 1279517 - RNA, 19 nt, Homo sapiens
  misc_RNA (1)...(19): siRNA sense strand
ugacgccuguuauagagaa

SEQ ID NO: 1279518 - RNA, 19 nt, Homo sapiens
  misc_RNA (1)...(19): siRNA sense strand
cgaguagauuauaagugua

SEQ ID NO: 1279519 - RNA, 19 nt, Homo sapiens
  misc_RNA (1)...(19): siRNA sense strand
gcacuuuauuuguaaugag

SEQ ID NO: 1279520 - RNA, 19 nt, Homo sapiens
  misc_RNA (1)...(19): siRNA sense strand
guagaaguauuugaguauc

SEQ ID NO: 1279521 - RNA, 19 nt, Homo sapiens
  misc_RNA (1)...(19): siRNA sense strand
guauuugaguaucuugaug

SEQ ID NO: 1279522 - RNA, 19 nt, Homo sapiens
  misc_RNA (1)...(19): siRNA sense strand
aggaauacuugacaguuug

SEQ ID NO: 1279523 - RNA, 19 nt, Homo sapiens
  misc_RNA (1)...(19): siRNA sense strand
ccaaaacccuacuaugaga

SEQ ID NO: 1279524 - RNA, 19 nt, Homo sapiens
  misc_RNA (1)...(19): siRNA sense strand
aguguaaaguggucaaaug

SEQ ID NO: 1279525 - RNA, 19 nt, Homo sapiens
  misc_RNA (1)...(19): siRNA sense strand
ccacccauacuauuuguga

SEQ ID NO: 1279526 - RNA, 19 nt, Homo sapiens
  misc_RNA (1)...(19): siRNA sense strand
caccaacauuugaagcuau

SEQ ID NO: 1279527 - RNA, 19 nt, Homo sapiens
  misc_RNA (1)...(19): siRNA sense strand
uuggagagagcacgauuua

SEQ ID NO: 1279528 - RNA, 19 nt, Homo sapiens
  misc_RNA (1)...(19): siRNA sense strand
gguuaucagaugcacuuua

SEQ ID NO: 1279529 - RNA, 19 nt, Homo sapiens
  misc_RNA (1)...(19): siRNA sense strand
ugaggagccaccaacauuu

SEQ ID NO: 1279530 - RNA, 19 nt, Homo sapiens
  misc_RNA (1)...(19): siRNA sense strand
ggaaggaauacuugacagu

SEQ ID NO: 1279531 - RNA, 19 nt, Homo sapiens
  misc_RNA (1)...(19): siRNA sense strand
gaggaaggaauacuugaca

SEQ ID NO: 1279532 - RNA, 19 nt, Homo sapiens
  misc_RNA (1)...(19): siRNA sense strand
ccaguuccaaagugucuua

SEQ ID NO: 1279533 - RNA, 19 nt, Homo sapiens
  misc_RNA (1)...(19): siRNA sense strand
ugaguaucuugaugcagua

SEQ ID NO: 1279534 - RNA, 19 nt, Homo sapiens
  misc_RNA (1)...(19): siRNA sense strand
caccuuuagugaaguagaa

SEQ ID NO: 1279535 - RNA, 19 nt, Homo sapiens
  misc_RNA (1)...(19): siRNA sense strand
acagauaucaggauuugga

SEQ ID NO: 1279536 - RNA, 19 nt, Homo sapiens
  misc_RNA (1)...(19): siRNA sense strand
ucauugcugugauuguuau

SEQ ID NO: 1279537 - RNA, 19 nt, Homo sapiens
  misc_RNA (1)...(19): siRNA sense strand
ucagaugcacuuuauuugu

SEQ ID NO: 1279538 - RNA, 19 nt, Homo sapiens
  misc_RNA (1)...(19): siRNA sense strand
gugcugcuccagaguguaa

SEQ ID NO: 1279539 - RNA, 19 nt, Homo sapiens
  misc_RNA (1)...(19): siRNA sense strand
ggaaaacacaccuuuagug

SEQ ID NO: 1279540 - RNA, 19 nt, Homo sapiens
  misc_RNA (1)...(19): siRNA sense strand
aaggaucaguagcaauuug

SEQ ID NO: 1279541 - RNA, 19 nt, Homo sapiens
  misc_RNA (1)...(19): siRNA sense strand
uauauacgggauccuuuaa

SEQ ID NO: 1279542 - RNA, 19 nt, Homo sapiens
  misc_RNA (1)...(19): siRNA sense strand
ugaaguagaaguauuugag

SEQ ID NO: 1279543 - RNA, 19 nt, Homo sapiens
  misc_RNA (1)...(19): siRNA sense strand
cuugacaguuuggauguuu

SEQ ID NO: 1279544 - RNA, 19 nt, Homo sapiens
  misc_RNA (1)...(19): siRNA sense strand
cauauauacgggauccuuu

SEQ ID NO: 1279545 - RNA, 19 nt, Homo sapiens
  misc_RNA (1)...(19): siRNA sense strand
auauauacgggauccuuua

SEQ ID NO: 1279546 - RNA, 19 nt, Homo sapiens
  misc_RNA (1)...(19): siRNA sense strand
cuuaaaggaucaguagcaa

SEQ ID NO: 1279547 - RNA, 19 nt, Homo sapiens
  misc_RNA (1)...(19): siRNA sense strand
uaaaccugaggaaggaaua

SEQ ID NO: 1279548 - RNA, 19 nt, Homo sapiens
  misc_RNA (1)...(19): siRNA sense strand
agaugacgccuguuauaga

SEQ ID NO: 1279549 - RNA, 19 nt, Homo sapiens
  misc_RNA (1)...(19): siRNA sense strand
ugugauuguuauugccaua

SEQ ID NO: 1279550 - RNA, 19 nt, Homo sapiens
  misc_RNA (1)...(19): siRNA sense strand
gagagcacgauuuauugug

SEQ ID NO: 1279551 - RNA, 19 nt, Homo sapiens
  misc_RNA (1)...(19): siRNA sense strand
gaaguauuugaguaucuug

SEQ ID NO: 1279552 - RNA, 19 nt, Homo sapiens
  misc_RNA (1)...(19): siRNA sense strand
ggcuaccugucucagauga

SEQ ID NO: 1279553 - RNA, 19 nt, Homo sapiens
  misc_RNA (1)...(19): siRNA sense strand
gauaucaggauuuggaaaa

SEQ ID NO: 1279554 - RNA, 19 nt, Homo sapiens
  misc_RNA (1)...(19): siRNA sense strand
ccucuugccacccauacua

SEQ ID NO: 1279555 - RNA, 19 nt, Homo sapiens
  misc_RNA (1)...(19): siRNA sense strand
ccaugguguugcugcugua

SEQ ID NO: 1279556 - RNA, 19 nt, Homo sapiens
  misc_RNA (1)...(19): siRNA sense strand
cagaugacgccuguuauag

SEQ ID NO: 1279557 - RNA, 19 nt, Homo sapiens
  misc_RNA (1)...(19): siRNA sense strand
uuggugaacgaguagauua

SEQ ID NO: 1279558 - RNA, 19 nt, Homo sapiens
  misc_RNA (1)...(19): siRNA sense strand
gucauugcugugauuguua

SEQ ID NO: 1279559 - RNA, 19 nt, Homo sapiens
  misc_RNA (1)...(19): siRNA sense strand
ggagccaccaacauuugaa

SEQ ID NO: 1279560 - RNA, 19 nt, Homo sapiens
  misc_RNA (1)...(19): siRNA sense strand
gcgcuuuccuggguugcuu

SEQ ID NO: 1279561 - RNA, 19 nt, Homo sapiens
  misc_RNA (1)...(19): siRNA sense strand
uacuacaaagcaacaguua

SEQ ID NO: 1279562 - RNA, 19 nt, Homo sapiens
  misc_RNA (1)...(19): siRNA sense strand
cuugaugcaguaacuuaua

SEQ ID NO: 1279563 - RNA, 19 nt, Homo sapiens
  misc_RNA (1)...(19): siRNA sense strand
aaacauguccauauauacg

SEQ ID NO: 1279564 - RNA, 19 nt, Homo sapiens
  misc_RNA (1)...(19): siRNA sense strand
guguaaaguggucaaaugu

SEQ ID NO: 1279565 - RNA, 19 nt, Homo sapiens
  misc_RNA (1)...(19): siRNA sense strand
cuuacgaguuugguuauca

SEQ ID NO: 1279566 - RNA, 19 nt, Homo sapiens
  misc_RNA (1)...(19): siRNA sense strand
uacgggauccuuuaaaugg

SEQ ID NO: 1279567 - RNA, 19 nt, Homo sapiens
  misc_RNA (1)...(19): siRNA sense strand
aaccaaaacccuacuauga

SEQ ID NO: 1279568 - RNA, 19 nt, Homo sapiens
  misc_RNA (1)...(19): siRNA sense strand
cccaauaugugaaaagguu

SEQ ID NO: 1279569 - RNA, 19 nt, Homo sapiens
  misc_RNA (1)...(19): siRNA sense strand
cgauggcagcgacacaauu

SEQ ID NO: 1279570 - RNA, 19 nt, Homo sapiens
  misc_RNA (1)...(19): siRNA sense strand
gauccauuuucacuuauug

SEQ ID NO: 1279571 - RNA, 19 nt, Homo sapiens
  misc_RNA (1)...(19): siRNA sense strand
uugaugcaguaacuuauag

SEQ ID NO: 1279572 - RNA, 19 nt, Homo sapiens
  misc_RNA (1)...(19): siRNA sense strand
guaucuugaugcaguaacu

SEQ ID NO: 1279573 - RNA, 19 nt, Homo sapiens
  misc_RNA (1)...(19): siRNA sense strand
caacauuugaagcuaugga

SEQ ID NO: 1279574 - RNA, 19 nt, Homo sapiens
  misc_RNA (1)...(19): siRNA sense strand
gagauuggugaacgaguag

SEQ ID NO: 1279575 - RNA, 19 nt, Homo sapiens
  misc_RNA (1)...(19): siRNA sense strand
ggagagagcacgauuuauu

SEQ ID NO: 1279576 - RNA, 19 nt, Homo sapiens
  misc_RNA (1)...(19): siRNA sense strand
agagaaacauguccauaua

SEQ ID NO: 1279577 - RNA, 19 nt, Homo sapiens
  misc_RNA (1)...(19): siRNA sense strand
cagaugcacuuuauuugua

SEQ ID NO: 1279578 - RNA, 19 nt, Homo sapiens
  misc_RNA (1)...(19): siRNA sense strand
ggacuuacgaguuugguua

SEQ ID NO: 1279579 - RNA, 19 nt, Homo sapiens
  misc_RNA (1)...(19): siRNA sense strand
aaacagauaucaggauuug

SEQ ID NO: 1279580 - RNA, 19 nt, Homo sapiens
  misc_RNA (1)...(19): siRNA sense strand
cuauggagcucauugguaa

SEQ ID NO: 1279581 - RNA, 19 nt, Homo sapiens
  misc_RNA (1)...(19): siRNA sense strand
aaacacaccuuuagugaag

SEQ ID NO: 1279582 - RNA, 19 nt, Homo sapiens
  misc_RNA (1)...(19): siRNA sense strand
gaacuuaaaggaucaguag

SEQ ID NO: 1279583 - RNA, 19 nt, Homo sapiens
  misc_RNA (1)...(19): siRNA sense strand
gaaaacagauaucaggauu

SEQ ID NO: 1279584 - RNA, 19 nt, Homo sapiens
  misc_RNA (1)...(19): siRNA sense strand
uaaaggaucaguagcaauu

SEQ ID NO: 1279585 - RNA, 19 nt, Homo sapiens
  misc_RNA (1)...(19): siRNA sense strand
aaaugggacuuacgaguuu

SEQ ID NO: 1279586 - RNA, 19 nt, Homo sapiens
  misc_RNA (1)...(19): siRNA sense strand
guuaucagaugcacuuuau

SEQ ID NO: 1279587 - RNA, 19 nt, Homo sapiens
  misc_RNA (1)...(19): siRNA sense strand
ugagauuggugaacgagua

SEQ ID NO: 1279588 - RNA, 19 nt, Homo sapiens
  misc_RNA (1)...(19): siRNA sense strand
gugaacgaguagauuauaa

SEQ ID NO: 1279589 - RNA, 19 nt, Homo sapiens
  misc_RNA (1)...(19): siRNA sense strand
gagagagcacgauuuauug

SEQ ID NO: 1279590 - RNA, 19 nt, Homo sapiens
  misc_RNA (1)...(19): siRNA sense strand
caaaugggacuuacgaguu

SEQ ID NO: 1279591 - RNA, 19 nt, Homo sapiens
  misc_RNA (1)...(19): siRNA sense strand
ggucauugcugugauuguu

SEQ ID NO: 1279592 - RNA, 19 nt, Homo sapiens
  misc_RNA (1)...(19): siRNA sense strand
ccagauccauuuucacuua

SEQ ID NO: 1279593 - RNA, 19 nt, Homo sapiens
  misc_RNA (1)...(19): siRNA sense strand
gaaggaauacuugacaguu

SEQ ID NO: 1279594 - RNA, 19 nt, Homo sapiens
  misc_RNA (1)...(19): siRNA sense strand
aaggaauacuugacaguuu

SEQ ID NO: 1279595 - RNA, 19 nt, Homo sapiens
  misc_RNA (1)...(19): siRNA sense strand
ucagaugacgccuguuaua

SEQ ID NO: 1279596 - RNA, 19 nt, Homo sapiens
  misc_RNA (1)...(19): siRNA sense strand
gaaaacacaccuuuaguga

SEQ ID NO: 1279597 - RNA, 19 nt, Homo sapiens
  misc_RNA (1)...(19): siRNA sense strand
gaugacgccuguuauagag

SEQ ID NO: 1279598 - RNA, 19 nt, Homo sapiens
  misc_RNA (1)...(19): siRNA sense strand
gagaaacauguccauauau

SEQ ID NO: 1279599 - RNA, 19 nt, Homo sapiens
  misc_RNA (1)...(19): siRNA sense strand
acgaguagauuauaagugu

SEQ ID NO: 1279600 - RNA, 19 nt, Homo sapiens
  misc_RNA (1)...(19): siRNA sense strand
cuacaaagcaacaguuaug

SEQ ID NO: 1279601 - RNA, 19 nt, Homo sapiens
  misc_RNA (1)...(19): siRNA sense strand
ccaccaacauuugaagcua

SEQ ID NO: 1279602 - RNA, 19 nt, Homo sapiens
  misc_RNA (1)...(19): siRNA sense strand
uauacgggauccuuuaaau

SEQ ID NO: 1279603 - RNA, 19 nt, Homo sapiens
  misc_RNA (1)...(19): siRNA sense strand
cgaguuugguuaucagaug

SEQ ID NO: 1279604 - RNA, 19 nt, Homo sapiens
  misc_RNA (1)...(19): siRNA sense strand
gaacgaguagauuauaagu

SEQ ID NO: 1279605 - RNA, 19 nt, Homo sapiens
  misc_RNA (1)...(19): siRNA sense strand
gugaggagccaccaacauu

SEQ ID NO: 1279606 - RNA, 19 nt, Homo sapiens
  misc_RNA (1)...(19): siRNA sense strand
gauggcagcgacacaauug

SEQ ID NO: 1279607 - RNA, 19 nt, Homo sapiens
  misc_RNA (1)...(19): siRNA sense strand
gcuauggagcucauuggua

SEQ ID NO: 1279608 - RNA, 19 nt, Homo sapiens
  misc_RNA (1)...(19): siRNA sense strand
gaggagccaccaacauuug

SEQ ID NO: 1279609 - RNA, 19 nt, Homo sapiens
  misc_RNA (1)...(19): siRNA sense strand
acacaccuuuagugaagua

SEQ ID NO: 1279610 - RNA, 19 nt, Homo sapiens
  misc_RNA (1)...(19): siRNA sense strand
ucucagaugacgccuguua

SEQ ID NO: 1279611 - RNA, 19 nt, Homo sapiens
  misc_RNA (1)...(19): siRNA sense strand
uagagaaacauguccauau

SEQ ID NO: 1279612 - RNA, 19 nt, Homo sapiens
  misc_RNA (1)...(19): siRNA sense strand
ggugaacgaguagauuaua

SEQ ID NO: 1279613 - RNA, 19 nt, Homo sapiens
  misc_RNA (1)...(19): siRNA sense strand
gaaguagaaguauuugagu

SEQ ID NO: 1279614 - RNA, 19 nt, Homo sapiens
  misc_RNA (1)...(19): siRNA sense strand
gaaacauguccauauauac

SEQ ID NO: 1279615 - RNA, 19 nt, Homo sapiens
  misc_RNA (1)...(19): siRNA sense strand
ugacgccuguuauagagaa

SEQ ID NO: 1279616 - RNA, 19 nt, Homo sapiens
  misc_RNA (1)...(19): siRNA sense strand
cgaguagauuauaagugua

SEQ ID NO: 1279617 - RNA, 19 nt, Homo sapiens
  misc_RNA (1)...(19): siRNA sense strand
gcacuuuauuuguaaugag

SEQ ID NO: 1279618 - RNA, 19 nt, Homo sapiens
  misc_RNA (1)...(19): siRNA sense strand
guagaaguauuugaguauc

SEQ ID NO: 1279619 - RNA, 19 nt, Homo sapiens
  misc_RNA (1)...(19): siRNA sense strand
guauuugaguaucuugaug

SEQ ID NO: 1279620 - RNA, 19 nt, Homo sapiens
  misc_RNA (1)...(19): siRNA sense strand
aggaauacuugacaguuug

SEQ ID NO: 1279621 - RNA, 19 nt, Homo sapiens
  misc_RNA (1)...(19): siRNA sense strand
aguguaaaguggucaaaug

SEQ ID NO: 1279622 - RNA, 19 nt, Homo sapiens
  misc_RNA (1)...(19): siRNA sense strand
ccaaaacccuacuaugaga

SEQ ID NO: 1279623 - RNA, 19 nt, Homo sapiens
  misc_RNA (1)...(19): siRNA sense strand
ccacccauacuauuuguga

SEQ ID NO: 1279624 - RNA, 19 nt, Homo sapiens
  misc_RNA (1)...(19): siRNA sense strand
caccaacauuugaagcuau

SEQ ID NO: 1279625 - RNA, 19 nt, Homo sapiens
  misc_RNA (1)...(19): siRNA sense strand
uuggagagagcacgauuua

SEQ ID NO: 1279626 - RNA, 19 nt, Homo sapiens
  misc_RNA (1)...(19): siRNA sense strand
gguuaucagaugcacuuua

SEQ ID NO: 1279627 - RNA, 19 nt, Homo sapiens
  misc_RNA (1)...(19): siRNA sense strand
ugaggagccaccaacauuu

SEQ ID NO: 1279628 - RNA, 19 nt, Homo sapiens
  misc_RNA (1)...(19): siRNA sense strand
ggaaggaauacuugacagu

SEQ ID NO: 1279629 - RNA, 19 nt, Homo sapiens
  misc_RNA (1)...(19): siRNA sense strand
gaggaaggaauacuugaca

SEQ ID NO: 1279630 - RNA, 19 nt, Homo sapiens
  misc_RNA (1)...(19): siRNA sense strand
ugaguaucuugaugcagua

SEQ ID NO: 1279631 - RNA, 19 nt, Homo sapiens
  misc_RNA (1)...(19): siRNA sense strand
caccuuuagugaaguagaa

SEQ ID NO: 1279632 - RNA, 19 nt, Homo sapiens
  misc_RNA (1)...(19): siRNA sense strand
acagauaucaggauuugga

SEQ ID NO: 1279633 - RNA, 19 nt, Homo sapiens
  misc_RNA (1)...(19): siRNA sense strand
ucauugcugugauuguuau

SEQ ID NO: 1279634 - RNA, 19 nt, Homo sapiens
  misc_RNA (1)...(19): siRNA sense strand
ucagaugcacuuuauuugu

SEQ ID NO: 1279635 - RNA, 19 nt, Homo sapiens
  misc_RNA (1)...(19): siRNA sense strand
gugcugcuccagaguguaa

SEQ ID NO: 1279636 - RNA, 19 nt, Homo sapiens
  misc_RNA (1)...(19): siRNA sense strand
ggaaaacacaccuuuagug

SEQ ID NO: 1279637 - RNA, 19 nt, Homo sapiens
  misc_RNA (1)...(19): siRNA sense strand
aaggaucaguagcaauuug

SEQ ID NO: 1279638 - RNA, 19 nt, Homo sapiens
  misc_RNA (1)...(19): siRNA sense strand
uauauacgggauccuuuaa

SEQ ID NO: 1279639 - RNA, 19 nt, Homo sapiens
  misc_RNA (1)...(19): siRNA sense strand
ugaaguagaaguauuugag

SEQ ID NO: 1279640 - RNA, 19 nt, Homo sapiens
  misc_RNA (1)...(19): siRNA sense strand
cuugacaguuuggauguuu

SEQ ID NO: 1279641 - RNA, 19 nt, Homo sapiens
  misc_RNA (1)...(19): siRNA sense strand
cauauauacgggauccuuu

SEQ ID NO: 1279642 - RNA, 19 nt, Homo sapiens
  misc_RNA (1)...(19): siRNA sense strand
auauauacgggauccuuua

SEQ ID NO: 1279643 - RNA, 19 nt, Homo sapiens
  misc_RNA (1)...(19): siRNA sense strand
cuuaaaggaucaguagcaa

SEQ ID NO: 1279644 - RNA, 19 nt, Homo sapiens
  misc_RNA (1)...(19): siRNA sense strand
uaaaccugaggaaggaaua

SEQ ID NO: 1279645 - RNA, 19 nt, Homo sapiens
  misc_RNA (1)...(19): siRNA sense strand
agaugacgccuguuauaga

SEQ ID NO: 1279646 - RNA, 19 nt, Homo sapiens
  misc_RNA (1)...(19): siRNA sense strand
ugugauuguuauugccaua

SEQ ID NO: 1279647 - RNA, 19 nt, Homo sapiens
  misc_RNA (1)...(19): siRNA sense strand
gagagcacgauuuauugug

SEQ ID NO: 1279648 - RNA, 19 nt, Homo sapiens
  misc_RNA (1)...(19): siRNA sense strand
gaaguauuugaguaucuug

SEQ ID NO: 1279649 - RNA, 19 nt, Homo sapiens
  misc_RNA (1)...(19): siRNA sense strand
ccucuugccacccauacua

SEQ ID NO: 1279650 - RNA, 19 nt, Homo sapiens
  misc_RNA (1)...(19): siRNA sense strand
gauaucaggauuuggaaaa

SEQ ID NO: 1279651 - RNA, 19 nt, Homo sapiens
  misc_RNA (1)...(19): siRNA sense strand
ggcuaccugucucagauga

SEQ ID NO: 1279652 - RNA, 19 nt, Homo sapiens
  misc_RNA (1)...(19): siRNA sense strand
ccaugguguugcugcugua

SEQ ID NO: 1279653 - RNA, 19 nt, Homo sapiens
  misc_RNA (1)...(19): siRNA sense strand
cagaugacgccuguuauag

SEQ ID NO: 1279654 - RNA, 19 nt, Homo sapiens
  misc_RNA (1)...(19): siRNA sense strand
gucauugcugugauuguua

SEQ ID NO: 1279655 - RNA, 19 nt, Homo sapiens
  misc_RNA (1)...(19): siRNA sense strand
uuggugaacgaguagauua

SEQ ID NO: 1279656 - RNA, 19 nt, Homo sapiens
  misc_RNA (1)...(19): siRNA sense strand
ggagccaccaacauuugaa

SEQ ID NO: 1279657 - RNA, 19 nt, Homo sapiens
  misc_RNA (1)...(19): siRNA sense strand
gcgcuuuccuggguugcuu

SEQ ID NO: 1279658 - RNA, 19 nt, Homo sapiens
  misc_RNA (1)...(19): siRNA sense strand
uacuacaaagcaacaguua

SEQ ID NO: 1279659 - RNA, 19 nt, Homo sapiens
  misc_RNA (1)...(19): siRNA sense strand
cuugaugcaguaacuuaua

SEQ ID NO: 1279660 - RNA, 19 nt, Homo sapiens
  misc_RNA (1)...(19): siRNA sense strand
aaacauguccauauauacg

SEQ ID NO: 1279661 - RNA, 19 nt, Homo sapiens
  misc_RNA (1)...(19): siRNA sense strand
guguaaaguggucaaaugu

SEQ ID NO: 1279662 - RNA, 19 nt, Homo sapiens
  misc_RNA (1)...(19): siRNA sense strand
cuuacgaguuugguuauca

SEQ ID NO: 1279663 - RNA, 19 nt, Homo sapiens
  misc_RNA (1)...(19): siRNA sense strand
uacgggauccuuuaaaugg

SEQ ID NO: 1279664 - RNA, 19 nt, Homo sapiens
  misc_RNA (1)...(19): siRNA sense strand
aaccaaaacccuacuauga

SEQ ID NO: 1279665 - RNA, 19 nt, Homo sapiens
  misc_RNA (1)...(19): siRNA sense strand
cccaauaugugaaaagguu

SEQ ID NO: 1279666 - RNA, 19 nt, Homo sapiens
  misc_RNA (1)...(19): siRNA sense strand
cgauggcagcgacacaauu

SEQ ID NO: 1279667 - RNA, 19 nt, Homo sapiens
  misc_RNA (1)...(19): siRNA sense strand
gauccauuuucacuuauug

SEQ ID NO: 1279668 - RNA, 19 nt, Homo sapiens
  misc_RNA (1)...(19): siRNA sense strand
uugaugcaguaacuuauag

SEQ ID NO: 1279669 - RNA, 19 nt, Homo sapiens
  misc_RNA (1)...(19): siRNA sense strand
guaucuugaugcaguaacu

SEQ ID NO: 1279670 - RNA, 19 nt, Homo sapiens
  misc_RNA (1)...(19): siRNA sense strand
caacauuugaagcuaugga

SEQ ID NO: 1279671 - RNA, 19 nt, Homo sapiens
  misc_RNA (1)...(19): siRNA sense strand
gagauuggugaacgaguag

SEQ ID NO: 1279672 - RNA, 19 nt, Homo sapiens
  misc_RNA (1)...(19): siRNA sense strand
ggagagagcacgauuuauu

SEQ ID NO: 1279673 - RNA, 19 nt, Homo sapiens
  misc_RNA (1)...(19): siRNA sense strand
agagaaacauguccauaua

SEQ ID NO: 1279674 - RNA, 19 nt, Homo sapiens
  misc_RNA (1)...(19): siRNA sense strand
cagaugcacuuuauuugua

SEQ ID NO: 1279675 - RNA, 19 nt, Homo sapiens
  misc_RNA (1)...(19): siRNA sense strand
ggacuuacgaguuugguua

SEQ ID NO: 1279676 - RNA, 19 nt, Homo sapiens
  misc_RNA (1)...(19): siRNA sense strand
aaacagauaucaggauuug

SEQ ID NO: 1279677 - RNA, 19 nt, Homo sapiens
  misc_RNA (1)...(19): siRNA sense strand
cuauggagcucauugguaa

SEQ ID NO: 1279678 - RNA, 19 nt, Homo sapiens
  misc_RNA (1)...(19): siRNA sense strand
aaacacaccuuuagugaag

SEQ ID NO: 1279679 - RNA, 19 nt, Homo sapiens
  misc_RNA (1)...(19): siRNA sense strand
gaacuuaaaggaucaguag

SEQ ID NO: 1279680 - RNA, 19 nt, Homo sapiens
  misc_RNA (1)...(19): siRNA sense strand
gaaaacagauaucaggauu

SEQ ID NO: 1279681 - RNA, 19 nt, Homo sapiens
  misc_RNA (1)...(19): siRNA sense strand
uaaaggaucaguagcaauu

SEQ ID NO: 1279682 - RNA, 19 nt, Homo sapiens
  misc_RNA (1)...(19): siRNA sense strand
aaaugggacuuacgaguuu

SEQ ID NO: 1279683 - RNA, 19 nt, Homo sapiens
  misc_RNA (1)...(19): siRNA sense strand
guuaucagaugcacuuuau

SEQ ID NO: 1279684 - RNA, 19 nt, Homo sapiens
  misc_RNA (1)...(19): siRNA sense strand
gagcugaauaugccacuua

SEQ ID NO: 1279685 - RNA, 19 nt, Homo sapiens
  misc_RNA (1)...(19): siRNA sense strand
ugagauuggugaacgagua

SEQ ID NO: 1279686 - RNA, 19 nt, Homo sapiens
  misc_RNA (1)...(19): siRNA sense strand
gugaacgaguagauuauaa

SEQ ID NO: 1279687 - RNA, 19 nt, Homo sapiens
  misc_RNA (1)...(19): siRNA sense strand
gagagagcacgauuuauug

SEQ ID NO: 1279688 - RNA, 19 nt, Homo sapiens
  misc_RNA (1)...(19): siRNA sense strand
caaaugggacuuacgaguu

SEQ ID NO: 1279689 - RNA, 19 nt, Homo sapiens
  misc_RNA (1)...(19): siRNA sense strand
ggucauugcugugauuguu

SEQ ID NO: 1279690 - RNA, 19 nt, Homo sapiens
  misc_RNA (1)...(19): siRNA sense strand
ccagauccauuuucacuua

SEQ ID NO: 1279691 - RNA, 19 nt, Homo sapiens
  misc_RNA (1)...(19): siRNA sense strand
gaaggaauacuugacaguu

SEQ ID NO: 1279692 - RNA, 19 nt, Homo sapiens
  misc_RNA (1)...(19): siRNA sense strand
aaggaauacuugacaguuu

SEQ ID NO: 1279693 - RNA, 19 nt, Homo sapiens
  misc_RNA (1)...(19): siRNA sense strand
ucagaugacgccuguuaua

SEQ ID NO: 1279694 - RNA, 19 nt, Homo sapiens
  misc_RNA (1)...(19): siRNA sense strand
gaaaacacaccuuuaguga

SEQ ID NO: 1279695 - RNA, 19 nt, Homo sapiens
  misc_RNA (1)...(19): siRNA sense strand
gaugacgccuguuauagag

SEQ ID NO: 1279696 - RNA, 19 nt, Homo sapiens
  misc_RNA (1)...(19): siRNA sense strand
gagaaacauguccauauau

SEQ ID NO: 1279697 - RNA, 19 nt, Homo sapiens
  misc_RNA (1)...(19): siRNA sense strand
ccacuuaccagacuaaauc

SEQ ID NO: 1279698 - RNA, 19 nt, Homo sapiens
  misc_RNA (1)...(19): siRNA sense strand
acgaguagauuauaagugu

SEQ ID NO: 1279699 - RNA, 19 nt, Homo sapiens
  misc_RNA (1)...(19): siRNA sense strand
cuacaaagcaacaguuaug

SEQ ID NO: 1279700 - RNA, 19 nt, Homo sapiens
  misc_RNA (1)...(19): siRNA sense strand
ccaccaacauuugaagcua

SEQ ID NO: 1279701 - RNA, 19 nt, Homo sapiens
  misc_RNA (1)...(19): siRNA sense strand
uauacgggauccuuuaaau

SEQ ID NO: 1279702 - RNA, 19 nt, Homo sapiens
  misc_RNA (1)...(19): siRNA sense strand
cgaguuugguuaucagaug

SEQ ID NO: 1279703 - RNA, 19 nt, Homo sapiens
  misc_RNA (1)...(19): siRNA sense strand
gaacgaguagauuauaagu

SEQ ID NO: 1279704 - RNA, 19 nt, Homo sapiens
  misc_RNA (1)...(19): siRNA sense strand
gugaggagccaccaacauu

SEQ ID NO: 1279705 - RNA, 19 nt, Homo sapiens
  misc_RNA (1)...(19): siRNA sense strand
gauggcagcgacacaauug

SEQ ID NO: 1279706 - RNA, 19 nt, Homo sapiens
  misc_RNA (1)...(19): siRNA sense strand
ucucagaugacgccuguua

SEQ ID NO: 1279707 - RNA, 19 nt, Homo sapiens
  misc_RNA (1)...(19): siRNA sense strand
gaggagccaccaacauuug

SEQ ID NO: 1279708 - RNA, 19 nt, Homo sapiens
  misc_RNA (1)...(19): siRNA sense strand
gcuauggagcucauuggua

SEQ ID NO: 1279709 - RNA, 19 nt, Homo sapiens
  misc_RNA (1)...(19): siRNA sense strand
acacaccuuuagugaagua

SEQ ID NO: 1279710 - RNA, 19 nt, Homo sapiens
  misc_RNA (1)...(19): siRNA sense strand
uagagaaacauguccauau

SEQ ID NO: 1279711 - RNA, 19 nt, Homo sapiens
  misc_RNA (1)...(19): siRNA sense strand
ggugaacgaguagauuaua

SEQ ID NO: 1279712 - RNA, 19 nt, Homo sapiens
  misc_RNA (1)...(19): siRNA sense strand
gaaguagaaguauuugagu

SEQ ID NO: 1279713 - RNA, 19 nt, Homo sapiens
  misc_RNA (1)...(19): siRNA sense strand
gaaacauguccauauauac

SEQ ID NO: 1279714 - RNA, 19 nt, Homo sapiens
  misc_RNA (1)...(19): siRNA sense strand
ugacgccuguuauagagaa

SEQ ID NO: 1279715 - RNA, 19 nt, Homo sapiens
  misc_RNA (1)...(19): siRNA sense strand
cgaguagauuauaagugua

SEQ ID NO: 1279716 - RNA, 19 nt, Homo sapiens
  misc_RNA (1)...(19): siRNA sense strand
gcacuuuauuuguaaugag

SEQ ID NO: 1279717 - RNA, 19 nt, Homo sapiens
  misc_RNA (1)...(19): siRNA sense strand
guagaaguauuugaguauc

SEQ ID NO: 1279718 - RNA, 19 nt, Homo sapiens
  misc_RNA (1)...(19): siRNA sense strand
guauuugaguaucuugaug

SEQ ID NO: 1279719 - RNA, 19 nt, Homo sapiens
  misc_RNA (1)...(19): siRNA sense strand
aggaauacuugacaguuug

SEQ ID NO: 1279720 - RNA, 19 nt, Homo sapiens
  misc_RNA (1)...(19): siRNA sense strand
ccaaaacccuacuaugaga

SEQ ID NO: 1279721 - RNA, 19 nt, Homo sapiens
  misc_RNA (1)...(19): siRNA sense strand
aguguaaaguggucaaaug

SEQ ID NO: 1279722 - RNA, 19 nt, Homo sapiens
  misc_RNA (1)...(19): siRNA sense strand
ccacccauacuauuuguga

SEQ ID NO: 1279723 - RNA, 19 nt, Homo sapiens
  misc_RNA (1)...(19): siRNA sense strand
uuggagagagcacgauuua

SEQ ID NO: 1279724 - RNA, 19 nt, Homo sapiens
  misc_RNA (1)...(19): siRNA sense strand
gguuaucagaugcacuuua

SEQ ID NO: 1279725 - RNA, 19 nt, Homo sapiens
  misc_RNA (1)...(19): siRNA sense strand
caccaacauuugaagcuau

SEQ ID NO: 1279726 - RNA, 19 nt, Homo sapiens
  misc_RNA (1)...(19): siRNA sense strand
ugaggagccaccaacauuu

SEQ ID NO: 1279727 - RNA, 19 nt, Homo sapiens
  misc_RNA (1)...(19): siRNA sense strand
ggaaggaauacuugacagu

SEQ ID NO: 1279728 - RNA, 19 nt, Homo sapiens
  misc_RNA (1)...(19): siRNA sense strand
gaggaaggaauacuugaca

SEQ ID NO: 1279729 - RNA, 19 nt, Homo sapiens
  misc_RNA (1)...(19): siRNA sense strand
ugaguaucuugaugcagua

SEQ ID NO: 1279730 - RNA, 19 nt, Homo sapiens
  misc_RNA (1)...(19): siRNA sense strand
caccuuuagugaaguagaa

SEQ ID NO: 1279731 - RNA, 19 nt, Homo sapiens
  misc_RNA (1)...(19): siRNA sense strand
acagauaucaggauuugga

SEQ ID NO: 1279732 - RNA, 19 nt, Homo sapiens
  misc_RNA (1)...(19): siRNA sense strand
ucauugcugugauuguuau

SEQ ID NO: 1279733 - RNA, 19 nt, Homo sapiens
  misc_RNA (1)...(19): siRNA sense strand
ucagaugcacuuuauuugu

SEQ ID NO: 1279734 - RNA, 19 nt, Homo sapiens
  misc_RNA (1)...(19): siRNA sense strand
gugcugcuccagaguguaa

SEQ ID NO: 1279735 - RNA, 19 nt, Homo sapiens
  misc_RNA (1)...(19): siRNA sense strand
ggaaaacacaccuuuagug

SEQ ID NO: 1279736 - RNA, 19 nt, Homo sapiens
  misc_RNA (1)...(19): siRNA sense strand
aaggaucaguagcaauuug

SEQ ID NO: 1279737 - RNA, 19 nt, Homo sapiens
  misc_RNA (1)...(19): siRNA sense strand
uauauacgggauccuuuaa

SEQ ID NO: 1279738 - RNA, 19 nt, Homo sapiens
  misc_RNA (1)...(19): siRNA sense strand
ugaaguagaaguauuugag

SEQ ID NO: 1279739 - RNA, 19 nt, Homo sapiens
  misc_RNA (1)...(19): siRNA sense strand
cuugacaguuuggauguuu

SEQ ID NO: 1279740 - RNA, 19 nt, Homo sapiens
  misc_RNA (1)...(19): siRNA sense strand
cauauauacgggauccuuu

SEQ ID NO: 1279741 - RNA, 19 nt, Homo sapiens
  misc_RNA (1)...(19): siRNA sense strand
auauauacgggauccuuua

SEQ ID NO: 1279742 - RNA, 19 nt, Homo sapiens
  misc_RNA (1)...(19): siRNA sense strand
cuuaaaggaucaguagcaa

SEQ ID NO: 1279743 - RNA, 19 nt, Homo sapiens
  misc_RNA (1)...(19): siRNA sense strand
uaaaccugaggaaggaaua

SEQ ID NO: 1279744 - RNA, 19 nt, Homo sapiens
  misc_RNA (1)...(19): siRNA sense strand
agaugacgccuguuauaga

SEQ ID NO: 1279745 - RNA, 19 nt, Homo sapiens
  misc_RNA (1)...(19): siRNA sense strand
ugugauuguuauugccaua

SEQ ID NO: 1279746 - RNA, 19 nt, Homo sapiens
  misc_RNA (1)...(19): siRNA sense strand
gagagcacgauuuauugug

SEQ ID NO: 1279747 - RNA, 19 nt, Homo sapiens
  misc_RNA (1)...(19): siRNA sense strand
gaaguauuugaguaucuug

SEQ ID NO: 1279748 - RNA, 19 nt, Homo sapiens
  misc_RNA (1)...(19): siRNA sense strand
ggcuaccugucucagauga

SEQ ID NO: 1279749 - RNA, 19 nt, Homo sapiens
  misc_RNA (1)...(19): siRNA sense strand
gauaucaggauuuggaaaa

SEQ ID NO: 1279750 - RNA, 19 nt, Homo sapiens
  misc_RNA (1)...(19): siRNA sense strand
ccucuugccacccauacua

SEQ ID NO: 1279751 - RNA, 19 nt, Homo sapiens
  misc_RNA (1)...(19): siRNA sense strand
ccaugguguugcugcugua

SEQ ID NO: 1279752 - RNA, 19 nt, Homo sapiens
  misc_RNA (1)...(19): siRNA sense strand
cagaugacgccuguuauag

SEQ ID NO: 1279753 - RNA, 19 nt, Homo sapiens
  misc_RNA (1)...(19): siRNA sense strand
cagaugguggagcugaaua

SEQ ID NO: 1279754 - RNA, 19 nt, Homo sapiens
  misc_RNA (1)...(19): siRNA sense strand
uuggugaacgaguagauua

SEQ ID NO: 1279755 - RNA, 19 nt, Homo sapiens
  misc_RNA (1)...(19): siRNA sense strand
gucauugcugugauuguua

SEQ ID NO: 1279756 - RNA, 19 nt, Homo sapiens
  misc_RNA (1)...(19): siRNA sense strand
ggagccaccaacauuugaa

SEQ ID NO: 1279757 - RNA, 19 nt, Homo sapiens
  misc_RNA (1)...(19): siRNA sense strand
gcgcuuuccuggguugcuu

SEQ ID NO: 1279758 - RNA, 19 nt, Homo sapiens
  misc_RNA (1)...(19): siRNA sense strand
uacuacaaagcaacaguua

SEQ ID NO: 1279759 - RNA, 19 nt, Homo sapiens
  misc_RNA (1)...(19): siRNA sense strand
cuugaugcaguaacuuaua

SEQ ID NO: 1279760 - RNA, 19 nt, Homo sapiens
  misc_RNA (1)...(19): siRNA sense strand
aaacauguccauauauacg

SEQ ID NO: 1279761 - RNA, 19 nt, Homo sapiens
  misc_RNA (1)...(19): siRNA sense strand
guguaaaguggucaaaugu

SEQ ID NO: 1279762 - RNA, 19 nt, Homo sapiens
  misc_RNA (1)...(19): siRNA sense strand
cuuacgaguuugguuauca

SEQ ID NO: 1279763 - RNA, 19 nt, Homo sapiens
  misc_RNA (1)...(19): siRNA sense strand
uacgggauccuuuaaaugg

SEQ ID NO: 1279764 - RNA, 19 nt, Homo sapiens
  misc_RNA (1)...(19): siRNA sense strand
gcagaugguggagcugaau

SEQ ID NO: 1279765 - RNA, 19 nt, Homo sapiens
  misc_RNA (1)...(19): siRNA sense strand
aaccaaaacccuacuauga

SEQ ID NO: 1279766 - RNA, 19 nt, Homo sapiens
  misc_RNA (1)...(19): siRNA sense strand
cccaauaugugaaaagguu

SEQ ID NO: 1279767 - RNA, 19 nt, Homo sapiens
  misc_RNA (1)...(19): siRNA sense strand
ggagcugaauaugccacuu

SEQ ID NO: 1279768 - RNA, 19 nt, Homo sapiens
  misc_RNA (1)...(19): siRNA sense strand
cgauggcagcgacacaauu

SEQ ID NO: 1279769 - RNA, 19 nt, Homo sapiens
  misc_RNA (1)...(19): siRNA sense strand
gauccauuuucacuuauug

SEQ ID NO: 1279770 - RNA, 19 nt, Homo sapiens
  misc_RNA (1)...(19): siRNA sense strand
uugaugcaguaacuuauag

SEQ ID NO: 1279771 - RNA, 19 nt, Homo sapiens
  misc_RNA (1)...(19): siRNA sense strand
guaucuugaugcaguaacu

SEQ ID NO: 1279772 - RNA, 19 nt, Homo sapiens
  misc_RNA (1)...(19): siRNA sense strand
ggagagagcacgauuuauu

SEQ ID NO: 1279773 - RNA, 19 nt, Homo sapiens
  misc_RNA (1)...(19): siRNA sense strand
agagaaacauguccauaua

SEQ ID NO: 1279774 - RNA, 19 nt, Homo sapiens
  misc_RNA (1)...(19): siRNA sense strand
cagaugcacuuuauuugua

SEQ ID NO: 1279775 - RNA, 19 nt, Homo sapiens
  misc_RNA (1)...(19): siRNA sense strand
ggacuuacgaguuugguua

SEQ ID NO: 1279776 - RNA, 19 nt, Homo sapiens
  misc_RNA (1)...(19): siRNA sense strand
aaacagauaucaggauuug

SEQ ID NO: 1279777 - RNA, 19 nt, Homo sapiens
  misc_RNA (1)...(19): siRNA sense strand
cuauggagcucauugguaa

SEQ ID NO: 1279778 - RNA, 19 nt, Homo sapiens
  misc_RNA (1)...(19): siRNA sense strand
aaacacaccuuuagugaag

SEQ ID NO: 1279779 - RNA, 19 nt, Homo sapiens
  misc_RNA (1)...(19): siRNA sense strand
gaacuuaaaggaucaguag

SEQ ID NO: 1279780 - RNA, 19 nt, Homo sapiens
  misc_RNA (1)...(19): siRNA sense strand
gaaaacagauaucaggauu

SEQ ID NO: 1279781 - RNA, 19 nt, Homo sapiens
  misc_RNA (1)...(19): siRNA sense strand
uaaaggaucaguagcaauu

SEQ ID NO: 1279782 - RNA, 19 nt, Homo sapiens
  misc_RNA (1)...(19): siRNA sense strand
aaaugggacuuacgaguuu

SEQ ID NO: 1279783 - RNA, 19 nt, Homo sapiens
  misc_RNA (1)...(19): siRNA sense strand
guuaucagaugcacuuuau

SEQ ID NO: 1279784 - RNA, 19 nt, Homo sapiens
  misc_RNA (1)...(19): siRNA sense strand
ugagauuggugaacgagua

SEQ ID NO: 1279785 - RNA, 19 nt, Homo sapiens
  misc_RNA (1)...(19): siRNA sense strand
gugaacgaguagauuauaa

SEQ ID NO: 1279786 - RNA, 19 nt, Homo sapiens
  misc_RNA (1)...(19): siRNA sense strand
gagagagcacgauuuauug

SEQ ID NO: 1279787 - RNA, 19 nt, Homo sapiens
  misc_RNA (1)...(19): siRNA sense strand
caaaugggacuuacgaguu

SEQ ID NO: 1279788 - RNA, 19 nt, Homo sapiens
  misc_RNA (1)...(19): siRNA sense strand
ggucauugcugugauuguu

SEQ ID NO: 1279789 - RNA, 19 nt, Homo sapiens
  misc_RNA (1)...(19): siRNA sense strand
ccagauccauuuucacuua

SEQ ID NO: 1279790 - RNA, 19 nt, Homo sapiens
  misc_RNA (1)...(19): siRNA sense strand
gaaggaauacuugacaguu

SEQ ID NO: 1279791 - RNA, 19 nt, Homo sapiens
  misc_RNA (1)...(19): siRNA sense strand
aaggaauacuugacaguuu

SEQ ID NO: 1279792 - RNA, 19 nt, Homo sapiens
  misc_RNA (1)...(19): siRNA sense strand
ucagaugacgccuguuaua

SEQ ID NO: 1279793 - RNA, 19 nt, Homo sapiens
  misc_RNA (1)...(19): siRNA sense strand
gaaaacacaccuuuaguga

SEQ ID NO: 1279794 - RNA, 19 nt, Homo sapiens
  misc_RNA (1)...(19): siRNA sense strand
gaugacgccuguuauagag

SEQ ID NO: 1279795 - RNA, 19 nt, Homo sapiens
  misc_RNA (1)...(19): siRNA sense strand
gagaaacauguccauauau

SEQ ID NO: 1279796 - RNA, 19 nt, Homo sapiens
  misc_RNA (1)...(19): siRNA sense strand
acgaguagauuauaagugu

SEQ ID NO: 1279797 - RNA, 19 nt, Homo sapiens
  misc_RNA (1)...(19): siRNA sense strand
cuacaaagcaacaguuaug

SEQ ID NO: 1279798 - RNA, 19 nt, Homo sapiens
  misc_RNA (1)...(19): siRNA sense strand
ccaccaacauuugaagcua

SEQ ID NO: 1279799 - RNA, 19 nt, Homo sapiens
  misc_RNA (1)...(19): siRNA sense strand
uauacgggauccuuuaaau

SEQ ID NO: 1279800 - RNA, 19 nt, Homo sapiens
  misc_RNA (1)...(19): siRNA sense strand
cgaguuugguuaucagaug

SEQ ID NO: 1279801 - RNA, 19 nt, Homo sapiens
  misc_RNA (1)...(19): siRNA sense strand
gaacgaguagauuauaagu

SEQ ID NO: 1279802 - RNA, 19 nt, Homo sapiens
  misc_RNA (1)...(19): siRNA sense strand
gugaggagccaccaacauu

SEQ ID NO: 1279803 - RNA, 19 nt, Homo sapiens
  misc_RNA (1)...(19): siRNA sense strand
gauggcagcgacacaauug

SEQ ID NO: 1279804 - RNA, 19 nt, Homo sapiens
  misc_RNA (1)...(19): siRNA sense strand
gcuauggagcucauuggua

SEQ ID NO: 1279805 - RNA, 19 nt, Homo sapiens
  misc_RNA (1)...(19): siRNA sense strand
gaggagccaccaacauuug

SEQ ID NO: 1279806 - RNA, 19 nt, Homo sapiens
  misc_RNA (1)...(19): siRNA sense strand
acacaccuuuagugaagua

SEQ ID NO: 1279807 - RNA, 19 nt, Homo sapiens
  misc_RNA (1)...(19): siRNA sense strand
ucucagaugacgccuguua

SEQ ID NO: 1279808 - RNA, 19 nt, Homo sapiens
  misc_RNA (1)...(19): siRNA sense strand
uagagaaacauguccauau

SEQ ID NO: 1279809 - RNA, 19 nt, Homo sapiens
  misc_RNA (1)...(19): siRNA sense strand
guuccaaagugucuuaaag

SEQ ID NO: 1279810 - RNA, 19 nt, Homo sapiens
  misc_RNA (1)...(19): siRNA sense strand
ggugaacgaguagauuaua

SEQ ID NO: 1279811 - RNA, 19 nt, Homo sapiens
  misc_RNA (1)...(19): siRNA sense strand
gaaguagaaguauuugagu

SEQ ID NO: 1279812 - RNA, 19 nt, Homo sapiens
  misc_RNA (1)...(19): siRNA sense strand
gaaacauguccauauauac

SEQ ID NO: 1279813 - RNA, 19 nt, Homo sapiens
  misc_RNA (1)...(19): siRNA sense strand
ugacgccuguuauagagaa

SEQ ID NO: 1279814 - RNA, 19 nt, Homo sapiens
  misc_RNA (1)...(19): siRNA sense strand
cgaguagauuauaagugua

SEQ ID NO: 1279815 - RNA, 19 nt, Homo sapiens
  misc_RNA (1)...(19): siRNA sense strand
gcacuuuauuuguaaugag

SEQ ID NO: 1279816 - RNA, 19 nt, Homo sapiens
  misc_RNA (1)...(19): siRNA sense strand
guagaaguauuugaguauc

SEQ ID NO: 1279817 - RNA, 19 nt, Homo sapiens
  misc_RNA (1)...(19): siRNA sense strand
guauuugaguaucuugaug

SEQ ID NO: 1279818 - RNA, 19 nt, Homo sapiens
  misc_RNA (1)...(19): siRNA sense strand
aggaauacuugacaguuug

SEQ ID NO: 1279819 - RNA, 19 nt, Homo sapiens
  misc_RNA (1)...(19): siRNA sense strand
ccaaaacccuacuaugaga

SEQ ID NO: 1279820 - RNA, 19 nt, Homo sapiens
  misc_RNA (1)...(19): siRNA sense strand
aguguaaaguggucaaaug

SEQ ID NO: 1279821 - RNA, 19 nt, Homo sapiens
  misc_RNA (1)...(19): siRNA sense strand
ccacccauacuauuuguga

SEQ ID NO: 1279822 - RNA, 19 nt, Homo sapiens
  misc_RNA (1)...(19): siRNA sense strand
caccaacauuugaagcuau

SEQ ID NO: 1279823 - RNA, 19 nt, Homo sapiens
  misc_RNA (1)...(19): siRNA sense strand
uuggagagagcacgauuua

SEQ ID NO: 1279824 - RNA, 19 nt, Homo sapiens
  misc_RNA (1)...(19): siRNA sense strand
gguuaucagaugcacuuua

SEQ ID NO: 1279825 - RNA, 19 nt, Homo sapiens
  misc_RNA (1)...(19): siRNA sense strand
ugaggagccaccaacauuu

SEQ ID NO: 1279826 - RNA, 19 nt, Homo sapiens
  misc_RNA (1)...(19): siRNA sense strand
ggaaggaauacuugacagu

SEQ ID NO: 1279827 - RNA, 19 nt, Homo sapiens
  misc_RNA (1)...(19): siRNA sense strand
gaggaaggaauacuugaca

SEQ ID NO: 1279828 - RNA, 19 nt, Homo sapiens
  misc_RNA (1)...(19): siRNA sense strand
ccaguuccaaagugucuua

SEQ ID NO: 1279829 - RNA, 19 nt, Homo sapiens
  misc_RNA (1)...(19): siRNA sense strand
ugaguaucuugaugcagua

SEQ ID NO: 1279830 - RNA, 19 nt, Homo sapiens
  misc_RNA (1)...(19): siRNA sense strand
caccuuuagugaaguagaa

SEQ ID NO: 1279831 - RNA, 19 nt, Homo sapiens
  misc_RNA (1)...(19): siRNA sense strand
acagauaucaggauuugga

SEQ ID NO: 1279832 - RNA, 19 nt, Homo sapiens
  misc_RNA (1)...(19): siRNA sense strand
ucauugcugugauuguuau

SEQ ID NO: 1279833 - RNA, 19 nt, Homo sapiens
  misc_RNA (1)...(19): siRNA sense strand
ucagaugcacuuuauuugu

SEQ ID NO: 1279834 - RNA, 19 nt, Homo sapiens
  misc_RNA (1)...(19): siRNA sense strand
gugcugcuccagaguguaa

SEQ ID NO: 1279835 - RNA, 19 nt, Homo sapiens
  misc_RNA (1)...(19): siRNA sense strand
ggaaaacacaccuuuagug

SEQ ID NO: 1279836 - RNA, 19 nt, Homo sapiens
  misc_RNA (1)...(19): siRNA sense strand
aaggaucaguagcaauuug

SEQ ID NO: 1279837 - RNA, 19 nt, Homo sapiens
  misc_RNA (1)...(19): siRNA sense strand
uauauacgggauccuuuaa

SEQ ID NO: 1279838 - RNA, 19 nt, Homo sapiens
  misc_RNA (1)...(19): siRNA sense strand
ugaaguagaaguauuugag

SEQ ID NO: 1279839 - RNA, 19 nt, Homo sapiens
  misc_RNA (1)...(19): siRNA sense strand
cuugacaguuuggauguuu

SEQ ID NO: 1279840 - RNA, 19 nt, Homo sapiens
  misc_RNA (1)...(19): siRNA sense strand
cauauauacgggauccuuu

SEQ ID NO: 1279841 - RNA, 19 nt, Homo sapiens
  misc_RNA (1)...(19): siRNA sense strand
auauauacgggauccuuua

SEQ ID NO: 1279842 - RNA, 19 nt, Homo sapiens
  misc_RNA (1)...(19): siRNA sense strand
cuuaaaggaucaguagcaa

SEQ ID NO: 1279843 - RNA, 19 nt, Homo sapiens
  misc_RNA (1)...(19): siRNA sense strand
uaaaccugaggaaggaaua

SEQ ID NO: 1279844 - RNA, 19 nt, Homo sapiens
  misc_RNA (1)...(19): siRNA sense strand
agaugacgccuguuauaga

SEQ ID NO: 1279845 - RNA, 19 nt, Homo sapiens
  misc_RNA (1)...(19): siRNA sense strand
ugugauuguuauugccaua

SEQ ID NO: 1279846 - RNA, 19 nt, Homo sapiens
  misc_RNA (1)...(19): siRNA sense strand
gagagcacgauuuauugug

SEQ ID NO: 1279847 - RNA, 19 nt, Homo sapiens
  misc_RNA (1)...(19): siRNA sense strand
gaaguauuugaguaucuug

SEQ ID NO: 1279848 - RNA, 19 nt, Homo sapiens
  misc_RNA (1)...(19): siRNA sense strand
ggcuaccugucucagauga

SEQ ID NO: 1279849 - RNA, 19 nt, Homo sapiens
  misc_RNA (1)...(19): siRNA sense strand
gauaucaggauuuggaaaa

SEQ ID NO: 1279850 - RNA, 19 nt, Homo sapiens
  misc_RNA (1)...(19): siRNA sense strand
ccucuugccacccauacua

SEQ ID NO: 1279851 - RNA, 19 nt, Homo sapiens
  misc_RNA (1)...(19): siRNA sense strand
ccaugguguugcugcugua

SEQ ID NO: 1279852 - RNA, 19 nt, Homo sapiens
  misc_RNA (1)...(19): siRNA sense strand
cagaugacgccuguuauag

SEQ ID NO: 1279853 - RNA, 19 nt, Homo sapiens
  misc_RNA (1)...(19): siRNA sense strand
uuggugaacgaguagauua

SEQ ID NO: 1279854 - RNA, 19 nt, Homo sapiens
  misc_RNA (1)...(19): siRNA sense strand
gucauugcugugauuguua

SEQ ID NO: 1279855 - RNA, 19 nt, Homo sapiens
  misc_RNA (1)...(19): siRNA sense strand
ggagccaccaacauuugaa

SEQ ID NO: 1279856 - RNA, 19 nt, Homo sapiens
  misc_RNA (1)...(19): siRNA sense strand
gcgcuuuccuggguugcuu

SEQ ID NO: 1279857 - RNA, 19 nt, Homo sapiens
  misc_RNA (1)...(19): siRNA sense strand
uacuacaaagcaacaguua

SEQ ID NO: 1279858 - RNA, 19 nt, Homo sapiens
  misc_RNA (1)...(19): siRNA sense strand
cuugaugcaguaacuuaua

SEQ ID NO: 1279859 - RNA, 19 nt, Homo sapiens
  misc_RNA (1)...(19): siRNA sense strand
aaacauguccauauauacg

SEQ ID NO: 1279860 - RNA, 19 nt, Homo sapiens
  misc_RNA (1)...(19): siRNA sense strand
guguaaaguggucaaaugu

SEQ ID NO: 1279861 - RNA, 19 nt, Homo sapiens
  misc_RNA (1)...(19): siRNA sense strand
cuuacgaguuugguuauca

SEQ ID NO: 1279862 - RNA, 19 nt, Homo sapiens
  misc_RNA (1)...(19): siRNA sense strand
uacgggauccuuuaaaugg

SEQ ID NO: 1279863 - RNA, 19 nt, Homo sapiens
  misc_RNA (1)...(19): siRNA sense strand
aaccaaaacccuacuauga

SEQ ID NO: 1279864 - RNA, 19 nt, Homo sapiens
  misc_RNA (1)...(19): siRNA sense strand
cccaauaugugaaaagguu

SEQ ID NO: 1279865 - RNA, 19 nt, Homo sapiens
  misc_RNA (1)...(19): siRNA sense strand
cgauggcagcgacacaauu

SEQ ID NO: 1279866 - RNA, 19 nt, Homo sapiens
  misc_RNA (1)...(19): siRNA sense strand
gauccauuuucacuuauug

SEQ ID NO: 1279867 - RNA, 19 nt, Homo sapiens
  misc_RNA (1)...(19): siRNA sense strand
uugaugcaguaacuuauag

SEQ ID NO: 1279868 - RNA, 19 nt, Homo sapiens
  misc_RNA (1)...(19): siRNA sense strand
guaucuugaugcaguaacu

SEQ ID NO: 1279869 - RNA, 19 nt, Homo sapiens
  misc_RNA (1)...(19): siRNA sense strand
caacauuugaagcuaugga

SEQ ID NO: 1279870 - RNA, 19 nt, Homo sapiens
  misc_RNA (1)...(19): siRNA sense strand
gagauuggugaacgaguag

SEQ ID NO: 1279871 - RNA, 19 nt, Homo sapiens
  misc_RNA (1)...(19): siRNA sense strand
ggagagagcacgauuuauu

SEQ ID NO: 1279872 - RNA, 19 nt, Homo sapiens
  misc_RNA (1)...(19): siRNA sense strand
agagaaacauguccauaua

SEQ ID NO: 1279873 - RNA, 19 nt, Homo sapiens
  misc_RNA (1)...(19): siRNA sense strand
cagaugcacuuuauuugua

SEQ ID NO: 1279874 - RNA, 19 nt, Homo sapiens
  misc_RNA (1)...(19): siRNA sense strand
ggacuuacgaguuugguua

SEQ ID NO: 1279875 - RNA, 19 nt, Homo sapiens
  misc_RNA (1)...(19): siRNA sense strand
aaacagauaucaggauuug

SEQ ID NO: 1279876 - RNA, 19 nt, Homo sapiens
  misc_RNA (1)...(19): siRNA sense strand
cuauggagcucauugguaa

SEQ ID NO: 1279877 - RNA, 19 nt, Homo sapiens
  misc_RNA (1)...(19): siRNA sense strand
aaacacaccuuuagugaag

SEQ ID NO: 1279878 - RNA, 19 nt, Homo sapiens
  misc_RNA (1)...(19): siRNA sense strand
gaacuuaaaggaucaguag

SEQ ID NO: 1279879 - RNA, 19 nt, Homo sapiens
  misc_RNA (1)...(19): siRNA sense strand
gaaaacagauaucaggauu

SEQ ID NO: 1279880 - RNA, 19 nt, Homo sapiens
  misc_RNA (1)...(19): siRNA sense strand
uaaaggaucaguagcaauu

SEQ ID NO: 1279881 - RNA, 19 nt, Homo sapiens
  misc_RNA (1)...(19): siRNA sense strand
aaaugggacuuacgaguuu

SEQ ID NO: 1279882 - RNA, 19 nt, Homo sapiens
  misc_RNA (1)...(19): siRNA sense strand
guuaucagaugcacuuuau

SEQ ID NO: 1279883 - RNA, 19 nt, Homo sapiens
  misc_RNA (1)...(19): siRNA sense strand
gagcugaauaugccacuua

SEQ ID NO: 1279884 - RNA, 19 nt, Homo sapiens
  misc_RNA (1)...(19): siRNA sense strand
gagcagagaggcugaauag

SEQ ID NO: 1279885 - RNA, 19 nt, Homo sapiens
  misc_RNA (1)...(19): siRNA sense strand
ugagauuggugaacgagua

SEQ ID NO: 1279886 - RNA, 19 nt, Homo sapiens
  misc_RNA (1)...(19): siRNA sense strand
gugaacgaguagauuauaa

SEQ ID NO: 1279887 - RNA, 19 nt, Homo sapiens
  misc_RNA (1)...(19): siRNA sense strand
gagagagcacgauuuauug

SEQ ID NO: 1279888 - RNA, 19 nt, Homo sapiens
  misc_RNA (1)...(19): siRNA sense strand
caaaugggacuuacgaguu

SEQ ID NO: 1279889 - RNA, 19 nt, Homo sapiens
  misc_RNA (1)...(19): siRNA sense strand
ggucauugcugugauuguu

SEQ ID NO: 1279890 - RNA, 19 nt, Homo sapiens
  misc_RNA (1)...(19): siRNA sense strand
ccagauccauuuucacuua

SEQ ID NO: 1279891 - RNA, 19 nt, Homo sapiens
  misc_RNA (1)...(19): siRNA sense strand
gaaggaauacuugacaguu

SEQ ID NO: 1279892 - RNA, 19 nt, Homo sapiens
  misc_RNA (1)...(19): siRNA sense strand
aaggaauacuugacaguuu

SEQ ID NO: 1279893 - RNA, 19 nt, Homo sapiens
  misc_RNA (1)...(19): siRNA sense strand
ucagaugacgccuguuaua

SEQ ID NO: 1279894 - RNA, 19 nt, Homo sapiens
  misc_RNA (1)...(19): siRNA sense strand
gaaaacacaccuuuaguga

SEQ ID NO: 1279895 - RNA, 19 nt, Homo sapiens
  misc_RNA (1)...(19): siRNA sense strand
gaugacgccuguuauagag

SEQ ID NO: 1279896 - RNA, 19 nt, Homo sapiens
  misc_RNA (1)...(19): siRNA sense strand
gagaaacauguccauauau

SEQ ID NO: 1279897 - RNA, 19 nt, Homo sapiens
  misc_RNA (1)...(19): siRNA sense strand
ccacuuaccagacuaaauc

SEQ ID NO: 1279898 - RNA, 19 nt, Homo sapiens
  misc_RNA (1)...(19): siRNA sense strand
acgaguagauuauaagugu

SEQ ID NO: 1279899 - RNA, 19 nt, Homo sapiens
  misc_RNA (1)...(19): siRNA sense strand
cuacaaagcaacaguuaug

SEQ ID NO: 1279900 - RNA, 19 nt, Homo sapiens
  misc_RNA (1)...(19): siRNA sense strand
ccaccaacauuugaagcua

SEQ ID NO: 1279901 - RNA, 19 nt, Homo sapiens
  misc_RNA (1)...(19): siRNA sense strand
uauacgggauccuuuaaau

SEQ ID NO: 1279902 - RNA, 19 nt, Homo sapiens
  misc_RNA (1)...(19): siRNA sense strand
cgaguuugguuaucagaug

SEQ ID NO: 1279903 - RNA, 19 nt, Homo sapiens
  misc_RNA (1)...(19): siRNA sense strand
gaacgaguagauuauaagu

SEQ ID NO: 1279904 - RNA, 19 nt, Homo sapiens
  misc_RNA (1)...(19): siRNA sense strand
gugaggagccaccaacauu

SEQ ID NO: 1279905 - RNA, 19 nt, Homo sapiens
  misc_RNA (1)...(19): siRNA sense strand
gauggcagcgacacaauug

SEQ ID NO: 1279906 - RNA, 19 nt, Homo sapiens
  misc_RNA (1)...(19): siRNA sense strand
ucucagaugacgccuguua

SEQ ID NO: 1279907 - RNA, 19 nt, Homo sapiens
  misc_RNA (1)...(19): siRNA sense strand
acacaccuuuagugaagua

SEQ ID NO: 1279908 - RNA, 19 nt, Homo sapiens
  misc_RNA (1)...(19): siRNA sense strand
gcuauggagcucauuggua

SEQ ID NO: 1279909 - RNA, 19 nt, Homo sapiens
  misc_RNA (1)...(19): siRNA sense strand
gaggagccaccaacauuug

SEQ ID NO: 1279910 - RNA, 19 nt, Homo sapiens
  misc_RNA (1)...(19): siRNA sense strand
uagagaaacauguccauau

SEQ ID NO: 1279911 - RNA, 19 nt, Homo sapiens
  misc_RNA (1)...(19): siRNA sense strand
ggugaacgaguagauuaua

SEQ ID NO: 1279912 - RNA, 19 nt, Homo sapiens
  misc_RNA (1)...(19): siRNA sense strand
gaaguagaaguauuugagu

SEQ ID NO: 1279913 - RNA, 19 nt, Homo sapiens
  misc_RNA (1)...(19): siRNA sense strand
gaaacauguccauauauac

SEQ ID NO: 1279914 - RNA, 19 nt, Homo sapiens
  misc_RNA (1)...(19): siRNA sense strand
ugacgccuguuauagagaa

SEQ ID NO: 1279915 - RNA, 19 nt, Homo sapiens
  misc_RNA (1)...(19): siRNA sense strand
cgaguagauuauaagugua

SEQ ID NO: 1279916 - RNA, 19 nt, Homo sapiens
  misc_RNA (1)...(19): siRNA sense strand
gcacuuuauuuguaaugag

SEQ ID NO: 1279917 - RNA, 19 nt, Homo sapiens
  misc_RNA (1)...(19): siRNA sense strand
guagaaguauuugaguauc

SEQ ID NO: 1279918 - RNA, 19 nt, Homo sapiens
  misc_RNA (1)...(19): siRNA sense strand
guauuugaguaucuugaug

SEQ ID NO: 1279919 - RNA, 19 nt, Homo sapiens
  misc_RNA (1)...(19): siRNA sense strand
aggaauacuugacaguuug

SEQ ID NO: 1279920 - RNA, 19 nt, Homo sapiens
  misc_RNA (1)...(19): siRNA sense strand
ccaaaacccuacuaugaga

SEQ ID NO: 1279921 - RNA, 19 nt, Homo sapiens
  misc_RNA (1)...(19): siRNA sense strand
aguguaaaguggucaaaug

SEQ ID NO: 1279922 - RNA, 19 nt, Homo sapiens
  misc_RNA (1)...(19): siRNA sense strand
ccacccauacuauuuguga

SEQ ID NO: 1279923 - RNA, 19 nt, Homo sapiens
  misc_RNA (1)...(19): siRNA sense strand
uuggagagagcacgauuua

SEQ ID NO: 1279924 - RNA, 19 nt, Homo sapiens
  misc_RNA (1)...(19): siRNA sense strand
gguuaucagaugcacuuua

SEQ ID NO: 1279925 - RNA, 19 nt, Homo sapiens
  misc_RNA (1)...(19): siRNA sense strand
caccaacauuugaagcuau

SEQ ID NO: 1279926 - RNA, 19 nt, Homo sapiens
  misc_RNA (1)...(19): siRNA sense strand
ugaggagccaccaacauuu

SEQ ID NO: 1279927 - RNA, 19 nt, Homo sapiens
  misc_RNA (1)...(19): siRNA sense strand
ggaaggaauacuugacagu

SEQ ID NO: 1279928 - RNA, 19 nt, Homo sapiens
  misc_RNA (1)...(19): siRNA sense strand
gaggaaggaauacuugaca

SEQ ID NO: 1279929 - RNA, 19 nt, Homo sapiens
  misc_RNA (1)...(19): siRNA sense strand
ugaguaucuugaugcagua

SEQ ID NO: 1279930 - RNA, 19 nt, Homo sapiens
  misc_RNA (1)...(19): siRNA sense strand
caccuuuagugaaguagaa

SEQ ID NO: 1279931 - RNA, 19 nt, Homo sapiens
  misc_RNA (1)...(19): siRNA sense strand
acagauaucaggauuugga

SEQ ID NO: 1279932 - RNA, 19 nt, Homo sapiens
  misc_RNA (1)...(19): siRNA sense strand
ucauugcugugauuguuau

SEQ ID NO: 1279933 - RNA, 19 nt, Homo sapiens
  misc_RNA (1)...(19): siRNA sense strand
ucagaugcacuuuauuugu

SEQ ID NO: 1279934 - RNA, 19 nt, Homo sapiens
  misc_RNA (1)...(19): siRNA sense strand
gugcugcuccagaguguaa

SEQ ID NO: 1279935 - RNA, 19 nt, Homo sapiens
  misc_RNA (1)...(19): siRNA sense strand
ggaaaacacaccuuuagug

SEQ ID NO: 1279936 - RNA, 19 nt, Homo sapiens
  misc_RNA (1)...(19): siRNA sense strand
aaggaucaguagcaauuug

SEQ ID NO: 1279937 - RNA, 19 nt, Homo sapiens
  misc_RNA (1)...(19): siRNA sense strand
uauauacgggauccuuuaa

SEQ ID NO: 1279938 - RNA, 19 nt, Homo sapiens
  misc_RNA (1)...(19): siRNA sense strand
ugaaguagaaguauuugag

SEQ ID NO: 1279939 - RNA, 19 nt, Homo sapiens
  misc_RNA (1)...(19): siRNA sense strand
cuugacaguuuggauguuu

SEQ ID NO: 1279940 - RNA, 19 nt, Homo sapiens
  misc_RNA (1)...(19): siRNA sense strand
cauauauacgggauccuuu

SEQ ID NO: 1279941 - RNA, 19 nt, Homo sapiens
  misc_RNA (1)...(19): siRNA sense strand
auauauacgggauccuuua

SEQ ID NO: 1279942 - RNA, 19 nt, Homo sapiens
  misc_RNA (1)...(19): siRNA sense strand
cuuaaaggaucaguagcaa

SEQ ID NO: 1279943 - RNA, 19 nt, Homo sapiens
  misc_RNA (1)...(19): siRNA sense strand
uaaaccugaggaaggaaua

SEQ ID NO: 1279944 - RNA, 19 nt, Homo sapiens
  misc_RNA (1)...(19): siRNA sense strand
agaugacgccuguuauaga

SEQ ID NO: 1279945 - RNA, 19 nt, Homo sapiens
  misc_RNA (1)...(19): siRNA sense strand
ugugauuguuauugccaua

SEQ ID NO: 1279946 - RNA, 19 nt, Homo sapiens
  misc_RNA (1)...(19): siRNA sense strand
gagagcacgauuuauugug

SEQ ID NO: 1279947 - RNA, 19 nt, Homo sapiens
  misc_RNA (1)...(19): siRNA sense strand
gaaguauuugaguaucuug

SEQ ID NO: 1279948 - RNA, 19 nt, Homo sapiens
  misc_RNA (1)...(19): siRNA sense strand
ggcuaccugucucagauga

SEQ ID NO: 1279949 - RNA, 19 nt, Homo sapiens
  misc_RNA (1)...(19): siRNA sense strand
gauaucaggauuuggaaaa

SEQ ID NO: 1279950 - RNA, 19 nt, Homo sapiens
  misc_RNA (1)...(19): siRNA sense strand
ccucuugccacccauacua

SEQ ID NO: 1279951 - RNA, 19 nt, Homo sapiens
  misc_RNA (1)...(19): siRNA sense strand
ccaugguguugcugcugua

SEQ ID NO: 1279952 - RNA, 19 nt, Homo sapiens
  misc_RNA (1)...(19): siRNA sense strand
cagaugacgccuguuauag

SEQ ID NO: 1279953 - RNA, 19 nt, Homo sapiens
  misc_RNA (1)...(19): siRNA sense strand
cagaugguggagcugaaua

SEQ ID NO: 1279954 - RNA, 19 nt, Homo sapiens
  misc_RNA (1)...(19): siRNA sense strand
gucauugcugugauuguua

SEQ ID NO: 1279955 - RNA, 19 nt, Homo sapiens
  misc_RNA (1)...(19): siRNA sense strand
ggagccaccaacauuugaa

SEQ ID NO: 1279956 - RNA, 19 nt, Homo sapiens
  misc_RNA (1)...(19): siRNA sense strand
uuggugaacgaguagauua

SEQ ID NO: 1279957 - RNA, 19 nt, Homo sapiens
  misc_RNA (1)...(19): siRNA sense strand
gcgcuuuccuggguugcuu

SEQ ID NO: 1279958 - RNA, 19 nt, Homo sapiens
  misc_RNA (1)...(19): siRNA sense strand
uacuacaaagcaacaguua

SEQ ID NO: 1279959 - RNA, 19 nt, Homo sapiens
  misc_RNA (1)...(19): siRNA sense strand
cuugaugcaguaacuuaua

SEQ ID NO: 1279960 - RNA, 19 nt, Homo sapiens
  misc_RNA (1)...(19): siRNA sense strand
aaacauguccauauauacg

SEQ ID NO: 1279961 - RNA, 19 nt, Homo sapiens
  misc_RNA (1)...(19): siRNA sense strand
guguaaaguggucaaaugu

SEQ ID NO: 1279962 - RNA, 19 nt, Homo sapiens
  misc_RNA (1)...(19): siRNA sense strand
cuuacgaguuugguuauca

SEQ ID NO: 1279963 - RNA, 19 nt, Homo sapiens
  misc_RNA (1)...(19): siRNA sense strand
uacgggauccuuuaaaugg

SEQ ID NO: 1279964 - RNA, 19 nt, Homo sapiens
  misc_RNA (1)...(19): siRNA sense strand
gcagaugguggagcugaau

SEQ ID NO: 1279965 - RNA, 19 nt, Homo sapiens
  misc_RNA (1)...(19): siRNA sense strand
aaccaaaacccuacuauga

SEQ ID NO: 1279966 - RNA, 19 nt, Homo sapiens
  misc_RNA (1)...(19): siRNA sense strand
uugaugcaguaacuuauag

SEQ ID NO: 1279967 - RNA, 19 nt, Homo sapiens
  misc_RNA (1)...(19): siRNA sense strand
ggagcugaauaugccacuu

SEQ ID NO: 1279968 - RNA, 19 nt, Homo sapiens
  misc_RNA (1)...(19): siRNA sense strand
caacauuugaagcuaugga

SEQ ID NO: 1279969 - RNA, 19 nt, Homo sapiens
  misc_RNA (1)...(19): siRNA sense strand
cgauggcagcgacacaauu

SEQ ID NO: 1279970 - RNA, 19 nt, Homo sapiens
  misc_RNA (1)...(19): siRNA sense strand
gauccauuuucacuuauug

SEQ ID NO: 1279971 - RNA, 19 nt, Homo sapiens
  misc_RNA (1)...(19): siRNA sense strand
ggagagagcacgauuuauu

SEQ ID NO: 1279972 - RNA, 19 nt, Homo sapiens
  misc_RNA (1)...(19): siRNA sense strand
agagaaacauguccauaua

SEQ ID NO: 1279973 - RNA, 19 nt, Homo sapiens
  misc_RNA (1)...(19): siRNA sense strand
cagaugcacuuuauuugua

SEQ ID NO: 1279974 - RNA, 19 nt, Homo sapiens
  misc_RNA (1)...(19): siRNA sense strand
ggacuuacgaguuugguua

SEQ ID NO: 1279975 - RNA, 19 nt, Homo sapiens
  misc_RNA (1)...(19): siRNA sense strand
aaacagauaucaggauuug

SEQ ID NO: 1279976 - RNA, 19 nt, Homo sapiens
  misc_RNA (1)...(19): siRNA sense strand
cuauggagcucauugguaa

SEQ ID NO: 1279977 - RNA, 19 nt, Homo sapiens
  misc_RNA (1)...(19): siRNA sense strand
aaacacaccuuuagugaag

SEQ ID NO: 1279978 - RNA, 19 nt, Homo sapiens
  misc_RNA (1)...(19): siRNA sense strand
gaacuuaaaggaucaguag

SEQ ID NO: 1279979 - RNA, 19 nt, Homo sapiens
  misc_RNA (1)...(19): siRNA sense strand
gaaaacagauaucaggauu

SEQ ID NO: 1279980 - RNA, 19 nt, Homo sapiens
  misc_RNA (1)...(19): siRNA sense strand
uaaaggaucaguagcaauu

SEQ ID NO: 1279981 - RNA, 19 nt, Homo sapiens
  misc_RNA (1)...(19): siRNA sense strand
aaaugggacuuacgaguuu

SEQ ID NO: 1279982 - RNA, 19 nt, Homo sapiens
  misc_RNA (1)...(19): siRNA sense strand
guuaucagaugcacuuuau

SEQ ID NO: 1279983 - RNA, 19 nt, Homo sapiens
  misc_RNA (1)...(19): siRNA sense strand
gagcugaauaugccacuua

SEQ ID NO: 1279984 - RNA, 19 nt, Homo sapiens
  misc_RNA (1)...(19): siRNA sense strand
ugagauuggugaacgagua

SEQ ID NO: 1279985 - RNA, 19 nt, Homo sapiens
  misc_RNA (1)...(19): siRNA sense strand
gugaacgaguagauuauaa

SEQ ID NO: 1279986 - RNA, 19 nt, Homo sapiens
  misc_RNA (1)...(19): siRNA sense strand
gagagagcacgauuuauug

SEQ ID NO: 1279987 - RNA, 19 nt, Homo sapiens
  misc_RNA (1)...(19): siRNA sense strand
caaaugggacuuacgaguu

SEQ ID NO: 1279988 - RNA, 19 nt, Homo sapiens
  misc_RNA (1)...(19): siRNA sense strand
ggucauugcugugauuguu

SEQ ID NO: 1279989 - RNA, 19 nt, Homo sapiens
  misc_RNA (1)...(19): siRNA sense strand
ccagauccauuuucacuua

SEQ ID NO: 1279990 - RNA, 19 nt, Homo sapiens
  misc_RNA (1)...(19): siRNA sense strand
gaaggaauacuugacaguu

SEQ ID NO: 1279991 - RNA, 19 nt, Homo sapiens
  misc_RNA (1)...(19): siRNA sense strand
aaggaauacuugacaguuu

SEQ ID NO: 1279992 - RNA, 19 nt, Homo sapiens
  misc_RNA (1)...(19): siRNA sense strand
ucagaugacgccuguuaua

SEQ ID NO: 1279993 - RNA, 19 nt, Homo sapiens
  misc_RNA (1)...(19): siRNA sense strand
gaaaacacaccuuuaguga

SEQ ID NO: 1279994 - RNA, 19 nt, Homo sapiens
  misc_RNA (1)...(19): siRNA sense strand
gaugacgccuguuauagag

SEQ ID NO: 1279995 - RNA, 19 nt, Homo sapiens
  misc_RNA (1)...(19): siRNA sense strand
gagaaacauguccauauau

SEQ ID NO: 1279996 - RNA, 19 nt, Homo sapiens
  misc_RNA (1)...(19): siRNA sense strand
ccacuuaccagacuaaauc

SEQ ID NO: 1279997 - RNA, 19 nt, Homo sapiens
  misc_RNA (1)...(19): siRNA sense strand
acgaguagauuauaagugu

SEQ ID NO: 1279998 - RNA, 19 nt, Homo sapiens
  misc_RNA (1)...(19): siRNA sense strand
cuacaaagcaacaguuaug

SEQ ID NO: 1279999 - RNA, 19 nt, Homo sapiens
  misc_RNA (1)...(19): siRNA sense strand
ccaccaacauuugaagcua

SEQ ID NO: 1280000 - RNA, 19 nt, Homo sapiens
  misc_RNA (1)...(19): siRNA sense strand
uauacgggauccuuuaaau

SEQ ID NO: 1280001 - RNA, 19 nt, Homo sapiens
  misc_RNA (1)...(19): siRNA sense strand
cgaguuugguuaucagaug

SEQ ID NO: 1280002 - RNA, 19 nt, Homo sapiens
  misc_RNA (1)...(19): siRNA sense strand
gaacgaguagauuauaagu

SEQ ID NO: 1280003 - RNA, 19 nt, Homo sapiens
  misc_RNA (1)...(19): siRNA sense strand
gugaggagccaccaacauu

SEQ ID NO: 1280004 - RNA, 19 nt, Homo sapiens
  misc_RNA (1)...(19): siRNA sense strand
gauggcagcgacacaauug

SEQ ID NO: 1280005 - RNA, 19 nt, Homo sapiens
  misc_RNA (1)...(19): siRNA sense strand
ucucagaugacgccuguua

SEQ ID NO: 1280006 - RNA, 19 nt, Homo sapiens
  misc_RNA (1)...(19): siRNA sense strand
gaggagccaccaacauuug

SEQ ID NO: 1280007 - RNA, 19 nt, Homo sapiens
  misc_RNA (1)...(19): siRNA sense strand
gcuauggagcucauuggua

SEQ ID NO: 1280008 - RNA, 19 nt, Homo sapiens
  misc_RNA (1)...(19): siRNA sense strand
acacaccuuuagugaagua

SEQ ID NO: 1280009 - RNA, 19 nt, Homo sapiens
  misc_RNA (1)...(19): siRNA sense strand
uagagaaacauguccauau

SEQ ID NO: 1280010 - RNA, 19 nt, Homo sapiens
  misc_RNA (1)...(19): siRNA sense strand
guuccaaagugucuuaaag

SEQ ID NO: 1280011 - RNA, 19 nt, Homo sapiens
  misc_RNA (1)...(19): siRNA sense strand
ggugaacgaguagauuaua

SEQ ID NO: 1280012 - RNA, 19 nt, Homo sapiens
  misc_RNA (1)...(19): siRNA sense strand
gaaguagaaguauuugagu

SEQ ID NO: 1280013 - RNA, 19 nt, Homo sapiens
  misc_RNA (1)...(19): siRNA sense strand
gaaacauguccauauauac

SEQ ID NO: 1280014 - RNA, 19 nt, Homo sapiens
  misc_RNA (1)...(19): siRNA sense strand
ugacgccuguuauagagaa

SEQ ID NO: 1280015 - RNA, 19 nt, Homo sapiens
  misc_RNA (1)...(19): siRNA sense strand
cgaguagauuauaagugua

SEQ ID NO: 1280016 - RNA, 19 nt, Homo sapiens
  misc_RNA (1)...(19): siRNA sense strand
gcacuuuauuuguaaugag

SEQ ID NO: 1280017 - RNA, 19 nt, Homo sapiens
  misc_RNA (1)...(19): siRNA sense strand
guagaaguauuugaguauc

SEQ ID NO: 1280018 - RNA, 19 nt, Homo sapiens
  misc_RNA (1)...(19): siRNA sense strand
guauuugaguaucuugaug

SEQ ID NO: 1280019 - RNA, 19 nt, Homo sapiens
  misc_RNA (1)...(19): siRNA sense strand
aggaauacuugacaguuug

SEQ ID NO: 1280020 - RNA, 19 nt, Homo sapiens
  misc_RNA (1)...(19): siRNA sense strand
ccaaaacccuacuaugaga

SEQ ID NO: 1280021 - RNA, 19 nt, Homo sapiens
  misc_RNA (1)...(19): siRNA sense strand
aguguaaaguggucaaaug

SEQ ID NO: 1280022 - RNA, 19 nt, Homo sapiens
  misc_RNA (1)...(19): siRNA sense strand
ccacccauacuauuuguga

SEQ ID NO: 1280023 - RNA, 19 nt, Homo sapiens
  misc_RNA (1)...(19): siRNA sense strand
uuggagagagcacgauuua

SEQ ID NO: 1280024 - RNA, 19 nt, Homo sapiens
  misc_RNA (1)...(19): siRNA sense strand
gguuaucagaugcacuuua

SEQ ID NO: 1280025 - RNA, 19 nt, Homo sapiens
  misc_RNA (1)...(19): siRNA sense strand
caccaacauuugaagcuau

SEQ ID NO: 1280026 - RNA, 19 nt, Homo sapiens
  misc_RNA (1)...(19): siRNA sense strand
ugaggagccaccaacauuu

SEQ ID NO: 1280027 - RNA, 19 nt, Homo sapiens
  misc_RNA (1)...(19): siRNA sense strand
ggaaggaauacuugacagu

SEQ ID NO: 1280028 - RNA, 19 nt, Homo sapiens
  misc_RNA (1)...(19): siRNA sense strand
gaggaaggaauacuugaca

SEQ ID NO: 1280029 - RNA, 19 nt, Homo sapiens
  misc_RNA (1)...(19): siRNA sense strand
ccaguuccaaagugucuua

SEQ ID NO: 1280030 - RNA, 19 nt, Homo sapiens
  misc_RNA (1)...(19): siRNA sense strand
ugaguaucuugaugcagua

SEQ ID NO: 1280031 - RNA, 19 nt, Homo sapiens
  misc_RNA (1)...(19): siRNA sense strand
caccuuuagugaaguagaa

SEQ ID NO: 1280032 - RNA, 19 nt, Homo sapiens
  misc_RNA (1)...(19): siRNA sense strand
acagauaucaggauuugga

SEQ ID NO: 1280033 - RNA, 19 nt, Homo sapiens
  misc_RNA (1)...(19): siRNA sense strand
ucauugcugugauuguuau

SEQ ID NO: 1280034 - RNA, 19 nt, Homo sapiens
  misc_RNA (1)...(19): siRNA sense strand
ucagaugcacuuuauuugu

SEQ ID NO: 1280035 - RNA, 19 nt, Homo sapiens
  misc_RNA (1)...(19): siRNA sense strand
gugcugcuccagaguguaa

SEQ ID NO: 1280036 - RNA, 19 nt, Homo sapiens
  misc_RNA (1)...(19): siRNA sense strand
ggaaaacacaccuuuagug

SEQ ID NO: 1280037 - RNA, 19 nt, Homo sapiens
  misc_RNA (1)...(19): siRNA sense strand
aaggaucaguagcaauuug

SEQ ID NO: 1280038 - RNA, 19 nt, Homo sapiens
  misc_RNA (1)...(19): siRNA sense strand
uauauacgggauccuuuaa

SEQ ID NO: 1280039 - RNA, 19 nt, Homo sapiens
  misc_RNA (1)...(19): siRNA sense strand
ugaaguagaaguauuugag

SEQ ID NO: 1280040 - RNA, 19 nt, Homo sapiens
  misc_RNA (1)...(19): siRNA sense strand
cuugacaguuuggauguuu

SEQ ID NO: 1280041 - RNA, 19 nt, Homo sapiens
  misc_RNA (1)...(19): siRNA sense strand
cauauauacgggauccuuu

SEQ ID NO: 1280042 - RNA, 19 nt, Homo sapiens
  misc_RNA (1)...(19): siRNA sense strand
auauauacgggauccuuua

SEQ ID NO: 1280043 - RNA, 19 nt, Homo sapiens
  misc_RNA (1)...(19): siRNA sense strand
cuuaaaggaucaguagcaa

SEQ ID NO: 1280044 - RNA, 19 nt, Homo sapiens
  misc_RNA (1)...(19): siRNA sense strand
uaaaccugaggaaggaaua

SEQ ID NO: 1280045 - RNA, 19 nt, Homo sapiens
  misc_RNA (1)...(19): siRNA sense strand
agaugacgccuguuauaga

SEQ ID NO: 1280046 - RNA, 19 nt, Homo sapiens
  misc_RNA (1)...(19): siRNA sense strand
ugugauuguuauugccaua

SEQ ID NO: 1280047 - RNA, 19 nt, Homo sapiens
  misc_RNA (1)...(19): siRNA sense strand
gagagcacgauuuauugug

SEQ ID NO: 1280048 - RNA, 19 nt, Homo sapiens
  misc_RNA (1)...(19): siRNA sense strand
gaaguauuugaguaucuug

SEQ ID NO: 1280049 - RNA, 19 nt, Homo sapiens
  misc_RNA (1)...(19): siRNA sense strand
ggcuaccugucucagauga

SEQ ID NO: 1280050 - RNA, 19 nt, Homo sapiens
  misc_RNA (1)...(19): siRNA sense strand
gauaucaggauuuggaaaa

SEQ ID NO: 1280051 - RNA, 19 nt, Homo sapiens
  misc_RNA (1)...(19): siRNA sense strand
ccucuugccacccauacua

SEQ ID NO: 1280052 - RNA, 19 nt, Homo sapiens
  misc_RNA (1)...(19): siRNA sense strand
ccaugguguugcugcugua

SEQ ID NO: 1280053 - RNA, 19 nt, Homo sapiens
  misc_RNA (1)...(19): siRNA sense strand
cagaugacgccuguuauag

SEQ ID NO: 1280054 - RNA, 19 nt, Homo sapiens
  misc_RNA (1)...(19): siRNA sense strand
cagaugguggagcugaaua

SEQ ID NO: 1280055 - RNA, 19 nt, Homo sapiens
  misc_RNA (1)...(19): siRNA sense strand
gucauugcugugauuguua

SEQ ID NO: 1280056 - RNA, 19 nt, Homo sapiens
  misc_RNA (1)...(19): siRNA sense strand
ggagccaccaacauuugaa

SEQ ID NO: 1280057 - RNA, 19 nt, Homo sapiens
  misc_RNA (1)...(19): siRNA sense strand
uuggugaacgaguagauua

SEQ ID NO: 1280058 - RNA, 19 nt, Homo sapiens
  misc_RNA (1)...(19): siRNA sense strand
gcgcuuuccuggguugcuu

SEQ ID NO: 1280059 - RNA, 19 nt, Homo sapiens
  misc_RNA (1)...(19): siRNA sense strand
uacuacaaagcaacaguua

SEQ ID NO: 1280060 - RNA, 19 nt, Homo sapiens
  misc_RNA (1)...(19): siRNA sense strand
cuugaugcaguaacuuaua

SEQ ID NO: 1280061 - RNA, 19 nt, Homo sapiens
  misc_RNA (1)...(19): siRNA sense strand
aaacauguccauauauacg

SEQ ID NO: 1280062 - RNA, 19 nt, Homo sapiens
  misc_RNA (1)...(19): siRNA sense strand
guguaaaguggucaaaugu

SEQ ID NO: 1280063 - RNA, 19 nt, Homo sapiens
  misc_RNA (1)...(19): siRNA sense strand
cuuacgaguuugguuauca

SEQ ID NO: 1280064 - RNA, 19 nt, Homo sapiens
  misc_RNA (1)...(19): siRNA sense strand
uacgggauccuuuaaaugg

SEQ ID NO: 1280065 - RNA, 19 nt, Homo sapiens
  misc_RNA (1)...(19): siRNA sense strand
gcagaugguggagcugaau

SEQ ID NO: 1280066 - RNA, 19 nt, Homo sapiens
  misc_RNA (1)...(19): siRNA sense strand
aaccaaaacccuacuauga

SEQ ID NO: 1280067 - RNA, 19 nt, Homo sapiens
  misc_RNA (1)...(19): siRNA sense strand
uugaugcaguaacuuauag

SEQ ID NO: 1280068 - RNA, 19 nt, Homo sapiens
  misc_RNA (1)...(19): siRNA sense strand
ggagcugaauaugccacuu

SEQ ID NO: 1280069 - RNA, 19 nt, Homo sapiens
  misc_RNA (1)...(19): siRNA sense strand
cgauggcagcgacacaauu

SEQ ID NO: 1280070 - RNA, 19 nt, Homo sapiens
  misc_RNA (1)...(19): siRNA sense strand
gauccauuuucacuuauug

SEQ ID NO: 1280071 - RNA, 19 nt, Homo sapiens
  misc_RNA (1)...(19): siRNA sense strand
ggagagagcacgauuuauu

SEQ ID NO: 1280072 - RNA, 19 nt, Homo sapiens
  misc_RNA (1)...(19): siRNA sense strand
agagaaacauguccauaua

SEQ ID NO: 1280073 - RNA, 19 nt, Homo sapiens
  misc_RNA (1)...(19): siRNA sense strand
cagaugcacuuuauuugua

SEQ ID NO: 1280074 - RNA, 19 nt, Homo sapiens
  misc_RNA (1)...(19): siRNA sense strand
ggacuuacgaguuugguua

SEQ ID NO: 1280075 - RNA, 19 nt, Homo sapiens
  misc_RNA (1)...(19): siRNA sense strand
aaacagauaucaggauuug

SEQ ID NO: 1280076 - RNA, 19 nt, Homo sapiens
  misc_RNA (1)...(19): siRNA sense strand
cuauggagcucauugguaa

SEQ ID NO: 1280077 - RNA, 19 nt, Homo sapiens
  misc_RNA (1)...(19): siRNA sense strand
aaacacaccuuuagugaag

SEQ ID NO: 1280078 - RNA, 19 nt, Homo sapiens
  misc_RNA (1)...(19): siRNA sense strand
gaacuuaaaggaucaguag

SEQ ID NO: 1280079 - RNA, 19 nt, Homo sapiens
  misc_RNA (1)...(19): siRNA sense strand
gaaaacagauaucaggauu

SEQ ID NO: 1280080 - RNA, 19 nt, Homo sapiens
  misc_RNA (1)...(19): siRNA sense strand
uaaaggaucaguagcaauu

SEQ ID NO: 1280081 - RNA, 19 nt, Homo sapiens
  misc_RNA (1)...(19): siRNA sense strand
aaaugggacuuacgaguuu

SEQ ID NO: 1280082 - RNA, 19 nt, Homo sapiens
  misc_RNA (1)...(19): siRNA sense strand
guuaucagaugcacuuuau

SEQ ID NO: 1280083 - RNA, 19 nt, Homo sapiens
  misc_RNA (1)...(19): siRNA sense strand
gagcugaauaugccacuua

SEQ ID NO: 1280084 - RNA, 19 nt, Homo sapiens
  misc_RNA (1)...(19): siRNA sense strand
ugagauuggugaacgagua

SEQ ID NO: 1280085 - RNA, 19 nt, Homo sapiens
  misc_RNA (1)...(19): siRNA sense strand
gugaacgaguagauuauaa

SEQ ID NO: 1280086 - RNA, 19 nt, Homo sapiens
  misc_RNA (1)...(19): siRNA sense strand
gagagagcacgauuuauug

SEQ ID NO: 1280087 - RNA, 19 nt, Homo sapiens
  misc_RNA (1)...(19): siRNA sense strand
caaaugggacuuacgaguu

SEQ ID NO: 1280088 - RNA, 19 nt, Homo sapiens
  misc_RNA (1)...(19): siRNA sense strand
ggucauugcugugauuguu

SEQ ID NO: 1280089 - RNA, 19 nt, Homo sapiens
  misc_RNA (1)...(19): siRNA sense strand
ccagauccauuuucacuua

SEQ ID NO: 1280090 - RNA, 19 nt, Homo sapiens
  misc_RNA (1)...(19): siRNA sense strand
gaaggaauacuugacaguu

SEQ ID NO: 1280091 - RNA, 19 nt, Homo sapiens
  misc_RNA (1)...(19): siRNA sense strand
aaggaauacuugacaguuu

SEQ ID NO: 1280092 - RNA, 19 nt, Homo sapiens
  misc_RNA (1)...(19): siRNA sense strand
ucagaugacgccuguuaua

SEQ ID NO: 1280093 - RNA, 19 nt, Homo sapiens
  misc_RNA (1)...(19): siRNA sense strand
gaaaacacaccuuuaguga

SEQ ID NO: 1280094 - RNA, 19 nt, Homo sapiens
  misc_RNA (1)...(19): siRNA sense strand
gaugacgccuguuauagag

SEQ ID NO: 1280095 - RNA, 19 nt, Homo sapiens
  misc_RNA (1)...(19): siRNA sense strand
gagaaacauguccauauau

SEQ ID NO: 1280096 - RNA, 19 nt, Homo sapiens
  misc_RNA (1)...(19): siRNA sense strand
ccacuuaccagacuaaauc

SEQ ID NO: 1280097 - RNA, 19 nt, Homo sapiens
  misc_RNA (1)...(19): siRNA sense strand
acgaguagauuauaagugu

SEQ ID NO: 1280098 - RNA, 19 nt, Homo sapiens
  misc_RNA (1)...(19): siRNA sense strand
cuacaaagcaacaguuaug

SEQ ID NO: 1280099 - RNA, 19 nt, Homo sapiens
  misc_RNA (1)...(19): siRNA sense strand
ccaccaacauuugaagcua

SEQ ID NO: 1280100 - RNA, 19 nt, Homo sapiens
  misc_RNA (1)...(19): siRNA sense strand
uauacgggauccuuuaaau

SEQ ID NO: 1280101 - RNA, 19 nt, Homo sapiens
  misc_RNA (1)...(19): siRNA sense strand
cgaguuugguuaucagaug

SEQ ID NO: 1280102 - RNA, 19 nt, Homo sapiens
  misc_RNA (1)...(19): siRNA sense strand
gaacgaguagauuauaagu

SEQ ID NO: 1280103 - RNA, 19 nt, Homo sapiens
  misc_RNA (1)...(19): siRNA sense strand
gugaggagccaccaacauu

SEQ ID NO: 1280104 - RNA, 19 nt, Homo sapiens
  misc_RNA (1)...(19): siRNA sense strand
gauggcagcgacacaauug

SEQ ID NO: 1280105 - RNA, 19 nt, Homo sapiens
  misc_RNA (1)...(19): siRNA sense strand
ucucagaugacgccuguua

SEQ ID NO: 1280106 - RNA, 19 nt, Homo sapiens
  misc_RNA (1)...(19): siRNA sense strand
gaggagccaccaacauuug

SEQ ID NO: 1280107 - RNA, 19 nt, Homo sapiens
  misc_RNA (1)...(19): siRNA sense strand
gcuauggagcucauuggua

SEQ ID NO: 1280108 - RNA, 19 nt, Homo sapiens
  misc_RNA (1)...(19): siRNA sense strand
acacaccuuuagugaagua

SEQ ID NO: 1280109 - RNA, 19 nt, Homo sapiens
  misc_RNA (1)...(19): siRNA sense strand
uagagaaacauguccauau

SEQ ID NO: 1280110 - RNA, 19 nt, Homo sapiens
  misc_RNA (1)...(19): siRNA sense strand
guuccaaagugucuuaaag

SEQ ID NO: 1280111 - RNA, 19 nt, Homo sapiens
  misc_RNA (1)...(19): siRNA sense strand
ggugaacgaguagauuaua

SEQ ID NO: 1280112 - RNA, 19 nt, Homo sapiens
  misc_RNA (1)...(19): siRNA sense strand
gaaguagaaguauuugagu

SEQ ID NO: 1280113 - RNA, 19 nt, Homo sapiens
  misc_RNA (1)...(19): siRNA sense strand
gaaacauguccauauauac

SEQ ID NO: 1280114 - RNA, 19 nt, Homo sapiens
  misc_RNA (1)...(19): siRNA sense strand
ugacgccuguuauagagaa

SEQ ID NO: 1280115 - RNA, 19 nt, Homo sapiens
  misc_RNA (1)...(19): siRNA sense strand
cgaguagauuauaagugua

SEQ ID NO: 1280116 - RNA, 19 nt, Homo sapiens
  misc_RNA (1)...(19): siRNA sense strand
gcacuuuauuuguaaugag

SEQ ID NO: 1280117 - RNA, 19 nt, Homo sapiens
  misc_RNA (1)...(19): siRNA sense strand
guagaaguauuugaguauc

SEQ ID NO: 1280118 - RNA, 19 nt, Homo sapiens
  misc_RNA (1)...(19): siRNA sense strand
guauuugaguaucuugaug

SEQ ID NO: 1280119 - RNA, 19 nt, Homo sapiens
  misc_RNA (1)...(19): siRNA sense strand
aggaauacuugacaguuug

SEQ ID NO: 1280120 - RNA, 19 nt, Homo sapiens
  misc_RNA (1)...(19): siRNA sense strand
ccaaaacccuacuaugaga

SEQ ID NO: 1280121 - RNA, 19 nt, Homo sapiens
  misc_RNA (1)...(19): siRNA sense strand
aguguaaaguggucaaaug

SEQ ID NO: 1280122 - RNA, 19 nt, Homo sapiens
  misc_RNA (1)...(19): siRNA sense strand
ccacccauacuauuuguga

SEQ ID NO: 1280123 - RNA, 19 nt, Homo sapiens
  misc_RNA (1)...(19): siRNA sense strand
uuggagagagcacgauuua

SEQ ID NO: 1280124 - RNA, 19 nt, Homo sapiens
  misc_RNA (1)...(19): siRNA sense strand
gguuaucagaugcacuuua

SEQ ID NO: 1280125 - RNA, 19 nt, Homo sapiens
  misc_RNA (1)...(19): siRNA sense strand
caccaacauuugaagcuau

SEQ ID NO: 1280126 - RNA, 19 nt, Homo sapiens
  misc_RNA (1)...(19): siRNA sense strand
ugaggagccaccaacauuu

SEQ ID NO: 1280127 - RNA, 19 nt, Homo sapiens
  misc_RNA (1)...(19): siRNA sense strand
ggaaggaauacuugacagu

SEQ ID NO: 1280128 - RNA, 19 nt, Homo sapiens
  misc_RNA (1)...(19): siRNA sense strand
gaggaaggaauacuugaca

SEQ ID NO: 1280129 - RNA, 19 nt, Homo sapiens
  misc_RNA (1)...(19): siRNA sense strand
ccaguuccaaagugucuua

SEQ ID NO: 1280130 - RNA, 19 nt, Homo sapiens
  misc_RNA (1)...(19): siRNA sense strand
ugaguaucuugaugcagua

SEQ ID NO: 1280131 - RNA, 19 nt, Homo sapiens
  misc_RNA (1)...(19): siRNA sense strand
caccuuuagugaaguagaa

SEQ ID NO: 1280132 - RNA, 19 nt, Homo sapiens
  misc_RNA (1)...(19): siRNA sense strand
acagauaucaggauuugga

SEQ ID NO: 1280133 - RNA, 19 nt, Homo sapiens
  misc_RNA (1)...(19): siRNA sense strand
ucauugcugugauuguuau

SEQ ID NO: 1280134 - RNA, 19 nt, Homo sapiens
  misc_RNA (1)...(19): siRNA sense strand
ucagaugcacuuuauuugu

SEQ ID NO: 1280135 - RNA, 19 nt, Homo sapiens
  misc_RNA (1)...(19): siRNA sense strand
gugcugcuccagaguguaa

SEQ ID NO: 1280136 - RNA, 19 nt, Homo sapiens
  misc_RNA (1)...(19): siRNA sense strand
ggaaaacacaccuuuagug

SEQ ID NO: 1280137 - RNA, 19 nt, Homo sapiens
  misc_RNA (1)...(19): siRNA sense strand
aaggaucaguagcaauuug

SEQ ID NO: 1280138 - RNA, 19 nt, Homo sapiens
  misc_RNA (1)...(19): siRNA sense strand
uauauacgggauccuuuaa

SEQ ID NO: 1280139 - RNA, 19 nt, Homo sapiens
  misc_RNA (1)...(19): siRNA sense strand
ugaaguagaaguauuugag

SEQ ID NO: 1280140 - RNA, 19 nt, Homo sapiens
  misc_RNA (1)...(19): siRNA sense strand
cuugacaguuuggauguuu

SEQ ID NO: 1280141 - RNA, 19 nt, Homo sapiens
  misc_RNA (1)...(19): siRNA sense strand
cauauauacgggauccuuu

SEQ ID NO: 1280142 - RNA, 19 nt, Homo sapiens
  misc_RNA (1)...(19): siRNA sense strand
auauauacgggauccuuua

SEQ ID NO: 1280143 - RNA, 19 nt, Homo sapiens
  misc_RNA (1)...(19): siRNA sense strand
cuuaaaggaucaguagcaa

SEQ ID NO: 1280144 - RNA, 19 nt, Homo sapiens
  misc_RNA (1)...(19): siRNA sense strand
uaaaccugaggaaggaaua

SEQ ID NO: 1280145 - RNA, 19 nt, Homo sapiens
  misc_RNA (1)...(19): siRNA sense strand
agaugacgccuguuauaga

SEQ ID NO: 1280146 - RNA, 19 nt, Homo sapiens
  misc_RNA (1)...(19): siRNA sense strand
ugugauuguuauugccaua

SEQ ID NO: 1280147 - RNA, 19 nt, Homo sapiens
  misc_RNA (1)...(19): siRNA sense strand
gagagcacgauuuauugug

SEQ ID NO: 1280148 - RNA, 19 nt, Homo sapiens
  misc_RNA (1)...(19): siRNA sense strand
gaaguauuugaguaucuug

SEQ ID NO: 1280149 - RNA, 19 nt, Homo sapiens
  misc_RNA (1)...(19): siRNA sense strand
ggcuaccugucucagauga

SEQ ID NO: 1280150 - RNA, 19 nt, Homo sapiens
  misc_RNA (1)...(19): siRNA sense strand
gauaucaggauuuggaaaa

SEQ ID NO: 1280151 - RNA, 19 nt, Homo sapiens
  misc_RNA (1)...(19): siRNA sense strand
ccucuugccacccauacua

SEQ ID NO: 1280152 - RNA, 19 nt, Homo sapiens
  misc_RNA (1)...(19): siRNA sense strand
ccaugguguugcugcugua

SEQ ID NO: 1280153 - RNA, 19 nt, Homo sapiens
  misc_RNA (1)...(19): siRNA sense strand
cagaugacgccuguuauag

SEQ ID NO: 1280154 - RNA, 19 nt, Homo sapiens
  misc_RNA (1)...(19): siRNA sense strand
cagaugguggagcugaaua

SEQ ID NO: 1280155 - RNA, 19 nt, Homo sapiens
  misc_RNA (1)...(19): siRNA sense strand
gucauugcugugauuguua

SEQ ID NO: 1280156 - RNA, 19 nt, Homo sapiens
  misc_RNA (1)...(19): siRNA sense strand
ggagccaccaacauuugaa

SEQ ID NO: 1280157 - RNA, 19 nt, Homo sapiens
  misc_RNA (1)...(19): siRNA sense strand
uuggugaacgaguagauua

SEQ ID NO: 1280158 - RNA, 19 nt, Homo sapiens
  misc_RNA (1)...(19): siRNA sense strand
gcgcuuuccuggguugcuu

SEQ ID NO: 1280159 - RNA, 19 nt, Homo sapiens
  misc_RNA (1)...(19): siRNA sense strand
uacuacaaagcaacaguua

SEQ ID NO: 1280160 - RNA, 19 nt, Homo sapiens
  misc_RNA (1)...(19): siRNA sense strand
cuugaugcaguaacuuaua

SEQ ID NO: 1280161 - RNA, 19 nt, Homo sapiens
  misc_RNA (1)...(19): siRNA sense strand
aaacauguccauauauacg

SEQ ID NO: 1280162 - RNA, 19 nt, Homo sapiens
  misc_RNA (1)...(19): siRNA sense strand
guguaaaguggucaaaugu

SEQ ID NO: 1280163 - RNA, 19 nt, Homo sapiens
  misc_RNA (1)...(19): siRNA sense strand
cuuacgaguuugguuauca

SEQ ID NO: 1280164 - RNA, 19 nt, Homo sapiens
  misc_RNA (1)...(19): siRNA sense strand
uacgggauccuuuaaaugg

SEQ ID NO: 1280165 - RNA, 19 nt, Homo sapiens
  misc_RNA (1)...(19): siRNA sense strand
gcagaugguggagcugaau

SEQ ID NO: 1280166 - RNA, 19 nt, Homo sapiens
  misc_RNA (1)...(19): siRNA sense strand
aaccaaaacccuacuauga

SEQ ID NO: 1280167 - RNA, 19 nt, Homo sapiens
  misc_RNA (1)...(19): siRNA sense strand
uugaugcaguaacuuauag

SEQ ID NO: 1280168 - RNA, 19 nt, Homo sapiens
  misc_RNA (1)...(19): siRNA sense strand
ggagcugaauaugccacuu

SEQ ID NO: 1280169 - RNA, 19 nt, Homo sapiens
  misc_RNA (1)...(19): siRNA sense strand
cgauggcagcgacacaauu

SEQ ID NO: 1280170 - RNA, 19 nt, Homo sapiens
  misc_RNA (1)...(19): siRNA sense strand
gauccauuuucacuuauug

SEQ ID NO: 1280171 - RNA, 19 nt, Homo sapiens
  misc_RNA (1)...(19): siRNA sense strand
ggagagagcacgauuuauu

SEQ ID NO: 1280172 - RNA, 19 nt, Homo sapiens
  misc_RNA (1)...(19): siRNA sense strand
agagaaacauguccauaua

SEQ ID NO: 1280173 - RNA, 19 nt, Homo sapiens
  misc_RNA (1)...(19): siRNA sense strand
cagaugcacuuuauuugua

SEQ ID NO: 1280174 - RNA, 19 nt, Homo sapiens
  misc_RNA (1)...(19): siRNA sense strand
ggacuuacgaguuugguua

SEQ ID NO: 1280175 - RNA, 19 nt, Homo sapiens
  misc_RNA (1)...(19): siRNA sense strand
aaacagauaucaggauuug

SEQ ID NO: 1280176 - RNA, 19 nt, Homo sapiens
  misc_RNA (1)...(19): siRNA sense strand
cuauggagcucauugguaa

SEQ ID NO: 1280177 - RNA, 19 nt, Homo sapiens
  misc_RNA (1)...(19): siRNA sense strand
aaacacaccuuuagugaag

SEQ ID NO: 1280178 - RNA, 19 nt, Homo sapiens
  misc_RNA (1)...(19): siRNA sense strand
gaacuuaaaggaucaguag

SEQ ID NO: 1280179 - RNA, 19 nt, Homo sapiens
  misc_RNA (1)...(19): siRNA sense strand
gaaaacagauaucaggauu

SEQ ID NO: 1280180 - RNA, 19 nt, Homo sapiens
  misc_RNA (1)...(19): siRNA sense strand
uaaaggaucaguagcaauu

SEQ ID NO: 1280181 - RNA, 19 nt, Homo sapiens
  misc_RNA (1)...(19): siRNA sense strand
aaaugggacuuacgaguuu

SEQ ID NO: 1280182 - RNA, 19 nt, Homo sapiens
  misc_RNA (1)...(19): siRNA sense strand
guuaucagaugcacuuuau

SEQ ID NO: 1280183 - RNA, 19 nt, Homo sapiens
  misc_RNA (1)...(19): siRNA sense strand
gagcugaauaugccacuua

SEQ ID NO: 1280184 - RNA, 19 nt, Homo sapiens
  misc_RNA (1)...(19): siRNA sense strand
ugagauuggugaacgagua

SEQ ID NO: 1280185 - RNA, 19 nt, Homo sapiens
  misc_RNA (1)...(19): siRNA sense strand
gugaacgaguagauuauaa

SEQ ID NO: 1280186 - RNA, 19 nt, Homo sapiens
  misc_RNA (1)...(19): siRNA sense strand
gagagagcacgauuuauug

SEQ ID NO: 1280187 - RNA, 19 nt, Homo sapiens
  misc_RNA (1)...(19): siRNA sense strand
caaaugggacuuacgaguu

SEQ ID NO: 1280188 - RNA, 19 nt, Homo sapiens
  misc_RNA (1)...(19): siRNA sense strand
ggucauugcugugauuguu

SEQ ID NO: 1280189 - RNA, 19 nt, Homo sapiens
  misc_RNA (1)...(19): siRNA sense strand
ccagauccauuuucacuua

SEQ ID NO: 1280190 - RNA, 19 nt, Homo sapiens
  misc_RNA (1)...(19): siRNA sense strand
gaaggaauacuugacaguu

SEQ ID NO: 1280191 - RNA, 19 nt, Homo sapiens
  misc_RNA (1)...(19): siRNA sense strand
aaggaauacuugacaguuu

SEQ ID NO: 1280192 - RNA, 19 nt, Homo sapiens
  misc_RNA (1)...(19): siRNA sense strand
ucagaugacgccuguuaua

SEQ ID NO: 1280193 - RNA, 19 nt, Homo sapiens
  misc_RNA (1)...(19): siRNA sense strand
gaaaacacaccuuuaguga

SEQ ID NO: 1280194 - RNA, 19 nt, Homo sapiens
  misc_RNA (1)...(19): siRNA sense strand
gaugacgccuguuauagag

SEQ ID NO: 1280195 - RNA, 19 nt, Homo sapiens
  misc_RNA (1)...(19): siRNA sense strand
gagaaacauguccauauau

SEQ ID NO: 1280196 - RNA, 19 nt, Homo sapiens
  misc_RNA (1)...(19): siRNA sense strand
ccacuuaccagacuaaauc

SEQ ID NO: 1280197 - RNA, 19 nt, Homo sapiens
  misc_RNA (1)...(19): siRNA sense strand
acgaguagauuauaagugu

SEQ ID NO: 1280198 - RNA, 19 nt, Homo sapiens
  misc_RNA (1)...(19): siRNA sense strand
cuacaaagcaacaguuaug

SEQ ID NO: 1280199 - RNA, 19 nt, Homo sapiens
  misc_RNA (1)...(19): siRNA sense strand
ccaccaacauuugaagcua

SEQ ID NO: 1280200 - RNA, 19 nt, Homo sapiens
  misc_RNA (1)...(19): siRNA sense strand
uauacgggauccuuuaaau

SEQ ID NO: 1280201 - RNA, 19 nt, Homo sapiens
  misc_RNA (1)...(19): siRNA sense strand
cgaguuugguuaucagaug

SEQ ID NO: 1280202 - RNA, 19 nt, Homo sapiens
  misc_RNA (1)...(19): siRNA sense strand
gaacgaguagauuauaagu

SEQ ID NO: 1280203 - RNA, 19 nt, Homo sapiens
  misc_RNA (1)...(19): siRNA sense strand
gugaggagccaccaacauu

SEQ ID NO: 1280204 - RNA, 19 nt, Homo sapiens
  misc_RNA (1)...(19): siRNA sense strand
gauggcagcgacacaauug

SEQ ID NO: 1280205 - RNA, 19 nt, Homo sapiens
  misc_RNA (1)...(19): siRNA sense strand
ucucagaugacgccuguua

SEQ ID NO: 1280206 - RNA, 19 nt, Homo sapiens
  misc_RNA (1)...(19): siRNA sense strand
gaggagccaccaacauuug

SEQ ID NO: 1280207 - RNA, 19 nt, Homo sapiens
  misc_RNA (1)...(19): siRNA sense strand
gcuauggagcucauuggua

SEQ ID NO: 1280208 - RNA, 19 nt, Homo sapiens
  misc_RNA (1)...(19): siRNA sense strand
acacaccuuuagugaagua

SEQ ID NO: 1280209 - RNA, 19 nt, Homo sapiens
  misc_RNA (1)...(19): siRNA sense strand
uagagaaacauguccauau

SEQ ID NO: 1280210 - RNA, 19 nt, Homo sapiens
  misc_RNA (1)...(19): siRNA sense strand
guuccaaagugucuuaaag

SEQ ID NO: 1280211 - RNA, 19 nt, Homo sapiens
  misc_RNA (1)...(19): siRNA sense strand
ggugaacgaguagauuaua

SEQ ID NO: 1280212 - RNA, 19 nt, Homo sapiens
  misc_RNA (1)...(19): siRNA sense strand
gaaguagaaguauuugagu

SEQ ID NO: 1280213 - RNA, 19 nt, Homo sapiens
  misc_RNA (1)...(19): siRNA sense strand
gaaacauguccauauauac

SEQ ID NO: 1280214 - RNA, 19 nt, Homo sapiens
  misc_RNA (1)...(19): siRNA sense strand
ugacgccuguuauagagaa

SEQ ID NO: 1280215 - RNA, 19 nt, Homo sapiens
  misc_RNA (1)...(19): siRNA sense strand
cgaguagauuauaagugua

SEQ ID NO: 1280216 - RNA, 19 nt, Homo sapiens
  misc_RNA (1)...(19): siRNA sense strand
gcacuuuauuuguaaugag

SEQ ID NO: 1280217 - RNA, 19 nt, Homo sapiens
  misc_RNA (1)...(19): siRNA sense strand
guagaaguauuugaguauc

SEQ ID NO: 1280218 - RNA, 19 nt, Homo sapiens
  misc_RNA (1)...(19): siRNA sense strand
guauuugaguaucuugaug

SEQ ID NO: 1280219 - RNA, 19 nt, Homo sapiens
  misc_RNA (1)...(19): siRNA sense strand
aggaauacuugacaguuug

SEQ ID NO: 1280220 - RNA, 19 nt, Homo sapiens
  misc_RNA (1)...(19): siRNA sense strand
ccaaaacccuacuaugaga

SEQ ID NO: 1280221 - RNA, 19 nt, Homo sapiens
  misc_RNA (1)...(19): siRNA sense strand
aguguaaaguggucaaaug

SEQ ID NO: 1280222 - RNA, 19 nt, Homo sapiens
  misc_RNA (1)...(19): siRNA sense strand
ccacccauacuauuuguga

SEQ ID NO: 1280223 - RNA, 19 nt, Homo sapiens
  misc_RNA (1)...(19): siRNA sense strand
uuggagagagcacgauuua

SEQ ID NO: 1280224 - RNA, 19 nt, Homo sapiens
  misc_RNA (1)...(19): siRNA sense strand
gguuaucagaugcacuuua

SEQ ID NO: 1280225 - RNA, 19 nt, Homo sapiens
  misc_RNA (1)...(19): siRNA sense strand
caccaacauuugaagcuau

SEQ ID NO: 1280226 - RNA, 19 nt, Homo sapiens
  misc_RNA (1)...(19): siRNA sense strand
ugaggagccaccaacauuu

SEQ ID NO: 1280227 - RNA, 19 nt, Homo sapiens
  misc_RNA (1)...(19): siRNA sense strand
ggaaggaauacuugacagu

SEQ ID NO: 1280228 - RNA, 19 nt, Homo sapiens
  misc_RNA (1)...(19): siRNA sense strand
gaggaaggaauacuugaca

SEQ ID NO: 1280229 - RNA, 19 nt, Homo sapiens
  misc_RNA (1)...(19): siRNA sense strand
ccaguuccaaagugucuua

SEQ ID NO: 1280230 - RNA, 19 nt, Homo sapiens
  misc_RNA (1)...(19): siRNA sense strand
ugaguaucuugaugcagua

SEQ ID NO: 1280231 - RNA, 19 nt, Homo sapiens
  misc_RNA (1)...(19): siRNA sense strand
caccuuuagugaaguagaa

SEQ ID NO: 1280232 - RNA, 19 nt, Homo sapiens
  misc_RNA (1)...(19): siRNA sense strand
acagauaucaggauuugga

SEQ ID NO: 1280233 - RNA, 19 nt, Homo sapiens
  misc_RNA (1)...(19): siRNA sense strand
ucauugcugugauuguuau

SEQ ID NO: 1280234 - RNA, 19 nt, Homo sapiens
  misc_RNA (1)...(19): siRNA sense strand
ucagaugcacuuuauuugu

SEQ ID NO: 1280235 - RNA, 19 nt, Homo sapiens
  misc_RNA (1)...(19): siRNA sense strand
gugcugcuccagaguguaa

SEQ ID NO: 1280236 - RNA, 19 nt, Homo sapiens
  misc_RNA (1)...(19): siRNA sense strand
ggaaaacacaccuuuagug

SEQ ID NO: 1280237 - RNA, 19 nt, Homo sapiens
  misc_RNA (1)...(19): siRNA sense strand
aaggaucaguagcaauuug

SEQ ID NO: 1280238 - RNA, 19 nt, Homo sapiens
  misc_RNA (1)...(19): siRNA sense strand
uauauacgggauccuuuaa

SEQ ID NO: 1280239 - RNA, 19 nt, Homo sapiens
  misc_RNA (1)...(19): siRNA sense strand
ugaaguagaaguauuugag

SEQ ID NO: 1280240 - RNA, 19 nt, Homo sapiens
  misc_RNA (1)...(19): siRNA sense strand
cuugacaguuuggauguuu

SEQ ID NO: 1280241 - RNA, 19 nt, Homo sapiens
  misc_RNA (1)...(19): siRNA sense strand
cauauauacgggauccuuu

SEQ ID NO: 1280242 - RNA, 19 nt, Homo sapiens
  misc_RNA (1)...(19): siRNA sense strand
auauauacgggauccuuua

SEQ ID NO: 1280243 - RNA, 19 nt, Homo sapiens
  misc_RNA (1)...(19): siRNA sense strand
cuuaaaggaucaguagcaa

SEQ ID NO: 1280244 - RNA, 19 nt, Homo sapiens
  misc_RNA (1)...(19): siRNA sense strand
uaaaccugaggaaggaaua

SEQ ID NO: 1280245 - RNA, 19 nt, Homo sapiens
  misc_RNA (1)...(19): siRNA sense strand
agaugacgccuguuauaga

SEQ ID NO: 1280246 - RNA, 19 nt, Homo sapiens
  misc_RNA (1)...(19): siRNA sense strand
ugugauuguuauugccaua

SEQ ID NO: 1280247 - RNA, 19 nt, Homo sapiens
  misc_RNA (1)...(19): siRNA sense strand
gagagcacgauuuauugug

SEQ ID NO: 1280248 - RNA, 19 nt, Homo sapiens
  misc_RNA (1)...(19): siRNA sense strand
gaaguauuugaguaucuug

SEQ ID NO: 1280249 - RNA, 19 nt, Homo sapiens
  misc_RNA (1)...(19): siRNA sense strand
ggcuaccugucucagauga

SEQ ID NO: 1280250 - RNA, 19 nt, Homo sapiens
  misc_RNA (1)...(19): siRNA sense strand
gauaucaggauuuggaaaa

SEQ ID NO: 1280251 - RNA, 19 nt, Homo sapiens
  misc_RNA (1)...(19): siRNA sense strand
ccucuugccacccauacua

SEQ ID NO: 1280252 - RNA, 19 nt, Homo sapiens
  misc_RNA (1)...(19): siRNA sense strand
ccaugguguugcugcugua

SEQ ID NO: 1280253 - RNA, 19 nt, Homo sapiens
  misc_RNA (1)...(19): siRNA sense strand
cagaugacgccuguuauag

SEQ ID NO: 1280254 - RNA, 19 nt, Homo sapiens
  misc_RNA (1)...(19): siRNA sense strand
cagaugguggagcugaaua

SEQ ID NO: 1280255 - RNA, 19 nt, Homo sapiens
  misc_RNA (1)...(19): siRNA sense strand
gucauugcugugauuguua

SEQ ID NO: 1280256 - RNA, 19 nt, Homo sapiens
  misc_RNA (1)...(19): siRNA sense strand
ggagccaccaacauuugaa

SEQ ID NO: 1280257 - RNA, 19 nt, Homo sapiens
  misc_RNA (1)...(19): siRNA sense strand
uuggugaacgaguagauua

SEQ ID NO: 1280258 - RNA, 19 nt, Homo sapiens
  misc_RNA (1)...(19): siRNA sense strand
gcgcuuuccuggguugcuu

SEQ ID NO: 1280259 - RNA, 19 nt, Homo sapiens
  misc_RNA (1)...(19): siRNA sense strand
uacuacaaagcaacaguua

SEQ ID NO: 1280260 - RNA, 19 nt, Homo sapiens
  misc_RNA (1)...(19): siRNA sense strand
cuugaugcaguaacuuaua

SEQ ID NO: 1280261 - RNA, 19 nt, Homo sapiens
  misc_RNA (1)...(19): siRNA sense strand
aaacauguccauauauacg

SEQ ID NO: 1280262 - RNA, 19 nt, Homo sapiens
  misc_RNA (1)...(19): siRNA sense strand
guguaaaguggucaaaugu

SEQ ID NO: 1280263 - RNA, 19 nt, Homo sapiens
  misc_RNA (1)...(19): siRNA sense strand
cuuacgaguuugguuauca

SEQ ID NO: 1280264 - RNA, 19 nt, Homo sapiens
  misc_RNA (1)...(19): siRNA sense strand
uacgggauccuuuaaaugg

SEQ ID NO: 1280265 - RNA, 19 nt, Homo sapiens
  misc_RNA (1)...(19): siRNA sense strand
gcagaugguggagcugaau

SEQ ID NO: 1280266 - RNA, 19 nt, Homo sapiens
  misc_RNA (1)...(19): siRNA sense strand
aaccaaaacccuacuauga

SEQ ID NO: 1280267 - RNA, 19 nt, Homo sapiens
  misc_RNA (1)...(19): siRNA sense strand
uugaugcaguaacuuauag

SEQ ID NO: 1280268 - RNA, 19 nt, Homo sapiens
  misc_RNA (1)...(19): siRNA sense strand
ggagcugaauaugccacuu

SEQ ID NO: 1280269 - RNA, 19 nt, Homo sapiens
  misc_RNA (1)...(19): siRNA sense strand
cgauggcagcgacacaauu

SEQ ID NO: 1280270 - RNA, 19 nt, Homo sapiens
  misc_RNA (1)...(19): siRNA sense strand
gauccauuuucacuuauug

SEQ ID NO: 1280271 - RNA, 19 nt, Homo sapiens
  misc_RNA (1)...(19): siRNA sense strand
guacagcaaugauggauuu

SEQ ID NO: 1280272 - RNA, 19 nt, Homo sapiens
  misc_RNA (1)...(19): siRNA sense strand
gagaugaauuccuuugaaa

SEQ ID NO: 1280273 - RNA, 19 nt, Homo sapiens
  misc_RNA (1)...(19): siRNA sense strand
gaagaacgcaugaaacgaa

SEQ ID NO: 1280274 - RNA, 19 nt, Homo sapiens
  misc_RNA (1)...(19): siRNA sense strand
ccacagacauugagaagau

SEQ ID NO: 1280275 - RNA, 19 nt, Homo sapiens
  misc_RNA (1)...(19): siRNA sense strand
gauaaagacacgauugaaa

SEQ ID NO: 1280276 - RNA, 19 nt, Homo sapiens
  misc_RNA (1)...(19): siRNA sense strand
ugacauaacagcuuucaaa

SEQ ID NO: 1280277 - RNA, 19 nt, Homo sapiens
  misc_RNA (1)...(19): siRNA sense strand
gagauacucaggauauuaa

SEQ ID NO: 1280278 - RNA, 19 nt, Homo sapiens
  misc_RNA (1)...(19): siRNA sense strand
caacagauaccaugagaug

SEQ ID NO: 1280279 - RNA, 19 nt, Homo sapiens
  misc_RNA (1)...(19): siRNA sense strand
guucggcgguccaaugaua

SEQ ID NO: 1280280 - RNA, 19 nt, Homo sapiens
  misc_RNA (1)...(19): siRNA sense strand
gaaacgaacaggauaaagu

SEQ ID NO: 1280281 - RNA, 19 nt, Homo sapiens
  misc_RNA (1)...(19): siRNA sense strand
cauaacagcuuucaaacag

SEQ ID NO: 1280282 - RNA, 19 nt, Homo sapiens
  misc_RNA (1)...(19): siRNA sense strand
ggaccuggaugaccuagau

SEQ ID NO: 1280283 - RNA, 19 nt, Homo sapiens
  misc_RNA (1)...(19): siRNA sense strand
caagaauucugucuacauc

SEQ ID NO: 1280284 - RNA, 19 nt, Homo sapiens
  misc_RNA (1)...(19): siRNA sense strand
gaaauucugauguacaaga

SEQ ID NO: 1280285 - RNA, 19 nt, Homo sapiens
  misc_RNA (1)...(19): siRNA sense strand
ggacuggccuauuguguac

SEQ ID NO: 1280286 - RNA, 19 nt, Homo sapiens
  misc_RNA (1)...(19): siRNA sense strand
ggaaccugauucugacgua

SEQ ID NO: 1280287 - RNA, 19 nt, Homo sapiens
  misc_RNA (1)...(19): siRNA sense strand
ugagaugaauuccuuugaa

SEQ ID NO: 1280288 - RNA, 19 nt, Homo sapiens
  misc_RNA (1)...(19): siRNA sense strand
gcaugaaacgaaagaauga

SEQ ID NO: 1280289 - RNA, 19 nt, Homo sapiens
  misc_RNA (1)...(19): siRNA sense strand
ugaccaauauugagaaaca

SEQ ID NO: 1280290 - RNA, 19 nt, Homo sapiens
  misc_RNA (1)...(19): siRNA sense strand
ccucaggaguuguuugaaa

SEQ ID NO: 1280291 - RNA, 19 nt, Homo sapiens
  misc_RNA (1)...(19): siRNA sense strand
gggaaugugacgacuauuu

SEQ ID NO: 1280292 - RNA, 19 nt, Homo sapiens
  misc_RNA (1)...(19): siRNA sense strand
uggcagaggucaagcauuc

SEQ ID NO: 1280293 - RNA, 19 nt, Homo sapiens
  misc_RNA (1)...(19): siRNA sense strand
ucagugacauaacagcuuu

SEQ ID NO: 1280294 - RNA, 19 nt, Homo sapiens
  misc_RNA (1)...(19): siRNA sense strand
gggaugcccugcagaaagu

SEQ ID NO: 1280295 - RNA, 19 nt, Homo sapiens
  misc_RNA (1)...(19): siRNA sense strand
ccagaggcauugacacaga

SEQ ID NO: 1280296 - RNA, 19 nt, Homo sapiens
  misc_RNA (1)...(19): siRNA sense strand
gaaguuugcucggcugaca

SEQ ID NO: 1280297 - RNA, 19 nt, Homo sapiens
  misc_RNA (1)...(19): siRNA sense strand
cugaagacgugguuuguga

SEQ ID NO: 1280298 - RNA, 19 nt, Homo sapiens
  misc_RNA (1)...(19): siRNA sense strand
gguccaaugauacuaauuu

SEQ ID NO: 1280299 - RNA, 19 nt, Homo sapiens
  misc_RNA (1)...(19): siRNA sense strand
caacagauguaugccaaca

SEQ ID NO: 1280300 - RNA, 19 nt, Homo sapiens
  misc_RNA (1)...(19): siRNA sense strand
agacgugguuugugauuga

SEQ ID NO: 1280301 - RNA, 19 nt, Homo sapiens
  misc_RNA (1)...(19): siRNA sense strand
gcgagaauguccacaagca

SEQ ID NO: 1280302 - RNA, 19 nt, Homo sapiens
  misc_RNA (1)...(19): siRNA sense strand
cagagaagguccugcagau

SEQ ID NO: 1280303 - RNA, 19 nt, Homo sapiens
  misc_RNA (1)...(19): siRNA sense strand
gaagacgugguuugugauu

SEQ ID NO: 1280304 - RNA, 19 nt, Homo sapiens
  misc_RNA (1)...(19): siRNA sense strand
gaacgcaugaaacgaaaga

SEQ ID NO: 1280305 - RNA, 19 nt, Homo sapiens
  misc_RNA (1)...(19): siRNA sense strand
gaucuugaccuucuauaca

SEQ ID NO: 1280306 - RNA, 19 nt, Homo sapiens
  misc_RNA (1)...(19): siRNA sense strand
gaagaggaagaacgcauga

SEQ ID NO: 1280307 - RNA, 19 nt, Homo sapiens
  misc_RNA (1)...(19): siRNA sense strand
ccuuugaaauucugaugua

SEQ ID NO: 1280308 - RNA, 19 nt, Homo sapiens
  misc_RNA (1)...(19): siRNA sense strand
gggcagaagugaugcaaaa

SEQ ID NO: 1280309 - RNA, 19 nt, Homo sapiens
  misc_RNA (1)...(19): siRNA sense strand
ggaguuguuugaaauaucg

SEQ ID NO: 1280310 - RNA, 19 nt, Homo sapiens
  misc_RNA (1)...(19): siRNA sense strand
gcaagaauucugucuacau

SEQ ID NO: 1280311 - RNA, 19 nt, Homo sapiens
  misc_RNA (1)...(19): siRNA sense strand
cccguaagcuggaccacua

SEQ ID NO: 1280312 - RNA, 19 nt, Homo sapiens
  misc_RNA (1)...(19): siRNA sense strand
ccaucuuggucccuuauaa

SEQ ID NO: 1280313 - RNA, 19 nt, Homo sapiens
  misc_RNA (1)...(19): siRNA sense strand
cgaacaggauaaagugguu

SEQ ID NO: 1280314 - RNA, 19 nt, Homo sapiens
  misc_RNA (1)...(19): siRNA sense strand
ggagcugacugauaaagac

SEQ ID NO: 1280315 - RNA, 19 nt, Homo sapiens
  misc_RNA (1)...(19): siRNA sense strand
cagcaagaauucugucuac

SEQ ID NO: 1280316 - RNA, 19 nt, Homo sapiens
  misc_RNA (1)...(19): siRNA sense strand
gaagguggucccagcaaga

SEQ ID NO: 1280317 - RNA, 19 nt, Homo sapiens
  misc_RNA (1)...(19): siRNA sense strand
ccacuacauugaauaugga

SEQ ID NO: 1280318 - RNA, 19 nt, Homo sapiens
  misc_RNA (1)...(19): siRNA sense strand
ggaccacuacauugaauau

SEQ ID NO: 1280319 - RNA, 19 nt, Homo sapiens
  misc_RNA (1)...(19): siRNA sense strand
acuaugagaugaauuccuu

SEQ ID NO: 1280320 - RNA, 19 nt, Homo sapiens
  misc_RNA (1)...(19): siRNA sense strand
gcagaaagugcuggaauuc

SEQ ID NO: 1280321 - RNA, 19 nt, Homo sapiens
  misc_RNA (1)...(19): siRNA sense strand
gagaagguccugcagaucu

SEQ ID NO: 1280322 - RNA, 19 nt, Homo sapiens
  misc_RNA (1)...(19): siRNA sense strand
ggagacguguuuggagaug

SEQ ID NO: 1280323 - RNA, 19 nt, Homo sapiens
  misc_RNA (1)...(19): siRNA sense strand
cagaagauccucucagucu

SEQ ID NO: 1280324 - RNA, 19 nt, Homo sapiens
  misc_RNA (1)...(19): siRNA sense strand
guucagcucucuaaaaguu

SEQ ID NO: 1280325 - RNA, 19 nt, Homo sapiens
  misc_RNA (1)...(19): siRNA sense strand
aaaccaggcagaauaaugu

SEQ ID NO: 1280326 - RNA, 19 nt, Homo sapiens
  misc_RNA (1)...(19): siRNA sense strand
ccaagacaauccgcaacaa

SEQ ID NO: 1280327 - RNA, 19 nt, Homo sapiens
  misc_RNA (1)...(19): siRNA sense strand
gcaagaggcaccaaagacu

SEQ ID NO: 1280328 - RNA, 19 nt, Homo sapiens
  misc_RNA (1)...(19): siRNA sense strand
ggacaucaaggccuuaaac

SEQ ID NO: 1280329 - RNA, 19 nt, Homo sapiens
  misc_RNA (1)...(19): siRNA sense strand
gacaguggcaucaccaaga

SEQ ID NO: 1280330 - RNA, 19 nt, Homo sapiens
  misc_RNA (1)...(19): siRNA sense strand
ggaagagugaggacuggaa

SEQ ID NO: 1280331 - RNA, 19 nt, Homo sapiens
  misc_RNA (1)...(19): siRNA sense strand
ugaccagccucaccagugu

SEQ ID NO: 1280332 - RNA, 19 nt, Homo sapiens
  misc_RNA (1)...(19): siRNA sense strand
ccucacaucaucuuacauu

SEQ ID NO: 1280333 - RNA, 19 nt, Homo sapiens
  misc_RNA (1)...(19): siRNA sense strand
ugagaacuaugagaugaau

SEQ ID NO: 1280334 - RNA, 19 nt, Homo sapiens
  misc_RNA (1)...(19): siRNA sense strand
ugcagaaagugcuggaauu

SEQ ID NO: 1280335 - RNA, 19 nt, Homo sapiens
  misc_RNA (1)...(19): siRNA sense strand
guugacagccucugcuuug

SEQ ID NO: 1280336 - RNA, 19 nt, Homo sapiens
  misc_RNA (1)...(19): siRNA sense strand
ggauugagugagcgaguaa

SEQ ID NO: 1280337 - RNA, 19 nt, Homo sapiens
  misc_RNA (1)...(19): siRNA sense strand
cgcaugaacuaccugaaga

SEQ ID NO: 1280338 - RNA, 19 nt, Homo sapiens
  misc_RNA (1)...(19): siRNA sense strand
aaacuuauccgcaugaacu

SEQ ID NO: 1280339 - RNA, 19 nt, Homo sapiens
  misc_RNA (1)...(19): siRNA sense strand
aaacgaacaggauaaagug

SEQ ID NO: 1280340 - RNA, 19 nt, Homo sapiens
  misc_RNA (1)...(19): siRNA sense strand
gaacaggauaaagugguuu

SEQ ID NO: 1280341 - RNA, 19 nt, Homo sapiens
  misc_RNA (1)...(19): siRNA sense strand
cuuauaaugucuccuucaa

SEQ ID NO: 1280342 - RNA, 19 nt, Homo sapiens
  misc_RNA (1)...(19): siRNA sense strand
uaagcuggaccacuacauu

SEQ ID NO: 1280343 - RNA, 19 nt, Homo sapiens
  misc_RNA (1)...(19): siRNA sense strand
caggaguuguuugaaauau

SEQ ID NO: 1280344 - RNA, 19 nt, Homo sapiens
  misc_RNA (1)...(19): siRNA sense strand
aagaacgcaugaaacgaaa

SEQ ID NO: 1280345 - RNA, 19 nt, Homo sapiens
  misc_RNA (1)...(19): siRNA sense strand
ggacaugagagccgacauc

SEQ ID NO: 1280346 - RNA, 19 nt, Homo sapiens
  misc_RNA (1)...(19): siRNA sense strand
ggaaugugacgacuauuuu

SEQ ID NO: 1280347 - RNA, 19 nt, Homo sapiens
  misc_RNA (1)...(19): siRNA sense strand
ucaggaguuguuugaaaua

SEQ ID NO: 1280348 - RNA, 19 nt, Homo sapiens
  misc_RNA (1)...(19): siRNA sense strand
ggucaagcauucguucuac

SEQ ID NO: 1280349 - RNA, 19 nt, Homo sapiens
  misc_RNA (1)...(19): siRNA sense strand
uggccuggcugguuguuga

SEQ ID NO: 1280350 - RNA, 19 nt, Homo sapiens
  misc_RNA (1)...(19): siRNA sense strand
agaggaagaacgcaugaaa

SEQ ID NO: 1280351 - RNA, 19 nt, Homo sapiens
  misc_RNA (1)...(19): siRNA sense strand
gaaagugcuggaauucuac

SEQ ID NO: 1280352 - RNA, 19 nt, Homo sapiens
  misc_RNA (1)...(19): siRNA sense strand
gagauguguucuggaagga

SEQ ID NO: 1280353 - RNA, 19 nt, Homo sapiens
  misc_RNA (1)...(19): siRNA sense strand
ucgggaaugugacgacuau

SEQ ID NO: 1280354 - RNA, 19 nt, Homo sapiens
  misc_RNA (1)...(19): siRNA sense strand
ccugugugguucuuuguga

SEQ ID NO: 1280355 - RNA, 19 nt, Homo sapiens
  misc_RNA (1)...(19): siRNA sense strand
ugacguacaacuugaggaa

SEQ ID NO: 1280356 - RNA, 19 nt, Homo sapiens
  misc_RNA (1)...(19): siRNA sense strand
gggacuaugagaucuuuga

SEQ ID NO: 1280357 - RNA, 19 nt, Homo sapiens
  misc_RNA (1)...(19): siRNA sense strand
uuucauaccaccuuuguug

SEQ ID NO: 1280358 - RNA, 19 nt, Homo sapiens
  misc_RNA (1)...(19): siRNA sense strand
ugaccuagauguggagaag

SEQ ID NO: 1280359 - RNA, 19 nt, Homo sapiens
  misc_RNA (1)...(19): siRNA sense strand
gaaacgugaagaggaagaa

SEQ ID NO: 1280360 - RNA, 19 nt, Homo sapiens
  misc_RNA (1)...(19): siRNA sense strand
gaccuacugugaucugcau

SEQ ID NO: 1280361 - RNA, 19 nt, Homo sapiens
  misc_RNA (1)...(19): siRNA sense strand
ccaguccugugccaauguu

SEQ ID NO: 1280362 - RNA, 19 nt, Homo sapiens
  misc_RNA (1)...(19): siRNA sense strand
uuggagauguguucuggaa

SEQ ID NO: 1280363 - RNA, 19 nt, Homo sapiens
  misc_RNA (1)...(19): siRNA sense strand
uuugagaacuaugagauga

SEQ ID NO: 1280364 - RNA, 19 nt, Homo sapiens
  misc_RNA (1)...(19): siRNA sense strand
caugaugauuggcucacuu

SEQ ID NO: 1280365 - RNA, 19 nt, Homo sapiens
  misc_RNA (1)...(19): siRNA sense strand
caggggaggugauuucuga

SEQ ID NO: 1280366 - RNA, 19 nt, Homo sapiens
  misc_RNA (1)...(19): siRNA sense strand
ggaagaacgcaugaaacga

SEQ ID NO: 1280367 - RNA, 19 nt, Homo sapiens
  misc_RNA (1)...(19): siRNA sense strand
gauuggcucacuucucuau

SEQ ID NO: 1280368 - RNA, 19 nt, Homo sapiens
  misc_RNA (1)...(19): siRNA sense strand
gguggucccagcaagaauu

SEQ ID NO: 1280369 - RNA, 19 nt, Homo sapiens
  misc_RNA (1)...(19): siRNA sense strand
ggugguggccauucuagga

SEQ ID NO: 1280370 - RNA, 19 nt, Homo sapiens
  misc_RNA (1)...(19): siRNA sense strand
gaggugauccaagaugaug

SEQ ID NO: 1280371 - RNA, 19 nt, Homo sapiens
  misc_RNA (1)...(19): siRNA sense strand
guacagcaaugauggauuu

SEQ ID NO: 1280372 - RNA, 19 nt, Homo sapiens
  misc_RNA (1)...(19): siRNA sense strand
gagaugaauuccuuugaaa

SEQ ID NO: 1280373 - RNA, 19 nt, Homo sapiens
  misc_RNA (1)...(19): siRNA sense strand
gaagaacgcaugaaacgaa

SEQ ID NO: 1280374 - RNA, 19 nt, Homo sapiens
  misc_RNA (1)...(19): siRNA sense strand
ccacagacauugagaagau

SEQ ID NO: 1280375 - RNA, 19 nt, Homo sapiens
  misc_RNA (1)...(19): siRNA sense strand
gauaaagacacgauugaaa

SEQ ID NO: 1280376 - RNA, 19 nt, Homo sapiens
  misc_RNA (1)...(19): siRNA sense strand
ugacauaacagcuuucaaa

SEQ ID NO: 1280377 - RNA, 19 nt, Homo sapiens
  misc_RNA (1)...(19): siRNA sense strand
gagauacucaggauauuaa

SEQ ID NO: 1280378 - RNA, 19 nt, Homo sapiens
  misc_RNA (1)...(19): siRNA sense strand
caacagauaccaugagaug

SEQ ID NO: 1280379 - RNA, 19 nt, Homo sapiens
  misc_RNA (1)...(19): siRNA sense strand
guucggcgguccaaugaua

SEQ ID NO: 1280380 - RNA, 19 nt, Homo sapiens
  misc_RNA (1)...(19): siRNA sense strand
gaaacgaacaggauaaagu

SEQ ID NO: 1280381 - RNA, 19 nt, Homo sapiens
  misc_RNA (1)...(19): siRNA sense strand
cauaacagcuuucaaacag

SEQ ID NO: 1280382 - RNA, 19 nt, Homo sapiens
  misc_RNA (1)...(19): siRNA sense strand
ggaccuggaugaccuagau

SEQ ID NO: 1280383 - RNA, 19 nt, Homo sapiens
  misc_RNA (1)...(19): siRNA sense strand
caagaauucugucuacauc

SEQ ID NO: 1280384 - RNA, 19 nt, Homo sapiens
  misc_RNA (1)...(19): siRNA sense strand
gaaauucugauguacaaga

SEQ ID NO: 1280385 - RNA, 19 nt, Homo sapiens
  misc_RNA (1)...(19): siRNA sense strand
ggacuggccuauuguguac

SEQ ID NO: 1280386 - RNA, 19 nt, Homo sapiens
  misc_RNA (1)...(19): siRNA sense strand
ggaaccugauucugacgua

SEQ ID NO: 1280387 - RNA, 19 nt, Homo sapiens
  misc_RNA (1)...(19): siRNA sense strand
ugagaugaauuccuuugaa

SEQ ID NO: 1280388 - RNA, 19 nt, Homo sapiens
  misc_RNA (1)...(19): siRNA sense strand
gcaugaaacgaaagaauga

SEQ ID NO: 1280389 - RNA, 19 nt, Homo sapiens
  misc_RNA (1)...(19): siRNA sense strand
ugaccaauauugagaaaca

SEQ ID NO: 1280390 - RNA, 19 nt, Homo sapiens
  misc_RNA (1)...(19): siRNA sense strand
ccucaggaguuguuugaaa

SEQ ID NO: 1280391 - RNA, 19 nt, Homo sapiens
  misc_RNA (1)...(19): siRNA sense strand
gggaaugugacgacuauuu

SEQ ID NO: 1280392 - RNA, 19 nt, Homo sapiens
  misc_RNA (1)...(19): siRNA sense strand
uggcagaggucaagcauuc

SEQ ID NO: 1280393 - RNA, 19 nt, Homo sapiens
  misc_RNA (1)...(19): siRNA sense strand
ucagugacauaacagcuuu

SEQ ID NO: 1280394 - RNA, 19 nt, Homo sapiens
  misc_RNA (1)...(19): siRNA sense strand
gggaugcccugcagaaagu

SEQ ID NO: 1280395 - RNA, 19 nt, Homo sapiens
  misc_RNA (1)...(19): siRNA sense strand
ccagaggcauugacacaga

SEQ ID NO: 1280396 - RNA, 19 nt, Homo sapiens
  misc_RNA (1)...(19): siRNA sense strand
gaaguuugcucggcugaca

SEQ ID NO: 1280397 - RNA, 19 nt, Homo sapiens
  misc_RNA (1)...(19): siRNA sense strand
cugaagacgugguuuguga

SEQ ID NO: 1280398 - RNA, 19 nt, Homo sapiens
  misc_RNA (1)...(19): siRNA sense strand
gguccaaugauacuaauuu

SEQ ID NO: 1280399 - RNA, 19 nt, Homo sapiens
  misc_RNA (1)...(19): siRNA sense strand
caacagauguaugccaaca

SEQ ID NO: 1280400 - RNA, 19 nt, Homo sapiens
  misc_RNA (1)...(19): siRNA sense strand
agacgugguuugugauuga

SEQ ID NO: 1280401 - RNA, 19 nt, Homo sapiens
  misc_RNA (1)...(19): siRNA sense strand
gcgagaauguccacaagca

SEQ ID NO: 1280402 - RNA, 19 nt, Homo sapiens
  misc_RNA (1)...(19): siRNA sense strand
cagagaagguccugcagau

SEQ ID NO: 1280403 - RNA, 19 nt, Homo sapiens
  misc_RNA (1)...(19): siRNA sense strand
gaagacgugguuugugauu

SEQ ID NO: 1280404 - RNA, 19 nt, Homo sapiens
  misc_RNA (1)...(19): siRNA sense strand
gaacgcaugaaacgaaaga

SEQ ID NO: 1280405 - RNA, 19 nt, Homo sapiens
  misc_RNA (1)...(19): siRNA sense strand
gaucuugaccuucuauaca

SEQ ID NO: 1280406 - RNA, 19 nt, Homo sapiens
  misc_RNA (1)...(19): siRNA sense strand
gaagaggaagaacgcauga

SEQ ID NO: 1280407 - RNA, 19 nt, Homo sapiens
  misc_RNA (1)...(19): siRNA sense strand
ccuuugaaauucugaugua

SEQ ID NO: 1280408 - RNA, 19 nt, Homo sapiens
  misc_RNA (1)...(19): siRNA sense strand
gggcagaagugaugcaaaa

SEQ ID NO: 1280409 - RNA, 19 nt, Homo sapiens
  misc_RNA (1)...(19): siRNA sense strand
ggaguuguuugaaauaucg

SEQ ID NO: 1280410 - RNA, 19 nt, Homo sapiens
  misc_RNA (1)...(19): siRNA sense strand
gcaagaauucugucuacau

SEQ ID NO: 1280411 - RNA, 19 nt, Homo sapiens
  misc_RNA (1)...(19): siRNA sense strand
cccguaagcuggaccacua

SEQ ID NO: 1280412 - RNA, 19 nt, Homo sapiens
  misc_RNA (1)...(19): siRNA sense strand
ccaucuuggucccuuauaa

SEQ ID NO: 1280413 - RNA, 19 nt, Homo sapiens
  misc_RNA (1)...(19): siRNA sense strand
cgaacaggauaaagugguu

SEQ ID NO: 1280414 - RNA, 19 nt, Homo sapiens
  misc_RNA (1)...(19): siRNA sense strand
ggagcugacugauaaagac

SEQ ID NO: 1280415 - RNA, 19 nt, Homo sapiens
  misc_RNA (1)...(19): siRNA sense strand
cagcaagaauucugucuac

SEQ ID NO: 1280416 - RNA, 19 nt, Homo sapiens
  misc_RNA (1)...(19): siRNA sense strand
gaagguggucccagcaaga

SEQ ID NO: 1280417 - RNA, 19 nt, Homo sapiens
  misc_RNA (1)...(19): siRNA sense strand
ccacuacauugaauaugga

SEQ ID NO: 1280418 - RNA, 19 nt, Homo sapiens
  misc_RNA (1)...(19): siRNA sense strand
ggaccacuacauugaauau

SEQ ID NO: 1280419 - RNA, 19 nt, Homo sapiens
  misc_RNA (1)...(19): siRNA sense strand
acuaugagaugaauuccuu

SEQ ID NO: 1280420 - RNA, 19 nt, Homo sapiens
  misc_RNA (1)...(19): siRNA sense strand
gcagaaagugcuggaauuc

SEQ ID NO: 1280421 - RNA, 19 nt, Homo sapiens
  misc_RNA (1)...(19): siRNA sense strand
gagaagguccugcagaucu

SEQ ID NO: 1280422 - RNA, 19 nt, Homo sapiens
  misc_RNA (1)...(19): siRNA sense strand
ggagacguguuuggagaug

SEQ ID NO: 1280423 - RNA, 19 nt, Homo sapiens
  misc_RNA (1)...(19): siRNA sense strand
cagaagauccucucagucu

SEQ ID NO: 1280424 - RNA, 19 nt, Homo sapiens
  misc_RNA (1)...(19): siRNA sense strand
guucagcucucuaaaaguu

SEQ ID NO: 1280425 - RNA, 19 nt, Homo sapiens
  misc_RNA (1)...(19): siRNA sense strand
aaaccaggcagaauaaugu

SEQ ID NO: 1280426 - RNA, 19 nt, Homo sapiens
  misc_RNA (1)...(19): siRNA sense strand
ccaagacaauccgcaacaa

SEQ ID NO: 1280427 - RNA, 19 nt, Homo sapiens
  misc_RNA (1)...(19): siRNA sense strand
gcaagaggcaccaaagacu

SEQ ID NO: 1280428 - RNA, 19 nt, Homo sapiens
  misc_RNA (1)...(19): siRNA sense strand
ggacaucaaggccuuaaac

SEQ ID NO: 1280429 - RNA, 19 nt, Homo sapiens
  misc_RNA (1)...(19): siRNA sense strand
gacaguggcaucaccaaga

SEQ ID NO: 1280430 - RNA, 19 nt, Homo sapiens
  misc_RNA (1)...(19): siRNA sense strand
ggaagagugaggacuggaa

SEQ ID NO: 1280431 - RNA, 19 nt, Homo sapiens
  misc_RNA (1)...(19): siRNA sense strand
ugaccagccucaccagugu

SEQ ID NO: 1280432 - RNA, 19 nt, Homo sapiens
  misc_RNA (1)...(19): siRNA sense strand
ccucacaucaucuuacauu

SEQ ID NO: 1280433 - RNA, 19 nt, Homo sapiens
  misc_RNA (1)...(19): siRNA sense strand
ugagaacuaugagaugaau

SEQ ID NO: 1280434 - RNA, 19 nt, Homo sapiens
  misc_RNA (1)...(19): siRNA sense strand
ugcagaaagugcuggaauu

SEQ ID NO: 1280435 - RNA, 19 nt, Homo sapiens
  misc_RNA (1)...(19): siRNA sense strand
guugacagccucugcuuug

SEQ ID NO: 1280436 - RNA, 19 nt, Homo sapiens
  misc_RNA (1)...(19): siRNA sense strand
ggauugagugagcgaguaa

SEQ ID NO: 1280437 - RNA, 19 nt, Homo sapiens
  misc_RNA (1)...(19): siRNA sense strand
cgcaugaacuaccugaaga

SEQ ID NO: 1280438 - RNA, 19 nt, Homo sapiens
  misc_RNA (1)...(19): siRNA sense strand
aaacuuauccgcaugaacu

SEQ ID NO: 1280439 - RNA, 19 nt, Homo sapiens
  misc_RNA (1)...(19): siRNA sense strand
aaacgaacaggauaaagug

SEQ ID NO: 1280440 - RNA, 19 nt, Homo sapiens
  misc_RNA (1)...(19): siRNA sense strand
gaacaggauaaagugguuu

SEQ ID NO: 1280441 - RNA, 19 nt, Homo sapiens
  misc_RNA (1)...(19): siRNA sense strand
cuuauaaugucuccuucaa

SEQ ID NO: 1280442 - RNA, 19 nt, Homo sapiens
  misc_RNA (1)...(19): siRNA sense strand
uaagcuggaccacuacauu

SEQ ID NO: 1280443 - RNA, 19 nt, Homo sapiens
  misc_RNA (1)...(19): siRNA sense strand
caggaguuguuugaaauau

SEQ ID NO: 1280444 - RNA, 19 nt, Homo sapiens
  misc_RNA (1)...(19): siRNA sense strand
aagaacgcaugaaacgaaa

SEQ ID NO: 1280445 - RNA, 19 nt, Homo sapiens
  misc_RNA (1)...(19): siRNA sense strand
ggacaugagagccgacauc

SEQ ID NO: 1280446 - RNA, 19 nt, Homo sapiens
  misc_RNA (1)...(19): siRNA sense strand
ggaaugugacgacuauuuu

SEQ ID NO: 1280447 - RNA, 19 nt, Homo sapiens
  misc_RNA (1)...(19): siRNA sense strand
ucaggaguuguuugaaaua

SEQ ID NO: 1280448 - RNA, 19 nt, Homo sapiens
  misc_RNA (1)...(19): siRNA sense strand
ggucaagcauucguucuac

SEQ ID NO: 1280449 - RNA, 19 nt, Homo sapiens
  misc_RNA (1)...(19): siRNA sense strand
uggccuggcugguuguuga

SEQ ID NO: 1280450 - RNA, 19 nt, Homo sapiens
  misc_RNA (1)...(19): siRNA sense strand
agaggaagaacgcaugaaa

SEQ ID NO: 1280451 - RNA, 19 nt, Homo sapiens
  misc_RNA (1)...(19): siRNA sense strand
gaaagugcuggaauucuac

SEQ ID NO: 1280452 - RNA, 19 nt, Homo sapiens
  misc_RNA (1)...(19): siRNA sense strand
gagauguguucuggaagga

SEQ ID NO: 1280453 - RNA, 19 nt, Homo sapiens
  misc_RNA (1)...(19): siRNA sense strand
ucgggaaugugacgacuau

SEQ ID NO: 1280454 - RNA, 19 nt, Homo sapiens
  misc_RNA (1)...(19): siRNA sense strand
ccugugugguucuuuguga

SEQ ID NO: 1280455 - RNA, 19 nt, Homo sapiens
  misc_RNA (1)...(19): siRNA sense strand
ugacguacaacuugaggaa

SEQ ID NO: 1280456 - RNA, 19 nt, Homo sapiens
  misc_RNA (1)...(19): siRNA sense strand
gggacuaugagaucuuuga

SEQ ID NO: 1280457 - RNA, 19 nt, Homo sapiens
  misc_RNA (1)...(19): siRNA sense strand
uuucauaccaccuuuguug

SEQ ID NO: 1280458 - RNA, 19 nt, Homo sapiens
  misc_RNA (1)...(19): siRNA sense strand
ugaccuagauguggagaag

SEQ ID NO: 1280459 - RNA, 19 nt, Homo sapiens
  misc_RNA (1)...(19): siRNA sense strand
gaaacgugaagaggaagaa

SEQ ID NO: 1280460 - RNA, 19 nt, Homo sapiens
  misc_RNA (1)...(19): siRNA sense strand
gaccuacugugaucugcau

SEQ ID NO: 1280461 - RNA, 19 nt, Homo sapiens
  misc_RNA (1)...(19): siRNA sense strand
ccaguccugugccaauguu

SEQ ID NO: 1280462 - RNA, 19 nt, Homo sapiens
  misc_RNA (1)...(19): siRNA sense strand
uuggagauguguucuggaa

SEQ ID NO: 1280463 - RNA, 19 nt, Homo sapiens
  misc_RNA (1)...(19): siRNA sense strand
uuugagaacuaugagauga

SEQ ID NO: 1280464 - RNA, 19 nt, Homo sapiens
  misc_RNA (1)...(19): siRNA sense strand
caugaugauuggcucacuu

SEQ ID NO: 1280465 - RNA, 19 nt, Homo sapiens
  misc_RNA (1)...(19): siRNA sense strand
caggggaggugauuucuga

SEQ ID NO: 1280466 - RNA, 19 nt, Homo sapiens
  misc_RNA (1)...(19): siRNA sense strand
ggaagaacgcaugaaacga

SEQ ID NO: 1280467 - RNA, 19 nt, Homo sapiens
  misc_RNA (1)...(19): siRNA sense strand
gauuggcucacuucucuau

SEQ ID NO: 1280468 - RNA, 19 nt, Homo sapiens
  misc_RNA (1)...(19): siRNA sense strand
gguggucccagcaagaauu

SEQ ID NO: 1280469 - RNA, 19 nt, Homo sapiens
  misc_RNA (1)...(19): siRNA sense strand
ggugguggccauucuagga

SEQ ID NO: 1280470 - RNA, 19 nt, Homo sapiens
  misc_RNA (1)...(19): siRNA sense strand
gaggugauccaagaugaug

SEQ ID NO: 1280471 - RNA, 19 nt, Homo sapiens
  misc_RNA (1)...(19): siRNA sense strand
caacagauaucauucguuu

SEQ ID NO: 1280472 - RNA, 19 nt, Homo sapiens
  misc_RNA (1)...(19): siRNA sense strand
ggacagaacuaggcuaaga

SEQ ID NO: 1280473 - RNA, 19 nt, Homo sapiens
  misc_RNA (1)...(19): siRNA sense strand
gauaagcacccaacagaua

SEQ ID NO: 1280474 - RNA, 19 nt, Homo sapiens
  misc_RNA (1)...(19): siRNA sense strand
ggaagaagcacuauauuca

SEQ ID NO: 1280475 - RNA, 19 nt, Homo sapiens
  misc_RNA (1)...(19): siRNA sense strand
gcugaaauguuuacgguuu

SEQ ID NO: 1280476 - RNA, 19 nt, Homo sapiens
  misc_RNA (1)...(19): siRNA sense strand
aaacacagauggucccaaa

SEQ ID NO: 1280477 - RNA, 19 nt, Homo sapiens
  misc_RNA (1)...(19): siRNA sense strand
gguguuaucuuuauacauc

SEQ ID NO: 1280478 - RNA, 19 nt, Homo sapiens
  misc_RNA (1)...(19): siRNA sense strand
agaaaucccuucccacuau

SEQ ID NO: 1280479 - RNA, 19 nt, Homo sapiens
  misc_RNA (1)...(19): siRNA sense strand
gacagacucucaaagaaga

SEQ ID NO: 1280480 - RNA, 19 nt, Homo sapiens
  misc_RNA (1)...(19): siRNA sense strand
gaagcacuauauucaaaug

SEQ ID NO: 1280481 - RNA, 19 nt, Homo sapiens
  misc_RNA (1)...(19): siRNA sense strand
ccaaggguguuaucuuuau

SEQ ID NO: 1280482 - RNA, 19 nt, Homo sapiens
  misc_RNA (1)...(19): siRNA sense strand
gcagaagcccuggacuuua

SEQ ID NO: 1280483 - RNA, 19 nt, Homo sapiens
  misc_RNA (1)...(19): siRNA sense strand
ucaaugaugucgaggagaa

SEQ ID NO: 1280484 - RNA, 19 nt, Homo sapiens
  misc_RNA (1)...(19): siRNA sense strand
gaagaagcacuauauucaa

SEQ ID NO: 1280485 - RNA, 19 nt, Homo sapiens
  misc_RNA (1)...(19): siRNA sense strand
caaggguguuaucuuuaua

SEQ ID NO: 1280486 - RNA, 19 nt, Homo sapiens
  misc_RNA (1)...(19): siRNA sense strand
gaaagaacuucauauuacc

SEQ ID NO: 1280487 - RNA, 19 nt, Homo sapiens
  misc_RNA (1)...(19): siRNA sense strand
uguaaucgcugacguucaa

SEQ ID NO: 1280488 - RNA, 19 nt, Homo sapiens
  misc_RNA (1)...(19): siRNA sense strand
ugaaugaccggguauuuga

SEQ ID NO: 1280489 - RNA, 19 nt, Homo sapiens
  misc_RNA (1)...(19): siRNA sense strand
gaaaucccuucccacuaug

SEQ ID NO: 1280490 - RNA, 19 nt, Homo sapiens
  misc_RNA (1)...(19): siRNA sense strand
gagaaaucccuucccacua

SEQ ID NO: 1280491 - RNA, 19 nt, Homo sapiens
  misc_RNA (1)...(19): siRNA sense strand
gcacccaacagauaucauu

SEQ ID NO: 1280492 - RNA, 19 nt, Homo sapiens
  misc_RNA (1)...(19): siRNA sense strand
ggacagacucucaaagaag

SEQ ID NO: 1280493 - RNA, 19 nt, Homo sapiens
  misc_RNA (1)...(19): siRNA sense strand
acagucacaugauaagaaa

SEQ ID NO: 1280494 - RNA, 19 nt, Homo sapiens
  misc_RNA (1)...(19): siRNA sense strand
cagaagcccuggacuuuac

SEQ ID NO: 1280495 - RNA, 19 nt, Homo sapiens
  misc_RNA (1)...(19): siRNA sense strand
ucuggaugcugaaauguuu

SEQ ID NO: 1280496 - RNA, 19 nt, Homo sapiens
  misc_RNA (1)...(19): siRNA sense strand
cugaaauguuuacgguuua

SEQ ID NO: 1280497 - RNA, 19 nt, Homo sapiens
  misc_RNA (1)...(19): siRNA sense strand
ccuaaaccaucagcuauug

SEQ ID NO: 1280498 - RNA, 19 nt, Homo sapiens
  misc_RNA (1)...(19): siRNA sense strand
gaccggguauuugaagaaa

SEQ ID NO: 1280499 - RNA, 19 nt, Homo sapiens
  misc_RNA (1)...(19): siRNA sense strand
gacagucacaugauaagaa

SEQ ID NO: 1280500 - RNA, 19 nt, Homo sapiens
  misc_RNA (1)...(19): siRNA sense strand
uuccaaggguguuaucuuu

SEQ ID NO: 1280501 - RNA, 19 nt, Homo sapiens
  misc_RNA (1)...(19): siRNA sense strand
accaucagcuauugaauga

SEQ ID NO: 1280502 - RNA, 19 nt, Homo sapiens
  misc_RNA (1)...(19): siRNA sense strand
aagcaauucuccagaggaa

SEQ ID NO: 1280503 - RNA, 19 nt, Homo sapiens
  misc_RNA (1)...(19): siRNA sense strand
ccucggagccuuugucguu

SEQ ID NO: 1280504 - RNA, 19 nt, Homo sapiens
  misc_RNA (1)...(19): siRNA sense strand
cgguuuaacugguacauca

SEQ ID NO: 1280505 - RNA, 19 nt, Homo sapiens
  misc_RNA (1)...(19): siRNA sense strand
uggacagacucucaaagaa

SEQ ID NO: 1280506 - RNA, 19 nt, Homo sapiens
  misc_RNA (1)...(19): siRNA sense strand
caacuaguuacaagcaauu

SEQ ID NO: 1280507 - RNA, 19 nt, Homo sapiens
  misc_RNA (1)...(19): siRNA sense strand
cauauuaccaagccuaaga

SEQ ID NO: 1280508 - RNA, 19 nt, Homo sapiens
  misc_RNA (1)...(19): siRNA sense strand
ccggguauuugaagaaaga

SEQ ID NO: 1280509 - RNA, 19 nt, Homo sapiens
  misc_RNA (1)...(19): siRNA sense strand
ucgguccucuuccucuuua

SEQ ID NO: 1280510 - RNA, 19 nt, Homo sapiens
  misc_RNA (1)...(19): siRNA sense strand
uaaaccaucagcuauugaa

SEQ ID NO: 1280511 - RNA, 19 nt, Homo sapiens
  misc_RNA (1)...(19): siRNA sense strand
guuuacgguuuaacuggua

SEQ ID NO: 1280512 - RNA, 19 nt, Homo sapiens
  misc_RNA (1)...(19): siRNA sense strand
ucaacuaguuacaagcaau

SEQ ID NO: 1280513 - RNA, 19 nt, Homo sapiens
  misc_RNA (1)...(19): siRNA sense strand
caaauggacagacucucaa

SEQ ID NO: 1280514 - RNA, 19 nt, Homo sapiens
  misc_RNA (1)...(19): siRNA sense strand
gaaugaccggguauuugaa

SEQ ID NO: 1280515 - RNA, 19 nt, Homo sapiens
  misc_RNA (1)...(19): siRNA sense strand
ggacaccccuaaaccauca

SEQ ID NO: 1280516 - RNA, 19 nt, Homo sapiens
  misc_RNA (1)...(19): siRNA sense strand
uaacugguacaucaauuuc

SEQ ID NO: 1280517 - RNA, 19 nt, Homo sapiens
  misc_RNA (1)...(19): siRNA sense strand
gcccuggacuuuacaacca

SEQ ID NO: 1280518 - RNA, 19 nt, Homo sapiens
  misc_RNA (1)...(19): siRNA sense strand
gagcccugcuuggcaaaug

SEQ ID NO: 1280519 - RNA, 19 nt, Homo sapiens
  misc_RNA (1)...(19): siRNA sense strand
caggacagaacuaggcuaa

SEQ ID NO: 1280520 - RNA, 19 nt, Homo sapiens
  misc_RNA (1)...(19): siRNA sense strand
caggugugcuggcauugga

SEQ ID NO: 1280521 - RNA, 19 nt, Homo sapiens
  misc_RNA (1)...(19): siRNA sense strand
gacagaacuaggcuaagaa

SEQ ID NO: 1280522 - RNA, 19 nt, Homo sapiens
  misc_RNA (1)...(19): siRNA sense strand
acaaauggacagacucuca

SEQ ID NO: 1280523 - RNA, 19 nt, Homo sapiens
  misc_RNA (1)...(19): siRNA sense strand
cccuggcgaucuucugaua

SEQ ID NO: 1280524 - RNA, 19 nt, Homo sapiens
  misc_RNA (1)...(19): siRNA sense strand
gcaauucuccagaggaaaa

SEQ ID NO: 1280525 - RNA, 19 nt, Homo sapiens
  misc_RNA (1)...(19): siRNA sense strand
gguauuugaagaaagaaga

SEQ ID NO: 1280526 - RNA, 19 nt, Homo sapiens
  misc_RNA (1)...(19): siRNA sense strand
agccgacagucacaugaua

SEQ ID NO: 1280527 - RNA, 19 nt, Homo sapiens
  misc_RNA (1)...(19): siRNA sense strand
gcugacguucaacuaguua

SEQ ID NO: 1280528 - RNA, 19 nt, Homo sapiens
  misc_RNA (1)...(19): siRNA sense strand
uggaagaagcacuauauuc

SEQ ID NO: 1280529 - RNA, 19 nt, Homo sapiens
  misc_RNA (1)...(19): siRNA sense strand
cagcagaagcccuggacuu

SEQ ID NO: 1280530 - RNA, 19 nt, Homo sapiens
  misc_RNA (1)...(19): siRNA sense strand
gagacuguccagcaaggaa

SEQ ID NO: 1280531 - RNA, 19 nt, Homo sapiens
  misc_RNA (1)...(19): siRNA sense strand
gaacuaggcuaagaaaagc

SEQ ID NO: 1280532 - RNA, 19 nt, Homo sapiens
  misc_RNA (1)...(19): siRNA sense strand
cugauaagcacccaacaga

SEQ ID NO: 1280533 - RNA, 19 nt, Homo sapiens
  misc_RNA (1)...(19): siRNA sense strand
ucuggaagaagcacuauau

SEQ ID NO: 1280534 - RNA, 19 nt, Homo sapiens
  misc_RNA (1)...(19): siRNA sense strand
acagaacuaggcuaagaaa

SEQ ID NO: 1280535 - RNA, 19 nt, Homo sapiens
  misc_RNA (1)...(19): siRNA sense strand
ggacuuuacaaccaagcuu

SEQ ID NO: 1280536 - RNA, 19 nt, Homo sapiens
  misc_RNA (1)...(19): siRNA sense strand
gccgacagucacaugauaa

SEQ ID NO: 1280537 - RNA, 19 nt, Homo sapiens
  misc_RNA (1)...(19): siRNA sense strand
ucaaauggugaaagaacuu

SEQ ID NO: 1280538 - RNA, 19 nt, Homo sapiens
  misc_RNA (1)...(19): siRNA sense strand
ggaucuggaagaagcacua

SEQ ID NO: 1280539 - RNA, 19 nt, Homo sapiens
  misc_RNA (1)...(19): siRNA sense strand
agaaagaagagcccugcuu

SEQ ID NO: 1280540 - RNA, 19 nt, Homo sapiens
  misc_RNA (1)...(19): siRNA sense strand
uccaaggguguuaucuuua

SEQ ID NO: 1280541 - RNA, 19 nt, Homo sapiens
  misc_RNA (1)...(19): siRNA sense strand
ucgcugacguucaacuagu

SEQ ID NO: 1280542 - RNA, 19 nt, Homo sapiens
  misc_RNA (1)...(19): siRNA sense strand
gcuaagaaaagcacaauca

SEQ ID NO: 1280543 - RNA, 19 nt, Homo sapiens
  misc_RNA (1)...(19): siRNA sense strand
uacaucaauuucucuccaa

SEQ ID NO: 1280544 - RNA, 19 nt, Homo sapiens
  misc_RNA (1)...(19): siRNA sense strand
ccaaaugaccccagacuuc

SEQ ID NO: 1280545 - RNA, 19 nt, Homo sapiens
  misc_RNA (1)...(19): siRNA sense strand
auaagcacccaacagauau

SEQ ID NO: 1280546 - RNA, 19 nt, Homo sapiens
  misc_RNA (1)...(19): siRNA sense strand
agcagaagcccuggacuuu

SEQ ID NO: 1280547 - RNA, 19 nt, Homo sapiens
  misc_RNA (1)...(19): siRNA sense strand
aagaaaagcacaaucaaug

SEQ ID NO: 1280548 - RNA, 19 nt, Homo sapiens
  misc_RNA (1)...(19): siRNA sense strand
agagaaaauuccagcagaa

SEQ ID NO: 1280549 - RNA, 19 nt, Homo sapiens
  misc_RNA (1)...(19): siRNA sense strand
ugacaaauggacagacucu

SEQ ID NO: 1280550 - RNA, 19 nt, Homo sapiens
  misc_RNA (1)...(19): siRNA sense strand
guucaacuaguuacaagca

SEQ ID NO: 1280551 - RNA, 19 nt, Homo sapiens
  misc_RNA (1)...(19): siRNA sense strand
ugaccggguauuugaagaa

SEQ ID NO: 1280552 - RNA, 19 nt, Homo sapiens
  misc_RNA (1)...(19): siRNA sense strand
guccagcaaggaagaagaa

SEQ ID NO: 1280553 - RNA, 19 nt, Homo sapiens
  misc_RNA (1)...(19): siRNA sense strand
gaaaggcgaugaagaaguu

SEQ ID NO: 1280554 - RNA, 19 nt, Homo sapiens
  misc_RNA (1)...(19): siRNA sense strand
gcagaaaggcgaugaagaa

SEQ ID NO: 1280555 - RNA, 19 nt, Homo sapiens
  misc_RNA (1)...(19): siRNA sense strand
gcaacuaugugguggagaa

SEQ ID NO: 1280556 - RNA, 19 nt, Homo sapiens
  misc_RNA (1)...(19): siRNA sense strand
gcacugggcugcagaaagg

SEQ ID NO: 1280557 - RNA, 19 nt, Homo sapiens
  misc_RNA (1)...(19): siRNA sense strand
ggacggaggugcacgaagu

SEQ ID NO: 1280558 - RNA, 19 nt, Homo sapiens
  misc_RNA (1)...(19): siRNA sense strand
ggcacacgcucuuggaaua

SEQ ID NO: 1280559 - RNA, 19 nt, Homo sapiens
  misc_RNA (1)...(19): siRNA sense strand
gaggauggcuucuucuauc

SEQ ID NO: 1280560 - RNA, 19 nt, Homo sapiens
  misc_RNA (1)...(19): siRNA sense strand
ugaccaaguucacccagua

SEQ ID NO: 1280561 - RNA, 19 nt, Homo sapiens
  misc_RNA (1)...(19): siRNA sense strand
uggagaaggugcccgagaa

SEQ ID NO: 1280562 - RNA, 19 nt, Homo sapiens
  misc_RNA (1)...(19): siRNA sense strand
gauggcuucuucuaucuca

SEQ ID NO: 1280563 - RNA, 19 nt, Homo sapiens
  misc_RNA (1)...(19): siRNA sense strand
cgcaugaccuggcaaagga

SEQ ID NO: 1280564 - RNA, 19 nt, Homo sapiens
  misc_RNA (1)...(19): siRNA sense strand
aagugaagcugcgcaacua

SEQ ID NO: 1280565 - RNA, 19 nt, Homo sapiens
  misc_RNA (1)...(19): siRNA sense strand
gaagugaagcugcgcaacu

SEQ ID NO: 1280566 - RNA, 19 nt, Homo sapiens
  misc_RNA (1)...(19): siRNA sense strand
ggccaguuaucucuccaaa

SEQ ID NO: 1280567 - RNA, 19 nt, Homo sapiens
  misc_RNA (1)...(19): siRNA sense strand
ggcucaaccugaccaaguu

SEQ ID NO: 1280568 - RNA, 19 nt, Homo sapiens
  misc_RNA (1)...(19): siRNA sense strand
gcgaugaagaaguuugaaa

SEQ ID NO: 1280569 - RNA, 19 nt, Homo sapiens
  misc_RNA (1)...(19): siRNA sense strand
ccaagguguuccuaagcuu

SEQ ID NO: 1280570 - RNA, 19 nt, Homo sapiens
  misc_RNA (1)...(19): siRNA sense strand
gcacacgcucuuggaauau

SEQ ID NO: 1280571 - RNA, 19 nt, Homo sapiens
  misc_RNA (1)...(19): siRNA sense strand
guccgaggauggcuucuuc

SEQ ID NO: 1280572 - RNA, 19 nt, Homo sapiens
  misc_RNA (1)...(19): siRNA sense strand
ucaaccaggcccucaaaga

SEQ ID NO: 1280573 - RNA, 19 nt, Homo sapiens
  misc_RNA (1)...(19): siRNA sense strand
caaccaggcccucaaagac

SEQ ID NO: 1280574 - RNA, 19 nt, Homo sapiens
  misc_RNA (1)...(19): siRNA sense strand
cagccacccuccaguccaa

SEQ ID NO: 1280575 - RNA, 19 nt, Homo sapiens
  misc_RNA (1)...(19): siRNA sense strand
gcgacagacuccaguacag

SEQ ID NO: 1280576 - RNA, 19 nt, Homo sapiens
  misc_RNA (1)...(19): siRNA sense strand
ccaguuaucucuccaaaac

SEQ ID NO: 1280577 - RNA, 19 nt, Homo sapiens
  misc_RNA (1)...(19): siRNA sense strand
ccaggguggcuuuguggua

SEQ ID NO: 1280578 - RNA, 19 nt, Homo sapiens
  misc_RNA (1)...(19): siRNA sense strand
gaugaagaaguuugaaagg

SEQ ID NO: 1280579 - RNA, 19 nt, Homo sapiens
  misc_RNA (1)...(19): siRNA sense strand
gggcucaaccugaccaagu

SEQ ID NO: 1280580 - RNA, 19 nt, Homo sapiens
  misc_RNA (1)...(19): siRNA sense strand
gcgcgaggagcacauugaa

SEQ ID NO: 1280581 - RNA, 19 nt, Homo sapiens
  misc_RNA (1)...(19): siRNA sense strand
cgaggauggcuucuucuau

SEQ ID NO: 1280582 - RNA, 19 nt, Homo sapiens
  misc_RNA (1)...(19): siRNA sense strand
ucaccuaccgggaccagaa

SEQ ID NO: 1280583 - RNA, 19 nt, Homo sapiens
  misc_RNA (1)...(19): siRNA sense strand
uguccgggcuugugcuguu

SEQ ID NO: 1280584 - RNA, 19 nt, Homo sapiens
  misc_RNA (1)...(19): siRNA sense strand
ggaggugcacgaagugaag

SEQ ID NO: 1280585 - RNA, 19 nt, Homo sapiens
  misc_RNA (1)...(19): siRNA sense strand
cagaacacgggcuggauug

SEQ ID NO: 1280586 - RNA, 19 nt, Homo sapiens
  misc_RNA (1)...(19): siRNA sense strand
ggagaaggugcccgagaag

SEQ ID NO: 1280587 - RNA, 19 nt, Homo sapiens
  misc_RNA (1)...(19): siRNA sense strand
cgaugaagaaguuugaaag

SEQ ID NO: 1280588 - RNA, 19 nt, Homo sapiens
  misc_RNA (1)...(19): siRNA sense strand
gacacaaggucaccauccu

SEQ ID NO: 1280589 - RNA, 19 nt, Homo sapiens
  misc_RNA (1)...(19): siRNA sense strand
ggaaucugaaggugcugaa

SEQ ID NO: 1280590 - RNA, 19 nt, Homo sapiens
  misc_RNA (1)...(19): siRNA sense strand
ugaagcugcgcaacuaugu

SEQ ID NO: 1280591 - RNA, 19 nt, Homo sapiens
  misc_RNA (1)...(19): siRNA sense strand
ccaagaccccuucgagaaa

SEQ ID NO: 1280592 - RNA, 19 nt, Homo sapiens
  misc_RNA (1)...(19): siRNA sense strand
ucgacgacguggcggcauu

SEQ ID NO: 1280593 - RNA, 19 nt, Homo sapiens
  misc_RNA (1)...(19): siRNA sense strand
ccacucgcccgaagacauc

SEQ ID NO: 1280594 - RNA, 19 nt, Homo sapiens
  misc_RNA (1)...(19): siRNA sense strand
gaagcugcgcaacuaugug

SEQ ID NO: 1280595 - RNA, 19 nt, Homo sapiens
  misc_RNA (1)...(19): siRNA sense strand
gugaagcugcgcaacuaug

SEQ ID NO: 1280596 - RNA, 19 nt, Homo sapiens
  misc_RNA (1)...(19): siRNA sense strand
ccgaggauggcuucuucua

SEQ ID NO: 1280597 - RNA, 19 nt, Homo sapiens
  misc_RNA (1)...(19): siRNA sense strand
gaaaggcgaugaagaaguu

SEQ ID NO: 1280598 - RNA, 19 nt, Homo sapiens
  misc_RNA (1)...(19): siRNA sense strand
gcagaaaggcgaugaagaa

SEQ ID NO: 1280599 - RNA, 19 nt, Homo sapiens
  misc_RNA (1)...(19): siRNA sense strand
gcaacuaugugguggagaa

SEQ ID NO: 1280600 - RNA, 19 nt, Homo sapiens
  misc_RNA (1)...(19): siRNA sense strand
gcacugggcugcagaaagg

SEQ ID NO: 1280601 - RNA, 19 nt, Homo sapiens
  misc_RNA (1)...(19): siRNA sense strand
ggacggaggugcacgaagu

SEQ ID NO: 1280602 - RNA, 19 nt, Homo sapiens
  misc_RNA (1)...(19): siRNA sense strand
ggcacacgcucuuggaaua

SEQ ID NO: 1280603 - RNA, 19 nt, Homo sapiens
  misc_RNA (1)...(19): siRNA sense strand
gaggauggcuucuucuauc

SEQ ID NO: 1280604 - RNA, 19 nt, Homo sapiens
  misc_RNA (1)...(19): siRNA sense strand
ugaccaaguucacccagua

SEQ ID NO: 1280605 - RNA, 19 nt, Homo sapiens
  misc_RNA (1)...(19): siRNA sense strand
uggagaaggugcccgagaa

SEQ ID NO: 1280606 - RNA, 19 nt, Homo sapiens
  misc_RNA (1)...(19): siRNA sense strand
gauggcuucuucuaucuca

SEQ ID NO: 1280607 - RNA, 19 nt, Homo sapiens
  misc_RNA (1)...(19): siRNA sense strand
cgcaugaccuggcaaagga

SEQ ID NO: 1280608 - RNA, 19 nt, Homo sapiens
  misc_RNA (1)...(19): siRNA sense strand
aagugaagcugcgcaacua

SEQ ID NO: 1280609 - RNA, 19 nt, Homo sapiens
  misc_RNA (1)...(19): siRNA sense strand
gaagugaagcugcgcaacu

SEQ ID NO: 1280610 - RNA, 19 nt, Homo sapiens
  misc_RNA (1)...(19): siRNA sense strand
ggccaguuaucucuccaaa

SEQ ID NO: 1280611 - RNA, 19 nt, Homo sapiens
  misc_RNA (1)...(19): siRNA sense strand
ggcucaaccugaccaaguu

SEQ ID NO: 1280612 - RNA, 19 nt, Homo sapiens
  misc_RNA (1)...(19): siRNA sense strand
gcgaugaagaaguuugaaa

SEQ ID NO: 1280613 - RNA, 19 nt, Homo sapiens
  misc_RNA (1)...(19): siRNA sense strand
ccaagguguuccuaagcuu

SEQ ID NO: 1280614 - RNA, 19 nt, Homo sapiens
  misc_RNA (1)...(19): siRNA sense strand
gcacacgcucuuggaauau

SEQ ID NO: 1280615 - RNA, 19 nt, Homo sapiens
  misc_RNA (1)...(19): siRNA sense strand
guccgaggauggcuucuuc

SEQ ID NO: 1280616 - RNA, 19 nt, Homo sapiens
  misc_RNA (1)...(19): siRNA sense strand
ucaaccaggcccucaaaga

SEQ ID NO: 1280617 - RNA, 19 nt, Homo sapiens
  misc_RNA (1)...(19): siRNA sense strand
caaccaggcccucaaagac

SEQ ID NO: 1280618 - RNA, 19 nt, Homo sapiens
  misc_RNA (1)...(19): siRNA sense strand
cagccacccuccaguccaa

SEQ ID NO: 1280619 - RNA, 19 nt, Homo sapiens
  misc_RNA (1)...(19): siRNA sense strand
gcgacagacuccaguacag

SEQ ID NO: 1280620 - RNA, 19 nt, Homo sapiens
  misc_RNA (1)...(19): siRNA sense strand
ccaguuaucucuccaaaac

SEQ ID NO: 1280621 - RNA, 19 nt, Homo sapiens
  misc_RNA (1)...(19): siRNA sense strand
ccaggguggcuuuguggua

SEQ ID NO: 1280622 - RNA, 19 nt, Homo sapiens
  misc_RNA (1)...(19): siRNA sense strand
gaugaagaaguuugaaagg

SEQ ID NO: 1280623 - RNA, 19 nt, Homo sapiens
  misc_RNA (1)...(19): siRNA sense strand
gggcucaaccugaccaagu

SEQ ID NO: 1280624 - RNA, 19 nt, Homo sapiens
  misc_RNA (1)...(19): siRNA sense strand
gcgcgaggagcacauugaa

SEQ ID NO: 1280625 - RNA, 19 nt, Homo sapiens
  misc_RNA (1)...(19): siRNA sense strand
cgaggauggcuucuucuau

SEQ ID NO: 1280626 - RNA, 19 nt, Homo sapiens
  misc_RNA (1)...(19): siRNA sense strand
ucaccuaccgggaccagaa

SEQ ID NO: 1280627 - RNA, 19 nt, Homo sapiens
  misc_RNA (1)...(19): siRNA sense strand
uguccgggcuugugcuguu

SEQ ID NO: 1280628 - RNA, 19 nt, Homo sapiens
  misc_RNA (1)...(19): siRNA sense strand
ggaggugcacgaagugaag

SEQ ID NO: 1280629 - RNA, 19 nt, Homo sapiens
  misc_RNA (1)...(19): siRNA sense strand
cagaacacgggcuggauug

SEQ ID NO: 1280630 - RNA, 19 nt, Homo sapiens
  misc_RNA (1)...(19): siRNA sense strand
ggagaaggugcccgagaag

SEQ ID NO: 1280631 - RNA, 19 nt, Homo sapiens
  misc_RNA (1)...(19): siRNA sense strand
cgaugaagaaguuugaaag

SEQ ID NO: 1280632 - RNA, 19 nt, Homo sapiens
  misc_RNA (1)...(19): siRNA sense strand
gacacaaggucaccauccu

SEQ ID NO: 1280633 - RNA, 19 nt, Homo sapiens
  misc_RNA (1)...(19): siRNA sense strand
ggaaucugaaggugcugaa

SEQ ID NO: 1280634 - RNA, 19 nt, Homo sapiens
  misc_RNA (1)...(19): siRNA sense strand
ugaagcugcgcaacuaugu

SEQ ID NO: 1280635 - RNA, 19 nt, Homo sapiens
  misc_RNA (1)...(19): siRNA sense strand
ccaagaccccuucgagaaa

SEQ ID NO: 1280636 - RNA, 19 nt, Homo sapiens
  misc_RNA (1)...(19): siRNA sense strand
ucgacgacguggcggcauu

SEQ ID NO: 1280637 - RNA, 19 nt, Homo sapiens
  misc_RNA (1)...(19): siRNA sense strand
ccacucgcccgaagacauc

SEQ ID NO: 1280638 - RNA, 19 nt, Homo sapiens
  misc_RNA (1)...(19): siRNA sense strand
gaagcugcgcaacuaugug

SEQ ID NO: 1280639 - RNA, 19 nt, Homo sapiens
  misc_RNA (1)...(19): siRNA sense strand
gugaagcugcgcaacuaug

SEQ ID NO: 1280640 - RNA, 19 nt, Homo sapiens
  misc_RNA (1)...(19): siRNA sense strand
ccgaggauggcuucuucua

SEQ ID NO: 1280641 - RNA, 19 nt, Homo sapiens
  misc_RNA (1)...(19): siRNA sense strand
acacagaccucgccauuga

SEQ ID NO: 1280642 - RNA, 19 nt, Homo sapiens
  misc_RNA (1)...(19): siRNA sense strand
ggauggaccugacuuucaa

SEQ ID NO: 1280643 - RNA, 19 nt, Homo sapiens
  misc_RNA (1)...(19): siRNA sense strand
ccacugugcuggccaugaa

SEQ ID NO: 1280644 - RNA, 19 nt, Homo sapiens
  misc_RNA (1)...(19): siRNA sense strand
ggacgugguggacaaguuu

SEQ ID NO: 1280645 - RNA, 19 nt, Homo sapiens
  misc_RNA (1)...(19): siRNA sense strand
ggauauugaugaccacaca

SEQ ID NO: 1280646 - RNA, 19 nt, Homo sapiens
  misc_RNA (1)...(19): siRNA sense strand
caacccagcccggacaaua

SEQ ID NO: 1280647 - RNA, 19 nt, Homo sapiens
  misc_RNA (1)...(19): siRNA sense strand
ccacacagaccucgccauu

SEQ ID NO: 1280648 - RNA, 19 nt, Homo sapiens
  misc_RNA (1)...(19): siRNA sense strand
uggccaagguggauauuga

SEQ ID NO: 1280649 - RNA, 19 nt, Homo sapiens
  misc_RNA (1)...(19): siRNA sense strand
gggccgagguuagagaaga

SEQ ID NO: 1280650 - RNA, 19 nt, Homo sapiens
  misc_RNA (1)...(19): siRNA sense strand
gggacgugguggacaaguu

SEQ ID NO: 1280651 - RNA, 19 nt, Homo sapiens
  misc_RNA (1)...(19): siRNA sense strand
ccugguggccugacuguaa

SEQ ID NO: 1280652 - RNA, 19 nt, Homo sapiens
  misc_RNA (1)...(19): siRNA sense strand
caauauacaccacgaggau

SEQ ID NO: 1280653 - RNA, 19 nt, Homo sapiens
  misc_RNA (1)...(19): siRNA sense strand
ccaagguggauauugauga

SEQ ID NO: 1280654 - RNA, 19 nt, Homo sapiens
  misc_RNA (1)...(19): siRNA sense strand
ugucagcggugcccacugu

SEQ ID NO: 1280655 - RNA, 19 nt, Homo sapiens
  misc_RNA (1)...(19): siRNA sense strand
ugacaaccuuuaauaucca

SEQ ID NO: 1280656 - RNA, 19 nt, Homo sapiens
  misc_RNA (1)...(19): siRNA sense strand
caagguggauauugaugac

SEQ ID NO: 1280657 - RNA, 19 nt, Homo sapiens
  misc_RNA (1)...(19): siRNA sense strand
ucaaggaugaggaucaguu

SEQ ID NO: 1280658 - RNA, 19 nt, Homo sapiens
  misc_RNA (1)...(19): siRNA sense strand
caaggaugaggaucaguug

SEQ ID NO: 1280659 - RNA, 19 nt, Homo sapiens
  misc_RNA (1)...(19): siRNA sense strand
agaagaugguggccaagca

SEQ ID NO: 1280660 - RNA, 19 nt, Homo sapiens
  misc_RNA (1)...(19): siRNA sense strand
ggaucuccuugacaaccuu

SEQ ID NO: 1280661 - RNA, 19 nt, Homo sapiens
  misc_RNA (1)...(19): siRNA sense strand
agaccucgccauugaguau

SEQ ID NO: 1280662 - RNA, 19 nt, Homo sapiens
  misc_RNA (1)...(19): siRNA sense strand
ggccgagguuagagaagau

SEQ ID NO: 1280663 - RNA, 19 nt, Homo sapiens
  misc_RNA (1)...(19): siRNA sense strand
ccucugucaucuccaggaa

SEQ ID NO: 1280664 - RNA, 19 nt, Homo sapiens
  misc_RNA (1)...(19): siRNA sense strand
gugcuggccaugaagaaug

SEQ ID NO: 1280665 - RNA, 19 nt, Homo sapiens
  misc_RNA (1)...(19): siRNA sense strand
uugacaaccuuuaauaucc

SEQ ID NO: 1280666 - RNA, 19 nt, Homo sapiens
  misc_RNA (1)...(19): siRNA sense strand
gcacgggaagguggugaug

SEQ ID NO: 1280667 - RNA, 19 nt, Homo sapiens
  misc_RNA (1)...(19): siRNA sense strand
cuugacaaccuuuaauauc

SEQ ID NO: 1280668 - RNA, 19 nt, Homo sapiens
  misc_RNA (1)...(19): siRNA sense strand
acccagcccggacaauaua

SEQ ID NO: 1280669 - RNA, 19 nt, Homo sapiens
  misc_RNA (1)...(19): siRNA sense strand
guuccuggccucugucauc

SEQ ID NO: 1280670 - RNA, 19 nt, Homo sapiens
  misc_RNA (1)...(19): siRNA sense strand
aaacagaggugguccauaa

SEQ ID NO: 1280671 - RNA, 19 nt, Homo sapiens
  misc_RNA (1)...(19): siRNA sense strand
cuaggaaacuggaccauua

SEQ ID NO: 1280672 - RNA, 19 nt, Homo sapiens
  misc_RNA (1)...(19): siRNA sense strand
acaaauagccgaaguguuu

SEQ ID NO: 1280673 - RNA, 19 nt, Homo sapiens
  misc_RNA (1)...(19): siRNA sense strand
caugagagcugauaucugu

SEQ ID NO: 1280674 - RNA, 19 nt, Homo sapiens
  misc_RNA (1)...(19): siRNA sense strand
ggaauugacugacaagaag

SEQ ID NO: 1280675 - RNA, 19 nt, Homo sapiens
  misc_RNA (1)...(19): siRNA sense strand
cauaggauuuggaaacaua

SEQ ID NO: 1280676 - RNA, 19 nt, Homo sapiens
  misc_RNA (1)...(19): siRNA sense strand
ggacgaaauuugcccgauu

SEQ ID NO: 1280677 - RNA, 19 nt, Homo sapiens
  misc_RNA (1)...(19): siRNA sense strand
ggauuggccuguaguuuau

SEQ ID NO: 1280678 - RNA, 19 nt, Homo sapiens
  misc_RNA (1)...(19): siRNA sense strand
guggagaggucauuucuga

SEQ ID NO: 1280679 - RNA, 19 nt, Homo sapiens
  misc_RNA (1)...(19): siRNA sense strand
ccauaaacauucaagacua

SEQ ID NO: 1280680 - RNA, 19 nt, Homo sapiens
  misc_RNA (1)...(19): siRNA sense strand
gagcugacgucaugcagaa

SEQ ID NO: 1280681 - RNA, 19 nt, Homo sapiens
  misc_RNA (1)...(19): siRNA sense strand
ucaaggauauuacguuguu

SEQ ID NO: 1280682 - RNA, 19 nt, Homo sapiens
  misc_RNA (1)...(19): siRNA sense strand
gaaacuggaccauuaccua

SEQ ID NO: 1280683 - RNA, 19 nt, Homo sapiens
  misc_RNA (1)...(19): siRNA sense strand
gauauuacguuguucaaac

SEQ ID NO: 1280684 - RNA, 19 nt, Homo sapiens
  misc_RNA (1)...(19): siRNA sense strand
gaaauuugcccgauugaca

SEQ ID NO: 1280685 - RNA, 19 nt, Homo sapiens
  misc_RNA (1)...(19): siRNA sense strand
accaugagaugcugaauaa

SEQ ID NO: 1280686 - RNA, 19 nt, Homo sapiens
  misc_RNA (1)...(19): siRNA sense strand
caagaagaccauugagaaa

SEQ ID NO: 1280687 - RNA, 19 nt, Homo sapiens
  misc_RNA (1)...(19): siRNA sense strand
aaacaaagcagaacaacau

SEQ ID NO: 1280688 - RNA, 19 nt, Homo sapiens
  misc_RNA (1)...(19): siRNA sense strand
cagauauccuuccucagua

SEQ ID NO: 1280689 - RNA, 19 nt, Homo sapiens
  misc_RNA (1)...(19): siRNA sense strand
gacgaaauuugcccgauug

SEQ ID NO: 1280690 - RNA, 19 nt, Homo sapiens
  misc_RNA (1)...(19): siRNA sense strand
cagcaaggauucauuguac

SEQ ID NO: 1280691 - RNA, 19 nt, Homo sapiens
  misc_RNA (1)...(19): siRNA sense strand
gcugauaucuguguucauc

SEQ ID NO: 1280692 - RNA, 19 nt, Homo sapiens
  misc_RNA (1)...(19): siRNA sense strand
gugagcgagucauggauua

SEQ ID NO: 1280693 - RNA, 19 nt, Homo sapiens
  misc_RNA (1)...(19): siRNA sense strand
ggaaucagcagucucuuca

SEQ ID NO: 1280694 - RNA, 19 nt, Homo sapiens
  misc_RNA (1)...(19): siRNA sense strand
ugacaagccuuacaaccau

SEQ ID NO: 1280695 - RNA, 19 nt, Homo sapiens
  misc_RNA (1)...(19): siRNA sense strand
gacaagccuuacaaccaua

SEQ ID NO: 1280696 - RNA, 19 nt, Homo sapiens
  misc_RNA (1)...(19): siRNA sense strand
gaucugcugucuuguuuac

SEQ ID NO: 1280697 - RNA, 19 nt, Homo sapiens
  misc_RNA (1)...(19): siRNA sense strand
uuuguaaacucucuggaua

SEQ ID NO: 1280698 - RNA, 19 nt, Homo sapiens
  misc_RNA (1)...(19): siRNA sense strand
uggauuggccuguaguuua

SEQ ID NO: 1280699 - RNA, 19 nt, Homo sapiens
  misc_RNA (1)...(19): siRNA sense strand
gagcugauaucuguguuca

SEQ ID NO: 1280700 - RNA, 19 nt, Homo sapiens
  misc_RNA (1)...(19): siRNA sense strand
cauaaacauucaagacuag

SEQ ID NO: 1280701 - RNA, 19 nt, Homo sapiens
  misc_RNA (1)...(19): siRNA sense strand
ugauaucuguguucaucua

SEQ ID NO: 1280702 - RNA, 19 nt, Homo sapiens
  misc_RNA (1)...(19): siRNA sense strand
gguuggcucucuucuuuau

SEQ ID NO: 1280703 - RNA, 19 nt, Homo sapiens
  misc_RNA (1)...(19): siRNA sense strand
ggccuguaguuuauaguaa

SEQ ID NO: 1280704 - RNA, 19 nt, Homo sapiens
  misc_RNA (1)...(19): siRNA sense strand
acaagaagaccauugagaa

SEQ ID NO: 1280705 - RNA, 19 nt, Homo sapiens
  misc_RNA (1)...(19): siRNA sense strand
gggaauugacugacaagaa

SEQ ID NO: 1280706 - RNA, 19 nt, Homo sapiens
  misc_RNA (1)...(19): siRNA sense strand
caaaaggcauugauacaga

SEQ ID NO: 1280707 - RNA, 19 nt, Homo sapiens
  misc_RNA (1)...(19): siRNA sense strand
gagcgagucauggauuaua

SEQ ID NO: 1280708 - RNA, 19 nt, Homo sapiens
  misc_RNA (1)...(19): siRNA sense strand
caugagaugcugaauaaug

SEQ ID NO: 1280709 - RNA, 19 nt, Homo sapiens
  misc_RNA (1)...(19): siRNA sense strand
uaaacucucuggauaucau

SEQ ID NO: 1280710 - RNA, 19 nt, Homo sapiens
  misc_RNA (1)...(19): siRNA sense strand
ugaucgaucugcugucuug

SEQ ID NO: 1280711 - RNA, 19 nt, Homo sapiens
  misc_RNA (1)...(19): siRNA sense strand
ucaucgagcugacgucaug

SEQ ID NO: 1280712 - RNA, 19 nt, Homo sapiens
  misc_RNA (1)...(19): siRNA sense strand
gaugaugguuggcucucuu

SEQ ID NO: 1280713 - RNA, 19 nt, Homo sapiens
  misc_RNA (1)...(19): siRNA sense strand
uuaaugaacauccugcuuu

SEQ ID NO: 1280714 - RNA, 19 nt, Homo sapiens
  misc_RNA (1)...(19): siRNA sense strand
ugaacuaucugaaaacuug

SEQ ID NO: 1280715 - RNA, 19 nt, Homo sapiens
  misc_RNA (1)...(19): siRNA sense strand
gacaagaagaccauugaga

SEQ ID NO: 1280716 - RNA, 19 nt, Homo sapiens
  misc_RNA (1)...(19): siRNA sense strand
caaccgauaccaugagaug

SEQ ID NO: 1280717 - RNA, 19 nt, Homo sapiens
  misc_RNA (1)...(19): siRNA sense strand
ggaccauuaccuagaauau

SEQ ID NO: 1280718 - RNA, 19 nt, Homo sapiens
  misc_RNA (1)...(19): siRNA sense strand
ucgaucugcugucuuguuu

SEQ ID NO: 1280719 - RNA, 19 nt, Homo sapiens
  misc_RNA (1)...(19): siRNA sense strand
cagcagcucacgccaauga

SEQ ID NO: 1280720 - RNA, 19 nt, Homo sapiens
  misc_RNA (1)...(19): siRNA sense strand
agaagaccauugagaaagu

SEQ ID NO: 1280721 - RNA, 19 nt, Homo sapiens
  misc_RNA (1)...(19): siRNA sense strand
gccaauagaggaugauuca

SEQ ID NO: 1280722 - RNA, 19 nt, Homo sapiens
  misc_RNA (1)...(19): siRNA sense strand
cguguccucucucuacuuu

SEQ ID NO: 1280723 - RNA, 19 nt, Homo sapiens
  misc_RNA (1)...(19): siRNA sense strand
ccauaucgcuacaauacca

SEQ ID NO: 1280724 - RNA, 19 nt, Homo sapiens
  misc_RNA (1)...(19): siRNA sense strand
ucagauauccuuccucagu

SEQ ID NO: 1280725 - RNA, 19 nt, Homo sapiens
  misc_RNA (1)...(19): siRNA sense strand
gaggugguccauaaacauu

SEQ ID NO: 1280726 - RNA, 19 nt, Homo sapiens
  misc_RNA (1)...(19): siRNA sense strand
cagcucacgccaaugaaua

SEQ ID NO: 1280727 - RNA, 19 nt, Homo sapiens
  misc_RNA (1)...(19): siRNA sense strand
aauagaggaugauucaaca

SEQ ID NO: 1280728 - RNA, 19 nt, Homo sapiens
  misc_RNA (1)...(19): siRNA sense strand
ggacaugagagcugauauc

SEQ ID NO: 1280729 - RNA, 19 nt, Homo sapiens
  misc_RNA (1)...(19): siRNA sense strand
gguauagcaucggagacua

SEQ ID NO: 1280730 - RNA, 19 nt, Homo sapiens
  misc_RNA (1)...(19): siRNA sense strand
gaagaccauugagaaaguc

SEQ ID NO: 1280731 - RNA, 19 nt, Homo sapiens
  misc_RNA (1)...(19): siRNA sense strand
uauauugucucaacauggu

SEQ ID NO: 1280732 - RNA, 19 nt, Homo sapiens
  misc_RNA (1)...(19): siRNA sense strand
augguuggcucucuucuuu

SEQ ID NO: 1280733 - RNA, 19 nt, Homo sapiens
  misc_RNA (1)...(19): siRNA sense strand
gauuguggauuggccugua

SEQ ID NO: 1280734 - RNA, 19 nt, Homo sapiens
  misc_RNA (1)...(19): siRNA sense strand
ccagcaaggauucauugua

SEQ ID NO: 1280735 - RNA, 19 nt, Homo sapiens
  misc_RNA (1)...(19): siRNA sense strand
ucacuaacaccauccaaau

SEQ ID NO: 1280736 - RNA, 19 nt, Homo sapiens
  misc_RNA (1)...(19): siRNA sense strand
ucagcagucucuucaguuc

SEQ ID NO: 1280737 - RNA, 19 nt, Homo sapiens
  misc_RNA (1)...(19): siRNA sense strand
aaacaagaagcgccaaaga

SEQ ID NO: 1280738 - RNA, 19 nt, Homo sapiens
  misc_RNA (1)...(19): siRNA sense strand
cuacgaaucaaacugcuuu

SEQ ID NO: 1280739 - RNA, 19 nt, Homo sapiens
  misc_RNA (1)...(19): siRNA sense strand
cagcuggcuuugagcauug

SEQ ID NO: 1280740 - RNA, 19 nt, Homo sapiens
  misc_RNA (1)...(19): siRNA sense strand
ccagcuggcuuugagcauu

SEQ ID NO: 1280741 - RNA, 19 nt, Homo sapiens
  misc_RNA (1)...(19): siRNA sense strand
cuaacaccauccaaauaga

SEQ ID NO: 1280742 - RNA, 19 nt, Homo sapiens
  misc_RNA (1)...(19): siRNA sense strand
ccaaagacgccaccacaca

SEQ ID NO: 1280743 - RNA, 19 nt, Homo sapiens
  misc_RNA (1)...(19): siRNA sense strand
cagaggugguccauaaaca

SEQ ID NO: 1280744 - RNA, 19 nt, Homo sapiens
  misc_RNA (1)...(19): siRNA sense strand
gaaaugaacaugaaaaggu

SEQ ID NO: 1280745 - RNA, 19 nt, Homo sapiens
  misc_RNA (1)...(19): siRNA sense strand
gagacuacgaggucauuga

SEQ ID NO: 1280746 - RNA, 19 nt, Homo sapiens
  misc_RNA (1)...(19): siRNA sense strand
ggaggacccagcaaggauu

SEQ ID NO: 1280747 - RNA, 19 nt, Homo sapiens
  misc_RNA (1)...(19): siRNA sense strand
gauauccuuccucaguaua

SEQ ID NO: 1280748 - RNA, 19 nt, Homo sapiens
  misc_RNA (1)...(19): siRNA sense strand
gaugaggugguggcuauuu

SEQ ID NO: 1280749 - RNA, 19 nt, Homo sapiens
  misc_RNA (1)...(19): siRNA sense strand
guacguguccucucucuac

SEQ ID NO: 1280750 - RNA, 19 nt, Homo sapiens
  misc_RNA (1)...(19): siRNA sense strand
gauagugugguggacguua

SEQ ID NO: 1280751 - RNA, 19 nt, Homo sapiens
  misc_RNA (1)...(19): siRNA sense strand
acccuaagcucauaaggau

SEQ ID NO: 1280752 - RNA, 19 nt, Homo sapiens
  misc_RNA (1)...(19): siRNA sense strand
uagaggaugauucaacaaa

SEQ ID NO: 1280753 - RNA, 19 nt, Homo sapiens
  misc_RNA (1)...(19): siRNA sense strand
gaaaagguccucuccaucu

SEQ ID NO: 1280754 - RNA, 19 nt, Homo sapiens
  misc_RNA (1)...(19): siRNA sense strand
agucauggauuauauuguc

SEQ ID NO: 1280755 - RNA, 19 nt, Homo sapiens
  misc_RNA (1)...(19): siRNA sense strand
ggaaacauagcuccuacca

SEQ ID NO: 1280756 - RNA, 19 nt, Homo sapiens
  misc_RNA (1)...(19): siRNA sense strand
cacuaacaccauccaaaua

SEQ ID NO: 1280757 - RNA, 19 nt, Homo sapiens
  misc_RNA (1)...(19): siRNA sense strand
ggugguccauaaacauuca

SEQ ID NO: 1280758 - RNA, 19 nt, Homo sapiens
  misc_RNA (1)...(19): siRNA sense strand
ggauauuacguuguucaaa

SEQ ID NO: 1280759 - RNA, 19 nt, Homo sapiens
  misc_RNA (1)...(19): siRNA sense strand
uuaccaugcuggagaaagu

SEQ ID NO: 1280760 - RNA, 19 nt, Homo sapiens
  misc_RNA (1)...(19): siRNA sense strand
gauaucuguguucaucuaa

SEQ ID NO: 1280761 - RNA, 19 nt, Homo sapiens
  misc_RNA (1)...(19): siRNA sense strand
cagcaaauguaugccaaca

SEQ ID NO: 1280762 - RNA, 19 nt, Homo sapiens
  misc_RNA (1)...(19): siRNA sense strand
ugucuuguuuaccuuauga

SEQ ID NO: 1280763 - RNA, 19 nt, Homo sapiens
  misc_RNA (1)...(19): siRNA sense strand
caaagacgccaccacacau

SEQ ID NO: 1280764 - RNA, 19 nt, Homo sapiens
  misc_RNA (1)...(19): siRNA sense strand
uguaaacucucuggauauc

SEQ ID NO: 1280765 - RNA, 19 nt, Homo sapiens
  misc_RNA (1)...(19): siRNA sense strand
uaaugaacauccugcuuuu

SEQ ID NO: 1280766 - RNA, 19 nt, Homo sapiens
  misc_RNA (1)...(19): siRNA sense strand
gagagcugauaucuguguu

SEQ ID NO: 1280767 - RNA, 19 nt, Homo sapiens
  misc_RNA (1)...(19): siRNA sense strand
ugaauaauguacgggacuu

SEQ ID NO: 1280768 - RNA, 19 nt, Homo sapiens
  misc_RNA (1)...(19): siRNA sense strand
augagaugcugaauaaugu

SEQ ID NO: 1280769 - RNA, 19 nt, Homo sapiens
  misc_RNA (1)...(19): siRNA sense strand
ucucucuacuuuaccauga

SEQ ID NO: 1280770 - RNA, 19 nt, Homo sapiens
  misc_RNA (1)...(19): siRNA sense strand
aaacagaggugguccauaa

SEQ ID NO: 1280771 - RNA, 19 nt, Homo sapiens
  misc_RNA (1)...(19): siRNA sense strand
cuaggaaacuggaccauua

SEQ ID NO: 1280772 - RNA, 19 nt, Homo sapiens
  misc_RNA (1)...(19): siRNA sense strand
acaaauagccgaaguguuu

SEQ ID NO: 1280773 - RNA, 19 nt, Homo sapiens
  misc_RNA (1)...(19): siRNA sense strand
caugagagcugauaucugu

SEQ ID NO: 1280774 - RNA, 19 nt, Homo sapiens
  misc_RNA (1)...(19): siRNA sense strand
ggaauugacugacaagaag

SEQ ID NO: 1280775 - RNA, 19 nt, Homo sapiens
  misc_RNA (1)...(19): siRNA sense strand
cauaggauuuggaaacaua

SEQ ID NO: 1280776 - RNA, 19 nt, Homo sapiens
  misc_RNA (1)...(19): siRNA sense strand
ggacgaaauuugcccgauu

SEQ ID NO: 1280777 - RNA, 19 nt, Homo sapiens
  misc_RNA (1)...(19): siRNA sense strand
ggauuggccuguaguuuau

SEQ ID NO: 1280778 - RNA, 19 nt, Homo sapiens
  misc_RNA (1)...(19): siRNA sense strand
guggagaggucauuucuga

SEQ ID NO: 1280779 - RNA, 19 nt, Homo sapiens
  misc_RNA (1)...(19): siRNA sense strand
ccauaaacauucaagacua

SEQ ID NO: 1280780 - RNA, 19 nt, Homo sapiens
  misc_RNA (1)...(19): siRNA sense strand
gagcugacgucaugcagaa

SEQ ID NO: 1280781 - RNA, 19 nt, Homo sapiens
  misc_RNA (1)...(19): siRNA sense strand
ucaaggauauuacguuguu

SEQ ID NO: 1280782 - RNA, 19 nt, Homo sapiens
  misc_RNA (1)...(19): siRNA sense strand
gaaacuggaccauuaccua

SEQ ID NO: 1280783 - RNA, 19 nt, Homo sapiens
  misc_RNA (1)...(19): siRNA sense strand
gauauuacguuguucaaac

SEQ ID NO: 1280784 - RNA, 19 nt, Homo sapiens
  misc_RNA (1)...(19): siRNA sense strand
gaaauuugcccgauugaca

SEQ ID NO: 1280785 - RNA, 19 nt, Homo sapiens
  misc_RNA (1)...(19): siRNA sense strand
accaugagaugcugaauaa

SEQ ID NO: 1280786 - RNA, 19 nt, Homo sapiens
  misc_RNA (1)...(19): siRNA sense strand
caagaagaccauugagaaa

SEQ ID NO: 1280787 - RNA, 19 nt, Homo sapiens
  misc_RNA (1)...(19): siRNA sense strand
aaacaaagcagaacaacau

SEQ ID NO: 1280788 - RNA, 19 nt, Homo sapiens
  misc_RNA (1)...(19): siRNA sense strand
cagauauccuuccucagua

SEQ ID NO: 1280789 - RNA, 19 nt, Homo sapiens
  misc_RNA (1)...(19): siRNA sense strand
gacgaaauuugcccgauug

SEQ ID NO: 1280790 - RNA, 19 nt, Homo sapiens
  misc_RNA (1)...(19): siRNA sense strand
cagcaaggauucauuguac

SEQ ID NO: 1280791 - RNA, 19 nt, Homo sapiens
  misc_RNA (1)...(19): siRNA sense strand
gcugauaucuguguucauc

SEQ ID NO: 1280792 - RNA, 19 nt, Homo sapiens
  misc_RNA (1)...(19): siRNA sense strand
gugagcgagucauggauua

SEQ ID NO: 1280793 - RNA, 19 nt, Homo sapiens
  misc_RNA (1)...(19): siRNA sense strand
ggaaucagcagucucuuca

SEQ ID NO: 1280794 - RNA, 19 nt, Homo sapiens
  misc_RNA (1)...(19): siRNA sense strand
ugacaagccuuacaaccau

SEQ ID NO: 1280795 - RNA, 19 nt, Homo sapiens
  misc_RNA (1)...(19): siRNA sense strand
gacaagccuuacaaccaua

SEQ ID NO: 1280796 - RNA, 19 nt, Homo sapiens
  misc_RNA (1)...(19): siRNA sense strand
gaucugcugucuuguuuac

SEQ ID NO: 1280797 - RNA, 19 nt, Homo sapiens
  misc_RNA (1)...(19): siRNA sense strand
uuuguaaacucucuggaua

SEQ ID NO: 1280798 - RNA, 19 nt, Homo sapiens
  misc_RNA (1)...(19): siRNA sense strand
uggauuggccuguaguuua

SEQ ID NO: 1280799 - RNA, 19 nt, Homo sapiens
  misc_RNA (1)...(19): siRNA sense strand
gagcugauaucuguguuca

SEQ ID NO: 1280800 - RNA, 19 nt, Homo sapiens
  misc_RNA (1)...(19): siRNA sense strand
cauaaacauucaagacuag

SEQ ID NO: 1280801 - RNA, 19 nt, Homo sapiens
  misc_RNA (1)...(19): siRNA sense strand
ugauaucuguguucaucua

SEQ ID NO: 1280802 - RNA, 19 nt, Homo sapiens
  misc_RNA (1)...(19): siRNA sense strand
gguuggcucucuucuuuau

SEQ ID NO: 1280803 - RNA, 19 nt, Homo sapiens
  misc_RNA (1)...(19): siRNA sense strand
ggccuguaguuuauaguaa

SEQ ID NO: 1280804 - RNA, 19 nt, Homo sapiens
  misc_RNA (1)...(19): siRNA sense strand
acaagaagaccauugagaa

SEQ ID NO: 1280805 - RNA, 19 nt, Homo sapiens
  misc_RNA (1)...(19): siRNA sense strand
gggaauugacugacaagaa

SEQ ID NO: 1280806 - RNA, 19 nt, Homo sapiens
  misc_RNA (1)...(19): siRNA sense strand
caaaaggcauugauacaga

SEQ ID NO: 1280807 - RNA, 19 nt, Homo sapiens
  misc_RNA (1)...(19): siRNA sense strand
gagcgagucauggauuaua

SEQ ID NO: 1280808 - RNA, 19 nt, Homo sapiens
  misc_RNA (1)...(19): siRNA sense strand
caugagaugcugaauaaug

SEQ ID NO: 1280809 - RNA, 19 nt, Homo sapiens
  misc_RNA (1)...(19): siRNA sense strand
uaaacucucuggauaucau

SEQ ID NO: 1280810 - RNA, 19 nt, Homo sapiens
  misc_RNA (1)...(19): siRNA sense strand
ugaucgaucugcugucuug

SEQ ID NO: 1280811 - RNA, 19 nt, Homo sapiens
  misc_RNA (1)...(19): siRNA sense strand
ucaucgagcugacgucaug

SEQ ID NO: 1280812 - RNA, 19 nt, Homo sapiens
  misc_RNA (1)...(19): siRNA sense strand
gaugaugguuggcucucuu

SEQ ID NO: 1280813 - RNA, 19 nt, Homo sapiens
  misc_RNA (1)...(19): siRNA sense strand
uuaaugaacauccugcuuu

SEQ ID NO: 1280814 - RNA, 19 nt, Homo sapiens
  misc_RNA (1)...(19): siRNA sense strand
ugaacuaucugaaaacuug

SEQ ID NO: 1280815 - RNA, 19 nt, Homo sapiens
  misc_RNA (1)...(19): siRNA sense strand
gacaagaagaccauugaga

SEQ ID NO: 1280816 - RNA, 19 nt, Homo sapiens
  misc_RNA (1)...(19): siRNA sense strand
caaccgauaccaugagaug

SEQ ID NO: 1280817 - RNA, 19 nt, Homo sapiens
  misc_RNA (1)...(19): siRNA sense strand
ggaccauuaccuagaauau

SEQ ID NO: 1280818 - RNA, 19 nt, Homo sapiens
  misc_RNA (1)...(19): siRNA sense strand
ucgaucugcugucuuguuu

SEQ ID NO: 1280819 - RNA, 19 nt, Homo sapiens
  misc_RNA (1)...(19): siRNA sense strand
cagcagcucacgccaauga

SEQ ID NO: 1280820 - RNA, 19 nt, Homo sapiens
  misc_RNA (1)...(19): siRNA sense strand
agaagaccauugagaaagu

SEQ ID NO: 1280821 - RNA, 19 nt, Homo sapiens
  misc_RNA (1)...(19): siRNA sense strand
gccaauagaggaugauuca

SEQ ID NO: 1280822 - RNA, 19 nt, Homo sapiens
  misc_RNA (1)...(19): siRNA sense strand
cguguccucucucuacuuu

SEQ ID NO: 1280823 - RNA, 19 nt, Homo sapiens
  misc_RNA (1)...(19): siRNA sense strand
ccauaucgcuacaauacca

SEQ ID NO: 1280824 - RNA, 19 nt, Homo sapiens
  misc_RNA (1)...(19): siRNA sense strand
ucagauauccuuccucagu

SEQ ID NO: 1280825 - RNA, 19 nt, Homo sapiens
  misc_RNA (1)...(19): siRNA sense strand
gaggugguccauaaacauu

SEQ ID NO: 1280826 - RNA, 19 nt, Homo sapiens
  misc_RNA (1)...(19): siRNA sense strand
cagcucacgccaaugaaua

SEQ ID NO: 1280827 - RNA, 19 nt, Homo sapiens
  misc_RNA (1)...(19): siRNA sense strand
aauagaggaugauucaaca

SEQ ID NO: 1280828 - RNA, 19 nt, Homo sapiens
  misc_RNA (1)...(19): siRNA sense strand
ggacaugagagcugauauc

SEQ ID NO: 1280829 - RNA, 19 nt, Homo sapiens
  misc_RNA (1)...(19): siRNA sense strand
gguauagcaucggagacua

SEQ ID NO: 1280830 - RNA, 19 nt, Homo sapiens
  misc_RNA (1)...(19): siRNA sense strand
gaagaccauugagaaaguc

SEQ ID NO: 1280831 - RNA, 19 nt, Homo sapiens
  misc_RNA (1)...(19): siRNA sense strand
uauauugucucaacauggu

SEQ ID NO: 1280832 - RNA, 19 nt, Homo sapiens
  misc_RNA (1)...(19): siRNA sense strand
augguuggcucucuucuuu

SEQ ID NO: 1280833 - RNA, 19 nt, Homo sapiens
  misc_RNA (1)...(19): siRNA sense strand
gauuguggauuggccugua

SEQ ID NO: 1280834 - RNA, 19 nt, Homo sapiens
  misc_RNA (1)...(19): siRNA sense strand
ccagcaaggauucauugua

SEQ ID NO: 1280835 - RNA, 19 nt, Homo sapiens
  misc_RNA (1)...(19): siRNA sense strand
ucacuaacaccauccaaau

SEQ ID NO: 1280836 - RNA, 19 nt, Homo sapiens
  misc_RNA (1)...(19): siRNA sense strand
ucagcagucucuucaguuc

SEQ ID NO: 1280837 - RNA, 19 nt, Homo sapiens
  misc_RNA (1)...(19): siRNA sense strand
aaacaagaagcgccaaaga

SEQ ID NO: 1280838 - RNA, 19 nt, Homo sapiens
  misc_RNA (1)...(19): siRNA sense strand
cuacgaaucaaacugcuuu

SEQ ID NO: 1280839 - RNA, 19 nt, Homo sapiens
  misc_RNA (1)...(19): siRNA sense strand
cagcuggcuuugagcauug

SEQ ID NO: 1280840 - RNA, 19 nt, Homo sapiens
  misc_RNA (1)...(19): siRNA sense strand
ccagcuggcuuugagcauu

SEQ ID NO: 1280841 - RNA, 19 nt, Homo sapiens
  misc_RNA (1)...(19): siRNA sense strand
cuaacaccauccaaauaga

SEQ ID NO: 1280842 - RNA, 19 nt, Homo sapiens
  misc_RNA (1)...(19): siRNA sense strand
ccaaagacgccaccacaca

SEQ ID NO: 1280843 - RNA, 19 nt, Homo sapiens
  misc_RNA (1)...(19): siRNA sense strand
cagaggugguccauaaaca

SEQ ID NO: 1280844 - RNA, 19 nt, Homo sapiens
  misc_RNA (1)...(19): siRNA sense strand
gaaaugaacaugaaaaggu

SEQ ID NO: 1280845 - RNA, 19 nt, Homo sapiens
  misc_RNA (1)...(19): siRNA sense strand
gagacuacgaggucauuga

SEQ ID NO: 1280846 - RNA, 19 nt, Homo sapiens
  misc_RNA (1)...(19): siRNA sense strand
ggaggacccagcaaggauu

SEQ ID NO: 1280847 - RNA, 19 nt, Homo sapiens
  misc_RNA (1)...(19): siRNA sense strand
gauauccuuccucaguaua

SEQ ID NO: 1280848 - RNA, 19 nt, Homo sapiens
  misc_RNA (1)...(19): siRNA sense strand
gaugaggugguggcuauuu

SEQ ID NO: 1280849 - RNA, 19 nt, Homo sapiens
  misc_RNA (1)...(19): siRNA sense strand
guacguguccucucucuac

SEQ ID NO: 1280850 - RNA, 19 nt, Homo sapiens
  misc_RNA (1)...(19): siRNA sense strand
gauagugugguggacguua

SEQ ID NO: 1280851 - RNA, 19 nt, Homo sapiens
  misc_RNA (1)...(19): siRNA sense strand
acccuaagcucauaaggau

SEQ ID NO: 1280852 - RNA, 19 nt, Homo sapiens
  misc_RNA (1)...(19): siRNA sense strand
uagaggaugauucaacaaa

SEQ ID NO: 1280853 - RNA, 19 nt, Homo sapiens
  misc_RNA (1)...(19): siRNA sense strand
gaaaagguccucuccaucu

SEQ ID NO: 1280854 - RNA, 19 nt, Homo sapiens
  misc_RNA (1)...(19): siRNA sense strand
agucauggauuauauuguc

SEQ ID NO: 1280855 - RNA, 19 nt, Homo sapiens
  misc_RNA (1)...(19): siRNA sense strand
ggaaacauagcuccuacca

SEQ ID NO: 1280856 - RNA, 19 nt, Homo sapiens
  misc_RNA (1)...(19): siRNA sense strand
cacuaacaccauccaaaua

SEQ ID NO: 1280857 - RNA, 19 nt, Homo sapiens
  misc_RNA (1)...(19): siRNA sense strand
ggugguccauaaacauuca

SEQ ID NO: 1280858 - RNA, 19 nt, Homo sapiens
  misc_RNA (1)...(19): siRNA sense strand
ggauauuacguuguucaaa

SEQ ID NO: 1280859 - RNA, 19 nt, Homo sapiens
  misc_RNA (1)...(19): siRNA sense strand
uuaccaugcuggagaaagu

SEQ ID NO: 1280860 - RNA, 19 nt, Homo sapiens
  misc_RNA (1)...(19): siRNA sense strand
gauaucuguguucaucuaa

SEQ ID NO: 1280861 - RNA, 19 nt, Homo sapiens
  misc_RNA (1)...(19): siRNA sense strand
cagcaaauguaugccaaca

SEQ ID NO: 1280862 - RNA, 19 nt, Homo sapiens
  misc_RNA (1)...(19): siRNA sense strand
ugucuuguuuaccuuauga

SEQ ID NO: 1280863 - RNA, 19 nt, Homo sapiens
  misc_RNA (1)...(19): siRNA sense strand
caaagacgccaccacacau

SEQ ID NO: 1280864 - RNA, 19 nt, Homo sapiens
  misc_RNA (1)...(19): siRNA sense strand
uguaaacucucuggauauc

SEQ ID NO: 1280865 - RNA, 19 nt, Homo sapiens
  misc_RNA (1)...(19): siRNA sense strand
uaaugaacauccugcuuuu

SEQ ID NO: 1280866 - RNA, 19 nt, Homo sapiens
  misc_RNA (1)...(19): siRNA sense strand
gagagcugauaucuguguu

SEQ ID NO: 1280867 - RNA, 19 nt, Homo sapiens
  misc_RNA (1)...(19): siRNA sense strand
ugaauaauguacgggacuu

SEQ ID NO: 1280868 - RNA, 19 nt, Homo sapiens
  misc_RNA (1)...(19): siRNA sense strand
augagaugcugaauaaugu

SEQ ID NO: 1280869 - RNA, 19 nt, Homo sapiens
  misc_RNA (1)...(19): siRNA sense strand
ucucucuacuuuaccauga

SEQ ID NO: 1280870 - RNA, 19 nt, Homo sapiens
  misc_RNA (1)...(19): siRNA sense strand
aaacagaggugguccauaa

SEQ ID NO: 1280871 - RNA, 19 nt, Homo sapiens
  misc_RNA (1)...(19): siRNA sense strand
cuaggaaacuggaccauua

SEQ ID NO: 1280872 - RNA, 19 nt, Homo sapiens
  misc_RNA (1)...(19): siRNA sense strand
acaaauagccgaaguguuu

SEQ ID NO: 1280873 - RNA, 19 nt, Homo sapiens
  misc_RNA (1)...(19): siRNA sense strand
caugagagcugauaucugu

SEQ ID NO: 1280874 - RNA, 19 nt, Homo sapiens
  misc_RNA (1)...(19): siRNA sense strand
ggaauugacugacaagaag

SEQ ID NO: 1280875 - RNA, 19 nt, Homo sapiens
  misc_RNA (1)...(19): siRNA sense strand
cauaggauuuggaaacaua

SEQ ID NO: 1280876 - RNA, 19 nt, Homo sapiens
  misc_RNA (1)...(19): siRNA sense strand
ggacgaaauuugcccgauu

SEQ ID NO: 1280877 - RNA, 19 nt, Homo sapiens
  misc_RNA (1)...(19): siRNA sense strand
ccauaaacauucaagacua

SEQ ID NO: 1280878 - RNA, 19 nt, Homo sapiens
  misc_RNA (1)...(19): siRNA sense strand
guggagaggucauuucuga

SEQ ID NO: 1280879 - RNA, 19 nt, Homo sapiens
  misc_RNA (1)...(19): siRNA sense strand
ucaaggauauuacguuguu

SEQ ID NO: 1280880 - RNA, 19 nt, Homo sapiens
  misc_RNA (1)...(19): siRNA sense strand
gaaacuggaccauuaccua

SEQ ID NO: 1280881 - RNA, 19 nt, Homo sapiens
  misc_RNA (1)...(19): siRNA sense strand
gauauuacguuguucaaac

SEQ ID NO: 1280882 - RNA, 19 nt, Homo sapiens
  misc_RNA (1)...(19): siRNA sense strand
gaaauuugcccgauugaca

SEQ ID NO: 1280883 - RNA, 19 nt, Homo sapiens
  misc_RNA (1)...(19): siRNA sense strand
accaugagaugcugaauaa

SEQ ID NO: 1280884 - RNA, 19 nt, Homo sapiens
  misc_RNA (1)...(19): siRNA sense strand
caagaagaccauugagaaa

SEQ ID NO: 1280885 - RNA, 19 nt, Homo sapiens
  misc_RNA (1)...(19): siRNA sense strand
aaacaaagcagaacaacau

SEQ ID NO: 1280886 - RNA, 19 nt, Homo sapiens
  misc_RNA (1)...(19): siRNA sense strand
cagauauccuuccucagua

SEQ ID NO: 1280887 - RNA, 19 nt, Homo sapiens
  misc_RNA (1)...(19): siRNA sense strand
gacgaaauuugcccgauug

SEQ ID NO: 1280888 - RNA, 19 nt, Homo sapiens
  misc_RNA (1)...(19): siRNA sense strand
cagcaaggauucauuguac

SEQ ID NO: 1280889 - RNA, 19 nt, Homo sapiens
  misc_RNA (1)...(19): siRNA sense strand
gcugauaucuguguucauc

SEQ ID NO: 1280890 - RNA, 19 nt, Homo sapiens
  misc_RNA (1)...(19): siRNA sense strand
gugagcgagucauggauua

SEQ ID NO: 1280891 - RNA, 19 nt, Homo sapiens
  misc_RNA (1)...(19): siRNA sense strand
ggaaucagcagucucuuca

SEQ ID NO: 1280892 - RNA, 19 nt, Homo sapiens
  misc_RNA (1)...(19): siRNA sense strand
ugacaagccuuacaaccau

SEQ ID NO: 1280893 - RNA, 19 nt, Homo sapiens
  misc_RNA (1)...(19): siRNA sense strand
gacaagccuuacaaccaua

SEQ ID NO: 1280894 - RNA, 19 nt, Homo sapiens
  misc_RNA (1)...(19): siRNA sense strand
gaucugcugucuuguuuac

SEQ ID NO: 1280895 - RNA, 19 nt, Homo sapiens
  misc_RNA (1)...(19): siRNA sense strand
gagcugauaucuguguuca

SEQ ID NO: 1280896 - RNA, 19 nt, Homo sapiens
  misc_RNA (1)...(19): siRNA sense strand
cauaaacauucaagacuag

SEQ ID NO: 1280897 - RNA, 19 nt, Homo sapiens
  misc_RNA (1)...(19): siRNA sense strand
ugauaucuguguucaucua

SEQ ID NO: 1280898 - RNA, 19 nt, Homo sapiens
  misc_RNA (1)...(19): siRNA sense strand
gguuggcucucuucuuuau

SEQ ID NO: 1280899 - RNA, 19 nt, Homo sapiens
  misc_RNA (1)...(19): siRNA sense strand
acaagaagaccauugagaa

SEQ ID NO: 1280900 - RNA, 19 nt, Homo sapiens
  misc_RNA (1)...(19): siRNA sense strand
ugaucgaucugcugucuug

SEQ ID NO: 1280901 - RNA, 19 nt, Homo sapiens
  misc_RNA (1)...(19): siRNA sense strand
caaaaggcauugauacaga

SEQ ID NO: 1280902 - RNA, 19 nt, Homo sapiens
  misc_RNA (1)...(19): siRNA sense strand
gagcgagucauggauuaua

SEQ ID NO: 1280903 - RNA, 19 nt, Homo sapiens
  misc_RNA (1)...(19): siRNA sense strand
caugagaugcugaauaaug

SEQ ID NO: 1280904 - RNA, 19 nt, Homo sapiens
  misc_RNA (1)...(19): siRNA sense strand
gggaauugacugacaagaa

SEQ ID NO: 1280905 - RNA, 19 nt, Homo sapiens
  misc_RNA (1)...(19): siRNA sense strand
gaugaugguuggcucucuu

SEQ ID NO: 1280906 - RNA, 19 nt, Homo sapiens
  misc_RNA (1)...(19): siRNA sense strand
uuaaugaacauccugcuuu

SEQ ID NO: 1280907 - RNA, 19 nt, Homo sapiens
  misc_RNA (1)...(19): siRNA sense strand
ugaacuaucugaaaacuug

SEQ ID NO: 1280908 - RNA, 19 nt, Homo sapiens
  misc_RNA (1)...(19): siRNA sense strand
cagcagcucacgccaauga

SEQ ID NO: 1280909 - RNA, 19 nt, Homo sapiens
  misc_RNA (1)...(19): siRNA sense strand
gacaagaagaccauugaga

SEQ ID NO: 1280910 - RNA, 19 nt, Homo sapiens
  misc_RNA (1)...(19): siRNA sense strand
caaccgauaccaugagaug

SEQ ID NO: 1280911 - RNA, 19 nt, Homo sapiens
  misc_RNA (1)...(19): siRNA sense strand
agaagaccauugagaaagu

SEQ ID NO: 1280912 - RNA, 19 nt, Homo sapiens
  misc_RNA (1)...(19): siRNA sense strand
ggaccauuaccuagaauau

SEQ ID NO: 1280913 - RNA, 19 nt, Homo sapiens
  misc_RNA (1)...(19): siRNA sense strand
ucgaucugcugucuuguuu

SEQ ID NO: 1280914 - RNA, 19 nt, Homo sapiens
  misc_RNA (1)...(19): siRNA sense strand
gccaauagaggaugauuca

SEQ ID NO: 1280915 - RNA, 19 nt, Homo sapiens
  misc_RNA (1)...(19): siRNA sense strand
cguguccucucucuacuuu

SEQ ID NO: 1280916 - RNA, 19 nt, Homo sapiens
  misc_RNA (1)...(19): siRNA sense strand
ccauaucgcuacaauacca

SEQ ID NO: 1280917 - RNA, 19 nt, Homo sapiens
  misc_RNA (1)...(19): siRNA sense strand
ucagauauccuuccucagu

SEQ ID NO: 1280918 - RNA, 19 nt, Homo sapiens
  misc_RNA (1)...(19): siRNA sense strand
gaggugguccauaaacauu

SEQ ID NO: 1280919 - RNA, 19 nt, Homo sapiens
  misc_RNA (1)...(19): siRNA sense strand
cagcucacgccaaugaaua

SEQ ID NO: 1280920 - RNA, 19 nt, Homo sapiens
  misc_RNA (1)...(19): siRNA sense strand
aauagaggaugauucaaca

SEQ ID NO: 1280921 - RNA, 19 nt, Homo sapiens
  misc_RNA (1)...(19): siRNA sense strand
ggacaugagagcugauauc

SEQ ID NO: 1280922 - RNA, 19 nt, Homo sapiens
  misc_RNA (1)...(19): siRNA sense strand
gguauagcaucggagacua

SEQ ID NO: 1280923 - RNA, 19 nt, Homo sapiens
  misc_RNA (1)...(19): siRNA sense strand
aaacaagaagcgccaaaga

SEQ ID NO: 1280924 - RNA, 19 nt, Homo sapiens
  misc_RNA (1)...(19): siRNA sense strand
uauauugucucaacauggu

SEQ ID NO: 1280925 - RNA, 19 nt, Homo sapiens
  misc_RNA (1)...(19): siRNA sense strand
augguuggcucucuucuuu

SEQ ID NO: 1280926 - RNA, 19 nt, Homo sapiens
  misc_RNA (1)...(19): siRNA sense strand
ccagcaaggauucauugua

SEQ ID NO: 1280927 - RNA, 19 nt, Homo sapiens
  misc_RNA (1)...(19): siRNA sense strand
ucacuaacaccauccaaau

SEQ ID NO: 1280928 - RNA, 19 nt, Homo sapiens
  misc_RNA (1)...(19): siRNA sense strand
ucagcagucucuucaguuc

SEQ ID NO: 1280929 - RNA, 19 nt, Homo sapiens
  misc_RNA (1)...(19): siRNA sense strand
gaagaccauugagaaaguc

SEQ ID NO: 1280930 - RNA, 19 nt, Homo sapiens
  misc_RNA (1)...(19): siRNA sense strand
cagaggugguccauaaaca

SEQ ID NO: 1280931 - RNA, 19 nt, Homo sapiens
  misc_RNA (1)...(19): siRNA sense strand
cagcuggcuuugagcauug

SEQ ID NO: 1280932 - RNA, 19 nt, Homo sapiens
  misc_RNA (1)...(19): siRNA sense strand
ccagcuggcuuugagcauu

SEQ ID NO: 1280933 - RNA, 19 nt, Homo sapiens
  misc_RNA (1)...(19): siRNA sense strand
cuaacaccauccaaauaga

SEQ ID NO: 1280934 - RNA, 19 nt, Homo sapiens
  misc_RNA (1)...(19): siRNA sense strand
cuacgaaucaaacugcuuu

SEQ ID NO: 1280935 - RNA, 19 nt, Homo sapiens
  misc_RNA (1)...(19): siRNA sense strand
gaaaugaacaugaaaaggu

SEQ ID NO: 1280936 - RNA, 19 nt, Homo sapiens
  misc_RNA (1)...(19): siRNA sense strand
ccaaagacgccaccacaca

SEQ ID NO: 1280937 - RNA, 19 nt, Homo sapiens
  misc_RNA (1)...(19): siRNA sense strand
gagacuacgaggucauuga

SEQ ID NO: 1280938 - RNA, 19 nt, Homo sapiens
  misc_RNA (1)...(19): siRNA sense strand
ggaggacccagcaaggauu

SEQ ID NO: 1280939 - RNA, 19 nt, Homo sapiens
  misc_RNA (1)...(19): siRNA sense strand
gauauccuuccucaguaua

SEQ ID NO: 1280940 - RNA, 19 nt, Homo sapiens
  misc_RNA (1)...(19): siRNA sense strand
gaugaggugguggcuauuu

SEQ ID NO: 1280941 - RNA, 19 nt, Homo sapiens
  misc_RNA (1)...(19): siRNA sense strand
guacguguccucucucuac

SEQ ID NO: 1280942 - RNA, 19 nt, Homo sapiens
  misc_RNA (1)...(19): siRNA sense strand
gauagugugguggacguua

SEQ ID NO: 1280943 - RNA, 19 nt, Homo sapiens
  misc_RNA (1)...(19): siRNA sense strand
acccuaagcucauaaggau

SEQ ID NO: 1280944 - RNA, 19 nt, Homo sapiens
  misc_RNA (1)...(19): siRNA sense strand
uagaggaugauucaacaaa

SEQ ID NO: 1280945 - RNA, 19 nt, Homo sapiens
  misc_RNA (1)...(19): siRNA sense strand
gaaaagguccucuccaucu

SEQ ID NO: 1280946 - RNA, 19 nt, Homo sapiens
  misc_RNA (1)...(19): siRNA sense strand
agucauggauuauauuguc

SEQ ID NO: 1280947 - RNA, 19 nt, Homo sapiens
  misc_RNA (1)...(19): siRNA sense strand
ggaaacauagcuccuacca

SEQ ID NO: 1280948 - RNA, 19 nt, Homo sapiens
  misc_RNA (1)...(19): siRNA sense strand
cacuaacaccauccaaaua

SEQ ID NO: 1280949 - RNA, 19 nt, Homo sapiens
  misc_RNA (1)...(19): siRNA sense strand
ggugguccauaaacauuca

SEQ ID NO: 1280950 - RNA, 19 nt, Homo sapiens
  misc_RNA (1)...(19): siRNA sense strand
ggauauuacguuguucaaa

SEQ ID NO: 1280951 - RNA, 19 nt, Homo sapiens
  misc_RNA (1)...(19): siRNA sense strand
uuaccaugcuggagaaagu

SEQ ID NO: 1280952 - RNA, 19 nt, Homo sapiens
  misc_RNA (1)...(19): siRNA sense strand
gauaucuguguucaucuaa

SEQ ID NO: 1280953 - RNA, 19 nt, Homo sapiens
  misc_RNA (1)...(19): siRNA sense strand
cagcaaauguaugccaaca

SEQ ID NO: 1280954 - RNA, 19 nt, Homo sapiens
  misc_RNA (1)...(19): siRNA sense strand
ugucuuguuuaccuuauga

SEQ ID NO: 1280955 - RNA, 19 nt, Homo sapiens
  misc_RNA (1)...(19): siRNA sense strand
caaagacgccaccacacau

SEQ ID NO: 1280956 - RNA, 19 nt, Homo sapiens
  misc_RNA (1)...(19): siRNA sense strand
caauagaggaugauucaac

SEQ ID NO: 1280957 - RNA, 19 nt, Homo sapiens
  misc_RNA (1)...(19): siRNA sense strand
uaaugaacauccugcuuuu

SEQ ID NO: 1280958 - RNA, 19 nt, Homo sapiens
  misc_RNA (1)...(19): siRNA sense strand
gagagcugauaucuguguu

SEQ ID NO: 1280959 - RNA, 19 nt, Homo sapiens
  misc_RNA (1)...(19): siRNA sense strand
ugaauaauguacgggacuu

SEQ ID NO: 1280960 - RNA, 19 nt, Homo sapiens
  misc_RNA (1)...(19): siRNA sense strand
augagaugcugaauaaugu

SEQ ID NO: 1280961 - RNA, 19 nt, Homo sapiens
  misc_RNA (1)...(19): siRNA sense strand
ucucucuacuuuaccauga

SEQ ID NO: 1280962 - RNA, 19 nt, Homo sapiens
  misc_RNA (1)...(19): siRNA sense strand
gcagucucuucaguucuuu

SEQ ID NO: 1280963 - RNA, 19 nt, Homo sapiens
  misc_RNA (1)...(19): siRNA sense strand
aaucagcagucucuucagu

SEQ ID NO: 1280964 - RNA, 19 nt, Homo sapiens
  misc_RNA (1)...(19): siRNA sense strand
agauauccuuccucaguau

SEQ ID NO: 1280965 - RNA, 19 nt, Homo sapiens
  misc_RNA (1)...(19): siRNA sense strand
guagaguuccaaaccauuc

SEQ ID NO: 1280966 - RNA, 19 nt, Homo sapiens
  misc_RNA (1)...(19): siRNA sense strand
ggauuauauugucucaaca

SEQ ID NO: 1280967 - RNA, 19 nt, Homo sapiens
  misc_RNA (1)...(19): siRNA sense strand
uggauuauauugucucaac

SEQ ID NO: 1280968 - RNA, 19 nt, Homo sapiens
  misc_RNA (1)...(19): siRNA sense strand
gacccuaagcucauaagga

SEQ ID NO: 1280969 - RNA, 19 nt, Homo sapiens
  misc_RNA (1)...(19): siRNA sense strand
gggauugggugauuuuaau

SEQ ID NO: 1280970 - RNA, 19 nt, Homo sapiens
  misc_RNA (1)...(19): siRNA sense strand
aaacagaggugguccauaa

SEQ ID NO: 1280971 - RNA, 19 nt, Homo sapiens
  misc_RNA (1)...(19): siRNA sense strand
cuaggaaacuggaccauua

SEQ ID NO: 1280972 - RNA, 19 nt, Homo sapiens
  misc_RNA (1)...(19): siRNA sense strand
acaaauagccgaaguguuu

SEQ ID NO: 1280973 - RNA, 19 nt, Homo sapiens
  misc_RNA (1)...(19): siRNA sense strand
caugagagcugauaucugu

SEQ ID NO: 1280974 - RNA, 19 nt, Homo sapiens
  misc_RNA (1)...(19): siRNA sense strand
ggaauugacugacaagaag

SEQ ID NO: 1280975 - RNA, 19 nt, Homo sapiens
  misc_RNA (1)...(19): siRNA sense strand
cauaggauuuggaaacaua

SEQ ID NO: 1280976 - RNA, 19 nt, Homo sapiens
  misc_RNA (1)...(19): siRNA sense strand
ggacgaaauuugcccgauu

SEQ ID NO: 1280977 - RNA, 19 nt, Homo sapiens
  misc_RNA (1)...(19): siRNA sense strand
ggauuggccuguaguuuau

SEQ ID NO: 1280978 - RNA, 19 nt, Homo sapiens
  misc_RNA (1)...(19): siRNA sense strand
guggagaggucauuucuga

SEQ ID NO: 1280979 - RNA, 19 nt, Homo sapiens
  misc_RNA (1)...(19): siRNA sense strand
ccauaaacauucaagacua

SEQ ID NO: 1280980 - RNA, 19 nt, Homo sapiens
  misc_RNA (1)...(19): siRNA sense strand
gagcugacgucaugcagaa

SEQ ID NO: 1280981 - RNA, 19 nt, Homo sapiens
  misc_RNA (1)...(19): siRNA sense strand
ucaaggauauuacguuguu

SEQ ID NO: 1280982 - RNA, 19 nt, Homo sapiens
  misc_RNA (1)...(19): siRNA sense strand
gaaacuggaccauuaccua

SEQ ID NO: 1280983 - RNA, 19 nt, Homo sapiens
  misc_RNA (1)...(19): siRNA sense strand
gauauuacguuguucaaac

SEQ ID NO: 1280984 - RNA, 19 nt, Homo sapiens
  misc_RNA (1)...(19): siRNA sense strand
gaaauuugcccgauugaca

SEQ ID NO: 1280985 - RNA, 19 nt, Homo sapiens
  misc_RNA (1)...(19): siRNA sense strand
accaugagaugcugaauaa

SEQ ID NO: 1280986 - RNA, 19 nt, Homo sapiens
  misc_RNA (1)...(19): siRNA sense strand
caagaagaccauugagaaa

SEQ ID NO: 1280987 - RNA, 19 nt, Homo sapiens
  misc_RNA (1)...(19): siRNA sense strand
aaacaaagcagaacaacau

SEQ ID NO: 1280988 - RNA, 19 nt, Homo sapiens
  misc_RNA (1)...(19): siRNA sense strand
cagauauccuuccucagua

SEQ ID NO: 1280989 - RNA, 19 nt, Homo sapiens
  misc_RNA (1)...(19): siRNA sense strand
gacgaaauuugcccgauug

SEQ ID NO: 1280990 - RNA, 19 nt, Homo sapiens
  misc_RNA (1)...(19): siRNA sense strand
cagcaaggauucauuguac

SEQ ID NO: 1280991 - RNA, 19 nt, Homo sapiens
  misc_RNA (1)...(19): siRNA sense strand
gcugauaucuguguucauc

SEQ ID NO: 1280992 - RNA, 19 nt, Homo sapiens
  misc_RNA (1)...(19): siRNA sense strand
gugagcgagucauggauua

SEQ ID NO: 1280993 - RNA, 19 nt, Homo sapiens
  misc_RNA (1)...(19): siRNA sense strand
ggaaucagcagucucuuca

SEQ ID NO: 1280994 - RNA, 19 nt, Homo sapiens
  misc_RNA (1)...(19): siRNA sense strand
ugacaagccuuacaaccau

SEQ ID NO: 1280995 - RNA, 19 nt, Homo sapiens
  misc_RNA (1)...(19): siRNA sense strand
gacaagccuuacaaccaua

SEQ ID NO: 1280996 - RNA, 19 nt, Homo sapiens
  misc_RNA (1)...(19): siRNA sense strand
gaucugcugucuuguuuac

SEQ ID NO: 1280997 - RNA, 19 nt, Homo sapiens
  misc_RNA (1)...(19): siRNA sense strand
uuuguaaacucucuggaua

SEQ ID NO: 1280998 - RNA, 19 nt, Homo sapiens
  misc_RNA (1)...(19): siRNA sense strand
uggauuggccuguaguuua

SEQ ID NO: 1280999 - RNA, 19 nt, Homo sapiens
  misc_RNA (1)...(19): siRNA sense strand
gagcugauaucuguguuca

SEQ ID NO: 1281000 - RNA, 19 nt, Homo sapiens
  misc_RNA (1)...(19): siRNA sense strand
cauaaacauucaagacuag

SEQ ID NO: 1281001 - RNA, 19 nt, Homo sapiens
  misc_RNA (1)...(19): siRNA sense strand
ugauaucuguguucaucua

SEQ ID NO: 1281002 - RNA, 19 nt, Homo sapiens
  misc_RNA (1)...(19): siRNA sense strand
gguuggcucucuucuuuau

SEQ ID NO: 1281003 - RNA, 19 nt, Homo sapiens
  misc_RNA (1)...(19): siRNA sense strand
ggccuguaguuuauaguaa

SEQ ID NO: 1281004 - RNA, 19 nt, Homo sapiens
  misc_RNA (1)...(19): siRNA sense strand
acaagaagaccauugagaa

SEQ ID NO: 1281005 - RNA, 19 nt, Homo sapiens
  misc_RNA (1)...(19): siRNA sense strand
gggaauugacugacaagaa

SEQ ID NO: 1281006 - RNA, 19 nt, Homo sapiens
  misc_RNA (1)...(19): siRNA sense strand
caaaaggcauugauacaga

SEQ ID NO: 1281007 - RNA, 19 nt, Homo sapiens
  misc_RNA (1)...(19): siRNA sense strand
gagcgagucauggauuaua

SEQ ID NO: 1281008 - RNA, 19 nt, Homo sapiens
  misc_RNA (1)...(19): siRNA sense strand
caugagaugcugaauaaug

SEQ ID NO: 1281009 - RNA, 19 nt, Homo sapiens
  misc_RNA (1)...(19): siRNA sense strand
uaaacucucuggauaucau

SEQ ID NO: 1281010 - RNA, 19 nt, Homo sapiens
  misc_RNA (1)...(19): siRNA sense strand
ugaucgaucugcugucuug

SEQ ID NO: 1281011 - RNA, 19 nt, Homo sapiens
  misc_RNA (1)...(19): siRNA sense strand
ucaucgagcugacgucaug

SEQ ID NO: 1281012 - RNA, 19 nt, Homo sapiens
  misc_RNA (1)...(19): siRNA sense strand
gaugaugguuggcucucuu

SEQ ID NO: 1281013 - RNA, 19 nt, Homo sapiens
  misc_RNA (1)...(19): siRNA sense strand
uuaaugaacauccugcuuu

SEQ ID NO: 1281014 - RNA, 19 nt, Homo sapiens
  misc_RNA (1)...(19): siRNA sense strand
ugaacuaucugaaaacuug

SEQ ID NO: 1281015 - RNA, 19 nt, Homo sapiens
  misc_RNA (1)...(19): siRNA sense strand
gacaagaagaccauugaga

SEQ ID NO: 1281016 - RNA, 19 nt, Homo sapiens
  misc_RNA (1)...(19): siRNA sense strand
caaccgauaccaugagaug

SEQ ID NO: 1281017 - RNA, 19 nt, Homo sapiens
  misc_RNA (1)...(19): siRNA sense strand
ggaccauuaccuagaauau

SEQ ID NO: 1281018 - RNA, 19 nt, Homo sapiens
  misc_RNA (1)...(19): siRNA sense strand
ucgaucugcugucuuguuu

SEQ ID NO: 1281019 - RNA, 19 nt, Homo sapiens
  misc_RNA (1)...(19): siRNA sense strand
cagcagcucacgccaauga

SEQ ID NO: 1281020 - RNA, 19 nt, Homo sapiens
  misc_RNA (1)...(19): siRNA sense strand
agaagaccauugagaaagu

SEQ ID NO: 1281021 - RNA, 19 nt, Homo sapiens
  misc_RNA (1)...(19): siRNA sense strand
gccaauagaggaugauuca

SEQ ID NO: 1281022 - RNA, 19 nt, Homo sapiens
  misc_RNA (1)...(19): siRNA sense strand
cguguccucucucuacuuu

SEQ ID NO: 1281023 - RNA, 19 nt, Homo sapiens
  misc_RNA (1)...(19): siRNA sense strand
ccauaucgcuacaauacca

SEQ ID NO: 1281024 - RNA, 19 nt, Homo sapiens
  misc_RNA (1)...(19): siRNA sense strand
ucagauauccuuccucagu

SEQ ID NO: 1281025 - RNA, 19 nt, Homo sapiens
  misc_RNA (1)...(19): siRNA sense strand
gaggugguccauaaacauu

SEQ ID NO: 1281026 - RNA, 19 nt, Homo sapiens
  misc_RNA (1)...(19): siRNA sense strand
cagcucacgccaaugaaua

SEQ ID NO: 1281027 - RNA, 19 nt, Homo sapiens
  misc_RNA (1)...(19): siRNA sense strand
aauagaggaugauucaaca

SEQ ID NO: 1281028 - RNA, 19 nt, Homo sapiens
  misc_RNA (1)...(19): siRNA sense strand
ggacaugagagcugauauc

SEQ ID NO: 1281029 - RNA, 19 nt, Homo sapiens
  misc_RNA (1)...(19): siRNA sense strand
gguauagcaucggagacua

SEQ ID NO: 1281030 - RNA, 19 nt, Homo sapiens
  misc_RNA (1)...(19): siRNA sense strand
gaagaccauugagaaaguc

SEQ ID NO: 1281031 - RNA, 19 nt, Homo sapiens
  misc_RNA (1)...(19): siRNA sense strand
uauauugucucaacauggu

SEQ ID NO: 1281032 - RNA, 19 nt, Homo sapiens
  misc_RNA (1)...(19): siRNA sense strand
augguuggcucucuucuuu

SEQ ID NO: 1281033 - RNA, 19 nt, Homo sapiens
  misc_RNA (1)...(19): siRNA sense strand
gauuguggauuggccugua

SEQ ID NO: 1281034 - RNA, 19 nt, Homo sapiens
  misc_RNA (1)...(19): siRNA sense strand
ccagcaaggauucauugua

SEQ ID NO: 1281035 - RNA, 19 nt, Homo sapiens
  misc_RNA (1)...(19): siRNA sense strand
ucacuaacaccauccaaau

SEQ ID NO: 1281036 - RNA, 19 nt, Homo sapiens
  misc_RNA (1)...(19): siRNA sense strand
ucagcagucucuucaguuc

SEQ ID NO: 1281037 - RNA, 19 nt, Homo sapiens
  misc_RNA (1)...(19): siRNA sense strand
aaacaagaagcgccaaaga

SEQ ID NO: 1281038 - RNA, 19 nt, Homo sapiens
  misc_RNA (1)...(19): siRNA sense strand
cuacgaaucaaacugcuuu

SEQ ID NO: 1281039 - RNA, 19 nt, Homo sapiens
  misc_RNA (1)...(19): siRNA sense strand
cagcuggcuuugagcauug

SEQ ID NO: 1281040 - RNA, 19 nt, Homo sapiens
  misc_RNA (1)...(19): siRNA sense strand
ccagcuggcuuugagcauu

SEQ ID NO: 1281041 - RNA, 19 nt, Homo sapiens
  misc_RNA (1)...(19): siRNA sense strand
cuaacaccauccaaauaga

SEQ ID NO: 1281042 - RNA, 19 nt, Homo sapiens
  misc_RNA (1)...(19): siRNA sense strand
ccaaagacgccaccacaca

SEQ ID NO: 1281043 - RNA, 19 nt, Homo sapiens
  misc_RNA (1)...(19): siRNA sense strand
cagaggugguccauaaaca

SEQ ID NO: 1281044 - RNA, 19 nt, Homo sapiens
  misc_RNA (1)...(19): siRNA sense strand
gaaaugaacaugaaaaggu

SEQ ID NO: 1281045 - RNA, 19 nt, Homo sapiens
  misc_RNA (1)...(19): siRNA sense strand
gagacuacgaggucauuga

SEQ ID NO: 1281046 - RNA, 19 nt, Homo sapiens
  misc_RNA (1)...(19): siRNA sense strand
ggaggacccagcaaggauu

SEQ ID NO: 1281047 - RNA, 19 nt, Homo sapiens
  misc_RNA (1)...(19): siRNA sense strand
gauauccuuccucaguaua

SEQ ID NO: 1281048 - RNA, 19 nt, Homo sapiens
  misc_RNA (1)...(19): siRNA sense strand
gaugaggugguggcuauuu

SEQ ID NO: 1281049 - RNA, 19 nt, Homo sapiens
  misc_RNA (1)...(19): siRNA sense strand
guacguguccucucucuac

SEQ ID NO: 1281050 - RNA, 19 nt, Homo sapiens
  misc_RNA (1)...(19): siRNA sense strand
gauagugugguggacguua

SEQ ID NO: 1281051 - RNA, 19 nt, Homo sapiens
  misc_RNA (1)...(19): siRNA sense strand
acccuaagcucauaaggau

SEQ ID NO: 1281052 - RNA, 19 nt, Homo sapiens
  misc_RNA (1)...(19): siRNA sense strand
uagaggaugauucaacaaa

SEQ ID NO: 1281053 - RNA, 19 nt, Homo sapiens
  misc_RNA (1)...(19): siRNA sense strand
gaaaagguccucuccaucu

SEQ ID NO: 1281054 - RNA, 19 nt, Homo sapiens
  misc_RNA (1)...(19): siRNA sense strand
agucauggauuauauuguc

SEQ ID NO: 1281055 - RNA, 19 nt, Homo sapiens
  misc_RNA (1)...(19): siRNA sense strand
ggaaacauagcuccuacca

SEQ ID NO: 1281056 - RNA, 19 nt, Homo sapiens
  misc_RNA (1)...(19): siRNA sense strand
cacuaacaccauccaaaua

SEQ ID NO: 1281057 - RNA, 19 nt, Homo sapiens
  misc_RNA (1)...(19): siRNA sense strand
ggugguccauaaacauuca

SEQ ID NO: 1281058 - RNA, 19 nt, Homo sapiens
  misc_RNA (1)...(19): siRNA sense strand
ggauauuacguuguucaaa

SEQ ID NO: 1281059 - RNA, 19 nt, Homo sapiens
  misc_RNA (1)...(19): siRNA sense strand
uuaccaugcuggagaaagu

SEQ ID NO: 1281060 - RNA, 19 nt, Homo sapiens
  misc_RNA (1)...(19): siRNA sense strand
gauaucuguguucaucuaa

SEQ ID NO: 1281061 - RNA, 19 nt, Homo sapiens
  misc_RNA (1)...(19): siRNA sense strand
cagcaaauguaugccaaca

SEQ ID NO: 1281062 - RNA, 19 nt, Homo sapiens
  misc_RNA (1)...(19): siRNA sense strand
ugucuuguuuaccuuauga

SEQ ID NO: 1281063 - RNA, 19 nt, Homo sapiens
  misc_RNA (1)...(19): siRNA sense strand
caaagacgccaccacacau

SEQ ID NO: 1281064 - RNA, 19 nt, Homo sapiens
  misc_RNA (1)...(19): siRNA sense strand
uguaaacucucuggauauc

SEQ ID NO: 1281065 - RNA, 19 nt, Homo sapiens
  misc_RNA (1)...(19): siRNA sense strand
uaaugaacauccugcuuuu

SEQ ID NO: 1281066 - RNA, 19 nt, Homo sapiens
  misc_RNA (1)...(19): siRNA sense strand
gagagcugauaucuguguu

SEQ ID NO: 1281067 - RNA, 19 nt, Homo sapiens
  misc_RNA (1)...(19): siRNA sense strand
ugaauaauguacgggacuu

SEQ ID NO: 1281068 - RNA, 19 nt, Homo sapiens
  misc_RNA (1)...(19): siRNA sense strand
augagaugcugaauaaugu

SEQ ID NO: 1281069 - RNA, 19 nt, Homo sapiens
  misc_RNA (1)...(19): siRNA sense strand
ucucucuacuuuaccauga

SEQ ID NO: 1281070 - RNA, 19 nt, Homo sapiens
  misc_RNA (1)...(19): siRNA sense strand
aaacagaggugguccauaa

SEQ ID NO: 1281071 - RNA, 19 nt, Homo sapiens
  misc_RNA (1)...(19): siRNA sense strand
cuaggaaacuggaccauua

SEQ ID NO: 1281072 - RNA, 19 nt, Homo sapiens
  misc_RNA (1)...(19): siRNA sense strand
acaaauagccgaaguguuu

SEQ ID NO: 1281073 - RNA, 19 nt, Homo sapiens
  misc_RNA (1)...(19): siRNA sense strand
caugagagcugauaucugu

SEQ ID NO: 1281074 - RNA, 19 nt, Homo sapiens
  misc_RNA (1)...(19): siRNA sense strand
ggaauugacugacaagaag

SEQ ID NO: 1281075 - RNA, 19 nt, Homo sapiens
  misc_RNA (1)...(19): siRNA sense strand
cauaggauuuggaaacaua

SEQ ID NO: 1281076 - RNA, 19 nt, Homo sapiens
  misc_RNA (1)...(19): siRNA sense strand
ggacgaaauuugcccgauu

SEQ ID NO: 1281077 - RNA, 19 nt, Homo sapiens
  misc_RNA (1)...(19): siRNA sense strand
ggauuggccuguaguuuau

SEQ ID NO: 1281078 - RNA, 19 nt, Homo sapiens
  misc_RNA (1)...(19): siRNA sense strand
guggagaggucauuucuga

SEQ ID NO: 1281079 - RNA, 19 nt, Homo sapiens
  misc_RNA (1)...(19): siRNA sense strand
ccauaaacauucaagacua

SEQ ID NO: 1281080 - RNA, 19 nt, Homo sapiens
  misc_RNA (1)...(19): siRNA sense strand
gagcugacgucaugcagaa

SEQ ID NO: 1281081 - RNA, 19 nt, Homo sapiens
  misc_RNA (1)...(19): siRNA sense strand
ucaaggauauuacguuguu

SEQ ID NO: 1281082 - RNA, 19 nt, Homo sapiens
  misc_RNA (1)...(19): siRNA sense strand
gaaacuggaccauuaccua

SEQ ID NO: 1281083 - RNA, 19 nt, Homo sapiens
  misc_RNA (1)...(19): siRNA sense strand
gauauuacguuguucaaac

SEQ ID NO: 1281084 - RNA, 19 nt, Homo sapiens
  misc_RNA (1)...(19): siRNA sense strand
gaaauuugcccgauugaca

SEQ ID NO: 1281085 - RNA, 19 nt, Homo sapiens
  misc_RNA (1)...(19): siRNA sense strand
accaugagaugcugaauaa

SEQ ID NO: 1281086 - RNA, 19 nt, Homo sapiens
  misc_RNA (1)...(19): siRNA sense strand
caagaagaccauugagaaa

SEQ ID NO: 1281087 - RNA, 19 nt, Homo sapiens
  misc_RNA (1)...(19): siRNA sense strand
aaacaaagcagaacaacau

SEQ ID NO: 1281088 - RNA, 19 nt, Homo sapiens
  misc_RNA (1)...(19): siRNA sense strand
cagauauccuuccucagua

SEQ ID NO: 1281089 - RNA, 19 nt, Homo sapiens
  misc_RNA (1)...(19): siRNA sense strand
gacgaaauuugcccgauug

SEQ ID NO: 1281090 - RNA, 19 nt, Homo sapiens
  misc_RNA (1)...(19): siRNA sense strand
cagcaaggauucauuguac

SEQ ID NO: 1281091 - RNA, 19 nt, Homo sapiens
  misc_RNA (1)...(19): siRNA sense strand
gcugauaucuguguucauc

SEQ ID NO: 1281092 - RNA, 19 nt, Homo sapiens
  misc_RNA (1)...(19): siRNA sense strand
gugagcgagucauggauua

SEQ ID NO: 1281093 - RNA, 19 nt, Homo sapiens
  misc_RNA (1)...(19): siRNA sense strand
ggaaucagcagucucuuca

SEQ ID NO: 1281094 - RNA, 19 nt, Homo sapiens
  misc_RNA (1)...(19): siRNA sense strand
ugacaagccuuacaaccau

SEQ ID NO: 1281095 - RNA, 19 nt, Homo sapiens
  misc_RNA (1)...(19): siRNA sense strand
gacaagccuuacaaccaua

SEQ ID NO: 1281096 - RNA, 19 nt, Homo sapiens
  misc_RNA (1)...(19): siRNA sense strand
gaucugcugucuuguuuac

SEQ ID NO: 1281097 - RNA, 19 nt, Homo sapiens
  misc_RNA (1)...(19): siRNA sense strand
uuuguaaacucucuggaua

SEQ ID NO: 1281098 - RNA, 19 nt, Homo sapiens
  misc_RNA (1)...(19): siRNA sense strand
uggauuggccuguaguuua

SEQ ID NO: 1281099 - RNA, 19 nt, Homo sapiens
  misc_RNA (1)...(19): siRNA sense strand
gagcugauaucuguguuca

SEQ ID NO: 1281100 - RNA, 19 nt, Homo sapiens
  misc_RNA (1)...(19): siRNA sense strand
cauaaacauucaagacuag

SEQ ID NO: 1281101 - RNA, 19 nt, Homo sapiens
  misc_RNA (1)...(19): siRNA sense strand
ugauaucuguguucaucua

SEQ ID NO: 1281102 - RNA, 19 nt, Homo sapiens
  misc_RNA (1)...(19): siRNA sense strand
gguuggcucucuucuuuau

SEQ ID NO: 1281103 - RNA, 19 nt, Homo sapiens
  misc_RNA (1)...(19): siRNA sense strand
ggccuguaguuuauaguaa

SEQ ID NO: 1281104 - RNA, 19 nt, Homo sapiens
  misc_RNA (1)...(19): siRNA sense strand
acaagaagaccauugagaa

SEQ ID NO: 1281105 - RNA, 19 nt, Homo sapiens
  misc_RNA (1)...(19): siRNA sense strand
gggaauugacugacaagaa

SEQ ID NO: 1281106 - RNA, 19 nt, Homo sapiens
  misc_RNA (1)...(19): siRNA sense strand
caaaaggcauugauacaga

SEQ ID NO: 1281107 - RNA, 19 nt, Homo sapiens
  misc_RNA (1)...(19): siRNA sense strand
gagcgagucauggauuaua

SEQ ID NO: 1281108 - RNA, 19 nt, Homo sapiens
  misc_RNA (1)...(19): siRNA sense strand
caugagaugcugaauaaug

SEQ ID NO: 1281109 - RNA, 19 nt, Homo sapiens
  misc_RNA (1)...(19): siRNA sense strand
uaaacucucuggauaucau

SEQ ID NO: 1281110 - RNA, 19 nt, Homo sapiens
  misc_RNA (1)...(19): siRNA sense strand
ugaucgaucugcugucuug

SEQ ID NO: 1281111 - RNA, 19 nt, Homo sapiens
  misc_RNA (1)...(19): siRNA sense strand
ucaucgagcugacgucaug

SEQ ID NO: 1281112 - RNA, 19 nt, Homo sapiens
  misc_RNA (1)...(19): siRNA sense strand
gaugaugguuggcucucuu

SEQ ID NO: 1281113 - RNA, 19 nt, Homo sapiens
  misc_RNA (1)...(19): siRNA sense strand
uuaaugaacauccugcuuu

SEQ ID NO: 1281114 - RNA, 19 nt, Homo sapiens
  misc_RNA (1)...(19): siRNA sense strand
ugaacuaucugaaaacuug

SEQ ID NO: 1281115 - RNA, 19 nt, Homo sapiens
  misc_RNA (1)...(19): siRNA sense strand
gacaagaagaccauugaga

SEQ ID NO: 1281116 - RNA, 19 nt, Homo sapiens
  misc_RNA (1)...(19): siRNA sense strand
caaccgauaccaugagaug

SEQ ID NO: 1281117 - RNA, 19 nt, Homo sapiens
  misc_RNA (1)...(19): siRNA sense strand
ggaccauuaccuagaauau

SEQ ID NO: 1281118 - RNA, 19 nt, Homo sapiens
  misc_RNA (1)...(19): siRNA sense strand
ucgaucugcugucuuguuu

SEQ ID NO: 1281119 - RNA, 19 nt, Homo sapiens
  misc_RNA (1)...(19): siRNA sense strand
cagcagcucacgccaauga

SEQ ID NO: 1281120 - RNA, 19 nt, Homo sapiens
  misc_RNA (1)...(19): siRNA sense strand
agaagaccauugagaaagu

SEQ ID NO: 1281121 - RNA, 19 nt, Homo sapiens
  misc_RNA (1)...(19): siRNA sense strand
gccaauagaggaugauuca

SEQ ID NO: 1281122 - RNA, 19 nt, Homo sapiens
  misc_RNA (1)...(19): siRNA sense strand
cguguccucucucuacuuu

SEQ ID NO: 1281123 - RNA, 19 nt, Homo sapiens
  misc_RNA (1)...(19): siRNA sense strand
ccauaucgcuacaauacca

SEQ ID NO: 1281124 - RNA, 19 nt, Homo sapiens
  misc_RNA (1)...(19): siRNA sense strand
ucagauauccuuccucagu

SEQ ID NO: 1281125 - RNA, 19 nt, Homo sapiens
  misc_RNA (1)...(19): siRNA sense strand
gaggugguccauaaacauu

SEQ ID NO: 1281126 - RNA, 19 nt, Homo sapiens
  misc_RNA (1)...(19): siRNA sense strand
cagcucacgccaaugaaua

SEQ ID NO: 1281127 - RNA, 19 nt, Homo sapiens
  misc_RNA (1)...(19): siRNA sense strand
aauagaggaugauucaaca

SEQ ID NO: 1281128 - RNA, 19 nt, Homo sapiens
  misc_RNA (1)...(19): siRNA sense strand
ggacaugagagcugauauc

SEQ ID NO: 1281129 - RNA, 19 nt, Homo sapiens
  misc_RNA (1)...(19): siRNA sense strand
gguauagcaucggagacua

SEQ ID NO: 1281130 - RNA, 19 nt, Homo sapiens
  misc_RNA (1)...(19): siRNA sense strand
gaagaccauugagaaaguc

SEQ ID NO: 1281131 - RNA, 19 nt, Homo sapiens
  misc_RNA (1)...(19): siRNA sense strand
uauauugucucaacauggu

SEQ ID NO: 1281132 - RNA, 19 nt, Homo sapiens
  misc_RNA (1)...(19): siRNA sense strand
augguuggcucucuucuuu

SEQ ID NO: 1281133 - RNA, 19 nt, Homo sapiens
  misc_RNA (1)...(19): siRNA sense strand
gauuguggauuggccugua

SEQ ID NO: 1281134 - RNA, 19 nt, Homo sapiens
  misc_RNA (1)...(19): siRNA sense strand
ccagcaaggauucauugua

SEQ ID NO: 1281135 - RNA, 19 nt, Homo sapiens
  misc_RNA (1)...(19): siRNA sense strand
ucacuaacaccauccaaau

SEQ ID NO: 1281136 - RNA, 19 nt, Homo sapiens
  misc_RNA (1)...(19): siRNA sense strand
ucagcagucucuucaguuc

SEQ ID NO: 1281137 - RNA, 19 nt, Homo sapiens
  misc_RNA (1)...(19): siRNA sense strand
aaacaagaagcgccaaaga

SEQ ID NO: 1281138 - RNA, 19 nt, Homo sapiens
  misc_RNA (1)...(19): siRNA sense strand
cuacgaaucaaacugcuuu

SEQ ID NO: 1281139 - RNA, 19 nt, Homo sapiens
  misc_RNA (1)...(19): siRNA sense strand
cagcuggcuuugagcauug

SEQ ID NO: 1281140 - RNA, 19 nt, Homo sapiens
  misc_RNA (1)...(19): siRNA sense strand
ccagcuggcuuugagcauu

SEQ ID NO: 1281141 - RNA, 19 nt, Homo sapiens
  misc_RNA (1)...(19): siRNA sense strand
cuaacaccauccaaauaga

SEQ ID NO: 1281142 - RNA, 19 nt, Homo sapiens
  misc_RNA (1)...(19): siRNA sense strand
ccaaagacgccaccacaca

SEQ ID NO: 1281143 - RNA, 19 nt, Homo sapiens
  misc_RNA (1)...(19): siRNA sense strand
cagaggugguccauaaaca

SEQ ID NO: 1281144 - RNA, 19 nt, Homo sapiens
  misc_RNA (1)...(19): siRNA sense strand
gaaaugaacaugaaaaggu

SEQ ID NO: 1281145 - RNA, 19 nt, Homo sapiens
  misc_RNA (1)...(19): siRNA sense strand
gagacuacgaggucauuga

SEQ ID NO: 1281146 - RNA, 19 nt, Homo sapiens
  misc_RNA (1)...(19): siRNA sense strand
ggaggacccagcaaggauu

SEQ ID NO: 1281147 - RNA, 19 nt, Homo sapiens
  misc_RNA (1)...(19): siRNA sense strand
gauauccuuccucaguaua

SEQ ID NO: 1281148 - RNA, 19 nt, Homo sapiens
  misc_RNA (1)...(19): siRNA sense strand
gaugaggugguggcuauuu

SEQ ID NO: 1281149 - RNA, 19 nt, Homo sapiens
  misc_RNA (1)...(19): siRNA sense strand
guacguguccucucucuac

SEQ ID NO: 1281150 - RNA, 19 nt, Homo sapiens
  misc_RNA (1)...(19): siRNA sense strand
gauagugugguggacguua

SEQ ID NO: 1281151 - RNA, 19 nt, Homo sapiens
  misc_RNA (1)...(19): siRNA sense strand
acccuaagcucauaaggau

SEQ ID NO: 1281152 - RNA, 19 nt, Homo sapiens
  misc_RNA (1)...(19): siRNA sense strand
uagaggaugauucaacaaa

SEQ ID NO: 1281153 - RNA, 19 nt, Homo sapiens
  misc_RNA (1)...(19): siRNA sense strand
gaaaagguccucuccaucu

SEQ ID NO: 1281154 - RNA, 19 nt, Homo sapiens
  misc_RNA (1)...(19): siRNA sense strand
agucauggauuauauuguc

SEQ ID NO: 1281155 - RNA, 19 nt, Homo sapiens
  misc_RNA (1)...(19): siRNA sense strand
ggaaacauagcuccuacca

SEQ ID NO: 1281156 - RNA, 19 nt, Homo sapiens
  misc_RNA (1)...(19): siRNA sense strand
cacuaacaccauccaaaua

SEQ ID NO: 1281157 - RNA, 19 nt, Homo sapiens
  misc_RNA (1)...(19): siRNA sense strand
ggugguccauaaacauuca

SEQ ID NO: 1281158 - RNA, 19 nt, Homo sapiens
  misc_RNA (1)...(19): siRNA sense strand
ggauauuacguuguucaaa

SEQ ID NO: 1281159 - RNA, 19 nt, Homo sapiens
  misc_RNA (1)...(19): siRNA sense strand
uuaccaugcuggagaaagu

SEQ ID NO: 1281160 - RNA, 19 nt, Homo sapiens
  misc_RNA (1)...(19): siRNA sense strand
gauaucuguguucaucuaa

SEQ ID NO: 1281161 - RNA, 19 nt, Homo sapiens
  misc_RNA (1)...(19): siRNA sense strand
cagcaaauguaugccaaca

SEQ ID NO: 1281162 - RNA, 19 nt, Homo sapiens
  misc_RNA (1)...(19): siRNA sense strand
ugucuuguuuaccuuauga

SEQ ID NO: 1281163 - RNA, 19 nt, Homo sapiens
  misc_RNA (1)...(19): siRNA sense strand
caaagacgccaccacacau

SEQ ID NO: 1281164 - RNA, 19 nt, Homo sapiens
  misc_RNA (1)...(19): siRNA sense strand
uguaaacucucuggauauc

SEQ ID NO: 1281165 - RNA, 19 nt, Homo sapiens
  misc_RNA (1)...(19): siRNA sense strand
uaaugaacauccugcuuuu

SEQ ID NO: 1281166 - RNA, 19 nt, Homo sapiens
  misc_RNA (1)...(19): siRNA sense strand
gagagcugauaucuguguu

SEQ ID NO: 1281167 - RNA, 19 nt, Homo sapiens
  misc_RNA (1)...(19): siRNA sense strand
ugaauaauguacgggacuu

SEQ ID NO: 1281168 - RNA, 19 nt, Homo sapiens
  misc_RNA (1)...(19): siRNA sense strand
augagaugcugaauaaugu

SEQ ID NO: 1281169 - RNA, 19 nt, Homo sapiens
  misc_RNA (1)...(19): siRNA sense strand
ucucucuacuuuaccauga

SEQ ID NO: 1281170 - RNA, 19 nt, Homo sapiens
  misc_RNA (1)...(19): siRNA sense strand
aaacagaggugguccauaa

SEQ ID NO: 1281171 - RNA, 19 nt, Homo sapiens
  misc_RNA (1)...(19): siRNA sense strand
cuaggaaacuggaccauua

SEQ ID NO: 1281172 - RNA, 19 nt, Homo sapiens
  misc_RNA (1)...(19): siRNA sense strand
acaaauagccgaaguguuu

SEQ ID NO: 1281173 - RNA, 19 nt, Homo sapiens
  misc_RNA (1)...(19): siRNA sense strand
caugagagcugauaucugu

SEQ ID NO: 1281174 - RNA, 19 nt, Homo sapiens
  misc_RNA (1)...(19): siRNA sense strand
ggaauugacugacaagaag

SEQ ID NO: 1281175 - RNA, 19 nt, Homo sapiens
  misc_RNA (1)...(19): siRNA sense strand
cauaggauuuggaaacaua

SEQ ID NO: 1281176 - RNA, 19 nt, Homo sapiens
  misc_RNA (1)...(19): siRNA sense strand
ggacgaaauuugcccgauu

SEQ ID NO: 1281177 - RNA, 19 nt, Homo sapiens
  misc_RNA (1)...(19): siRNA sense strand
ccauaaacauucaagacua

SEQ ID NO: 1281178 - RNA, 19 nt, Homo sapiens
  misc_RNA (1)...(19): siRNA sense strand
guggagaggucauuucuga

SEQ ID NO: 1281179 - RNA, 19 nt, Homo sapiens
  misc_RNA (1)...(19): siRNA sense strand
ucaaggauauuacguuguu

SEQ ID NO: 1281180 - RNA, 19 nt, Homo sapiens
  misc_RNA (1)...(19): siRNA sense strand
gaaacuggaccauuaccua

SEQ ID NO: 1281181 - RNA, 19 nt, Homo sapiens
  misc_RNA (1)...(19): siRNA sense strand
gauauuacguuguucaaac

SEQ ID NO: 1281182 - RNA, 19 nt, Homo sapiens
  misc_RNA (1)...(19): siRNA sense strand
gaaauuugcccgauugaca

SEQ ID NO: 1281183 - RNA, 19 nt, Homo sapiens
  misc_RNA (1)...(19): siRNA sense strand
accaugagaugcugaauaa

SEQ ID NO: 1281184 - RNA, 19 nt, Homo sapiens
  misc_RNA (1)...(19): siRNA sense strand
caagaagaccauugagaaa

SEQ ID NO: 1281185 - RNA, 19 nt, Homo sapiens
  misc_RNA (1)...(19): siRNA sense strand
aaacaaagcagaacaacau

SEQ ID NO: 1281186 - RNA, 19 nt, Homo sapiens
  misc_RNA (1)...(19): siRNA sense strand
cagauauccuuccucagua

SEQ ID NO: 1281187 - RNA, 19 nt, Homo sapiens
  misc_RNA (1)...(19): siRNA sense strand
gacgaaauuugcccgauug

SEQ ID NO: 1281188 - RNA, 19 nt, Homo sapiens
  misc_RNA (1)...(19): siRNA sense strand
cagcaaggauucauuguac

SEQ ID NO: 1281189 - RNA, 19 nt, Homo sapiens
  misc_RNA (1)...(19): siRNA sense strand
gcugauaucuguguucauc

SEQ ID NO: 1281190 - RNA, 19 nt, Homo sapiens
  misc_RNA (1)...(19): siRNA sense strand
gugagcgagucauggauua

SEQ ID NO: 1281191 - RNA, 19 nt, Homo sapiens
  misc_RNA (1)...(19): siRNA sense strand
ggaaucagcagucucuuca

SEQ ID NO: 1281192 - RNA, 19 nt, Homo sapiens
  misc_RNA (1)...(19): siRNA sense strand
ugacaagccuuacaaccau

SEQ ID NO: 1281193 - RNA, 19 nt, Homo sapiens
  misc_RNA (1)...(19): siRNA sense strand
gacaagccuuacaaccaua

SEQ ID NO: 1281194 - RNA, 19 nt, Homo sapiens
  misc_RNA (1)...(19): siRNA sense strand
gaucugcugucuuguuuac

SEQ ID NO: 1281195 - RNA, 19 nt, Homo sapiens
  misc_RNA (1)...(19): siRNA sense strand
gagcugauaucuguguuca

SEQ ID NO: 1281196 - RNA, 19 nt, Homo sapiens
  misc_RNA (1)...(19): siRNA sense strand
cauaaacauucaagacuag

SEQ ID NO: 1281197 - RNA, 19 nt, Homo sapiens
  misc_RNA (1)...(19): siRNA sense strand
ugauaucuguguucaucua

SEQ ID NO: 1281198 - RNA, 19 nt, Homo sapiens
  misc_RNA (1)...(19): siRNA sense strand
gguuggcucucuucuuuau

SEQ ID NO: 1281199 - RNA, 19 nt, Homo sapiens
  misc_RNA (1)...(19): siRNA sense strand
acaagaagaccauugagaa

SEQ ID NO: 1281200 - RNA, 19 nt, Homo sapiens
  misc_RNA (1)...(19): siRNA sense strand
ugaucgaucugcugucuug

SEQ ID NO: 1281201 - RNA, 19 nt, Homo sapiens
  misc_RNA (1)...(19): siRNA sense strand
caaaaggcauugauacaga

SEQ ID NO: 1281202 - RNA, 19 nt, Homo sapiens
  misc_RNA (1)...(19): siRNA sense strand
gagcgagucauggauuaua

SEQ ID NO: 1281203 - RNA, 19 nt, Homo sapiens
  misc_RNA (1)...(19): siRNA sense strand
caugagaugcugaauaaug

SEQ ID NO: 1281204 - RNA, 19 nt, Homo sapiens
  misc_RNA (1)...(19): siRNA sense strand
gggaauugacugacaagaa

SEQ ID NO: 1281205 - RNA, 19 nt, Homo sapiens
  misc_RNA (1)...(19): siRNA sense strand
gaugaugguuggcucucuu

SEQ ID NO: 1281206 - RNA, 19 nt, Homo sapiens
  misc_RNA (1)...(19): siRNA sense strand
uuaaugaacauccugcuuu

SEQ ID NO: 1281207 - RNA, 19 nt, Homo sapiens
  misc_RNA (1)...(19): siRNA sense strand
ugaacuaucugaaaacuug

SEQ ID NO: 1281208 - RNA, 19 nt, Homo sapiens
  misc_RNA (1)...(19): siRNA sense strand
cagcagcucacgccaauga

SEQ ID NO: 1281209 - RNA, 19 nt, Homo sapiens
  misc_RNA (1)...(19): siRNA sense strand
gacaagaagaccauugaga

SEQ ID NO: 1281210 - RNA, 19 nt, Homo sapiens
  misc_RNA (1)...(19): siRNA sense strand
caaccgauaccaugagaug

SEQ ID NO: 1281211 - RNA, 19 nt, Homo sapiens
  misc_RNA (1)...(19): siRNA sense strand
agaagaccauugagaaagu

SEQ ID NO: 1281212 - RNA, 19 nt, Homo sapiens
  misc_RNA (1)...(19): siRNA sense strand
ggaccauuaccuagaauau

SEQ ID NO: 1281213 - RNA, 19 nt, Homo sapiens
  misc_RNA (1)...(19): siRNA sense strand
ucgaucugcugucuuguuu

SEQ ID NO: 1281214 - RNA, 19 nt, Homo sapiens
  misc_RNA (1)...(19): siRNA sense strand
gccaauagaggaugauuca

SEQ ID NO: 1281215 - RNA, 19 nt, Homo sapiens
  misc_RNA (1)...(19): siRNA sense strand
cguguccucucucuacuuu

SEQ ID NO: 1281216 - RNA, 19 nt, Homo sapiens
  misc_RNA (1)...(19): siRNA sense strand
ccauaucgcuacaauacca

SEQ ID NO: 1281217 - RNA, 19 nt, Homo sapiens
  misc_RNA (1)...(19): siRNA sense strand
ucagauauccuuccucagu

SEQ ID NO: 1281218 - RNA, 19 nt, Homo sapiens
  misc_RNA (1)...(19): siRNA sense strand
gaggugguccauaaacauu

SEQ ID NO: 1281219 - RNA, 19 nt, Homo sapiens
  misc_RNA (1)...(19): siRNA sense strand
cagcucacgccaaugaaua

SEQ ID NO: 1281220 - RNA, 19 nt, Homo sapiens
  misc_RNA (1)...(19): siRNA sense strand
aauagaggaugauucaaca

SEQ ID NO: 1281221 - RNA, 19 nt, Homo sapiens
  misc_RNA (1)...(19): siRNA sense strand
ggacaugagagcugauauc

SEQ ID NO: 1281222 - RNA, 19 nt, Homo sapiens
  misc_RNA (1)...(19): siRNA sense strand
gguauagcaucggagacua

SEQ ID NO: 1281223 - RNA, 19 nt, Homo sapiens
  misc_RNA (1)...(19): siRNA sense strand
aaacaagaagcgccaaaga

SEQ ID NO: 1281224 - RNA, 19 nt, Homo sapiens
  misc_RNA (1)...(19): siRNA sense strand
uauauugucucaacauggu

SEQ ID NO: 1281225 - RNA, 19 nt, Homo sapiens
  misc_RNA (1)...(19): siRNA sense strand
augguuggcucucuucuuu

SEQ ID NO: 1281226 - RNA, 19 nt, Homo sapiens
  misc_RNA (1)...(19): siRNA sense strand
ccagcaaggauucauugua

SEQ ID NO: 1281227 - RNA, 19 nt, Homo sapiens
  misc_RNA (1)...(19): siRNA sense strand
ucacuaacaccauccaaau

SEQ ID NO: 1281228 - RNA, 19 nt, Homo sapiens
  misc_RNA (1)...(19): siRNA sense strand
ucagcagucucuucaguuc

SEQ ID NO: 1281229 - RNA, 19 nt, Homo sapiens
  misc_RNA (1)...(19): siRNA sense strand
gaagaccauugagaaaguc

SEQ ID NO: 1281230 - RNA, 19 nt, Homo sapiens
  misc_RNA (1)...(19): siRNA sense strand
cagaggugguccauaaaca

SEQ ID NO: 1281231 - RNA, 19 nt, Homo sapiens
  misc_RNA (1)...(19): siRNA sense strand
cagcuggcuuugagcauug

SEQ ID NO: 1281232 - RNA, 19 nt, Homo sapiens
  misc_RNA (1)...(19): siRNA sense strand
ccagcuggcuuugagcauu

SEQ ID NO: 1281233 - RNA, 19 nt, Homo sapiens
  misc_RNA (1)...(19): siRNA sense strand
cuaacaccauccaaauaga

SEQ ID NO: 1281234 - RNA, 19 nt, Homo sapiens
  misc_RNA (1)...(19): siRNA sense strand
cuacgaaucaaacugcuuu

SEQ ID NO: 1281235 - RNA, 19 nt, Homo sapiens
  misc_RNA (1)...(19): siRNA sense strand
gaaaugaacaugaaaaggu

SEQ ID NO: 1281236 - RNA, 19 nt, Homo sapiens
  misc_RNA (1)...(19): siRNA sense strand
ccaaagacgccaccacaca

SEQ ID NO: 1281237 - RNA, 19 nt, Homo sapiens
  misc_RNA (1)...(19): siRNA sense strand
gagacuacgaggucauuga

SEQ ID NO: 1281238 - RNA, 19 nt, Homo sapiens
  misc_RNA (1)...(19): siRNA sense strand
ggaggacccagcaaggauu

SEQ ID NO: 1281239 - RNA, 19 nt, Homo sapiens
  misc_RNA (1)...(19): siRNA sense strand
gauauccuuccucaguaua

SEQ ID NO: 1281240 - RNA, 19 nt, Homo sapiens
  misc_RNA (1)...(19): siRNA sense strand
gaugaggugguggcuauuu

SEQ ID NO: 1281241 - RNA, 19 nt, Homo sapiens
  misc_RNA (1)...(19): siRNA sense strand
guacguguccucucucuac

SEQ ID NO: 1281242 - RNA, 19 nt, Homo sapiens
  misc_RNA (1)...(19): siRNA sense strand
gauagugugguggacguua

SEQ ID NO: 1281243 - RNA, 19 nt, Homo sapiens
  misc_RNA (1)...(19): siRNA sense strand
acccuaagcucauaaggau

SEQ ID NO: 1281244 - RNA, 19 nt, Homo sapiens
  misc_RNA (1)...(19): siRNA sense strand
uagaggaugauucaacaaa

SEQ ID NO: 1281245 - RNA, 19 nt, Homo sapiens
  misc_RNA (1)...(19): siRNA sense strand
gaaaagguccucuccaucu

SEQ ID NO: 1281246 - RNA, 19 nt, Homo sapiens
  misc_RNA (1)...(19): siRNA sense strand
agucauggauuauauuguc

SEQ ID NO: 1281247 - RNA, 19 nt, Homo sapiens
  misc_RNA (1)...(19): siRNA sense strand
ggaaacauagcuccuacca

SEQ ID NO: 1281248 - RNA, 19 nt, Homo sapiens
  misc_RNA (1)...(19): siRNA sense strand
cacuaacaccauccaaaua

SEQ ID NO: 1281249 - RNA, 19 nt, Homo sapiens
  misc_RNA (1)...(19): siRNA sense strand
ggugguccauaaacauuca

SEQ ID NO: 1281250 - RNA, 19 nt, Homo sapiens
  misc_RNA (1)...(19): siRNA sense strand
ggauauuacguuguucaaa

SEQ ID NO: 1281251 - RNA, 19 nt, Homo sapiens
  misc_RNA (1)...(19): siRNA sense strand
uuaccaugcuggagaaagu

SEQ ID NO: 1281252 - RNA, 19 nt, Homo sapiens
  misc_RNA (1)...(19): siRNA sense strand
gauaucuguguucaucuaa

SEQ ID NO: 1281253 - RNA, 19 nt, Homo sapiens
  misc_RNA (1)...(19): siRNA sense strand
cagcaaauguaugccaaca

SEQ ID NO: 1281254 - RNA, 19 nt, Homo sapiens
  misc_RNA (1)...(19): siRNA sense strand
ugucuuguuuaccuuauga

SEQ ID NO: 1281255 - RNA, 19 nt, Homo sapiens
  misc_RNA (1)...(19): siRNA sense strand
caaagacgccaccacacau

SEQ ID NO: 1281256 - RNA, 19 nt, Homo sapiens
  misc_RNA (1)...(19): siRNA sense strand
caauagaggaugauucaac

SEQ ID NO: 1281257 - RNA, 19 nt, Homo sapiens
  misc_RNA (1)...(19): siRNA sense strand
uaaugaacauccugcuuuu

SEQ ID NO: 1281258 - RNA, 19 nt, Homo sapiens
  misc_RNA (1)...(19): siRNA sense strand
gagagcugauaucuguguu

SEQ ID NO: 1281259 - RNA, 19 nt, Homo sapiens
  misc_RNA (1)...(19): siRNA sense strand
ugaauaauguacgggacuu

SEQ ID NO: 1281260 - RNA, 19 nt, Homo sapiens
  misc_RNA (1)...(19): siRNA sense strand
augagaugcugaauaaugu

SEQ ID NO: 1281261 - RNA, 19 nt, Homo sapiens
  misc_RNA (1)...(19): siRNA sense strand
ucucucuacuuuaccauga

SEQ ID NO: 1281262 - RNA, 19 nt, Homo sapiens
  misc_RNA (1)...(19): siRNA sense strand
gcagucucuucaguucuuu

SEQ ID NO: 1281263 - RNA, 19 nt, Homo sapiens
  misc_RNA (1)...(19): siRNA sense strand
aaucagcagucucuucagu

SEQ ID NO: 1281264 - RNA, 19 nt, Homo sapiens
  misc_RNA (1)...(19): siRNA sense strand
agauauccuuccucaguau

SEQ ID NO: 1281265 - RNA, 19 nt, Homo sapiens
  misc_RNA (1)...(19): siRNA sense strand
guagaguuccaaaccauuc

SEQ ID NO: 1281266 - RNA, 19 nt, Homo sapiens
  misc_RNA (1)...(19): siRNA sense strand
ggauuauauugucucaaca

SEQ ID NO: 1281267 - RNA, 19 nt, Homo sapiens
  misc_RNA (1)...(19): siRNA sense strand
uggauuauauugucucaac

SEQ ID NO: 1281268 - RNA, 19 nt, Homo sapiens
  misc_RNA (1)...(19): siRNA sense strand
gacccuaagcucauaagga

SEQ ID NO: 1281269 - RNA, 19 nt, Homo sapiens
  misc_RNA (1)...(19): siRNA sense strand
gggauugggugauuuuaau

SEQ ID NO: 1281270 - RNA, 19 nt, Homo sapiens
  misc_RNA (1)...(19): siRNA sense strand
gaacauagcuauagaagug

SEQ ID NO: 1281271 - RNA, 19 nt, Homo sapiens
  misc_RNA (1)...(19): siRNA sense strand
gaaaugaacugcaggaaga

SEQ ID NO: 1281272 - RNA, 19 nt, Homo sapiens
  misc_RNA (1)...(19): siRNA sense strand
ggaagaaacuaaugagaaa

SEQ ID NO: 1281273 - RNA, 19 nt, Homo sapiens
  misc_RNA (1)...(19): siRNA sense strand
gaaggaauaugcaggcaaa

SEQ ID NO: 1281274 - RNA, 19 nt, Homo sapiens
  misc_RNA (1)...(19): siRNA sense strand
gacaauacauuacgucauu

SEQ ID NO: 1281275 - RNA, 19 nt, Homo sapiens
  misc_RNA (1)...(19): siRNA sense strand
gggcauaggcuaccauuua

SEQ ID NO: 1281276 - RNA, 19 nt, Homo sapiens
  misc_RNA (1)...(19): siRNA sense strand
gaaaucagacagaguaauu

SEQ ID NO: 1281277 - RNA, 19 nt, Homo sapiens
  misc_RNA (1)...(19): siRNA sense strand
ggaaaggacaaacaaauuu

SEQ ID NO: 1281278 - RNA, 19 nt, Homo sapiens
  misc_RNA (1)...(19): siRNA sense strand
gagaaaggauccuguguuc

SEQ ID NO: 1281279 - RNA, 19 nt, Homo sapiens
  misc_RNA (1)...(19): siRNA sense strand
aagaauggcugauauagaa

SEQ ID NO: 1281280 - RNA, 19 nt, Homo sapiens
  misc_RNA (1)...(19): siRNA sense strand
gcagagauccugaggcuuu

SEQ ID NO: 1281281 - RNA, 19 nt, Homo sapiens
  misc_RNA (1)...(19): siRNA sense strand
gaugauaacuggagacaca

SEQ ID NO: 1281282 - RNA, 19 nt, Homo sapiens
  misc_RNA (1)...(19): siRNA sense strand
gaaagaagccaucagaauc

SEQ ID NO: 1281283 - RNA, 19 nt, Homo sapiens
  misc_RNA (1)...(19): siRNA sense strand
gauccuguguucagaauuu

SEQ ID NO: 1281284 - RNA, 19 nt, Homo sapiens
  misc_RNA (1)...(19): siRNA sense strand
gcagugagagucaucuuua

SEQ ID NO: 1281285 - RNA, 19 nt, Homo sapiens
  misc_RNA (1)...(19): siRNA sense strand
gaaagaaugagaacaguga

SEQ ID NO: 1281286 - RNA, 19 nt, Homo sapiens
  misc_RNA (1)...(19): siRNA sense strand
gcucuucucuguuccuuaa

SEQ ID NO: 1281287 - RNA, 19 nt, Homo sapiens
  misc_RNA (1)...(19): siRNA sense strand
gaaggaaaaucaacuauug

SEQ ID NO: 1281288 - RNA, 19 nt, Homo sapiens
  misc_RNA (1)...(19): siRNA sense strand
caaauccuguguaguauug

SEQ ID NO: 1281289 - RNA, 19 nt, Homo sapiens
  misc_RNA (1)...(19): siRNA sense strand
agagucaucuuuacugaua

SEQ ID NO: 1281290 - RNA, 19 nt, Homo sapiens
  misc_RNA (1)...(19): siRNA sense strand
ggaggaagauauccagaug

SEQ ID NO: 1281291 - RNA, 19 nt, Homo sapiens
  misc_RNA (1)...(19): siRNA sense strand
gcacccaguuuauagauga

SEQ ID NO: 1281292 - RNA, 19 nt, Homo sapiens
  misc_RNA (1)...(19): siRNA sense strand
cauuaaugcugcuaucaua

SEQ ID NO: 1281293 - RNA, 19 nt, Homo sapiens
  misc_RNA (1)...(19): siRNA sense strand
gcuaauaccuuaccuucau

SEQ ID NO: 1281294 - RNA, 19 nt, Homo sapiens
  misc_RNA (1)...(19): siRNA sense strand
ggaaagaagccaucagaau

SEQ ID NO: 1281295 - RNA, 19 nt, Homo sapiens
  misc_RNA (1)...(19): siRNA sense strand
ugaagaaccuggcacaaau

SEQ ID NO: 1281296 - RNA, 19 nt, Homo sapiens
  misc_RNA (1)...(19): siRNA sense strand
ggcauaggcuaccauuuaa

SEQ ID NO: 1281297 - RNA, 19 nt, Homo sapiens
  misc_RNA (1)...(19): siRNA sense strand
gaaacuaacuuuugggauu

SEQ ID NO: 1281298 - RNA, 19 nt, Homo sapiens
  misc_RNA (1)...(19): siRNA sense strand
ugaaugagguguuucugaa

SEQ ID NO: 1281299 - RNA, 19 nt, Homo sapiens
  misc_RNA (1)...(19): siRNA sense strand
gauaguugcuacugaucua

SEQ ID NO: 1281300 - RNA, 19 nt, Homo sapiens
  misc_RNA (1)...(19): siRNA sense strand
ucaaaugucuucaauggau

SEQ ID NO: 1281301 - RNA, 19 nt, Homo sapiens
  misc_RNA (1)...(19): siRNA sense strand
gaguauggguaccgaagua

SEQ ID NO: 1281302 - RNA, 19 nt, Homo sapiens
  misc_RNA (1)...(19): siRNA sense strand
ugaaaggugugguguuuga

SEQ ID NO: 1281303 - RNA, 19 nt, Homo sapiens
  misc_RNA (1)...(19): siRNA sense strand
ggaacugucuccaaauaca

SEQ ID NO: 1281304 - RNA, 19 nt, Homo sapiens
  misc_RNA (1)...(19): siRNA sense strand
gguguacgcugccgugaaa

SEQ ID NO: 1281305 - RNA, 19 nt, Homo sapiens
  misc_RNA (1)...(19): siRNA sense strand
gauuggcucucuauucauu

SEQ ID NO: 1281306 - RNA, 19 nt, Homo sapiens
  misc_RNA (1)...(19): siRNA sense strand
guuaauaccucccuucaca

SEQ ID NO: 1281307 - RNA, 19 nt, Homo sapiens
  misc_RNA (1)...(19): siRNA sense strand
ucauagaaaucgcaacaaa

SEQ ID NO: 1281308 - RNA, 19 nt, Homo sapiens
  misc_RNA (1)...(19): siRNA sense strand
gcaauggacuacuuggaau

SEQ ID NO: 1281309 - RNA, 19 nt, Homo sapiens
  misc_RNA (1)...(19): siRNA sense strand
aaaguucgcuuccuaaagu

SEQ ID NO: 1281310 - RNA, 19 nt, Homo sapiens
  misc_RNA (1)...(19): siRNA sense strand
agacagaccuuguuggaau

SEQ ID NO: 1281311 - RNA, 19 nt, Homo sapiens
  misc_RNA (1)...(19): siRNA sense strand
uauggaaucuccugaaaga

SEQ ID NO: 1281312 - RNA, 19 nt, Homo sapiens
  misc_RNA (1)...(19): siRNA sense strand
gagaguagaagcuuugaaa

SEQ ID NO: 1281313 - RNA, 19 nt, Homo sapiens
  misc_RNA (1)...(19): siRNA sense strand
gaaccagugucuccagaau

SEQ ID NO: 1281314 - RNA, 19 nt, Homo sapiens
  misc_RNA (1)...(19): siRNA sense strand
gaauggacuuugugucuuc

SEQ ID NO: 1281315 - RNA, 19 nt, Homo sapiens
  misc_RNA (1)...(19): siRNA sense strand
uugaagagcauauggauua

SEQ ID NO: 1281316 - RNA, 19 nt, Homo sapiens
  misc_RNA (1)...(19): siRNA sense strand
uaugcuggcuucauccuua

SEQ ID NO: 1281317 - RNA, 19 nt, Homo sapiens
  misc_RNA (1)...(19): siRNA sense strand
ccacuuggauucuucacaa

SEQ ID NO: 1281318 - RNA, 19 nt, Homo sapiens
  misc_RNA (1)...(19): siRNA sense strand
gaaagacaauacauuacgu

SEQ ID NO: 1281319 - RNA, 19 nt, Homo sapiens
  misc_RNA (1)...(19): siRNA sense strand
cagcauuggugacuacaaa

SEQ ID NO: 1281320 - RNA, 19 nt, Homo sapiens
  misc_RNA (1)...(19): siRNA sense strand
uuacagggaucuugauaga

SEQ ID NO: 1281321 - RNA, 19 nt, Homo sapiens
  misc_RNA (1)...(19): siRNA sense strand
aaacuuaagugguggacaa

SEQ ID NO: 1281322 - RNA, 19 nt, Homo sapiens
  misc_RNA (1)...(19): siRNA sense strand
gaucacagauuuucaauag

SEQ ID NO: 1281323 - RNA, 19 nt, Homo sapiens
  misc_RNA (1)...(19): siRNA sense strand
ccagaggagauuauauuua

SEQ ID NO: 1281324 - RNA, 19 nt, Homo sapiens
  misc_RNA (1)...(19): siRNA sense strand
ggagcugggugaucuugaa

SEQ ID NO: 1281325 - RNA, 19 nt, Homo sapiens
  misc_RNA (1)...(19): siRNA sense strand
ugaaaaggaucacagauuu

SEQ ID NO: 1281326 - RNA, 19 nt, Homo sapiens
  misc_RNA (1)...(19): siRNA sense strand
cgugaaaggucucaggaaa

SEQ ID NO: 1281327 - RNA, 19 nt, Homo sapiens
  misc_RNA (1)...(19): siRNA sense strand
ggaauggacuuugugucuu

SEQ ID NO: 1281328 - RNA, 19 nt, Homo sapiens
  misc_RNA (1)...(19): siRNA sense strand
gaaaggauccuguguucag

SEQ ID NO: 1281329 - RNA, 19 nt, Homo sapiens
  misc_RNA (1)...(19): siRNA sense strand
gacagaacauagcuauaga

SEQ ID NO: 1281330 - RNA, 19 nt, Homo sapiens
  misc_RNA (1)...(19): siRNA sense strand
ugggaacugucuccaaaua

SEQ ID NO: 1281331 - RNA, 19 nt, Homo sapiens
  misc_RNA (1)...(19): siRNA sense strand
guacaggaauuagaaaugg

SEQ ID NO: 1281332 - RNA, 19 nt, Homo sapiens
  misc_RNA (1)...(19): siRNA sense strand
ggagaaagagguacaacga

SEQ ID NO: 1281333 - RNA, 19 nt, Homo sapiens
  misc_RNA (1)...(19): siRNA sense strand
uggcccagcuuauacauuu

SEQ ID NO: 1281334 - RNA, 19 nt, Homo sapiens
  misc_RNA (1)...(19): siRNA sense strand
ccucaaaugucuucaaugg

SEQ ID NO: 1281335 - RNA, 19 nt, Homo sapiens
  misc_RNA (1)...(19): siRNA sense strand
ggaaggcugagauguauug

SEQ ID NO: 1281336 - RNA, 19 nt, Homo sapiens
  misc_RNA (1)...(19): siRNA sense strand
ccaagaagcaacgcuauuu

SEQ ID NO: 1281337 - RNA, 19 nt, Homo sapiens
  misc_RNA (1)...(19): siRNA sense strand
ggaagguguucauauccaa

SEQ ID NO: 1281338 - RNA, 19 nt, Homo sapiens
  misc_RNA (1)...(19): siRNA sense strand
cacaugaaguggagaaaga

SEQ ID NO: 1281339 - RNA, 19 nt, Homo sapiens
  misc_RNA (1)...(19): siRNA sense strand
gaaaucgcaacaaaucauu

SEQ ID NO: 1281340 - RNA, 19 nt, Homo sapiens
  misc_RNA (1)...(19): siRNA sense strand
caaaauccauaccucauaa

SEQ ID NO: 1281341 - RNA, 19 nt, Homo sapiens
  misc_RNA (1)...(19): siRNA sense strand
caggaaggcugagauguau

SEQ ID NO: 1281342 - RNA, 19 nt, Homo sapiens
  misc_RNA (1)...(19): siRNA sense strand
cauuuaaguuugcaucuga

SEQ ID NO: 1281343 - RNA, 19 nt, Homo sapiens
  misc_RNA (1)...(19): siRNA sense strand
ggacaggaagguguucaua

SEQ ID NO: 1281344 - RNA, 19 nt, Homo sapiens
  misc_RNA (1)...(19): siRNA sense strand
ccagaucacugcccuccuu

SEQ ID NO: 1281345 - RNA, 19 nt, Homo sapiens
  misc_RNA (1)...(19): siRNA sense strand
gcugaaggcucccgugaag

SEQ ID NO: 1281346 - RNA, 19 nt, Homo sapiens
  misc_RNA (1)...(19): siRNA sense strand
cuuaggagcuucagaaucu

SEQ ID NO: 1281347 - RNA, 19 nt, Homo sapiens
  misc_RNA (1)...(19): siRNA sense strand
gaaagagguacaacgaguu

SEQ ID NO: 1281348 - RNA, 19 nt, Homo sapiens
  misc_RNA (1)...(19): siRNA sense strand
ucacacacuuucaagaaug

SEQ ID NO: 1281349 - RNA, 19 nt, Homo sapiens
  misc_RNA (1)...(19): siRNA sense strand
gccaagcacugguggaugu

SEQ ID NO: 1281350 - RNA, 19 nt, Homo sapiens
  misc_RNA (1)...(19): siRNA sense strand
uaaguugccuguugaggau

SEQ ID NO: 1281351 - RNA, 19 nt, Homo sapiens
  misc_RNA (1)...(19): siRNA sense strand
cauaauagcuacucuuuuc

SEQ ID NO: 1281352 - RNA, 19 nt, Homo sapiens
  misc_RNA (1)...(19): siRNA sense strand
ugagaacagugaaugcuau

SEQ ID NO: 1281353 - RNA, 19 nt, Homo sapiens
  misc_RNA (1)...(19): siRNA sense strand
gcaggucugugcaauagca

SEQ ID NO: 1281354 - RNA, 19 nt, Homo sapiens
  misc_RNA (1)...(19): siRNA sense strand
gauauaggaagccuuguug

SEQ ID NO: 1281355 - RNA, 19 nt, Homo sapiens
  misc_RNA (1)...(19): siRNA sense strand
uaaguuugcaucugaauga

SEQ ID NO: 1281356 - RNA, 19 nt, Homo sapiens
  misc_RNA (1)...(19): siRNA sense strand
cccaagagauaaugaacaa

SEQ ID NO: 1281357 - RNA, 19 nt, Homo sapiens
  misc_RNA (1)...(19): siRNA sense strand
ggcuaugucucaucucuug

SEQ ID NO: 1281358 - RNA, 19 nt, Homo sapiens
  misc_RNA (1)...(19): siRNA sense strand
cagcaggucugugcaauag

SEQ ID NO: 1281359 - RNA, 19 nt, Homo sapiens
  misc_RNA (1)...(19): siRNA sense strand
gaaaauaucagcaaguuca

SEQ ID NO: 1281360 - RNA, 19 nt, Homo sapiens
  misc_RNA (1)...(19): siRNA sense strand
gcuuauacauuuggacuau

SEQ ID NO: 1281361 - RNA, 19 nt, Homo sapiens
  misc_RNA (1)...(19): siRNA sense strand
ucaugacacuccucaaaug

SEQ ID NO: 1281362 - RNA, 19 nt, Homo sapiens
  misc_RNA (1)...(19): siRNA sense strand
ugagagucaucuuuacuga

SEQ ID NO: 1281363 - RNA, 19 nt, Homo sapiens
  misc_RNA (1)...(19): siRNA sense strand
ccauaacaacuuugaauga

SEQ ID NO: 1281364 - RNA, 19 nt, Homo sapiens
  misc_RNA (1)...(19): siRNA sense strand
ucacaggcuuucuucaaau

SEQ ID NO: 1281365 - RNA, 19 nt, Homo sapiens
  misc_RNA (1)...(19): siRNA sense strand
guacugcccucaggagaau

SEQ ID NO: 1281366 - RNA, 19 nt, Homo sapiens
  misc_RNA (1)...(19): siRNA sense strand
gaaguuauaggacuguuag

SEQ ID NO: 1281367 - RNA, 19 nt, Homo sapiens
  misc_RNA (1)...(19): siRNA sense strand
auucaaauccuguguagua

SEQ ID NO: 1281368 - RNA, 19 nt, Homo sapiens
  misc_RNA (1)...(19): siRNA sense strand
gcccagaggagauuauauu

SEQ ID NO: 1281369 - RNA, 19 nt, Homo sapiens
  misc_RNA (1)...(19): siRNA sense strand
ccuguggacuauauuauug

SEQ ID NO: 1281370 - RNA, 19 nt, Homo sapiens
  misc_RNA (1)...(19): siRNA sense strand
gaacauagcuauagaagug

SEQ ID NO: 1281371 - RNA, 19 nt, Homo sapiens
  misc_RNA (1)...(19): siRNA sense strand
gaaaugaacugcaggaaga

SEQ ID NO: 1281372 - RNA, 19 nt, Homo sapiens
  misc_RNA (1)...(19): siRNA sense strand
ggaagaaacuaaugagaaa

SEQ ID NO: 1281373 - RNA, 19 nt, Homo sapiens
  misc_RNA (1)...(19): siRNA sense strand
gaaggaauaugcaggcaaa

SEQ ID NO: 1281374 - RNA, 19 nt, Homo sapiens
  misc_RNA (1)...(19): siRNA sense strand
gacaauacauuacgucauu

SEQ ID NO: 1281375 - RNA, 19 nt, Homo sapiens
  misc_RNA (1)...(19): siRNA sense strand
gggcauaggcuaccauuua

SEQ ID NO: 1281376 - RNA, 19 nt, Homo sapiens
  misc_RNA (1)...(19): siRNA sense strand
gaaaucagacagaguaauu

SEQ ID NO: 1281377 - RNA, 19 nt, Homo sapiens
  misc_RNA (1)...(19): siRNA sense strand
ggaaaggacaaacaaauuu

SEQ ID NO: 1281378 - RNA, 19 nt, Homo sapiens
  misc_RNA (1)...(19): siRNA sense strand
gagaaaggauccuguguuc

SEQ ID NO: 1281379 - RNA, 19 nt, Homo sapiens
  misc_RNA (1)...(19): siRNA sense strand
aagaauggcugauauagaa

SEQ ID NO: 1281380 - RNA, 19 nt, Homo sapiens
  misc_RNA (1)...(19): siRNA sense strand
gaugauaacuggagacaca

SEQ ID NO: 1281381 - RNA, 19 nt, Homo sapiens
  misc_RNA (1)...(19): siRNA sense strand
gaaagaagccaucagaauc

SEQ ID NO: 1281382 - RNA, 19 nt, Homo sapiens
  misc_RNA (1)...(19): siRNA sense strand
gauccuguguucagaauuu

SEQ ID NO: 1281383 - RNA, 19 nt, Homo sapiens
  misc_RNA (1)...(19): siRNA sense strand
gcagugagagucaucuuua

SEQ ID NO: 1281384 - RNA, 19 nt, Homo sapiens
  misc_RNA (1)...(19): siRNA sense strand
gaaagaaugagaacaguga

SEQ ID NO: 1281385 - RNA, 19 nt, Homo sapiens
  misc_RNA (1)...(19): siRNA sense strand
gcucuucucuguuccuuaa

SEQ ID NO: 1281386 - RNA, 19 nt, Homo sapiens
  misc_RNA (1)...(19): siRNA sense strand
gaaggaaaaucaacuauug

SEQ ID NO: 1281387 - RNA, 19 nt, Homo sapiens
  misc_RNA (1)...(19): siRNA sense strand
caaauccuguguaguauug

SEQ ID NO: 1281388 - RNA, 19 nt, Homo sapiens
  misc_RNA (1)...(19): siRNA sense strand
agagucaucuuuacugaua

SEQ ID NO: 1281389 - RNA, 19 nt, Homo sapiens
  misc_RNA (1)...(19): siRNA sense strand
ggaggaagauauccagaug

SEQ ID NO: 1281390 - RNA, 19 nt, Homo sapiens
  misc_RNA (1)...(19): siRNA sense strand
gcacccaguuuauagauga

SEQ ID NO: 1281391 - RNA, 19 nt, Homo sapiens
  misc_RNA (1)...(19): siRNA sense strand
cauuaaugcugcuaucaua

SEQ ID NO: 1281392 - RNA, 19 nt, Homo sapiens
  misc_RNA (1)...(19): siRNA sense strand
gcuaauaccuuaccuucau

SEQ ID NO: 1281393 - RNA, 19 nt, Homo sapiens
  misc_RNA (1)...(19): siRNA sense strand
ggaaagaagccaucagaau

SEQ ID NO: 1281394 - RNA, 19 nt, Homo sapiens
  misc_RNA (1)...(19): siRNA sense strand
ggcauaggcuaccauuuaa

SEQ ID NO: 1281395 - RNA, 19 nt, Homo sapiens
  misc_RNA (1)...(19): siRNA sense strand
gaaacuaacuuuugggauu

SEQ ID NO: 1281396 - RNA, 19 nt, Homo sapiens
  misc_RNA (1)...(19): siRNA sense strand
ugaaugagguguuucugaa

SEQ ID NO: 1281397 - RNA, 19 nt, Homo sapiens
  misc_RNA (1)...(19): siRNA sense strand
gauaguugcuacugaucua

SEQ ID NO: 1281398 - RNA, 19 nt, Homo sapiens
  misc_RNA (1)...(19): siRNA sense strand
ucaaaugucuucaauggau

SEQ ID NO: 1281399 - RNA, 19 nt, Homo sapiens
  misc_RNA (1)...(19): siRNA sense strand
gaguauggguaccgaagua

SEQ ID NO: 1281400 - RNA, 19 nt, Homo sapiens
  misc_RNA (1)...(19): siRNA sense strand
ugaaaggugugguguuuga

SEQ ID NO: 1281401 - RNA, 19 nt, Homo sapiens
  misc_RNA (1)...(19): siRNA sense strand
ggaacugucuccaaauaca

SEQ ID NO: 1281402 - RNA, 19 nt, Homo sapiens
  misc_RNA (1)...(19): siRNA sense strand
gguguacgcugccgugaaa

SEQ ID NO: 1281403 - RNA, 19 nt, Homo sapiens
  misc_RNA (1)...(19): siRNA sense strand
gauuggcucucuauucauu

SEQ ID NO: 1281404 - RNA, 19 nt, Homo sapiens
  misc_RNA (1)...(19): siRNA sense strand
guuaauaccucccuucaca

SEQ ID NO: 1281405 - RNA, 19 nt, Homo sapiens
  misc_RNA (1)...(19): siRNA sense strand
ucauagaaaucgcaacaaa

SEQ ID NO: 1281406 - RNA, 19 nt, Homo sapiens
  misc_RNA (1)...(19): siRNA sense strand
gcaauggacuacuuggaau

SEQ ID NO: 1281407 - RNA, 19 nt, Homo sapiens
  misc_RNA (1)...(19): siRNA sense strand
aaaguucgcuuccuaaagu

SEQ ID NO: 1281408 - RNA, 19 nt, Homo sapiens
  misc_RNA (1)...(19): siRNA sense strand
uauggaaucuccugaaaga

SEQ ID NO: 1281409 - RNA, 19 nt, Homo sapiens
  misc_RNA (1)...(19): siRNA sense strand
gagaguagaagcuuugaaa

SEQ ID NO: 1281410 - RNA, 19 nt, Homo sapiens
  misc_RNA (1)...(19): siRNA sense strand
agacagaccuuguuggaau

SEQ ID NO: 1281411 - RNA, 19 nt, Homo sapiens
  misc_RNA (1)...(19): siRNA sense strand
gaaccagugucuccagaau

SEQ ID NO: 1281412 - RNA, 19 nt, Homo sapiens
  misc_RNA (1)...(19): siRNA sense strand
gaauggacuuugugucuuc

SEQ ID NO: 1281413 - RNA, 19 nt, Homo sapiens
  misc_RNA (1)...(19): siRNA sense strand
uugaagagcauauggauua

SEQ ID NO: 1281414 - RNA, 19 nt, Homo sapiens
  misc_RNA (1)...(19): siRNA sense strand
uaugcuggcuucauccuua

SEQ ID NO: 1281415 - RNA, 19 nt, Homo sapiens
  misc_RNA (1)...(19): siRNA sense strand
ccacuuggauucuucacaa

SEQ ID NO: 1281416 - RNA, 19 nt, Homo sapiens
  misc_RNA (1)...(19): siRNA sense strand
gaaagacaauacauuacgu

SEQ ID NO: 1281417 - RNA, 19 nt, Homo sapiens
  misc_RNA (1)...(19): siRNA sense strand
cagcauuggugacuacaaa

SEQ ID NO: 1281418 - RNA, 19 nt, Homo sapiens
  misc_RNA (1)...(19): siRNA sense strand
uuacagggaucuugauaga

SEQ ID NO: 1281419 - RNA, 19 nt, Homo sapiens
  misc_RNA (1)...(19): siRNA sense strand
aaacuuaagugguggacaa

SEQ ID NO: 1281420 - RNA, 19 nt, Homo sapiens
  misc_RNA (1)...(19): siRNA sense strand
gaucacagauuuucaauag

SEQ ID NO: 1281421 - RNA, 19 nt, Homo sapiens
  misc_RNA (1)...(19): siRNA sense strand
ccagaggagauuauauuua

SEQ ID NO: 1281422 - RNA, 19 nt, Homo sapiens
  misc_RNA (1)...(19): siRNA sense strand
ugaaaaggaucacagauuu

SEQ ID NO: 1281423 - RNA, 19 nt, Homo sapiens
  misc_RNA (1)...(19): siRNA sense strand
cgugaaaggucucaggaaa

SEQ ID NO: 1281424 - RNA, 19 nt, Homo sapiens
  misc_RNA (1)...(19): siRNA sense strand
ggaauggacuuugugucuu

SEQ ID NO: 1281425 - RNA, 19 nt, Homo sapiens
  misc_RNA (1)...(19): siRNA sense strand
gaaaggauccuguguucag

SEQ ID NO: 1281426 - RNA, 19 nt, Homo sapiens
  misc_RNA (1)...(19): siRNA sense strand
gacagaacauagcuauaga

SEQ ID NO: 1281427 - RNA, 19 nt, Homo sapiens
  misc_RNA (1)...(19): siRNA sense strand
ugggaacugucuccaaaua

SEQ ID NO: 1281428 - RNA, 19 nt, Homo sapiens
  misc_RNA (1)...(19): siRNA sense strand
guacaggaauuagaaaugg

SEQ ID NO: 1281429 - RNA, 19 nt, Homo sapiens
  misc_RNA (1)...(19): siRNA sense strand
ggagaaagagguacaacga

SEQ ID NO: 1281430 - RNA, 19 nt, Homo sapiens
  misc_RNA (1)...(19): siRNA sense strand
uggcccagcuuauacauuu

SEQ ID NO: 1281431 - RNA, 19 nt, Homo sapiens
  misc_RNA (1)...(19): siRNA sense strand
ccucaaaugucuucaaugg

SEQ ID NO: 1281432 - RNA, 19 nt, Homo sapiens
  misc_RNA (1)...(19): siRNA sense strand
ccaagaagcaacgcuauuu

SEQ ID NO: 1281433 - RNA, 19 nt, Homo sapiens
  misc_RNA (1)...(19): siRNA sense strand
ggaagguguucauauccaa

SEQ ID NO: 1281434 - RNA, 19 nt, Homo sapiens
  misc_RNA (1)...(19): siRNA sense strand
cacaugaaguggagaaaga

SEQ ID NO: 1281435 - RNA, 19 nt, Homo sapiens
  misc_RNA (1)...(19): siRNA sense strand
gaaaucgcaacaaaucauu

SEQ ID NO: 1281436 - RNA, 19 nt, Homo sapiens
  misc_RNA (1)...(19): siRNA sense strand
caaaauccauaccucauaa

SEQ ID NO: 1281437 - RNA, 19 nt, Homo sapiens
  misc_RNA (1)...(19): siRNA sense strand
cauuuaaguuugcaucuga

SEQ ID NO: 1281438 - RNA, 19 nt, Homo sapiens
  misc_RNA (1)...(19): siRNA sense strand
ggacaggaagguguucaua

SEQ ID NO: 1281439 - RNA, 19 nt, Homo sapiens
  misc_RNA (1)...(19): siRNA sense strand
ccagaucacugcccuccuu

SEQ ID NO: 1281440 - RNA, 19 nt, Homo sapiens
  misc_RNA (1)...(19): siRNA sense strand
gcugaaggcucccgugaag

SEQ ID NO: 1281441 - RNA, 19 nt, Homo sapiens
  misc_RNA (1)...(19): siRNA sense strand
cuuaggagcuucagaaucu

SEQ ID NO: 1281442 - RNA, 19 nt, Homo sapiens
  misc_RNA (1)...(19): siRNA sense strand
gaaagagguacaacgaguu

SEQ ID NO: 1281443 - RNA, 19 nt, Homo sapiens
  misc_RNA (1)...(19): siRNA sense strand
ucacacacuuucaagaaug

SEQ ID NO: 1281444 - RNA, 19 nt, Homo sapiens
  misc_RNA (1)...(19): siRNA sense strand
gccaagcacugguggaugu

SEQ ID NO: 1281445 - RNA, 19 nt, Homo sapiens
  misc_RNA (1)...(19): siRNA sense strand
cauaauagcuacucuuuuc

SEQ ID NO: 1281446 - RNA, 19 nt, Homo sapiens
  misc_RNA (1)...(19): siRNA sense strand
ugagaacagugaaugcuau

SEQ ID NO: 1281447 - RNA, 19 nt, Homo sapiens
  misc_RNA (1)...(19): siRNA sense strand
gcaggucugugcaauagca

SEQ ID NO: 1281448 - RNA, 19 nt, Homo sapiens
  misc_RNA (1)...(19): siRNA sense strand
gauauaggaagccuuguug

SEQ ID NO: 1281449 - RNA, 19 nt, Homo sapiens
  misc_RNA (1)...(19): siRNA sense strand
uaaguuugcaucugaauga

SEQ ID NO: 1281450 - RNA, 19 nt, Homo sapiens
  misc_RNA (1)...(19): siRNA sense strand
cccaagagauaaugaacaa

SEQ ID NO: 1281451 - RNA, 19 nt, Homo sapiens
  misc_RNA (1)...(19): siRNA sense strand
ggcuaugucucaucucuug

SEQ ID NO: 1281452 - RNA, 19 nt, Homo sapiens
  misc_RNA (1)...(19): siRNA sense strand
cagcaggucugugcaauag

SEQ ID NO: 1281453 - RNA, 19 nt, Homo sapiens
  misc_RNA (1)...(19): siRNA sense strand
ucaugacacuccucaaaug

SEQ ID NO: 1281454 - RNA, 19 nt, Homo sapiens
  misc_RNA (1)...(19): siRNA sense strand
gaaaauaucagcaaguuca

SEQ ID NO: 1281455 - RNA, 19 nt, Homo sapiens
  misc_RNA (1)...(19): siRNA sense strand
gcuuauacauuuggacuau

SEQ ID NO: 1281456 - RNA, 19 nt, Homo sapiens
  misc_RNA (1)...(19): siRNA sense strand
ugagagucaucuuuacuga

SEQ ID NO: 1281457 - RNA, 19 nt, Homo sapiens
  misc_RNA (1)...(19): siRNA sense strand
uaucauggccacuuuaaug

SEQ ID NO: 1281458 - RNA, 19 nt, Homo sapiens
  misc_RNA (1)...(19): siRNA sense strand
guacugcccucaggagaau

SEQ ID NO: 1281459 - RNA, 19 nt, Homo sapiens
  misc_RNA (1)...(19): siRNA sense strand
gaaguuauaggacuguuag

SEQ ID NO: 1281460 - RNA, 19 nt, Homo sapiens
  misc_RNA (1)...(19): siRNA sense strand
auucaaauccuguguagua

SEQ ID NO: 1281461 - RNA, 19 nt, Homo sapiens
  misc_RNA (1)...(19): siRNA sense strand
gcccagaggagauuauauu

SEQ ID NO: 1281462 - RNA, 19 nt, Homo sapiens
  misc_RNA (1)...(19): siRNA sense strand
ccuguggacuauauuauug

SEQ ID NO: 1281463 - RNA, 19 nt, Homo sapiens
  misc_RNA (1)...(19): siRNA sense strand
ccauaacaacuuugaauga

SEQ ID NO: 1281464 - RNA, 19 nt, Homo sapiens
  misc_RNA (1)...(19): siRNA sense strand
accaaggcauugaggauua

SEQ ID NO: 1281465 - RNA, 19 nt, Homo sapiens
  misc_RNA (1)...(19): siRNA sense strand
gaguauaacaucacugguu

SEQ ID NO: 1281466 - RNA, 19 nt, Homo sapiens
  misc_RNA (1)...(19): siRNA sense strand
gaauauggaaucuccugaa

SEQ ID NO: 1281467 - RNA, 19 nt, Homo sapiens
  misc_RNA (1)...(19): siRNA sense strand
cgugggaacugucuccaaa

SEQ ID NO: 1281468 - RNA, 19 nt, Homo sapiens
  misc_RNA (1)...(19): siRNA sense strand
guggaugccuuuggaacua

SEQ ID NO: 1281469 - RNA, 19 nt, Homo sapiens
  misc_RNA (1)...(19): siRNA sense strand
cgacagaacauagcuauag

SEQ ID NO: 1281470 - RNA, 19 nt, Homo sapiens
  misc_RNA (1)...(19): siRNA sense strand
gcacuuaccuugcuuccaa

SEQ ID NO: 1281471 - RNA, 19 nt, Homo sapiens
  misc_RNA (1)...(19): siRNA sense strand
gcacauggauucaguaugg

SEQ ID NO: 1281472 - RNA, 19 nt, Homo sapiens
  misc_RNA (1)...(19): siRNA sense strand
guagaaacauggcauauag

SEQ ID NO: 1281473 - RNA, 19 nt, Homo sapiens
  misc_RNA (1)...(19): siRNA sense strand
gcaagcacaugcagaagaa

SEQ ID NO: 1281474 - RNA, 19 nt, Homo sapiens
  misc_RNA (1)...(19): siRNA sense strand
gaacaaagaggaauuagca

SEQ ID NO: 1281475 - RNA, 19 nt, Homo sapiens
  misc_RNA (1)...(19): siRNA sense strand
gaaauaucaucaccuagga

SEQ ID NO: 1281476 - RNA, 19 nt, Homo sapiens
  misc_RNA (1)...(19): siRNA sense strand
caaauauucucaugagguu

SEQ ID NO: 1281477 - RNA, 19 nt, Homo sapiens
  misc_RNA (1)...(19): siRNA sense strand
gaguagagaucgguucuuu

SEQ ID NO: 1281478 - RNA, 19 nt, Homo sapiens
  misc_RNA (1)...(19): siRNA sense strand
gaucaugacucagaggaaa

SEQ ID NO: 1281479 - RNA, 19 nt, Homo sapiens
  misc_RNA (1)...(19): siRNA sense strand
gcccagagcuccuucuuca

SEQ ID NO: 1281480 - RNA, 19 nt, Homo sapiens
  misc_RNA (1)...(19): siRNA sense strand
gaaaggugcuggccaucau

SEQ ID NO: 1281481 - RNA, 19 nt, Homo sapiens
  misc_RNA (1)...(19): siRNA sense strand
guaggaaguuauacaauca

SEQ ID NO: 1281482 - RNA, 19 nt, Homo sapiens
  misc_RNA (1)...(19): siRNA sense strand
agagaaauaucaucaccua

SEQ ID NO: 1281483 - RNA, 19 nt, Homo sapiens
  misc_RNA (1)...(19): siRNA sense strand
ggcagaugcuuauugguaa

SEQ ID NO: 1281484 - RNA, 19 nt, Homo sapiens
  misc_RNA (1)...(19): siRNA sense strand
gauauaacuucuaccagau

SEQ ID NO: 1281485 - RNA, 19 nt, Homo sapiens
  misc_RNA (1)...(19): siRNA sense strand
ccacagauauaacuucuac

SEQ ID NO: 1281486 - RNA, 19 nt, Homo sapiens
  misc_RNA (1)...(19): siRNA sense strand
gaguagcacuuguuaacga

SEQ ID NO: 1281487 - RNA, 19 nt, Homo sapiens
  misc_RNA (1)...(19): siRNA sense strand
gcagaugcuuauugguaaa

SEQ ID NO: 1281488 - RNA, 19 nt, Homo sapiens
  misc_RNA (1)...(19): siRNA sense strand
gaggugugcugcuucauca

SEQ ID NO: 1281489 - RNA, 19 nt, Homo sapiens
  misc_RNA (1)...(19): siRNA sense strand
ggaaauuugucuugaccau

SEQ ID NO: 1281490 - RNA, 19 nt, Homo sapiens
  misc_RNA (1)...(19): siRNA sense strand
guagagaucgguucuuuca

SEQ ID NO: 1281491 - RNA, 19 nt, Homo sapiens
  misc_RNA (1)...(19): siRNA sense strand
caucagaagaccaacauuu

SEQ ID NO: 1281492 - RNA, 19 nt, Homo sapiens
  misc_RNA (1)...(19): siRNA sense strand
aaacauagcuuccaaaacu

SEQ ID NO: 1281493 - RNA, 19 nt, Homo sapiens
  misc_RNA (1)...(19): siRNA sense strand
uagcagcggucacagagaa

SEQ ID NO: 1281494 - RNA, 19 nt, Homo sapiens
  misc_RNA (1)...(19): siRNA sense strand
gagaaaggcuacuguaacc

SEQ ID NO: 1281495 - RNA, 19 nt, Homo sapiens
  misc_RNA (1)...(19): siRNA sense strand
ucucuggacugaacaaaga

SEQ ID NO: 1281496 - RNA, 19 nt, Homo sapiens
  misc_RNA (1)...(19): siRNA sense strand
ggacggacuuugagcacau

SEQ ID NO: 1281497 - RNA, 19 nt, Homo sapiens
  misc_RNA (1)...(19): siRNA sense strand
ggaguggccacagauauaa

SEQ ID NO: 1281498 - RNA, 19 nt, Homo sapiens
  misc_RNA (1)...(19): siRNA sense strand
ucucuuggcucucugcaaa

SEQ ID NO: 1281499 - RNA, 19 nt, Homo sapiens
  misc_RNA (1)...(19): siRNA sense strand
gaaauccaggcagcacuua

SEQ ID NO: 1281500 - RNA, 19 nt, Homo sapiens
  misc_RNA (1)...(19): siRNA sense strand
ucuaccagauccuuaaauu

SEQ ID NO: 1281501 - RNA, 19 nt, Homo sapiens
  misc_RNA (1)...(19): siRNA sense strand
agacaaacauagcuuccaa

SEQ ID NO: 1281502 - RNA, 19 nt, Homo sapiens
  misc_RNA (1)...(19): siRNA sense strand
gcagugcuccuccuccaaa

SEQ ID NO: 1281503 - RNA, 19 nt, Homo sapiens
  misc_RNA (1)...(19): siRNA sense strand
cagaggaaauuugucuuga

SEQ ID NO: 1281504 - RNA, 19 nt, Homo sapiens
  misc_RNA (1)...(19): siRNA sense strand
guucaagacuccacaucug

SEQ ID NO: 1281505 - RNA, 19 nt, Homo sapiens
  misc_RNA (1)...(19): siRNA sense strand
cuaccagauccuuaaauua

SEQ ID NO: 1281506 - RNA, 19 nt, Homo sapiens
  misc_RNA (1)...(19): siRNA sense strand
ucacagagaaauaucauca

SEQ ID NO: 1281507 - RNA, 19 nt, Homo sapiens
  misc_RNA (1)...(19): siRNA sense strand
ccagauccuuaaauuacaa

SEQ ID NO: 1281508 - RNA, 19 nt, Homo sapiens
  misc_RNA (1)...(19): siRNA sense strand
gcauauagggcuagaagca

SEQ ID NO: 1281509 - RNA, 19 nt, Homo sapiens
  misc_RNA (1)...(19): siRNA sense strand
gaauccaccucuguucugu

SEQ ID NO: 1281510 - RNA, 19 nt, Homo sapiens
  misc_RNA (1)...(19): siRNA sense strand
aaugguagcugcagcaaag

SEQ ID NO: 1281511 - RNA, 19 nt, Homo sapiens
  misc_RNA (1)...(19): siRNA sense strand
acaaguaccacaucuucua

SEQ ID NO: 1281512 - RNA, 19 nt, Homo sapiens
  misc_RNA (1)...(19): siRNA sense strand
uaucugaugucacaaguac

SEQ ID NO: 1281513 - RNA, 19 nt, Homo sapiens
  misc_RNA (1)...(19): siRNA sense strand
gaccaaggcgccaggagaa

SEQ ID NO: 1281514 - RNA, 19 nt, Homo sapiens
  misc_RNA (1)...(19): siRNA sense strand
cuucauaccuggagucucu

SEQ ID NO: 1281515 - RNA, 19 nt, Homo sapiens
  misc_RNA (1)...(19): siRNA sense strand
ccaccucuguucuguagga

SEQ ID NO: 1281516 - RNA, 19 nt, Homo sapiens
  misc_RNA (1)...(19): siRNA sense strand
uggcagaugcuuauuggua

SEQ ID NO: 1281517 - RNA, 19 nt, Homo sapiens
  misc_RNA (1)...(19): siRNA sense strand
ggaccugcuucccgagaug

SEQ ID NO: 1281518 - RNA, 19 nt, Homo sapiens
  misc_RNA (1)...(19): siRNA sense strand
ucaccaagccagccaauuc

SEQ ID NO: 1281519 - RNA, 19 nt, Homo sapiens
  misc_RNA (1)...(19): siRNA sense strand
gaucucacccgcaaguuca

SEQ ID NO: 1281520 - RNA, 19 nt, Homo sapiens
  misc_RNA (1)...(19): siRNA sense strand
cgagcggaauuuaugcaaa

SEQ ID NO: 1281521 - RNA, 19 nt, Homo sapiens
  misc_RNA (1)...(19): siRNA sense strand
ggaaauccaggcagcacuu

SEQ ID NO: 1281522 - RNA, 19 nt, Homo sapiens
  misc_RNA (1)...(19): siRNA sense strand
guccaaggcuacugaucuu

SEQ ID NO: 1281523 - RNA, 19 nt, Homo sapiens
  misc_RNA (1)...(19): siRNA sense strand
ucagggcagccaagaauuu

SEQ ID NO: 1281524 - RNA, 19 nt, Homo sapiens
  misc_RNA (1)...(19): siRNA sense strand
cgacgccucuccacuccuu

SEQ ID NO: 1281525 - RNA, 19 nt, Homo sapiens
  misc_RNA (1)...(19): siRNA sense strand
gguggcagaugcuuauugg

SEQ ID NO: 1281526 - RNA, 19 nt, Homo sapiens
  misc_RNA (1)...(19): siRNA sense strand
aaauuugucuugaccaucu

SEQ ID NO: 1281527 - RNA, 19 nt, Homo sapiens
  misc_RNA (1)...(19): siRNA sense strand
gguggaugaucaugacuca

SEQ ID NO: 1281528 - RNA, 19 nt, Homo sapiens
  misc_RNA (1)...(19): siRNA sense strand
ucacaaguaccacaucuuc

SEQ ID NO: 1281529 - RNA, 19 nt, Homo sapiens
  misc_RNA (1)...(19): siRNA sense strand
gaucaucaauggcaaaagu

SEQ ID NO: 1281530 - RNA, 19 nt, Homo sapiens
  misc_RNA (1)...(19): siRNA sense strand
gagggucggcagcagauuu

SEQ ID NO: 1281531 - RNA, 19 nt, Homo sapiens
  misc_RNA (1)...(19): siRNA sense strand
agagaaagacaaacggaaa

SEQ ID NO: 1281532 - RNA, 19 nt, Homo sapiens
  misc_RNA (1)...(19): siRNA sense strand
gauggaguggccacagaua

SEQ ID NO: 1281533 - RNA, 19 nt, Homo sapiens
  misc_RNA (1)...(19): siRNA sense strand
uuaccuugcuuccaauuca

SEQ ID NO: 1281534 - RNA, 19 nt, Homo sapiens
  misc_RNA (1)...(19): siRNA sense strand
cguagaaacauggcauaua

SEQ ID NO: 1281535 - RNA, 19 nt, Homo sapiens
  misc_RNA (1)...(19): siRNA sense strand
gcacaccuaguccagauca

SEQ ID NO: 1281536 - RNA, 19 nt, Homo sapiens
  misc_RNA (1)...(19): siRNA sense strand
gaugauucagacaaacaua

SEQ ID NO: 1281537 - RNA, 19 nt, Homo sapiens
  misc_RNA (1)...(19): siRNA sense strand
uggagucucucuaucaauc

SEQ ID NO: 1281538 - RNA, 19 nt, Homo sapiens
  misc_RNA (1)...(19): siRNA sense strand
cacgaacucucuggacuga

SEQ ID NO: 1281539 - RNA, 19 nt, Homo sapiens
  misc_RNA (1)...(19): siRNA sense strand
gguaaugaguugugauucc

SEQ ID NO: 1281540 - RNA, 19 nt, Homo sapiens
  misc_RNA (1)...(19): siRNA sense strand
aaaccuggacggacuuuga

SEQ ID NO: 1281541 - RNA, 19 nt, Homo sapiens
  misc_RNA (1)...(19): siRNA sense strand
uggaguggccacagauaua

SEQ ID NO: 1281542 - RNA, 19 nt, Homo sapiens
  misc_RNA (1)...(19): siRNA sense strand
ccagagcuccuucuucaca

SEQ ID NO: 1281543 - RNA, 19 nt, Homo sapiens
  misc_RNA (1)...(19): siRNA sense strand
aaugaguugugauuccuuu

SEQ ID NO: 1281544 - RNA, 19 nt, Homo sapiens
  misc_RNA (1)...(19): siRNA sense strand
cgaacucucuggacugaac

SEQ ID NO: 1281545 - RNA, 19 nt, Homo sapiens
  misc_RNA (1)...(19): siRNA sense strand
uaccagauccuuaaauuac

SEQ ID NO: 1281546 - RNA, 19 nt, Homo sapiens
  misc_RNA (1)...(19): siRNA sense strand
ggaauccaccucuguucug

SEQ ID NO: 1281547 - RNA, 19 nt, Homo sapiens
  misc_RNA (1)...(19): siRNA sense strand
cgagggaacugucguuuuc

SEQ ID NO: 1281548 - RNA, 19 nt, Homo sapiens
  misc_RNA (1)...(19): siRNA sense strand
aagggaugauucagacaaa

SEQ ID NO: 1281549 - RNA, 19 nt, Homo sapiens
  misc_RNA (1)...(19): siRNA sense strand
caagggaugauucagacaa

SEQ ID NO: 1281550 - RNA, 19 nt, Homo sapiens
  misc_RNA (1)...(19): siRNA sense strand
auucaaacgucgacucuuc

SEQ ID NO: 1281551 - RNA, 19 nt, Homo sapiens
  misc_RNA (1)...(19): siRNA sense strand
cuucuaggguggaugauca

SEQ ID NO: 1281552 - RNA, 19 nt, Homo sapiens
  misc_RNA (1)...(19): siRNA sense strand
gcucuucucuuggcucucu

SEQ ID NO: 1281553 - RNA, 19 nt, Homo sapiens
  misc_RNA (1)...(19): siRNA sense strand
caggagaaagacuguguuu

SEQ ID NO: 1281554 - RNA, 19 nt, Homo sapiens
  misc_RNA (1)...(19): siRNA sense strand
ucacauccuggacgaauga

SEQ ID NO: 1281555 - RNA, 19 nt, Homo sapiens
  misc_RNA (1)...(19): siRNA sense strand
gcuagaagcaagaguagag

SEQ ID NO: 1281556 - RNA, 19 nt, Homo sapiens
  misc_RNA (1)...(19): siRNA sense strand
caggcuugcuuuccucaga

SEQ ID NO: 1281557 - RNA, 19 nt, Homo sapiens
  misc_RNA (1)...(19): siRNA sense strand
ccuggagucucucuaucaa

SEQ ID NO: 1281558 - RNA, 19 nt, Homo sapiens
  misc_RNA (1)...(19): siRNA sense strand
aaacgucgacucuucauac

SEQ ID NO: 1281559 - RNA, 19 nt, Homo sapiens
  misc_RNA (1)...(19): siRNA sense strand
caaacgucgacucuucaua

SEQ ID NO: 1281560 - RNA, 19 nt, Homo sapiens
  misc_RNA (1)...(19): siRNA sense strand
gagaagagaaagacaaacg

SEQ ID NO: 1281561 - RNA, 19 nt, Homo sapiens
  misc_RNA (1)...(19): siRNA sense strand
gauuugguauuggaagaau

SEQ ID NO: 1281562 - RNA, 19 nt, Homo sapiens
  misc_RNA (1)...(19): siRNA sense strand
ccagagacccugcgauaac

SEQ ID NO: 1281563 - RNA, 19 nt, Homo sapiens
  misc_RNA (1)...(19): siRNA sense strand
ggucugccgucgcaaguac

SEQ ID NO: 1281564 - RNA, 19 nt, Homo sapiens
  misc_RNA (1)...(19): siRNA sense strand
ucagaggaaauuugucuug

SEQ ID NO: 1281565 - RNA, 19 nt, Homo sapiens
  misc_RNA (1)...(19): siRNA sense strand
agaugaugcugacccaaga

SEQ ID NO: 1281566 - RNA, 19 nt, Homo sapiens
  misc_RNA (1)...(19): siRNA sense strand
ugccagagacccugcgaua

SEQ ID NO: 1281567 - RNA, 19 nt, Homo sapiens
  misc_RNA (1)...(19): siRNA sense strand
ggccacagauauaacuucu

SEQ ID NO: 1281568 - RNA, 19 nt, Homo sapiens
  misc_RNA (1)...(19): siRNA sense strand
cagaagaccaacauuugug

SEQ ID NO: 1281569 - RNA, 19 nt, Homo sapiens
  misc_RNA (1)...(19): siRNA sense strand
gguaugugcagcagaugaa

SEQ ID NO: 1281570 - RNA, 19 nt, Homo sapiens
  misc_RNA (1)...(19): siRNA sense strand
gcacuuaccuugcuuccaa

SEQ ID NO: 1281571 - RNA, 19 nt, Homo sapiens
  misc_RNA (1)...(19): siRNA sense strand
gcacauggauucaguaugg

SEQ ID NO: 1281572 - RNA, 19 nt, Homo sapiens
  misc_RNA (1)...(19): siRNA sense strand
guagaaacauggcauauag

SEQ ID NO: 1281573 - RNA, 19 nt, Homo sapiens
  misc_RNA (1)...(19): siRNA sense strand
gcaagcacaugcagaagaa

SEQ ID NO: 1281574 - RNA, 19 nt, Homo sapiens
  misc_RNA (1)...(19): siRNA sense strand
gaacaaagaggaauuagca

SEQ ID NO: 1281575 - RNA, 19 nt, Homo sapiens
  misc_RNA (1)...(19): siRNA sense strand
gaaauaucaucaccuagga

SEQ ID NO: 1281576 - RNA, 19 nt, Homo sapiens
  misc_RNA (1)...(19): siRNA sense strand
caaauauucucaugagguu

SEQ ID NO: 1281577 - RNA, 19 nt, Homo sapiens
  misc_RNA (1)...(19): siRNA sense strand
gaguagagaucgguucuuu

SEQ ID NO: 1281578 - RNA, 19 nt, Homo sapiens
  misc_RNA (1)...(19): siRNA sense strand
gaucaugacucagaggaaa

SEQ ID NO: 1281579 - RNA, 19 nt, Homo sapiens
  misc_RNA (1)...(19): siRNA sense strand
gcccagagcuccuucuuca

SEQ ID NO: 1281580 - RNA, 19 nt, Homo sapiens
  misc_RNA (1)...(19): siRNA sense strand
gaaaggugcuggccaucau

SEQ ID NO: 1281581 - RNA, 19 nt, Homo sapiens
  misc_RNA (1)...(19): siRNA sense strand
guaggaaguuauacaauca

SEQ ID NO: 1281582 - RNA, 19 nt, Homo sapiens
  misc_RNA (1)...(19): siRNA sense strand
agagaaauaucaucaccua

SEQ ID NO: 1281583 - RNA, 19 nt, Homo sapiens
  misc_RNA (1)...(19): siRNA sense strand
ggcagaugcuuauugguaa

SEQ ID NO: 1281584 - RNA, 19 nt, Homo sapiens
  misc_RNA (1)...(19): siRNA sense strand
gauauaacuucuaccagau

SEQ ID NO: 1281585 - RNA, 19 nt, Homo sapiens
  misc_RNA (1)...(19): siRNA sense strand
ccacagauauaacuucuac

SEQ ID NO: 1281586 - RNA, 19 nt, Homo sapiens
  misc_RNA (1)...(19): siRNA sense strand
gaguagcacuuguuaacga

SEQ ID NO: 1281587 - RNA, 19 nt, Homo sapiens
  misc_RNA (1)...(19): siRNA sense strand
gcagaugcuuauugguaaa

SEQ ID NO: 1281588 - RNA, 19 nt, Homo sapiens
  misc_RNA (1)...(19): siRNA sense strand
gaggugugcugcuucauca

SEQ ID NO: 1281589 - RNA, 19 nt, Homo sapiens
  misc_RNA (1)...(19): siRNA sense strand
ggaaauuugucuugaccau

SEQ ID NO: 1281590 - RNA, 19 nt, Homo sapiens
  misc_RNA (1)...(19): siRNA sense strand
guagagaucgguucuuuca

SEQ ID NO: 1281591 - RNA, 19 nt, Homo sapiens
  misc_RNA (1)...(19): siRNA sense strand
caucagaagaccaacauuu

SEQ ID NO: 1281592 - RNA, 19 nt, Homo sapiens
  misc_RNA (1)...(19): siRNA sense strand
aaacauagcuuccaaaacu

SEQ ID NO: 1281593 - RNA, 19 nt, Homo sapiens
  misc_RNA (1)...(19): siRNA sense strand
uagcagcggucacagagaa

SEQ ID NO: 1281594 - RNA, 19 nt, Homo sapiens
  misc_RNA (1)...(19): siRNA sense strand
gagaaaggcuacuguaacc

SEQ ID NO: 1281595 - RNA, 19 nt, Homo sapiens
  misc_RNA (1)...(19): siRNA sense strand
ucucuggacugaacaaaga

SEQ ID NO: 1281596 - RNA, 19 nt, Homo sapiens
  misc_RNA (1)...(19): siRNA sense strand
ggacggacuuugagcacau

SEQ ID NO: 1281597 - RNA, 19 nt, Homo sapiens
  misc_RNA (1)...(19): siRNA sense strand
ggaguggccacagauauaa

SEQ ID NO: 1281598 - RNA, 19 nt, Homo sapiens
  misc_RNA (1)...(19): siRNA sense strand
ucucuuggcucucugcaaa

SEQ ID NO: 1281599 - RNA, 19 nt, Homo sapiens
  misc_RNA (1)...(19): siRNA sense strand
gaaauccaggcagcacuua

SEQ ID NO: 1281600 - RNA, 19 nt, Homo sapiens
  misc_RNA (1)...(19): siRNA sense strand
ucuaccagauccuuaaauu

SEQ ID NO: 1281601 - RNA, 19 nt, Homo sapiens
  misc_RNA (1)...(19): siRNA sense strand
agacaaacauagcuuccaa

SEQ ID NO: 1281602 - RNA, 19 nt, Homo sapiens
  misc_RNA (1)...(19): siRNA sense strand
gcagugcuccuccuccaaa

SEQ ID NO: 1281603 - RNA, 19 nt, Homo sapiens
  misc_RNA (1)...(19): siRNA sense strand
cagaggaaauuugucuuga

SEQ ID NO: 1281604 - RNA, 19 nt, Homo sapiens
  misc_RNA (1)...(19): siRNA sense strand
guucaagacuccacaucug

SEQ ID NO: 1281605 - RNA, 19 nt, Homo sapiens
  misc_RNA (1)...(19): siRNA sense strand
cuaccagauccuuaaauua

SEQ ID NO: 1281606 - RNA, 19 nt, Homo sapiens
  misc_RNA (1)...(19): siRNA sense strand
ucacagagaaauaucauca

SEQ ID NO: 1281607 - RNA, 19 nt, Homo sapiens
  misc_RNA (1)...(19): siRNA sense strand
ccagauccuuaaauuacaa

SEQ ID NO: 1281608 - RNA, 19 nt, Homo sapiens
  misc_RNA (1)...(19): siRNA sense strand
gcauauagggcuagaagca

SEQ ID NO: 1281609 - RNA, 19 nt, Homo sapiens
  misc_RNA (1)...(19): siRNA sense strand
gaauccaccucuguucugu

SEQ ID NO: 1281610 - RNA, 19 nt, Homo sapiens
  misc_RNA (1)...(19): siRNA sense strand
aaugguagcugcagcaaag

SEQ ID NO: 1281611 - RNA, 19 nt, Homo sapiens
  misc_RNA (1)...(19): siRNA sense strand
acaaguaccacaucuucua

SEQ ID NO: 1281612 - RNA, 19 nt, Homo sapiens
  misc_RNA (1)...(19): siRNA sense strand
uaucugaugucacaaguac

SEQ ID NO: 1281613 - RNA, 19 nt, Homo sapiens
  misc_RNA (1)...(19): siRNA sense strand
gaccaaggcgccaggagaa

SEQ ID NO: 1281614 - RNA, 19 nt, Homo sapiens
  misc_RNA (1)...(19): siRNA sense strand
cuucauaccuggagucucu

SEQ ID NO: 1281615 - RNA, 19 nt, Homo sapiens
  misc_RNA (1)...(19): siRNA sense strand
ccaccucuguucuguagga

SEQ ID NO: 1281616 - RNA, 19 nt, Homo sapiens
  misc_RNA (1)...(19): siRNA sense strand
uggcagaugcuuauuggua

SEQ ID NO: 1281617 - RNA, 19 nt, Homo sapiens
  misc_RNA (1)...(19): siRNA sense strand
ggaccugcuucccgagaug

SEQ ID NO: 1281618 - RNA, 19 nt, Homo sapiens
  misc_RNA (1)...(19): siRNA sense strand
ucaccaagccagccaauuc

SEQ ID NO: 1281619 - RNA, 19 nt, Homo sapiens
  misc_RNA (1)...(19): siRNA sense strand
gaucucacccgcaaguuca

SEQ ID NO: 1281620 - RNA, 19 nt, Homo sapiens
  misc_RNA (1)...(19): siRNA sense strand
cgagcggaauuuaugcaaa

SEQ ID NO: 1281621 - RNA, 19 nt, Homo sapiens
  misc_RNA (1)...(19): siRNA sense strand
ggaaauccaggcagcacuu

SEQ ID NO: 1281622 - RNA, 19 nt, Homo sapiens
  misc_RNA (1)...(19): siRNA sense strand
guccaaggcuacugaucuu

SEQ ID NO: 1281623 - RNA, 19 nt, Homo sapiens
  misc_RNA (1)...(19): siRNA sense strand
ucagggcagccaagaauuu

SEQ ID NO: 1281624 - RNA, 19 nt, Homo sapiens
  misc_RNA (1)...(19): siRNA sense strand
cgacgccucuccacuccuu

SEQ ID NO: 1281625 - RNA, 19 nt, Homo sapiens
  misc_RNA (1)...(19): siRNA sense strand
gguggcagaugcuuauugg

SEQ ID NO: 1281626 - RNA, 19 nt, Homo sapiens
  misc_RNA (1)...(19): siRNA sense strand
aaauuugucuugaccaucu

SEQ ID NO: 1281627 - RNA, 19 nt, Homo sapiens
  misc_RNA (1)...(19): siRNA sense strand
gguggaugaucaugacuca

SEQ ID NO: 1281628 - RNA, 19 nt, Homo sapiens
  misc_RNA (1)...(19): siRNA sense strand
ucacaaguaccacaucuuc

SEQ ID NO: 1281629 - RNA, 19 nt, Homo sapiens
  misc_RNA (1)...(19): siRNA sense strand
gaucaucaauggcaaaagu

SEQ ID NO: 1281630 - RNA, 19 nt, Homo sapiens
  misc_RNA (1)...(19): siRNA sense strand
gagggucggcagcagauuu

SEQ ID NO: 1281631 - RNA, 19 nt, Homo sapiens
  misc_RNA (1)...(19): siRNA sense strand
agagaaagacaaacggaaa

SEQ ID NO: 1281632 - RNA, 19 nt, Homo sapiens
  misc_RNA (1)...(19): siRNA sense strand
gauggaguggccacagaua

SEQ ID NO: 1281633 - RNA, 19 nt, Homo sapiens
  misc_RNA (1)...(19): siRNA sense strand
uuaccuugcuuccaauuca

SEQ ID NO: 1281634 - RNA, 19 nt, Homo sapiens
  misc_RNA (1)...(19): siRNA sense strand
cguagaaacauggcauaua

SEQ ID NO: 1281635 - RNA, 19 nt, Homo sapiens
  misc_RNA (1)...(19): siRNA sense strand
gcacaccuaguccagauca

SEQ ID NO: 1281636 - RNA, 19 nt, Homo sapiens
  misc_RNA (1)...(19): siRNA sense strand
gaugauucagacaaacaua

SEQ ID NO: 1281637 - RNA, 19 nt, Homo sapiens
  misc_RNA (1)...(19): siRNA sense strand
uggagucucucuaucaauc

SEQ ID NO: 1281638 - RNA, 19 nt, Homo sapiens
  misc_RNA (1)...(19): siRNA sense strand
cacgaacucucuggacuga

SEQ ID NO: 1281639 - RNA, 19 nt, Homo sapiens
  misc_RNA (1)...(19): siRNA sense strand
gguaaugaguugugauucc

SEQ ID NO: 1281640 - RNA, 19 nt, Homo sapiens
  misc_RNA (1)...(19): siRNA sense strand
aaaccuggacggacuuuga

SEQ ID NO: 1281641 - RNA, 19 nt, Homo sapiens
  misc_RNA (1)...(19): siRNA sense strand
uggaguggccacagauaua

SEQ ID NO: 1281642 - RNA, 19 nt, Homo sapiens
  misc_RNA (1)...(19): siRNA sense strand
ccagagcuccuucuucaca

SEQ ID NO: 1281643 - RNA, 19 nt, Homo sapiens
  misc_RNA (1)...(19): siRNA sense strand
aaugaguugugauuccuuu

SEQ ID NO: 1281644 - RNA, 19 nt, Homo sapiens
  misc_RNA (1)...(19): siRNA sense strand
cgaacucucuggacugaac

SEQ ID NO: 1281645 - RNA, 19 nt, Homo sapiens
  misc_RNA (1)...(19): siRNA sense strand
uaccagauccuuaaauuac

SEQ ID NO: 1281646 - RNA, 19 nt, Homo sapiens
  misc_RNA (1)...(19): siRNA sense strand
ggaauccaccucuguucug

SEQ ID NO: 1281647 - RNA, 19 nt, Homo sapiens
  misc_RNA (1)...(19): siRNA sense strand
cgagggaacugucguuuuc

SEQ ID NO: 1281648 - RNA, 19 nt, Homo sapiens
  misc_RNA (1)...(19): siRNA sense strand
aagggaugauucagacaaa

SEQ ID NO: 1281649 - RNA, 19 nt, Homo sapiens
  misc_RNA (1)...(19): siRNA sense strand
caagggaugauucagacaa

SEQ ID NO: 1281650 - RNA, 19 nt, Homo sapiens
  misc_RNA (1)...(19): siRNA sense strand
auucaaacgucgacucuuc

SEQ ID NO: 1281651 - RNA, 19 nt, Homo sapiens
  misc_RNA (1)...(19): siRNA sense strand
cuucuaggguggaugauca

SEQ ID NO: 1281652 - RNA, 19 nt, Homo sapiens
  misc_RNA (1)...(19): siRNA sense strand
gcucuucucuuggcucucu

SEQ ID NO: 1281653 - RNA, 19 nt, Homo sapiens
  misc_RNA (1)...(19): siRNA sense strand
caggagaaagacuguguuu

SEQ ID NO: 1281654 - RNA, 19 nt, Homo sapiens
  misc_RNA (1)...(19): siRNA sense strand
ucacauccuggacgaauga

SEQ ID NO: 1281655 - RNA, 19 nt, Homo sapiens
  misc_RNA (1)...(19): siRNA sense strand
gcuagaagcaagaguagag

SEQ ID NO: 1281656 - RNA, 19 nt, Homo sapiens
  misc_RNA (1)...(19): siRNA sense strand
caggcuugcuuuccucaga

SEQ ID NO: 1281657 - RNA, 19 nt, Homo sapiens
  misc_RNA (1)...(19): siRNA sense strand
ccuggagucucucuaucaa

SEQ ID NO: 1281658 - RNA, 19 nt, Homo sapiens
  misc_RNA (1)...(19): siRNA sense strand
aaacgucgacucuucauac

SEQ ID NO: 1281659 - RNA, 19 nt, Homo sapiens
  misc_RNA (1)...(19): siRNA sense strand
caaacgucgacucuucaua

SEQ ID NO: 1281660 - RNA, 19 nt, Homo sapiens
  misc_RNA (1)...(19): siRNA sense strand
gagaagagaaagacaaacg

SEQ ID NO: 1281661 - RNA, 19 nt, Homo sapiens
  misc_RNA (1)...(19): siRNA sense strand
gauuugguauuggaagaau

SEQ ID NO: 1281662 - RNA, 19 nt, Homo sapiens
  misc_RNA (1)...(19): siRNA sense strand
ccagagacccugcgauaac

SEQ ID NO: 1281663 - RNA, 19 nt, Homo sapiens
  misc_RNA (1)...(19): siRNA sense strand
ggucugccgucgcaaguac

SEQ ID NO: 1281664 - RNA, 19 nt, Homo sapiens
  misc_RNA (1)...(19): siRNA sense strand
ucagaggaaauuugucuug

SEQ ID NO: 1281665 - RNA, 19 nt, Homo sapiens
  misc_RNA (1)...(19): siRNA sense strand
agaugaugcugacccaaga

SEQ ID NO: 1281666 - RNA, 19 nt, Homo sapiens
  misc_RNA (1)...(19): siRNA sense strand
ugccagagacccugcgaua

SEQ ID NO: 1281667 - RNA, 19 nt, Homo sapiens
  misc_RNA (1)...(19): siRNA sense strand
ggccacagauauaacuucu

SEQ ID NO: 1281668 - RNA, 19 nt, Homo sapiens
  misc_RNA (1)...(19): siRNA sense strand
cagaagaccaacauuugug

SEQ ID NO: 1281669 - RNA, 19 nt, Homo sapiens
  misc_RNA (1)...(19): siRNA sense strand
gguaugugcagcagaugaa

SEQ ID NO: 1281670 - RNA, 19 nt, Homo sapiens
  misc_RNA (1)...(19): siRNA sense strand
cgaauucucuggugguuga

SEQ ID NO: 1281671 - RNA, 19 nt, Homo sapiens
  misc_RNA (1)...(19): siRNA sense strand
cguaugagcuucggauuga

SEQ ID NO: 1281672 - RNA, 19 nt, Homo sapiens
  misc_RNA (1)...(19): siRNA sense strand
gcagcugcauggcuacuug

SEQ ID NO: 1281673 - RNA, 19 nt, Homo sapiens
  misc_RNA (1)...(19): siRNA sense strand
cagaaacuccgacauugaa

SEQ ID NO: 1281674 - RNA, 19 nt, Homo sapiens
  misc_RNA (1)...(19): siRNA sense strand
gcagagcacggacagcuau

SEQ ID NO: 1281675 - RNA, 19 nt, Homo sapiens
  misc_RNA (1)...(19): siRNA sense strand
ucagaaacuccgacauuga

SEQ ID NO: 1281676 - RNA, 19 nt, Homo sapiens
  misc_RNA (1)...(19): siRNA sense strand
cgacauugaacuucggaaa

SEQ ID NO: 1281677 - RNA, 19 nt, Homo sapiens
  misc_RNA (1)...(19): siRNA sense strand
gaagccaguaccagcguuu

SEQ ID NO: 1281678 - RNA, 19 nt, Homo sapiens
  misc_RNA (1)...(19): siRNA sense strand
gaaaggagagacggacauc

SEQ ID NO: 1281679 - RNA, 19 nt, Homo sapiens
  misc_RNA (1)...(19): siRNA sense strand
gaacuucggaaaggagaga

SEQ ID NO: 1281680 - RNA, 19 nt, Homo sapiens
  misc_RNA (1)...(19): siRNA sense strand
agacggacaucgggaggaa

SEQ ID NO: 1281681 - RNA, 19 nt, Homo sapiens
  misc_RNA (1)...(19): siRNA sense strand
gcaggacuccaaggucauu

SEQ ID NO: 1281682 - RNA, 19 nt, Homo sapiens
  misc_RNA (1)...(19): siRNA sense strand
acaccaaaguccuggagau

SEQ ID NO: 1281683 - RNA, 19 nt, Homo sapiens
  misc_RNA (1)...(19): siRNA sense strand
agagaaagcgaagccagua

SEQ ID NO: 1281684 - RNA, 19 nt, Homo sapiens
  misc_RNA (1)...(19): siRNA sense strand
acucagaaacuccgacauu

SEQ ID NO: 1281685 - RNA, 19 nt, Homo sapiens
  misc_RNA (1)...(19): siRNA sense strand
gccggaauccugaaacuca

SEQ ID NO: 1281686 - RNA, 19 nt, Homo sapiens
  misc_RNA (1)...(19): siRNA sense strand
cucagaaacuccgacauug

SEQ ID NO: 1281687 - RNA, 19 nt, Homo sapiens
  misc_RNA (1)...(19): siRNA sense strand
ggaaaggagagacggacau

SEQ ID NO: 1281688 - RNA, 19 nt, Homo sapiens
  misc_RNA (1)...(19): siRNA sense strand
cagcaugcgagccgucauu

SEQ ID NO: 1281689 - RNA, 19 nt, Homo sapiens
  misc_RNA (1)...(19): siRNA sense strand
aaacuccgacauugaacuu

SEQ ID NO: 1281690 - RNA, 19 nt, Homo sapiens
  misc_RNA (1)...(19): siRNA sense strand
agaaugagccgcugaugcu

SEQ ID NO: 1281691 - RNA, 19 nt, Homo sapiens
  misc_RNA (1)...(19): siRNA sense strand
gccgaauucucuggugguu

SEQ ID NO: 1281692 - RNA, 19 nt, Homo sapiens
  misc_RNA (1)...(19): siRNA sense strand
acauugaacuucggaaagg

SEQ ID NO: 1281693 - RNA, 19 nt, Homo sapiens
  misc_RNA (1)...(19): siRNA sense strand
gacauugaacuucggaaag

SEQ ID NO: 1281694 - RNA, 19 nt, Homo sapiens
  misc_RNA (1)...(19): siRNA sense strand
gaaacuccgacauugaacu

SEQ ID NO: 1281695 - RNA, 19 nt, Homo sapiens
  misc_RNA (1)...(19): siRNA sense strand
gcaugcgagccgucauuga

SEQ ID NO: 1281696 - RNA, 19 nt, Homo sapiens
  misc_RNA (1)...(19): siRNA sense strand
gaccugugcaagccgaauu

SEQ ID NO: 1281697 - RNA, 19 nt, Homo sapiens
  misc_RNA (1)...(19): siRNA sense strand
gaaagcgaagccaguacca

SEQ ID NO: 1281698 - RNA, 19 nt, Homo sapiens
  misc_RNA (1)...(19): siRNA sense strand
ggagaaugagccgcugaug

SEQ ID NO: 1281699 - RNA, 19 nt, Homo sapiens
  misc_RNA (1)...(19): siRNA sense strand
cgaauucucuggugguuga

SEQ ID NO: 1281700 - RNA, 19 nt, Homo sapiens
  misc_RNA (1)...(19): siRNA sense strand
cguaugagcuucggauuga

SEQ ID NO: 1281701 - RNA, 19 nt, Homo sapiens
  misc_RNA (1)...(19): siRNA sense strand
gcagcugcauggcuacuug

SEQ ID NO: 1281702 - RNA, 19 nt, Homo sapiens
  misc_RNA (1)...(19): siRNA sense strand
cagaaacuccgacauugaa

SEQ ID NO: 1281703 - RNA, 19 nt, Homo sapiens
  misc_RNA (1)...(19): siRNA sense strand
gcagagcacggacagcuau

SEQ ID NO: 1281704 - RNA, 19 nt, Homo sapiens
  misc_RNA (1)...(19): siRNA sense strand
ucagaaacuccgacauuga

SEQ ID NO: 1281705 - RNA, 19 nt, Homo sapiens
  misc_RNA (1)...(19): siRNA sense strand
cgacauugaacuucggaaa

SEQ ID NO: 1281706 - RNA, 19 nt, Homo sapiens
  misc_RNA (1)...(19): siRNA sense strand
gaagccaguaccagcguuu

SEQ ID NO: 1281707 - RNA, 19 nt, Homo sapiens
  misc_RNA (1)...(19): siRNA sense strand
gaaaggagagacggacauc

SEQ ID NO: 1281708 - RNA, 19 nt, Homo sapiens
  misc_RNA (1)...(19): siRNA sense strand
gaacuucggaaaggagaga

SEQ ID NO: 1281709 - RNA, 19 nt, Homo sapiens
  misc_RNA (1)...(19): siRNA sense strand
agacggacaucgggaggaa

SEQ ID NO: 1281710 - RNA, 19 nt, Homo sapiens
  misc_RNA (1)...(19): siRNA sense strand
gcaggacuccaaggucauu

SEQ ID NO: 1281711 - RNA, 19 nt, Homo sapiens
  misc_RNA (1)...(19): siRNA sense strand
acaccaaaguccuggagau

SEQ ID NO: 1281712 - RNA, 19 nt, Homo sapiens
  misc_RNA (1)...(19): siRNA sense strand
agagaaagcgaagccagua

SEQ ID NO: 1281713 - RNA, 19 nt, Homo sapiens
  misc_RNA (1)...(19): siRNA sense strand
acucagaaacuccgacauu

SEQ ID NO: 1281714 - RNA, 19 nt, Homo sapiens
  misc_RNA (1)...(19): siRNA sense strand
gccggaauccugaaacuca

SEQ ID NO: 1281715 - RNA, 19 nt, Homo sapiens
  misc_RNA (1)...(19): siRNA sense strand
cucagaaacuccgacauug

SEQ ID NO: 1281716 - RNA, 19 nt, Homo sapiens
  misc_RNA (1)...(19): siRNA sense strand
ggaaaggagagacggacau

SEQ ID NO: 1281717 - RNA, 19 nt, Homo sapiens
  misc_RNA (1)...(19): siRNA sense strand
cagcaugcgagccgucauu

SEQ ID NO: 1281718 - RNA, 19 nt, Homo sapiens
  misc_RNA (1)...(19): siRNA sense strand
aaacuccgacauugaacuu

SEQ ID NO: 1281719 - RNA, 19 nt, Homo sapiens
  misc_RNA (1)...(19): siRNA sense strand
agaaugagccgcugaugcu

SEQ ID NO: 1281720 - RNA, 19 nt, Homo sapiens
  misc_RNA (1)...(19): siRNA sense strand
gccgaauucucuggugguu

SEQ ID NO: 1281721 - RNA, 19 nt, Homo sapiens
  misc_RNA (1)...(19): siRNA sense strand
acauugaacuucggaaagg

SEQ ID NO: 1281722 - RNA, 19 nt, Homo sapiens
  misc_RNA (1)...(19): siRNA sense strand
gacauugaacuucggaaag

SEQ ID NO: 1281723 - RNA, 19 nt, Homo sapiens
  misc_RNA (1)...(19): siRNA sense strand
gaaacuccgacauugaacu

SEQ ID NO: 1281724 - RNA, 19 nt, Homo sapiens
  misc_RNA (1)...(19): siRNA sense strand
gcaugcgagccgucauuga

SEQ ID NO: 1281725 - RNA, 19 nt, Homo sapiens
  misc_RNA (1)...(19): siRNA sense strand
gaccugugcaagccgaauu

SEQ ID NO: 1281726 - RNA, 19 nt, Homo sapiens
  misc_RNA (1)...(19): siRNA sense strand
gaaagcgaagccaguacca

SEQ ID NO: 1281727 - RNA, 19 nt, Homo sapiens
  misc_RNA (1)...(19): siRNA sense strand
ggagaaugagccgcugaug

SEQ ID NO: 1281728 - RNA, 19 nt, Homo sapiens
  misc_RNA (1)...(19): siRNA sense strand
cgaauucucuggugguuga

SEQ ID NO: 1281729 - RNA, 19 nt, Homo sapiens
  misc_RNA (1)...(19): siRNA sense strand
cagaaacuccgacauugaa

SEQ ID NO: 1281730 - RNA, 19 nt, Homo sapiens
  misc_RNA (1)...(19): siRNA sense strand
gcagagcacggacagcuau

SEQ ID NO: 1281731 - RNA, 19 nt, Homo sapiens
  misc_RNA (1)...(19): siRNA sense strand
ucagaaacuccgacauuga

SEQ ID NO: 1281732 - RNA, 19 nt, Homo sapiens
  misc_RNA (1)...(19): siRNA sense strand
cgacauugaacuucggaaa

SEQ ID NO: 1281733 - RNA, 19 nt, Homo sapiens
  misc_RNA (1)...(19): siRNA sense strand
gaagccaguaccagcguuu

SEQ ID NO: 1281734 - RNA, 19 nt, Homo sapiens
  misc_RNA (1)...(19): siRNA sense strand
gaaaggagagacggacauc

SEQ ID NO: 1281735 - RNA, 19 nt, Homo sapiens
  misc_RNA (1)...(19): siRNA sense strand
gaacuucggaaaggagaga

SEQ ID NO: 1281736 - RNA, 19 nt, Homo sapiens
  misc_RNA (1)...(19): siRNA sense strand
agacggacaucgggaggaa

SEQ ID NO: 1281737 - RNA, 19 nt, Homo sapiens
  misc_RNA (1)...(19): siRNA sense strand
gcaggacuccaaggucauu

SEQ ID NO: 1281738 - RNA, 19 nt, Homo sapiens
  misc_RNA (1)...(19): siRNA sense strand
gccggaauccugaaacuca

SEQ ID NO: 1281739 - RNA, 19 nt, Homo sapiens
  misc_RNA (1)...(19): siRNA sense strand
agagaaagcgaagccagua

SEQ ID NO: 1281740 - RNA, 19 nt, Homo sapiens
  misc_RNA (1)...(19): siRNA sense strand
acucagaaacuccgacauu

SEQ ID NO: 1281741 - RNA, 19 nt, Homo sapiens
  misc_RNA (1)...(19): siRNA sense strand
acaccaaaguccuggagau

SEQ ID NO: 1281742 - RNA, 19 nt, Homo sapiens
  misc_RNA (1)...(19): siRNA sense strand
cucagaaacuccgacauug

SEQ ID NO: 1281743 - RNA, 19 nt, Homo sapiens
  misc_RNA (1)...(19): siRNA sense strand
ggaaaggagagacggacau

SEQ ID NO: 1281744 - RNA, 19 nt, Homo sapiens
  misc_RNA (1)...(19): siRNA sense strand
cagcaugcgagccgucauu

SEQ ID NO: 1281745 - RNA, 19 nt, Homo sapiens
  misc_RNA (1)...(19): siRNA sense strand
aaacuccgacauugaacuu

SEQ ID NO: 1281746 - RNA, 19 nt, Homo sapiens
  misc_RNA (1)...(19): siRNA sense strand
gcaugcgagccgucauuga

SEQ ID NO: 1281747 - RNA, 19 nt, Homo sapiens
  misc_RNA (1)...(19): siRNA sense strand
gccgaauucucuggugguu

SEQ ID NO: 1281748 - RNA, 19 nt, Homo sapiens
  misc_RNA (1)...(19): siRNA sense strand
acauugaacuucggaaagg

SEQ ID NO: 1281749 - RNA, 19 nt, Homo sapiens
  misc_RNA (1)...(19): siRNA sense strand
gacauugaacuucggaaag

SEQ ID NO: 1281750 - RNA, 19 nt, Homo sapiens
  misc_RNA (1)...(19): siRNA sense strand
gaaacuccgacauugaacu

SEQ ID NO: 1281751 - RNA, 19 nt, Homo sapiens
  misc_RNA (1)...(19): siRNA sense strand
gaccugugcaagccgaauu

SEQ ID NO: 1281752 - RNA, 19 nt, Homo sapiens
  misc_RNA (1)...(19): siRNA sense strand
gaaagcgaagccaguacca

SEQ ID NO: 1281753 - RNA, 19 nt, Homo sapiens
  misc_RNA (1)...(19): siRNA sense strand
cgaauucucuggugguuga

SEQ ID NO: 1281754 - RNA, 19 nt, Homo sapiens
  misc_RNA (1)...(19): siRNA sense strand
cguaugagcuucggauuga

SEQ ID NO: 1281755 - RNA, 19 nt, Homo sapiens
  misc_RNA (1)...(19): siRNA sense strand
gcagcugcauggcuacuug

SEQ ID NO: 1281756 - RNA, 19 nt, Homo sapiens
  misc_RNA (1)...(19): siRNA sense strand
cagaaacuccgacauugaa

SEQ ID NO: 1281757 - RNA, 19 nt, Homo sapiens
  misc_RNA (1)...(19): siRNA sense strand
gcagagcacggacagcuau

SEQ ID NO: 1281758 - RNA, 19 nt, Homo sapiens
  misc_RNA (1)...(19): siRNA sense strand
ucagaaacuccgacauuga

SEQ ID NO: 1281759 - RNA, 19 nt, Homo sapiens
  misc_RNA (1)...(19): siRNA sense strand
cgacauugaacuucggaaa

SEQ ID NO: 1281760 - RNA, 19 nt, Homo sapiens
  misc_RNA (1)...(19): siRNA sense strand
gaagccaguaccagcguuu

SEQ ID NO: 1281761 - RNA, 19 nt, Homo sapiens
  misc_RNA (1)...(19): siRNA sense strand
gaaaggagagacggacauc

SEQ ID NO: 1281762 - RNA, 19 nt, Homo sapiens
  misc_RNA (1)...(19): siRNA sense strand
gaacuucggaaaggagaga

SEQ ID NO: 1281763 - RNA, 19 nt, Homo sapiens
  misc_RNA (1)...(19): siRNA sense strand
agacggacaucgggaggaa

SEQ ID NO: 1281764 - RNA, 19 nt, Homo sapiens
  misc_RNA (1)...(19): siRNA sense strand
gcaggacuccaaggucauu

SEQ ID NO: 1281765 - RNA, 19 nt, Homo sapiens
  misc_RNA (1)...(19): siRNA sense strand
acaccaaaguccuggagau

SEQ ID NO: 1281766 - RNA, 19 nt, Homo sapiens
  misc_RNA (1)...(19): siRNA sense strand
agagaaagcgaagccagua

SEQ ID NO: 1281767 - RNA, 19 nt, Homo sapiens
  misc_RNA (1)...(19): siRNA sense strand
acucagaaacuccgacauu

SEQ ID NO: 1281768 - RNA, 19 nt, Homo sapiens
  misc_RNA (1)...(19): siRNA sense strand
gccggaauccugaaacuca

SEQ ID NO: 1281769 - RNA, 19 nt, Homo sapiens
  misc_RNA (1)...(19): siRNA sense strand
cucagaaacuccgacauug

SEQ ID NO: 1281770 - RNA, 19 nt, Homo sapiens
  misc_RNA (1)...(19): siRNA sense strand
ggaaaggagagacggacau

SEQ ID NO: 1281771 - RNA, 19 nt, Homo sapiens
  misc_RNA (1)...(19): siRNA sense strand
cagcaugcgagccgucauu

SEQ ID NO: 1281772 - RNA, 19 nt, Homo sapiens
  misc_RNA (1)...(19): siRNA sense strand
aaacuccgacauugaacuu

SEQ ID NO: 1281773 - RNA, 19 nt, Homo sapiens
  misc_RNA (1)...(19): siRNA sense strand
agaaugagccgcugaugcu

SEQ ID NO: 1281774 - RNA, 19 nt, Homo sapiens
  misc_RNA (1)...(19): siRNA sense strand
gccgaauucucuggugguu

SEQ ID NO: 1281775 - RNA, 19 nt, Homo sapiens
  misc_RNA (1)...(19): siRNA sense strand
acauugaacuucggaaagg

SEQ ID NO: 1281776 - RNA, 19 nt, Homo sapiens
  misc_RNA (1)...(19): siRNA sense strand
gacauugaacuucggaaag

SEQ ID NO: 1281777 - RNA, 19 nt, Homo sapiens
  misc_RNA (1)...(19): siRNA sense strand
gaaacuccgacauugaacu

SEQ ID NO: 1281778 - RNA, 19 nt, Homo sapiens
  misc_RNA (1)...(19): siRNA sense strand
gcaugcgagccgucauuga

SEQ ID NO: 1281779 - RNA, 19 nt, Homo sapiens
  misc_RNA (1)...(19): siRNA sense strand
gaccugugcaagccgaauu

SEQ ID NO: 1281780 - RNA, 19 nt, Homo sapiens
  misc_RNA (1)...(19): siRNA sense strand
gaaagcgaagccaguacca

SEQ ID NO: 1281781 - RNA, 19 nt, Homo sapiens
  misc_RNA (1)...(19): siRNA sense strand
ggagaaugagccgcugaug

SEQ ID NO: 1281782 - RNA, 19 nt, Homo sapiens
  misc_RNA (1)...(19): siRNA sense strand
cgaauucucuggugguuga

SEQ ID NO: 1281783 - RNA, 19 nt, Homo sapiens
  misc_RNA (1)...(19): siRNA sense strand
cguaugagcuucggauuga

SEQ ID NO: 1281784 - RNA, 19 nt, Homo sapiens
  misc_RNA (1)...(19): siRNA sense strand
gcagcugcauggcuacuug

SEQ ID NO: 1281785 - RNA, 19 nt, Homo sapiens
  misc_RNA (1)...(19): siRNA sense strand
cagaaacuccgacauugaa

SEQ ID NO: 1281786 - RNA, 19 nt, Homo sapiens
  misc_RNA (1)...(19): siRNA sense strand
gcagagcacggacagcuau

SEQ ID NO: 1281787 - RNA, 19 nt, Homo sapiens
  misc_RNA (1)...(19): siRNA sense strand
ucagaaacuccgacauuga

SEQ ID NO: 1281788 - RNA, 19 nt, Homo sapiens
  misc_RNA (1)...(19): siRNA sense strand
cgacauugaacuucggaaa

SEQ ID NO: 1281789 - RNA, 19 nt, Homo sapiens
  misc_RNA (1)...(19): siRNA sense strand
gaagccaguaccagcguuu

SEQ ID NO: 1281790 - RNA, 19 nt, Homo sapiens
  misc_RNA (1)...(19): siRNA sense strand
gaaaggagagacggacauc

SEQ ID NO: 1281791 - RNA, 19 nt, Homo sapiens
  misc_RNA (1)...(19): siRNA sense strand
gaacuucggaaaggagaga

SEQ ID NO: 1281792 - RNA, 19 nt, Homo sapiens
  misc_RNA (1)...(19): siRNA sense strand
agacggacaucgggaggaa

SEQ ID NO: 1281793 - RNA, 19 nt, Homo sapiens
  misc_RNA (1)...(19): siRNA sense strand
gcaggacuccaaggucauu

SEQ ID NO: 1281794 - RNA, 19 nt, Homo sapiens
  misc_RNA (1)...(19): siRNA sense strand
acaccaaaguccuggagau

SEQ ID NO: 1281795 - RNA, 19 nt, Homo sapiens
  misc_RNA (1)...(19): siRNA sense strand
agagaaagcgaagccagua

SEQ ID NO: 1281796 - RNA, 19 nt, Homo sapiens
  misc_RNA (1)...(19): siRNA sense strand
acucagaaacuccgacauu

SEQ ID NO: 1281797 - RNA, 19 nt, Homo sapiens
  misc_RNA (1)...(19): siRNA sense strand
gccggaauccugaaacuca

SEQ ID NO: 1281798 - RNA, 19 nt, Homo sapiens
  misc_RNA (1)...(19): siRNA sense strand
cucagaaacuccgacauug

SEQ ID NO: 1281799 - RNA, 19 nt, Homo sapiens
  misc_RNA (1)...(19): siRNA sense strand
ggaaaggagagacggacau

SEQ ID NO: 1281800 - RNA, 19 nt, Homo sapiens
  misc_RNA (1)...(19): siRNA sense strand
cagcaugcgagccgucauu

SEQ ID NO: 1281801 - RNA, 19 nt, Homo sapiens
  misc_RNA (1)...(19): siRNA sense strand
aaacuccgacauugaacuu

SEQ ID NO: 1281802 - RNA, 19 nt, Homo sapiens
  misc_RNA (1)...(19): siRNA sense strand
agaaugagccgcugaugcu

SEQ ID NO: 1281803 - RNA, 19 nt, Homo sapiens
  misc_RNA (1)...(19): siRNA sense strand
gccgaauucucuggugguu

SEQ ID NO: 1281804 - RNA, 19 nt, Homo sapiens
  misc_RNA (1)...(19): siRNA sense strand
acauugaacuucggaaagg

SEQ ID NO: 1281805 - RNA, 19 nt, Homo sapiens
  misc_RNA (1)...(19): siRNA sense strand
gacauugaacuucggaaag

SEQ ID NO: 1281806 - RNA, 19 nt, Homo sapiens
  misc_RNA (1)...(19): siRNA sense strand
gaaacuccgacauugaacu

SEQ ID NO: 1281807 - RNA, 19 nt, Homo sapiens
  misc_RNA (1)...(19): siRNA sense strand
gcaugcgagccgucauuga

SEQ ID NO: 1281808 - RNA, 19 nt, Homo sapiens
  misc_RNA (1)...(19): siRNA sense strand
gaccugugcaagccgaauu

SEQ ID NO: 1281809 - RNA, 19 nt, Homo sapiens
  misc_RNA (1)...(19): siRNA sense strand
gaaagcgaagccaguacca

SEQ ID NO: 1281810 - RNA, 19 nt, Homo sapiens
  misc_RNA (1)...(19): siRNA sense strand
ggagaaugagccgcugaug

SEQ ID NO: 1281811 - RNA, 19 nt, Homo sapiens
  misc_RNA (1)...(19): siRNA sense strand
agaagaaacugcucaagaa

SEQ ID NO: 1281812 - RNA, 19 nt, Homo sapiens
  misc_RNA (1)...(19): siRNA sense strand
ucaagagccugaagaauau

SEQ ID NO: 1281813 - RNA, 19 nt, Homo sapiens
  misc_RNA (1)...(19): siRNA sense strand
gcuccugggugaccuguua

SEQ ID NO: 1281814 - RNA, 19 nt, Homo sapiens
  misc_RNA (1)...(19): siRNA sense strand
ugaagcaacugcagaaaga

SEQ ID NO: 1281815 - RNA, 19 nt, Homo sapiens
  misc_RNA (1)...(19): siRNA sense strand
ggagccaucucuucccuuu

SEQ ID NO: 1281816 - RNA, 19 nt, Homo sapiens
  misc_RNA (1)...(19): siRNA sense strand
ccagauggguccacacuga

SEQ ID NO: 1281817 - RNA, 19 nt, Homo sapiens
  misc_RNA (1)...(19): siRNA sense strand
ucucacagcucaaguaugu

SEQ ID NO: 1281818 - RNA, 19 nt, Homo sapiens
  misc_RNA (1)...(19): siRNA sense strand
gcacagauuugagguagau

SEQ ID NO: 1281819 - RNA, 19 nt, Homo sapiens
  misc_RNA (1)...(19): siRNA sense strand
acagagauguggcagagua

SEQ ID NO: 1281820 - RNA, 19 nt, Homo sapiens
  misc_RNA (1)...(19): siRNA sense strand
uggugaagcuguugaauga

SEQ ID NO: 1281821 - RNA, 19 nt, Homo sapiens
  misc_RNA (1)...(19): siRNA sense strand
acacggauauuuacagaga

SEQ ID NO: 1281822 - RNA, 19 nt, Homo sapiens
  misc_RNA (1)...(19): siRNA sense strand
acacccagcuguucucaaa

SEQ ID NO: 1281823 - RNA, 19 nt, Homo sapiens
  misc_RNA (1)...(19): siRNA sense strand
ggacacagaugccccacua

SEQ ID NO: 1281824 - RNA, 19 nt, Homo sapiens
  misc_RNA (1)...(19): siRNA sense strand
cucaagagccugaagaaua

SEQ ID NO: 1281825 - RNA, 19 nt, Homo sapiens
  misc_RNA (1)...(19): siRNA sense strand
ccacaggcaucuccuaugg

SEQ ID NO: 1281826 - RNA, 19 nt, Homo sapiens
  misc_RNA (1)...(19): siRNA sense strand
gcagaggugugguguggau

SEQ ID NO: 1281827 - RNA, 19 nt, Homo sapiens
  misc_RNA (1)...(19): siRNA sense strand
gggcggaucugcuuaucug

SEQ ID NO: 1281828 - RNA, 19 nt, Homo sapiens
  misc_RNA (1)...(19): siRNA sense strand
ccaugaugcugucaccuuu

SEQ ID NO: 1281829 - RNA, 19 nt, Homo sapiens
  misc_RNA (1)...(19): siRNA sense strand
agauugagguggaggugua

SEQ ID NO: 1281830 - RNA, 19 nt, Homo sapiens
  misc_RNA (1)...(19): siRNA sense strand
gaccuuugcugucaugucu

SEQ ID NO: 1281831 - RNA, 19 nt, Homo sapiens
  misc_RNA (1)...(19): siRNA sense strand
agacacggauauuuacaga

SEQ ID NO: 1281832 - RNA, 19 nt, Homo sapiens
  misc_RNA (1)...(19): siRNA sense strand
gaacgacuccaugaucaau

SEQ ID NO: 1281833 - RNA, 19 nt, Homo sapiens
  misc_RNA (1)...(19): siRNA sense strand
gaagaaacugcucaagaag

SEQ ID NO: 1281834 - RNA, 19 nt, Homo sapiens
  misc_RNA (1)...(19): siRNA sense strand
ugccagacacggauauuua

SEQ ID NO: 1281835 - RNA, 19 nt, Homo sapiens
  misc_RNA (1)...(19): siRNA sense strand
ccacugucccucaucuaua

SEQ ID NO: 1281836 - RNA, 19 nt, Homo sapiens
  misc_RNA (1)...(19): siRNA sense strand
gugaagcuguugaaugaca

SEQ ID NO: 1281837 - RNA, 19 nt, Homo sapiens
  misc_RNA (1)...(19): siRNA sense strand
gcagccaucaucauuguga

SEQ ID NO: 1281838 - RNA, 19 nt, Homo sapiens
  misc_RNA (1)...(19): siRNA sense strand
ggucuaaagcacagauuug

SEQ ID NO: 1281839 - RNA, 19 nt, Homo sapiens
  misc_RNA (1)...(19): siRNA sense strand
ccucaucauugucaaacuu

SEQ ID NO: 1281840 - RNA, 19 nt, Homo sapiens
  misc_RNA (1)...(19): siRNA sense strand
ggagauaagauggaagaug

SEQ ID NO: 1281841 - RNA, 19 nt, Homo sapiens
  misc_RNA (1)...(19): siRNA sense strand
gagcucaggagauaagaug

SEQ ID NO: 1281842 - RNA, 19 nt, Homo sapiens
  misc_RNA (1)...(19): siRNA sense strand
gcagaaagaggagaagcuu

SEQ ID NO: 1281843 - RNA, 19 nt, Homo sapiens
  misc_RNA (1)...(19): siRNA sense strand
gcugaguucuacagugaug

SEQ ID NO: 1281844 - RNA, 19 nt, Homo sapiens
  misc_RNA (1)...(19): siRNA sense strand
ucaaugagacagccagaga

SEQ ID NO: 1281845 - RNA, 19 nt, Homo sapiens
  misc_RNA (1)...(19): siRNA sense strand
guacucagaggccaaggaa

SEQ ID NO: 1281846 - RNA, 19 nt, Homo sapiens
  misc_RNA (1)...(19): siRNA sense strand
aagaagaaacugcucaaga

SEQ ID NO: 1281847 - RNA, 19 nt, Homo sapiens
  misc_RNA (1)...(19): siRNA sense strand
aggagaagcuucggaaaca

SEQ ID NO: 1281848 - RNA, 19 nt, Homo sapiens
  misc_RNA (1)...(19): siRNA sense strand
gaggcgagacuaccacaug

SEQ ID NO: 1281849 - RNA, 19 nt, Homo sapiens
  misc_RNA (1)...(19): siRNA sense strand
gaagaugcaacagccaaug

SEQ ID NO: 1281850 - RNA, 19 nt, Homo sapiens
  misc_RNA (1)...(19): siRNA sense strand
uaagauggaagaugcaaca

SEQ ID NO: 1281851 - RNA, 19 nt, Homo sapiens
  misc_RNA (1)...(19): siRNA sense strand
cuucaucuacuuccuguuu

SEQ ID NO: 1281852 - RNA, 19 nt, Homo sapiens
  misc_RNA (1)...(19): siRNA sense strand
augcugaguucuacaguga

SEQ ID NO: 1281853 - RNA, 19 nt, Homo sapiens
  misc_RNA (1)...(19): siRNA sense strand
gugguuggguuugccauug

SEQ ID NO: 1281854 - RNA, 19 nt, Homo sapiens
  misc_RNA (1)...(19): siRNA sense strand
acgacuccaugaucaauga

SEQ ID NO: 1281855 - RNA, 19 nt, Homo sapiens
  misc_RNA (1)...(19): siRNA sense strand
augcauccaucaccaagaa

SEQ ID NO: 1281856 - RNA, 19 nt, Homo sapiens
  misc_RNA (1)...(19): siRNA sense strand
gcuugaggcugggcacuuc

SEQ ID NO: 1281857 - RNA, 19 nt, Homo sapiens
  misc_RNA (1)...(19): siRNA sense strand
gcgagacuaccacauggaa

SEQ ID NO: 1281858 - RNA, 19 nt, Homo sapiens
  misc_RNA (1)...(19): siRNA sense strand
caggagauaagauggaaga

SEQ ID NO: 1281859 - RNA, 19 nt, Homo sapiens
  misc_RNA (1)...(19): siRNA sense strand
gaggagaagcuucggaaac

SEQ ID NO: 1281860 - RNA, 19 nt, Homo sapiens
  misc_RNA (1)...(19): siRNA sense strand
uugaacgacuccaugauca

SEQ ID NO: 1281861 - RNA, 19 nt, Homo sapiens
  misc_RNA (1)...(19): siRNA sense strand
caacagccaauggucaaga

SEQ ID NO: 1281862 - RNA, 19 nt, Homo sapiens
  misc_RNA (1)...(19): siRNA sense strand
ggaagaugcaacagccaau

SEQ ID NO: 1281863 - RNA, 19 nt, Homo sapiens
  misc_RNA (1)...(19): siRNA sense strand
cuucuacccugucuucauc

SEQ ID NO: 1281864 - RNA, 19 nt, Homo sapiens
  misc_RNA (1)...(19): siRNA sense strand
guguuuggccuccaucuga

SEQ ID NO: 1281865 - RNA, 19 nt, Homo sapiens
  misc_RNA (1)...(19): siRNA sense strand
gaagaagaaacugcucaag

SEQ ID NO: 1281866 - RNA, 19 nt, Homo sapiens
  misc_RNA (1)...(19): siRNA sense strand
cccgugaguugcucuaugu

SEQ ID NO: 1281867 - RNA, 19 nt, Homo sapiens
  misc_RNA (1)...(19): siRNA sense strand
ggagaagcuucggaaacag

SEQ ID NO: 1281868 - RNA, 19 nt, Homo sapiens
  misc_RNA (1)...(19): siRNA sense strand
gauaagauggaagaugcaa

SEQ ID NO: 1281869 - RNA, 19 nt, Homo sapiens
  misc_RNA (1)...(19): siRNA sense strand
ugaagcuguugaaugacaa

SEQ ID NO: 1281870 - RNA, 19 nt, Homo sapiens
  misc_RNA (1)...(19): siRNA sense strand
gcucaggagauaagaugga

SEQ ID NO: 1281871 - RNA, 19 nt, Homo sapiens
  misc_RNA (1)...(19): siRNA sense strand
gcuaccggguggacagcaa

SEQ ID NO: 1281872 - RNA, 19 nt, Homo sapiens
  misc_RNA (1)...(19): siRNA sense strand
ggugggcagugugacagaa

SEQ ID NO: 1281873 - RNA, 19 nt, Homo sapiens
  misc_RNA (1)...(19): siRNA sense strand
cagcucaaguauguguuug

SEQ ID NO: 1281874 - RNA, 19 nt, Homo sapiens
  misc_RNA (1)...(19): siRNA sense strand
guggugaagcuguugaaug

SEQ ID NO: 1281875 - RNA, 19 nt, Homo sapiens
  misc_RNA (1)...(19): siRNA sense strand
cacugucccucaucuauac

SEQ ID NO: 1281876 - RNA, 19 nt, Homo sapiens
  misc_RNA (1)...(19): siRNA sense strand
gccacugucccucaucuau

SEQ ID NO: 1281877 - RNA, 19 nt, Homo sapiens
  misc_RNA (1)...(19): siRNA sense strand
gcacuucccggcacaucuc

SEQ ID NO: 1281878 - RNA, 19 nt, Homo sapiens
  misc_RNA (1)...(19): siRNA sense strand
ccuauggcaugggucuaaa

SEQ ID NO: 1281879 - RNA, 19 nt, Homo sapiens
  misc_RNA (1)...(19): siRNA sense strand
ugggugcccucuccuuugu

SEQ ID NO: 1281880 - RNA, 19 nt, Homo sapiens
  misc_RNA (1)...(19): siRNA sense strand
gggucuaaagcacagauuu

SEQ ID NO: 1281881 - RNA, 19 nt, Homo sapiens
  misc_RNA (1)...(19): siRNA sense strand
gcagcugcccaugccgaua

SEQ ID NO: 1281882 - RNA, 19 nt, Homo sapiens
  misc_RNA (1)...(19): siRNA sense strand
aacagccaauggucaagaa

SEQ ID NO: 1281883 - RNA, 19 nt, Homo sapiens
  misc_RNA (1)...(19): siRNA sense strand
cuacagugaugcgcugaag

SEQ ID NO: 1281884 - RNA, 19 nt, Homo sapiens
  misc_RNA (1)...(19): siRNA sense strand
uuaucuggcuggugaccuu

SEQ ID NO: 1281885 - RNA, 19 nt, Homo sapiens
  misc_RNA (1)...(19): siRNA sense strand
gucuaaagcacagauuuga

SEQ ID NO: 1281886 - RNA, 19 nt, Homo sapiens
  misc_RNA (1)...(19): siRNA sense strand
gggccacugucccucaucu

SEQ ID NO: 1281887 - RNA, 19 nt, Homo sapiens
  misc_RNA (1)...(19): siRNA sense strand
ggugagcucaggagauaag

SEQ ID NO: 1281888 - RNA, 19 nt, Homo sapiens
  misc_RNA (1)...(19): siRNA sense strand
uuccucaucucccagaaga

SEQ ID NO: 1281889 - RNA, 19 nt, Homo sapiens
  misc_RNA (1)...(19): siRNA sense strand
acggauauuuacagagaug

SEQ ID NO: 1281890 - RNA, 19 nt, Homo sapiens
  misc_RNA (1)...(19): siRNA sense strand
gggccucaguaaccuuauc

SEQ ID NO: 1281891 - RNA, 19 nt, Homo sapiens
  misc_RNA (1)...(19): siRNA sense strand
aaagcacagauuugaggua

SEQ ID NO: 1281892 - RNA, 19 nt, Homo sapiens
  misc_RNA (1)...(19): siRNA sense strand
ggccacaggcaucuccuau

SEQ ID NO: 1281893 - RNA, 19 nt, Homo sapiens
  misc_RNA (1)...(19): siRNA sense strand
cagccaucaucauugugaa

SEQ ID NO: 1281894 - RNA, 19 nt, Homo sapiens
  misc_RNA (1)...(19): siRNA sense strand
ggcugggccugauccacuu

SEQ ID NO: 1281895 - RNA, 19 nt, Homo sapiens
  misc_RNA (1)...(19): siRNA sense strand
cagccaauggucaagaaga

SEQ ID NO: 1281896 - RNA, 19 nt, Homo sapiens
  misc_RNA (1)...(19): siRNA sense strand
acucagaggccaaggaagu

SEQ ID NO: 1281897 - RNA, 19 nt, Homo sapiens
  misc_RNA (1)...(19): siRNA sense strand
gugccagacacggauauuu

SEQ ID NO: 1281898 - RNA, 19 nt, Homo sapiens
  misc_RNA (1)...(19): siRNA sense strand
ggugguugcggucaucuuc

SEQ ID NO: 1281899 - RNA, 19 nt, Homo sapiens
  misc_RNA (1)...(19): siRNA sense strand
agaagaaacugcucaagaa

SEQ ID NO: 1281900 - RNA, 19 nt, Homo sapiens
  misc_RNA (1)...(19): siRNA sense strand
ucaagagccugaagaauau

SEQ ID NO: 1281901 - RNA, 19 nt, Homo sapiens
  misc_RNA (1)...(19): siRNA sense strand
gcuccugggugaccuguua

SEQ ID NO: 1281902 - RNA, 19 nt, Homo sapiens
  misc_RNA (1)...(19): siRNA sense strand
ugaagcaacugcagaaaga

SEQ ID NO: 1281903 - RNA, 19 nt, Homo sapiens
  misc_RNA (1)...(19): siRNA sense strand
ggagccaucucuucccuuu

SEQ ID NO: 1281904 - RNA, 19 nt, Homo sapiens
  misc_RNA (1)...(19): siRNA sense strand
ccagauggguccacacuga

SEQ ID NO: 1281905 - RNA, 19 nt, Homo sapiens
  misc_RNA (1)...(19): siRNA sense strand
ucucacagcucaaguaugu

SEQ ID NO: 1281906 - RNA, 19 nt, Homo sapiens
  misc_RNA (1)...(19): siRNA sense strand
gcacagauuugagguagau

SEQ ID NO: 1281907 - RNA, 19 nt, Homo sapiens
  misc_RNA (1)...(19): siRNA sense strand
acagagauguggcagagua

SEQ ID NO: 1281908 - RNA, 19 nt, Homo sapiens
  misc_RNA (1)...(19): siRNA sense strand
uggugaagcuguugaauga

SEQ ID NO: 1281909 - RNA, 19 nt, Homo sapiens
  misc_RNA (1)...(19): siRNA sense strand
acacggauauuuacagaga

SEQ ID NO: 1281910 - RNA, 19 nt, Homo sapiens
  misc_RNA (1)...(19): siRNA sense strand
acacccagcuguucucaaa

SEQ ID NO: 1281911 - RNA, 19 nt, Homo sapiens
  misc_RNA (1)...(19): siRNA sense strand
ggacacagaugccccacua

SEQ ID NO: 1281912 - RNA, 19 nt, Homo sapiens
  misc_RNA (1)...(19): siRNA sense strand
cucaagagccugaagaaua

SEQ ID NO: 1281913 - RNA, 19 nt, Homo sapiens
  misc_RNA (1)...(19): siRNA sense strand
ccacaggcaucuccuaugg

SEQ ID NO: 1281914 - RNA, 19 nt, Homo sapiens
  misc_RNA (1)...(19): siRNA sense strand
gcagaggugugguguggau

SEQ ID NO: 1281915 - RNA, 19 nt, Homo sapiens
  misc_RNA (1)...(19): siRNA sense strand
gggcggaucugcuuaucug

SEQ ID NO: 1281916 - RNA, 19 nt, Homo sapiens
  misc_RNA (1)...(19): siRNA sense strand
ccaugaugcugucaccuuu

SEQ ID NO: 1281917 - RNA, 19 nt, Homo sapiens
  misc_RNA (1)...(19): siRNA sense strand
agauugagguggaggugua

SEQ ID NO: 1281918 - RNA, 19 nt, Homo sapiens
  misc_RNA (1)...(19): siRNA sense strand
gaccuuugcugucaugucu

SEQ ID NO: 1281919 - RNA, 19 nt, Homo sapiens
  misc_RNA (1)...(19): siRNA sense strand
agacacggauauuuacaga

SEQ ID NO: 1281920 - RNA, 19 nt, Homo sapiens
  misc_RNA (1)...(19): siRNA sense strand
gaacgacuccaugaucaau

SEQ ID NO: 1281921 - RNA, 19 nt, Homo sapiens
  misc_RNA (1)...(19): siRNA sense strand
gaagaaacugcucaagaag

SEQ ID NO: 1281922 - RNA, 19 nt, Homo sapiens
  misc_RNA (1)...(19): siRNA sense strand
ugccagacacggauauuua

SEQ ID NO: 1281923 - RNA, 19 nt, Homo sapiens
  misc_RNA (1)...(19): siRNA sense strand
ccacugucccucaucuaua

SEQ ID NO: 1281924 - RNA, 19 nt, Homo sapiens
  misc_RNA (1)...(19): siRNA sense strand
gugaagcuguugaaugaca

SEQ ID NO: 1281925 - RNA, 19 nt, Homo sapiens
  misc_RNA (1)...(19): siRNA sense strand
gcagccaucaucauuguga

SEQ ID NO: 1281926 - RNA, 19 nt, Homo sapiens
  misc_RNA (1)...(19): siRNA sense strand
ggucuaaagcacagauuug

SEQ ID NO: 1281927 - RNA, 19 nt, Homo sapiens
  misc_RNA (1)...(19): siRNA sense strand
ccucaucauugucaaacuu

SEQ ID NO: 1281928 - RNA, 19 nt, Homo sapiens
  misc_RNA (1)...(19): siRNA sense strand
ggagauaagauggaagaug

SEQ ID NO: 1281929 - RNA, 19 nt, Homo sapiens
  misc_RNA (1)...(19): siRNA sense strand
gagcucaggagauaagaug

SEQ ID NO: 1281930 - RNA, 19 nt, Homo sapiens
  misc_RNA (1)...(19): siRNA sense strand
gcagaaagaggagaagcuu

SEQ ID NO: 1281931 - RNA, 19 nt, Homo sapiens
  misc_RNA (1)...(19): siRNA sense strand
gcugaguucuacagugaug

SEQ ID NO: 1281932 - RNA, 19 nt, Homo sapiens
  misc_RNA (1)...(19): siRNA sense strand
ucaaugagacagccagaga

SEQ ID NO: 1281933 - RNA, 19 nt, Homo sapiens
  misc_RNA (1)...(19): siRNA sense strand
guacucagaggccaaggaa

SEQ ID NO: 1281934 - RNA, 19 nt, Homo sapiens
  misc_RNA (1)...(19): siRNA sense strand
aagaagaaacugcucaaga

SEQ ID NO: 1281935 - RNA, 19 nt, Homo sapiens
  misc_RNA (1)...(19): siRNA sense strand
aggagaagcuucggaaaca

SEQ ID NO: 1281936 - RNA, 19 nt, Homo sapiens
  misc_RNA (1)...(19): siRNA sense strand
gaggcgagacuaccacaug

SEQ ID NO: 1281937 - RNA, 19 nt, Homo sapiens
  misc_RNA (1)...(19): siRNA sense strand
gaagaugcaacagccaaug

SEQ ID NO: 1281938 - RNA, 19 nt, Homo sapiens
  misc_RNA (1)...(19): siRNA sense strand
uaagauggaagaugcaaca

SEQ ID NO: 1281939 - RNA, 19 nt, Homo sapiens
  misc_RNA (1)...(19): siRNA sense strand
cuucaucuacuuccuguuu

SEQ ID NO: 1281940 - RNA, 19 nt, Homo sapiens
  misc_RNA (1)...(19): siRNA sense strand
augcugaguucuacaguga

SEQ ID NO: 1281941 - RNA, 19 nt, Homo sapiens
  misc_RNA (1)...(19): siRNA sense strand
gugguuggguuugccauug

SEQ ID NO: 1281942 - RNA, 19 nt, Homo sapiens
  misc_RNA (1)...(19): siRNA sense strand
acgacuccaugaucaauga

SEQ ID NO: 1281943 - RNA, 19 nt, Homo sapiens
  misc_RNA (1)...(19): siRNA sense strand
augcauccaucaccaagaa

SEQ ID NO: 1281944 - RNA, 19 nt, Homo sapiens
  misc_RNA (1)...(19): siRNA sense strand
gcuugaggcugggcacuuc

SEQ ID NO: 1281945 - RNA, 19 nt, Homo sapiens
  misc_RNA (1)...(19): siRNA sense strand
gcgagacuaccacauggaa

SEQ ID NO: 1281946 - RNA, 19 nt, Homo sapiens
  misc_RNA (1)...(19): siRNA sense strand
caggagauaagauggaaga

SEQ ID NO: 1281947 - RNA, 19 nt, Homo sapiens
  misc_RNA (1)...(19): siRNA sense strand
gaggagaagcuucggaaac

SEQ ID NO: 1281948 - RNA, 19 nt, Homo sapiens
  misc_RNA (1)...(19): siRNA sense strand
uugaacgacuccaugauca

SEQ ID NO: 1281949 - RNA, 19 nt, Homo sapiens
  misc_RNA (1)...(19): siRNA sense strand
caacagccaauggucaaga

SEQ ID NO: 1281950 - RNA, 19 nt, Homo sapiens
  misc_RNA (1)...(19): siRNA sense strand
ggaagaugcaacagccaau

SEQ ID NO: 1281951 - RNA, 19 nt, Homo sapiens
  misc_RNA (1)...(19): siRNA sense strand
cuucuacccugucuucauc

SEQ ID NO: 1281952 - RNA, 19 nt, Homo sapiens
  misc_RNA (1)...(19): siRNA sense strand
guguuuggccuccaucuga

SEQ ID NO: 1281953 - RNA, 19 nt, Homo sapiens
  misc_RNA (1)...(19): siRNA sense strand
gaagaagaaacugcucaag

SEQ ID NO: 1281954 - RNA, 19 nt, Homo sapiens
  misc_RNA (1)...(19): siRNA sense strand
cccgugaguugcucuaugu

SEQ ID NO: 1281955 - RNA, 19 nt, Homo sapiens
  misc_RNA (1)...(19): siRNA sense strand
ggagaagcuucggaaacag

SEQ ID NO: 1281956 - RNA, 19 nt, Homo sapiens
  misc_RNA (1)...(19): siRNA sense strand
gauaagauggaagaugcaa

SEQ ID NO: 1281957 - RNA, 19 nt, Homo sapiens
  misc_RNA (1)...(19): siRNA sense strand
ugaagcuguugaaugacaa

SEQ ID NO: 1281958 - RNA, 19 nt, Homo sapiens
  misc_RNA (1)...(19): siRNA sense strand
gcucaggagauaagaugga

SEQ ID NO: 1281959 - RNA, 19 nt, Homo sapiens
  misc_RNA (1)...(19): siRNA sense strand
gcuaccggguggacagcaa

SEQ ID NO: 1281960 - RNA, 19 nt, Homo sapiens
  misc_RNA (1)...(19): siRNA sense strand
ggugggcagugugacagaa

SEQ ID NO: 1281961 - RNA, 19 nt, Homo sapiens
  misc_RNA (1)...(19): siRNA sense strand
cagcucaaguauguguuug

SEQ ID NO: 1281962 - RNA, 19 nt, Homo sapiens
  misc_RNA (1)...(19): siRNA sense strand
guggugaagcuguugaaug

SEQ ID NO: 1281963 - RNA, 19 nt, Homo sapiens
  misc_RNA (1)...(19): siRNA sense strand
cacugucccucaucuauac

SEQ ID NO: 1281964 - RNA, 19 nt, Homo sapiens
  misc_RNA (1)...(19): siRNA sense strand
gccacugucccucaucuau

SEQ ID NO: 1281965 - RNA, 19 nt, Homo sapiens
  misc_RNA (1)...(19): siRNA sense strand
gcacuucccggcacaucuc

SEQ ID NO: 1281966 - RNA, 19 nt, Homo sapiens
  misc_RNA (1)...(19): siRNA sense strand
ccuauggcaugggucuaaa

SEQ ID NO: 1281967 - RNA, 19 nt, Homo sapiens
  misc_RNA (1)...(19): siRNA sense strand
ugggugcccucuccuuugu

SEQ ID NO: 1281968 - RNA, 19 nt, Homo sapiens
  misc_RNA (1)...(19): siRNA sense strand
gggucuaaagcacagauuu

SEQ ID NO: 1281969 - RNA, 19 nt, Homo sapiens
  misc_RNA (1)...(19): siRNA sense strand
gcagcugcccaugccgaua

SEQ ID NO: 1281970 - RNA, 19 nt, Homo sapiens
  misc_RNA (1)...(19): siRNA sense strand
aacagccaauggucaagaa

SEQ ID NO: 1281971 - RNA, 19 nt, Homo sapiens
  misc_RNA (1)...(19): siRNA sense strand
cuacagugaugcgcugaag

SEQ ID NO: 1281972 - RNA, 19 nt, Homo sapiens
  misc_RNA (1)...(19): siRNA sense strand
uuaucuggcuggugaccuu

SEQ ID NO: 1281973 - RNA, 19 nt, Homo sapiens
  misc_RNA (1)...(19): siRNA sense strand
gucuaaagcacagauuuga

SEQ ID NO: 1281974 - RNA, 19 nt, Homo sapiens
  misc_RNA (1)...(19): siRNA sense strand
gggccacugucccucaucu

SEQ ID NO: 1281975 - RNA, 19 nt, Homo sapiens
  misc_RNA (1)...(19): siRNA sense strand
ggugagcucaggagauaag

SEQ ID NO: 1281976 - RNA, 19 nt, Homo sapiens
  misc_RNA (1)...(19): siRNA sense strand
uuccucaucucccagaaga

SEQ ID NO: 1281977 - RNA, 19 nt, Homo sapiens
  misc_RNA (1)...(19): siRNA sense strand
acggauauuuacagagaug

SEQ ID NO: 1281978 - RNA, 19 nt, Homo sapiens
  misc_RNA (1)...(19): siRNA sense strand
gggccucaguaaccuuauc

SEQ ID NO: 1281979 - RNA, 19 nt, Homo sapiens
  misc_RNA (1)...(19): siRNA sense strand
aaagcacagauuugaggua

SEQ ID NO: 1281980 - RNA, 19 nt, Homo sapiens
  misc_RNA (1)...(19): siRNA sense strand
ggccacaggcaucuccuau

SEQ ID NO: 1281981 - RNA, 19 nt, Homo sapiens
  misc_RNA (1)...(19): siRNA sense strand
cagccaucaucauugugaa

SEQ ID NO: 1281982 - RNA, 19 nt, Homo sapiens
  misc_RNA (1)...(19): siRNA sense strand
ggcugggccugauccacuu

SEQ ID NO: 1281983 - RNA, 19 nt, Homo sapiens
  misc_RNA (1)...(19): siRNA sense strand
cagccaauggucaagaaga

SEQ ID NO: 1281984 - RNA, 19 nt, Homo sapiens
  misc_RNA (1)...(19): siRNA sense strand
acucagaggccaaggaagu

SEQ ID NO: 1281985 - RNA, 19 nt, Homo sapiens
  misc_RNA (1)...(19): siRNA sense strand
gugccagacacggauauuu

SEQ ID NO: 1281986 - RNA, 19 nt, Homo sapiens
  misc_RNA (1)...(19): siRNA sense strand
ggugguugcggucaucuuc

SEQ ID NO: 1281987 - RNA, 19 nt, Homo sapiens
  misc_RNA (1)...(19): siRNA sense strand
agaagaaacugcucaagaa

SEQ ID NO: 1281988 - RNA, 19 nt, Homo sapiens
  misc_RNA (1)...(19): siRNA sense strand
ucaagagccugaagaauau

SEQ ID NO: 1281989 - RNA, 19 nt, Homo sapiens
  misc_RNA (1)...(19): siRNA sense strand
gcuccugggugaccuguua

SEQ ID NO: 1281990 - RNA, 19 nt, Homo sapiens
  misc_RNA (1)...(19): siRNA sense strand
ugaagcaacugcagaaaga

SEQ ID NO: 1281991 - RNA, 19 nt, Homo sapiens
  misc_RNA (1)...(19): siRNA sense strand
ggagccaucucuucccuuu

SEQ ID NO: 1281992 - RNA, 19 nt, Homo sapiens
  misc_RNA (1)...(19): siRNA sense strand
ccagauggguccacacuga

SEQ ID NO: 1281993 - RNA, 19 nt, Homo sapiens
  misc_RNA (1)...(19): siRNA sense strand
ucucacagcucaaguaugu

SEQ ID NO: 1281994 - RNA, 19 nt, Homo sapiens
  misc_RNA (1)...(19): siRNA sense strand
gcacagauuugagguagau

SEQ ID NO: 1281995 - RNA, 19 nt, Homo sapiens
  misc_RNA (1)...(19): siRNA sense strand
acagagauguggcagagua

SEQ ID NO: 1281996 - RNA, 19 nt, Homo sapiens
  misc_RNA (1)...(19): siRNA sense strand
uggugaagcuguugaauga

SEQ ID NO: 1281997 - RNA, 19 nt, Homo sapiens
  misc_RNA (1)...(19): siRNA sense strand
acacggauauuuacagaga

SEQ ID NO: 1281998 - RNA, 19 nt, Homo sapiens
  misc_RNA (1)...(19): siRNA sense strand
acacccagcuguucucaaa

SEQ ID NO: 1281999 - RNA, 19 nt, Homo sapiens
  misc_RNA (1)...(19): siRNA sense strand
ggacacagaugccccacua

SEQ ID NO: 1282000 - RNA, 19 nt, Homo sapiens
  misc_RNA (1)...(19): siRNA sense strand
cucaagagccugaagaaua

SEQ ID NO: 1282001 - RNA, 19 nt, Homo sapiens
  misc_RNA (1)...(19): siRNA sense strand
ccacaggcaucuccuaugg

SEQ ID NO: 1282002 - RNA, 19 nt, Homo sapiens
  misc_RNA (1)...(19): siRNA sense strand
gcagaggugugguguggau

SEQ ID NO: 1282003 - RNA, 19 nt, Homo sapiens
  misc_RNA (1)...(19): siRNA sense strand
gggcggaucugcuuaucug

SEQ ID NO: 1282004 - RNA, 19 nt, Homo sapiens
  misc_RNA (1)...(19): siRNA sense strand
ccaugaugcugucaccuuu

SEQ ID NO: 1282005 - RNA, 19 nt, Homo sapiens
  misc_RNA (1)...(19): siRNA sense strand
agauugagguggaggugua

SEQ ID NO: 1282006 - RNA, 19 nt, Homo sapiens
  misc_RNA (1)...(19): siRNA sense strand
gaccuuugcugucaugucu

SEQ ID NO: 1282007 - RNA, 19 nt, Homo sapiens
  misc_RNA (1)...(19): siRNA sense strand
agacacggauauuuacaga

SEQ ID NO: 1282008 - RNA, 19 nt, Homo sapiens
  misc_RNA (1)...(19): siRNA sense strand
gaacgacuccaugaucaau

SEQ ID NO: 1282009 - RNA, 19 nt, Homo sapiens
  misc_RNA (1)...(19): siRNA sense strand
gaagaaacugcucaagaag

SEQ ID NO: 1282010 - RNA, 19 nt, Homo sapiens
  misc_RNA (1)...(19): siRNA sense strand
ugccagacacggauauuua

SEQ ID NO: 1282011 - RNA, 19 nt, Homo sapiens
  misc_RNA (1)...(19): siRNA sense strand
ccacugucccucaucuaua

SEQ ID NO: 1282012 - RNA, 19 nt, Homo sapiens
  misc_RNA (1)...(19): siRNA sense strand
gugaagcuguugaaugaca

SEQ ID NO: 1282013 - RNA, 19 nt, Homo sapiens
  misc_RNA (1)...(19): siRNA sense strand
gcagccaucaucauuguga

SEQ ID NO: 1282014 - RNA, 19 nt, Homo sapiens
  misc_RNA (1)...(19): siRNA sense strand
ggucuaaagcacagauuug

SEQ ID NO: 1282015 - RNA, 19 nt, Homo sapiens
  misc_RNA (1)...(19): siRNA sense strand
ccucaucauugucaaacuu

SEQ ID NO: 1282016 - RNA, 19 nt, Homo sapiens
  misc_RNA (1)...(19): siRNA sense strand
ggagauaagauggaagaug

SEQ ID NO: 1282017 - RNA, 19 nt, Homo sapiens
  misc_RNA (1)...(19): siRNA sense strand
gagcucaggagauaagaug

SEQ ID NO: 1282018 - RNA, 19 nt, Homo sapiens
  misc_RNA (1)...(19): siRNA sense strand
gcagaaagaggagaagcuu

SEQ ID NO: 1282019 - RNA, 19 nt, Homo sapiens
  misc_RNA (1)...(19): siRNA sense strand
gcugaguucuacagugaug

SEQ ID NO: 1282020 - RNA, 19 nt, Homo sapiens
  misc_RNA (1)...(19): siRNA sense strand
ucaaugagacagccagaga

SEQ ID NO: 1282021 - RNA, 19 nt, Homo sapiens
  misc_RNA (1)...(19): siRNA sense strand
guacucagaggccaaggaa

SEQ ID NO: 1282022 - RNA, 19 nt, Homo sapiens
  misc_RNA (1)...(19): siRNA sense strand
aagaagaaacugcucaaga

SEQ ID NO: 1282023 - RNA, 19 nt, Homo sapiens
  misc_RNA (1)...(19): siRNA sense strand
aggagaagcuucggaaaca

SEQ ID NO: 1282024 - RNA, 19 nt, Homo sapiens
  misc_RNA (1)...(19): siRNA sense strand
gaggcgagacuaccacaug

SEQ ID NO: 1282025 - RNA, 19 nt, Homo sapiens
  misc_RNA (1)...(19): siRNA sense strand
gaagaugcaacagccaaug

SEQ ID NO: 1282026 - RNA, 19 nt, Homo sapiens
  misc_RNA (1)...(19): siRNA sense strand
uaagauggaagaugcaaca

SEQ ID NO: 1282027 - RNA, 19 nt, Homo sapiens
  misc_RNA (1)...(19): siRNA sense strand
cuucaucuacuuccuguuu

SEQ ID NO: 1282028 - RNA, 19 nt, Homo sapiens
  misc_RNA (1)...(19): siRNA sense strand
augcugaguucuacaguga

SEQ ID NO: 1282029 - RNA, 19 nt, Homo sapiens
  misc_RNA (1)...(19): siRNA sense strand
gugguuggguuugccauug

SEQ ID NO: 1282030 - RNA, 19 nt, Homo sapiens
  misc_RNA (1)...(19): siRNA sense strand
acgacuccaugaucaauga

SEQ ID NO: 1282031 - RNA, 19 nt, Homo sapiens
  misc_RNA (1)...(19): siRNA sense strand
augcauccaucaccaagaa

SEQ ID NO: 1282032 - RNA, 19 nt, Homo sapiens
  misc_RNA (1)...(19): siRNA sense strand
gcuugaggcugggcacuuc

SEQ ID NO: 1282033 - RNA, 19 nt, Homo sapiens
  misc_RNA (1)...(19): siRNA sense strand
gcgagacuaccacauggaa

SEQ ID NO: 1282034 - RNA, 19 nt, Homo sapiens
  misc_RNA (1)...(19): siRNA sense strand
caggagauaagauggaaga

SEQ ID NO: 1282035 - RNA, 19 nt, Homo sapiens
  misc_RNA (1)...(19): siRNA sense strand
gaggagaagcuucggaaac

SEQ ID NO: 1282036 - RNA, 19 nt, Homo sapiens
  misc_RNA (1)...(19): siRNA sense strand
uugaacgacuccaugauca

SEQ ID NO: 1282037 - RNA, 19 nt, Homo sapiens
  misc_RNA (1)...(19): siRNA sense strand
caacagccaauggucaaga

SEQ ID NO: 1282038 - RNA, 19 nt, Homo sapiens
  misc_RNA (1)...(19): siRNA sense strand
ggaagaugcaacagccaau

SEQ ID NO: 1282039 - RNA, 19 nt, Homo sapiens
  misc_RNA (1)...(19): siRNA sense strand
cuucuacccugucuucauc

SEQ ID NO: 1282040 - RNA, 19 nt, Homo sapiens
  misc_RNA (1)...(19): siRNA sense strand
guguuuggccuccaucuga

SEQ ID NO: 1282041 - RNA, 19 nt, Homo sapiens
  misc_RNA (1)...(19): siRNA sense strand
gaagaagaaacugcucaag

SEQ ID NO: 1282042 - RNA, 19 nt, Homo sapiens
  misc_RNA (1)...(19): siRNA sense strand
cccgugaguugcucuaugu

SEQ ID NO: 1282043 - RNA, 19 nt, Homo sapiens
  misc_RNA (1)...(19): siRNA sense strand
ggagaagcuucggaaacag

SEQ ID NO: 1282044 - RNA, 19 nt, Homo sapiens
  misc_RNA (1)...(19): siRNA sense strand
gauaagauggaagaugcaa

SEQ ID NO: 1282045 - RNA, 19 nt, Homo sapiens
  misc_RNA (1)...(19): siRNA sense strand
ugaagcuguugaaugacaa

SEQ ID NO: 1282046 - RNA, 19 nt, Homo sapiens
  misc_RNA (1)...(19): siRNA sense strand
gcucaggagauaagaugga

SEQ ID NO: 1282047 - RNA, 19 nt, Homo sapiens
  misc_RNA (1)...(19): siRNA sense strand
gcuaccggguggacagcaa

SEQ ID NO: 1282048 - RNA, 19 nt, Homo sapiens
  misc_RNA (1)...(19): siRNA sense strand
ggugggcagugugacagaa

SEQ ID NO: 1282049 - RNA, 19 nt, Homo sapiens
  misc_RNA (1)...(19): siRNA sense strand
cagcucaaguauguguuug

SEQ ID NO: 1282050 - RNA, 19 nt, Homo sapiens
  misc_RNA (1)...(19): siRNA sense strand
guggugaagcuguugaaug

SEQ ID NO: 1282051 - RNA, 19 nt, Homo sapiens
  misc_RNA (1)...(19): siRNA sense strand
cacugucccucaucuauac

SEQ ID NO: 1282052 - RNA, 19 nt, Homo sapiens
  misc_RNA (1)...(19): siRNA sense strand
gccacugucccucaucuau

SEQ ID NO: 1282053 - RNA, 19 nt, Homo sapiens
  misc_RNA (1)...(19): siRNA sense strand
gcacuucccggcacaucuc

SEQ ID NO: 1282054 - RNA, 19 nt, Homo sapiens
  misc_RNA (1)...(19): siRNA sense strand
ccuauggcaugggucuaaa

SEQ ID NO: 1282055 - RNA, 19 nt, Homo sapiens
  misc_RNA (1)...(19): siRNA sense strand
ugggugcccucuccuuugu

SEQ ID NO: 1282056 - RNA, 19 nt, Homo sapiens
  misc_RNA (1)...(19): siRNA sense strand
gggucuaaagcacagauuu

SEQ ID NO: 1282057 - RNA, 19 nt, Homo sapiens
  misc_RNA (1)...(19): siRNA sense strand
gcagcugcccaugccgaua

SEQ ID NO: 1282058 - RNA, 19 nt, Homo sapiens
  misc_RNA (1)...(19): siRNA sense strand
aacagccaauggucaagaa

SEQ ID NO: 1282059 - RNA, 19 nt, Homo sapiens
  misc_RNA (1)...(19): siRNA sense strand
cuacagugaugcgcugaag

SEQ ID NO: 1282060 - RNA, 19 nt, Homo sapiens
  misc_RNA (1)...(19): siRNA sense strand
uuaucuggcuggugaccuu

SEQ ID NO: 1282061 - RNA, 19 nt, Homo sapiens
  misc_RNA (1)...(19): siRNA sense strand
gucuaaagcacagauuuga

SEQ ID NO: 1282062 - RNA, 19 nt, Homo sapiens
  misc_RNA (1)...(19): siRNA sense strand
gggccacugucccucaucu

SEQ ID NO: 1282063 - RNA, 19 nt, Homo sapiens
  misc_RNA (1)...(19): siRNA sense strand
ggugagcucaggagauaag

SEQ ID NO: 1282064 - RNA, 19 nt, Homo sapiens
  misc_RNA (1)...(19): siRNA sense strand
uuccucaucucccagaaga

SEQ ID NO: 1282065 - RNA, 19 nt, Homo sapiens
  misc_RNA (1)...(19): siRNA sense strand
acggauauuuacagagaug

SEQ ID NO: 1282066 - RNA, 19 nt, Homo sapiens
  misc_RNA (1)...(19): siRNA sense strand
gggccucaguaaccuuauc

SEQ ID NO: 1282067 - RNA, 19 nt, Homo sapiens
  misc_RNA (1)...(19): siRNA sense strand
aaagcacagauuugaggua

SEQ ID NO: 1282068 - RNA, 19 nt, Homo sapiens
  misc_RNA (1)...(19): siRNA sense strand
ggccacaggcaucuccuau

SEQ ID NO: 1282069 - RNA, 19 nt, Homo sapiens
  misc_RNA (1)...(19): siRNA sense strand
cagccaucaucauugugaa

SEQ ID NO: 1282070 - RNA, 19 nt, Homo sapiens
  misc_RNA (1)...(19): siRNA sense strand
ggcugggccugauccacuu

SEQ ID NO: 1282071 - RNA, 19 nt, Homo sapiens
  misc_RNA (1)...(19): siRNA sense strand
cagccaauggucaagaaga

SEQ ID NO: 1282072 - RNA, 19 nt, Homo sapiens
  misc_RNA (1)...(19): siRNA sense strand
acucagaggccaaggaagu

SEQ ID NO: 1282073 - RNA, 19 nt, Homo sapiens
  misc_RNA (1)...(19): siRNA sense strand
gugccagacacggauauuu

SEQ ID NO: 1282074 - RNA, 19 nt, Homo sapiens
  misc_RNA (1)...(19): siRNA sense strand
ggugguugcggucaucuuc

SEQ ID NO: 1282075 - RNA, 19 nt, Homo sapiens
  misc_RNA (1)...(19): siRNA sense strand
gaaagaugauggaaacaug

SEQ ID NO: 1282076 - RNA, 19 nt, Homo sapiens
  misc_RNA (1)...(19): siRNA sense strand
ugugguagcuugugacuuu

SEQ ID NO: 1282077 - RNA, 19 nt, Homo sapiens
  misc_RNA (1)...(19): siRNA sense strand
ggauaaauacaccaugaua

SEQ ID NO: 1282078 - RNA, 19 nt, Homo sapiens
  misc_RNA (1)...(19): siRNA sense strand
gaguuucucucguaucgua

SEQ ID NO: 1282079 - RNA, 19 nt, Homo sapiens
  misc_RNA (1)...(19): siRNA sense strand
gcuacugcaucuuaugaua

SEQ ID NO: 1282080 - RNA, 19 nt, Homo sapiens
  misc_RNA (1)...(19): siRNA sense strand
ggucagagauuuaacuuuu

SEQ ID NO: 1282081 - RNA, 19 nt, Homo sapiens
  misc_RNA (1)...(19): siRNA sense strand
uaugggaccugaaagauga

SEQ ID NO: 1282082 - RNA, 19 nt, Homo sapiens
  misc_RNA (1)...(19): siRNA sense strand
gagaauugaugaggauuau

SEQ ID NO: 1282083 - RNA, 19 nt, Homo sapiens
  misc_RNA (1)...(19): siRNA sense strand
ggaaacaugaugaaaguau

SEQ ID NO: 1282084 - RNA, 19 nt, Homo sapiens
  misc_RNA (1)...(19): siRNA sense strand
ggagaauugaugaggauua

SEQ ID NO: 1282085 - RNA, 19 nt, Homo sapiens
  misc_RNA (1)...(19): siRNA sense strand
gaaguggucagagauuuaa

SEQ ID NO: 1282086 - RNA, 19 nt, Homo sapiens
  misc_RNA (1)...(19): siRNA sense strand
guacagcugugcauucucu

SEQ ID NO: 1282087 - RNA, 19 nt, Homo sapiens
  misc_RNA (1)...(19): siRNA sense strand
ggaauuugggcaccuguuu

SEQ ID NO: 1282088 - RNA, 19 nt, Homo sapiens
  misc_RNA (1)...(19): siRNA sense strand
gaaaacuccuccuuaacuu

SEQ ID NO: 1282089 - RNA, 19 nt, Homo sapiens
  misc_RNA (1)...(19): siRNA sense strand
ugaaguggucagagauuua

SEQ ID NO: 1282090 - RNA, 19 nt, Homo sapiens
  misc_RNA (1)...(19): siRNA sense strand
uaucugggauccacauaau

SEQ ID NO: 1282091 - RNA, 19 nt, Homo sapiens
  misc_RNA (1)...(19): siRNA sense strand
gaugauggaaacaugauga

SEQ ID NO: 1282092 - RNA, 19 nt, Homo sapiens
  misc_RNA (1)...(19): siRNA sense strand
gguacgaucuguaucuuuu

SEQ ID NO: 1282093 - RNA, 19 nt, Homo sapiens
  misc_RNA (1)...(19): siRNA sense strand
ucccuagccugcaacauuu

SEQ ID NO: 1282094 - RNA, 19 nt, Homo sapiens
  misc_RNA (1)...(19): siRNA sense strand
ccugaaagaugauggaaac

SEQ ID NO: 1282095 - RNA, 19 nt, Homo sapiens
  misc_RNA (1)...(19): siRNA sense strand
aagccuugcugaugauaaa

SEQ ID NO: 1282096 - RNA, 19 nt, Homo sapiens
  misc_RNA (1)...(19): siRNA sense strand
gauggaaacaugaugaaag

SEQ ID NO: 1282097 - RNA, 19 nt, Homo sapiens
  misc_RNA (1)...(19): siRNA sense strand
uagaaggacaucaccauga

SEQ ID NO: 1282098 - RNA, 19 nt, Homo sapiens
  misc_RNA (1)...(19): siRNA sense strand
gcugugccuucucuacuga

SEQ ID NO: 1282099 - RNA, 19 nt, Homo sapiens
  misc_RNA (1)...(19): siRNA sense strand
gaguaugggaccugaaaga

SEQ ID NO: 1282100 - RNA, 19 nt, Homo sapiens
  misc_RNA (1)...(19): siRNA sense strand
gauaaauacaccaugauac

SEQ ID NO: 1282101 - RNA, 19 nt, Homo sapiens
  misc_RNA (1)...(19): siRNA sense strand
cuugguagaucauacugaa

SEQ ID NO: 1282102 - RNA, 19 nt, Homo sapiens
  misc_RNA (1)...(19): siRNA sense strand
ccaccuacuccaauauuug

SEQ ID NO: 1282103 - RNA, 19 nt, Homo sapiens
  misc_RNA (1)...(19): siRNA sense strand
cagaguaugggaccugaaa

SEQ ID NO: 1282104 - RNA, 19 nt, Homo sapiens
  misc_RNA (1)...(19): siRNA sense strand
ccgauuccuuccaagcuuu

SEQ ID NO: 1282105 - RNA, 19 nt, Homo sapiens
  misc_RNA (1)...(19): siRNA sense strand
gucccuagccugcaacauu

SEQ ID NO: 1282106 - RNA, 19 nt, Homo sapiens
  misc_RNA (1)...(19): siRNA sense strand
guaugggaccugaaagaug

SEQ ID NO: 1282107 - RNA, 19 nt, Homo sapiens
  misc_RNA (1)...(19): siRNA sense strand
gguagaucauacugaagug

SEQ ID NO: 1282108 - RNA, 19 nt, Homo sapiens
  misc_RNA (1)...(19): siRNA sense strand
gauuauccagugcaaguug

SEQ ID NO: 1282109 - RNA, 19 nt, Homo sapiens
  misc_RNA (1)...(19): siRNA sense strand
gaauuugggcaccuguuuc

SEQ ID NO: 1282110 - RNA, 19 nt, Homo sapiens
  misc_RNA (1)...(19): siRNA sense strand
ugacggaaguguguauuuu

SEQ ID NO: 1282111 - RNA, 19 nt, Homo sapiens
  misc_RNA (1)...(19): siRNA sense strand
aaagaugauggaaacauga

SEQ ID NO: 1282112 - RNA, 19 nt, Homo sapiens
  misc_RNA (1)...(19): siRNA sense strand
gccgauuccuuccaagcuu

SEQ ID NO: 1282113 - RNA, 19 nt, Homo sapiens
  misc_RNA (1)...(19): siRNA sense strand
gaaacuagaaggacaucac

SEQ ID NO: 1282114 - RNA, 19 nt, Homo sapiens
  misc_RNA (1)...(19): siRNA sense strand
caugauacggaaacuagaa

SEQ ID NO: 1282115 - RNA, 19 nt, Homo sapiens
  misc_RNA (1)...(19): siRNA sense strand
ggaaaacuccuccuuaacu

SEQ ID NO: 1282116 - RNA, 19 nt, Homo sapiens
  misc_RNA (1)...(19): siRNA sense strand
auggaaacaugaugaaagu

SEQ ID NO: 1282117 - RNA, 19 nt, Homo sapiens
  misc_RNA (1)...(19): siRNA sense strand
gcaugucaauccgaagagu

SEQ ID NO: 1282118 - RNA, 19 nt, Homo sapiens
  misc_RNA (1)...(19): siRNA sense strand
cccaccuacuccaauauuu

SEQ ID NO: 1282119 - RNA, 19 nt, Homo sapiens
  misc_RNA (1)...(19): siRNA sense strand
caucagaauuggguguaca

SEQ ID NO: 1282120 - RNA, 19 nt, Homo sapiens
  misc_RNA (1)...(19): siRNA sense strand
acucuucuaugcuguguuc

SEQ ID NO: 1282121 - RNA, 19 nt, Homo sapiens
  misc_RNA (1)...(19): siRNA sense strand
gaugcccacccaagaaguu

SEQ ID NO: 1282122 - RNA, 19 nt, Homo sapiens
  misc_RNA (1)...(19): siRNA sense strand
ggaccugaaagaugaugga

SEQ ID NO: 1282123 - RNA, 19 nt, Homo sapiens
  misc_RNA (1)...(19): siRNA sense strand
gagugaugcccacccaaga

SEQ ID NO: 1282124 - RNA, 19 nt, Homo sapiens
  misc_RNA (1)...(19): siRNA sense strand
gauacggaaacuagaagga

SEQ ID NO: 1282125 - RNA, 19 nt, Homo sapiens
  misc_RNA (1)...(19): siRNA sense strand
guguacagcugugcauucu

SEQ ID NO: 1282126 - RNA, 19 nt, Homo sapiens
  misc_RNA (1)...(19): siRNA sense strand
guucaggagcugccgauuc

SEQ ID NO: 1282127 - RNA, 19 nt, Homo sapiens
  misc_RNA (1)...(19): siRNA sense strand
ggucuuugcugugccuucu

SEQ ID NO: 1282128 - RNA, 19 nt, Homo sapiens
  misc_RNA (1)...(19): siRNA sense strand
ggaauauggauaaauacac

SEQ ID NO: 1282129 - RNA, 19 nt, Homo sapiens
  misc_RNA (1)...(19): siRNA sense strand
ugaaagaugauggaaacau

SEQ ID NO: 1282130 - RNA, 19 nt, Homo sapiens
  misc_RNA (1)...(19): siRNA sense strand
ucucucguaucguauuuag

SEQ ID NO: 1282131 - RNA, 19 nt, Homo sapiens
  misc_RNA (1)...(19): siRNA sense strand
gguguacagcugugcauuc

SEQ ID NO: 1282132 - RNA, 19 nt, Homo sapiens
  misc_RNA (1)...(19): siRNA sense strand
ucuccugacucuucuaugc

SEQ ID NO: 1282133 - RNA, 19 nt, Homo sapiens
  misc_RNA (1)...(19): siRNA sense strand
auggagacauucugaugga

SEQ ID NO: 1282134 - RNA, 19 nt, Homo sapiens
  misc_RNA (1)...(19): siRNA sense strand
cuggagaauugaugaggau

SEQ ID NO: 1282135 - RNA, 19 nt, Homo sapiens
  misc_RNA (1)...(19): siRNA sense strand
ggguacgaucuguaucuuu

SEQ ID NO: 1282136 - RNA, 19 nt, Homo sapiens
  misc_RNA (1)...(19): siRNA sense strand
cuccuuaacuugguagauc

SEQ ID NO: 1282137 - RNA, 19 nt, Homo sapiens
  misc_RNA (1)...(19): siRNA sense strand
ugcauucucuccugacucu

SEQ ID NO: 1282138 - RNA, 19 nt, Homo sapiens
  misc_RNA (1)...(19): siRNA sense strand
gaaagaugauggaaacaug

SEQ ID NO: 1282139 - RNA, 19 nt, Homo sapiens
  misc_RNA (1)...(19): siRNA sense strand
ggucagagauuuaacuuuu

SEQ ID NO: 1282140 - RNA, 19 nt, Homo sapiens
  misc_RNA (1)...(19): siRNA sense strand
uaugggaccugaaagauga

SEQ ID NO: 1282141 - RNA, 19 nt, Homo sapiens
  misc_RNA (1)...(19): siRNA sense strand
ggaaacaugaugaaaguau

SEQ ID NO: 1282142 - RNA, 19 nt, Homo sapiens
  misc_RNA (1)...(19): siRNA sense strand
gaaguggucagagauuuaa

SEQ ID NO: 1282143 - RNA, 19 nt, Homo sapiens
  misc_RNA (1)...(19): siRNA sense strand
guacagcugugcauucucu

SEQ ID NO: 1282144 - RNA, 19 nt, Homo sapiens
  misc_RNA (1)...(19): siRNA sense strand
gaaaacuccuccuuaacuu

SEQ ID NO: 1282145 - RNA, 19 nt, Homo sapiens
  misc_RNA (1)...(19): siRNA sense strand
ugaaguggucagagauuua

SEQ ID NO: 1282146 - RNA, 19 nt, Homo sapiens
  misc_RNA (1)...(19): siRNA sense strand
gaugauggaaacaugauga

SEQ ID NO: 1282147 - RNA, 19 nt, Homo sapiens
  misc_RNA (1)...(19): siRNA sense strand
ccugaaagaugauggaaac

SEQ ID NO: 1282148 - RNA, 19 nt, Homo sapiens
  misc_RNA (1)...(19): siRNA sense strand
gauggaaacaugaugaaag

SEQ ID NO: 1282149 - RNA, 19 nt, Homo sapiens
  misc_RNA (1)...(19): siRNA sense strand
gaguaugggaccugaaaga

SEQ ID NO: 1282150 - RNA, 19 nt, Homo sapiens
  misc_RNA (1)...(19): siRNA sense strand
cuugguagaucauacugaa

SEQ ID NO: 1282151 - RNA, 19 nt, Homo sapiens
  misc_RNA (1)...(19): siRNA sense strand
cagaguaugggaccugaaa

SEQ ID NO: 1282152 - RNA, 19 nt, Homo sapiens
  misc_RNA (1)...(19): siRNA sense strand
gguagaucauacugaagug

SEQ ID NO: 1282153 - RNA, 19 nt, Homo sapiens
  misc_RNA (1)...(19): siRNA sense strand
guaugggaccugaaagaug

SEQ ID NO: 1282154 - RNA, 19 nt, Homo sapiens
  misc_RNA (1)...(19): siRNA sense strand
aaagaugauggaaacauga

SEQ ID NO: 1282155 - RNA, 19 nt, Homo sapiens
  misc_RNA (1)...(19): siRNA sense strand
ggaaaacuccuccuuaacu

SEQ ID NO: 1282156 - RNA, 19 nt, Homo sapiens
  misc_RNA (1)...(19): siRNA sense strand
auggaaacaugaugaaagu

SEQ ID NO: 1282157 - RNA, 19 nt, Homo sapiens
  misc_RNA (1)...(19): siRNA sense strand
caucagaauuggguguaca

SEQ ID NO: 1282158 - RNA, 19 nt, Homo sapiens
  misc_RNA (1)...(19): siRNA sense strand
acucuucuaugcuguguuc

SEQ ID NO: 1282159 - RNA, 19 nt, Homo sapiens
  misc_RNA (1)...(19): siRNA sense strand
ggaccugaaagaugaugga

SEQ ID NO: 1282160 - RNA, 19 nt, Homo sapiens
  misc_RNA (1)...(19): siRNA sense strand
guguacagcugugcauucu

SEQ ID NO: 1282161 - RNA, 19 nt, Homo sapiens
  misc_RNA (1)...(19): siRNA sense strand
ugaaagaugauggaaacau

SEQ ID NO: 1282162 - RNA, 19 nt, Homo sapiens
  misc_RNA (1)...(19): siRNA sense strand
gguguacagcugugcauuc

SEQ ID NO: 1282163 - RNA, 19 nt, Homo sapiens
  misc_RNA (1)...(19): siRNA sense strand
ucuccugacucuucuaugc

SEQ ID NO: 1282164 - RNA, 19 nt, Homo sapiens
  misc_RNA (1)...(19): siRNA sense strand
cuccuuaacuugguagauc

SEQ ID NO: 1282165 - RNA, 19 nt, Homo sapiens
  misc_RNA (1)...(19): siRNA sense strand
ugcauucucuccugacucu

SEQ ID NO: 1282166 - RNA, 19 nt, Homo sapiens
  misc_RNA (1)...(19): siRNA sense strand
gaaagaugauggaaacaug

SEQ ID NO: 1282167 - RNA, 19 nt, Homo sapiens
  misc_RNA (1)...(19): siRNA sense strand
ugugguagcuugugacuuu

SEQ ID NO: 1282168 - RNA, 19 nt, Homo sapiens
  misc_RNA (1)...(19): siRNA sense strand
ggauaaauacaccaugaua

SEQ ID NO: 1282169 - RNA, 19 nt, Homo sapiens
  misc_RNA (1)...(19): siRNA sense strand
gaguuucucucguaucgua

SEQ ID NO: 1282170 - RNA, 19 nt, Homo sapiens
  misc_RNA (1)...(19): siRNA sense strand
gcuacugcaucuuaugaua

SEQ ID NO: 1282171 - RNA, 19 nt, Homo sapiens
  misc_RNA (1)...(19): siRNA sense strand
ggucagagauuuaacuuuu

SEQ ID NO: 1282172 - RNA, 19 nt, Homo sapiens
  misc_RNA (1)...(19): siRNA sense strand
uaugggaccugaaagauga

SEQ ID NO: 1282173 - RNA, 19 nt, Homo sapiens
  misc_RNA (1)...(19): siRNA sense strand
gagaauugaugaggauuau

SEQ ID NO: 1282174 - RNA, 19 nt, Homo sapiens
  misc_RNA (1)...(19): siRNA sense strand
ggaaacaugaugaaaguau

SEQ ID NO: 1282175 - RNA, 19 nt, Homo sapiens
  misc_RNA (1)...(19): siRNA sense strand
ggagaauugaugaggauua

SEQ ID NO: 1282176 - RNA, 19 nt, Homo sapiens
  misc_RNA (1)...(19): siRNA sense strand
gaaguggucagagauuuaa

SEQ ID NO: 1282177 - RNA, 19 nt, Homo sapiens
  misc_RNA (1)...(19): siRNA sense strand
guacagcugugcauucucu

SEQ ID NO: 1282178 - RNA, 19 nt, Homo sapiens
  misc_RNA (1)...(19): siRNA sense strand
ggaauuugggcaccuguuu

SEQ ID NO: 1282179 - RNA, 19 nt, Homo sapiens
  misc_RNA (1)...(19): siRNA sense strand
gaaaacuccuccuuaacuu

SEQ ID NO: 1282180 - RNA, 19 nt, Homo sapiens
  misc_RNA (1)...(19): siRNA sense strand
ugaaguggucagagauuua

SEQ ID NO: 1282181 - RNA, 19 nt, Homo sapiens
  misc_RNA (1)...(19): siRNA sense strand
uaucugggauccacauaau

SEQ ID NO: 1282182 - RNA, 19 nt, Homo sapiens
  misc_RNA (1)...(19): siRNA sense strand
gaugauggaaacaugauga

SEQ ID NO: 1282183 - RNA, 19 nt, Homo sapiens
  misc_RNA (1)...(19): siRNA sense strand
gguacgaucuguaucuuuu

SEQ ID NO: 1282184 - RNA, 19 nt, Homo sapiens
  misc_RNA (1)...(19): siRNA sense strand
ucccuagccugcaacauuu

SEQ ID NO: 1282185 - RNA, 19 nt, Homo sapiens
  misc_RNA (1)...(19): siRNA sense strand
ccugaaagaugauggaaac

SEQ ID NO: 1282186 - RNA, 19 nt, Homo sapiens
  misc_RNA (1)...(19): siRNA sense strand
aagccuugcugaugauaaa

SEQ ID NO: 1282187 - RNA, 19 nt, Homo sapiens
  misc_RNA (1)...(19): siRNA sense strand
gauggaaacaugaugaaag

SEQ ID NO: 1282188 - RNA, 19 nt, Homo sapiens
  misc_RNA (1)...(19): siRNA sense strand
uagaaggacaucaccauga

SEQ ID NO: 1282189 - RNA, 19 nt, Homo sapiens
  misc_RNA (1)...(19): siRNA sense strand
gcugugccuucucuacuga

SEQ ID NO: 1282190 - RNA, 19 nt, Homo sapiens
  misc_RNA (1)...(19): siRNA sense strand
gaguaugggaccugaaaga

SEQ ID NO: 1282191 - RNA, 19 nt, Homo sapiens
  misc_RNA (1)...(19): siRNA sense strand
gauaaauacaccaugauac

SEQ ID NO: 1282192 - RNA, 19 nt, Homo sapiens
  misc_RNA (1)...(19): siRNA sense strand
cuugguagaucauacugaa

SEQ ID NO: 1282193 - RNA, 19 nt, Homo sapiens
  misc_RNA (1)...(19): siRNA sense strand
ccaccuacuccaauauuug

SEQ ID NO: 1282194 - RNA, 19 nt, Homo sapiens
  misc_RNA (1)...(19): siRNA sense strand
cagaguaugggaccugaaa

SEQ ID NO: 1282195 - RNA, 19 nt, Homo sapiens
  misc_RNA (1)...(19): siRNA sense strand
ccgauuccuuccaagcuuu

SEQ ID NO: 1282196 - RNA, 19 nt, Homo sapiens
  misc_RNA (1)...(19): siRNA sense strand
gucccuagccugcaacauu

SEQ ID NO: 1282197 - RNA, 19 nt, Homo sapiens
  misc_RNA (1)...(19): siRNA sense strand
guaugggaccugaaagaug

SEQ ID NO: 1282198 - RNA, 19 nt, Homo sapiens
  misc_RNA (1)...(19): siRNA sense strand
gauuauccagugcaaguug

SEQ ID NO: 1282199 - RNA, 19 nt, Homo sapiens
  misc_RNA (1)...(19): siRNA sense strand
gaauuugggcaccuguuuc

SEQ ID NO: 1282200 - RNA, 19 nt, Homo sapiens
  misc_RNA (1)...(19): siRNA sense strand
gguagaucauacugaagug

SEQ ID NO: 1282201 - RNA, 19 nt, Homo sapiens
  misc_RNA (1)...(19): siRNA sense strand
ugacggaaguguguauuuu

SEQ ID NO: 1282202 - RNA, 19 nt, Homo sapiens
  misc_RNA (1)...(19): siRNA sense strand
aaagaugauggaaacauga

SEQ ID NO: 1282203 - RNA, 19 nt, Homo sapiens
  misc_RNA (1)...(19): siRNA sense strand
gccgauuccuuccaagcuu

SEQ ID NO: 1282204 - RNA, 19 nt, Homo sapiens
  misc_RNA (1)...(19): siRNA sense strand
gaaacuagaaggacaucac

SEQ ID NO: 1282205 - RNA, 19 nt, Homo sapiens
  misc_RNA (1)...(19): siRNA sense strand
caugauacggaaacuagaa

SEQ ID NO: 1282206 - RNA, 19 nt, Homo sapiens
  misc_RNA (1)...(19): siRNA sense strand
ggaaaacuccuccuuaacu

SEQ ID NO: 1282207 - RNA, 19 nt, Homo sapiens
  misc_RNA (1)...(19): siRNA sense strand
auggaaacaugaugaaagu

SEQ ID NO: 1282208 - RNA, 19 nt, Homo sapiens
  misc_RNA (1)...(19): siRNA sense strand
gcaugucaauccgaagagu

SEQ ID NO: 1282209 - RNA, 19 nt, Homo sapiens
  misc_RNA (1)...(19): siRNA sense strand
cccaccuacuccaauauuu

SEQ ID NO: 1282210 - RNA, 19 nt, Homo sapiens
  misc_RNA (1)...(19): siRNA sense strand
caucagaauuggguguaca

SEQ ID NO: 1282211 - RNA, 19 nt, Homo sapiens
  misc_RNA (1)...(19): siRNA sense strand
acucuucuaugcuguguuc

SEQ ID NO: 1282212 - RNA, 19 nt, Homo sapiens
  misc_RNA (1)...(19): siRNA sense strand
gaugcccacccaagaaguu

SEQ ID NO: 1282213 - RNA, 19 nt, Homo sapiens
  misc_RNA (1)...(19): siRNA sense strand
ggaccugaaagaugaugga

SEQ ID NO: 1282214 - RNA, 19 nt, Homo sapiens
  misc_RNA (1)...(19): siRNA sense strand
gagugaugcccacccaaga

SEQ ID NO: 1282215 - RNA, 19 nt, Homo sapiens
  misc_RNA (1)...(19): siRNA sense strand
gauacggaaacuagaagga

SEQ ID NO: 1282216 - RNA, 19 nt, Homo sapiens
  misc_RNA (1)...(19): siRNA sense strand
ggucaacgagaaagagauc

SEQ ID NO: 1282217 - RNA, 19 nt, Homo sapiens
  misc_RNA (1)...(19): siRNA sense strand
guguacagcugugcauucu

SEQ ID NO: 1282218 - RNA, 19 nt, Homo sapiens
  misc_RNA (1)...(19): siRNA sense strand
guucaggagcugccgauuc

SEQ ID NO: 1282219 - RNA, 19 nt, Homo sapiens
  misc_RNA (1)...(19): siRNA sense strand
ggucuuugcugugccuucu

SEQ ID NO: 1282220 - RNA, 19 nt, Homo sapiens
  misc_RNA (1)...(19): siRNA sense strand
ggaauauggauaaauacac

SEQ ID NO: 1282221 - RNA, 19 nt, Homo sapiens
  misc_RNA (1)...(19): siRNA sense strand
ugaaagaugauggaaacau

SEQ ID NO: 1282222 - RNA, 19 nt, Homo sapiens
  misc_RNA (1)...(19): siRNA sense strand
ucucucguaucguauuuag

SEQ ID NO: 1282223 - RNA, 19 nt, Homo sapiens
  misc_RNA (1)...(19): siRNA sense strand
gguguacagcugugcauuc

SEQ ID NO: 1282224 - RNA, 19 nt, Homo sapiens
  misc_RNA (1)...(19): siRNA sense strand
ucuccugacucuucuaugc

SEQ ID NO: 1282225 - RNA, 19 nt, Homo sapiens
  misc_RNA (1)...(19): siRNA sense strand
auggagacauucugaugga

SEQ ID NO: 1282226 - RNA, 19 nt, Homo sapiens
  misc_RNA (1)...(19): siRNA sense strand
cuggagaauugaugaggau

SEQ ID NO: 1282227 - RNA, 19 nt, Homo sapiens
  misc_RNA (1)...(19): siRNA sense strand
ggguacgaucuguaucuuu

SEQ ID NO: 1282228 - RNA, 19 nt, Homo sapiens
  misc_RNA (1)...(19): siRNA sense strand
ugcauucucuccugacucu

SEQ ID NO: 1282229 - RNA, 19 nt, Homo sapiens
  misc_RNA (1)...(19): siRNA sense strand
cuccuuaacuugguagauc

SEQ ID NO: 1282230 - RNA, 19 nt, Homo sapiens
  misc_RNA (1)...(19): siRNA sense strand
ggaaagaguuuauguucua

SEQ ID NO: 1282231 - RNA, 19 nt, Homo sapiens
  misc_RNA (1)...(19): siRNA sense strand
cagaagaacuguuugauug

SEQ ID NO: 1282232 - RNA, 19 nt, Homo sapiens
  misc_RNA (1)...(19): siRNA sense strand
gagaagagcuccagcagau

SEQ ID NO: 1282233 - RNA, 19 nt, Homo sapiens
  misc_RNA (1)...(19): siRNA sense strand
gcaauugugugccaucaaa

SEQ ID NO: 1282234 - RNA, 19 nt, Homo sapiens
  misc_RNA (1)...(19): siRNA sense strand
ggagacaaaucaucaggaa

SEQ ID NO: 1282235 - RNA, 19 nt, Homo sapiens
  misc_RNA (1)...(19): siRNA sense strand
gaagagcuccagcagauaa

SEQ ID NO: 1282236 - RNA, 19 nt, Homo sapiens
  misc_RNA (1)...(19): siRNA sense strand
caagaucuguggagacaaa

SEQ ID NO: 1282237 - RNA, 19 nt, Homo sapiens
  misc_RNA (1)...(19): siRNA sense strand
guuguucacuucagaauuu

SEQ ID NO: 1282238 - RNA, 19 nt, Homo sapiens
  misc_RNA (1)...(19): siRNA sense strand
gcaccugacugaagaugaa

SEQ ID NO: 1282239 - RNA, 19 nt, Homo sapiens
  misc_RNA (1)...(19): siRNA sense strand
gaaauuauuccaugcaaga

SEQ ID NO: 1282240 - RNA, 19 nt, Homo sapiens
  misc_RNA (1)...(19): siRNA sense strand
ggaagaaauugagaacuau

SEQ ID NO: 1282241 - RNA, 19 nt, Homo sapiens
  misc_RNA (1)...(19): siRNA sense strand
caaggugucuacauuaaga

SEQ ID NO: 1282242 - RNA, 19 nt, Homo sapiens
  misc_RNA (1)...(19): siRNA sense strand
ccgagaagauggaauacua

SEQ ID NO: 1282243 - RNA, 19 nt, Homo sapiens
  misc_RNA (1)...(19): siRNA sense strand
gaagauggaauacuaacaa

SEQ ID NO: 1282244 - RNA, 19 nt, Homo sapiens
  misc_RNA (1)...(19): siRNA sense strand
cagcuuguaugcagaagua

SEQ ID NO: 1282245 - RNA, 19 nt, Homo sapiens
  misc_RNA (1)...(19): siRNA sense strand
gaucaaauugugcuucuaa

SEQ ID NO: 1282246 - RNA, 19 nt, Homo sapiens
  misc_RNA (1)...(19): siRNA sense strand
gcagagagacagcuuguau

SEQ ID NO: 1282247 - RNA, 19 nt, Homo sapiens
  misc_RNA (1)...(19): siRNA sense strand
caaacgcauugauggauuu

SEQ ID NO: 1282248 - RNA, 19 nt, Homo sapiens
  misc_RNA (1)...(19): siRNA sense strand
gaagaacuguuugauugau

SEQ ID NO: 1282249 - RNA, 19 nt, Homo sapiens
  misc_RNA (1)...(19): siRNA sense strand
uagaacaccuugcacagaa

SEQ ID NO: 1282250 - RNA, 19 nt, Homo sapiens
  misc_RNA (1)...(19): siRNA sense strand
aggaagaaauugagaacua

SEQ ID NO: 1282251 - RNA, 19 nt, Homo sapiens
  misc_RNA (1)...(19): siRNA sense strand
gaacaccuugcacagaaua

SEQ ID NO: 1282252 - RNA, 19 nt, Homo sapiens
  misc_RNA (1)...(19): siRNA sense strand
aaucaaaccagaaccaaua

SEQ ID NO: 1282253 - RNA, 19 nt, Homo sapiens
  misc_RNA (1)...(19): siRNA sense strand
guagggaugucucgagaug

SEQ ID NO: 1282254 - RNA, 19 nt, Homo sapiens
  misc_RNA (1)...(19): siRNA sense strand
gaggugauguggcaauugu

SEQ ID NO: 1282255 - RNA, 19 nt, Homo sapiens
  misc_RNA (1)...(19): siRNA sense strand
gcucauggcugcaagaaaa

SEQ ID NO: 1282256 - RNA, 19 nt, Homo sapiens
  misc_RNA (1)...(19): siRNA sense strand
ggaaaccugccaauacuug

SEQ ID NO: 1282257 - RNA, 19 nt, Homo sapiens
  misc_RNA (1)...(19): siRNA sense strand
gaggugguguuuaucagaa

SEQ ID NO: 1282258 - RNA, 19 nt, Homo sapiens
  misc_RNA (1)...(19): siRNA sense strand
ccaaacgcauugauggauu

SEQ ID NO: 1282259 - RNA, 19 nt, Homo sapiens
  misc_RNA (1)...(19): siRNA sense strand
uuacagaagcuauacagua

SEQ ID NO: 1282260 - RNA, 19 nt, Homo sapiens
  misc_RNA (1)...(19): siRNA sense strand
gaaccaauaugugacuaca

SEQ ID NO: 1282261 - RNA, 19 nt, Homo sapiens
  misc_RNA (1)...(19): siRNA sense strand
caacacguccuacagaaga

SEQ ID NO: 1282262 - RNA, 19 nt, Homo sapiens
  misc_RNA (1)...(19): siRNA sense strand
gugaagacuuuauuagcuu

SEQ ID NO: 1282263 - RNA, 19 nt, Homo sapiens
  misc_RNA (1)...(19): siRNA sense strand
uaugcaaggugucuacauu

SEQ ID NO: 1282264 - RNA, 19 nt, Homo sapiens
  misc_RNA (1)...(19): siRNA sense strand
ucaccgagaagauggaaua

SEQ ID NO: 1282265 - RNA, 19 nt, Homo sapiens
  misc_RNA (1)...(19): siRNA sense strand
ccagucaggucuugauauc

SEQ ID NO: 1282266 - RNA, 19 nt, Homo sapiens
  misc_RNA (1)...(19): siRNA sense strand
gauggaauacuaacaaagu

SEQ ID NO: 1282267 - RNA, 19 nt, Homo sapiens
  misc_RNA (1)...(19): siRNA sense strand
gaaugugccgugccuuuga

SEQ ID NO: 1282268 - RNA, 19 nt, Homo sapiens
  misc_RNA (1)...(19): siRNA sense strand
ggagaagucagcaaagcaa

SEQ ID NO: 1282269 - RNA, 19 nt, Homo sapiens
  misc_RNA (1)...(19): siRNA sense strand
ugcaaggugucuacauuaa

SEQ ID NO: 1282270 - RNA, 19 nt, Homo sapiens
  misc_RNA (1)...(19): siRNA sense strand
acagaagaaucaccgagaa

SEQ ID NO: 1282271 - RNA, 19 nt, Homo sapiens
  misc_RNA (1)...(19): siRNA sense strand
gaagaaucaccgagaagau

SEQ ID NO: 1282272 - RNA, 19 nt, Homo sapiens
  misc_RNA (1)...(19): siRNA sense strand
ucagaagaacuguuugauu

SEQ ID NO: 1282273 - RNA, 19 nt, Homo sapiens
  misc_RNA (1)...(19): siRNA sense strand
cgaccucaguaacuacauu

SEQ ID NO: 1282274 - RNA, 19 nt, Homo sapiens
  misc_RNA (1)...(19): siRNA sense strand
caaaccagaaccaauaugu

SEQ ID NO: 1282275 - RNA, 19 nt, Homo sapiens
  misc_RNA (1)...(19): siRNA sense strand
agacaaaucaucaggaauc

SEQ ID NO: 1282276 - RNA, 19 nt, Homo sapiens
  misc_RNA (1)...(19): siRNA sense strand
gacugaagaugaaauugca

SEQ ID NO: 1282277 - RNA, 19 nt, Homo sapiens
  misc_RNA (1)...(19): siRNA sense strand
guccauggcagaauuagaa

SEQ ID NO: 1282278 - RNA, 19 nt, Homo sapiens
  misc_RNA (1)...(19): siRNA sense strand
uacaguaugugguggaguu

SEQ ID NO: 1282279 - RNA, 19 nt, Homo sapiens
  misc_RNA (1)...(19): siRNA sense strand
gccaauacuugagagaaga

SEQ ID NO: 1282280 - RNA, 19 nt, Homo sapiens
  misc_RNA (1)...(19): siRNA sense strand
gaaaccugccaauacuuga

SEQ ID NO: 1282281 - RNA, 19 nt, Homo sapiens
  misc_RNA (1)...(19): siRNA sense strand
aaauucagcuagcucuuca

SEQ ID NO: 1282282 - RNA, 19 nt, Homo sapiens
  misc_RNA (1)...(19): siRNA sense strand
gacauugugcgacuucauu

SEQ ID NO: 1282283 - RNA, 19 nt, Homo sapiens
  misc_RNA (1)...(19): siRNA sense strand
cgagaagauggaauacuaa

SEQ ID NO: 1282284 - RNA, 19 nt, Homo sapiens
  misc_RNA (1)...(19): siRNA sense strand
agaaaccgcugccaacacu

SEQ ID NO: 1282285 - RNA, 19 nt, Homo sapiens
  misc_RNA (1)...(19): siRNA sense strand
cuaugcaccugacugaaga

SEQ ID NO: 1282286 - RNA, 19 nt, Homo sapiens
  misc_RNA (1)...(19): siRNA sense strand
cgacgucuucaaauccuua

SEQ ID NO: 1282287 - RNA, 19 nt, Homo sapiens
  misc_RNA (1)...(19): siRNA sense strand
cagaaugugccgugccuuu

SEQ ID NO: 1282288 - RNA, 19 nt, Homo sapiens
  misc_RNA (1)...(19): siRNA sense strand
gggaggugauguggcaauu

SEQ ID NO: 1282289 - RNA, 19 nt, Homo sapiens
  misc_RNA (1)...(19): siRNA sense strand
gaaucaaaccagaaccaau

SEQ ID NO: 1282290 - RNA, 19 nt, Homo sapiens
  misc_RNA (1)...(19): siRNA sense strand
ccaacgggcugacggaacu

SEQ ID NO: 1282291 - RNA, 19 nt, Homo sapiens
  misc_RNA (1)...(19): siRNA sense strand
gaucuguggagacaaauca

SEQ ID NO: 1282292 - RNA, 19 nt, Homo sapiens
  misc_RNA (1)...(19): siRNA sense strand
ucaaauccuuagguuguga

SEQ ID NO: 1282293 - RNA, 19 nt, Homo sapiens
  misc_RNA (1)...(19): siRNA sense strand
gaagaaauugagaacuauc

SEQ ID NO: 1282294 - RNA, 19 nt, Homo sapiens
  misc_RNA (1)...(19): siRNA sense strand
ucgagaugcuguaaaauuu

SEQ ID NO: 1282295 - RNA, 19 nt, Homo sapiens
  misc_RNA (1)...(19): siRNA sense strand
ucagcuagcucuucaacac

SEQ ID NO: 1282296 - RNA, 19 nt, Homo sapiens
  misc_RNA (1)...(19): siRNA sense strand
gguugugaagacuuuauua

SEQ ID NO: 1282297 - RNA, 19 nt, Homo sapiens
  misc_RNA (1)...(19): siRNA sense strand
aaccagaaccaauauguga

SEQ ID NO: 1282298 - RNA, 19 nt, Homo sapiens
  misc_RNA (1)...(19): siRNA sense strand
aaucaucaggaauccauua

SEQ ID NO: 1282299 - RNA, 19 nt, Homo sapiens
  misc_RNA (1)...(19): siRNA sense strand
gcuucuaccuggacauaca

SEQ ID NO: 1282300 - RNA, 19 nt, Homo sapiens
  misc_RNA (1)...(19): siRNA sense strand
guaugcagaaguacagaaa

SEQ ID NO: 1282301 - RNA, 19 nt, Homo sapiens
  misc_RNA (1)...(19): siRNA sense strand
caaaucaucaggaauccau

SEQ ID NO: 1282302 - RNA, 19 nt, Homo sapiens
  misc_RNA (1)...(19): siRNA sense strand
ggaaucaaaccagaaccaa

SEQ ID NO: 1282303 - RNA, 19 nt, Homo sapiens
  misc_RNA (1)...(19): siRNA sense strand
acgcauugauggauuuaug

SEQ ID NO: 1282304 - RNA, 19 nt, Homo sapiens
  misc_RNA (1)...(19): siRNA sense strand
cuuagguugugaagacuuu

SEQ ID NO: 1282305 - RNA, 19 nt, Homo sapiens
  misc_RNA (1)...(19): siRNA sense strand
agaagaacuguuugauuga

SEQ ID NO: 1282306 - RNA, 19 nt, Homo sapiens
  misc_RNA (1)...(19): siRNA sense strand
aaugcaaauugauggguaa

SEQ ID NO: 1282307 - RNA, 19 nt, Homo sapiens
  misc_RNA (1)...(19): siRNA sense strand
cuucaaauccuuagguugu

SEQ ID NO: 1282308 - RNA, 19 nt, Homo sapiens
  misc_RNA (1)...(19): siRNA sense strand
cugccaacacugucgauua

SEQ ID NO: 1282309 - RNA, 19 nt, Homo sapiens
  misc_RNA (1)...(19): siRNA sense strand
gcaaggugucuacauuaag

SEQ ID NO: 1282310 - RNA, 19 nt, Homo sapiens
  misc_RNA (1)...(19): siRNA sense strand
ugugaagacuuuauuagcu

SEQ ID NO: 1282311 - RNA, 19 nt, Homo sapiens
  misc_RNA (1)...(19): siRNA sense strand
acgacgaccucaguaacua

SEQ ID NO: 1282312 - RNA, 19 nt, Homo sapiens
  misc_RNA (1)...(19): siRNA sense strand
ugacuacacaccagcauca

SEQ ID NO: 1282313 - RNA, 19 nt, Homo sapiens
  misc_RNA (1)...(19): siRNA sense strand
aaagcaauauacccagaca

SEQ ID NO: 1282314 - RNA, 19 nt, Homo sapiens
  misc_RNA (1)...(19): siRNA sense strand
cucuagaggugguguuuau

SEQ ID NO: 1282315 - RNA, 19 nt, Homo sapiens
  misc_RNA (1)...(19): siRNA sense strand
cuaaaucgcaucuggaaac

SEQ ID NO: 1282316 - RNA, 19 nt, Homo sapiens
  misc_RNA (1)...(19): siRNA sense strand
cagcuucuaccuggacaua

SEQ ID NO: 1282317 - RNA, 19 nt, Homo sapiens
  misc_RNA (1)...(19): siRNA sense strand
guucuaugcaccugacuga

SEQ ID NO: 1282318 - RNA, 19 nt, Homo sapiens
  misc_RNA (1)...(19): siRNA sense strand
cagaaccaauaugugacua

SEQ ID NO: 1282319 - RNA, 19 nt, Homo sapiens
  misc_RNA (1)...(19): siRNA sense strand
ugccaacacugucgauuac

SEQ ID NO: 1282320 - RNA, 19 nt, Homo sapiens
  misc_RNA (1)...(19): siRNA sense strand
ggaguuguucacuucagaa

SEQ ID NO: 1282321 - RNA, 19 nt, Homo sapiens
  misc_RNA (1)...(19): siRNA sense strand
uggaaagaguuuauguucu

SEQ ID NO: 1282322 - RNA, 19 nt, Homo sapiens
  misc_RNA (1)...(19): siRNA sense strand
gaagacuuuauuagcuuug

SEQ ID NO: 1282323 - RNA, 19 nt, Homo sapiens
  misc_RNA (1)...(19): siRNA sense strand
gaagucagcaaagcaaugc

SEQ ID NO: 1282324 - RNA, 19 nt, Homo sapiens
  misc_RNA (1)...(19): siRNA sense strand
guagaaaccgcugccaaca

SEQ ID NO: 1282325 - RNA, 19 nt, Homo sapiens
  misc_RNA (1)...(19): siRNA sense strand
ggugguguuuaucagaaug

SEQ ID NO: 1282326 - RNA, 19 nt, Homo sapiens
  misc_RNA (1)...(19): siRNA sense strand
cuggaaaccugccaauacu

SEQ ID NO: 1282327 - RNA, 19 nt, Homo sapiens
  misc_RNA (1)...(19): siRNA sense strand
gaucgaaccaguagaaacc

SEQ ID NO: 1282328 - RNA, 19 nt, Homo sapiens
  misc_RNA (1)...(19): siRNA sense strand
cgucagaagaacuguuuga

SEQ ID NO: 1282329 - RNA, 19 nt, Homo sapiens
  misc_RNA (1)...(19): siRNA sense strand
gccuuugacucucagaaca

SEQ ID NO: 1282330 - RNA, 19 nt, Homo sapiens
  misc_RNA (1)...(19): siRNA sense strand
ggaaagaguuuauguucua

SEQ ID NO: 1282331 - RNA, 19 nt, Homo sapiens
  misc_RNA (1)...(19): siRNA sense strand
cagaagaacuguuugauug

SEQ ID NO: 1282332 - RNA, 19 nt, Homo sapiens
  misc_RNA (1)...(19): siRNA sense strand
gagaagagcuccagcagau

SEQ ID NO: 1282333 - RNA, 19 nt, Homo sapiens
  misc_RNA (1)...(19): siRNA sense strand
gcaauugugugccaucaaa

SEQ ID NO: 1282334 - RNA, 19 nt, Homo sapiens
  misc_RNA (1)...(19): siRNA sense strand
ggagacaaaucaucaggaa

SEQ ID NO: 1282335 - RNA, 19 nt, Homo sapiens
  misc_RNA (1)...(19): siRNA sense strand
gaagagcuccagcagauaa

SEQ ID NO: 1282336 - RNA, 19 nt, Homo sapiens
  misc_RNA (1)...(19): siRNA sense strand
caagaucuguggagacaaa

SEQ ID NO: 1282337 - RNA, 19 nt, Homo sapiens
  misc_RNA (1)...(19): siRNA sense strand
guuguucacuucagaauuu

SEQ ID NO: 1282338 - RNA, 19 nt, Homo sapiens
  misc_RNA (1)...(19): siRNA sense strand
gcaccugacugaagaugaa

SEQ ID NO: 1282339 - RNA, 19 nt, Homo sapiens
  misc_RNA (1)...(19): siRNA sense strand
gaaauuauuccaugcaaga

SEQ ID NO: 1282340 - RNA, 19 nt, Homo sapiens
  misc_RNA (1)...(19): siRNA sense strand
ggaagaaauugagaacuau

SEQ ID NO: 1282341 - RNA, 19 nt, Homo sapiens
  misc_RNA (1)...(19): siRNA sense strand
caaggugucuacauuaaga

SEQ ID NO: 1282342 - RNA, 19 nt, Homo sapiens
  misc_RNA (1)...(19): siRNA sense strand
ccgagaagauggaauacua

SEQ ID NO: 1282343 - RNA, 19 nt, Homo sapiens
  misc_RNA (1)...(19): siRNA sense strand
gaagauggaauacuaacaa

SEQ ID NO: 1282344 - RNA, 19 nt, Homo sapiens
  misc_RNA (1)...(19): siRNA sense strand
cagcuuguaugcagaagua

SEQ ID NO: 1282345 - RNA, 19 nt, Homo sapiens
  misc_RNA (1)...(19): siRNA sense strand
gaucaaauugugcuucuaa

SEQ ID NO: 1282346 - RNA, 19 nt, Homo sapiens
  misc_RNA (1)...(19): siRNA sense strand
gcagagagacagcuuguau

SEQ ID NO: 1282347 - RNA, 19 nt, Homo sapiens
  misc_RNA (1)...(19): siRNA sense strand
caaacgcauugauggauuu

SEQ ID NO: 1282348 - RNA, 19 nt, Homo sapiens
  misc_RNA (1)...(19): siRNA sense strand
gaagaacuguuugauugau

SEQ ID NO: 1282349 - RNA, 19 nt, Homo sapiens
  misc_RNA (1)...(19): siRNA sense strand
uagaacaccuugcacagaa

SEQ ID NO: 1282350 - RNA, 19 nt, Homo sapiens
  misc_RNA (1)...(19): siRNA sense strand
aggaagaaauugagaacua

SEQ ID NO: 1282351 - RNA, 19 nt, Homo sapiens
  misc_RNA (1)...(19): siRNA sense strand
gaacaccuugcacagaaua

SEQ ID NO: 1282352 - RNA, 19 nt, Homo sapiens
  misc_RNA (1)...(19): siRNA sense strand
aaucaaaccagaaccaaua

SEQ ID NO: 1282353 - RNA, 19 nt, Homo sapiens
  misc_RNA (1)...(19): siRNA sense strand
guagggaugucucgagaug

SEQ ID NO: 1282354 - RNA, 19 nt, Homo sapiens
  misc_RNA (1)...(19): siRNA sense strand
gaggugauguggcaauugu

SEQ ID NO: 1282355 - RNA, 19 nt, Homo sapiens
  misc_RNA (1)...(19): siRNA sense strand
gcucauggcugcaagaaaa

SEQ ID NO: 1282356 - RNA, 19 nt, Homo sapiens
  misc_RNA (1)...(19): siRNA sense strand
ggaaaccugccaauacuug

SEQ ID NO: 1282357 - RNA, 19 nt, Homo sapiens
  misc_RNA (1)...(19): siRNA sense strand
gaggugguguuuaucagaa

SEQ ID NO: 1282358 - RNA, 19 nt, Homo sapiens
  misc_RNA (1)...(19): siRNA sense strand
ccaaacgcauugauggauu

SEQ ID NO: 1282359 - RNA, 19 nt, Homo sapiens
  misc_RNA (1)...(19): siRNA sense strand
uuacagaagcuauacagua

SEQ ID NO: 1282360 - RNA, 19 nt, Homo sapiens
  misc_RNA (1)...(19): siRNA sense strand
gaaccaauaugugacuaca

SEQ ID NO: 1282361 - RNA, 19 nt, Homo sapiens
  misc_RNA (1)...(19): siRNA sense strand
caacacguccuacagaaga

SEQ ID NO: 1282362 - RNA, 19 nt, Homo sapiens
  misc_RNA (1)...(19): siRNA sense strand
gugaagacuuuauuagcuu

SEQ ID NO: 1282363 - RNA, 19 nt, Homo sapiens
  misc_RNA (1)...(19): siRNA sense strand
uaugcaaggugucuacauu

SEQ ID NO: 1282364 - RNA, 19 nt, Homo sapiens
  misc_RNA (1)...(19): siRNA sense strand
ucaccgagaagauggaaua

SEQ ID NO: 1282365 - RNA, 19 nt, Homo sapiens
  misc_RNA (1)...(19): siRNA sense strand
ccagucaggucuugauauc

SEQ ID NO: 1282366 - RNA, 19 nt, Homo sapiens
  misc_RNA (1)...(19): siRNA sense strand
gauggaauacuaacaaagu

SEQ ID NO: 1282367 - RNA, 19 nt, Homo sapiens
  misc_RNA (1)...(19): siRNA sense strand
gaaugugccgugccuuuga

SEQ ID NO: 1282368 - RNA, 19 nt, Homo sapiens
  misc_RNA (1)...(19): siRNA sense strand
ggagaagucagcaaagcaa

SEQ ID NO: 1282369 - RNA, 19 nt, Homo sapiens
  misc_RNA (1)...(19): siRNA sense strand
ugcaaggugucuacauuaa

SEQ ID NO: 1282370 - RNA, 19 nt, Homo sapiens
  misc_RNA (1)...(19): siRNA sense strand
acagaagaaucaccgagaa

SEQ ID NO: 1282371 - RNA, 19 nt, Homo sapiens
  misc_RNA (1)...(19): siRNA sense strand
gaagaaucaccgagaagau

SEQ ID NO: 1282372 - RNA, 19 nt, Homo sapiens
  misc_RNA (1)...(19): siRNA sense strand
ucagaagaacuguuugauu

SEQ ID NO: 1282373 - RNA, 19 nt, Homo sapiens
  misc_RNA (1)...(19): siRNA sense strand
cgaccucaguaacuacauu

SEQ ID NO: 1282374 - RNA, 19 nt, Homo sapiens
  misc_RNA (1)...(19): siRNA sense strand
caaaccagaaccaauaugu

SEQ ID NO: 1282375 - RNA, 19 nt, Homo sapiens
  misc_RNA (1)...(19): siRNA sense strand
agacaaaucaucaggaauc

SEQ ID NO: 1282376 - RNA, 19 nt, Homo sapiens
  misc_RNA (1)...(19): siRNA sense strand
gacugaagaugaaauugca

SEQ ID NO: 1282377 - RNA, 19 nt, Homo sapiens
  misc_RNA (1)...(19): siRNA sense strand
guccauggcagaauuagaa

SEQ ID NO: 1282378 - RNA, 19 nt, Homo sapiens
  misc_RNA (1)...(19): siRNA sense strand
uacaguaugugguggaguu

SEQ ID NO: 1282379 - RNA, 19 nt, Homo sapiens
  misc_RNA (1)...(19): siRNA sense strand
gccaauacuugagagaaga

SEQ ID NO: 1282380 - RNA, 19 nt, Homo sapiens
  misc_RNA (1)...(19): siRNA sense strand
gaaaccugccaauacuuga

SEQ ID NO: 1282381 - RNA, 19 nt, Homo sapiens
  misc_RNA (1)...(19): siRNA sense strand
aaauucagcuagcucuuca

SEQ ID NO: 1282382 - RNA, 19 nt, Homo sapiens
  misc_RNA (1)...(19): siRNA sense strand
gacauugugcgacuucauu

SEQ ID NO: 1282383 - RNA, 19 nt, Homo sapiens
  misc_RNA (1)...(19): siRNA sense strand
cgagaagauggaauacuaa

SEQ ID NO: 1282384 - RNA, 19 nt, Homo sapiens
  misc_RNA (1)...(19): siRNA sense strand
agaaaccgcugccaacacu

SEQ ID NO: 1282385 - RNA, 19 nt, Homo sapiens
  misc_RNA (1)...(19): siRNA sense strand
cuaugcaccugacugaaga

SEQ ID NO: 1282386 - RNA, 19 nt, Homo sapiens
  misc_RNA (1)...(19): siRNA sense strand
cgacgucuucaaauccuua

SEQ ID NO: 1282387 - RNA, 19 nt, Homo sapiens
  misc_RNA (1)...(19): siRNA sense strand
cagaaugugccgugccuuu

SEQ ID NO: 1282388 - RNA, 19 nt, Homo sapiens
  misc_RNA (1)...(19): siRNA sense strand
gggaggugauguggcaauu

SEQ ID NO: 1282389 - RNA, 19 nt, Homo sapiens
  misc_RNA (1)...(19): siRNA sense strand
gaaucaaaccagaaccaau

SEQ ID NO: 1282390 - RNA, 19 nt, Homo sapiens
  misc_RNA (1)...(19): siRNA sense strand
ccaacgggcugacggaacu

SEQ ID NO: 1282391 - RNA, 19 nt, Homo sapiens
  misc_RNA (1)...(19): siRNA sense strand
gaucuguggagacaaauca

SEQ ID NO: 1282392 - RNA, 19 nt, Homo sapiens
  misc_RNA (1)...(19): siRNA sense strand
ucaaauccuuagguuguga

SEQ ID NO: 1282393 - RNA, 19 nt, Homo sapiens
  misc_RNA (1)...(19): siRNA sense strand
gaagaaauugagaacuauc

SEQ ID NO: 1282394 - RNA, 19 nt, Homo sapiens
  misc_RNA (1)...(19): siRNA sense strand
ucgagaugcuguaaaauuu

SEQ ID NO: 1282395 - RNA, 19 nt, Homo sapiens
  misc_RNA (1)...(19): siRNA sense strand
ucagcuagcucuucaacac

SEQ ID NO: 1282396 - RNA, 19 nt, Homo sapiens
  misc_RNA (1)...(19): siRNA sense strand
gguugugaagacuuuauua

SEQ ID NO: 1282397 - RNA, 19 nt, Homo sapiens
  misc_RNA (1)...(19): siRNA sense strand
aaccagaaccaauauguga

SEQ ID NO: 1282398 - RNA, 19 nt, Homo sapiens
  misc_RNA (1)...(19): siRNA sense strand
aaucaucaggaauccauua

SEQ ID NO: 1282399 - RNA, 19 nt, Homo sapiens
  misc_RNA (1)...(19): siRNA sense strand
gcuucuaccuggacauaca

SEQ ID NO: 1282400 - RNA, 19 nt, Homo sapiens
  misc_RNA (1)...(19): siRNA sense strand
guaugcagaaguacagaaa

SEQ ID NO: 1282401 - RNA, 19 nt, Homo sapiens
  misc_RNA (1)...(19): siRNA sense strand
caaaucaucaggaauccau

SEQ ID NO: 1282402 - RNA, 19 nt, Homo sapiens
  misc_RNA (1)...(19): siRNA sense strand
ggaaucaaaccagaaccaa

SEQ ID NO: 1282403 - RNA, 19 nt, Homo sapiens
  misc_RNA (1)...(19): siRNA sense strand
acgcauugauggauuuaug

SEQ ID NO: 1282404 - RNA, 19 nt, Homo sapiens
  misc_RNA (1)...(19): siRNA sense strand
cuuagguugugaagacuuu

SEQ ID NO: 1282405 - RNA, 19 nt, Homo sapiens
  misc_RNA (1)...(19): siRNA sense strand
agaagaacuguuugauuga

SEQ ID NO: 1282406 - RNA, 19 nt, Homo sapiens
  misc_RNA (1)...(19): siRNA sense strand
aaugcaaauugauggguaa

SEQ ID NO: 1282407 - RNA, 19 nt, Homo sapiens
  misc_RNA (1)...(19): siRNA sense strand
cuucaaauccuuagguugu

SEQ ID NO: 1282408 - RNA, 19 nt, Homo sapiens
  misc_RNA (1)...(19): siRNA sense strand
cugccaacacugucgauua

SEQ ID NO: 1282409 - RNA, 19 nt, Homo sapiens
  misc_RNA (1)...(19): siRNA sense strand
gcaaggugucuacauuaag

SEQ ID NO: 1282410 - RNA, 19 nt, Homo sapiens
  misc_RNA (1)...(19): siRNA sense strand
ugugaagacuuuauuagcu

SEQ ID NO: 1282411 - RNA, 19 nt, Homo sapiens
  misc_RNA (1)...(19): siRNA sense strand
acgacgaccucaguaacua

SEQ ID NO: 1282412 - RNA, 19 nt, Homo sapiens
  misc_RNA (1)...(19): siRNA sense strand
ugacuacacaccagcauca

SEQ ID NO: 1282413 - RNA, 19 nt, Homo sapiens
  misc_RNA (1)...(19): siRNA sense strand
aaagcaauauacccagaca

SEQ ID NO: 1282414 - RNA, 19 nt, Homo sapiens
  misc_RNA (1)...(19): siRNA sense strand
cucuagaggugguguuuau

SEQ ID NO: 1282415 - RNA, 19 nt, Homo sapiens
  misc_RNA (1)...(19): siRNA sense strand
cuaaaucgcaucuggaaac

SEQ ID NO: 1282416 - RNA, 19 nt, Homo sapiens
  misc_RNA (1)...(19): siRNA sense strand
cagcuucuaccuggacaua

SEQ ID NO: 1282417 - RNA, 19 nt, Homo sapiens
  misc_RNA (1)...(19): siRNA sense strand
guucuaugcaccugacuga

SEQ ID NO: 1282418 - RNA, 19 nt, Homo sapiens
  misc_RNA (1)...(19): siRNA sense strand
cagaaccaauaugugacua

SEQ ID NO: 1282419 - RNA, 19 nt, Homo sapiens
  misc_RNA (1)...(19): siRNA sense strand
ugccaacacugucgauuac

SEQ ID NO: 1282420 - RNA, 19 nt, Homo sapiens
  misc_RNA (1)...(19): siRNA sense strand
ggaguuguucacuucagaa

SEQ ID NO: 1282421 - RNA, 19 nt, Homo sapiens
  misc_RNA (1)...(19): siRNA sense strand
uggaaagaguuuauguucu

SEQ ID NO: 1282422 - RNA, 19 nt, Homo sapiens
  misc_RNA (1)...(19): siRNA sense strand
gaagacuuuauuagcuuug

SEQ ID NO: 1282423 - RNA, 19 nt, Homo sapiens
  misc_RNA (1)...(19): siRNA sense strand
gaagucagcaaagcaaugc

SEQ ID NO: 1282424 - RNA, 19 nt, Homo sapiens
  misc_RNA (1)...(19): siRNA sense strand
guagaaaccgcugccaaca

SEQ ID NO: 1282425 - RNA, 19 nt, Homo sapiens
  misc_RNA (1)...(19): siRNA sense strand
ggugguguuuaucagaaug

SEQ ID NO: 1282426 - RNA, 19 nt, Homo sapiens
  misc_RNA (1)...(19): siRNA sense strand
cuggaaaccugccaauacu

SEQ ID NO: 1282427 - RNA, 19 nt, Homo sapiens
  misc_RNA (1)...(19): siRNA sense strand
gaucgaaccaguagaaacc

SEQ ID NO: 1282428 - RNA, 19 nt, Homo sapiens
  misc_RNA (1)...(19): siRNA sense strand
cgucagaagaacuguuuga

SEQ ID NO: 1282429 - RNA, 19 nt, Homo sapiens
  misc_RNA (1)...(19): siRNA sense strand
gccuuugacucucagaaca

SEQ ID NO: 1282430 - RNA, 19 nt, Homo sapiens
  misc_RNA (1)...(19): siRNA sense strand
ggaaagaguuuauguucua

SEQ ID NO: 1282431 - RNA, 19 nt, Homo sapiens
  misc_RNA (1)...(19): siRNA sense strand
cagaagaacuguuugauug

SEQ ID NO: 1282432 - RNA, 19 nt, Homo sapiens
  misc_RNA (1)...(19): siRNA sense strand
gagaagagcuccagcagau

SEQ ID NO: 1282433 - RNA, 19 nt, Homo sapiens
  misc_RNA (1)...(19): siRNA sense strand
gcaauugugugccaucaaa

SEQ ID NO: 1282434 - RNA, 19 nt, Homo sapiens
  misc_RNA (1)...(19): siRNA sense strand
ggagacaaaucaucaggaa

SEQ ID NO: 1282435 - RNA, 19 nt, Homo sapiens
  misc_RNA (1)...(19): siRNA sense strand
gaagagcuccagcagauaa

SEQ ID NO: 1282436 - RNA, 19 nt, Homo sapiens
  misc_RNA (1)...(19): siRNA sense strand
caagaucuguggagacaaa

SEQ ID NO: 1282437 - RNA, 19 nt, Homo sapiens
  misc_RNA (1)...(19): siRNA sense strand
guuguucacuucagaauuu

SEQ ID NO: 1282438 - RNA, 19 nt, Homo sapiens
  misc_RNA (1)...(19): siRNA sense strand
gcaccugacugaagaugaa

SEQ ID NO: 1282439 - RNA, 19 nt, Homo sapiens
  misc_RNA (1)...(19): siRNA sense strand
gaaauuauuccaugcaaga

SEQ ID NO: 1282440 - RNA, 19 nt, Homo sapiens
  misc_RNA (1)...(19): siRNA sense strand
ggaagaaauugagaacuau

SEQ ID NO: 1282441 - RNA, 19 nt, Homo sapiens
  misc_RNA (1)...(19): siRNA sense strand
caaggugucuacauuaaga

SEQ ID NO: 1282442 - RNA, 19 nt, Homo sapiens
  misc_RNA (1)...(19): siRNA sense strand
ccgagaagauggaauacua

SEQ ID NO: 1282443 - RNA, 19 nt, Homo sapiens
  misc_RNA (1)...(19): siRNA sense strand
gaagauggaauacuaacaa

SEQ ID NO: 1282444 - RNA, 19 nt, Homo sapiens
  misc_RNA (1)...(19): siRNA sense strand
cagcuuguaugcagaagua

SEQ ID NO: 1282445 - RNA, 19 nt, Homo sapiens
  misc_RNA (1)...(19): siRNA sense strand
gaucaaauugugcuucuaa

SEQ ID NO: 1282446 - RNA, 19 nt, Homo sapiens
  misc_RNA (1)...(19): siRNA sense strand
gcagagagacagcuuguau

SEQ ID NO: 1282447 - RNA, 19 nt, Homo sapiens
  misc_RNA (1)...(19): siRNA sense strand
caaacgcauugauggauuu

SEQ ID NO: 1282448 - RNA, 19 nt, Homo sapiens
  misc_RNA (1)...(19): siRNA sense strand
gaagaacuguuugauugau

SEQ ID NO: 1282449 - RNA, 19 nt, Homo sapiens
  misc_RNA (1)...(19): siRNA sense strand
uagaacaccuugcacagaa

SEQ ID NO: 1282450 - RNA, 19 nt, Homo sapiens
  misc_RNA (1)...(19): siRNA sense strand
aggaagaaauugagaacua

SEQ ID NO: 1282451 - RNA, 19 nt, Homo sapiens
  misc_RNA (1)...(19): siRNA sense strand
gaacaccuugcacagaaua

SEQ ID NO: 1282452 - RNA, 19 nt, Homo sapiens
  misc_RNA (1)...(19): siRNA sense strand
aaucaaaccagaaccaaua

SEQ ID NO: 1282453 - RNA, 19 nt, Homo sapiens
  misc_RNA (1)...(19): siRNA sense strand
guagggaugucucgagaug

SEQ ID NO: 1282454 - RNA, 19 nt, Homo sapiens
  misc_RNA (1)...(19): siRNA sense strand
gaggugauguggcaauugu

SEQ ID NO: 1282455 - RNA, 19 nt, Homo sapiens
  misc_RNA (1)...(19): siRNA sense strand
gcucauggcugcaagaaaa

SEQ ID NO: 1282456 - RNA, 19 nt, Homo sapiens
  misc_RNA (1)...(19): siRNA sense strand
ggaaaccugccaauacuug

SEQ ID NO: 1282457 - RNA, 19 nt, Homo sapiens
  misc_RNA (1)...(19): siRNA sense strand
gaggugguguuuaucagaa

SEQ ID NO: 1282458 - RNA, 19 nt, Homo sapiens
  misc_RNA (1)...(19): siRNA sense strand
ccaaacgcauugauggauu

SEQ ID NO: 1282459 - RNA, 19 nt, Homo sapiens
  misc_RNA (1)...(19): siRNA sense strand
uuacagaagcuauacagua

SEQ ID NO: 1282460 - RNA, 19 nt, Homo sapiens
  misc_RNA (1)...(19): siRNA sense strand
gaaccaauaugugacuaca

SEQ ID NO: 1282461 - RNA, 19 nt, Homo sapiens
  misc_RNA (1)...(19): siRNA sense strand
caacacguccuacagaaga

SEQ ID NO: 1282462 - RNA, 19 nt, Homo sapiens
  misc_RNA (1)...(19): siRNA sense strand
gugaagacuuuauuagcuu

SEQ ID NO: 1282463 - RNA, 19 nt, Homo sapiens
  misc_RNA (1)...(19): siRNA sense strand
uaugcaaggugucuacauu

SEQ ID NO: 1282464 - RNA, 19 nt, Homo sapiens
  misc_RNA (1)...(19): siRNA sense strand
ucaccgagaagauggaaua

SEQ ID NO: 1282465 - RNA, 19 nt, Homo sapiens
  misc_RNA (1)...(19): siRNA sense strand
ccagucaggucuugauauc

SEQ ID NO: 1282466 - RNA, 19 nt, Homo sapiens
  misc_RNA (1)...(19): siRNA sense strand
gauggaauacuaacaaagu

SEQ ID NO: 1282467 - RNA, 19 nt, Homo sapiens
  misc_RNA (1)...(19): siRNA sense strand
gaaugugccgugccuuuga

SEQ ID NO: 1282468 - RNA, 19 nt, Homo sapiens
  misc_RNA (1)...(19): siRNA sense strand
ggagaagucagcaaagcaa

SEQ ID NO: 1282469 - RNA, 19 nt, Homo sapiens
  misc_RNA (1)...(19): siRNA sense strand
ugcaaggugucuacauuaa

SEQ ID NO: 1282470 - RNA, 19 nt, Homo sapiens
  misc_RNA (1)...(19): siRNA sense strand
acagaagaaucaccgagaa

SEQ ID NO: 1282471 - RNA, 19 nt, Homo sapiens
  misc_RNA (1)...(19): siRNA sense strand
gaagaaucaccgagaagau

SEQ ID NO: 1282472 - RNA, 19 nt, Homo sapiens
  misc_RNA (1)...(19): siRNA sense strand
ucagaagaacuguuugauu

SEQ ID NO: 1282473 - RNA, 19 nt, Homo sapiens
  misc_RNA (1)...(19): siRNA sense strand
cgaccucaguaacuacauu

SEQ ID NO: 1282474 - RNA, 19 nt, Homo sapiens
  misc_RNA (1)...(19): siRNA sense strand
caaaccagaaccaauaugu

SEQ ID NO: 1282475 - RNA, 19 nt, Homo sapiens
  misc_RNA (1)...(19): siRNA sense strand
agacaaaucaucaggaauc

SEQ ID NO: 1282476 - RNA, 19 nt, Homo sapiens
  misc_RNA (1)...(19): siRNA sense strand
gacugaagaugaaauugca

SEQ ID NO: 1282477 - RNA, 19 nt, Homo sapiens
  misc_RNA (1)...(19): siRNA sense strand
guccauggcagaauuagaa

SEQ ID NO: 1282478 - RNA, 19 nt, Homo sapiens
  misc_RNA (1)...(19): siRNA sense strand
uacaguaugugguggaguu

SEQ ID NO: 1282479 - RNA, 19 nt, Homo sapiens
  misc_RNA (1)...(19): siRNA sense strand
gccaauacuugagagaaga

SEQ ID NO: 1282480 - RNA, 19 nt, Homo sapiens
  misc_RNA (1)...(19): siRNA sense strand
gaaaccugccaauacuuga

SEQ ID NO: 1282481 - RNA, 19 nt, Homo sapiens
  misc_RNA (1)...(19): siRNA sense strand
aaauucagcuagcucuuca

SEQ ID NO: 1282482 - RNA, 19 nt, Homo sapiens
  misc_RNA (1)...(19): siRNA sense strand
gacauugugcgacuucauu

SEQ ID NO: 1282483 - RNA, 19 nt, Homo sapiens
  misc_RNA (1)...(19): siRNA sense strand
cgagaagauggaauacuaa

SEQ ID NO: 1282484 - RNA, 19 nt, Homo sapiens
  misc_RNA (1)...(19): siRNA sense strand
agaaaccgcugccaacacu

SEQ ID NO: 1282485 - RNA, 19 nt, Homo sapiens
  misc_RNA (1)...(19): siRNA sense strand
cuaugcaccugacugaaga

SEQ ID NO: 1282486 - RNA, 19 nt, Homo sapiens
  misc_RNA (1)...(19): siRNA sense strand
cgacgucuucaaauccuua

SEQ ID NO: 1282487 - RNA, 19 nt, Homo sapiens
  misc_RNA (1)...(19): siRNA sense strand
cagaaugugccgugccuuu

SEQ ID NO: 1282488 - RNA, 19 nt, Homo sapiens
  misc_RNA (1)...(19): siRNA sense strand
gggaggugauguggcaauu

SEQ ID NO: 1282489 - RNA, 19 nt, Homo sapiens
  misc_RNA (1)...(19): siRNA sense strand
gaaucaaaccagaaccaau

SEQ ID NO: 1282490 - RNA, 19 nt, Homo sapiens
  misc_RNA (1)...(19): siRNA sense strand
ccaacgggcugacggaacu

SEQ ID NO: 1282491 - RNA, 19 nt, Homo sapiens
  misc_RNA (1)...(19): siRNA sense strand
gaucuguggagacaaauca

SEQ ID NO: 1282492 - RNA, 19 nt, Homo sapiens
  misc_RNA (1)...(19): siRNA sense strand
ucaaauccuuagguuguga

SEQ ID NO: 1282493 - RNA, 19 nt, Homo sapiens
  misc_RNA (1)...(19): siRNA sense strand
gaagaaauugagaacuauc

SEQ ID NO: 1282494 - RNA, 19 nt, Homo sapiens
  misc_RNA (1)...(19): siRNA sense strand
ucgagaugcuguaaaauuu

SEQ ID NO: 1282495 - RNA, 19 nt, Homo sapiens
  misc_RNA (1)...(19): siRNA sense strand
ucagcuagcucuucaacac

SEQ ID NO: 1282496 - RNA, 19 nt, Homo sapiens
  misc_RNA (1)...(19): siRNA sense strand
gguugugaagacuuuauua

SEQ ID NO: 1282497 - RNA, 19 nt, Homo sapiens
  misc_RNA (1)...(19): siRNA sense strand
aaccagaaccaauauguga

SEQ ID NO: 1282498 - RNA, 19 nt, Homo sapiens
  misc_RNA (1)...(19): siRNA sense strand
aaucaucaggaauccauua

SEQ ID NO: 1282499 - RNA, 19 nt, Homo sapiens
  misc_RNA (1)...(19): siRNA sense strand
gcuucuaccuggacauaca

SEQ ID NO: 1282500 - RNA, 19 nt, Homo sapiens
  misc_RNA (1)...(19): siRNA sense strand
guaugcagaaguacagaaa

SEQ ID NO: 1282501 - RNA, 19 nt, Homo sapiens
  misc_RNA (1)...(19): siRNA sense strand
caaaucaucaggaauccau

SEQ ID NO: 1282502 - RNA, 19 nt, Homo sapiens
  misc_RNA (1)...(19): siRNA sense strand
ggaaucaaaccagaaccaa

SEQ ID NO: 1282503 - RNA, 19 nt, Homo sapiens
  misc_RNA (1)...(19): siRNA sense strand
acgcauugauggauuuaug

SEQ ID NO: 1282504 - RNA, 19 nt, Homo sapiens
  misc_RNA (1)...(19): siRNA sense strand
cuuagguugugaagacuuu

SEQ ID NO: 1282505 - RNA, 19 nt, Homo sapiens
  misc_RNA (1)...(19): siRNA sense strand
agaagaacuguuugauuga

SEQ ID NO: 1282506 - RNA, 19 nt, Homo sapiens
  misc_RNA (1)...(19): siRNA sense strand
aaugcaaauugauggguaa

SEQ ID NO: 1282507 - RNA, 19 nt, Homo sapiens
  misc_RNA (1)...(19): siRNA sense strand
cuucaaauccuuagguugu

SEQ ID NO: 1282508 - RNA, 19 nt, Homo sapiens
  misc_RNA (1)...(19): siRNA sense strand
cugccaacacugucgauua

SEQ ID NO: 1282509 - RNA, 19 nt, Homo sapiens
  misc_RNA (1)...(19): siRNA sense strand
gcaaggugucuacauuaag

SEQ ID NO: 1282510 - RNA, 19 nt, Homo sapiens
  misc_RNA (1)...(19): siRNA sense strand
ugugaagacuuuauuagcu

SEQ ID NO: 1282511 - RNA, 19 nt, Homo sapiens
  misc_RNA (1)...(19): siRNA sense strand
acgacgaccucaguaacua

SEQ ID NO: 1282512 - RNA, 19 nt, Homo sapiens
  misc_RNA (1)...(19): siRNA sense strand
ugacuacacaccagcauca

SEQ ID NO: 1282513 - RNA, 19 nt, Homo sapiens
  misc_RNA (1)...(19): siRNA sense strand
aaagcaauauacccagaca

SEQ ID NO: 1282514 - RNA, 19 nt, Homo sapiens
  misc_RNA (1)...(19): siRNA sense strand
cucuagaggugguguuuau

SEQ ID NO: 1282515 - RNA, 19 nt, Homo sapiens
  misc_RNA (1)...(19): siRNA sense strand
cuaaaucgcaucuggaaac

SEQ ID NO: 1282516 - RNA, 19 nt, Homo sapiens
  misc_RNA (1)...(19): siRNA sense strand
cagcuucuaccuggacaua

SEQ ID NO: 1282517 - RNA, 19 nt, Homo sapiens
  misc_RNA (1)...(19): siRNA sense strand
guucuaugcaccugacuga

SEQ ID NO: 1282518 - RNA, 19 nt, Homo sapiens
  misc_RNA (1)...(19): siRNA sense strand
cagaaccaauaugugacua

SEQ ID NO: 1282519 - RNA, 19 nt, Homo sapiens
  misc_RNA (1)...(19): siRNA sense strand
ugccaacacugucgauuac

SEQ ID NO: 1282520 - RNA, 19 nt, Homo sapiens
  misc_RNA (1)...(19): siRNA sense strand
ggaguuguucacuucagaa

SEQ ID NO: 1282521 - RNA, 19 nt, Homo sapiens
  misc_RNA (1)...(19): siRNA sense strand
uggaaagaguuuauguucu

SEQ ID NO: 1282522 - RNA, 19 nt, Homo sapiens
  misc_RNA (1)...(19): siRNA sense strand
gaagacuuuauuagcuuug

SEQ ID NO: 1282523 - RNA, 19 nt, Homo sapiens
  misc_RNA (1)...(19): siRNA sense strand
gaagucagcaaagcaaugc

SEQ ID NO: 1282524 - RNA, 19 nt, Homo sapiens
  misc_RNA (1)...(19): siRNA sense strand
guagaaaccgcugccaaca

SEQ ID NO: 1282525 - RNA, 19 nt, Homo sapiens
  misc_RNA (1)...(19): siRNA sense strand
ggugguguuuaucagaaug

SEQ ID NO: 1282526 - RNA, 19 nt, Homo sapiens
  misc_RNA (1)...(19): siRNA sense strand
cuggaaaccugccaauacu

SEQ ID NO: 1282527 - RNA, 19 nt, Homo sapiens
  misc_RNA (1)...(19): siRNA sense strand
gaucgaaccaguagaaacc

SEQ ID NO: 1282528 - RNA, 19 nt, Homo sapiens
  misc_RNA (1)...(19): siRNA sense strand
cgucagaagaacuguuuga

SEQ ID NO: 1282529 - RNA, 19 nt, Homo sapiens
  misc_RNA (1)...(19): siRNA sense strand
gccuuugacucucagaaca

SEQ ID NO: 1282530 - RNA, 19 nt, Homo sapiens
  misc_RNA (1)...(19): siRNA sense strand
ggaaagaguuuauguucua

SEQ ID NO: 1282531 - RNA, 19 nt, Homo sapiens
  misc_RNA (1)...(19): siRNA sense strand
cagaagaacuguuugauug

SEQ ID NO: 1282532 - RNA, 19 nt, Homo sapiens
  misc_RNA (1)...(19): siRNA sense strand
gagaagagcuccagcagau

SEQ ID NO: 1282533 - RNA, 19 nt, Homo sapiens
  misc_RNA (1)...(19): siRNA sense strand
gcaauugugugccaucaaa

SEQ ID NO: 1282534 - RNA, 19 nt, Homo sapiens
  misc_RNA (1)...(19): siRNA sense strand
ggagacaaaucaucaggaa

SEQ ID NO: 1282535 - RNA, 19 nt, Homo sapiens
  misc_RNA (1)...(19): siRNA sense strand
gaagagcuccagcagauaa

SEQ ID NO: 1282536 - RNA, 19 nt, Homo sapiens
  misc_RNA (1)...(19): siRNA sense strand
caagaucuguggagacaaa

SEQ ID NO: 1282537 - RNA, 19 nt, Homo sapiens
  misc_RNA (1)...(19): siRNA sense strand
guuguucacuucagaauuu

SEQ ID NO: 1282538 - RNA, 19 nt, Homo sapiens
  misc_RNA (1)...(19): siRNA sense strand
gcaccugacugaagaugaa

SEQ ID NO: 1282539 - RNA, 19 nt, Homo sapiens
  misc_RNA (1)...(19): siRNA sense strand
gaaauuauuccaugcaaga

SEQ ID NO: 1282540 - RNA, 19 nt, Homo sapiens
  misc_RNA (1)...(19): siRNA sense strand
ggaagaaauugagaacuau

SEQ ID NO: 1282541 - RNA, 19 nt, Homo sapiens
  misc_RNA (1)...(19): siRNA sense strand
caaggugucuacauuaaga

SEQ ID NO: 1282542 - RNA, 19 nt, Homo sapiens
  misc_RNA (1)...(19): siRNA sense strand
ccgagaagauggaauacua

SEQ ID NO: 1282543 - RNA, 19 nt, Homo sapiens
  misc_RNA (1)...(19): siRNA sense strand
gaagauggaauacuaacaa

SEQ ID NO: 1282544 - RNA, 19 nt, Homo sapiens
  misc_RNA (1)...(19): siRNA sense strand
cagcuuguaugcagaagua

SEQ ID NO: 1282545 - RNA, 19 nt, Homo sapiens
  misc_RNA (1)...(19): siRNA sense strand
gaucaaauugugcuucuaa

SEQ ID NO: 1282546 - RNA, 19 nt, Homo sapiens
  misc_RNA (1)...(19): siRNA sense strand
gcagagagacagcuuguau

SEQ ID NO: 1282547 - RNA, 19 nt, Homo sapiens
  misc_RNA (1)...(19): siRNA sense strand
caaacgcauugauggauuu

SEQ ID NO: 1282548 - RNA, 19 nt, Homo sapiens
  misc_RNA (1)...(19): siRNA sense strand
gaagaacuguuugauugau

SEQ ID NO: 1282549 - RNA, 19 nt, Homo sapiens
  misc_RNA (1)...(19): siRNA sense strand
uagaacaccuugcacagaa

SEQ ID NO: 1282550 - RNA, 19 nt, Homo sapiens
  misc_RNA (1)...(19): siRNA sense strand
aggaagaaauugagaacua

SEQ ID NO: 1282551 - RNA, 19 nt, Homo sapiens
  misc_RNA (1)...(19): siRNA sense strand
gaacaccuugcacagaaua

SEQ ID NO: 1282552 - RNA, 19 nt, Homo sapiens
  misc_RNA (1)...(19): siRNA sense strand
aaucaaaccagaaccaaua

SEQ ID NO: 1282553 - RNA, 19 nt, Homo sapiens
  misc_RNA (1)...(19): siRNA sense strand
guagggaugucucgagaug

SEQ ID NO: 1282554 - RNA, 19 nt, Homo sapiens
  misc_RNA (1)...(19): siRNA sense strand
gaggugauguggcaauugu

SEQ ID NO: 1282555 - RNA, 19 nt, Homo sapiens
  misc_RNA (1)...(19): siRNA sense strand
gcucauggcugcaagaaaa

SEQ ID NO: 1282556 - RNA, 19 nt, Homo sapiens
  misc_RNA (1)...(19): siRNA sense strand
ggaaaccugccaauacuug

SEQ ID NO: 1282557 - RNA, 19 nt, Homo sapiens
  misc_RNA (1)...(19): siRNA sense strand
gaggugguguuuaucagaa

SEQ ID NO: 1282558 - RNA, 19 nt, Homo sapiens
  misc_RNA (1)...(19): siRNA sense strand
ccaaacgcauugauggauu

SEQ ID NO: 1282559 - RNA, 19 nt, Homo sapiens
  misc_RNA (1)...(19): siRNA sense strand
uuacagaagcuauacagua

SEQ ID NO: 1282560 - RNA, 19 nt, Homo sapiens
  misc_RNA (1)...(19): siRNA sense strand
gaaccaauaugugacuaca

SEQ ID NO: 1282561 - RNA, 19 nt, Homo sapiens
  misc_RNA (1)...(19): siRNA sense strand
caacacguccuacagaaga

SEQ ID NO: 1282562 - RNA, 19 nt, Homo sapiens
  misc_RNA (1)...(19): siRNA sense strand
gugaagacuuuauuagcuu

SEQ ID NO: 1282563 - RNA, 19 nt, Homo sapiens
  misc_RNA (1)...(19): siRNA sense strand
uaugcaaggugucuacauu

SEQ ID NO: 1282564 - RNA, 19 nt, Homo sapiens
  misc_RNA (1)...(19): siRNA sense strand
ucaccgagaagauggaaua

SEQ ID NO: 1282565 - RNA, 19 nt, Homo sapiens
  misc_RNA (1)...(19): siRNA sense strand
ccagucaggucuugauauc

SEQ ID NO: 1282566 - RNA, 19 nt, Homo sapiens
  misc_RNA (1)...(19): siRNA sense strand
gauggaauacuaacaaagu

SEQ ID NO: 1282567 - RNA, 19 nt, Homo sapiens
  misc_RNA (1)...(19): siRNA sense strand
gaaugugccgugccuuuga

SEQ ID NO: 1282568 - RNA, 19 nt, Homo sapiens
  misc_RNA (1)...(19): siRNA sense strand
ggagaagucagcaaagcaa

SEQ ID NO: 1282569 - RNA, 19 nt, Homo sapiens
  misc_RNA (1)...(19): siRNA sense strand
ugcaaggugucuacauuaa

SEQ ID NO: 1282570 - RNA, 19 nt, Homo sapiens
  misc_RNA (1)...(19): siRNA sense strand
acagaagaaucaccgagaa

SEQ ID NO: 1282571 - RNA, 19 nt, Homo sapiens
  misc_RNA (1)...(19): siRNA sense strand
gaagaaucaccgagaagau

SEQ ID NO: 1282572 - RNA, 19 nt, Homo sapiens
  misc_RNA (1)...(19): siRNA sense strand
ucagaagaacuguuugauu

SEQ ID NO: 1282573 - RNA, 19 nt, Homo sapiens
  misc_RNA (1)...(19): siRNA sense strand
cgaccucaguaacuacauu

SEQ ID NO: 1282574 - RNA, 19 nt, Homo sapiens
  misc_RNA (1)...(19): siRNA sense strand
caaaccagaaccaauaugu

SEQ ID NO: 1282575 - RNA, 19 nt, Homo sapiens
  misc_RNA (1)...(19): siRNA sense strand
agacaaaucaucaggaauc

SEQ ID NO: 1282576 - RNA, 19 nt, Homo sapiens
  misc_RNA (1)...(19): siRNA sense strand
gacugaagaugaaauugca

SEQ ID NO: 1282577 - RNA, 19 nt, Homo sapiens
  misc_RNA (1)...(19): siRNA sense strand
guccauggcagaauuagaa

SEQ ID NO: 1282578 - RNA, 19 nt, Homo sapiens
  misc_RNA (1)...(19): siRNA sense strand
uacaguaugugguggaguu

SEQ ID NO: 1282579 - RNA, 19 nt, Homo sapiens
  misc_RNA (1)...(19): siRNA sense strand
gccaauacuugagagaaga

SEQ ID NO: 1282580 - RNA, 19 nt, Homo sapiens
  misc_RNA (1)...(19): siRNA sense strand
gaaaccugccaauacuuga

SEQ ID NO: 1282581 - RNA, 19 nt, Homo sapiens
  misc_RNA (1)...(19): siRNA sense strand
aaauucagcuagcucuuca

SEQ ID NO: 1282582 - RNA, 19 nt, Homo sapiens
  misc_RNA (1)...(19): siRNA sense strand
gacauugugcgacuucauu

SEQ ID NO: 1282583 - RNA, 19 nt, Homo sapiens
  misc_RNA (1)...(19): siRNA sense strand
cgagaagauggaauacuaa

SEQ ID NO: 1282584 - RNA, 19 nt, Homo sapiens
  misc_RNA (1)...(19): siRNA sense strand
agaaaccgcugccaacacu

SEQ ID NO: 1282585 - RNA, 19 nt, Homo sapiens
  misc_RNA (1)...(19): siRNA sense strand
cuaugcaccugacugaaga

SEQ ID NO: 1282586 - RNA, 19 nt, Homo sapiens
  misc_RNA (1)...(19): siRNA sense strand
cgacgucuucaaauccuua

SEQ ID NO: 1282587 - RNA, 19 nt, Homo sapiens
  misc_RNA (1)...(19): siRNA sense strand
cagaaugugccgugccuuu

SEQ ID NO: 1282588 - RNA, 19 nt, Homo sapiens
  misc_RNA (1)...(19): siRNA sense strand
gggaggugauguggcaauu

SEQ ID NO: 1282589 - RNA, 19 nt, Homo sapiens
  misc_RNA (1)...(19): siRNA sense strand
gaaucaaaccagaaccaau

SEQ ID NO: 1282590 - RNA, 19 nt, Homo sapiens
  misc_RNA (1)...(19): siRNA sense strand
ccaacgggcugacggaacu

SEQ ID NO: 1282591 - RNA, 19 nt, Homo sapiens
  misc_RNA (1)...(19): siRNA sense strand
gaucuguggagacaaauca

SEQ ID NO: 1282592 - RNA, 19 nt, Homo sapiens
  misc_RNA (1)...(19): siRNA sense strand
ucaaauccuuagguuguga

SEQ ID NO: 1282593 - RNA, 19 nt, Homo sapiens
  misc_RNA (1)...(19): siRNA sense strand
gaagaaauugagaacuauc

SEQ ID NO: 1282594 - RNA, 19 nt, Homo sapiens
  misc_RNA (1)...(19): siRNA sense strand
ucgagaugcuguaaaauuu

SEQ ID NO: 1282595 - RNA, 19 nt, Homo sapiens
  misc_RNA (1)...(19): siRNA sense strand
ucagcuagcucuucaacac

SEQ ID NO: 1282596 - RNA, 19 nt, Homo sapiens
  misc_RNA (1)...(19): siRNA sense strand
gguugugaagacuuuauua

SEQ ID NO: 1282597 - RNA, 19 nt, Homo sapiens
  misc_RNA (1)...(19): siRNA sense strand
aaccagaaccaauauguga

SEQ ID NO: 1282598 - RNA, 19 nt, Homo sapiens
  misc_RNA (1)...(19): siRNA sense strand
aaucaucaggaauccauua

SEQ ID NO: 1282599 - RNA, 19 nt, Homo sapiens
  misc_RNA (1)...(19): siRNA sense strand
gcuucuaccuggacauaca

SEQ ID NO: 1282600 - RNA, 19 nt, Homo sapiens
  misc_RNA (1)...(19): siRNA sense strand
guaugcagaaguacagaaa

SEQ ID NO: 1282601 - RNA, 19 nt, Homo sapiens
  misc_RNA (1)...(19): siRNA sense strand
caaaucaucaggaauccau

SEQ ID NO: 1282602 - RNA, 19 nt, Homo sapiens
  misc_RNA (1)...(19): siRNA sense strand
ggaaucaaaccagaaccaa

SEQ ID NO: 1282603 - RNA, 19 nt, Homo sapiens
  misc_RNA (1)...(19): siRNA sense strand
acgcauugauggauuuaug

SEQ ID NO: 1282604 - RNA, 19 nt, Homo sapiens
  misc_RNA (1)...(19): siRNA sense strand
cuuagguugugaagacuuu

SEQ ID NO: 1282605 - RNA, 19 nt, Homo sapiens
  misc_RNA (1)...(19): siRNA sense strand
agaagaacuguuugauuga

SEQ ID NO: 1282606 - RNA, 19 nt, Homo sapiens
  misc_RNA (1)...(19): siRNA sense strand
aaugcaaauugauggguaa

SEQ ID NO: 1282607 - RNA, 19 nt, Homo sapiens
  misc_RNA (1)...(19): siRNA sense strand
cuucaaauccuuagguugu

SEQ ID NO: 1282608 - RNA, 19 nt, Homo sapiens
  misc_RNA (1)...(19): siRNA sense strand
cugccaacacugucgauua

SEQ ID NO: 1282609 - RNA, 19 nt, Homo sapiens
  misc_RNA (1)...(19): siRNA sense strand
gcaaggugucuacauuaag

SEQ ID NO: 1282610 - RNA, 19 nt, Homo sapiens
  misc_RNA (1)...(19): siRNA sense strand
ugugaagacuuuauuagcu

SEQ ID NO: 1282611 - RNA, 19 nt, Homo sapiens
  misc_RNA (1)...(19): siRNA sense strand
acgacgaccucaguaacua

SEQ ID NO: 1282612 - RNA, 19 nt, Homo sapiens
  misc_RNA (1)...(19): siRNA sense strand
ugacuacacaccagcauca

SEQ ID NO: 1282613 - RNA, 19 nt, Homo sapiens
  misc_RNA (1)...(19): siRNA sense strand
aaagcaauauacccagaca

SEQ ID NO: 1282614 - RNA, 19 nt, Homo sapiens
  misc_RNA (1)...(19): siRNA sense strand
cucuagaggugguguuuau

SEQ ID NO: 1282615 - RNA, 19 nt, Homo sapiens
  misc_RNA (1)...(19): siRNA sense strand
cuaaaucgcaucuggaaac

SEQ ID NO: 1282616 - RNA, 19 nt, Homo sapiens
  misc_RNA (1)...(19): siRNA sense strand
cagcuucuaccuggacaua

SEQ ID NO: 1282617 - RNA, 19 nt, Homo sapiens
  misc_RNA (1)...(19): siRNA sense strand
guucuaugcaccugacuga

SEQ ID NO: 1282618 - RNA, 19 nt, Homo sapiens
  misc_RNA (1)...(19): siRNA sense strand
cagaaccaauaugugacua

SEQ ID NO: 1282619 - RNA, 19 nt, Homo sapiens
  misc_RNA (1)...(19): siRNA sense strand
ugccaacacugucgauuac

SEQ ID NO: 1282620 - RNA, 19 nt, Homo sapiens
  misc_RNA (1)...(19): siRNA sense strand
ggaguuguucacuucagaa

SEQ ID NO: 1282621 - RNA, 19 nt, Homo sapiens
  misc_RNA (1)...(19): siRNA sense strand
uggaaagaguuuauguucu

SEQ ID NO: 1282622 - RNA, 19 nt, Homo sapiens
  misc_RNA (1)...(19): siRNA sense strand
gaagacuuuauuagcuuug

SEQ ID NO: 1282623 - RNA, 19 nt, Homo sapiens
  misc_RNA (1)...(19): siRNA sense strand
gaagucagcaaagcaaugc

SEQ ID NO: 1282624 - RNA, 19 nt, Homo sapiens
  misc_RNA (1)...(19): siRNA sense strand
guagaaaccgcugccaaca

SEQ ID NO: 1282625 - RNA, 19 nt, Homo sapiens
  misc_RNA (1)...(19): siRNA sense strand
ggugguguuuaucagaaug

SEQ ID NO: 1282626 - RNA, 19 nt, Homo sapiens
  misc_RNA (1)...(19): siRNA sense strand
cuggaaaccugccaauacu

SEQ ID NO: 1282627 - RNA, 19 nt, Homo sapiens
  misc_RNA (1)...(19): siRNA sense strand
gaucgaaccaguagaaacc

SEQ ID NO: 1282628 - RNA, 19 nt, Homo sapiens
  misc_RNA (1)...(19): siRNA sense strand
cgucagaagaacuguuuga

SEQ ID NO: 1282629 - RNA, 19 nt, Homo sapiens
  misc_RNA (1)...(19): siRNA sense strand
gccuuugacucucagaaca

SEQ ID NO: 1282630 - RNA, 19 nt, Homo sapiens
  misc_RNA (1)...(19): siRNA sense strand
ggaaagaguuuauguucua

SEQ ID NO: 1282631 - RNA, 19 nt, Homo sapiens
  misc_RNA (1)...(19): siRNA sense strand
cagaagaacuguuugauug

SEQ ID NO: 1282632 - RNA, 19 nt, Homo sapiens
  misc_RNA (1)...(19): siRNA sense strand
gagaagagcuccagcagau

SEQ ID NO: 1282633 - RNA, 19 nt, Homo sapiens
  misc_RNA (1)...(19): siRNA sense strand
gcaauugugugccaucaaa

SEQ ID NO: 1282634 - RNA, 19 nt, Homo sapiens
  misc_RNA (1)...(19): siRNA sense strand
ggagacaaaucaucaggaa

SEQ ID NO: 1282635 - RNA, 19 nt, Homo sapiens
  misc_RNA (1)...(19): siRNA sense strand
gaagagcuccagcagauaa

SEQ ID NO: 1282636 - RNA, 19 nt, Homo sapiens
  misc_RNA (1)...(19): siRNA sense strand
caagaucuguggagacaaa

SEQ ID NO: 1282637 - RNA, 19 nt, Homo sapiens
  misc_RNA (1)...(19): siRNA sense strand
guuguucacuucagaauuu

SEQ ID NO: 1282638 - RNA, 19 nt, Homo sapiens
  misc_RNA (1)...(19): siRNA sense strand
gcaccugacugaagaugaa

SEQ ID NO: 1282639 - RNA, 19 nt, Homo sapiens
  misc_RNA (1)...(19): siRNA sense strand
gaaauuauuccaugcaaga

SEQ ID NO: 1282640 - RNA, 19 nt, Homo sapiens
  misc_RNA (1)...(19): siRNA sense strand
ggaagaaauugagaacuau

SEQ ID NO: 1282641 - RNA, 19 nt, Homo sapiens
  misc_RNA (1)...(19): siRNA sense strand
caaggugucuacauuaaga

SEQ ID NO: 1282642 - RNA, 19 nt, Homo sapiens
  misc_RNA (1)...(19): siRNA sense strand
ccgagaagauggaauacua

SEQ ID NO: 1282643 - RNA, 19 nt, Homo sapiens
  misc_RNA (1)...(19): siRNA sense strand
gaagauggaauacuaacaa

SEQ ID NO: 1282644 - RNA, 19 nt, Homo sapiens
  misc_RNA (1)...(19): siRNA sense strand
cagcuuguaugcagaagua

SEQ ID NO: 1282645 - RNA, 19 nt, Homo sapiens
  misc_RNA (1)...(19): siRNA sense strand
gaucaaauugugcuucuaa

SEQ ID NO: 1282646 - RNA, 19 nt, Homo sapiens
  misc_RNA (1)...(19): siRNA sense strand
gcagagagacagcuuguau

SEQ ID NO: 1282647 - RNA, 19 nt, Homo sapiens
  misc_RNA (1)...(19): siRNA sense strand
caaacgcauugauggauuu

SEQ ID NO: 1282648 - RNA, 19 nt, Homo sapiens
  misc_RNA (1)...(19): siRNA sense strand
gaagaacuguuugauugau

SEQ ID NO: 1282649 - RNA, 19 nt, Homo sapiens
  misc_RNA (1)...(19): siRNA sense strand
uagaacaccuugcacagaa

SEQ ID NO: 1282650 - RNA, 19 nt, Homo sapiens
  misc_RNA (1)...(19): siRNA sense strand
aggaagaaauugagaacua

SEQ ID NO: 1282651 - RNA, 19 nt, Homo sapiens
  misc_RNA (1)...(19): siRNA sense strand
gaacaccuugcacagaaua

SEQ ID NO: 1282652 - RNA, 19 nt, Homo sapiens
  misc_RNA (1)...(19): siRNA sense strand
aaucaaaccagaaccaaua

SEQ ID NO: 1282653 - RNA, 19 nt, Homo sapiens
  misc_RNA (1)...(19): siRNA sense strand
guagggaugucucgagaug

SEQ ID NO: 1282654 - RNA, 19 nt, Homo sapiens
  misc_RNA (1)...(19): siRNA sense strand
gaggugauguggcaauugu

SEQ ID NO: 1282655 - RNA, 19 nt, Homo sapiens
  misc_RNA (1)...(19): siRNA sense strand
gcucauggcugcaagaaaa

SEQ ID NO: 1282656 - RNA, 19 nt, Homo sapiens
  misc_RNA (1)...(19): siRNA sense strand
ggaaaccugccaauacuug

SEQ ID NO: 1282657 - RNA, 19 nt, Homo sapiens
  misc_RNA (1)...(19): siRNA sense strand
gaggugguguuuaucagaa

SEQ ID NO: 1282658 - RNA, 19 nt, Homo sapiens
  misc_RNA (1)...(19): siRNA sense strand
ccaaacgcauugauggauu

SEQ ID NO: 1282659 - RNA, 19 nt, Homo sapiens
  misc_RNA (1)...(19): siRNA sense strand
uuacagaagcuauacagua

SEQ ID NO: 1282660 - RNA, 19 nt, Homo sapiens
  misc_RNA (1)...(19): siRNA sense strand
gaaccaauaugugacuaca

SEQ ID NO: 1282661 - RNA, 19 nt, Homo sapiens
  misc_RNA (1)...(19): siRNA sense strand
caacacguccuacagaaga

SEQ ID NO: 1282662 - RNA, 19 nt, Homo sapiens
  misc_RNA (1)...(19): siRNA sense strand
gugaagacuuuauuagcuu

SEQ ID NO: 1282663 - RNA, 19 nt, Homo sapiens
  misc_RNA (1)...(19): siRNA sense strand
uaugcaaggugucuacauu

SEQ ID NO: 1282664 - RNA, 19 nt, Homo sapiens
  misc_RNA (1)...(19): siRNA sense strand
ucaccgagaagauggaaua

SEQ ID NO: 1282665 - RNA, 19 nt, Homo sapiens
  misc_RNA (1)...(19): siRNA sense strand
ccagucaggucuugauauc

SEQ ID NO: 1282666 - RNA, 19 nt, Homo sapiens
  misc_RNA (1)...(19): siRNA sense strand
gauggaauacuaacaaagu

SEQ ID NO: 1282667 - RNA, 19 nt, Homo sapiens
  misc_RNA (1)...(19): siRNA sense strand
gaaugugccgugccuuuga

SEQ ID NO: 1282668 - RNA, 19 nt, Homo sapiens
  misc_RNA (1)...(19): siRNA sense strand
ggagaagucagcaaagcaa

SEQ ID NO: 1282669 - RNA, 19 nt, Homo sapiens
  misc_RNA (1)...(19): siRNA sense strand
ugcaaggugucuacauuaa

SEQ ID NO: 1282670 - RNA, 19 nt, Homo sapiens
  misc_RNA (1)...(19): siRNA sense strand
acagaagaaucaccgagaa

SEQ ID NO: 1282671 - RNA, 19 nt, Homo sapiens
  misc_RNA (1)...(19): siRNA sense strand
gaagaaucaccgagaagau

SEQ ID NO: 1282672 - RNA, 19 nt, Homo sapiens
  misc_RNA (1)...(19): siRNA sense strand
ucagaagaacuguuugauu

SEQ ID NO: 1282673 - RNA, 19 nt, Homo sapiens
  misc_RNA (1)...(19): siRNA sense strand
cgaccucaguaacuacauu

SEQ ID NO: 1282674 - RNA, 19 nt, Homo sapiens
  misc_RNA (1)...(19): siRNA sense strand
caaaccagaaccaauaugu

SEQ ID NO: 1282675 - RNA, 19 nt, Homo sapiens
  misc_RNA (1)...(19): siRNA sense strand
agacaaaucaucaggaauc

SEQ ID NO: 1282676 - RNA, 19 nt, Homo sapiens
  misc_RNA (1)...(19): siRNA sense strand
gacugaagaugaaauugca

SEQ ID NO: 1282677 - RNA, 19 nt, Homo sapiens
  misc_RNA (1)...(19): siRNA sense strand
guccauggcagaauuagaa

SEQ ID NO: 1282678 - RNA, 19 nt, Homo sapiens
  misc_RNA (1)...(19): siRNA sense strand
uacaguaugugguggaguu

SEQ ID NO: 1282679 - RNA, 19 nt, Homo sapiens
  misc_RNA (1)...(19): siRNA sense strand
gccaauacuugagagaaga

SEQ ID NO: 1282680 - RNA, 19 nt, Homo sapiens
  misc_RNA (1)...(19): siRNA sense strand
gaaaccugccaauacuuga

SEQ ID NO: 1282681 - RNA, 19 nt, Homo sapiens
  misc_RNA (1)...(19): siRNA sense strand
aaauucagcuagcucuuca

SEQ ID NO: 1282682 - RNA, 19 nt, Homo sapiens
  misc_RNA (1)...(19): siRNA sense strand
gacauugugcgacuucauu

SEQ ID NO: 1282683 - RNA, 19 nt, Homo sapiens
  misc_RNA (1)...(19): siRNA sense strand
cgagaagauggaauacuaa

SEQ ID NO: 1282684 - RNA, 19 nt, Homo sapiens
  misc_RNA (1)...(19): siRNA sense strand
agaaaccgcugccaacacu

SEQ ID NO: 1282685 - RNA, 19 nt, Homo sapiens
  misc_RNA (1)...(19): siRNA sense strand
cuaugcaccugacugaaga

SEQ ID NO: 1282686 - RNA, 19 nt, Homo sapiens
  misc_RNA (1)...(19): siRNA sense strand
cgacgucuucaaauccuua

SEQ ID NO: 1282687 - RNA, 19 nt, Homo sapiens
  misc_RNA (1)...(19): siRNA sense strand
cagaaugugccgugccuuu

SEQ ID NO: 1282688 - RNA, 19 nt, Homo sapiens
  misc_RNA (1)...(19): siRNA sense strand
gggaggugauguggcaauu

SEQ ID NO: 1282689 - RNA, 19 nt, Homo sapiens
  misc_RNA (1)...(19): siRNA sense strand
gaaucaaaccagaaccaau

SEQ ID NO: 1282690 - RNA, 19 nt, Homo sapiens
  misc_RNA (1)...(19): siRNA sense strand
ccaacgggcugacggaacu

SEQ ID NO: 1282691 - RNA, 19 nt, Homo sapiens
  misc_RNA (1)...(19): siRNA sense strand
gaucuguggagacaaauca

SEQ ID NO: 1282692 - RNA, 19 nt, Homo sapiens
  misc_RNA (1)...(19): siRNA sense strand
ucaaauccuuagguuguga

SEQ ID NO: 1282693 - RNA, 19 nt, Homo sapiens
  misc_RNA (1)...(19): siRNA sense strand
gaagaaauugagaacuauc

SEQ ID NO: 1282694 - RNA, 19 nt, Homo sapiens
  misc_RNA (1)...(19): siRNA sense strand
ucgagaugcuguaaaauuu

SEQ ID NO: 1282695 - RNA, 19 nt, Homo sapiens
  misc_RNA (1)...(19): siRNA sense strand
ucagcuagcucuucaacac

SEQ ID NO: 1282696 - RNA, 19 nt, Homo sapiens
  misc_RNA (1)...(19): siRNA sense strand
gguugugaagacuuuauua

SEQ ID NO: 1282697 - RNA, 19 nt, Homo sapiens
  misc_RNA (1)...(19): siRNA sense strand
aaccagaaccaauauguga

SEQ ID NO: 1282698 - RNA, 19 nt, Homo sapiens
  misc_RNA (1)...(19): siRNA sense strand
aaucaucaggaauccauua

SEQ ID NO: 1282699 - RNA, 19 nt, Homo sapiens
  misc_RNA (1)...(19): siRNA sense strand
gcuucuaccuggacauaca

SEQ ID NO: 1282700 - RNA, 19 nt, Homo sapiens
  misc_RNA (1)...(19): siRNA sense strand
guaugcagaaguacagaaa

SEQ ID NO: 1282701 - RNA, 19 nt, Homo sapiens
  misc_RNA (1)...(19): siRNA sense strand
caaaucaucaggaauccau

SEQ ID NO: 1282702 - RNA, 19 nt, Homo sapiens
  misc_RNA (1)...(19): siRNA sense strand
ggaaucaaaccagaaccaa

SEQ ID NO: 1282703 - RNA, 19 nt, Homo sapiens
  misc_RNA (1)...(19): siRNA sense strand
acgcauugauggauuuaug

SEQ ID NO: 1282704 - RNA, 19 nt, Homo sapiens
  misc_RNA (1)...(19): siRNA sense strand
cuuagguugugaagacuuu

SEQ ID NO: 1282705 - RNA, 19 nt, Homo sapiens
  misc_RNA (1)...(19): siRNA sense strand
agaagaacuguuugauuga

SEQ ID NO: 1282706 - RNA, 19 nt, Homo sapiens
  misc_RNA (1)...(19): siRNA sense strand
aaugcaaauugauggguaa

SEQ ID NO: 1282707 - RNA, 19 nt, Homo sapiens
  misc_RNA (1)...(19): siRNA sense strand
cuucaaauccuuagguugu

SEQ ID NO: 1282708 - RNA, 19 nt, Homo sapiens
  misc_RNA (1)...(19): siRNA sense strand
cugccaacacugucgauua

SEQ ID NO: 1282709 - RNA, 19 nt, Homo sapiens
  misc_RNA (1)...(19): siRNA sense strand
gcaaggugucuacauuaag

SEQ ID NO: 1282710 - RNA, 19 nt, Homo sapiens
  misc_RNA (1)...(19): siRNA sense strand
ugugaagacuuuauuagcu

SEQ ID NO: 1282711 - RNA, 19 nt, Homo sapiens
  misc_RNA (1)...(19): siRNA sense strand
acgacgaccucaguaacua

SEQ ID NO: 1282712 - RNA, 19 nt, Homo sapiens
  misc_RNA (1)...(19): siRNA sense strand
ugacuacacaccagcauca

SEQ ID NO: 1282713 - RNA, 19 nt, Homo sapiens
  misc_RNA (1)...(19): siRNA sense strand
aaagcaauauacccagaca

SEQ ID NO: 1282714 - RNA, 19 nt, Homo sapiens
  misc_RNA (1)...(19): siRNA sense strand
cucuagaggugguguuuau

SEQ ID NO: 1282715 - RNA, 19 nt, Homo sapiens
  misc_RNA (1)...(19): siRNA sense strand
cuaaaucgcaucuggaaac

SEQ ID NO: 1282716 - RNA, 19 nt, Homo sapiens
  misc_RNA (1)...(19): siRNA sense strand
cagcuucuaccuggacaua

SEQ ID NO: 1282717 - RNA, 19 nt, Homo sapiens
  misc_RNA (1)...(19): siRNA sense strand
guucuaugcaccugacuga

SEQ ID NO: 1282718 - RNA, 19 nt, Homo sapiens
  misc_RNA (1)...(19): siRNA sense strand
cagaaccaauaugugacua

SEQ ID NO: 1282719 - RNA, 19 nt, Homo sapiens
  misc_RNA (1)...(19): siRNA sense strand
ugccaacacugucgauuac

SEQ ID NO: 1282720 - RNA, 19 nt, Homo sapiens
  misc_RNA (1)...(19): siRNA sense strand
ggaguuguucacuucagaa

SEQ ID NO: 1282721 - RNA, 19 nt, Homo sapiens
  misc_RNA (1)...(19): siRNA sense strand
uggaaagaguuuauguucu

SEQ ID NO: 1282722 - RNA, 19 nt, Homo sapiens
  misc_RNA (1)...(19): siRNA sense strand
gaagacuuuauuagcuuug

SEQ ID NO: 1282723 - RNA, 19 nt, Homo sapiens
  misc_RNA (1)...(19): siRNA sense strand
gaagucagcaaagcaaugc

SEQ ID NO: 1282724 - RNA, 19 nt, Homo sapiens
  misc_RNA (1)...(19): siRNA sense strand
guagaaaccgcugccaaca

SEQ ID NO: 1282725 - RNA, 19 nt, Homo sapiens
  misc_RNA (1)...(19): siRNA sense strand
ggugguguuuaucagaaug

SEQ ID NO: 1282726 - RNA, 19 nt, Homo sapiens
  misc_RNA (1)...(19): siRNA sense strand
cuggaaaccugccaauacu

SEQ ID NO: 1282727 - RNA, 19 nt, Homo sapiens
  misc_RNA (1)...(19): siRNA sense strand
gaucgaaccaguagaaacc

SEQ ID NO: 1282728 - RNA, 19 nt, Homo sapiens
  misc_RNA (1)...(19): siRNA sense strand
cgucagaagaacuguuuga

SEQ ID NO: 1282729 - RNA, 19 nt, Homo sapiens
  misc_RNA (1)...(19): siRNA sense strand
gccuuugacucucagaaca

SEQ ID NO: 1282730 - RNA, 19 nt, Homo sapiens
  misc_RNA (1)...(19): siRNA sense strand
ggaaagaguuuauguucua

SEQ ID NO: 1282731 - RNA, 19 nt, Homo sapiens
  misc_RNA (1)...(19): siRNA sense strand
cagaagaacuguuugauug

SEQ ID NO: 1282732 - RNA, 19 nt, Homo sapiens
  misc_RNA (1)...(19): siRNA sense strand
gagaagagcuccagcagau

SEQ ID NO: 1282733 - RNA, 19 nt, Homo sapiens
  misc_RNA (1)...(19): siRNA sense strand
gcaauugugugccaucaaa

SEQ ID NO: 1282734 - RNA, 19 nt, Homo sapiens
  misc_RNA (1)...(19): siRNA sense strand
ggagacaaaucaucaggaa

SEQ ID NO: 1282735 - RNA, 19 nt, Homo sapiens
  misc_RNA (1)...(19): siRNA sense strand
gaagagcuccagcagauaa

SEQ ID NO: 1282736 - RNA, 19 nt, Homo sapiens
  misc_RNA (1)...(19): siRNA sense strand
caagaucuguggagacaaa

SEQ ID NO: 1282737 - RNA, 19 nt, Homo sapiens
  misc_RNA (1)...(19): siRNA sense strand
guuguucacuucagaauuu

SEQ ID NO: 1282738 - RNA, 19 nt, Homo sapiens
  misc_RNA (1)...(19): siRNA sense strand
gcaccugacugaagaugaa

SEQ ID NO: 1282739 - RNA, 19 nt, Homo sapiens
  misc_RNA (1)...(19): siRNA sense strand
gaaauuauuccaugcaaga

SEQ ID NO: 1282740 - RNA, 19 nt, Homo sapiens
  misc_RNA (1)...(19): siRNA sense strand
ggaagaaauugagaacuau

SEQ ID NO: 1282741 - RNA, 19 nt, Homo sapiens
  misc_RNA (1)...(19): siRNA sense strand
caaggugucuacauuaaga

SEQ ID NO: 1282742 - RNA, 19 nt, Homo sapiens
  misc_RNA (1)...(19): siRNA sense strand
ccgagaagauggaauacua

SEQ ID NO: 1282743 - RNA, 19 nt, Homo sapiens
  misc_RNA (1)...(19): siRNA sense strand
gaagauggaauacuaacaa

SEQ ID NO: 1282744 - RNA, 19 nt, Homo sapiens
  misc_RNA (1)...(19): siRNA sense strand
cagcuuguaugcagaagua

SEQ ID NO: 1282745 - RNA, 19 nt, Homo sapiens
  misc_RNA (1)...(19): siRNA sense strand
gaucaaauugugcuucuaa

SEQ ID NO: 1282746 - RNA, 19 nt, Homo sapiens
  misc_RNA (1)...(19): siRNA sense strand
gcagagagacagcuuguau

SEQ ID NO: 1282747 - RNA, 19 nt, Homo sapiens
  misc_RNA (1)...(19): siRNA sense strand
caaacgcauugauggauuu

SEQ ID NO: 1282748 - RNA, 19 nt, Homo sapiens
  misc_RNA (1)...(19): siRNA sense strand
gaagaacuguuugauugau

SEQ ID NO: 1282749 - RNA, 19 nt, Homo sapiens
  misc_RNA (1)...(19): siRNA sense strand
uagaacaccuugcacagaa

SEQ ID NO: 1282750 - RNA, 19 nt, Homo sapiens
  misc_RNA (1)...(19): siRNA sense strand
aggaagaaauugagaacua

SEQ ID NO: 1282751 - RNA, 19 nt, Homo sapiens
  misc_RNA (1)...(19): siRNA sense strand
gaacaccuugcacagaaua

SEQ ID NO: 1282752 - RNA, 19 nt, Homo sapiens
  misc_RNA (1)...(19): siRNA sense strand
aaucaaaccagaaccaaua

SEQ ID NO: 1282753 - RNA, 19 nt, Homo sapiens
  misc_RNA (1)...(19): siRNA sense strand
guagggaugucucgagaug

SEQ ID NO: 1282754 - RNA, 19 nt, Homo sapiens
  misc_RNA (1)...(19): siRNA sense strand
gaggugauguggcaauugu

SEQ ID NO: 1282755 - RNA, 19 nt, Homo sapiens
  misc_RNA (1)...(19): siRNA sense strand
gcucauggcugcaagaaaa

SEQ ID NO: 1282756 - RNA, 19 nt, Homo sapiens
  misc_RNA (1)...(19): siRNA sense strand
ggaaaccugccaauacuug

SEQ ID NO: 1282757 - RNA, 19 nt, Homo sapiens
  misc_RNA (1)...(19): siRNA sense strand
gaggugguguuuaucagaa

SEQ ID NO: 1282758 - RNA, 19 nt, Homo sapiens
  misc_RNA (1)...(19): siRNA sense strand
ccaaacgcauugauggauu

SEQ ID NO: 1282759 - RNA, 19 nt, Homo sapiens
  misc_RNA (1)...(19): siRNA sense strand
uuacagaagcuauacagua

SEQ ID NO: 1282760 - RNA, 19 nt, Homo sapiens
  misc_RNA (1)...(19): siRNA sense strand
gaaccaauaugugacuaca

SEQ ID NO: 1282761 - RNA, 19 nt, Homo sapiens
  misc_RNA (1)...(19): siRNA sense strand
caacacguccuacagaaga

SEQ ID NO: 1282762 - RNA, 19 nt, Homo sapiens
  misc_RNA (1)...(19): siRNA sense strand
gugaagacuuuauuagcuu

SEQ ID NO: 1282763 - RNA, 19 nt, Homo sapiens
  misc_RNA (1)...(19): siRNA sense strand
uaugcaaggugucuacauu

SEQ ID NO: 1282764 - RNA, 19 nt, Homo sapiens
  misc_RNA (1)...(19): siRNA sense strand
ucaccgagaagauggaaua

SEQ ID NO: 1282765 - RNA, 19 nt, Homo sapiens
  misc_RNA (1)...(19): siRNA sense strand
ccagucaggucuugauauc

SEQ ID NO: 1282766 - RNA, 19 nt, Homo sapiens
  misc_RNA (1)...(19): siRNA sense strand
gauggaauacuaacaaagu

SEQ ID NO: 1282767 - RNA, 19 nt, Homo sapiens
  misc_RNA (1)...(19): siRNA sense strand
gaaugugccgugccuuuga

SEQ ID NO: 1282768 - RNA, 19 nt, Homo sapiens
  misc_RNA (1)...(19): siRNA sense strand
ggagaagucagcaaagcaa

SEQ ID NO: 1282769 - RNA, 19 nt, Homo sapiens
  misc_RNA (1)...(19): siRNA sense strand
ugcaaggugucuacauuaa

SEQ ID NO: 1282770 - RNA, 19 nt, Homo sapiens
  misc_RNA (1)...(19): siRNA sense strand
acagaagaaucaccgagaa

SEQ ID NO: 1282771 - RNA, 19 nt, Homo sapiens
  misc_RNA (1)...(19): siRNA sense strand
gaagaaucaccgagaagau

SEQ ID NO: 1282772 - RNA, 19 nt, Homo sapiens
  misc_RNA (1)...(19): siRNA sense strand
ucagaagaacuguuugauu

SEQ ID NO: 1282773 - RNA, 19 nt, Homo sapiens
  misc_RNA (1)...(19): siRNA sense strand
cgaccucaguaacuacauu

SEQ ID NO: 1282774 - RNA, 19 nt, Homo sapiens
  misc_RNA (1)...(19): siRNA sense strand
caaaccagaaccaauaugu

SEQ ID NO: 1282775 - RNA, 19 nt, Homo sapiens
  misc_RNA (1)...(19): siRNA sense strand
agacaaaucaucaggaauc

SEQ ID NO: 1282776 - RNA, 19 nt, Homo sapiens
  misc_RNA (1)...(19): siRNA sense strand
gacugaagaugaaauugca

SEQ ID NO: 1282777 - RNA, 19 nt, Homo sapiens
  misc_RNA (1)...(19): siRNA sense strand
guccauggcagaauuagaa

SEQ ID NO: 1282778 - RNA, 19 nt, Homo sapiens
  misc_RNA (1)...(19): siRNA sense strand
uacaguaugugguggaguu

SEQ ID NO: 1282779 - RNA, 19 nt, Homo sapiens
  misc_RNA (1)...(19): siRNA sense strand
gccaauacuugagagaaga

SEQ ID NO: 1282780 - RNA, 19 nt, Homo sapiens
  misc_RNA (1)...(19): siRNA sense strand
gaaaccugccaauacuuga

SEQ ID NO: 1282781 - RNA, 19 nt, Homo sapiens
  misc_RNA (1)...(19): siRNA sense strand
aaauucagcuagcucuuca

SEQ ID NO: 1282782 - RNA, 19 nt, Homo sapiens
  misc_RNA (1)...(19): siRNA sense strand
gacauugugcgacuucauu

SEQ ID NO: 1282783 - RNA, 19 nt, Homo sapiens
  misc_RNA (1)...(19): siRNA sense strand
cgagaagauggaauacuaa

SEQ ID NO: 1282784 - RNA, 19 nt, Homo sapiens
  misc_RNA (1)...(19): siRNA sense strand
agaaaccgcugccaacacu

SEQ ID NO: 1282785 - RNA, 19 nt, Homo sapiens
  misc_RNA (1)...(19): siRNA sense strand
cuaugcaccugacugaaga

SEQ ID NO: 1282786 - RNA, 19 nt, Homo sapiens
  misc_RNA (1)...(19): siRNA sense strand
cgacgucuucaaauccuua

SEQ ID NO: 1282787 - RNA, 19 nt, Homo sapiens
  misc_RNA (1)...(19): siRNA sense strand
cagaaugugccgugccuuu

SEQ ID NO: 1282788 - RNA, 19 nt, Homo sapiens
  misc_RNA (1)...(19): siRNA sense strand
gggaggugauguggcaauu

SEQ ID NO: 1282789 - RNA, 19 nt, Homo sapiens
  misc_RNA (1)...(19): siRNA sense strand
gaaucaaaccagaaccaau

SEQ ID NO: 1282790 - RNA, 19 nt, Homo sapiens
  misc_RNA (1)...(19): siRNA sense strand
ccaacgggcugacggaacu

SEQ ID NO: 1282791 - RNA, 19 nt, Homo sapiens
  misc_RNA (1)...(19): siRNA sense strand
gaucuguggagacaaauca

SEQ ID NO: 1282792 - RNA, 19 nt, Homo sapiens
  misc_RNA (1)...(19): siRNA sense strand
ucaaauccuuagguuguga

SEQ ID NO: 1282793 - RNA, 19 nt, Homo sapiens
  misc_RNA (1)...(19): siRNA sense strand
gaagaaauugagaacuauc

SEQ ID NO: 1282794 - RNA, 19 nt, Homo sapiens
  misc_RNA (1)...(19): siRNA sense strand
ucgagaugcuguaaaauuu

SEQ ID NO: 1282795 - RNA, 19 nt, Homo sapiens
  misc_RNA (1)...(19): siRNA sense strand
ucagcuagcucuucaacac

SEQ ID NO: 1282796 - RNA, 19 nt, Homo sapiens
  misc_RNA (1)...(19): siRNA sense strand
gguugugaagacuuuauua

SEQ ID NO: 1282797 - RNA, 19 nt, Homo sapiens
  misc_RNA (1)...(19): siRNA sense strand
aaccagaaccaauauguga

SEQ ID NO: 1282798 - RNA, 19 nt, Homo sapiens
  misc_RNA (1)...(19): siRNA sense strand
aaucaucaggaauccauua

SEQ ID NO: 1282799 - RNA, 19 nt, Homo sapiens
  misc_RNA (1)...(19): siRNA sense strand
gcuucuaccuggacauaca

SEQ ID NO: 1282800 - RNA, 19 nt, Homo sapiens
  misc_RNA (1)...(19): siRNA sense strand
guaugcagaaguacagaaa

SEQ ID NO: 1282801 - RNA, 19 nt, Homo sapiens
  misc_RNA (1)...(19): siRNA sense strand
caaaucaucaggaauccau

SEQ ID NO: 1282802 - RNA, 19 nt, Homo sapiens
  misc_RNA (1)...(19): siRNA sense strand
ggaaucaaaccagaaccaa

SEQ ID NO: 1282803 - RNA, 19 nt, Homo sapiens
  misc_RNA (1)...(19): siRNA sense strand
acgcauugauggauuuaug

SEQ ID NO: 1282804 - RNA, 19 nt, Homo sapiens
  misc_RNA (1)...(19): siRNA sense strand
cuuagguugugaagacuuu

SEQ ID NO: 1282805 - RNA, 19 nt, Homo sapiens
  misc_RNA (1)...(19): siRNA sense strand
agaagaacuguuugauuga

SEQ ID NO: 1282806 - RNA, 19 nt, Homo sapiens
  misc_RNA (1)...(19): siRNA sense strand
aaugcaaauugauggguaa

SEQ ID NO: 1282807 - RNA, 19 nt, Homo sapiens
  misc_RNA (1)...(19): siRNA sense strand
cuucaaauccuuagguugu

SEQ ID NO: 1282808 - RNA, 19 nt, Homo sapiens
  misc_RNA (1)...(19): siRNA sense strand
cugccaacacugucgauua

SEQ ID NO: 1282809 - RNA, 19 nt, Homo sapiens
  misc_RNA (1)...(19): siRNA sense strand
gcaaggugucuacauuaag

SEQ ID NO: 1282810 - RNA, 19 nt, Homo sapiens
  misc_RNA (1)...(19): siRNA sense strand
ugugaagacuuuauuagcu

SEQ ID NO: 1282811 - RNA, 19 nt, Homo sapiens
  misc_RNA (1)...(19): siRNA sense strand
acgacgaccucaguaacua

SEQ ID NO: 1282812 - RNA, 19 nt, Homo sapiens
  misc_RNA (1)...(19): siRNA sense strand
ugacuacacaccagcauca

SEQ ID NO: 1282813 - RNA, 19 nt, Homo sapiens
  misc_RNA (1)...(19): siRNA sense strand
aaagcaauauacccagaca

SEQ ID NO: 1282814 - RNA, 19 nt, Homo sapiens
  misc_RNA (1)...(19): siRNA sense strand
cucuagaggugguguuuau

SEQ ID NO: 1282815 - RNA, 19 nt, Homo sapiens
  misc_RNA (1)...(19): siRNA sense strand
cuaaaucgcaucuggaaac

SEQ ID NO: 1282816 - RNA, 19 nt, Homo sapiens
  misc_RNA (1)...(19): siRNA sense strand
cagcuucuaccuggacaua

SEQ ID NO: 1282817 - RNA, 19 nt, Homo sapiens
  misc_RNA (1)...(19): siRNA sense strand
guucuaugcaccugacuga

SEQ ID NO: 1282818 - RNA, 19 nt, Homo sapiens
  misc_RNA (1)...(19): siRNA sense strand
cagaaccaauaugugacua

SEQ ID NO: 1282819 - RNA, 19 nt, Homo sapiens
  misc_RNA (1)...(19): siRNA sense strand
ugccaacacugucgauuac

SEQ ID NO: 1282820 - RNA, 19 nt, Homo sapiens
  misc_RNA (1)...(19): siRNA sense strand
ggaguuguucacuucagaa

SEQ ID NO: 1282821 - RNA, 19 nt, Homo sapiens
  misc_RNA (1)...(19): siRNA sense strand
uggaaagaguuuauguucu

SEQ ID NO: 1282822 - RNA, 19 nt, Homo sapiens
  misc_RNA (1)...(19): siRNA sense strand
gaagacuuuauuagcuuug

SEQ ID NO: 1282823 - RNA, 19 nt, Homo sapiens
  misc_RNA (1)...(19): siRNA sense strand
gaagucagcaaagcaaugc

SEQ ID NO: 1282824 - RNA, 19 nt, Homo sapiens
  misc_RNA (1)...(19): siRNA sense strand
guagaaaccgcugccaaca

SEQ ID NO: 1282825 - RNA, 19 nt, Homo sapiens
  misc_RNA (1)...(19): siRNA sense strand
ggugguguuuaucagaaug

SEQ ID NO: 1282826 - RNA, 19 nt, Homo sapiens
  misc_RNA (1)...(19): siRNA sense strand
cuggaaaccugccaauacu

SEQ ID NO: 1282827 - RNA, 19 nt, Homo sapiens
  misc_RNA (1)...(19): siRNA sense strand
gaucgaaccaguagaaacc

SEQ ID NO: 1282828 - RNA, 19 nt, Homo sapiens
  misc_RNA (1)...(19): siRNA sense strand
cgucagaagaacuguuuga

SEQ ID NO: 1282829 - RNA, 19 nt, Homo sapiens
  misc_RNA (1)...(19): siRNA sense strand
gccuuugacucucagaaca

SEQ ID NO: 1282830 - RNA, 19 nt, Homo sapiens
  misc_RNA (1)...(19): siRNA sense strand
ggaaagaguuuauguucua

SEQ ID NO: 1282831 - RNA, 19 nt, Homo sapiens
  misc_RNA (1)...(19): siRNA sense strand
cagaagaacuguuugauug

SEQ ID NO: 1282832 - RNA, 19 nt, Homo sapiens
  misc_RNA (1)...(19): siRNA sense strand
gagaagagcuccagcagau

SEQ ID NO: 1282833 - RNA, 19 nt, Homo sapiens
  misc_RNA (1)...(19): siRNA sense strand
gcaauugugugccaucaaa

SEQ ID NO: 1282834 - RNA, 19 nt, Homo sapiens
  misc_RNA (1)...(19): siRNA sense strand
ggagacaaaucaucaggaa

SEQ ID NO: 1282835 - RNA, 19 nt, Homo sapiens
  misc_RNA (1)...(19): siRNA sense strand
gaagagcuccagcagauaa

SEQ ID NO: 1282836 - RNA, 19 nt, Homo sapiens
  misc_RNA (1)...(19): siRNA sense strand
caagaucuguggagacaaa

SEQ ID NO: 1282837 - RNA, 19 nt, Homo sapiens
  misc_RNA (1)...(19): siRNA sense strand
guuguucacuucagaauuu

SEQ ID NO: 1282838 - RNA, 19 nt, Homo sapiens
  misc_RNA (1)...(19): siRNA sense strand
gcaccugacugaagaugaa

SEQ ID NO: 1282839 - RNA, 19 nt, Homo sapiens
  misc_RNA (1)...(19): siRNA sense strand
gaaauuauuccaugcaaga

SEQ ID NO: 1282840 - RNA, 19 nt, Homo sapiens
  misc_RNA (1)...(19): siRNA sense strand
ggaagaaauugagaacuau

SEQ ID NO: 1282841 - RNA, 19 nt, Homo sapiens
  misc_RNA (1)...(19): siRNA sense strand
caaggugucuacauuaaga

SEQ ID NO: 1282842 - RNA, 19 nt, Homo sapiens
  misc_RNA (1)...(19): siRNA sense strand
ccgagaagauggaauacua

SEQ ID NO: 1282843 - RNA, 19 nt, Homo sapiens
  misc_RNA (1)...(19): siRNA sense strand
gaagauggaauacuaacaa

SEQ ID NO: 1282844 - RNA, 19 nt, Homo sapiens
  misc_RNA (1)...(19): siRNA sense strand
cagcuuguaugcagaagua

SEQ ID NO: 1282845 - RNA, 19 nt, Homo sapiens
  misc_RNA (1)...(19): siRNA sense strand
gaucaaauugugcuucuaa

SEQ ID NO: 1282846 - RNA, 19 nt, Homo sapiens
  misc_RNA (1)...(19): siRNA sense strand
gcagagagacagcuuguau

SEQ ID NO: 1282847 - RNA, 19 nt, Homo sapiens
  misc_RNA (1)...(19): siRNA sense strand
caaacgcauugauggauuu

SEQ ID NO: 1282848 - RNA, 19 nt, Homo sapiens
  misc_RNA (1)...(19): siRNA sense strand
gaagaacuguuugauugau

SEQ ID NO: 1282849 - RNA, 19 nt, Homo sapiens
  misc_RNA (1)...(19): siRNA sense strand
uagaacaccuugcacagaa

SEQ ID NO: 1282850 - RNA, 19 nt, Homo sapiens
  misc_RNA (1)...(19): siRNA sense strand
aggaagaaauugagaacua

SEQ ID NO: 1282851 - RNA, 19 nt, Homo sapiens
  misc_RNA (1)...(19): siRNA sense strand
gaacaccuugcacagaaua

SEQ ID NO: 1282852 - RNA, 19 nt, Homo sapiens
  misc_RNA (1)...(19): siRNA sense strand
aaucaaaccagaaccaaua

SEQ ID NO: 1282853 - RNA, 19 nt, Homo sapiens
  misc_RNA (1)...(19): siRNA sense strand
guagggaugucucgagaug

SEQ ID NO: 1282854 - RNA, 19 nt, Homo sapiens
  misc_RNA (1)...(19): siRNA sense strand
gaggugauguggcaauugu

SEQ ID NO: 1282855 - RNA, 19 nt, Homo sapiens
  misc_RNA (1)...(19): siRNA sense strand
gcucauggcugcaagaaaa

SEQ ID NO: 1282856 - RNA, 19 nt, Homo sapiens
  misc_RNA (1)...(19): siRNA sense strand
ggaaaccugccaauacuug

SEQ ID NO: 1282857 - RNA, 19 nt, Homo sapiens
  misc_RNA (1)...(19): siRNA sense strand
gaggugguguuuaucagaa

SEQ ID NO: 1282858 - RNA, 19 nt, Homo sapiens
  misc_RNA (1)...(19): siRNA sense strand
ccaaacgcauugauggauu

SEQ ID NO: 1282859 - RNA, 19 nt, Homo sapiens
  misc_RNA (1)...(19): siRNA sense strand
uuacagaagcuauacagua

SEQ ID NO: 1282860 - RNA, 19 nt, Homo sapiens
  misc_RNA (1)...(19): siRNA sense strand
gaaccaauaugugacuaca

SEQ ID NO: 1282861 - RNA, 19 nt, Homo sapiens
  misc_RNA (1)...(19): siRNA sense strand
caacacguccuacagaaga

SEQ ID NO: 1282862 - RNA, 19 nt, Homo sapiens
  misc_RNA (1)...(19): siRNA sense strand
gugaagacuuuauuagcuu

SEQ ID NO: 1282863 - RNA, 19 nt, Homo sapiens
  misc_RNA (1)...(19): siRNA sense strand
uaugcaaggugucuacauu

SEQ ID NO: 1282864 - RNA, 19 nt, Homo sapiens
  misc_RNA (1)...(19): siRNA sense strand
ucaccgagaagauggaaua

SEQ ID NO: 1282865 - RNA, 19 nt, Homo sapiens
  misc_RNA (1)...(19): siRNA sense strand
ccagucaggucuugauauc

SEQ ID NO: 1282866 - RNA, 19 nt, Homo sapiens
  misc_RNA (1)...(19): siRNA sense strand
gauggaauacuaacaaagu

SEQ ID NO: 1282867 - RNA, 19 nt, Homo sapiens
  misc_RNA (1)...(19): siRNA sense strand
gaaugugccgugccuuuga

SEQ ID NO: 1282868 - RNA, 19 nt, Homo sapiens
  misc_RNA (1)...(19): siRNA sense strand
ggagaagucagcaaagcaa

SEQ ID NO: 1282869 - RNA, 19 nt, Homo sapiens
  misc_RNA (1)...(19): siRNA sense strand
ugcaaggugucuacauuaa

SEQ ID NO: 1282870 - RNA, 19 nt, Homo sapiens
  misc_RNA (1)...(19): siRNA sense strand
acagaagaaucaccgagaa

SEQ ID NO: 1282871 - RNA, 19 nt, Homo sapiens
  misc_RNA (1)...(19): siRNA sense strand
gaagaaucaccgagaagau

SEQ ID NO: 1282872 - RNA, 19 nt, Homo sapiens
  misc_RNA (1)...(19): siRNA sense strand
ucagaagaacuguuugauu

SEQ ID NO: 1282873 - RNA, 19 nt, Homo sapiens
  misc_RNA (1)...(19): siRNA sense strand
cgaccucaguaacuacauu

SEQ ID NO: 1282874 - RNA, 19 nt, Homo sapiens
  misc_RNA (1)...(19): siRNA sense strand
caaaccagaaccaauaugu

SEQ ID NO: 1282875 - RNA, 19 nt, Homo sapiens
  misc_RNA (1)...(19): siRNA sense strand
agacaaaucaucaggaauc

SEQ ID NO: 1282876 - RNA, 19 nt, Homo sapiens
  misc_RNA (1)...(19): siRNA sense strand
gacugaagaugaaauugca

SEQ ID NO: 1282877 - RNA, 19 nt, Homo sapiens
  misc_RNA (1)...(19): siRNA sense strand
guccauggcagaauuagaa

SEQ ID NO: 1282878 - RNA, 19 nt, Homo sapiens
  misc_RNA (1)...(19): siRNA sense strand
uacaguaugugguggaguu

SEQ ID NO: 1282879 - RNA, 19 nt, Homo sapiens
  misc_RNA (1)...(19): siRNA sense strand
gccaauacuugagagaaga

SEQ ID NO: 1282880 - RNA, 19 nt, Homo sapiens
  misc_RNA (1)...(19): siRNA sense strand
gaaaccugccaauacuuga

SEQ ID NO: 1282881 - RNA, 19 nt, Homo sapiens
  misc_RNA (1)...(19): siRNA sense strand
aaauucagcuagcucuuca

SEQ ID NO: 1282882 - RNA, 19 nt, Homo sapiens
  misc_RNA (1)...(19): siRNA sense strand
gacauugugcgacuucauu

SEQ ID NO: 1282883 - RNA, 19 nt, Homo sapiens
  misc_RNA (1)...(19): siRNA sense strand
cgagaagauggaauacuaa

SEQ ID NO: 1282884 - RNA, 19 nt, Homo sapiens
  misc_RNA (1)...(19): siRNA sense strand
agaaaccgcugccaacacu

SEQ ID NO: 1282885 - RNA, 19 nt, Homo sapiens
  misc_RNA (1)...(19): siRNA sense strand
cuaugcaccugacugaaga

SEQ ID NO: 1282886 - RNA, 19 nt, Homo sapiens
  misc_RNA (1)...(19): siRNA sense strand
cgacgucuucaaauccuua

SEQ ID NO: 1282887 - RNA, 19 nt, Homo sapiens
  misc_RNA (1)...(19): siRNA sense strand
cagaaugugccgugccuuu

SEQ ID NO: 1282888 - RNA, 19 nt, Homo sapiens
  misc_RNA (1)...(19): siRNA sense strand
gggaggugauguggcaauu

SEQ ID NO: 1282889 - RNA, 19 nt, Homo sapiens
  misc_RNA (1)...(19): siRNA sense strand
gaaucaaaccagaaccaau

SEQ ID NO: 1282890 - RNA, 19 nt, Homo sapiens
  misc_RNA (1)...(19): siRNA sense strand
ccaacgggcugacggaacu

SEQ ID NO: 1282891 - RNA, 19 nt, Homo sapiens
  misc_RNA (1)...(19): siRNA sense strand
gaucuguggagacaaauca

SEQ ID NO: 1282892 - RNA, 19 nt, Homo sapiens
  misc_RNA (1)...(19): siRNA sense strand
ucaaauccuuagguuguga

SEQ ID NO: 1282893 - RNA, 19 nt, Homo sapiens
  misc_RNA (1)...(19): siRNA sense strand
gaagaaauugagaacuauc

SEQ ID NO: 1282894 - RNA, 19 nt, Homo sapiens
  misc_RNA (1)...(19): siRNA sense strand
ucgagaugcuguaaaauuu

SEQ ID NO: 1282895 - RNA, 19 nt, Homo sapiens
  misc_RNA (1)...(19): siRNA sense strand
ucagcuagcucuucaacac

SEQ ID NO: 1282896 - RNA, 19 nt, Homo sapiens
  misc_RNA (1)...(19): siRNA sense strand
gguugugaagacuuuauua

SEQ ID NO: 1282897 - RNA, 19 nt, Homo sapiens
  misc_RNA (1)...(19): siRNA sense strand
aaccagaaccaauauguga

SEQ ID NO: 1282898 - RNA, 19 nt, Homo sapiens
  misc_RNA (1)...(19): siRNA sense strand
aaucaucaggaauccauua

SEQ ID NO: 1282899 - RNA, 19 nt, Homo sapiens
  misc_RNA (1)...(19): siRNA sense strand
gcuucuaccuggacauaca

SEQ ID NO: 1282900 - RNA, 19 nt, Homo sapiens
  misc_RNA (1)...(19): siRNA sense strand
guaugcagaaguacagaaa

SEQ ID NO: 1282901 - RNA, 19 nt, Homo sapiens
  misc_RNA (1)...(19): siRNA sense strand
caaaucaucaggaauccau

SEQ ID NO: 1282902 - RNA, 19 nt, Homo sapiens
  misc_RNA (1)...(19): siRNA sense strand
ggaaucaaaccagaaccaa

SEQ ID NO: 1282903 - RNA, 19 nt, Homo sapiens
  misc_RNA (1)...(19): siRNA sense strand
acgcauugauggauuuaug

SEQ ID NO: 1282904 - RNA, 19 nt, Homo sapiens
  misc_RNA (1)...(19): siRNA sense strand
cuuagguugugaagacuuu

SEQ ID NO: 1282905 - RNA, 19 nt, Homo sapiens
  misc_RNA (1)...(19): siRNA sense strand
agaagaacuguuugauuga

SEQ ID NO: 1282906 - RNA, 19 nt, Homo sapiens
  misc_RNA (1)...(19): siRNA sense strand
aaugcaaauugauggguaa

SEQ ID NO: 1282907 - RNA, 19 nt, Homo sapiens
  misc_RNA (1)...(19): siRNA sense strand
cuucaaauccuuagguugu

SEQ ID NO: 1282908 - RNA, 19 nt, Homo sapiens
  misc_RNA (1)...(19): siRNA sense strand
cugccaacacugucgauua

SEQ ID NO: 1282909 - RNA, 19 nt, Homo sapiens
  misc_RNA (1)...(19): siRNA sense strand
gcaaggugucuacauuaag

SEQ ID NO: 1282910 - RNA, 19 nt, Homo sapiens
  misc_RNA (1)...(19): siRNA sense strand
ugugaagacuuuauuagcu

SEQ ID NO: 1282911 - RNA, 19 nt, Homo sapiens
  misc_RNA (1)...(19): siRNA sense strand
acgacgaccucaguaacua

SEQ ID NO: 1282912 - RNA, 19 nt, Homo sapiens
  misc_RNA (1)...(19): siRNA sense strand
ugacuacacaccagcauca

SEQ ID NO: 1282913 - RNA, 19 nt, Homo sapiens
  misc_RNA (1)...(19): siRNA sense strand
aaagcaauauacccagaca

SEQ ID NO: 1282914 - RNA, 19 nt, Homo sapiens
  misc_RNA (1)...(19): siRNA sense strand
cucuagaggugguguuuau

SEQ ID NO: 1282915 - RNA, 19 nt, Homo sapiens
  misc_RNA (1)...(19): siRNA sense strand
cuaaaucgcaucuggaaac

SEQ ID NO: 1282916 - RNA, 19 nt, Homo sapiens
  misc_RNA (1)...(19): siRNA sense strand
cagcuucuaccuggacaua

SEQ ID NO: 1282917 - RNA, 19 nt, Homo sapiens
  misc_RNA (1)...(19): siRNA sense strand
guucuaugcaccugacuga

SEQ ID NO: 1282918 - RNA, 19 nt, Homo sapiens
  misc_RNA (1)...(19): siRNA sense strand
cagaaccaauaugugacua

SEQ ID NO: 1282919 - RNA, 19 nt, Homo sapiens
  misc_RNA (1)...(19): siRNA sense strand
ugccaacacugucgauuac

SEQ ID NO: 1282920 - RNA, 19 nt, Homo sapiens
  misc_RNA (1)...(19): siRNA sense strand
ggaguuguucacuucagaa

SEQ ID NO: 1282921 - RNA, 19 nt, Homo sapiens
  misc_RNA (1)...(19): siRNA sense strand
uggaaagaguuuauguucu

SEQ ID NO: 1282922 - RNA, 19 nt, Homo sapiens
  misc_RNA (1)...(19): siRNA sense strand
gaagacuuuauuagcuuug

SEQ ID NO: 1282923 - RNA, 19 nt, Homo sapiens
  misc_RNA (1)...(19): siRNA sense strand
gaagucagcaaagcaaugc

SEQ ID NO: 1282924 - RNA, 19 nt, Homo sapiens
  misc_RNA (1)...(19): siRNA sense strand
guagaaaccgcugccaaca

SEQ ID NO: 1282925 - RNA, 19 nt, Homo sapiens
  misc_RNA (1)...(19): siRNA sense strand
ggugguguuuaucagaaug

SEQ ID NO: 1282926 - RNA, 19 nt, Homo sapiens
  misc_RNA (1)...(19): siRNA sense strand
cuggaaaccugccaauacu

SEQ ID NO: 1282927 - RNA, 19 nt, Homo sapiens
  misc_RNA (1)...(19): siRNA sense strand
gaucgaaccaguagaaacc

SEQ ID NO: 1282928 - RNA, 19 nt, Homo sapiens
  misc_RNA (1)...(19): siRNA sense strand
cgucagaagaacuguuuga

SEQ ID NO: 1282929 - RNA, 19 nt, Homo sapiens
  misc_RNA (1)...(19): siRNA sense strand
gccuuugacucucagaaca

SEQ ID NO: 1282930 - RNA, 19 nt, Homo sapiens
  misc_RNA (1)...(19): siRNA sense strand
ggaaagaguuuauguucua

SEQ ID NO: 1282931 - RNA, 19 nt, Homo sapiens
  misc_RNA (1)...(19): siRNA sense strand
cagaagaacuguuugauug

SEQ ID NO: 1282932 - RNA, 19 nt, Homo sapiens
  misc_RNA (1)...(19): siRNA sense strand
gagaagagcuccagcagau

SEQ ID NO: 1282933 - RNA, 19 nt, Homo sapiens
  misc_RNA (1)...(19): siRNA sense strand
gcaauugugugccaucaaa

SEQ ID NO: 1282934 - RNA, 19 nt, Homo sapiens
  misc_RNA (1)...(19): siRNA sense strand
ggagacaaaucaucaggaa

SEQ ID NO: 1282935 - RNA, 19 nt, Homo sapiens
  misc_RNA (1)...(19): siRNA sense strand
gaagagcuccagcagauaa

SEQ ID NO: 1282936 - RNA, 19 nt, Homo sapiens
  misc_RNA (1)...(19): siRNA sense strand
caagaucuguggagacaaa

SEQ ID NO: 1282937 - RNA, 19 nt, Homo sapiens
  misc_RNA (1)...(19): siRNA sense strand
guuguucacuucagaauuu

SEQ ID NO: 1282938 - RNA, 19 nt, Homo sapiens
  misc_RNA (1)...(19): siRNA sense strand
gcaccugacugaagaugaa

SEQ ID NO: 1282939 - RNA, 19 nt, Homo sapiens
  misc_RNA (1)...(19): siRNA sense strand
gaaauuauuccaugcaaga

SEQ ID NO: 1282940 - RNA, 19 nt, Homo sapiens
  misc_RNA (1)...(19): siRNA sense strand
ggaagaaauugagaacuau

SEQ ID NO: 1282941 - RNA, 19 nt, Homo sapiens
  misc_RNA (1)...(19): siRNA sense strand
caaggugucuacauuaaga

SEQ ID NO: 1282942 - RNA, 19 nt, Homo sapiens
  misc_RNA (1)...(19): siRNA sense strand
ccgagaagauggaauacua

SEQ ID NO: 1282943 - RNA, 19 nt, Homo sapiens
  misc_RNA (1)...(19): siRNA sense strand
gaagauggaauacuaacaa

SEQ ID NO: 1282944 - RNA, 19 nt, Homo sapiens
  misc_RNA (1)...(19): siRNA sense strand
cagcuuguaugcagaagua

SEQ ID NO: 1282945 - RNA, 19 nt, Homo sapiens
  misc_RNA (1)...(19): siRNA sense strand
gaucaaauugugcuucuaa

SEQ ID NO: 1282946 - RNA, 19 nt, Homo sapiens
  misc_RNA (1)...(19): siRNA sense strand
gcagagagacagcuuguau

SEQ ID NO: 1282947 - RNA, 19 nt, Homo sapiens
  misc_RNA (1)...(19): siRNA sense strand
caaacgcauugauggauuu

SEQ ID NO: 1282948 - RNA, 19 nt, Homo sapiens
  misc_RNA (1)...(19): siRNA sense strand
gaagaacuguuugauugau

SEQ ID NO: 1282949 - RNA, 19 nt, Homo sapiens
  misc_RNA (1)...(19): siRNA sense strand
uagaacaccuugcacagaa

SEQ ID NO: 1282950 - RNA, 19 nt, Homo sapiens
  misc_RNA (1)...(19): siRNA sense strand
aggaagaaauugagaacua

SEQ ID NO: 1282951 - RNA, 19 nt, Homo sapiens
  misc_RNA (1)...(19): siRNA sense strand
gaacaccuugcacagaaua

SEQ ID NO: 1282952 - RNA, 19 nt, Homo sapiens
  misc_RNA (1)...(19): siRNA sense strand
aaucaaaccagaaccaaua

SEQ ID NO: 1282953 - RNA, 19 nt, Homo sapiens
  misc_RNA (1)...(19): siRNA sense strand
guagggaugucucgagaug

SEQ ID NO: 1282954 - RNA, 19 nt, Homo sapiens
  misc_RNA (1)...(19): siRNA sense strand
gaggugauguggcaauugu

SEQ ID NO: 1282955 - RNA, 19 nt, Homo sapiens
  misc_RNA (1)...(19): siRNA sense strand
gcucauggcugcaagaaaa

SEQ ID NO: 1282956 - RNA, 19 nt, Homo sapiens
  misc_RNA (1)...(19): siRNA sense strand
ggaaaccugccaauacuug

SEQ ID NO: 1282957 - RNA, 19 nt, Homo sapiens
  misc_RNA (1)...(19): siRNA sense strand
gaggugguguuuaucagaa

SEQ ID NO: 1282958 - RNA, 19 nt, Homo sapiens
  misc_RNA (1)...(19): siRNA sense strand
ccaaacgcauugauggauu

SEQ ID NO: 1282959 - RNA, 19 nt, Homo sapiens
  misc_RNA (1)...(19): siRNA sense strand
uuacagaagcuauacagua

SEQ ID NO: 1282960 - RNA, 19 nt, Homo sapiens
  misc_RNA (1)...(19): siRNA sense strand
gaaccaauaugugacuaca

SEQ ID NO: 1282961 - RNA, 19 nt, Homo sapiens
  misc_RNA (1)...(19): siRNA sense strand
caacacguccuacagaaga

SEQ ID NO: 1282962 - RNA, 19 nt, Homo sapiens
  misc_RNA (1)...(19): siRNA sense strand
gugaagacuuuauuagcuu

SEQ ID NO: 1282963 - RNA, 19 nt, Homo sapiens
  misc_RNA (1)...(19): siRNA sense strand
uaugcaaggugucuacauu

SEQ ID NO: 1282964 - RNA, 19 nt, Homo sapiens
  misc_RNA (1)...(19): siRNA sense strand
ucaccgagaagauggaaua

SEQ ID NO: 1282965 - RNA, 19 nt, Homo sapiens
  misc_RNA (1)...(19): siRNA sense strand
ccagucaggucuugauauc

SEQ ID NO: 1282966 - RNA, 19 nt, Homo sapiens
  misc_RNA (1)...(19): siRNA sense strand
gauggaauacuaacaaagu

SEQ ID NO: 1282967 - RNA, 19 nt, Homo sapiens
  misc_RNA (1)...(19): siRNA sense strand
gaaugugccgugccuuuga

SEQ ID NO: 1282968 - RNA, 19 nt, Homo sapiens
  misc_RNA (1)...(19): siRNA sense strand
ggagaagucagcaaagcaa

SEQ ID NO: 1282969 - RNA, 19 nt, Homo sapiens
  misc_RNA (1)...(19): siRNA sense strand
ugcaaggugucuacauuaa

SEQ ID NO: 1282970 - RNA, 19 nt, Homo sapiens
  misc_RNA (1)...(19): siRNA sense strand
acagaagaaucaccgagaa

SEQ ID NO: 1282971 - RNA, 19 nt, Homo sapiens
  misc_RNA (1)...(19): siRNA sense strand
gaagaaucaccgagaagau

SEQ ID NO: 1282972 - RNA, 19 nt, Homo sapiens
  misc_RNA (1)...(19): siRNA sense strand
ucagaagaacuguuugauu

SEQ ID NO: 1282973 - RNA, 19 nt, Homo sapiens
  misc_RNA (1)...(19): siRNA sense strand
cgaccucaguaacuacauu

SEQ ID NO: 1282974 - RNA, 19 nt, Homo sapiens
  misc_RNA (1)...(19): siRNA sense strand
caaaccagaaccaauaugu

SEQ ID NO: 1282975 - RNA, 19 nt, Homo sapiens
  misc_RNA (1)...(19): siRNA sense strand
agacaaaucaucaggaauc

SEQ ID NO: 1282976 - RNA, 19 nt, Homo sapiens
  misc_RNA (1)...(19): siRNA sense strand
gacugaagaugaaauugca

SEQ ID NO: 1282977 - RNA, 19 nt, Homo sapiens
  misc_RNA (1)...(19): siRNA sense strand
guccauggcagaauuagaa

SEQ ID NO: 1282978 - RNA, 19 nt, Homo sapiens
  misc_RNA (1)...(19): siRNA sense strand
uacaguaugugguggaguu

SEQ ID NO: 1282979 - RNA, 19 nt, Homo sapiens
  misc_RNA (1)...(19): siRNA sense strand
gccaauacuugagagaaga

SEQ ID NO: 1282980 - RNA, 19 nt, Homo sapiens
  misc_RNA (1)...(19): siRNA sense strand
gaaaccugccaauacuuga

SEQ ID NO: 1282981 - RNA, 19 nt, Homo sapiens
  misc_RNA (1)...(19): siRNA sense strand
aaauucagcuagcucuuca

SEQ ID NO: 1282982 - RNA, 19 nt, Homo sapiens
  misc_RNA (1)...(19): siRNA sense strand
gacauugugcgacuucauu

SEQ ID NO: 1282983 - RNA, 19 nt, Homo sapiens
  misc_RNA (1)...(19): siRNA sense strand
cgagaagauggaauacuaa

SEQ ID NO: 1282984 - RNA, 19 nt, Homo sapiens
  misc_RNA (1)...(19): siRNA sense strand
agaaaccgcugccaacacu

SEQ ID NO: 1282985 - RNA, 19 nt, Homo sapiens
  misc_RNA (1)...(19): siRNA sense strand
cuaugcaccugacugaaga

SEQ ID NO: 1282986 - RNA, 19 nt, Homo sapiens
  misc_RNA (1)...(19): siRNA sense strand
cgacgucuucaaauccuua

SEQ ID NO: 1282987 - RNA, 19 nt, Homo sapiens
  misc_RNA (1)...(19): siRNA sense strand
cagaaugugccgugccuuu

SEQ ID NO: 1282988 - RNA, 19 nt, Homo sapiens
  misc_RNA (1)...(19): siRNA sense strand
gggaggugauguggcaauu

SEQ ID NO: 1282989 - RNA, 19 nt, Homo sapiens
  misc_RNA (1)...(19): siRNA sense strand
gaaucaaaccagaaccaau

SEQ ID NO: 1282990 - RNA, 19 nt, Homo sapiens
  misc_RNA (1)...(19): siRNA sense strand
ccaacgggcugacggaacu

SEQ ID NO: 1282991 - RNA, 19 nt, Homo sapiens
  misc_RNA (1)...(19): siRNA sense strand
gaucuguggagacaaauca

SEQ ID NO: 1282992 - RNA, 19 nt, Homo sapiens
  misc_RNA (1)...(19): siRNA sense strand
ucaaauccuuagguuguga

SEQ ID NO: 1282993 - RNA, 19 nt, Homo sapiens
  misc_RNA (1)...(19): siRNA sense strand
gaagaaauugagaacuauc

SEQ ID NO: 1282994 - RNA, 19 nt, Homo sapiens
  misc_RNA (1)...(19): siRNA sense strand
ucgagaugcuguaaaauuu

SEQ ID NO: 1282995 - RNA, 19 nt, Homo sapiens
  misc_RNA (1)...(19): siRNA sense strand
ucagcuagcucuucaacac

SEQ ID NO: 1282996 - RNA, 19 nt, Homo sapiens
  misc_RNA (1)...(19): siRNA sense strand
gguugugaagacuuuauua

SEQ ID NO: 1282997 - RNA, 19 nt, Homo sapiens
  misc_RNA (1)...(19): siRNA sense strand
aaccagaaccaauauguga

SEQ ID NO: 1282998 - RNA, 19 nt, Homo sapiens
  misc_RNA (1)...(19): siRNA sense strand
aaucaucaggaauccauua

SEQ ID NO: 1282999 - RNA, 19 nt, Homo sapiens
  misc_RNA (1)...(19): siRNA sense strand
gcuucuaccuggacauaca

SEQ ID NO: 1283000 - RNA, 19 nt, Homo sapiens
  misc_RNA (1)...(19): siRNA sense strand
guaugcagaaguacagaaa

SEQ ID NO: 1283001 - RNA, 19 nt, Homo sapiens
  misc_RNA (1)...(19): siRNA sense strand
caaaucaucaggaauccau

SEQ ID NO: 1283002 - RNA, 19 nt, Homo sapiens
  misc_RNA (1)...(19): siRNA sense strand
ggaaucaaaccagaaccaa

SEQ ID NO: 1283003 - RNA, 19 nt, Homo sapiens
  misc_RNA (1)...(19): siRNA sense strand
acgcauugauggauuuaug

SEQ ID NO: 1283004 - RNA, 19 nt, Homo sapiens
  misc_RNA (1)...(19): siRNA sense strand
cuuagguugugaagacuuu

SEQ ID NO: 1283005 - RNA, 19 nt, Homo sapiens
  misc_RNA (1)...(19): siRNA sense strand
agaagaacuguuugauuga

SEQ ID NO: 1283006 - RNA, 19 nt, Homo sapiens
  misc_RNA (1)...(19): siRNA sense strand
aaugcaaauugauggguaa

SEQ ID NO: 1283007 - RNA, 19 nt, Homo sapiens
  misc_RNA (1)...(19): siRNA sense strand
cuucaaauccuuagguugu

SEQ ID NO: 1283008 - RNA, 19 nt, Homo sapiens
  misc_RNA (1)...(19): siRNA sense strand
cugccaacacugucgauua

SEQ ID NO: 1283009 - RNA, 19 nt, Homo sapiens
  misc_RNA (1)...(19): siRNA sense strand
gcaaggugucuacauuaag

SEQ ID NO: 1283010 - RNA, 19 nt, Homo sapiens
  misc_RNA (1)...(19): siRNA sense strand
ugugaagacuuuauuagcu

SEQ ID NO: 1283011 - RNA, 19 nt, Homo sapiens
  misc_RNA (1)...(19): siRNA sense strand
acgacgaccucaguaacua

SEQ ID NO: 1283012 - RNA, 19 nt, Homo sapiens
  misc_RNA (1)...(19): siRNA sense strand
ugacuacacaccagcauca

SEQ ID NO: 1283013 - RNA, 19 nt, Homo sapiens
  misc_RNA (1)...(19): siRNA sense strand
aaagcaauauacccagaca

SEQ ID NO: 1283014 - RNA, 19 nt, Homo sapiens
  misc_RNA (1)...(19): siRNA sense strand
cucuagaggugguguuuau

SEQ ID NO: 1283015 - RNA, 19 nt, Homo sapiens
  misc_RNA (1)...(19): siRNA sense strand
cuaaaucgcaucuggaaac

SEQ ID NO: 1283016 - RNA, 19 nt, Homo sapiens
  misc_RNA (1)...(19): siRNA sense strand
cagcuucuaccuggacaua

SEQ ID NO: 1283017 - RNA, 19 nt, Homo sapiens
  misc_RNA (1)...(19): siRNA sense strand
guucuaugcaccugacuga

SEQ ID NO: 1283018 - RNA, 19 nt, Homo sapiens
  misc_RNA (1)...(19): siRNA sense strand
cagaaccaauaugugacua

SEQ ID NO: 1283019 - RNA, 19 nt, Homo sapiens
  misc_RNA (1)...(19): siRNA sense strand
ugccaacacugucgauuac

SEQ ID NO: 1283020 - RNA, 19 nt, Homo sapiens
  misc_RNA (1)...(19): siRNA sense strand
ggaguuguucacuucagaa

SEQ ID NO: 1283021 - RNA, 19 nt, Homo sapiens
  misc_RNA (1)...(19): siRNA sense strand
uggaaagaguuuauguucu

SEQ ID NO: 1283022 - RNA, 19 nt, Homo sapiens
  misc_RNA (1)...(19): siRNA sense strand
gaagacuuuauuagcuuug

SEQ ID NO: 1283023 - RNA, 19 nt, Homo sapiens
  misc_RNA (1)...(19): siRNA sense strand
gaagucagcaaagcaaugc

SEQ ID NO: 1283024 - RNA, 19 nt, Homo sapiens
  misc_RNA (1)...(19): siRNA sense strand
guagaaaccgcugccaaca

SEQ ID NO: 1283025 - RNA, 19 nt, Homo sapiens
  misc_RNA (1)...(19): siRNA sense strand
ggugguguuuaucagaaug

SEQ ID NO: 1283026 - RNA, 19 nt, Homo sapiens
  misc_RNA (1)...(19): siRNA sense strand
cuggaaaccugccaauacu

SEQ ID NO: 1283027 - RNA, 19 nt, Homo sapiens
  misc_RNA (1)...(19): siRNA sense strand
gaucgaaccaguagaaacc

SEQ ID NO: 1283028 - RNA, 19 nt, Homo sapiens
  misc_RNA (1)...(19): siRNA sense strand
cgucagaagaacuguuuga

SEQ ID NO: 1283029 - RNA, 19 nt, Homo sapiens
  misc_RNA (1)...(19): siRNA sense strand
gccuuugacucucagaaca

SEQ ID NO: 1283030 - RNA, 19 nt, Homo sapiens
  misc_RNA (1)...(19): siRNA sense strand
cgaaguuacucaaggauuu

SEQ ID NO: 1283031 - RNA, 19 nt, Homo sapiens
  misc_RNA (1)...(19): siRNA sense strand
gaagauggcagaagcuguu

SEQ ID NO: 1283032 - RNA, 19 nt, Homo sapiens
  misc_RNA (1)...(19): siRNA sense strand
gaucacaucaucauugcua

SEQ ID NO: 1283033 - RNA, 19 nt, Homo sapiens
  misc_RNA (1)...(19): siRNA sense strand
gaaagagauucugcuguca

SEQ ID NO: 1283034 - RNA, 19 nt, Homo sapiens
  misc_RNA (1)...(19): siRNA sense strand
gagaugcaucccaguguua

SEQ ID NO: 1283035 - RNA, 19 nt, Homo sapiens
  misc_RNA (1)...(19): siRNA sense strand
gaauauggaaucacaagug

SEQ ID NO: 1283036 - RNA, 19 nt, Homo sapiens
  misc_RNA (1)...(19): siRNA sense strand
ccgcaugacuggaggaaga

SEQ ID NO: 1283037 - RNA, 19 nt, Homo sapiens
  misc_RNA (1)...(19): siRNA sense strand
gaaggaauccccuggaaaa

SEQ ID NO: 1283038 - RNA, 19 nt, Homo sapiens
  misc_RNA (1)...(19): siRNA sense strand
gcaucccaguguuauguaa

SEQ ID NO: 1283039 - RNA, 19 nt, Homo sapiens
  misc_RNA (1)...(19): siRNA sense strand
ggcagaagcuguucaaaau

SEQ ID NO: 1283040 - RNA, 19 nt, Homo sapiens
  misc_RNA (1)...(19): siRNA sense strand
gucaaguacuuuaacauca

SEQ ID NO: 1283041 - RNA, 19 nt, Homo sapiens
  misc_RNA (1)...(19): siRNA sense strand
cgagaugcaucccaguguu

SEQ ID NO: 1283042 - RNA, 19 nt, Homo sapiens
  misc_RNA (1)...(19): siRNA sense strand
ggaggacacgggcaccuuu

SEQ ID NO: 1283043 - RNA, 19 nt, Homo sapiens
  misc_RNA (1)...(19): siRNA sense strand
ccaguguuauguaaagaug

SEQ ID NO: 1283044 - RNA, 19 nt, Homo sapiens
  misc_RNA (1)...(19): siRNA sense strand
gaaguuacucaaggauuug

SEQ ID NO: 1283045 - RNA, 19 nt, Homo sapiens
  misc_RNA (1)...(19): siRNA sense strand
cacaugcucugaggaggua

SEQ ID NO: 1283046 - RNA, 19 nt, Homo sapiens
  misc_RNA (1)...(19): siRNA sense strand
caggucagcgggacuauga

SEQ ID NO: 1283047 - RNA, 19 nt, Homo sapiens
  misc_RNA (1)...(19): siRNA sense strand
uagagcacauggcaucuca

SEQ ID NO: 1283048 - RNA, 19 nt, Homo sapiens
  misc_RNA (1)...(19): siRNA sense strand
ucuaucacgcccauuauaa

SEQ ID NO: 1283049 - RNA, 19 nt, Homo sapiens
  misc_RNA (1)...(19): siRNA sense strand
ugggaggccugauccaaga

SEQ ID NO: 1283050 - RNA, 19 nt, Homo sapiens
  misc_RNA (1)...(19): siRNA sense strand
ggagaaggcugggguagau

SEQ ID NO: 1283051 - RNA, 19 nt, Homo sapiens
  misc_RNA (1)...(19): siRNA sense strand
gaagucugaauuuggagaa

SEQ ID NO: 1283052 - RNA, 19 nt, Homo sapiens
  misc_RNA (1)...(19): siRNA sense strand
gauggacuacgacaauguu

SEQ ID NO: 1283053 - RNA, 19 nt, Homo sapiens
  misc_RNA (1)...(19): siRNA sense strand
cagaagcuguucaaaauca

SEQ ID NO: 1283054 - RNA, 19 nt, Homo sapiens
  misc_RNA (1)...(19): siRNA sense strand
gacaggcugcugaggguaa

SEQ ID NO: 1283055 - RNA, 19 nt, Homo sapiens
  misc_RNA (1)...(19): siRNA sense strand
caaaggugggaaagagauu

SEQ ID NO: 1283056 - RNA, 19 nt, Homo sapiens
  misc_RNA (1)...(19): siRNA sense strand
gcgaaguuacucaaggauu

SEQ ID NO: 1283057 - RNA, 19 nt, Homo sapiens
  misc_RNA (1)...(19): siRNA sense strand
gccgaucacaucaucauug

SEQ ID NO: 1283058 - RNA, 19 nt, Homo sapiens
  misc_RNA (1)...(19): siRNA sense strand
caacgcaggcgaaguuacu

SEQ ID NO: 1283059 - RNA, 19 nt, Homo sapiens
  misc_RNA (1)...(19): siRNA sense strand
ggagcauguugaggucuau

SEQ ID NO: 1283060 - RNA, 19 nt, Homo sapiens
  misc_RNA (1)...(19): siRNA sense strand
cuaucacgcccauuauaaa

SEQ ID NO: 1283061 - RNA, 19 nt, Homo sapiens
  misc_RNA (1)...(19): siRNA sense strand
cacgguggcuggacgagau

SEQ ID NO: 1283062 - RNA, 19 nt, Homo sapiens
  misc_RNA (1)...(19): siRNA sense strand
gcucugaggagguagucaa

SEQ ID NO: 1283063 - RNA, 19 nt, Homo sapiens
  misc_RNA (1)...(19): siRNA sense strand
gauggcagaagcuguucaa

SEQ ID NO: 1283064 - RNA, 19 nt, Homo sapiens
  misc_RNA (1)...(19): siRNA sense strand
ucacgcccauuauaaacca

SEQ ID NO: 1283065 - RNA, 19 nt, Homo sapiens
  misc_RNA (1)...(19): siRNA sense strand
cagaucugauggacuacga

SEQ ID NO: 1283066 - RNA, 19 nt, Homo sapiens
  misc_RNA (1)...(19): siRNA sense strand
cuuggaauauggaaucaca

SEQ ID NO: 1283067 - RNA, 19 nt, Homo sapiens
  misc_RNA (1)...(19): siRNA sense strand
ccaaaggugggaaagagau

SEQ ID NO: 1283068 - RNA, 19 nt, Homo sapiens
  misc_RNA (1)...(19): siRNA sense strand
ggaauauggaaucacaagu

SEQ ID NO: 1283069 - RNA, 19 nt, Homo sapiens
  misc_RNA (1)...(19): siRNA sense strand
aggcgaaguuacucaagga

SEQ ID NO: 1283070 - RNA, 19 nt, Homo sapiens
  misc_RNA (1)...(19): siRNA sense strand
gggcuggacaccaccauca

SEQ ID NO: 1283071 - RNA, 19 nt, Homo sapiens
  misc_RNA (1)...(19): siRNA sense strand
gaggacacgggcaccuuug

SEQ ID NO: 1283072 - RNA, 19 nt, Homo sapiens
  misc_RNA (1)...(19): siRNA sense strand
gucuaucacgcccauuaua

SEQ ID NO: 1283073 - RNA, 19 nt, Homo sapiens
  misc_RNA (1)...(19): siRNA sense strand
ccacaucuacgccauuggu

SEQ ID NO: 1283074 - RNA, 19 nt, Homo sapiens
  misc_RNA (1)...(19): siRNA sense strand
ggacagaaaagucaaguac

SEQ ID NO: 1283075 - RNA, 19 nt, Homo sapiens
  misc_RNA (1)...(19): siRNA sense strand
ggucuaucacgcccauuau

SEQ ID NO: 1283076 - RNA, 19 nt, Homo sapiens
  misc_RNA (1)...(19): siRNA sense strand
aaaaucacgugaaauccuu

SEQ ID NO: 1283077 - RNA, 19 nt, Homo sapiens
  misc_RNA (1)...(19): siRNA sense strand
cacgugaaauccuugaacu

SEQ ID NO: 1283078 - RNA, 19 nt, Homo sapiens
  misc_RNA (1)...(19): siRNA sense strand
aggagcauguugaggucua

SEQ ID NO: 1283079 - RNA, 19 nt, Homo sapiens
  misc_RNA (1)...(19): siRNA sense strand
ggacuacguggaaccuucu

SEQ ID NO: 1283080 - RNA, 19 nt, Homo sapiens
  misc_RNA (1)...(19): siRNA sense strand
gccaaaggugggaaagaga

SEQ ID NO: 1283081 - RNA, 19 nt, Homo sapiens
  misc_RNA (1)...(19): siRNA sense strand
ugccaaaggugggaaagag

SEQ ID NO: 1283082 - RNA, 19 nt, Homo sapiens
  misc_RNA (1)...(19): siRNA sense strand
uguccuccauggucauaga

SEQ ID NO: 1283083 - RNA, 19 nt, Homo sapiens
  misc_RNA (1)...(19): siRNA sense strand
gcuggacaccaccaucaug

SEQ ID NO: 1283084 - RNA, 19 nt, Homo sapiens
  misc_RNA (1)...(19): siRNA sense strand
ccgaucacaucaucauugc

SEQ ID NO: 1283085 - RNA, 19 nt, Homo sapiens
  misc_RNA (1)...(19): siRNA sense strand
gucagccgaucacaucauc

SEQ ID NO: 1283086 - RNA, 19 nt, Homo sapiens
  misc_RNA (1)...(19): siRNA sense strand
ggucagcgggacuaugauc

SEQ ID NO: 1283087 - RNA, 19 nt, Homo sapiens
  misc_RNA (1)...(19): siRNA sense strand
ucugauggacuacgacaau

SEQ ID NO: 1283088 - RNA, 19 nt, Homo sapiens
  misc_RNA (1)...(19): siRNA sense strand
cgaaguuacucaaggauuu

SEQ ID NO: 1283089 - RNA, 19 nt, Homo sapiens
  misc_RNA (1)...(19): siRNA sense strand
gaagauggcagaagcuguu

SEQ ID NO: 1283090 - RNA, 19 nt, Homo sapiens
  misc_RNA (1)...(19): siRNA sense strand
gaucacaucaucauugcua

SEQ ID NO: 1283091 - RNA, 19 nt, Homo sapiens
  misc_RNA (1)...(19): siRNA sense strand
gaaagagauucugcuguca

SEQ ID NO: 1283092 - RNA, 19 nt, Homo sapiens
  misc_RNA (1)...(19): siRNA sense strand
gagaugcaucccaguguua

SEQ ID NO: 1283093 - RNA, 19 nt, Homo sapiens
  misc_RNA (1)...(19): siRNA sense strand
gaauauggaaucacaagug

SEQ ID NO: 1283094 - RNA, 19 nt, Homo sapiens
  misc_RNA (1)...(19): siRNA sense strand
ccgcaugacuggaggaaga

SEQ ID NO: 1283095 - RNA, 19 nt, Homo sapiens
  misc_RNA (1)...(19): siRNA sense strand
gaaggaauccccuggaaaa

SEQ ID NO: 1283096 - RNA, 19 nt, Homo sapiens
  misc_RNA (1)...(19): siRNA sense strand
gcaucccaguguuauguaa

SEQ ID NO: 1283097 - RNA, 19 nt, Homo sapiens
  misc_RNA (1)...(19): siRNA sense strand
ggcagaagcuguucaaaau

SEQ ID NO: 1283098 - RNA, 19 nt, Homo sapiens
  misc_RNA (1)...(19): siRNA sense strand
gucaaguacuuuaacauca

SEQ ID NO: 1283099 - RNA, 19 nt, Homo sapiens
  misc_RNA (1)...(19): siRNA sense strand
cgagaugcaucccaguguu

SEQ ID NO: 1283100 - RNA, 19 nt, Homo sapiens
  misc_RNA (1)...(19): siRNA sense strand
ggaggacacgggcaccuuu

SEQ ID NO: 1283101 - RNA, 19 nt, Homo sapiens
  misc_RNA (1)...(19): siRNA sense strand
ccaguguuauguaaagaug

SEQ ID NO: 1283102 - RNA, 19 nt, Homo sapiens
  misc_RNA (1)...(19): siRNA sense strand
gaaguuacucaaggauuug

SEQ ID NO: 1283103 - RNA, 19 nt, Homo sapiens
  misc_RNA (1)...(19): siRNA sense strand
cacaugcucugaggaggua

SEQ ID NO: 1283104 - RNA, 19 nt, Homo sapiens
  misc_RNA (1)...(19): siRNA sense strand
uagagcacauggcaucuca

SEQ ID NO: 1283105 - RNA, 19 nt, Homo sapiens
  misc_RNA (1)...(19): siRNA sense strand
ucuaucacgcccauuauaa

SEQ ID NO: 1283106 - RNA, 19 nt, Homo sapiens
  misc_RNA (1)...(19): siRNA sense strand
gaagucugaauuuggagaa

SEQ ID NO: 1283107 - RNA, 19 nt, Homo sapiens
  misc_RNA (1)...(19): siRNA sense strand
ugggaggccugauccaaga

SEQ ID NO: 1283108 - RNA, 19 nt, Homo sapiens
  misc_RNA (1)...(19): siRNA sense strand
ggagaaggcugggguagau

SEQ ID NO: 1283109 - RNA, 19 nt, Homo sapiens
  misc_RNA (1)...(19): siRNA sense strand
gauggacuacgacaauguu

SEQ ID NO: 1283110 - RNA, 19 nt, Homo sapiens
  misc_RNA (1)...(19): siRNA sense strand
cagaagcuguucaaaauca

SEQ ID NO: 1283111 - RNA, 19 nt, Homo sapiens
  misc_RNA (1)...(19): siRNA sense strand
gacaggcugcugaggguaa

SEQ ID NO: 1283112 - RNA, 19 nt, Homo sapiens
  misc_RNA (1)...(19): siRNA sense strand
caaaggugggaaagagauu

SEQ ID NO: 1283113 - RNA, 19 nt, Homo sapiens
  misc_RNA (1)...(19): siRNA sense strand
gcgaaguuacucaaggauu

SEQ ID NO: 1283114 - RNA, 19 nt, Homo sapiens
  misc_RNA (1)...(19): siRNA sense strand
gccgaucacaucaucauug

SEQ ID NO: 1283115 - RNA, 19 nt, Homo sapiens
  misc_RNA (1)...(19): siRNA sense strand
caacgcaggcgaaguuacu

SEQ ID NO: 1283116 - RNA, 19 nt, Homo sapiens
  misc_RNA (1)...(19): siRNA sense strand
ggagcauguugaggucuau

SEQ ID NO: 1283117 - RNA, 19 nt, Homo sapiens
  misc_RNA (1)...(19): siRNA sense strand
cuaucacgcccauuauaaa

SEQ ID NO: 1283118 - RNA, 19 nt, Homo sapiens
  misc_RNA (1)...(19): siRNA sense strand
cacgguggcuggacgagau

SEQ ID NO: 1283119 - RNA, 19 nt, Homo sapiens
  misc_RNA (1)...(19): siRNA sense strand
gcucugaggagguagucaa

SEQ ID NO: 1283120 - RNA, 19 nt, Homo sapiens
  misc_RNA (1)...(19): siRNA sense strand
ccaaaggugggaaagagau

SEQ ID NO: 1283121 - RNA, 19 nt, Homo sapiens
  misc_RNA (1)...(19): siRNA sense strand
ucacgcccauuauaaacca

SEQ ID NO: 1283122 - RNA, 19 nt, Homo sapiens
  misc_RNA (1)...(19): siRNA sense strand
cagaucugauggacuacga

SEQ ID NO: 1283123 - RNA, 19 nt, Homo sapiens
  misc_RNA (1)...(19): siRNA sense strand
gauggcagaagcuguucaa

SEQ ID NO: 1283124 - RNA, 19 nt, Homo sapiens
  misc_RNA (1)...(19): siRNA sense strand
cuuggaauauggaaucaca

SEQ ID NO: 1283125 - RNA, 19 nt, Homo sapiens
  misc_RNA (1)...(19): siRNA sense strand
ggaauauggaaucacaagu

SEQ ID NO: 1283126 - RNA, 19 nt, Homo sapiens
  misc_RNA (1)...(19): siRNA sense strand
aggcgaaguuacucaagga

SEQ ID NO: 1283127 - RNA, 19 nt, Homo sapiens
  misc_RNA (1)...(19): siRNA sense strand
gggcuggacaccaccauca

SEQ ID NO: 1283128 - RNA, 19 nt, Homo sapiens
  misc_RNA (1)...(19): siRNA sense strand
gaggacacgggcaccuuug

SEQ ID NO: 1283129 - RNA, 19 nt, Homo sapiens
  misc_RNA (1)...(19): siRNA sense strand
gucuaucacgcccauuaua

SEQ ID NO: 1283130 - RNA, 19 nt, Homo sapiens
  misc_RNA (1)...(19): siRNA sense strand
ccacaucuacgccauuggu

SEQ ID NO: 1283131 - RNA, 19 nt, Homo sapiens
  misc_RNA (1)...(19): siRNA sense strand
ggacagaaaagucaaguac

SEQ ID NO: 1283132 - RNA, 19 nt, Homo sapiens
  misc_RNA (1)...(19): siRNA sense strand
ggucuaucacgcccauuau

SEQ ID NO: 1283133 - RNA, 19 nt, Homo sapiens
  misc_RNA (1)...(19): siRNA sense strand
aaaaucacgugaaauccuu

SEQ ID NO: 1283134 - RNA, 19 nt, Homo sapiens
  misc_RNA (1)...(19): siRNA sense strand
gccaaaggugggaaagaga

SEQ ID NO: 1283135 - RNA, 19 nt, Homo sapiens
  misc_RNA (1)...(19): siRNA sense strand
cacgugaaauccuugaacu

SEQ ID NO: 1283136 - RNA, 19 nt, Homo sapiens
  misc_RNA (1)...(19): siRNA sense strand
aggagcauguugaggucua

SEQ ID NO: 1283137 - RNA, 19 nt, Homo sapiens
  misc_RNA (1)...(19): siRNA sense strand
ugccaaaggugggaaagag

SEQ ID NO: 1283138 - RNA, 19 nt, Homo sapiens
  misc_RNA (1)...(19): siRNA sense strand
uguccuccauggucauaga

SEQ ID NO: 1283139 - RNA, 19 nt, Homo sapiens
  misc_RNA (1)...(19): siRNA sense strand
gcuggacaccaccaucaug

SEQ ID NO: 1283140 - RNA, 19 nt, Homo sapiens
  misc_RNA (1)...(19): siRNA sense strand
ccgaucacaucaucauugc

SEQ ID NO: 1283141 - RNA, 19 nt, Homo sapiens
  misc_RNA (1)...(19): siRNA sense strand
gucagccgaucacaucauc

SEQ ID NO: 1283142 - RNA, 19 nt, Homo sapiens
  misc_RNA (1)...(19): siRNA sense strand
ucugauggacuacgacaau

SEQ ID NO: 1283143 - RNA, 19 nt, Homo sapiens
  misc_RNA (1)...(19): siRNA sense strand
cgaaguuacucaaggauuu

SEQ ID NO: 1283144 - RNA, 19 nt, Homo sapiens
  misc_RNA (1)...(19): siRNA sense strand
gaagauggcagaagcuguu

SEQ ID NO: 1283145 - RNA, 19 nt, Homo sapiens
  misc_RNA (1)...(19): siRNA sense strand
gaucacaucaucauugcua

SEQ ID NO: 1283146 - RNA, 19 nt, Homo sapiens
  misc_RNA (1)...(19): siRNA sense strand
gaaagagauucugcuguca

SEQ ID NO: 1283147 - RNA, 19 nt, Homo sapiens
  misc_RNA (1)...(19): siRNA sense strand
gagaugcaucccaguguua

SEQ ID NO: 1283148 - RNA, 19 nt, Homo sapiens
  misc_RNA (1)...(19): siRNA sense strand
gaauauggaaucacaagug

SEQ ID NO: 1283149 - RNA, 19 nt, Homo sapiens
  misc_RNA (1)...(19): siRNA sense strand
ccgcaugacuggaggaaga

SEQ ID NO: 1283150 - RNA, 19 nt, Homo sapiens
  misc_RNA (1)...(19): siRNA sense strand
gaaggaauccccuggaaaa

SEQ ID NO: 1283151 - RNA, 19 nt, Homo sapiens
  misc_RNA (1)...(19): siRNA sense strand
gcaucccaguguuauguaa

SEQ ID NO: 1283152 - RNA, 19 nt, Homo sapiens
  misc_RNA (1)...(19): siRNA sense strand
ggcagaagcuguucaaaau

SEQ ID NO: 1283153 - RNA, 19 nt, Homo sapiens
  misc_RNA (1)...(19): siRNA sense strand
gucaaguacuuuaacauca

SEQ ID NO: 1283154 - RNA, 19 nt, Homo sapiens
  misc_RNA (1)...(19): siRNA sense strand
cgagaugcaucccaguguu

SEQ ID NO: 1283155 - RNA, 19 nt, Homo sapiens
  misc_RNA (1)...(19): siRNA sense strand
ggaggacacgggcaccuuu

SEQ ID NO: 1283156 - RNA, 19 nt, Homo sapiens
  misc_RNA (1)...(19): siRNA sense strand
ccaguguuauguaaagaug

SEQ ID NO: 1283157 - RNA, 19 nt, Homo sapiens
  misc_RNA (1)...(19): siRNA sense strand
gaaguuacucaaggauuug

SEQ ID NO: 1283158 - RNA, 19 nt, Homo sapiens
  misc_RNA (1)...(19): siRNA sense strand
cacaugcucugaggaggua

SEQ ID NO: 1283159 - RNA, 19 nt, Homo sapiens
  misc_RNA (1)...(19): siRNA sense strand
caggucagcgggacuauga

SEQ ID NO: 1283160 - RNA, 19 nt, Homo sapiens
  misc_RNA (1)...(19): siRNA sense strand
uagagcacauggcaucuca

SEQ ID NO: 1283161 - RNA, 19 nt, Homo sapiens
  misc_RNA (1)...(19): siRNA sense strand
ucuaucacgcccauuauaa

SEQ ID NO: 1283162 - RNA, 19 nt, Homo sapiens
  misc_RNA (1)...(19): siRNA sense strand
ugggaggccugauccaaga

SEQ ID NO: 1283163 - RNA, 19 nt, Homo sapiens
  misc_RNA (1)...(19): siRNA sense strand
ggagaaggcugggguagau

SEQ ID NO: 1283164 - RNA, 19 nt, Homo sapiens
  misc_RNA (1)...(19): siRNA sense strand
gaagucugaauuuggagaa

SEQ ID NO: 1283165 - RNA, 19 nt, Homo sapiens
  misc_RNA (1)...(19): siRNA sense strand
gauggacuacgacaauguu

SEQ ID NO: 1283166 - RNA, 19 nt, Homo sapiens
  misc_RNA (1)...(19): siRNA sense strand
cagaagcuguucaaaauca

SEQ ID NO: 1283167 - RNA, 19 nt, Homo sapiens
  misc_RNA (1)...(19): siRNA sense strand
gacaggcugcugaggguaa

SEQ ID NO: 1283168 - RNA, 19 nt, Homo sapiens
  misc_RNA (1)...(19): siRNA sense strand
caaaggugggaaagagauu

SEQ ID NO: 1283169 - RNA, 19 nt, Homo sapiens
  misc_RNA (1)...(19): siRNA sense strand
gcgaaguuacucaaggauu

SEQ ID NO: 1283170 - RNA, 19 nt, Homo sapiens
  misc_RNA (1)...(19): siRNA sense strand
gccgaucacaucaucauug

SEQ ID NO: 1283171 - RNA, 19 nt, Homo sapiens
  misc_RNA (1)...(19): siRNA sense strand
caacgcaggcgaaguuacu

SEQ ID NO: 1283172 - RNA, 19 nt, Homo sapiens
  misc_RNA (1)...(19): siRNA sense strand
ggagcauguugaggucuau

SEQ ID NO: 1283173 - RNA, 19 nt, Homo sapiens
  misc_RNA (1)...(19): siRNA sense strand
cuaucacgcccauuauaaa

SEQ ID NO: 1283174 - RNA, 19 nt, Homo sapiens
  misc_RNA (1)...(19): siRNA sense strand
cacgguggcuggacgagau

SEQ ID NO: 1283175 - RNA, 19 nt, Homo sapiens
  misc_RNA (1)...(19): siRNA sense strand
gcucugaggagguagucaa

SEQ ID NO: 1283176 - RNA, 19 nt, Homo sapiens
  misc_RNA (1)...(19): siRNA sense strand
gauggcagaagcuguucaa

SEQ ID NO: 1283177 - RNA, 19 nt, Homo sapiens
  misc_RNA (1)...(19): siRNA sense strand
ucacgcccauuauaaacca

SEQ ID NO: 1283178 - RNA, 19 nt, Homo sapiens
  misc_RNA (1)...(19): siRNA sense strand
cagaucugauggacuacga

SEQ ID NO: 1283179 - RNA, 19 nt, Homo sapiens
  misc_RNA (1)...(19): siRNA sense strand
cuuggaauauggaaucaca

SEQ ID NO: 1283180 - RNA, 19 nt, Homo sapiens
  misc_RNA (1)...(19): siRNA sense strand
ccaaaggugggaaagagau

SEQ ID NO: 1283181 - RNA, 19 nt, Homo sapiens
  misc_RNA (1)...(19): siRNA sense strand
ggaauauggaaucacaagu

SEQ ID NO: 1283182 - RNA, 19 nt, Homo sapiens
  misc_RNA (1)...(19): siRNA sense strand
aggcgaaguuacucaagga

SEQ ID NO: 1283183 - RNA, 19 nt, Homo sapiens
  misc_RNA (1)...(19): siRNA sense strand
gggcuggacaccaccauca

SEQ ID NO: 1283184 - RNA, 19 nt, Homo sapiens
  misc_RNA (1)...(19): siRNA sense strand
gaggacacgggcaccuuug

SEQ ID NO: 1283185 - RNA, 19 nt, Homo sapiens
  misc_RNA (1)...(19): siRNA sense strand
gucuaucacgcccauuaua

SEQ ID NO: 1283186 - RNA, 19 nt, Homo sapiens
  misc_RNA (1)...(19): siRNA sense strand
ccacaucuacgccauuggu

SEQ ID NO: 1283187 - RNA, 19 nt, Homo sapiens
  misc_RNA (1)...(19): siRNA sense strand
ggacagaaaagucaaguac

SEQ ID NO: 1283188 - RNA, 19 nt, Homo sapiens
  misc_RNA (1)...(19): siRNA sense strand
ggucuaucacgcccauuau

SEQ ID NO: 1283189 - RNA, 19 nt, Homo sapiens
  misc_RNA (1)...(19): siRNA sense strand
aaaaucacgugaaauccuu

SEQ ID NO: 1283190 - RNA, 19 nt, Homo sapiens
  misc_RNA (1)...(19): siRNA sense strand
cacgugaaauccuugaacu

SEQ ID NO: 1283191 - RNA, 19 nt, Homo sapiens
  misc_RNA (1)...(19): siRNA sense strand
aggagcauguugaggucua

SEQ ID NO: 1283192 - RNA, 19 nt, Homo sapiens
  misc_RNA (1)...(19): siRNA sense strand
ggacuacguggaaccuucu

SEQ ID NO: 1283193 - RNA, 19 nt, Homo sapiens
  misc_RNA (1)...(19): siRNA sense strand
gccaaaggugggaaagaga

SEQ ID NO: 1283194 - RNA, 19 nt, Homo sapiens
  misc_RNA (1)...(19): siRNA sense strand
ugccaaaggugggaaagag

SEQ ID NO: 1283195 - RNA, 19 nt, Homo sapiens
  misc_RNA (1)...(19): siRNA sense strand
uguccuccauggucauaga

SEQ ID NO: 1283196 - RNA, 19 nt, Homo sapiens
  misc_RNA (1)...(19): siRNA sense strand
gcuggacaccaccaucaug

SEQ ID NO: 1283197 - RNA, 19 nt, Homo sapiens
  misc_RNA (1)...(19): siRNA sense strand
ccgaucacaucaucauugc

SEQ ID NO: 1283198 - RNA, 19 nt, Homo sapiens
  misc_RNA (1)...(19): siRNA sense strand
gucagccgaucacaucauc

SEQ ID NO: 1283199 - RNA, 19 nt, Homo sapiens
  misc_RNA (1)...(19): siRNA sense strand
ggucagcgggacuaugauc

SEQ ID NO: 1283200 - RNA, 19 nt, Homo sapiens
  misc_RNA (1)...(19): siRNA sense strand
ucugauggacuacgacaau

SEQ ID NO: 1283201 - RNA, 19 nt, Homo sapiens
  misc_RNA (1)...(19): siRNA sense strand
cgaaguuacucaaggauuu

SEQ ID NO: 1283202 - RNA, 19 nt, Homo sapiens
  misc_RNA (1)...(19): siRNA sense strand
gaagauggcagaagcuguu

SEQ ID NO: 1283203 - RNA, 19 nt, Homo sapiens
  misc_RNA (1)...(19): siRNA sense strand
gaucacaucaucauugcua

SEQ ID NO: 1283204 - RNA, 19 nt, Homo sapiens
  misc_RNA (1)...(19): siRNA sense strand
gaaagagauucugcuguca

SEQ ID NO: 1283205 - RNA, 19 nt, Homo sapiens
  misc_RNA (1)...(19): siRNA sense strand
gagaugcaucccaguguua

SEQ ID NO: 1283206 - RNA, 19 nt, Homo sapiens
  misc_RNA (1)...(19): siRNA sense strand
gaauauggaaucacaagug

SEQ ID NO: 1283207 - RNA, 19 nt, Homo sapiens
  misc_RNA (1)...(19): siRNA sense strand
ccgcaugacuggaggaaga

SEQ ID NO: 1283208 - RNA, 19 nt, Homo sapiens
  misc_RNA (1)...(19): siRNA sense strand
gaaggaauccccuggaaaa

SEQ ID NO: 1283209 - RNA, 19 nt, Homo sapiens
  misc_RNA (1)...(19): siRNA sense strand
gcaucccaguguuauguaa

SEQ ID NO: 1283210 - RNA, 19 nt, Homo sapiens
  misc_RNA (1)...(19): siRNA sense strand
ggcagaagcuguucaaaau

SEQ ID NO: 1283211 - RNA, 19 nt, Homo sapiens
  misc_RNA (1)...(19): siRNA sense strand
gucaaguacuuuaacauca

SEQ ID NO: 1283212 - RNA, 19 nt, Homo sapiens
  misc_RNA (1)...(19): siRNA sense strand
cgagaugcaucccaguguu

SEQ ID NO: 1283213 - RNA, 19 nt, Homo sapiens
  misc_RNA (1)...(19): siRNA sense strand
ggaggacacgggcaccuuu

SEQ ID NO: 1283214 - RNA, 19 nt, Homo sapiens
  misc_RNA (1)...(19): siRNA sense strand
ccaguguuauguaaagaug

SEQ ID NO: 1283215 - RNA, 19 nt, Homo sapiens
  misc_RNA (1)...(19): siRNA sense strand
gaaguuacucaaggauuug

SEQ ID NO: 1283216 - RNA, 19 nt, Homo sapiens
  misc_RNA (1)...(19): siRNA sense strand
cacaugcucugaggaggua

SEQ ID NO: 1283217 - RNA, 19 nt, Homo sapiens
  misc_RNA (1)...(19): siRNA sense strand
caggucagcgggacuauga

SEQ ID NO: 1283218 - RNA, 19 nt, Homo sapiens
  misc_RNA (1)...(19): siRNA sense strand
uagagcacauggcaucuca

SEQ ID NO: 1283219 - RNA, 19 nt, Homo sapiens
  misc_RNA (1)...(19): siRNA sense strand
ucuaucacgcccauuauaa

SEQ ID NO: 1283220 - RNA, 19 nt, Homo sapiens
  misc_RNA (1)...(19): siRNA sense strand
ugggaggccugauccaaga

SEQ ID NO: 1283221 - RNA, 19 nt, Homo sapiens
  misc_RNA (1)...(19): siRNA sense strand
ggagaaggcugggguagau

SEQ ID NO: 1283222 - RNA, 19 nt, Homo sapiens
  misc_RNA (1)...(19): siRNA sense strand
gaagucugaauuuggagaa

SEQ ID NO: 1283223 - RNA, 19 nt, Homo sapiens
  misc_RNA (1)...(19): siRNA sense strand
gauggacuacgacaauguu

SEQ ID NO: 1283224 - RNA, 19 nt, Homo sapiens
  misc_RNA (1)...(19): siRNA sense strand
cagaagcuguucaaaauca

SEQ ID NO: 1283225 - RNA, 19 nt, Homo sapiens
  misc_RNA (1)...(19): siRNA sense strand
gacaggcugcugaggguaa

SEQ ID NO: 1283226 - RNA, 19 nt, Homo sapiens
  misc_RNA (1)...(19): siRNA sense strand
caaaggugggaaagagauu

SEQ ID NO: 1283227 - RNA, 19 nt, Homo sapiens
  misc_RNA (1)...(19): siRNA sense strand
gcgaaguuacucaaggauu

SEQ ID NO: 1283228 - RNA, 19 nt, Homo sapiens
  misc_RNA (1)...(19): siRNA sense strand
gccgaucacaucaucauug

SEQ ID NO: 1283229 - RNA, 19 nt, Homo sapiens
  misc_RNA (1)...(19): siRNA sense strand
caacgcaggcgaaguuacu

SEQ ID NO: 1283230 - RNA, 19 nt, Homo sapiens
  misc_RNA (1)...(19): siRNA sense strand
ggagcauguugaggucuau

SEQ ID NO: 1283231 - RNA, 19 nt, Homo sapiens
  misc_RNA (1)...(19): siRNA sense strand
cuaucacgcccauuauaaa

SEQ ID NO: 1283232 - RNA, 19 nt, Homo sapiens
  misc_RNA (1)...(19): siRNA sense strand
cacgguggcuggacgagau

SEQ ID NO: 1283233 - RNA, 19 nt, Homo sapiens
  misc_RNA (1)...(19): siRNA sense strand
gcucugaggagguagucaa

SEQ ID NO: 1283234 - RNA, 19 nt, Homo sapiens
  misc_RNA (1)...(19): siRNA sense strand
gauggcagaagcuguucaa

SEQ ID NO: 1283235 - RNA, 19 nt, Homo sapiens
  misc_RNA (1)...(19): siRNA sense strand
ucacgcccauuauaaacca

SEQ ID NO: 1283236 - RNA, 19 nt, Homo sapiens
  misc_RNA (1)...(19): siRNA sense strand
cagaucugauggacuacga

SEQ ID NO: 1283237 - RNA, 19 nt, Homo sapiens
  misc_RNA (1)...(19): siRNA sense strand
cuuggaauauggaaucaca

SEQ ID NO: 1283238 - RNA, 19 nt, Homo sapiens
  misc_RNA (1)...(19): siRNA sense strand
ccaaaggugggaaagagau

SEQ ID NO: 1283239 - RNA, 19 nt, Homo sapiens
  misc_RNA (1)...(19): siRNA sense strand
ggaauauggaaucacaagu

SEQ ID NO: 1283240 - RNA, 19 nt, Homo sapiens
  misc_RNA (1)...(19): siRNA sense strand
aggcgaaguuacucaagga

SEQ ID NO: 1283241 - RNA, 19 nt, Homo sapiens
  misc_RNA (1)...(19): siRNA sense strand
gggcuggacaccaccauca

SEQ ID NO: 1283242 - RNA, 19 nt, Homo sapiens
  misc_RNA (1)...(19): siRNA sense strand
gaggacacgggcaccuuug

SEQ ID NO: 1283243 - RNA, 19 nt, Homo sapiens
  misc_RNA (1)...(19): siRNA sense strand
gucuaucacgcccauuaua

SEQ ID NO: 1283244 - RNA, 19 nt, Homo sapiens
  misc_RNA (1)...(19): siRNA sense strand
ccacaucuacgccauuggu

SEQ ID NO: 1283245 - RNA, 19 nt, Homo sapiens
  misc_RNA (1)...(19): siRNA sense strand
ggacagaaaagucaaguac

SEQ ID NO: 1283246 - RNA, 19 nt, Homo sapiens
  misc_RNA (1)...(19): siRNA sense strand
ggucuaucacgcccauuau

SEQ ID NO: 1283247 - RNA, 19 nt, Homo sapiens
  misc_RNA (1)...(19): siRNA sense strand
aaaaucacgugaaauccuu

SEQ ID NO: 1283248 - RNA, 19 nt, Homo sapiens
  misc_RNA (1)...(19): siRNA sense strand
cacgugaaauccuugaacu

SEQ ID NO: 1283249 - RNA, 19 nt, Homo sapiens
  misc_RNA (1)...(19): siRNA sense strand
aggagcauguugaggucua

SEQ ID NO: 1283250 - RNA, 19 nt, Homo sapiens
  misc_RNA (1)...(19): siRNA sense strand
ggacuacguggaaccuucu

SEQ ID NO: 1283251 - RNA, 19 nt, Homo sapiens
  misc_RNA (1)...(19): siRNA sense strand
gccaaaggugggaaagaga

SEQ ID NO: 1283252 - RNA, 19 nt, Homo sapiens
  misc_RNA (1)...(19): siRNA sense strand
ugccaaaggugggaaagag

SEQ ID NO: 1283253 - RNA, 19 nt, Homo sapiens
  misc_RNA (1)...(19): siRNA sense strand
uguccuccauggucauaga

SEQ ID NO: 1283254 - RNA, 19 nt, Homo sapiens
  misc_RNA (1)...(19): siRNA sense strand
gcuggacaccaccaucaug

SEQ ID NO: 1283255 - RNA, 19 nt, Homo sapiens
  misc_RNA (1)...(19): siRNA sense strand
ccgaucacaucaucauugc

SEQ ID NO: 1283256 - RNA, 19 nt, Homo sapiens
  misc_RNA (1)...(19): siRNA sense strand
gucagccgaucacaucauc

SEQ ID NO: 1283257 - RNA, 19 nt, Homo sapiens
  misc_RNA (1)...(19): siRNA sense strand
ggucagcgggacuaugauc

SEQ ID NO: 1283258 - RNA, 19 nt, Homo sapiens
  misc_RNA (1)...(19): siRNA sense strand
ucugauggacuacgacaau

SEQ ID NO: 1283259 - RNA, 19 nt, Homo sapiens
  misc_RNA (1)...(19): siRNA sense strand
cgaaguuacucaaggauuu

SEQ ID NO: 1283260 - RNA, 19 nt, Homo sapiens
  misc_RNA (1)...(19): siRNA sense strand
gaagauggcagaagcuguu

SEQ ID NO: 1283261 - RNA, 19 nt, Homo sapiens
  misc_RNA (1)...(19): siRNA sense strand
gaucacaucaucauugcua

SEQ ID NO: 1283262 - RNA, 19 nt, Homo sapiens
  misc_RNA (1)...(19): siRNA sense strand
gaaagagauucugcuguca

SEQ ID NO: 1283263 - RNA, 19 nt, Homo sapiens
  misc_RNA (1)...(19): siRNA sense strand
gagaugcaucccaguguua

SEQ ID NO: 1283264 - RNA, 19 nt, Homo sapiens
  misc_RNA (1)...(19): siRNA sense strand
gaauauggaaucacaagug

SEQ ID NO: 1283265 - RNA, 19 nt, Homo sapiens
  misc_RNA (1)...(19): siRNA sense strand
ccgcaugacuggaggaaga

SEQ ID NO: 1283266 - RNA, 19 nt, Homo sapiens
  misc_RNA (1)...(19): siRNA sense strand
gaaggaauccccuggaaaa

SEQ ID NO: 1283267 - RNA, 19 nt, Homo sapiens
  misc_RNA (1)...(19): siRNA sense strand
gcaucccaguguuauguaa

SEQ ID NO: 1283268 - RNA, 19 nt, Homo sapiens
  misc_RNA (1)...(19): siRNA sense strand
ggcagaagcuguucaaaau

SEQ ID NO: 1283269 - RNA, 19 nt, Homo sapiens
  misc_RNA (1)...(19): siRNA sense strand
gucaaguacuuuaacauca

SEQ ID NO: 1283270 - RNA, 19 nt, Homo sapiens
  misc_RNA (1)...(19): siRNA sense strand
cgagaugcaucccaguguu

SEQ ID NO: 1283271 - RNA, 19 nt, Homo sapiens
  misc_RNA (1)...(19): siRNA sense strand
ggaggacacgggcaccuuu

SEQ ID NO: 1283272 - RNA, 19 nt, Homo sapiens
  misc_RNA (1)...(19): siRNA sense strand
ccaguguuauguaaagaug

SEQ ID NO: 1283273 - RNA, 19 nt, Homo sapiens
  misc_RNA (1)...(19): siRNA sense strand
gaaguuacucaaggauuug

SEQ ID NO: 1283274 - RNA, 19 nt, Homo sapiens
  misc_RNA (1)...(19): siRNA sense strand
cacaugcucugaggaggua

SEQ ID NO: 1283275 - RNA, 19 nt, Homo sapiens
  misc_RNA (1)...(19): siRNA sense strand
uagagcacauggcaucuca

SEQ ID NO: 1283276 - RNA, 19 nt, Homo sapiens
  misc_RNA (1)...(19): siRNA sense strand
ucuaucacgcccauuauaa

SEQ ID NO: 1283277 - RNA, 19 nt, Homo sapiens
  misc_RNA (1)...(19): siRNA sense strand
gaagucugaauuuggagaa

SEQ ID NO: 1283278 - RNA, 19 nt, Homo sapiens
  misc_RNA (1)...(19): siRNA sense strand
ugggaggccugauccaaga

SEQ ID NO: 1283279 - RNA, 19 nt, Homo sapiens
  misc_RNA (1)...(19): siRNA sense strand
ggagaaggcugggguagau

SEQ ID NO: 1283280 - RNA, 19 nt, Homo sapiens
  misc_RNA (1)...(19): siRNA sense strand
gauggacuacgacaauguu

SEQ ID NO: 1283281 - RNA, 19 nt, Homo sapiens
  misc_RNA (1)...(19): siRNA sense strand
cagaagcuguucaaaauca

SEQ ID NO: 1283282 - RNA, 19 nt, Homo sapiens
  misc_RNA (1)...(19): siRNA sense strand
gacaggcugcugaggguaa

SEQ ID NO: 1283283 - RNA, 19 nt, Homo sapiens
  misc_RNA (1)...(19): siRNA sense strand
caaaggugggaaagagauu

SEQ ID NO: 1283284 - RNA, 19 nt, Homo sapiens
  misc_RNA (1)...(19): siRNA sense strand
gcgaaguuacucaaggauu

SEQ ID NO: 1283285 - RNA, 19 nt, Homo sapiens
  misc_RNA (1)...(19): siRNA sense strand
gccgaucacaucaucauug

SEQ ID NO: 1283286 - RNA, 19 nt, Homo sapiens
  misc_RNA (1)...(19): siRNA sense strand
caacgcaggcgaaguuacu

SEQ ID NO: 1283287 - RNA, 19 nt, Homo sapiens
  misc_RNA (1)...(19): siRNA sense strand
ggagcauguugaggucuau

SEQ ID NO: 1283288 - RNA, 19 nt, Homo sapiens
  misc_RNA (1)...(19): siRNA sense strand
cuaucacgcccauuauaaa

SEQ ID NO: 1283289 - RNA, 19 nt, Homo sapiens
  misc_RNA (1)...(19): siRNA sense strand
cacgguggcuggacgagau

SEQ ID NO: 1283290 - RNA, 19 nt, Homo sapiens
  misc_RNA (1)...(19): siRNA sense strand
gcucugaggagguagucaa

SEQ ID NO: 1283291 - RNA, 19 nt, Homo sapiens
  misc_RNA (1)...(19): siRNA sense strand
ccaaaggugggaaagagau

SEQ ID NO: 1283292 - RNA, 19 nt, Homo sapiens
  misc_RNA (1)...(19): siRNA sense strand
ucacgcccauuauaaacca

SEQ ID NO: 1283293 - RNA, 19 nt, Homo sapiens
  misc_RNA (1)...(19): siRNA sense strand
cagaucugauggacuacga

SEQ ID NO: 1283294 - RNA, 19 nt, Homo sapiens
  misc_RNA (1)...(19): siRNA sense strand
gauggcagaagcuguucaa

SEQ ID NO: 1283295 - RNA, 19 nt, Homo sapiens
  misc_RNA (1)...(19): siRNA sense strand
cuuggaauauggaaucaca

SEQ ID NO: 1283296 - RNA, 19 nt, Homo sapiens
  misc_RNA (1)...(19): siRNA sense strand
ggaauauggaaucacaagu

SEQ ID NO: 1283297 - RNA, 19 nt, Homo sapiens
  misc_RNA (1)...(19): siRNA sense strand
aggcgaaguuacucaagga

SEQ ID NO: 1283298 - RNA, 19 nt, Homo sapiens
  misc_RNA (1)...(19): siRNA sense strand
gggcuggacaccaccauca

SEQ ID NO: 1283299 - RNA, 19 nt, Homo sapiens
  misc_RNA (1)...(19): siRNA sense strand
gaggacacgggcaccuuug

SEQ ID NO: 1283300 - RNA, 19 nt, Homo sapiens
  misc_RNA (1)...(19): siRNA sense strand
gucuaucacgcccauuaua

SEQ ID NO: 1283301 - RNA, 19 nt, Homo sapiens
  misc_RNA (1)...(19): siRNA sense strand
ccacaucuacgccauuggu

SEQ ID NO: 1283302 - RNA, 19 nt, Homo sapiens
  misc_RNA (1)...(19): siRNA sense strand
ggacagaaaagucaaguac

SEQ ID NO: 1283303 - RNA, 19 nt, Homo sapiens
  misc_RNA (1)...(19): siRNA sense strand
ggucuaucacgcccauuau

SEQ ID NO: 1283304 - RNA, 19 nt, Homo sapiens
  misc_RNA (1)...(19): siRNA sense strand
aaaaucacgugaaauccuu

SEQ ID NO: 1283305 - RNA, 19 nt, Homo sapiens
  misc_RNA (1)...(19): siRNA sense strand
gccaaaggugggaaagaga

SEQ ID NO: 1283306 - RNA, 19 nt, Homo sapiens
  misc_RNA (1)...(19): siRNA sense strand
cacgugaaauccuugaacu

SEQ ID NO: 1283307 - RNA, 19 nt, Homo sapiens
  misc_RNA (1)...(19): siRNA sense strand
aggagcauguugaggucua

SEQ ID NO: 1283308 - RNA, 19 nt, Homo sapiens
  misc_RNA (1)...(19): siRNA sense strand
ugccaaaggugggaaagag

SEQ ID NO: 1283309 - RNA, 19 nt, Homo sapiens
  misc_RNA (1)...(19): siRNA sense strand
uguccuccauggucauaga

SEQ ID NO: 1283310 - RNA, 19 nt, Homo sapiens
  misc_RNA (1)...(19): siRNA sense strand
gcuggacaccaccaucaug

SEQ ID NO: 1283311 - RNA, 19 nt, Homo sapiens
  misc_RNA (1)...(19): siRNA sense strand
ccgaucacaucaucauugc

SEQ ID NO: 1283312 - RNA, 19 nt, Homo sapiens
  misc_RNA (1)...(19): siRNA sense strand
gucagccgaucacaucauc

SEQ ID NO: 1283313 - RNA, 19 nt, Homo sapiens
  misc_RNA (1)...(19): siRNA sense strand
ucugauggacuacgacaau

SEQ ID NO: 1283314 - RNA, 19 nt, Homo sapiens
  misc_RNA (1)...(19): siRNA sense strand
cgaaguuacucaaggauuu

SEQ ID NO: 1283315 - RNA, 19 nt, Homo sapiens
  misc_RNA (1)...(19): siRNA sense strand
gaagauggcagaagcuguu

SEQ ID NO: 1283316 - RNA, 19 nt, Homo sapiens
  misc_RNA (1)...(19): siRNA sense strand
gaucacaucaucauugcua

SEQ ID NO: 1283317 - RNA, 19 nt, Homo sapiens
  misc_RNA (1)...(19): siRNA sense strand
gaaagagauucugcuguca

SEQ ID NO: 1283318 - RNA, 19 nt, Homo sapiens
  misc_RNA (1)...(19): siRNA sense strand
gagaugcaucccaguguua

SEQ ID NO: 1283319 - RNA, 19 nt, Homo sapiens
  misc_RNA (1)...(19): siRNA sense strand
gaauauggaaucacaagug

SEQ ID NO: 1283320 - RNA, 19 nt, Homo sapiens
  misc_RNA (1)...(19): siRNA sense strand
ccgcaugacuggaggaaga

SEQ ID NO: 1283321 - RNA, 19 nt, Homo sapiens
  misc_RNA (1)...(19): siRNA sense strand
gaaggaauccccuggaaaa

SEQ ID NO: 1283322 - RNA, 19 nt, Homo sapiens
  misc_RNA (1)...(19): siRNA sense strand
gcaucccaguguuauguaa

SEQ ID NO: 1283323 - RNA, 19 nt, Homo sapiens
  misc_RNA (1)...(19): siRNA sense strand
ggcagaagcuguucaaaau

SEQ ID NO: 1283324 - RNA, 19 nt, Homo sapiens
  misc_RNA (1)...(19): siRNA sense strand
gucaaguacuuuaacauca

SEQ ID NO: 1283325 - RNA, 19 nt, Homo sapiens
  misc_RNA (1)...(19): siRNA sense strand
cgagaugcaucccaguguu

SEQ ID NO: 1283326 - RNA, 19 nt, Homo sapiens
  misc_RNA (1)...(19): siRNA sense strand
ggaggacacgggcaccuuu

SEQ ID NO: 1283327 - RNA, 19 nt, Homo sapiens
  misc_RNA (1)...(19): siRNA sense strand
ccaguguuauguaaagaug

SEQ ID NO: 1283328 - RNA, 19 nt, Homo sapiens
  misc_RNA (1)...(19): siRNA sense strand
gaaguuacucaaggauuug

SEQ ID NO: 1283329 - RNA, 19 nt, Homo sapiens
  misc_RNA (1)...(19): siRNA sense strand
cacaugcucugaggaggua

SEQ ID NO: 1283330 - RNA, 19 nt, Homo sapiens
  misc_RNA (1)...(19): siRNA sense strand
caggucagcgggacuauga

SEQ ID NO: 1283331 - RNA, 19 nt, Homo sapiens
  misc_RNA (1)...(19): siRNA sense strand
uagagcacauggcaucuca

SEQ ID NO: 1283332 - RNA, 19 nt, Homo sapiens
  misc_RNA (1)...(19): siRNA sense strand
ucuaucacgcccauuauaa

SEQ ID NO: 1283333 - RNA, 19 nt, Homo sapiens
  misc_RNA (1)...(19): siRNA sense strand
ugggaggccugauccaaga

SEQ ID NO: 1283334 - RNA, 19 nt, Homo sapiens
  misc_RNA (1)...(19): siRNA sense strand
ggagaaggcugggguagau

SEQ ID NO: 1283335 - RNA, 19 nt, Homo sapiens
  misc_RNA (1)...(19): siRNA sense strand
gaagucugaauuuggagaa

SEQ ID NO: 1283336 - RNA, 19 nt, Homo sapiens
  misc_RNA (1)...(19): siRNA sense strand
gauggacuacgacaauguu

SEQ ID NO: 1283337 - RNA, 19 nt, Homo sapiens
  misc_RNA (1)...(19): siRNA sense strand
cagaagcuguucaaaauca

SEQ ID NO: 1283338 - RNA, 19 nt, Homo sapiens
  misc_RNA (1)...(19): siRNA sense strand
gacaggcugcugaggguaa

SEQ ID NO: 1283339 - RNA, 19 nt, Homo sapiens
  misc_RNA (1)...(19): siRNA sense strand
caaaggugggaaagagauu

SEQ ID NO: 1283340 - RNA, 19 nt, Homo sapiens
  misc_RNA (1)...(19): siRNA sense strand
gcgaaguuacucaaggauu

SEQ ID NO: 1283341 - RNA, 19 nt, Homo sapiens
  misc_RNA (1)...(19): siRNA sense strand
gccgaucacaucaucauug

SEQ ID NO: 1283342 - RNA, 19 nt, Homo sapiens
  misc_RNA (1)...(19): siRNA sense strand
caacgcaggcgaaguuacu

SEQ ID NO: 1283343 - RNA, 19 nt, Homo sapiens
  misc_RNA (1)...(19): siRNA sense strand
ggagcauguugaggucuau

SEQ ID NO: 1283344 - RNA, 19 nt, Homo sapiens
  misc_RNA (1)...(19): siRNA sense strand
cuaucacgcccauuauaaa

SEQ ID NO: 1283345 - RNA, 19 nt, Homo sapiens
  misc_RNA (1)...(19): siRNA sense strand
cacgguggcuggacgagau

SEQ ID NO: 1283346 - RNA, 19 nt, Homo sapiens
  misc_RNA (1)...(19): siRNA sense strand
gcucugaggagguagucaa

SEQ ID NO: 1283347 - RNA, 19 nt, Homo sapiens
  misc_RNA (1)...(19): siRNA sense strand
gauggcagaagcuguucaa

SEQ ID NO: 1283348 - RNA, 19 nt, Homo sapiens
  misc_RNA (1)...(19): siRNA sense strand
ucacgcccauuauaaacca

SEQ ID NO: 1283349 - RNA, 19 nt, Homo sapiens
  misc_RNA (1)...(19): siRNA sense strand
cagaucugauggacuacga

SEQ ID NO: 1283350 - RNA, 19 nt, Homo sapiens
  misc_RNA (1)...(19): siRNA sense strand
cuuggaauauggaaucaca

SEQ ID NO: 1283351 - RNA, 19 nt, Homo sapiens
  misc_RNA (1)...(19): siRNA sense strand
ccaaaggugggaaagagau

SEQ ID NO: 1283352 - RNA, 19 nt, Homo sapiens
  misc_RNA (1)...(19): siRNA sense strand
ggaauauggaaucacaagu

SEQ ID NO: 1283353 - RNA, 19 nt, Homo sapiens
  misc_RNA (1)...(19): siRNA sense strand
aggcgaaguuacucaagga

SEQ ID NO: 1283354 - RNA, 19 nt, Homo sapiens
  misc_RNA (1)...(19): siRNA sense strand
gggcuggacaccaccauca

SEQ ID NO: 1283355 - RNA, 19 nt, Homo sapiens
  misc_RNA (1)...(19): siRNA sense strand
gaggacacgggcaccuuug

SEQ ID NO: 1283356 - RNA, 19 nt, Homo sapiens
  misc_RNA (1)...(19): siRNA sense strand
gucuaucacgcccauuaua

SEQ ID NO: 1283357 - RNA, 19 nt, Homo sapiens
  misc_RNA (1)...(19): siRNA sense strand
ccacaucuacgccauuggu

SEQ ID NO: 1283358 - RNA, 19 nt, Homo sapiens
  misc_RNA (1)...(19): siRNA sense strand
ggacagaaaagucaaguac

SEQ ID NO: 1283359 - RNA, 19 nt, Homo sapiens
  misc_RNA (1)...(19): siRNA sense strand
ggucuaucacgcccauuau

SEQ ID NO: 1283360 - RNA, 19 nt, Homo sapiens
  misc_RNA (1)...(19): siRNA sense strand
aaaaucacgugaaauccuu

SEQ ID NO: 1283361 - RNA, 19 nt, Homo sapiens
  misc_RNA (1)...(19): siRNA sense strand
cacgugaaauccuugaacu

SEQ ID NO: 1283362 - RNA, 19 nt, Homo sapiens
  misc_RNA (1)...(19): siRNA sense strand
aggagcauguugaggucua

SEQ ID NO: 1283363 - RNA, 19 nt, Homo sapiens
  misc_RNA (1)...(19): siRNA sense strand
ggacuacguggaaccuucu

SEQ ID NO: 1283364 - RNA, 19 nt, Homo sapiens
  misc_RNA (1)...(19): siRNA sense strand
gccaaaggugggaaagaga

SEQ ID NO: 1283365 - RNA, 19 nt, Homo sapiens
  misc_RNA (1)...(19): siRNA sense strand
ugccaaaggugggaaagag

SEQ ID NO: 1283366 - RNA, 19 nt, Homo sapiens
  misc_RNA (1)...(19): siRNA sense strand
uguccuccauggucauaga

SEQ ID NO: 1283367 - RNA, 19 nt, Homo sapiens
  misc_RNA (1)...(19): siRNA sense strand
gcuggacaccaccaucaug

SEQ ID NO: 1283368 - RNA, 19 nt, Homo sapiens
  misc_RNA (1)...(19): siRNA sense strand
ccgaucacaucaucauugc

SEQ ID NO: 1283369 - RNA, 19 nt, Homo sapiens
  misc_RNA (1)...(19): siRNA sense strand
gucagccgaucacaucauc

SEQ ID NO: 1283370 - RNA, 19 nt, Homo sapiens
  misc_RNA (1)...(19): siRNA sense strand
ggucagcgggacuaugauc

SEQ ID NO: 1283371 - RNA, 19 nt, Homo sapiens
  misc_RNA (1)...(19): siRNA sense strand
ucugauggacuacgacaau

SEQ ID NO: 1283372 - RNA, 19 nt, Homo sapiens
  misc_RNA (1)...(19): siRNA sense strand
gaacaagcauccaaagaga

SEQ ID NO: 1283373 - RNA, 19 nt, Homo sapiens
  misc_RNA (1)...(19): siRNA sense strand
guagauggcuugaauuuua

SEQ ID NO: 1283374 - RNA, 19 nt, Homo sapiens
  misc_RNA (1)...(19): siRNA sense strand
gaaaguggacccagugauu

SEQ ID NO: 1283375 - RNA, 19 nt, Homo sapiens
  misc_RNA (1)...(19): siRNA sense strand
gaaugugaaugaccucuug

SEQ ID NO: 1283376 - RNA, 19 nt, Homo sapiens
  misc_RNA (1)...(19): siRNA sense strand
gcacguacuucucccauca

SEQ ID NO: 1283377 - RNA, 19 nt, Homo sapiens
  misc_RNA (1)...(19): siRNA sense strand
gaugugaguuggauaagga

SEQ ID NO: 1283378 - RNA, 19 nt, Homo sapiens
  misc_RNA (1)...(19): siRNA sense strand
ugaaugaccucuugaagca

SEQ ID NO: 1283379 - RNA, 19 nt, Homo sapiens
  misc_RNA (1)...(19): siRNA sense strand
caggagacgugucaacauu

SEQ ID NO: 1283380 - RNA, 19 nt, Homo sapiens
  misc_RNA (1)...(19): siRNA sense strand
ugagguuucuuaccaaauu

SEQ ID NO: 1283381 - RNA, 19 nt, Homo sapiens
  misc_RNA (1)...(19): siRNA sense strand
gugaagaacuugaaagacu

SEQ ID NO: 1283382 - RNA, 19 nt, Homo sapiens
  misc_RNA (1)...(19): siRNA sense strand
ucaaugcacucucuguaug

SEQ ID NO: 1283383 - RNA, 19 nt, Homo sapiens
  misc_RNA (1)...(19): siRNA sense strand
gagagugguuuggacauug

SEQ ID NO: 1283384 - RNA, 19 nt, Homo sapiens
  misc_RNA (1)...(19): siRNA sense strand
ugaagaacuugaaagacuu

SEQ ID NO: 1283385 - RNA, 19 nt, Homo sapiens
  misc_RNA (1)...(19): siRNA sense strand
gaaggugcuuuacguggau

SEQ ID NO: 1283386 - RNA, 19 nt, Homo sapiens
  misc_RNA (1)...(19): siRNA sense strand
ccacaggaucuuaguguuu

SEQ ID NO: 1283387 - RNA, 19 nt, Homo sapiens
  misc_RNA (1)...(19): siRNA sense strand
ggguuuagauguauacaca

SEQ ID NO: 1283388 - RNA, 19 nt, Homo sapiens
  misc_RNA (1)...(19): siRNA sense strand
guacaguaaugccuuugau

SEQ ID NO: 1283389 - RNA, 19 nt, Homo sapiens
  misc_RNA (1)...(19): siRNA sense strand
ccacucagccuuuaaccuu

SEQ ID NO: 1283390 - RNA, 19 nt, Homo sapiens
  misc_RNA (1)...(19): siRNA sense strand
guaaugccuuugauguguu

SEQ ID NO: 1283391 - RNA, 19 nt, Homo sapiens
  misc_RNA (1)...(19): siRNA sense strand
ccaaguagcacuaaauuuu

SEQ ID NO: 1283392 - RNA, 19 nt, Homo sapiens
  misc_RNA (1)...(19): siRNA sense strand
gcaguauucuaaccagcaa

SEQ ID NO: 1283393 - RNA, 19 nt, Homo sapiens
  misc_RNA (1)...(19): siRNA sense strand
ccaguacaguaaugccuuu

SEQ ID NO: 1283394 - RNA, 19 nt, Homo sapiens
  misc_RNA (1)...(19): siRNA sense strand
cagcaauuccagccuguua

SEQ ID NO: 1283395 - RNA, 19 nt, Homo sapiens
  misc_RNA (1)...(19): siRNA sense strand
gaaauccaaguagcacuaa

SEQ ID NO: 1283396 - RNA, 19 nt, Homo sapiens
  misc_RNA (1)...(19): siRNA sense strand
acucagccuuuaaccuuua

SEQ ID NO: 1283397 - RNA, 19 nt, Homo sapiens
  misc_RNA (1)...(19): siRNA sense strand
caaguucggcucuaccaaa

SEQ ID NO: 1283398 - RNA, 19 nt, Homo sapiens
  misc_RNA (1)...(19): siRNA sense strand
ggagacgugucaacauuuu

SEQ ID NO: 1283399 - RNA, 19 nt, Homo sapiens
  misc_RNA (1)...(19): siRNA sense strand
cacaggaucuuaguguuug

SEQ ID NO: 1283400 - RNA, 19 nt, Homo sapiens
  misc_RNA (1)...(19): siRNA sense strand
gaccagugaaggugcuuua

SEQ ID NO: 1283401 - RNA, 19 nt, Homo sapiens
  misc_RNA (1)...(19): siRNA sense strand
gcuuaaauaacaugcagua

SEQ ID NO: 1283402 - RNA, 19 nt, Homo sapiens
  misc_RNA (1)...(19): siRNA sense strand
gcuguaagcccuaccuuca

SEQ ID NO: 1283403 - RNA, 19 nt, Homo sapiens
  misc_RNA (1)...(19): siRNA sense strand
gaucgacccauuugagguu

SEQ ID NO: 1283404 - RNA, 19 nt, Homo sapiens
  misc_RNA (1)...(19): siRNA sense strand
gaaaagccauacaaaggau

SEQ ID NO: 1283405 - RNA, 19 nt, Homo sapiens
  misc_RNA (1)...(19): siRNA sense strand
gcaauuccagccuguuaug

SEQ ID NO: 1283406 - RNA, 19 nt, Homo sapiens
  misc_RNA (1)...(19): siRNA sense strand
gacccagccucaucagugu

SEQ ID NO: 1283407 - RNA, 19 nt, Homo sapiens
  misc_RNA (1)...(19): siRNA sense strand
uaaugccuuugauguguuu

SEQ ID NO: 1283408 - RNA, 19 nt, Homo sapiens
  misc_RNA (1)...(19): siRNA sense strand
gggcacugguauccugaaa

SEQ ID NO: 1283409 - RNA, 19 nt, Homo sapiens
  misc_RNA (1)...(19): siRNA sense strand
gagguuucuuaccaaauug

SEQ ID NO: 1283410 - RNA, 19 nt, Homo sapiens
  misc_RNA (1)...(19): siRNA sense strand
aaccucggcuugaauguga

SEQ ID NO: 1283411 - RNA, 19 nt, Homo sapiens
  misc_RNA (1)...(19): siRNA sense strand
uguaagcccuaccuucaug

SEQ ID NO: 1283412 - RNA, 19 nt, Homo sapiens
  misc_RNA (1)...(19): siRNA sense strand
ugaaauccaaguagcacua

SEQ ID NO: 1283413 - RNA, 19 nt, Homo sapiens
  misc_RNA (1)...(19): siRNA sense strand
cauuugagguuucuuacca

SEQ ID NO: 1283414 - RNA, 19 nt, Homo sapiens
  misc_RNA (1)...(19): siRNA sense strand
gagaaaguggacccaguga

SEQ ID NO: 1283415 - RNA, 19 nt, Homo sapiens
  misc_RNA (1)...(19): siRNA sense strand
gcacugguauccugaaaag

SEQ ID NO: 1283416 - RNA, 19 nt, Homo sapiens
  misc_RNA (1)...(19): siRNA sense strand
agagugguuuggacauuga

SEQ ID NO: 1283417 - RNA, 19 nt, Homo sapiens
  misc_RNA (1)...(19): siRNA sense strand
agagagugguuuggacauu

SEQ ID NO: 1283418 - RNA, 19 nt, Homo sapiens
  misc_RNA (1)...(19): siRNA sense strand
gccacaggaucuuaguguu

SEQ ID NO: 1283419 - RNA, 19 nt, Homo sapiens
  misc_RNA (1)...(19): siRNA sense strand
ugaacaagcauccaaagag

SEQ ID NO: 1283420 - RNA, 19 nt, Homo sapiens
  misc_RNA (1)...(19): siRNA sense strand
agccaucucuuccucaaug

SEQ ID NO: 1283421 - RNA, 19 nt, Homo sapiens
  misc_RNA (1)...(19): siRNA sense strand
aaagccaucucuuccucaa

SEQ ID NO: 1283422 - RNA, 19 nt, Homo sapiens
  misc_RNA (1)...(19): siRNA sense strand
guguuuggaucgacccauu

SEQ ID NO: 1283423 - RNA, 19 nt, Homo sapiens
  misc_RNA (1)...(19): siRNA sense strand
aguaaugccuuugaugugu

SEQ ID NO: 1283424 - RNA, 19 nt, Homo sapiens
  misc_RNA (1)...(19): siRNA sense strand
ugcuuuacguggaugauaa

SEQ ID NO: 1283425 - RNA, 19 nt, Homo sapiens
  misc_RNA (1)...(19): siRNA sense strand
gauugaacaagcauccaaa

SEQ ID NO: 1283426 - RNA, 19 nt, Homo sapiens
  misc_RNA (1)...(19): siRNA sense strand
ggaucgggguuuagaugua

SEQ ID NO: 1283427 - RNA, 19 nt, Homo sapiens
  misc_RNA (1)...(19): siRNA sense strand
uaagugacccagccucauc

SEQ ID NO: 1283428 - RNA, 19 nt, Homo sapiens
  misc_RNA (1)...(19): siRNA sense strand
cagugaaggugcuuuacgu

SEQ ID NO: 1283429 - RNA, 19 nt, Homo sapiens
  misc_RNA (1)...(19): siRNA sense strand
aauaugaagggcacuggua

SEQ ID NO: 1283430 - RNA, 19 nt, Homo sapiens
  misc_RNA (1)...(19): siRNA sense strand
ccucaaugcacucucugua

SEQ ID NO: 1283431 - RNA, 19 nt, Homo sapiens
  misc_RNA (1)...(19): siRNA sense strand
ggaugugaguuggauaagg

SEQ ID NO: 1283432 - RNA, 19 nt, Homo sapiens
  misc_RNA (1)...(19): siRNA sense strand
acaguaaugccuuugaugu

SEQ ID NO: 1283433 - RNA, 19 nt, Homo sapiens
  misc_RNA (1)...(19): siRNA sense strand
ccucaguccucuccaguac

SEQ ID NO: 1283434 - RNA, 19 nt, Homo sapiens
  misc_RNA (1)...(19): siRNA sense strand
guaguaguaccaauggaau

SEQ ID NO: 1283435 - RNA, 19 nt, Homo sapiens
  misc_RNA (1)...(19): siRNA sense strand
cacucagccuuuaaccuuu

SEQ ID NO: 1283436 - RNA, 19 nt, Homo sapiens
  misc_RNA (1)...(19): siRNA sense strand
ccgguccacucagccuuua

SEQ ID NO: 1283437 - RNA, 19 nt, Homo sapiens
  misc_RNA (1)...(19): siRNA sense strand
uggcuugaauuuuagcuua

SEQ ID NO: 1283438 - RNA, 19 nt, Homo sapiens
  misc_RNA (1)...(19): siRNA sense strand
cagggucaagguaguagua

SEQ ID NO: 1283439 - RNA, 19 nt, Homo sapiens
  misc_RNA (1)...(19): siRNA sense strand
gcagcaacaacagcagaaa

SEQ ID NO: 1283440 - RNA, 19 nt, Homo sapiens
  misc_RNA (1)...(19): siRNA sense strand
aaaguggacccagugauug

SEQ ID NO: 1283441 - RNA, 19 nt, Homo sapiens
  misc_RNA (1)...(19): siRNA sense strand
ucacucugcugcuguaagc

SEQ ID NO: 1283442 - RNA, 19 nt, Homo sapiens
  misc_RNA (1)...(19): siRNA sense strand
cuaccaaaaugaagaauag

SEQ ID NO: 1283443 - RNA, 19 nt, Homo sapiens
  misc_RNA (1)...(19): siRNA sense strand
cguggaugauaauaaugaa

SEQ ID NO: 1283444 - RNA, 19 nt, Homo sapiens
  misc_RNA (1)...(19): siRNA sense strand
guacuucucccaucaaccu

SEQ ID NO: 1283445 - RNA, 19 nt, Homo sapiens
  misc_RNA (1)...(19): siRNA sense strand
aauaguggccguagcaaca

SEQ ID NO: 1283446 - RNA, 19 nt, Homo sapiens
  misc_RNA (1)...(19): siRNA sense strand
ccaccaaguucggcucuac

SEQ ID NO: 1283447 - RNA, 19 nt, Homo sapiens
  misc_RNA (1)...(19): siRNA sense strand
gcaaucugccacaggaucu

SEQ ID NO: 1283448 - RNA, 19 nt, Homo sapiens
  misc_RNA (1)...(19): siRNA sense strand
uaguaccaauggaauguuc

SEQ ID NO: 1283449 - RNA, 19 nt, Homo sapiens
  misc_RNA (1)...(19): siRNA sense strand
caccacagcagcaacaaca

SEQ ID NO: 1283450 - RNA, 19 nt, Homo sapiens
  misc_RNA (1)...(19): siRNA sense strand
aaauggaugugaguuggau

SEQ ID NO: 1283451 - RNA, 19 nt, Homo sapiens
  misc_RNA (1)...(19): siRNA sense strand
ggacccagugauugaacaa

SEQ ID NO: 1283452 - RNA, 19 nt, Homo sapiens
  misc_RNA (1)...(19): siRNA sense strand
ccucuccaguacaguaaug

SEQ ID NO: 1283453 - RNA, 19 nt, Homo sapiens
  misc_RNA (1)...(19): siRNA sense strand
gaucgggguuuagauguau

SEQ ID NO: 1283454 - RNA, 19 nt, Homo sapiens
  misc_RNA (1)...(19): siRNA sense strand
uaacaugcaguauucuaac

SEQ ID NO: 1283455 - RNA, 19 nt, Homo sapiens
  misc_RNA (1)...(19): siRNA sense strand
uacaaaggaucgggguuua

SEQ ID NO: 1283456 - RNA, 19 nt, Homo sapiens
  misc_RNA (1)...(19): siRNA sense strand
ccuauggaggccucaauga

SEQ ID NO: 1283457 - RNA, 19 nt, Homo sapiens
  misc_RNA (1)...(19): siRNA sense strand
ugauguguuugcagccuau

SEQ ID NO: 1283458 - RNA, 19 nt, Homo sapiens
  misc_RNA (1)...(19): siRNA sense strand
ucaguccucuccaguacag

SEQ ID NO: 1283459 - RNA, 19 nt, Homo sapiens
  misc_RNA (1)...(19): siRNA sense strand
aaauccaaguagcacuaaa

SEQ ID NO: 1283460 - RNA, 19 nt, Homo sapiens
  misc_RNA (1)...(19): siRNA sense strand
ugaguuggauaaggagauc

SEQ ID NO: 1283461 - RNA, 19 nt, Homo sapiens
  misc_RNA (1)...(19): siRNA sense strand
gaagcagaaagccaucucu

SEQ ID NO: 1283462 - RNA, 19 nt, Homo sapiens
  misc_RNA (1)...(19): siRNA sense strand
uuguagauggcuugaauuu

SEQ ID NO: 1283463 - RNA, 19 nt, Homo sapiens
  misc_RNA (1)...(19): siRNA sense strand
caguaaugccuuugaugug

SEQ ID NO: 1283464 - RNA, 19 nt, Homo sapiens
  misc_RNA (1)...(19): siRNA sense strand
gugcuuuacguggaugaua

SEQ ID NO: 1283465 - RNA, 19 nt, Homo sapiens
  misc_RNA (1)...(19): siRNA sense strand
aauaugcagggucaaggua

SEQ ID NO: 1283466 - RNA, 19 nt, Homo sapiens
  misc_RNA (1)...(19): siRNA sense strand
caaccucggcuugaaugug

SEQ ID NO: 1283467 - RNA, 19 nt, Homo sapiens
  misc_RNA (1)...(19): siRNA sense strand
gaaacuaugugcgggauga

SEQ ID NO: 1283468 - RNA, 19 nt, Homo sapiens
  misc_RNA (1)...(19): siRNA sense strand
ggagcuggaaguacaagua

SEQ ID NO: 1283469 - RNA, 19 nt, Homo sapiens
  misc_RNA (1)...(19): siRNA sense strand
ugaucuaccugcacacuug

SEQ ID NO: 1283470 - RNA, 19 nt, Homo sapiens
  misc_RNA (1)...(19): siRNA sense strand
ggccaccguuucugcgaua

SEQ ID NO: 1283471 - RNA, 19 nt, Homo sapiens
  misc_RNA (1)...(19): siRNA sense strand
gcuggaaguacaaguauug

SEQ ID NO: 1283472 - RNA, 19 nt, Homo sapiens
  misc_RNA (1)...(19): siRNA sense strand
cauccgugcugcuguugaa

SEQ ID NO: 1283473 - RNA, 19 nt, Homo sapiens
  misc_RNA (1)...(19): siRNA sense strand
gagcuggaaguacaaguau

SEQ ID NO: 1283474 - RNA, 19 nt, Homo sapiens
  misc_RNA (1)...(19): siRNA sense strand
gucauucccugcccuaauc

SEQ ID NO: 1283475 - RNA, 19 nt, Homo sapiens
  misc_RNA (1)...(19): siRNA sense strand
ccuaaucgcugccccauga

SEQ ID NO: 1283476 - RNA, 19 nt, Homo sapiens
  misc_RNA (1)...(19): siRNA sense strand
gcgggaugaugcagucuuc

SEQ ID NO: 1283477 - RNA, 19 nt, Homo sapiens
  misc_RNA (1)...(19): siRNA sense strand
gaauaccugcagcuucaau

SEQ ID NO: 1283478 - RNA, 19 nt, Homo sapiens
  misc_RNA (1)...(19): siRNA sense strand
acuacaaguuccuggagaa

SEQ ID NO: 1283479 - RNA, 19 nt, Homo sapiens
  misc_RNA (1)...(19): siRNA sense strand
ucucugggcuuugguuauc

SEQ ID NO: 1283480 - RNA, 19 nt, Homo sapiens
  misc_RNA (1)...(19): siRNA sense strand
ggacuaugccaagaucuac

SEQ ID NO: 1283481 - RNA, 19 nt, Homo sapiens
  misc_RNA (1)...(19): siRNA sense strand
cuucauccgugcugcuguu

SEQ ID NO: 1283482 - RNA, 19 nt, Homo sapiens
  misc_RNA (1)...(19): siRNA sense strand
acccggagcuggaaguaca

SEQ ID NO: 1283483 - RNA, 19 nt, Homo sapiens
  misc_RNA (1)...(19): siRNA sense strand
ccucuggacuaugccaaga

SEQ ID NO: 1283484 - RNA, 19 nt, Homo sapiens
  misc_RNA (1)...(19): siRNA sense strand
gcgccucaagugcgaguuu

SEQ ID NO: 1283485 - RNA, 19 nt, Homo sapiens
  misc_RNA (1)...(19): siRNA sense strand
gccacuacgucaucuacag

SEQ ID NO: 1283486 - RNA, 19 nt, Homo sapiens
  misc_RNA (1)...(19): siRNA sense strand
uggcuucgacuacaaguuc

SEQ ID NO: 1283487 - RNA, 19 nt, Homo sapiens
  misc_RNA (1)...(19): siRNA sense strand
guucucugggcuuugguua

SEQ ID NO: 1283488 - RNA, 19 nt, Homo sapiens
  misc_RNA (1)...(19): siRNA sense strand
gaaacuaugugcgggauga

SEQ ID NO: 1283489 - RNA, 19 nt, Homo sapiens
  misc_RNA (1)...(19): siRNA sense strand
ggagcuggaaguacaagua

SEQ ID NO: 1283490 - RNA, 19 nt, Homo sapiens
  misc_RNA (1)...(19): siRNA sense strand
ugaucuaccugcacacuug

SEQ ID NO: 1283491 - RNA, 19 nt, Homo sapiens
  misc_RNA (1)...(19): siRNA sense strand
ggccaccguuucugcgaua

SEQ ID NO: 1283492 - RNA, 19 nt, Homo sapiens
  misc_RNA (1)...(19): siRNA sense strand
gcuggaaguacaaguauug

SEQ ID NO: 1283493 - RNA, 19 nt, Homo sapiens
  misc_RNA (1)...(19): siRNA sense strand
cauccgugcugcuguugaa

SEQ ID NO: 1283494 - RNA, 19 nt, Homo sapiens
  misc_RNA (1)...(19): siRNA sense strand
gagcuggaaguacaaguau

SEQ ID NO: 1283495 - RNA, 19 nt, Homo sapiens
  misc_RNA (1)...(19): siRNA sense strand
gucauucccugcccuaauc

SEQ ID NO: 1283496 - RNA, 19 nt, Homo sapiens
  misc_RNA (1)...(19): siRNA sense strand
ccuaaucgcugccccauga

SEQ ID NO: 1283497 - RNA, 19 nt, Homo sapiens
  misc_RNA (1)...(19): siRNA sense strand
gcgggaugaugcagucuuc

SEQ ID NO: 1283498 - RNA, 19 nt, Homo sapiens
  misc_RNA (1)...(19): siRNA sense strand
gaauaccugcagcuucaau

SEQ ID NO: 1283499 - RNA, 19 nt, Homo sapiens
  misc_RNA (1)...(19): siRNA sense strand
acuacaaguuccuggagaa

SEQ ID NO: 1283500 - RNA, 19 nt, Homo sapiens
  misc_RNA (1)...(19): siRNA sense strand
ucucugggcuuugguuauc

SEQ ID NO: 1283501 - RNA, 19 nt, Homo sapiens
  misc_RNA (1)...(19): siRNA sense strand
ggacuaugccaagaucuac

SEQ ID NO: 1283502 - RNA, 19 nt, Homo sapiens
  misc_RNA (1)...(19): siRNA sense strand
cuucauccgugcugcuguu

SEQ ID NO: 1283503 - RNA, 19 nt, Homo sapiens
  misc_RNA (1)...(19): siRNA sense strand
acccggagcuggaaguaca

SEQ ID NO: 1283504 - RNA, 19 nt, Homo sapiens
  misc_RNA (1)...(19): siRNA sense strand
ccucuggacuaugccaaga

SEQ ID NO: 1283505 - RNA, 19 nt, Homo sapiens
  misc_RNA (1)...(19): siRNA sense strand
gcgccucaagugcgaguuu

SEQ ID NO: 1283506 - RNA, 19 nt, Homo sapiens
  misc_RNA (1)...(19): siRNA sense strand
gccacuacgucaucuacag

SEQ ID NO: 1283507 - RNA, 19 nt, Homo sapiens
  misc_RNA (1)...(19): siRNA sense strand
uggcuucgacuacaaguuc

SEQ ID NO: 1283508 - RNA, 19 nt, Homo sapiens
  misc_RNA (1)...(19): siRNA sense strand
guucucugggcuuugguua

SEQ ID NO: 1283509 - RNA, 19 nt, Homo sapiens
  misc_RNA (1)...(19): siRNA sense strand
ggaaugagcucuucuacug

SEQ ID NO: 1283510 - RNA, 19 nt, Homo sapiens
  misc_RNA (1)...(19): siRNA sense strand
caucauuucuuucuacuuc

SEQ ID NO: 1283511 - RNA, 19 nt, Homo sapiens
  misc_RNA (1)...(19): siRNA sense strand
gcuggacgcuuucgaugga

SEQ ID NO: 1283512 - RNA, 19 nt, Homo sapiens
  misc_RNA (1)...(19): siRNA sense strand
gagccacgcuguucuucca

SEQ ID NO: 1283513 - RNA, 19 nt, Homo sapiens
  misc_RNA (1)...(19): siRNA sense strand
ggccugcucuguucaccuu

SEQ ID NO: 1283514 - RNA, 19 nt, Homo sapiens
  misc_RNA (1)...(19): siRNA sense strand
gaccgcugcuccaccaugu

SEQ ID NO: 1283515 - RNA, 19 nt, Homo sapiens
  misc_RNA (1)...(19): siRNA sense strand
gucacaagaugaucgacuu

SEQ ID NO: 1283516 - RNA, 19 nt, Homo sapiens
  misc_RNA (1)...(19): siRNA sense strand
ccaugugccuguuggucaa

SEQ ID NO: 1283517 - RNA, 19 nt, Homo sapiens
  misc_RNA (1)...(19): siRNA sense strand
cagcaugaguuuggaugug

SEQ ID NO: 1283518 - RNA, 19 nt, Homo sapiens
  misc_RNA (1)...(19): siRNA sense strand
acgcuguucuuccaaauca

SEQ ID NO: 1283519 - RNA, 19 nt, Homo sapiens
  misc_RNA (1)...(19): siRNA sense strand
cggauugucuucgccauca

SEQ ID NO: 1283520 - RNA, 19 nt, Homo sapiens
  misc_RNA (1)...(19): siRNA sense strand
gccacgcuguucuuccaaa

SEQ ID NO: 1283521 - RNA, 19 nt, Homo sapiens
  misc_RNA (1)...(19): siRNA sense strand
ccacgcuguucuuccaaau

SEQ ID NO: 1283522 - RNA, 19 nt, Homo sapiens
  misc_RNA (1)...(19): siRNA sense strand
uccucuaccuguuccauuu

SEQ ID NO: 1283523 - RNA, 19 nt, Homo sapiens
  misc_RNA (1)...(19): siRNA sense strand
guuuggauguggccaguca

SEQ ID NO: 1283524 - RNA, 19 nt, Homo sapiens
  misc_RNA (1)...(19): siRNA sense strand
uugcugaagucgcucauca

SEQ ID NO: 1283525 - RNA, 19 nt, Homo sapiens
  misc_RNA (1)...(19): siRNA sense strand
ucugagggaccuuuaguug

SEQ ID NO: 1283526 - RNA, 19 nt, Homo sapiens
  misc_RNA (1)...(19): siRNA sense strand
ggcugcaccuccacaguuc

SEQ ID NO: 1283527 - RNA, 19 nt, Homo sapiens
  misc_RNA (1)...(19): siRNA sense strand
gauugucuucgccaucauu

SEQ ID NO: 1283528 - RNA, 19 nt, Homo sapiens
  misc_RNA (1)...(19): siRNA sense strand
ccucgaggccugcucuguu

SEQ ID NO: 1283529 - RNA, 19 nt, Homo sapiens
  misc_RNA (1)...(19): siRNA sense strand
caccuugugugcugggaau

SEQ ID NO: 1283530 - RNA, 19 nt, Homo sapiens
  misc_RNA (1)...(19): siRNA sense strand
caaccuggcccugcuguac

SEQ ID NO: 1283531 - RNA, 19 nt, Homo sapiens
  misc_RNA (1)...(19): siRNA sense strand
gaccuuuaguuggcucugu

SEQ ID NO: 1283532 - RNA, 19 nt, Homo sapiens
  misc_RNA (1)...(19): siRNA sense strand
ucuucgccaucauuucuuu

SEQ ID NO: 1283533 - RNA, 19 nt, Homo sapiens
  misc_RNA (1)...(19): siRNA sense strand
gcugcucgcgcucuuaauc

SEQ ID NO: 1283534 - RNA, 19 nt, Homo sapiens
  misc_RNA (1)...(19): siRNA sense strand
gguuaugcccggauugucu

SEQ ID NO: 1283535 - RNA, 19 nt, Homo sapiens
  misc_RNA (1)...(19): siRNA sense strand
cgccaucauuucuuucuac

SEQ ID NO: 1283536 - RNA, 19 nt, Homo sapiens
  misc_RNA (1)...(19): siRNA sense strand
ggaaugagcucuucuacug

SEQ ID NO: 1283537 - RNA, 19 nt, Homo sapiens
  misc_RNA (1)...(19): siRNA sense strand
caucauuucuuucuacuuc

SEQ ID NO: 1283538 - RNA, 19 nt, Homo sapiens
  misc_RNA (1)...(19): siRNA sense strand
gcuggacgcuuucgaugga

SEQ ID NO: 1283539 - RNA, 19 nt, Homo sapiens
  misc_RNA (1)...(19): siRNA sense strand
gagccacgcuguucuucca

SEQ ID NO: 1283540 - RNA, 19 nt, Homo sapiens
  misc_RNA (1)...(19): siRNA sense strand
ggccugcucuguucaccuu

SEQ ID NO: 1283541 - RNA, 19 nt, Homo sapiens
  misc_RNA (1)...(19): siRNA sense strand
gaccgcugcuccaccaugu

SEQ ID NO: 1283542 - RNA, 19 nt, Homo sapiens
  misc_RNA (1)...(19): siRNA sense strand
gucacaagaugaucgacuu

SEQ ID NO: 1283543 - RNA, 19 nt, Homo sapiens
  misc_RNA (1)...(19): siRNA sense strand
ccaugugccuguuggucaa

SEQ ID NO: 1283544 - RNA, 19 nt, Homo sapiens
  misc_RNA (1)...(19): siRNA sense strand
cagcaugaguuuggaugug

SEQ ID NO: 1283545 - RNA, 19 nt, Homo sapiens
  misc_RNA (1)...(19): siRNA sense strand
acgcuguucuuccaaauca

SEQ ID NO: 1283546 - RNA, 19 nt, Homo sapiens
  misc_RNA (1)...(19): siRNA sense strand
cggauugucuucgccauca

SEQ ID NO: 1283547 - RNA, 19 nt, Homo sapiens
  misc_RNA (1)...(19): siRNA sense strand
gccacgcuguucuuccaaa

SEQ ID NO: 1283548 - RNA, 19 nt, Homo sapiens
  misc_RNA (1)...(19): siRNA sense strand
ccacgcuguucuuccaaau

SEQ ID NO: 1283549 - RNA, 19 nt, Homo sapiens
  misc_RNA (1)...(19): siRNA sense strand
uccucuaccuguuccauuu

SEQ ID NO: 1283550 - RNA, 19 nt, Homo sapiens
  misc_RNA (1)...(19): siRNA sense strand
guuuggauguggccaguca

SEQ ID NO: 1283551 - RNA, 19 nt, Homo sapiens
  misc_RNA (1)...(19): siRNA sense strand
uugcugaagucgcucauca

SEQ ID NO: 1283552 - RNA, 19 nt, Homo sapiens
  misc_RNA (1)...(19): siRNA sense strand
ucugagggaccuuuaguug

SEQ ID NO: 1283553 - RNA, 19 nt, Homo sapiens
  misc_RNA (1)...(19): siRNA sense strand
ggcugcaccuccacaguuc

SEQ ID NO: 1283554 - RNA, 19 nt, Homo sapiens
  misc_RNA (1)...(19): siRNA sense strand
gauugucuucgccaucauu

SEQ ID NO: 1283555 - RNA, 19 nt, Homo sapiens
  misc_RNA (1)...(19): siRNA sense strand
ccucgaggccugcucuguu

SEQ ID NO: 1283556 - RNA, 19 nt, Homo sapiens
  misc_RNA (1)...(19): siRNA sense strand
caccuugugugcugggaau

SEQ ID NO: 1283557 - RNA, 19 nt, Homo sapiens
  misc_RNA (1)...(19): siRNA sense strand
caaccuggcccugcuguac

SEQ ID NO: 1283558 - RNA, 19 nt, Homo sapiens
  misc_RNA (1)...(19): siRNA sense strand
gaccuuuaguuggcucugu

SEQ ID NO: 1283559 - RNA, 19 nt, Homo sapiens
  misc_RNA (1)...(19): siRNA sense strand
ucuucgccaucauuucuuu

SEQ ID NO: 1283560 - RNA, 19 nt, Homo sapiens
  misc_RNA (1)...(19): siRNA sense strand
gcugcucgcgcucuuaauc

SEQ ID NO: 1283561 - RNA, 19 nt, Homo sapiens
  misc_RNA (1)...(19): siRNA sense strand
gguuaugcccggauugucu

SEQ ID NO: 1283562 - RNA, 19 nt, Homo sapiens
  misc_RNA (1)...(19): siRNA sense strand
cgccaucauuucuuucuac

SEQ ID NO: 1283563 - RNA, 19 nt, Homo sapiens
  misc_RNA (1)...(19): siRNA sense strand
gaucaaagauuagccguuu

SEQ ID NO: 1283564 - RNA, 19 nt, Homo sapiens
  misc_RNA (1)...(19): siRNA sense strand
gaagagcgcuacaaaugug

SEQ ID NO: 1283565 - RNA, 19 nt, Homo sapiens
  misc_RNA (1)...(19): siRNA sense strand
ggucacaccugucccuaua

SEQ ID NO: 1283566 - RNA, 19 nt, Homo sapiens
  misc_RNA (1)...(19): siRNA sense strand
caagaacgccuacauuaaa

SEQ ID NO: 1283567 - RNA, 19 nt, Homo sapiens
  misc_RNA (1)...(19): siRNA sense strand
gagcaagacuguccuuuua

SEQ ID NO: 1283568 - RNA, 19 nt, Homo sapiens
  misc_RNA (1)...(19): siRNA sense strand
gugcgaagauuauucuaaa

SEQ ID NO: 1283569 - RNA, 19 nt, Homo sapiens
  misc_RNA (1)...(19): siRNA sense strand
caugauacccacauuaaua

SEQ ID NO: 1283570 - RNA, 19 nt, Homo sapiens
  misc_RNA (1)...(19): siRNA sense strand
ggaggaaccugcagcaaca

SEQ ID NO: 1283571 - RNA, 19 nt, Homo sapiens
  misc_RNA (1)...(19): siRNA sense strand
gccaagaacgccuacauua

SEQ ID NO: 1283572 - RNA, 19 nt, Homo sapiens
  misc_RNA (1)...(19): siRNA sense strand
gcagcuagcagaaacuaua

SEQ ID NO: 1283573 - RNA, 19 nt, Homo sapiens
  misc_RNA (1)...(19): siRNA sense strand
auaaagaggucaucaaauc

SEQ ID NO: 1283574 - RNA, 19 nt, Homo sapiens
  misc_RNA (1)...(19): siRNA sense strand
gcuagaagcucaagugcau

SEQ ID NO: 1283575 - RNA, 19 nt, Homo sapiens
  misc_RNA (1)...(19): siRNA sense strand
uaacugaccuggaggaucu

SEQ ID NO: 1283576 - RNA, 19 nt, Homo sapiens
  misc_RNA (1)...(19): siRNA sense strand
ggugacagauuacaagaug

SEQ ID NO: 1283577 - RNA, 19 nt, Homo sapiens
  misc_RNA (1)...(19): siRNA sense strand
caucaaaucucaggagguu

SEQ ID NO: 1283578 - RNA, 19 nt, Homo sapiens
  misc_RNA (1)...(19): siRNA sense strand
gcaaugcuccuggauguaa

SEQ ID NO: 1283579 - RNA, 19 nt, Homo sapiens
  misc_RNA (1)...(19): siRNA sense strand
ccaagaacgccuacauuaa

SEQ ID NO: 1283580 - RNA, 19 nt, Homo sapiens
  misc_RNA (1)...(19): siRNA sense strand
gaggguacuugcuauaaug

SEQ ID NO: 1283581 - RNA, 19 nt, Homo sapiens
  misc_RNA (1)...(19): siRNA sense strand
ccaauuagaagaacagauu

SEQ ID NO: 1283582 - RNA, 19 nt, Homo sapiens
  misc_RNA (1)...(19): siRNA sense strand
gcacaugcguuugguuuua

SEQ ID NO: 1283583 - RNA, 19 nt, Homo sapiens
  misc_RNA (1)...(19): siRNA sense strand
uuuggaaggugacagauua

SEQ ID NO: 1283584 - RNA, 19 nt, Homo sapiens
  misc_RNA (1)...(19): siRNA sense strand
ggaggguacuugcuauaau

SEQ ID NO: 1283585 - RNA, 19 nt, Homo sapiens
  misc_RNA (1)...(19): siRNA sense strand
cagaagagcauaaagguau

SEQ ID NO: 1283586 - RNA, 19 nt, Homo sapiens
  misc_RNA (1)...(19): siRNA sense strand
caacaauugugcgaagauu

SEQ ID NO: 1283587 - RNA, 19 nt, Homo sapiens
  misc_RNA (1)...(19): siRNA sense strand
aaacugagguagaugaaca

SEQ ID NO: 1283588 - RNA, 19 nt, Homo sapiens
  misc_RNA (1)...(19): siRNA sense strand
gagcacaugcguuugguuu

SEQ ID NO: 1283589 - RNA, 19 nt, Homo sapiens
  misc_RNA (1)...(19): siRNA sense strand
ggaagagcgcuacaaaugu

SEQ ID NO: 1283590 - RNA, 19 nt, Homo sapiens
  misc_RNA (1)...(19): siRNA sense strand
cccaauagcagcagcuuua

SEQ ID NO: 1283591 - RNA, 19 nt, Homo sapiens
  misc_RNA (1)...(19): siRNA sense strand
aaacaugauacccacauua

SEQ ID NO: 1283592 - RNA, 19 nt, Homo sapiens
  misc_RNA (1)...(19): siRNA sense strand
guccucaacuuauauguau

SEQ ID NO: 1283593 - RNA, 19 nt, Homo sapiens
  misc_RNA (1)...(19): siRNA sense strand
aaacuuguguccugaauac

SEQ ID NO: 1283594 - RNA, 19 nt, Homo sapiens
  misc_RNA (1)...(19): siRNA sense strand
caaacaugauacccacauu

SEQ ID NO: 1283595 - RNA, 19 nt, Homo sapiens
  misc_RNA (1)...(19): siRNA sense strand
ucaagcaguuugcacaguu

SEQ ID NO: 1283596 - RNA, 19 nt, Homo sapiens
  misc_RNA (1)...(19): siRNA sense strand
ggacuuugagcccaguaua

SEQ ID NO: 1283597 - RNA, 19 nt, Homo sapiens
  misc_RNA (1)...(19): siRNA sense strand
auggaaagcucauuuggaa

SEQ ID NO: 1283598 - RNA, 19 nt, Homo sapiens
  misc_RNA (1)...(19): siRNA sense strand
gcugugcuguaacggauaa

SEQ ID NO: 1283599 - RNA, 19 nt, Homo sapiens
  misc_RNA (1)...(19): siRNA sense strand
gauggaagcaguugauaca

SEQ ID NO: 1283600 - RNA, 19 nt, Homo sapiens
  misc_RNA (1)...(19): siRNA sense strand
gaagcuuccucccaaacau

SEQ ID NO: 1283601 - RNA, 19 nt, Homo sapiens
  misc_RNA (1)...(19): siRNA sense strand
gaauguccaauuagaagaa

SEQ ID NO: 1283602 - RNA, 19 nt, Homo sapiens
  misc_RNA (1)...(19): siRNA sense strand
uggaagagcgcuacaaaug

SEQ ID NO: 1283603 - RNA, 19 nt, Homo sapiens
  misc_RNA (1)...(19): siRNA sense strand
gguacuugcuauaauggaa

SEQ ID NO: 1283604 - RNA, 19 nt, Homo sapiens
  misc_RNA (1)...(19): siRNA sense strand
acaagagccuagaacagaa

SEQ ID NO: 1283605 - RNA, 19 nt, Homo sapiens
  misc_RNA (1)...(19): siRNA sense strand
ggauguaaugccaagguua

SEQ ID NO: 1283606 - RNA, 19 nt, Homo sapiens
  misc_RNA (1)...(19): siRNA sense strand
gauaaagaggucaucaaau

SEQ ID NO: 1283607 - RNA, 19 nt, Homo sapiens
  misc_RNA (1)...(19): siRNA sense strand
gaaggugacagauuacaag

SEQ ID NO: 1283608 - RNA, 19 nt, Homo sapiens
  misc_RNA (1)...(19): siRNA sense strand
caguauagaguaccaguuu

SEQ ID NO: 1283609 - RNA, 19 nt, Homo sapiens
  misc_RNA (1)...(19): siRNA sense strand
gcagcaacaugagcauuca

SEQ ID NO: 1283610 - RNA, 19 nt, Homo sapiens
  misc_RNA (1)...(19): siRNA sense strand
gauguaaugccaagguuau

SEQ ID NO: 1283611 - RNA, 19 nt, Homo sapiens
  misc_RNA (1)...(19): siRNA sense strand
ccugagaccuuugauggaa

SEQ ID NO: 1283612 - RNA, 19 nt, Homo sapiens
  misc_RNA (1)...(19): siRNA sense strand
acaugagcauucagccuua

SEQ ID NO: 1283613 - RNA, 19 nt, Homo sapiens
  misc_RNA (1)...(19): siRNA sense strand
cacuauggcugugcuguaa

SEQ ID NO: 1283614 - RNA, 19 nt, Homo sapiens
  misc_RNA (1)...(19): siRNA sense strand
ucaucaaucuacagaauca

SEQ ID NO: 1283615 - RNA, 19 nt, Homo sapiens
  misc_RNA (1)...(19): siRNA sense strand
gguaugcccugugguuuca

SEQ ID NO: 1283616 - RNA, 19 nt, Homo sapiens
  misc_RNA (1)...(19): siRNA sense strand
aagcucaagugcaucaauu

SEQ ID NO: 1283617 - RNA, 19 nt, Homo sapiens
  misc_RNA (1)...(19): siRNA sense strand
gcaguuugcacaguuguuu

SEQ ID NO: 1283618 - RNA, 19 nt, Homo sapiens
  misc_RNA (1)...(19): siRNA sense strand
gugccaaucugcccuguag

SEQ ID NO: 1283619 - RNA, 19 nt, Homo sapiens
  misc_RNA (1)...(19): siRNA sense strand
cagauuacaagaugaagaa

SEQ ID NO: 1283620 - RNA, 19 nt, Homo sapiens
  misc_RNA (1)...(19): siRNA sense strand
agaggaaacuaacaaacau

SEQ ID NO: 1283621 - RNA, 19 nt, Homo sapiens
  misc_RNA (1)...(19): siRNA sense strand
caagcaguuugcacaguug

SEQ ID NO: 1283622 - RNA, 19 nt, Homo sapiens
  misc_RNA (1)...(19): siRNA sense strand
auaaagcacagcugaguaa

SEQ ID NO: 1283623 - RNA, 19 nt, Homo sapiens
  misc_RNA (1)...(19): siRNA sense strand
ggucaugcgaggagaguuu

SEQ ID NO: 1283624 - RNA, 19 nt, Homo sapiens
  misc_RNA (1)...(19): siRNA sense strand
gcuagagcauaccugaaug

SEQ ID NO: 1283625 - RNA, 19 nt, Homo sapiens
  misc_RNA (1)...(19): siRNA sense strand
gugcaguguucuaaugaga

SEQ ID NO: 1283626 - RNA, 19 nt, Homo sapiens
  misc_RNA (1)...(19): siRNA sense strand
gaacgccuacauuaaagau

SEQ ID NO: 1283627 - RNA, 19 nt, Homo sapiens
  misc_RNA (1)...(19): siRNA sense strand
ggaaggugacagauuacaa

SEQ ID NO: 1283628 - RNA, 19 nt, Homo sapiens
  misc_RNA (1)...(19): siRNA sense strand
cacaagagccuagaacaga

SEQ ID NO: 1283629 - RNA, 19 nt, Homo sapiens
  misc_RNA (1)...(19): siRNA sense strand
gaugaacaccuggcuguau

SEQ ID NO: 1283630 - RNA, 19 nt, Homo sapiens
  misc_RNA (1)...(19): siRNA sense strand
agauaaagaggucaucaaa

SEQ ID NO: 1283631 - RNA, 19 nt, Homo sapiens
  misc_RNA (1)...(19): siRNA sense strand
acaccugucccuauacuuu

SEQ ID NO: 1283632 - RNA, 19 nt, Homo sapiens
  misc_RNA (1)...(19): siRNA sense strand
gaagagagaggcgguggau

SEQ ID NO: 1283633 - RNA, 19 nt, Homo sapiens
  misc_RNA (1)...(19): siRNA sense strand
gcucaagugcaucaauuau

SEQ ID NO: 1283634 - RNA, 19 nt, Homo sapiens
  misc_RNA (1)...(19): siRNA sense strand
gaagaggaaacuaacaaac

SEQ ID NO: 1283635 - RNA, 19 nt, Homo sapiens
  misc_RNA (1)...(19): siRNA sense strand
ugagagaauuaaacacagu

SEQ ID NO: 1283636 - RNA, 19 nt, Homo sapiens
  misc_RNA (1)...(19): siRNA sense strand
acgccuacauuaaagauga

SEQ ID NO: 1283637 - RNA, 19 nt, Homo sapiens
  misc_RNA (1)...(19): siRNA sense strand
ugacagauuacaagaugaa

SEQ ID NO: 1283638 - RNA, 19 nt, Homo sapiens
  misc_RNA (1)...(19): siRNA sense strand
cauaaagcacagcugagua

SEQ ID NO: 1283639 - RNA, 19 nt, Homo sapiens
  misc_RNA (1)...(19): siRNA sense strand
gauacccacauuaauauuc

SEQ ID NO: 1283640 - RNA, 19 nt, Homo sapiens
  misc_RNA (1)...(19): siRNA sense strand
ccauuuccuuggacuuuga

SEQ ID NO: 1283641 - RNA, 19 nt, Homo sapiens
  misc_RNA (1)...(19): siRNA sense strand
agucaucaaucuacagaau

SEQ ID NO: 1283642 - RNA, 19 nt, Homo sapiens
  misc_RNA (1)...(19): siRNA sense strand
gcuggaggguacuugcuau

SEQ ID NO: 1283643 - RNA, 19 nt, Homo sapiens
  misc_RNA (1)...(19): siRNA sense strand
gagccuagaacagaaagaa

SEQ ID NO: 1283644 - RNA, 19 nt, Homo sapiens
  misc_RNA (1)...(19): siRNA sense strand
gaaaacuuguguccugaau

SEQ ID NO: 1283645 - RNA, 19 nt, Homo sapiens
  misc_RNA (1)...(19): siRNA sense strand
gaugacacucuguucuuga

SEQ ID NO: 1283646 - RNA, 19 nt, Homo sapiens
  misc_RNA (1)...(19): siRNA sense strand
caauagcagcagcuuuaaa

SEQ ID NO: 1283647 - RNA, 19 nt, Homo sapiens
  misc_RNA (1)...(19): siRNA sense strand
ucagaagagcauaaaggua

SEQ ID NO: 1283648 - RNA, 19 nt, Homo sapiens
  misc_RNA (1)...(19): siRNA sense strand
uagaagaggaaacuaacaa

SEQ ID NO: 1283649 - RNA, 19 nt, Homo sapiens
  misc_RNA (1)...(19): siRNA sense strand
aaaaggaguucaagcaguu

SEQ ID NO: 1283650 - RNA, 19 nt, Homo sapiens
  misc_RNA (1)...(19): siRNA sense strand
caagagccuagaacagaaa

SEQ ID NO: 1283651 - RNA, 19 nt, Homo sapiens
  misc_RNA (1)...(19): siRNA sense strand
ccugugcaguguucuaaug

SEQ ID NO: 1283652 - RNA, 19 nt, Homo sapiens
  misc_RNA (1)...(19): siRNA sense strand
gaaagcucauuuggaaggu

SEQ ID NO: 1283653 - RNA, 19 nt, Homo sapiens
  misc_RNA (1)...(19): siRNA sense strand
aacaugauacccacauuaa

SEQ ID NO: 1283654 - RNA, 19 nt, Homo sapiens
  misc_RNA (1)...(19): siRNA sense strand
uaaacacagugccaaucug

SEQ ID NO: 1283655 - RNA, 19 nt, Homo sapiens
  misc_RNA (1)...(19): siRNA sense strand
gcagaaacuauaaagaaac

SEQ ID NO: 1283656 - RNA, 19 nt, Homo sapiens
  misc_RNA (1)...(19): siRNA sense strand
gaaaagaauguccaauuag

SEQ ID NO: 1283657 - RNA, 19 nt, Homo sapiens
  misc_RNA (1)...(19): siRNA sense strand
ggaaccugcagcaacauga

SEQ ID NO: 1283658 - RNA, 19 nt, Homo sapiens
  misc_RNA (1)...(19): siRNA sense strand
acaauugugcgaagauuau

SEQ ID NO: 1283659 - RNA, 19 nt, Homo sapiens
  misc_RNA (1)...(19): siRNA sense strand
aauuugaccugagaccuuu

SEQ ID NO: 1283660 - RNA, 19 nt, Homo sapiens
  misc_RNA (1)...(19): siRNA sense strand
cagcuagcagaaacuauaa

SEQ ID NO: 1283661 - RNA, 19 nt, Homo sapiens
  misc_RNA (1)...(19): siRNA sense strand
aagaacgccuacauuaaag

SEQ ID NO: 1283662 - RNA, 19 nt, Homo sapiens
  misc_RNA (1)...(19): siRNA sense strand
gacacucuguucuugaaag

SEQ ID NO: 1283663 - RNA, 19 nt, Homo sapiens
  misc_RNA (1)...(19): siRNA sense strand
gaucaaagauuagccguuu

SEQ ID NO: 1283664 - RNA, 19 nt, Homo sapiens
  misc_RNA (1)...(19): siRNA sense strand
gaagagcgcuacaaaugug

SEQ ID NO: 1283665 - RNA, 19 nt, Homo sapiens
  misc_RNA (1)...(19): siRNA sense strand
ggucacaccugucccuaua

SEQ ID NO: 1283666 - RNA, 19 nt, Homo sapiens
  misc_RNA (1)...(19): siRNA sense strand
caagaacgccuacauuaaa

SEQ ID NO: 1283667 - RNA, 19 nt, Homo sapiens
  misc_RNA (1)...(19): siRNA sense strand
gagcaagacuguccuuuua

SEQ ID NO: 1283668 - RNA, 19 nt, Homo sapiens
  misc_RNA (1)...(19): siRNA sense strand
gugcgaagauuauucuaaa

SEQ ID NO: 1283669 - RNA, 19 nt, Homo sapiens
  misc_RNA (1)...(19): siRNA sense strand
caugauacccacauuaaua

SEQ ID NO: 1283670 - RNA, 19 nt, Homo sapiens
  misc_RNA (1)...(19): siRNA sense strand
ggaggaaccugcagcaaca

SEQ ID NO: 1283671 - RNA, 19 nt, Homo sapiens
  misc_RNA (1)...(19): siRNA sense strand
gccaagaacgccuacauua

SEQ ID NO: 1283672 - RNA, 19 nt, Homo sapiens
  misc_RNA (1)...(19): siRNA sense strand
gcagcuagcagaaacuaua

SEQ ID NO: 1283673 - RNA, 19 nt, Homo sapiens
  misc_RNA (1)...(19): siRNA sense strand
auaaagaggucaucaaauc

SEQ ID NO: 1283674 - RNA, 19 nt, Homo sapiens
  misc_RNA (1)...(19): siRNA sense strand
gcuagaagcucaagugcau

SEQ ID NO: 1283675 - RNA, 19 nt, Homo sapiens
  misc_RNA (1)...(19): siRNA sense strand
uaacugaccuggaggaucu

SEQ ID NO: 1283676 - RNA, 19 nt, Homo sapiens
  misc_RNA (1)...(19): siRNA sense strand
ggugacagauuacaagaug

SEQ ID NO: 1283677 - RNA, 19 nt, Homo sapiens
  misc_RNA (1)...(19): siRNA sense strand
caucaaaucucaggagguu

SEQ ID NO: 1283678 - RNA, 19 nt, Homo sapiens
  misc_RNA (1)...(19): siRNA sense strand
gcaaugcuccuggauguaa

SEQ ID NO: 1283679 - RNA, 19 nt, Homo sapiens
  misc_RNA (1)...(19): siRNA sense strand
ccaagaacgccuacauuaa

SEQ ID NO: 1283680 - RNA, 19 nt, Homo sapiens
  misc_RNA (1)...(19): siRNA sense strand
gaggguacuugcuauaaug

SEQ ID NO: 1283681 - RNA, 19 nt, Homo sapiens
  misc_RNA (1)...(19): siRNA sense strand
ccaauuagaagaacagauu

SEQ ID NO: 1283682 - RNA, 19 nt, Homo sapiens
  misc_RNA (1)...(19): siRNA sense strand
gcacaugcguuugguuuua

SEQ ID NO: 1283683 - RNA, 19 nt, Homo sapiens
  misc_RNA (1)...(19): siRNA sense strand
uuuggaaggugacagauua

SEQ ID NO: 1283684 - RNA, 19 nt, Homo sapiens
  misc_RNA (1)...(19): siRNA sense strand
ggaggguacuugcuauaau

SEQ ID NO: 1283685 - RNA, 19 nt, Homo sapiens
  misc_RNA (1)...(19): siRNA sense strand
cagaagagcauaaagguau

SEQ ID NO: 1283686 - RNA, 19 nt, Homo sapiens
  misc_RNA (1)...(19): siRNA sense strand
caacaauugugcgaagauu

SEQ ID NO: 1283687 - RNA, 19 nt, Homo sapiens
  misc_RNA (1)...(19): siRNA sense strand
aaacugagguagaugaaca

SEQ ID NO: 1283688 - RNA, 19 nt, Homo sapiens
  misc_RNA (1)...(19): siRNA sense strand
gagcacaugcguuugguuu

SEQ ID NO: 1283689 - RNA, 19 nt, Homo sapiens
  misc_RNA (1)...(19): siRNA sense strand
ggaagagcgcuacaaaugu

SEQ ID NO: 1283690 - RNA, 19 nt, Homo sapiens
  misc_RNA (1)...(19): siRNA sense strand
cccaauagcagcagcuuua

SEQ ID NO: 1283691 - RNA, 19 nt, Homo sapiens
  misc_RNA (1)...(19): siRNA sense strand
aaacaugauacccacauua

SEQ ID NO: 1283692 - RNA, 19 nt, Homo sapiens
  misc_RNA (1)...(19): siRNA sense strand
guccucaacuuauauguau

SEQ ID NO: 1283693 - RNA, 19 nt, Homo sapiens
  misc_RNA (1)...(19): siRNA sense strand
aaacuuguguccugaauac

SEQ ID NO: 1283694 - RNA, 19 nt, Homo sapiens
  misc_RNA (1)...(19): siRNA sense strand
caaacaugauacccacauu

SEQ ID NO: 1283695 - RNA, 19 nt, Homo sapiens
  misc_RNA (1)...(19): siRNA sense strand
ucaagcaguuugcacaguu

SEQ ID NO: 1283696 - RNA, 19 nt, Homo sapiens
  misc_RNA (1)...(19): siRNA sense strand
ggacuuugagcccaguaua

SEQ ID NO: 1283697 - RNA, 19 nt, Homo sapiens
  misc_RNA (1)...(19): siRNA sense strand
auggaaagcucauuuggaa

SEQ ID NO: 1283698 - RNA, 19 nt, Homo sapiens
  misc_RNA (1)...(19): siRNA sense strand
gcugugcuguaacggauaa

SEQ ID NO: 1283699 - RNA, 19 nt, Homo sapiens
  misc_RNA (1)...(19): siRNA sense strand
gauggaagcaguugauaca

SEQ ID NO: 1283700 - RNA, 19 nt, Homo sapiens
  misc_RNA (1)...(19): siRNA sense strand
gaagcuuccucccaaacau

SEQ ID NO: 1283701 - RNA, 19 nt, Homo sapiens
  misc_RNA (1)...(19): siRNA sense strand
gaauguccaauuagaagaa

SEQ ID NO: 1283702 - RNA, 19 nt, Homo sapiens
  misc_RNA (1)...(19): siRNA sense strand
uggaagagcgcuacaaaug

SEQ ID NO: 1283703 - RNA, 19 nt, Homo sapiens
  misc_RNA (1)...(19): siRNA sense strand
gguacuugcuauaauggaa

SEQ ID NO: 1283704 - RNA, 19 nt, Homo sapiens
  misc_RNA (1)...(19): siRNA sense strand
acaagagccuagaacagaa

SEQ ID NO: 1283705 - RNA, 19 nt, Homo sapiens
  misc_RNA (1)...(19): siRNA sense strand
ggauguaaugccaagguua

SEQ ID NO: 1283706 - RNA, 19 nt, Homo sapiens
  misc_RNA (1)...(19): siRNA sense strand
gauaaagaggucaucaaau

SEQ ID NO: 1283707 - RNA, 19 nt, Homo sapiens
  misc_RNA (1)...(19): siRNA sense strand
gaaggugacagauuacaag

SEQ ID NO: 1283708 - RNA, 19 nt, Homo sapiens
  misc_RNA (1)...(19): siRNA sense strand
caguauagaguaccaguuu

SEQ ID NO: 1283709 - RNA, 19 nt, Homo sapiens
  misc_RNA (1)...(19): siRNA sense strand
gcagcaacaugagcauuca

SEQ ID NO: 1283710 - RNA, 19 nt, Homo sapiens
  misc_RNA (1)...(19): siRNA sense strand
gauguaaugccaagguuau

SEQ ID NO: 1283711 - RNA, 19 nt, Homo sapiens
  misc_RNA (1)...(19): siRNA sense strand
ccugagaccuuugauggaa

SEQ ID NO: 1283712 - RNA, 19 nt, Homo sapiens
  misc_RNA (1)...(19): siRNA sense strand
acaugagcauucagccuua

SEQ ID NO: 1283713 - RNA, 19 nt, Homo sapiens
  misc_RNA (1)...(19): siRNA sense strand
cacuauggcugugcuguaa

SEQ ID NO: 1283714 - RNA, 19 nt, Homo sapiens
  misc_RNA (1)...(19): siRNA sense strand
ucaucaaucuacagaauca

SEQ ID NO: 1283715 - RNA, 19 nt, Homo sapiens
  misc_RNA (1)...(19): siRNA sense strand
gguaugcccugugguuuca

SEQ ID NO: 1283716 - RNA, 19 nt, Homo sapiens
  misc_RNA (1)...(19): siRNA sense strand
aagcucaagugcaucaauu

SEQ ID NO: 1283717 - RNA, 19 nt, Homo sapiens
  misc_RNA (1)...(19): siRNA sense strand
gcaguuugcacaguuguuu

SEQ ID NO: 1283718 - RNA, 19 nt, Homo sapiens
  misc_RNA (1)...(19): siRNA sense strand
gugccaaucugcccuguag

SEQ ID NO: 1283719 - RNA, 19 nt, Homo sapiens
  misc_RNA (1)...(19): siRNA sense strand
cagauuacaagaugaagaa

SEQ ID NO: 1283720 - RNA, 19 nt, Homo sapiens
  misc_RNA (1)...(19): siRNA sense strand
agaggaaacuaacaaacau

SEQ ID NO: 1283721 - RNA, 19 nt, Homo sapiens
  misc_RNA (1)...(19): siRNA sense strand
caagcaguuugcacaguug

SEQ ID NO: 1283722 - RNA, 19 nt, Homo sapiens
  misc_RNA (1)...(19): siRNA sense strand
auaaagcacagcugaguaa

SEQ ID NO: 1283723 - RNA, 19 nt, Homo sapiens
  misc_RNA (1)...(19): siRNA sense strand
ggucaugcgaggagaguuu

SEQ ID NO: 1283724 - RNA, 19 nt, Homo sapiens
  misc_RNA (1)...(19): siRNA sense strand
gcuagagcauaccugaaug

SEQ ID NO: 1283725 - RNA, 19 nt, Homo sapiens
  misc_RNA (1)...(19): siRNA sense strand
gugcaguguucuaaugaga

SEQ ID NO: 1283726 - RNA, 19 nt, Homo sapiens
  misc_RNA (1)...(19): siRNA sense strand
gaacgccuacauuaaagau

SEQ ID NO: 1283727 - RNA, 19 nt, Homo sapiens
  misc_RNA (1)...(19): siRNA sense strand
ggaaggugacagauuacaa

SEQ ID NO: 1283728 - RNA, 19 nt, Homo sapiens
  misc_RNA (1)...(19): siRNA sense strand
cacaagagccuagaacaga

SEQ ID NO: 1283729 - RNA, 19 nt, Homo sapiens
  misc_RNA (1)...(19): siRNA sense strand
gaugaacaccuggcuguau

SEQ ID NO: 1283730 - RNA, 19 nt, Homo sapiens
  misc_RNA (1)...(19): siRNA sense strand
agauaaagaggucaucaaa

SEQ ID NO: 1283731 - RNA, 19 nt, Homo sapiens
  misc_RNA (1)...(19): siRNA sense strand
acaccugucccuauacuuu

SEQ ID NO: 1283732 - RNA, 19 nt, Homo sapiens
  misc_RNA (1)...(19): siRNA sense strand
gaagagagaggcgguggau

SEQ ID NO: 1283733 - RNA, 19 nt, Homo sapiens
  misc_RNA (1)...(19): siRNA sense strand
gcucaagugcaucaauuau

SEQ ID NO: 1283734 - RNA, 19 nt, Homo sapiens
  misc_RNA (1)...(19): siRNA sense strand
gaagaggaaacuaacaaac

SEQ ID NO: 1283735 - RNA, 19 nt, Homo sapiens
  misc_RNA (1)...(19): siRNA sense strand
ugagagaauuaaacacagu

SEQ ID NO: 1283736 - RNA, 19 nt, Homo sapiens
  misc_RNA (1)...(19): siRNA sense strand
acgccuacauuaaagauga

SEQ ID NO: 1283737 - RNA, 19 nt, Homo sapiens
  misc_RNA (1)...(19): siRNA sense strand
ugacagauuacaagaugaa

SEQ ID NO: 1283738 - RNA, 19 nt, Homo sapiens
  misc_RNA (1)...(19): siRNA sense strand
cauaaagcacagcugagua

SEQ ID NO: 1283739 - RNA, 19 nt, Homo sapiens
  misc_RNA (1)...(19): siRNA sense strand
gauacccacauuaauauuc

SEQ ID NO: 1283740 - RNA, 19 nt, Homo sapiens
  misc_RNA (1)...(19): siRNA sense strand
ccauuuccuuggacuuuga

SEQ ID NO: 1283741 - RNA, 19 nt, Homo sapiens
  misc_RNA (1)...(19): siRNA sense strand
agucaucaaucuacagaau

SEQ ID NO: 1283742 - RNA, 19 nt, Homo sapiens
  misc_RNA (1)...(19): siRNA sense strand
gcuggaggguacuugcuau

SEQ ID NO: 1283743 - RNA, 19 nt, Homo sapiens
  misc_RNA (1)...(19): siRNA sense strand
gagccuagaacagaaagaa

SEQ ID NO: 1283744 - RNA, 19 nt, Homo sapiens
  misc_RNA (1)...(19): siRNA sense strand
gaaaacuuguguccugaau

SEQ ID NO: 1283745 - RNA, 19 nt, Homo sapiens
  misc_RNA (1)...(19): siRNA sense strand
gaugacacucuguucuuga

SEQ ID NO: 1283746 - RNA, 19 nt, Homo sapiens
  misc_RNA (1)...(19): siRNA sense strand
caauagcagcagcuuuaaa

SEQ ID NO: 1283747 - RNA, 19 nt, Homo sapiens
  misc_RNA (1)...(19): siRNA sense strand
ucagaagagcauaaaggua

SEQ ID NO: 1283748 - RNA, 19 nt, Homo sapiens
  misc_RNA (1)...(19): siRNA sense strand
uagaagaggaaacuaacaa

SEQ ID NO: 1283749 - RNA, 19 nt, Homo sapiens
  misc_RNA (1)...(19): siRNA sense strand
aaaaggaguucaagcaguu

SEQ ID NO: 1283750 - RNA, 19 nt, Homo sapiens
  misc_RNA (1)...(19): siRNA sense strand
caagagccuagaacagaaa

SEQ ID NO: 1283751 - RNA, 19 nt, Homo sapiens
  misc_RNA (1)...(19): siRNA sense strand
ccugugcaguguucuaaug

SEQ ID NO: 1283752 - RNA, 19 nt, Homo sapiens
  misc_RNA (1)...(19): siRNA sense strand
gaaagcucauuuggaaggu

SEQ ID NO: 1283753 - RNA, 19 nt, Homo sapiens
  misc_RNA (1)...(19): siRNA sense strand
aacaugauacccacauuaa

SEQ ID NO: 1283754 - RNA, 19 nt, Homo sapiens
  misc_RNA (1)...(19): siRNA sense strand
uaaacacagugccaaucug

SEQ ID NO: 1283755 - RNA, 19 nt, Homo sapiens
  misc_RNA (1)...(19): siRNA sense strand
gcagaaacuauaaagaaac

SEQ ID NO: 1283756 - RNA, 19 nt, Homo sapiens
  misc_RNA (1)...(19): siRNA sense strand
gaaaagaauguccaauuag

SEQ ID NO: 1283757 - RNA, 19 nt, Homo sapiens
  misc_RNA (1)...(19): siRNA sense strand
ggaaccugcagcaacauga

SEQ ID NO: 1283758 - RNA, 19 nt, Homo sapiens
  misc_RNA (1)...(19): siRNA sense strand
acaauugugcgaagauuau

SEQ ID NO: 1283759 - RNA, 19 nt, Homo sapiens
  misc_RNA (1)...(19): siRNA sense strand
aauuugaccugagaccuuu

SEQ ID NO: 1283760 - RNA, 19 nt, Homo sapiens
  misc_RNA (1)...(19): siRNA sense strand
cagcuagcagaaacuauaa

SEQ ID NO: 1283761 - RNA, 19 nt, Homo sapiens
  misc_RNA (1)...(19): siRNA sense strand
aagaacgccuacauuaaag

SEQ ID NO: 1283762 - RNA, 19 nt, Homo sapiens
  misc_RNA (1)...(19): siRNA sense strand
gacacucuguucuugaaag

SEQ ID NO: 1283763 - RNA, 19 nt, Homo sapiens
  misc_RNA (1)...(19): siRNA sense strand
ugacauagcugggaaguuu

SEQ ID NO: 1283764 - RNA, 19 nt, Homo sapiens
  misc_RNA (1)...(19): siRNA sense strand
gcugaaagcucucgaaauc

SEQ ID NO: 1283765 - RNA, 19 nt, Homo sapiens
  misc_RNA (1)...(19): siRNA sense strand
ggaauagcaucucaaguga

SEQ ID NO: 1283766 - RNA, 19 nt, Homo sapiens
  misc_RNA (1)...(19): siRNA sense strand
gaagaaugaugagaaggua

SEQ ID NO: 1283767 - RNA, 19 nt, Homo sapiens
  misc_RNA (1)...(19): siRNA sense strand
gaaagaagaggaagaggaa

SEQ ID NO: 1283768 - RNA, 19 nt, Homo sapiens
  misc_RNA (1)...(19): siRNA sense strand
gugaagaacuccauggaaa

SEQ ID NO: 1283769 - RNA, 19 nt, Homo sapiens
  misc_RNA (1)...(19): siRNA sense strand
cugagaaacucgucacuua

SEQ ID NO: 1283770 - RNA, 19 nt, Homo sapiens
  misc_RNA (1)...(19): siRNA sense strand
ugaagaaucugacguaaag

SEQ ID NO: 1283771 - RNA, 19 nt, Homo sapiens
  misc_RNA (1)...(19): siRNA sense strand
gaggaggagucucagaauu

SEQ ID NO: 1283772 - RNA, 19 nt, Homo sapiens
  misc_RNA (1)...(19): siRNA sense strand
cggaagaccugacugagaa

SEQ ID NO: 1283773 - RNA, 19 nt, Homo sapiens
  misc_RNA (1)...(19): siRNA sense strand
gaugaggaaugggaaguuu

SEQ ID NO: 1283774 - RNA, 19 nt, Homo sapiens
  misc_RNA (1)...(19): siRNA sense strand
gcagggcgcaugacuauga

SEQ ID NO: 1283775 - RNA, 19 nt, Homo sapiens
  misc_RNA (1)...(19): siRNA sense strand
ccucucggcugaugacaua

SEQ ID NO: 1283776 - RNA, 19 nt, Homo sapiens
  misc_RNA (1)...(19): siRNA sense strand
ggaagaggaagaagagauu

SEQ ID NO: 1283777 - RNA, 19 nt, Homo sapiens
  misc_RNA (1)...(19): siRNA sense strand
gagggaugcugaucuugaa

SEQ ID NO: 1283778 - RNA, 19 nt, Homo sapiens
  misc_RNA (1)...(19): siRNA sense strand
guggaugacugaagacuug

SEQ ID NO: 1283779 - RNA, 19 nt, Homo sapiens
  misc_RNA (1)...(19): siRNA sense strand
uugaugagguggccauaua

SEQ ID NO: 1283780 - RNA, 19 nt, Homo sapiens
  misc_RNA (1)...(19): siRNA sense strand
ggaaaucgagagugaguug

SEQ ID NO: 1283781 - RNA, 19 nt, Homo sapiens
  misc_RNA (1)...(19): siRNA sense strand
gaggaugaauuaugaaacu

SEQ ID NO: 1283782 - RNA, 19 nt, Homo sapiens
  misc_RNA (1)...(19): siRNA sense strand
cagccuacccucucaauuu

SEQ ID NO: 1283783 - RNA, 19 nt, Homo sapiens
  misc_RNA (1)...(19): siRNA sense strand
gaggugccaucacggguaa

SEQ ID NO: 1283784 - RNA, 19 nt, Homo sapiens
  misc_RNA (1)...(19): siRNA sense strand
cgaaaucgcccaggaaaug

SEQ ID NO: 1283785 - RNA, 19 nt, Homo sapiens
  misc_RNA (1)...(19): siRNA sense strand
caagcaguuuggaguauug

SEQ ID NO: 1283786 - RNA, 19 nt, Homo sapiens
  misc_RNA (1)...(19): siRNA sense strand
ccacagauuccgugaagaa

SEQ ID NO: 1283787 - RNA, 19 nt, Homo sapiens
  misc_RNA (1)...(19): siRNA sense strand
gcagaugagacgcccauuu

SEQ ID NO: 1283788 - RNA, 19 nt, Homo sapiens
  misc_RNA (1)...(19): siRNA sense strand
gaaaucgcccaggaaauga

SEQ ID NO: 1283789 - RNA, 19 nt, Homo sapiens
  misc_RNA (1)...(19): siRNA sense strand
gaugagacgcccauuuguu

SEQ ID NO: 1283790 - RNA, 19 nt, Homo sapiens
  misc_RNA (1)...(19): siRNA sense strand
uggaaagcaugaacacuga

SEQ ID NO: 1283791 - RNA, 19 nt, Homo sapiens
  misc_RNA (1)...(19): siRNA sense strand
cggcagacaugcagaaagu

SEQ ID NO: 1283792 - RNA, 19 nt, Homo sapiens
  misc_RNA (1)...(19): siRNA sense strand
cagaugagacgcccauuug

SEQ ID NO: 1283793 - RNA, 19 nt, Homo sapiens
  misc_RNA (1)...(19): siRNA sense strand
ggaggagucucagaauucu

SEQ ID NO: 1283794 - RNA, 19 nt, Homo sapiens
  misc_RNA (1)...(19): siRNA sense strand
gggaggcgaugcagcugaa

SEQ ID NO: 1283795 - RNA, 19 nt, Homo sapiens
  misc_RNA (1)...(19): siRNA sense strand
gcugggaaguuucaguuca

SEQ ID NO: 1283796 - RNA, 19 nt, Homo sapiens
  misc_RNA (1)...(19): siRNA sense strand
aaaugaagaaucugacgua

SEQ ID NO: 1283797 - RNA, 19 nt, Homo sapiens
  misc_RNA (1)...(19): siRNA sense strand
uggaauagcaucucaagug

SEQ ID NO: 1283798 - RNA, 19 nt, Homo sapiens
  misc_RNA (1)...(19): siRNA sense strand
caucacggguaacuguuga

SEQ ID NO: 1283799 - RNA, 19 nt, Homo sapiens
  misc_RNA (1)...(19): siRNA sense strand
gaaugcuaccucccaguuu

SEQ ID NO: 1283800 - RNA, 19 nt, Homo sapiens
  misc_RNA (1)...(19): siRNA sense strand
ggccgaauaugucagauac

SEQ ID NO: 1283801 - RNA, 19 nt, Homo sapiens
  misc_RNA (1)...(19): siRNA sense strand
gaaguuaccaccguacauc

SEQ ID NO: 1283802 - RNA, 19 nt, Homo sapiens
  misc_RNA (1)...(19): siRNA sense strand
gaugagguggccauauauu

SEQ ID NO: 1283803 - RNA, 19 nt, Homo sapiens
  misc_RNA (1)...(19): siRNA sense strand
caaccgggaaugcuaagaa

SEQ ID NO: 1283804 - RNA, 19 nt, Homo sapiens
  misc_RNA (1)...(19): siRNA sense strand
ugagacgcccauuuguuua

SEQ ID NO: 1283805 - RNA, 19 nt, Homo sapiens
  misc_RNA (1)...(19): siRNA sense strand
ugugggaaaucgagaguga

SEQ ID NO: 1283806 - RNA, 19 nt, Homo sapiens
  misc_RNA (1)...(19): siRNA sense strand
gacgauguccugugggaaa

SEQ ID NO: 1283807 - RNA, 19 nt, Homo sapiens
  misc_RNA (1)...(19): siRNA sense strand
cagacaugaucacccguuu

SEQ ID NO: 1283808 - RNA, 19 nt, Homo sapiens
  misc_RNA (1)...(19): siRNA sense strand
caugaucacccguuuggaa

SEQ ID NO: 1283809 - RNA, 19 nt, Homo sapiens
  misc_RNA (1)...(19): siRNA sense strand
guccaaggguucaagaagu

SEQ ID NO: 1283810 - RNA, 19 nt, Homo sapiens
  misc_RNA (1)...(19): siRNA sense strand
ucuacaagccacugaauga

SEQ ID NO: 1283811 - RNA, 19 nt, Homo sapiens
  misc_RNA (1)...(19): siRNA sense strand
gggaggaggagucucagaa

SEQ ID NO: 1283812 - RNA, 19 nt, Homo sapiens
  misc_RNA (1)...(19): siRNA sense strand
ggaggaggagucucagaau

SEQ ID NO: 1283813 - RNA, 19 nt, Homo sapiens
  misc_RNA (1)...(19): siRNA sense strand
acacugacauggugaucau

SEQ ID NO: 1283814 - RNA, 19 nt, Homo sapiens
  misc_RNA (1)...(19): siRNA sense strand
gguucaagcugaugguagu

SEQ ID NO: 1283815 - RNA, 19 nt, Homo sapiens
  misc_RNA (1)...(19): siRNA sense strand
guucgagacuggcgcaaag

SEQ ID NO: 1283816 - RNA, 19 nt, Homo sapiens
  misc_RNA (1)...(19): siRNA sense strand
ggaugcugaucuugaaugg

SEQ ID NO: 1283817 - RNA, 19 nt, Homo sapiens
  misc_RNA (1)...(19): siRNA sense strand
cgagggaugcugaucuuga

SEQ ID NO: 1283818 - RNA, 19 nt, Homo sapiens
  misc_RNA (1)...(19): siRNA sense strand
uuaccaccguacaucauuu

SEQ ID NO: 1283819 - RNA, 19 nt, Homo sapiens
  misc_RNA (1)...(19): siRNA sense strand
aaugaagaaucugacguaa

SEQ ID NO: 1283820 - RNA, 19 nt, Homo sapiens
  misc_RNA (1)...(19): siRNA sense strand
gaaagcaugaacacugaca

SEQ ID NO: 1283821 - RNA, 19 nt, Homo sapiens
  misc_RNA (1)...(19): siRNA sense strand
gcaguuuggaguauuggaa

SEQ ID NO: 1283822 - RNA, 19 nt, Homo sapiens
  misc_RNA (1)...(19): siRNA sense strand
gagacuggcgcaaagugaa

SEQ ID NO: 1283823 - RNA, 19 nt, Homo sapiens
  misc_RNA (1)...(19): siRNA sense strand
ccauaucuccagcaacuug

SEQ ID NO: 1283824 - RNA, 19 nt, Homo sapiens
  misc_RNA (1)...(19): siRNA sense strand
ccagugggauggaaauucg

SEQ ID NO: 1283825 - RNA, 19 nt, Homo sapiens
  misc_RNA (1)...(19): siRNA sense strand
ccaaacccaaugaaugcua

SEQ ID NO: 1283826 - RNA, 19 nt, Homo sapiens
  misc_RNA (1)...(19): siRNA sense strand
ggaugaauuaugaaacugu

SEQ ID NO: 1283827 - RNA, 19 nt, Homo sapiens
  misc_RNA (1)...(19): siRNA sense strand
cagauuccgugaagaacuc

SEQ ID NO: 1283828 - RNA, 19 nt, Homo sapiens
  misc_RNA (1)...(19): siRNA sense strand
agccuacccucucaauuug

SEQ ID NO: 1283829 - RNA, 19 nt, Homo sapiens
  misc_RNA (1)...(19): siRNA sense strand
ggaagaccugacugagaaa

SEQ ID NO: 1283830 - RNA, 19 nt, Homo sapiens
  misc_RNA (1)...(19): siRNA sense strand
ggguuggugucgaagaaug

SEQ ID NO: 1283831 - RNA, 19 nt, Homo sapiens
  misc_RNA (1)...(19): siRNA sense strand
guaguggaauaugcugaga

SEQ ID NO: 1283832 - RNA, 19 nt, Homo sapiens
  misc_RNA (1)...(19): siRNA sense strand
ucagcacuuugacagcuuu

SEQ ID NO: 1283833 - RNA, 19 nt, Homo sapiens
  misc_RNA (1)...(19): siRNA sense strand
gcagacaugcagaaaguac

SEQ ID NO: 1283834 - RNA, 19 nt, Homo sapiens
  misc_RNA (1)...(19): siRNA sense strand
gacaugaucacccguuugg

SEQ ID NO: 1283835 - RNA, 19 nt, Homo sapiens
  misc_RNA (1)...(19): siRNA sense strand
ggagaaccaccaaaagauu

SEQ ID NO: 1283836 - RNA, 19 nt, Homo sapiens
  misc_RNA (1)...(19): siRNA sense strand
ugccauaucuccagcaacu

SEQ ID NO: 1283837 - RNA, 19 nt, Homo sapiens
  misc_RNA (1)...(19): siRNA sense strand
gaagaggaagaagagauuc

SEQ ID NO: 1283838 - RNA, 19 nt, Homo sapiens
  misc_RNA (1)...(19): siRNA sense strand
gguauggguggaugacuga

SEQ ID NO: 1283839 - RNA, 19 nt, Homo sapiens
  misc_RNA (1)...(19): siRNA sense strand
ggguaacuguugauaacca

SEQ ID NO: 1283840 - RNA, 19 nt, Homo sapiens
  misc_RNA (1)...(19): siRNA sense strand
augagacgcccauuuguuu

SEQ ID NO: 1283841 - RNA, 19 nt, Homo sapiens
  misc_RNA (1)...(19): siRNA sense strand
cgaagaaugaugagaaggu

SEQ ID NO: 1283842 - RNA, 19 nt, Homo sapiens
  misc_RNA (1)...(19): siRNA sense strand
ggccaaacccaaugaaugc

SEQ ID NO: 1283843 - RNA, 19 nt, Homo sapiens
  misc_RNA (1)...(19): siRNA sense strand
gaggagaaccaccaaaaga

SEQ ID NO: 1283844 - RNA, 19 nt, Homo sapiens
  misc_RNA (1)...(19): siRNA sense strand
gucauggucgcguggaaua

SEQ ID NO: 1283845 - RNA, 19 nt, Homo sapiens
  misc_RNA (1)...(19): siRNA sense strand
gaagaacuccauggaaagc

SEQ ID NO: 1283846 - RNA, 19 nt, Homo sapiens
  misc_RNA (1)...(19): siRNA sense strand
ggaaguuaccaccguacau

SEQ ID NO: 1283847 - RNA, 19 nt, Homo sapiens
  misc_RNA (1)...(19): siRNA sense strand
gagacgcccauuuguuuag

SEQ ID NO: 1283848 - RNA, 19 nt, Homo sapiens
  misc_RNA (1)...(19): siRNA sense strand
ugaaugcuaccucccaguu

SEQ ID NO: 1283849 - RNA, 19 nt, Homo sapiens
  misc_RNA (1)...(19): siRNA sense strand
aaugcuaccucccaguuuc

SEQ ID NO: 1283850 - RNA, 19 nt, Homo sapiens
  misc_RNA (1)...(19): siRNA sense strand
uccaaggguucaagaagug

SEQ ID NO: 1283851 - RNA, 19 nt, Homo sapiens
  misc_RNA (1)...(19): siRNA sense strand
caggagcagugcccaagca

SEQ ID NO: 1283852 - RNA, 19 nt, Homo sapiens
  misc_RNA (1)...(19): siRNA sense strand
ugucgaagaaugaugagaa

SEQ ID NO: 1283853 - RNA, 19 nt, Homo sapiens
  misc_RNA (1)...(19): siRNA sense strand
gaggaagaagagauucaga

SEQ ID NO: 1283854 - RNA, 19 nt, Homo sapiens
  misc_RNA (1)...(19): siRNA sense strand
gcaacuuggaggaggaaga

SEQ ID NO: 1283855 - RNA, 19 nt, Homo sapiens
  misc_RNA (1)...(19): siRNA sense strand
uucaagaagugccauaucu

SEQ ID NO: 1283856 - RNA, 19 nt, Homo sapiens
  misc_RNA (1)...(19): siRNA sense strand
gaaugaugagaagguauga

SEQ ID NO: 1283857 - RNA, 19 nt, Homo sapiens
  misc_RNA (1)...(19): siRNA sense strand
ucacggguaacuguugaua

SEQ ID NO: 1283858 - RNA, 19 nt, Homo sapiens
  misc_RNA (1)...(19): siRNA sense strand
cgagacuggcgcaaaguga

SEQ ID NO: 1283859 - RNA, 19 nt, Homo sapiens
  misc_RNA (1)...(19): siRNA sense strand
gcccaaccgggaaugcuaa

SEQ ID NO: 1283860 - RNA, 19 nt, Homo sapiens
  misc_RNA (1)...(19): siRNA sense strand
caauuugagccugaaagaa

SEQ ID NO: 1283861 - RNA, 19 nt, Homo sapiens
  misc_RNA (1)...(19): siRNA sense strand
aagaagaggaagaggaaga

SEQ ID NO: 1283862 - RNA, 19 nt, Homo sapiens
  misc_RNA (1)...(19): siRNA sense strand
ugccacagauuccgugaag

SEQ ID NO: 1283863 - RNA, 19 nt, Homo sapiens
  misc_RNA (1)...(19): siRNA sense strand
caacaucauuggcaucaua

SEQ ID NO: 1283864 - RNA, 19 nt, Homo sapiens
  misc_RNA (1)...(19): siRNA sense strand
aagagucacugcauaauaa

SEQ ID NO: 1283865 - RNA, 19 nt, Homo sapiens
  misc_RNA (1)...(19): siRNA sense strand
caggaagaaugaagaagua

SEQ ID NO: 1283866 - RNA, 19 nt, Homo sapiens
  misc_RNA (1)...(19): siRNA sense strand
ggacuaaaucuacaaguga

SEQ ID NO: 1283867 - RNA, 19 nt, Homo sapiens
  misc_RNA (1)...(19): siRNA sense strand
gugcacaucuauauugaaa

SEQ ID NO: 1283868 - RNA, 19 nt, Homo sapiens
  misc_RNA (1)...(19): siRNA sense strand
ugacagagguauccagaug

SEQ ID NO: 1283869 - RNA, 19 nt, Homo sapiens
  misc_RNA (1)...(19): siRNA sense strand
gaagaaugaagaaguaaug

SEQ ID NO: 1283870 - RNA, 19 nt, Homo sapiens
  misc_RNA (1)...(19): siRNA sense strand
caucaucgcagaaauugua

SEQ ID NO: 1283871 - RNA, 19 nt, Homo sapiens
  misc_RNA (1)...(19): siRNA sense strand
gaaaccagcaggaagaaug

SEQ ID NO: 1283872 - RNA, 19 nt, Homo sapiens
  misc_RNA (1)...(19): siRNA sense strand
ugaagaugcugacuacgaa

SEQ ID NO: 1283873 - RNA, 19 nt, Homo sapiens
  misc_RNA (1)...(19): siRNA sense strand
ucaaagagucacugcauaa

SEQ ID NO: 1283874 - RNA, 19 nt, Homo sapiens
  misc_RNA (1)...(19): siRNA sense strand
ucauuggcaucauaguuua

SEQ ID NO: 1283875 - RNA, 19 nt, Homo sapiens
  misc_RNA (1)...(19): siRNA sense strand
ggacacagccgaauaucuc

SEQ ID NO: 1283876 - RNA, 19 nt, Homo sapiens
  misc_RNA (1)...(19): siRNA sense strand
gggcacggacuacugguua

SEQ ID NO: 1283877 - RNA, 19 nt, Homo sapiens
  misc_RNA (1)...(19): siRNA sense strand
aaagagucacugcauaaua

SEQ ID NO: 1283878 - RNA, 19 nt, Homo sapiens
  misc_RNA (1)...(19): siRNA sense strand
gcaagaaaaucgaucacuu

SEQ ID NO: 1283879 - RNA, 19 nt, Homo sapiens
  misc_RNA (1)...(19): siRNA sense strand
gcaaaggcuuccacaccau

SEQ ID NO: 1283880 - RNA, 19 nt, Homo sapiens
  misc_RNA (1)...(19): siRNA sense strand
gcaggaagaaugaagaagu

SEQ ID NO: 1283881 - RNA, 19 nt, Homo sapiens
  misc_RNA (1)...(19): siRNA sense strand
gcacggacuacugguuaua

SEQ ID NO: 1283882 - RNA, 19 nt, Homo sapiens
  misc_RNA (1)...(19): siRNA sense strand
acagagguauccagauguu

SEQ ID NO: 1283883 - RNA, 19 nt, Homo sapiens
  misc_RNA (1)...(19): siRNA sense strand
gacuaaaucuacaagugau

SEQ ID NO: 1283884 - RNA, 19 nt, Homo sapiens
  misc_RNA (1)...(19): siRNA sense strand
gaacaggacacagccgaau

SEQ ID NO: 1283885 - RNA, 19 nt, Homo sapiens
  misc_RNA (1)...(19): siRNA sense strand
ggaagaaugaagaaguaau

SEQ ID NO: 1283886 - RNA, 19 nt, Homo sapiens
  misc_RNA (1)...(19): siRNA sense strand
ggagccuucucuuucauca

SEQ ID NO: 1283887 - RNA, 19 nt, Homo sapiens
  misc_RNA (1)...(19): siRNA sense strand
cagcagacacaacgucauu

SEQ ID NO: 1283888 - RNA, 19 nt, Homo sapiens
  misc_RNA (1)...(19): siRNA sense strand
gugcaggacuaaaucuaca

SEQ ID NO: 1283889 - RNA, 19 nt, Homo sapiens
  misc_RNA (1)...(19): siRNA sense strand
agacacaacgucauucuca

SEQ ID NO: 1283890 - RNA, 19 nt, Homo sapiens
  misc_RNA (1)...(19): siRNA sense strand
ggguuaagcaacaucauug

SEQ ID NO: 1283891 - RNA, 19 nt, Homo sapiens
  misc_RNA (1)...(19): siRNA sense strand
agaggugugugcaggacua

SEQ ID NO: 1283892 - RNA, 19 nt, Homo sapiens
  misc_RNA (1)...(19): siRNA sense strand
cggaguuccugaagaaauc

SEQ ID NO: 1283893 - RNA, 19 nt, Homo sapiens
  misc_RNA (1)...(19): siRNA sense strand
uuucuacaguuccacaauu

SEQ ID NO: 1283894 - RNA, 19 nt, Homo sapiens
  misc_RNA (1)...(19): siRNA sense strand
uucaaagagucacugcaua

SEQ ID NO: 1283895 - RNA, 19 nt, Homo sapiens
  misc_RNA (1)...(19): siRNA sense strand
ccacaauuccacacccaaa

SEQ ID NO: 1283896 - RNA, 19 nt, Homo sapiens
  misc_RNA (1)...(19): siRNA sense strand
caucauuggcaucauaguu

SEQ ID NO: 1283897 - RNA, 19 nt, Homo sapiens
  misc_RNA (1)...(19): siRNA sense strand
caaagagucacugcauaau

SEQ ID NO: 1283898 - RNA, 19 nt, Homo sapiens
  misc_RNA (1)...(19): siRNA sense strand
uaggagccuuugccgcuuu

SEQ ID NO: 1283899 - RNA, 19 nt, Homo sapiens
  misc_RNA (1)...(19): siRNA sense strand
gaggaccugcugccuagaa

SEQ ID NO: 1283900 - RNA, 19 nt, Homo sapiens
  misc_RNA (1)...(19): siRNA sense strand
aggacuaaaucuacaagug

SEQ ID NO: 1283901 - RNA, 19 nt, Homo sapiens
  misc_RNA (1)...(19): siRNA sense strand
agagguauccagauguuga

SEQ ID NO: 1283902 - RNA, 19 nt, Homo sapiens
  misc_RNA (1)...(19): siRNA sense strand
caaagaguucaaagaguca

SEQ ID NO: 1283903 - RNA, 19 nt, Homo sapiens
  misc_RNA (1)...(19): siRNA sense strand
ggaccacgcuuuucuacag

SEQ ID NO: 1283904 - RNA, 19 nt, Homo sapiens
  misc_RNA (1)...(19): siRNA sense strand
gccgugcacaucuauauug

SEQ ID NO: 1283905 - RNA, 19 nt, Homo sapiens
  misc_RNA (1)...(19): siRNA sense strand
aaaccagcaggaagaauga

SEQ ID NO: 1283906 - RNA, 19 nt, Homo sapiens
  misc_RNA (1)...(19): siRNA sense strand
aaugaaaccagcaggaaga

SEQ ID NO: 1283907 - RNA, 19 nt, Homo sapiens
  misc_RNA (1)...(19): siRNA sense strand
cugaagaaaucuacuuuug

SEQ ID NO: 1283908 - RNA, 19 nt, Homo sapiens
  misc_RNA (1)...(19): siRNA sense strand
ccgugcacaucuauauuga

SEQ ID NO: 1283909 - RNA, 19 nt, Homo sapiens
  misc_RNA (1)...(19): siRNA sense strand
gcagacacaacgucauucu

SEQ ID NO: 1283910 - RNA, 19 nt, Homo sapiens
  misc_RNA (1)...(19): siRNA sense strand
aaaaguuacuccuaugguu

SEQ ID NO: 1283911 - RNA, 19 nt, Homo sapiens
  misc_RNA (1)...(19): siRNA sense strand
cccaaagaguucaaagagu

SEQ ID NO: 1283912 - RNA, 19 nt, Homo sapiens
  misc_RNA (1)...(19): siRNA sense strand
guucaaagagucacugcau

SEQ ID NO: 1283913 - RNA, 19 nt, Homo sapiens
  misc_RNA (1)...(19): siRNA sense strand
cagcaggaagaaugaagaa

SEQ ID NO: 1283914 - RNA, 19 nt, Homo sapiens
  misc_RNA (1)...(19): siRNA sense strand
ggcacggacuacugguuau

SEQ ID NO: 1283915 - RNA, 19 nt, Homo sapiens
  misc_RNA (1)...(19): siRNA sense strand
acaggacacagccgaauau

SEQ ID NO: 1283916 - RNA, 19 nt, Homo sapiens
  misc_RNA (1)...(19): siRNA sense strand
ggugugugcaggacuaaau

SEQ ID NO: 1283917 - RNA, 19 nt, Homo sapiens
  misc_RNA (1)...(19): siRNA sense strand
guugaucaccacuguagga

SEQ ID NO: 1283918 - RNA, 19 nt, Homo sapiens
  misc_RNA (1)...(19): siRNA sense strand
acggacuacugguuauauu

SEQ ID NO: 1283919 - RNA, 19 nt, Homo sapiens
  misc_RNA (1)...(19): siRNA sense strand
uuucggagccuucucuuuc

SEQ ID NO: 1283920 - RNA, 19 nt, Homo sapiens
  misc_RNA (1)...(19): siRNA sense strand
acaauuccacacccaaaga

SEQ ID NO: 1283921 - RNA, 19 nt, Homo sapiens
  misc_RNA (1)...(19): siRNA sense strand
gugucacgcugcuguucuu

SEQ ID NO: 1283922 - RNA, 19 nt, Homo sapiens
  misc_RNA (1)...(19): siRNA sense strand
gcaguuacgagccaaaucc

SEQ ID NO: 1283923 - RNA, 19 nt, Homo sapiens
  misc_RNA (1)...(19): siRNA sense strand
gauguugaucaccacugua

SEQ ID NO: 1283924 - RNA, 19 nt, Homo sapiens
  misc_RNA (1)...(19): siRNA sense strand
agauguugaucaccacugu

SEQ ID NO: 1283925 - RNA, 19 nt, Homo sapiens
  misc_RNA (1)...(19): siRNA sense strand
agccuucucuuucaucauc

SEQ ID NO: 1283926 - RNA, 19 nt, Homo sapiens
  misc_RNA (1)...(19): siRNA sense strand
gcaggguuaagcaacauca

SEQ ID NO: 1283927 - RNA, 19 nt, Homo sapiens
  misc_RNA (1)...(19): siRNA sense strand
caagaaaaucgaucacuuc

SEQ ID NO: 1283928 - RNA, 19 nt, Homo sapiens
  misc_RNA (1)...(19): siRNA sense strand
aacaggacacagccgaaua

SEQ ID NO: 1283929 - RNA, 19 nt, Homo sapiens
  misc_RNA (1)...(19): siRNA sense strand
caucgcagaaauuguagga

SEQ ID NO: 1283930 - RNA, 19 nt, Homo sapiens
  misc_RNA (1)...(19): siRNA sense strand
ggacuacugguuauauucc

SEQ ID NO: 1283931 - RNA, 19 nt, Homo sapiens
  misc_RNA (1)...(19): siRNA sense strand
ccagcaggaagaaugaaga

SEQ ID NO: 1283932 - RNA, 19 nt, Homo sapiens
  misc_RNA (1)...(19): siRNA sense strand
auaauaauccggccaacag

SEQ ID NO: 1283933 - RNA, 19 nt, Homo sapiens
  misc_RNA (1)...(19): siRNA sense strand
gacagagguauccagaugu

SEQ ID NO: 1283934 - RNA, 19 nt, Homo sapiens
  misc_RNA (1)...(19): siRNA sense strand
gcaacaucauuggcaucau

SEQ ID NO: 1283935 - RNA, 19 nt, Homo sapiens
  misc_RNA (1)...(19): siRNA sense strand
cugaagaugcugacuacga

SEQ ID NO: 1283936 - RNA, 19 nt, Homo sapiens
  misc_RNA (1)...(19): siRNA sense strand
gccuugagcccuuaaacuu

SEQ ID NO: 1283937 - RNA, 19 nt, Homo sapiens
  misc_RNA (1)...(19): siRNA sense strand
ucccugcucuccauacuuc

SEQ ID NO: 1283938 - RNA, 19 nt, Homo sapiens
  misc_RNA (1)...(19): siRNA sense strand
cuugagcccuuaaacuucu

SEQ ID NO: 1283939 - RNA, 19 nt, Homo sapiens
  misc_RNA (1)...(19): siRNA sense strand
gccuugagcccuuaaacuu

SEQ ID NO: 1283940 - RNA, 19 nt, Homo sapiens
  misc_RNA (1)...(19): siRNA sense strand
ucccugcucuccauacuuc

SEQ ID NO: 1283941 - RNA, 19 nt, Homo sapiens
  misc_RNA (1)...(19): siRNA sense strand
cuugagcccuuaaacuucu

SEQ ID NO: 1283942 - RNA, 19 nt, Homo sapiens
  misc_RNA (1)...(19): siRNA sense strand
gccuugagcccuuaaacuu

SEQ ID NO: 1283943 - RNA, 19 nt, Homo sapiens
  misc_RNA (1)...(19): siRNA sense strand
cuugagcccuuaaacuucu

SEQ ID NO: 1283944 - RNA, 19 nt, Homo sapiens
  misc_RNA (1)...(19): siRNA sense strand
gccuugagcccuuaaacuu

SEQ ID NO: 1283945 - RNA, 19 nt, Homo sapiens
  misc_RNA (1)...(19): siRNA sense strand
ucccugcucuccauacuuc

SEQ ID NO: 1283946 - RNA, 19 nt, Homo sapiens
  misc_RNA (1)...(19): siRNA sense strand
cuugagcccuuaaacuucu

SEQ ID NO: 1283947 - RNA, 19 nt, Homo sapiens
  misc_RNA (1)...(19): siRNA sense strand
gccuugagcccuuaaacuu

SEQ ID NO: 1283948 - RNA, 19 nt, Homo sapiens
  misc_RNA (1)...(19): siRNA sense strand
ucccugcucuccauacuuc

SEQ ID NO: 1283949 - RNA, 19 nt, Homo sapiens
  misc_RNA (1)...(19): siRNA sense strand
cuugagcccuuaaacuucu

SEQ ID NO: 1283950 - RNA, 19 nt, Homo sapiens
  misc_RNA (1)...(19): siRNA sense strand
gccuugagcccuuaaacuu

SEQ ID NO: 1283951 - RNA, 19 nt, Homo sapiens
  misc_RNA (1)...(19): siRNA sense strand
cuugagcccuuaaacuucu

SEQ ID NO: 1283952 - RNA, 19 nt, Homo sapiens
  misc_RNA (1)...(19): siRNA sense strand
gguaauggaugaugaagua

SEQ ID NO: 1283953 - RNA, 19 nt, Homo sapiens
  misc_RNA (1)...(19): siRNA sense strand
ggaauuggccuccuguauu

SEQ ID NO: 1283954 - RNA, 19 nt, Homo sapiens
  misc_RNA (1)...(19): siRNA sense strand
caacugcauucuauagauu

SEQ ID NO: 1283955 - RNA, 19 nt, Homo sapiens
  misc_RNA (1)...(19): siRNA sense strand
gcaacugcauucuauagau

SEQ ID NO: 1283956 - RNA, 19 nt, Homo sapiens
  misc_RNA (1)...(19): siRNA sense strand
agaagacuguguagcauuu

SEQ ID NO: 1283957 - RNA, 19 nt, Homo sapiens
  misc_RNA (1)...(19): siRNA sense strand
gcagagcccaccugaauga

SEQ ID NO: 1283958 - RNA, 19 nt, Homo sapiens
  misc_RNA (1)...(19): siRNA sense strand
ucgaacagaugacagagua

SEQ ID NO: 1283959 - RNA, 19 nt, Homo sapiens
  misc_RNA (1)...(19): siRNA sense strand
ccacaccauugcauauuug

SEQ ID NO: 1283960 - RNA, 19 nt, Homo sapiens
  misc_RNA (1)...(19): siRNA sense strand
gagaaaaugccaagaagua

SEQ ID NO: 1283961 - RNA, 19 nt, Homo sapiens
  misc_RNA (1)...(19): siRNA sense strand
gaacagaugacagaguaga

SEQ ID NO: 1283962 - RNA, 19 nt, Homo sapiens
  misc_RNA (1)...(19): siRNA sense strand
ugacagaguagaacgugua

SEQ ID NO: 1283963 - RNA, 19 nt, Homo sapiens
  misc_RNA (1)...(19): siRNA sense strand
ucacccagguaauggauga

SEQ ID NO: 1283964 - RNA, 19 nt, Homo sapiens
  misc_RNA (1)...(19): siRNA sense strand
ccaccugaaugaccuugaa

SEQ ID NO: 1283965 - RNA, 19 nt, Homo sapiens
  misc_RNA (1)...(19): siRNA sense strand
cuacagccauccugcacuu

SEQ ID NO: 1283966 - RNA, 19 nt, Homo sapiens
  misc_RNA (1)...(19): siRNA sense strand
aaaugaugcuuaugaguac

SEQ ID NO: 1283967 - RNA, 19 nt, Homo sapiens
  misc_RNA (1)...(19): siRNA sense strand
aauggaugaugaaguauuc

SEQ ID NO: 1283968 - RNA, 19 nt, Homo sapiens
  misc_RNA (1)...(19): siRNA sense strand
ccagaagacuguguagcau

SEQ ID NO: 1283969 - RNA, 19 nt, Homo sapiens
  misc_RNA (1)...(19): siRNA sense strand
acgcagagcccaccugaau

SEQ ID NO: 1283970 - RNA, 19 nt, Homo sapiens
  misc_RNA (1)...(19): siRNA sense strand
acagguugcugaaaaguaa

SEQ ID NO: 1283971 - RNA, 19 nt, Homo sapiens
  misc_RNA (1)...(19): siRNA sense strand
gcacuucagacuauuuguc

SEQ ID NO: 1283972 - RNA, 19 nt, Homo sapiens
  misc_RNA (1)...(19): siRNA sense strand
gcuuacagguugcugaaaa

SEQ ID NO: 1283973 - RNA, 19 nt, Homo sapiens
  misc_RNA (1)...(19): siRNA sense strand
cagaagacuguguagcauu

SEQ ID NO: 1283974 - RNA, 19 nt, Homo sapiens
  misc_RNA (1)...(19): siRNA sense strand
accacaccauugcauauuu

SEQ ID NO: 1283975 - RNA, 19 nt, Homo sapiens
  misc_RNA (1)...(19): siRNA sense strand
uuuguuggauauggaguua

SEQ ID NO: 1283976 - RNA, 19 nt, Homo sapiens
  misc_RNA (1)...(19): siRNA sense strand
cauccuaugcaacaauuau

SEQ ID NO: 1283977 - RNA, 19 nt, Homo sapiens
  misc_RNA (1)...(19): siRNA sense strand
gaagacuguguagcauuug

SEQ ID NO: 1283978 - RNA, 19 nt, Homo sapiens
  misc_RNA (1)...(19): siRNA sense strand
ccagguaauggaugaugaa

SEQ ID NO: 1283979 - RNA, 19 nt, Homo sapiens
  misc_RNA (1)...(19): siRNA sense strand
caauccagaagacugugua

SEQ ID NO: 1283980 - RNA, 19 nt, Homo sapiens
  misc_RNA (1)...(19): siRNA sense strand
cccagguaauggaugauga

SEQ ID NO: 1283981 - RNA, 19 nt, Homo sapiens
  misc_RNA (1)...(19): siRNA sense strand
agauugacaagaaagguuu

SEQ ID NO: 1283982 - RNA, 19 nt, Homo sapiens
  misc_RNA (1)...(19): siRNA sense strand
cuaccacaccauugcauau

SEQ ID NO: 1283983 - RNA, 19 nt, Homo sapiens
  misc_RNA (1)...(19): siRNA sense strand
gaaaaugccaagaaguauc

SEQ ID NO: 1283984 - RNA, 19 nt, Homo sapiens
  misc_RNA (1)...(19): siRNA sense strand
gcugaaaaguaaauuguac

SEQ ID NO: 1283985 - RNA, 19 nt, Homo sapiens
  misc_RNA (1)...(19): siRNA sense strand
caccauugcauauuugaca

SEQ ID NO: 1283986 - RNA, 19 nt, Homo sapiens
  misc_RNA (1)...(19): siRNA sense strand
uagauugacaagaaagguu

SEQ ID NO: 1283987 - RNA, 19 nt, Homo sapiens
  misc_RNA (1)...(19): siRNA sense strand
auccugcacuucagacuau

SEQ ID NO: 1283988 - RNA, 19 nt, Homo sapiens
  misc_RNA (1)...(19): siRNA sense strand
cauccugcacuucagacua

SEQ ID NO: 1283989 - RNA, 19 nt, Homo sapiens
  misc_RNA (1)...(19): siRNA sense strand
ggccuccuguauuccuuga

SEQ ID NO: 1283990 - RNA, 19 nt, Homo sapiens
  misc_RNA (1)...(19): siRNA sense strand
uggaauuggccuccuguau

SEQ ID NO: 1283991 - RNA, 19 nt, Homo sapiens
  misc_RNA (1)...(19): siRNA sense strand
gguaauggaugaugaagua

SEQ ID NO: 1283992 - RNA, 19 nt, Homo sapiens
  misc_RNA (1)...(19): siRNA sense strand
ggaauuggccuccuguauu

SEQ ID NO: 1283993 - RNA, 19 nt, Homo sapiens
  misc_RNA (1)...(19): siRNA sense strand
caacugcauucuauagauu

SEQ ID NO: 1283994 - RNA, 19 nt, Homo sapiens
  misc_RNA (1)...(19): siRNA sense strand
gcaacugcauucuauagau

SEQ ID NO: 1283995 - RNA, 19 nt, Homo sapiens
  misc_RNA (1)...(19): siRNA sense strand
agaagacuguguagcauuu

SEQ ID NO: 1283996 - RNA, 19 nt, Homo sapiens
  misc_RNA (1)...(19): siRNA sense strand
gcagagcccaccugaauga

SEQ ID NO: 1283997 - RNA, 19 nt, Homo sapiens
  misc_RNA (1)...(19): siRNA sense strand
ucgaacagaugacagagua

SEQ ID NO: 1283998 - RNA, 19 nt, Homo sapiens
  misc_RNA (1)...(19): siRNA sense strand
ccacaccauugcauauuug

SEQ ID NO: 1283999 - RNA, 19 nt, Homo sapiens
  misc_RNA (1)...(19): siRNA sense strand
gaacagaugacagaguaga

SEQ ID NO: 1284000 - RNA, 19 nt, Homo sapiens
  misc_RNA (1)...(19): siRNA sense strand
ugacagaguagaacgugua

SEQ ID NO: 1284001 - RNA, 19 nt, Homo sapiens
  misc_RNA (1)...(19): siRNA sense strand
ucacccagguaauggauga

SEQ ID NO: 1284002 - RNA, 19 nt, Homo sapiens
  misc_RNA (1)...(19): siRNA sense strand
ccaccugaaugaccuugaa

SEQ ID NO: 1284003 - RNA, 19 nt, Homo sapiens
  misc_RNA (1)...(19): siRNA sense strand
cuacagccauccugcacuu

SEQ ID NO: 1284004 - RNA, 19 nt, Homo sapiens
  misc_RNA (1)...(19): siRNA sense strand
aaaugaugcuuaugaguac

SEQ ID NO: 1284005 - RNA, 19 nt, Homo sapiens
  misc_RNA (1)...(19): siRNA sense strand
aauggaugaugaaguauuc

SEQ ID NO: 1284006 - RNA, 19 nt, Homo sapiens
  misc_RNA (1)...(19): siRNA sense strand
ccagaagacuguguagcau

SEQ ID NO: 1284007 - RNA, 19 nt, Homo sapiens
  misc_RNA (1)...(19): siRNA sense strand
acgcagagcccaccugaau

SEQ ID NO: 1284008 - RNA, 19 nt, Homo sapiens
  misc_RNA (1)...(19): siRNA sense strand
acagguugcugaaaaguaa

SEQ ID NO: 1284009 - RNA, 19 nt, Homo sapiens
  misc_RNA (1)...(19): siRNA sense strand
gcacuucagacuauuuguc

SEQ ID NO: 1284010 - RNA, 19 nt, Homo sapiens
  misc_RNA (1)...(19): siRNA sense strand
gcuuacagguugcugaaaa

SEQ ID NO: 1284011 - RNA, 19 nt, Homo sapiens
  misc_RNA (1)...(19): siRNA sense strand
cagaagacuguguagcauu

SEQ ID NO: 1284012 - RNA, 19 nt, Homo sapiens
  misc_RNA (1)...(19): siRNA sense strand
accacaccauugcauauuu

SEQ ID NO: 1284013 - RNA, 19 nt, Homo sapiens
  misc_RNA (1)...(19): siRNA sense strand
uuuguuggauauggaguua

SEQ ID NO: 1284014 - RNA, 19 nt, Homo sapiens
  misc_RNA (1)...(19): siRNA sense strand
cauccuaugcaacaauuau

SEQ ID NO: 1284015 - RNA, 19 nt, Homo sapiens
  misc_RNA (1)...(19): siRNA sense strand
gaagacuguguagcauuug

SEQ ID NO: 1284016 - RNA, 19 nt, Homo sapiens
  misc_RNA (1)...(19): siRNA sense strand
ccagguaauggaugaugaa

SEQ ID NO: 1284017 - RNA, 19 nt, Homo sapiens
  misc_RNA (1)...(19): siRNA sense strand
caauccagaagacugugua

SEQ ID NO: 1284018 - RNA, 19 nt, Homo sapiens
  misc_RNA (1)...(19): siRNA sense strand
cccagguaauggaugauga

SEQ ID NO: 1284019 - RNA, 19 nt, Homo sapiens
  misc_RNA (1)...(19): siRNA sense strand
agauugacaagaaagguuu

SEQ ID NO: 1284020 - RNA, 19 nt, Homo sapiens
  misc_RNA (1)...(19): siRNA sense strand
cuaccacaccauugcauau

SEQ ID NO: 1284021 - RNA, 19 nt, Homo sapiens
  misc_RNA (1)...(19): siRNA sense strand
caccauugcauauuugaca

SEQ ID NO: 1284022 - RNA, 19 nt, Homo sapiens
  misc_RNA (1)...(19): siRNA sense strand
gcugaaaaguaaauuguac

SEQ ID NO: 1284023 - RNA, 19 nt, Homo sapiens
  misc_RNA (1)...(19): siRNA sense strand
uagauugacaagaaagguu

SEQ ID NO: 1284024 - RNA, 19 nt, Homo sapiens
  misc_RNA (1)...(19): siRNA sense strand
auccugcacuucagacuau

SEQ ID NO: 1284025 - RNA, 19 nt, Homo sapiens
  misc_RNA (1)...(19): siRNA sense strand
cauccugcacuucagacua

SEQ ID NO: 1284026 - RNA, 19 nt, Homo sapiens
  misc_RNA (1)...(19): siRNA sense strand
ggccuccuguauuccuuga

SEQ ID NO: 1284027 - RNA, 19 nt, Homo sapiens
  misc_RNA (1)...(19): siRNA sense strand
uggaauuggccuccuguau

SEQ ID NO: 1284028 - RNA, 19 nt, Homo sapiens
  misc_RNA (1)...(19): siRNA sense strand
gguaauggaugaugaagua

SEQ ID NO: 1284029 - RNA, 19 nt, Homo sapiens
  misc_RNA (1)...(19): siRNA sense strand
ggaauuggccuccuguauu

SEQ ID NO: 1284030 - RNA, 19 nt, Homo sapiens
  misc_RNA (1)...(19): siRNA sense strand
caacugcauucuauagauu

SEQ ID NO: 1284031 - RNA, 19 nt, Homo sapiens
  misc_RNA (1)...(19): siRNA sense strand
gcaacugcauucuauagau

SEQ ID NO: 1284032 - RNA, 19 nt, Homo sapiens
  misc_RNA (1)...(19): siRNA sense strand
agaagacuguguagcauuu

SEQ ID NO: 1284033 - RNA, 19 nt, Homo sapiens
  misc_RNA (1)...(19): siRNA sense strand
gcagagcccaccugaauga

SEQ ID NO: 1284034 - RNA, 19 nt, Homo sapiens
  misc_RNA (1)...(19): siRNA sense strand
ucgaacagaugacagagua

SEQ ID NO: 1284035 - RNA, 19 nt, Homo sapiens
  misc_RNA (1)...(19): siRNA sense strand
ccacaccauugcauauuug

SEQ ID NO: 1284036 - RNA, 19 nt, Homo sapiens
  misc_RNA (1)...(19): siRNA sense strand
gaacagaugacagaguaga

SEQ ID NO: 1284037 - RNA, 19 nt, Homo sapiens
  misc_RNA (1)...(19): siRNA sense strand
ugacagaguagaacgugua

SEQ ID NO: 1284038 - RNA, 19 nt, Homo sapiens
  misc_RNA (1)...(19): siRNA sense strand
ucacccagguaauggauga

SEQ ID NO: 1284039 - RNA, 19 nt, Homo sapiens
  misc_RNA (1)...(19): siRNA sense strand
ccaccugaaugaccuugaa

SEQ ID NO: 1284040 - RNA, 19 nt, Homo sapiens
  misc_RNA (1)...(19): siRNA sense strand
cuacagccauccugcacuu

SEQ ID NO: 1284041 - RNA, 19 nt, Homo sapiens
  misc_RNA (1)...(19): siRNA sense strand
aaaugaugcuuaugaguac

SEQ ID NO: 1284042 - RNA, 19 nt, Homo sapiens
  misc_RNA (1)...(19): siRNA sense strand
aauggaugaugaaguauuc

SEQ ID NO: 1284043 - RNA, 19 nt, Homo sapiens
  misc_RNA (1)...(19): siRNA sense strand
ccagaagacuguguagcau

SEQ ID NO: 1284044 - RNA, 19 nt, Homo sapiens
  misc_RNA (1)...(19): siRNA sense strand
acgcagagcccaccugaau

SEQ ID NO: 1284045 - RNA, 19 nt, Homo sapiens
  misc_RNA (1)...(19): siRNA sense strand
acagguugcugaaaaguaa

SEQ ID NO: 1284046 - RNA, 19 nt, Homo sapiens
  misc_RNA (1)...(19): siRNA sense strand
gcacuucagacuauuuguc

SEQ ID NO: 1284047 - RNA, 19 nt, Homo sapiens
  misc_RNA (1)...(19): siRNA sense strand
gcuuacagguugcugaaaa

SEQ ID NO: 1284048 - RNA, 19 nt, Homo sapiens
  misc_RNA (1)...(19): siRNA sense strand
cagaagacuguguagcauu

SEQ ID NO: 1284049 - RNA, 19 nt, Homo sapiens
  misc_RNA (1)...(19): siRNA sense strand
accacaccauugcauauuu

SEQ ID NO: 1284050 - RNA, 19 nt, Homo sapiens
  misc_RNA (1)...(19): siRNA sense strand
uuuguuggauauggaguua

SEQ ID NO: 1284051 - RNA, 19 nt, Homo sapiens
  misc_RNA (1)...(19): siRNA sense strand
cauccuaugcaacaauuau

SEQ ID NO: 1284052 - RNA, 19 nt, Homo sapiens
  misc_RNA (1)...(19): siRNA sense strand
gaagacuguguagcauuug

SEQ ID NO: 1284053 - RNA, 19 nt, Homo sapiens
  misc_RNA (1)...(19): siRNA sense strand
ccagguaauggaugaugaa

SEQ ID NO: 1284054 - RNA, 19 nt, Homo sapiens
  misc_RNA (1)...(19): siRNA sense strand
caauccagaagacugugua

SEQ ID NO: 1284055 - RNA, 19 nt, Homo sapiens
  misc_RNA (1)...(19): siRNA sense strand
cccagguaauggaugauga

SEQ ID NO: 1284056 - RNA, 19 nt, Homo sapiens
  misc_RNA (1)...(19): siRNA sense strand
agauugacaagaaagguuu

SEQ ID NO: 1284057 - RNA, 19 nt, Homo sapiens
  misc_RNA (1)...(19): siRNA sense strand
cuaccacaccauugcauau

SEQ ID NO: 1284058 - RNA, 19 nt, Homo sapiens
  misc_RNA (1)...(19): siRNA sense strand
caccauugcauauuugaca

SEQ ID NO: 1284059 - RNA, 19 nt, Homo sapiens
  misc_RNA (1)...(19): siRNA sense strand
gcugaaaaguaaauuguac

SEQ ID NO: 1284060 - RNA, 19 nt, Homo sapiens
  misc_RNA (1)...(19): siRNA sense strand
uagauugacaagaaagguu

SEQ ID NO: 1284061 - RNA, 19 nt, Homo sapiens
  misc_RNA (1)...(19): siRNA sense strand
auccugcacuucagacuau

SEQ ID NO: 1284062 - RNA, 19 nt, Homo sapiens
  misc_RNA (1)...(19): siRNA sense strand
cauccugcacuucagacua

SEQ ID NO: 1284063 - RNA, 19 nt, Homo sapiens
  misc_RNA (1)...(19): siRNA sense strand
ggccuccuguauuccuuga

SEQ ID NO: 1284064 - RNA, 19 nt, Homo sapiens
  misc_RNA (1)...(19): siRNA sense strand
uggaauuggccuccuguau

SEQ ID NO: 1284065 - RNA, 19 nt, Homo sapiens
  misc_RNA (1)...(19): siRNA sense strand
gguaauggaugaugaagua

SEQ ID NO: 1284066 - RNA, 19 nt, Homo sapiens
  misc_RNA (1)...(19): siRNA sense strand
ggaauuggccuccuguauu

SEQ ID NO: 1284067 - RNA, 19 nt, Homo sapiens
  misc_RNA (1)...(19): siRNA sense strand
caacugcauucuauagauu

SEQ ID NO: 1284068 - RNA, 19 nt, Homo sapiens
  misc_RNA (1)...(19): siRNA sense strand
gcaacugcauucuauagau

SEQ ID NO: 1284069 - RNA, 19 nt, Homo sapiens
  misc_RNA (1)...(19): siRNA sense strand
agaagacuguguagcauuu

SEQ ID NO: 1284070 - RNA, 19 nt, Homo sapiens
  misc_RNA (1)...(19): siRNA sense strand
gcagagcccaccugaauga

SEQ ID NO: 1284071 - RNA, 19 nt, Homo sapiens
  misc_RNA (1)...(19): siRNA sense strand
ucgaacagaugacagagua

SEQ ID NO: 1284072 - RNA, 19 nt, Homo sapiens
  misc_RNA (1)...(19): siRNA sense strand
ccacaccauugcauauuug

SEQ ID NO: 1284073 - RNA, 19 nt, Homo sapiens
  misc_RNA (1)...(19): siRNA sense strand
gaacagaugacagaguaga

SEQ ID NO: 1284074 - RNA, 19 nt, Homo sapiens
  misc_RNA (1)...(19): siRNA sense strand
ugacagaguagaacgugua

SEQ ID NO: 1284075 - RNA, 19 nt, Homo sapiens
  misc_RNA (1)...(19): siRNA sense strand
ucacccagguaauggauga

SEQ ID NO: 1284076 - RNA, 19 nt, Homo sapiens
  misc_RNA (1)...(19): siRNA sense strand
ccaccugaaugaccuugaa

SEQ ID NO: 1284077 - RNA, 19 nt, Homo sapiens
  misc_RNA (1)...(19): siRNA sense strand
cuacagccauccugcacuu

SEQ ID NO: 1284078 - RNA, 19 nt, Homo sapiens
  misc_RNA (1)...(19): siRNA sense strand
aaaugaugcuuaugaguac

SEQ ID NO: 1284079 - RNA, 19 nt, Homo sapiens
  misc_RNA (1)...(19): siRNA sense strand
aauggaugaugaaguauuc

SEQ ID NO: 1284080 - RNA, 19 nt, Homo sapiens
  misc_RNA (1)...(19): siRNA sense strand
ccagaagacuguguagcau

SEQ ID NO: 1284081 - RNA, 19 nt, Homo sapiens
  misc_RNA (1)...(19): siRNA sense strand
acgcagagcccaccugaau

SEQ ID NO: 1284082 - RNA, 19 nt, Homo sapiens
  misc_RNA (1)...(19): siRNA sense strand
acagguugcugaaaaguaa

SEQ ID NO: 1284083 - RNA, 19 nt, Homo sapiens
  misc_RNA (1)...(19): siRNA sense strand
gcacuucagacuauuuguc

SEQ ID NO: 1284084 - RNA, 19 nt, Homo sapiens
  misc_RNA (1)...(19): siRNA sense strand
gcuuacagguugcugaaaa

SEQ ID NO: 1284085 - RNA, 19 nt, Homo sapiens
  misc_RNA (1)...(19): siRNA sense strand
cagaagacuguguagcauu

SEQ ID NO: 1284086 - RNA, 19 nt, Homo sapiens
  misc_RNA (1)...(19): siRNA sense strand
accacaccauugcauauuu

SEQ ID NO: 1284087 - RNA, 19 nt, Homo sapiens
  misc_RNA (1)...(19): siRNA sense strand
uuuguuggauauggaguua

SEQ ID NO: 1284088 - RNA, 19 nt, Homo sapiens
  misc_RNA (1)...(19): siRNA sense strand
cauccuaugcaacaauuau

SEQ ID NO: 1284089 - RNA, 19 nt, Homo sapiens
  misc_RNA (1)...(19): siRNA sense strand
gaagacuguguagcauuug

SEQ ID NO: 1284090 - RNA, 19 nt, Homo sapiens
  misc_RNA (1)...(19): siRNA sense strand
ccagguaauggaugaugaa

SEQ ID NO: 1284091 - RNA, 19 nt, Homo sapiens
  misc_RNA (1)...(19): siRNA sense strand
caauccagaagacugugua

SEQ ID NO: 1284092 - RNA, 19 nt, Homo sapiens
  misc_RNA (1)...(19): siRNA sense strand
cccagguaauggaugauga

SEQ ID NO: 1284093 - RNA, 19 nt, Homo sapiens
  misc_RNA (1)...(19): siRNA sense strand
agauugacaagaaagguuu

SEQ ID NO: 1284094 - RNA, 19 nt, Homo sapiens
  misc_RNA (1)...(19): siRNA sense strand
cuaccacaccauugcauau

SEQ ID NO: 1284095 - RNA, 19 nt, Homo sapiens
  misc_RNA (1)...(19): siRNA sense strand
caccauugcauauuugaca

SEQ ID NO: 1284096 - RNA, 19 nt, Homo sapiens
  misc_RNA (1)...(19): siRNA sense strand
gcugaaaaguaaauuguac

SEQ ID NO: 1284097 - RNA, 19 nt, Homo sapiens
  misc_RNA (1)...(19): siRNA sense strand
uagauugacaagaaagguu

SEQ ID NO: 1284098 - RNA, 19 nt, Homo sapiens
  misc_RNA (1)...(19): siRNA sense strand
auccugcacuucagacuau

SEQ ID NO: 1284099 - RNA, 19 nt, Homo sapiens
  misc_RNA (1)...(19): siRNA sense strand
cauccugcacuucagacua

SEQ ID NO: 1284100 - RNA, 19 nt, Homo sapiens
  misc_RNA (1)...(19): siRNA sense strand
ggccuccuguauuccuuga

SEQ ID NO: 1284101 - RNA, 19 nt, Homo sapiens
  misc_RNA (1)...(19): siRNA sense strand
uggaauuggccuccuguau

SEQ ID NO: 1284102 - RNA, 19 nt, Homo sapiens
  misc_RNA (1)...(19): siRNA sense strand
gguaauggaugaugaagua

SEQ ID NO: 1284103 - RNA, 19 nt, Homo sapiens
  misc_RNA (1)...(19): siRNA sense strand
ggaauuggccuccuguauu

SEQ ID NO: 1284104 - RNA, 19 nt, Homo sapiens
  misc_RNA (1)...(19): siRNA sense strand
caacugcauucuauagauu

SEQ ID NO: 1284105 - RNA, 19 nt, Homo sapiens
  misc_RNA (1)...(19): siRNA sense strand
gcaacugcauucuauagau

SEQ ID NO: 1284106 - RNA, 19 nt, Homo sapiens
  misc_RNA (1)...(19): siRNA sense strand
agaagacuguguagcauuu

SEQ ID NO: 1284107 - RNA, 19 nt, Homo sapiens
  misc_RNA (1)...(19): siRNA sense strand
gcagagcccaccugaauga

SEQ ID NO: 1284108 - RNA, 19 nt, Homo sapiens
  misc_RNA (1)...(19): siRNA sense strand
ucgaacagaugacagagua

SEQ ID NO: 1284109 - RNA, 19 nt, Homo sapiens
  misc_RNA (1)...(19): siRNA sense strand
ccacaccauugcauauuug

SEQ ID NO: 1284110 - RNA, 19 nt, Homo sapiens
  misc_RNA (1)...(19): siRNA sense strand
gagaaaaugccaagaagua

SEQ ID NO: 1284111 - RNA, 19 nt, Homo sapiens
  misc_RNA (1)...(19): siRNA sense strand
gaacagaugacagaguaga

SEQ ID NO: 1284112 - RNA, 19 nt, Homo sapiens
  misc_RNA (1)...(19): siRNA sense strand
ugacagaguagaacgugua

SEQ ID NO: 1284113 - RNA, 19 nt, Homo sapiens
  misc_RNA (1)...(19): siRNA sense strand
ucacccagguaauggauga

SEQ ID NO: 1284114 - RNA, 19 nt, Homo sapiens
  misc_RNA (1)...(19): siRNA sense strand
ccaccugaaugaccuugaa

SEQ ID NO: 1284115 - RNA, 19 nt, Homo sapiens
  misc_RNA (1)...(19): siRNA sense strand
cuacagccauccugcacuu

SEQ ID NO: 1284116 - RNA, 19 nt, Homo sapiens
  misc_RNA (1)...(19): siRNA sense strand
aaaugaugcuuaugaguac

SEQ ID NO: 1284117 - RNA, 19 nt, Homo sapiens
  misc_RNA (1)...(19): siRNA sense strand
aauggaugaugaaguauuc

SEQ ID NO: 1284118 - RNA, 19 nt, Homo sapiens
  misc_RNA (1)...(19): siRNA sense strand
ccagaagacuguguagcau

SEQ ID NO: 1284119 - RNA, 19 nt, Homo sapiens
  misc_RNA (1)...(19): siRNA sense strand
acgcagagcccaccugaau

SEQ ID NO: 1284120 - RNA, 19 nt, Homo sapiens
  misc_RNA (1)...(19): siRNA sense strand
acagguugcugaaaaguaa

SEQ ID NO: 1284121 - RNA, 19 nt, Homo sapiens
  misc_RNA (1)...(19): siRNA sense strand
gcacuucagacuauuuguc

SEQ ID NO: 1284122 - RNA, 19 nt, Homo sapiens
  misc_RNA (1)...(19): siRNA sense strand
gcuuacagguugcugaaaa

SEQ ID NO: 1284123 - RNA, 19 nt, Homo sapiens
  misc_RNA (1)...(19): siRNA sense strand
cagaagacuguguagcauu

SEQ ID NO: 1284124 - RNA, 19 nt, Homo sapiens
  misc_RNA (1)...(19): siRNA sense strand
accacaccauugcauauuu

SEQ ID NO: 1284125 - RNA, 19 nt, Homo sapiens
  misc_RNA (1)...(19): siRNA sense strand
uuuguuggauauggaguua

SEQ ID NO: 1284126 - RNA, 19 nt, Homo sapiens
  misc_RNA (1)...(19): siRNA sense strand
cauccuaugcaacaauuau

SEQ ID NO: 1284127 - RNA, 19 nt, Homo sapiens
  misc_RNA (1)...(19): siRNA sense strand
gaagacuguguagcauuug

SEQ ID NO: 1284128 - RNA, 19 nt, Homo sapiens
  misc_RNA (1)...(19): siRNA sense strand
ccagguaauggaugaugaa

SEQ ID NO: 1284129 - RNA, 19 nt, Homo sapiens
  misc_RNA (1)...(19): siRNA sense strand
caauccagaagacugugua

SEQ ID NO: 1284130 - RNA, 19 nt, Homo sapiens
  misc_RNA (1)...(19): siRNA sense strand
cccagguaauggaugauga

SEQ ID NO: 1284131 - RNA, 19 nt, Homo sapiens
  misc_RNA (1)...(19): siRNA sense strand
agauugacaagaaagguuu

SEQ ID NO: 1284132 - RNA, 19 nt, Homo sapiens
  misc_RNA (1)...(19): siRNA sense strand
cuaccacaccauugcauau

SEQ ID NO: 1284133 - RNA, 19 nt, Homo sapiens
  misc_RNA (1)...(19): siRNA sense strand
gaaaaugccaagaaguauc

SEQ ID NO: 1284134 - RNA, 19 nt, Homo sapiens
  misc_RNA (1)...(19): siRNA sense strand
gcugaaaaguaaauuguac

SEQ ID NO: 1284135 - RNA, 19 nt, Homo sapiens
  misc_RNA (1)...(19): siRNA sense strand
caccauugcauauuugaca

SEQ ID NO: 1284136 - RNA, 19 nt, Homo sapiens
  misc_RNA (1)...(19): siRNA sense strand
uagauugacaagaaagguu

SEQ ID NO: 1284137 - RNA, 19 nt, Homo sapiens
  misc_RNA (1)...(19): siRNA sense strand
auccugcacuucagacuau

SEQ ID NO: 1284138 - RNA, 19 nt, Homo sapiens
  misc_RNA (1)...(19): siRNA sense strand
cauccugcacuucagacua

SEQ ID NO: 1284139 - RNA, 19 nt, Homo sapiens
  misc_RNA (1)...(19): siRNA sense strand
ggccuccuguauuccuuga

SEQ ID NO: 1284140 - RNA, 19 nt, Homo sapiens
  misc_RNA (1)...(19): siRNA sense strand
uggaauuggccuccuguau

SEQ ID NO: 1284141 - RNA, 19 nt, Homo sapiens
  misc_RNA (1)...(19): siRNA sense strand
gguaauggaugaugaagua

SEQ ID NO: 1284142 - RNA, 19 nt, Homo sapiens
  misc_RNA (1)...(19): siRNA sense strand
ggaauuggccuccuguauu

SEQ ID NO: 1284143 - RNA, 19 nt, Homo sapiens
  misc_RNA (1)...(19): siRNA sense strand
caacugcauucuauagauu

SEQ ID NO: 1284144 - RNA, 19 nt, Homo sapiens
  misc_RNA (1)...(19): siRNA sense strand
gcaacugcauucuauagau

SEQ ID NO: 1284145 - RNA, 19 nt, Homo sapiens
  misc_RNA (1)...(19): siRNA sense strand
agaagacuguguagcauuu

SEQ ID NO: 1284146 - RNA, 19 nt, Homo sapiens
  misc_RNA (1)...(19): siRNA sense strand
gcagagcccaccugaauga

SEQ ID NO: 1284147 - RNA, 19 nt, Homo sapiens
  misc_RNA (1)...(19): siRNA sense strand
ucgaacagaugacagagua

SEQ ID NO: 1284148 - RNA, 19 nt, Homo sapiens
  misc_RNA (1)...(19): siRNA sense strand
ccacaccauugcauauuug

SEQ ID NO: 1284149 - RNA, 19 nt, Homo sapiens
  misc_RNA (1)...(19): siRNA sense strand
gaacagaugacagaguaga

SEQ ID NO: 1284150 - RNA, 19 nt, Homo sapiens
  misc_RNA (1)...(19): siRNA sense strand
ugacagaguagaacgugua

SEQ ID NO: 1284151 - RNA, 19 nt, Homo sapiens
  misc_RNA (1)...(19): siRNA sense strand
ucacccagguaauggauga

SEQ ID NO: 1284152 - RNA, 19 nt, Homo sapiens
  misc_RNA (1)...(19): siRNA sense strand
ccaccugaaugaccuugaa

SEQ ID NO: 1284153 - RNA, 19 nt, Homo sapiens
  misc_RNA (1)...(19): siRNA sense strand
cuacagccauccugcacuu

SEQ ID NO: 1284154 - RNA, 19 nt, Homo sapiens
  misc_RNA (1)...(19): siRNA sense strand
aaaugaugcuuaugaguac

SEQ ID NO: 1284155 - RNA, 19 nt, Homo sapiens
  misc_RNA (1)...(19): siRNA sense strand
aauggaugaugaaguauuc

SEQ ID NO: 1284156 - RNA, 19 nt, Homo sapiens
  misc_RNA (1)...(19): siRNA sense strand
ccagaagacuguguagcau

SEQ ID NO: 1284157 - RNA, 19 nt, Homo sapiens
  misc_RNA (1)...(19): siRNA sense strand
acgcagagcccaccugaau

SEQ ID NO: 1284158 - RNA, 19 nt, Homo sapiens
  misc_RNA (1)...(19): siRNA sense strand
acagguugcugaaaaguaa

SEQ ID NO: 1284159 - RNA, 19 nt, Homo sapiens
  misc_RNA (1)...(19): siRNA sense strand
gcacuucagacuauuuguc

SEQ ID NO: 1284160 - RNA, 19 nt, Homo sapiens
  misc_RNA (1)...(19): siRNA sense strand
gcuuacagguugcugaaaa

SEQ ID NO: 1284161 - RNA, 19 nt, Homo sapiens
  misc_RNA (1)...(19): siRNA sense strand
cagaagacuguguagcauu

SEQ ID NO: 1284162 - RNA, 19 nt, Homo sapiens
  misc_RNA (1)...(19): siRNA sense strand
accacaccauugcauauuu

SEQ ID NO: 1284163 - RNA, 19 nt, Homo sapiens
  misc_RNA (1)...(19): siRNA sense strand
uuuguuggauauggaguua

SEQ ID NO: 1284164 - RNA, 19 nt, Homo sapiens
  misc_RNA (1)...(19): siRNA sense strand
cauccuaugcaacaauuau

SEQ ID NO: 1284165 - RNA, 19 nt, Homo sapiens
  misc_RNA (1)...(19): siRNA sense strand
gaagacuguguagcauuug

SEQ ID NO: 1284166 - RNA, 19 nt, Homo sapiens
  misc_RNA (1)...(19): siRNA sense strand
ccagguaauggaugaugaa

SEQ ID NO: 1284167 - RNA, 19 nt, Homo sapiens
  misc_RNA (1)...(19): siRNA sense strand
caauccagaagacugugua

SEQ ID NO: 1284168 - RNA, 19 nt, Homo sapiens
  misc_RNA (1)...(19): siRNA sense strand
cccagguaauggaugauga

SEQ ID NO: 1284169 - RNA, 19 nt, Homo sapiens
  misc_RNA (1)...(19): siRNA sense strand
agauugacaagaaagguuu

SEQ ID NO: 1284170 - RNA, 19 nt, Homo sapiens
  misc_RNA (1)...(19): siRNA sense strand
cuaccacaccauugcauau

SEQ ID NO: 1284171 - RNA, 19 nt, Homo sapiens
  misc_RNA (1)...(19): siRNA sense strand
caccauugcauauuugaca

SEQ ID NO: 1284172 - RNA, 19 nt, Homo sapiens
  misc_RNA (1)...(19): siRNA sense strand
gcugaaaaguaaauuguac

SEQ ID NO: 1284173 - RNA, 19 nt, Homo sapiens
  misc_RNA (1)...(19): siRNA sense strand
uagauugacaagaaagguu

SEQ ID NO: 1284174 - RNA, 19 nt, Homo sapiens
  misc_RNA (1)...(19): siRNA sense strand
auccugcacuucagacuau

SEQ ID NO: 1284175 - RNA, 19 nt, Homo sapiens
  misc_RNA (1)...(19): siRNA sense strand
cauccugcacuucagacua

SEQ ID NO: 1284176 - RNA, 19 nt, Homo sapiens
  misc_RNA (1)...(19): siRNA sense strand
ggccuccuguauuccuuga

SEQ ID NO: 1284177 - RNA, 19 nt, Homo sapiens
  misc_RNA (1)...(19): siRNA sense strand
uggaauuggccuccuguau

SEQ ID NO: 1284178 - RNA, 19 nt, Homo sapiens
  misc_RNA (1)...(19): siRNA sense strand
gguaauggaugaugaagua

SEQ ID NO: 1284179 - RNA, 19 nt, Homo sapiens
  misc_RNA (1)...(19): siRNA sense strand
ggaauuggccuccuguauu

SEQ ID NO: 1284180 - RNA, 19 nt, Homo sapiens
  misc_RNA (1)...(19): siRNA sense strand
caacugcauucuauagauu

SEQ ID NO: 1284181 - RNA, 19 nt, Homo sapiens
  misc_RNA (1)...(19): siRNA sense strand
gcaacugcauucuauagau

SEQ ID NO: 1284182 - RNA, 19 nt, Homo sapiens
  misc_RNA (1)...(19): siRNA sense strand
agaagacuguguagcauuu

SEQ ID NO: 1284183 - RNA, 19 nt, Homo sapiens
  misc_RNA (1)...(19): siRNA sense strand
gcagagcccaccugaauga

SEQ ID NO: 1284184 - RNA, 19 nt, Homo sapiens
  misc_RNA (1)...(19): siRNA sense strand
ucgaacagaugacagagua

SEQ ID NO: 1284185 - RNA, 19 nt, Homo sapiens
  misc_RNA (1)...(19): siRNA sense strand
ccacaccauugcauauuug

SEQ ID NO: 1284186 - RNA, 19 nt, Homo sapiens
  misc_RNA (1)...(19): siRNA sense strand
gaacagaugacagaguaga

SEQ ID NO: 1284187 - RNA, 19 nt, Homo sapiens
  misc_RNA (1)...(19): siRNA sense strand
ugacagaguagaacgugua

SEQ ID NO: 1284188 - RNA, 19 nt, Homo sapiens
  misc_RNA (1)...(19): siRNA sense strand
ucacccagguaauggauga

SEQ ID NO: 1284189 - RNA, 19 nt, Homo sapiens
  misc_RNA (1)...(19): siRNA sense strand
ccaccugaaugaccuugaa

SEQ ID NO: 1284190 - RNA, 19 nt, Homo sapiens
  misc_RNA (1)...(19): siRNA sense strand
cuacagccauccugcacuu

SEQ ID NO: 1284191 - RNA, 19 nt, Homo sapiens
  misc_RNA (1)...(19): siRNA sense strand
aaaugaugcuuaugaguac

SEQ ID NO: 1284192 - RNA, 19 nt, Homo sapiens
  misc_RNA (1)...(19): siRNA sense strand
aauggaugaugaaguauuc

SEQ ID NO: 1284193 - RNA, 19 nt, Homo sapiens
  misc_RNA (1)...(19): siRNA sense strand
ccagaagacuguguagcau

SEQ ID NO: 1284194 - RNA, 19 nt, Homo sapiens
  misc_RNA (1)...(19): siRNA sense strand
acgcagagcccaccugaau

SEQ ID NO: 1284195 - RNA, 19 nt, Homo sapiens
  misc_RNA (1)...(19): siRNA sense strand
acagguugcugaaaaguaa

SEQ ID NO: 1284196 - RNA, 19 nt, Homo sapiens
  misc_RNA (1)...(19): siRNA sense strand
gcacuucagacuauuuguc

SEQ ID NO: 1284197 - RNA, 19 nt, Homo sapiens
  misc_RNA (1)...(19): siRNA sense strand
gcuuacagguugcugaaaa

SEQ ID NO: 1284198 - RNA, 19 nt, Homo sapiens
  misc_RNA (1)...(19): siRNA sense strand
cagaagacuguguagcauu

SEQ ID NO: 1284199 - RNA, 19 nt, Homo sapiens
  misc_RNA (1)...(19): siRNA sense strand
accacaccauugcauauuu

SEQ ID NO: 1284200 - RNA, 19 nt, Homo sapiens
  misc_RNA (1)...(19): siRNA sense strand
uuuguuggauauggaguua

SEQ ID NO: 1284201 - RNA, 19 nt, Homo sapiens
  misc_RNA (1)...(19): siRNA sense strand
cauccuaugcaacaauuau

SEQ ID NO: 1284202 - RNA, 19 nt, Homo sapiens
  misc_RNA (1)...(19): siRNA sense strand
gaagacuguguagcauuug

SEQ ID NO: 1284203 - RNA, 19 nt, Homo sapiens
  misc_RNA (1)...(19): siRNA sense strand
ccagguaauggaugaugaa

SEQ ID NO: 1284204 - RNA, 19 nt, Homo sapiens
  misc_RNA (1)...(19): siRNA sense strand
caauccagaagacugugua

SEQ ID NO: 1284205 - RNA, 19 nt, Homo sapiens
  misc_RNA (1)...(19): siRNA sense strand
cccagguaauggaugauga

SEQ ID NO: 1284206 - RNA, 19 nt, Homo sapiens
  misc_RNA (1)...(19): siRNA sense strand
agauugacaagaaagguuu

SEQ ID NO: 1284207 - RNA, 19 nt, Homo sapiens
  misc_RNA (1)...(19): siRNA sense strand
cuaccacaccauugcauau

SEQ ID NO: 1284208 - RNA, 19 nt, Homo sapiens
  misc_RNA (1)...(19): siRNA sense strand
caccauugcauauuugaca

SEQ ID NO: 1284209 - RNA, 19 nt, Homo sapiens
  misc_RNA (1)...(19): siRNA sense strand
gcugaaaaguaaauuguac

SEQ ID NO: 1284210 - RNA, 19 nt, Homo sapiens
  misc_RNA (1)...(19): siRNA sense strand
uagauugacaagaaagguu

SEQ ID NO: 1284211 - RNA, 19 nt, Homo sapiens
  misc_RNA (1)...(19): siRNA sense strand
auccugcacuucagacuau

SEQ ID NO: 1284212 - RNA, 19 nt, Homo sapiens
  misc_RNA (1)...(19): siRNA sense strand
cauccugcacuucagacua

SEQ ID NO: 1284213 - RNA, 19 nt, Homo sapiens
  misc_RNA (1)...(19): siRNA sense strand
ggccuccuguauuccuuga

SEQ ID NO: 1284214 - RNA, 19 nt, Homo sapiens
  misc_RNA (1)...(19): siRNA sense strand
uggaauuggccuccuguau

SEQ ID NO: 1284215 - RNA, 19 nt, Homo sapiens
  misc_RNA (1)...(19): siRNA sense strand
gguaauggaugaugaagua

SEQ ID NO: 1284216 - RNA, 19 nt, Homo sapiens
  misc_RNA (1)...(19): siRNA sense strand
ggaauuggccuccuguauu

SEQ ID NO: 1284217 - RNA, 19 nt, Homo sapiens
  misc_RNA (1)...(19): siRNA sense strand
caacugcauucuauagauu

SEQ ID NO: 1284218 - RNA, 19 nt, Homo sapiens
  misc_RNA (1)...(19): siRNA sense strand
gcaacugcauucuauagau

SEQ ID NO: 1284219 - RNA, 19 nt, Homo sapiens
  misc_RNA (1)...(19): siRNA sense strand
agaagacuguguagcauuu

SEQ ID NO: 1284220 - RNA, 19 nt, Homo sapiens
  misc_RNA (1)...(19): siRNA sense strand
gcagagcccaccugaauga

SEQ ID NO: 1284221 - RNA, 19 nt, Homo sapiens
  misc_RNA (1)...(19): siRNA sense strand
ucgaacagaugacagagua

SEQ ID NO: 1284222 - RNA, 19 nt, Homo sapiens
  misc_RNA (1)...(19): siRNA sense strand
ccacaccauugcauauuug

SEQ ID NO: 1284223 - RNA, 19 nt, Homo sapiens
  misc_RNA (1)...(19): siRNA sense strand
gaacagaugacagaguaga

SEQ ID NO: 1284224 - RNA, 19 nt, Homo sapiens
  misc_RNA (1)...(19): siRNA sense strand
ugacagaguagaacgugua

SEQ ID NO: 1284225 - RNA, 19 nt, Homo sapiens
  misc_RNA (1)...(19): siRNA sense strand
ucacccagguaauggauga

SEQ ID NO: 1284226 - RNA, 19 nt, Homo sapiens
  misc_RNA (1)...(19): siRNA sense strand
ccaccugaaugaccuugaa

SEQ ID NO: 1284227 - RNA, 19 nt, Homo sapiens
  misc_RNA (1)...(19): siRNA sense strand
cuacagccauccugcacuu

SEQ ID NO: 1284228 - RNA, 19 nt, Homo sapiens
  misc_RNA (1)...(19): siRNA sense strand
aaaugaugcuuaugaguac

SEQ ID NO: 1284229 - RNA, 19 nt, Homo sapiens
  misc_RNA (1)...(19): siRNA sense strand
aauggaugaugaaguauuc

SEQ ID NO: 1284230 - RNA, 19 nt, Homo sapiens
  misc_RNA (1)...(19): siRNA sense strand
ccagaagacuguguagcau

SEQ ID NO: 1284231 - RNA, 19 nt, Homo sapiens
  misc_RNA (1)...(19): siRNA sense strand
acgcagagcccaccugaau

SEQ ID NO: 1284232 - RNA, 19 nt, Homo sapiens
  misc_RNA (1)...(19): siRNA sense strand
acagguugcugaaaaguaa

SEQ ID NO: 1284233 - RNA, 19 nt, Homo sapiens
  misc_RNA (1)...(19): siRNA sense strand
gcacuucagacuauuuguc

SEQ ID NO: 1284234 - RNA, 19 nt, Homo sapiens
  misc_RNA (1)...(19): siRNA sense strand
gcuuacagguugcugaaaa

SEQ ID NO: 1284235 - RNA, 19 nt, Homo sapiens
  misc_RNA (1)...(19): siRNA sense strand
cagaagacuguguagcauu

SEQ ID NO: 1284236 - RNA, 19 nt, Homo sapiens
  misc_RNA (1)...(19): siRNA sense strand
accacaccauugcauauuu

SEQ ID NO: 1284237 - RNA, 19 nt, Homo sapiens
  misc_RNA (1)...(19): siRNA sense strand
uuuguuggauauggaguua

SEQ ID NO: 1284238 - RNA, 19 nt, Homo sapiens
  misc_RNA (1)...(19): siRNA sense strand
cauccuaugcaacaauuau

SEQ ID NO: 1284239 - RNA, 19 nt, Homo sapiens
  misc_RNA (1)...(19): siRNA sense strand
gaagacuguguagcauuug

SEQ ID NO: 1284240 - RNA, 19 nt, Homo sapiens
  misc_RNA (1)...(19): siRNA sense strand
ccagguaauggaugaugaa

SEQ ID NO: 1284241 - RNA, 19 nt, Homo sapiens
  misc_RNA (1)...(19): siRNA sense strand
caauccagaagacugugua

SEQ ID NO: 1284242 - RNA, 19 nt, Homo sapiens
  misc_RNA (1)...(19): siRNA sense strand
cccagguaauggaugauga

SEQ ID NO: 1284243 - RNA, 19 nt, Homo sapiens
  misc_RNA (1)...(19): siRNA sense strand
agauugacaagaaagguuu

SEQ ID NO: 1284244 - RNA, 19 nt, Homo sapiens
  misc_RNA (1)...(19): siRNA sense strand
cuaccacaccauugcauau

SEQ ID NO: 1284245 - RNA, 19 nt, Homo sapiens
  misc_RNA (1)...(19): siRNA sense strand
caccauugcauauuugaca

SEQ ID NO: 1284246 - RNA, 19 nt, Homo sapiens
  misc_RNA (1)...(19): siRNA sense strand
gcugaaaaguaaauuguac

SEQ ID NO: 1284247 - RNA, 19 nt, Homo sapiens
  misc_RNA (1)...(19): siRNA sense strand
uagauugacaagaaagguu

SEQ ID NO: 1284248 - RNA, 19 nt, Homo sapiens
  misc_RNA (1)...(19): siRNA sense strand
auccugcacuucagacuau

SEQ ID NO: 1284249 - RNA, 19 nt, Homo sapiens
  misc_RNA (1)...(19): siRNA sense strand
cauccugcacuucagacua

SEQ ID NO: 1284250 - RNA, 19 nt, Homo sapiens
  misc_RNA (1)...(19): siRNA sense strand
ggccuccuguauuccuuga

SEQ ID NO: 1284251 - RNA, 19 nt, Homo sapiens
  misc_RNA (1)...(19): siRNA sense strand
uggaauuggccuccuguau

SEQ ID NO: 1284252 - RNA, 19 nt, Homo sapiens
  misc_RNA (1)...(19): siRNA sense strand
gcaagaauauggacagaaa

SEQ ID NO: 1284253 - RNA, 19 nt, Homo sapiens
  misc_RNA (1)...(19): siRNA sense strand
gaggugaacuuucugguuu

SEQ ID NO: 1284254 - RNA, 19 nt, Homo sapiens
  misc_RNA (1)...(19): siRNA sense strand
gcaaagagaucuacaccau

SEQ ID NO: 1284255 - RNA, 19 nt, Homo sapiens
  misc_RNA (1)...(19): siRNA sense strand
gcaagugcuucauuugauu

SEQ ID NO: 1284256 - RNA, 19 nt, Homo sapiens
  misc_RNA (1)...(19): siRNA sense strand
uugaagaucuggaguauga

SEQ ID NO: 1284257 - RNA, 19 nt, Homo sapiens
  misc_RNA (1)...(19): siRNA sense strand
agacucaacugcaaggaua

SEQ ID NO: 1284258 - RNA, 19 nt, Homo sapiens
  misc_RNA (1)...(19): siRNA sense strand
aaagagaucuacaccauca

SEQ ID NO: 1284259 - RNA, 19 nt, Homo sapiens
  misc_RNA (1)...(19): siRNA sense strand
ucacucggcuuucacguuu

SEQ ID NO: 1284260 - RNA, 19 nt, Homo sapiens
  misc_RNA (1)...(19): siRNA sense strand
caacaaagccacaguccuu

SEQ ID NO: 1284261 - RNA, 19 nt, Homo sapiens
  misc_RNA (1)...(19): siRNA sense strand
caacaucaaugggacacua

SEQ ID NO: 1284262 - RNA, 19 nt, Homo sapiens
  misc_RNA (1)...(19): siRNA sense strand
gaauggagcacaugaaauc

SEQ ID NO: 1284263 - RNA, 19 nt, Homo sapiens
  misc_RNA (1)...(19): siRNA sense strand
ggaaaguacuuggcuagug

SEQ ID NO: 1284264 - RNA, 19 nt, Homo sapiens
  misc_RNA (1)...(19): siRNA sense strand
guucauaucuggaauacuc

SEQ ID NO: 1284265 - RNA, 19 nt, Homo sapiens
  misc_RNA (1)...(19): siRNA sense strand
gagaauggagcacaugaaa

SEQ ID NO: 1284266 - RNA, 19 nt, Homo sapiens
  misc_RNA (1)...(19): siRNA sense strand
gagcacaugaaaucaauaa

SEQ ID NO: 1284267 - RNA, 19 nt, Homo sapiens
  misc_RNA (1)...(19): siRNA sense strand
caaagccaauggaaauaga

SEQ ID NO: 1284268 - RNA, 19 nt, Homo sapiens
  misc_RNA (1)...(19): siRNA sense strand
gcacaugaaaucaauaauc

SEQ ID NO: 1284269 - RNA, 19 nt, Homo sapiens
  misc_RNA (1)...(19): siRNA sense strand
uauggaaccugaaugagaa

SEQ ID NO: 1284270 - RNA, 19 nt, Homo sapiens
  misc_RNA (1)...(19): siRNA sense strand
ggauauggaaccugaauga

SEQ ID NO: 1284271 - RNA, 19 nt, Homo sapiens
  misc_RNA (1)...(19): siRNA sense strand
agaagggacugcaguaugu

SEQ ID NO: 1284272 - RNA, 19 nt, Homo sapiens
  misc_RNA (1)...(19): siRNA sense strand
ccugauaguugcugugauu

SEQ ID NO: 1284273 - RNA, 19 nt, Homo sapiens
  misc_RNA (1)...(19): siRNA sense strand
ggaaauagauggggauguu

SEQ ID NO: 1284274 - RNA, 19 nt, Homo sapiens
  misc_RNA (1)...(19): siRNA sense strand
cgaggucaaugccaucaaa

SEQ ID NO: 1284275 - RNA, 19 nt, Homo sapiens
  misc_RNA (1)...(19): siRNA sense strand
gacaugacauugaagaucu

SEQ ID NO: 1284276 - RNA, 19 nt, Homo sapiens
  misc_RNA (1)...(19): siRNA sense strand
guauguagaggcugagaua

SEQ ID NO: 1284277 - RNA, 19 nt, Homo sapiens
  misc_RNA (1)...(19): siRNA sense strand
gcuaguggauccuuugaca

SEQ ID NO: 1284278 - RNA, 19 nt, Homo sapiens
  misc_RNA (1)...(19): siRNA sense strand
ggaagagaauggagcacau

SEQ ID NO: 1284279 - RNA, 19 nt, Homo sapiens
  misc_RNA (1)...(19): siRNA sense strand
gcaaaggcggcaaccauga

SEQ ID NO: 1284280 - RNA, 19 nt, Homo sapiens
  misc_RNA (1)...(19): siRNA sense strand
agucugagguguucauuug

SEQ ID NO: 1284281 - RNA, 19 nt, Homo sapiens
  misc_RNA (1)...(19): siRNA sense strand
guggauccuuugacaagua

SEQ ID NO: 1284282 - RNA, 19 nt, Homo sapiens
  misc_RNA (1)...(19): siRNA sense strand
gauguggacuggcagaaca

SEQ ID NO: 1284283 - RNA, 19 nt, Homo sapiens
  misc_RNA (1)...(19): siRNA sense strand
uaaccuggccagcaccuua

SEQ ID NO: 1284284 - RNA, 19 nt, Homo sapiens
  misc_RNA (1)...(19): siRNA sense strand
guugagacauuguauacga

SEQ ID NO: 1284285 - RNA, 19 nt, Homo sapiens
  misc_RNA (1)...(19): siRNA sense strand
ggcacgacgucccaaguaa

SEQ ID NO: 1284286 - RNA, 19 nt, Homo sapiens
  misc_RNA (1)...(19): siRNA sense strand
ggcaagugcuucauuugau

SEQ ID NO: 1284287 - RNA, 19 nt, Homo sapiens
  misc_RNA (1)...(19): siRNA sense strand
cggaugacaugacauugaa

SEQ ID NO: 1284288 - RNA, 19 nt, Homo sapiens
  misc_RNA (1)...(19): siRNA sense strand
ggaacccugucagugauuu

SEQ ID NO: 1284289 - RNA, 19 nt, Homo sapiens
  misc_RNA (1)...(19): siRNA sense strand
gaagucucguccacagcua

SEQ ID NO: 1284290 - RNA, 19 nt, Homo sapiens
  misc_RNA (1)...(19): siRNA sense strand
guuggcaagugcuucauuu

SEQ ID NO: 1284291 - RNA, 19 nt, Homo sapiens
  misc_RNA (1)...(19): siRNA sense strand
gaagcucacucagcagcaa

SEQ ID NO: 1284292 - RNA, 19 nt, Homo sapiens
  misc_RNA (1)...(19): siRNA sense strand
caucuucgcucugaaaugg

SEQ ID NO: 1284293 - RNA, 19 nt, Homo sapiens
  misc_RNA (1)...(19): siRNA sense strand
ucaccucacuggacuggaa

SEQ ID NO: 1284294 - RNA, 19 nt, Homo sapiens
  misc_RNA (1)...(19): siRNA sense strand
ccacgagucugagguguuc

SEQ ID NO: 1284295 - RNA, 19 nt, Homo sapiens
  misc_RNA (1)...(19): siRNA sense strand
gcucugaaauggaacaaaa

SEQ ID NO: 1284296 - RNA, 19 nt, Homo sapiens
  misc_RNA (1)...(19): siRNA sense strand
caccuuaggccaacauaaa

SEQ ID NO: 1284297 - RNA, 19 nt, Homo sapiens
  misc_RNA (1)...(19): siRNA sense strand
ggaacacuauuggcuaugg

SEQ ID NO: 1284298 - RNA, 19 nt, Homo sapiens
  misc_RNA (1)...(19): siRNA sense strand
gaacgcccgaggagauaaa

SEQ ID NO: 1284299 - RNA, 19 nt, Homo sapiens
  misc_RNA (1)...(19): siRNA sense strand
ccaaggcacuggcgguauc

SEQ ID NO: 1284300 - RNA, 19 nt, Homo sapiens
  misc_RNA (1)...(19): siRNA sense strand
gggcacgacgucccaagua

SEQ ID NO: 1284301 - RNA, 19 nt, Homo sapiens
  misc_RNA (1)...(19): siRNA sense strand
cagcucguguugagacauu

SEQ ID NO: 1284302 - RNA, 19 nt, Homo sapiens
  misc_RNA (1)...(19): siRNA sense strand
cauugaagaucuggaguau

SEQ ID NO: 1284303 - RNA, 19 nt, Homo sapiens
  misc_RNA (1)...(19): siRNA sense strand
gaagggacugcaguaugua

SEQ ID NO: 1284304 - RNA, 19 nt, Homo sapiens
  misc_RNA (1)...(19): siRNA sense strand
gcucggaugacaugacauu

SEQ ID NO: 1284305 - RNA, 19 nt, Homo sapiens
  misc_RNA (1)...(19): siRNA sense strand
cacgacgucccaaguaaua

SEQ ID NO: 1284306 - RNA, 19 nt, Homo sapiens
  misc_RNA (1)...(19): siRNA sense strand
caacugcaaggauauggaa

SEQ ID NO: 1284307 - RNA, 19 nt, Homo sapiens
  misc_RNA (1)...(19): siRNA sense strand
ccacagaggcaucagcaau

SEQ ID NO: 1284308 - RNA, 19 nt, Homo sapiens
  misc_RNA (1)...(19): siRNA sense strand
gcaggcauuuggagagaag

SEQ ID NO: 1284309 - RNA, 19 nt, Homo sapiens
  misc_RNA (1)...(19): siRNA sense strand
agauaagcaucaacaagga

SEQ ID NO: 1284310 - RNA, 19 nt, Homo sapiens
  misc_RNA (1)...(19): siRNA sense strand
gaugacaugacauugaaga

SEQ ID NO: 1284311 - RNA, 19 nt, Homo sapiens
  misc_RNA (1)...(19): siRNA sense strand
cagaacaacaugaccuuug

SEQ ID NO: 1284312 - RNA, 19 nt, Homo sapiens
  misc_RNA (1)...(19): siRNA sense strand
gaugguuucgcaagaauau

SEQ ID NO: 1284313 - RNA, 19 nt, Homo sapiens
  misc_RNA (1)...(19): siRNA sense strand
ccacccagcucguguugag

SEQ ID NO: 1284314 - RNA, 19 nt, Homo sapiens
  misc_RNA (1)...(19): siRNA sense strand
gaagagaauggagcacaug

SEQ ID NO: 1284315 - RNA, 19 nt, Homo sapiens
  misc_RNA (1)...(19): siRNA sense strand
ggauccuucuggaauguug

SEQ ID NO: 1284316 - RNA, 19 nt, Homo sapiens
  misc_RNA (1)...(19): siRNA sense strand
ucacacaggagaagccaaa

SEQ ID NO: 1284317 - RNA, 19 nt, Homo sapiens
  misc_RNA (1)...(19): siRNA sense strand
cagcaggcauuuggagaga

SEQ ID NO: 1284318 - RNA, 19 nt, Homo sapiens
  misc_RNA (1)...(19): siRNA sense strand
ggugaacuuucugguuuau

SEQ ID NO: 1284319 - RNA, 19 nt, Homo sapiens
  misc_RNA (1)...(19): siRNA sense strand
gugacgaggugaacuuucu

SEQ ID NO: 1284320 - RNA, 19 nt, Homo sapiens
  misc_RNA (1)...(19): siRNA sense strand
gcagaacaacaugaccuuu

SEQ ID NO: 1284321 - RNA, 19 nt, Homo sapiens
  misc_RNA (1)...(19): siRNA sense strand
uaugaugguuucgcaagaa

SEQ ID NO: 1284322 - RNA, 19 nt, Homo sapiens
  misc_RNA (1)...(19): siRNA sense strand
cgacgucccaaguaauaaa

SEQ ID NO: 1284323 - RNA, 19 nt, Homo sapiens
  misc_RNA (1)...(19): siRNA sense strand
gcacgacgucccaaguaau

SEQ ID NO: 1284324 - RNA, 19 nt, Homo sapiens
  misc_RNA (1)...(19): siRNA sense strand
auaaagaugucaccucacu

SEQ ID NO: 1284325 - RNA, 19 nt, Homo sapiens
  misc_RNA (1)...(19): siRNA sense strand
gagugcugguguagacaaa

SEQ ID NO: 1284326 - RNA, 19 nt, Homo sapiens
  misc_RNA (1)...(19): siRNA sense strand
acucaaagccaauggaaau

SEQ ID NO: 1284327 - RNA, 19 nt, Homo sapiens
  misc_RNA (1)...(19): siRNA sense strand
gcaguuuccuuuucauuca

SEQ ID NO: 1284328 - RNA, 19 nt, Homo sapiens
  misc_RNA (1)...(19): siRNA sense strand
gcaccuuaggccaacauaa

SEQ ID NO: 1284329 - RNA, 19 nt, Homo sapiens
  misc_RNA (1)...(19): siRNA sense strand
gagacauuguauacgagaa

SEQ ID NO: 1284330 - RNA, 19 nt, Homo sapiens
  misc_RNA (1)...(19): siRNA sense strand
gaagaucuggaguaugaag

SEQ ID NO: 1284331 - RNA, 19 nt, Homo sapiens
  misc_RNA (1)...(19): siRNA sense strand
gcaaaauccuccaaagaac

SEQ ID NO: 1284332 - RNA, 19 nt, Homo sapiens
  misc_RNA (1)...(19): siRNA sense strand
gaaccugaaugagaauagc

SEQ ID NO: 1284333 - RNA, 19 nt, Homo sapiens
  misc_RNA (1)...(19): siRNA sense strand
cagaagggacugcaguaug

SEQ ID NO: 1284334 - RNA, 19 nt, Homo sapiens
  misc_RNA (1)...(19): siRNA sense strand
ccuggaacccugucaguga

SEQ ID NO: 1284335 - RNA, 19 nt, Homo sapiens
  misc_RNA (1)...(19): siRNA sense strand
uggagcacaugaaaucaau

SEQ ID NO: 1284336 - RNA, 19 nt, Homo sapiens
  misc_RNA (1)...(19): siRNA sense strand
aacccaaacuccagcauca

SEQ ID NO: 1284337 - RNA, 19 nt, Homo sapiens
  misc_RNA (1)...(19): siRNA sense strand
ugaacuuucugguuuaucg

SEQ ID NO: 1284338 - RNA, 19 nt, Homo sapiens
  misc_RNA (1)...(19): siRNA sense strand
gagauuccacccaacaaag

SEQ ID NO: 1284339 - RNA, 19 nt, Homo sapiens
  misc_RNA (1)...(19): siRNA sense strand
ggguucauaugaugguuuc

SEQ ID NO: 1284340 - RNA, 19 nt, Homo sapiens
  misc_RNA (1)...(19): siRNA sense strand
acacacucaugaagcauca

SEQ ID NO: 1284341 - RNA, 19 nt, Homo sapiens
  misc_RNA (1)...(19): siRNA sense strand
ggacuggcagaacaacaug

SEQ ID NO: 1284342 - RNA, 19 nt, Homo sapiens
  misc_RNA (1)...(19): siRNA sense strand
gagaagccaaacagcaguu

SEQ ID NO: 1284343 - RNA, 19 nt, Homo sapiens
  misc_RNA (1)...(19): siRNA sense strand
aggugaacuuucugguuua

SEQ ID NO: 1284344 - RNA, 19 nt, Homo sapiens
  misc_RNA (1)...(19): siRNA sense strand
ggagcacaugaaaucaaua

SEQ ID NO: 1284345 - RNA, 19 nt, Homo sapiens
  misc_RNA (1)...(19): siRNA sense strand
uggcaagugcuucauuuga

SEQ ID NO: 1284346 - RNA, 19 nt, Homo sapiens
  misc_RNA (1)...(19): siRNA sense strand
gcugagauaagcaucaaca

SEQ ID NO: 1284347 - RNA, 19 nt, Homo sapiens
  misc_RNA (1)...(19): siRNA sense strand
uagagucccugucccugau

SEQ ID NO: 1284348 - RNA, 19 nt, Homo sapiens
  misc_RNA (1)...(19): siRNA sense strand
ugagauuccacccaacaaa

SEQ ID NO: 1284349 - RNA, 19 nt, Homo sapiens
  misc_RNA (1)...(19): siRNA sense strand
gugcuucauuugauucuac

SEQ ID NO: 1284350 - RNA, 19 nt, Homo sapiens
  misc_RNA (1)...(19): siRNA sense strand
ggaacgcccgaggagauaa

SEQ ID NO: 1284351 - RNA, 19 nt, Homo sapiens
  misc_RNA (1)...(19): siRNA sense strand
gcacccacacacucaugaa

SEQ ID NO: 1284352 - RNA, 19 nt, Homo sapiens
  misc_RNA (1)...(19): siRNA sense strand
gcaagaauauggacagaaa

SEQ ID NO: 1284353 - RNA, 19 nt, Homo sapiens
  misc_RNA (1)...(19): siRNA sense strand
gaggugaacuuucugguuu

SEQ ID NO: 1284354 - RNA, 19 nt, Homo sapiens
  misc_RNA (1)...(19): siRNA sense strand
gcaaagagaucuacaccau

SEQ ID NO: 1284355 - RNA, 19 nt, Homo sapiens
  misc_RNA (1)...(19): siRNA sense strand
gcaagugcuucauuugauu

SEQ ID NO: 1284356 - RNA, 19 nt, Homo sapiens
  misc_RNA (1)...(19): siRNA sense strand
uugaagaucuggaguauga

SEQ ID NO: 1284357 - RNA, 19 nt, Homo sapiens
  misc_RNA (1)...(19): siRNA sense strand
agacucaacugcaaggaua

SEQ ID NO: 1284358 - RNA, 19 nt, Homo sapiens
  misc_RNA (1)...(19): siRNA sense strand
aaagagaucuacaccauca

SEQ ID NO: 1284359 - RNA, 19 nt, Homo sapiens
  misc_RNA (1)...(19): siRNA sense strand
ucacucggcuuucacguuu

SEQ ID NO: 1284360 - RNA, 19 nt, Homo sapiens
  misc_RNA (1)...(19): siRNA sense strand
caacaaagccacaguccuu

SEQ ID NO: 1284361 - RNA, 19 nt, Homo sapiens
  misc_RNA (1)...(19): siRNA sense strand
caacaucaaugggacacua

SEQ ID NO: 1284362 - RNA, 19 nt, Homo sapiens
  misc_RNA (1)...(19): siRNA sense strand
gaauggagcacaugaaauc

SEQ ID NO: 1284363 - RNA, 19 nt, Homo sapiens
  misc_RNA (1)...(19): siRNA sense strand
ggaaaguacuuggcuagug

SEQ ID NO: 1284364 - RNA, 19 nt, Homo sapiens
  misc_RNA (1)...(19): siRNA sense strand
guucauaucuggaauacuc

SEQ ID NO: 1284365 - RNA, 19 nt, Homo sapiens
  misc_RNA (1)...(19): siRNA sense strand
gagaauggagcacaugaaa

SEQ ID NO: 1284366 - RNA, 19 nt, Homo sapiens
  misc_RNA (1)...(19): siRNA sense strand
gagcacaugaaaucaauaa

SEQ ID NO: 1284367 - RNA, 19 nt, Homo sapiens
  misc_RNA (1)...(19): siRNA sense strand
caaagccaauggaaauaga

SEQ ID NO: 1284368 - RNA, 19 nt, Homo sapiens
  misc_RNA (1)...(19): siRNA sense strand
gcacaugaaaucaauaauc

SEQ ID NO: 1284369 - RNA, 19 nt, Homo sapiens
  misc_RNA (1)...(19): siRNA sense strand
uauggaaccugaaugagaa

SEQ ID NO: 1284370 - RNA, 19 nt, Homo sapiens
  misc_RNA (1)...(19): siRNA sense strand
ggauauggaaccugaauga

SEQ ID NO: 1284371 - RNA, 19 nt, Homo sapiens
  misc_RNA (1)...(19): siRNA sense strand
agaagggacugcaguaugu

SEQ ID NO: 1284372 - RNA, 19 nt, Homo sapiens
  misc_RNA (1)...(19): siRNA sense strand
ccugauaguugcugugauu

SEQ ID NO: 1284373 - RNA, 19 nt, Homo sapiens
  misc_RNA (1)...(19): siRNA sense strand
ggaaauagauggggauguu

SEQ ID NO: 1284374 - RNA, 19 nt, Homo sapiens
  misc_RNA (1)...(19): siRNA sense strand
cgaggucaaugccaucaaa

SEQ ID NO: 1284375 - RNA, 19 nt, Homo sapiens
  misc_RNA (1)...(19): siRNA sense strand
gacaugacauugaagaucu

SEQ ID NO: 1284376 - RNA, 19 nt, Homo sapiens
  misc_RNA (1)...(19): siRNA sense strand
guauguagaggcugagaua

SEQ ID NO: 1284377 - RNA, 19 nt, Homo sapiens
  misc_RNA (1)...(19): siRNA sense strand
gcuaguggauccuuugaca

SEQ ID NO: 1284378 - RNA, 19 nt, Homo sapiens
  misc_RNA (1)...(19): siRNA sense strand
ggaagagaauggagcacau

SEQ ID NO: 1284379 - RNA, 19 nt, Homo sapiens
  misc_RNA (1)...(19): siRNA sense strand
gcaaaggcggcaaccauga

SEQ ID NO: 1284380 - RNA, 19 nt, Homo sapiens
  misc_RNA (1)...(19): siRNA sense strand
agucugagguguucauuug

SEQ ID NO: 1284381 - RNA, 19 nt, Homo sapiens
  misc_RNA (1)...(19): siRNA sense strand
guggauccuuugacaagua

SEQ ID NO: 1284382 - RNA, 19 nt, Homo sapiens
  misc_RNA (1)...(19): siRNA sense strand
gauguggacuggcagaaca

SEQ ID NO: 1284383 - RNA, 19 nt, Homo sapiens
  misc_RNA (1)...(19): siRNA sense strand
uaaccuggccagcaccuua

SEQ ID NO: 1284384 - RNA, 19 nt, Homo sapiens
  misc_RNA (1)...(19): siRNA sense strand
guugagacauuguauacga

SEQ ID NO: 1284385 - RNA, 19 nt, Homo sapiens
  misc_RNA (1)...(19): siRNA sense strand
ggcacgacgucccaaguaa

SEQ ID NO: 1284386 - RNA, 19 nt, Homo sapiens
  misc_RNA (1)...(19): siRNA sense strand
ggcaagugcuucauuugau

SEQ ID NO: 1284387 - RNA, 19 nt, Homo sapiens
  misc_RNA (1)...(19): siRNA sense strand
cggaugacaugacauugaa

SEQ ID NO: 1284388 - RNA, 19 nt, Homo sapiens
  misc_RNA (1)...(19): siRNA sense strand
ggaacccugucagugauuu

SEQ ID NO: 1284389 - RNA, 19 nt, Homo sapiens
  misc_RNA (1)...(19): siRNA sense strand
gaagucucguccacagcua

SEQ ID NO: 1284390 - RNA, 19 nt, Homo sapiens
  misc_RNA (1)...(19): siRNA sense strand
guuggcaagugcuucauuu

SEQ ID NO: 1284391 - RNA, 19 nt, Homo sapiens
  misc_RNA (1)...(19): siRNA sense strand
gaagcucacucagcagcaa

SEQ ID NO: 1284392 - RNA, 19 nt, Homo sapiens
  misc_RNA (1)...(19): siRNA sense strand
caucuucgcucugaaaugg

SEQ ID NO: 1284393 - RNA, 19 nt, Homo sapiens
  misc_RNA (1)...(19): siRNA sense strand
ucaccucacuggacuggaa

SEQ ID NO: 1284394 - RNA, 19 nt, Homo sapiens
  misc_RNA (1)...(19): siRNA sense strand
ccacgagucugagguguuc

SEQ ID NO: 1284395 - RNA, 19 nt, Homo sapiens
  misc_RNA (1)...(19): siRNA sense strand
gcucugaaauggaacaaaa

SEQ ID NO: 1284396 - RNA, 19 nt, Homo sapiens
  misc_RNA (1)...(19): siRNA sense strand
caccuuaggccaacauaaa

SEQ ID NO: 1284397 - RNA, 19 nt, Homo sapiens
  misc_RNA (1)...(19): siRNA sense strand
ggaacacuauuggcuaugg

SEQ ID NO: 1284398 - RNA, 19 nt, Homo sapiens
  misc_RNA (1)...(19): siRNA sense strand
gaacgcccgaggagauaaa

SEQ ID NO: 1284399 - RNA, 19 nt, Homo sapiens
  misc_RNA (1)...(19): siRNA sense strand
ccaaggcacuggcgguauc

SEQ ID NO: 1284400 - RNA, 19 nt, Homo sapiens
  misc_RNA (1)...(19): siRNA sense strand
gggcacgacgucccaagua

SEQ ID NO: 1284401 - RNA, 19 nt, Homo sapiens
  misc_RNA (1)...(19): siRNA sense strand
cagcucguguugagacauu

SEQ ID NO: 1284402 - RNA, 19 nt, Homo sapiens
  misc_RNA (1)...(19): siRNA sense strand
cauugaagaucuggaguau

SEQ ID NO: 1284403 - RNA, 19 nt, Homo sapiens
  misc_RNA (1)...(19): siRNA sense strand
gaagggacugcaguaugua

SEQ ID NO: 1284404 - RNA, 19 nt, Homo sapiens
  misc_RNA (1)...(19): siRNA sense strand
gcucggaugacaugacauu

SEQ ID NO: 1284405 - RNA, 19 nt, Homo sapiens
  misc_RNA (1)...(19): siRNA sense strand
cacgacgucccaaguaaua

SEQ ID NO: 1284406 - RNA, 19 nt, Homo sapiens
  misc_RNA (1)...(19): siRNA sense strand
caacugcaaggauauggaa

SEQ ID NO: 1284407 - RNA, 19 nt, Homo sapiens
  misc_RNA (1)...(19): siRNA sense strand
ccacagaggcaucagcaau

SEQ ID NO: 1284408 - RNA, 19 nt, Homo sapiens
  misc_RNA (1)...(19): siRNA sense strand
gcaggcauuuggagagaag

SEQ ID NO: 1284409 - RNA, 19 nt, Homo sapiens
  misc_RNA (1)...(19): siRNA sense strand
agauaagcaucaacaagga

SEQ ID NO: 1284410 - RNA, 19 nt, Homo sapiens
  misc_RNA (1)...(19): siRNA sense strand
gaugacaugacauugaaga

SEQ ID NO: 1284411 - RNA, 19 nt, Homo sapiens
  misc_RNA (1)...(19): siRNA sense strand
cagaacaacaugaccuuug

SEQ ID NO: 1284412 - RNA, 19 nt, Homo sapiens
  misc_RNA (1)...(19): siRNA sense strand
gaugguuucgcaagaauau

SEQ ID NO: 1284413 - RNA, 19 nt, Homo sapiens
  misc_RNA (1)...(19): siRNA sense strand
ccacccagcucguguugag

SEQ ID NO: 1284414 - RNA, 19 nt, Homo sapiens
  misc_RNA (1)...(19): siRNA sense strand
gaagagaauggagcacaug

SEQ ID NO: 1284415 - RNA, 19 nt, Homo sapiens
  misc_RNA (1)...(19): siRNA sense strand
ggauccuucuggaauguug

SEQ ID NO: 1284416 - RNA, 19 nt, Homo sapiens
  misc_RNA (1)...(19): siRNA sense strand
ucacacaggagaagccaaa

SEQ ID NO: 1284417 - RNA, 19 nt, Homo sapiens
  misc_RNA (1)...(19): siRNA sense strand
cagcaggcauuuggagaga

SEQ ID NO: 1284418 - RNA, 19 nt, Homo sapiens
  misc_RNA (1)...(19): siRNA sense strand
ggugaacuuucugguuuau

SEQ ID NO: 1284419 - RNA, 19 nt, Homo sapiens
  misc_RNA (1)...(19): siRNA sense strand
gugacgaggugaacuuucu

SEQ ID NO: 1284420 - RNA, 19 nt, Homo sapiens
  misc_RNA (1)...(19): siRNA sense strand
gcagaacaacaugaccuuu

SEQ ID NO: 1284421 - RNA, 19 nt, Homo sapiens
  misc_RNA (1)...(19): siRNA sense strand
uaugaugguuucgcaagaa

SEQ ID NO: 1284422 - RNA, 19 nt, Homo sapiens
  misc_RNA (1)...(19): siRNA sense strand
cgacgucccaaguaauaaa

SEQ ID NO: 1284423 - RNA, 19 nt, Homo sapiens
  misc_RNA (1)...(19): siRNA sense strand
gcacgacgucccaaguaau

SEQ ID NO: 1284424 - RNA, 19 nt, Homo sapiens
  misc_RNA (1)...(19): siRNA sense strand
auaaagaugucaccucacu

SEQ ID NO: 1284425 - RNA, 19 nt, Homo sapiens
  misc_RNA (1)...(19): siRNA sense strand
gagugcugguguagacaaa

SEQ ID NO: 1284426 - RNA, 19 nt, Homo sapiens
  misc_RNA (1)...(19): siRNA sense strand
acucaaagccaauggaaau

SEQ ID NO: 1284427 - RNA, 19 nt, Homo sapiens
  misc_RNA (1)...(19): siRNA sense strand
gcaguuuccuuuucauuca

SEQ ID NO: 1284428 - RNA, 19 nt, Homo sapiens
  misc_RNA (1)...(19): siRNA sense strand
gcaccuuaggccaacauaa

SEQ ID NO: 1284429 - RNA, 19 nt, Homo sapiens
  misc_RNA (1)...(19): siRNA sense strand
gagacauuguauacgagaa

SEQ ID NO: 1284430 - RNA, 19 nt, Homo sapiens
  misc_RNA (1)...(19): siRNA sense strand
gaagaucuggaguaugaag

SEQ ID NO: 1284431 - RNA, 19 nt, Homo sapiens
  misc_RNA (1)...(19): siRNA sense strand
gcaaaauccuccaaagaac

SEQ ID NO: 1284432 - RNA, 19 nt, Homo sapiens
  misc_RNA (1)...(19): siRNA sense strand
gaaccugaaugagaauagc

SEQ ID NO: 1284433 - RNA, 19 nt, Homo sapiens
  misc_RNA (1)...(19): siRNA sense strand
cagaagggacugcaguaug

SEQ ID NO: 1284434 - RNA, 19 nt, Homo sapiens
  misc_RNA (1)...(19): siRNA sense strand
ccuggaacccugucaguga

SEQ ID NO: 1284435 - RNA, 19 nt, Homo sapiens
  misc_RNA (1)...(19): siRNA sense strand
uggagcacaugaaaucaau

SEQ ID NO: 1284436 - RNA, 19 nt, Homo sapiens
  misc_RNA (1)...(19): siRNA sense strand
aacccaaacuccagcauca

SEQ ID NO: 1284437 - RNA, 19 nt, Homo sapiens
  misc_RNA (1)...(19): siRNA sense strand
ugaacuuucugguuuaucg

SEQ ID NO: 1284438 - RNA, 19 nt, Homo sapiens
  misc_RNA (1)...(19): siRNA sense strand
gagauuccacccaacaaag

SEQ ID NO: 1284439 - RNA, 19 nt, Homo sapiens
  misc_RNA (1)...(19): siRNA sense strand
ggguucauaugaugguuuc

SEQ ID NO: 1284440 - RNA, 19 nt, Homo sapiens
  misc_RNA (1)...(19): siRNA sense strand
acacacucaugaagcauca

SEQ ID NO: 1284441 - RNA, 19 nt, Homo sapiens
  misc_RNA (1)...(19): siRNA sense strand
ggacuggcagaacaacaug

SEQ ID NO: 1284442 - RNA, 19 nt, Homo sapiens
  misc_RNA (1)...(19): siRNA sense strand
gagaagccaaacagcaguu

SEQ ID NO: 1284443 - RNA, 19 nt, Homo sapiens
  misc_RNA (1)...(19): siRNA sense strand
aggugaacuuucugguuua

SEQ ID NO: 1284444 - RNA, 19 nt, Homo sapiens
  misc_RNA (1)...(19): siRNA sense strand
ggagcacaugaaaucaaua

SEQ ID NO: 1284445 - RNA, 19 nt, Homo sapiens
  misc_RNA (1)...(19): siRNA sense strand
uggcaagugcuucauuuga

SEQ ID NO: 1284446 - RNA, 19 nt, Homo sapiens
  misc_RNA (1)...(19): siRNA sense strand
gcugagauaagcaucaaca

SEQ ID NO: 1284447 - RNA, 19 nt, Homo sapiens
  misc_RNA (1)...(19): siRNA sense strand
uagagucccugucccugau

SEQ ID NO: 1284448 - RNA, 19 nt, Homo sapiens
  misc_RNA (1)...(19): siRNA sense strand
ugagauuccacccaacaaa

SEQ ID NO: 1284449 - RNA, 19 nt, Homo sapiens
  misc_RNA (1)...(19): siRNA sense strand
gugcuucauuugauucuac

SEQ ID NO: 1284450 - RNA, 19 nt, Homo sapiens
  misc_RNA (1)...(19): siRNA sense strand
ggaacgcccgaggagauaa

SEQ ID NO: 1284451 - RNA, 19 nt, Homo sapiens
  misc_RNA (1)...(19): siRNA sense strand
gcacccacacacucaugaa

SEQ ID NO: 1284452 - RNA, 19 nt, Homo sapiens
  misc_RNA (1)...(19): siRNA sense strand
gcaagaauauggacagaaa

SEQ ID NO: 1284453 - RNA, 19 nt, Homo sapiens
  misc_RNA (1)...(19): siRNA sense strand
gaggugaacuuucugguuu

SEQ ID NO: 1284454 - RNA, 19 nt, Homo sapiens
  misc_RNA (1)...(19): siRNA sense strand
gcaaagagaucuacaccau

SEQ ID NO: 1284455 - RNA, 19 nt, Homo sapiens
  misc_RNA (1)...(19): siRNA sense strand
gcaagugcuucauuugauu

SEQ ID NO: 1284456 - RNA, 19 nt, Homo sapiens
  misc_RNA (1)...(19): siRNA sense strand
uugaagaucuggaguauga

SEQ ID NO: 1284457 - RNA, 19 nt, Homo sapiens
  misc_RNA (1)...(19): siRNA sense strand
agacucaacugcaaggaua

SEQ ID NO: 1284458 - RNA, 19 nt, Homo sapiens
  misc_RNA (1)...(19): siRNA sense strand
aaagagaucuacaccauca

SEQ ID NO: 1284459 - RNA, 19 nt, Homo sapiens
  misc_RNA (1)...(19): siRNA sense strand
ucacucggcuuucacguuu

SEQ ID NO: 1284460 - RNA, 19 nt, Homo sapiens
  misc_RNA (1)...(19): siRNA sense strand
caacaaagccacaguccuu

SEQ ID NO: 1284461 - RNA, 19 nt, Homo sapiens
  misc_RNA (1)...(19): siRNA sense strand
caacaucaaugggacacua

SEQ ID NO: 1284462 - RNA, 19 nt, Homo sapiens
  misc_RNA (1)...(19): siRNA sense strand
gaauggagcacaugaaauc

SEQ ID NO: 1284463 - RNA, 19 nt, Homo sapiens
  misc_RNA (1)...(19): siRNA sense strand
ggaaaguacuuggcuagug

SEQ ID NO: 1284464 - RNA, 19 nt, Homo sapiens
  misc_RNA (1)...(19): siRNA sense strand
guucauaucuggaauacuc

SEQ ID NO: 1284465 - RNA, 19 nt, Homo sapiens
  misc_RNA (1)...(19): siRNA sense strand
gagaauggagcacaugaaa

SEQ ID NO: 1284466 - RNA, 19 nt, Homo sapiens
  misc_RNA (1)...(19): siRNA sense strand
gagcacaugaaaucaauaa

SEQ ID NO: 1284467 - RNA, 19 nt, Homo sapiens
  misc_RNA (1)...(19): siRNA sense strand
caaagccaauggaaauaga

SEQ ID NO: 1284468 - RNA, 19 nt, Homo sapiens
  misc_RNA (1)...(19): siRNA sense strand
gcacaugaaaucaauaauc

SEQ ID NO: 1284469 - RNA, 19 nt, Homo sapiens
  misc_RNA (1)...(19): siRNA sense strand
uauggaaccugaaugagaa

SEQ ID NO: 1284470 - RNA, 19 nt, Homo sapiens
  misc_RNA (1)...(19): siRNA sense strand
ggauauggaaccugaauga

SEQ ID NO: 1284471 - RNA, 19 nt, Homo sapiens
  misc_RNA (1)...(19): siRNA sense strand
agaagggacugcaguaugu

SEQ ID NO: 1284472 - RNA, 19 nt, Homo sapiens
  misc_RNA (1)...(19): siRNA sense strand
ccugauaguugcugugauu

SEQ ID NO: 1284473 - RNA, 19 nt, Homo sapiens
  misc_RNA (1)...(19): siRNA sense strand
ggaaauagauggggauguu

SEQ ID NO: 1284474 - RNA, 19 nt, Homo sapiens
  misc_RNA (1)...(19): siRNA sense strand
cgaggucaaugccaucaaa

SEQ ID NO: 1284475 - RNA, 19 nt, Homo sapiens
  misc_RNA (1)...(19): siRNA sense strand
gacaugacauugaagaucu

SEQ ID NO: 1284476 - RNA, 19 nt, Homo sapiens
  misc_RNA (1)...(19): siRNA sense strand
guauguagaggcugagaua

SEQ ID NO: 1284477 - RNA, 19 nt, Homo sapiens
  misc_RNA (1)...(19): siRNA sense strand
gcuaguggauccuuugaca

SEQ ID NO: 1284478 - RNA, 19 nt, Homo sapiens
  misc_RNA (1)...(19): siRNA sense strand
ggaagagaauggagcacau

SEQ ID NO: 1284479 - RNA, 19 nt, Homo sapiens
  misc_RNA (1)...(19): siRNA sense strand
gcaaaggcggcaaccauga

SEQ ID NO: 1284480 - RNA, 19 nt, Homo sapiens
  misc_RNA (1)...(19): siRNA sense strand
agucugagguguucauuug

SEQ ID NO: 1284481 - RNA, 19 nt, Homo sapiens
  misc_RNA (1)...(19): siRNA sense strand
guggauccuuugacaagua

SEQ ID NO: 1284482 - RNA, 19 nt, Homo sapiens
  misc_RNA (1)...(19): siRNA sense strand
gauguggacuggcagaaca

SEQ ID NO: 1284483 - RNA, 19 nt, Homo sapiens
  misc_RNA (1)...(19): siRNA sense strand
uaaccuggccagcaccuua

SEQ ID NO: 1284484 - RNA, 19 nt, Homo sapiens
  misc_RNA (1)...(19): siRNA sense strand
guugagacauuguauacga

SEQ ID NO: 1284485 - RNA, 19 nt, Homo sapiens
  misc_RNA (1)...(19): siRNA sense strand
ggcacgacgucccaaguaa

SEQ ID NO: 1284486 - RNA, 19 nt, Homo sapiens
  misc_RNA (1)...(19): siRNA sense strand
ggcaagugcuucauuugau

SEQ ID NO: 1284487 - RNA, 19 nt, Homo sapiens
  misc_RNA (1)...(19): siRNA sense strand
cggaugacaugacauugaa

SEQ ID NO: 1284488 - RNA, 19 nt, Homo sapiens
  misc_RNA (1)...(19): siRNA sense strand
ggaacccugucagugauuu

SEQ ID NO: 1284489 - RNA, 19 nt, Homo sapiens
  misc_RNA (1)...(19): siRNA sense strand
gaagucucguccacagcua

SEQ ID NO: 1284490 - RNA, 19 nt, Homo sapiens
  misc_RNA (1)...(19): siRNA sense strand
guuggcaagugcuucauuu

SEQ ID NO: 1284491 - RNA, 19 nt, Homo sapiens
  misc_RNA (1)...(19): siRNA sense strand
gaagcucacucagcagcaa

SEQ ID NO: 1284492 - RNA, 19 nt, Homo sapiens
  misc_RNA (1)...(19): siRNA sense strand
caucuucgcucugaaaugg

SEQ ID NO: 1284493 - RNA, 19 nt, Homo sapiens
  misc_RNA (1)...(19): siRNA sense strand
ucaccucacuggacuggaa

SEQ ID NO: 1284494 - RNA, 19 nt, Homo sapiens
  misc_RNA (1)...(19): siRNA sense strand
ccacgagucugagguguuc

SEQ ID NO: 1284495 - RNA, 19 nt, Homo sapiens
  misc_RNA (1)...(19): siRNA sense strand
gcucugaaauggaacaaaa

SEQ ID NO: 1284496 - RNA, 19 nt, Homo sapiens
  misc_RNA (1)...(19): siRNA sense strand
caccuuaggccaacauaaa

SEQ ID NO: 1284497 - RNA, 19 nt, Homo sapiens
  misc_RNA (1)...(19): siRNA sense strand
ggaacacuauuggcuaugg

SEQ ID NO: 1284498 - RNA, 19 nt, Homo sapiens
  misc_RNA (1)...(19): siRNA sense strand
gaacgcccgaggagauaaa

SEQ ID NO: 1284499 - RNA, 19 nt, Homo sapiens
  misc_RNA (1)...(19): siRNA sense strand
ccaaggcacuggcgguauc

SEQ ID NO: 1284500 - RNA, 19 nt, Homo sapiens
  misc_RNA (1)...(19): siRNA sense strand
gggcacgacgucccaagua

SEQ ID NO: 1284501 - RNA, 19 nt, Homo sapiens
  misc_RNA (1)...(19): siRNA sense strand
cagcucguguugagacauu

SEQ ID NO: 1284502 - RNA, 19 nt, Homo sapiens
  misc_RNA (1)...(19): siRNA sense strand
cauugaagaucuggaguau

SEQ ID NO: 1284503 - RNA, 19 nt, Homo sapiens
  misc_RNA (1)...(19): siRNA sense strand
gaagggacugcaguaugua

SEQ ID NO: 1284504 - RNA, 19 nt, Homo sapiens
  misc_RNA (1)...(19): siRNA sense strand
gcucggaugacaugacauu

SEQ ID NO: 1284505 - RNA, 19 nt, Homo sapiens
  misc_RNA (1)...(19): siRNA sense strand
cacgacgucccaaguaaua

SEQ ID NO: 1284506 - RNA, 19 nt, Homo sapiens
  misc_RNA (1)...(19): siRNA sense strand
caacugcaaggauauggaa

SEQ ID NO: 1284507 - RNA, 19 nt, Homo sapiens
  misc_RNA (1)...(19): siRNA sense strand
ccacagaggcaucagcaau

SEQ ID NO: 1284508 - RNA, 19 nt, Homo sapiens
  misc_RNA (1)...(19): siRNA sense strand
gcaggcauuuggagagaag

SEQ ID NO: 1284509 - RNA, 19 nt, Homo sapiens
  misc_RNA (1)...(19): siRNA sense strand
agauaagcaucaacaagga

SEQ ID NO: 1284510 - RNA, 19 nt, Homo sapiens
  misc_RNA (1)...(19): siRNA sense strand
gaugacaugacauugaaga

SEQ ID NO: 1284511 - RNA, 19 nt, Homo sapiens
  misc_RNA (1)...(19): siRNA sense strand
cagaacaacaugaccuuug

SEQ ID NO: 1284512 - RNA, 19 nt, Homo sapiens
  misc_RNA (1)...(19): siRNA sense strand
gaugguuucgcaagaauau

SEQ ID NO: 1284513 - RNA, 19 nt, Homo sapiens
  misc_RNA (1)...(19): siRNA sense strand
ccacccagcucguguugag

SEQ ID NO: 1284514 - RNA, 19 nt, Homo sapiens
  misc_RNA (1)...(19): siRNA sense strand
gaagagaauggagcacaug

SEQ ID NO: 1284515 - RNA, 19 nt, Homo sapiens
  misc_RNA (1)...(19): siRNA sense strand
ggauccuucuggaauguug

SEQ ID NO: 1284516 - RNA, 19 nt, Homo sapiens
  misc_RNA (1)...(19): siRNA sense strand
ucacacaggagaagccaaa

SEQ ID NO: 1284517 - RNA, 19 nt, Homo sapiens
  misc_RNA (1)...(19): siRNA sense strand
cagcaggcauuuggagaga

SEQ ID NO: 1284518 - RNA, 19 nt, Homo sapiens
  misc_RNA (1)...(19): siRNA sense strand
ggugaacuuucugguuuau

SEQ ID NO: 1284519 - RNA, 19 nt, Homo sapiens
  misc_RNA (1)...(19): siRNA sense strand
gugacgaggugaacuuucu

SEQ ID NO: 1284520 - RNA, 19 nt, Homo sapiens
  misc_RNA (1)...(19): siRNA sense strand
gcagaacaacaugaccuuu

SEQ ID NO: 1284521 - RNA, 19 nt, Homo sapiens
  misc_RNA (1)...(19): siRNA sense strand
uaugaugguuucgcaagaa

SEQ ID NO: 1284522 - RNA, 19 nt, Homo sapiens
  misc_RNA (1)...(19): siRNA sense strand
cgacgucccaaguaauaaa

SEQ ID NO: 1284523 - RNA, 19 nt, Homo sapiens
  misc_RNA (1)...(19): siRNA sense strand
gcacgacgucccaaguaau

SEQ ID NO: 1284524 - RNA, 19 nt, Homo sapiens
  misc_RNA (1)...(19): siRNA sense strand
auaaagaugucaccucacu

SEQ ID NO: 1284525 - RNA, 19 nt, Homo sapiens
  misc_RNA (1)...(19): siRNA sense strand
gagugcugguguagacaaa

SEQ ID NO: 1284526 - RNA, 19 nt, Homo sapiens
  misc_RNA (1)...(19): siRNA sense strand
acucaaagccaauggaaau

SEQ ID NO: 1284527 - RNA, 19 nt, Homo sapiens
  misc_RNA (1)...(19): siRNA sense strand
gcaguuuccuuuucauuca

SEQ ID NO: 1284528 - RNA, 19 nt, Homo sapiens
  misc_RNA (1)...(19): siRNA sense strand
gcaccuuaggccaacauaa

SEQ ID NO: 1284529 - RNA, 19 nt, Homo sapiens
  misc_RNA (1)...(19): siRNA sense strand
gagacauuguauacgagaa

SEQ ID NO: 1284530 - RNA, 19 nt, Homo sapiens
  misc_RNA (1)...(19): siRNA sense strand
gaagaucuggaguaugaag

SEQ ID NO: 1284531 - RNA, 19 nt, Homo sapiens
  misc_RNA (1)...(19): siRNA sense strand
gcaaaauccuccaaagaac

SEQ ID NO: 1284532 - RNA, 19 nt, Homo sapiens
  misc_RNA (1)...(19): siRNA sense strand
gaaccugaaugagaauagc

SEQ ID NO: 1284533 - RNA, 19 nt, Homo sapiens
  misc_RNA (1)...(19): siRNA sense strand
cagaagggacugcaguaug

SEQ ID NO: 1284534 - RNA, 19 nt, Homo sapiens
  misc_RNA (1)...(19): siRNA sense strand
ccuggaacccugucaguga

SEQ ID NO: 1284535 - RNA, 19 nt, Homo sapiens
  misc_RNA (1)...(19): siRNA sense strand
uggagcacaugaaaucaau

SEQ ID NO: 1284536 - RNA, 19 nt, Homo sapiens
  misc_RNA (1)...(19): siRNA sense strand
aacccaaacuccagcauca

SEQ ID NO: 1284537 - RNA, 19 nt, Homo sapiens
  misc_RNA (1)...(19): siRNA sense strand
ugaacuuucugguuuaucg

SEQ ID NO: 1284538 - RNA, 19 nt, Homo sapiens
  misc_RNA (1)...(19): siRNA sense strand
gagauuccacccaacaaag

SEQ ID NO: 1284539 - RNA, 19 nt, Homo sapiens
  misc_RNA (1)...(19): siRNA sense strand
ggguucauaugaugguuuc

SEQ ID NO: 1284540 - RNA, 19 nt, Homo sapiens
  misc_RNA (1)...(19): siRNA sense strand
acacacucaugaagcauca

SEQ ID NO: 1284541 - RNA, 19 nt, Homo sapiens
  misc_RNA (1)...(19): siRNA sense strand
ggacuggcagaacaacaug

SEQ ID NO: 1284542 - RNA, 19 nt, Homo sapiens
  misc_RNA (1)...(19): siRNA sense strand
gagaagccaaacagcaguu

SEQ ID NO: 1284543 - RNA, 19 nt, Homo sapiens
  misc_RNA (1)...(19): siRNA sense strand
aggugaacuuucugguuua

SEQ ID NO: 1284544 - RNA, 19 nt, Homo sapiens
  misc_RNA (1)...(19): siRNA sense strand
ggagcacaugaaaucaaua

SEQ ID NO: 1284545 - RNA, 19 nt, Homo sapiens
  misc_RNA (1)...(19): siRNA sense strand
uggcaagugcuucauuuga

SEQ ID NO: 1284546 - RNA, 19 nt, Homo sapiens
  misc_RNA (1)...(19): siRNA sense strand
gcugagauaagcaucaaca

SEQ ID NO: 1284547 - RNA, 19 nt, Homo sapiens
  misc_RNA (1)...(19): siRNA sense strand
uagagucccugucccugau

SEQ ID NO: 1284548 - RNA, 19 nt, Homo sapiens
  misc_RNA (1)...(19): siRNA sense strand
ugagauuccacccaacaaa

SEQ ID NO: 1284549 - RNA, 19 nt, Homo sapiens
  misc_RNA (1)...(19): siRNA sense strand
gugcuucauuugauucuac

SEQ ID NO: 1284550 - RNA, 19 nt, Homo sapiens
  misc_RNA (1)...(19): siRNA sense strand
ggaacgcccgaggagauaa

SEQ ID NO: 1284551 - RNA, 19 nt, Homo sapiens
  misc_RNA (1)...(19): siRNA sense strand
gcacccacacacucaugaa

SEQ ID NO: 1284552 - RNA, 19 nt, Homo sapiens
  misc_RNA (1)...(19): siRNA sense strand
ggaaagaguuuauguucua

SEQ ID NO: 1284553 - RNA, 19 nt, Homo sapiens
  misc_RNA (1)...(19): siRNA sense strand
cagaagaacuguuugauug

SEQ ID NO: 1284554 - RNA, 19 nt, Homo sapiens
  misc_RNA (1)...(19): siRNA sense strand
gagaagagcuccagcagau

SEQ ID NO: 1284555 - RNA, 19 nt, Homo sapiens
  misc_RNA (1)...(19): siRNA sense strand
gcaauugugugccaucaaa

SEQ ID NO: 1284556 - RNA, 19 nt, Homo sapiens
  misc_RNA (1)...(19): siRNA sense strand
ggagacaaaucaucaggaa

SEQ ID NO: 1284557 - RNA, 19 nt, Homo sapiens
  misc_RNA (1)...(19): siRNA sense strand
gaagagcuccagcagauaa

SEQ ID NO: 1284558 - RNA, 19 nt, Homo sapiens
  misc_RNA (1)...(19): siRNA sense strand
caagaucuguggagacaaa

SEQ ID NO: 1284559 - RNA, 19 nt, Homo sapiens
  misc_RNA (1)...(19): siRNA sense strand
guuguucacuucagaauuu

SEQ ID NO: 1284560 - RNA, 19 nt, Homo sapiens
  misc_RNA (1)...(19): siRNA sense strand
gcaccugacugaagaugaa

SEQ ID NO: 1284561 - RNA, 19 nt, Homo sapiens
  misc_RNA (1)...(19): siRNA sense strand
gaaauuauuccaugcaaga

SEQ ID NO: 1284562 - RNA, 19 nt, Homo sapiens
  misc_RNA (1)...(19): siRNA sense strand
ggaagaaauugagaacuau

SEQ ID NO: 1284563 - RNA, 19 nt, Homo sapiens
  misc_RNA (1)...(19): siRNA sense strand
caaggugucuacauuaaga

SEQ ID NO: 1284564 - RNA, 19 nt, Homo sapiens
  misc_RNA (1)...(19): siRNA sense strand
ccgagaagauggaauacua

SEQ ID NO: 1284565 - RNA, 19 nt, Homo sapiens
  misc_RNA (1)...(19): siRNA sense strand
gaagauggaauacuaacaa

SEQ ID NO: 1284566 - RNA, 19 nt, Homo sapiens
  misc_RNA (1)...(19): siRNA sense strand
cagcuuguaugcagaagua

SEQ ID NO: 1284567 - RNA, 19 nt, Homo sapiens
  misc_RNA (1)...(19): siRNA sense strand
gaucaaauugugcuucuaa

SEQ ID NO: 1284568 - RNA, 19 nt, Homo sapiens
  misc_RNA (1)...(19): siRNA sense strand
gcagagagacagcuuguau

SEQ ID NO: 1284569 - RNA, 19 nt, Homo sapiens
  misc_RNA (1)...(19): siRNA sense strand
caaacgcauugauggauuu

SEQ ID NO: 1284570 - RNA, 19 nt, Homo sapiens
  misc_RNA (1)...(19): siRNA sense strand
gaagaacuguuugauugau

SEQ ID NO: 1284571 - RNA, 19 nt, Homo sapiens
  misc_RNA (1)...(19): siRNA sense strand
uagaacaccuugcacagaa

SEQ ID NO: 1284572 - RNA, 19 nt, Homo sapiens
  misc_RNA (1)...(19): siRNA sense strand
aggaagaaauugagaacua

SEQ ID NO: 1284573 - RNA, 19 nt, Homo sapiens
  misc_RNA (1)...(19): siRNA sense strand
gaacaccuugcacagaaua

SEQ ID NO: 1284574 - RNA, 19 nt, Homo sapiens
  misc_RNA (1)...(19): siRNA sense strand
aaucaaaccagaaccaaua

SEQ ID NO: 1284575 - RNA, 19 nt, Homo sapiens
  misc_RNA (1)...(19): siRNA sense strand
guagggaugucucgagaug

SEQ ID NO: 1284576 - RNA, 19 nt, Homo sapiens
  misc_RNA (1)...(19): siRNA sense strand
gaggugauguggcaauugu

SEQ ID NO: 1284577 - RNA, 19 nt, Homo sapiens
  misc_RNA (1)...(19): siRNA sense strand
gcucauggcugcaagaaaa

SEQ ID NO: 1284578 - RNA, 19 nt, Homo sapiens
  misc_RNA (1)...(19): siRNA sense strand
ggaaaccugccaauacuug

SEQ ID NO: 1284579 - RNA, 19 nt, Homo sapiens
  misc_RNA (1)...(19): siRNA sense strand
gaggugguguuuaucagaa

SEQ ID NO: 1284580 - RNA, 19 nt, Homo sapiens
  misc_RNA (1)...(19): siRNA sense strand
ccaaacgcauugauggauu

SEQ ID NO: 1284581 - RNA, 19 nt, Homo sapiens
  misc_RNA (1)...(19): siRNA sense strand
uuacagaagcuauacagua

SEQ ID NO: 1284582 - RNA, 19 nt, Homo sapiens
  misc_RNA (1)...(19): siRNA sense strand
gaaccaauaugugacuaca

SEQ ID NO: 1284583 - RNA, 19 nt, Homo sapiens
  misc_RNA (1)...(19): siRNA sense strand
caacacguccuacagaaga

SEQ ID NO: 1284584 - RNA, 19 nt, Homo sapiens
  misc_RNA (1)...(19): siRNA sense strand
gugaagacuuuauuagcuu

SEQ ID NO: 1284585 - RNA, 19 nt, Homo sapiens
  misc_RNA (1)...(19): siRNA sense strand
uaugcaaggugucuacauu

SEQ ID NO: 1284586 - RNA, 19 nt, Homo sapiens
  misc_RNA (1)...(19): siRNA sense strand
ucaccgagaagauggaaua

SEQ ID NO: 1284587 - RNA, 19 nt, Homo sapiens
  misc_RNA (1)...(19): siRNA sense strand
ccagucaggucuugauauc

SEQ ID NO: 1284588 - RNA, 19 nt, Homo sapiens
  misc_RNA (1)...(19): siRNA sense strand
gauggaauacuaacaaagu

SEQ ID NO: 1284589 - RNA, 19 nt, Homo sapiens
  misc_RNA (1)...(19): siRNA sense strand
gaaugugccgugccuuuga

SEQ ID NO: 1284590 - RNA, 19 nt, Homo sapiens
  misc_RNA (1)...(19): siRNA sense strand
ggagaagucagcaaagcaa

SEQ ID NO: 1284591 - RNA, 19 nt, Homo sapiens
  misc_RNA (1)...(19): siRNA sense strand
ugcaaggugucuacauuaa

SEQ ID NO: 1284592 - RNA, 19 nt, Homo sapiens
  misc_RNA (1)...(19): siRNA sense strand
acagaagaaucaccgagaa

SEQ ID NO: 1284593 - RNA, 19 nt, Homo sapiens
  misc_RNA (1)...(19): siRNA sense strand
gaagaaucaccgagaagau

SEQ ID NO: 1284594 - RNA, 19 nt, Homo sapiens
  misc_RNA (1)...(19): siRNA sense strand
ucagaagaacuguuugauu

SEQ ID NO: 1284595 - RNA, 19 nt, Homo sapiens
  misc_RNA (1)...(19): siRNA sense strand
cgaccucaguaacuacauu

SEQ ID NO: 1284596 - RNA, 19 nt, Homo sapiens
  misc_RNA (1)...(19): siRNA sense strand
caaaccagaaccaauaugu

SEQ ID NO: 1284597 - RNA, 19 nt, Homo sapiens
  misc_RNA (1)...(19): siRNA sense strand
agacaaaucaucaggaauc

SEQ ID NO: 1284598 - RNA, 19 nt, Homo sapiens
  misc_RNA (1)...(19): siRNA sense strand
gacugaagaugaaauugca

SEQ ID NO: 1284599 - RNA, 19 nt, Homo sapiens
  misc_RNA (1)...(19): siRNA sense strand
guccauggcagaauuagaa

SEQ ID NO: 1284600 - RNA, 19 nt, Homo sapiens
  misc_RNA (1)...(19): siRNA sense strand
uacaguaugugguggaguu

SEQ ID NO: 1284601 - RNA, 19 nt, Homo sapiens
  misc_RNA (1)...(19): siRNA sense strand
gccaauacuugagagaaga

SEQ ID NO: 1284602 - RNA, 19 nt, Homo sapiens
  misc_RNA (1)...(19): siRNA sense strand
gaaaccugccaauacuuga

SEQ ID NO: 1284603 - RNA, 19 nt, Homo sapiens
  misc_RNA (1)...(19): siRNA sense strand
aaauucagcuagcucuuca

SEQ ID NO: 1284604 - RNA, 19 nt, Homo sapiens
  misc_RNA (1)...(19): siRNA sense strand
gacauugugcgacuucauu

SEQ ID NO: 1284605 - RNA, 19 nt, Homo sapiens
  misc_RNA (1)...(19): siRNA sense strand
cgagaagauggaauacuaa

SEQ ID NO: 1284606 - RNA, 19 nt, Homo sapiens
  misc_RNA (1)...(19): siRNA sense strand
agaaaccgcugccaacacu

SEQ ID NO: 1284607 - RNA, 19 nt, Homo sapiens
  misc_RNA (1)...(19): siRNA sense strand
cuaugcaccugacugaaga

SEQ ID NO: 1284608 - RNA, 19 nt, Homo sapiens
  misc_RNA (1)...(19): siRNA sense strand
cgacgucuucaaauccuua

SEQ ID NO: 1284609 - RNA, 19 nt, Homo sapiens
  misc_RNA (1)...(19): siRNA sense strand
cagaaugugccgugccuuu

SEQ ID NO: 1284610 - RNA, 19 nt, Homo sapiens
  misc_RNA (1)...(19): siRNA sense strand
gggaggugauguggcaauu

SEQ ID NO: 1284611 - RNA, 19 nt, Homo sapiens
  misc_RNA (1)...(19): siRNA sense strand
gaaucaaaccagaaccaau

SEQ ID NO: 1284612 - RNA, 19 nt, Homo sapiens
  misc_RNA (1)...(19): siRNA sense strand
ccaacgggcugacggaacu

SEQ ID NO: 1284613 - RNA, 19 nt, Homo sapiens
  misc_RNA (1)...(19): siRNA sense strand
gaucuguggagacaaauca

SEQ ID NO: 1284614 - RNA, 19 nt, Homo sapiens
  misc_RNA (1)...(19): siRNA sense strand
ucaaauccuuagguuguga

SEQ ID NO: 1284615 - RNA, 19 nt, Homo sapiens
  misc_RNA (1)...(19): siRNA sense strand
gaagaaauugagaacuauc

SEQ ID NO: 1284616 - RNA, 19 nt, Homo sapiens
  misc_RNA (1)...(19): siRNA sense strand
ucgagaugcuguaaaauuu

SEQ ID NO: 1284617 - RNA, 19 nt, Homo sapiens
  misc_RNA (1)...(19): siRNA sense strand
ucagcuagcucuucaacac

SEQ ID NO: 1284618 - RNA, 19 nt, Homo sapiens
  misc_RNA (1)...(19): siRNA sense strand
gguugugaagacuuuauua

SEQ ID NO: 1284619 - RNA, 19 nt, Homo sapiens
  misc_RNA (1)...(19): siRNA sense strand
aaccagaaccaauauguga

SEQ ID NO: 1284620 - RNA, 19 nt, Homo sapiens
  misc_RNA (1)...(19): siRNA sense strand
aaucaucaggaauccauua

SEQ ID NO: 1284621 - RNA, 19 nt, Homo sapiens
  misc_RNA (1)...(19): siRNA sense strand
gcuucuaccuggacauaca

SEQ ID NO: 1284622 - RNA, 19 nt, Homo sapiens
  misc_RNA (1)...(19): siRNA sense strand
guaugcagaaguacagaaa

SEQ ID NO: 1284623 - RNA, 19 nt, Homo sapiens
  misc_RNA (1)...(19): siRNA sense strand
caaaucaucaggaauccau

SEQ ID NO: 1284624 - RNA, 19 nt, Homo sapiens
  misc_RNA (1)...(19): siRNA sense strand
ggaaucaaaccagaaccaa

SEQ ID NO: 1284625 - RNA, 19 nt, Homo sapiens
  misc_RNA (1)...(19): siRNA sense strand
acgcauugauggauuuaug

SEQ ID NO: 1284626 - RNA, 19 nt, Homo sapiens
  misc_RNA (1)...(19): siRNA sense strand
cuuagguugugaagacuuu

SEQ ID NO: 1284627 - RNA, 19 nt, Homo sapiens
  misc_RNA (1)...(19): siRNA sense strand
agaagaacuguuugauuga

SEQ ID NO: 1284628 - RNA, 19 nt, Homo sapiens
  misc_RNA (1)...(19): siRNA sense strand
aaugcaaauugauggguaa

SEQ ID NO: 1284629 - RNA, 19 nt, Homo sapiens
  misc_RNA (1)...(19): siRNA sense strand
cuucaaauccuuagguugu

SEQ ID NO: 1284630 - RNA, 19 nt, Homo sapiens
  misc_RNA (1)...(19): siRNA sense strand
cugccaacacugucgauua

SEQ ID NO: 1284631 - RNA, 19 nt, Homo sapiens
  misc_RNA (1)...(19): siRNA sense strand
gcaaggugucuacauuaag

SEQ ID NO: 1284632 - RNA, 19 nt, Homo sapiens
  misc_RNA (1)...(19): siRNA sense strand
ugugaagacuuuauuagcu

SEQ ID NO: 1284633 - RNA, 19 nt, Homo sapiens
  misc_RNA (1)...(19): siRNA sense strand
acgacgaccucaguaacua

SEQ ID NO: 1284634 - RNA, 19 nt, Homo sapiens
  misc_RNA (1)...(19): siRNA sense strand
ugacuacacaccagcauca

SEQ ID NO: 1284635 - RNA, 19 nt, Homo sapiens
  misc_RNA (1)...(19): siRNA sense strand
aaagcaauauacccagaca

SEQ ID NO: 1284636 - RNA, 19 nt, Homo sapiens
  misc_RNA (1)...(19): siRNA sense strand
cucuagaggugguguuuau

SEQ ID NO: 1284637 - RNA, 19 nt, Homo sapiens
  misc_RNA (1)...(19): siRNA sense strand
cuaaaucgcaucuggaaac

SEQ ID NO: 1284638 - RNA, 19 nt, Homo sapiens
  misc_RNA (1)...(19): siRNA sense strand
cagcuucuaccuggacaua

SEQ ID NO: 1284639 - RNA, 19 nt, Homo sapiens
  misc_RNA (1)...(19): siRNA sense strand
guucuaugcaccugacuga

SEQ ID NO: 1284640 - RNA, 19 nt, Homo sapiens
  misc_RNA (1)...(19): siRNA sense strand
cagaaccaauaugugacua

SEQ ID NO: 1284641 - RNA, 19 nt, Homo sapiens
  misc_RNA (1)...(19): siRNA sense strand
ugccaacacugucgauuac

SEQ ID NO: 1284642 - RNA, 19 nt, Homo sapiens
  misc_RNA (1)...(19): siRNA sense strand
ggaguuguucacuucagaa

SEQ ID NO: 1284643 - RNA, 19 nt, Homo sapiens
  misc_RNA (1)...(19): siRNA sense strand
uggaaagaguuuauguucu

SEQ ID NO: 1284644 - RNA, 19 nt, Homo sapiens
  misc_RNA (1)...(19): siRNA sense strand
gaagacuuuauuagcuuug

SEQ ID NO: 1284645 - RNA, 19 nt, Homo sapiens
  misc_RNA (1)...(19): siRNA sense strand
gaagucagcaaagcaaugc

SEQ ID NO: 1284646 - RNA, 19 nt, Homo sapiens
  misc_RNA (1)...(19): siRNA sense strand
guagaaaccgcugccaaca

SEQ ID NO: 1284647 - RNA, 19 nt, Homo sapiens
  misc_RNA (1)...(19): siRNA sense strand
ggugguguuuaucagaaug

SEQ ID NO: 1284648 - RNA, 19 nt, Homo sapiens
  misc_RNA (1)...(19): siRNA sense strand
cuggaaaccugccaauacu

SEQ ID NO: 1284649 - RNA, 19 nt, Homo sapiens
  misc_RNA (1)...(19): siRNA sense strand
gaucgaaccaguagaaacc

SEQ ID NO: 1284650 - RNA, 19 nt, Homo sapiens
  misc_RNA (1)...(19): siRNA sense strand
cgucagaagaacuguuuga

SEQ ID NO: 1284651 - RNA, 19 nt, Homo sapiens
  misc_RNA (1)...(19): siRNA sense strand
gccuuugacucucagaaca

SEQ ID NO: 1284652 - RNA, 19 nt, Homo sapiens
  misc_RNA (1)...(19): siRNA sense strand
ggaaagaguuuauguucua

SEQ ID NO: 1284653 - RNA, 19 nt, Homo sapiens
  misc_RNA (1)...(19): siRNA sense strand
cagaagaacuguuugauug

SEQ ID NO: 1284654 - RNA, 19 nt, Homo sapiens
  misc_RNA (1)...(19): siRNA sense strand
gagaagagcuccagcagau

SEQ ID NO: 1284655 - RNA, 19 nt, Homo sapiens
  misc_RNA (1)...(19): siRNA sense strand
gcaauugugugccaucaaa

SEQ ID NO: 1284656 - RNA, 19 nt, Homo sapiens
  misc_RNA (1)...(19): siRNA sense strand
ggagacaaaucaucaggaa

SEQ ID NO: 1284657 - RNA, 19 nt, Homo sapiens
  misc_RNA (1)...(19): siRNA sense strand
gaagagcuccagcagauaa

SEQ ID NO: 1284658 - RNA, 19 nt, Homo sapiens
  misc_RNA (1)...(19): siRNA sense strand
caagaucuguggagacaaa

SEQ ID NO: 1284659 - RNA, 19 nt, Homo sapiens
  misc_RNA (1)...(19): siRNA sense strand
guuguucacuucagaauuu

SEQ ID NO: 1284660 - RNA, 19 nt, Homo sapiens
  misc_RNA (1)...(19): siRNA sense strand
gcaccugacugaagaugaa

SEQ ID NO: 1284661 - RNA, 19 nt, Homo sapiens
  misc_RNA (1)...(19): siRNA sense strand
gaaauuauuccaugcaaga

SEQ ID NO: 1284662 - RNA, 19 nt, Homo sapiens
  misc_RNA (1)...(19): siRNA sense strand
ggaagaaauugagaacuau

SEQ ID NO: 1284663 - RNA, 19 nt, Homo sapiens
  misc_RNA (1)...(19): siRNA sense strand
caaggugucuacauuaaga

SEQ ID NO: 1284664 - RNA, 19 nt, Homo sapiens
  misc_RNA (1)...(19): siRNA sense strand
ccgagaagauggaauacua

SEQ ID NO: 1284665 - RNA, 19 nt, Homo sapiens
  misc_RNA (1)...(19): siRNA sense strand
gaagauggaauacuaacaa

SEQ ID NO: 1284666 - RNA, 19 nt, Homo sapiens
  misc_RNA (1)...(19): siRNA sense strand
cagcuuguaugcagaagua

SEQ ID NO: 1284667 - RNA, 19 nt, Homo sapiens
  misc_RNA (1)...(19): siRNA sense strand
gaucaaauugugcuucuaa

SEQ ID NO: 1284668 - RNA, 19 nt, Homo sapiens
  misc_RNA (1)...(19): siRNA sense strand
gcagagagacagcuuguau

SEQ ID NO: 1284669 - RNA, 19 nt, Homo sapiens
  misc_RNA (1)...(19): siRNA sense strand
caaacgcauugauggauuu

SEQ ID NO: 1284670 - RNA, 19 nt, Homo sapiens
  misc_RNA (1)...(19): siRNA sense strand
gaagaacuguuugauugau

SEQ ID NO: 1284671 - RNA, 19 nt, Homo sapiens
  misc_RNA (1)...(19): siRNA sense strand
uagaacaccuugcacagaa

SEQ ID NO: 1284672 - RNA, 19 nt, Homo sapiens
  misc_RNA (1)...(19): siRNA sense strand
aggaagaaauugagaacua

SEQ ID NO: 1284673 - RNA, 19 nt, Homo sapiens
  misc_RNA (1)...(19): siRNA sense strand
gaacaccuugcacagaaua

SEQ ID NO: 1284674 - RNA, 19 nt, Homo sapiens
  misc_RNA (1)...(19): siRNA sense strand
aaucaaaccagaaccaaua

SEQ ID NO: 1284675 - RNA, 19 nt, Homo sapiens
  misc_RNA (1)...(19): siRNA sense strand
guagggaugucucgagaug

SEQ ID NO: 1284676 - RNA, 19 nt, Homo sapiens
  misc_RNA (1)...(19): siRNA sense strand
gaggugauguggcaauugu

SEQ ID NO: 1284677 - RNA, 19 nt, Homo sapiens
  misc_RNA (1)...(19): siRNA sense strand
gcucauggcugcaagaaaa

SEQ ID NO: 1284678 - RNA, 19 nt, Homo sapiens
  misc_RNA (1)...(19): siRNA sense strand
ggaaaccugccaauacuug

SEQ ID NO: 1284679 - RNA, 19 nt, Homo sapiens
  misc_RNA (1)...(19): siRNA sense strand
gaggugguguuuaucagaa

SEQ ID NO: 1284680 - RNA, 19 nt, Homo sapiens
  misc_RNA (1)...(19): siRNA sense strand
ccaaacgcauugauggauu

SEQ ID NO: 1284681 - RNA, 19 nt, Homo sapiens
  misc_RNA (1)...(19): siRNA sense strand
uuacagaagcuauacagua

SEQ ID NO: 1284682 - RNA, 19 nt, Homo sapiens
  misc_RNA (1)...(19): siRNA sense strand
gaaccaauaugugacuaca

SEQ ID NO: 1284683 - RNA, 19 nt, Homo sapiens
  misc_RNA (1)...(19): siRNA sense strand
caacacguccuacagaaga

SEQ ID NO: 1284684 - RNA, 19 nt, Homo sapiens
  misc_RNA (1)...(19): siRNA sense strand
gugaagacuuuauuagcuu

SEQ ID NO: 1284685 - RNA, 19 nt, Homo sapiens
  misc_RNA (1)...(19): siRNA sense strand
uaugcaaggugucuacauu

SEQ ID NO: 1284686 - RNA, 19 nt, Homo sapiens
  misc_RNA (1)...(19): siRNA sense strand
ucaccgagaagauggaaua

SEQ ID NO: 1284687 - RNA, 19 nt, Homo sapiens
  misc_RNA (1)...(19): siRNA sense strand
ccagucaggucuugauauc

SEQ ID NO: 1284688 - RNA, 19 nt, Homo sapiens
  misc_RNA (1)...(19): siRNA sense strand
gauggaauacuaacaaagu

SEQ ID NO: 1284689 - RNA, 19 nt, Homo sapiens
  misc_RNA (1)...(19): siRNA sense strand
gaaugugccgugccuuuga

SEQ ID NO: 1284690 - RNA, 19 nt, Homo sapiens
  misc_RNA (1)...(19): siRNA sense strand
ggagaagucagcaaagcaa

SEQ ID NO: 1284691 - RNA, 19 nt, Homo sapiens
  misc_RNA (1)...(19): siRNA sense strand
ugcaaggugucuacauuaa

SEQ ID NO: 1284692 - RNA, 19 nt, Homo sapiens
  misc_RNA (1)...(19): siRNA sense strand
acagaagaaucaccgagaa

SEQ ID NO: 1284693 - RNA, 19 nt, Homo sapiens
  misc_RNA (1)...(19): siRNA sense strand
gaagaaucaccgagaagau

SEQ ID NO: 1284694 - RNA, 19 nt, Homo sapiens
  misc_RNA (1)...(19): siRNA sense strand
ucagaagaacuguuugauu

SEQ ID NO: 1284695 - RNA, 19 nt, Homo sapiens
  misc_RNA (1)...(19): siRNA sense strand
cgaccucaguaacuacauu

SEQ ID NO: 1284696 - RNA, 19 nt, Homo sapiens
  misc_RNA (1)...(19): siRNA sense strand
caaaccagaaccaauaugu

SEQ ID NO: 1284697 - RNA, 19 nt, Homo sapiens
  misc_RNA (1)...(19): siRNA sense strand
agacaaaucaucaggaauc

SEQ ID NO: 1284698 - RNA, 19 nt, Homo sapiens
  misc_RNA (1)...(19): siRNA sense strand
gacugaagaugaaauugca

SEQ ID NO: 1284699 - RNA, 19 nt, Homo sapiens
  misc_RNA (1)...(19): siRNA sense strand
guccauggcagaauuagaa

SEQ ID NO: 1284700 - RNA, 19 nt, Homo sapiens
  misc_RNA (1)...(19): siRNA sense strand
uacaguaugugguggaguu

SEQ ID NO: 1284701 - RNA, 19 nt, Homo sapiens
  misc_RNA (1)...(19): siRNA sense strand
gccaauacuugagagaaga

SEQ ID NO: 1284702 - RNA, 19 nt, Homo sapiens
  misc_RNA (1)...(19): siRNA sense strand
gaaaccugccaauacuuga

SEQ ID NO: 1284703 - RNA, 19 nt, Homo sapiens
  misc_RNA (1)...(19): siRNA sense strand
aaauucagcuagcucuuca

SEQ ID NO: 1284704 - RNA, 19 nt, Homo sapiens
  misc_RNA (1)...(19): siRNA sense strand
gacauugugcgacuucauu

SEQ ID NO: 1284705 - RNA, 19 nt, Homo sapiens
  misc_RNA (1)...(19): siRNA sense strand
cgagaagauggaauacuaa

SEQ ID NO: 1284706 - RNA, 19 nt, Homo sapiens
  misc_RNA (1)...(19): siRNA sense strand
agaaaccgcugccaacacu

SEQ ID NO: 1284707 - RNA, 19 nt, Homo sapiens
  misc_RNA (1)...(19): siRNA sense strand
cuaugcaccugacugaaga

SEQ ID NO: 1284708 - RNA, 19 nt, Homo sapiens
  misc_RNA (1)...(19): siRNA sense strand
cgacgucuucaaauccuua

SEQ ID NO: 1284709 - RNA, 19 nt, Homo sapiens
  misc_RNA (1)...(19): siRNA sense strand
cagaaugugccgugccuuu

SEQ ID NO: 1284710 - RNA, 19 nt, Homo sapiens
  misc_RNA (1)...(19): siRNA sense strand
gggaggugauguggcaauu

SEQ ID NO: 1284711 - RNA, 19 nt, Homo sapiens
  misc_RNA (1)...(19): siRNA sense strand
gaaucaaaccagaaccaau

SEQ ID NO: 1284712 - RNA, 19 nt, Homo sapiens
  misc_RNA (1)...(19): siRNA sense strand
ccaacgggcugacggaacu

SEQ ID NO: 1284713 - RNA, 19 nt, Homo sapiens
  misc_RNA (1)...(19): siRNA sense strand
gaucuguggagacaaauca

SEQ ID NO: 1284714 - RNA, 19 nt, Homo sapiens
  misc_RNA (1)...(19): siRNA sense strand
ucaaauccuuagguuguga

SEQ ID NO: 1284715 - RNA, 19 nt, Homo sapiens
  misc_RNA (1)...(19): siRNA sense strand
gaagaaauugagaacuauc

SEQ ID NO: 1284716 - RNA, 19 nt, Homo sapiens
  misc_RNA (1)...(19): siRNA sense strand
ucgagaugcuguaaaauuu

SEQ ID NO: 1284717 - RNA, 19 nt, Homo sapiens
  misc_RNA (1)...(19): siRNA sense strand
ucagcuagcucuucaacac

SEQ ID NO: 1284718 - RNA, 19 nt, Homo sapiens
  misc_RNA (1)...(19): siRNA sense strand
gguugugaagacuuuauua

SEQ ID NO: 1284719 - RNA, 19 nt, Homo sapiens
  misc_RNA (1)...(19): siRNA sense strand
aaccagaaccaauauguga

SEQ ID NO: 1284720 - RNA, 19 nt, Homo sapiens
  misc_RNA (1)...(19): siRNA sense strand
aaucaucaggaauccauua

SEQ ID NO: 1284721 - RNA, 19 nt, Homo sapiens
  misc_RNA (1)...(19): siRNA sense strand
gcuucuaccuggacauaca

SEQ ID NO: 1284722 - RNA, 19 nt, Homo sapiens
  misc_RNA (1)...(19): siRNA sense strand
guaugcagaaguacagaaa

SEQ ID NO: 1284723 - RNA, 19 nt, Homo sapiens
  misc_RNA (1)...(19): siRNA sense strand
caaaucaucaggaauccau

SEQ ID NO: 1284724 - RNA, 19 nt, Homo sapiens
  misc_RNA (1)...(19): siRNA sense strand
ggaaucaaaccagaaccaa

SEQ ID NO: 1284725 - RNA, 19 nt, Homo sapiens
  misc_RNA (1)...(19): siRNA sense strand
acgcauugauggauuuaug

SEQ ID NO: 1284726 - RNA, 19 nt, Homo sapiens
  misc_RNA (1)...(19): siRNA sense strand
cuuagguugugaagacuuu

SEQ ID NO: 1284727 - RNA, 19 nt, Homo sapiens
  misc_RNA (1)...(19): siRNA sense strand
agaagaacuguuugauuga

SEQ ID NO: 1284728 - RNA, 19 nt, Homo sapiens
  misc_RNA (1)...(19): siRNA sense strand
aaugcaaauugauggguaa

SEQ ID NO: 1284729 - RNA, 19 nt, Homo sapiens
  misc_RNA (1)...(19): siRNA sense strand
cuucaaauccuuagguugu

SEQ ID NO: 1284730 - RNA, 19 nt, Homo sapiens
  misc_RNA (1)...(19): siRNA sense strand
cugccaacacugucgauua

SEQ ID NO: 1284731 - RNA, 19 nt, Homo sapiens
  misc_RNA (1)...(19): siRNA sense strand
gcaaggugucuacauuaag

SEQ ID NO: 1284732 - RNA, 19 nt, Homo sapiens
  misc_RNA (1)...(19): siRNA sense strand
ugugaagacuuuauuagcu

SEQ ID NO: 1284733 - RNA, 19 nt, Homo sapiens
  misc_RNA (1)...(19): siRNA sense strand
acgacgaccucaguaacua

SEQ ID NO: 1284734 - RNA, 19 nt, Homo sapiens
  misc_RNA (1)...(19): siRNA sense strand
ugacuacacaccagcauca

SEQ ID NO: 1284735 - RNA, 19 nt, Homo sapiens
  misc_RNA (1)...(19): siRNA sense strand
aaagcaauauacccagaca

SEQ ID NO: 1284736 - RNA, 19 nt, Homo sapiens
  misc_RNA (1)...(19): siRNA sense strand
cucuagaggugguguuuau

SEQ ID NO: 1284737 - RNA, 19 nt, Homo sapiens
  misc_RNA (1)...(19): siRNA sense strand
cuaaaucgcaucuggaaac

SEQ ID NO: 1284738 - RNA, 19 nt, Homo sapiens
  misc_RNA (1)...(19): siRNA sense strand
cagcuucuaccuggacaua

SEQ ID NO: 1284739 - RNA, 19 nt, Homo sapiens
  misc_RNA (1)...(19): siRNA sense strand
guucuaugcaccugacuga

SEQ ID NO: 1284740 - RNA, 19 nt, Homo sapiens
  misc_RNA (1)...(19): siRNA sense strand
cagaaccaauaugugacua

SEQ ID NO: 1284741 - RNA, 19 nt, Homo sapiens
  misc_RNA (1)...(19): siRNA sense strand
ugccaacacugucgauuac

SEQ ID NO: 1284742 - RNA, 19 nt, Homo sapiens
  misc_RNA (1)...(19): siRNA sense strand
ggaguuguucacuucagaa

SEQ ID NO: 1284743 - RNA, 19 nt, Homo sapiens
  misc_RNA (1)...(19): siRNA sense strand
uggaaagaguuuauguucu

SEQ ID NO: 1284744 - RNA, 19 nt, Homo sapiens
  misc_RNA (1)...(19): siRNA sense strand
gaagacuuuauuagcuuug

SEQ ID NO: 1284745 - RNA, 19 nt, Homo sapiens
  misc_RNA (1)...(19): siRNA sense strand
gaagucagcaaagcaaugc

SEQ ID NO: 1284746 - RNA, 19 nt, Homo sapiens
  misc_RNA (1)...(19): siRNA sense strand
guagaaaccgcugccaaca

SEQ ID NO: 1284747 - RNA, 19 nt, Homo sapiens
  misc_RNA (1)...(19): siRNA sense strand
ggugguguuuaucagaaug

SEQ ID NO: 1284748 - RNA, 19 nt, Homo sapiens
  misc_RNA (1)...(19): siRNA sense strand
cuggaaaccugccaauacu

SEQ ID NO: 1284749 - RNA, 19 nt, Homo sapiens
  misc_RNA (1)...(19): siRNA sense strand
gaucgaaccaguagaaacc

SEQ ID NO: 1284750 - RNA, 19 nt, Homo sapiens
  misc_RNA (1)...(19): siRNA sense strand
cgucagaagaacuguuuga

SEQ ID NO: 1284751 - RNA, 19 nt, Homo sapiens
  misc_RNA (1)...(19): siRNA sense strand
gccuuugacucucagaaca

SEQ ID NO: 1284752 - RNA, 19 nt, Homo sapiens
  misc_RNA (1)...(19): siRNA sense strand
ggaaagaguuuauguucua

SEQ ID NO: 1284753 - RNA, 19 nt, Homo sapiens
  misc_RNA (1)...(19): siRNA sense strand
cagaagaacuguuugauug

SEQ ID NO: 1284754 - RNA, 19 nt, Homo sapiens
  misc_RNA (1)...(19): siRNA sense strand
gagaagagcuccagcagau

SEQ ID NO: 1284755 - RNA, 19 nt, Homo sapiens
  misc_RNA (1)...(19): siRNA sense strand
gcaauugugugccaucaaa

SEQ ID NO: 1284756 - RNA, 19 nt, Homo sapiens
  misc_RNA (1)...(19): siRNA sense strand
ggagacaaaucaucaggaa

SEQ ID NO: 1284757 - RNA, 19 nt, Homo sapiens
  misc_RNA (1)...(19): siRNA sense strand
gaagagcuccagcagauaa

SEQ ID NO: 1284758 - RNA, 19 nt, Homo sapiens
  misc_RNA (1)...(19): siRNA sense strand
caagaucuguggagacaaa

SEQ ID NO: 1284759 - RNA, 19 nt, Homo sapiens
  misc_RNA (1)...(19): siRNA sense strand
guuguucacuucagaauuu

SEQ ID NO: 1284760 - RNA, 19 nt, Homo sapiens
  misc_RNA (1)...(19): siRNA sense strand
gcaccugacugaagaugaa

SEQ ID NO: 1284761 - RNA, 19 nt, Homo sapiens
  misc_RNA (1)...(19): siRNA sense strand
gaaauuauuccaugcaaga

SEQ ID NO: 1284762 - RNA, 19 nt, Homo sapiens
  misc_RNA (1)...(19): siRNA sense strand
ggaagaaauugagaacuau

SEQ ID NO: 1284763 - RNA, 19 nt, Homo sapiens
  misc_RNA (1)...(19): siRNA sense strand
caaggugucuacauuaaga

SEQ ID NO: 1284764 - RNA, 19 nt, Homo sapiens
  misc_RNA (1)...(19): siRNA sense strand
ccgagaagauggaauacua

SEQ ID NO: 1284765 - RNA, 19 nt, Homo sapiens
  misc_RNA (1)...(19): siRNA sense strand
gaagauggaauacuaacaa

SEQ ID NO: 1284766 - RNA, 19 nt, Homo sapiens
  misc_RNA (1)...(19): siRNA sense strand
cagcuuguaugcagaagua

SEQ ID NO: 1284767 - RNA, 19 nt, Homo sapiens
  misc_RNA (1)...(19): siRNA sense strand
gaucaaauugugcuucuaa

SEQ ID NO: 1284768 - RNA, 19 nt, Homo sapiens
  misc_RNA (1)...(19): siRNA sense strand
gcagagagacagcuuguau

SEQ ID NO: 1284769 - RNA, 19 nt, Homo sapiens
  misc_RNA (1)...(19): siRNA sense strand
caaacgcauugauggauuu

SEQ ID NO: 1284770 - RNA, 19 nt, Homo sapiens
  misc_RNA (1)...(19): siRNA sense strand
gaagaacuguuugauugau

SEQ ID NO: 1284771 - RNA, 19 nt, Homo sapiens
  misc_RNA (1)...(19): siRNA sense strand
uagaacaccuugcacagaa

SEQ ID NO: 1284772 - RNA, 19 nt, Homo sapiens
  misc_RNA (1)...(19): siRNA sense strand
aggaagaaauugagaacua

SEQ ID NO: 1284773 - RNA, 19 nt, Homo sapiens
  misc_RNA (1)...(19): siRNA sense strand
gaacaccuugcacagaaua

SEQ ID NO: 1284774 - RNA, 19 nt, Homo sapiens
  misc_RNA (1)...(19): siRNA sense strand
aaucaaaccagaaccaaua

SEQ ID NO: 1284775 - RNA, 19 nt, Homo sapiens
  misc_RNA (1)...(19): siRNA sense strand
guagggaugucucgagaug

SEQ ID NO: 1284776 - RNA, 19 nt, Homo sapiens
  misc_RNA (1)...(19): siRNA sense strand
gaggugauguggcaauugu

SEQ ID NO: 1284777 - RNA, 19 nt, Homo sapiens
  misc_RNA (1)...(19): siRNA sense strand
gcucauggcugcaagaaaa

SEQ ID NO: 1284778 - RNA, 19 nt, Homo sapiens
  misc_RNA (1)...(19): siRNA sense strand
ggaaaccugccaauacuug

SEQ ID NO: 1284779 - RNA, 19 nt, Homo sapiens
  misc_RNA (1)...(19): siRNA sense strand
gaggugguguuuaucagaa

SEQ ID NO: 1284780 - RNA, 19 nt, Homo sapiens
  misc_RNA (1)...(19): siRNA sense strand
ccaaacgcauugauggauu

SEQ ID NO: 1284781 - RNA, 19 nt, Homo sapiens
  misc_RNA (1)...(19): siRNA sense strand
uuacagaagcuauacagua

SEQ ID NO: 1284782 - RNA, 19 nt, Homo sapiens
  misc_RNA (1)...(19): siRNA sense strand
gaaccaauaugugacuaca

SEQ ID NO: 1284783 - RNA, 19 nt, Homo sapiens
  misc_RNA (1)...(19): siRNA sense strand
caacacguccuacagaaga

SEQ ID NO: 1284784 - RNA, 19 nt, Homo sapiens
  misc_RNA (1)...(19): siRNA sense strand
gugaagacuuuauuagcuu

SEQ ID NO: 1284785 - RNA, 19 nt, Homo sapiens
  misc_RNA (1)...(19): siRNA sense strand
uaugcaaggugucuacauu

SEQ ID NO: 1284786 - RNA, 19 nt, Homo sapiens
  misc_RNA (1)...(19): siRNA sense strand
ucaccgagaagauggaaua

SEQ ID NO: 1284787 - RNA, 19 nt, Homo sapiens
  misc_RNA (1)...(19): siRNA sense strand
ccagucaggucuugauauc

SEQ ID NO: 1284788 - RNA, 19 nt, Homo sapiens
  misc_RNA (1)...(19): siRNA sense strand
gauggaauacuaacaaagu

SEQ ID NO: 1284789 - RNA, 19 nt, Homo sapiens
  misc_RNA (1)...(19): siRNA sense strand
gaaugugccgugccuuuga

SEQ ID NO: 1284790 - RNA, 19 nt, Homo sapiens
  misc_RNA (1)...(19): siRNA sense strand
ggagaagucagcaaagcaa

SEQ ID NO: 1284791 - RNA, 19 nt, Homo sapiens
  misc_RNA (1)...(19): siRNA sense strand
ugcaaggugucuacauuaa

SEQ ID NO: 1284792 - RNA, 19 nt, Homo sapiens
  misc_RNA (1)...(19): siRNA sense strand
acagaagaaucaccgagaa

SEQ ID NO: 1284793 - RNA, 19 nt, Homo sapiens
  misc_RNA (1)...(19): siRNA sense strand
gaagaaucaccgagaagau

SEQ ID NO: 1284794 - RNA, 19 nt, Homo sapiens
  misc_RNA (1)...(19): siRNA sense strand
ucagaagaacuguuugauu

SEQ ID NO: 1284795 - RNA, 19 nt, Homo sapiens
  misc_RNA (1)...(19): siRNA sense strand
cgaccucaguaacuacauu

SEQ ID NO: 1284796 - RNA, 19 nt, Homo sapiens
  misc_RNA (1)...(19): siRNA sense strand
caaaccagaaccaauaugu

SEQ ID NO: 1284797 - RNA, 19 nt, Homo sapiens
  misc_RNA (1)...(19): siRNA sense strand
agacaaaucaucaggaauc

SEQ ID NO: 1284798 - RNA, 19 nt, Homo sapiens
  misc_RNA (1)...(19): siRNA sense strand
gacugaagaugaaauugca

SEQ ID NO: 1284799 - RNA, 19 nt, Homo sapiens
  misc_RNA (1)...(19): siRNA sense strand
guccauggcagaauuagaa

SEQ ID NO: 1284800 - RNA, 19 nt, Homo sapiens
  misc_RNA (1)...(19): siRNA sense strand
uacaguaugugguggaguu

SEQ ID NO: 1284801 - RNA, 19 nt, Homo sapiens
  misc_RNA (1)...(19): siRNA sense strand
gccaauacuugagagaaga

SEQ ID NO: 1284802 - RNA, 19 nt, Homo sapiens
  misc_RNA (1)...(19): siRNA sense strand
gaaaccugccaauacuuga

SEQ ID NO: 1284803 - RNA, 19 nt, Homo sapiens
  misc_RNA (1)...(19): siRNA sense strand
aaauucagcuagcucuuca

SEQ ID NO: 1284804 - RNA, 19 nt, Homo sapiens
  misc_RNA (1)...(19): siRNA sense strand
gacauugugcgacuucauu

SEQ ID NO: 1284805 - RNA, 19 nt, Homo sapiens
  misc_RNA (1)...(19): siRNA sense strand
cgagaagauggaauacuaa

SEQ ID NO: 1284806 - RNA, 19 nt, Homo sapiens
  misc_RNA (1)...(19): siRNA sense strand
agaaaccgcugccaacacu

SEQ ID NO: 1284807 - RNA, 19 nt, Homo sapiens
  misc_RNA (1)...(19): siRNA sense strand
cuaugcaccugacugaaga

SEQ ID NO: 1284808 - RNA, 19 nt, Homo sapiens
  misc_RNA (1)...(19): siRNA sense strand
cgacgucuucaaauccuua

SEQ ID NO: 1284809 - RNA, 19 nt, Homo sapiens
  misc_RNA (1)...(19): siRNA sense strand
cagaaugugccgugccuuu

SEQ ID NO: 1284810 - RNA, 19 nt, Homo sapiens
  misc_RNA (1)...(19): siRNA sense strand
gggaggugauguggcaauu

SEQ ID NO: 1284811 - RNA, 19 nt, Homo sapiens
  misc_RNA (1)...(19): siRNA sense strand
gaaucaaaccagaaccaau

SEQ ID NO: 1284812 - RNA, 19 nt, Homo sapiens
  misc_RNA (1)...(19): siRNA sense strand
ccaacgggcugacggaacu

SEQ ID NO: 1284813 - RNA, 19 nt, Homo sapiens
  misc_RNA (1)...(19): siRNA sense strand
gaucuguggagacaaauca

SEQ ID NO: 1284814 - RNA, 19 nt, Homo sapiens
  misc_RNA (1)...(19): siRNA sense strand
ucaaauccuuagguuguga

SEQ ID NO: 1284815 - RNA, 19 nt, Homo sapiens
  misc_RNA (1)...(19): siRNA sense strand
gaagaaauugagaacuauc

SEQ ID NO: 1284816 - RNA, 19 nt, Homo sapiens
  misc_RNA (1)...(19): siRNA sense strand
ucgagaugcuguaaaauuu

SEQ ID NO: 1284817 - RNA, 19 nt, Homo sapiens
  misc_RNA (1)...(19): siRNA sense strand
ucagcuagcucuucaacac

SEQ ID NO: 1284818 - RNA, 19 nt, Homo sapiens
  misc_RNA (1)...(19): siRNA sense strand
gguugugaagacuuuauua

SEQ ID NO: 1284819 - RNA, 19 nt, Homo sapiens
  misc_RNA (1)...(19): siRNA sense strand
aaccagaaccaauauguga

SEQ ID NO: 1284820 - RNA, 19 nt, Homo sapiens
  misc_RNA (1)...(19): siRNA sense strand
aaucaucaggaauccauua

SEQ ID NO: 1284821 - RNA, 19 nt, Homo sapiens
  misc_RNA (1)...(19): siRNA sense strand
gcuucuaccuggacauaca

SEQ ID NO: 1284822 - RNA, 19 nt, Homo sapiens
  misc_RNA (1)...(19): siRNA sense strand
guaugcagaaguacagaaa

SEQ ID NO: 1284823 - RNA, 19 nt, Homo sapiens
  misc_RNA (1)...(19): siRNA sense strand
caaaucaucaggaauccau

SEQ ID NO: 1284824 - RNA, 19 nt, Homo sapiens
  misc_RNA (1)...(19): siRNA sense strand
ggaaucaaaccagaaccaa

SEQ ID NO: 1284825 - RNA, 19 nt, Homo sapiens
  misc_RNA (1)...(19): siRNA sense strand
acgcauugauggauuuaug

SEQ ID NO: 1284826 - RNA, 19 nt, Homo sapiens
  misc_RNA (1)...(19): siRNA sense strand
cuuagguugugaagacuuu

SEQ ID NO: 1284827 - RNA, 19 nt, Homo sapiens
  misc_RNA (1)...(19): siRNA sense strand
agaagaacuguuugauuga

SEQ ID NO: 1284828 - RNA, 19 nt, Homo sapiens
  misc_RNA (1)...(19): siRNA sense strand
aaugcaaauugauggguaa

SEQ ID NO: 1284829 - RNA, 19 nt, Homo sapiens
  misc_RNA (1)...(19): siRNA sense strand
cuucaaauccuuagguugu

SEQ ID NO: 1284830 - RNA, 19 nt, Homo sapiens
  misc_RNA (1)...(19): siRNA sense strand
cugccaacacugucgauua

SEQ ID NO: 1284831 - RNA, 19 nt, Homo sapiens
  misc_RNA (1)...(19): siRNA sense strand
gcaaggugucuacauuaag

SEQ ID NO: 1284832 - RNA, 19 nt, Homo sapiens
  misc_RNA (1)...(19): siRNA sense strand
ugugaagacuuuauuagcu

SEQ ID NO: 1284833 - RNA, 19 nt, Homo sapiens
  misc_RNA (1)...(19): siRNA sense strand
acgacgaccucaguaacua

SEQ ID NO: 1284834 - RNA, 19 nt, Homo sapiens
  misc_RNA (1)...(19): siRNA sense strand
ugacuacacaccagcauca

SEQ ID NO: 1284835 - RNA, 19 nt, Homo sapiens
  misc_RNA (1)...(19): siRNA sense strand
aaagcaauauacccagaca

SEQ ID NO: 1284836 - RNA, 19 nt, Homo sapiens
  misc_RNA (1)...(19): siRNA sense strand
cucuagaggugguguuuau

SEQ ID NO: 1284837 - RNA, 19 nt, Homo sapiens
  misc_RNA (1)...(19): siRNA sense strand
cuaaaucgcaucuggaaac

SEQ ID NO: 1284838 - RNA, 19 nt, Homo sapiens
  misc_RNA (1)...(19): siRNA sense strand
cagcuucuaccuggacaua

SEQ ID NO: 1284839 - RNA, 19 nt, Homo sapiens
  misc_RNA (1)...(19): siRNA sense strand
guucuaugcaccugacuga

SEQ ID NO: 1284840 - RNA, 19 nt, Homo sapiens
  misc_RNA (1)...(19): siRNA sense strand
cagaaccaauaugugacua

SEQ ID NO: 1284841 - RNA, 19 nt, Homo sapiens
  misc_RNA (1)...(19): siRNA sense strand
ugccaacacugucgauuac

SEQ ID NO: 1284842 - RNA, 19 nt, Homo sapiens
  misc_RNA (1)...(19): siRNA sense strand
ggaguuguucacuucagaa

SEQ ID NO: 1284843 - RNA, 19 nt, Homo sapiens
  misc_RNA (1)...(19): siRNA sense strand
uggaaagaguuuauguucu

SEQ ID NO: 1284844 - RNA, 19 nt, Homo sapiens
  misc_RNA (1)...(19): siRNA sense strand
gaagacuuuauuagcuuug

SEQ ID NO: 1284845 - RNA, 19 nt, Homo sapiens
  misc_RNA (1)...(19): siRNA sense strand
gaagucagcaaagcaaugc

SEQ ID NO: 1284846 - RNA, 19 nt, Homo sapiens
  misc_RNA (1)...(19): siRNA sense strand
guagaaaccgcugccaaca

SEQ ID NO: 1284847 - RNA, 19 nt, Homo sapiens
  misc_RNA (1)...(19): siRNA sense strand
ggugguguuuaucagaaug

SEQ ID NO: 1284848 - RNA, 19 nt, Homo sapiens
  misc_RNA (1)...(19): siRNA sense strand
cuggaaaccugccaauacu

SEQ ID NO: 1284849 - RNA, 19 nt, Homo sapiens
  misc_RNA (1)...(19): siRNA sense strand
gaucgaaccaguagaaacc

SEQ ID NO: 1284850 - RNA, 19 nt, Homo sapiens
  misc_RNA (1)...(19): siRNA sense strand
cgucagaagaacuguuuga

SEQ ID NO: 1284851 - RNA, 19 nt, Homo sapiens
  misc_RNA (1)...(19): siRNA sense strand
gccuuugacucucagaaca

SEQ ID NO: 1284852 - RNA, 19 nt, Homo sapiens
  misc_RNA (1)...(19): siRNA sense strand
ggaaagaguuuauguucua

SEQ ID NO: 1284853 - RNA, 19 nt, Homo sapiens
  misc_RNA (1)...(19): siRNA sense strand
cagaagaacuguuugauug

SEQ ID NO: 1284854 - RNA, 19 nt, Homo sapiens
  misc_RNA (1)...(19): siRNA sense strand
gagaagagcuccagcagau

SEQ ID NO: 1284855 - RNA, 19 nt, Homo sapiens
  misc_RNA (1)...(19): siRNA sense strand
gcaauugugugccaucaaa

SEQ ID NO: 1284856 - RNA, 19 nt, Homo sapiens
  misc_RNA (1)...(19): siRNA sense strand
ggagacaaaucaucaggaa

SEQ ID NO: 1284857 - RNA, 19 nt, Homo sapiens
  misc_RNA (1)...(19): siRNA sense strand
gaagagcuccagcagauaa

SEQ ID NO: 1284858 - RNA, 19 nt, Homo sapiens
  misc_RNA (1)...(19): siRNA sense strand
caagaucuguggagacaaa

SEQ ID NO: 1284859 - RNA, 19 nt, Homo sapiens
  misc_RNA (1)...(19): siRNA sense strand
guuguucacuucagaauuu

SEQ ID NO: 1284860 - RNA, 19 nt, Homo sapiens
  misc_RNA (1)...(19): siRNA sense strand
gcaccugacugaagaugaa

SEQ ID NO: 1284861 - RNA, 19 nt, Homo sapiens
  misc_RNA (1)...(19): siRNA sense strand
gaaauuauuccaugcaaga

SEQ ID NO: 1284862 - RNA, 19 nt, Homo sapiens
  misc_RNA (1)...(19): siRNA sense strand
ggaagaaauugagaacuau

SEQ ID NO: 1284863 - RNA, 19 nt, Homo sapiens
  misc_RNA (1)...(19): siRNA sense strand
caaggugucuacauuaaga

SEQ ID NO: 1284864 - RNA, 19 nt, Homo sapiens
  misc_RNA (1)...(19): siRNA sense strand
ccgagaagauggaauacua

SEQ ID NO: 1284865 - RNA, 19 nt, Homo sapiens
  misc_RNA (1)...(19): siRNA sense strand
gaagauggaauacuaacaa

SEQ ID NO: 1284866 - RNA, 19 nt, Homo sapiens
  misc_RNA (1)...(19): siRNA sense strand
cagcuuguaugcagaagua

SEQ ID NO: 1284867 - RNA, 19 nt, Homo sapiens
  misc_RNA (1)...(19): siRNA sense strand
gaucaaauugugcuucuaa

SEQ ID NO: 1284868 - RNA, 19 nt, Homo sapiens
  misc_RNA (1)...(19): siRNA sense strand
gcagagagacagcuuguau

SEQ ID NO: 1284869 - RNA, 19 nt, Homo sapiens
  misc_RNA (1)...(19): siRNA sense strand
caaacgcauugauggauuu

SEQ ID NO: 1284870 - RNA, 19 nt, Homo sapiens
  misc_RNA (1)...(19): siRNA sense strand
gaagaacuguuugauugau

SEQ ID NO: 1284871 - RNA, 19 nt, Homo sapiens
  misc_RNA (1)...(19): siRNA sense strand
uagaacaccuugcacagaa

SEQ ID NO: 1284872 - RNA, 19 nt, Homo sapiens
  misc_RNA (1)...(19): siRNA sense strand
aggaagaaauugagaacua

SEQ ID NO: 1284873 - RNA, 19 nt, Homo sapiens
  misc_RNA (1)...(19): siRNA sense strand
gaacaccuugcacagaaua

SEQ ID NO: 1284874 - RNA, 19 nt, Homo sapiens
  misc_RNA (1)...(19): siRNA sense strand
aaucaaaccagaaccaaua

SEQ ID NO: 1284875 - RNA, 19 nt, Homo sapiens
  misc_RNA (1)...(19): siRNA sense strand
guagggaugucucgagaug

SEQ ID NO: 1284876 - RNA, 19 nt, Homo sapiens
  misc_RNA (1)...(19): siRNA sense strand
gaggugauguggcaauugu

SEQ ID NO: 1284877 - RNA, 19 nt, Homo sapiens
  misc_RNA (1)...(19): siRNA sense strand
gcucauggcugcaagaaaa

SEQ ID NO: 1284878 - RNA, 19 nt, Homo sapiens
  misc_RNA (1)...(19): siRNA sense strand
ggaaaccugccaauacuug

SEQ ID NO: 1284879 - RNA, 19 nt, Homo sapiens
  misc_RNA (1)...(19): siRNA sense strand
gaggugguguuuaucagaa

SEQ ID NO: 1284880 - RNA, 19 nt, Homo sapiens
  misc_RNA (1)...(19): siRNA sense strand
ccaaacgcauugauggauu

SEQ ID NO: 1284881 - RNA, 19 nt, Homo sapiens
  misc_RNA (1)...(19): siRNA sense strand
uuacagaagcuauacagua

SEQ ID NO: 1284882 - RNA, 19 nt, Homo sapiens
  misc_RNA (1)...(19): siRNA sense strand
gaaccaauaugugacuaca

SEQ ID NO: 1284883 - RNA, 19 nt, Homo sapiens
  misc_RNA (1)...(19): siRNA sense strand
caacacguccuacagaaga

SEQ ID NO: 1284884 - RNA, 19 nt, Homo sapiens
  misc_RNA (1)...(19): siRNA sense strand
gugaagacuuuauuagcuu

SEQ ID NO: 1284885 - RNA, 19 nt, Homo sapiens
  misc_RNA (1)...(19): siRNA sense strand
uaugcaaggugucuacauu

SEQ ID NO: 1284886 - RNA, 19 nt, Homo sapiens
  misc_RNA (1)...(19): siRNA sense strand
ucaccgagaagauggaaua

SEQ ID NO: 1284887 - RNA, 19 nt, Homo sapiens
  misc_RNA (1)...(19): siRNA sense strand
ccagucaggucuugauauc

SEQ ID NO: 1284888 - RNA, 19 nt, Homo sapiens
  misc_RNA (1)...(19): siRNA sense strand
gauggaauacuaacaaagu

SEQ ID NO: 1284889 - RNA, 19 nt, Homo sapiens
  misc_RNA (1)...(19): siRNA sense strand
gaaugugccgugccuuuga

SEQ ID NO: 1284890 - RNA, 19 nt, Homo sapiens
  misc_RNA (1)...(19): siRNA sense strand
ggagaagucagcaaagcaa

SEQ ID NO: 1284891 - RNA, 19 nt, Homo sapiens
  misc_RNA (1)...(19): siRNA sense strand
ugcaaggugucuacauuaa

SEQ ID NO: 1284892 - RNA, 19 nt, Homo sapiens
  misc_RNA (1)...(19): siRNA sense strand
acagaagaaucaccgagaa

SEQ ID NO: 1284893 - RNA, 19 nt, Homo sapiens
  misc_RNA (1)...(19): siRNA sense strand
gaagaaucaccgagaagau

SEQ ID NO: 1284894 - RNA, 19 nt, Homo sapiens
  misc_RNA (1)...(19): siRNA sense strand
ucagaagaacuguuugauu

SEQ ID NO: 1284895 - RNA, 19 nt, Homo sapiens
  misc_RNA (1)...(19): siRNA sense strand
cgaccucaguaacuacauu

SEQ ID NO: 1284896 - RNA, 19 nt, Homo sapiens
  misc_RNA (1)...(19): siRNA sense strand
caaaccagaaccaauaugu

SEQ ID NO: 1284897 - RNA, 19 nt, Homo sapiens
  misc_RNA (1)...(19): siRNA sense strand
agacaaaucaucaggaauc

SEQ ID NO: 1284898 - RNA, 19 nt, Homo sapiens
  misc_RNA (1)...(19): siRNA sense strand
gacugaagaugaaauugca

SEQ ID NO: 1284899 - RNA, 19 nt, Homo sapiens
  misc_RNA (1)...(19): siRNA sense strand
guccauggcagaauuagaa

SEQ ID NO: 1284900 - RNA, 19 nt, Homo sapiens
  misc_RNA (1)...(19): siRNA sense strand
uacaguaugugguggaguu

SEQ ID NO: 1284901 - RNA, 19 nt, Homo sapiens
  misc_RNA (1)...(19): siRNA sense strand
gccaauacuugagagaaga

SEQ ID NO: 1284902 - RNA, 19 nt, Homo sapiens
  misc_RNA (1)...(19): siRNA sense strand
gaaaccugccaauacuuga

SEQ ID NO: 1284903 - RNA, 19 nt, Homo sapiens
  misc_RNA (1)...(19): siRNA sense strand
aaauucagcuagcucuuca

SEQ ID NO: 1284904 - RNA, 19 nt, Homo sapiens
  misc_RNA (1)...(19): siRNA sense strand
gacauugugcgacuucauu

SEQ ID NO: 1284905 - RNA, 19 nt, Homo sapiens
  misc_RNA (1)...(19): siRNA sense strand
cgagaagauggaauacuaa

SEQ ID NO: 1284906 - RNA, 19 nt, Homo sapiens
  misc_RNA (1)...(19): siRNA sense strand
agaaaccgcugccaacacu

SEQ ID NO: 1284907 - RNA, 19 nt, Homo sapiens
  misc_RNA (1)...(19): siRNA sense strand
cuaugcaccugacugaaga

SEQ ID NO: 1284908 - RNA, 19 nt, Homo sapiens
  misc_RNA (1)...(19): siRNA sense strand
cgacgucuucaaauccuua

SEQ ID NO: 1284909 - RNA, 19 nt, Homo sapiens
  misc_RNA (1)...(19): siRNA sense strand
cagaaugugccgugccuuu

SEQ ID NO: 1284910 - RNA, 19 nt, Homo sapiens
  misc_RNA (1)...(19): siRNA sense strand
gggaggugauguggcaauu

SEQ ID NO: 1284911 - RNA, 19 nt, Homo sapiens
  misc_RNA (1)...(19): siRNA sense strand
gaaucaaaccagaaccaau

SEQ ID NO: 1284912 - RNA, 19 nt, Homo sapiens
  misc_RNA (1)...(19): siRNA sense strand
ccaacgggcugacggaacu

SEQ ID NO: 1284913 - RNA, 19 nt, Homo sapiens
  misc_RNA (1)...(19): siRNA sense strand
gaucuguggagacaaauca

SEQ ID NO: 1284914 - RNA, 19 nt, Homo sapiens
  misc_RNA (1)...(19): siRNA sense strand
ucaaauccuuagguuguga

SEQ ID NO: 1284915 - RNA, 19 nt, Homo sapiens
  misc_RNA (1)...(19): siRNA sense strand
gaagaaauugagaacuauc

SEQ ID NO: 1284916 - RNA, 19 nt, Homo sapiens
  misc_RNA (1)...(19): siRNA sense strand
ucgagaugcuguaaaauuu

SEQ ID NO: 1284917 - RNA, 19 nt, Homo sapiens
  misc_RNA (1)...(19): siRNA sense strand
ucagcuagcucuucaacac

SEQ ID NO: 1284918 - RNA, 19 nt, Homo sapiens
  misc_RNA (1)...(19): siRNA sense strand
gguugugaagacuuuauua

SEQ ID NO: 1284919 - RNA, 19 nt, Homo sapiens
  misc_RNA (1)...(19): siRNA sense strand
aaccagaaccaauauguga

SEQ ID NO: 1284920 - RNA, 19 nt, Homo sapiens
  misc_RNA (1)...(19): siRNA sense strand
aaucaucaggaauccauua

SEQ ID NO: 1284921 - RNA, 19 nt, Homo sapiens
  misc_RNA (1)...(19): siRNA sense strand
gcuucuaccuggacauaca

SEQ ID NO: 1284922 - RNA, 19 nt, Homo sapiens
  misc_RNA (1)...(19): siRNA sense strand
guaugcagaaguacagaaa

SEQ ID NO: 1284923 - RNA, 19 nt, Homo sapiens
  misc_RNA (1)...(19): siRNA sense strand
caaaucaucaggaauccau

SEQ ID NO: 1284924 - RNA, 19 nt, Homo sapiens
  misc_RNA (1)...(19): siRNA sense strand
ggaaucaaaccagaaccaa

SEQ ID NO: 1284925 - RNA, 19 nt, Homo sapiens
  misc_RNA (1)...(19): siRNA sense strand
acgcauugauggauuuaug

SEQ ID NO: 1284926 - RNA, 19 nt, Homo sapiens
  misc_RNA (1)...(19): siRNA sense strand
cuuagguugugaagacuuu

SEQ ID NO: 1284927 - RNA, 19 nt, Homo sapiens
  misc_RNA (1)...(19): siRNA sense strand
agaagaacuguuugauuga

SEQ ID NO: 1284928 - RNA, 19 nt, Homo sapiens
  misc_RNA (1)...(19): siRNA sense strand
aaugcaaauugauggguaa

SEQ ID NO: 1284929 - RNA, 19 nt, Homo sapiens
  misc_RNA (1)...(19): siRNA sense strand
cuucaaauccuuagguugu

SEQ ID NO: 1284930 - RNA, 19 nt, Homo sapiens
  misc_RNA (1)...(19): siRNA sense strand
cugccaacacugucgauua

SEQ ID NO: 1284931 - RNA, 19 nt, Homo sapiens
  misc_RNA (1)...(19): siRNA sense strand
gcaaggugucuacauuaag

SEQ ID NO: 1284932 - RNA, 19 nt, Homo sapiens
  misc_RNA (1)...(19): siRNA sense strand
ugugaagacuuuauuagcu

SEQ ID NO: 1284933 - RNA, 19 nt, Homo sapiens
  misc_RNA (1)...(19): siRNA sense strand
acgacgaccucaguaacua

SEQ ID NO: 1284934 - RNA, 19 nt, Homo sapiens
  misc_RNA (1)...(19): siRNA sense strand
ugacuacacaccagcauca

SEQ ID NO: 1284935 - RNA, 19 nt, Homo sapiens
  misc_RNA (1)...(19): siRNA sense strand
aaagcaauauacccagaca

SEQ ID NO: 1284936 - RNA, 19 nt, Homo sapiens
  misc_RNA (1)...(19): siRNA sense strand
cucuagaggugguguuuau

SEQ ID NO: 1284937 - RNA, 19 nt, Homo sapiens
  misc_RNA (1)...(19): siRNA sense strand
cuaaaucgcaucuggaaac

SEQ ID NO: 1284938 - RNA, 19 nt, Homo sapiens
  misc_RNA (1)...(19): siRNA sense strand
cagcuucuaccuggacaua

SEQ ID NO: 1284939 - RNA, 19 nt, Homo sapiens
  misc_RNA (1)...(19): siRNA sense strand
guucuaugcaccugacuga

SEQ ID NO: 1284940 - RNA, 19 nt, Homo sapiens
  misc_RNA (1)...(19): siRNA sense strand
cagaaccaauaugugacua

SEQ ID NO: 1284941 - RNA, 19 nt, Homo sapiens
  misc_RNA (1)...(19): siRNA sense strand
ugccaacacugucgauuac

SEQ ID NO: 1284942 - RNA, 19 nt, Homo sapiens
  misc_RNA (1)...(19): siRNA sense strand
ggaguuguucacuucagaa

SEQ ID NO: 1284943 - RNA, 19 nt, Homo sapiens
  misc_RNA (1)...(19): siRNA sense strand
uggaaagaguuuauguucu

SEQ ID NO: 1284944 - RNA, 19 nt, Homo sapiens
  misc_RNA (1)...(19): siRNA sense strand
gaagacuuuauuagcuuug

SEQ ID NO: 1284945 - RNA, 19 nt, Homo sapiens
  misc_RNA (1)...(19): siRNA sense strand
gaagucagcaaagcaaugc

SEQ ID NO: 1284946 - RNA, 19 nt, Homo sapiens
  misc_RNA (1)...(19): siRNA sense strand
guagaaaccgcugccaaca

SEQ ID NO: 1284947 - RNA, 19 nt, Homo sapiens
  misc_RNA (1)...(19): siRNA sense strand
ggugguguuuaucagaaug

SEQ ID NO: 1284948 - RNA, 19 nt, Homo sapiens
  misc_RNA (1)...(19): siRNA sense strand
cuggaaaccugccaauacu

SEQ ID NO: 1284949 - RNA, 19 nt, Homo sapiens
  misc_RNA (1)...(19): siRNA sense strand
gaucgaaccaguagaaacc

SEQ ID NO: 1284950 - RNA, 19 nt, Homo sapiens
  misc_RNA (1)...(19): siRNA sense strand
cgucagaagaacuguuuga

SEQ ID NO: 1284951 - RNA, 19 nt, Homo sapiens
  misc_RNA (1)...(19): siRNA sense strand
gccuuugacucucagaaca

SEQ ID NO: 1284952 - RNA, 19 nt, Homo sapiens
  misc_RNA (1)...(19): siRNA sense strand
gguaauggaugaugaagua

SEQ ID NO: 1284953 - RNA, 19 nt, Homo sapiens
  misc_RNA (1)...(19): siRNA sense strand
ggaauuggccuccuguauu

SEQ ID NO: 1284954 - RNA, 19 nt, Homo sapiens
  misc_RNA (1)...(19): siRNA sense strand
caacugcauucuauagauu

SEQ ID NO: 1284955 - RNA, 19 nt, Homo sapiens
  misc_RNA (1)...(19): siRNA sense strand
gcaacugcauucuauagau

SEQ ID NO: 1284956 - RNA, 19 nt, Homo sapiens
  misc_RNA (1)...(19): siRNA sense strand
agaagacuguguagcauuu

SEQ ID NO: 1284957 - RNA, 19 nt, Homo sapiens
  misc_RNA (1)...(19): siRNA sense strand
gcagagcccaccugaauga

SEQ ID NO: 1284958 - RNA, 19 nt, Homo sapiens
  misc_RNA (1)...(19): siRNA sense strand
ucgaacagaugacagagua

SEQ ID NO: 1284959 - RNA, 19 nt, Homo sapiens
  misc_RNA (1)...(19): siRNA sense strand
ccacaccauugcauauuug

SEQ ID NO: 1284960 - RNA, 19 nt, Homo sapiens
  misc_RNA (1)...(19): siRNA sense strand
gagaaaaugccaagaagua

SEQ ID NO: 1284961 - RNA, 19 nt, Homo sapiens
  misc_RNA (1)...(19): siRNA sense strand
gaacagaugacagaguaga

SEQ ID NO: 1284962 - RNA, 19 nt, Homo sapiens
  misc_RNA (1)...(19): siRNA sense strand
ugacagaguagaacgugua

SEQ ID NO: 1284963 - RNA, 19 nt, Homo sapiens
  misc_RNA (1)...(19): siRNA sense strand
ucacccagguaauggauga

SEQ ID NO: 1284964 - RNA, 19 nt, Homo sapiens
  misc_RNA (1)...(19): siRNA sense strand
ccaccugaaugaccuugaa

SEQ ID NO: 1284965 - RNA, 19 nt, Homo sapiens
  misc_RNA (1)...(19): siRNA sense strand
cuacagccauccugcacuu

SEQ ID NO: 1284966 - RNA, 19 nt, Homo sapiens
  misc_RNA (1)...(19): siRNA sense strand
aaaugaugcuuaugaguac

SEQ ID NO: 1284967 - RNA, 19 nt, Homo sapiens
  misc_RNA (1)...(19): siRNA sense strand
aauggaugaugaaguauuc

SEQ ID NO: 1284968 - RNA, 19 nt, Homo sapiens
  misc_RNA (1)...(19): siRNA sense strand
ccagaagacuguguagcau

SEQ ID NO: 1284969 - RNA, 19 nt, Homo sapiens
  misc_RNA (1)...(19): siRNA sense strand
acgcagagcccaccugaau

SEQ ID NO: 1284970 - RNA, 19 nt, Homo sapiens
  misc_RNA (1)...(19): siRNA sense strand
acagguugcugaaaaguaa

SEQ ID NO: 1284971 - RNA, 19 nt, Homo sapiens
  misc_RNA (1)...(19): siRNA sense strand
gcacuucagacuauuuguc

SEQ ID NO: 1284972 - RNA, 19 nt, Homo sapiens
  misc_RNA (1)...(19): siRNA sense strand
gcuuacagguugcugaaaa

SEQ ID NO: 1284973 - RNA, 19 nt, Homo sapiens
  misc_RNA (1)...(19): siRNA sense strand
cagaagacuguguagcauu

SEQ ID NO: 1284974 - RNA, 19 nt, Homo sapiens
  misc_RNA (1)...(19): siRNA sense strand
accacaccauugcauauuu

SEQ ID NO: 1284975 - RNA, 19 nt, Homo sapiens
  misc_RNA (1)...(19): siRNA sense strand
uuuguuggauauggaguua

SEQ ID NO: 1284976 - RNA, 19 nt, Homo sapiens
  misc_RNA (1)...(19): siRNA sense strand
cauccuaugcaacaauuau

SEQ ID NO: 1284977 - RNA, 19 nt, Homo sapiens
  misc_RNA (1)...(19): siRNA sense strand
gaagacuguguagcauuug

SEQ ID NO: 1284978 - RNA, 19 nt, Homo sapiens
  misc_RNA (1)...(19): siRNA sense strand
ccagguaauggaugaugaa

SEQ ID NO: 1284979 - RNA, 19 nt, Homo sapiens
  misc_RNA (1)...(19): siRNA sense strand
caauccagaagacugugua

SEQ ID NO: 1284980 - RNA, 19 nt, Homo sapiens
  misc_RNA (1)...(19): siRNA sense strand
cccagguaauggaugauga

SEQ ID NO: 1284981 - RNA, 19 nt, Homo sapiens
  misc_RNA (1)...(19): siRNA sense strand
agauugacaagaaagguuu

SEQ ID NO: 1284982 - RNA, 19 nt, Homo sapiens
  misc_RNA (1)...(19): siRNA sense strand
cuaccacaccauugcauau

SEQ ID NO: 1284983 - RNA, 19 nt, Homo sapiens
  misc_RNA (1)...(19): siRNA sense strand
gaaaaugccaagaaguauc

SEQ ID NO: 1284984 - RNA, 19 nt, Homo sapiens
  misc_RNA (1)...(19): siRNA sense strand
gcugaaaaguaaauuguac

SEQ ID NO: 1284985 - RNA, 19 nt, Homo sapiens
  misc_RNA (1)...(19): siRNA sense strand
caccauugcauauuugaca

SEQ ID NO: 1284986 - RNA, 19 nt, Homo sapiens
  misc_RNA (1)...(19): siRNA sense strand
uagauugacaagaaagguu

SEQ ID NO: 1284987 - RNA, 19 nt, Homo sapiens
  misc_RNA (1)...(19): siRNA sense strand
auccugcacuucagacuau

SEQ ID NO: 1284988 - RNA, 19 nt, Homo sapiens
  misc_RNA (1)...(19): siRNA sense strand
cauccugcacuucagacua

SEQ ID NO: 1284989 - RNA, 19 nt, Homo sapiens
  misc_RNA (1)...(19): siRNA sense strand
ggccuccuguauuccuuga

SEQ ID NO: 1284990 - RNA, 19 nt, Homo sapiens
  misc_RNA (1)...(19): siRNA sense strand
uggaauuggccuccuguau

SEQ ID NO: 1284991 - RNA, 19 nt, Homo sapiens
  misc_RNA (1)...(19): siRNA sense strand
gguaauggaugaugaagua

SEQ ID NO: 1284992 - RNA, 19 nt, Homo sapiens
  misc_RNA (1)...(19): siRNA sense strand
ggaauuggccuccuguauu

SEQ ID NO: 1284993 - RNA, 19 nt, Homo sapiens
  misc_RNA (1)...(19): siRNA sense strand
caacugcauucuauagauu

SEQ ID NO: 1284994 - RNA, 19 nt, Homo sapiens
  misc_RNA (1)...(19): siRNA sense strand
gcaacugcauucuauagau

SEQ ID NO: 1284995 - RNA, 19 nt, Homo sapiens
  misc_RNA (1)...(19): siRNA sense strand
agaagacuguguagcauuu

SEQ ID NO: 1284996 - RNA, 19 nt, Homo sapiens
  misc_RNA (1)...(19): siRNA sense strand
gcagagcccaccugaauga

SEQ ID NO: 1284997 - RNA, 19 nt, Homo sapiens
  misc_RNA (1)...(19): siRNA sense strand
ucgaacagaugacagagua

SEQ ID NO: 1284998 - RNA, 19 nt, Homo sapiens
  misc_RNA (1)...(19): siRNA sense strand
ccacaccauugcauauuug

SEQ ID NO: 1284999 - RNA, 19 nt, Homo sapiens
  misc_RNA (1)...(19): siRNA sense strand
gaacagaugacagaguaga

SEQ ID NO: 1285000 - RNA, 19 nt, Homo sapiens
  misc_RNA (1)...(19): siRNA sense strand
ugacagaguagaacgugua

SEQ ID NO: 1285001 - RNA, 19 nt, Homo sapiens
  misc_RNA (1)...(19): siRNA sense strand
ucacccagguaauggauga

SEQ ID NO: 1285002 - RNA, 19 nt, Homo sapiens
  misc_RNA (1)...(19): siRNA sense strand
ccaccugaaugaccuugaa

SEQ ID NO: 1285003 - RNA, 19 nt, Homo sapiens
  misc_RNA (1)...(19): siRNA sense strand
cuacagccauccugcacuu

SEQ ID NO: 1285004 - RNA, 19 nt, Homo sapiens
  misc_RNA (1)...(19): siRNA sense strand
aaaugaugcuuaugaguac

SEQ ID NO: 1285005 - RNA, 19 nt, Homo sapiens
  misc_RNA (1)...(19): siRNA sense strand
aauggaugaugaaguauuc

SEQ ID NO: 1285006 - RNA, 19 nt, Homo sapiens
  misc_RNA (1)...(19): siRNA sense strand
ccagaagacuguguagcau

SEQ ID NO: 1285007 - RNA, 19 nt, Homo sapiens
  misc_RNA (1)...(19): siRNA sense strand
acgcagagcccaccugaau

SEQ ID NO: 1285008 - RNA, 19 nt, Homo sapiens
  misc_RNA (1)...(19): siRNA sense strand
acagguugcugaaaaguaa

SEQ ID NO: 1285009 - RNA, 19 nt, Homo sapiens
  misc_RNA (1)...(19): siRNA sense strand
gcacuucagacuauuuguc

SEQ ID NO: 1285010 - RNA, 19 nt, Homo sapiens
  misc_RNA (1)...(19): siRNA sense strand
gcuuacagguugcugaaaa

SEQ ID NO: 1285011 - RNA, 19 nt, Homo sapiens
  misc_RNA (1)...(19): siRNA sense strand
cagaagacuguguagcauu

SEQ ID NO: 1285012 - RNA, 19 nt, Homo sapiens
  misc_RNA (1)...(19): siRNA sense strand
accacaccauugcauauuu

SEQ ID NO: 1285013 - RNA, 19 nt, Homo sapiens
  misc_RNA (1)...(19): siRNA sense strand
uuuguuggauauggaguua

SEQ ID NO: 1285014 - RNA, 19 nt, Homo sapiens
  misc_RNA (1)...(19): siRNA sense strand
cauccuaugcaacaauuau

SEQ ID NO: 1285015 - RNA, 19 nt, Homo sapiens
  misc_RNA (1)...(19): siRNA sense strand
gaagacuguguagcauuug

SEQ ID NO: 1285016 - RNA, 19 nt, Homo sapiens
  misc_RNA (1)...(19): siRNA sense strand
ccagguaauggaugaugaa

SEQ ID NO: 1285017 - RNA, 19 nt, Homo sapiens
  misc_RNA (1)...(19): siRNA sense strand
caauccagaagacugugua

SEQ ID NO: 1285018 - RNA, 19 nt, Homo sapiens
  misc_RNA (1)...(19): siRNA sense strand
cccagguaauggaugauga

SEQ ID NO: 1285019 - RNA, 19 nt, Homo sapiens
  misc_RNA (1)...(19): siRNA sense strand
agauugacaagaaagguuu

SEQ ID NO: 1285020 - RNA, 19 nt, Homo sapiens
  misc_RNA (1)...(19): siRNA sense strand
cuaccacaccauugcauau

SEQ ID NO: 1285021 - RNA, 19 nt, Homo sapiens
  misc_RNA (1)...(19): siRNA sense strand
caccauugcauauuugaca

SEQ ID NO: 1285022 - RNA, 19 nt, Homo sapiens
  misc_RNA (1)...(19): siRNA sense strand
gcugaaaaguaaauuguac

SEQ ID NO: 1285023 - RNA, 19 nt, Homo sapiens
  misc_RNA (1)...(19): siRNA sense strand
uagauugacaagaaagguu

SEQ ID NO: 1285024 - RNA, 19 nt, Homo sapiens
  misc_RNA (1)...(19): siRNA sense strand
auccugcacuucagacuau

SEQ ID NO: 1285025 - RNA, 19 nt, Homo sapiens
  misc_RNA (1)...(19): siRNA sense strand
cauccugcacuucagacua

SEQ ID NO: 1285026 - RNA, 19 nt, Homo sapiens
  misc_RNA (1)...(19): siRNA sense strand
ggccuccuguauuccuuga

SEQ ID NO: 1285027 - RNA, 19 nt, Homo sapiens
  misc_RNA (1)...(19): siRNA sense strand
uggaauuggccuccuguau

SEQ ID NO: 1285028 - RNA, 19 nt, Homo sapiens
  misc_RNA (1)...(19): siRNA sense strand
gguaauggaugaugaagua

SEQ ID NO: 1285029 - RNA, 19 nt, Homo sapiens
  misc_RNA (1)...(19): siRNA sense strand
ggaauuggccuccuguauu

SEQ ID NO: 1285030 - RNA, 19 nt, Homo sapiens
  misc_RNA (1)...(19): siRNA sense strand
caacugcauucuauagauu

SEQ ID NO: 1285031 - RNA, 19 nt, Homo sapiens
  misc_RNA (1)...(19): siRNA sense strand
gcaacugcauucuauagau

SEQ ID NO: 1285032 - RNA, 19 nt, Homo sapiens
  misc_RNA (1)...(19): siRNA sense strand
agaagacuguguagcauuu

SEQ ID NO: 1285033 - RNA, 19 nt, Homo sapiens
  misc_RNA (1)...(19): siRNA sense strand
gcagagcccaccugaauga

SEQ ID NO: 1285034 - RNA, 19 nt, Homo sapiens
  misc_RNA (1)...(19): siRNA sense strand
ucgaacagaugacagagua

SEQ ID NO: 1285035 - RNA, 19 nt, Homo sapiens
  misc_RNA (1)...(19): siRNA sense strand
ccacaccauugcauauuug

SEQ ID NO: 1285036 - RNA, 19 nt, Homo sapiens
  misc_RNA (1)...(19): siRNA sense strand
gaacagaugacagaguaga

SEQ ID NO: 1285037 - RNA, 19 nt, Homo sapiens
  misc_RNA (1)...(19): siRNA sense strand
ugacagaguagaacgugua

SEQ ID NO: 1285038 - RNA, 19 nt, Homo sapiens
  misc_RNA (1)...(19): siRNA sense strand
ucacccagguaauggauga

SEQ ID NO: 1285039 - RNA, 19 nt, Homo sapiens
  misc_RNA (1)...(19): siRNA sense strand
ccaccugaaugaccuugaa

SEQ ID NO: 1285040 - RNA, 19 nt, Homo sapiens
  misc_RNA (1)...(19): siRNA sense strand
cuacagccauccugcacuu

SEQ ID NO: 1285041 - RNA, 19 nt, Homo sapiens
  misc_RNA (1)...(19): siRNA sense strand
aaaugaugcuuaugaguac

SEQ ID NO: 1285042 - RNA, 19 nt, Homo sapiens
  misc_RNA (1)...(19): siRNA sense strand
aauggaugaugaaguauuc

SEQ ID NO: 1285043 - RNA, 19 nt, Homo sapiens
  misc_RNA (1)...(19): siRNA sense strand
ccagaagacuguguagcau

SEQ ID NO: 1285044 - RNA, 19 nt, Homo sapiens
  misc_RNA (1)...(19): siRNA sense strand
acgcagagcccaccugaau

SEQ ID NO: 1285045 - RNA, 19 nt, Homo sapiens
  misc_RNA (1)...(19): siRNA sense strand
acagguugcugaaaaguaa

SEQ ID NO: 1285046 - RNA, 19 nt, Homo sapiens
  misc_RNA (1)...(19): siRNA sense strand
gcacuucagacuauuuguc

SEQ ID NO: 1285047 - RNA, 19 nt, Homo sapiens
  misc_RNA (1)...(19): siRNA sense strand
gcuuacagguugcugaaaa

SEQ ID NO: 1285048 - RNA, 19 nt, Homo sapiens
  misc_RNA (1)...(19): siRNA sense strand
cagaagacuguguagcauu

SEQ ID NO: 1285049 - RNA, 19 nt, Homo sapiens
  misc_RNA (1)...(19): siRNA sense strand
accacaccauugcauauuu

SEQ ID NO: 1285050 - RNA, 19 nt, Homo sapiens
  misc_RNA (1)...(19): siRNA sense strand
uuuguuggauauggaguua

SEQ ID NO: 1285051 - RNA, 19 nt, Homo sapiens
  misc_RNA (1)...(19): siRNA sense strand
cauccuaugcaacaauuau

SEQ ID NO: 1285052 - RNA, 19 nt, Homo sapiens
  misc_RNA (1)...(19): siRNA sense strand
gaagacuguguagcauuug

SEQ ID NO: 1285053 - RNA, 19 nt, Homo sapiens
  misc_RNA (1)...(19): siRNA sense strand
ccagguaauggaugaugaa

SEQ ID NO: 1285054 - RNA, 19 nt, Homo sapiens
  misc_RNA (1)...(19): siRNA sense strand
caauccagaagacugugua

SEQ ID NO: 1285055 - RNA, 19 nt, Homo sapiens
  misc_RNA (1)...(19): siRNA sense strand
cccagguaauggaugauga

SEQ ID NO: 1285056 - RNA, 19 nt, Homo sapiens
  misc_RNA (1)...(19): siRNA sense strand
agauugacaagaaagguuu

SEQ ID NO: 1285057 - RNA, 19 nt, Homo sapiens
  misc_RNA (1)...(19): siRNA sense strand
cuaccacaccauugcauau

SEQ ID NO: 1285058 - RNA, 19 nt, Homo sapiens
  misc_RNA (1)...(19): siRNA sense strand
caccauugcauauuugaca

SEQ ID NO: 1285059 - RNA, 19 nt, Homo sapiens
  misc_RNA (1)...(19): siRNA sense strand
gcugaaaaguaaauuguac

SEQ ID NO: 1285060 - RNA, 19 nt, Homo sapiens
  misc_RNA (1)...(19): siRNA sense strand
uagauugacaagaaagguu

SEQ ID NO: 1285061 - RNA, 19 nt, Homo sapiens
  misc_RNA (1)...(19): siRNA sense strand
auccugcacuucagacuau

SEQ ID NO: 1285062 - RNA, 19 nt, Homo sapiens
  misc_RNA (1)...(19): siRNA sense strand
cauccugcacuucagacua

SEQ ID NO: 1285063 - RNA, 19 nt, Homo sapiens
  misc_RNA (1)...(19): siRNA sense strand
ggccuccuguauuccuuga

SEQ ID NO: 1285064 - RNA, 19 nt, Homo sapiens
  misc_RNA (1)...(19): siRNA sense strand
uggaauuggccuccuguau

SEQ ID NO: 1285065 - RNA, 19 nt, Homo sapiens
  misc_RNA (1)...(19): siRNA sense strand
gguaauggaugaugaagua

SEQ ID NO: 1285066 - RNA, 19 nt, Homo sapiens
  misc_RNA (1)...(19): siRNA sense strand
ggaauuggccuccuguauu

SEQ ID NO: 1285067 - RNA, 19 nt, Homo sapiens
  misc_RNA (1)...(19): siRNA sense strand
caacugcauucuauagauu

SEQ ID NO: 1285068 - RNA, 19 nt, Homo sapiens
  misc_RNA (1)...(19): siRNA sense strand
gcaacugcauucuauagau

SEQ ID NO: 1285069 - RNA, 19 nt, Homo sapiens
  misc_RNA (1)...(19): siRNA sense strand
agaagacuguguagcauuu

SEQ ID NO: 1285070 - RNA, 19 nt, Homo sapiens
  misc_RNA (1)...(19): siRNA sense strand
gcagagcccaccugaauga

SEQ ID NO: 1285071 - RNA, 19 nt, Homo sapiens
  misc_RNA (1)...(19): siRNA sense strand
ucgaacagaugacagagua

SEQ ID NO: 1285072 - RNA, 19 nt, Homo sapiens
  misc_RNA (1)...(19): siRNA sense strand
ccacaccauugcauauuug

SEQ ID NO: 1285073 - RNA, 19 nt, Homo sapiens
  misc_RNA (1)...(19): siRNA sense strand
gaacagaugacagaguaga

SEQ ID NO: 1285074 - RNA, 19 nt, Homo sapiens
  misc_RNA (1)...(19): siRNA sense strand
ugacagaguagaacgugua

SEQ ID NO: 1285075 - RNA, 19 nt, Homo sapiens
  misc_RNA (1)...(19): siRNA sense strand
ucacccagguaauggauga

SEQ ID NO: 1285076 - RNA, 19 nt, Homo sapiens
  misc_RNA (1)...(19): siRNA sense strand
ccaccugaaugaccuugaa

SEQ ID NO: 1285077 - RNA, 19 nt, Homo sapiens
  misc_RNA (1)...(19): siRNA sense strand
cuacagccauccugcacuu

SEQ ID NO: 1285078 - RNA, 19 nt, Homo sapiens
  misc_RNA (1)...(19): siRNA sense strand
aaaugaugcuuaugaguac

SEQ ID NO: 1285079 - RNA, 19 nt, Homo sapiens
  misc_RNA (1)...(19): siRNA sense strand
aauggaugaugaaguauuc

SEQ ID NO: 1285080 - RNA, 19 nt, Homo sapiens
  misc_RNA (1)...(19): siRNA sense strand
ccagaagacuguguagcau

SEQ ID NO: 1285081 - RNA, 19 nt, Homo sapiens
  misc_RNA (1)...(19): siRNA sense strand
acgcagagcccaccugaau

SEQ ID NO: 1285082 - RNA, 19 nt, Homo sapiens
  misc_RNA (1)...(19): siRNA sense strand
acagguugcugaaaaguaa

SEQ ID NO: 1285083 - RNA, 19 nt, Homo sapiens
  misc_RNA (1)...(19): siRNA sense strand
gcacuucagacuauuuguc

SEQ ID NO: 1285084 - RNA, 19 nt, Homo sapiens
  misc_RNA (1)...(19): siRNA sense strand
gcuuacagguugcugaaaa

SEQ ID NO: 1285085 - RNA, 19 nt, Homo sapiens
  misc_RNA (1)...(19): siRNA sense strand
cagaagacuguguagcauu

SEQ ID NO: 1285086 - RNA, 19 nt, Homo sapiens
  misc_RNA (1)...(19): siRNA sense strand
accacaccauugcauauuu

SEQ ID NO: 1285087 - RNA, 19 nt, Homo sapiens
  misc_RNA (1)...(19): siRNA sense strand
uuuguuggauauggaguua

SEQ ID NO: 1285088 - RNA, 19 nt, Homo sapiens
  misc_RNA (1)...(19): siRNA sense strand
cauccuaugcaacaauuau

SEQ ID NO: 1285089 - RNA, 19 nt, Homo sapiens
  misc_RNA (1)...(19): siRNA sense strand
gaagacuguguagcauuug

SEQ ID NO: 1285090 - RNA, 19 nt, Homo sapiens
  misc_RNA (1)...(19): siRNA sense strand
ccagguaauggaugaugaa

SEQ ID NO: 1285091 - RNA, 19 nt, Homo sapiens
  misc_RNA (1)...(19): siRNA sense strand
caauccagaagacugugua

SEQ ID NO: 1285092 - RNA, 19 nt, Homo sapiens
  misc_RNA (1)...(19): siRNA sense strand
cccagguaauggaugauga

SEQ ID NO: 1285093 - RNA, 19 nt, Homo sapiens
  misc_RNA (1)...(19): siRNA sense strand
agauugacaagaaagguuu

SEQ ID NO: 1285094 - RNA, 19 nt, Homo sapiens
  misc_RNA (1)...(19): siRNA sense strand
cuaccacaccauugcauau

SEQ ID NO: 1285095 - RNA, 19 nt, Homo sapiens
  misc_RNA (1)...(19): siRNA sense strand
caccauugcauauuugaca

SEQ ID NO: 1285096 - RNA, 19 nt, Homo sapiens
  misc_RNA (1)...(19): siRNA sense strand
gcugaaaaguaaauuguac

SEQ ID NO: 1285097 - RNA, 19 nt, Homo sapiens
  misc_RNA (1)...(19): siRNA sense strand
uagauugacaagaaagguu

SEQ ID NO: 1285098 - RNA, 19 nt, Homo sapiens
  misc_RNA (1)...(19): siRNA sense strand
auccugcacuucagacuau

SEQ ID NO: 1285099 - RNA, 19 nt, Homo sapiens
  misc_RNA (1)...(19): siRNA sense strand
cauccugcacuucagacua

SEQ ID NO: 1285100 - RNA, 19 nt, Homo sapiens
  misc_RNA (1)...(19): siRNA sense strand
ggccuccuguauuccuuga

SEQ ID NO: 1285101 - RNA, 19 nt, Homo sapiens
  misc_RNA (1)...(19): siRNA sense strand
uggaauuggccuccuguau

SEQ ID NO: 1285102 - RNA, 19 nt, Homo sapiens
  misc_RNA (1)...(19): siRNA sense strand
gaaauucccacucauguuu

SEQ ID NO: 1285103 - RNA, 19 nt, Homo sapiens
  misc_RNA (1)...(19): siRNA sense strand
gaagagugcuugaaauuuu

SEQ ID NO: 1285104 - RNA, 19 nt, Homo sapiens
  misc_RNA (1)...(19): siRNA sense strand
gggagaagcccaacuguuu

SEQ ID NO: 1285105 - RNA, 19 nt, Homo sapiens
  misc_RNA (1)...(19): siRNA sense strand
gaucucgccuugcggauuu

SEQ ID NO: 1285106 - RNA, 19 nt, Homo sapiens
  misc_RNA (1)...(19): siRNA sense strand
cacagaagcugaaauccaa

SEQ ID NO: 1285107 - RNA, 19 nt, Homo sapiens
  misc_RNA (1)...(19): siRNA sense strand
ggcaauggcuccgauguga

SEQ ID NO: 1285108 - RNA, 19 nt, Homo sapiens
  misc_RNA (1)...(19): siRNA sense strand
agaagucgcucuacaacug

SEQ ID NO: 1285109 - RNA, 19 nt, Homo sapiens
  misc_RNA (1)...(19): siRNA sense strand
gcagccagccuucccagua

SEQ ID NO: 1285110 - RNA, 19 nt, Homo sapiens
  misc_RNA (1)...(19): siRNA sense strand
aacagcagauugucagaua

SEQ ID NO: 1285111 - RNA, 19 nt, Homo sapiens
  misc_RNA (1)...(19): siRNA sense strand
ccaccagcguguccaauga

SEQ ID NO: 1285112 - RNA, 19 nt, Homo sapiens
  misc_RNA (1)...(19): siRNA sense strand
agaacugccugcgcauuua

SEQ ID NO: 1285113 - RNA, 19 nt, Homo sapiens
  misc_RNA (1)...(19): siRNA sense strand
uagaagagugcuugaaauu

SEQ ID NO: 1285114 - RNA, 19 nt, Homo sapiens
  misc_RNA (1)...(19): siRNA sense strand
ccacugcccuccggguuaa

SEQ ID NO: 1285115 - RNA, 19 nt, Homo sapiens
  misc_RNA (1)...(19): siRNA sense strand
cagcagauugucagauaua

SEQ ID NO: 1285116 - RNA, 19 nt, Homo sapiens
  misc_RNA (1)...(19): siRNA sense strand
ggagaagcccaacuguuug

SEQ ID NO: 1285117 - RNA, 19 nt, Homo sapiens
  misc_RNA (1)...(19): siRNA sense strand
gagaagcccaacuguuuga

SEQ ID NO: 1285118 - RNA, 19 nt, Homo sapiens
  misc_RNA (1)...(19): siRNA sense strand
gcacagaagcugaaaucca

SEQ ID NO: 1285119 - RNA, 19 nt, Homo sapiens
  misc_RNA (1)...(19): siRNA sense strand
cuagaagagugcuugaaau

SEQ ID NO: 1285120 - RNA, 19 nt, Homo sapiens
  misc_RNA (1)...(19): siRNA sense strand
guaugaagaaggagaagaa

SEQ ID NO: 1285121 - RNA, 19 nt, Homo sapiens
  misc_RNA (1)...(19): siRNA sense strand
ccuccaagcuguggucuga

SEQ ID NO: 1285122 - RNA, 19 nt, Homo sapiens
  misc_RNA (1)...(19): siRNA sense strand
aagcugaaauccaaugugu

SEQ ID NO: 1285123 - RNA, 19 nt, Homo sapiens
  misc_RNA (1)...(19): siRNA sense strand
gccaccgugugcaaauuua

SEQ ID NO: 1285124 - RNA, 19 nt, Homo sapiens
  misc_RNA (1)...(19): siRNA sense strand
cagcagggucugagaauga

SEQ ID NO: 1285125 - RNA, 19 nt, Homo sapiens
  misc_RNA (1)...(19): siRNA sense strand
gcccaacuguuugaauuug

SEQ ID NO: 1285126 - RNA, 19 nt, Homo sapiens
  misc_RNA (1)...(19): siRNA sense strand
aagcccaacuguuugaauu

SEQ ID NO: 1285127 - RNA, 19 nt, Homo sapiens
  misc_RNA (1)...(19): siRNA sense strand
gcaaggagaccaacuucag
